United States Patent Application Publication US 2022/0073911 A1 - sequence listing, part 2

SEQ ID NO: 17499 - DNA, 53 bp, Artificial Sequence; identical to SEQ ID NO: 1357
  Description of Artificial Sequence: Synthetic hazel nut; 5' sequence and inner sequence

SEQ ID NO: 17500 - DNA, 54 bp, Artificial Sequence; identical to SEQ ID NO: 1250
  Description of Artificial Sequence: Synthetic hazel nut; 5' sequence and inner sequence

SEQ ID NO: 17501 - DNA, 53 bp, Artificial Sequence
  Description of Artificial Sequence: Synthetic hazel nut; 5' sequence and inner sequence
tagggaagagaaggacatatgatcgcaacgagcgtacgacgatggcacaccgt

SEQ ID NO: 17502 - DNA, 53 bp, Artificial Sequence; identical to SEQ ID NO: 1481
  Description of Artificial Sequence: Synthetic hazel nut; 5' sequence and inner sequence

SEQ ID NO: 17503 - DNA, 53 bp, Artificial Sequence
  Description of Artificial Sequence: Synthetic hazel nut; 5' sequence and inner sequence
tagggaagagaaggacatatgatcgtgacggtgacggcacatgcgacgcgaca

SEQ ID NO: 17504 - DNA, 53 bp, Artificial Sequence
  Description of Artificial Sequence: Synthetic hazel nut; 5' sequence and inner sequence
tagggaagagaaggacatatgatggtgacacgcattacgccttcgacgtcacg

SEQ ID NO: 17505 - DNA, 53 bp, Artificial Sequence; identical to SEQ ID NO: 1563
  Description of Artificial Sequence: Synthetic hazel nut; 5' sequence and inner sequence

SEQ ID NO: 17506 - DNA, 53 bp, Artificial Sequence; identical to SEQ ID NO: 1379
  Description of Artificial Sequence: Synthetic hazel nut; 5' sequence and inner sequence

SEQ ID NO: 17507 - DNA, 53 bp, Artificial Sequence; identical to SEQ ID NO: 5573
  Description of Artificial Sequence: Synthetic hazel nut; 5' sequence and inner sequence

SEQ ID NO: 17508 - DNA, 53 bp, Artificial Sequence; identical to SEQ ID NO: 1299
  Description of Artificial Sequence: Synthetic hazel nut; 5' sequence and inner sequence

SEQ ID NO: 17509 - DNA, 53 bp, Artificial Sequence; identical to SEQ ID NO: 1767
  Description of Artificial Sequence: Synthetic hazel nut; 5' sequence and inner sequence

SEQ ID NO: 17510 - DNA, 53 bp, Artificial Sequence; identical to SEQ ID NO: 1085
  Description of Artificial Sequence: Synthetic hazel nut; 5' sequence and inner sequence

SEQ ID NO: 17511 - DNA, 53 bp, Artificial Sequence; identical to SEQ ID NO: 1262
  Description of Artificial Sequence: Synthetic hazel nut; 5' sequence and inner sequence

SEQ ID NO: 17512 - DNA, 53 bp, Artificial Sequence; identical to SEQ ID NO: 1862
  Description of Artificial Sequence: Synthetic hazel nut; 5' sequence and inner sequence

SEQ ID NO: 17513 - DNA, 53 bp, Artificial Sequence
  Description of Artificial Sequence: Synthetic hazel nut; 5' sequence and inner sequence
tagggaagagaaggacatatgattgacgcgaatggacgcacactgcctacgca

SEQ ID NO: 17514 - DNA, 53 bp, Artificial Sequence; identical to SEQ ID NO: 1754
  Description of Artificial Sequence: Synthetic hazel nut; 5' sequence and inner sequence

SEQ ID NO: 17515 - DNA, 53 bp, Artificial Sequence; identical to SEQ ID NO: 1681
  Description of Artificial Sequence: Synthetic hazel nut; 5' sequence and inner sequence

SEQ ID NO: 17516 - DNA, 49 bp, Artificial Sequence; identical to SEQ ID NO: 1516
  Description of Artificial Sequence: Synthetic hazel nut; 5' sequence and inner sequence

SEQ ID NO: 17517 - DNA, 53 bp, Artificial Sequence; identical to SEQ ID NO: 1308
  Description of Artificial Sequence: Synthetic hazel nut; 5' sequence and inner sequence

SEQ ID NO: 17518 - DNA, 53 bp, Artificial Sequence; identical to SEQ ID NO: 1306
  Description of Artificial Sequence: Synthetic hazel nut; 5' sequence and inner sequence

SEQ ID NO: 17519 - DNA, 53 bp, Artificial Sequence; identical to SEQ ID NO: 1381
  Description of Artificial Sequence: Synthetic hazel nut; 5' sequence and inner sequence

SEQ ID NO: 17520 - DNA, 53 bp, Artificial Sequence; identical to SEQ ID NO: 1419
  Description of Artificial Sequence: Synthetic hazel nut; 5' sequence and inner sequence

SEQ ID NO: 17521 - DNA, 53 bp, Artificial Sequence; identical to SEQ ID NO: 1507
  Description of Artificial Sequence: Synthetic hazel nut; 5' sequence and inner sequence

SEQ ID NO: 17522 - DNA, 53 bp, Artificial Sequence; identical to SEQ ID NO: 1130
  Description of Artificial Sequence: Synthetic hazel nut; 5' sequence and inner sequence

SEQ ID NO: 17523 - DNA, 53 bp, Artificial Sequence; identical to SEQ ID NO: 1746
  Description of Artificial Sequence: Synthetic hazel nut; 5' sequence and inner sequence

SEQ ID NO: 17524 - DNA, 53 bp, Artificial Sequence
  Description of Artificial Sequence: Synthetic hazel nut; 5' sequence and inner sequence
tagggaagagaaggacatatgatcgacacacagtgacgacagcatccgtcgtg

SEQ ID NO: 17525 - DNA, 53 bp, Artificial Sequence; identical to SEQ ID NO: 9546
  Description of Artificial Sequence: Synthetic hazel nut; 5' sequence and inner sequence

SEQ ID NO: 17526 - DNA, 53 bp, Artificial Sequence; identical to SEQ ID NO: 1699
  Description of Artificial Sequence: Synthetic hazel nut; 5' sequence and inner sequence

SEQ ID NO: 17527 - DNA, 53 bp, Artificial Sequence; identical to SEQ ID NO: 1312
  Description of Artificial Sequence: Synthetic hazel nut; 5' sequence and inner sequence

SEQ ID NO: 17528 - DNA, 53 bp, Artificial Sequence
  Description of Artificial Sequence: Synthetic hazel nut; 5' sequence and inner sequence
tagggaagagaaggacatatgatgtgctgcatgccaccttgcctaacgtgtca

SEQ ID NO: 17529 - DNA, 53 bp, Artificial Sequence; identical to SEQ ID NO: 1236
  Description of Artificial Sequence: Synthetic hazel nut; 5' sequence and inner sequence

SEQ ID NO: 17530 - DNA, 53 bp, Artificial Sequence; identical to SEQ ID NO: 1162
  Description of Artificial Sequence: Synthetic hazel nut; 5' sequence and inner sequence

SEQ ID NO: 17531 - DNA, 53 bp, Artificial Sequence
  Description of Artificial Sequence: Synthetic hazel nut; 5' sequence and inner sequence
tagggaagagaaggacatatgatggcatgcgatgaccgaggcatgatgcgtca

SEQ ID NO: 17532 - DNA, 53 bp, Artificial Sequence; identical to SEQ ID NO: 1191
  Description of Artificial Sequence: Synthetic hazel nut; 5' sequence and inner sequence

SEQ ID NO: 17533 - DNA, 53 bp, Artificial Sequence; identical to SEQ ID NO: 1243
  Description of Artificial Sequence: Synthetic hazel nut; 5' sequence and inner sequence

SEQ ID NO: 17534 - DNA, 53 bp, Artificial Sequence; identical to SEQ ID NO: 1826
  Description of Artificial Sequence: Synthetic hazel nut; 5' sequence and inner sequence

SEQ ID NO: 17535 - DNA, 53 bp, Artificial Sequence; identical to SEQ ID NO: 1497
  Description of Artificial Sequence: Synthetic hazel nut; 5' sequence and inner sequence

SEQ ID NO: 17536 - DNA, 53 bp, Artificial Sequence; identical to SEQ ID NO: 1586
  Description of Artificial Sequence: Synthetic hazel nut; 5' sequence and inner sequence

SEQ ID NO: 17537 - DNA, 53 bp, Artificial Sequence; identical to SEQ ID NO: 1752
  Description of Artificial Sequence: Synthetic hazel nut; 5' sequence and inner sequence

SEQ ID NO: 17538 - DNA, 54 bp, Artificial Sequence; identical to SEQ ID NO: 1845
  Description of Artificial Sequence: Synthetic hazel nut; 5' sequence and inner sequence

SEQ ID NO: 17539 - DNA, 53 bp, Artificial Sequence; identical to SEQ ID NO: 1952
  Description of Artificial Sequence: Synthetic hazel nut; 5' sequence and inner sequence

SEQ ID NO: 17540 - DNA, 52 bp, Artificial Sequence
  Description of Artificial Sequence: Synthetic hazel nut; 5' sequence and inner sequence
tagggaagagaaggacatatgatcgcaacgacactcacgggcacgacgcgca

SEQ ID NO: 17541 - DNA, 53 bp, Artificial Sequence; identical to SEQ ID NO: 1466
  Description of Artificial Sequence: Synthetic hazel nut; 5' sequence and inner sequence

SEQ ID NO: 17542 - DNA, 53 bp, Artificial Sequence; identical to SEQ ID NO: 1394
  Description of Artificial Sequence: Synthetic hazel nut; 5' sequence and inner sequence

SEQ ID NO: 17543 - DNA, 53 bp, Artificial Sequence; identical to SEQ ID NO: 1336
  Description of Artificial Sequence: Synthetic hazel nut; 5' sequence and inner sequence

SEQ ID NO: 17544 - DNA, 53 bp, Artificial Sequence
  Description of Artificial Sequence: Synthetic hazel nut; 5' sequence and inner sequence
tagggaagagaaggacatatgatcgaccatgcacacgtggtgatgacggcatg

SEQ ID NO: 17545 - DNA, 53 bp, Artificial Sequence; identical to SEQ ID NO: 1456
  Description of Artificial Sequence: Synthetic hazel nut; 5' sequence and inner sequence

SEQ ID NO: 17546 - DNA, 53 bp, Artificial Sequence; identical to SEQ ID NO: 1524
  Description of Artificial Sequence: Synthetic hazel nut; 5' sequence and inner sequence

SEQ ID NO: 17547 - DNA, 53 bp, Artificial Sequence; identical to SEQ ID NO: 1447
  Description of Artificial Sequence: Synthetic hazel nut; 5' sequence and inner sequence

SEQ ID NO: 17548 - DNA, 53 bp, Artificial Sequence; identical to SEQ ID NO: 1859
  Description of Artificial Sequence: Synthetic hazel nut; 5' sequence and inner sequence

SEQ ID NO: 17549 - DNA, 53 bp, Artificial Sequence; identical to SEQ ID NO: 1628
  Description of Artificial Sequence: Synthetic hazel nut; 5' sequence and inner sequence

SEQ ID NO: 17550 - DNA, 53 bp, Artificial Sequence; identical to SEQ ID NO: 1959
  Description of Artificial Sequence: Synthetic hazel nut; 5' sequence and inner sequence

SEQ ID NO: 17551 - DNA, 53 bp, Artificial Sequence; identical to SEQ ID NO: 6000
  Description of Artificial Sequence: Synthetic hazel nut; 5' sequence and inner sequence

SEQ ID NO: 17552 - DNA, 53 bp, Artificial Sequence; identical to SEQ ID NO: 1788
  Description of Artificial Sequence: Synthetic hazel nut; 5' sequence and inner sequence

SEQ ID NO: 17553 - DNA, 53 bp, Artificial Sequence; identical to SEQ ID NO: 1393
  Description of Artificial Sequence: Synthetic hazel nut; 5' sequence and inner sequence

SEQ ID NO: 17554 - DNA, 53 bp, Artificial Sequence
  Description of Artificial Sequence: Synthetic hazel nut; 5' sequence and inner sequence
tagggaagagaaggacatatgatccgatgcggaccgacacacctcaccttgcg

SEQ ID NO: 17555 - DNA, 53 bp, Artificial Sequence
  Description of Artificial Sequence: Synthetic hazel nut; 5' sequence and inner sequence
tagggaagagaaggacatatgatgccatgcgatgaacgaggcatgatgcgtca

SEQ ID NO: 17556 - DNA, 53 bp, Artificial Sequence; identical to SEQ ID NO: 5792
  Description of Artificial Sequence: Synthetic hazel nut; 5' sequence and inner sequence

SEQ ID NO: 17557 - DNA, 51 bp, Artificial Sequence; identical to SEQ ID NO: 5786
  Description of Artificial Sequence: Synthetic hazel nut; 5' sequence and inner sequence

SEQ ID NO: 17558 - DNA, 53 bp, Artificial Sequence; identical to SEQ ID NO: 1840
  Description of Artificial Sequence: Synthetic hazel nut; 5' sequence and inner sequence

SEQ ID NO: 17559 - DNA, 53 bp, Artificial Sequence; identical to SEQ ID NO: 1860
  Description of Artificial Sequence: Synthetic hazel nut; 5' sequence and inner sequence

SEQ ID NO: 17560 - DNA, 53 bp, Artificial Sequence; identical to SEQ ID NO: 1825
  Description of Artificial Sequence: Synthetic hazel nut; 5' sequence and inner sequence

SEQ ID NO: 17561 - DNA, 53 bp, Artificial Sequence
  Description of Artificial Sequence: Synthetic hazel nut; 5' sequence and inner sequence
tagggaagagaaggacatatgatggcatgcgatgaacgaggcatgacgcgtca

SEQ ID NO: 17562 - DNA, 53 bp, Artificial Sequence; identical to SEQ ID NO: 1478
  Description of Artificial Sequence: Synthetic hazel nut; 5' sequence and inner sequence

SEQ ID NO: 17563 - DNA, 53 bp, Artificial Sequence; identical to SEQ ID NO: 5229
  Description of Artificial Sequence: Synthetic hazel nut; 5' sequence and inner sequence

SEQ ID NO: 17564 - DNA, 53 bp, Artificial Sequence; identical to SEQ ID NO: 5915
  Description of Artificial Sequence: Synthetic hazel nut; 5' sequence and inner sequence

SEQ ID NO: 17565 - DNA, 53 bp, Artificial Sequence; identical to SEQ ID NO: 1373
  Description of Artificial Sequence: Synthetic hazel nut; 5' sequence and inner sequence

SEQ ID NO: 17566 - DNA, 53 bp, Artificial Sequence; identical to SEQ ID NO: 1189
  Description of Artificial Sequence: Synthetic hazel nut; 5' sequence and inner sequence

SEQ ID NO: 17567 - DNA, 53 bp, Artificial Sequence; identical to SEQ ID NO: 1545
  Description of Artificial Sequence: Synthetic hazel nut; 5' sequence and inner sequence

SEQ ID NO: 17568 - DNA, 53 bp, Artificial Sequence; identical to SEQ ID NO: 1295
  Description of Artificial Sequence: Synthetic hazel nut; 5' sequence and inner sequence

SEQ ID NO: 17569 - DNA, 53 bp, Artificial Sequence; identical to SEQ ID NO: 1460
  Description of Artificial Sequence: Synthetic hazel nut; 5' sequence and inner sequence

SEQ ID NO: 17570 - DNA, 53 bp, Artificial Sequence; identical to SEQ ID NO: 1696
  Description of Artificial Sequence: Synthetic hazel nut; 5' sequence and inner sequence

SEQ ID NO: 17571 - DNA, 53 bp, Artificial Sequence; identical to SEQ ID NO: 1141
  Description of Artificial Sequence: Synthetic hazel nut; 5' sequence and inner sequence

SEQ ID NO: 17572 - DNA, 53 bp, Artificial Sequence; identical to SEQ ID NO: 1529
  Description of Artificial Sequence: Synthetic hazel nut; 5' sequence and inner sequence

SEQ ID NO: 17573 - DNA, 53 bp, Artificial Sequence
  Description of Artificial Sequence: Synthetic hazel nut; 5' sequence and inner sequence
tagggaagagaaggacatatgatgcgtgtcagcaatacgtcctcatctgcgcg

SEQ ID NO: 17574 - DNA, 53 bp, Artificial Sequence; identical to SEQ ID NO: 5995
  Description of Artificial Sequence: Synthetic hazel nut; 5' sequence and inner sequence

SEQ ID NO: 17575 - DNA, 53 bp, Artificial Sequence; identical to SEQ ID NO: 1372
  Description of Artificial Sequence: Synthetic hazel nut; 5' sequence and inner sequence

SEQ ID NO: 17576 - DNA, 53 bp, Artificial Sequence; identical to SEQ ID NO: 1887
  Description of Artificial Sequence: Synthetic hazel nut; 5' sequence and inner sequence

SEQ ID NO: 17577 - DNA, 53 bp, Artificial Sequence; identical to SEQ ID NO: 1517
  Description of Artificial Sequence: Synthetic hazel nut; 5' sequence and inner sequence

SEQ ID NO: 17578 - DNA, 54 bp, Artificial Sequence; identical to SEQ ID NO: 1150
  Description of Artificial Sequence: Synthetic hazel nut; 5' sequence and inner sequence

SEQ ID NO: 17579 - DNA, 53 bp, Artificial Sequence; identical to SEQ ID NO: 1837
  Description of Artificial Sequence: Synthetic hazel nut; 5' sequence and inner sequence

SEQ ID NO: 17580 - DNA, 53 bp, Artificial Sequence; identical to SEQ ID NO: 1113
  Description of Artificial Sequence: Synthetic hazel nut; 5' sequence and inner sequence

SEQ ID NO: 17581 - DNA, 53 bp, Artificial Sequence; identical to SEQ ID NO: 1638
  Description of Artificial Sequence: Synthetic hazel nut; 5' sequence and inner sequence

SEQ ID NO: 17582 - DNA, 53 bp, Artificial Sequence; identical to SEQ ID NO: 1388
  Description of Artificial Sequence: Synthetic hazel nut; 5' sequence and inner sequence

SEQ ID NO: 17583 - DNA, 53 bp, Artificial Sequence
  Description of Artificial Sequence: Synthetic hazel nut; 5' sequence and inner sequence
tagggaagagaaggacatatgatcgcatcgtacgtactcctcgtcactgcgcg

SEQ ID NO: 17584 - DNA, 53 bp, Artificial Sequence; identical to SEQ ID NO: 1227
  Description of Artificial Sequence: Synthetic hazel nut; 5' sequence and inner sequence

SEQ ID NO: 17585 - DNA, 53 bp, Artificial Sequence
  Description of Artificial Sequence: Synthetic hazel nut; 5' sequence and inner sequence
tagggaagagaaggacatatgatcgtaccgcaagtgacgtgtcagtgccgtga

SEQ ID NO: 17586 - DNA, 53 bp, Artificial Sequence; identical to SEQ ID NO: 5931
  Description of Artificial Sequence: Synthetic hazel nut; 5' sequence and inner sequence

SEQ ID NO: 17587 - DNA, 53 bp, Artificial Sequence; identical to SEQ ID NO: 1487
  Description of Artificial Sequence: Synthetic hazel nut; 5' sequence and inner sequence

SEQ ID NO: 17588 - DNA, 53 bp, Artificial Sequence; identical to SEQ ID NO: 5702
  Description of Artificial Sequence: Synthetic hazel nut; 5' sequence and inner sequence

SEQ ID NO: 17589 - DNA, 53 bp, Artificial Sequence; identical to SEQ ID NO: 5807
  Description of Artificial Sequence: Synthetic hazel nut; 5' sequence and inner sequence

SEQ ID NO: 17590 - DNA, 53 bp, Artificial Sequence; identical to SEQ ID NO: 5652
  Description of Artificial Sequence: Synthetic hazel nut; 5' sequence and inner sequence

SEQ ID NO: 17591 - DNA, 53 bp, Artificial Sequence
  Description of Artificial Sequence: Synthetic hazel nut; 5' sequence and inner sequence
tagggaagagaaggacatatgatggcatgcgatgaacgagacatgatgcgtca

SEQ ID NO: 17592 - DNA, 53 bp, Artificial Sequence
  Description of Artificial Sequence: Synthetic hazel nut; 5' sequence and inner sequence
tagggaagagaaggacatatgatggacgacgcgaccaagacagcatgcgcaca

SEQ ID NO: 17593 - DNA, 53 bp, Artificial Sequence; identical to SEQ ID NO: 9816
  Description of Artificial Sequence: Synthetic hazel nut; 5' sequence and inner sequence

SEQ ID NO: 17594 - DNA, 53 bp, Artificial Sequence; identical to SEQ ID NO: 1910
  Description of Artificial Sequence: Synthetic hazel nut; 5' sequence and inner sequence

SEQ ID NO: 17595 - DNA, 53 bp, Artificial Sequence
  Description of Artificial Sequence: Synthetic hazel nut; 5' sequence and inner sequence
tagggaagagaaggacatatgatggcatgcgatgaacgaggcctgatgcgtca

SEQ ID NO: 17596 - DNA, 53 bp, Artificial Sequence; identical to SEQ ID NO: 1405
  Description of Artificial Sequence: Synthetic hazel nut; 5' sequence and inner sequence

SEQ ID NO: 17597 - DNA, 53 bp, Artificial Sequence; identical to SEQ ID NO: 13997
  Description of Artificial Sequence: Synthetic hazel nut; 5' sequence and inner sequence

SEQ ID NO: 17598 - DNA, 53 bp, Artificial Sequence; identical to SEQ ID NO: 1665
  Description of Artificial Sequence: Synthetic hazel nut; 5' sequence and inner sequence

SEQ ID NO: 17599 - DNA, 53 bp, Artificial Sequence
  Description of Artificial Sequence: Synthetic hazel nut; 5' sequence and inner sequence
tagggaagagaaggacatatgatgcacgcagtgacaccgttgtggacggcgca

SEQ ID NO: 17600 - DNA, 53 bp, Artificial Sequence; identical to SEQ ID NO: 1540
  Description of Artificial Sequence: Synthetic hazel nut; 5' sequence and inner sequence

SEQ ID NO: 17601 - DNA, 53 bp, Artificial Sequence; identical to SEQ ID NO: 1593
  Description of Artificial Sequence: Synthetic hazel nut; 5' sequence and inner sequence

SEQ ID NO: 17602 - DNA, 53 bp, Artificial Sequence; identical to SEQ ID NO: 1444
  Description of Artificial Sequence: Synthetic hazel nut; 5' sequence and inner sequence

SEQ ID NO: 17603 - DNA, 53 bp, Artificial Sequence
  Description of Artificial Sequence: Synthetic hazel nut; 5' sequence and inner sequence
tagggaagagaaggacatatgatcatgcgcgatgatcgcacgcgtacgtcacg

SEQ ID NO: 17604 - DNA, 53 bp, Artificial Sequence; identical to SEQ ID NO: 1600
  Description of Artificial Sequence: Synthetic hazel nut; 5' sequence and inner sequence

SEQ ID NO: 17605 - DNA, 53 bp, Artificial Sequence
  Description of Artificial Sequence: Synthetic hazel nut; 5' sequence and inner sequence
tagggaagagaaggacatatgatggcatgcgatgaaagaggcatgatgcgtca

SEQ ID NO: 17606 - DNA, 53 bp, Artificial Sequence; identical to SEQ ID NO: 5886
  Description of Artificial Sequence: Synthetic hazel nut; 5' sequence and inner sequence

SEQ ID NO: 17607 - DNA, 53 bp, Artificial Sequence; identical to SEQ ID NO: 1244
  Description of Artificial Sequence: Synthetic hazel nut; 5' sequence and inner sequence

SEQ ID NO: 17608 - DNA, 53 bp, Artificial Sequence
  Description of Artificial Sequence: Synthetic hazel nut; 5' sequence and inner sequence
tagggaagagaaggacatatgatggcatgcgatgaacgaggcatgatgcgtcc

SEQ ID NO: 17609 - DNA, 53 bp, Artificial Sequence
  Description of Artificial Sequence: Synthetic hazel nut; 5' sequence and inner sequence
tagggaagagaaggacatatgatgcgatccgcgtcctgtcacgttacgcagcc

SEQ ID NO: 17610 - DNA, 53 bp, Artificial Sequence; identical to SEQ ID NO: 5198
  Description of Artificial Sequence: Synthetic hazel nut; 5' sequence and inner sequence

SEQ ID NO: 17611 - DNA, 53 bp, Artificial Sequence; identical to SEQ ID NO: 1143
  Description of Artificial Sequence: Synthetic hazel nut; 5' sequence and inner sequence

SEQ ID NO: 17612 - DNA, 53 bp, Artificial Sequence
  Description of Artificial Sequence: Synthetic hazel nut; 5' sequence and inner sequence
tagggaagagaaggacatatgatcgaaccagcgtcacgtacggcatggcgaca

SEQ ID NO: 17613 - DNA, 53 bp, Artificial Sequence; identical to SEQ ID NO: 1344
  Description of Artificial Sequence: Synthetic hazel nut; 5' sequence and inner sequence

SEQ ID NO: 17614 - DNA, 53 bp, Artificial Sequence; identical to SEQ ID NO: 1310
  Description of Artificial Sequence: Synthetic hazel nut; 5' sequence and inner sequence

SEQ ID NO: 17615 - DNA, 53 bp, Artificial Sequence; identical to SEQ ID NO: 1396
  Description of Artificial Sequence: Synthetic hazel nut; 5' sequence and inner sequence

SEQ ID NO: 17616 - DNA, 53 bp, Artificial Sequence; identical to SEQ ID NO: 1180
  Description of Artificial Sequence: Synthetic hazel nut; 5' sequence and inner sequence

SEQ ID NO: 17617 - DNA, 53 bp, Artificial Sequence; identical to SEQ ID NO: 1413
  Description of Artificial Sequence: Synthetic hazel nut; 5' sequence and inner sequence

SEQ ID NO: 17618 - DNA, 52 bp, Artificial Sequence
  Description of Artificial Sequence: Synthetic hazel nut; 5' sequence and inner sequence
tagggaagagaaggacatatgatgcgtgcatggaagggacgtacgctgcgcc

SEQ ID NO: 17619 - DNA, 53 bp, Artificial Sequence
  Description of Artificial Sequence: Synthetic hazel nut; 5' sequence and inner sequence
tagggaagagaaggacatatgatccacgcagtgacgaccagccgtacgcaacg

SEQ ID NO: 17620 - DNA, 53 bp, Artificial Sequence; identical to SEQ ID NO: 5809
  Description of Artificial Sequence: Synthetic hazel nut; 5' sequence and inner sequence

SEQ ID NO: 17621 - DNA, 53 bp, Artificial Sequence
  Description of Artificial Sequence: Synthetic hazel nut; 5' sequence and inner sequence
tagggaagagaaggacatatgatgcacacggccgaacgcgtcccacatgcatg

SEQ ID NO: 17622 - DNA, 53 bp, Artificial Sequence; identical to SEQ ID NO: 1495
  Description of Artificial Sequence: Synthetic hazel nut; 5' sequence and inner sequence

SEQ ID NO: 17623 - DNA, 53 bp, Artificial Sequence; identical to SEQ ID NO: 1522
  Description of Artificial Sequence: Synthetic hazel nut; 5' sequence and inner sequence

SEQ ID NO: 17624 - DNA, 53 bp, Artificial Sequence; identical to SEQ ID NO: 1608
  Description of Artificial Sequence: Synthetic hazel nut; 5' sequence and inner sequence

SEQ ID NO: 17625 - DNA, 53 bp, Artificial Sequence; identical to SEQ ID NO: 1383
  Description of Artificial Sequence: Synthetic hazel nut; 5' sequence and inner sequence

SEQ ID NO: 17626 - DNA, 53 bp, Artificial Sequence; identical to SEQ ID NO: 1351
  Description of Artificial Sequence: Synthetic hazel nut; 5' sequence and inner sequence

SEQ ID NO: 17627 - DNA, 53 bp, Artificial Sequence
  Description of Artificial Sequence: Synthetic hazel nut; 5' sequence and inner sequence
tagggaagagaaggacatatgatggcatgcgatgcacgaggcatgatgcgtca

SEQ ID NO: 17628 - DNA, 53 bp, Artificial Sequence
  Description of Artificial Sequence: Synthetic hazel nut; 5' sequence and inner sequence
tagggaagagaaggacatatgatcgcgtgaacggaacgtcctgtcgtcacgtc

SEQ ID NO: 17629 - DNA, 53 bp, Artificial Sequence
  Description of Artificial Sequence: Synthetic hazel nut; 5' sequence and inner sequence
tagggaagagaaggacatatgatgcatgccaatcacatgtcgtgtcgcgcaca

SEQ ID NO: 17630 - DNA, 53 bp, Artificial Sequence
  Description of Artificial Sequence: Synthetic hazel nut; 5' sequence and inner sequence
tagggaagagaaggacatatgatggcctgacacgcatcagcctgaccgtcaca

SEQ ID NO: 17631 - DNA, 53 bp, Artificial Sequence; identical to SEQ ID NO: 9801
  Description of Artificial Sequence: Synthetic hazel nut; 5' sequence and inner sequence

SEQ ID NO: 17632 - DNA, 53 bp, Artificial Sequence; identical to SEQ ID NO: 1340
  Description of Artificial Sequence: Synthetic hazel nut; 5' sequence and inner sequence

SEQ ID NO: 17633 - DNA, 53 bp, Artificial Sequence; identical to SEQ ID NO: 1198
  Description of Artificial Sequence: Synthetic hazel nut; 5' sequence and inner sequence

SEQ ID NO: 17634 - DNA, 53 bp, Artificial Sequence
  Description of Artificial Sequence: Synthetic hazel nut; 5' sequence and inner sequence
tagggaagagaaggacatatgatgacgcacagcatgagggacgtatcgccacg

SEQ ID NO: 17635 - DNA, 53 bp, Artificial Sequence; identical to SEQ ID NO: 1264
  Description of Artificial Sequence: Synthetic hazel nut; 5' sequence and inner sequence

SEQ ID NO: 17636 - DNA, 53 bp, Artificial Sequence; identical to SEQ ID NO: 1590
  Description of Artificial Sequence: Synthetic hazel nut; 5' sequence and inner sequence

SEQ ID NO: 17637 - DNA, 53 bp, Artificial Sequence
  Description of Artificial Sequence: Synthetic hazel nut; 5' sequence and inner sequence
tagggaagagaaggacatatgatcgatgcgcaggcaggaggtacgtggccacc

SEQ ID NO: 17638 - DNA, 53 bp, Artificial Sequence
  Description of Artificial Sequence: Synthetic hazel nut; 5' sequence and inner sequence
tagggaagagaaggacatatgatcgcatcgagcaacacgtacgcacgacctgc

SEQ ID NO: 17639 - DNA, 53 bp, Artificial Sequence; identical to SEQ ID NO: 1646
  Description of Artificial Sequence: Synthetic hazel nut; 5' sequence and inner sequence

SEQ ID NO: 17640 - DNA, 53 bp, Artificial Sequence
  Description of Artificial Sequence: Synthetic hazel nut; 5' sequence and inner sequence
tagggaagagaaggacatatgatacgtcacgcacagtgtcacgttccgatgcg

SEQ ID NO: 17641 - DNA, 53 bp, Artificial Sequence; identical to SEQ ID NO: 1354
  Description of Artificial Sequence: Synthetic hazel nut; 5' sequence and inner sequence

SEQ ID NO: 17642 - DNA, 53 bp, Artificial Sequence; identical to SEQ ID NO: 5539
  Description of Artificial Sequence: Synthetic hazel nut; 5' sequence and inner sequence

SEQ ID NO: 17643 - DNA, 53 bp, Artificial Sequence
  Description of Artificial Sequence: Synthetic hazel nut; 5' sequence and inner sequence
tagggaagagaaggacatatgatgcacaaggcgtgacgtaccatgtgtccatc

SEQ ID NO: 17644 - DNA, 53 bp, Artificial Sequence
  Description of Artificial Sequence: Synthetic hazel nut; 5' sequence and inner sequence
tagggaagagaaggacatatgatgcacggcgcagctcacgtccttgcgtcacc

SEQ ID NO: 17645 - DNA, 53 bp, Artificial Sequence; identical to SEQ ID NO: 5642
  Description of Artificial Sequence: Synthetic hazel nut; 5' sequence and inner sequence

SEQ ID NO: 17646 - DNA, 53 bp, Artificial Sequence; identical to SEQ ID NO: 5687
  Description of Artificial Sequence: Synthetic hazel nut; 5' sequence and inner sequence

SEQ ID NO: 17647 - DNA, 53 bp, Artificial Sequence; identical to SEQ ID NO: 1994
  Description of Artificial Sequence: Synthetic hazel nut; 5' sequence and inner sequence

SEQ ID NO: 17648 - DNA, 53 bp, Artificial Sequence; identical to SEQ ID NO: 1482
  Description of Artificial Sequence: Synthetic hazel nut; 5' sequence and inner sequence

SEQ ID NO: 17649 - DNA, 53 bp, Artificial Sequence
  Description of Artificial Sequence: Synthetic hazel nut; 5' sequence and inner sequence
tagggaagagaaggacatatgatcgatgcgcatcattggtacgacattgccgt

SEQ ID NO: 17650 - DNA, 53 bp, Artificial Sequence; identical to SEQ ID NO: 1565
  Description of Artificial Sequence: Synthetic hazel nut; 5' sequence and inner sequence

SEQ ID NO: 17651 - DNA, 53 bp, Artificial Sequence
  Description of Artificial Sequence: Synthetic hazel nut; 5' sequence and inner sequence
tagggaagagaaggacatatgatggcatgagatgaacgaggcatgatgcgtca

SEQ ID NO: 17652 - DNA, 53 bp, Artificial Sequence
  Description of Artificial Sequence: Synthetic hazel nut; 5' sequence and inner sequence
tagggaagagaaggacatatgatgcacggcagcaacgtgacctgcactgcacc

SEQ ID NO: 17653 - DNA, 53 bp, Artificial Sequence; identical to SEQ ID NO: 1539
  Description of Artificial Sequence: Synthetic hazel nut; 5' sequence and inner sequence

SEQ ID NO: 17654 - DNA, 53 bp, Artificial Sequence
  Description of Artificial Sequence: Synthetic hazel nut; 5' sequence and inner sequence
tagggaagagaaggacatatgatcgcaccgacaacatgttgccttaccgcatg

SEQ ID NO: 17655 - DNA, 53 bp, Artificial Sequence
  Description of Artificial Sequence: Synthetic hazel nut; 5' sequence and inner sequence
tagggaagagaaggacatatgatcacgtgacgcatgcacttcgccttgccaca

SEQ ID NO: 17656 - DNA, 53 bp, Artificial Sequence; identical to SEQ ID NO: 1370
  Description of Artificial Sequence: Synthetic hazel nut; 5' sequence and inner sequence

SEQ ID NO: 17657 - DNA, 53 bp, Artificial Sequence
  Description of Artificial Sequence: Synthetic hazel nut; 5' sequence and inner sequence
tagggaagagaaggacatatgatcgacgcaccgatacatgaccacgcttcacg

SEQ ID NO: 17658 - DNA, 53 bp, Artificial Sequence; identical to SEQ ID NO: 5831
  Description of Artificial Sequence: Synthetic hazel nut; 5' sequence and inner sequence

SEQ ID NO: 17659 - DNA, 53 bp, Artificial Sequence; identical to SEQ ID NO: 1471
  Description of Artificial Sequence: Synthetic hazel nut; 5' sequence and inner sequence

SEQ ID NO: 17660 - DNA, 53 bp, Artificial Sequence
  Description of Artificial Sequence: Synthetic hazel nut; 5' sequence and inner sequence
tagggaagagaaggacatatgattgacatcgttacgcacgcactctgcacgta

SEQ ID NO: 17661 - DNA, 53 bp, Artificial Sequence; identical to SEQ ID NO: 5726
  Description of Artificial Sequence: Synthetic hazel nut; 5' sequence and inner sequence

SEQ ID NO: 17662 - DNA, 53 bp, Artificial Sequence
  Description of Artificial Sequence: Synthetic hazel nut; 5' sequence and inner sequence
tagggaagagaaggacatatgatcgtggcagacggcacggaacgcacggtgca

SEQ ID NO: 17663 - DNA, 53 bp, Artificial Sequence
  Description of Artificial Sequence: Synthetic hazel nut; 5' sequence and inner sequence
tagggaagagaaggacatatgatggacagcgcgaaggtacgtactgccgtggt

SEQ ID NO: 17664 - DNA, 53 bp, Artificial Sequence
  Description of Artificial Sequence: Synthetic hazel nut; 5' sequence and inner sequence
tagggaagagaaggacatatgatcgtaccacgtaacgacagcatgctttcggt

SEQ ID NO: 17665 - DNA, 52 bp, Artificial Sequence
  Description of Artificial Sequence: Synthetic hazel nut; 5' sequence and inner sequence
tagggaagagaaggacatatgatcgcaacgacactcacgggcatgacgcgca

SEQ ID NO: 17666 - DNA, 53 bp, Artificial Sequence; identical to SEQ ID NO: 1512
  Description of Artificial Sequence: Synthetic hazel nut; 5' sequence and inner sequence

SEQ ID NO: 17667 - DNA, 53 bp, Artificial Sequence; identical to SEQ ID NO: 1556
  Description of Artificial Sequence: Synthetic hazel nut; 5' sequence and inner sequence

SEQ ID NO: 17668 - DNA, 53 bp, Artificial Sequence
  Description of Artificial Sequence: Synthetic hazel nut; 5' sequence and inner sequence
tagggaagagaaggacatatgatcgcaccgtgcaacgacagcttggcggcgtg

SEQ ID NO: 17669 - DNA, 53 bp, Artificial Sequence
  Description of Artificial Sequence: Synthetic hazel nut; 5' sequence and inner sequence
tagggaagagaaggacatatgatgcgtgaggcacacatgcttgtcgcgtcgca

SEQ ID NO: 17670 - DNA, 53 bp, Artificial Sequence; identical to SEQ ID NO: 1488
  Description of Artificial Sequence: Synthetic hazel nut; 5' sequence and inner sequence

SEQ ID NO: 17671 - DNA, 53 bp, Artificial Sequence; identical to SEQ ID NO: 1418
  Description of Artificial Sequence: Synthetic hazel nut; 5' sequence and inner sequence

SEQ ID NO: 17672 - DNA, 53 bp, Artificial Sequence
  Description of Artificial Sequence: Synthetic hazel nut; 5' sequence and inner sequence
tagggaagagaaggacatatgatcacgcacagtgtagggaccgttgctgcacg

SEQ ID NO: 17673 - DNA, 53 bp, Artificial Sequence; identical to SEQ ID NO: 1776
  Description of Artificial Sequence: Synthetic hazel nut; 5' sequence and inner sequence

SEQ ID NO: 17674 - DNA, 53 bp, Artificial Sequence; identical to SEQ ID NO: 1725
  Description of Artificial Sequence: Synthetic hazel nut; 5' sequence and inner sequence

SEQ ID NO: 17675 - DNA, 53 bp, Artificial Sequence
  Description of Artificial Sequence: Synthetic hazel nut; 5' sequence and inner sequence
tagggaagagaaggacatatgatggcatgcgatgaacgaggaatgatgcgtca

SEQ ID NO: 17676 - DNA, 53 bp, Artificial Sequence
  Description of Artificial Sequence: Synthetic hazel nut; 5' sequence and inner sequence
tagggaagagaaggacatatgatcacacgtcacatcgtgcacatgcgatcgta

SEQ ID NO: 17677 - DNA, 53 bp, Artificial Sequence
  Description of Artificial Sequence: Synthetic hazel nut; 5' sequence and inner sequence
tagggaagagaaggacatatgatcgtgccggcaaggacgcaccatgacgcaca

SEQ ID NO: 17678 - DNA, 53 bp, Artificial Sequence; identical to SEQ ID NO: 1763
  Description of Artificial Sequence: Synthetic hazel nut; 5' sequence and inner sequence

SEQ ID NO: 17679 - DNA, 53 bp, Artificial Sequence; identical to SEQ ID NO: 1683
  Description of Artificial Sequence: Synthetic hazel nut; 5' sequence and inner sequence

SEQ ID NO: 17680 - DNA, 53 bp, Artificial Sequence; identical to SEQ ID NO: 5835
  Description of Artificial Sequence: Synthetic hazel nut; 5' sequence and inner sequence

SEQ ID NO: 17681 - DNA, 53 bp, Artificial Sequence; identical to SEQ ID NO: 1452
  Description of Artificial Sequence: Synthetic hazel nut; 5' sequence and inner sequence

SEQ ID NO: 17682 - DNA, 53 bp, Artificial Sequence; identical to SEQ ID NO: 1905
  Description of Artificial Sequence: Synthetic hazel nut; 5' sequence and inner sequence

SEQ ID NO: 17683 - DNA, 53 bp, Artificial Sequence; identical to SEQ ID NO: 1339
  Description of Artificial Sequence: Synthetic hazel nut; 5' sequence and inner sequence

SEQ ID NO: 17684 - DNA, 53 bp, Artificial Sequence; identical to SEQ ID NO: 13996
  Description of Artificial Sequence: Synthetic hazel nut; 5' sequence and inner sequence

SEQ ID NO: 17685 - DNA, 53 bp, Artificial Sequence
  Description of Artificial Sequence: Synthetic hazel nut; 5' sequence and inner sequence
tagggaagagaaggacatatgatgcatgacaatgccatagcgtcacctgcacg

SEQ ID NO: 17686 - DNA, 53 bp, Artificial Sequence; identical to SEQ ID NO: 1525
  Description of Artificial Sequence: Synthetic hazel nut; 5' sequence and inner sequence

SEQ ID NO: 17687 - DNA, 53 bp, Artificial Sequence; identical to SEQ ID NO: 1397
  Description of Artificial Sequence: Synthetic hazel nut; 5' sequence and inner sequence

SEQ ID NO: 17688 - DNA, 53 bp, Artificial Sequence
  Description of Artificial Sequence: Synthetic hazel nut; 5' sequence and inner sequence
tagggaagagaaggacatatgatggccacagcgtacctcaacgttgacgtgca

SEQ ID NO: 17689 - DNA, 53 bp, Artificial Sequence; identical to SEQ ID NO: 1717
  Description of Artificial Sequence: Synthetic hazel nut; 5' sequence and inner sequence

SEQ ID NO: 17690 - DNA, 53 bp, Artificial Sequence
  Description of Artificial Sequence: Synthetic hazel nut; 5' sequence and inner sequence
tagggaagagaaggacatatgatccgacatcgtaccgatcacgtgcttacgta

SEQ ID NO: 17691 - DNA, 53 bp, Artificial Sequence; identical to SEQ ID NO: 1650
  Description of Artificial Sequence: Synthetic hazel nut; 5' sequence and inner sequence

SEQ ID NO: 17692 - DNA, 53 bp, Artificial Sequence
  Description of Artificial Sequence: Synthetic hazel nut; 5' sequence and inner sequence
tagggaagagaaggacatatgatcgcaccgtcgatacctcatgcacgctgaca

SEQ ID NO: 17693 - DNA, 53 bp, Artificial Sequence; identical to SEQ ID NO: 1743
  Description of Artificial Sequence: Synthetic hazel nut; 5' sequence and inner sequence

SEQ ID NO: 17694 - DNA, 53 bp, Artificial Sequence; identical to SEQ ID NO: 1980
  Description of Artificial Sequence: Synthetic hazel nut; 5' sequence and inner sequence

SEQ ID NO: 17695 - DNA, 53 bp, Artificial Sequence
  Description of Artificial Sequence: Synthetic hazel nut; 5' sequence and inner sequence
tagggaagagaaggacatatgatcgcaccgtgacgagacgtgctagtgtgtca

SEQ ID NO: 17696 - DNA, 53 bp, Artificial Sequence
  Description of Artificial Sequence: Synthetic hazel nut; 5' sequence and inner sequence
tagggaagagaaggacatatgatggcatgtgatgaacgaggcatgatgcgtca

SEQ ID NO: 17697 - DNA, 53 bp, Artificial Sequence; identical to SEQ ID NO: 5376
  Description of Artificial Sequence: Synthetic hazel nut; 5' sequence and inner sequence

SEQ ID NO: 17698 - DNA, 53 bp, Artificial Sequence
  Description of Artificial Sequence: Synthetic hazel nut; 5' sequence and inner sequence
tagggaagagaaggacatatgatgcgtgatggcgcaacgtcctgtgcttcgcg

SEQ ID NO: 17699 - DNA, 53 bp, Artificial Sequence; identical to SEQ ID NO: 1594
  Description of Artificial Sequence: Synthetic hazel nut; 5' sequence and inner sequence

SEQ ID NO: 17700 - DNA, 53 bp, Artificial Sequence; identical to SEQ ID NO: 1324
  Description of Artificial Sequence: Synthetic hazel nut; 5' sequence and inner sequence

SEQ ID NO: 17701 - DNA, 53 bp, Artificial Sequence; identical to SEQ ID NO: 1329
  Description of Artificial Sequence: Synthetic hazel nut; 5' sequence and inner sequence

SEQ ID NO: 17702 - DNA, 53 bp, Artificial Sequence; identical to SEQ ID NO: 1534
  Description of Artificial Sequence: Synthetic hazel nut; 5' sequence and inner sequence

SEQ ID NO: 17703 - DNA, 53 bp, Artificial Sequence
  Description of Artificial Sequence: Synthetic hazel nut; 5' sequence and inner sequence
tagggaagagaaggacatatgatcgtcacgcacgtgaacgcgtcattgccgca

SEQ ID NO: 17704 - DNA, 53 bp, Artificial Sequence; identical to SEQ ID NO: 9960
  Description of Artificial Sequence: Synthetic hazel nut; 5' sequence and inner sequence

SEQ ID NO: 17705 - DNA, 53 bp, Artificial Sequence
  Description of Artificial Sequence: Synthetic hazel nut; 5' sequence and inner sequence
tagggaagagaaggacatatgatgcgacgcacatcaccgcactgaccgtgtgt

SEQ ID NO: 17706 - DNA, 53 bp, Artificial Sequence
  Description of Artificial Sequence: Synthetic hazel nut; 5' sequence and inner sequence
tagggaagagaaggacatatgatcacacgcagtgcgactgacctgacgtcacg

SEQ ID NO: 17707 - DNA, 53 bp, Artificial Sequence; identical to SEQ ID NO: 5531
  Description of Artificial Sequence: Synthetic hazel nut; 5' sequence and inner sequence

SEQ ID NO: 17708 - DNA, 53 bp, Artificial Sequence; identical to SEQ ID NO: 1806
  Description of Artificial Sequence: Synthetic hazel nut; 5' sequence and inner sequence

SEQ ID NO: 17709 - DNA, 53 bp, Artificial Sequence
  Description of Artificial Sequence: Synthetic hazel nut; 5' sequence and inner sequence
tagggaagagaaggacatatgatggcatgcgatgaacgaggcatgatgagtca

SEQ ID NO: 17710 - DNA, 53 bp, Artificial Sequence
  Description of Artificial Sequence: Synthetic hazel nut; 5' sequence and inner sequence
tagggaagagaaggacatatgatggcacacgggcaggacgtgctactcgcgca

SEQ ID NO: 17711 - DNA, 52 bp, Artificial Sequence; identical to SEQ ID NO: 1259
  Description of Artificial Sequence: Synthetic hazel nut; 5' sequence and inner sequence

SEQ ID NO: 17712 - DNA, 53 bp, Artificial Sequence; identical to SEQ ID NO: 9971
  Description of Artificial Sequence: Synthetic hazel nut; 5' sequence and inner sequence

SEQ ID NO: 17713 - DNA, 53 bp, Artificial Sequence
  Description of Artificial Sequence: Synthetic hazel nut; 5' sequence and inner sequence
tagggaagagaaggacatatgatgcccagtgcaacgtaggtacgtaccgtgcc

SEQ ID NO: 17714 - DNA, 53 bp, Artificial Sequence; identical to SEQ ID NO: 1668
  Description of Artificial Sequence: Synthetic hazel nut; 5' sequence and inner sequence

SEQ ID NO: 17715 - DNA, 53 bp, Artificial Sequence
  Description of Artificial Sequence: Synthetic hazel nut; 5' sequence and inner sequence
tagggaagagaaggacatatgatcgtgaacacgtgccgacgatgcgtaccgtc

SEQ ID NO: 17716 - DNA, 53 bp, Artificial Sequence; identical to SEQ ID NO: 1305
  Description of Artificial Sequence: Synthetic hazel nut; 5' sequence and inner sequence

SEQ ID NO: 17717 - DNA, 53 bp, Artificial Sequence; identical to SEQ ID NO: 5610
  Description of Artificial Sequence: Synthetic hazel nut; 5' sequence and inner sequence

SEQ ID NO: 17718 - DNA, 53 bp, Artificial Sequence
  Description of Artificial Sequence: Synthetic hazel nut; 5' sequence and inner sequence
tagggaagagaaggacatatgatggcatgcgacgaacgaggcatgatgcgtca

SEQ ID NO: 17719 - DNA, 53 bp, Artificial Sequence; identical to SEQ ID NO: 1440
  Description of Artificial Sequence: Synthetic hazel nut; 5' sequence and inner sequence

SEQ ID NO: 17720 - DNA, 53 bp, Artificial Sequence
  Description of Artificial Sequence: Synthetic hazel nut; 5' sequence and inner sequence
tagggaagagaaggacatatgatggcatgcgatgaatgaggcatgatgcgtca

SEQ ID NO: 17721 - DNA, 53 bp, Artificial Sequence; identical to SEQ ID NO: 1705
  Description of Artificial Sequence: Synthetic hazel nut; 5' sequence and inner sequence

SEQ ID NO: 17722 - DNA, 53 bp, Artificial Sequence
  Description of Artificial Sequence: Synthetic hazel nut; 5' sequence and inner sequence
tagggaagagaaggacatatgatacgcttaggcacatcgtccgctgcttcacg

SEQ ID NO: 17723 - DNA, 53 bp, Artificial Sequence; identical to SEQ ID NO: 1263
  Description of Artificial Sequence: Synthetic hazel nut; 5' sequence and inner sequence

SEQ ID NO: 17724 - DNA, 53 bp, Artificial Sequence; identical to SEQ ID NO: 1273
  Description of Artificial Sequence: Synthetic hazel nut; 5' sequence and inner sequence

SEQ ID NO: 17725 - DNA, 53 bp, Artificial Sequence; identical to SEQ ID NO: 1984
  Description of Artificial Sequence: Synthetic hazel nut; 5' sequence and inner sequence

SEQ ID NO: 17726 - DNA, 53 bp, Artificial Sequence
  Description of Artificial Sequence: Synthetic hazel nut; 5' sequence and inner sequence
tagggaagagaaggacatatgatcgtggcgaacgaacatacgcacactgcacg

SEQ ID NO: 17727 - DNA, 53 bp, Artificial Sequence; identical to SEQ ID NO: 1721
  Description of Artificial Sequence: Synthetic hazel nut; 5' sequence and inner sequence

SEQ ID NO: 17728 - DNA, 53 bp, Artificial Sequence; identical to SEQ ID NO: 1389
  Description of Artificial Sequence: Synthetic hazel nut; 5' sequence and inner sequence

SEQ ID NO: 17729 - DNA, 53 bp, Artificial Sequence
  Description of Artificial Sequence: Synthetic hazel nut; 5' sequence and inner sequence
tagggaagagaaggacatatgatgcgtaaggcaggcaagtacggcacgcatcg

SEQ ID NO: 17730 - DNA, 53 bp, Artificial Sequence
  Description of Artificial Sequence: Synthetic hazel nut; 5' sequence and inner sequence
tagggaagagaaggacatatgatggcatgcgatgaacgaggcatgatacgtca

SEQ ID NO: 17731 - DNA, 53 bp, Artificial Sequence
  Description of Artificial Sequence: Synthetic hazel nut; 5' sequence and inner sequence
tagggaagagaaggacatatgatggcatgcgatgaacgaggcatgatgcgtga

SEQ ID NO: 17732 - DNA, 53 bp, Artificial Sequence; identical to SEQ ID NO: 1422
  Description of Artificial Sequence: Synthetic hazel nut; 5' sequence and inner sequence

SEQ ID NO: 17733 - DNA, 53 bp, Artificial Sequence
  Description of Artificial Sequence: Synthetic hazel nut; 5' sequence and inner sequence
tagggaagagaaggacatatgatgcgtgaggagtgacgccaccatcatgcaca

SEQ ID NO: 17734 - DNA, 53 bp, Artificial Sequence; identical to SEQ ID NO: 1731
  Description of Artificial Sequence: Synthetic hazel nut; 5' sequence and inner sequence

SEQ ID NO: 17735 - DNA, 53 bp, Artificial Sequence
  Description of Artificial Sequence: Synthetic hazel nut; 5' sequence and inner sequence
tagggaagagaaggacatatgatggcctgaccacaccgtatgcatcgcgtcca

SEQ ID NO: 17736 - DNA, 53 bp, Artificial Sequence
  Description of Artificial Sequence: Synthetic hazel nut; 5' sequence and inner sequence
tagggaagagaaggacatatgatacgcacaacgtcaacatgaggtgcgcaaca

SEQ ID NO: 17737 - DNA, 53 bp, Artificial Sequence; identical to SEQ ID NO: 1087
  Description of Artificial Sequence: Synthetic hazel nut; 5' sequence and inner sequence

SEQ ID NO: 17738 - DNA, 53 bp, Artificial Sequence; identical to SEQ ID NO: 1779
  Description of Artificial Sequence: Synthetic hazel nut; 5' sequence and inner sequence

SEQ ID NO: 17739 - DNA, 53 bp, Artificial Sequence
  Description of Artificial Sequence: Synthetic hazel nut; 5' sequence and inner sequence
tagggaagagaaggacatatgatcgtgacgcagtgcctagctgtgacagtgca

SEQ ID NO: 17740 - DNA, 53 bp, Artificial Sequence
  Description of Artificial Sequence: Synthetic hazel nut; 5' sequence and inner sequence
tagggaagagaaggacatatgatcgcaacggagcacgtgacctggcctgcacg

SEQ ID NO: 17741 - DNA, 53 bp, Artificial Sequence
  Description of Artificial Sequence: Synthetic hazel nut; 5' sequence and inner sequence
tagggaagagaaggacatatgatgcgacgaagcgacatgtgccttgcgatgcc

SEQ ID NO: 17742 - DNA, 53 bp, Artificial Sequence; identical to SEQ ID NO: 1210
  Description of Artificial Sequence: Synthetic hazel nut; 5' sequence and inner sequence

SEQ ID NO: 17743 - DNA, 53 bp, Artificial Sequence; identical to SEQ ID NO: 1546
  Description of Artificial Sequence: Synthetic hazel nut; 5' sequence and inner sequence

SEQ ID NO: 17744 - DNA, 53 bp, Artificial Sequence
  Description of Artificial Sequence: Synthetic hazel nut; 5' sequence and inner sequence
tagggaagagaaggacatatgatcgtgtgtacgcatcgaccgtctgtgccatg

SEQ ID NO: 17745 - DNA, 53 bp, Artificial Sequence; identical to SEQ ID NO: 1598
  Description of Artificial Sequence: Synthetic hazel nut; 5' sequence and inner sequence

SEQ ID NO: 17746 - DNA, 52 bp, Artificial Sequence
  Description of Artificial Sequence: Synthetic hazel nut; 5' sequence and inner sequence
tagggaagagaaggacatatgatgcatgcgatgaacgaggcatgatgcgtca

SEQ ID NO: 17747 - DNA, 53 bp, Artificial Sequence; identical to SEQ ID NO: 1589
  Description of Artificial Sequence: Synthetic hazel nut; 5' sequence and inner sequence

SEQ ID NO: 17748 - DNA, 53 bp, Artificial Sequence
  Description of Artificial Sequence: Synthetic hazel nut; 5' sequence and inner sequence
tagggaagagaaggacatatgatcgtaccaccgtgtgcatgtgatgcatggca

SEQ ID NO: 17749 - DNA, 53 bp, Artificial Sequence; identical to SEQ ID NO: 1361
  Description of Artificial Sequence: Synthetic hazel nut; 5' sequence and inner sequence

SEQ ID NO: 17750 - DNA, 53 bp, Artificial Sequence
  Description of Artificial Sequence: Synthetic hazel nut; 5' sequence and inner sequence
tagggaagagaaggacatatgatggcatgcgatgaacgaggtatgatgcgtca

SEQ ID NO: 17751 - DNA, 53 bp, Artificial Sequence; identical to SEQ ID NO: 1486
  Description of Artificial Sequence: Synthetic hazel nut; 5' sequence and inner sequence

SEQ ID NO: 17752 - DNA, 53 bp, Artificial Sequence
  Description of Artificial Sequence: Synthetic hazel nut; 5' sequence and inner sequence
tagggaagagaaggacatatgatgcacgtcatgctgaccgaactgcctacgca

SEQ ID NO: 17753 - DNA, 53 bp, Artificial Sequence
  Description of Artificial Sequence: Synthetic hazel nut; 5' sequence and inner sequence
tagggaagagaaggacatatgatcacacggaacgcacatggtggtacgacgcg

SEQ ID NO: 17754 - DNA, 53 bp, Artificial Sequence; identical to SEQ ID NO: 1365
  Description of Artificial Sequence: Synthetic hazel nut; 5' sequence and inner sequence

SEQ ID NO: 17755 - DNA, 53 bp, Artificial Sequence
  Description of Artificial Sequence: Synthetic hazel nut; 5' sequence and inner sequence
tagggaagagaaggacatatgatgcgaggaacgtgcacatcgtccgctgcatg

SEQ ID NO: 17756 - DNA, 53 bp, Artificial Sequence; identical to SEQ ID NO: 1866
  Description of Artificial Sequence: Synthetic hazel nut; 5' sequence and inner sequence

SEQ ID NO: 17757 - DNA, 53 bp, Artificial Sequence; identical to SEQ ID NO: 1916
  Description of Artificial Sequence: Synthetic hazel nut; 5' sequence and inner sequence

SEQ ID NO: 17758 - DNA, 53 bp, Artificial Sequence; identical to SEQ ID NO: 5585
  Description of Artificial Sequence: Synthetic hazel nut; 5' sequence and inner sequence

SEQ ID NO: 17759 - DNA, 53 bp, Artificial Sequence
  Description of Artificial Sequence: Synthetic hazel nut; 5' sequence and inner sequence
tagggaagagaaggacatatgattgcgcatgcatcgtcggcactgagcttgcc

SEQ ID NO: 17760 - DNA, 53 bp, Artificial Sequence; identical to SEQ ID NO: 1884
  Description of Artificial Sequence: Synthetic hazel nut; 5' sequence and inner sequence

SEQ ID NO: 17761 - DNA, 53 bp, Artificial Sequence
  Description of Artificial Sequence: Synthetic hazel nut; 5' sequence and inner sequence
tagggaagagaaggacatatgatccgacacgcatggtaaggtaggcaggcacg

SEQ ID NO: 17762 - DNA, 53 bp, Artificial Sequence; identical to SEQ ID NO: 1166
  Description of Artificial Sequence: Synthetic hazel nut; 5' sequence and inner sequence

SEQ ID NO: 17763 - DNA, 53 bp, Artificial Sequence; identical to SEQ ID NO: 5893
  Description of Artificial Sequence: Synthetic hazel nut; 5' sequence and inner sequence

SEQ ID NO: 17764 - DNA, 53 bp, Artificial Sequence; identical to SEQ ID NO: 5238
  Description of Artificial Sequence: Synthetic hazel nut; 5' sequence and inner sequence

SEQ ID NO: 17765 - DNA, 53 bp, Artificial Sequence
  Description of Artificial Sequence: Synthetic hazel nut; 5' sequence and inner sequence
tagggaagagaaggacatatgatcatgtgcgaacggacgtacacgtgtgatca

SEQ ID NO: 17766 - DNA, 53 bp, Artificial Sequence; identical to SEQ ID NO: 1676
  Description of Artificial Sequence: Synthetic hazel nut; 5' sequence and inner sequence

SEQ ID NO: 17767 - DNA, 53 bp, Artificial Sequence
  Description of Artificial Sequence: Synthetic hazel nut; 5' sequence and inner sequence
tagggaagagaaggacatatgatcgaccacactcaggcacgtacggtatgtca

SEQ ID NO: 17768 - DNA, 53 bp, Artificial Sequence
  Description of Artificial Sequence: Synthetic hazel nut; 5' sequence and inner sequence
tagggaagagaaggacatatgatcgcaccgtcgatacgtcatgcacgctgaga

SEQ ID NO: 17769 - DNA, 53 bp, Artificial Sequence
  Description of Artificial Sequence: Synthetic hazel nut; 5' sequence and inner sequence
tagggaagagaaggacatatgattgacgcagcgtaacgttcgagtggtacgta

SEQ ID NO: 17770 - DNA, 53 bp, Artificial Sequence
  Description of Artificial Sequence: Synthetic hazel nut; 5' sequence and inner sequence
tagggaagagaaggacatatgatggcatgcgatgaacgaggcatgatgcctca

SEQ ID NO: 17771 - DNA, 53 bp, Artificial Sequence; identical to SEQ ID NO: 1914
  Description of Artificial Sequence: Synthetic hazel nut; 5' sequence and inner sequence

SEQ ID NO: 17772 - DNA, 53 bp, Artificial Sequence; identical to SEQ ID NO: 1720
  Description of Artificial Sequence: Synthetic hazel nut; 5' sequence and inner sequence

SEQ ID NO: 17773 - DNA, 53 bp, Artificial Sequence; identical to SEQ ID NO: 1867
  Description of Artificial Sequence: Synthetic hazel nut; 5' sequence and inner sequence

SEQ ID NO: 17774 - DNA, 53 bp, Artificial Sequence
  Description of Artificial Sequence: Synthetic hazel nut; 5' sequence and inner sequence
tagggaagagaaggacatatgatcacgacacgatgtccacgtcccgttcgcgc

SEQ ID NO: 17775 - DNA, 53 bp, Artificial Sequence; identical to SEQ ID NO: 1989
  Description of Artificial Sequence: Synthetic hazel nut; 5' sequence and inner sequence

SEQ ID NO: 17776 - DNA, 53 bp, Artificial Sequence
  Description of Artificial Sequence: Synthetic hazel nut; 5' sequence and inner sequence
tagggaagagaaggacatatgatggcatgcggtgaacgaggcatgatgcgtca

SEQ ID NO: 17777 - DNA, 53 bp, Artificial Sequence
  Description of Artificial Sequence: Synthetic hazel nut; 5' sequence and inner sequence
tagggaagagaaggacatatgatcgcatggcaacatgtccgcacgcgtgcacg

SEQ ID NO: 17778 - DNA, 53 bp, Artificial Sequence
  Description of Artificial Sequence: Synthetic hazel nut; 5' sequence and inner sequence
tagggaagagaaggacatatgatgccacgtcgatgcccaacgctcactgcgtg

SEQ ID NO: 17779 - DNA, 53 bp, Artificial Sequence; identical to SEQ ID NO: 1719
  Description of Artificial Sequence: Synthetic hazel nut; 5' sequence and inner sequence

SEQ ID NO: 17780 - DNA, 53 bp, Artificial Sequence; identical to SEQ ID NO: 1318
  Description of Artificial Sequence: Synthetic hazel nut; 5' sequence and inner sequence

SEQ ID NO: 17781 - DNA, 53 bp, Artificial Sequence
  Description of Artificial Sequence: Synthetic hazel nut; 5' sequence and inner sequence
tagggaagagaaggacatatgatggcacgatcgacatgtcacagtgctgcgca

SEQ ID NO: 17782 - DNA, 53 bp, Artificial Sequence; identical to SEQ ID NO: 1330
  Description of Artificial Sequence: Synthetic hazel nut; 5' sequence and inner sequence

SEQ ID NO: 17783 - DNA, 53 bp, Artificial Sequence
  Description of Artificial Sequence: Synthetic hazel nut; 5' sequence and inner sequence
tagggaagagaaggacatatgatggccgacgcggaacggtgcatgaccatgca

SEQ ID NO: 17784 - DNA, 53 bp, Artificial Sequence; identical to SEQ ID NO: 5875
  Description of Artificial Sequence: Synthetic hazel nut; 5' sequence and inner sequence

SEQ ID NO: 17785 - DNA, 53 bp, Artificial Sequence
  Description of Artificial Sequence: Synthetic hazel nut; 5' sequence and inner sequence
tagggaagagaaggacatatgatcgcgtcatgcgtaccgaacgtgtctgcgct

SEQ ID NO: 17786 - DNA, 53 bp, Artificial Sequence; identical to SEQ ID NO: 1376
  Description of Artificial Sequence: Synthetic hazel nut; 5' sequence and inner sequence

SEQ ID NO: 17787 - DNA, 53 bp, Artificial Sequence
  Description of Artificial Sequence: Synthetic hazel nut; 5' sequence and inner sequence
tagggaagagaaggacatatgatggcgtgcgatgaacgaggcatgatgcgtca

SEQ ID NO: 17788 - DNA, 53 bp, Artificial Sequence; identical to SEQ ID NO: 9792
  Description of Artificial Sequence: Synthetic hazel nut; 5' sequence and inner sequence

SEQ ID NO: 17789 - DNA, 53 bp, Artificial Sequence; identical to SEQ ID NO: 9758
  Description of Artificial Sequence: Synthetic hazel nut; 5' sequence and inner sequence

SEQ ID NO: 17790 - DNA, 53 bp, Artificial Sequence; identical to SEQ ID NO: 1335
  Description of Artificial Sequence: Synthetic hazel nut; 5' sequence and inner sequence

SEQ ID NO: 17791 - DNA, 53 bp, Artificial Sequence
  Description of Artificial Sequence: Synthetic hazel nut; 5' sequence and inner sequence
tagggaagagaaggacatatgatcgtgcaacaggtcagtgacgacgctgtgcc

SEQ ID NO: 17792 - DNA, 53 bp, Artificial Sequence
  Description of Artificial Sequence: Synthetic hazel nut; 5' sequence and inner sequence
tagggaagagaaggacatatgattgacacaccgacgagcacgatgacttcgcg

SEQ ID NO: 17793 - DNA, 53 bp, Artificial Sequence
  Description of Artificial Sequence: Synthetic hazel nut; 5' sequence and inner sequence
tagggaagagaaggacatatgattgcgttgcatcgtacgtgtgcttgccgaca

SEQ ID NO: 17794 - DNA, 53 bp, Artificial Sequence
  Description of Artificial Sequence: Synthetic hazel nut; 5' sequence and inner sequence
tagggaagagaaggacatatgatgatgtgccgcctcgacgtaccagctgcgac

SEQ ID NO: 17795 - DNA, 53 bp, Artificial Sequence
  Description of Artificial Sequence: Synthetic hazel nut; 5' sequence and inner sequence
tagggaagagaaggacatatgatcacgtgacggcacgggaagtcatgtgcaca

SEQ ID NO: 17796 - DNA, 53 bp, Artificial Sequence; identical to SEQ ID NO: 1128
  Description of Artificial Sequence: Synthetic hazel nut; 5' sequence and inner sequence

SEQ ID NO: 17797 - DNA, 53 bp, Artificial Sequence; identical to SEQ ID NO: 1218
  Description of Artificial Sequence: Synthetic hazel nut; 5' sequence and inner sequence

SEQ ID NO: 17798 - DNA, 53 bp, Artificial Sequence; identical to SEQ ID NO: 1636
  Description of Artificial Sequence: Synthetic hazel nut; 5' sequence and inner sequence

SEQ ID NO: 17799 - DNA, 53 bp, Artificial Sequence
  Description of Artificial Sequence: Synthetic hazel nut; 5' sequence and inner sequence
tagggaagagaaggacatatgatggcatgcgatgaacgtggcatgatgcgtca

SEQ ID NO: 17800 - DNA, 53 bp, Artificial Sequence; identical to SEQ ID NO: 1682
  Description of Artificial Sequence: Synthetic hazel nut; 5' sequence and inner sequence

SEQ ID NO: 17801 - DNA, 53 bp, Artificial Sequence
  Description of Artificial Sequence: Synthetic hazel nut; 5' sequence and inner sequence
tagggaagagaaggacatatgatccatggcacacggacactaggtccatcgcg

SEQ ID NO: 17802 - DNA, 51 bp, Artificial Sequence
  Description of Artificial Sequence: Synthetic hazel nut; 5' sequence and inner sequence
tagggaagagaaggacatatgatgtacgatgctgcccgacatgtgtacgtg

SEQ ID NO: 17803 - DNA, 53 bp, Artificial Sequence
  Description of Artificial Sequence: Synthetic hazel nut; 5' sequence and inner sequence
tagggaagagaaggacatatgatcgacccgcatgtacgttggtgcgtgccgct

SEQ ID NO: 17804 - DNA, 53 bp, Artificial Sequence
  Description of Artificial Sequence: Synthetic hazel nut; 5' sequence and inner sequence
tagggaagagaaggacatatgatcgcgtacgaagcacaggacgtcactgcacg

SEQ ID NO: 17805 - DNA, 53 bp, Artificial Sequence; identical to SEQ ID NO: 9925
  Description of Artificial Sequence: Synthetic hazel nut; 5' sequence and inner sequence

SEQ ID NO: 17806 - DNA, 53 bp, Artificial Sequence; identical to SEQ ID NO: 1337
  Description of Artificial Sequence: Synthetic hazel nut; 5' sequence and inner sequence

SEQ ID NO: 17807 - DNA, 53 bp, Artificial Sequence; identical to SEQ ID NO: 5419
  Description of Artificial Sequence: Synthetic hazel nut; 5' sequence and inner sequence

SEQ ID NO: 17808 - DNA, 53 bp, Artificial Sequence
  Description of Artificial Sequence: Synthetic hazel nut; 5' sequence and inner sequence
tagggaagagaaggacatatgatggcgtagggagcgtaccgtatcgtgcgtca

SEQ ID NO: 17809 - DNA, 53 bp, Artificial Sequence; identical to SEQ ID NO: 1437
  Description of Artificial Sequence: Synthetic hazel nut; 5' sequence and inner sequence

SEQ ID NO: 17810 - DNA, 53 bp, Artificial Sequence
  Description of Artificial Sequence: Synthetic hazel nut; 5' sequence and inner sequence
tagggaagagaaggacatatgatggcatgcgatggatgtgcgttgtgctcggc

SEQ ID NO: 17811 - DNA, 53 bp, Artificial Sequence
  Description of Artificial Sequence: Synthetic hazel nut; 5' sequence and inner sequence
tagggaagagaaggacatatgatcgtgcagtcagcgcgtcaccatacggtgtg

SEQ ID NO: 17812 - DNA, 53 bp, Artificial Sequence; identical to SEQ ID NO: 9770
  Description of Artificial Sequence: Synthetic hazel nut; 5' sequence and inner sequence

SEQ ID NO: 17813 - DNA, 53 bp, Artificial Sequence
  Description of Artificial Sequence: Synthetic hazel nut; 5' sequence and inner sequence
tagggaagagaaggacatatgatgccactatgcctgcctgaccgtgacgcacg

SEQ ID NO: 17814 - DNA, 53 bp, Artificial Sequence
  Description of Artificial Sequence: Synthetic hazel nut; 5' sequence and inner sequence
tagggaagagaaggacatatgatgcacgcagcgtacggtcactctgaggcaca

SEQ ID NO: 17815 - DNA, 53 bp, Artificial Sequence; identical to SEQ ID NO: 1409
  Description of Artificial Sequence: Synthetic hazel nut; 5' sequence and inner sequence

SEQ ID NO: 17816 - DNA, 53 bp, Artificial Sequence
  Description of Artificial Sequence: Synthetic hazel nut; 5' sequence and inner sequence
tagggaagagaaggacatatgatggccgacggaccgacgcaacgtactgcgtg

SEQ ID NO: 17817 - DNA, 53 bp, Artificial Sequence; identical to SEQ ID NO: 1961
  Description of Artificial Sequence: Synthetic hazel nut; 5' sequence and inner sequence

SEQ ID NO: 17818 - DNA, 53 bp, Artificial Sequence
  Description of Artificial Sequence: Synthetic hazel nut; 5' sequence and inner sequence
tagggaagagaaggacatatgataacgtgtgtgcgcaacgactgatgtacgtg

SEQ ID NO: 17819 - DNA, 53 bp, Artificial Sequence
  Description of Artificial Sequence: Synthetic hazel nut; 5' sequence and inner sequence
tagggaagagaaggacatatgatacgtcaacgacaccgatgcacgtcactgcg

SEQ ID NO: 17820 - DNA, 53 bp, Artificial Sequence; identical to SEQ ID NO: 1623
  Description of Artificial Sequence: Synthetic hazel nut; 5' sequence and inner sequence

SEQ ID NO: 17821 - DNA, 53 bp, Artificial Sequence; identical to SEQ ID NO: 5817
  Description of Artificial Sequence: Synthetic hazel nut; 5' sequence and inner sequence

SEQ ID NO: 17822 - DNA, 53 bp, Artificial Sequence; identical to SEQ ID NO: 1637
  Description of Artificial Sequence: Synthetic hazel nut; 5' sequence and inner sequence

SEQ ID NO: 17823 - DNA, 53 bp, Artificial Sequence; identical to SEQ ID NO: 1647
  Description of Artificial Sequence: Synthetic hazel nut; 5' sequence and inner sequence

SEQ ID NO: 17824 - DNA, 53 bp, Artificial Sequence
  Description of Artificial Sequence: Synthetic hazel nut; 5' sequence and inner sequence
tagggaagagaaggacatatgatcgcacggtcgatacgtcatgcacgctgaca

SEQ ID NO: 17825 - DNA, 53 bp, Artificial Sequence
  Description of Artificial Sequence: Synthetic hazel nut; 5' sequence and inner sequence
tagggaagagaaggacatatgatcgtgccgtaacagcaacgtacttggccaca

SEQ ID NO: 17826 - DNA, 53 bp, Artificial Sequence; identical to SEQ ID NO: 1544
  Description of Artificial Sequence: Synthetic hazel nut; 5' sequence and inner sequence

SEQ ID NO: 17827 - DNA, 53 bp, Artificial Sequence; identical to SEQ ID NO: 1757
  Description of Artificial Sequence: Synthetic hazel nut; 5' sequence and inner sequence

SEQ ID NO: 17828 - DNA, 53 bp, Artificial Sequence; identical to SEQ ID NO: 1991
  Description of Artificial Sequence: Synthetic hazel nut; 5' sequence and inner sequence

SEQ ID NO: 17829 - DNA, 53 bp, Artificial Sequence
  Description of Artificial Sequence: Synthetic hazel nut; 5' sequence and inner sequence
tagggaagagaaggacatatgatcgcatcgcaatggccacgcgcaccgtcacg

SEQ ID NO: 17830 - DNA, 53 bp, Artificial Sequence; identical to SEQ ID NO: 9999
  Description of Artificial Sequence: Synthetic hazel nut; 5' sequence and inner sequence

SEQ ID NO: 17831 - DNA, 53 bp, Artificial Sequence; identical to SEQ ID NO: 1890
  Description of Artificial Sequence: Synthetic hazel nut; 5' sequence and inner sequence

SEQ ID NO: 17832 - DNA, 53 bp, Artificial Sequence
  Description of Artificial Sequence: Synthetic hazel nut; 5' sequence and inner sequence
tagggaagagaaggacatatgatcgcatcgtagccgtgtgccgtgtacgcagg

SEQ ID NO: 17833 - DNA, 53 bp, Artificial Sequence; identical to SEQ ID NO: 5710
  Description of Artificial Sequence: Synthetic hazel nut; 5' sequence and inner sequence

SEQ ID NO: 17834 - DNA, 53 bp, Artificial Sequence; identical to SEQ ID NO: 5958
  Description of Artificial Sequence: Synthetic hazel nut; 5' sequence and inner sequence

SEQ ID NO: 17835 - DNA, 53 bp, Artificial Sequence; identical to SEQ ID NO: 5852
  Description of Artificial Sequence: Synthetic hazel nut; 5' sequence and inner sequence

SEQ ID NO: 17836 - DNA, 53 bp, Artificial Sequence
  Description of Artificial Sequence: Synthetic hazel nut; 5' sequence and inner sequence
tagggaagagaaggacatatgatcgtgccacgacgtatgcctccgcagccacg

SEQ ID NO: 17837 - DNA, 53 bp, Artificial Sequence
  Description of Artificial Sequence: Synthetic hazel nut; 5' sequence and inner sequence
tagggaagagaaggacatatgatgcgtcacagcgtggtacgtctcgcaccgtg

SEQ ID NO: 17838 - DNA, 53 bp, Artificial Sequence
  Description of Artificial Sequence: Synthetic hazel nut; 5' sequence and inner sequence
tagggaagagaaggacatatgatcggcatgacggcaactgtgctacgtgcgcg

SEQ ID NO: 17839 - DNA, 53 bp, Artificial Sequence; identical to SEQ ID NO: 1643
  Description of Artificial Sequence: Synthetic hazel nut; 5' sequence and inner sequence

SEQ ID NO: 17840 - DNA, 53 bp, Artificial Sequence; identical to SEQ ID NO: 1449
  Description of Artificial Sequence: Synthetic hazel nut; 5' sequence and inner sequence

SEQ ID NO: 17841 - DNA, 53 bp, Artificial Sequence
  Description of Artificial Sequence: Synthetic hazel nut; 5' sequence and inner sequence
tagggaagagaaggacatatgatcgaccaacgtgatgcaacgtgtacttcggc

SEQ ID NO: 17842 - DNA, 53 bp, Artificial Sequence; identical to SEQ ID NO: 1349
  Description of Artificial Sequence: Synthetic hazel nut; 5' sequence and inner sequence

SEQ ID NO: 17843 - DNA, 53 bp, Artificial Sequence; identical to SEQ ID NO: 1260
  Description of Artificial Sequence: Synthetic hazel nut; 5' sequence and inner sequence

SEQ ID NO: 17844 - DNA, 53 bp, Artificial Sequence
  Description of Artificial Sequence: Synthetic hazel nut; 5' sequence and inner sequence
tagggaagagaaggacatatgatcgtgaacacgcacaatgacactgccgcacg

SEQ ID NO: 17845 - DNA, 53 bp, Artificial Sequence; identical to SEQ ID NO: 9860
  Description of Artificial Sequence: Synthetic hazel nut; 5' sequence and inner sequence

SEQ ID NO: 17846 - DNA, 53 bp, Artificial Sequence
  Description of Artificial Sequence: Synthetic hazel nut; 5' sequence and inner sequence
tagggaagagaaggacatatgatggcatgcgatgaacgaggcatgatgcgtaa

SEQ ID NO: 17847 - DNA, 53 bp, Artificial Sequence
  Description of Artificial Sequence: Synthetic hazel nut; 5' sequence and inner sequence
tagggaagagaaggacatatgatgcaccacgccgacaatgtacgctgctgacc

SEQ ID NO: 17848 - DNA, 53 bp, Artificial Sequence
  Description of Artificial Sequence: Synthetic hazel nut; 5' sequence and inner sequence
tagggaagagaaggacatatgatcgacacggaccgacctgcgaactgcacgcg

SEQ ID NO: 17849 - DNA, 53 bp, Artificial Sequence
  Description of Artificial Sequence: Synthetic hazel nut; 5' sequence and inner sequence
tagggaagagaaggacatatgatgcgaatgcaccgacacgtccctcacgcacg

SEQ ID NO: 17850 - DNA, 53 bp, Artificial Sequence; identical to SEQ ID NO: 1585
  Description of Artificial Sequence: Synthetic hazel nut; 5' sequence and inner sequence

SEQ ID NO: 17851 - DNA, 53 bp, Artificial Sequence
  Description of Artificial Sequence: Synthetic hazel nut; 5' sequence and inner sequence
tagggaagagaaggacatatgatcgtgcgtagcgaccaaccgtcaacgtggcc

SEQ ID NO: 17852 - DNA, 53 bp, Artificial Sequence; identical to SEQ ID NO: 5579
  Description of Artificial Sequence: Synthetic hazel nut; 5' sequence and inner sequence

SEQ ID NO: 17853 - DNA, 53 bp, Artificial Sequence
  Description of Artificial Sequence: Synthetic hazel nut; 5' sequence and inner sequence
tagggaagagaaggacatatgatcgacacgacgacctgcacgctacgtgaatg

SEQ ID NO: 17854 - DNA, 53 bp, Artificial Sequence; identical to SEQ ID NO: 1770
  Description of Artificial Sequence: Synthetic hazel nut; 5' sequence and inner sequence

SEQ ID NO: 17855 - DNA, 53 bp, Artificial Sequence
  Description of Artificial Sequence: Synthetic hazel nut; 5' sequence and inner sequence
tagggaagagaaggacatatgatggaccgaacgtgtacggcagatacgtggca

SEQ ID NO: 17856 - DNA, 53 bp, Artificial Sequence; identical to SEQ ID NO: 5956
  Description of Artificial Sequence: Synthetic hazel nut; 5' sequence and inner sequence

SEQ ID NO: 17857 - DNA, 53 bp, Artificial Sequence; identical to SEQ ID NO: 1375
  Description of Artificial Sequence: Synthetic hazel nut; 5' sequence and inner sequence

SEQ ID NO: 17858 - DNA, 53 bp, Artificial Sequence; identical to SEQ ID NO: 1271
  Description of Artificial Sequence: Synthetic hazel nut; 5' sequence and inner sequence

SEQ ID NO: 17859 - DNA, 53 bp, Artificial Sequence
  Description of Artificial Sequence: Synthetic hazel nut; 5' sequence and inner sequence
tagggaagagaaggacatatgatcacgtgcacgtggcgtcgttggcctacgcg

SEQ ID NO: 17860 - DNA, 53 bp, Artificial Sequence; identical to SEQ ID NO: 5273
  Description of Artificial Sequence: Synthetic hazel nut; 5' sequence and inner sequence

SEQ ID NO: 17861 - DNA, 53 bp, Artificial Sequence
  Description of Artificial Sequence: Synthetic hazel nut; 5' sequence and inner sequence
tagggaagagaaggacatatgatcgtcacgcagacgtagtgccgcagtacgca

SEQ ID NO: 17862 - DNA, 53 bp, Artificial Sequence
  Description of Artificial Sequence: Synthetic hazel nut; 5' sequence and inner sequence
tagggaagagaaggacatatgatggcatgcgattaacgaggcatgatgcgtca

SEQ ID NO: 17863 - DNA, 53 bp, Artificial Sequence
  Description of Artificial Sequence: Synthetic hazel nut; 5' sequence and inner sequence
tagggaagagaaggacatatgatcgaccacacgtaagatggcctcgctgcacc

SEQ ID NO: 17864 - DNA, 53 bp, Artificial Sequence
  Description of Artificial Sequence: Synthetic hazel nut; 5' sequence and inner sequence
tagggaagagaaggacatatgatcgacggcaggcacggtgacatcagtacgta

SEQ ID NO: 17865 - DNA, 53 bp, Artificial Sequence; identical to SEQ ID NO: 9994
  Description of Artificial Sequence: Synthetic hazel nut; 5' sequence and inner sequence

SEQ ID NO: 17866 - DNA, 53 bp, Artificial Sequence
  Description of Artificial Sequence: Synthetic hazel nut; 5' sequence and inner sequence
tagggaagagaaggacatatgatggcacgcgatgaacgaggcatgatgcgtca

SEQ ID NO: 17867 - DNA, 53 bp, Artificial Sequence; identical to SEQ ID NO: 1912
  Description of Artificial Sequence: Synthetic hazel nut; 5' sequence and inner sequence

SEQ ID NO: 17868 - DNA, 53 bp, Artificial Sequence
  Description of Artificial Sequence: Synthetic hazel nut; 5' sequence and inner sequence
tagggaagagaaggacatatgatgcgtagggcggacggacattgcacttcgcc

SEQ ID NO: 17869 - DNA, 53 bp, Artificial Sequence
  Description of Artificial Sequence: Synthetic hazel nut; 5' sequence and inner sequence
tagggaagagaaggacatatgatcgaacgcacaaggcaacgtacgcgcagtca

SEQ ID NO: 17870 - DNA, 53 bp, Artificial Sequence; identical to SEQ ID NO: 1307
  Description of Artificial Sequence: Synthetic hazel nut; 5' sequence and inner sequence

SEQ ID NO: 17871 - DNA, 53 bp, Artificial Sequence; identical to SEQ ID NO: 1883
  Description of Artificial Sequence: Synthetic hazel nut; 5' sequence and inner sequence

SEQ ID NO: 17872 - DNA, 52 bp, Artificial Sequence; identical to SEQ ID NO: 1879
  Description of Artificial Sequence: Synthetic hazel nut; 5' sequence and inner sequence

SEQ ID NO: 17873 - DNA, 53 bp, Artificial Sequence
  Description of Artificial Sequence: Synthetic hazel nut; 5' sequence and inner sequence
tagggaagagaaggacatatgatacgactcgacctaaccgtactacgtgtgcg

SEQ ID NO: 17874 - DNA, 53 bp, Artificial Sequence; identical to SEQ ID NO: 1684
  Description of Artificial Sequence: Synthetic hazel nut; 5' sequence and inner sequence

SEQ ID NO: 17875 - DNA, 53 bp, Artificial Sequence; identical to SEQ ID NO: 1728
  Description of Artificial Sequence: Synthetic hazel nut; 5' sequence and inner sequence

SEQ ID NO: 17876 - DNA, 53 bp, Artificial Sequence
  Description of Artificial Sequence: Synthetic hazel nut; 5' sequence and inner sequence
tagggaagagaaggacatatgatcgtaacgtaccacggtgcgtctgtgcgtcc

SEQ ID NO: 17877 - DNA, 53 bp, Artificial Sequence
  Description of Artificial Sequence: Synthetic hazel nut; 5' sequence and inner sequence
tagggaagagaaggacatatgatacgtcgcagcgtaacggttgggatgtgaca

SEQ ID NO: 17878 - DNA, 53 bp, Artificial Sequence
  Description of Artificial Sequence: Synthetic hazel nut; 5' sequence and inner sequence
tagggaagagaaggacatatgatccatgcaggacgtagcgtgaccgttgcaca

SEQ ID NO: 17879 - DNA, 53 bp, Artificial Sequence
  Description of Artificial Sequence: Synthetic hazel nut; 5' sequence and inner sequence
tagggaagagaaggacatatgatcacgtatgcgtaacggacatgcgcttcact

SEQ ID NO: 17880 - DNA, 53 bp, Artificial Sequence
  Description of Artificial Sequence: Synthetic hazel nut; 5' sequence and inner sequence
tagggaagagaaggacatatgattcgcaccgtgacagtgaggcattgtggaca

SEQ ID NO: 17881 - DNA, 53 bp, Artificial Sequence; identical to SEQ ID NO: 1645
  Description of Artificial Sequence: Synthetic hazel nut; 5' sequence and inner sequence

SEQ ID NO: 17882 - DNA, 53 bp, Artificial Sequence; identical to SEQ ID NO: 1932
  Description of Artificial Sequence: Synthetic hazel nut; 5' sequence and inner sequence

SEQ ID NO: 17883 - DNA, 53 bp, Artificial Sequence
  Description of Artificial Sequence: Synthetic hazel nut; 5' sequence and inner sequence
tagggaagagaaggacatatgatgcatacggaacgaacgtaatggacgacgta

SEQ ID NO: 17884 - DNA, 53 bp, Artificial Sequence
  Description of Artificial Sequence: Synthetic hazel nut; 5' sequence and inner sequence
tagggaagagaaggacatatgatcgtgcagcttgacgtacggttggccacgta

SEQ ID NO: 17885 - DNA, 53 bp, Artificial Sequence; identical to SEQ ID NO: 5960
  Description of Artificial Sequence: Synthetic hazel nut; 5' sequence and inner sequence

SEQ ID NO: 17886 - DNA, 53 bp, Artificial Sequence
  Description of Artificial Sequence: Synthetic hazel nut; 5' sequence and inner sequence
tagggaagagaaggacatatgatccgtcggcacacaggtccactcgctacgca

SEQ ID NO: 17887 - DNA, 53 bp, Artificial Sequence; identical to SEQ ID NO: 1849
  Description of Artificial Sequence: Synthetic hazel nut; 5' sequence and inner sequence

SEQ ID NO: 17888 - DNA, 53 bp, Artificial Sequence
  Description of Artificial Sequence: Synthetic hazel nut; 5' sequence and inner sequence
tagggaagagaaggacatatgatagtgtgccgatgcgtccctatcacgtggca

SEQ ID NO: 17889 - DNA, 53 bp, Artificial Sequence; identical to SEQ ID NO: 5655
  Description of Artificial Sequence: Synthetic hazel nut; 5' sequence and inner sequence

SEQ ID NO: 17890 - DNA, 53 bp, Artificial Sequence
  Description of Artificial Sequence: Synthetic hazel nut; 5' sequence and inner sequence
tagggaagagaaggacatatgatcgatccgacgaacgtgcgtgtcacatcgcg

SEQ ID NO: 17891 - DNA, 53 bp, Artificial Sequence
  Description of Artificial Sequence: Synthetic hazel nut; 5' sequence and inner sequence
tagggaagagaaggacatatgatcggtgcagcgtgcatcggaaggtggcgtga

SEQ ID NO: 17892 - DNA, 53 bp, Artificial Sequence
  Description of Artificial Sequence: Synthetic hazel nut; 5' sequence and inner sequence
tagggaagagaaggacatatgatggcatgcgatgaacgaggcatggtgcgtca

SEQ ID NO: 17893 - DNA, 53 bp, Artificial Sequence; identical to SEQ ID NO: 1395
  Description of Artificial Sequence: Synthetic hazel nut; 5' sequence and inner sequence

SEQ ID NO: 17894 - DNA, 53 bp, Artificial Sequence; identical to SEQ ID NO: 5401
  Description of Artificial Sequence: Synthetic hazel nut; 5' sequence and inner sequence

SEQ ID NO: 17895 - DNA, 53 bp, Artificial Sequence
  Description of Artificial Sequence: Synthetic hazel nut; 5' sequence and inner sequence
tagggaagagaaggacatatgatccatgcgtgcaacctcgcccttacgtagcg

SEQ ID NO: 17896 - DNA, 53 bp, Artificial Sequence
  Description of Artificial Sequence: Synthetic hazel nut; 5' sequence and inner sequence
tagggaagagaaggacatatgatgcggcacacgtaccttccttgcgcatgggc

SEQ ID NO: 17897 - DNA, 53 bp, Artificial Sequence; identical to SEQ ID NO: 1514
  Description of Artificial Sequence: Synthetic hazel nut; 5' sequence and inner sequence

SEQ ID NO: 17898 - DNA, 53 bp, Artificial Sequence; identical to SEQ ID NO: 1602
  Description of Artificial Sequence: Synthetic hazel nut; 5' sequence and inner sequence

SEQ ID NO: 17899 - DNA, 53 bp, Artificial Sequence
  Description of Artificial Sequence: Synthetic hazel nut; 5' sequence and inner sequence
tagggaagagaaggacatatgatcgtgacgaacgtaggtcggtcagcttgcca

SEQ ID NO: 17900 - DNA, 53 bp, Artificial Sequence; identical to SEQ ID NO: 1818
  Description of Artificial Sequence: Synthetic hazel nut; 5' sequence and inner sequence

SEQ ID NO: 17901 - DNA, 53 bp, Artificial Sequence
  Description of Artificial Sequence: Synthetic hazel nut; 5' sequence and inner sequence
tagggaagagaaggacatatgatcggtacggatgcatcctccttcacggcacg

SEQ ID NO: 17902 - DNA, 53 bp, Artificial Sequence; identical to SEQ ID NO: 1906
  Description of Artificial Sequence: Synthetic hazel nut; 5' sequence and inner sequence

SEQ ID NO: 17903 - DNA, 53 bp, Artificial Sequence; identical to SEQ ID NO: 5735
  Description of Artificial Sequence: Synthetic hazel nut; 5' sequence and inner sequence

SEQ ID NO: 17904 - DNA, 53 bp, Artificial Sequence
  Description of Artificial Sequence: Synthetic hazel nut; 5' sequence and inner sequence
tagggaagagaaggacatatgattcggtacgtagcatggatcgttgcgacacg

SEQ ID NO: 17905 - DNA, 53 bp, Artificial Sequence; identical to SEQ ID NO: 1075
  Description of Artificial Sequence: Synthetic hazel nut; 5' sequence and inner sequence

SEQ ID NO: 17906 - DNA, 53 bp, Artificial Sequence
  Description of Artificial Sequence: Synthetic hazel nut; 5' sequence and inner sequence
tagggaagagaaggacatatgatcgtgacgcacaacaaggcatgtgaggcaca

SEQ ID NO: 17907 - DNA, 53 bp, Artificial Sequence
  Description of Artificial Sequence: Synthetic hazel nut; 5' sequence and inner sequence
tagggaagagaaggacatatgatcgcaaggcatgtcgcactctcaccgtgacg

SEQ ID NO: 17908 - DNA, 53 bp, Artificial Sequence
  Description of Artificial Sequence: Synthetic hazel nut; 5' sequence and inner sequence
tagggaagagaaggacatatgatggtgacacaacggaggtacgtcgctgcacg

SEQ ID NO: 17909 - DNA, 53 bp, Artificial Sequence; identical to SEQ ID NO: 5948
  Description of Artificial Sequence: Synthetic hazel nut; 5' sequence and inner sequence

SEQ ID NO: 17910 - DNA, 53 bp, Artificial Sequence; identical to SEQ ID NO: 9712
  Description of Artificial Sequence: Synthetic hazel nut; 5' sequence and inner sequence

SEQ ID NO: 17911 - DNA, 53 bp, Artificial Sequence
  Description of Artificial Sequence: Synthetic hazel nut; 5' sequence and inner sequence
tagggaagagaaggacatatgatgcaatcaggcacactgaccctctcagcacg

SEQ ID NO: 17912 - DNA, 53 bp, Artificial Sequence
  Description of Artificial Sequence: Synthetic hazel nut; 5' sequence and inner sequence
tagggaagagaaggacatatgatacgtgcggaacgtcgatcgctgccttgtcc

SEQ ID NO: 17913 - DNA, 53 bp, Artificial Sequence; identical to SEQ ID NO: 13869
  Description of Artificial Sequence: Synthetic hazel nut; 5' sequence and inner sequence

SEQ ID NO: 17914 - DNA, 53 bp, Artificial Sequence
  Description of Artificial Sequence: Synthetic hazel nut; 5' sequence and inner sequence
tagggaagagaaggacatatgatcggaccgaagagtgcacgtgctacgtaacg

SEQ ID NO: 17915 - DNA, 53 bp, Artificial Sequence; identical to SEQ ID NO: 1480
  Description of Artificial Sequence: Synthetic hazel nut; 5' sequence and inner sequence

SEQ ID NO: 17916 - DNA, 53 bp, Artificial Sequence; identical to SEQ ID NO: 5971
  Description of Artificial Sequence: Synthetic hazel nut; 5' sequence and inner sequence

SEQ ID NO: 17917 - DNA, 53 bp, Artificial Sequence
  Description of Artificial Sequence: Synthetic hazel nut; 5' sequence and inner sequence
tagggaagagaaggacatatgatggacgcgcatgaccgtcggatcgcgacaca

SEQ ID NO: 17918 - DNA, 53 bp, Artificial Sequence
  Description of Artificial Sequence: Synthetic hazel nut; 5' sequence and inner sequence
tagggaagagaaggacatatgatgcaacgcatgacgcaggccagcacttcgca

SEQ ID NO: 17919 - DNA, 53 bp, Artificial Sequence; identical to SEQ ID NO: 1903
  Description of Artificial Sequence: Synthetic hazel nut; 5' sequence and inner sequence

SEQ ID NO: 17920 - DNA, 53 bp, Artificial Sequence; identical to SEQ ID NO: 5552
  Description of Artificial Sequence: Synthetic hazel nut; 5' sequence and inner sequence

SEQ ID NO: 17921 - DNA, 53 bp, Artificial Sequence; identical to SEQ ID NO: 1531
  Description of Artificial Sequence: Synthetic hazel nut; 5' sequence and inner sequence

SEQ ID NO: 17922 - DNA, 53 bp, Artificial Sequence; identical to SEQ ID NO: 9756
  Description of Artificial Sequence: Synthetic hazel nut; 5' sequence and inner sequence

SEQ ID NO: 17923 - DNA, 53 bp, Artificial Sequence
  Description of Artificial Sequence: Synthetic hazel nut; 5' sequence and inner sequence
tagggaagagaaggacatatgatggcacacgtgatggacgacgttcccgatgc

SEQ ID NO: 17924 - DNA, 53 bp, Artificial Sequence; identical to SEQ ID NO: 1679
  Description of Artificial Sequence: Synthetic hazel nut; 5' sequence and inner sequence

SEQ ID NO: 17925 - DNA, 53 bp, Artificial Sequence
  Description of Artificial Sequence: Synthetic hazel nut; 5' sequence and inner sequence
tagggaagagaaggacatatgatcgcgcagtgaccgcatgttccctcgtcaca

SEQ ID NO: 17926 - DNA, 53 bp, Artificial Sequence
  Description of Artificial Sequence: Synthetic hazel nut; 5' sequence and inner sequence
tagggaagagaaggacatatgatgaccacgcgcatgaccgtacgtgcaccatg

SEQ ID NO: 17927 - DNA, 48 bp, Artificial Sequence
  Description of Artificial Sequence: Synthetic hazel nut; 5' sequence and inner sequence
tagggaagagaaggacatatgatcgcaccgtcaagcaggcacgtgtca

SEQ ID NO: 17928 - DNA, 53 bp, Artificial Sequence
  Description of Artificial Sequence: Synthetic hazel nut; 5' sequence and inner sequence
tagggaagagaaggacatatgatagcgtggcacggtacggatacgttggcaca

SEQ ID NO: 17929 - DNA, 53 bp, Artificial Sequence; identical to SEQ ID NO: 9968
  Description of Artificial Sequence: Synthetic hazel nut; 5' sequence and inner sequence

SEQ ID NO: 17930 - DNA, 53 bp, Artificial Sequence
  Description of Artificial Sequence: Synthetic hazel nut; 5' sequence and inner sequence
tagggaagagaaggacatatgatgcatcatgaccctcactgaccgcatgcgcg

SEQ ID NO: 17931 - DNA, 53 bp, Artificial Sequence
  Description of Artificial Sequence: Synthetic hazel nut; 5' sequence and inner sequence
tagggaagagaaggacatatgatcgcaccgtcgatacgtcatgcaggctgaca

SEQ ID NO: 17932 - DNA, 53 bp, Artificial Sequence
  Description of Artificial Sequence: Synthetic hazel nut; 5' sequence and inner sequence
tagggaagagaaggacatatgatcgaccacgtggcatgacggcgtgcgacgta

SEQ ID NO: 17933 - DNA, 53 bp, Artificial Sequence
  Description of Artificial Sequence: Synthetic hazel nut; 5' sequence and inner sequence
tagggaagagaaggacatatgatcgtcgcgacgagcaaggtgaacgtgtcccg

SEQ ID NO: 17934 - DNA, 53 bp, Artificial Sequence; identical to SEQ ID NO: 5384
  Description of Artificial Sequence: Synthetic hazel nut; 5' sequence and inner sequence

SEQ ID NO: 17935 - DNA, 53 bp, Artificial Sequence; identical to SEQ ID NO: 1655
  Description of Artificial Sequence: Synthetic hazel nut; 5' sequence and inner sequence

SEQ ID NO: 17936 - DNA, 53 bp, Artificial Sequence
  Description of Artificial Sequence: Synthetic hazel nut; 5' sequence and inner sequence
tagggaagagaaggacatatgatgcagcacggcatgtgacgtattcccgctgc

SEQ ID NO: 17937 - DNA, 53 bp, Artificial Sequence
  Description of Artificial Sequence: Synthetic hazel nut; 5' sequence and inner sequence
tagggaagagaaggacatatgatacatgcgcatcgagcctacctgtacgcaca

SEQ ID NO: 17938 - DNA, 53 bp, Artificial Sequence
  Description of Artificial Sequence: Synthetic hazel nut; 5' sequence and inner sequence
tagggaagagaaggacatatgatacacgacatgaggacgatacgcaccgtgcc

SEQ ID NO: 17939 - DNA, 53 bp, Artificial Sequence; identical to SEQ ID NO: 1441
  Description of Artificial Sequence: Synthetic hazel nut; 5' sequence and inner sequence

SEQ ID NO: 17940 - DNA, 49 bp, Artificial Sequence
  Description of Artificial Sequence: Synthetic hazel nut; 5' sequence and inner sequence
tagggaagagaaggacatatgatgcatgggtgcgatcgtaacgcgtggt

SEQ ID NO: 17941 - DNA, 53 bp, Artificial Sequence
  Description of Artificial Sequence: Synthetic hazel nut; 5' sequence and inner sequence
tagggaagagaaggacatatgatgcatcacaacatcatgccgtgatctgcaca

SEQ ID NO: 17942 - DNA, 53 bp, Artificial Sequence
  Description of Artificial Sequence: Synthetic hazel nut; 5' sequence and inner sequence
tagggaagagaaggacatatgatgtcaccacgacgatgagcgccatgtcgacg

SEQ ID NO: 17943 - DNA, 53 bp, Artificial Sequence
  Description of Artificial Sequence: Synthetic hazel nut; 5' sequence and inner sequence
tagggaagagaaggacatatgatcgtacggcacgcgacatgacatccgccatg

SEQ ID NO: 17944 - DNA, 53 bp, Artificial Sequence
  Description of Artificial Sequence: Synthetic hazel nut; 5' sequence and inner sequence
tagggaagagaaggacatatgatgcacacagcacgatgactgcactgatcggt

SEQ ID NO: 17945 - DNA, 53 bp, Artificial Sequence; identical to SEQ ID NO: 5861
  Description of Artificial Sequence: Synthetic hazel nut; 5' sequence and inner sequence

SEQ ID NO: 17946 - DNA, 53 bp, Artificial Sequence; identical to SEQ ID NO: 5611
  Description of Artificial Sequence: Synthetic hazel nut; 5' sequence and inner sequence

SEQ ID NO: 17947 - DNA, 53 bp, Artificial Sequence; identical to SEQ ID NO: 1570
  Description of Artificial Sequence: Synthetic hazel nut; 5' sequence and inner sequence

SEQ ID NO: 17948 - DNA, 53 bp, Artificial Sequence
  Description of Artificial Sequence: Synthetic hazel nut; 5' sequence and inner sequence
tagggaagagaaggacatatgatgcgtgtcagcaatacgtcctcatctgcacg

SEQ ID NO: 17949 - DNA, 53 bp, Artificial Sequence
  Description of Artificial Sequence: Synthetic hazel nut; 5' sequence and inner sequence
tagggaagagaaggacatatgatcgtaccgcaagcgacgtgtccgtgccgtga

SEQ ID NO: 17950 - DNA, 53 bp, Artificial Sequence
  Description of Artificial Sequence: Synthetic hazel nut; 5' sequence and inner sequence
tagggaagagaaggacatatgatcacgcagtgacgcatgtgcaccacgacgcg

SEQ ID NO: 17951 - DNA, 53 bp, Artificial Sequence
  Description of Artificial Sequence: Synthetic hazel nut; 5' sequence and inner sequence
tagggaagagaaggacatatgatggcacaccacaggtacgcatcgcctcggtc

SEQ ID NO: 17952 - DNA, 53 bp, Artificial Sequence
  Description of Artificial Sequence: Synthetic hazel nut; 5' sequence and inner sequence
tagggaagagaaggacatatgatcgtaccacgcgaggacaagcatgggtcacg

SEQ ID NO: 17953 - DNA, 53 bp, Artificial Sequence
  Description of Artificial Sequence: Synthetic hazel nut; 5' sequence and inner sequence
tagggaagagaaggacatatgatcaacgcgcaacggtgaggtaggcctgagca

SEQ ID NO: 17954 - DNA, 53 bp, Artificial Sequence
  Description of Artificial Sequence: Synthetic hazel nut; 5' sequence and inner sequence
tagggaagagaaggacatatgatgcacaaggcgataccgtccgcaacgccacg

SEQ ID NO: 17955 - DNA, 53 bp, Artificial Sequence
  Description of Artificial Sequence: Synthetic hazel nut; 5' sequence and inner sequence
tagggaagagaaggacatatgatccgacgatgcagtgtggcgtaacgtgcatg

SEQ ID NO: 17956 - DNA, 53 bp, Artificial Sequence
  Description of Artificial Sequence: Synthetic hazel nut; 5' sequence and inner sequence
tagggaagagaaggacatatgatcgcaacgcaagatggtgcccgtcctgcacg

SEQ ID NO: 17957 - DNA, 53 bp, Artificial Sequence
  Description of Artificial Sequence: Synthetic hazel nut; 5' sequence and inner sequence
tagggaagagaaggacatatgattggacgcaacgaaacgtacgccacttcgcg

SEQ ID NO: 17958 - DNA, 53 bp, Artificial Sequence; identical to SEQ ID NO: 5254
  Description of Artificial Sequence: Synthetic hazel nut; 5' sequence and inner sequence

SEQ ID NO: 17959 - DNA, 54 bp, Artificial Sequence; identical to SEQ ID NO: 1652
  Description of Artificial Sequence: Synthetic hazel nut; 5' sequence and inner sequence

SEQ ID NO: 17960 - DNA, 53 bp, Artificial Sequence; identical to SEQ ID NO: 1784
  Description of Artificial Sequence: Synthetic hazel nut; 5' sequence and inner sequence

SEQ ID NO: 17961 - DNA, 53 bp, Artificial Sequence; identical to SEQ ID NO: 1601
  Description of Artificial Sequence: Synthetic hazel nut; 5' sequence and inner sequence

SEQ ID NO: 17962 - DNA, 53 bp, Artificial Sequence
  Description of Artificial Sequence: Synthetic hazel nut; 5' sequence and inner sequence
tagggaagagaaggacatatgatggcatgcgcgtaccatcgagggggcgtgga

SEQ ID NO: 17963 - DNA, 53 bp, Artificial Sequence; identical to SEQ ID NO: 1187
  Description of Artificial Sequence: Synthetic hazel nut; 5' sequence and inner sequence

SEQ ID NO: 17964 - DNA, 53 bp, Artificial Sequence
  Description of Artificial Sequence: Synthetic hazel nut; 5' sequence and inner sequence
tagggaagagaaggacatatgatgcacggaacgcaatgtacgtagcgtcgaca

SEQ ID NO: 17965 - DNA, 53 bp, Artificial Sequence
  Description of Artificial Sequence: Synthetic hazel nut; 5' sequence and inner sequence
tagggaagagaaggacatatgatacggcacggacactacggcatgtacgcata

SEQ ID NO: 17966 - DNA, 53 bp, Artificial Sequence
  Description of Artificial Sequence: Synthetic hazel nut; 5' sequence and inner sequence
tagggaagagaaggacatatgatcgtgacgcacatggcacacaccgctacgcg

SEQ ID NO: 17967 - DNA, 53 bp, Artificial Sequence; identical to SEQ ID NO: 1811
  Description of Artificial Sequence: Synthetic hazel nut; 5' sequence and inner sequence

SEQ ID NO: 17968 - DNA, 53 bp, Artificial Sequence
  Description of Artificial Sequence: Synthetic hazel nut; 5' sequence and inner sequence
tagggaagagaaggacatatgatcctgcctcgtgcctggacgctccatgcgcg

SEQ ID NO: 17969 - DNA, 53 bp, Artificial Sequence; identical to SEQ ID NO: 5590
  Description of Artificial Sequence: Synthetic hazel nut; 5' sequence and inner sequence

SEQ ID NO: 17970 - DNA, 53 bp, Artificial Sequence
  Description of Artificial Sequence: Synthetic hazel nut; 5' sequence and inner sequence
tagggaagagaaggacatatgatgcgcatgcaaggcacggtacgtactgcgca

SEQ ID NO: 17971 - DNA, 53 bp, Artificial Sequence; identical to SEQ ID NO: 1768
  Description of Artificial Sequence: Synthetic hazel nut; 5' sequence and inner sequence

SEQ ID NO: 17972 - DNA, 53 bp, Artificial Sequence; identical to SEQ ID NO: 1677
  Description of Artificial Sequence: Synthetic hazel nut; 5' sequence and inner sequence

SEQ ID NO: 17973 - DNA, 53 bp, Artificial Sequence
  Description of Artificial Sequence: Synthetic hazel nut; 5' sequence and inner sequence
tagggaagagaaggacatatgatggccgaacggacgtacgtgcacgcagcccg

SEQ ID NO: 17974 - DNA, 53 bp, Artificial Sequence; identical to SEQ ID NO: 1574
  Description of Artificial Sequence: Synthetic hazel nut; 5' sequence and inner sequence

SEQ ID NO: 17975 - DNA, 53 bp, Artificial Sequence
  Description of Artificial Sequence: Synthetic hazel nut; 5' sequence and inner sequence
tagggaagagaaggacatatgatcgatggccgaacgaagcacgttgctacgcg

SEQ ID NO: 17976 - DNA, 53 bp, Artificial Sequence
  Description of Artificial Sequence: Synthetic hazel nut; 5' sequence and inner sequence
tagggaagagaaggacatatgatccgtcacatggatcggacctgatgcgcacc

SEQ ID NO: 17977 - DNA, 53 bp, Artificial Sequence; identical to SEQ ID NO: 1341
  Description of Artificial Sequence: Synthetic hazel nut; 5' sequence and inner sequence

SEQ ID NO: 17978 - DNA, 53 bp, Artificial Sequence
  Description of Artificial Sequence: Synthetic hazel nut; 5' sequence and inner sequence
tagggaagagaaggacatatgatcgtgacacgaacgcgatgtacgatgcgaca

SEQ ID NO: 17979 - DNA, 53 bp, Artificial Sequence
  Description of Artificial Sequence: Synthetic hazel nut; 5' sequence and inner sequence
tagggaagagaaggacatatgatacgatgcggcatacgtacgctacgtggcca

SEQ ID NO: 17980 - DNA, 53 bp, Artificial Sequence
  Description of Artificial Sequence: Synthetic hazel nut; 5' sequence and inner sequence
tagggaagagaaggacatatgatcgtgccgccaccctgaccgatgcgtggtga

SEQ ID NO: 17981 - DNA, 53 bp, Artificial Sequence; identical to SEQ ID NO: 1555
  Description of Artificial Sequence: Synthetic hazel nut; 5' sequence and inner sequence

SEQ ID NO: 17982 - DNA, 53 bp, Artificial Sequence
  Description of Artificial Sequence: Synthetic hazel nut; 5' sequence and inner sequence
tagggaagagaaggacatatgatggcatgggatgaacgaggcatgatgcgtca

SEQ ID NO: 17983 - DNA, 53 bp, Artificial Sequence; identical to SEQ ID NO: 1403
  Description of Artificial Sequence: Synthetic hazel nut; 5' sequence and inner sequence

SEQ ID NO: 17984 - DNA, 53 bp, Artificial Sequence
  Description of Artificial Sequence: Synthetic hazel nut; 5' sequence and inner sequence
tagggaagagaaggacatatgatccgtgcgcatgaacggtatggtgcttcgtg

SEQ ID NO: 17985 - DNA, 53 bp, Artificial Sequence
  Description of Artificial Sequence: Synthetic hazel nut; 5' sequence and inner sequence
tagggaagagaaggacatatgatgcgtgtgcgtacgatgacctgcgatgcgcc

SEQ ID NO: 17986 - DNA, 53 bp, Artificial Sequence
  Description of Artificial Sequence: Synthetic hazel nut; 5' sequence and inner sequence
tagggaagagaaggacatatgatgcgtgcgatgaccggatcgtgccatgcgga

SEQ ID NO: 17987 - DNA, 53 bp, Artificial Sequence
  Description of Artificial Sequence: Synthetic hazel nut; 5' sequence and inner sequence
tagggaagagaaggacatatgattgacagcatggccaaacgacatcgtgcaca

SEQ ID NO: 17988 - DNA, 53 bp, Artificial Sequence
  Description of Artificial Sequence: Synthetic hazel nut; 5' sequence and inner sequence
tagggaagagaaggacatatgatgcaatgcacacgtacgaccttcgcgccacg

SEQ ID NO: 17989 - DNA, 53 bp, Artificial Sequence
  Description of Artificial Sequence: Synthetic hazel nut; 5' sequence and inner sequence
tagggaagagaaggacatatgatggcaacacggtgcacatcgggtacatcgcg

SEQ ID NO: 17990 - DNA, 53 bp, Artificial Sequence; identical to SEQ ID NO: 1799
  Description of Artificial Sequence: Synthetic hazel nut; 5' sequence and inner sequence

SEQ ID NO: 17991 - DNA, 53 bp, Artificial Sequence; identical to SEQ ID NO: 9579
  Description of Artificial Sequence: Synthetic hazel nut; 5' sequence and inner sequence

SEQ ID NO: 17992 - DNA, 53 bp, Artificial Sequence; identical to SEQ ID NO: 5761
  Description of Artificial Sequence: Synthetic hazel nut; 5' sequence and inner sequence

SEQ ID NO: 17993 - DNA, 53 bp, Artificial Sequence
  Description of Artificial Sequence: Synthetic hazel nut; 5' sequence and inner sequence
tagggaagagaaggacatatgatcacgcagggaacgtatccgtccttgccgcg

SEQ ID NO: 17994 - DNA, 54 bp, Artificial Sequence; identical to SEQ ID NO: 1971
  Description of Artificial Sequence: Synthetic hazel nut; 5' sequence and inner sequence

SEQ ID NO: 17995 - DNA, 53 bp, Artificial Sequence; identical to SEQ ID NO: 1621
  Description of Artificial Sequence: Synthetic hazel nut; 5' sequence and inner sequence

SEQ ID NO: 17996 - DNA, 53 bp, Artificial Sequence; identical to SEQ ID NO: 1901
  Description of Artificial Sequence: Synthetic hazel nut; 5' sequence and inner sequence

SEQ ID NO: 17997 - DNA, 53 bp, Artificial Sequence
  Description of Artificial Sequence: Synthetic hazel nut; 5' sequence and inner sequence
tagggaagagaaggacatatgatgcacacataccgttacgttgtggtgcacca

SEQ ID NO: 17998 - DNA, 53 bp, Artificial Sequence; identical to SEQ ID NO: 1493
  Description of Artificial Sequence: Synthetic hazel nut; 5' sequence and inner sequence

SEQ ID NO: 17999 - DNA, 53 bp, Artificial Sequence
  Description of Artificial Sequence: Synthetic hazel nut; 5' sequence and inner sequence
tagggaagagaaggacatatgatggcatgcgttgaacgaggcatgatgcgtca

SEQ ID NO: 18000 - DNA, 53 bp, Artificial Sequence
  Description of Artificial Sequence: Synthetic hazel nut; 5' sequence and inner sequence
tagggaagagaaggacatatgatgcaaccacagcacatcgacgccctcgcacc

SEQ ID NO: 18001 - DNA, 53 bp, Artificial Sequence
  Description of Artificial Sequence: Synthetic hazel nut; 5' sequence and inner sequence
tagggaagagaaggacatatgatcacgacaagcacacatgtcctgcctgcacg

SEQ ID NO: 18002 - DNA, 53 bp, Artificial Sequence; identical to SEQ ID NO: 1891
  Description of Artificial Sequence: Synthetic hazel nut; 5' sequence and inner sequence

SEQ ID NO: 18003 - DNA, 53 bp, Artificial Sequence; identical to SEQ ID NO: 2003
  Description of Artificial Sequence: Synthetic hazel nut; inner sequence and 3' sequence

SEQ ID NO: 18004 - DNA, 53 bp, Artificial Sequence; identical to SEQ ID NO: 2010
  Description of Artificial Sequence: Synthetic hazel nut; inner sequence and 3' sequence

SEQ ID NO: 18005 - DNA, 53 bp, Artificial Sequence; identical to SEQ ID NO: 2004
  Description of Artificial Sequence: Synthetic hazel nut; inner sequence and 3' sequence

SEQ ID NO: 18006 - DNA, 53 bp, Artificial Sequence; identical to SEQ ID NO: 2008
  Description of Artificial Sequence: Synthetic hazel nut; inner sequence and 3' sequence

SEQ ID NO: 18007 - DNA, 53 bp, Artificial Sequence; identical to SEQ ID NO: 2006
  Description of Artificial Sequence: Synthetic hazel nut; inner sequence and 3' sequence

SEQ ID NO: 18008 - DNA, 53 bp, Artificial Sequence; identical to SEQ ID NO: 2005
  Description of Artificial Sequence: Synthetic hazel nut; inner sequence and 3' sequence

SEQ ID NO: 18009 - DNA, 53 bp, Artificial Sequence; identical to SEQ ID NO: 2020
  Description of Artificial Sequence: Synthetic hazel nut; inner sequence and 3' sequence

SEQ ID NO: 18010 - DNA, 53 bp, Artificial Sequence; identical to SEQ ID NO: 2036
  Description of Artificial Sequence: Synthetic hazel nut; inner sequence and 3' sequence

SEQ ID NO: 18011 - DNA, 53 bp, Artificial Sequence; identical to SEQ ID NO: 2009
  Description of Artificial Sequence: Synthetic hazel nut; inner sequence and 3' sequence

SEQ ID NO: 18012 - DNA, 53 bp, Artificial Sequence; identical to SEQ ID NO: 2007
  Description of Artificial Sequence: Synthetic hazel nut; inner sequence and 3' sequence

SEQ ID NO: 18013 - DNA, 53 bp, Artificial Sequence; identical to SEQ ID NO: 2012
  Description of Artificial Sequence: Synthetic hazel nut; inner sequence and 3' sequence

SEQ ID NO: 18014 - DNA, 53 bp, Artificial Sequence; identical to SEQ ID NO: 2040
  Description of Artificial Sequence: Synthetic hazel nut; inner sequence and 3' sequence

SEQ ID NO: 18015 - DNA, 53 bp, Artificial Sequence; identical to SEQ ID NO: 2011
  Description of Artificial Sequence: Synthetic hazel nut; inner sequence and 3' sequence

SEQ ID NO: 18016 - DNA, 53 bp, Artificial Sequence; identical to SEQ ID NO: 2045
  Description of Artificial Sequence: Synthetic hazel nut; inner sequence and 3' sequence

SEQ ID NO: 18017 - DNA, 53 bp, Artificial Sequence; identical to SEQ ID NO: 2023
  Description of Artificial Sequence: Synthetic hazel nut; inner sequence and 3' sequence

SEQ ID NO: 18018 - DNA, 53 bp, Artificial Sequence; identical to SEQ ID NO: 2030
  Description of Artificial Sequence: Synthetic hazel nut; inner sequence and 3' sequence

SEQ ID NO: 18019 - DNA, 53 bp, Artificial Sequence; identical to SEQ ID NO: 2022
  Description of Artificial Sequence: Synthetic hazel nut; inner sequence and 3' sequence

SEQ ID NO: 18020 - DNA, 53 bp, Artificial Sequence; identical to SEQ ID NO: 2108
  Description of Artificial Sequence: Synthetic hazel nut; inner sequence and 3' sequence

SEQ ID NO: 18021 - DNA, 53 bp, Artificial Sequence; identical to SEQ ID NO: 2021
  Description of Artificial Sequence: Synthetic hazel nut; inner sequence and 3' sequence

SEQ ID NO: 18022 - DNA, 53 bp, Artificial Sequence; identical to SEQ ID NO: 2014
  Description of Artificial Sequence: Synthetic hazel nut; inner sequence and 3' sequence

SEQ ID NO: 18023 - DNA, 53 bp, Artificial Sequence; identical to SEQ ID NO: 2044
  Description of Artificial Sequence: Synthetic hazel nut; inner sequence and 3' sequence

SEQ ID NO: 18024 - DNA, 53 bp, Artificial Sequence; identical to SEQ ID NO: 2129
  Description of Artificial Sequence: Synthetic hazel nut; inner sequence and 3' sequence

SEQ ID NO: 18025 - DNA, 53 bp, Artificial Sequence; identical to SEQ ID NO: 2028
  Description of Artificial Sequence: Synthetic hazel nut; inner sequence and 3' sequence

SEQ ID NO: 18026 - DNA, 53 bp, Artificial Sequence; identical to SEQ ID NO: 2041
  Description of Artificial Sequence: Synthetic hazel nut; inner sequence and 3' sequence

SEQ ID NO: 18027 - DNA, 53 bp, Artificial Sequence; identical to SEQ ID NO: 2033
  Description of Artificial Sequence: Synthetic hazel nut; inner sequence and 3' sequence

SEQ ID NO: 18028 - DNA, 52 bp, Artificial Sequence; identical to SEQ ID NO: 2193
  Description of Artificial Sequence: Synthetic hazel nut; inner sequence and 3' sequence

SEQ ID NO: 18029 - DNA, 53 bp, Artificial Sequence; identical to SEQ ID NO: 2079
  Description of Artificial Sequence: Synthetic hazel nut; inner sequence and 3' sequence

SEQ ID NO: 18030 - DNA, 53 bp, Artificial Sequence; identical to SEQ ID NO: 2052
  Description of Artificial Sequence: Synthetic hazel nut; inner sequence and 3' sequence

SEQ ID NO: 18031 - DNA, 53 bp, Artificial Sequence; identical to SEQ ID NO: 2046
  Description of Artificial Sequence: Synthetic hazel nut; inner sequence and 3' sequence

SEQ ID NO: 18032 - DNA, 53 bp, Artificial Sequence; identical to SEQ ID NO: 2016
  Description of Artificial Sequence: Synthetic hazel nut; inner sequence and 3' sequence

SEQ ID NO: 18033 - DNA, 53 bp, Artificial Sequence; identical to SEQ ID NO: 2060
  Description of Artificial Sequence: Synthetic hazel nut; inner sequence and 3' sequence

SEQ ID NO: 18034 - DNA, 53 bp, Artificial Sequence; identical to SEQ ID NO: 2017
  Description of Artificial Sequence: Synthetic hazel nut; inner sequence and 3' sequence

SEQ ID NO: 18035 - DNA, 53 bp, Artificial Sequence; identical to SEQ ID NO: 2013
  Description of Artificial Sequence: Synthetic hazel nut; inner sequence and 3' sequence

SEQ ID NO: 18036 - DNA, 53 bp, Artificial Sequence; identical to SEQ ID NO: 2025
  Description of Artificial Sequence: Synthetic hazel nut; inner sequence and 3' sequence

SEQ ID NO: 18037 - DNA, 53 bp, Artificial Sequence; identical to SEQ ID NO: 2077
  Description of Artificial Sequence: Synthetic hazel nut; inner sequence and 3' sequence

SEQ ID NO: 18038 - DNA, 53 bp, Artificial Sequence; identical to SEQ ID NO: 2018
  Description of Artificial Sequence: Synthetic hazel nut; inner sequence and 3' sequence

SEQ ID NO: 18039 - DNA, 53 bp, Artificial Sequence; identical to SEQ ID NO: 2051
  Description of Artificial Sequence: Synthetic hazel nut; inner sequence and 3' sequence

SEQ ID NO: 18040 - DNA, 53 bp, Artificial Sequence; identical to SEQ ID NO: 2015
  Description of Artificial Sequence: Synthetic hazel nut; inner sequence and 3' sequence

SEQ ID NO: 18041 - DNA, 53 bp, Artificial Sequence; identical to SEQ ID NO: 2049
  Description of Artificial Sequence: Synthetic hazel nut; inner sequence and 3' sequence

SEQ ID NO: 18042 - DNA, 53 bp, Artificial Sequence; identical to SEQ ID NO: 2050
  Description of Artificial Sequence: Synthetic hazel nut; inner sequence and 3' sequence

SEQ ID NO: 18043 - DNA, 53 bp, Artificial Sequence; identical to SEQ ID NO: 2064
  Description of Artificial Sequence: Synthetic hazel nut; inner sequence and 3' sequence

SEQ ID NO: 18044 - DNA, 53 bp, Artificial Sequence; identical to SEQ ID NO: 2053
  Description of Artificial Sequence: Synthetic hazel nut; inner sequence and 3' sequence

SEQ ID NO: 18045 - DNA, 53 bp, Artificial Sequence; identical to SEQ ID NO: 2098
  Description of Artificial Sequence: Synthetic hazel nut; inner sequence and 3' sequence

SEQ ID NO: 18046 - DNA, 53 bp, Artificial Sequence; identical to SEQ ID NO: 2088
  Description of Artificial Sequence: Synthetic hazel nut; inner sequence and 3' sequence

SEQ ID NO: 18047 - DNA, 53 bp, Artificial Sequence; identical to SEQ ID NO: 2074
  Description of Artificial Sequence: Synthetic hazel nut; inner sequence and 3' sequence

SEQ ID NO: 18048 - DNA, 53 bp, Artificial Sequence; identical to SEQ ID NO: 2247
  Description of Artificial Sequence: Synthetic hazel nut; inner sequence and 3' sequence

SEQ ID NO: 18049 - DNA, 53 bp, Artificial Sequence; identical to SEQ ID NO: 2037
  Description of Artificial Sequence: Synthetic hazel nut; inner sequence and 3' sequence

SEQ ID NO: 18050 - DNA, 53 bp, Artificial Sequence; identical to SEQ ID NO: 2096
  Description of Artificial Sequence: Synthetic hazel nut; inner sequence and 3' sequence

SEQ ID NO: 18051 - DNA, 53 bp, Artificial Sequence; identical to SEQ ID NO: 2131
  Description of Artificial Sequence: Synthetic hazel nut; inner sequence and 3' sequence

SEQ ID NO: 18052 - DNA, 53 bp, Artificial Sequence; identical to SEQ ID NO: 2178
  Description of Artificial Sequence: Synthetic hazel nut; inner sequence and 3' sequence

SEQ ID NO: 18053 - DNA, 53 bp, Artificial Sequence; identical to SEQ ID NO: 2066
  Description of Artificial Sequence: Synthetic hazel nut; inner sequence and 3' sequence

SEQ ID NO: 18054 - DNA, 53 bp, Artificial Sequence; identical to SEQ ID NO: 2081
  Description of Artificial Sequence: Synthetic hazel nut; inner sequence and 3' sequence

SEQ ID NO: 18055 - DNA, 53 bp, Artificial Sequence; identical to SEQ ID NO: 2115
  Description of Artificial Sequence: Synthetic hazel nut; inner sequence and 3' sequence

SEQ ID NO: 18056 - DNA, 53 bp, Artificial Sequence; identical to SEQ ID NO: 2138
  Description of Artificial Sequence: Synthetic hazel nut; inner sequence and 3' sequence

SEQ ID NO: 18057 - DNA, 53 bp, Artificial Sequence; identical to SEQ ID NO: 2034
  Description of Artificial Sequence: Synthetic hazel nut; inner sequence and 3' sequence

SEQ ID NO: 18058 - DNA, 53 bp, Artificial Sequence; identical to SEQ ID NO: 2073
  Description of Artificial Sequence: Synthetic hazel nut; inner sequence and 3' sequence

SEQ ID NO: 18059 - DNA, 52 bp, Artificial Sequence; identical to SEQ ID NO: 2070
  Description of Artificial Sequence: Synthetic hazel nut; inner sequence and 3' sequence

SEQ ID NO: 18060 - DNA, 53 bp, Artificial Sequence; identical to SEQ ID NO: 2519
  Description of Artificial Sequence: Synthetic hazel nut; inner sequence and 3' sequence

SEQ ID NO: 18061 - DNA, 53 bp, Artificial Sequence; identical to SEQ ID NO: 2172
  Description of Artificial Sequence: Synthetic hazel nut; inner sequence and 3' sequence

SEQ ID NO: 18062 - DNA, 53 bp, Artificial Sequence; identical to SEQ ID NO: 2185
  Description of Artificial Sequence: Synthetic hazel nut; inner sequence and 3' sequence

SEQ ID NO: 18063 - DNA, 53 bp, Artificial Sequence; identical to SEQ ID NO: 2255
  Description of Artificial Sequence: Synthetic hazel nut; inner sequence and 3' sequence

SEQ ID NO: 18064 - DNA, 53 bp, Artificial Sequence; identical to SEQ ID NO: 2067
  Description of Artificial Sequence: Synthetic hazel nut; inner sequence and 3' sequence

SEQ ID NO: 18065 - DNA, 53 bp, Artificial Sequence; identical to SEQ ID NO: 2281
  Description of Artificial Sequence: Synthetic hazel nut; inner sequence and 3' sequence

SEQ ID NO: 18066 - DNA, 53 bp, Artificial Sequence; identical to SEQ ID NO: 2035
  Description of Artificial Sequence: Synthetic hazel nut; inner sequence and 3' sequence

SEQ ID NO: 18067 - DNA, 53 bp, Artificial Sequence; identical to SEQ ID NO: 2057
  Description of Artificial Sequence: Synthetic hazel nut; inner sequence and 3' sequence

SEQ ID NO: 18068 - DNA, 53 bp, Artificial Sequence; identical to SEQ ID NO: 2038
  Description of Artificial Sequence: Synthetic hazel nut; inner sequence and 3' sequence

SEQ ID NO: 18069 - DNA, 53 bp, Artificial Sequence; identical to SEQ ID NO: 2029
  Description of Artificial Sequence: Synthetic hazel nut; inner sequence and 3' sequence

SEQ ID NO: 18070 - DNA, 53 bp, Artificial Sequence; identical to SEQ ID NO: 2366
  Description of Artificial Sequence: Synthetic hazel nut; inner sequence and 3' sequence

SEQ ID NO: 18071 - DNA, 53 bp, Artificial Sequence; identical to SEQ ID NO: 2054
  Description of Artificial Sequence: Synthetic hazel nut; inner sequence and 3' sequence

SEQ ID NO: 18072 - DNA, 53 bp, Artificial Sequence; identical to SEQ ID NO: 2526
  Description of Artificial Sequence: Synthetic hazel nut; inner sequence and 3' sequence

SEQ ID NO: 18073 - DNA, 53 bp, Artificial Sequence; identical to SEQ ID NO: 2031
  Description of Artificial Sequence: Synthetic hazel nut; inner sequence and 3' sequence

SEQ ID NO: 18074 - DNA, 53 bp, Artificial Sequence; identical to SEQ ID NO: 2470
  Description of Artificial Sequence: Synthetic hazel nut; inner sequence and 3' sequence

SEQ ID NO: 18075 - DNA, 53 bp, Artificial Sequence; identical to SEQ ID NO: 2090
  Description of Artificial Sequence: Synthetic hazel nut; inner sequence and 3' sequence

SEQ ID NO: 18076 - DNA, 53 bp, Artificial Sequence; identical to SEQ ID NO: 2285
  Description of Artificial Sequence: Synthetic hazel nut; inner sequence and 3' sequence

SEQ ID NO: 18077 - DNA, 53 bp, Artificial Sequence; identical to SEQ ID NO: 2032
  Description of Artificial Sequence: Synthetic hazel nut; inner sequence and 3' sequence

SEQ ID NO: 18078 - DNA, 53 bp, Artificial Sequence; identical to SEQ ID NO: 2055
  Description of Artificial Sequence: Synthetic hazel nut; inner sequence and 3' sequence

SEQ ID NO: 18079 - DNA, 53 bp, Artificial Sequence; identical to SEQ ID NO: 2042
  Description of Artificial Sequence: Synthetic hazel nut; inner sequence and 3' sequence

SEQ ID NO: 18080 - DNA, 53 bp, Artificial Sequence; identical to SEQ ID NO: 2080
  Description of Artificial Sequence: Synthetic hazel nut; inner sequence and 3' sequence

SEQ ID NO: 18081 - DNA, 53 bp, Artificial Sequence; identical to SEQ ID NO: 2061
  Description of Artificial Sequence: Synthetic hazel nut; inner sequence and 3' sequence

SEQ ID NO: 18082 - DNA, 53 bp, Artificial Sequence; identical to SEQ ID NO: 2059
  Description of Artificial Sequence: Synthetic hazel nut; inner sequence and 3' sequence

SEQ ID NO: 18083 - DNA, 53 bp, Artificial Sequence; identical to SEQ ID NO: 2219
  Description of Artificial Sequence: Synthetic hazel nut; inner sequence and 3' sequence

SEQ ID NO: 18084 - DNA, 53 bp, Artificial Sequence; identical to SEQ ID NO: 2144
  Description of Artificial Sequence: Synthetic hazel nut; inner sequence and 3' sequence

SEQ ID NO: 18085 - DNA, 53 bp, Artificial Sequence; identical to SEQ ID NO: 2102
  Description of Artificial Sequence: Synthetic hazel nut; inner sequence and 3' sequence

SEQ ID NO: 18086 - DNA, 53 bp, Artificial Sequence; identical to SEQ ID NO: 6356
  Description of Artificial Sequence: Synthetic hazel nut; inner sequence and 3' sequence

SEQ ID NO: 18087 - DNA, 53 bp, Artificial Sequence; identical to SEQ ID NO: 2048
  Description of Artificial Sequence: Synthetic hazel nut; inner sequence and 3' sequence

SEQ ID NO: 18088 - DNA, 53 bp, Artificial Sequence; identical to SEQ ID NO: 2024
  Description of Artificial Sequence: Synthetic hazel nut; inner sequence and 3' sequence

SEQ ID NO: 18089 - DNA, 53 bp, Artificial Sequence; identical to SEQ ID NO: 2203
  Description of Artificial Sequence: Synthetic hazel nut; inner sequence and 3' sequence

SEQ ID NO: 18090 - DNA, 53 bp, Artificial Sequence; identical to SEQ ID NO: 2019
  Description of Artificial Sequence: Synthetic hazel nut; inner sequence and 3' sequence

SEQ ID NO: 18091 - DNA, 53 bp, Artificial Sequence; identical to SEQ ID NO: 2188
  Description of Artificial Sequence: Synthetic hazel nut; inner sequence and 3' sequence

SEQ ID NO: 18092 - DNA, 53 bp, Artificial Sequence; identical to SEQ ID NO: 2151
  Description of Artificial Sequence: Synthetic hazel nut; inner sequence and 3' sequence

SEQ ID NO: 18093 - DNA, 53 bp, Artificial Sequence; identical to SEQ ID NO: 2062
  Description of Artificial Sequence: Synthetic hazel nut; inner sequence and 3' sequence

SEQ ID NO: 18094 - DNA, 53 bp, Artificial Sequence; identical to SEQ ID NO: 2152
  Description of Artificial Sequence: Synthetic hazel nut; inner sequence and 3' sequence

SEQ ID NO: 18095 - DNA, 53 bp, Artificial Sequence; identical to SEQ ID NO: 6469
  Description of Artificial Sequence: Synthetic hazel nut; inner sequence and 3' sequence

SEQ ID NO: 18096 - DNA, 53 bp, Artificial Sequence; identical to SEQ ID NO: 2111
  Description of Artificial Sequence: Synthetic hazel nut; inner sequence and 3' sequence

SEQ ID NO: 18097 - DNA, 53 bp, Artificial Sequence; identical to SEQ ID NO: 2063
  Description of Artificial Sequence: Synthetic hazel nut; inner sequence and 3' sequence

SEQ ID NO: 18098 - DNA, 53 bp, Artificial Sequence; identical to SEQ ID NO: 2084
  Description of Artificial Sequence: Synthetic hazel nut; inner sequence and 3' sequence

SEQ ID NO: 18099 - DNA, 53 bp, Artificial Sequence; identical to SEQ ID NO: 2613
  Description of Artificial Sequence: Synthetic hazel nut; inner sequence and 3' sequence

SEQ ID NO: 18100 - DNA, 53 bp, Artificial Sequence; identical to SEQ ID NO: 2230
  Description of Artificial Sequence: Synthetic hazel nut; inner sequence and 3' sequence

SEQ ID NO: 18101 - DNA, 53 bp, Artificial Sequence; identical to SEQ ID NO: 2097
  Description of Artificial Sequence: Synthetic hazel nut; inner sequence and 3' sequence

SEQ ID NO: 18102 - DNA, 53 bp, Artificial Sequence; identical to SEQ ID NO: 2195
  Description of Artificial Sequence: Synthetic hazel nut; inner sequence and 3' sequence

SEQ ID NO: 18103 - DNA, 53 bp, Artificial Sequence; identical to SEQ ID NO: 2229
  Description of Artificial Sequence: Synthetic hazel nut; inner sequence and 3' sequence

SEQ ID NO: 18104 - DNA, 53 bp, Artificial Sequence; identical to SEQ ID NO: 2136
  Description of Artificial Sequence: Synthetic hazel nut; inner sequence and 3' sequence

SEQ ID NO: 18105 - DNA, 53 bp, Artificial Sequence; identical to SEQ ID NO: 2197
  Description of Artificial Sequence: Synthetic hazel nut; inner sequence and 3' sequence

SEQ ID NO: 18106 - DNA, 53 bp, Artificial Sequence; identical to SEQ ID NO: 2245
  Description of Artificial Sequence: Synthetic hazel nut; inner sequence and 3' sequence

SEQ ID NO: 18107 - DNA, 53 bp, Artificial Sequence; identical to SEQ ID NO: 2117
  Description of Artificial Sequence: Synthetic hazel nut; inner sequence and 3' sequence

SEQ ID NO: 18108 - DNA, 53 bp, Artificial Sequence; identical to SEQ ID NO: 2171
  Description of Artificial Sequence: Synthetic hazel nut; inner sequence and 3' sequence

SEQ ID NO: 18109 - DNA, 53 bp, Artificial Sequence; identical to SEQ ID NO: 2068
  Description of Artificial Sequence: Synthetic hazel nut; inner sequence and 3' sequence

SEQ ID NO: 18110 - DNA, 53 bp, Artificial Sequence; identical to SEQ ID NO: 2325
  Description of Artificial Sequence: Synthetic hazel nut; inner sequence and 3' sequence

SEQ ID NO: 18111 - DNA, 53 bp, Artificial Sequence; identical to SEQ ID NO: 2149
  Description of Artificial Sequence: Synthetic hazel nut; inner sequence and 3' sequence

SEQ ID NO: 18112 - DNA, 53 bp, Artificial Sequence; identical to SEQ ID NO: 2126
  Description of Artificial Sequence: Synthetic hazel nut; inner sequence and 3' sequence

SEQ ID NO: 18113 - DNA, 53 bp, Artificial Sequence; identical to SEQ ID NO: 2492
  Description of Artificial Sequence: Synthetic hazel nut; inner sequence and 3' sequence

SEQ ID NO: 18114 - DNA, 53 bp, Artificial Sequence; identical to SEQ ID NO: 2321
  Description of Artificial Sequence: Synthetic hazel nut; inner sequence and 3' sequence

SEQ ID NO: 18115 - DNA, 53 bp, Artificial Sequence; identical to SEQ ID NO: 2313
  Description of Artificial Sequence: Synthetic hazel nut; inner sequence and 3' sequence

SEQ ID NO: 18116 - DNA, 53 bp, Artificial Sequence; identical to SEQ ID NO: 2359
  Description of Artificial Sequence: Synthetic hazel nut; inner sequence and 3' sequence

SEQ ID NO: 18117 - DNA, 53 bp, Artificial Sequence; identical to SEQ ID NO: 2065
  Description of Artificial Sequence: Synthetic hazel nut; inner sequence and 3' sequence

SEQ ID NO: 18118 - DNA, 53 bp, Artificial Sequence; identical to SEQ ID NO: 2112
  Description of Artificial Sequence: Synthetic hazel nut; inner sequence and 3' sequence

SEQ ID NO: 18119 - DNA, 53 bp, Artificial Sequence; identical to SEQ ID NO: 2164
  Description of Artificial Sequence: Synthetic hazel nut; inner sequence and 3' sequence

SEQ ID NO: 18120 - DNA, 53 bp, Artificial Sequence; identical to SEQ ID NO: 6289
  Description of Artificial Sequence: Synthetic hazel nut; inner sequence and 3' sequence

SEQ ID NO: 18121 - DNA, 53 bp, Artificial Sequence; identical to SEQ ID NO: 2103
  Description of Artificial Sequence: Synthetic hazel nut; inner sequence and 3' sequence

SEQ ID NO: 18122 - DNA, 53 bp, Artificial Sequence; identical to SEQ ID NO: 2181
  Description of Artificial Sequence: Synthetic hazel nut; inner sequence and 3' sequence

SEQ ID NO: 18123 - DNA, 53 bp, Artificial Sequence; identical to SEQ ID NO: 2269
  Description of Artificial Sequence: Synthetic hazel nut; inner sequence and 3' sequence

SEQ ID NO: 18124 - DNA, 53 bp, Artificial Sequence; identical to SEQ ID NO: 2610
  Description of Artificial Sequence: Synthetic hazel nut; inner sequence and 3' sequence

SEQ ID NO: 18125 - DNA, 53 bp, Artificial Sequence; identical to SEQ ID NO: 2929
  Description of Artificial Sequence: Synthetic hazel nut; inner sequence and 3' sequence

SEQ ID NO: 18126 - DNA, 53 bp, Artificial Sequence; identical to SEQ ID NO: 2276
  Description of Artificial Sequence: Synthetic hazel nut; inner sequence and 3' sequence

SEQ ID NO: 18127 - DNA, 53 bp, Artificial Sequence; identical to SEQ ID NO: 2275
  Description of Artificial Sequence: Synthetic hazel nut; inner sequence and 3' sequence

SEQ ID NO: 18128 - DNA, 53 bp, Artificial Sequence; identical to SEQ ID NO: 2039
  Description of Artificial Sequence: Synthetic hazel nut; inner sequence and 3' sequence

SEQ ID NO: 18129 - DNA, 53 bp, Artificial Sequence; identical to SEQ ID NO: 2552
  Description of Artificial Sequence: Synthetic hazel nut; inner sequence and 3' sequence

SEQ ID NO: 18130 - DNA, 53 bp, Artificial Sequence; identical to SEQ ID NO: 2071
  Description of Artificial Sequence: Synthetic hazel nut; inner sequence and 3' sequence

SEQ ID NO: 18131 - DNA, 53 bp, Artificial Sequence; identical to SEQ ID NO: 2043
  Description of Artificial Sequence: Synthetic hazel nut; inner sequence and 3' sequence

SEQ ID NO: 18132 - DNA, 53 bp, Artificial Sequence; identical to SEQ ID NO: 2093
  Description of Artificial Sequence: Synthetic hazel nut; inner sequence and 3' sequence

SEQ ID NO: 18133 - DNA, 53 bp, Artificial Sequence; identical to SEQ ID NO: 2072
  Description of Artificial Sequence: Synthetic hazel nut; inner sequence and 3' sequence

SEQ ID NO: 18134 - DNA, 53 bp, Artificial Sequence; identical to SEQ ID NO: 2086
  Description of Artificial Sequence: Synthetic hazel nut; inner sequence and 3' sequence

SEQ ID NO: 18135 - DNA, 53 bp, Artificial Sequence; identical to SEQ ID NO: 2207
  Description of Artificial Sequence: Synthetic hazel nut; inner sequence and 3' sequence

SEQ ID NO: 18136 - DNA, 53 bp, Artificial Sequence; identical to SEQ ID NO: 2706
  Description of Artificial Sequence: Synthetic hazel nut; inner sequence and 3' sequence

SEQ ID NO: 18137 - DNA, 53 bp, Artificial Sequence; identical to SEQ ID NO: 2095
  Description of Artificial Sequence: Synthetic hazel nut; inner sequence and 3' sequence

SEQ ID NO: 18138 - DNA, 53 bp, Artificial Sequence; identical to SEQ ID NO: 2076
  Description of Artificial Sequence: Synthetic hazel nut; inner sequence and 3' sequence

SEQ ID NO: 18139 - DNA, 53 bp, Artificial Sequence; identical to SEQ ID NO: 2209
  Description of Artificial Sequence: Synthetic hazel nut; inner sequence and 3' sequence

SEQ ID NO: 18140 - DNA, 53 bp, Artificial Sequence; identical to SEQ ID NO: 2047
  Description of Artificial Sequence: Synthetic hazel nut; inner sequence and 3' sequence

SEQ ID NO: 18141 - DNA, 53 bp, Artificial Sequence; identical to SEQ ID NO: 2099
  Description of Artificial Sequence: Synthetic hazel nut; inner sequence and 3' sequence

SEQ ID NO: 18142 - DNA, 53 bp, Artificial Sequence; identical to SEQ ID NO: 2956
  Description of Artificial Sequence: Synthetic hazel nut; inner sequence and 3' sequence

SEQ ID NO: 18143 - DNA, 53 bp, Artificial Sequence; identical to SEQ ID NO: 2078
  Description of Artificial Sequence: Synthetic hazel nut; inner sequence and 3' sequence

SEQ ID NO: 18144 - DNA, 53 bp, Artificial Sequence; identical to SEQ ID NO: 2174
  Description of Artificial Sequence: Synthetic hazel nut; inner sequence and 3' sequence

SEQ ID NO: 18145 - DNA, 53 bp, Artificial Sequence; identical to SEQ ID NO: 2134
  Description of Artificial Sequence: Synthetic hazel nut; inner sequence and 3' sequence

SEQ ID NO: 18146 - DNA, 53 bp, Artificial Sequence; identical to SEQ ID NO: 2069
  Description of Artificial Sequence: Synthetic hazel nut; inner sequence and 3' sequence

SEQ ID NO: 18147 - DNA, 53 bp, Artificial Sequence; identical to SEQ ID NO: 2140
  Description of Artificial Sequence: Synthetic hazel nut; inner sequence and 3' sequence

SEQ ID NO: 18148 - DNA, 53 bp, Artificial Sequence; identical to SEQ ID NO: 2082
  Description of Artificial Sequence: Synthetic hazel nut; inner sequence and 3' sequence

SEQ ID NO: 18149 - DNA, 53 bp, Artificial Sequence; identical to SEQ ID NO: 2110
  Description of Artificial Sequence: Synthetic hazel nut; inner sequence and 3' sequence

SEQ ID NO: 18150 - DNA, 53 bp, Artificial Sequence; identical to SEQ ID NO: 2283
  Description of Artificial Sequence: Synthetic hazel nut; inner sequence and 3' sequence

SEQ ID NO: 18151 - DNA, 53 bp, Artificial Sequence; identical to SEQ ID NO: 2058
  Description of Artificial Sequence: Synthetic hazel nut; inner sequence and 3' sequence

SEQ ID NO: 18152 - DNA, 53 bp, Artificial Sequence; identical to SEQ ID NO: 2314
  Description of Artificial Sequence: Synthetic hazel nut; inner sequence and 3' sequence

SEQ ID NO: 18153 - DNA, 53 bp, Artificial Sequence; identical to SEQ ID NO: 2190
  Description of Artificial Sequence: Synthetic hazel nut; inner sequence and 3' sequence

SEQ ID NO: 18154 - DNA, 53 bp, Artificial Sequence; identical to SEQ ID NO: 2121
  Description of Artificial Sequence: Synthetic hazel nut; inner sequence and 3' sequence

SEQ ID NO: 18155 - DNA, 53 bp, Artificial Sequence; identical to SEQ ID NO: 2663
  Description of Artificial Sequence: Synthetic hazel nut; inner sequence and 3' sequence

SEQ ID NO: 18156 - DNA, 53 bp, Artificial Sequence; identical to SEQ ID NO: 6659
  Description of Artificial Sequence: Synthetic hazel nut; inner sequence and 3' sequence

SEQ ID NO: 18157 - DNA, 53 bp, Artificial Sequence; identical to SEQ ID NO: 2120
  Description of Artificial Sequence: Synthetic hazel nut; inner sequence and 3' sequence

SEQ ID NO: 18158 - DNA, 53 bp, Artificial Sequence; identical to SEQ ID NO: 2092
  Description of Artificial Sequence: Synthetic hazel nut; inner sequence and 3' sequence

SEQ ID NO: 18159 - DNA, 53 bp, Artificial Sequence; identical to SEQ ID NO: 2579
  Description of Artificial Sequence: Synthetic hazel nut; inner sequence and 3' sequence

SEQ ID NO: 18160 - DNA, 53 bp, Artificial Sequence; identical to SEQ ID NO: 2182
  Description of Artificial Sequence: Synthetic hazel nut; inner sequence and 3' sequence

SEQ ID NO: 18161 - DNA, 53 bp, Artificial Sequence; identical to SEQ ID NO: 2200
  Description of Artificial Sequence: Synthetic hazel nut; inner sequence and 3' sequence

SEQ ID NO: 18162 - DNA, 53 bp, Artificial Sequence; identical to SEQ ID NO: 2100
  Description of Artificial Sequence: Synthetic hazel nut; inner sequence and 3' sequence

SEQ ID NO: 18163 - DNA, 53 bp, Artificial Sequence; identical to SEQ ID NO: 2458
  Description of Artificial Sequence: Synthetic hazel nut; inner sequence and 3' sequence

SEQ ID NO: 18164 - DNA, 53 bp, Artificial Sequence; identical to SEQ ID NO: 2232
  Description of Artificial Sequence: Synthetic hazel nut; inner sequence and 3' sequence

SEQ ID NO: 18165 - DNA, 53 bp, Artificial Sequence; identical to SEQ ID NO: 2246
  Description of Artificial Sequence: Synthetic hazel nut; inner sequence and 3' sequence

SEQ ID NO: 18166 - DNA, 53 bp, Artificial Sequence; identical to SEQ ID NO: 2465
  Description of Artificial Sequence: Synthetic hazel nut; inner sequence and 3' sequence

SEQ ID NO: 18167 - DNA, 53 bp, Artificial Sequence; identical to SEQ ID NO: 2311
  Description of Artificial Sequence: Synthetic hazel nut; inner sequence and 3' sequence

SEQ ID NO: 18168 - DNA, 53 bp, Artificial Sequence; identical to SEQ ID NO: 6272
  Description of Artificial Sequence: Synthetic hazel nut; inner sequence and 3' sequence

SEQ ID NO: 18169 - DNA, 53 bp, Artificial Sequence; identical to SEQ ID NO: 2266
  Description of Artificial Sequence: Synthetic hazel nut; inner sequence and 3' sequence

SEQ ID NO: 18170 - DNA, 53 bp, Artificial Sequence; identical to SEQ ID NO: 2184
  Description of Artificial Sequence: Synthetic hazel nut; inner sequence and 3' sequence

SEQ ID NO: 18171 - DNA, 53 bp, Artificial Sequence; identical to SEQ ID NO: 2762
  Description of Artificial Sequence: Synthetic hazel nut; inner sequence and 3' sequence

SEQ ID NO: 18172 - DNA, 53 bp, Artificial Sequence; identical to SEQ ID NO: 2567
  Description of Artificial Sequence: Synthetic hazel nut; inner sequence and 3' sequence

SEQ ID NO: 18173 - DNA, 53 bp, Artificial Sequence; identical to SEQ ID NO: 2520
  Description of Artificial Sequence: Synthetic hazel nut; inner sequence and 3' sequence

SEQ ID NO: 18174 - DNA, 53 bp, Artificial Sequence; identical to SEQ ID NO: 2353
  Description of Artificial Sequence: Synthetic hazel nut; inner sequence and 3' sequence

SEQ ID NO: 18175 - DNA, 53 bp, Artificial Sequence; identical to SEQ ID NO: 2367
  Description of Artificial Sequence: Synthetic hazel nut; inner sequence and 3' sequence

SEQ ID NO: 18176 - DNA, 53 bp, Artificial Sequence; identical to SEQ ID NO: 6240
  Description of Artificial Sequence: Synthetic hazel nut; inner sequence and 3' sequence

SEQ ID NO: 18177 - DNA, 53 bp, Artificial Sequence; identical to SEQ ID NO: 2194
  Description of Artificial Sequence: Synthetic hazel nut; inner sequence and 3' sequence

SEQ ID NO: 18178 - DNA, 53 bp, Artificial Sequence; identical to SEQ ID NO: 2154
  Description of Artificial Sequence: Synthetic hazel nut; inner sequence and 3' sequence

SEQ ID NO: 18179 - DNA, 53 bp, Artificial Sequence; identical to SEQ ID NO: 2026
  Description of Artificial Sequence: Synthetic hazel nut; inner sequence and 3' sequence

SEQ ID NO: 18180 - DNA, 53 bp, Artificial Sequence; identical to SEQ ID NO: 2240
  Description of Artificial Sequence: Synthetic hazel nut; inner sequence and 3' sequence

SEQ ID NO: 18181 - DNA, 53 bp, Artificial Sequence; identical to SEQ ID NO: 2290
  Description of Artificial Sequence: Synthetic hazel nut; inner sequence and 3' sequence

SEQ ID NO: 18182 - DNA, 53 bp, Artificial Sequence; identical to SEQ ID NO: 2233
  Description of Artificial Sequence: Synthetic hazel nut; inner sequence and 3' sequence

SEQ ID NO: 18183 - DNA, 53 bp, Artificial Sequence; identical to SEQ ID NO: 2201
  Description of Artificial Sequence: Synthetic hazel nut; inner sequence and 3' sequence

SEQ ID NO: 18184 - DNA, 53 bp, Artificial Sequence; identical to SEQ ID NO: 2027
  Description of Artificial Sequence: Synthetic hazel nut; inner sequence and 3' sequence

SEQ ID NO: 18185 - DNA, 54 bp, Artificial Sequence; identical to SEQ ID NO: 2221
  Description of Artificial Sequence: Synthetic hazel nut; inner sequence and 3' sequence

SEQ ID NO: 18186 - DNA, 53 bp, Artificial Sequence; identical to SEQ ID NO: 2505
  Description of Artificial Sequence: Synthetic hazel nut; inner sequence and 3' sequence

SEQ ID NO: 18187 - DNA, 53 bp, Artificial Sequence; identical to SEQ ID NO: 2133
  Description of Artificial Sequence: Synthetic hazel nut; inner sequence and 3' sequence

SEQ ID NO: 18188 - DNA, 53 bp, Artificial Sequence; identical to SEQ ID NO: 2217
  Description of Artificial Sequence: Synthetic hazel nut; inner sequence and 3' sequence

SEQ ID NO: 18189 - DNA, 53 bp, Artificial Sequence; identical to SEQ ID NO: 2823
  Description of Artificial Sequence: Synthetic hazel nut; inner sequence and 3' sequence

SEQ ID NO: 18190 - DNA, 53 bp, Artificial Sequence; identical to SEQ ID NO: 2137
  Description of Artificial Sequence: Synthetic hazel nut; inner sequence and 3' sequence

SEQ ID NO: 18191 - DNA, 53 bp, Artificial Sequence; identical to SEQ ID NO: 6755
  Description of Artificial Sequence: Synthetic hazel nut; inner sequence and 3' sequence

SEQ ID NO: 18192 - DNA, 53 bp, Artificial Sequence; identical to SEQ ID NO: 6583
  Description of Artificial Sequence: Synthetic hazel nut; inner sequence and 3' sequence

SEQ ID NO: 18193 - DNA, 53 bp, Artificial Sequence; identical to SEQ ID NO: 2094
  Description of Artificial Sequence: Synthetic hazel nut; inner sequence and 3' sequence

SEQ ID NO: 18194 - DNA, 53 bp, Artificial Sequence; identical to SEQ ID NO: 2168
  Description of Artificial Sequence: Synthetic hazel nut; inner sequence and 3' sequence

SEQ ID NO: 18195 - DNA, 53 bp, Artificial Sequence; identical to SEQ ID NO: 2125
  Description of Artificial Sequence: Synthetic hazel nut; inner sequence and 3' sequence

SEQ ID NO: 18196 - DNA, 53 bp, Artificial Sequence; identical to SEQ ID NO: 2360
  Description of Artificial Sequence: Synthetic hazel nut; inner sequence and 3' sequence

SEQ ID NO: 18197 - DNA, 53 bp, Artificial Sequence; identical to SEQ ID NO: 2104
  Description of Artificial Sequence: Synthetic hazel nut; inner sequence and 3' sequence

SEQ ID NO: 18198 - DNA, 53 bp, Artificial Sequence; identical to SEQ ID NO: 2225
  Description of Artificial Sequence: Synthetic hazel nut; inner sequence and 3' sequence

SEQ ID NO: 18199 - DNA, 53 bp, Artificial Sequence; identical to SEQ ID NO: 6429
  Description of Artificial Sequence: Synthetic hazel nut; inner sequence and 3' sequence

SEQ ID NO: 18200 - DNA, 53 bp, Artificial Sequence; identical to SEQ ID NO: 6230
  Description of Artificial Sequence: Synthetic hazel nut; inner sequence and 3' sequence

SEQ ID NO: 18201 - DNA, 53 bp, Artificial Sequence; identical to SEQ ID NO: 2626
  Description of Artificial Sequence: Synthetic hazel nut; inner sequence and 3' sequence

SEQ ID NO: 18202 - DNA, 53 bp, Artificial Sequence; identical to SEQ ID NO: 6521
  Description of Artificial Sequence: Synthetic hazel nut; inner sequence and 3' sequence

SEQ ID NO: 18203 - DNA, 53 bp, Artificial Sequence; identical to SEQ ID NO: 2101
  Description of Artificial Sequence: Synthetic hazel nut; inner sequence and 3' sequence

SEQ ID NO: 18204 - DNA, 53 bp, Artificial Sequence; identical to SEQ ID NO: 6985
  Description of Artificial Sequence: Synthetic hazel nut; inner sequence and 3' sequence

SEQ ID NO: 18205 - DNA, 53 bp, Artificial Sequence; identical to SEQ ID NO: 2105
  Description of Artificial Sequence: Synthetic hazel nut; inner sequence and 3' sequence

SEQ ID NO: 18206 - DNA, 53 bp, Artificial Sequence; identical to SEQ ID NO: 2722
  Description of Artificial Sequence: Synthetic hazel nut; inner sequence and 3' sequence

SEQ ID NO: 18207 - DNA, 53 bp, Artificial Sequence; identical to SEQ ID NO: 2220
  Description of Artificial Sequence: Synthetic hazel nut; inner sequence and 3' sequence

SEQ ID NO: 18208 - DNA, 53 bp, Artificial Sequence; identical to SEQ ID NO: 2909
  Description of Artificial Sequence: Synthetic hazel nut; inner sequence and 3' sequence

SEQ ID NO: 18209 - DNA, 53 bp, Artificial Sequence; identical to SEQ ID NO: 2606
  Description of Artificial Sequence: Synthetic hazel nut; inner sequence and 3' sequence

SEQ ID NO: 18210 - DNA, 53 bp, Artificial Sequence; identical to SEQ ID NO: 2122
  Description of Artificial Sequence: Synthetic hazel nut; inner sequence and 3' sequence

SEQ ID NO: 18211 - DNA, 53 bp, Artificial Sequence
  Description of Artificial Sequence: Synthetic hazel nut; inner sequence and 3' sequence
cgcaacgcacgtcacgtccttggcggcacattgactagtacatgaccacttga

SEQ ID NO: 18212 - DNA, 51 bp, Artificial Sequence; identical to SEQ ID NO: 2148
  Description of Artificial Sequence: Synthetic hazel nut; inner sequence and 3' sequence

SEQ ID NO: 18213 - DNA, 53 bp, Artificial Sequence; identical to SEQ ID NO: 2124
  Description of Artificial Sequence: Synthetic hazel nut; inner sequence and 3' sequence

SEQ ID NO: 18214 - DNA, 53 bp, Artificial Sequence; identical to SEQ ID NO: 2118
  Description of Artificial Sequence: Synthetic hazel nut; inner sequence and 3' sequence

SEQ ID NO: 18215 - DNA, 53 bp, Artificial Sequence; identical to SEQ ID NO: 2630
  Description of Artificial Sequence: Synthetic hazel nut; inner sequence and 3' sequence

SEQ ID NO: 18216 - DNA, 53 bp, Artificial Sequence; identical to SEQ ID NO: 2257
  Description of Artificial Sequence: Synthetic hazel nut; inner sequence and 3' sequence

SEQ ID NO: 18217 - DNA, 53 bp, Artificial Sequence; identical to SEQ ID NO: 2123
  Description of Artificial Sequence: Synthetic hazel nut; inner sequence and 3' sequence

SEQ ID NO: 18218 - DNA, 53 bp, Artificial Sequence
  Description of Artificial Sequence: Synthetic hazel nut; inner sequence and 3' sequence
cgtaccacaggctcggtccgctacgacacgttgactagtacatgaccacttga

SEQ ID NO: 18219 - DNA, 53 bp, Artificial Sequence; identical to SEQ ID NO: 2355
  Description of Artificial Sequence: Synthetic hazel nut; inner sequence and 3' sequence

SEQ ID NO: 18220 - DNA, 53 bp, Artificial Sequence; identical to SEQ ID NO: 2333
  Description of Artificial Sequence: Synthetic hazel nut; inner sequence and 3' sequence

SEQ ID NO: 18221 - DNA, 53 bp, Artificial Sequence; identical to SEQ ID NO: 6662
  Description of Artificial Sequence: Synthetic hazel nut; inner sequence and 3' sequence

SEQ ID NO: 18222 - DNA, 53 bp, Artificial Sequence; identical to SEQ ID NO: 2114
  Description of Artificial Sequence: Synthetic hazel nut; inner sequence and 3' sequence

SEQ ID NO: 18223 - DNA, 53 bp, Artificial Sequence; identical to SEQ ID NO: 2436
  Description of Artificial Sequence: Synthetic hazel nut; inner sequence and 3' sequence

SEQ ID NO: 18224 - DNA, 53 bp, Artificial Sequence; identical to SEQ ID NO: 2953
  Description of Artificial Sequence: Synthetic hazel nut; inner sequence and 3' sequence

SEQ ID NO: 18225 - DNA, 53 bp, Artificial Sequence; identical to SEQ ID NO: 2176
  Description of Artificial Sequence: Synthetic hazel nut; inner sequence and 3' sequence

SEQ ID NO: 18226 - DNA, 53 bp, Artificial Sequence; identical to SEQ ID NO: 10678
  Description of Artificial Sequence: Synthetic hazel nut; inner sequence and 3' sequence

SEQ ID NO: 18227 - DNA, 53 bp, Artificial Sequence; identical to SEQ ID NO: 6772
  Description of Artificial Sequence: Synthetic hazel nut; inner sequence and 3' sequence

SEQ ID NO: 18228 - DNA, 53 bp, Artificial Sequence; identical to SEQ ID NO: 2056
  Description of Artificial Sequence: Synthetic hazel nut; inner sequence and 3' sequence

SEQ ID NO: 18229 - DNA, 53 bp, Artificial Sequence; identical to SEQ ID NO: 2450
  Description of Artificial Sequence: Synthetic hazel nut; inner sequence and 3' sequence

SEQ ID NO: 18230 - DNA, 53 bp, Artificial Sequence; identical to SEQ ID NO: 2142
  Description of Artificial Sequence: Synthetic hazel nut; inner sequence and 3' sequence

SEQ ID NO: 18231 - DNA, 53 bp, Artificial Sequence; identical to SEQ ID NO: 2169
  Description of Artificial Sequence: Synthetic hazel nut; inner sequence and 3' sequence

SEQ ID NO: 18232 - DNA, 53 bp, Artificial Sequence; identical to SEQ ID NO: 2718
  Description of Artificial Sequence: Synthetic hazel nut; inner sequence and 3' sequence

SEQ ID NO: 18233 - DNA, 53 bp, Artificial Sequence; identical to SEQ ID NO: 2222
  Description of Artificial Sequence: Synthetic hazel nut; inner sequence and 3' sequence

SEQ ID NO: 18234 - DNA, 53 bp, Artificial Sequence; identical to SEQ ID NO: 2293
  Description of Artificial Sequence: Synthetic hazel nut; inner sequence and 3' sequence

SEQ ID NO: 18235 - DNA, 53 bp, Artificial Sequence; identical to SEQ ID NO: 2163
  Description of Artificial Sequence: Synthetic hazel nut; inner sequence and 3' sequence

SEQ ID NO: 18236 - DNA, 53 bp, Artificial Sequence; identical to SEQ ID NO: 2253
  Description of Artificial Sequence: Synthetic hazel nut; inner sequence and 3' sequence

SEQ ID NO: 18237 - DNA, 53 bp, Artificial Sequence; identical to SEQ ID NO: 2196
  Description of Artificial Sequence: Synthetic hazel nut; inner sequence and 3' sequence

SEQ ID NO: 18238 - DNA, 53 bp, Artificial Sequence; identical to SEQ ID NO: 2279
  Description of Artificial Sequence: Synthetic hazel nut; inner sequence and 3' sequence

SEQ ID NO: 18239 - DNA, 53 bp, Artificial Sequence; identical to SEQ ID NO: 2468
  Description of Artificial Sequence: Synthetic hazel nut; inner sequence and 3' sequence

SEQ ID NO: 18240 - DNA, 53 bp, Artificial Sequence; identical to SEQ ID NO: 2206
  Description of Artificial Sequence: Synthetic hazel nut; inner sequence and 3' sequence

SEQ ID NO: 18241 - DNA, 53 bp, Artificial Sequence; identical to SEQ ID NO: 2274
  Description of Artificial Sequence: Synthetic hazel nut; inner sequence and 3' sequence

SEQ ID NO: 18242 - DNA, 53 bp, Artificial Sequence; identical to SEQ ID NO: 2506
  Description of Artificial Sequence: Synthetic hazel nut; inner sequence and 3' sequence

SEQ ID NO: 18243 - DNA, 53 bp, Artificial Sequence; identical to SEQ ID NO: 2332
  Description of Artificial Sequence: Synthetic hazel nut; inner sequence and 3' sequence

SEQ ID NO: 18244 - DNA, 53 bp, Artificial Sequence; identical to SEQ ID NO: 6627
  Description of Artificial Sequence: Synthetic hazel nut; inner sequence and 3' sequence

SEQ ID NO: 18245 - DNA, 53 bp, Artificial Sequence; identical to SEQ ID NO: 6612
  Description of Artificial Sequence: Synthetic hazel nut; inner sequence and 3' sequence

SEQ ID NO: 18246 - DNA, 53 bp, Artificial Sequence; identical to SEQ ID NO: 2091
  Description of Artificial Sequence: Synthetic hazel nut; inner sequence and 3' sequence

SEQ ID NO: 18247 - DNA, 53 bp, Artificial Sequence; identical to SEQ ID NO: 10984
  Description of Artificial Sequence: Synthetic hazel nut; inner sequence and 3' sequence

SEQ ID NO: 18248 - DNA, 53 bp, Artificial Sequence; identical to SEQ ID NO: 2228
  Description of Artificial Sequence: Synthetic hazel nut; inner sequence and 3' sequence

SEQ ID NO: 18249 - DNA, 53 bp, Artificial Sequence; identical to SEQ ID NO: 6673
  Description of Artificial Sequence: Synthetic hazel nut; inner sequence and 3' sequence

SEQ ID NO: 18250 - DNA, 53 bp, Artificial Sequence; identical to SEQ ID NO: 2832
  Description of Artificial Sequence: Synthetic hazel nut; inner sequence and 3' sequence

SEQ ID NO: 18251 - DNA, 53 bp, Artificial Sequence; identical to SEQ ID NO: 2237
  Description of Artificial Sequence: Synthetic hazel nut; inner sequence and 3' sequence

SEQ ID NO: 18252 - DNA, 53 bp, Artificial Sequence; identical to SEQ ID NO: 2177
  Description of Artificial Sequence: Synthetic hazel nut; inner sequence and 3' sequence

SEQ ID NO: 18253 - DNA, 53 bp, Artificial Sequence; identical to SEQ ID NO: 6492
  Description of Artificial Sequence: Synthetic hazel nut; inner sequence and 3' sequence

SEQ ID NO: 18254 - DNA, 53 bp, Artificial Sequence; identical to SEQ ID NO: 2145
  Description of Artificial Sequence: Synthetic hazel nut; inner sequence and 3' sequence

SEQ ID NO: 18255 - DNA, 53 bp, Artificial Sequence; identical to SEQ ID NO: 2371
  Description of Artificial Sequence: Synthetic hazel nut; inner sequence and 3' sequence

SEQ ID NO: 18256 - DNA, 53 bp, Artificial Sequence; identical to SEQ ID NO: 2816
  Description of Artificial Sequence: Synthetic hazel nut; inner sequence and 3' sequence

SEQ ID NO: 18257 - DNA, 53 bp, Artificial Sequence; identical to SEQ ID NO: 2278
  Description of Artificial Sequence: Synthetic hazel nut; inner sequence and 3' sequence

SEQ ID NO: 18258 - DNA, 53 bp, Artificial Sequence; identical to SEQ ID NO: 6571
  Description of Artificial Sequence: Synthetic hazel nut; inner sequence and 3' sequence

SEQ ID NO: 18259 - DNA, 53 bp, Artificial Sequence; identical to SEQ ID NO: 2249
  Description of Artificial Sequence: Synthetic hazel nut; inner sequence and 3' sequence

SEQ ID NO: 18260 - DNA, 53 bp, Artificial Sequence; identical to SEQ ID NO: 2300
  Description of Artificial Sequence: Synthetic hazel nut; inner sequence and 3' sequence

SEQ ID NO: 18261 - DNA, 53 bp, Artificial Sequence; identical to SEQ ID NO: 2364
  Description of Artificial Sequence: Synthetic hazel nut; inner sequence and 3' sequence

SEQ ID NO: 18262 - DNA, 53 bp, Artificial Sequence; identical to SEQ ID NO: 2234
  Description of Artificial Sequence: Synthetic hazel nut; inner sequence and 3' sequence

SEQ ID NO: 18263 - DNA, 53 bp, Artificial Sequence; identical to SEQ ID NO: 6576
  Description of Artificial Sequence: Synthetic hazel nut; inner sequence and 3' sequence

SEQ ID NO: 18264 - DNA, 53 bp, Artificial Sequence
  Description of Artificial Sequence: Synthetic hazel nut; inner sequence and 3' sequence
ggacgcacaccgaccgtacgccgtgtcgcattgactagtacatgaccacttga

SEQ ID NO: 18265 - DNA, 53 bp, Artificial Sequence
  Description of Artificial Sequence: Synthetic hazel nut; inner sequence and 3' sequence
gcgacacggtagcatcgacggtacgcgcgattgactagtacatgaccacttga

SEQ ID NO: 18266 - DNA, 53 bp, Artificial Sequence
  Description of Artificial Sequence: Synthetic hazel nut; inner sequence and 3' sequence
cgtgcgcaacgagcaggaccacgcgtcacgttgactagtacatgaccacttga

SEQ ID NO: 18267 - DNA, 53 bp, Artificial Sequence; identical to SEQ ID NO: 6489
  Description of Artificial Sequence: Synthetic hazel nut; inner sequence and 3' sequence

SEQ ID NO: 18268 - DNA, 53 bp, Artificial Sequence; identical to SEQ ID NO: 2950
  Description of Artificial Sequence: Synthetic hazel nut; inner sequence and 3' sequence

SEQ ID NO: 18269 - DNA, 53 bp, Artificial Sequence; identical to SEQ ID NO: 2352
  Description of Artificial Sequence: Synthetic hazel nut; inner sequence and 3' sequence

SEQ ID NO: 18270 - DNA, 53 bp, Artificial Sequence
  Description of Artificial Sequence: Synthetic hazel nut; inner sequence and 3' sequence
gacggatcgacctcaacgtgttgcgatgcattgactagtacatgaccacttga

SEQ ID NO: 18271 - DNA, 53 bp, Artificial Sequence; identical to SEQ ID NO: 2160
  Description of Artificial Sequence: Synthetic hazel nut; inner sequence and 3' sequence

SEQ ID NO: 18272 - DNA, 53 bp, Artificial Sequence; identical to SEQ ID NO: 2256
  Description of Artificial Sequence: Synthetic hazel nut; inner sequence and 3' sequence

SEQ ID NO: 18273 - DNA, 53 bp, Artificial Sequence; identical to SEQ ID NO: 6485
  Description of Artificial Sequence: Synthetic hazel nut; inner sequence and 3' sequence

SEQ ID NO: 18274 - DNA, 53 bp, Artificial Sequence; identical to SEQ ID NO: 2158
  Description of Artificial Sequence: Synthetic hazel nut; inner sequence and 3' sequence

SEQ ID NO: 18275 - DNA, 53 bp, Artificial Sequence; identical to SEQ ID NO: 2592
  Description of Artificial Sequence: Synthetic hazel nut; inner sequence and 3' sequence

SEQ ID NO: 18276 - DNA, 53 bp, Artificial Sequence; identical to SEQ ID NO: 2433
  Description of Artificial Sequence: Synthetic hazel nut; inner sequence and 3' sequence

SEQ ID NO: 18277 - DNA, 53 bp, Artificial Sequence; identical to SEQ ID NO: 2697
  Description of Artificial Sequence: Synthetic hazel nut; inner sequence and 3' sequence

SEQ ID NO: 18278 - DNA, 53 bp, Artificial Sequence; identical to SEQ ID NO: 2881
  Description of Artificial Sequence: Synthetic hazel nut; inner sequence and 3' sequence

SEQ ID NO: 18279 - DNA, 53 bp, Artificial Sequence; identical to SEQ ID NO: 2575
  Description of Artificial Sequence: Synthetic hazel nut; inner sequence and 3' sequence

SEQ ID NO: 18280 - DNA, 53 bp, Artificial Sequence; identical to SEQ ID NO: 2673
  Description of Artificial Sequence: Synthetic hazel nut; inner sequence and 3' sequence

SEQ ID NO: 18281 - DNA, 53 bp, Artificial Sequence; identical to SEQ ID NO: 6746
  Description of Artificial Sequence: Synthetic hazel nut; inner sequence and 3' sequence

SEQ ID NO: 18282 - DNA, 53 bp, Artificial Sequence; identical to SEQ ID NO: 6871
  Description of Artificial Sequence: Synthetic hazel nut; inner sequence and 3' sequence

SEQ ID NO: 18283 - DNA, 53 bp, Artificial Sequence; identical to SEQ ID NO: 2231
  Description of Artificial Sequence: Synthetic hazel nut; inner sequence and 3' sequence

SEQ ID NO: 18284 - DNA, 53 bp, Artificial Sequence; identical to SEQ ID NO: 2161
  Description of Artificial Sequence: Synthetic hazel nut; inner sequence and 3' sequence

SEQ ID NO: 18285 - DNA, 53 bp, Artificial Sequence; identical to SEQ ID NO: 2687
  Description of Artificial Sequence: Synthetic hazel nut; inner sequence and 3' sequence

SEQ ID NO: 18286 - DNA, 53 bp, Artificial Sequence; identical to SEQ ID NO: 2429
  Description of Artificial Sequence: Synthetic hazel nut; inner sequence and 3' sequence

SEQ ID NO: 18287 - DNA, 53 bp, Artificial Sequence; identical to SEQ ID NO: 2147
  Description of Artificial Sequence: Synthetic hazel nut; inner sequence and 3' sequence

SEQ ID NO: 18288 - DNA, 53 bp, Artificial Sequence; identical to SEQ ID NO: 2430
  Description of Artificial Sequence: Synthetic hazel nut; inner sequence and 3' sequence

SEQ ID NO: 18289 - DNA, 53 bp, Artificial Sequence; identical to SEQ ID NO: 2527
  Description of Artificial Sequence: Synthetic hazel nut; inner sequence and 3' sequence

SEQ ID NO: 18290 - DNA, 53 bp, Artificial Sequence; identical to SEQ ID NO: 2277
  Description of Artificial Sequence: Synthetic hazel nut; inner sequence and 3' sequence

SEQ ID NO: 18291 - DNA, 53 bp, Artificial Sequence; identical to SEQ ID NO: 2362
  Description of Artificial Sequence: Synthetic hazel nut; inner sequence and 3' sequence

SEQ ID NO: 18292 - DNA, 53 bp, Artificial Sequence; identical to SEQ ID NO: 2315
  Description of Artificial Sequence: Synthetic hazel nut; inner sequence and 3' sequence

SEQ ID NO: 18293 - DNA, 53 bp, Artificial Sequence; identical to SEQ ID NO: 2282
  Description of Artificial Sequence: Synthetic hazel nut; inner sequence and 3' sequence

SEQ ID NO: 18294 - DNA, 53 bp, Artificial Sequence; identical to SEQ ID NO: 2634
  Description of Artificial Sequence: Synthetic hazel nut; inner sequence and 3' sequence

SEQ ID NO: 18295 - DNA, 53 bp, Artificial Sequence; identical to SEQ ID NO: 2671
  Description of Artificial Sequence: Synthetic hazel nut; inner sequence and 3' sequence

SEQ ID NO: 18296 - DNA, 53 bp, Artificial Sequence; identical to SEQ ID NO: 2268
  Description of Artificial Sequence: Synthetic hazel nut; inner sequence and 3' sequence

SEQ ID NO: 18297 - DNA, 53 bp, Artificial Sequence; identical to SEQ ID NO: 2783
  Description of Artificial Sequence: Synthetic hazel nut; inner sequence and 3' sequence

SEQ ID NO: 18298 - DNA, 53 bp, Artificial Sequence; identical to SEQ ID NO: 2270
  Description of Artificial Sequence: Synthetic hazel nut; inner sequence and 3' sequence

SEQ ID NO: 18299 - DNA, 53 bp, Artificial Sequence; identical to SEQ ID NO: 2338
  Description of Artificial Sequence: Synthetic hazel nut; inner sequence and 3' sequence

SEQ ID NO: 18300 - DNA, 53 bp, Artificial Sequence; identical to SEQ ID NO: 2202
  Description of Artificial Sequence: Synthetic hazel nut; inner sequence and 3' sequence

SEQ ID NO: 18301 - DNA, 53 bp, Artificial Sequence; identical to SEQ ID NO: 2107
  Description of Artificial Sequence: Synthetic hazel nut; inner sequence and 3' sequence

SEQ ID NO: 18302 - DNA, 53 bp, Artificial Sequence; identical to SEQ ID NO: 2448
  Description of Artificial Sequence: Synthetic hazel nut; inner sequence and 3' sequence

SEQ ID NO: 18303 - DNA, 53 bp, Artificial Sequence; identical to SEQ ID NO: 2287
  Description of Artificial Sequence: Synthetic hazel nut; inner sequence and 3' sequence

SEQ ID NO: 18304 - DNA, 53 bp, Artificial Sequence; identical to SEQ ID NO: 2292
  Description of Artificial Sequence: Synthetic hazel nut; inner sequence and 3' sequence

SEQ ID NO: 18305 - DNA, 53 bp, Artificial Sequence; identical to SEQ ID NO: 2323
  Description of Artificial Sequence: Synthetic hazel nut; inner sequence and 3' sequence

SEQ ID NO: 18306 - DNA, 53 bp, Artificial Sequence; identical to SEQ ID NO: 2597
  Description of Artificial Sequence: Synthetic hazel nut; inner sequence and 3' sequence

SEQ ID NO: 18307 - DNA, 53 bp, Artificial Sequence; identical to SEQ ID NO: 6813
  Description of Artificial Sequence: Synthetic hazel nut; inner sequence and 3' sequence

SEQ ID NO: 18308 - DNA, 53 bp, Artificial Sequence; identical to SEQ ID NO: 2173
  Description of Artificial Sequence: Synthetic hazel nut; inner sequence and 3' sequence

SEQ ID NO: 18309 - DNA, 53 bp, Artificial Sequence; identical to SEQ ID NO: 2089
  Description of Artificial Sequence: Synthetic hazel nut; inner sequence and 3' sequence

SEQ ID NO: 18310 - DNA, 53 bp, Artificial Sequence; identical to SEQ ID NO: 2223
  Description of Artificial Sequence: Synthetic hazel nut; inner sequence and 3' sequence

SEQ ID NO: 18311 - DNA, 53 bp, Artificial Sequence; identical to SEQ ID NO: 6707
  Description of Artificial Sequence: Synthetic hazel nut; inner sequence and 3' sequence

SEQ ID NO: 18312 - DNA, 53 bp, Artificial Sequence; identical to SEQ ID NO: 2157
  Description of Artificial Sequence: Synthetic hazel nut; inner sequence and 3' sequence

SEQ ID NO: 18313 - DNA, 53 bp, Artificial Sequence; identical to SEQ ID NO: 2875
  Description of Artificial Sequence: Synthetic hazel nut; inner sequence and 3' sequence

SEQ ID NO: 18314 - DNA, 53 bp, Artificial Sequence; identical to SEQ ID NO: 2208
  Description of Artificial Sequence: Synthetic hazel nut; inner sequence and 3' sequence

SEQ ID NO: 18315 - DNA, 53 bp, Artificial Sequence; identical to SEQ ID NO: 10401
  Description of Artificial Sequence: Synthetic hazel nut; inner sequence and 3' sequence

SEQ ID NO: 18316 - DNA, 53 bp, Artificial Sequence; identical to SEQ ID NO: 2248
  Description of Artificial Sequence: Synthetic hazel nut; inner sequence and 3' sequence

SEQ ID NO: 18317 - DNA, 53 bp, Artificial Sequence; identical to SEQ ID NO: 2170
  Description of Artificial Sequence: Synthetic hazel nut; inner sequence and 3' sequence

SEQ ID NO: 18318 - DNA, 53 bp, Artificial Sequence; identical to SEQ ID NO: 2688
  Description of Artificial Sequence: Synthetic hazel nut; inner sequence and 3' sequence

SEQ ID NO: 18319 - DNA, 53 bp, Artificial Sequence; identical to SEQ ID NO: 6517
  Description of Artificial Sequence: Synthetic hazel nut; inner sequence and 3' sequence

SEQ ID NO: 18320 - DNA, 53 bp, Artificial Sequence; identical to SEQ ID NO: 2309
  Description of Artificial Sequence: Synthetic hazel nut; inner sequence and 3' sequence

SEQ ID NO: 18321 - DNA, 53 bp, Artificial Sequence; identical to SEQ ID NO: 6745
  Description of Artificial Sequence: Synthetic hazel nut; inner sequence and 3' sequence

SEQ ID NO: 18322 - DNA, 53 bp, Artificial Sequence; identical to SEQ ID NO: 2224
  Description of Artificial Sequence: Synthetic hazel nut; inner sequence and 3' sequence

SEQ ID NO: 18323 - DNA, 53 bp, Artificial Sequence; identical to SEQ ID NO: 2261
  Description of Artificial Sequence: Synthetic hazel nut; inner sequence and 3' sequence

SEQ ID NO: 18324 - DNA, 53 bp, Artificial Sequence; identical to SEQ ID NO: 2551
  Description of Artificial Sequence: Synthetic hazel nut; inner sequence and 3' sequence

SEQ ID NO: 18325 - DNA, 53 bp, Artificial Sequence; identical to SEQ ID NO: 2132
  Description of Artificial Sequence: Synthetic hazel nut; inner sequence and 3' sequence

SEQ ID NO: 18326 - DNA, 51 bp, Artificial Sequence; identical to SEQ ID NO: 2241
  Description of Artificial Sequence: Synthetic hazel nut; inner sequence and 3' sequence

SEQ ID NO: 18327 - DNA, 53 bp, Artificial Sequence; identical to SEQ ID NO: 2561
  Description of Artificial Sequence: Synthetic hazel nut; inner sequence and 3' sequence

SEQ ID NO: 18328 - DNA, 53 bp, Artificial Sequence; identical to SEQ ID NO: 2541
  Description of Artificial Sequence: Synthetic hazel nut; inner sequence and 3' sequence

SEQ ID NO: 18329 - DNA, 53 bp, Artificial Sequence; identical to SEQ ID NO: 6940
  Description of Artificial Sequence: Synthetic hazel nut; inner sequence and 3' sequence

SEQ ID NO: 18330 - DNA, 53 bp, Artificial Sequence; identical to SEQ ID NO: 2459
  Description of Artificial Sequence: Synthetic hazel nut; inner sequence and 3' sequence

SEQ ID NO: 18331 - DNA, 53 bp, Artificial Sequence; identical to SEQ ID NO: 2496
  Description of Artificial Sequence: Synthetic hazel nut; inner sequence and 3' sequence

SEQ ID NO: 18332 - DNA, 53 bp, Artificial Sequence; identical to SEQ ID NO: 2165
  Description of Artificial Sequence: Synthetic hazel nut; inner sequence and 3' sequence

SEQ ID NO: 18333 - DNA, 53 bp, Artificial Sequence; identical to SEQ ID NO: 2167
  Description of Artificial Sequence: Synthetic hazel nut; inner sequence and 3' sequence

SEQ ID NO: 18334 - DNA, 53 bp, Artificial Sequence; identical to SEQ ID NO: 2791
  Description of Artificial Sequence: Synthetic hazel nut; inner sequence and 3' sequence

SEQ ID NO: 18335 - DNA, 53 bp, Artificial Sequence; identical to SEQ ID NO: 6205
  Description of Artificial Sequence: Synthetic hazel nut; inner sequence and 3' sequence

SEQ ID NO: 18336 - DNA, 52 bp, Artificial Sequence; identical to SEQ ID NO: 2549
  Description of Artificial Sequence: Synthetic hazel nut; inner sequence and 3' sequence

SEQ ID NO: 18337 - DNA, 53 bp, Artificial Sequence; identical to SEQ ID NO: 6954
  Description of Artificial Sequence: Synthetic hazel nut; inner sequence and 3' sequence

SEQ ID NO: 18338 - DNA, 53 bp, Artificial Sequence; identical to SEQ ID NO: 2919
  Description of Artificial Sequence: Synthetic hazel nut; inner sequence and 3' sequence

SEQ ID NO: 18339 - DNA, 53 bp, Artificial Sequence; identical to SEQ ID NO: 2317
  Description of Artificial Sequence: Synthetic hazel nut; inner sequence and 3' sequence

SEQ ID NO: 18340 - DNA, 53 bp, Artificial Sequence; identical to SEQ ID NO: 2345
  Description of Artificial Sequence: Synthetic hazel nut; inner sequence and 3' sequence

SEQ ID NO: 18341 - DNA, 53 bp, Artificial Sequence; identical to SEQ ID NO: 2348
  Description of Artificial Sequence: Synthetic hazel nut; inner sequence and 3' sequence

SEQ ID NO: 18342 - DNA, 53 bp, Artificial Sequence
  Description of Artificial Sequence: Synthetic hazel nut; inner sequence and 3' sequence
cgtaccgtggcagaacgcgtcactgtgtcgttgactagtacatgaccacttga

SEQ ID NO: 18343 - DNA, 53 bp, Artificial Sequence; identical to SEQ ID NO: 2494
  Description of Artificial Sequence: Synthetic hazel nut; inner sequence and 3' sequence

SEQ ID NO: 18344 - DNA, 53 bp, Artificial Sequence; identical to SEQ ID NO: 6955
  Description of Artificial Sequence: Synthetic hazel nut; inner sequence and 3' sequence

SEQ ID NO: 18345 - DNA, 53 bp, Artificial Sequence; identical to SEQ ID NO: 6854
  Description of Artificial Sequence: Synthetic hazel nut; inner sequence and 3' sequence

SEQ ID NO: 18346 - DNA, 53 bp, Artificial Sequence; identical to SEQ ID NO: 2406
  Description of Artificial Sequence: Synthetic hazel nut; inner sequence and 3' sequence

SEQ ID NO: 18347 - DNA, 51 bp, Artificial Sequence; identical to SEQ ID NO: 2423
  Description of Artificial Sequence: Synthetic hazel nut; inner sequence and 3' sequence

SEQ ID NO: 18348 - DNA, 53 bp, Artificial Sequence; identical to SEQ ID NO: 2390
  Description of Artificial Sequence: Synthetic hazel nut; inner sequence and 3' sequence

SEQ ID NO: 18349 - DNA, 53 bp, Artificial Sequence; identical to SEQ ID NO: 2146
  Description of Artificial Sequence: Synthetic hazel nut; inner sequence and 3' sequence

SEQ ID NO: 18350 - DNA, 53 bp, Artificial Sequence; identical to SEQ ID NO: 2343
  Description of Artificial Sequence: Synthetic hazel nut; inner sequence and 3' sequence

SEQ ID NO: 18351 - DNA, 53 bp, Artificial Sequence; identical to SEQ ID NO: 2109
  Description of Artificial Sequence: Synthetic hazel nut; inner sequence and 3' sequence

SEQ ID NO: 18352 - DNA, 53 bp, Artificial Sequence
  Description of Artificial Sequence: Synthetic hazel nut; inner sequence and 3' sequence
cgacacacggtgcaacgtcaacactgcggcttgactagtacatgaccacttga

SEQ ID NO: 18353 - DNA, 53 bp, Artificial Sequence; identical to SEQ ID NO: 2183
  Description of Artificial Sequence: Synthetic hazel nut; inner sequence and 3' sequence

SEQ ID NO: 18354 - DNA, 53 bp, Artificial Sequence; identical to SEQ ID NO: 2384
  Description of Artificial Sequence: Synthetic hazel nut; inner sequence and 3' sequence

SEQ ID NO: 18355 - DNA, 53 bp, Artificial Sequence; identical to SEQ ID NO: 2576
  Description of Artificial Sequence: Synthetic hazel nut; inner sequence and 3' sequence

SEQ ID NO: 18356 - DNA, 53 bp, Artificial Sequence; identical to SEQ ID NO: 2654
  Description of Artificial Sequence: Synthetic hazel nut; inner sequence and 3' sequence

SEQ ID NO: 18357 - DNA, 53 bp, Artificial Sequence; identical to SEQ ID NO: 2407
  Description of Artificial Sequence: Synthetic hazel nut; inner sequence and 3' sequence

SEQ ID NO: 18358 - DNA, 53 bp, Artificial Sequence; identical to SEQ ID NO: 6739
  Description of Artificial Sequence: Synthetic hazel nut; inner sequence and 3' sequence

SEQ ID NO: 18359 - DNA, 53 bp, Artificial Sequence; identical to SEQ ID NO: 2420
  Description of Artificial Sequence: Synthetic hazel nut; inner sequence and 3' sequence

SEQ ID NO: 18360 - DNA, 53 bp, Artificial Sequence; identical to SEQ ID NO: 6694
  Description of Artificial Sequence: Synthetic hazel nut; inner sequence and 3' sequence

SEQ ID NO: 18361 - DNA, 53 bp, Artificial Sequence; identical to SEQ ID NO: 2385
  Description of Artificial Sequence: Synthetic hazel nut; inner sequence and 3' sequence

SEQ ID NO: 18362 - DNA, 53 bp, Artificial Sequence; identical to SEQ ID NO: 2528
  Description of Artificial Sequence: Synthetic hazel nut; inner sequence and 3' sequence

SEQ ID NO: 18363 - DNA, 53 bp, Artificial Sequence; identical to SEQ ID NO: 2291
  Description of Artificial Sequence: Synthetic hazel nut; inner sequence and 3' sequence

SEQ ID NO: 18364 - DNA, 53 bp, Artificial Sequence; identical to SEQ ID NO: 2923
  Description of Artificial Sequence: Synthetic hazel nut; inner sequence and 3' sequence

SEQ ID NO: 18365 - DNA, 53 bp, Artificial Sequence; identical to SEQ ID NO: 2211
  Description of Artificial Sequence: Synthetic hazel nut; inner sequence and 3' sequence

SEQ ID NO: 18366 - DNA, 53 bp, Artificial Sequence; identical to SEQ ID NO: 2380
  Description of Artificial Sequence: Synthetic hazel nut; inner sequence and 3' sequence

SEQ ID NO: 18367 - DNA, 53 bp, Artificial Sequence
  Description of Artificial Sequence: Synthetic hazel nut; inner sequence and 3' sequence
gcaccatcacgttgacgctgcccgtttgccttgactagtacatgaccacttga

SEQ ID NO: 18368 - DNA, 53 bp, Artificial Sequence; identical to SEQ ID NO: 2798
  Description of Artificial Sequence: Synthetic hazel nut; inner sequence and 3' sequence

SEQ ID NO: 18369 - DNA, 53 bp, Artificial Sequence; identical to SEQ ID NO: 2369
  Description of Artificial Sequence: Synthetic hazel nut; inner sequence and 3' sequence

SEQ ID NO: 18370 - DNA, 53 bp, Artificial Sequence; identical to SEQ ID NO: 2854
  Description of Artificial Sequence: Synthetic hazel nut; inner sequence and 3' sequence

SEQ ID NO: 18371 - DNA, 53 bp, Artificial Sequence; identical to SEQ ID NO: 2410
  Description of Artificial Sequence: Synthetic hazel nut; inner sequence and 3' sequence

SEQ ID NO: 18372 - DNA, 53 bp, Artificial Sequence; identical to SEQ ID NO: 2316
  Description of Artificial Sequence: Synthetic hazel nut; inner sequence and 3' sequence

SEQ ID NO: 18373 - DNA, 54 bp, Artificial Sequence
  Description of Artificial Sequence: Synthetic hazel nut; inner sequence and 3' sequence
cgtggcacgatggtaggacgacgcgttcacgttgactagtacatgaccacttga

SEQ ID NO: 18374 - DNA, 53 bp, Artificial Sequence; identical to SEQ ID NO: 6312
  Description of Artificial Sequence: Synthetic hazel nut; inner sequence and 3' sequence

SEQ ID NO: 18375 - DNA, 53 bp, Artificial Sequence; identical to SEQ ID NO: 6790
  Description of Artificial Sequence: Synthetic hazel nut; inner sequence and 3' sequence

SEQ ID NO: 18376 - DNA, 53 bp, Artificial Sequence; identical to SEQ ID NO: 2083
  Description of Artificial Sequence: Synthetic hazel nut; inner sequence and 3' sequence

SEQ ID NO: 18377 - DNA, 53 bp, Artificial Sequence; identical to SEQ ID NO: 2751
  Description of Artificial Sequence: Synthetic hazel nut; inner sequence and 3' sequence

SEQ ID NO: 18378 - DNA, 53 bp, Artificial Sequence; identical to SEQ ID NO: 2401
  Description of Artificial Sequence: Synthetic hazel nut; inner sequence and 3' sequence

SEQ ID NO: 18379 - DNA, 53 bp, Artificial Sequence; identical to SEQ ID NO: 2815
  Description of Artificial Sequence: Synthetic hazel nut; inner sequence and 3' sequence

SEQ ID NO: 18380 - DNA, 53 bp, Artificial Sequence
  Description of Artificial Sequence: Synthetic hazel nut; inner sequence and 3' sequence
tcatggccgaacgtgacgtacaccgtgccgttgactagtacatgaccacttga

SEQ ID NO: 18381 - DNA, 53 bp, Artificial Sequence; identical to SEQ ID NO: 2331
  Description of Artificial Sequence: Synthetic hazel nut; inner sequence and 3' sequence

SEQ ID NO: 18382 - DNA, 53 bp, Artificial Sequence; identical to SEQ ID NO: 10824
  Description of Artificial Sequence: Synthetic hazel nut; inner sequence and 3' sequence

SEQ ID NO: 18383 - DNA, 53 bp, Artificial Sequence
  Description of Artificial Sequence: Synthetic hazel nut; inner sequence and 3' sequence
cacgcgtcgtgagcaaggcatgccgtatcgttgactagtacatgaccacttga

SEQ ID NO: 18384 - DNA, 53 bp, Artificial Sequence; identical to SEQ ID NO: 2463
  Description of Artificial Sequence: Synthetic hazel nut; inner sequence and 3' sequence

SEQ ID NO: 18385 - DNA, 53 bp, Artificial Sequence; identical to SEQ ID NO: 2729
  Description of Artificial Sequence: Synthetic hazel nut; inner sequence and 3' sequence

SEQ ID NO: 18386 - DNA, 53 bp, Artificial Sequence
  Description of Artificial Sequence: Synthetic hazel nut; inner sequence and 3' sequence
gcacacagggcatcgtggacgtgtgtcgcgttgactagtacatgaccacttga

SEQ ID NO: 18387 - DNA, 53 bp, Artificial Sequence
  Description of Artificial Sequence: Synthetic hazel nut; inner sequence and 3' sequence
cgcgcaacgtgatggatgggctgatgcgcattgactagtacatgaccacttga

SEQ ID NO: 18388 - DNA, 53 bp, Artificial Sequence; identical to SEQ ID NO: 6882
  Description of Artificial Sequence: Synthetic hazel nut; inner sequence and 3' sequence

SEQ ID NO: 18389 - DNA, 53 bp, Artificial Sequence
  Description of Artificial Sequence: Synthetic hazel nut; inner sequence and 3' sequence
cgtaacgcatcatggtgcatgcgcttcacgttgactagtacatgaccacttga

SEQ ID NO: 18390 - DNA, 53 bp, Artificial Sequence; identical to SEQ ID NO: 2272
  Description of Artificial Sequence: Synthetic hazel nut; inner sequence and 3' sequence

SEQ ID NO: 18391 - DNA, 53 bp, Artificial Sequence; identical to SEQ ID NO: 2620
  Description of Artificial Sequence: Synthetic hazel nut; inner sequence and 3' sequence

SEQ ID NO: 18392 - DNA, 53 bp, Artificial Sequence; identical to SEQ ID NO: 2491
  Description of Artificial Sequence: Synthetic hazel nut; inner sequence and 3' sequence

SEQ ID NO: 18393 - DNA, 53 bp, Artificial Sequence; identical to SEQ ID NO: 2474
  Description of Artificial Sequence: Synthetic hazel nut; inner sequence and 3' sequence

SEQ ID NO: 18394 - DNA, 53 bp, Artificial Sequence; identical to SEQ ID NO: 2861
  Description of Artificial Sequence: Synthetic hazel nut; inner sequence and 3' sequence

SEQ ID NO: 18395 - DNA, 53 bp, Artificial Sequence; identical to SEQ ID NO: 2672
  Description of Artificial Sequence: Synthetic hazel nut; inner sequence and 3' sequence

SEQ ID NO: 18396 - DNA, 53 bp, Artificial Sequence; identical to SEQ ID NO: 6597
  Description of Artificial Sequence: Synthetic hazel nut; inner sequence and 3' sequence

SEQ ID NO: 18397 - DNA, 53 bp, Artificial Sequence; identical to SEQ ID NO: 2289
  Description of Artificial Sequence: Synthetic hazel nut; inner sequence and 3' sequence

SEQ ID NO: 18398 - DNA, 53 bp, Artificial Sequence; identical to SEQ ID NO: 2726
  Description of Artificial Sequence: Synthetic hazel nut; inner sequence and 3' sequence

SEQ ID NO: 18399 - DNA, 53 bp, Artificial Sequence
  Description of Artificial Sequence: Synthetic hazel nut; inner sequence and 3' sequence
cgcaccgcaagtgacgtgtccgtgccgtgattgactagtacatgaccacttga

SEQ ID NO: 18400 - DNA, 53 bp, Artificial Sequence; identical to SEQ ID NO: 2454
  Description of Artificial Sequence: Synthetic hazel nut; inner sequence and 3' sequence

SEQ ID NO: 18401 - DNA, 53 bp, Artificial Sequence; identical to SEQ ID NO: 2809
  Description of Artificial Sequence: Synthetic hazel nut; inner sequence and 3' sequence

SEQ ID NO: 18402 - DNA, 53 bp, Artificial Sequence; identical to SEQ ID NO: 2242
  Description of Artificial Sequence: Synthetic hazel nut; inner sequence and 3' sequence

SEQ ID NO: 18403 - DNA, 53 bp, Artificial Sequence; identical to SEQ ID NO: 2700
  Description of Artificial Sequence: Synthetic hazel nut; inner sequence and 3' sequence

SEQ ID NO: 18404 - DNA, 53 bp, Artificial Sequence; identical to SEQ ID NO: 2583
  Description of Artificial Sequence: Synthetic hazel nut; inner sequence and 3' sequence

SEQ ID NO: 18405 - DNA, 53 bp, Artificial Sequence; identical to SEQ ID NO: 2467
  Description of Artificial Sequence: Synthetic hazel nut; inner sequence and 3' sequence

SEQ ID NO: 18406 - DNA, 53 bp, Artificial Sequence; identical to SEQ ID NO: 2106
  Description of Artificial Sequence: Synthetic hazel nut; inner sequence and 3' sequence

SEQ ID NO: 18407 - DNA, 53 bp, Artificial Sequence; identical to SEQ ID NO: 2135
  Description of Artificial Sequence: Synthetic hazel nut; inner sequence and 3' sequence

SEQ ID NO: 18408 - DNA, 53 bp, Artificial Sequence
  Description of Artificial Sequence: Synthetic hazel nut; inner sequence and 3' sequence
cgtaccggcagggagcgtgcacactgcgcattgactagtacatgaccacttga

SEQ ID NO: 18409 - DNA, 53 bp, Artificial Sequence
  Description of Artificial Sequence: Synthetic hazel nut; inner sequence and 3' sequence
catgatggccgtgctgaccacgcgtgcgcattgactagtacatgaccacttga

SEQ ID NO: 18410 - DNA, 53 bp, Artificial Sequence; identical to SEQ ID NO: 2611
  Description of Artificial Sequence: Synthetic hazel nut; inner sequence and 3' sequence

SEQ ID NO: 18411 - DNA, 53 bp, Artificial Sequence; identical to SEQ ID NO: 6924
  Description of Artificial Sequence: Synthetic hazel nut; inner sequence and 3' sequence

SEQ ID NO: 18412 - DNA, 53 bp, Artificial Sequence
  Description of Artificial Sequence: Synthetic hazel nut; inner sequence and 3' sequence
cgacacgcatcagggacgcaacgctgcacgttgactagtacatgaccacttga

SEQ ID NO: 18413 - DNA, 53 bp, Artificial Sequence; identical to SEQ ID NO: 2535
  Description of Artificial Sequence: Synthetic hazel nut; inner sequence and 3' sequence

SEQ ID NO: 18414 - DNA, 53 bp, Artificial Sequence; identical to SEQ ID NO: 2442
  Description of Artificial Sequence: Synthetic hazel nut; inner sequence and 3' sequence

SEQ ID NO: 18415 - DNA, 53 bp, Artificial Sequence; identical to SEQ ID NO: 2886
  Description of Artificial Sequence: Synthetic hazel nut; inner sequence and 3' sequence

SEQ ID NO: 18416 - DNA, 53 bp, Artificial Sequence; identical to SEQ ID NO: 2326
  Description of Artificial Sequence: Synthetic hazel nut; inner sequence and 3' sequence

SEQ ID NO: 18417 - DNA, 53 bp, Artificial Sequence; identical to SEQ ID NO: 2358
  Description of Artificial Sequence: Synthetic hazel nut; inner sequence and 3' sequence

SEQ ID NO: 18418 - DNA, 53 bp, Artificial Sequence; identical to SEQ ID NO: 2438
  Description of Artificial Sequence: Synthetic hazel nut; inner sequence and 3' sequence

SEQ ID NO: 18419 - DNA, 53 bp, Artificial Sequence; identical to SEQ ID NO: 2153
  Description of Artificial Sequence: Synthetic hazel nut; inner sequence and 3' sequence

SEQ ID NO: 18420 - DNA, 53 bp, Artificial Sequence; identical to SEQ ID NO: 2990
  Description of Artificial Sequence: Synthetic hazel nut; inner sequence and 3' sequence

SEQ ID NO: 18421 - DNA, 53 bp, Artificial Sequence; identical to SEQ ID NO: 2297
  Description of Artificial Sequence: Synthetic hazel nut; inner sequence and 3' sequence

SEQ ID NO: 18422 - DNA, 53 bp, Artificial Sequence; identical to SEQ ID NO: 2960
  Description of Artificial Sequence: Synthetic hazel nut; inner sequence and 3' sequence

SEQ ID NO: 18423 - DNA, 53 bp, Artificial Sequence; identical to SEQ ID NO: 2571
  Description of Artificial Sequence: Synthetic hazel nut; inner sequence and 3' sequence

SEQ ID NO: 18424 - DNA, 53 bp, Artificial Sequence; identical to SEQ ID NO: 2477
  Description of Artificial Sequence: Synthetic hazel nut; inner sequence and 3' sequence

SEQ ID NO: 18425 - DNA, 53 bp, Artificial Sequence; identical to SEQ ID NO: 2736
  Description of Artificial Sequence: Synthetic hazel nut; inner sequence and 3' sequence

SEQ ID NO: 18426 - DNA, 53 bp, Artificial Sequence; identical to SEQ ID NO: 6663
  Description of Artificial Sequence: Synthetic hazel nut; inner sequence and 3' sequence

SEQ ID NO: 18427 - DNA, 53 bp, Artificial Sequence
  Description of Artificial Sequence: Synthetic hazel nut; inner sequence and 3' sequence
gacatgcgatgaacgaggcatgatgcgtcattgactagtacatgaccacttga

SEQ ID NO: 18428 - DNA, 53 bp, Artificial Sequence; identical to SEQ ID NO: 6706
  Description of Artificial Sequence: Synthetic hazel nut; inner sequence and 3' sequence

SEQ ID NO: 18429 - DNA, 53 bp, Artificial Sequence; identical to SEQ ID NO: 2530
  Description of Artificial Sequence: Synthetic hazel nut; inner sequence and 3' sequence

SEQ ID NO: 18430 - DNA, 53 bp, Artificial Sequence; identical to SEQ ID NO: 2632
  Description of Artificial Sequence: Synthetic hazel nut; inner sequence and 3' sequence

SEQ ID NO: 18431 - DNA, 53 bp, Artificial Sequence
  Description of Artificial Sequence: Synthetic hazel nut; inner sequence and 3' sequence
gcatgccgtacgatccctcactgtgcggtgttgactagtacatgaccacttga

SEQ ID NO: 18432 - DNA, 53 bp, Artificial Sequence; identical to SEQ ID NO: 2828
  Description of Artificial Sequence: Synthetic hazel nut; inner sequence and 3' sequence

SEQ ID NO: 18433 - DNA, 53 bp, Artificial Sequence; identical to SEQ ID NO: 2392
  Description of Artificial Sequence: Synthetic hazel nut; inner sequence and 3' sequence

SEQ ID NO: 18434 - DNA, 53 bp, Artificial Sequence
  Description of Artificial Sequence: Synthetic hazel nut; inner sequence and 3' sequence
cgtgctgacatgctcgtccctcactgcgtgttgactagtacatgaccacttga

SEQ ID NO: 18435 - DNA, 53 bp, Artificial Sequence; identical to SEQ ID NO: 2604
  Description of Artificial Sequence: Synthetic hazel nut; inner sequence and 3' sequence

SEQ ID NO: 18436 - DNA, 53 bp, Artificial Sequence
  Description of Artificial Sequence: Synthetic hazel nut; inner sequence and 3' sequence
gcgacacacggatcgaccttcgtagccacgttgactagtacatgaccacttga

SEQ ID NO: 18437 - DNA, 53 bp, Artificial Sequence; identical to SEQ ID NO: 2156
  Description of Artificial Sequence: Synthetic hazel nut; inner sequence and 3' sequence

SEQ ID NO: 18438 - DNA, 53 bp, Artificial Sequence; identical to SEQ ID NO: 2387
  Description of Artificial Sequence: Synthetic hazel nut; inner sequence and 3' sequence

SEQ ID NO: 18439 - DNA, 53 bp, Artificial Sequence; identical to SEQ ID NO: 2377
  Description of Artificial Sequence: Synthetic hazel nut; inner sequence and 3' sequence

SEQ ID NO: 18440 - DNA, 53 bp, Artificial Sequence; identical to SEQ ID NO: 2569
  Description of Artificial Sequence: Synthetic hazel nut; inner sequence and 3' sequence

SEQ ID NO: 18441 - DNA, 53 bp, Artificial Sequence; identical to SEQ ID NO: 2350
  Description of Artificial Sequence: Synthetic hazel nut; inner sequence and 3' sequence

SEQ ID NO: 18442 - DNA, 53 bp, Artificial Sequence
  Description of Artificial Sequence: Synthetic hazel nut; inner sequence and 3' sequence
acgtatgccgcatcgtcacgccaacatggtttgactagtacatgaccacttga

SEQ ID NO: 18443 - DNA, 53 bp, Artificial Sequence; identical to SEQ ID NO: 2303
  Description of Artificial Sequence: Synthetic hazel nut; inner sequence and 3' sequence

SEQ ID NO: 18444 - DNA, 53 bp, Artificial Sequence; identical to SEQ ID NO: 2215
  Description of Artificial Sequence: Synthetic hazel nut; inner sequence and 3' sequence

SEQ ID NO: 18445 - DNA, 53 bp, Artificial Sequence; identical to SEQ ID NO: 6621
  Description of Artificial Sequence: Synthetic hazel nut; inner sequence and 3' sequence

SEQ ID NO: 18446 - DNA, 53 bp, Artificial Sequence; identical to SEQ ID NO: 2347
  Description of Artificial Sequence: Synthetic hazel nut; inner sequence and 3' sequence

SEQ ID NO: 18447 - DNA, 53 bp, Artificial Sequence; identical to SEQ ID NO: 2928
  Description of Artificial Sequence: Synthetic hazel nut; inner sequence and 3' sequence

SEQ ID NO: 18448 - DNA, 53 bp, Artificial Sequence; identical to SEQ ID NO: 6819
  Description of Artificial Sequence: Synthetic hazel nut; inner sequence and 3' sequence

SEQ ID NO: 18449 - DNA, 53 bp, Artificial Sequence; identical to SEQ ID NO: 2342
  Description of Artificial Sequence: Synthetic hazel nut; inner sequence and 3' sequence

SEQ ID NO: 18450 - DNA, 53 bp, Artificial Sequence; identical to SEQ ID NO: 2320
  Description of Artificial Sequence: Synthetic hazel nut; inner sequence and 3' sequence

SEQ ID NO: 18451 - DNA, 53 bp, Artificial Sequence
  Description of Artificial Sequence: Synthetic hazel nut; inner sequence and 3' sequence
gcatggcaacgcgtacctctgcacttcacattgactagtacatgaccacttga

SEQ ID NO: 18452 - DNA, 53 bp, Artificial Sequence; identical to SEQ ID NO: 2127
  Description of Artificial Sequence: Synthetic hazel nut; inner sequence and 3' sequence

SEQ ID NO: 18453 - DNA, 53 bp, Artificial Sequence; identical to SEQ ID NO: 6502
  Description of Artificial Sequence: Synthetic hazel nut; inner sequence and 3' sequence

SEQ ID NO: 18454 - DNA, 53 bp, Artificial Sequence; identical to SEQ ID NO: 2457
  Description of Artificial Sequence: Synthetic hazel nut; inner sequence and 3' sequence

SEQ ID NO: 18455 - DNA, 53 bp, Artificial Sequence; identical to SEQ ID NO: 2498
  Description of Artificial Sequence: Synthetic hazel nut; inner sequence and 3' sequence

SEQ ID NO: 18456 - DNA, 53 bp, Artificial Sequence; identical to SEQ ID NO: 2116
  Description of Artificial Sequence: Synthetic hazel nut; inner sequence and 3' sequence

SEQ ID NO: 18457 - DNA, 53 bp, Artificial Sequence
  Description of Artificial Sequence: Synthetic hazel nut; inner sequence and 3' sequence
ggaatgcgatgaacgaggcatgatgcgtcattgactagtacatgaccacttga

SEQ ID NO: 18458 - DNA, 53 bp, Artificial Sequence; identical to SEQ ID NO: 2254
  Description of Artificial Sequence: Synthetic hazel nut; inner sequence and 3' sequence

SEQ ID NO: 18459 - DNA, 53 bp, Artificial Sequence; identical to SEQ ID NO: 2572
  Description of Artificial Sequence: Synthetic hazel nut; inner sequence and 3' sequence

SEQ ID NO: 18460 - DNA, 53 bp, Artificial Sequence; identical to SEQ ID NO: 2288
  Description of Artificial Sequence: Synthetic hazel nut; inner sequence and 3' sequence

SEQ ID NO: 18461 - DNA, 53 bp, Artificial Sequence; identical to SEQ ID NO: 2439
  Description of Artificial Sequence: Synthetic hazel nut; inner sequence and 3' sequence

SEQ ID NO: 18462 - DNA, 53 bp, Artificial Sequence; identical to SEQ ID NO: 10826
  Description of Artificial Sequence: Synthetic hazel nut; inner sequence and 3' sequence

SEQ ID NO: 18463 - DNA, 53 bp, Artificial Sequence; identical to SEQ ID NO: 2414
  Description of Artificial Sequence: Synthetic hazel nut; inner sequence and 3' sequence

SEQ ID NO: 18464 - DNA, 53 bp, Artificial Sequence; identical to SEQ ID NO: 2186
  Description of Artificial Sequence: Synthetic hazel nut; inner sequence and 3' sequence

SEQ ID NO: 18465 - DNA, 53 bp, Artificial Sequence; identical to SEQ ID NO: 2868
  Description of Artificial Sequence: Synthetic hazel nut; inner sequence and 3' sequence

SEQ ID NO: 18466 - DNA, 54 bp, Artificial Sequence; identical to SEQ ID NO: 2258
  Description of Artificial Sequence: Synthetic hazel nut; inner sequence and 3' sequence

SEQ ID NO: 18467 - DNA, 53 bp, Artificial Sequence; identical to SEQ ID NO: 2204
  Description of Artificial Sequence: Synthetic hazel nut; inner sequence and 3' sequence

SEQ ID NO: 18468 - DNA, 53 bp, Artificial Sequence; identical to SEQ ID NO: 6420
  Description of Artificial Sequence: Synthetic hazel nut; inner sequence and 3' sequence

SEQ ID NO: 18469 - DNA, 53 bp, Artificial Sequence; identical to SEQ ID NO: 6617
  Description of Artificial Sequence: Synthetic hazel nut; inner sequence and 3' sequence

SEQ ID NO: 18470 - DNA, 53 bp, Artificial Sequence; identical to SEQ ID NO: 2212
  Description of Artificial Sequence: Synthetic hazel nut; inner sequence and 3' sequence

SEQ ID NO: 18471 - DNA, 53 bp, Artificial Sequence
  Description of Artificial Sequence: Synthetic hazel nut; inner sequence and 3' sequence
gcacgtgctgtgaccggtaacgatgtggcattgactagtacatgaccacttga

SEQ ID NO: 18472 - DNA, 53 bp, Artificial Sequence; identical to SEQ ID NO: 2239
  Description of Artificial Sequence: Synthetic hazel nut; inner sequence and 3' sequence

SEQ ID NO: 18473 - DNA, 53 bp, Artificial Sequence; identical to SEQ ID NO: 2485
  Description of Artificial Sequence: Synthetic hazel nut; inner sequence and 3' sequence

SEQ ID NO: 18474 - DNA, 53 bp, Artificial Sequence; identical to SEQ ID NO: 2399
  Description of Artificial Sequence: Synthetic hazel nut; inner sequence and 3' sequence

SEQ ID NO: 18475 - DNA, 53 bp, Artificial Sequence; identical to SEQ ID NO: 2691
  Description of Artificial Sequence: Synthetic hazel nut; inner sequence and 3' sequence

SEQ ID NO: 18476 - DNA, 53 bp, Artificial Sequence
  Description of Artificial Sequence: Synthetic hazel nut; inner sequence and 3' sequence
ggtatgcgatgaacgaggcatgatgcgtcattgactagtacatgaccacttga

SEQ ID NO: 18477 - DNA, 53 bp, Artificial Sequence; identical to SEQ ID NO: 2603
  Description of Artificial Sequence: Synthetic hazel nut; inner sequence and 3' sequence

SEQ ID NO: 18478 - DNA, 53 bp, Artificial Sequence; identical to SEQ ID NO: 2490
  Description of Artificial Sequence: Synthetic hazel nut; inner sequence and 3' sequence

SEQ ID NO: 18479 - DNA, 53 bp, Artificial Sequence
  Description of Artificial Sequence: Synthetic hazel nut; inner sequence and 3' sequence
ggccacgatgaccctccctacgtacgcacgttgactagtacatgaccacttga

SEQ ID NO: 18480 - DNA, 53 bp, Artificial Sequence
  Description of Artificial Sequence: Synthetic hazel nut; inner sequence and 3' sequence
gtgcgaaacggaccatacgtacagtacgcgttgactagtacatgaccacttga

SEQ ID NO: 18481 - DNA, 53 bp, Artificial Sequence; identical to SEQ ID NO: 6336
  Description of Artificial Sequence: Synthetic hazel nut; inner sequence and 3' sequence

SEQ ID NO: 18482 - DNA, 53 bp, Artificial Sequence
  Description of Artificial Sequence: Synthetic hazel nut; inner sequence and 3' sequence
ccgcacgatgccgatggaccatgcgacacgttgactagtacatgaccacttga

SEQ ID NO: 18483 - DNA, 53 bp, Artificial Sequence; identical to SEQ ID NO: 2973
  Description of Artificial Sequence: Synthetic hazel nut; inner sequence and 3' sequence

SEQ ID NO: 18484 - DNA, 53 bp, Artificial Sequence; identical to SEQ ID NO: 6913
  Description of Artificial Sequence: Synthetic hazel nut; inner sequence and 3' sequence

SEQ ID NO: 18485 - DNA, 53 bp, Artificial Sequence; identical to SEQ ID NO: 2205
  Description of Artificial Sequence: Synthetic hazel nut; inner sequence and 3' sequence

SEQ ID NO: 18486 - DNA, 53 bp, Artificial Sequence; identical to SEQ ID NO: 2835
  Description of Artificial Sequence: Synthetic hazel nut; inner sequence and 3' sequence

SEQ ID NO: 18487 - DNA, 53 bp, Artificial Sequence; identical to SEQ ID NO: 2298
  Description of Artificial Sequence: Synthetic hazel nut; inner sequence and 3' sequence

SEQ ID NO: 18488 - DNA, 53 bp, Artificial Sequence
  Description of Artificial Sequence: Synthetic hazel nut; inner sequence and 3' sequence
gcaacagcatgccgatacgtaccgcgtacattgactagtacatgaccacttga

SEQ ID NO: 18489 - DNA, 53 bp, Artificial Sequence; identical to SEQ ID NO: 2192
  Description of Artificial Sequence: Synthetic hazel nut; inner sequence and 3' sequence

SEQ ID NO: 18490 - DNA, 53 bp, Artificial Sequence; identical to SEQ ID NO: 6297
  Description of Artificial Sequence: Synthetic hazel nut; inner sequence and 3' sequence

SEQ ID NO: 18491 - DNA, 53 bp, Artificial Sequence; identical to SEQ ID NO: 2155
  Description of Artificial Sequence: Synthetic hazel nut; inner sequence and 3' sequence

SEQ ID NO: 18492 - DNA, 53 bp, Artificial Sequence; identical to SEQ ID NO: 2553
  Description of Artificial Sequence: Synthetic hazel nut; inner sequence and 3' sequence

SEQ ID NO: 18493 - DNA, 53 bp, Artificial Sequence; identical to SEQ ID NO: 2267
  Description of Artificial Sequence: Synthetic hazel nut; inner sequence and 3' sequence

SEQ ID NO: 18494 - DNA, 53 bp, Artificial Sequence; identical to SEQ ID NO: 2568
  Description of Artificial Sequence: Synthetic hazel nut; inner sequence and 3' sequence

SEQ ID NO: 18495 - DNA, 53 bp, Artificial Sequence; identical to SEQ ID NO: 3001
  Description of Artificial Sequence: Synthetic hazel nut; inner sequence and 3' sequence

SEQ ID NO: 18496 - DNA, 53 bp, Artificial Sequence; identical to SEQ ID NO: 6994
  Description of Artificial Sequence: Synthetic hazel nut; inner sequence and 3' sequence

SEQ ID NO: 18497 - DNA, 53 bp, Artificial Sequence; identical to SEQ ID NO: 2175
  Description of Artificial Sequence: Synthetic hazel nut; inner sequence and 3' sequence

SEQ ID NO: 18498 - DNA, 53 bp, Artificial Sequence; identical to SEQ ID NO: 6774
  Description of Artificial Sequence: Synthetic hazel nut; inner sequence and 3' sequence

SEQ ID NO: 18499 - DNA, 53 bp, Artificial Sequence; identical to SEQ ID NO: 2357
  Description of Artificial Sequence: Synthetic hazel nut; inner sequence and 3' sequence

SEQ ID NO: 18500 - DNA, 54 bp, Artificial Sequence; identical to SEQ ID NO: 2250
  Description of Artificial Sequence: Synthetic hazel nut; inner sequence and 3' sequence

SEQ ID NO: 18501 - DNA, 53 bp, Artificial Sequence
  Description of Artificial Sequence: Synthetic hazel nut; inner sequence and 3' sequence
cgcaacgagcgtacgacgatggcacaccgtttgactagtacatgaccacttga

SEQ ID NO: 18502 - DNA, 53 bp, Artificial Sequence; identical to SEQ ID NO: 2481
  Description of Artificial Sequence: Synthetic hazel nut; inner sequence and 3' sequence

SEQ ID NO: 18503 - DNA, 53 bp, Artificial Sequence
  Description of Artificial Sequence: Synthetic hazel nut; inner sequence and 3' sequence
cgtgacggtgacggcacatgcgacgcgacattgactagtacatgaccacttga

SEQ ID NO: 18504 - DNA, 53 bp, Artificial Sequence
  Description of Artificial Sequence: Synthetic hazel nut; inner sequence and 3' sequence
ggtgacacgcattacgccttcgacgtcacgttgactagtacatgaccacttga

SEQ ID NO: 18505 - DNA, 53 bp, Artificial Sequence; identical to SEQ ID NO: 2563
  Description of Artificial Sequence: Synthetic hazel nut; inner sequence and 3' sequence

SEQ ID NO: 18506 - DNA, 53 bp, Artificial Sequence; identical to SEQ ID NO: 2379
  Description of Artificial Sequence: Synthetic hazel nut; inner sequence and 3' sequence

SEQ ID NO: 18507 - DNA, 53 bp, Artificial Sequence; identical to SEQ ID NO: 6573
  Description of Artificial Sequence: Synthetic hazel nut; inner sequence and 3' sequence

SEQ ID NO: 18508 - DNA, 53 bp, Artificial Sequence; identical to SEQ ID NO: 2299
  Description of Artificial Sequence: Synthetic hazel nut; inner sequence and 3' sequence

SEQ ID NO: 18509 - DNA, 53 bp, Artificial Sequence; identical to SEQ ID NO: 2767
  Description of Artificial Sequence: Synthetic hazel nut; inner sequence and 3' sequence

SEQ ID NO: 18510 - DNA, 53 bp, Artificial Sequence; identical to SEQ ID NO: 2085
  Description of Artificial Sequence: Synthetic hazel nut; inner sequence and 3' sequence

SEQ ID NO: 18511 - DNA, 53 bp, Artificial Sequence; identical to SEQ ID NO: 2262
  Description of Artificial Sequence: Synthetic hazel nut; inner sequence and 3' sequence

SEQ ID NO: 18512 - DNA, 53 bp, Artificial Sequence; identical to SEQ ID NO: 2862
  Description of Artificial Sequence: Synthetic hazel nut; inner sequence and 3' sequence

SEQ ID NO: 18513 - DNA, 53 bp, Artificial Sequence
  Description of Artificial Sequence: Synthetic hazel nut; inner sequence and 3' sequence
tgacgcgaatggacgcacactgcctacgcattgactagtacatgaccacttga

SEQ ID NO: 18514 - DNA, 53 bp, Artificial Sequence; identical to SEQ ID NO: 2754
  Description of Artificial Sequence: Synthetic hazel nut; inner sequence and 3' sequence

SEQ ID NO: 18515 - DNA, 53 bp, Artificial Sequence; identical to SEQ ID NO: 2681
  Description of Artificial Sequence: Synthetic hazel nut; inner sequence and 3' sequence

SEQ ID NO: 18516 - DNA, 49 bp, Artificial Sequence; identical to SEQ ID NO: 2516
  Description of Artificial Sequence: Synthetic hazel nut; inner sequence and 3' sequence

SEQ ID NO: 18517 - DNA, 53 bp, Artificial Sequence; identical to SEQ ID NO: 2308
  Description of Artificial Sequence: Synthetic hazel nut; inner sequence and 3' sequence

SEQ ID NO: 18518 - DNA, 53 bp, Artificial Sequence; identical to SEQ ID NO: 2306
  Description of Artificial Sequence: Synthetic hazel nut; inner sequence and 3' sequence

SEQ ID NO: 18519 - DNA, 53 bp, Artificial Sequence; identical to SEQ ID NO: 2381
  Description of Artificial Sequence: Synthetic hazel nut; inner sequence and 3' sequence

SEQ ID NO: 18520 - DNA, 53 bp, Artificial Sequence; identical to SEQ ID NO: 2419
  Description of Artificial Sequence: Synthetic hazel nut; inner sequence and 3' sequence

SEQ ID NO: 18521 - DNA, 53 bp, Artificial Sequence; identical to SEQ ID NO: 2507
  Description of Artificial Sequence: Synthetic hazel nut; inner sequence and 3' sequence

SEQ ID NO: 18522 - DNA, 53 bp, Artificial Sequence; identical to SEQ ID NO: 2130
  Description of Artificial Sequence: Synthetic hazel nut; inner sequence and 3' sequence

SEQ ID NO: 18523 - DNA, 53 bp, Artificial Sequence; identical to SEQ ID NO: 2746
  Description of Artificial Sequence: Synthetic hazel nut; inner sequence and 3' sequence

SEQ ID NO: 18524 - DNA, 53 bp, Artificial Sequence
  Description of Artificial Sequence: Synthetic hazel nut; inner sequence and 3' sequence
cgacacacagtgacgacagcatccgtcgtgttgactagtacatgaccacttga

SEQ ID NO: 18525 - DNA, 53 bp, Artificial Sequence; identical to SEQ ID NO: 10546
  Description of Artificial Sequence: Synthetic hazel nut; inner sequence and 3' sequence

SEQ ID NO: 18526 - DNA, 53 bp, Artificial Sequence; identical to SEQ ID NO: 2699
  Description of Artificial Sequence: Synthetic hazel nut; inner sequence and 3' sequence

SEQ ID NO: 18527 - DNA, 53 bp, Artificial Sequence; identical to SEQ ID NO: 2312
  Description of Artificial Sequence: Synthetic hazel nut; inner sequence and 3' sequence

SEQ ID NO: 18528 - DNA, 53 bp, Artificial Sequence
  Description of Artificial Sequence: Synthetic hazel nut; inner sequence and 3' sequence
gtgctgcatgccaccttgcctaacgtgtcattgactagtacatgaccacttga

SEQ ID NO: 18529 - DNA, 53 bp, Artificial Sequence; identical to SEQ ID NO: 2236
  Description of Artificial Sequence: Synthetic hazel nut; inner sequence and 3' sequence

SEQ ID NO: 18530 - DNA, 53 bp, Artificial Sequence; identical to SEQ ID NO: 2162
  Description of Artificial Sequence: Synthetic hazel nut; inner sequence and 3' sequence

SEQ ID NO: 18531 - DNA, 53 bp, Artificial Sequence
  Description of Artificial Sequence: Synthetic hazel nut; inner sequence and 3' sequence
ggcatgcgatgaccgaggcatgatgcgtcattgactagtacatgaccacttga

SEQ ID NO: 18532 - DNA, 53 bp, Artificial Sequence; identical to SEQ ID NO: 2191
  Description of Artificial Sequence: Synthetic hazel nut; inner sequence and 3' sequence

SEQ ID NO: 18533 - DNA, 53 bp, Artificial Sequence; identical to SEQ ID NO: 2243
  Description of Artificial Sequence: Synthetic hazel nut; inner sequence and 3' sequence

SEQ ID NO: 18534 - DNA, 53 bp, Artificial Sequence; identical to SEQ ID NO: 2826
  Description of Artificial Sequence: Synthetic hazel nut; inner sequence and 3' sequence

SEQ ID NO: 18535 - DNA, 53 bp, Artificial Sequence; identical to SEQ ID NO: 2497
  Description of Artificial Sequence: Synthetic hazel nut; inner sequence and 3' sequence

SEQ ID NO: 18536 - DNA, 53 bp, Artificial Sequence; identical to SEQ ID NO: 2586
  Description of Artificial Sequence: Synthetic hazel nut; inner sequence and 3' sequence

SEQ ID NO: 18537 - DNA, 53 bp, Artificial Sequence; identical to SEQ ID NO: 2752
  Description of Artificial Sequence: Synthetic hazel nut; inner sequence and 3' sequence

SEQ ID NO: 18538 - DNA, 54 bp, Artificial Sequence; identical to SEQ ID NO: 2845
  Description of Artificial Sequence: Synthetic hazel nut; inner sequence and 3' sequence

SEQ ID NO: 18539 - DNA, 53 bp, Artificial Sequence; identical to SEQ ID NO: 2952
  Description of Artificial Sequence: Synthetic hazel nut; inner sequence and 3' sequence

SEQ ID NO: 18540 - DNA, 52 bp, Artificial Sequence
  Description of Artificial Sequence: Synthetic hazel nut; inner sequence and 3' sequence
cgcaacgacactcacgggcacgacgcgcattgactagtacatgaccacttga

SEQ ID NO: 18541 - DNA, 53 bp, Artificial Sequence; identical to SEQ ID NO: 2466
  Description of Artificial Sequence: Synthetic hazel nut; inner sequence and 3' sequence

SEQ ID NO: 18542 - DNA, 53 bp, Artificial Sequence; identical to SEQ ID NO: 2394
  Description of Artificial Sequence: Synthetic hazel nut; inner sequence and 3' sequence

SEQ ID NO: 18543 - DNA, 53 bp, Artificial Sequence; identical to SEQ ID NO: 2336
  Description of Artificial Sequence: Synthetic hazel nut; inner sequence and 3' sequence

SEQ ID NO: 18544 - DNA, 53 bp, Artificial Sequence
  Description of Artificial Sequence: Synthetic hazel nut; inner sequence and 3' sequence
cgaccatgcacacgtggtgatgacggcatgttgactagtacatgaccacttga

SEQ ID NO: 18545 - DNA, 53 bp, Artificial Sequence; identical to SEQ ID NO: 2456
  Description of Artificial Sequence: Synthetic hazel nut; inner sequence and 3' sequence

SEQ ID NO: 18546 - DNA, 53 bp, Artificial Sequence; identical to SEQ ID NO: 2524
  Description of Artificial Sequence: Synthetic hazel nut; inner sequence and 3' sequence

SEQ ID NO: 18547 - DNA, 53 bp, Artificial Sequence; identical to SEQ ID NO: 2447
  Description of Artificial Sequence: Synthetic hazel nut; inner sequence and 3' sequence

SEQ ID NO: 18548 - DNA, 53 bp, Artificial Sequence; identical to SEQ ID NO: 2859
  Description of Artificial Sequence: Synthetic hazel nut; inner sequence and 3' sequence

SEQ ID NO: 18549 - DNA, 53 bp, Artificial Sequence; identical to SEQ ID NO: 2628
  Description of Artificial Sequence: Synthetic hazel nut; inner sequence and 3' sequence

SEQ ID NO: 18550 - DNA, 53 bp, Artificial Sequence; identical to SEQ ID NO: 2959
  Description of Artificial Sequence: Synthetic hazel nut; inner sequence and 3' sequence

SEQ ID NO: 18551 - DNA, 53 bp, Artificial Sequence; identical to SEQ ID NO: 7000
  Description of Artificial Sequence: Synthetic hazel nut; inner sequence and 3' sequence

SEQ ID NO: 18552 - DNA, 53 bp, Artificial Sequence; identical to SEQ ID NO: 2788
  Description of Artificial Sequence: Synthetic hazel nut; inner sequence and 3' sequence

SEQ ID NO: 18553 - DNA, 53 bp, Artificial Sequence; identical to SEQ ID NO: 2393
  Description of Artificial Sequence: Synthetic hazel nut; inner sequence and 3' sequence

SEQ ID NO: 18554 - DNA, 53 bp, Artificial Sequence
  Description of Artificial Sequence: Synthetic hazel nut; inner sequence and 3' sequence
ccgatgcggaccgacacacctcaccttgcgttgactagtacatgaccacttga

SEQ ID NO: 18555 - DNA, 53 bp, Artificial Sequence
  Description of Artificial Sequence: Synthetic hazel nut; inner sequence and 3' sequence
gccatgcgatgaacgaggcatgatgcgtcattgactagtacatgaccacttga

SEQ ID NO: 18556 - DNA, 53 bp, Artificial Sequence; identical to SEQ ID NO: 6792
  Description of Artificial Sequence: Synthetic hazel nut; inner sequence and 3' sequence

SEQ ID NO: 18557 - DNA, 51 bp, Artificial Sequence; identical to SEQ ID NO: 6786
  Description of Artificial Sequence: Synthetic hazel nut; inner sequence and 3' sequence

SEQ ID NO: 18558 - DNA, 53 bp, Artificial Sequence; identical to SEQ ID NO: 2840
  Description of Artificial Sequence: Synthetic hazel nut; inner sequence and 3' sequence

SEQ ID NO: 18559 - DNA, 53 bp, Artificial Sequence; identical to SEQ ID NO: 2860
  Description of Artificial Sequence: Synthetic hazel nut; inner sequence and 3' sequence

SEQ ID NO: 18560 - DNA, 53 bp, Artificial Sequence; identical to SEQ ID NO: 2825
  Description of Artificial Sequence: Synthetic hazel nut; inner sequence and 3' sequence

SEQ ID NO: 18561 - DNA, 53 bp, Artificial Sequence
  Description of Artificial Sequence: Synthetic hazel nut; inner sequence and 3' sequence
ggcatgcgatgaacgaggcatgacgcgtcattgactagtacatgaccacttga

SEQ ID NO: 18562 - DNA, 53 bp, Artificial Sequence; identical to SEQ ID NO: 2478
  Description of Artificial Sequence: Synthetic hazel nut; inner sequence and 3' sequence

SEQ ID NO: 18563 - DNA, 53 bp, Artificial Sequence; identical to SEQ ID NO: 6229
  Description of Artificial Sequence: Synthetic hazel nut; inner sequence and 3' sequence

SEQ ID NO: 18564 - DNA, 53 bp, Artificial Sequence; identical to SEQ ID NO: 6915
  Description of Artificial Sequence: Synthetic hazel nut; inner sequence and 3' sequence

SEQ ID NO: 18565 - DNA, 53 bp, Artificial Sequence; identical to SEQ ID NO: 2373
  Description of Artificial Sequence: Synthetic hazel nut; inner sequence and 3' sequence

SEQ ID NO: 18566 - DNA, 53 bp, Artificial Sequence; identical to SEQ ID NO: 2189
  Description of Artificial Sequence: Synthetic hazel nut; inner sequence and 3' sequence

SEQ ID NO: 18567 - DNA, 53 bp, Artificial Sequence; identical to SEQ ID NO: 2545
  Description of Artificial Sequence: Synthetic hazel nut; inner sequence and 3' sequence

SEQ ID NO: 18568 - DNA, 53 bp, Artificial Sequence; identical to SEQ ID NO: 2295
  Description of Artificial Sequence: Synthetic hazel nut; inner sequence and 3' sequence

SEQ ID NO: 18569 - DNA, 53 bp, Artificial Sequence; identical to SEQ ID NO: 2460
  Description of Artificial Sequence: Synthetic hazel nut; inner sequence and 3' sequence

SEQ ID NO: 18570 - DNA, 53 bp, Artificial Sequence; identical to SEQ ID NO: 2696
  Description of Artificial Sequence: Synthetic hazel nut; inner sequence and 3' sequence

SEQ ID NO: 18571 - DNA, 53 bp, Artificial Sequence; identical to SEQ ID NO: 2141
  Description of Artificial Sequence: Synthetic hazel nut; inner sequence and 3' sequence

SEQ ID NO: 18572 - DNA, 53 bp, Artificial Sequence; identical to SEQ ID NO: 2529
  Description of Artificial Sequence: Synthetic hazel nut; inner sequence and 3' sequence

SEQ ID NO: 18573 - DNA, 53 bp, Artificial Sequence
  Description of Artificial Sequence: Synthetic hazel nut; inner sequence and 3' sequence
gcgtgtcagcaatacgtcctcatctgcgcgttgactagtacatgaccacttga

SEQ ID NO: 18574 - DNA, 53 bp, Artificial Sequence; identical to SEQ ID NO: 6995
  Description of Artificial Sequence: Synthetic hazel nut; inner sequence and 3' sequence

SEQ ID NO: 18575 - DNA, 53 bp, Artificial Sequence; identical to SEQ ID NO: 2372
  Description of Artificial Sequence: Synthetic hazel nut; inner sequence and 3' sequence

SEQ ID NO: 18576 - DNA, 53 bp, Artificial Sequence; identical to SEQ ID NO: 2887
  Description of Artificial Sequence: Synthetic hazel nut; inner sequence and 3' sequence

SEQ ID NO: 18577 - DNA, 53 bp, Artificial Sequence; identical to SEQ ID NO: 2517
  Description of Artificial Sequence: Synthetic hazel nut; inner sequence and 3' sequence

SEQ ID NO: 18578 - DNA, 54 bp, Artificial Sequence; identical to SEQ ID NO: 2150
  Description of Artificial Sequence: Synthetic hazel nut; inner sequence and 3' sequence

SEQ ID NO: 18579 - DNA, 53 bp, Artificial Sequence; identical to SEQ ID NO: 2837
  Description of Artificial Sequence: Synthetic hazel nut; inner sequence and 3' sequence

SEQ ID NO: 18580 - DNA, 53 bp, Artificial Sequence; identical to SEQ ID NO: 2113
  Description of Artificial Sequence: Synthetic hazel nut; inner sequence and 3' sequence

SEQ ID NO: 18581 - DNA, 53 bp, Artificial Sequence; identical to SEQ ID NO: 2638
  Description of Artificial Sequence: Synthetic hazel nut; inner sequence and 3' sequence

SEQ ID NO: 18582 - DNA, 53 bp, Artificial Sequence; identical to SEQ ID NO: 2388
  Description of Artificial Sequence: Synthetic hazel nut; inner sequence and 3' sequence

SEQ ID NO: 18583 - DNA, 53 bp, Artificial Sequence
  Description of Artificial Sequence: Synthetic hazel nut; inner sequence and 3' sequence
cgcatcgtacgtactcctcgtcactgcgcgttgactagtacatgaccacttga

SEQ ID NO: 18584 - DNA, 53 bp, Artificial Sequence; identical to SEQ ID NO: 2227
  Description of Artificial Sequence: Synthetic hazel nut; inner sequence and 3' sequence

SEQ ID NO: 18585 - DNA, 53 bp, Artificial Sequence
  Description of Artificial Sequence: Synthetic hazel nut; inner sequence and 3' sequence
cgtaccgcaagtgacgtgtcagtgccgtgattgactagtacatgaccacttga

SEQ ID NO: 18586 - DNA, 53 bp, Artificial Sequence; identical to SEQ ID NO: 6931
  Description of Artificial Sequence: Synthetic hazel nut; inner sequence and 3' sequence

SEQ ID NO: 18587 - DNA, 53 bp, Artificial Sequence; identical to SEQ ID NO: 2487
  Description of Artificial Sequence: Synthetic hazel nut; inner sequence and 3' sequence

SEQ ID NO: 18588 - DNA, 53 bp, Artificial Sequence; identical to SEQ ID NO: 6702
  Description of Artificial Sequence: Synthetic hazel nut; inner sequence and 3' sequence

SEQ ID NO: 18589 - DNA, 53 bp, Artificial Sequence; identical to SEQ ID NO: 6807
  Description of Artificial Sequence: Synthetic hazel nut; inner sequence and 3' sequence

SEQ ID NO: 18590 - DNA, 53 bp, Artificial Sequence; identical to SEQ ID NO: 6652
  Description of Artificial Sequence: Synthetic hazel nut; inner sequence and 3' sequence

SEQ ID NO: 18591 - DNA, 53 bp, Artificial Sequence
  Description of Artificial Sequence: Synthetic hazel nut; inner sequence and 3' sequence
ggcatgcgatgaacgagacatgatgcgtcattgactagtacatgaccacttga

SEQ ID NO: 18592 - DNA, 53 bp, Artificial Sequence
  Description of Artificial Sequence: Synthetic hazel nut; inner sequence and 3' sequence
ggacgacgcgaccaagacagcatgcgcacattgactagtacatgaccacttga

SEQ ID NO: 18593 - DNA, 53 bp, Artificial Sequence; identical to SEQ ID NO: 10816
  Description of Artificial Sequence: Synthetic hazel nut; inner sequence and 3' sequence

SEQ ID NO: 18594 - DNA, 53 bp, Artificial Sequence; identical to SEQ ID NO: 2910
  Description of Artificial Sequence: Synthetic hazel nut; inner sequence and 3' sequence

SEQ ID NO: 18595 - DNA, 53 bp, Artificial Sequence
  Description of Artificial Sequence: Synthetic hazel nut; inner sequence and 3' sequence
ggcatgcgatgaacgaggcctgatgcgtcattgactagtacatgaccacttga

SEQ ID NO: 18596 - DNA, 53 bp, Artificial Sequence; identical to SEQ ID NO: 2405
  Description of Artificial Sequence: Synthetic hazel nut; inner sequence and 3' sequence

SEQ ID NO: 18597 - DNA, 53 bp, Artificial Sequence; identical to SEQ ID NO: 14997
  Description of Artificial Sequence: Synthetic hazel nut; inner sequence and 3' sequence

SEQ ID NO: 18598 - DNA, 53 bp, Artificial Sequence; identical to SEQ ID NO: 2665
  Description of Artificial Sequence: Synthetic hazel nut; inner sequence and 3' sequence

SEQ ID NO: 18599 - DNA, 53 bp, Artificial Sequence
  Description of Artificial Sequence: Synthetic hazel nut; inner sequence and 3' sequence
gcacgcagtgacaccgttgtggacggcgcattgactagtacatgaccacttga

SEQ ID NO: 18600 - DNA, 53 bp, Artificial Sequence; identical to SEQ ID NO: 2540
  Description of Artificial Sequence: Synthetic hazel nut; inner sequence and 3' sequence

SEQ ID NO: 18601 - DNA, 53 bp, Artificial Sequence; identical to SEQ ID NO: 2593
  Description of Artificial Sequence: Synthetic hazel nut; inner sequence and 3' sequence

SEQ ID NO: 18602 - DNA, 53 bp, Artificial Sequence; identical to SEQ ID NO: 2444
  Description of Artificial Sequence: Synthetic hazel nut; inner sequence and 3' sequence

SEQ ID NO: 18603 - DNA, 53 bp, Artificial Sequence
  Description of Artificial Sequence: Synthetic hazel nut; inner sequence and 3' sequence
catgcgcgatgatcgcacgcgtacgtcacgttgactagtacatgaccacttga

SEQ ID NO: 18604 - DNA, 53 bp, Artificial Sequence; identical to SEQ ID NO: 2600
  Description of Artificial Sequence: Synthetic hazel nut; inner sequence and 3' sequence

SEQ ID NO: 18605 - DNA, 53 bp, Artificial Sequence
  Description of Artificial Sequence: Synthetic hazel nut; inner sequence and 3' sequence
ggcatgcgatgaaagaggcatgatgcgtcattgactagtacatgaccacttga

SEQ ID NO: 18606 - DNA, 53 bp, Artificial Sequence; identical to SEQ ID NO: 6886
  Description of Artificial Sequence: Synthetic hazel nut; inner sequence and 3' sequence

SEQ ID NO: 18607 - DNA, 53 bp, Artificial Sequence; identical to SEQ ID NO: 2244
  Description of Artificial Sequence: Synthetic hazel nut; inner sequence and 3' sequence

SEQ ID NO: 18608 - DNA, 53 bp, Artificial Sequence
  Description of Artificial Sequence: Synthetic hazel nut; inner sequence and 3' sequence
ggcatgcgatgaacgaggcatgatgcgtccttgactagtacatgaccacttga

SEQ ID NO: 18609 - DNA, 53 bp, Artificial Sequence
  Description of Artificial Sequence: Synthetic hazel nut; inner sequence and 3' sequence
gcgatccgcgtcctgtcacgttacgcagccttgactagtacatgaccacttga

SEQ ID NO: 18610 - DNA, 53 bp, Artificial Sequence; identical to SEQ ID NO: 6198
  Description of Artificial Sequence: Synthetic hazel nut; inner sequence and 3' sequence

SEQ ID NO: 18611 - DNA, 53 bp, Artificial Sequence; identical to SEQ ID NO: 2143
  Description of Artificial Sequence: Synthetic hazel nut; inner sequence and 3' sequence

SEQ ID NO: 18612 - DNA, 53 bp, Artificial Sequence
  Description of Artificial Sequence: Synthetic hazel nut; inner sequence and 3' sequence
cgaaccagcgtcacgtacggcatggcgacattgactagtacatgaccacttga

SEQ ID NO: 18613 - DNA, 53 bp, Artificial Sequence; identical to SEQ ID NO: 2344
  Description of Artificial Sequence: Synthetic hazel nut; inner sequence and 3' sequence

SEQ ID NO: 18614 - DNA, 53 bp, Artificial Sequence; identical to SEQ ID NO: 2310
  Description of Artificial Sequence: Synthetic hazel nut; inner sequence and 3' sequence

SEQ ID NO: 18615 - DNA, 53 bp, Artificial Sequence; identical to SEQ ID NO: 2396
  Description of Artificial Sequence: Synthetic hazel nut; inner sequence and 3' sequence

SEQ ID NO: 18616 - DNA, 53 bp, Artificial Sequence; identical to SEQ ID NO: 2180
  Description of Artificial Sequence: Synthetic hazel nut; inner sequence and 3' sequence

SEQ ID NO: 18617 - DNA, 53 bp, Artificial Sequence; identical to SEQ ID NO: 2413
  Description of Artificial Sequence: Synthetic hazel nut; inner sequence and 3' sequence

SEQ ID NO: 18618 - DNA, 52 bp, Artificial Sequence
  Description of Artificial Sequence: Synthetic hazel nut; inner sequence and 3' sequence
gcgtgcatggaagggacgtacgctgcgccttgactagtacatgaccacttga

SEQ ID NO: 18619 - DNA, 53 bp, Artificial Sequence
  Description of Artificial Sequence: Synthetic hazel nut; inner sequence and 3' sequence
ccacgcagtgacgaccagccgtacgcaacgttgactagtacatgaccacttga

SEQ ID NO: 18620 - DNA, 53 bp, Artificial Sequence; identical to SEQ ID NO: 6809
  Description of Artificial Sequence: Synthetic hazel nut; inner sequence and 3' sequence

SEQ ID NO: 18621 - DNA, 53 bp, Artificial Sequence
  Description of Artificial Sequence: Synthetic hazel nut; inner sequence and 3' sequence
gcacacggccgaacgcgtcccacatgcatgttgactagtacatgaccacttga

SEQ ID NO: 18622 - DNA, 53 bp, Artificial Sequence; identical to SEQ ID NO: 2495
  Description of Artificial Sequence: Synthetic hazel nut; inner sequence and 3' sequence

SEQ ID NO: 18623 - DNA, 53 bp, Artificial Sequence; identical to SEQ ID NO: 2522
  Description of Artificial Sequence: Synthetic hazel nut; inner sequence and 3' sequence

SEQ ID NO: 18624 - DNA, 53 bp, Artificial Sequence; identical to SEQ ID NO: 2608
  Description of Artificial Sequence: Synthetic hazel nut; inner sequence and 3' sequence

SEQ ID NO: 18625 - DNA, 53 bp, Artificial Sequence; identical to SEQ ID NO: 2383
  Description of Artificial Sequence: Synthetic hazel nut; inner sequence and 3' sequence

SEQ ID NO: 18626 - DNA, 53 bp, Artificial Sequence; identical to SEQ ID NO: 2351
  Description of Artificial Sequence: Synthetic hazel nut; inner sequence and 3' sequence

SEQ ID NO: 18627 - DNA, 53 bp, Artificial Sequence
  Description of Artificial Sequence: Synthetic hazel nut; inner sequence and 3' sequence
ggcatgcgatgcacgaggcatgatgcgtcattgactagtacatgaccacttga

SEQ ID NO: 18628 - DNA, 53 bp, Artificial Sequence
  Description of Artificial Sequence: Synthetic hazel nut; inner sequence and 3' sequence
cgcgtgaacggaacgtcctgtcgtcacgtcttgactagtacatgaccacttga

SEQ ID NO: 18629 - DNA, 53 bp, Artificial Sequence
  Description of Artificial Sequence: Synthetic hazel nut; inner sequence and 3' sequence
gcatgccaatcacatgtcgtgtcgcgcacattgactagtacatgaccacttga

SEQ ID NO: 18630 - DNA, 53 bp, Artificial Sequence
  Description of Artificial Sequence: Synthetic hazel nut; inner sequence and 3' sequence
ggcctgacacgcatcagcctgaccgtcacattgactagtacatgaccacttga

SEQ ID NO: 18631 - DNA, 53 bp, Artificial Sequence; identical to SEQ ID NO: 10801
  Description of Artificial Sequence: Synthetic hazel nut; inner sequence and 3' sequence

SEQ ID NO: 18632 - DNA, 53 bp, Artificial Sequence; identical to SEQ ID NO: 2340
  Description of Artificial Sequence: Synthetic hazel nut; inner sequence and 3' sequence

SEQ ID NO: 18633 - DNA, 53 bp, Artificial Sequence; identical to SEQ ID NO: 2198
  Description of Artificial Sequence: Synthetic hazel nut; inner sequence and 3' sequence

SEQ ID NO: 18634 - DNA, 53 bp, Artificial Sequence
  Description of Artificial Sequence: Synthetic hazel nut; inner sequence and 3' sequence
gacgcacagcatgagggacgtatcgccacgttgactagtacatgaccacttga

SEQ ID NO: 18635 - DNA, 53 bp, Artificial Sequence; identical to SEQ ID NO: 2264
  Description of Artificial Sequence: Synthetic hazel nut; inner sequence and 3' sequence

SEQ ID NO: 18636 - DNA, 53 bp, Artificial Sequence; identical to SEQ ID NO: 2590
  Description of Artificial Sequence: Synthetic hazel nut; inner sequence and 3' sequence

SEQ ID NO: 18637 - DNA, 53 bp, Artificial Sequence
  Description of Artificial Sequence: Synthetic hazel nut; inner sequence and 3' sequence
cgatgcgcaggcaggaggtacgtggccaccttgactagtacatgaccacttga

SEQ ID NO: 18638 - DNA, 53 bp, Artificial Sequence
  Description of Artificial Sequence: Synthetic hazel nut; inner sequence and 3' sequence
cgcatcgagcaacacgtacgcacgacctgcttgactagtacatgaccacttga

SEQ ID NO: 18639 - DNA, 53 bp, Artificial Sequence; identical to SEQ ID NO: 2646
  Description of Artificial Sequence: Synthetic hazel nut; inner sequence and 3' sequence

SEQ ID NO: 18640 - DNA, 53 bp, Artificial Sequence
  Description of Artificial Sequence: Synthetic hazel nut; inner sequence and 3' sequence
acgtcacgcacagtgtcacgttccgatgcgttgactagtacatgaccacttga

SEQ ID NO: 18641 - DNA, 53 bp, Artificial Sequence; identical to SEQ ID NO: 2354
  Description of Artificial Sequence: Synthetic hazel nut; inner sequence and 3' sequence

SEQ ID NO: 18642 - DNA, 53 bp, Artificial Sequence; identical to SEQ ID NO: 6539
  Description of Artificial Sequence: Synthetic hazel nut; inner sequence and 3' sequence

SEQ ID NO: 18643 - DNA, 53 bp, Artificial Sequence
  Description of Artificial Sequence: Synthetic hazel nut; inner sequence and 3' sequence
gcacaaggcgtgacgtaccatgtgtccatcttgactagtacatgaccacttga

SEQ ID NO: 18644 - DNA, 53 bp, Artificial Sequence
  Description of Artificial Sequence: Synthetic hazel nut; inner sequence and 3' sequence
gcacggcgcagctcacgtccttgcgtcaccttgactagtacatgaccacttga

SEQ ID NO: 18645 - DNA, 53 bp, Artificial Sequence; identical to SEQ ID NO: 6642
  Description of Artificial Sequence: Synthetic hazel nut; inner sequence and 3' sequence

SEQ ID NO: 18646 - DNA, 53 bp, Artificial Sequence; identical to SEQ ID NO: 6687
  Description of Artificial Sequence: Synthetic hazel nut; inner sequence and 3' sequence

SEQ ID NO: 18647 - DNA, 53 bp, Artificial Sequence; identical to SEQ ID NO: 2994
  Description of Artificial Sequence: Synthetic hazel nut; inner sequence and 3' sequence

SEQ ID NO: 18648 - DNA, 53 bp, Artificial Sequence; identical to SEQ ID NO: 2482
  Description of Artificial Sequence: Synthetic hazel nut; inner sequence and 3' sequence

SEQ ID NO: 18649 - DNA, 53 bp, Artificial Sequence
  Description of Artificial Sequence: Synthetic hazel nut; inner sequence and 3' sequence
cgatgcgcatcattggtacgacattgccgtttgactagtacatgaccacttga

SEQ ID NO: 18650 - DNA, 53 bp, Artificial Sequence; identical to SEQ ID NO: 2565
  Description of Artificial Sequence: Synthetic hazel nut; inner sequence and 3' sequence

SEQ ID NO: 18651 - DNA, 53 bp, Artificial Sequence
  Description of Artificial Sequence: Synthetic hazel nut; inner sequence and 3' sequence
ggcatgagatgaacgaggcatgatgcgtcattgactagtacatgaccacttga

SEQ ID NO: 18652 - DNA, 53 bp, Artificial Sequence
  Description of Artificial Sequence: Synthetic hazel nut; inner sequence and 3' sequence
gcacggcagcaacgtgacctgcactgcaccttgactagtacatgaccacttga

SEQ ID NO: 18653 - DNA, 53 bp, Artificial Sequence; identical to SEQ ID NO: 2539
  Description of Artificial Sequence: Synthetic hazel nut; inner sequence and 3' sequence

SEQ ID NO: 18654 - DNA, 53 bp, Artificial Sequence
  Description of Artificial Sequence: Synthetic hazel nut; inner sequence and 3' sequence
cgcaccgacaacatgttgccttaccgcatgttgactagtacatgaccacttga

SEQ ID NO: 18655 - DNA, 53 bp, Artificial Sequence
  Description of Artificial Sequence: Synthetic hazel nut; inner sequence and 3' sequence
cacgtgacgcatgcacttcgccttgccacattgactagtacatgaccacttga

SEQ ID NO: 18656 - DNA, 53 bp, Artificial Sequence; identical to SEQ ID NO: 2370
  Description of Artificial Sequence: Synthetic hazel nut; inner sequence and 3' sequence

SEQ ID NO: 18657 - DNA, 53 bp, Artificial Sequence
  Description of Artificial Sequence: Synthetic hazel nut; inner sequence and 3' sequence
cgacgcaccgatacatgaccacgcttcacgttgactagtacatgaccacttga

SEQ ID NO: 18658 - DNA, 53 bp, Artificial Sequence; identical to SEQ ID NO: 6831
  Description of Artificial Sequence: Synthetic hazel nut; inner sequence and 3' sequence

SEQ ID NO: 18659 - DNA, 53 bp, Artificial Sequence; identical to SEQ ID NO: 2471
  Description of Artificial Sequence: Synthetic hazel nut; inner sequence and 3' sequence

SEQ ID NO: 18660 - DNA, 53 bp, Artificial Sequence
  Description of Artificial Sequence: Synthetic hazel nut; inner sequence and 3' sequence
tgacatcgttacgcacgcactctgcacgtattgactagtacatgaccacttga

SEQ ID NO: 18661 - DNA, 53 bp, Artificial Sequence; identical to SEQ ID NO: 6726
  Description of Artificial Sequence: Synthetic hazel nut; inner sequence and 3' sequence

SEQ ID NO: 18662 - DNA, 53 bp, Artificial Sequence
  Description of Artificial Sequence: Synthetic hazel nut; inner sequence and 3' sequence
cgtggcagacggcacggaacgcacggtgcattgactagtacatgaccacttga

SEQ ID NO: 18663 - DNA, 53 bp, Artificial Sequence
  Description of Artificial Sequence: Synthetic hazel nut; inner sequence and 3' sequence
ggacagcgcgaaggtacgtactgccgtggtttgactagtacatgaccacttga

SEQ ID NO: 18664 - DNA, 53 bp, Artificial Sequence
  Description of Artificial Sequence: Synthetic hazel nut; inner sequence and 3' sequence
cgtaccacgtaacgacagcatgctttcggtttgactagtacatgaccacttga

SEQ ID NO: 18665 - DNA, 52 bp, Artificial Sequence
  Description of Artificial Sequence: Synthetic hazel nut; inner sequence and 3' sequence
cgcaacgacactcacgggcatgacgcgcattgactagtacatgaccacttga

SEQ ID NO: 18666 - DNA, 53 bp, Artificial Sequence; identical to SEQ ID NO: 2512
  Description of Artificial Sequence: Synthetic hazel nut; inner sequence and 3' sequence

SEQ ID NO: 18667 - DNA, 53 bp, Artificial Sequence; identical to SEQ ID NO: 2556
  Description of Artificial Sequence: Synthetic hazel nut; inner sequence and 3' sequence

SEQ ID NO: 18668 - DNA, 53 bp, Artificial Sequence
  Description of Artificial Sequence: Synthetic hazel nut; inner sequence and 3' sequence
cgcaccgtgcaacgacagcttggcggcgtgttgactagtacatgaccacttga

SEQ ID NO: 18669 - DNA, 53 bp, Artificial Sequence
  Description of Artificial Sequence: Synthetic hazel nut; inner sequence and 3' sequence
gcgtgaggcacacatgcttgtcgcgtcgcattgactagtacatgaccacttga

SEQ ID NO: 18670 - DNA, 53 bp, Artificial Sequence; identical to SEQ ID NO: 2488
  Description of Artificial Sequence: Synthetic hazel nut; inner sequence and 3' sequence

SEQ ID NO: 18671 - DNA, 53 bp, Artificial Sequence; identical to SEQ ID NO: 2418
  Description of Artificial Sequence: Synthetic hazel nut; inner sequence and 3' sequence

SEQ ID NO: 18672 - DNA, 53 bp, Artificial Sequence
  Description of Artificial Sequence: Synthetic hazel nut; inner sequence and 3' sequence
cacgcacagtgtagggaccgttgctgcacgttgactagtacatgaccacttga

SEQ ID NO: 18673 - DNA, 53 bp, Artificial Sequence; identical to SEQ ID NO: 2776
  Description of Artificial Sequence: Synthetic hazel nut; inner sequence and 3' sequence

SEQ ID NO: 18674 - DNA, 53 bp, Artificial Sequence; identical to SEQ ID NO: 2725
  Description of Artificial Sequence: Synthetic hazel nut; inner sequence and 3' sequence

SEQ ID NO: 18675 - DNA, 53 bp, Artificial Sequence
  Description of Artificial Sequence: Synthetic hazel nut; inner sequence and 3' sequence
ggcatgcgatgaacgaggaatgatgcgtcattgactagtacatgaccacttga

SEQ ID NO: 18676 - DNA, 53 bp, Artificial Sequence
  Description of Artificial Sequence: Synthetic hazel nut; inner sequence and 3' sequence
cacacgtcacatcgtgcacatgcgatcgtattgactagtacatgaccacttga

SEQ ID NO: 18677 - DNA, 53 bp, Artificial Sequence
  Description of Artificial Sequence: Synthetic hazel nut; inner sequence and 3' sequence
cgtgccggcaaggacgcaccatgacgcacattgactagtacatgaccacttga

SEQ ID NO: 18678 - DNA, 53 bp, Artificial Sequence; identical to SEQ ID NO: 2763
  Description of Artificial Sequence: Synthetic hazel nut; inner sequence and 3' sequence

SEQ ID NO: 18679 - DNA, 53 bp, Artificial Sequence; identical to SEQ ID NO: 2683
  Description of Artificial Sequence: Synthetic hazel nut; inner sequence and 3' sequence

SEQ ID NO: 18680 - DNA, 53 bp, Artificial Sequence; identical to SEQ ID NO: 6835
  Description of Artificial Sequence: Synthetic hazel nut; inner sequence and 3' sequence

SEQ ID NO: 18681 - DNA, 53 bp, Artificial Sequence; identical to SEQ ID NO: 2452
  Description of Artificial Sequence: Synthetic hazel nut; inner sequence and 3' sequence

SEQ ID NO: 18682 - DNA, 53 bp, Artificial Sequence; identical to SEQ ID NO: 2905
  Description of Artificial Sequence: Synthetic hazel nut; inner sequence and 3' sequence

SEQ ID NO: 18683 - DNA, 53 bp, Artificial Sequence; identical to SEQ ID NO: 2339
  Description of Artificial Sequence: Synthetic hazel nut; inner sequence and 3' sequence

SEQ ID NO: 18684 - DNA, 53 bp, Artificial Sequence; identical to SEQ ID NO: 14996
  Description of Artificial Sequence: Synthetic hazel nut; inner sequence and 3' sequence

SEQ ID NO: 18685 - DNA, 53 bp, Artificial Sequence
  Description of Artificial Sequence: Synthetic hazel nut; inner sequence and 3' sequence
gcatgacaatgccatagcgtcacctgcacgttgactagtacatgaccacttga

SEQ ID NO: 18686 - DNA, 53 bp, Artificial Sequence; identical to SEQ ID NO: 2525
  Description of Artificial Sequence: Synthetic hazel nut; inner sequence and 3' sequence

SEQ ID NO: 18687 - DNA, 53 bp, Artificial Sequence; identical to SEQ ID NO: 2397
  Description of Artificial Sequence: Synthetic hazel nut; inner sequence and 3' sequence

SEQ ID NO: 18688 - DNA, 53 bp, Artificial Sequence
  Description of Artificial Sequence: Synthetic hazel nut; inner sequence and 3' sequence
ggccacagcgtacctcaacgttgacgtgcattgactagtacatgaccacttga

SEQ ID NO: 18689 - DNA, 53 bp, Artificial Sequence; identical to SEQ ID NO: 2717
  Description of Artificial Sequence: Synthetic hazel nut; inner sequence and 3' sequence

SEQ ID NO: 18690 - DNA, 53 bp, Artificial Sequence
  Description of Artificial Sequence: Synthetic hazel nut; inner sequence and 3' sequence
ccgacatcgtaccgatcacgtgcttacgtattgactagtacatgaccacttga

SEQ ID NO: 18691 - DNA, 53 bp, Artificial Sequence; identical to SEQ ID NO: 2650
  Description of Artificial Sequence: Synthetic hazel nut; inner sequence and 3' sequence

SEQ ID NO: 18692 - DNA, 53 bp, Artificial Sequence
  Description of Artificial Sequence: Synthetic hazel nut; inner sequence and 3' sequence
cgcaccgtcgatacctcatgcacgctgacattgactagtacatgaccacttga

SEQ ID NO: 18693 - DNA, 53 bp, Artificial Sequence; identical to SEQ ID NO: 2743
  Description of Artificial Sequence: Synthetic hazel nut; inner sequence and 3' sequence

SEQ ID NO: 18694 - DNA, 53 bp, Artificial Sequence; identical to SEQ ID NO: 2980
  Description of Artificial Sequence: Synthetic hazel nut; inner sequence and 3' sequence

SEQ ID NO: 18695 - DNA, 53 bp, Artificial Sequence
  Description of Artificial Sequence: Synthetic hazel nut; inner sequence and 3' sequence
cgcaccgtgacgagacgtgctagtgtgtcattgactagtacatgaccacttga

SEQ ID NO: 18696 - DNA, 53 bp, Artificial Sequence
  Description of Artificial Sequence: Synthetic hazel nut; inner sequence and 3' sequence
ggcatgtgatgaacgaggcatgatgcgtcattgactagtacatgaccacttga

SEQ ID NO: 18697 - DNA, 53 bp, Artificial Sequence; identical to SEQ ID NO: 6376
  Description of Artificial Sequence: Synthetic hazel nut; inner sequence and 3' sequence

SEQ ID NO: 18698 - DNA, 53 bp, Artificial Sequence
  Description of Artificial Sequence: Synthetic hazel nut; inner sequence and 3' sequence
gcgtgatggcgcaacgtcctgtgcttcgcgttgactagtacatgaccacttga

SEQ ID NO: 18699 - DNA, 53 bp, Artificial Sequence; identical to SEQ ID NO: 2594
  Description of Artificial Sequence: Synthetic hazel nut; inner sequence and 3' sequence

SEQ ID NO: 18700 - DNA, 53 bp, Artificial Sequence; identical to SEQ ID NO: 2324
  Description of Artificial Sequence: Synthetic hazel nut; inner sequence and 3' sequence

SEQ ID NO: 18701 - DNA, 53 bp, Artificial Sequence; identical to SEQ ID NO: 2329
  Description of Artificial Sequence: Synthetic hazel nut; inner sequence and 3' sequence

SEQ ID NO: 18702 - DNA, 53 bp, Artificial Sequence; identical to SEQ ID NO: 2534
  Description of Artificial Sequence: Synthetic hazel nut; inner sequence and 3' sequence

SEQ ID NO: 18703 - DNA, 53 bp, Artificial Sequence
  Description of Artificial Sequence: Synthetic hazel nut; inner sequence and 3' sequence
cgtcacgcacgtgaacgcgtcattgccgcattgactagtacatgaccacttga

SEQ ID NO: 18704 - DNA, 53 bp, Artificial Sequence; identical to SEQ ID NO: 10960
  Description of Artificial Sequence: Synthetic hazel nut; inner sequence and 3' sequence

SEQ ID NO: 18705 - DNA, 53 bp, Artificial Sequence
  Description of Artificial Sequence: Synthetic hazel nut; inner sequence and 3' sequence
gcgacgcacatcaccgcactgaccgtgtgtttgactagtacatgaccacttga

SEQ ID NO: 18706 - DNA, 53 bp, Artificial Sequence
  Description of Artificial Sequence: Synthetic hazel nut; inner sequence and 3' sequence
cacacgcagtgcgactgacctgacgtcacgttgactagtacatgaccacttga

SEQ ID NO: 18707 - DNA, 53 bp, Artificial Sequence; identical to SEQ ID NO: 6531
  Description of Artificial Sequence: Synthetic hazel nut; inner sequence and 3' sequence

SEQ ID NO: 18708 - DNA, 53 bp, Artificial Sequence; identical to SEQ ID NO: 2806
  Description of Artificial Sequence: Synthetic hazel nut; inner sequence and 3' sequence

SEQ ID NO: 18709 - DNA, 53 bp, Artificial Sequence
  Description of Artificial Sequence: Synthetic hazel nut; inner sequence and 3' sequence
ggcatgcgatgaacgaggcatgatgagtcattgactagtacatgaccacttga

SEQ ID NO: 18710 - DNA, 53 bp, Artificial Sequence
  Description of Artificial Sequence: Synthetic hazel nut; inner sequence and 3' sequence
ggcacacgggcaggacgtgctactcgcgcattgactagtacatgaccacttga

SEQ ID NO: 18711 - DNA, 52 bp, Artificial Sequence; identical to SEQ ID NO: 2259
  Description of Artificial Sequence: Synthetic hazel nut; inner sequence and 3' sequence

SEQ ID NO: 18712 - DNA, 53 bp, Artificial Sequence; identical to SEQ ID NO: 10971
  Description of Artificial Sequence: Synthetic hazel nut; inner sequence and 3' sequence

SEQ ID NO: 18713 - DNA, 53 bp, Artificial Sequence
  Description of Artificial Sequence: Synthetic hazel nut; inner sequence and 3' sequence
gcccagtgcaacgtaggtacgtaccgtgccttgactagtacatgaccacttga

SEQ ID NO: 18714 - DNA, 53 bp, Artificial Sequence; identical to SEQ ID NO: 2668
  Description of Artificial Sequence: Synthetic hazel nut; inner sequence and 3' sequence

SEQ ID NO: 18715 - DNA, 53 bp, Artificial Sequence
  Description of Artificial Sequence: Synthetic hazel nut; inner sequence and 3' sequence
cgtgaacacgtgccgacgatgcgtaccgtcttgactagtacatgaccacttga

SEQ ID NO: 18716 - DNA, 53 bp, Artificial Sequence; identical to SEQ ID NO: 2305
  Description of Artificial Sequence: Synthetic hazel nut; inner sequence and 3' sequence

SEQ ID NO: 18717 - DNA, 53 bp, Artificial Sequence; identical to SEQ ID NO: 6610
  Description of Artificial Sequence: Synthetic hazel nut; inner sequence and 3' sequence

SEQ ID NO: 18718 - DNA, 53 bp, Artificial Sequence
  Description of Artificial Sequence: Synthetic hazel nut; inner sequence and 3' sequence
ggcatgcgacgaacgaggcatgatgcgtcattgactagtacatgaccacttga

SEQ ID NO: 18719 - DNA, 53 bp, Artificial Sequence; identical to SEQ ID NO: 2440
  Description of Artificial Sequence: Synthetic hazel nut; inner sequence and 3' sequence

SEQ ID NO: 18720 - DNA, 53 bp, Artificial Sequence
  Description of Artificial Sequence: Synthetic hazel nut; inner sequence and 3' sequence
ggcatgcgatgaatgaggcatgatgcgtcattgactagtacatgaccacttga

SEQ ID NO: 18721 - DNA, 53 bp, Artificial Sequence; identical to SEQ ID NO: 2705
  Description of Artificial Sequence: Synthetic hazel nut; inner sequence and 3' sequence

SEQ ID NO: 18722 - DNA, 53 bp, Artificial Sequence
  Description of Artificial Sequence: Synthetic hazel nut; inner sequence and 3' sequence
acgcttaggcacatcgtccgctgcttcacgttgactagtacatgaccacttga

SEQ ID NO: 18723 - DNA, 53 bp, Artificial Sequence; identical to SEQ ID NO: 2263
  Description of Artificial Sequence: Synthetic hazel nut; inner sequence and 3' sequence

SEQ ID NO: 18724 - DNA, 53 bp, Artificial Sequence; identical to SEQ ID NO: 2273
  Description of Artificial Sequence: Synthetic hazel nut; inner sequence and 3' sequence

SEQ ID NO: 18725 - DNA, 53 bp, Artificial Sequence; identical to SEQ ID NO: 2984
  Description of Artificial Sequence: Synthetic hazel nut; inner sequence and 3' sequence

SEQ ID NO: 18726 - DNA, 53 bp, Artificial Sequence
  Description of Artificial Sequence: Synthetic hazel nut; inner sequence and 3' sequence
cgtggcgaacgaacatacgcacactgcacgttgactagtacatgaccacttga

SEQ ID NO: 18727 - DNA, 53 bp, Artificial Sequence; identical to SEQ ID NO: 2721
  Description of Artificial Sequence: Synthetic hazel nut; inner sequence and 3' sequence

SEQ ID NO: 18728 - DNA, 53 bp, Artificial Sequence; identical to SEQ ID NO: 2389
  Description of Artificial Sequence: Synthetic hazel nut; inner sequence and 3' sequence

SEQ ID NO: 18729 - DNA, 53 bp, Artificial Sequence
  Description of Artificial Sequence: Synthetic hazel nut; inner sequence and 3' sequence
gcgtaaggcaggcaagtacggcacgcatcgttgactagtacatgaccacttga

SEQ ID NO: 18730 - DNA, 53 bp, Artificial Sequence
  Description of Artificial Sequence: Synthetic hazel nut; inner sequence and 3' sequence
ggcatgcgatgaacgaggcatgatacgtcattgactagtacatgaccacttga

SEQ ID NO: 18731 - DNA, 53 bp, Artificial Sequence
  Description of Artificial Sequence: Synthetic hazel nut; inner sequence and 3' sequence
ggcatgcgatgaacgaggcatgatgcgtgattgactagtacatgaccacttga

SEQ ID NO: 18732 - DNA, 53 bp, Artificial Sequence; identical to SEQ ID NO: 2422
  Description of Artificial Sequence: Synthetic hazel nut; inner sequence and 3' sequence

SEQ ID NO: 18733 - DNA, 53 bp, Artificial Sequence
  Description of Artificial Sequence: Synthetic hazel nut; inner sequence and 3' sequence
gcgtgaggagtgacgccaccatcatgcacattgactagtacatgaccacttga

SEQ ID NO: 18734 - DNA, 53 bp, Artificial Sequence; identical to SEQ ID NO: 2731
  Description of Artificial Sequence: Synthetic hazel nut; inner sequence and 3' sequence

SEQ ID NO: 18735 - DNA, 53 bp, Artificial Sequence
  Description of Artificial Sequence: Synthetic hazel nut; inner sequence and 3' sequence
ggcctgaccacaccgtatgcatcgcgtccattgactagtacatgaccacttga

SEQ ID NO: 18736 - DNA, 53 bp, Artificial Sequence
  Description of Artificial Sequence: Synthetic hazel nut; inner sequence and 3' sequence
acgcacaacgtcaacatgaggtgcgcaacattgactagtacatgaccacttga

SEQ ID NO: 18737 - DNA, 53 bp, Artificial Sequence; identical to SEQ ID NO: 2087
  Description of Artificial Sequence: Synthetic hazel nut; inner sequence and 3' sequence

SEQ ID NO: 18738 - DNA, 53 bp, Artificial Sequence; identical to SEQ ID NO: 2779
  Description of Artificial Sequence: Synthetic hazel nut; inner sequence and 3' sequence

SEQ ID NO: 18739 - DNA, 53 bp, Artificial Sequence
  Description of Artificial Sequence: Synthetic hazel nut; inner sequence and 3' sequence
cgtgacgcagtgcctagctgtgacagtgcattgactagtacatgaccacttga

SEQ ID NO: 18740 - DNA, 53 bp, Artificial Sequence
  Description of Artificial Sequence: Synthetic hazel nut; inner sequence and 3' sequence
cgcaacggagcacgtgacctggcctgcacgttgactagtacatgaccacttga

SEQ ID NO: 18741 - DNA, 53 bp, Artificial Sequence
  Description of Artificial Sequence: Synthetic hazel nut; inner sequence and 3' sequence
gcgacgaagcgacatgtgccttgcgatgccttgactagtacatgaccacttga

SEQ ID NO: 18742 - DNA, 53 bp, Artificial Sequence; identical to SEQ ID NO: 2210
  Description of Artificial Sequence: Synthetic hazel nut; inner sequence and 3' sequence

SEQ ID NO: 18743 - DNA, 53 bp, Artificial Sequence; identical to SEQ ID NO: 2546
  Description of Artificial Sequence: Synthetic hazel nut; inner sequence and 3' sequence

SEQ ID NO: 18744 - DNA, 53 bp, Artificial Sequence
  Description of Artificial Sequence: Synthetic hazel nut; inner sequence and 3' sequence
cgtgtgtacgcatcgaccgtctgtgccatgttgactagtacatgaccacttga

SEQ ID NO: 18745 - DNA, 53 bp, Artificial Sequence; identical to SEQ ID NO: 2598
  Description of Artificial Sequence: Synthetic hazel nut; inner sequence and 3' sequence

SEQ ID NO: 18746 - DNA, 52 bp, Artificial Sequence
  Description of Artificial Sequence: Synthetic hazel nut; inner sequence and 3' sequence
gcatgcgatgaacgaggcatgatgcgtcattgactagtacatgaccacttga

SEQ ID NO: 18747 - DNA, 53 bp, Artificial Sequence; identical to SEQ ID NO: 2589
  Description of Artificial Sequence: Synthetic hazel nut; inner sequence and 3' sequence

SEQ ID NO: 18748 - DNA, 53 bp, Artificial Sequence
  Description of Artificial Sequence: Synthetic hazel nut; inner sequence and 3' sequence
cgtaccaccgtgtgcatgtgatgcatggcattgactagtacatgaccacttga

SEQ ID NO: 18749 - DNA, 53 bp, Artificial Sequence; identical to SEQ ID NO: 2361
  Description of Artificial Sequence: Synthetic hazel nut; inner sequence and 3' sequence

SEQ ID NO: 18750 - DNA, 53 bp, Artificial Sequence
  Description of Artificial Sequence: Synthetic hazel nut; inner sequence and 3' sequence
ggcatgcgatgaacgaggtatgatgcgtcattgactagtacatgaccacttga

SEQ ID NO: 18751 - DNA, 53 bp, Artificial Sequence; identical to SEQ ID NO: 2486
  Description of Artificial Sequence: Synthetic hazel nut; inner sequence and 3' sequence

SEQ ID NO: 18752 - DNA, 53 bp, Artificial Sequence
  Description of Artificial Sequence: Synthetic hazel nut; inner sequence and 3' sequence
gcacgtcatgctgaccgaactgcctacgcattgactagtacatgaccacttga

SEQ ID NO: 18753 - DNA, 53 bp, Artificial Sequence
  Description of Artificial Sequence: Synthetic hazel nut; inner sequence and 3' sequence
cacacggaacgcacatggtggtacgacgcgttgactagtacatgaccacttga

SEQ ID NO: 18754 - DNA, 53 bp, Artificial Sequence; identical to SEQ ID NO: 2365
  Description of Artificial Sequence: Synthetic hazel nut; inner sequence and 3' sequence

SEQ ID NO: 18755 - DNA, 53 bp, Artificial Sequence
  Description of Artificial Sequence: Synthetic hazel nut; inner sequence and 3' sequence
gcgaggaacgtgcacatcgtccgctgcatgttgactagtacatgaccacttga

SEQ ID NO: 18756 - DNA, 53 bp, Artificial Sequence; identical to SEQ ID NO: 2866
  Description of Artificial Sequence: Synthetic hazel nut; inner sequence and 3' sequence

SEQ ID NO: 18757 - DNA, 53 bp, Artificial Sequence; identical to SEQ ID NO: 2916
  Description of Artificial Sequence: Synthetic hazel nut; inner sequence and 3' sequence

SEQ ID NO: 18758 - DNA, 53 bp, Artificial Sequence; identical to SEQ ID NO: 6585
  Description of Artificial Sequence: Synthetic hazel nut; inner sequence and 3' sequence

SEQ ID NO: 18759 - DNA, 53 bp, Artificial Sequence
  Description of Artificial Sequence: Synthetic hazel nut; inner sequence and 3' sequence
tgcgcatgcatcgtcggcactgagcttgccttgactagtacatgaccacttga

SEQ ID NO: 18760 - DNA, 53 bp, Artificial Sequence; identical to SEQ ID NO: 2884
  Description of Artificial Sequence: Synthetic hazel nut; inner sequence and 3' sequence

SEQ ID NO: 18761 - DNA, 53 bp, Artificial Sequence
  Description of Artificial Sequence: Synthetic hazel nut; inner sequence and 3' sequence
ccgacacgcatggtaaggtaggcaggcacgttgactagtacatgaccacttga

SEQ ID NO: 18762 - DNA, 53 bp, Artificial Sequence; identical to SEQ ID NO: 2166
  Description of Artificial Sequence: Synthetic hazel nut; inner sequence and 3' sequence

SEQ ID NO: 18763 - DNA, 53 bp, Artificial Sequence; identical to SEQ ID NO: 6893
  Description of Artificial Sequence: Synthetic hazel nut; inner sequence and 3' sequence

SEQ ID NO: 18764 - DNA, 53 bp, Artificial Sequence; identical to SEQ ID NO: 6238
  Description of Artificial Sequence: Synthetic hazel nut; inner sequence and 3' sequence

SEQ ID NO: 18765 - DNA, 53 bp, Artificial Sequence
  Description of Artificial Sequence: Synthetic hazel nut; inner sequence and 3' sequence
catgtgcgaacggacgtacacgtgtgatcattgactagtacatgaccacttga

SEQ ID NO: 18766 - DNA, 53 bp, Artificial Sequence; identical to SEQ ID NO: 2676
  Description of Artificial Sequence: Synthetic hazel nut; inner sequence and 3' sequence

SEQ ID NO: 18767 - DNA, 53 bp, Artificial Sequence
  Description of Artificial Sequence: Synthetic hazel nut; inner sequence and 3' sequence
cgaccacactcaggcacgtacggtatgtcattgactagtacatgaccacttga

SEQ ID NO: 18768 - DNA, 53 bp, Artificial Sequence
  Description of Artificial Sequence: Synthetic hazel nut; inner sequence and 3' sequence
cgcaccgtcgatacgtcatgcacgctgagattgactagtacatgaccacttga

SEQ ID NO: 18769 - DNA, 53 bp, Artificial Sequence
  Description of Artificial Sequence: Synthetic hazel nut; inner sequence and 3' sequence
tgacgcagcgtaacgttcgagtggtacgtattgactagtacatgaccacttga

SEQ ID NO: 18770 - DNA, 53 bp, Artificial Sequence
  Description of Artificial Sequence: Synthetic hazel nut; inner sequence and 3' sequence
ggcatgcgatgaacgaggcatgatgcctcattgactagtacatgaccacttga

SEQ ID NO: 18771 - DNA, 53 bp, Artificial Sequence; identical to SEQ ID NO: 2914
  Description of Artificial Sequence: Synthetic hazel nut; inner sequence and 3' sequence

SEQ ID NO: 18772 - DNA, 53 bp, Artificial Sequence; identical to SEQ ID NO: 2720
  Description of Artificial Sequence: Synthetic hazel nut; inner sequence and 3' sequence

SEQ ID NO: 18773 - DNA, 53 bp, Artificial Sequence; identical to SEQ ID NO: 2867
  Description of Artificial Sequence: Synthetic hazel nut; inner sequence and 3' sequence

SEQ ID NO: 18774 - DNA, 53 bp, Artificial Sequence
  Description of Artificial Sequence: Synthetic hazel nut; inner sequence and 3' sequence
cacgacacgatgtccacgtcccgttcgcgcttgactagtacatgaccacttga

SEQ ID NO: 18775 - DNA, 53 bp, Artificial Sequence; identical to SEQ ID NO: 2989
  Description of Artificial Sequence: Synthetic hazel nut; inner sequence and 3' sequence

SEQ ID NO: 18776 - DNA, 53 bp, Artificial Sequence
  Description of Artificial Sequence: Synthetic hazel nut; inner sequence and 3' sequence
ggcatgcggtgaacgaggcatgatgcgtcattgactagtacatgaccacttga

SEQ ID NO: 18777 - DNA, 53 bp, Artificial Sequence
  Description of Artificial Sequence: Synthetic hazel nut; inner sequence and 3' sequence
cgcatggcaacatgtccgcacgcgtgcacgttgactagtacatgaccacttga

SEQ ID NO: 18778 - DNA, 53 bp, Artificial Sequence
  Description of Artificial Sequence: Synthetic hazel nut; inner sequence and 3' sequence
gccacgtcgatgcccaacgctcactgcgtgttgactagtacatgaccacttga

SEQ ID NO: 18779 - DNA, 53 bp, Artificial Sequence; identical to SEQ ID NO: 2719
  Description of Artificial Sequence: Synthetic hazel nut; inner sequence and 3' sequence

SEQ ID NO: 18780 - DNA, 53 bp, Artificial Sequence; identical to SEQ ID NO: 2318
  Description of Artificial Sequence: Synthetic hazel nut; inner sequence and 3' sequence

SEQ ID NO: 18781 - DNA, 53 bp, Artificial Sequence
  Description of Artificial Sequence: Synthetic hazel nut; inner sequence and 3' sequence
ggcacgatcgacatgtcacagtgctgcgcattgactagtacatgaccacttga

SEQ ID NO: 18782 - DNA, 53 bp, Artificial Sequence; identical to SEQ ID NO: 2330
  Description of Artificial Sequence: Synthetic hazel nut; inner sequence and 3' sequence

SEQ ID NO: 18783 - DNA, 53 bp, Artificial Sequence
  Description of Artificial Sequence: Synthetic hazel nut; inner sequence and 3' sequence
ggccgacgcggaacggtgcatgaccatgcattgactagtacatgaccacttga

SEQ ID NO: 18784 - DNA, 53 bp, Artificial Sequence; identical to SEQ ID NO: 6875
  Description of Artificial Sequence: Synthetic hazel nut; inner sequence and 3' sequence

SEQ ID NO: 18785 - DNA, 53 bp, Artificial Sequence
  Description of Artificial Sequence: Synthetic hazel nut; inner sequence and 3' sequence
cgcgtcatgcgtaccgaacgtgtctgcgctttgactagtacatgaccacttga

SEQ ID NO: 18786 - DNA, 53 bp, Artificial Sequence; identical to SEQ ID NO: 2376
  Description of Artificial Sequence: Synthetic hazel nut; inner sequence and 3' sequence

SEQ ID NO: 18787 - DNA, 53 bp, Artificial Sequence
  Description of Artificial Sequence: Synthetic hazel nut; inner sequence and 3' sequence
ggcgtgcgatgaacgaggcatgatgcgtcattgactagtacatgaccacttga

SEQ ID NO: 18788 - DNA, 53 bp, Artificial Sequence; identical to SEQ ID NO: 10792
  Description of Artificial Sequence: Synthetic hazel nut; inner sequence and 3' sequence

SEQ ID NO: 18789 - DNA, 53 bp, Artificial Sequence; identical to SEQ ID NO: 10758
  Description of Artificial Sequence: Synthetic hazel nut; inner sequence and 3' sequence

SEQ ID NO: 18790 - DNA, 53 bp, Artificial Sequence; identical to SEQ ID NO: 2335
  Description of Artificial Sequence: Synthetic hazel nut; inner sequence and 3' sequence

SEQ ID NO: 18791 - DNA, 53 bp, Artificial Sequence
  Description of Artificial Sequence: Synthetic hazel nut; inner sequence and 3' sequence
cgtgcaacaggtcagtgacgacgctgtgccttgactagtacatgaccacttga

SEQ ID NO: 18792 - DNA, 53 bp, Artificial Sequence
  Description of Artificial Sequence: Synthetic hazel nut; inner sequence and 3' sequence
tgacacaccgacgagcacgatgacttcgcgttgactagtacatgaccacttga

SEQ ID NO: 18793 - DNA, 53 bp, Artificial Sequence
  Description of Artificial Sequence: Synthetic hazel nut; inner sequence and 3' sequence
tgcgttgcatcgtacgtgtgcttgccgacattgactagtacatgaccacttga

SEQ ID NO: 18794 - DNA, 53 bp, Artificial Sequence
  Description of Artificial Sequence: Synthetic hazel nut; inner sequence and 3' sequence
gatgtgccgcctcgacgtaccagctgcgacttgactagtacatgaccacttga

SEQ ID NO: 18795 - DNA, 53 bp, Artificial Sequence
  Description of Artificial Sequence: Synthetic hazel nut; inner sequence and 3' sequence
cacgtgacggcacgggaagtcatgtgcacattgactagtacatgaccacttga

SEQ ID NO: 18796 - DNA, 53 bp, Artificial Sequence; identical to SEQ ID NO: 2128
  Description of Artificial Sequence: Synthetic hazel nut; inner sequence and 3' sequence

SEQ ID NO: 18797 - DNA, 53 bp, Artificial Sequence; identical to SEQ ID NO: 2218
  Description of Artificial Sequence: Synthetic hazel nut; inner sequence and 3' sequence

SEQ ID NO: 18798 - DNA, 53 bp, Artificial Sequence; identical to SEQ ID NO: 2636
  Description of Artificial Sequence: Synthetic hazel nut; inner sequence and 3' sequence

SEQ ID NO: 18799 - DNA, 53 bp, Artificial Sequence
  Description of Artificial Sequence: Synthetic hazel nut; inner sequence and 3' sequence
ggcatgcgatgaacgtggcatgatgcgtcattgactagtacatgaccacttga

SEQ ID NO: 18800 - DNA, 53 bp, Artificial Sequence; identical to SEQ ID NO: 2682
  Description of Artificial Sequence: Synthetic hazel nut; inner sequence and 3' sequence

SEQ ID NO: 18801 - DNA, 53 bp, Artificial Sequence
  Description of Artificial Sequence: Synthetic hazel nut; inner sequence and 3' sequence
ccatggcacacggacactaggtccatcgcgttgactagtacatgaccacttga

SEQ ID NO: 18802 - DNA, 51 bp, Artificial Sequence
  Description of Artificial Sequence: Synthetic hazel nut; inner sequence and 3' sequence
gtacgatgctgcccgacatgtgtacgtgttgactagtacatgaccacttga

SEQ ID NO: 18803 - DNA, 53 bp, Artificial Sequence
  Description of Artificial Sequence: Synthetic hazel nut; inner sequence and 3' sequence
cgacccgcatgtacgttggtgcgtgccgctttgactagtacatgaccacttga

SEQ ID NO: 18804 - DNA, 53 bp, Artificial Sequence
  Description of Artificial Sequence: Synthetic hazel nut; inner sequence and 3' sequence
cgcgtacgaagcacaggacgtcactgcacgttgactagtacatgaccacttga

SEQ ID NO: 18805 - DNA, 53 bp, Artificial Sequence; identical to SEQ ID NO: 10925
  Description of Artificial Sequence: Synthetic hazel nut; inner sequence and 3' sequence

SEQ ID NO: 18806 - DNA, 53 bp, Artificial Sequence; identical to SEQ ID NO: 2337
  Description of Artificial Sequence: Synthetic hazel nut; inner sequence and 3' sequence

SEQ ID NO: 18807 - DNA, 53 bp, Artificial Sequence; identical to SEQ ID NO: 6419
  Description of Artificial Sequence: Synthetic hazel nut; inner sequence and 3' sequence

SEQ ID NO: 18808 - DNA, 53 bp, Artificial Sequence
  Description of Artificial Sequence: Synthetic hazel nut; inner sequence and 3' sequence
ggcgtagggagcgtaccgtatcgtgcgtcattgactagtacatgaccacttga

SEQ ID NO: 18809 - DNA, 53 bp, Artificial Sequence; identical to SEQ ID NO: 2437
  Description of Artificial Sequence: Synthetic hazel nut; inner sequence and 3' sequence

SEQ ID NO: 18810 - DNA, 53 bp, Artificial Sequence
  Description of Artificial Sequence: Synthetic hazel nut; inner sequence and 3' sequence
ggcatgcgatggatgtgcgttgtgctcggcttgactagtacatgaccacttga

SEQ ID NO: 18811 - DNA, 53 bp, Artificial Sequence
  Description of Artificial Sequence: Synthetic hazel nut; inner sequence and 3' sequence
cgtgcagtcagcgcgtcaccatacggtgtgttgactagtacatgaccacttga

SEQ ID NO: 18812 - DNA, 53 bp, Artificial Sequence; identical to SEQ ID NO: 10770
  Description of Artificial Sequence: Synthetic hazel nut; inner sequence and 3' sequence

SEQ ID NO: 18813 - DNA, 53 bp, Artificial Sequence
  Description of Artificial Sequence: Synthetic hazel nut; inner sequence and 3' sequence
gccactatgcctgcctgaccgtgacgcacgttgactagtacatgaccacttga

SEQ ID NO: 18814 - DNA, 53 bp, Artificial Sequence
  Description of Artificial Sequence: Synthetic hazel nut; inner sequence and 3' sequence
gcacgcagcgtacggtcactctgaggcacattgactagtacatgaccacttga

SEQ ID NO: 18815 - DNA, 53 bp, Artificial Sequence; identical to SEQ ID NO: 2409
  Description of Artificial Sequence: Synthetic hazel nut; inner sequence and 3' sequence

SEQ ID NO: 18816 - DNA, 53 bp, Artificial Sequence
  Description of Artificial Sequence: Synthetic hazel nut; inner sequence and 3' sequence
ggccgacggaccgacgcaacgtactgcgtgttgactagtacatgaccacttga

SEQ ID NO: 18817 - DNA, 53 bp, Artificial Sequence; identical to SEQ ID NO: 2961
  Description of Artificial Sequence: Synthetic hazel nut; inner sequence and 3' sequence

SEQ ID NO: 18818 - DNA, 53 bp, Artificial Sequence
  Description of Artificial Sequence: Synthetic hazel nut; inner sequence and 3' sequence
aacgtgtgtgcgcaacgactgatgtacgtgttgactagtacatgaccacttga

SEQ ID NO: 18819 - DNA, 53 bp, Artificial Sequence
  Description of Artificial Sequence: Synthetic hazel nut; inner sequence and 3' sequence
acgtcaacgacaccgatgcacgtcactgcgttgactagtacatgaccacttga

SEQ ID NO: 18820 - DNA, 53 bp, Artificial Sequence; identical to SEQ ID NO: 2623
  Description of Artificial Sequence: Synthetic hazel nut; inner sequence and 3' sequence

SEQ ID NO: 18821 - DNA, 53 bp, Artificial Sequence; identical to SEQ ID NO: 6817
  Description of Artificial Sequence: Synthetic hazel nut; inner sequence and 3' sequence

SEQ ID NO: 18822 - DNA, 53 bp, Artificial Sequence; identical to SEQ ID NO: 2637
  Description of Artificial Sequence: Synthetic hazel nut; inner sequence and 3' sequence

SEQ ID NO: 18823 - DNA, 53 bp, Artificial Sequence; identical to SEQ ID NO: 2647
  Description of Artificial Sequence: Synthetic hazel nut; inner sequence and 3' sequence

SEQ ID NO: 18824 - DNA, 53 bp, Artificial Sequence
  Description of Artificial Sequence: Synthetic hazel nut; inner sequence and 3' sequence
cgcacggtcgatacgtcatgcacgctgacattgactagtacatgaccacttga

SEQ ID NO: 18825 - DNA, 53 bp, Artificial Sequence
  Description of Artificial Sequence: Synthetic hazel nut; inner sequence and 3' sequence
cgtgccgtaacagcaacgtacttggccacattgactagtacatgaccacttga

SEQ ID NO: 18826 - DNA, 53 bp, Artificial Sequence; identical to SEQ ID NO: 2544
  Description of Artificial Sequence: Synthetic hazel nut; inner sequence and 3' sequence

SEQ ID NO: 18827 - DNA, 53 bp, Artificial Sequence; identical to SEQ ID NO: 2757
  Description of Artificial Sequence: Synthetic hazel nut; inner sequence and 3' sequence

SEQ ID NO: 18828 - DNA, 53 bp, Artificial Sequence; identical to SEQ ID NO: 2991
  Description of Artificial Sequence: Synthetic hazel nut; inner sequence and 3' sequence

SEQ ID NO: 18829 - DNA, 53 bp, Artificial Sequence
  Description of Artificial Sequence: Synthetic hazel nut; inner sequence and 3' sequence
cgcatcgcaatggccacgcgcaccgtcacgttgactagtacatgaccacttga

SEQ ID NO: 18830 - DNA, 53 bp, Artificial Sequence; identical to SEQ ID NO: 10999
  Description of Artificial Sequence: Synthetic hazel nut; inner sequence and 3' sequence

SEQ ID NO: 18831 - DNA, 53 bp, Artificial Sequence; identical to SEQ ID NO: 2890
  Description of Artificial Sequence: Synthetic hazel nut; inner sequence and 3' sequence

SEQ ID NO: 18832 - DNA, 53 bp, Artificial Sequence
  Description of Artificial Sequence: Synthetic hazel nut; inner sequence and 3' sequence
cgcatcgtagccgtgtgccgtgtacgcaggttgactagtacatgaccacttga

SEQ ID NO: 18833 - DNA, 53 bp, Artificial Sequence; identical to SEQ ID NO: 6710
  Description of Artificial Sequence: Synthetic hazel nut; inner sequence and 3' sequence

SEQ ID NO: 18834 - DNA, 53 bp, Artificial Sequence; identical to SEQ ID NO: 6958
  Description of Artificial Sequence: Synthetic hazel nut; inner sequence and 3' sequence

SEQ ID NO: 18835 - DNA, 53 bp, Artificial Sequence; identical to SEQ ID NO: 6852
  Description of Artificial Sequence: Synthetic hazel nut; inner sequence and 3' sequence

SEQ ID NO: 18836 - DNA, 53 bp, Artificial Sequence
  Description of Artificial Sequence: Synthetic hazel nut; inner sequence and 3' sequence
cgtgccacgacgtatgcctccgcagccacgttgactagtacatgaccacttga

SEQ ID NO: 18837 - DNA, 53 bp, Artificial Sequence
  Description of Artificial Sequence: Synthetic hazel nut; inner sequence and 3' sequence
gcgtcacagcgtggtacgtctcgcaccgtgttgactagtacatgaccacttga

SEQ ID NO: 18838 - DNA, 53 bp, Artificial Sequence
  Description of Artificial Sequence: Synthetic hazel nut; inner sequence and 3' sequence
cggcatgacggcaactgtgctacgtgcgcgttgactagtacatgaccacttga

SEQ ID NO: 18839 - DNA, 53 bp, Artificial Sequence; identical to SEQ ID NO: 2643
  Description of Artificial Sequence: Synthetic hazel nut; inner sequence and 3' sequence

SEQ ID NO: 18840 - DNA, 53 bp, Artificial Sequence; identical to SEQ ID NO: 2449
  Description of Artificial Sequence: Synthetic hazel nut; inner sequence and 3' sequence

SEQ ID NO: 18841 - DNA, 53 bp, Artificial Sequence
  Description of Artificial Sequence: Synthetic hazel nut; inner sequence and 3' sequence
cgaccaacgtgatgcaacgtgtacttcggcttgactagtacatgaccacttga

SEQ ID NO: 18842 - DNA, 53 bp, Artificial Sequence; identical to SEQ ID NO: 2349
  Description of Artificial Sequence: Synthetic hazel nut; inner sequence and 3' sequence

SEQ ID NO: 18843 - DNA, 53 bp, Artificial Sequence; identical to SEQ ID NO: 2260
  Description of Artificial Sequence: Synthetic hazel nut; inner sequence and 3' sequence

SEQ ID NO: 18844 - DNA, 53 bp, Artificial Sequence
  Description of Artificial Sequence: Synthetic hazel nut; inner sequence and 3' sequence
cgtgaacacgcacaatgacactgccgcacgttgactagtacatgaccacttga

SEQ ID NO: 18845 - DNA, 53 bp, Artificial Sequence; identical to SEQ ID NO: 10860
  Description of Artificial Sequence: Synthetic hazel nut; inner sequence and 3' sequence

SEQ ID NO: 18846 - DNA, 53 bp, Artificial Sequence
  Description of Artificial Sequence: Synthetic hazel nut; inner sequence and 3' sequence
ggcatgcgatgaacgaggcatgatgcgtaattgactagtacatgaccacttga

SEQ ID NO: 18847 - DNA, 53 bp, Artificial Sequence
  Description of Artificial Sequence: Synthetic hazel nut; inner sequence and 3' sequence
gcaccacgccgacaatgtacgctgctgaccttgactagtacatgaccacttga

SEQ ID NO: 18848 - DNA, 53 bp, Artificial Sequence
  Description of Artificial Sequence: Synthetic hazel nut; inner sequence and 3' sequence
cgacacggaccgacctgcgaactgcacgcgttgactagtacatgaccacttga

SEQ ID NO: 18849 - DNA, 53 bp, Artificial Sequence
  Description of Artificial Sequence: Synthetic hazel nut; inner sequence and 3' sequence
gcgaatgcaccgacacgtccctcacgcacgttgactagtacatgaccacttga

SEQ ID NO: 18850 - DNA, 53 bp, Artificial Sequence; identical to SEQ ID NO: 2585
  Description of Artificial Sequence: Synthetic hazel nut; inner sequence and 3' sequence

SEQ ID NO: 18851 - DNA, 53 bp, Artificial Sequence
  Description of Artificial Sequence: Synthetic hazel nut; inner sequence and 3' sequence
cgtgcgtagcgaccaaccgtcaacgtggccttgactagtacatgaccacttga

SEQ ID NO: 18852 - DNA, 53 bp, Artificial Sequence; identical to SEQ ID NO: 6579
  Description of Artificial Sequence: Synthetic hazel nut; inner sequence and 3' sequence

SEQ ID NO: 18853 - DNA, 53 bp, Artificial Sequence
  Description of Artificial Sequence: Synthetic hazel nut; inner sequence and 3' sequence
cgacacgacgacctgcacgctacgtgaatgttgactagtacatgaccacttga

SEQ ID NO: 18854 - DNA, 53 bp, Artificial Sequence; identical to SEQ ID NO: 2770
  Description of Artificial Sequence: Synthetic hazel nut; inner sequence and 3' sequence

SEQ ID NO: 18855 - DNA, 53 bp, Artificial Sequence
  Description of Artificial Sequence: Synthetic hazel nut; inner sequence and 3' sequence
ggaccgaacgtgtacggcagatacgtggcattgactagtacatgaccacttga

SEQ ID NO: 18856 - DNA, 53 bp, Artificial Sequence; identical to SEQ ID NO: 6956
  Description of Artificial Sequence: Synthetic hazel nut; inner sequence and 3' sequence

SEQ ID NO: 18857 - DNA, 53 bp, Artificial Sequence; identical to SEQ ID NO: 2375
  Description of Artificial Sequence: Synthetic hazel nut; inner sequence and 3' sequence

SEQ ID NO: 18858 - DNA, 53 bp, Artificial Sequence; identical to SEQ ID NO: 2271
  Description of Artificial Sequence: Synthetic hazel nut; inner sequence and 3' sequence

SEQ ID NO: 18859 - DNA, 53 bp, Artificial Sequence
  Description of Artificial Sequence: Synthetic hazel nut; inner sequence and 3' sequence
cacgtgcacgtggcgtcgttggcctacgcgttgactagtacatgaccacttga

SEQ ID NO: 18860 - DNA, 53 bp, Artificial Sequence; identical to SEQ ID NO: 6273
  Description of Artificial Sequence: Synthetic hazel nut; inner sequence and 3' sequence

SEQ ID NO: 18861 - DNA, 53 bp, Artificial Sequence
  Description of Artificial Sequence: Synthetic hazel nut; inner sequence and 3' sequence
cgtcacgcagacgtagtgccgcagtacgcattgactagtacatgaccacttga

SEQ ID NO: 18862 - DNA, 53 bp, Artificial Sequence
  Description of Artificial Sequence: Synthetic hazel nut; inner sequence and 3' sequence
ggcatgcgattaacgaggcatgatgcgtcattgactagtacatgaccacttga

SEQ ID NO: 18863 - DNA, 53 bp, Artificial Sequence
  Description of Artificial Sequence: Synthetic hazel nut; inner sequence and 3' sequence
cgaccacacgtaagatggcctcgctgcaccttgactagtacatgaccacttga

SEQ ID NO: 18864 - DNA, 53 bp, Artificial Sequence
  Description of Artificial Sequence: Synthetic hazel nut; inner sequence and 3' sequence
cgacggcaggcacggtgacatcagtacgtattgactagtacatgaccacttga

SEQ ID NO: 18865 - DNA, 53 bp, Artificial Sequence; identical to SEQ ID NO: 10994
  Description of Artificial Sequence: Synthetic hazel nut; inner sequence and 3' sequence

SEQ ID NO: 18866 - DNA, 53 bp, Artificial Sequence
  Description of Artificial Sequence: Synthetic hazel nut; inner sequence and 3' sequence
ggcacgcgatgaacgaggcatgatgcgtcattgactagtacatgaccacttga

SEQ ID NO: 18867 - DNA, 53 bp, Artificial Sequence; identical to SEQ ID NO: 2912
  Description of Artificial Sequence: Synthetic hazel nut; inner sequence and 3' sequence

SEQ ID NO: 18868 - DNA, 53 bp, Artificial Sequence
  Description of Artificial Sequence: Synthetic hazel nut; inner sequence and 3' sequence
gcgtagggcggacggacattgcacttcgccttgactagtacatgaccacttga

SEQ ID NO: 18869 - DNA, 53 bp, Artificial Sequence
  Description of Artificial Sequence: Synthetic hazel nut; inner sequence and 3' sequence
cgaacgcacaaggcaacgtacgcgcagtcattgactagtacatgaccacttga

SEQ ID NO: 18870 - DNA, 53 bp, Artificial Sequence; identical to SEQ ID NO: 2307
  Description of Artificial Sequence: Synthetic hazel nut; inner sequence and 3' sequence

SEQ ID NO: 18871 - DNA, 53 bp, Artificial Sequence; identical to SEQ ID NO: 2883
  Description of Artificial Sequence: Synthetic hazel nut; inner sequence and 3' sequence

SEQ ID NO: 18872 - DNA, 52 bp, Artificial Sequence; identical to SEQ ID NO: 2879
  Description of Artificial Sequence: Synthetic hazel nut; inner sequence and 3' sequence

SEQ ID NO: 18873 - DNA, 53 bp, Artificial Sequence
  Description of Artificial Sequence: Synthetic hazel nut; inner sequence and 3' sequence
acgactcgacctaaccgtactacgtgtgcgttgactagtacatgaccacttga

SEQ ID NO: 18874 - DNA, 53 bp, Artificial Sequence; identical to SEQ ID NO: 2684
  Description of Artificial Sequence: Synthetic hazel nut; inner sequence and 3' sequence

SEQ ID NO: 18875 - DNA, 53 bp, Artificial Sequence; identical to SEQ ID NO: 2728
  Description of Artificial Sequence: Synthetic hazel nut; inner sequence and 3' sequence

SEQ ID NO: 18876 - DNA, 53 bp, Artificial Sequence
  Description of Artificial Sequence: Synthetic hazel nut; inner sequence and 3' sequence
cgtaacgtaccacggtgcgtctgtgcgtccttgactagtacatgaccacttga

SEQ ID NO: 18877 - DNA, 53 bp, Artificial Sequence
  Description of Artificial Sequence: Synthetic hazel nut; inner sequence and 3' sequence
acgtcgcagcgtaacggttgggatgtgacattgactagtacatgaccacttga

SEQ ID NO: 18878 - DNA, 53 bp, Artificial Sequence
  Description of Artificial Sequence: Synthetic hazel nut; inner sequence and 3' sequence
ccatgcaggacgtagcgtgaccgttgcacattgactagtacatgaccacttga

SEQ ID NO: 18879 - DNA, 53 bp, Artificial Sequence
  Description of Artificial Sequence: Synthetic hazel nut; inner sequence and 3' sequence
cacgtatgcgtaacggacatgcgcttcactttgactagtacatgaccacttga

SEQ ID NO: 18880 - DNA, 53 bp, Artificial Sequence
  Description of Artificial Sequence: Synthetic hazel nut; inner sequence and 3' sequence
tcgcaccgtgacagtgaggcattgtggacattgactagtacatgaccacttga

SEQ ID NO: 18881 - DNA, 53 bp, Artificial Sequence; identical to SEQ ID NO: 2645
  Description of Artificial Sequence: Synthetic hazel nut; inner sequence and 3' sequence

SEQ ID NO: 18882 - DNA, 53 bp, Artificial Sequence; identical to SEQ ID NO: 2932
  Description of Artificial Sequence: Synthetic hazel nut; inner sequence and 3' sequence

SEQ ID NO: 18883 - DNA, 53 bp, Artificial Sequence
  Description of Artificial Sequence: Synthetic hazel nut; inner sequence and 3' sequence
gcatacggaacgaacgtaatggacgacgtattgactagtacatgaccacttga

SEQ ID NO: 18884 - DNA, 53 bp, Artificial Sequence
  Description of Artificial Sequence: Synthetic hazel nut; inner sequence and 3' sequence
cgtgcagcttgacgtacggttggccacgtattgactagtacatgaccacttga

SEQ ID NO: 18885 - DNA, 53 bp, Artificial Sequence; identical to SEQ ID NO: 6960
  Description of Artificial Sequence: Synthetic hazel nut; inner sequence and 3' sequence

SEQ ID NO: 18886 - DNA, 53 bp, Artificial Sequence
  Description of Artificial Sequence: Synthetic hazel nut; inner sequence and 3' sequence
ccgtcggcacacaggtccactcgctacgcattgactagtacatgaccacttga

SEQ ID NO: 18887 - DNA, 53 bp, Artificial Sequence; identical to SEQ ID NO: 2849
  Description of Artificial Sequence: Synthetic hazel nut; inner sequence and 3' sequence

SEQ ID NO: 18888 - DNA, 53 bp, Artificial Sequence
  Description of Artificial Sequence: Synthetic hazel nut; inner sequence and 3' sequence
agtgtgccgatgcgtccctatcacgtggcattgactagtacatgaccacttga

SEQ ID NO: 18889 - DNA, 53 bp, Artificial Sequence; identical to SEQ ID NO: 6655
  Description of Artificial Sequence: Synthetic hazel nut; inner sequence and 3' sequence

SEQ ID NO: 18890 - DNA, 53 bp, Artificial Sequence
  Description of Artificial Sequence: Synthetic hazel nut; inner sequence and 3' sequence
cgatccgacgaacgtgcgtgtcacatcgcgttgactagtacatgaccacttga

SEQ ID NO: 18891 - DNA, 53 bp, Artificial Sequence
  Description of Artificial Sequence: Synthetic hazel nut; inner sequence and 3' sequence
cggtgcagcgtgcatcggaaggtggcgtgattgactagtacatgaccacttga

SEQ ID NO: 18892 - DNA, 53 bp, Artificial Sequence
  Description of Artificial Sequence: Synthetic hazel nut; inner sequence and 3' sequence
ggcatgcgatgaacgaggcatggtgcgtcattgactagtacatgaccacttga

SEQ ID NO: 18893 - DNA, 53 bp, Artificial Sequence; identical to SEQ ID NO: 2395
  Description of Artificial Sequence: Synthetic hazel nut; inner sequence and 3' sequence

SEQ ID NO: 18894 - DNA, 53 bp, Artificial Sequence; identical to SEQ ID NO: 6401
  Description of Artificial Sequence: Synthetic hazel nut; inner sequence and 3' sequence

SEQ ID NO: 18895 - DNA, 53 bp, Artificial Sequence
  Description of Artificial Sequence: Synthetic hazel nut; inner sequence and 3' sequence
ccatgcgtgcaacctcgcccttacgtagcgttgactagtacatgaccacttga

SEQ ID NO: 18896 - DNA, 53 bp, Artificial Sequence
  Description of Artificial Sequence: Synthetic hazel nut; inner sequence and 3' sequence
gcggcacacgtaccttccttgcgcatgggcttgactagtacatgaccacttga

SEQ ID NO: 18897 - DNA, 53 bp, Artificial Sequence; identical to SEQ ID NO: 2514
  Description of Artificial Sequence: Synthetic hazel nut; inner sequence and 3' sequence

SEQ ID NO: 18898 - DNA, 53 bp, Artificial Sequence; identical to SEQ ID NO: 2602
  Description of Artificial Sequence: Synthetic hazel nut; inner sequence and 3' sequence

SEQ ID NO: 18899 - DNA, 53 bp, Artificial Sequence
  Description of Artificial Sequence: Synthetic hazel nut; inner sequence and 3' sequence
cgtgacgaacgtaggtcggtcagcttgccattgactagtacatgaccacttga

SEQ ID NO: 18900 - DNA, 53 bp, Artificial Sequence; identical to SEQ ID NO: 2818
  Description of Artificial Sequence: Synthetic hazel nut; inner sequence and 3' sequence

SEQ ID NO: 18901 - DNA, 53 bp, Artificial Sequence
  Description of Artificial Sequence: Synthetic hazel nut; inner sequence and 3' sequence
cggtacggatgcatcctccttcacggcacgttgactagtacatgaccacttga

SEQ ID NO: 18902 - DNA, 53 bp, Artificial Sequence; identical to SEQ ID NO: 2906
  Description of Artificial Sequence: Synthetic hazel nut; inner sequence and 3' sequence

SEQ ID NO: 18903 - DNA, 53 bp, Artificial Sequence; identical to SEQ ID NO: 6735
  Description of Artificial Sequence: Synthetic hazel nut; inner sequence and 3' sequence

SEQ ID NO: 18904 - DNA, 53 bp, Artificial Sequence
  Description of Artificial Sequence: Synthetic hazel nut; inner sequence and 3' sequence
tcggtacgtagcatggatcgttgcgacacgttgactagtacatgaccacttga

SEQ ID NO: 18905 - DNA, 53 bp, Artificial Sequence; identical to SEQ ID NO: 2075
  Description of Artificial Sequence: Synthetic hazel nut; inner sequence and 3' sequence

SEQ ID NO: 18906 - DNA, 53 bp, Artificial Sequence
  Description of Artificial Sequence: Synthetic hazel nut; inner sequence and 3' sequence
cgtgacgcacaacaaggcatgtgaggcacattgactagtacatgaccacttga

SEQ ID NO: 18907 - DNA, 53 bp, Artificial Sequence
  Description of Artificial Sequence: Synthetic hazel nut; inner sequence and 3' sequence
cgcaaggcatgtcgcactctcaccgtgacgttgactagtacatgaccacttga

SEQ ID NO: 18908 - DNA, 53 bp, Artificial Sequence
  Description of Artificial Sequence: Synthetic hazel nut; inner sequence and 3' sequence
ggtgacacaacggaggtacgtcgctgcacgttgactagtacatgaccacttga

SEQ ID NO: 18909 - DNA, 53 bp, Artificial Sequence; identical to SEQ ID NO: 6948
  Description of Artificial Sequence: Synthetic hazel nut; inner sequence and 3' sequence

SEQ ID NO: 18910 - DNA, 53 bp, Artificial Sequence; identical to SEQ ID NO: 10712
  Description of Artificial Sequence: Synthetic hazel nut; inner sequence and 3' sequence

SEQ ID NO: 18911 - DNA, 53 bp, Artificial Sequence
  Description of Artificial Sequence: Synthetic hazel nut; inner sequence and 3' sequence
gcaatcaggcacactgaccctctcagcacgttgactagtacatgaccacttga

SEQ ID NO: 18912 - DNA, 53 bp, Artificial Sequence
  Description of Artificial Sequence: Synthetic hazel nut; inner sequence and 3' sequence
acgtgcggaacgtcgatcgctgccttgtccttgactagtacatgaccacttga

SEQ ID NO: 18913 - DNA, 53 bp, Artificial Sequence; identical to SEQ ID NO: 14869
  Description of Artificial Sequence: Synthetic hazel nut; inner sequence and 3' sequence

SEQ ID NO: 18914 - DNA, 53 bp, Artificial Sequence
  Description of Artificial Sequence: Synthetic hazel nut; inner sequence and 3' sequence
cggaccgaagagtgcacgtgctacgtaacgttgactagtacatgaccacttga

SEQ ID NO: 18915 - DNA, 53 bp, Artificial Sequence; identical to SEQ ID NO: 2480
  Description of Artificial Sequence: Synthetic hazel nut; inner sequence and 3' sequence

SEQ ID NO: 18916 - DNA, 53 bp, Artificial Sequence; identical to SEQ ID NO: 6971
  Description of Artificial Sequence: Synthetic hazel nut; inner sequence and 3' sequence

SEQ ID NO: 18917 - DNA, 53 bp, Artificial Sequence
  Description of Artificial Sequence: Synthetic hazel nut; inner sequence and 3' sequence
ggacgcgcatgaccgtcggatcgcgacacattgactagtacatgaccacttga

SEQ ID NO: 18918 - DNA, 53 bp, Artificial Sequence
  Description of Artificial Sequence: Synthetic hazel nut; inner sequence and 3' sequence
gcaacgcatgacgcaggccagcacttcgcattgactagtacatgaccacttga

SEQ ID NO: 18919 - DNA, 53 bp, Artificial Sequence; identical to SEQ ID NO: 2903
  Description of Artificial Sequence: Synthetic hazel nut; inner sequence and 3' sequence

SEQ ID NO: 18920 - DNA, 53 bp, Artificial Sequence; identical to SEQ ID NO: 6552
  Description of Artificial Sequence: Synthetic hazel nut; inner sequence and 3' sequence

SEQ ID NO: 18921 - DNA, 53 bp, Artificial Sequence; identical to SEQ ID NO: 2531
  Description of Artificial Sequence: Synthetic hazel nut; inner sequence and 3' sequence

SEQ ID NO: 18922 - DNA, 53 bp, Artificial Sequence; identical to SEQ ID NO: 10756
  Description of Artificial Sequence: Synthetic hazel nut; inner sequence and 3' sequence

SEQ ID NO: 18923 - DNA, 53 bp, Artificial Sequence
  Description of Artificial Sequence: Synthetic hazel nut; inner sequence and 3' sequence
ggcacacgtgatggacgacgttcccgatgcttgactagtacatgaccacttga

SEQ ID NO: 18924 - DNA, 53 bp, Artificial Sequence; identical to SEQ ID NO: 2679
  Description of Artificial Sequence: Synthetic hazel nut; inner sequence and 3' sequence

SEQ ID NO: 18925 - DNA, 53 bp, Artificial Sequence
  Description of Artificial Sequence: Synthetic hazel nut; inner sequence and 3' sequence
cgcgcagtgaccgcatgttccctcgtcacattgactagtacatgaccacttga

SEQ ID NO: 18926 - DNA, 53 bp, Artificial Sequence
  Description of Artificial Sequence: Synthetic hazel nut; inner sequence and 3' sequence
gaccacgcgcatgaccgtacgtgcaccatgttgactagtacatgaccacttga

SEQ ID NO: 18927 - DNA, 48 bp, Artificial Sequence
  Description of Artificial Sequence: Synthetic hazel nut; inner sequence and 3' sequence
cgcaccgtcaagcaggcacgtgtcattgactagtacatgaccacttga

SEQ ID NO: 18928 - DNA, 53 bp, Artificial Sequence
  Description of Artificial Sequence: Synthetic hazel nut; inner sequence and 3' sequence
agcgtggcacggtacggatacgttggcacattgactagtacatgaccacttga

SEQ ID NO: 18929 - DNA, 53 bp, Artificial Sequence; identical to SEQ ID NO: 10968
  Description of Artificial Sequence: Synthetic hazel nut; inner sequence and 3' sequence

SEQ ID NO: 18930 - DNA, 53 bp, Artificial Sequence
  Description of Artificial Sequence: Synthetic hazel nut; inner sequence and 3' sequence
gcatcatgaccctcactgaccgcatgcgcgttgactagtacatgaccacttga

SEQ ID NO: 18931 - DNA, 53 bp, Artificial Sequence
  Description of Artificial Sequence: Synthetic hazel nut; inner sequence and 3' sequence
cgcaccgtcgatacgtcatgcaggctgacattgactagtacatgaccacttga

SEQ ID NO: 18932 - DNA, 53 bp, Artificial Sequence
  Description of Artificial Sequence: Synthetic hazel nut; inner sequence and 3' sequence
cgaccacgtggcatgacggcgtgcgacgtattgactagtacatgaccacttga

SEQ ID NO: 18933 - DNA, 53 bp, Artificial Sequence
  Description of Artificial Sequence: Synthetic hazel nut; inner sequence and 3' sequence
cgtcgcgacgagcaaggtgaacgtgtcccgttgactagtacatgaccacttga

SEQ ID NO: 18934 - DNA, 53 bp, Artificial Sequence; identical to SEQ ID NO: 6384
  Description of Artificial Sequence: Synthetic hazel nut; inner sequence and 3' sequence

SEQ ID NO: 18935 - DNA, 53 bp, Artificial Sequence; identical to SEQ ID NO: 2655
  Description of Artificial Sequence: Synthetic hazel nut; inner sequence and 3' sequence

SEQ ID NO: 18936 - DNA, 53 bp, Artificial Sequence
  Description of Artificial Sequence: Synthetic hazel nut; inner sequence and 3' sequence
gcagcacggcatgtgacgtattcccgctgcttgactagtacatgaccacttga

SEQ ID NO: 18937 - DNA, 53 bp, Artificial Sequence
  Description of Artificial Sequence: Synthetic hazel nut; inner sequence and 3' sequence
acatgcgcatcgagcctacctgtacgcacattgactagtacatgaccacttga

SEQ ID NO: 18938 - DNA, 53 bp, Artificial Sequence
  Description of Artificial Sequence: Synthetic hazel nut; inner sequence and 3' sequence
acacgacatgaggacgatacgcaccgtgccttgactagtacatgaccacttga

SEQ ID NO: 18939 - DNA, 53 bp, Artificial Sequence; identical to SEQ ID NO: 2441
  Description of Artificial Sequence: Synthetic hazel nut; inner sequence and 3' sequence

SEQ ID NO: 18940 - DNA, 49 bp, Artificial Sequence
  Description of Artificial Sequence: Synthetic hazel nut; inner sequence and 3' sequence
gcatgggtgcgatcgtaacgcgtggtttgactagtacatgaccacttga

SEQ ID NO: 18941 - DNA, 53 bp, Artificial Sequence
  Description of Artificial Sequence: Synthetic hazel nut; inner sequence and 3' sequence
gcatcacaacatcatgccgtgatctgcacattgactagtacatgaccacttga

SEQ ID NO: 18942 - DNA, 53 bp, Artificial Sequence
  Description of Artificial Sequence: Synthetic hazel nut; inner sequence and 3' sequence
gtcaccacgacgatgagcgccatgtcgacgttgactagtacatgaccacttga

SEQ ID NO: 18943 - DNA, 53 bp, Artificial Sequence
  Description of Artificial Sequence: Synthetic hazel nut; inner sequence and 3' sequence
cgtacggcacgcgacatgacatccgccatgttgactagtacatgaccacttga

SEQ ID NO: 18944 - DNA, 53 bp, Artificial Sequence
  Description of Artificial Sequence: Synthetic hazel nut; inner sequence and 3' sequence
gcacacagcacgatgactgcactgatcggtttgactagtacatgaccacttga

SEQ ID NO: 18945 - DNA, 53 bp, Artificial Sequence; identical to SEQ ID NO: 6861
  Description of Artificial Sequence: Synthetic hazel nut; inner sequence and 3' sequence

SEQ ID NO: 18946 - DNA, 53 bp, Artificial Sequence; identical to SEQ ID NO: 6611
  Description of Artificial Sequence: Synthetic hazel nut; inner sequence and 3' sequence

SEQ ID NO: 18947 - DNA, 53 bp, Artificial Sequence; identical to SEQ ID NO: 2570
  Description of Artificial Sequence: Synthetic hazel nut; inner sequence and 3' sequence

SEQ ID NO: 18948 - DNA, 53 bp, Artificial Sequence
  Description of Artificial Sequence: Synthetic hazel nut; inner sequence and 3' sequence
gcgtgtcagcaatacgtcctcatctgcacgttgactagtacatgaccacttga

SEQ ID NO: 18949 - DNA, 53 bp, Artificial Sequence
  Description of Artificial Sequence: Synthetic hazel nut; inner sequence and 3' sequence
cgtaccgcaagcgacgtgtccgtgccgtgattgactagtacatgaccacttga

SEQ ID NO: 18950 - DNA, 53 bp, Artificial Sequence
  Description of Artificial Sequence: Synthetic hazel nut; inner sequence and 3' sequence
cacgcagtgacgcatgtgcaccacgacgcgttgactagtacatgaccacttga

SEQ ID NO: 18951 - DNA, 53 bp, Artificial Sequence
  Description of Artificial Sequence: Synthetic hazel nut; inner sequence and 3' sequence
ggcacaccacaggtacgcatcgcctcggtcttgactagtacatgaccacttga

SEQ ID NO: 18952 - DNA, 53 bp, Artificial Sequence
  Description of Artificial Sequence: Synthetic hazel nut; inner sequence and 3' sequence
cgtaccacgcgaggacaagcatgggtcacgttgactagtacatgaccacttga

SEQ ID NO: 18953 - DNA, 53 bp, Artificial Sequence
  Description of Artificial Sequence: Synthetic hazel nut; inner sequence and 3' sequence
caacgcgcaacggtgaggtaggcctgagcattgactagtacatgaccacttga

SEQ ID NO: 18954 - DNA, 53 bp, Artificial Sequence
  Description of Artificial Sequence: Synthetic hazel nut; inner sequence and 3' sequence
gcacaaggcgataccgtccgcaacgccacgttgactagtacatgaccacttga

SEQ ID NO: 18955 - DNA, 53 bp, Artificial Sequence
  Description of Artificial Sequence: Synthetic hazel nut; inner sequence and 3' sequence
ccgacgatgcagtgtggcgtaacgtgcatgttgactagtacatgaccacttga

SEQ ID NO: 18956 - DNA, 53 bp, Artificial Sequence
  Description of Artificial Sequence: Synthetic hazel nut; inner sequence and 3' sequence
cgcaacgcaagatggtgcccgtcctgcacgttgactagtacatgaccacttga

SEQ ID NO: 18957 - DNA, 53 bp, Artificial Sequence
  Description of Artificial Sequence: Synthetic hazel nut; inner sequence and 3' sequence
tggacgcaacgaaacgtacgccacttcgcgttgactagtacatgaccacttga

SEQ ID NO: 18958 - DNA, 53 bp, Artificial Sequence; identical to SEQ ID NO: 6254
  Description of Artificial Sequence: Synthetic hazel nut; inner sequence and 3' sequence

SEQ ID NO: 18959 - DNA, 54 bp, Artificial Sequence; identical to SEQ ID NO: 2652
  Description of Artificial Sequence: Synthetic hazel nut; inner sequence and 3' sequence

SEQ ID NO: 18960 - DNA, 53 bp, Artificial Sequence; identical to SEQ ID NO: 2784
  Description of Artificial Sequence: Synthetic hazel nut; inner sequence and 3' sequence

SEQ ID NO: 18961 - DNA, 53 bp, Artificial Sequence; identical to SEQ ID NO: 2601
  Description of Artificial Sequence: Synthetic hazel nut; inner sequence and 3' sequence

SEQ ID NO: 18962 - DNA, 53 bp, Artificial Sequence
  Description of Artificial Sequence: Synthetic hazel nut; inner sequence and 3' sequence
ggcatgcgcgtaccatcgagggggcgtggattgactagtacatgaccacttga

SEQ ID NO: 18963 - DNA, 53 bp, Artificial Sequence; identical to SEQ ID NO: 2187
  Description of Artificial Sequence: Synthetic hazel nut; inner sequence and 3' sequence

SEQ ID NO: 18964 - DNA, 53 bp, Artificial Sequence
  Description of Artificial Sequence: Synthetic hazel nut; inner sequence and 3' sequence
gcacggaacgcaatgtacgtagcgtcgacattgactagtacatgaccacttga

SEQ ID NO: 18965 - DNA, 53 bp, Artificial Sequence
  Description of Artificial Sequence: Synthetic hazel nut; inner sequence and 3' sequence
acggcacggacactacggcatgtacgcatattgactagtacatgaccacttga

SEQ ID NO: 18966 - DNA, 53 bp, Artificial Sequence
  Description of Artificial Sequence: Synthetic hazel nut; inner sequence and 3' sequence
cgtgacgcacatggcacacaccgctacgcgttgactagtacatgaccacttga

SEQ ID NO: 18967 - DNA, 53 bp, Artificial Sequence; identical to SEQ ID NO: 2811
  Description of Artificial Sequence: Synthetic hazel nut; inner sequence and 3' sequence

SEQ ID NO: 18968 - DNA, 53 bp, Artificial Sequence
  Description of Artificial Sequence: Synthetic hazel nut; inner sequence and 3' sequence
cctgcctcgtgcctggacgctccatgcgcgttgactagtacatgaccacttga

SEQ ID NO: 18969 - DNA, 53 bp, Artificial Sequence; identical to SEQ ID NO: 6590
  Description of Artificial Sequence: Synthetic hazel nut; inner sequence and 3' sequence

SEQ ID NO: 18970 - DNA, 53 bp, Artificial Sequence
  Description of Artificial Sequence: Synthetic hazel nut; inner sequence and 3' sequence
gcgcatgcaaggcacggtacgtactgcgcattgactagtacatgaccacttga

SEQ ID NO: 18971 - DNA, 53 bp, Artificial Sequence; identical to SEQ ID NO: 2768
  Description of Artificial Sequence: Synthetic hazel nut; inner sequence and 3' sequence

SEQ ID NO: 18972 - DNA, 53 bp, Artificial Sequence; identical to SEQ ID NO: 2677
  Description of Artificial Sequence: Synthetic hazel nut; inner sequence and 3' sequence

SEQ ID NO: 18973 - DNA, 53 bp, Artificial Sequence
  Description of Artificial Sequence: Synthetic hazel nut; inner sequence and 3' sequence
ggccgaacggacgtacgtgcacgcagcccgttgactagtacatgaccacttga

SEQ ID NO: 18974 - DNA, 53 bp, Artificial Sequence; identical to SEQ ID NO: 2574
  Description of Artificial Sequence: Synthetic hazel nut; inner sequence and 3' sequence

SEQ ID NO: 18975 - DNA, 53 bp, Artificial Sequence
  Description of Artificial Sequence: Synthetic hazel nut; inner sequence and 3' sequence
cgatggccgaacgaagcacgttgctacgcgttgactagtacatgaccacttga

SEQ ID NO: 18976 - DNA, 53 bp, Artificial Sequence
  Description of Artificial Sequence: Synthetic hazel nut; inner sequence and 3' sequence
ccgtcacatggatcggacctgatgcgcaccttgactagtacatgaccacttga

SEQ ID NO: 18977 - DNA, 53 bp, Artificial Sequence; identical to SEQ ID NO: 2341
  Description of Artificial Sequence: Synthetic hazel nut; inner sequence and 3' sequence

SEQ ID NO: 18978 - DNA, 53 bp, Artificial Sequence
  Description of Artificial Sequence: Synthetic hazel nut; inner sequence and 3' sequence
cgtgacacgaacgcgatgtacgatgcgacattgactagtacatgaccacttga

SEQ ID NO: 18979 - DNA, 53 bp, Artificial Sequence
  Description of Artificial Sequence: Synthetic hazel nut; inner sequence and 3' sequence
acgatgcggcatacgtacgctacgtggccattgactagtacatgaccacttga

SEQ ID NO: 18980 - DNA, 53 bp, Artificial Sequence
  Description of Artificial Sequence: Synthetic hazel nut; inner sequence and 3' sequence
cgtgccgccaccctgaccgatgcgtggtgattgactagtacatgaccacttga

SEQ ID NO: 18981 - DNA, 53 bp, Artificial Sequence; identical to SEQ ID NO: 2555
  Description of Artificial Sequence: Synthetic hazel nut; inner sequence and 3' sequence

SEQ ID NO: 18982 - DNA, 53 bp, Artificial Sequence
  Description of Artificial Sequence: Synthetic hazel nut; inner sequence and 3' sequence
ggcatgggatgaacgaggcatgatgcgtcattgactagtacatgaccacttga

SEQ ID NO: 18983 - DNA, 53 bp, Artificial Sequence; identical to SEQ ID NO: 2403
  Description of Artificial Sequence: Synthetic hazel nut; inner sequence and 3' sequence

SEQ ID NO: 18984 - DNA, 53 bp, Artificial Sequence
  Description of Artificial Sequence: Synthetic hazel nut; inner sequence and 3' sequence
ccgtgcgcatgaacggtatggtgcttcgtgttgactagtacatgaccacttga

SEQ ID NO: 18985 - DNA, 53 bp, Artificial Sequence
  Description of Artificial Sequence: Synthetic hazel nut; inner sequence and 3' sequence
gcgtgtgcgtacgatgacctgcgatgcgccttgactagtacatgaccacttga

SEQ ID NO: 18986 - DNA, 53 bp, Artificial Sequence
  Description of Artificial Sequence: Synthetic hazel nut; inner sequence and 3' sequence
gcgtgcgatgaccggatcgtgccatgcggattgactagtacatgaccacttga

SEQ ID NO: 18987 - DNA, 53 bp, Artificial Sequence
  Description of Artificial Sequence: Synthetic hazel nut; inner sequence and 3' sequence
tgacagcatggccaaacgacatcgtgcacattgactagtacatgaccacttga

SEQ ID NO: 18988 - DNA, 53 bp, Artificial Sequence
  Description of Artificial Sequence: Synthetic hazel nut; inner sequence and 3' sequence
gcaatgcacacgtacgaccttcgcgccacgttgactagtacatgaccacttga

SEQ ID NO: 18989 - DNA, 53 bp, Artificial Sequence
  Description of Artificial Sequence: Synthetic hazel nut; inner sequence and 3' sequence
ggcaacacggtgcacatcgggtacatcgcgttgactagtacatgaccacttga

SEQ ID NO: 18990 - DNA, 53 bp, Artificial Sequence; identical to SEQ ID NO: 2799
  Description of Artificial Sequence: Synthetic hazel nut; inner sequence and 3' sequence

SEQ ID NO: 18991 - DNA, 53 bp, Artificial Sequence; identical to SEQ ID NO: 10579
  Description of Artificial Sequence: Synthetic hazel nut; inner sequence and 3' sequence

SEQ ID NO: 18992 - DNA, 53 bp, Artificial Sequence; identical to SEQ ID NO: 6761
  Description of Artificial Sequence: Synthetic hazel nut; inner sequence and 3' sequence

SEQ ID NO: 18993 - DNA, 53 bp, Artificial Sequence
  Description of Artificial Sequence: Synthetic hazel nut; inner sequence and 3' sequence
cacgcagggaacgtatccgtccttgccgcgttgactagtacatgaccacttga

SEQ ID NO: 18994 - DNA, 54 bp, Artificial Sequence; identical to SEQ ID NO: 2971
  Description of Artificial Sequence: Synthetic hazel nut; inner sequence and 3' sequence

SEQ ID NO: 18995 - DNA, 53 bp, Artificial Sequence; identical to SEQ ID NO: 2621
  Description of Artificial Sequence: Synthetic hazel nut; inner sequence and 3' sequence

SEQ ID NO: 18996 - DNA, 53 bp, Artificial Sequence; identical to SEQ ID NO: 2901
  Description of Artificial Sequence: Synthetic hazel nut; inner sequence and 3' sequence

SEQ ID NO: 18997 - DNA, 53 bp, Artificial Sequence
  Description of Artificial Sequence: Synthetic hazel nut; inner sequence and 3' sequence
gcacacataccgttacgttgtggtgcaccattgactagtacatgaccacttga

SEQ ID NO: 18998 - DNA, 53 bp, Artificial Sequence; identical to SEQ ID NO: 2493
  Description of Artificial Sequence: Synthetic hazel nut; inner sequence and 3' sequence

SEQ ID NO: 18999 - DNA, 53 bp, Artificial Sequence
  Description of Artificial Sequence: Synthetic hazel nut; inner sequence and 3' sequence
ggcatgcgttgaacgaggcatgatgcgtcattgactagtacatgaccacttga

SEQ ID NO: 19000 - DNA, 53 bp, Artificial Sequence
  Description of Artificial Sequence: Synthetic hazel nut; inner sequence and 3' sequence
gcaaccacagcacatcgacgccctcgcaccttgactagtacatgaccacttga

SEQ ID NO: 19001 - DNA, 53 bp, Artificial Sequence
  Description of Artificial Sequence: Synthetic hazel nut; inner sequence and 3' sequence
cacgacaagcacacatgtcctgcctgcacgttgactagtacatgaccacttga

SEQ ID NO: 19002 - DNA, 53 bp, Artificial Sequence; identical to SEQ ID NO: 2891
  Description of Artificial Sequence: Synthetic hazel nut; inner sequence and 3' sequence

SEQ ID NO: 19003 - DNA, 76 bp, Artificial Sequence; identical to SEQ ID NO: 3003
  Description of Artificial Sequence: Synthetic hazel nut; 5' sequence + inner sequence + 3' sequence

SEQ ID NO: 19004 - DNA, 76 bp, Artificial Sequence; identical to SEQ ID NO: 3010
  Description of Artificial Sequence: Synthetic hazel nut; 5' sequence + inner sequence + 3' sequence

SEQ ID NO: 19005 - DNA, 76 bp, Artificial Sequence; identical to SEQ ID NO: 3004
  Description of Artificial Sequence: Synthetic hazel nut; 5' sequence + inner sequence + 3' sequence

SEQ ID NO: 19006 - DNA, 76 bp, Artificial Sequence; identical to SEQ ID NO: 3008
  Description of Artificial Sequence: Synthetic hazel nut; 5' sequence + inner sequence + 3' sequence

SEQ ID NO: 19007 - DNA, 76 bp, Artificial Sequence; identical to SEQ ID NO: 3006
  Description of Artificial Sequence: Synthetic hazel nut; 5' sequence + inner sequence + 3' sequence

SEQ ID NO: 19008 - DNA, 76 bp, Artificial Sequence; identical to SEQ ID NO: 3005
  Description of Artificial Sequence: Synthetic hazel nut; 5' sequence + inner sequence + 3' sequence

SEQ ID NO: 19009 - DNA, 76 bp, Artificial Sequence; identical to SEQ ID NO: 3020
  Description of Artificial Sequence: Synthetic hazel nut; 5' sequence + inner sequence + 3' sequence

SEQ ID NO: 19010 - DNA, 76 bp, Artificial Sequence; identical to SEQ ID NO: 3036
  Description of Artificial Sequence: Synthetic hazel nut; 5' sequence + inner sequence + 3' sequence

SEQ ID NO: 19011 - DNA, 76 bp, Artificial Sequence; identical to SEQ ID NO: 3009
  Description of Artificial Sequence: Synthetic hazel nut; 5' sequence + inner sequence + 3' sequence

SEQ ID NO: 19012 - DNA, 76 bp, Artificial Sequence; identical to SEQ ID NO: 3007
  Description of Artificial Sequence: Synthetic hazel nut; 5' sequence + inner sequence + 3' sequence

SEQ ID NO: 19013 - DNA, 76 bp, Artificial Sequence; identical to SEQ ID NO: 3012
  Description of Artificial Sequence: Synthetic hazel nut; 5' sequence + inner sequence + 3' sequence

SEQ ID NO: 19014 - DNA, 76 bp, Artificial Sequence; identical to SEQ ID NO: 3040
  Description of Artificial Sequence: Synthetic hazel nut; 5' sequence + inner sequence + 3' sequence

SEQ ID NO: 19015 - DNA, 76 bp, Artificial Sequence; identical to SEQ ID NO: 3011
  Description of Artificial Sequence: Synthetic hazel nut; 5' sequence + inner sequence + 3' sequence

SEQ ID NO: 19016 - DNA, 76 bp, Artificial Sequence; identical to SEQ ID NO: 3045
  Description of Artificial Sequence: Synthetic hazel nut; 5' sequence + inner sequence + 3' sequence

SEQ ID NO: 19017 - DNA, 76 bp, Artificial Sequence; identical to SEQ ID NO: 3023
  Description of Artificial Sequence: Synthetic hazel nut; 5' sequence + inner sequence + 3' sequence

SEQ ID NO: 19018 - DNA, 76 bp, Artificial Sequence; identical to SEQ ID NO: 3030
  Description of Artificial Sequence: Synthetic hazel nut; 5' sequence + inner sequence + 3' sequence

SEQ ID NO: 19019 - DNA, 76 bp, Artificial Sequence; identical to SEQ ID NO: 3022
  Description of Artificial Sequence: Synthetic hazel nut; 5' sequence + inner sequence + 3' sequence

SEQ ID NO: 19020 - DNA, 76 bp, Artificial Sequence; identical to SEQ ID NO: 3108
  Description of Artificial Sequence: Synthetic hazel nut; 5' sequence + inner sequence + 3' sequence

SEQ ID NO: 19021 - DNA, 76 bp, Artificial Sequence; identical to SEQ ID NO: 3021
  Description of Artificial Sequence: Synthetic hazel nut; 5' sequence + inner sequence + 3' sequence

SEQ ID NO: 19022 - DNA, 76 bp, Artificial Sequence; identical to SEQ ID NO: 3014
  Description of Artificial Sequence: Synthetic hazel nut; 5' sequence + inner sequence + 3' sequence

SEQ ID NO: 19023 - DNA, 76 bp, Artificial Sequence; identical to SEQ ID NO: 3044
  Description of Artificial Sequence: Synthetic hazel nut; 5' sequence + inner sequence + 3' sequence

SEQ ID NO: 19024 - DNA, 76 bp, Artificial Sequence; identical to SEQ ID NO: 3129
  Description of Artificial Sequence: Synthetic hazel nut; 5' sequence + inner sequence + 3' sequence

SEQ ID NO: 19025 - DNA, 76 bp, Artificial Sequence; identical to SEQ ID NO: 3028
  Description of Artificial Sequence: Synthetic hazel nut; 5' sequence + inner sequence + 3' sequence

SEQ ID NO: 19026 - DNA, 76 bp, Artificial Sequence; identical to SEQ ID NO: 3041
  Description of Artificial Sequence: Synthetic hazel nut; 5' sequence + inner sequence + 3' sequence

SEQ ID NO: 19027 - DNA, 76 bp, Artificial Sequence; identical to SEQ ID NO: 3033
  Description of Artificial Sequence: Synthetic hazel nut; 5' sequence + inner sequence + 3' sequence

SEQ ID NO: 19028 - DNA, 75 bp, Artificial Sequence; identical to SEQ ID NO: 3193
  Description of Artificial Sequence: Synthetic hazel nut; 5' sequence + inner sequence + 3' sequence

SEQ ID NO: 19029 - DNA, 76 bp, Artificial Sequence; identical to SEQ ID NO: 3079
  Description of Artificial Sequence: Synthetic hazel nut; 5' sequence + inner sequence + 3' sequence

SEQ ID NO: 19030 - DNA, 76 bp, Artificial Sequence; identical to SEQ ID NO: 3052
  Description of Artificial Sequence: Synthetic hazel nut; 5' sequence + inner sequence + 3' sequence

SEQ ID NO: 19031 - DNA, 76 bp, Artificial Sequence; identical to SEQ ID NO: 3046
  Description of Artificial Sequence: Synthetic hazel nut; 5' sequence + inner sequence + 3' sequence

SEQ ID NO: 19032 - DNA, 76 bp, Artificial Sequence; identical to SEQ ID NO: 3016
  Description of Artificial Sequence: Synthetic hazel nut; 5' sequence + inner sequence + 3' sequence

SEQ ID NO: 19033 - DNA, 76 bp, Artificial Sequence; identical to SEQ ID NO: 3060
  Description of Artificial Sequence: Synthetic hazel nut; 5' sequence + inner sequence + 3' sequence

SEQ ID NO: 19034 - DNA, 76 bp, Artificial Sequence; identical to SEQ ID NO: 3017
  Description of Artificial Sequence: Synthetic hazel nut; 5' sequence + inner sequence + 3' sequence

SEQ ID NO: 19035 - DNA, 76 bp, Artificial Sequence; identical to SEQ ID NO: 3013
  Description of Artificial Sequence: Synthetic hazel nut; 5' sequence + inner sequence + 3' sequence

SEQ ID NO: 19036 - DNA, 76 bp, Artificial Sequence; identical to SEQ ID NO: 3025
  Description of Artificial Sequence: Synthetic hazel nut; 5' sequence + inner sequence + 3' sequence

SEQ ID NO: 19037 - DNA, 76 bp, Artificial Sequence; identical to SEQ ID NO: 3077
  Description of Artificial Sequence: Synthetic hazel nut; 5' sequence + inner sequence + 3' sequence

SEQ ID NO: 19038 - DNA, 76 bp, Artificial Sequence; identical to SEQ ID NO: 3018
  Description of Artificial Sequence: Synthetic hazel nut; 5' sequence + inner sequence + 3' sequence

SEQ ID NO: 19039 - DNA, 76 bp, Artificial Sequence; identical to SEQ ID NO: 3051
  Description of Artificial Sequence: Synthetic hazel nut; 5' sequence + inner sequence + 3' sequence

SEQ ID NO: 19040 - DNA, 76 bp, Artificial Sequence; identical to SEQ ID NO: 3015
  Description of Artificial Sequence: Synthetic hazel nut; 5' sequence + inner sequence + 3' sequence

SEQ ID NO: 19041 - DNA, 76 bp, Artificial Sequence; identical to SEQ ID NO: 3049
  Description of Artificial Sequence: Synthetic hazel nut; 5' sequence + inner sequence + 3' sequence

SEQ ID NO: 19042 - DNA, 76 bp, Artificial Sequence; identical to SEQ ID NO: 3050
  Description of Artificial Sequence: Synthetic hazel nut; 5' sequence + inner sequence + 3' sequence

SEQ ID NO: 19043 - DNA, 76 bp, Artificial Sequence; identical to SEQ ID NO: 3064
  Description of Artificial Sequence: Synthetic hazel nut; 5' sequence + inner sequence + 3' sequence

SEQ ID NO: 19044 - DNA, 76 bp, Artificial Sequence; identical to SEQ ID NO: 3053
  Description of Artificial Sequence: Synthetic hazel nut; 5' sequence + inner sequence + 3' sequence

SEQ ID NO: 19045 - DNA, 76 bp, Artificial Sequence; identical to SEQ ID NO: 3098
  Description of Artificial Sequence: Synthetic hazel nut; 5' sequence + inner sequence + 3' sequence

SEQ ID NO: 19046 - DNA, 76 bp, Artificial Sequence; identical to SEQ ID NO: 3088
  Description of Artificial Sequence: Synthetic hazel nut; 5' sequence + inner sequence + 3' sequence

SEQ ID NO: 19047 - DNA, 76 bp, Artificial Sequence; identical to SEQ ID NO: 3074
  Description of Artificial Sequence: Synthetic hazel nut; 5' sequence + inner sequence + 3' sequence

SEQ ID NO: 19048 - DNA, 76 bp, Artificial Sequence; identical to SEQ ID NO: 3247
  Description of Artificial Sequence: Synthetic hazel nut; 5' sequence + inner sequence + 3' sequence

SEQ ID NO: 19049 - DNA, 76 bp, Artificial Sequence; identical to SEQ ID NO: 3037
  Description of Artificial Sequence: Synthetic hazel nut; 5' sequence + inner sequence + 3' sequence

SEQ ID NO: 19050 - DNA, 76 bp, Artificial Sequence; identical to SEQ ID NO: 3096
  Description of Artificial Sequence: Synthetic hazel nut; 5' sequence + inner sequence + 3' sequence

SEQ ID NO: 19051 - DNA, 76 bp, Artificial Sequence; identical to SEQ ID NO: 3131
  Description of Artificial Sequence: Synthetic hazel nut; 5' sequence + inner sequence + 3' sequence

SEQ ID NO: 19052 - DNA, 76 bp, Artificial Sequence; identical to SEQ ID NO: 3178
  Description of Artificial Sequence: Synthetic hazel nut; 5' sequence + inner sequence + 3' sequence

SEQ ID NO: 19053 - DNA, 76 bp, Artificial Sequence; identical to SEQ ID NO: 3066
  Description of Artificial Sequence: Synthetic hazel nut; 5' sequence + inner sequence + 3' sequence

SEQ ID NO: 19054 - DNA, 76 bp, Artificial Sequence; identical to SEQ ID NO: 3081
  Description of Artificial Sequence: Synthetic hazel nut; 5' sequence + inner sequence + 3' sequence

SEQ ID NO: 19055 - DNA, 76 bp, Artificial Sequence; identical to SEQ ID NO: 3115
  Description of Artificial Sequence: Synthetic hazel nut; 5' sequence + inner sequence + 3' sequence

SEQ ID NO: 19056 - DNA, 76 bp, Artificial Sequence; identical to SEQ ID NO: 3138
  Description of Artificial Sequence: Synthetic hazel nut; 5' sequence + inner sequence + 3' sequence

SEQ ID NO: 19057 - DNA, 76 bp, Artificial Sequence; identical to SEQ ID NO: 3034
  Description of Artificial Sequence: Synthetic hazel nut; 5' sequence + inner sequence + 3' sequence

SEQ ID NO: 19058 - DNA, 76 bp, Artificial Sequence; identical to SEQ ID NO: 3073
  Description of Artificial Sequence: Synthetic hazel nut; 5' sequence + inner sequence + 3' sequence

SEQ ID NO: 19059 - DNA, 75 bp, Artificial Sequence; identical to SEQ ID NO: 3070
  Description of Artificial Sequence: Synthetic hazel nut; 5' sequence + inner sequence + 3' sequence

SEQ ID NO: 19060 - DNA, 76 bp, Artificial Sequence; identical to SEQ ID NO: 3519
  Description of Artificial Sequence: Synthetic hazel nut; 5' sequence + inner sequence + 3' sequence

SEQ ID NO: 19061 - DNA, 76 bp, Artificial Sequence; identical to SEQ ID NO: 3172
  Description of Artificial Sequence: Synthetic hazel nut; 5' sequence + inner sequence + 3' sequence

SEQ ID NO: 19062 - DNA, 76 bp, Artificial Sequence; identical to SEQ ID NO: 3185
  Description of Artificial Sequence: Synthetic hazel nut; 5' sequence + inner sequence + 3' sequence

SEQ ID NO: 19063 - DNA, 76 bp, Artificial Sequence; identical to SEQ ID NO: 3255
  Description of Artificial Sequence: Synthetic hazel nut; 5' sequence + inner sequence + 3' sequence

SEQ ID NO: 19064 - DNA, 76 bp, Artificial Sequence; identical to SEQ ID NO: 3067
  Description of Artificial Sequence: Synthetic hazel nut; 5' sequence + inner sequence + 3' sequence

SEQ ID NO: 19065 - DNA, 76 bp, Artificial Sequence; identical to SEQ ID NO: 3281
  Description of Artificial Sequence: Synthetic hazel nut; 5' sequence + inner sequence + 3' sequence

SEQ ID NO: 19066 - DNA, 76 bp, Artificial Sequence; identical to SEQ ID NO: 3035
  Description of Artificial Sequence: Synthetic hazel nut; 5' sequence + inner sequence + 3' sequence

SEQ ID NO: 19067 - DNA, 76 bp, Artificial Sequence; identical to SEQ ID NO: 3057
  Description of Artificial Sequence: Synthetic hazel nut; 5' sequence + inner sequence + 3' sequence

SEQ ID NO: 19068 - DNA, 76 bp, Artificial Sequence; identical to SEQ ID NO: 3038
  Description of Artificial Sequence: Synthetic hazel nut; 5' sequence + inner sequence + 3' sequence

SEQ ID NO: 19069 - DNA, 76 bp, Artificial Sequence; identical to SEQ ID NO: 3029
  Description of Artificial Sequence: Synthetic hazel nut; 5' sequence + inner sequence + 3' sequence

SEQ ID NO: 19070 - DNA, 76 bp, Artificial Sequence; identical to SEQ ID NO: 3366
  Description of Artificial Sequence: Synthetic hazel nut; 5' sequence + inner sequence + 3' sequence

SEQ ID NO: 19071 - DNA, 76 bp, Artificial Sequence; identical to SEQ ID NO: 3054
  Description of Artificial Sequence: Synthetic hazel nut; 5' sequence + inner sequence + 3' sequence

SEQ ID NO: 19072 - DNA, 76 bp, Artificial Sequence; identical to SEQ ID NO: 3526
  Description of Artificial Sequence: Synthetic hazel nut; 5' sequence + inner sequence + 3' sequence

SEQ ID NO: 19073 - DNA, 76 bp, Artificial Sequence; identical to SEQ ID NO: 3031
  Description of Artificial Sequence: Synthetic hazel nut; 5' sequence + inner sequence + 3' sequence

SEQ ID NO: 19074 - DNA, 76 bp, Artificial Sequence; identical to SEQ ID NO: 3470
  Description of Artificial Sequence: Synthetic hazel nut; 5' sequence + inner sequence + 3' sequence

SEQ ID NO: 19075 - DNA, 76 bp, Artificial Sequence; identical to SEQ ID NO: 3090
  Description of Artificial Sequence: Synthetic hazel nut; 5' sequence + inner sequence + 3' sequence

SEQ ID NO: 19076 - DNA, 76 bp, Artificial Sequence; identical to SEQ ID NO: 3285
  Description of Artificial Sequence: Synthetic hazel nut; 5' sequence + inner sequence + 3' sequence

SEQ ID NO: 19077 - DNA, 76 bp, Artificial Sequence; identical to SEQ ID NO: 3032
  Description of Artificial Sequence: Synthetic hazel nut; 5' sequence + inner sequence + 3' sequence

SEQ ID NO: 19078 - DNA, 76 bp, Artificial Sequence; identical to SEQ ID NO: 3055
  Description of Artificial Sequence: Synthetic hazel nut; 5' sequence + inner sequence + 3' sequence

SEQ ID NO: 19079 - DNA, 76 bp, Artificial Sequence; identical to SEQ ID NO: 3042
  Description of Artificial Sequence: Synthetic hazel nut; 5' sequence + inner sequence + 3' sequence

SEQ ID NO: 19080 - DNA, 76 bp, Artificial Sequence; identical to SEQ ID NO: 3080
  Description of Artificial Sequence: Synthetic hazel nut; 5' sequence + inner sequence + 3' sequence

SEQ ID NO: 19081 - DNA, 76 bp, Artificial Sequence; identical to SEQ ID NO: 3061
  Description of Artificial Sequence: Synthetic hazel nut; 5' sequence + inner sequence + 3' sequence

SEQ ID NO: 19082 - DNA, 76 bp, Artificial Sequence; identical to SEQ ID NO: 3059
  Description of Artificial Sequence: Synthetic hazel nut; 5' sequence + inner sequence + 3' sequence

SEQ ID NO: 19083 - DNA, 76 bp, Artificial Sequence; identical to SEQ ID NO: 3219
  Description of Artificial Sequence: Synthetic hazel nut; 5' sequence + inner sequence + 3' sequence

SEQ ID NO: 19084 - DNA, 76 bp, Artificial Sequence; identical to SEQ ID NO: 3144
  Description of Artificial Sequence: Synthetic hazel nut; 5' sequence + inner sequence + 3' sequence

SEQ ID NO: 19085 - DNA, 76 bp, Artificial Sequence; identical to SEQ ID NO: 3102
  Description of Artificial Sequence: Synthetic hazel nut; 5' sequence + inner sequence + 3' sequence

SEQ ID NO: 19086 - DNA, 76 bp, Artificial Sequence; identical to SEQ ID NO: 7356
  Description of Artificial Sequence: Synthetic hazel nut; 5' sequence + inner sequence + 3' sequence

SEQ ID NO: 19087 - DNA, 76 bp, Artificial Sequence; identical to SEQ ID NO: 3048
  Description of Artificial Sequence: Synthetic hazel nut; 5' sequence + inner sequence + 3' sequence

SEQ ID NO: 19088 - DNA, 76 bp, Artificial Sequence; identical to SEQ ID NO: 3024
  Description of Artificial Sequence: Synthetic hazel nut; 5' sequence + inner sequence + 3' sequence

SEQ ID NO: 19089 - DNA, 76 bp, Artificial Sequence; identical to SEQ ID NO: 3203
  Description of Artificial Sequence: Synthetic hazel nut; 5' sequence + inner sequence + 3' sequence

SEQ ID NO: 19090 - DNA, 76 bp, Artificial Sequence; identical to SEQ ID NO: 3019
  Description of Artificial Sequence: Synthetic hazel nut; 5' sequence + inner sequence + 3' sequence

SEQ ID NO: 19091 - DNA, 76 bp, Artificial Sequence; identical to SEQ ID NO: 3188
  Description of Artificial Sequence: Synthetic hazel nut; 5' sequence + inner sequence + 3' sequence

SEQ ID NO: 19092 - DNA, 76 bp, Artificial Sequence; identical to SEQ ID NO: 3151
  Description of Artificial Sequence: Synthetic hazel nut; 5' sequence + inner sequence + 3' sequence

SEQ ID NO: 19093 - DNA, 76 bp, Artificial Sequence; identical to SEQ ID NO: 3062
  Description of Artificial Sequence: Synthetic hazel nut; 5' sequence + inner sequence + 3' sequence

SEQ ID NO: 19094 - DNA, 76 bp, Artificial Sequence; identical to SEQ ID NO: 3152
  Description of Artificial Sequence: Synthetic hazel nut; 5' sequence + inner sequence + 3' sequence

SEQ ID NO: 19095 - DNA, 76 bp, Artificial Sequence; identical to SEQ ID NO: 7469
  Description of Artificial Sequence: Synthetic hazel nut; 5' sequence + inner sequence + 3' sequence

SEQ ID NO: 19096 - DNA, 76 bp, Artificial Sequence; identical to SEQ ID NO: 3111
  Description of Artificial Sequence: Synthetic hazel nut; 5' sequence + inner sequence + 3' sequence

SEQ ID NO: 19097 - DNA, 76 bp, Artificial Sequence; identical to SEQ ID NO: 3063
  Description of Artificial Sequence: Synthetic hazel nut; 5' sequence + inner sequence + 3' sequence

SEQ ID NO: 19098 - DNA, 76 bp, Artificial Sequence; identical to SEQ ID NO: 3084
  Description of Artificial Sequence: Synthetic hazel nut; 5' sequence + inner sequence + 3' sequence

SEQ ID NO: 19099 - DNA, 76 bp, Artificial Sequence; identical to SEQ ID NO: 3613
  Description of Artificial Sequence: Synthetic hazel nut; 5' sequence + inner sequence + 3' sequence

SEQ ID NO: 19100 - DNA, 76 bp, Artificial Sequence; identical to SEQ ID NO: 3230
  Description of Artificial Sequence: Synthetic hazel nut; 5' sequence + inner sequence + 3' sequence

SEQ ID NO: 19101 - DNA, 76 bp, Artificial Sequence; identical to SEQ ID NO: 3097
  Description of Artificial Sequence: Synthetic hazel nut; 5' sequence + inner sequence + 3' sequence

SEQ ID NO: 19102 - DNA, 76 bp, Artificial Sequence; identical to SEQ ID NO: 3195
  Description of Artificial Sequence: Synthetic hazel nut; 5' sequence + inner sequence + 3' sequence

SEQ ID NO: 19103 - DNA, 76 bp, Artificial Sequence; identical to SEQ ID NO: 3229
  Description of Artificial Sequence: Synthetic hazel nut; 5' sequence + inner sequence + 3' sequence

SEQ ID NO: 19104 - DNA, 76 bp, Artificial Sequence; identical to SEQ ID NO: 3136
  Description of Artificial Sequence: Synthetic hazel nut; 5' sequence + inner sequence + 3' sequence

SEQ ID NO: 19105 - DNA, 76 bp, Artificial Sequence; identical to SEQ ID NO: 3197
  Description of Artificial Sequence: Synthetic hazel nut; 5' sequence + inner sequence + 3' sequence

SEQ ID NO: 19106 - DNA, 76 bp, Artificial Sequence; identical to SEQ ID NO: 3245
  Description of Artificial Sequence: Synthetic hazel nut; 5' sequence + inner sequence + 3' sequence

SEQ ID NO: 19107 - DNA, 76 bp, Artificial Sequence; identical to SEQ ID NO: 3117
  Description of Artificial Sequence: Synthetic hazel nut; 5' sequence + inner sequence + 3' sequence

SEQ ID NO: 19108 - DNA, 76 bp, Artificial Sequence; identical to SEQ ID NO: 3171
  Description of Artificial Sequence: Synthetic hazel nut; 5' sequence + inner sequence + 3' sequence

SEQ ID NO: 19109 - DNA, 76 bp, Artificial Sequence; identical to SEQ ID NO: 3068
  Description of Artificial Sequence: Synthetic hazel nut; 5' sequence + inner sequence + 3' sequence

SEQ ID NO: 19110 - DNA, 76 bp, Artificial Sequence; identical to SEQ ID NO: 3325
  Description of Artificial Sequence: Synthetic hazel nut; 5' sequence + inner sequence + 3' sequence

SEQ ID NO: 19111 - DNA, 76 bp, Artificial Sequence; identical to SEQ ID NO: 3149
  Description of Artificial Sequence: Synthetic hazel nut; 5' sequence + inner sequence + 3' sequence

SEQ ID NO: 19112 - DNA, 76 bp, Artificial Sequence; identical to SEQ ID NO: 3126
  Description of Artificial Sequence: Synthetic hazel nut; 5' sequence + inner sequence + 3' sequence

SEQ ID NO: 19113 - DNA, 76 bp, Artificial Sequence; identical to SEQ ID NO: 3492
  Description of Artificial Sequence: Synthetic hazel nut; 5' sequence + inner sequence + 3' sequence

SEQ ID NO: 19114 - DNA, 76 bp, Artificial Sequence; identical to SEQ ID NO: 3321
  Description of Artificial Sequence: Synthetic hazel nut; 5' sequence + inner sequence + 3' sequence

SEQ ID NO: 19115 - DNA, 76 bp, Artificial Sequence; identical to SEQ ID NO: 3313
  Description of Artificial Sequence: Synthetic hazel nut; 5' sequence + inner sequence + 3' sequence

SEQ ID NO: 19116 - DNA, 76 bp, Artificial Sequence; identical to SEQ ID NO: 3359
  Description of Artificial Sequence: Synthetic hazel nut; 5' sequence + inner sequence + 3' sequence

SEQ ID NO: 19117 - DNA, 76 bp, Artificial Sequence; identical to SEQ ID NO: 3065
  Description of Artificial Sequence: Synthetic hazel nut; 5' sequence + inner sequence + 3' sequence

SEQ ID NO: 19118 - DNA, 76 bp, Artificial Sequence; identical to SEQ ID NO: 3112
  Description of Artificial Sequence: Synthetic hazel nut; 5' sequence + inner sequence + 3' sequence

SEQ ID NO: 19119 - DNA, 76 bp, Artificial Sequence; identical to SEQ ID NO: 3164
  Description of Artificial Sequence: Synthetic hazel nut; 5' sequence + inner sequence + 3' sequence

SEQ ID NO: 19120 - DNA, 76 bp, Artificial Sequence; identical to SEQ ID NO: 7289
  Description of Artificial Sequence: Synthetic hazel nut; 5' sequence + inner sequence + 3' sequence

SEQ ID NO: 19121 - DNA, 76 bp, Artificial Sequence; identical to SEQ ID NO: 3103
  Description of Artificial Sequence: Synthetic hazel nut; 5' sequence + inner sequence + 3' sequence

SEQ ID NO: 19122 - DNA, 76 bp, Artificial Sequence; identical to SEQ ID NO: 3181
  Description of Artificial Sequence: Synthetic hazel nut; 5' sequence + inner sequence + 3' sequence

SEQ ID NO: 19123 - DNA, 76 bp, Artificial Sequence; identical to SEQ ID NO: 3269
  Description of Artificial Sequence: Synthetic hazel nut; 5' sequence + inner sequence + 3' sequence

SEQ ID NO: 19124 - DNA, 76 bp, Artificial Sequence; identical to SEQ ID NO: 3610
  Description of Artificial Sequence: Synthetic hazel nut; 5' sequence + inner sequence + 3' sequence

SEQ ID NO: 19125 - DNA, 76 bp, Artificial Sequence; identical to SEQ ID NO: 3929
  Description of Artificial Sequence: Synthetic hazel nut; 5' sequence + inner sequence + 3' sequence

SEQ ID NO: 19126 - DNA, 76 bp, Artificial Sequence; identical to SEQ ID NO: 3276
  Description of Artificial Sequence: Synthetic hazel nut; 5' sequence + inner sequence + 3' sequence

SEQ ID NO: 19127 - DNA, 76 bp, Artificial Sequence; identical to SEQ ID NO: 3275
  Description of Artificial Sequence: Synthetic hazel nut; 5' sequence + inner sequence + 3' sequence

SEQ ID NO: 19128 - DNA, 76 bp, Artificial Sequence; identical to SEQ ID NO: 3039
  Description of Artificial Sequence: Synthetic hazel nut; 5' sequence + inner sequence + 3' sequence

SEQ ID NO: 19129 - DNA, 76 bp, Artificial Sequence; identical to SEQ ID NO: 3552
  Description of Artificial Sequence: Synthetic hazel nut; 5' sequence + inner sequence + 3' sequence

SEQ ID NO: 19130 - DNA, 76 bp, Artificial Sequence; identical to SEQ ID NO: 3071
  Description of Artificial Sequence: Synthetic hazel nut; 5' sequence + inner sequence + 3' sequence

SEQ ID NO: 19131 - DNA, 76 bp, Artificial Sequence; identical to SEQ ID NO: 3043
  Description of Artificial Sequence: Synthetic hazel nut; 5' sequence + inner sequence + 3' sequence

SEQ ID NO: 19132 - DNA, 76 bp, Artificial Sequence; identical to SEQ ID NO: 3093
  Description of Artificial Sequence: Synthetic hazel nut; 5' sequence + inner sequence + 3' sequence

SEQ ID NO: 19133 - DNA, 76 bp, Artificial Sequence; identical to SEQ ID NO: 3072
  Description of Artificial Sequence: Synthetic hazel nut; 5' sequence + inner sequence + 3' sequence

SEQ ID NO: 19134 - DNA, 76 bp, Artificial Sequence; identical to SEQ ID NO: 3086
  Description of Artificial Sequence: Synthetic hazel nut; 5' sequence + inner sequence + 3' sequence

SEQ ID NO: 19135 - DNA, 76 bp, Artificial Sequence; identical to SEQ ID NO: 3207
  Description of Artificial Sequence: Synthetic hazel nut; 5' sequence + inner sequence + 3' sequence

SEQ ID NO: 19136 - DNA, 76 bp, Artificial Sequence; identical to SEQ ID NO: 3706
  Description of Artificial Sequence: Synthetic hazel nut; 5' sequence + inner sequence + 3' sequence

SEQ ID NO: 19137 - DNA, 76 bp, Artificial Sequence; identical to SEQ ID NO: 3095
  Description of Artificial Sequence: Synthetic hazel nut; 5' sequence + inner sequence + 3' sequence

SEQ ID NO: 19138 - DNA, 76 bp, Artificial Sequence; identical to SEQ ID NO: 3076
  Description of Artificial Sequence: Synthetic hazel nut; 5' sequence + inner sequence + 3' sequence

SEQ ID NO: 19139 - DNA, 76 bp, Artificial Sequence; identical to SEQ ID NO: 3209
  Description of Artificial Sequence: Synthetic hazel nut; 5' sequence + inner sequence + 3' sequence

SEQ ID NO: 19140 - DNA, 76 bp, Artificial Sequence; identical to SEQ ID NO: 3047
  Description of Artificial Sequence: Synthetic hazel nut; 5' sequence + inner sequence + 3' sequence

SEQ ID NO: 19141 - DNA, 76 bp, Artificial Sequence; identical to SEQ ID NO: 3099
  Description of Artificial Sequence: Synthetic hazel nut; 5' sequence + inner sequence + 3' sequence

SEQ ID NO: 19142 - DNA, 76 bp, Artificial Sequence; identical to SEQ ID NO: 3956
  Description of Artificial Sequence: Synthetic hazel nut; 5' sequence + inner sequence + 3' sequence

SEQ ID NO: 19143 - DNA, 76 bp, Artificial Sequence; identical to SEQ ID NO: 3078
  Description of Artificial Sequence: Synthetic hazel nut; 5' sequence + inner sequence + 3' sequence

SEQ ID NO: 19144 - DNA, 76 bp, Artificial Sequence; identical to SEQ ID NO: 3174
  Description of Artificial Sequence: Synthetic hazel nut; 5' sequence + inner sequence + 3' sequence

SEQ ID NO: 19145 - DNA, 76 bp, Artificial Sequence; identical to SEQ ID NO: 3134
  Description of Artificial Sequence: Synthetic hazel nut; 5' sequence + inner sequence + 3' sequence

SEQ ID NO: 19146 - DNA, 76 bp, Artificial Sequence; identical to SEQ ID NO: 3069
  Description of Artificial Sequence: Synthetic hazel nut; 5' sequence + inner sequence + 3' sequence

SEQ ID NO: 19147 - DNA, 76 bp, Artificial Sequence; identical to SEQ ID NO: 3140
  Description of Artificial Sequence: Synthetic hazel nut; 5' sequence + inner sequence + 3' sequence

SEQ ID NO: 19148 - DNA, 76 bp, Artificial Sequence; identical to SEQ ID NO: 3082
  Description of Artificial Sequence: Synthetic hazel nut; 5' sequence + inner sequence + 3' sequence

SEQ ID NO: 19149 - DNA, 76 bp, Artificial Sequence; identical to SEQ ID NO: 3110
  Description of Artificial Sequence: Synthetic hazel nut; 5' sequence + inner sequence + 3' sequence

SEQ ID NO: 19150 - DNA, 76 bp, Artificial Sequence; identical to SEQ ID NO: 3283
  Description of Artificial Sequence: Synthetic hazel nut; 5' sequence + inner sequence + 3' sequence

SEQ ID NO: 19151 - DNA, 76 bp, Artificial Sequence; identical to SEQ ID NO: 3058
  Description of Artificial Sequence: Synthetic hazel nut; 5' sequence + inner sequence + 3' sequence

SEQ ID NO: 19152 - DNA, 76 bp, Artificial Sequence; identical to SEQ ID NO: 3314
  Description of Artificial Sequence: Synthetic hazel nut; 5' sequence + inner sequence + 3' sequence

SEQ ID NO: 19153 - DNA, 76 bp, Artificial Sequence; identical to SEQ ID NO: 3190
  Description of Artificial Sequence: Synthetic hazel nut; 5' sequence + inner sequence + 3' sequence

SEQ ID NO: 19154 - DNA, 76 bp, Artificial Sequence; identical to SEQ ID NO: 3121
  Description of Artificial Sequence: Synthetic hazel nut; 5' sequence + inner sequence + 3' sequence

SEQ ID NO: 19155 - DNA, 76 bp, Artificial Sequence; identical to SEQ ID NO: 3663
  Description of Artificial Sequence: Synthetic hazel nut; 5' sequence + inner sequence + 3' sequence

SEQ ID NO: 19156 - DNA, 76 bp, Artificial Sequence; identical to SEQ ID NO: 7659
  Description of Artificial Sequence: Synthetic hazel nut; 5' sequence + inner sequence + 3' sequence

SEQ ID NO: 19157 - DNA, 76 bp, Artificial Sequence; identical to SEQ ID NO: 3120
  Description of Artificial Sequence: Synthetic hazel nut; 5' sequence + inner sequence + 3' sequence

SEQ ID NO: 19158 - DNA, 76 bp, Artificial Sequence; identical to SEQ ID NO: 3092
  Description of Artificial Sequence: Synthetic hazel nut; 5' sequence + inner sequence + 3' sequence

SEQ ID NO: 19159 - DNA, 76 bp, Artificial Sequence; identical to SEQ ID NO: 3579
  Description of Artificial Sequence: Synthetic hazel nut; 5' sequence + inner sequence + 3' sequence

SEQ ID NO: 19160 - DNA, 76 bp, Artificial Sequence; identical to SEQ ID NO: 3182
  Description of Artificial Sequence: Synthetic hazel nut; 5' sequence + inner sequence + 3' sequence

SEQ ID NO: 19161 - DNA, 76 bp, Artificial Sequence; identical to SEQ ID NO: 3200
  Description of Artificial Sequence: Synthetic hazel nut; 5' sequence + inner sequence + 3' sequence

SEQ ID NO: 19162 - DNA, 76 bp, Artificial Sequence; identical to SEQ ID NO: 3100
  Description of Artificial Sequence: Synthetic hazel nut; 5' sequence + inner sequence + 3' sequence

SEQ ID NO: 19163 - DNA, 76 bp, Artificial Sequence; identical to SEQ ID NO: 3458
  Description of Artificial Sequence: Synthetic hazel nut; 5' sequence + inner sequence + 3' sequence

SEQ ID NO: 19164 - DNA, 76 bp, Artificial Sequence; identical to SEQ ID NO: 3232
  Description of Artificial Sequence: Synthetic hazel nut; 5' sequence + inner sequence + 3' sequence

SEQ ID NO: 19165 - DNA, 76 bp, Artificial Sequence; identical to SEQ ID NO: 3246
  Description of Artificial Sequence: Synthetic hazel nut; 5' sequence + inner sequence + 3' sequence

SEQ ID NO: 19166 - DNA, 76 bp, Artificial Sequence; identical to SEQ ID NO: 3465
  Description of Artificial Sequence: Synthetic hazel nut; 5' sequence + inner sequence + 3' sequence

SEQ ID NO: 19167 - DNA, 76 bp, Artificial Sequence; identical to SEQ ID NO: 3311
  Description of Artificial Sequence: Synthetic hazel nut; 5' sequence + inner sequence + 3' sequence

SEQ ID NO: 19168 - DNA, 76 bp, Artificial Sequence; identical to SEQ ID NO: 7272
  Description of Artificial Sequence: Synthetic hazel nut; 5' sequence + inner sequence + 3' sequence

SEQ ID NO: 19169 - DNA, 76 bp, Artificial Sequence; identical to SEQ ID NO: 3266
  Description of Artificial Sequence: Synthetic hazel nut; 5' sequence + inner sequence + 3' sequence

SEQ ID NO: 19170 - DNA, 76 bp, Artificial Sequence; identical to SEQ ID NO: 3184
  Description of Artificial Sequence: Synthetic hazel nut; 5' sequence + inner sequence + 3' sequence

SEQ ID NO: 19171 - DNA, 76 bp, Artificial Sequence; identical to SEQ ID NO: 3762
  Description of Artificial Sequence: Synthetic hazel nut; 5' sequence + inner sequence + 3' sequence

SEQ ID NO: 19172 - DNA, 76 bp, Artificial Sequence; identical to SEQ ID NO: 3567
  Description of Artificial Sequence: Synthetic hazel nut; 5' sequence + inner sequence + 3' sequence

SEQ ID NO: 19173 - DNA, 76 bp, Artificial Sequence; identical to SEQ ID NO: 3520
  Description of Artificial Sequence: Synthetic hazel nut; 5' sequence + inner sequence + 3' sequence

SEQ ID NO: 19174 - DNA, 76 bp, Artificial Sequence; identical to SEQ ID NO: 3353
  Description of Artificial Sequence: Synthetic hazel nut; 5' sequence + inner sequence + 3' sequence

SEQ ID NO: 19175 - DNA, 76 bp, Artificial Sequence; identical to SEQ ID NO: 3367
  Description of Artificial Sequence: Synthetic hazel nut; 5' sequence + inner sequence + 3' sequence

SEQ ID NO: 19176 - DNA, 76 bp, Artificial Sequence; identical to SEQ ID NO: 7240
  Description of Artificial Sequence: Synthetic hazel nut; 5' sequence + inner sequence + 3' sequence

SEQ ID NO: 19177 - DNA, 76 bp, Artificial Sequence; identical to SEQ ID NO: 3194
  Description of Artificial Sequence: Synthetic hazel nut; 5' sequence + inner sequence + 3' sequence

SEQ ID NO: 19178 - DNA, 76 bp, Artificial Sequence; identical to SEQ ID NO: 3154
  Description of Artificial Sequence: Synthetic hazel nut; 5' sequence + inner sequence + 3' sequence

SEQ ID NO: 19179 - DNA, 76 bp, Artificial Sequence; identical to SEQ ID NO: 3026
  Description of Artificial Sequence: Synthetic hazel nut; 5' sequence + inner sequence + 3' sequence

SEQ ID NO: 19180 - DNA, 76 bp, Artificial Sequence; identical to SEQ ID NO: 3240
  Description of Artificial Sequence: Synthetic hazel nut; 5' sequence + inner sequence + 3' sequence

SEQ ID NO: 19181 - DNA, 76 bp, Artificial Sequence; identical to SEQ ID NO: 3290
  Description of Artificial Sequence: Synthetic hazel nut; 5' sequence + inner sequence + 3' sequence

SEQ ID NO: 19182 - DNA, 76 bp, Artificial Sequence; identical to SEQ ID NO: 3233
  Description of Artificial Sequence: Synthetic hazel nut; 5' sequence + inner sequence + 3' sequence

SEQ ID NO: 19183 - DNA, 76 bp, Artificial Sequence; identical to SEQ ID NO: 3201
  Description of Artificial Sequence: Synthetic hazel nut; 5' sequence + inner sequence + 3' sequence

SEQ ID NO: 19184 - DNA, 76 bp, Artificial Sequence; identical to SEQ ID NO: 3027
  Description of Artificial Sequence: Synthetic hazel nut; 5' sequence + inner sequence + 3' sequence

SEQ ID NO: 19185 - DNA, 77 bp, Artificial Sequence; identical to SEQ ID NO: 3221
  Description of Artificial Sequence: Synthetic hazel nut; 5' sequence + inner sequence + 3' sequence

SEQ ID NO: 19186 - DNA, 76 bp, Artificial Sequence; identical to SEQ ID NO: 3505
  Description of Artificial Sequence: Synthetic hazel nut; 5' sequence + inner sequence + 3' sequence

SEQ ID NO: 19187 - DNA, 76 bp, Artificial Sequence; identical to SEQ ID NO: 3133
  Description of Artificial Sequence: Synthetic hazel nut; 5' sequence + inner sequence + 3' sequence

SEQ ID NO: 19188 - DNA, 76 bp, Artificial Sequence; identical to SEQ ID NO: 3217
  Description of Artificial Sequence: Synthetic hazel nut; 5' sequence + inner sequence + 3' sequence

SEQ ID NO: 19189 - DNA, 76 bp, Artificial Sequence; identical to SEQ ID NO: 3823
  Description of Artificial Sequence: Synthetic hazel nut; 5' sequence + inner sequence + 3' sequence

SEQ ID NO: 19190 - DNA, 76 bp, Artificial Sequence; identical to SEQ ID NO: 3137
  Description of Artificial Sequence: Synthetic hazel nut; 5' sequence + inner sequence + 3' sequence

SEQ ID NO: 19191 - DNA, 76 bp, Artificial Sequence; identical to SEQ ID NO: 7755
  Description of Artificial Sequence: Synthetic hazel nut; 5' sequence + inner sequence + 3' sequence

SEQ ID NO: 19192 - DNA, 76 bp, Artificial Sequence; identical to SEQ ID NO: 7583
  Description of Artificial Sequence: Synthetic hazel nut; 5' sequence + inner sequence + 3' sequence

SEQ ID NO: 19193 - DNA, 76 bp, Artificial Sequence; identical to SEQ ID NO: 3094
  Description of Artificial Sequence: Synthetic hazel nut; 5' sequence + inner sequence + 3' sequence

SEQ ID NO: 19194 - DNA, 76 bp, Artificial Sequence; identical to SEQ ID NO: 3168
  Description of Artificial Sequence: Synthetic hazel nut; 5' sequence + inner sequence + 3' sequence

SEQ ID NO: 19195 - DNA, 76 bp, Artificial Sequence; identical to SEQ ID NO: 3125
  Description of Artificial Sequence: Synthetic hazel nut; 5' sequence + inner sequence + 3' sequence

SEQ ID NO: 19196 - DNA, 76 bp, Artificial Sequence; identical to SEQ ID NO: 3360
  Description of Artificial Sequence: Synthetic hazel nut; 5' sequence + inner sequence + 3' sequence

SEQ ID NO: 19197 - DNA, 76 bp, Artificial Sequence; identical to SEQ ID NO: 3104
  Description of Artificial Sequence: Synthetic hazel nut; 5' sequence + inner sequence + 3' sequence

SEQ ID NO: 19198 - DNA, 76 bp, Artificial Sequence; identical to SEQ ID NO: 3225
  Description of Artificial Sequence: Synthetic hazel nut; 5' sequence + inner sequence + 3' sequence

SEQ ID NO: 19199 - DNA, 76 bp, Artificial Sequence; identical to SEQ ID NO: 7429
  Description of Artificial Sequence: Synthetic hazel nut; 5' sequence + inner sequence + 3' sequence

SEQ ID NO: 19200 - DNA, 76 bp, Artificial Sequence; identical to SEQ ID NO: 7230
  Description of Artificial Sequence: Synthetic hazel nut; 5' sequence + inner sequence + 3' sequence

SEQ ID NO: 19201 - DNA, 76 bp, Artificial Sequence; identical to SEQ ID NO: 3626
  Description of Artificial Sequence: Synthetic hazel nut; 5' sequence + inner sequence + 3' sequence

SEQ ID NO: 19202 - DNA, 76 bp, Artificial Sequence; identical to SEQ ID NO: 7521
  Description of Artificial Sequence: Synthetic hazel nut; 5' sequence + inner sequence + 3' sequence

SEQ ID NO: 19203 - DNA, 76 bp, Artificial Sequence; identical to SEQ ID NO: 3101
  Description of Artificial Sequence: Synthetic hazel nut; 5' sequence + inner sequence + 3' sequence

SEQ ID NO: 19204 - DNA, 76 bp, Artificial Sequence; identical to SEQ ID NO: 7985
  Description of Artificial Sequence: Synthetic hazel nut; 5' sequence + inner sequence + 3' sequence

SEQ ID NO: 19205 - DNA, 76 bp, Artificial Sequence; identical to SEQ ID NO: 3105
  Description of Artificial Sequence: Synthetic hazel nut; 5' sequence + inner sequence + 3' sequence

SEQ ID NO: 19206 - DNA, 76 bp, Artificial Sequence; identical to SEQ ID NO: 3722
  Description of Artificial Sequence: Synthetic hazel nut; 5' sequence + inner sequence + 3' sequence

SEQ ID NO: 19207 - DNA, 76 bp, Artificial Sequence; identical to SEQ ID NO: 3220
  Description of Artificial Sequence: Synthetic hazel nut; 5' sequence + inner sequence + 3' sequence

SEQ ID NO: 19208 - DNA, 76 bp, Artificial Sequence; identical to SEQ ID NO: 3909
  Description of Artificial Sequence: Synthetic hazel nut; 5' sequence + inner sequence + 3' sequence

SEQ ID NO: 19209 - DNA, 76 bp, Artificial Sequence; identical to SEQ ID NO: 3606
  Description of Artificial Sequence: Synthetic hazel nut; 5' sequence + inner sequence + 3' sequence

SEQ ID NO: 19210 - DNA, 76 bp, Artificial Sequence; identical to SEQ ID NO: 3122
  Description of Artificial Sequence: Synthetic hazel nut; 5' sequence + inner sequence + 3' sequence

SEQ ID NO: 19211 - DNA, 76 bp, Artificial Sequence
  Description of Artificial Sequence: Synthetic hazel nut; 5' sequence + inner sequence + 3' sequence
tagggaagagaaggacatatgatcgcaacgcacgtcacgtccttggcggcacattgactagtacatgaccacttga

SEQ ID NO: 19212 - DNA, 74 bp, Artificial Sequence; identical to SEQ ID NO: 3148
  Description of Artificial Sequence: Synthetic hazel nut; 5' sequence + inner sequence + 3' sequence

SEQ ID NO: 19213 - DNA, 76 bp, Artificial Sequence; identical to SEQ ID NO: 3124
  Description of Artificial Sequence: Synthetic hazel nut; 5' sequence + inner sequence + 3' sequence

SEQ ID NO: 19214 - DNA, 76 bp, Artificial Sequence; identical to SEQ ID NO: 3118
  Description of Artificial Sequence: Synthetic hazel nut; 5' sequence + inner sequence + 3' sequence

SEQ ID NO: 19215 - DNA, 76 bp, Artificial Sequence; identical to SEQ ID NO: 3630
  Description of Artificial Sequence: Synthetic hazel nut; 5' sequence + inner sequence + 3' sequence

SEQ ID NO: 19216 - DNA, 76 bp, Artificial Sequence; identical to SEQ ID NO: 3257
  Description of Artificial Sequence: Synthetic hazel nut; 5' sequence + inner sequence + 3' sequence

SEQ ID NO: 19217 - DNA, 76 bp, Artificial Sequence; identical to SEQ ID NO: 3123
  Description of Artificial Sequence: Synthetic hazel nut; 5' sequence + inner sequence + 3' sequence

SEQ ID NO: 19218 - DNA, 76 bp, Artificial Sequence
  Description of Artificial Sequence: Synthetic hazel nut; 5' sequence + inner sequence + 3' sequence
tagggaagagaaggacatatgatcgtaccacaggctcggtccgctacgacacgttgactagtacatgaccacttga

SEQ ID NO: 19219 - DNA, 76 bp, Artificial Sequence; identical to SEQ ID NO: 3355
  Description of Artificial Sequence: Synthetic hazel nut; 5' sequence + inner sequence + 3' sequence

SEQ ID NO: 19220 - DNA, 76 bp, Artificial Sequence; identical to SEQ ID NO: 3333
  Description of Artificial Sequence: Synthetic hazel nut; 5' sequence + inner sequence + 3' sequence

SEQ ID NO: 19221 - DNA, 76 bp, Artificial Sequence; identical to SEQ ID NO: 7662
  Description of Artificial Sequence: Synthetic hazel nut; 5' sequence + inner sequence + 3' sequence

SEQ ID NO: 19222 - DNA, 76 bp, Artificial Sequence; identical to SEQ ID NO: 3114
  Description of Artificial Sequence: Synthetic hazel nut; 5' sequence + inner sequence + 3' sequence

SEQ ID NO: 19223 - DNA, 76 bp, Artificial Sequence; identical to SEQ ID NO: 3436
  Description of Artificial Sequence: Synthetic hazel nut; 5' sequence + inner sequence + 3' sequence

SEQ ID NO: 19224 - DNA, 76 bp, Artificial Sequence; identical to SEQ ID NO: 3953
  Description of Artificial Sequence: Synthetic hazel nut; 5' sequence + inner sequence + 3' sequence

SEQ ID NO: 19225 - DNA, 76 bp, Artificial Sequence; identical to SEQ ID NO: 3176
  Description of Artificial Sequence: Synthetic hazel nut; 5' sequence + inner sequence + 3' sequence

SEQ ID NO: 19226 - DNA, 76 bp, Artificial Sequence; identical to SEQ ID NO: 11678
  Description of Artificial Sequence: Synthetic hazel nut; 5' sequence + inner sequence + 3' sequence

SEQ ID NO: 19227 - DNA, 76 bp, Artificial Sequence; identical to SEQ ID NO: 7772
  Description of Artificial Sequence: Synthetic hazel nut; 5' sequence + inner sequence + 3' sequence

SEQ ID NO: 19228 - DNA, 76 bp, Artificial Sequence; identical to SEQ ID NO: 3056
  Description of Artificial Sequence: Synthetic hazel nut; 5' sequence + inner sequence + 3' sequence

SEQ ID NO: 19229 - DNA, 76 bp, Artificial Sequence; identical to SEQ ID NO: 3450
  Description of Artificial Sequence: Synthetic hazel nut; 5' sequence + inner sequence + 3' sequence

SEQ ID NO: 19230 - DNA, 76 bp, Artificial Sequence; identical to SEQ ID NO: 3142
  Description of Artificial Sequence: Synthetic hazel nut; 5' sequence + inner sequence + 3' sequence

SEQ ID NO: 19231 - DNA, 76 bp, Artificial Sequence; identical to SEQ ID NO: 3169
  Description of Artificial Sequence: Synthetic hazel nut; 5' sequence + inner sequence + 3' sequence

SEQ ID NO: 19232 - DNA, 76 bp, Artificial Sequence; identical to SEQ ID NO: 3718
  Description of Artificial Sequence: Synthetic hazel nut; 5' sequence + inner sequence + 3' sequence

SEQ ID NO: 19233 - DNA, 76 bp, Artificial Sequence; identical to SEQ ID NO: 3222
  Description of Artificial Sequence: Synthetic hazel nut; 5' sequence + inner sequence + 3' sequence

SEQ ID NO: 19234 - DNA, 76 bp, Artificial Sequence; identical to SEQ ID NO: 3293
  Description of Artificial Sequence: Synthetic hazel nut; 5' sequence + inner sequence + 3' sequence

SEQ ID NO: 19235 - DNA, 76 bp, Artificial Sequence; identical to SEQ ID NO: 3163
  Description of Artificial Sequence: Synthetic hazel nut; 5' sequence + inner sequence + 3' sequence

SEQ ID NO: 19236 - DNA, 76 bp, Artificial Sequence; identical to SEQ ID NO: 3253
  Description of Artificial Sequence: Synthetic hazel nut; 5' sequence + inner sequence + 3' sequence

SEQ ID NO: 19237 - DNA, 76 bp, Artificial Sequence; identical to SEQ ID NO: 3196
  Description of Artificial Sequence: Synthetic hazel nut; 5' sequence + inner sequence + 3' sequence

SEQ ID NO: 19238 - DNA, 76 bp, Artificial Sequence; identical to SEQ ID NO: 3279
  Description of Artificial Sequence: Synthetic hazel nut; 5' sequence + inner sequence + 3' sequence

SEQ ID NO: 19239 - DNA, 76 bp, Artificial Sequence; identical to SEQ ID NO: 3468
  Description of Artificial Sequence: Synthetic hazel nut; 5' sequence + inner sequence + 3' sequence

SEQ ID NO: 19240 - DNA, 76 bp, Artificial Sequence; identical to SEQ ID NO: 3206
  Description of Artificial Sequence: Synthetic hazel nut; 5' sequence + inner sequence + 3' sequence

SEQ ID NO: 19241 - DNA, 76 bp, Artificial Sequence; identical to SEQ ID NO: 3274
  Description of Artificial Sequence: Synthetic hazel nut; 5' sequence + inner sequence + 3' sequence

SEQ ID NO: 19242 - DNA, 76 bp, Artificial Sequence; identical to SEQ ID NO: 3506
  Description of Artificial Sequence: Synthetic hazel nut; 5' sequence + inner sequence + 3' sequence

SEQ ID NO: 19243 - DNA, 76 bp, Artificial Sequence; identical to SEQ ID NO: 3332
  Description of Artificial Sequence: Synthetic hazel nut; 5' sequence + inner sequence + 3' sequence

SEQ ID NO: 19244 - DNA, 76 bp, Artificial Sequence; identical to SEQ ID NO: 7627
  Description of Artificial Sequence: Synthetic hazel nut; 5' sequence + inner sequence + 3' sequence

SEQ ID NO: 19245 - DNA, 76 bp, Artificial Sequence; identical to SEQ ID NO: 7612
  Description of Artificial Sequence: Synthetic hazel nut; 5' sequence + inner sequence + 3' sequence

SEQ ID NO: 19246 - DNA, 76 bp, Artificial Sequence; identical to SEQ ID NO: 3091
  Description of Artificial Sequence: Synthetic hazel nut; 5' sequence + inner sequence + 3' sequence

SEQ ID NO: 19247 - DNA, 76 bp, Artificial Sequence; identical to SEQ ID NO: 11984
  Description of Artificial Sequence: Synthetic hazel nut; 5' sequence + inner sequence + 3' sequence

SEQ ID NO: 19248 - DNA, 76 bp, Artificial Sequence; identical to SEQ ID NO: 3228
  Description of Artificial Sequence: Synthetic hazel nut; 5' sequence + inner sequence + 3' sequence

SEQ ID NO: 19249 - DNA, 76 bp, Artificial Sequence; identical to SEQ ID NO: 7673
  Description of Artificial Sequence: Synthetic hazel nut; 5' sequence + inner sequence + 3' sequence

SEQ ID NO: 19250 - DNA, 76 bp, Artificial Sequence; identical to SEQ ID NO: 3832
  Description of Artificial Sequence: Synthetic hazel nut; 5' sequence + inner sequence + 3' sequence

SEQ ID NO: 19251 - DNA, 76 bp, Artificial Sequence; identical to SEQ ID NO: 3237
  Description of Artificial Sequence: Synthetic hazel nut; 5' sequence + inner sequence + 3' sequence

SEQ ID NO: 19252 - DNA, 76 bp, Artificial Sequence; identical to SEQ ID NO: 3177
  Description of Artificial Sequence: Synthetic hazel nut; 5' sequence + inner sequence + 3' sequence

SEQ ID NO: 19253 - DNA, 76 bp, Artificial Sequence; identical to SEQ ID NO: 7492
  Description of Artificial Sequence: Synthetic hazel nut; 5' sequence + inner sequence + 3' sequence

SEQ ID NO: 19254 - DNA, 76 bp, Artificial Sequence; identical to SEQ ID NO: 3145
  Description of Artificial Sequence: Synthetic hazel nut; 5' sequence + inner sequence + 3' sequence

SEQ ID NO: 19255 - DNA, 76 bp, Artificial Sequence; identical to SEQ ID NO: 3371
  Description of Artificial Sequence: Synthetic hazel nut; 5' sequence + inner sequence + 3' sequence

SEQ ID NO: 19256 - DNA, 76 bp, Artificial Sequence; identical to SEQ ID NO: 3816
  Description of Artificial Sequence: Synthetic hazel nut; 5' sequence + inner sequence + 3' sequence

SEQ ID NO: 19257 - DNA, 76 bp, Artificial Sequence; identical to SEQ ID NO: 3278
  Description of Artificial Sequence: Synthetic hazel nut; 5' sequence + inner sequence + 3' sequence

SEQ ID NO: 19258 - DNA, 76 bp, Artificial Sequence; identical to SEQ ID NO: 7571
  Description of Artificial Sequence: Synthetic hazel nut; 5' sequence + inner sequence + 3' sequence

SEQ ID NO: 19259 - DNA, 76 bp, Artificial Sequence; identical to SEQ ID NO: 3249
  Description of Artificial Sequence: Synthetic hazel nut; 5' sequence + inner sequence + 3' sequence

SEQ ID NO: 19260 - DNA, 76 bp, Artificial Sequence; identical to SEQ ID NO: 3300
  Description of Artificial Sequence: Synthetic hazel nut; 5' sequence + inner sequence + 3' sequence

SEQ ID NO: 19261 - DNA, 76 bp, Artificial Sequence; identical to SEQ ID NO: 3364
  Description of Artificial Sequence: Synthetic hazel nut; 5' sequence + inner sequence + 3' sequence

SEQ ID NO: 19262 - DNA, 76 bp, Artificial Sequence; identical to SEQ ID NO: 3234
  Description of Artificial Sequence: Synthetic hazel nut; 5' sequence + inner sequence + 3' sequence

SEQ ID NO: 19263 - DNA, 76 bp, Artificial Sequence; identical to SEQ ID NO: 7576
  Description of Artificial Sequence: Synthetic hazel nut; 5' sequence + inner sequence + 3' sequence

SEQ ID NO: 19264 - DNA, 76 bp, Artificial Sequence
  Description of Artificial Sequence: Synthetic hazel nut; 5' sequence + inner sequence + 3' sequence
tagggaagagaaggacatatgatggacgcacaccgaccgtacgccgtgtcgcattgactagtacatgaccacttga

SEQ ID NO: 19265 - DNA, 76 bp, Artificial Sequence
  Description of Artificial Sequence: Synthetic hazel nut; 5' sequence + inner sequence + 3' sequence
tagggaagagaaggacatatgatgcgacacggtagcatcgacggtacgcgcgattgactagtacatgaccacttga

SEQ ID NO: 19266 - DNA, 76 bp, Artificial Sequence
  Description of Artificial Sequence: Synthetic hazel nut; 5' sequence + inner sequence + 3' sequence
tagggaagagaaggacatatgatcgtgcgcaacgagcaggaccacgcgtcacgttgactagtacatgaccacttga

SEQ ID NO: 19267 - DNA, 76 bp, Artificial Sequence; identical to SEQ ID NO: 7489
  Description of Artificial Sequence: Synthetic hazel nut; 5' sequence + inner sequence + 3' sequence

SEQ ID NO: 19268 - DNA, 76 bp, Artificial Sequence; identical to SEQ ID NO: 3950
  Description of Artificial Sequence: Synthetic hazel nut; 5' sequence + inner sequence + 3' sequence

SEQ ID NO: 19269 - DNA, 76 bp, Artificial Sequence; identical to SEQ ID NO: 3352
  Description of Artificial Sequence: Synthetic hazel nut; 5' sequence + inner sequence + 3' sequence

SEQ ID NO: 19270 - DNA, 76 bp, Artificial Sequence
  Description of Artificial Sequence: Synthetic hazel nut; 5' sequence + inner sequence + 3' sequence
tagggaagagaaggacatatgatgacggatcgacctcaacgtgttgcgatgcattgactagtacatgaccacttga

SEQ ID NO: 19271 - DNA, 76 bp, Artificial Sequence; identical to SEQ ID NO: 3160
  Description of Artificial Sequence: Synthetic hazel nut; 5' sequence + inner sequence + 3' sequence

SEQ ID NO: 19272 - DNA, 76 bp, Artificial Sequence; identical to SEQ ID NO: 3256
  Description of Artificial Sequence: Synthetic hazel nut; 5' sequence + inner sequence + 3' sequence

SEQ ID NO: 19273 - DNA, 76 bp, Artificial Sequence; identical to SEQ ID NO: 7485
  Description of Artificial Sequence: Synthetic hazel nut; 5' sequence + inner sequence + 3' sequence

SEQ ID NO: 19274 - DNA, 76 bp, Artificial Sequence; identical to SEQ ID NO: 3158
  Description of Artificial Sequence: Synthetic hazel nut; 5' sequence + inner sequence + 3' sequence

SEQ ID NO: 19275 - DNA, 76 bp, Artificial Sequence; identical to SEQ ID NO: 3592
  Description of Artificial Sequence: Synthetic hazel nut; 5' sequence + inner sequence + 3' sequence

SEQ ID NO: 19276 - DNA, 76 bp, Artificial Sequence; identical to SEQ ID NO: 3433
  Description of Artificial Sequence: Synthetic hazel nut; 5' sequence + inner sequence + 3' sequence

SEQ ID NO: 19277 - DNA, 76 bp, Artificial Sequence; identical to SEQ ID NO: 3697
  Description of Artificial Sequence: Synthetic hazel nut; 5' sequence + inner sequence + 3' sequence

SEQ ID NO: 19278 - DNA, 76 bp, Artificial Sequence; identical to SEQ ID NO: 3881
  Description of Artificial Sequence: Synthetic hazel nut; 5' sequence + inner sequence + 3' sequence

SEQ ID NO: 19279 - DNA, 76 bp, Artificial Sequence; identical to SEQ ID NO: 3575
  Description of Artificial Sequence: Synthetic hazel nut; 5' sequence + inner sequence + 3' sequence

SEQ ID NO: 19280 - DNA, 76 bp, Artificial Sequence; identical to SEQ ID NO: 3673
  Description of Artificial Sequence: Synthetic hazel nut; 5' sequence + inner sequence + 3' sequence

SEQ ID NO: 19281 - DNA, 76 bp, Artificial Sequence; identical to SEQ ID NO: 7746
  Description of Artificial Sequence: Synthetic hazel nut; 5' sequence + inner sequence + 3' sequence

SEQ ID NO: 19282 - DNA, 76 bp, Artificial Sequence; identical to SEQ ID NO: 7871
  Description of Artificial Sequence: Synthetic hazel nut; 5' sequence + inner sequence + 3' sequence

SEQ ID NO: 19283 - DNA, 76 bp, Artificial Sequence; identical to SEQ ID NO: 3231
  Description of Artificial Sequence: Synthetic hazel nut; 5' sequence + inner sequence + 3' sequence

SEQ ID NO: 19284 - DNA, 76 bp, Artificial Sequence; identical to SEQ ID NO: 3161
  Description of Artificial Sequence: Synthetic hazel nut; 5' sequence + inner sequence + 3' sequence

SEQ ID NO: 19285 - DNA, 76 bp, Artificial Sequence; identical to SEQ ID NO: 3687
  Description of Artificial Sequence: Synthetic hazel nut; 5' sequence + inner sequence + 3' sequence

SEQ ID NO: 19286 - DNA, 76 bp, Artificial Sequence; identical to SEQ ID NO: 3429
  Description of Artificial Sequence: Synthetic hazel nut; 5' sequence + inner sequence + 3' sequence

SEQ ID NO: 19287 - DNA, 76 bp, Artificial Sequence; identical to SEQ ID NO: 3147
  Description of Artificial Sequence: Synthetic hazel nut; 5' sequence + inner sequence + 3' sequence

SEQ ID NO: 19288 - DNA, 76 bp, Artificial Sequence; identical to SEQ ID NO: 3430
  Description of Artificial Sequence: Synthetic hazel nut; 5' sequence + inner sequence + 3' sequence

SEQ ID NO: 19289 - DNA, 76 bp, Artificial Sequence; identical to SEQ ID NO: 3527
  Description of Artificial Sequence: Synthetic hazel nut; 5' sequence + inner sequence + 3' sequence

SEQ ID NO: 19290 - DNA, 76 bp, Artificial Sequence; identical to SEQ ID NO: 3277
  Description of Artificial Sequence: Synthetic hazel nut; 5' sequence + inner sequence + 3' sequence

SEQ ID NO: 19291 - DNA, 76 bp, Artificial Sequence; identical to SEQ ID NO: 3362
  Description of Artificial Sequence: Synthetic hazel nut; 5' sequence + inner sequence + 3' sequence

SEQ ID NO: 19292 - DNA, 76 bp, Artificial Sequence; identical to SEQ ID NO: 3315
  Description of Artificial Sequence: Synthetic hazel nut; 5' sequence + inner sequence + 3' sequence

SEQ ID NO: 19293 - DNA, 76 bp, Artificial Sequence; identical to SEQ ID NO: 3282
  Description of Artificial Sequence: Synthetic hazel nut; 5' sequence + inner sequence + 3' sequence

SEQ ID NO: 19294 - DNA, 76 bp, Artificial Sequence; identical to SEQ ID NO: 3634
  Description of Artificial Sequence: Synthetic hazel nut; 5' sequence + inner sequence + 3' sequence

SEQ ID NO: 19295 - DNA, 76 bp, Artificial Sequence; identical to SEQ ID NO: 3671
  Description of Artificial Sequence: Synthetic hazel nut; 5' sequence + inner sequence + 3' sequence

SEQ ID NO: 19296 - DNA, 76 bp, Artificial Sequence; identical to SEQ ID NO: 3268
  Description of Artificial Sequence: Synthetic hazel nut; 5' sequence + inner sequence + 3' sequence

SEQ ID NO: 19297 - DNA, 76 bp, Artificial Sequence; identical to SEQ ID NO: 3783
  Description of Artificial Sequence: Synthetic hazel nut; 5' sequence + inner sequence + 3' sequence

SEQ ID NO: 19298 - DNA, 76 bp, Artificial Sequence; identical to SEQ ID NO: 3270
  Description of Artificial Sequence: Synthetic hazel nut; 5' sequence + inner sequence + 3' sequence

SEQ ID NO: 19299 - DNA, 76 bp, Artificial Sequence; identical to SEQ ID NO: 3338
  Description of Artificial Sequence: Synthetic hazel nut; 5' sequence + inner sequence + 3' sequence

SEQ ID NO: 19300 - DNA, 76 bp, Artificial Sequence; identical to SEQ ID NO: 3202
  Description of Artificial Sequence: Synthetic hazel nut; 5' sequence + inner sequence + 3' sequence

SEQ ID NO: 19301 - DNA, 76 bp, Artificial Sequence; identical to SEQ ID NO: 3107
  Description of Artificial Sequence: Synthetic hazel nut; 5' sequence + inner sequence + 3' sequence

SEQ ID NO: 19302 - DNA, 76 bp, Artificial Sequence; identical to SEQ ID NO: 3448
  Description of Artificial Sequence: Synthetic hazel nut; 5' sequence + inner sequence + 3' sequence

SEQ ID NO: 19303 - DNA, 76 bp, Artificial Sequence; identical to SEQ ID NO: 3287
  Description of Artificial Sequence: Synthetic hazel nut; 5' sequence + inner sequence + 3' sequence

SEQ ID NO: 19304 - DNA, 76 bp, Artificial Sequence; identical to SEQ ID NO: 3292
  Description of Artificial Sequence: Synthetic hazel nut; 5' sequence + inner sequence + 3' sequence

SEQ ID NO: 19305 - DNA, 76 bp, Artificial Sequence; identical to SEQ ID NO: 3323
  Description of Artificial Sequence: Synthetic hazel nut; 5' sequence + inner sequence + 3' sequence

SEQ ID NO: 19306 - DNA, 76 bp, Artificial Sequence; identical to SEQ ID NO: 3597
  Description of Artificial Sequence: Synthetic hazel nut; 5' sequence + inner sequence + 3' sequence

SEQ ID NO: 19307 - DNA, 76 bp, Artificial Sequence; identical to SEQ ID NO: 7813
  Description of Artificial Sequence: Synthetic hazel nut; 5' sequence + inner sequence + 3' sequence

SEQ ID NO: 19308 - DNA, 76 bp, Artificial Sequence; identical to SEQ ID NO: 3173
  Description of Artificial Sequence: Synthetic hazel nut; 5' sequence + inner sequence + 3' sequence

SEQ ID NO: 19309 - DNA, 76 bp, Artificial Sequence; identical to SEQ ID NO: 3089
  Description of Artificial Sequence: Synthetic hazel nut; 5' sequence + inner sequence + 3' sequence

SEQ ID NO: 19310 - DNA, 76 bp, Artificial Sequence; identical to SEQ ID NO: 3223
  Description of Artificial Sequence: Synthetic hazel nut; 5' sequence + inner sequence + 3' sequence

SEQ ID NO: 19311 - DNA, 76 bp, Artificial Sequence; identical to SEQ ID NO: 7707
  Description of Artificial Sequence: Synthetic hazel nut; 5' sequence + inner sequence + 3' sequence

SEQ ID NO: 19312 - DNA, 76 bp, Artificial Sequence; identical to SEQ ID NO: 3157
  Description of Artificial Sequence: Synthetic hazel nut; 5' sequence + inner sequence + 3' sequence

SEQ ID NO: 19313 - DNA, 76 bp, Artificial Sequence; identical to SEQ ID NO: 3875
  Description of Artificial Sequence: Synthetic hazel nut; 5' sequence + inner sequence + 3' sequence

SEQ ID NO: 19314 - DNA, 76 bp, Artificial Sequence; identical to SEQ ID NO: 3208
  Description of Artificial Sequence: Synthetic hazel nut; 5' sequence + inner sequence + 3' sequence

SEQ ID NO: 19315 - DNA, 76 bp, Artificial Sequence; identical to SEQ ID NO: 11401
  Description of Artificial Sequence: Synthetic hazel nut; 5' sequence + inner sequence + 3' sequence

SEQ ID NO: 19316 - DNA, 76 bp, Artificial Sequence; identical to SEQ ID NO: 3248
  Description of Artificial Sequence: Synthetic hazel nut; 5' sequence + inner sequence + 3' sequence

SEQ ID NO: 19317 - DNA, 76 bp, Artificial Sequence; identical to SEQ ID NO: 3170
  Description of Artificial Sequence: Synthetic hazel nut; 5' sequence + inner sequence + 3' sequence

SEQ ID NO: 19318 - DNA, 76 bp, Artificial Sequence; identical to SEQ ID NO: 3688
  Description of Artificial Sequence: Synthetic hazel nut; 5' sequence + inner sequence + 3' sequence

SEQ ID NO: 19319 - DNA, 76 bp, Artificial Sequence; identical to SEQ ID NO: 7517
  Description of Artificial Sequence: Synthetic hazel nut; 5' sequence + inner sequence + 3' sequence

SEQ ID NO: 19320 - DNA, 76 bp, Artificial Sequence; identical to SEQ ID NO: 3309
  Description of Artificial Sequence: Synthetic hazel nut; 5' sequence + inner sequence + 3' sequence

SEQ ID NO: 19321 - DNA, 76 bp, Artificial Sequence; identical to SEQ ID NO: 7745
  Description of Artificial Sequence: Synthetic hazel nut; 5' sequence + inner sequence + 3' sequence

SEQ ID NO: 19322 - DNA, 76 bp, Artificial Sequence; identical to SEQ ID NO: 3224
  Description of Artificial Sequence: Synthetic hazel nut; 5' sequence + inner sequence + 3' sequence

SEQ ID NO: 19323 - DNA, 76 bp, Artificial Sequence; identical to SEQ ID NO: 3261
  Description of Artificial Sequence: Synthetic hazel nut; 5' sequence + inner sequence + 3' sequence

SEQ ID NO: 19324 - DNA, 76 bp, Artificial Sequence; identical to SEQ ID NO: 3551
  Description of Artificial Sequence: Synthetic hazel nut; 5' sequence + inner sequence + 3' sequence

SEQ ID NO: 19325 - DNA, 76 bp, Artificial Sequence; identical to SEQ ID NO: 3132
  Description of Artificial Sequence: Synthetic hazel nut; 5' sequence + inner sequence + 3' sequence

SEQ ID NO: 19326 - DNA, 74 bp, Artificial Sequence; identical to SEQ ID NO: 3241
  Description of Artificial Sequence: Synthetic hazel nut; 5' sequence + inner sequence + 3' sequence

SEQ ID NO: 19327 - DNA, 76 bp, Artificial Sequence; identical to SEQ ID NO: 3561
  Description of Artificial Sequence: Synthetic hazel nut; 5' sequence + inner sequence + 3' sequence

SEQ ID NO: 19328 - DNA, 76 bp, Artificial Sequence; identical to SEQ ID NO: 3541
  Description of Artificial Sequence: Synthetic hazel nut; 5' sequence + inner sequence + 3' sequence

SEQ ID NO: 19329 - DNA, 76 bp, Artificial Sequence; identical to SEQ ID NO: 7940
  Description of Artificial Sequence: Synthetic hazel nut; 5' sequence + inner sequence + 3' sequence

SEQ ID NO: 19330 - DNA, 76 bp, Artificial Sequence; identical to SEQ ID NO: 3459
  Description of Artificial Sequence: Synthetic hazel nut; 5' sequence + inner sequence + 3' sequence

SEQ ID NO: 19331 - DNA, 76 bp, Artificial Sequence; identical to SEQ ID NO: 3496
  Description of Artificial Sequence: Synthetic hazel nut; 5' sequence + inner sequence + 3' sequence

SEQ ID NO: 19332 - DNA, 76 bp, Artificial Sequence; identical to SEQ ID NO: 3165
  Description of Artificial Sequence: Synthetic hazel nut; 5' sequence + inner sequence + 3' sequence

SEQ ID NO: 19333 - DNA, 76 bp, Artificial Sequence; identical to SEQ ID NO: 3167
  Description of Artificial Sequence: Synthetic hazel nut; 5' sequence + inner sequence + 3' sequence

SEQ ID NO: 19334 - DNA, 76 bp, Artificial Sequence; identical to SEQ ID NO: 3791
  Description of Artificial Sequence: Synthetic hazel nut; 5' sequence + inner sequence + 3' sequence

SEQ ID NO: 19335 - DNA, 76 bp, Artificial Sequence; identical to SEQ ID NO: 7205
  Description of Artificial Sequence: Synthetic hazel nut; 5' sequence + inner sequence + 3' sequence

SEQ ID NO: 19336 - DNA, 75 bp, Artificial Sequence; identical to SEQ ID NO: 3549
  Description of Artificial Sequence: Synthetic hazel nut; 5' sequence + inner sequence + 3' sequence

SEQ ID NO: 19337 - DNA, 76 bp, Artificial Sequence; identical to SEQ ID NO: 7954
  Description of Artificial Sequence: Synthetic hazel nut; 5' sequence + inner sequence + 3' sequence

SEQ ID NO: 19338 - DNA, 76 bp, Artificial Sequence; identical to SEQ ID NO: 3919
  Description of Artificial Sequence: Synthetic hazel nut; 5' sequence + inner sequence + 3' sequence

SEQ ID NO: 19339 - DNA, 76 bp, Artificial Sequence; identical to SEQ ID NO: 3317
  Description of Artificial Sequence: Synthetic hazel nut; 5' sequence + inner sequence + 3' sequence

SEQ ID NO: 19340 - DNA, 76 bp, Artificial Sequence; identical to SEQ ID NO: 3345
  Description of Artificial Sequence: Synthetic hazel nut; 5' sequence + inner sequence + 3' sequence

SEQ ID NO: 19341 - DNA, 76 bp, Artificial Sequence; identical to SEQ ID NO: 3348
  Description of Artificial Sequence: Synthetic hazel nut; 5' sequence + inner sequence + 3' sequence

SEQ ID NO: 19342 - DNA, 76 bp, Artificial Sequence
  Description of Artificial Sequence: Synthetic hazel nut; 5' sequence + inner sequence + 3' sequence
tagggaagagaaggacatatgatcgtaccgtggcagaacgcgtcactgtgtcgttgactagtacatgaccacttga

SEQ ID NO: 19343 - DNA, 76 bp, Artificial Sequence; identical to SEQ ID NO: 3494
  Description of Artificial Sequence: Synthetic hazel nut; 5' sequence + inner sequence + 3' sequence

SEQ ID NO: 19344 - DNA, 76 bp, Artificial Sequence; identical to SEQ ID NO: 7955
  Description of Artificial Sequence: Synthetic hazel nut; 5' sequence + inner sequence + 3' sequence

SEQ ID NO: 19345 - DNA, 76 bp, Artificial Sequence; identical to SEQ ID NO: 7854
  Description of Artificial Sequence: Synthetic hazel nut; 5' sequence + inner sequence + 3' sequence

SEQ ID NO: 19346 - DNA, 76 bp, Artificial Sequence; identical to SEQ ID NO: 3406
  Description of Artificial Sequence: Synthetic hazel nut; 5' sequence + inner sequence + 3' sequence

SEQ ID NO: 19347 - DNA, 74 bp, Artificial Sequence; identical to SEQ ID NO: 3423
  Description of Artificial Sequence: Synthetic hazel nut; 5' sequence + inner sequence + 3' sequence

SEQ ID NO: 19348 - DNA, 76 bp, Artificial Sequence; identical to SEQ ID NO: 3390
  Description of Artificial Sequence: Synthetic hazel nut; 5' sequence + inner sequence + 3' sequence

SEQ ID NO: 19349 - DNA, 76 bp, Artificial Sequence; identical to SEQ ID NO: 3146
  Description of Artificial Sequence: Synthetic hazel nut; 5' sequence + inner sequence + 3' sequence

SEQ ID NO: 19350 - DNA, 76 bp, Artificial Sequence; identical to SEQ ID NO: 3343
  Description of Artificial Sequence: Synthetic hazel nut; 5' sequence + inner sequence + 3' sequence

SEQ ID NO: 19351 - DNA, 76 bp, Artificial Sequence; identical to SEQ ID NO: 3109
  Description of Artificial Sequence: Synthetic hazel nut; 5' sequence + inner sequence + 3' sequence

SEQ ID NO: 19352 - DNA, 76 bp, Artificial Sequence
  Description of Artificial Sequence: Synthetic hazel nut; 5' sequence + inner sequence + 3' sequence
tagggaagagaaggacatatgatcgacacacggtgcaacgtcaacactgcggcttgactagtacatgaccacttga

SEQ ID NO: 19353 - DNA, 76 bp, Artificial Sequence; identical to SEQ ID NO: 3183
  Description of Artificial Sequence: Synthetic hazel nut; 5' sequence + inner sequence + 3' sequence

SEQ ID NO: 19354 - DNA, 76 bp, Artificial Sequence; identical to SEQ ID NO: 3384
  Description of Artificial Sequence: Synthetic hazel nut; 5' sequence + inner sequence + 3' sequence

SEQ ID NO: 19355 - DNA, 76 bp, Artificial Sequence; identical to SEQ ID NO: 3576
  Description of Artificial Sequence: Synthetic hazel nut; 5' sequence + inner sequence + 3' sequence

SEQ ID NO: 19356 - DNA, 76 bp, Artificial Sequence; identical to SEQ ID NO: 3654
  Description of Artificial Sequence: Synthetic hazel nut; 5' sequence + inner sequence + 3' sequence

SEQ ID NO: 19357 - DNA, 76 bp, Artificial Sequence; identical to SEQ ID NO: 3407
  Description of Artificial Sequence: Synthetic hazel nut; 5' sequence + inner sequence + 3' sequence

SEQ ID NO: 19358 - DNA, 76 bp, Artificial Sequence; identical to SEQ ID NO: 7739
  Description of Artificial Sequence: Synthetic hazel nut; 5' sequence + inner sequence + 3' sequence

SEQ ID NO: 19359 - DNA, 76 bp, Artificial Sequence; identical to SEQ ID NO: 3420
  Description of Artificial Sequence: Synthetic hazel nut; 5' sequence + inner sequence + 3' sequence

SEQ ID NO: 19360 - DNA, 76 bp, Artificial Sequence; identical to SEQ ID NO: 7694
  Description of Artificial Sequence: Synthetic hazel nut; 5' sequence + inner sequence + 3' sequence

SEQ ID NO: 19361 - DNA, 76 bp, Artificial Sequence; identical to SEQ ID NO: 3385
  Description of Artificial Sequence: Synthetic hazel nut; 5' sequence + inner sequence + 3' sequence

SEQ ID NO: 19362 - DNA, 76 bp, Artificial Sequence; identical to SEQ ID NO: 3528
  Description of Artificial Sequence: Synthetic hazel nut; 5' sequence + inner sequence + 3' sequence

SEQ ID NO: 19363 - DNA, 76 bp, Artificial Sequence; identical to SEQ ID NO: 3291
  Description of Artificial Sequence: Synthetic hazel nut; 5' sequence + inner sequence + 3' sequence

SEQ ID NO: 19364 - DNA, 76 bp, Artificial Sequence; identical to SEQ ID NO: 3923
  Description of Artificial Sequence: Synthetic hazel nut; 5' sequence + inner sequence + 3' sequence

SEQ ID NO: 19365 - DNA, 76 bp, Artificial Sequence; identical to SEQ ID NO: 3211
  Description of Artificial Sequence: Synthetic hazel nut; 5' sequence + inner sequence + 3' sequence

SEQ ID NO: 19366 - DNA, 76 bp, Artificial Sequence; identical to SEQ ID NO: 3380
  Description of Artificial Sequence: Synthetic hazel nut; 5' sequence + inner sequence + 3' sequence

SEQ ID NO: 19367 - DNA, 76 bp, Artificial Sequence
  Description of Artificial Sequence: Synthetic hazel nut; 5' sequence + inner sequence + 3' sequence
tagggaagagaaggacatatgatgcaccatcacgttgacgctgcccgtttgccttgactagtacatgaccacttga

SEQ ID NO: 19368 - DNA, 76 bp, Artificial Sequence; identical to SEQ ID NO: 3798
  Description of Artificial Sequence: Synthetic hazel nut; 5' sequence + inner sequence + 3' sequence

SEQ ID NO: 19369 - DNA, 76 bp, Artificial Sequence; identical to SEQ ID NO: 3369
  Description of Artificial Sequence: Synthetic hazel nut; 5' sequence + inner sequence + 3' sequence

SEQ ID NO: 19370 - DNA, 76 bp, Artificial Sequence; identical to SEQ ID NO: 3854
  Description of Artificial Sequence: Synthetic hazel nut; 5' sequence + inner sequence + 3' sequence

SEQ ID NO: 19371 - DNA, 76 bp, Artificial Sequence; identical to SEQ ID NO: 3410
  Description of Artificial Sequence: Synthetic hazel nut; 5' sequence + inner sequence + 3' sequence

SEQ ID NO: 19372 - DNA, 76 bp, Artificial Sequence; identical to SEQ ID NO: 3316
  Description of Artificial Sequence: Synthetic hazel nut; 5' sequence + inner sequence + 3' sequence

SEQ ID NO: 19373 - DNA, 77 bp, Artificial Sequence
  Description of Artificial Sequence: Synthetic hazel nut; 5' sequence + inner sequence + 3' sequence
tagggaagagaaggacatatgatcgtggcacgatggtaggacgacgcgttcacgttgactagtacatgaccacttga

SEQ ID NO: 19374 - DNA, 76 bp, Artificial Sequence; identical to SEQ ID NO: 7312
  Description of Artificial Sequence: Synthetic hazel nut; 5' sequence + inner sequence + 3' sequence

SEQ ID NO: 19375 - DNA, 76 bp, Artificial Sequence; identical to SEQ ID NO: 7790
  Description of Artificial Sequence: Synthetic hazel nut; 5' sequence + inner sequence + 3' sequence

SEQ ID NO: 19376 - DNA, 76 bp, Artificial Sequence; identical to SEQ ID NO: 3083
  Description of Artificial Sequence: Synthetic hazel nut; 5' sequence + inner sequence + 3' sequence

SEQ ID NO: 19377 - DNA, 76 bp, Artificial Sequence; identical to SEQ ID NO: 3751
  Description of Artificial Sequence: Synthetic hazel nut; 5' sequence + inner sequence + 3' sequence

SEQ ID NO: 19378 - DNA, 76 bp, Artificial Sequence; identical to SEQ ID NO: 3401
  Description of Artificial Sequence: Synthetic hazel nut; 5' sequence + inner sequence + 3' sequence

SEQ ID NO: 19379 - DNA, 76 bp, Artificial Sequence; identical to SEQ ID NO: 3815
  Description of Artificial Sequence: Synthetic hazel nut; 5' sequence + inner sequence + 3' sequence

SEQ ID NO: 19380 - DNA, 76 bp, Artificial Sequence
  Description of Artificial Sequence: Synthetic hazel nut; 5' sequence + inner sequence + 3' sequence
tagggaagagaaggacatatgattcatggccgaacgtgacgtacaccgtgccgttgactagtacatgaccacttga

SEQ ID NO: 19381 - DNA, 76 bp, Artificial Sequence; identical to SEQ ID NO: 3331
  Description of Artificial Sequence: Synthetic hazel nut; 5' sequence + inner sequence + 3' sequence

SEQ ID NO: 19382 - DNA, 76 bp, Artificial Sequence; identical to SEQ ID NO: 11824
  Description of Artificial Sequence: Synthetic hazel nut; 5' sequence + inner sequence + 3' sequence

SEQ ID NO: 19383 - DNA, 76 bp, Artificial Sequence
  Description of Artificial Sequence: Synthetic hazel nut; 5' sequence + inner sequence + 3' sequence
tagggaagagaaggacatatgatcacgcgtcgtgagcaaggcatgccgtatcgttgactagtacatgaccacttga

SEQ ID NO: 19384 - DNA, 76 bp, Artificial Sequence; identical to SEQ ID NO: 3463
  Description of Artificial Sequence: Synthetic hazel nut; 5' sequence + inner sequence + 3' sequence

SEQ ID NO: 19385 - DNA, 76 bp, Artificial Sequence; identical to SEQ ID NO: 3729
  Description of Artificial Sequence: Synthetic hazel nut; 5' sequence + inner sequence + 3' sequence

SEQ ID NO: 19386 - DNA, 76 bp, Artificial Sequence
  Description of Artificial Sequence: Synthetic hazel nut; 5' sequence + inner sequence + 3' sequence
tagggaagagaaggacatatgatgcacacagggcatcgtggacgtgtgtcgcgttgactagtacatgaccacttga

SEQ ID NO: 19387 - DNA, 76 bp, Artificial Sequence
  Description of Artificial Sequence: Synthetic hazel nut; 5' sequence + inner sequence + 3' sequence
tagggaagagaaggacatatgatcgcgcaacgtgatggatgggctgatgcgcattgactagtacatgaccacttga

SEQ ID NO: 19388 - DNA, 76 bp, Artificial Sequence; identical to SEQ ID NO: 7882
  Description of Artificial Sequence: Synthetic hazel nut; 5' sequence + inner sequence + 3' sequence

SEQ ID NO: 19389 - DNA, 76 bp, Artificial Sequence
  Description of Artificial Sequence: Synthetic hazel nut; 5' sequence + inner sequence + 3' sequence
tagggaagagaaggacatatgatcgtaacgcatcatggtgcatgcgcttcacgttgactagtacatgaccacttga

SEQ ID NO: 19390 - DNA, 76 bp, Artificial Sequence; identical to SEQ ID NO: 3272
  Description of Artificial Sequence: Synthetic hazel nut; 5' sequence + inner sequence + 3' sequence

SEQ ID NO: 19391 - DNA, 76 bp, Artificial Sequence; identical to SEQ ID NO: 3620
  Description of Artificial Sequence: Synthetic hazel nut; 5' sequence + inner sequence + 3' sequence

SEQ ID NO: 19392 - DNA, 76 bp, Artificial Sequence; identical to SEQ ID NO: 3491
  Description of Artificial Sequence: Synthetic hazel nut; 5' sequence + inner sequence + 3' sequence

SEQ ID NO: 19393 - DNA, 76 bp, Artificial Sequence; identical to SEQ ID NO: 3474
  Description of Artificial Sequence: Synthetic hazel nut; 5' sequence + inner sequence + 3' sequence

SEQ ID NO: 19394 - DNA, 76 bp, Artificial Sequence; identical to SEQ ID NO: 3861
  Description of Artificial Sequence: Synthetic hazel nut; 5' sequence + inner sequence + 3' sequence

SEQ ID NO: 19395 - DNA, 76 bp, Artificial Sequence; identical to SEQ ID NO: 3672
  Description of Artificial Sequence: Synthetic hazel nut; 5' sequence + inner sequence + 3' sequence

SEQ ID NO: 19396 - DNA, 76 bp, Artificial Sequence; identical to SEQ ID NO: 7597
  Description of Artificial Sequence: Synthetic hazel nut; 5' sequence + inner sequence + 3' sequence

SEQ ID NO: 19397 - DNA, 76 bp, Artificial Sequence; identical to SEQ ID NO: 3289
  Description of Artificial Sequence: Synthetic hazel nut; 5' sequence + inner sequence + 3' sequence

SEQ ID NO: 19398 - DNA, 76 bp, Artificial Sequence; identical to SEQ ID NO: 3726
  Description of Artificial Sequence: Synthetic hazel nut; 5' sequence + inner sequence + 3' sequence

SEQ ID NO: 19399 - DNA, 76 bp, Artificial Sequence
  Description of Artificial Sequence: Synthetic hazel nut; 5' sequence + inner sequence + 3' sequence
tagggaagagaaggacatatgatcgcaccgcaagtgacgtgtccgtgccgtgattgactagtacatgaccacttga

SEQ ID NO: 19400 - DNA, 76 bp, Artificial Sequence; identical to SEQ ID NO: 3454
  Description of Artificial Sequence: Synthetic hazel nut; 5' sequence + inner sequence + 3' sequence

SEQ ID NO: 19401 - DNA, 76 bp, Artificial Sequence; identical to SEQ ID NO: 3809
  Description of Artificial Sequence: Synthetic hazel nut; 5' sequence + inner sequence + 3' sequence

SEQ ID NO: 19402 - DNA, 76 bp, Artificial Sequence; identical to SEQ ID NO: 3242
  Description of Artificial Sequence: Synthetic hazel nut; 5' sequence + inner sequence + 3' sequence

SEQ ID NO: 19403 - DNA, 76 bp, Artificial Sequence; identical to SEQ ID NO: 3700
  Description of Artificial Sequence: Synthetic hazel nut; 5' sequence + inner sequence + 3' sequence

SEQ ID NO: 19404 - DNA, 76 bp, Artificial Sequence; identical to SEQ ID NO: 3583
  Description of Artificial Sequence: Synthetic hazel nut; 5' sequence + inner sequence + 3' sequence

SEQ ID NO: 19405 - DNA, 76 bp, Artificial Sequence; identical to SEQ ID NO: 3467
  Description of Artificial Sequence: Synthetic hazel nut; 5' sequence + inner sequence + 3' sequence

SEQ ID NO: 19406 - DNA, 76 bp, Artificial Sequence; identical to SEQ ID NO: 3106
  Description of Artificial Sequence: Synthetic hazel nut; 5' sequence + inner sequence + 3' sequence

SEQ ID NO: 19407 - DNA, 76 bp, Artificial Sequence; identical to SEQ ID NO: 3135
  Description of Artificial Sequence: Synthetic hazel nut; 5' sequence + inner sequence + 3' sequence

SEQ ID NO: 19408 - DNA, 76 bp, Artificial Sequence
  Description of Artificial Sequence: Synthetic hazel nut; 5' sequence + inner sequence + 3' sequence
tagggaagagaaggacatatgatcgtaccggcagggagcgtgcacactgcgcattgactagtacatgaccacttga

SEQ ID NO: 19409 - DNA, 76 bp, Artificial Sequence
  Description of Artificial Sequence: Synthetic hazel nut; 5' sequence + inner sequence + 3' sequence
tagggaagagaaggacatatgatcatgatggccgtgctgaccacgcgtgcgcattgactagtacatgaccacttga

SEQ ID NO: 19410 - DNA, 76 bp, Artificial Sequence; identical to SEQ ID NO: 3611
  Description of Artificial Sequence: Synthetic hazel nut; 5' sequence + inner sequence + 3' sequence

SEQ ID NO: 19411 - DNA, 76 bp, Artificial Sequence; identical to SEQ ID NO: 7924
  Description of Artificial Sequence: Synthetic hazel nut; 5' sequence + inner sequence + 3' sequence

SEQ ID NO: 19412 - DNA, 76 bp, Artificial Sequence
  Description of Artificial Sequence: Synthetic hazel nut; 5' sequence + inner sequence + 3' sequence
tagggaagagaaggacatatgatcgacacgcatcagggacgcaacgctgcacgttgactagtacatgaccacttga

SEQ ID NO: 19413 - DNA, 76 bp, Artificial Sequence; identical to SEQ ID NO: 3535
  Description of Artificial Sequence: Synthetic hazel nut; 5' sequence + inner sequence + 3' sequence

SEQ ID NO: 19414 - DNA, 76 bp, Artificial Sequence; identical to SEQ ID NO: 3442
  Description of Artificial Sequence: Synthetic hazel nut; 5' sequence + inner sequence + 3' sequence

SEQ ID NO: 19415 - DNA, 76 bp, Artificial Sequence; identical to SEQ ID NO: 3886
  Description of Artificial Sequence: Synthetic hazel nut; 5' sequence + inner sequence + 3' sequence

SEQ ID NO: 19416 - DNA, 76 bp, Artificial Sequence; identical to SEQ ID NO: 3326
  Description of Artificial Sequence: Synthetic hazel nut; 5' sequence + inner sequence + 3' sequence

SEQ ID NO: 19417 - DNA, 76 bp, Artificial Sequence; identical to SEQ ID NO: 3358
  Description of Artificial Sequence: Synthetic hazel nut; 5' sequence + inner sequence + 3' sequence

SEQ ID NO: 19418 - DNA, 76 bp, Artificial Sequence; identical to SEQ ID NO: 3438
  Description of Artificial Sequence: Synthetic hazel nut; 5' sequence + inner sequence + 3' sequence

SEQ ID NO: 19419 - DNA, 76 bp, Artificial Sequence; identical to SEQ ID NO: 3153
  Description of Artificial Sequence: Synthetic hazel nut; 5' sequence + inner sequence + 3' sequence

SEQ ID NO: 19420 - DNA, 76 bp, Artificial Sequence; identical to SEQ ID NO: 3990
  Description of Artificial Sequence: Synthetic hazel nut; 5' sequence + inner sequence + 3' sequence

SEQ ID NO: 19421 - DNA, 76 bp, Artificial Sequence; identical to SEQ ID NO: 3297
  Description of Artificial Sequence: Synthetic hazel nut; 5' sequence + inner sequence + 3' sequence

SEQ ID NO: 19422 - DNA, 76 bp, Artificial Sequence; identical to SEQ ID NO: 3960
  Description of Artificial Sequence: Synthetic hazel nut; 5' sequence + inner sequence + 3' sequence

SEQ ID NO: 19423 - DNA, 76 bp, Artificial Sequence; identical to SEQ ID NO: 3571
  Description of Artificial Sequence: Synthetic hazel nut; 5' sequence + inner sequence + 3' sequence

SEQ ID NO: 19424 - DNA, 76 bp, Artificial Sequence; identical to SEQ ID NO: 3477
  Description of Artificial Sequence: Synthetic hazel nut; 5' sequence + inner sequence + 3' sequence

SEQ ID NO: 19425 - DNA, 76 bp, Artificial Sequence; identical to SEQ ID NO: 3736
  Description of Artificial Sequence: Synthetic hazel nut; 5' sequence + inner sequence + 3' sequence

SEQ ID NO: 19426 - DNA, 76 bp, Artificial Sequence; identical to SEQ ID NO: 7663
  Description of Artificial Sequence: Synthetic hazel nut; 5' sequence + inner sequence + 3' sequence

SEQ ID NO: 19427 - DNA, 76 bp, Artificial Sequence
  Description of Artificial Sequence: Synthetic hazel nut; 5' sequence + inner sequence + 3' sequence
tagggaagagaaggacatatgatgacatgcgatgaacgaggcatgatgcgtcattgactagtacatgaccacttga

SEQ ID NO: 19428 - DNA, 76 bp, Artificial Sequence; identical to SEQ ID NO: 7706
  Description of Artificial Sequence: Synthetic hazel nut; 5' sequence + inner sequence + 3' sequence

SEQ ID NO: 19429 - DNA, 76 bp, Artificial Sequence; identical to SEQ ID NO: 3530
  Description of Artificial Sequence: Synthetic hazel nut; 5' sequence + inner sequence + 3' sequence

SEQ ID NO: 19430 - DNA, 76 bp, Artificial Sequence; identical to SEQ ID NO: 3632
  Description of Artificial Sequence: Synthetic hazel nut; 5' sequence + inner sequence + 3' sequence

SEQ ID NO: 19431 - DNA, 76 bp, Artificial Sequence
  Description of Artificial Sequence: Synthetic hazel nut; 5' sequence + inner sequence + 3' sequence
tagggaagagaaggacatatgatgcatgccgtacgatccctcactgtgcggtgttgactagtacatgaccacttga

SEQ ID NO: 19432 - DNA, 76 bp, Artificial Sequence; identical to SEQ ID NO: 3828
  Description of Artificial Sequence: Synthetic hazel nut; 5' sequence + inner sequence + 3' sequence

SEQ ID NO: 19433 - DNA, 76 bp, Artificial Sequence; identical to SEQ ID NO: 3392
  Description of Artificial Sequence: Synthetic hazel nut; 5' sequence + inner sequence + 3' sequence

SEQ ID NO: 19434 - DNA, 76 bp, Artificial Sequence
  Description of Artificial Sequence: Synthetic hazel nut; 5' sequence + inner sequence + 3' sequence
tagggaagagaaggacatatgatcgtgctgacatgctcgtccctcactgcgtgttgactagtacatgaccacttga

SEQ ID NO: 19435 - DNA, 76 bp, Artificial Sequence; identical to SEQ ID NO: 3604
  Description of Artificial Sequence: Synthetic hazel nut; 5' sequence + inner sequence + 3' sequence

SEQ ID NO: 19436 - DNA, 76 bp, Artificial Sequence
  Description of Artificial Sequence: Synthetic hazel nut; 5' sequence + inner sequence + 3' sequence
tagggaagagaaggacatatgatgcgacacacggatcgaccttcgtagccacgttgactagtacatgaccacttga

SEQ ID NO: 19437 - DNA, 76 bp, Artificial Sequence; identical to SEQ ID NO: 3156
  Description of Artificial Sequence: Synthetic hazel nut; 5' sequence + inner sequence + 3' sequence

SEQ ID NO: 19438 - DNA, 76 bp, Artificial Sequence; identical to SEQ ID NO: 3387
  Description of Artificial Sequence: Synthetic hazel nut; 5' sequence + inner sequence + 3' sequence

SEQ ID NO: 19439 - DNA, 76 bp, Artificial Sequence; identical to SEQ ID NO: 3377
  Description of Artificial Sequence: Synthetic hazel nut; 5' sequence + inner sequence + 3' sequence

SEQ ID NO: 19440 - DNA, 76 bp, Artificial Sequence; identical to SEQ ID NO: 3569
  Description of Artificial Sequence: Synthetic hazel nut; 5' sequence + inner sequence + 3' sequence

SEQ ID NO: 19441 - DNA, 76 bp, Artificial Sequence; identical to SEQ ID NO: 3350
  Description of Artificial Sequence: Synthetic hazel nut; 5' sequence + inner sequence + 3' sequence

SEQ ID NO: 19442 - DNA, 76 bp, Artificial Sequence
  Description of Artificial Sequence: Synthetic hazel nut; 5' sequence + inner sequence + 3' sequence
tagggaagagaaggacatatgatacgtatgccgcatcgtcacgccaacatggtttgactagtacatgaccacttga

SEQ ID NO: 19443 - DNA, 76 bp, Artificial Sequence; identical to SEQ ID NO: 3303
  Description of Artificial Sequence: Synthetic hazel nut; 5' sequence + inner sequence + 3' sequence

SEQ ID NO: 19444 - DNA, 76 bp, Artificial Sequence; identical to SEQ ID NO: 3215
  Description of Artificial Sequence: Synthetic hazel nut; 5' sequence + inner sequence + 3' sequence

SEQ ID NO: 19445 - DNA, 76 bp, Artificial Sequence; identical to SEQ ID NO: 7621
  Description of Artificial Sequence: Synthetic hazel nut; 5' sequence + inner sequence + 3' sequence

SEQ ID NO: 19446 - DNA, 76 bp, Artificial Sequence; identical to SEQ ID NO: 3347
  Description of Artificial Sequence: Synthetic hazel nut; 5' sequence + inner sequence + 3' sequence

SEQ ID NO: 19447 - DNA, 76 bp, Artificial Sequence; identical to SEQ ID NO: 3928
  Description of Artificial Sequence: Synthetic hazel nut; 5' sequence + inner sequence + 3' sequence

SEQ ID NO: 19448 - DNA, 76 bp, Artificial Sequence; identical to SEQ ID NO: 7819
  Description of Artificial Sequence: Synthetic hazel nut; 5' sequence + inner sequence + 3' sequence

SEQ ID NO: 19449 - DNA, 76 bp, Artificial Sequence; identical to SEQ ID NO: 3342
  Description of Artificial Sequence: Synthetic hazel nut; 5' sequence + inner sequence + 3' sequence

SEQ ID NO: 19450 - DNA, 76 bp, Artificial Sequence; identical to SEQ ID NO: 3320
  Description of Artificial Sequence: Synthetic hazel nut; 5' sequence + inner sequence + 3' sequence

SEQ ID NO: 19451 - DNA, 76 bp, Artificial Sequence
  Description of Artificial Sequence: Synthetic hazel nut; 5' sequence + inner sequence + 3' sequence
tagggaagagaaggacatatgatgcatggcaacgcgtacctctgcacttcacattgactagtacatgaccacttga

SEQ ID NO: 19452 - DNA, 76 bp, Artificial Sequence; identical to SEQ ID NO: 3127
  Description of Artificial Sequence: Synthetic hazel nut; 5' sequence + inner sequence + 3' sequence

SEQ ID NO: 19453 - DNA, 76 bp, Artificial Sequence; identical to SEQ ID NO: 7502
  Description of Artificial Sequence: Synthetic hazel nut; 5' sequence + inner sequence + 3' sequence

SEQ ID NO: 19454 - DNA, 76 bp, Artificial Sequence; identical to SEQ ID NO: 3457
  Description of Artificial Sequence: Synthetic hazel nut; 5' sequence + inner sequence + 3' sequence

SEQ ID NO: 19455 - DNA, 76 bp, Artificial Sequence; identical to SEQ ID NO: 3498
  Description of Artificial Sequence: Synthetic hazel nut; 5' sequence + inner sequence + 3' sequence

SEQ ID NO: 19456 - DNA, 76 bp, Artificial Sequence; identical to SEQ ID NO: 3116
  Description of Artificial Sequence: Synthetic hazel nut; 5' sequence + inner sequence + 3' sequence

SEQ ID NO: 19457 - DNA, 76 bp, Artificial Sequence
  Description of Artificial Sequence: Synthetic hazel nut; 5' sequence + inner sequence + 3' sequence
tagggaagagaaggacatatgatggaatgcgatgaacgaggcatgatgcgtcattgactagtacatgaccacttga

SEQ ID NO: 19458 - DNA, 76 bp, Artificial Sequence; identical to SEQ ID NO: 3254
  Description of Artificial Sequence: Synthetic hazel nut; 5' sequence + inner sequence + 3' sequence

SEQ ID NO: 19459 - DNA, 76 bp, Artificial Sequence; identical to SEQ ID NO: 3572
  Description of Artificial Sequence: Synthetic hazel nut; 5' sequence + inner sequence + 3' sequence

SEQ ID NO: 19460 - DNA, 76 bp, Artificial Sequence; identical to SEQ ID NO: 3288
  Description of Artificial Sequence: Synthetic hazel nut; 5' sequence + inner sequence + 3' sequence

SEQ ID NO: 19461 - DNA, 76 bp, Artificial Sequence; identical to SEQ ID NO: 3439
  Description of Artificial Sequence: Synthetic hazel nut; 5' sequence + inner sequence + 3' sequence

SEQ ID NO: 19462 - DNA, 76 bp, Artificial Sequence; identical to SEQ ID NO: 11826
  Description of Artificial Sequence: Synthetic hazel nut; 5' sequence + inner sequence + 3' sequence

SEQ ID NO: 19463 - DNA, 76 bp, Artificial Sequence; identical to SEQ ID NO: 3414
  Description of Artificial Sequence: Synthetic hazel nut; 5' sequence + inner sequence + 3' sequence

SEQ ID NO: 19464 - DNA, 76 bp, Artificial Sequence; identical to SEQ ID NO: 3186
  Description of Artificial Sequence: Synthetic hazel nut; 5' sequence + inner sequence + 3' sequence

SEQ ID NO: 19465 - DNA, 76 bp, Artificial Sequence; identical to SEQ ID NO: 3868
  Description of Artificial Sequence: Synthetic hazel nut; 5' sequence + inner sequence + 3' sequence

SEQ ID NO: 19466 - DNA, 77 bp, Artificial Sequence; identical to SEQ ID NO: 3258
  Description of Artificial Sequence: Synthetic hazel nut; 5' sequence + inner sequence + 3' sequence

SEQ ID NO: 19467 - DNA, 76 bp, Artificial Sequence; identical to SEQ ID NO: 3204
  Description of Artificial Sequence: Synthetic hazel nut; 5' sequence + inner sequence + 3' sequence

SEQ ID NO: 19468 - DNA, 76 bp, Artificial Sequence; identical to SEQ ID NO: 7420
  Description of Artificial Sequence: Synthetic hazel nut; 5' sequence + inner sequence + 3' sequence

SEQ ID NO: 19469 - DNA, 76 bp, Artificial Sequence; identical to SEQ ID NO: 7617
  Description of Artificial Sequence: Synthetic hazel nut; 5' sequence + inner sequence + 3' sequence

SEQ ID NO: 19470 - DNA, 76 bp, Artificial Sequence; identical to SEQ ID NO: 3212
  Description of Artificial Sequence: Synthetic hazel nut; 5' sequence + inner sequence + 3' sequence

SEQ ID NO: 19471 - DNA, 76 bp, Artificial Sequence
  Description of Artificial Sequence: Synthetic hazel nut; 5' sequence + inner sequence + 3' sequence
tagggaagagaaggacatatgatgcacgtgctgtgaccggtaacgatgtggcattgactagtacatgaccacttga

SEQ ID NO: 19472 - DNA, 76 bp, Artificial Sequence; identical to SEQ ID NO: 3239
  Description of Artificial Sequence: Synthetic hazel nut; 5' sequence + inner sequence + 3' sequence

SEQ ID NO: 19473 - DNA, 76 bp, Artificial Sequence; identical to SEQ ID NO: 3485
  Description of Artificial Sequence: Synthetic hazel nut; 5' sequence + inner sequence + 3' sequence

SEQ ID NO: 19474 - DNA, 76 bp, Artificial Sequence; identical to SEQ ID NO: 3399
  Description of Artificial Sequence: Synthetic hazel nut; 5' sequence + inner sequence + 3' sequence

SEQ ID NO: 19475 - DNA, 76 bp, Artificial Sequence; identical to SEQ ID NO: 3691
  Description of Artificial Sequence: Synthetic hazel nut; 5' sequence + inner sequence + 3' sequence

SEQ ID NO: 19476 - DNA, 76 bp, Artificial Sequence
  Description of Artificial Sequence: Synthetic hazel nut; 5' sequence + inner sequence + 3' sequence
tagggaagagaaggacatatgatggtatgcgatgaacgaggcatgatgcgtcattgactagtacatgaccacttga

SEQ ID NO: 19477 - DNA, 76 bp, Artificial Sequence; identical to SEQ ID NO: 3603
  Description of Artificial Sequence: Synthetic hazel nut; 5' sequence + inner sequence + 3' sequence

SEQ ID NO: 19478 - DNA, 76 bp, Artificial Sequence; identical to SEQ ID NO: 3490
  Description of Artificial Sequence: Synthetic hazel nut; 5' sequence + inner sequence + 3' sequence

SEQ ID NO: 19479 - DNA, 76 bp, Artificial Sequence
  Description of Artificial Sequence: Synthetic hazel nut; 5' sequence + inner sequence + 3' sequence
tagggaagagaaggacatatgatggccacgatgaccctccctacgtacgcacgttgactagtacatgaccacttga

SEQ ID NO: 19480 - DNA, 76 bp, Artificial Sequence
  Description of Artificial Sequence: Synthetic hazel nut; 5' sequence + inner sequence + 3' sequence
tagggaagagaaggacatatgatgtgcgaaacggaccatacgtacagtacgcgttgactagtacatgaccacttga

SEQ ID NO: 19481 - DNA, 76 bp, Artificial Sequence; identical to SEQ ID NO: 7336
  Description of Artificial Sequence: Synthetic hazel nut; 5' sequence + inner sequence + 3' sequence

SEQ ID NO: 19482 - DNA, 76 bp, Artificial Sequence
  Description of Artificial Sequence: Synthetic hazel nut; 5' sequence + inner sequence + 3' sequence
tagggaagagaaggacatatgatccgcacgatgccgatggaccatgcgacacgttgactagtacatgaccacttga

SEQ ID NO: 19483 - DNA, 76 bp, Artificial Sequence; identical to SEQ ID NO: 3973
  Description of Artificial Sequence: Synthetic hazel nut; 5' sequence + inner sequence + 3' sequence

SEQ ID NO: 19484 - DNA, 76 bp, Artificial Sequence; identical to SEQ ID NO: 7913
  Description of Artificial Sequence: Synthetic hazel nut; 5' sequence + inner sequence + 3' sequence

SEQ ID NO: 19485 - DNA, 76 bp, Artificial Sequence; identical to SEQ ID NO: 3205
  Description of Artificial Sequence: Synthetic hazel nut; 5' sequence + inner sequence + 3' sequence

SEQ ID NO: 19486 - DNA, 76 bp, Artificial Sequence; identical to SEQ ID NO: 3835
  Description of Artificial Sequence: Synthetic hazel nut; 5' sequence + inner sequence + 3' sequence

SEQ ID NO: 19487 - DNA, 76 bp, Artificial Sequence; identical to SEQ ID NO: 3298
  Description of Artificial Sequence: Synthetic hazel nut; 5' sequence + inner sequence + 3' sequence

SEQ ID NO: 19488 - DNA, 76 bp, Artificial Sequence
  Description of Artificial Sequence: Synthetic hazel nut; 5' sequence + inner sequence + 3' sequence
tagggaagagaaggacatatgatgcaacagcatgccgatacgtaccgcgtacattgactagtacatgaccacttga

SEQ ID NO: 19489 - DNA, 76 bp, Artificial Sequence; identical to SEQ ID NO: 3192
  Description of Artificial Sequence: Synthetic hazel nut; 5' sequence + inner sequence + 3' sequence

SEQ ID NO: 19490 - DNA, 76 bp, Artificial Sequence; identical to SEQ ID NO: 7297
  Description of Artificial Sequence: Synthetic hazel nut; 5' sequence + inner sequence + 3' sequence

SEQ ID NO: 19491 - DNA, 76 bp, Artificial Sequence; identical to SEQ ID NO: 3155
  Description of Artificial Sequence: Synthetic hazel nut; 5' sequence + inner sequence + 3' sequence

SEQ ID NO: 19492 - DNA, 76 bp, Artificial Sequence; identical to SEQ ID NO: 3553
  Description of Artificial Sequence: Synthetic hazel nut; 5' sequence + inner sequence + 3' sequence

SEQ ID NO: 19493 - DNA, 76 bp, Artificial Sequence; identical to SEQ ID NO: 3267
  Description of Artificial Sequence: Synthetic hazel nut; 5' sequence + inner sequence + 3' sequence

SEQ ID NO: 19494 - DNA, 76 bp, Artificial Sequence; identical to SEQ ID NO: 3568
  Description of Artificial Sequence: Synthetic hazel nut; 5' sequence + inner sequence + 3' sequence

SEQ ID NO: 19495 - DNA, 76 bp, Artificial Sequence; identical to SEQ ID NO: 4001
  Description of Artificial Sequence: Synthetic hazel nut; 5' sequence + inner sequence + 3' sequence

SEQ ID NO: 19496 - DNA, 76 bp, Artificial Sequence; identical to SEQ ID NO: 7994
  Description of Artificial Sequence: Synthetic hazel nut; 5' sequence + inner sequence + 3' sequence

SEQ ID NO: 19497 - DNA, 76 bp, Artificial Sequence; identical to SEQ ID NO: 3175
  Description of Artificial Sequence: Synthetic hazel nut; 5' sequence + inner sequence + 3' sequence

SEQ ID NO: 19498 - DNA, 76 bp, Artificial Sequence; identical to SEQ ID NO: 7774
  Description of Artificial Sequence: Synthetic hazel nut; 5' sequence + inner sequence + 3' sequence

SEQ ID NO: 19499 - DNA, 76 bp, Artificial Sequence; identical to SEQ ID NO: 3357
  Description of Artificial Sequence: Synthetic hazel nut; 5' sequence + inner sequence + 3' sequence

SEQ ID NO: 19500 - DNA, 77 bp, Artificial Sequence; identical to SEQ ID NO: 3250
  Description of Artificial Sequence: Synthetic hazel nut; 5' sequence + inner sequence + 3' sequence

SEQ ID NO: 19501 - DNA, 76 bp, Artificial Sequence
  Description of Artificial Sequence: Synthetic hazel nut; 5' sequence + inner sequence + 3' sequence
tagggaagagaaggacatatgatcgcaacgagcgtacgacgatggcacaccgtttgactagtacatgaccacttga

SEQ ID NO: 19502 - DNA, 76 bp, Artificial Sequence; identical to SEQ ID NO: 3481
  Description of Artificial Sequence: Synthetic hazel nut; 5' sequence + inner sequence + 3' sequence

SEQ ID NO: 19503 - DNA, 76 bp, Artificial Sequence
  Description of Artificial Sequence: Synthetic hazel nut; 5' sequence + inner sequence + 3' sequence
tagggaagagaaggacatatgatcgtgacggtgacggcacatgcgacgcgacattgactagtacatgaccacttga

SEQ ID NO: 19504 - DNA, 76 bp, Artificial Sequence
  Description of Artificial Sequence: Synthetic hazel nut; 5' sequence + inner sequence + 3' sequence
tagggaagagaaggacatatgatggtgacacgcattacgccttcgacgtcacgttgactagtacatgaccacttga

SEQ ID NO: 19505 - DNA, 76 bp, Artificial Sequence; identical to SEQ ID NO: 3563
  Description of Artificial Sequence: Synthetic hazel nut; 5' sequence + inner sequence + 3' sequence

SEQ ID NO: 19506 - DNA, 76 bp, Artificial Sequence; identical to SEQ ID NO: 3379
  Description of Artificial Sequence: Synthetic hazel nut; 5' sequence + inner sequence + 3' sequence

SEQ ID NO: 19507 - DNA, 76 bp, Artificial Sequence; identical to SEQ ID NO: 7573
  Description of Artificial Sequence: Synthetic hazel nut; 5' sequence + inner sequence + 3' sequence

SEQ ID NO: 19508 - DNA, 76 bp, Artificial Sequence; identical to SEQ ID NO: 3299
  Description of Artificial Sequence: Synthetic hazel nut; 5' sequence + inner sequence + 3' sequence

SEQ ID NO: 19509 - DNA, 76 bp, Artificial Sequence; identical to SEQ ID NO: 3767
  Description of Artificial Sequence: Synthetic hazel nut; 5' sequence + inner sequence + 3' sequence

SEQ ID NO: 19510 - DNA, 76 bp, Artificial Sequence; identical to SEQ ID NO: 3085
  Description of Artificial Sequence: Synthetic hazel nut; 5' sequence + inner sequence + 3' sequence

SEQ ID NO: 19511 - DNA, 76 bp, Artificial Sequence; identical to SEQ ID NO: 3262
  Description of Artificial Sequence: Synthetic hazel nut; 5' sequence + inner sequence + 3' sequence

SEQ ID NO: 19512 - DNA, 76 bp, Artificial Sequence; identical to SEQ ID NO: 3862
  Description of Artificial Sequence: Synthetic hazel nut; 5' sequence + inner sequence + 3' sequence

SEQ ID NO: 19513 - DNA, 76 bp, Artificial Sequence
  Description of Artificial Sequence: Synthetic hazel nut; 5' sequence + inner sequence + 3' sequence
tagggaagagaaggacatatgattgacgcgaatggacgcacactgcctacgcattgactagtacatgaccacttga

SEQ ID NO: 19514 - DNA, 76 bp, Artificial Sequence; identical to SEQ ID NO: 3754
  Description of Artificial Sequence: Synthetic hazel nut; 5' sequence + inner sequence + 3' sequence

SEQ ID NO: 19515 - DNA, 76 bp, Artificial Sequence; identical to SEQ ID NO: 3681
  Description of Artificial Sequence: Synthetic hazel nut; 5' sequence + inner sequence + 3' sequence

SEQ ID NO: 19516 - DNA, 72 bp, Artificial Sequence; identical to SEQ ID NO: 3516
  Description of Artificial Sequence: Synthetic hazel nut; 5' sequence + inner sequence + 3' sequence

SEQ ID NO: 19517 - DNA, 76 bp, Artificial Sequence; identical to SEQ ID NO: 3308
  Description of Artificial Sequence: Synthetic hazel nut; 5' sequence + inner sequence + 3' sequence

SEQ ID NO: 19518 - DNA, 76 bp, Artificial Sequence; identical to SEQ ID NO: 3306
  Description of Artificial Sequence: Synthetic hazel nut; 5' sequence + inner sequence + 3' sequence

SEQ ID NO: 19519 - DNA, 76 bp, Artificial Sequence; identical to SEQ ID NO: 3381
  Description of Artificial Sequence: Synthetic hazel nut; 5' sequence + inner sequence + 3' sequence

SEQ ID NO: 19520 - DNA, 76 bp, Artificial Sequence; identical to SEQ ID NO: 3419
  Description of Artificial Sequence: Synthetic hazel nut; 5' sequence + inner sequence + 3' sequence

SEQ ID NO: 19521 - DNA, 76 bp, Artificial Sequence; identical to SEQ ID NO: 3507
  Description of Artificial Sequence: Synthetic hazel nut; 5' sequence + inner sequence + 3' sequence

SEQ ID NO: 19522 - DNA, 76 bp, Artificial Sequence; identical to SEQ ID NO: 3130
  Description of Artificial Sequence: Synthetic hazel nut; 5' sequence + inner sequence + 3' sequence

SEQ ID NO: 19523 - DNA, 76 bp, Artificial Sequence; identical to SEQ ID NO: 3746
  Description of Artificial Sequence: Synthetic hazel nut; 5' sequence + inner sequence + 3' sequence

SEQ ID NO: 19524 - DNA, 76 bp, Artificial Sequence
  Description of Artificial Sequence: Synthetic hazel nut; 5' sequence + inner sequence + 3' sequence
tagggaagagaaggacatatgatcgacacacagtgacgacagcatccgtcgtgttgactagtacatgaccacttga

SEQ ID NO: 19525 - DNA, 76 bp, Artificial Sequence; identical to SEQ ID NO: 11546
  Description of Artificial Sequence: Synthetic hazel nut; 5' sequence + inner sequence + 3' sequence

SEQ ID NO: 19526 - DNA, 76 bp, Artificial Sequence; identical to SEQ ID NO: 3699
  Description of Artificial Sequence: Synthetic hazel nut; 5' sequence + inner sequence + 3' sequence

SEQ ID NO: 19527 - DNA, 76 bp, Artificial Sequence; identical to SEQ ID NO: 3312
  Description of Artificial Sequence: Synthetic hazel nut; 5' sequence + inner sequence + 3' sequence

SEQ ID NO: 19528 - DNA, 76 bp, Artificial Sequence
  Description of Artificial Sequence: Synthetic hazel nut; 5' sequence + inner sequence + 3' sequence
tagggaagagaaggacatatgatgtgctgcatgccaccttgcctaacgtgtcattgactagtacatgaccacttga

SEQ ID NO: 19529 - DNA, 76 bp, Artificial Sequence; identical to SEQ ID NO: 3236
  Description of Artificial Sequence: Synthetic hazel nut; 5' sequence + inner sequence + 3' sequence

SEQ ID NO: 19530 - DNA, 76 bp, Artificial Sequence; identical to SEQ ID NO: 3162
  Description of Artificial Sequence: Synthetic hazel nut; 5' sequence + inner sequence + 3' sequence

SEQ ID NO: 19531 - DNA, 76 bp, Artificial Sequence
  Description of Artificial Sequence: Synthetic hazel nut; 5' sequence + inner sequence + 3' sequence
tagggaagagaaggacatatgatggcatgcgatgaccgaggcatgatgcgtcattgactagtacatgaccacttga

SEQ ID NO: 19532 - DNA, 76 bp, Artificial Sequence; identical to SEQ ID NO: 3191
  Description of Artificial Sequence: Synthetic hazel nut; 5' sequence + inner sequence + 3' sequence

SEQ ID NO: 19533 - DNA, 76 bp, Artificial Sequence; identical to SEQ ID NO: 3243
  Description of Artificial Sequence: Synthetic hazel nut; 5' sequence + inner sequence + 3' sequence

SEQ ID NO: 19534 - DNA, 76 bp, Artificial Sequence; identical to SEQ ID NO: 3826
  Description of Artificial Sequence: Synthetic hazel nut; 5' sequence + inner sequence + 3' sequence

SEQ ID NO: 19535 - DNA, 76 bp, Artificial Sequence; identical to SEQ ID NO: 3497
  Description of Artificial Sequence: Synthetic hazel nut; 5' sequence + inner sequence + 3' sequence

SEQ ID NO: 19536 - DNA, 76 bp, Artificial Sequence; identical to SEQ ID NO: 3586
  Description of Artificial Sequence: Synthetic hazel nut; 5' sequence + inner sequence + 3' sequence

SEQ ID NO: 19537 - DNA, 76 bp, Artificial Sequence; identical to SEQ ID NO: 3752
  Description of Artificial Sequence: Synthetic hazel nut; 5' sequence + inner sequence + 3' sequence

SEQ ID NO: 19538 - DNA, 77 bp, Artificial Sequence; identical to SEQ ID NO: 3845
  Description of Artificial Sequence: Synthetic hazel nut; 5' sequence + inner sequence + 3' sequence

SEQ ID NO: 19539 - DNA, 76 bp, Artificial Sequence; identical to SEQ ID NO: 3952
  Description of Artificial Sequence: Synthetic hazel nut; 5' sequence + inner sequence + 3' sequence

SEQ ID NO: 19540 - DNA, 75 bp, Artificial Sequence
  Description of Artificial Sequence: Synthetic hazel nut; 5' sequence + inner sequence + 3' sequence
tagggaagagaaggacatatgatcgcaacgacactcacgggcacgacgcgcattgactagtacatgaccacttga

SEQ ID NO: 19541 - DNA, 76 bp, Artificial Sequence; identical to SEQ ID NO: 3466
  Description of Artificial Sequence: Synthetic hazel nut; 5' sequence + inner sequence + 3' sequence

SEQ ID NO: 19542 - DNA, 76 bp, Artificial Sequence; identical to SEQ ID NO: 3394
  Description of Artificial Sequence: Synthetic hazel nut; 5' sequence + inner sequence + 3' sequence

SEQ ID NO: 19543 - DNA, 76 bp, Artificial Sequence; identical to SEQ ID NO: 3336
  Description of Artificial Sequence: Synthetic hazel nut; 5' sequence + inner sequence + 3' sequence

SEQ ID NO: 19544 - DNA, 76 bp, Artificial Sequence
  Description of Artificial Sequence: Synthetic hazel nut; 5' sequence + inner sequence + 3' sequence
tagggaagagaaggacatatgatcgaccatgcacacgtggtgatgacggcatgttgactagtacatgaccacttga

SEQ ID NO: 19545 - DNA, 76 bp, Artificial Sequence; identical to SEQ ID NO: 3456
  Description of Artificial Sequence: Synthetic hazel nut; 5' sequence + inner sequence + 3' sequence

SEQ ID NO: 19546 - DNA, 76 bp, Artificial Sequence; identical to SEQ ID NO: 3524
  Description of Artificial Sequence: Synthetic hazel nut; 5' sequence + inner sequence + 3' sequence

SEQ ID NO: 19547 - DNA, 76 bp, Artificial Sequence; identical to SEQ ID NO: 3447
  Description of Artificial Sequence: Synthetic hazel nut; 5' sequence + inner sequence + 3' sequence

SEQ ID NO: 19548 - DNA, 76 bp, Artificial Sequence; identical to SEQ ID NO: 3859
  Description of Artificial Sequence: Synthetic hazel nut; 5' sequence + inner sequence + 3' sequence

SEQ ID NO: 19549 - DNA, 76 bp, Artificial Sequence; identical to SEQ ID NO: 3628
  Description of Artificial Sequence: Synthetic hazel nut; 5' sequence + inner sequence + 3' sequence

SEQ ID NO: 19550 - DNA, 76 bp, Artificial Sequence; identical to SEQ ID NO: 3959
  Description of Artificial Sequence: Synthetic hazel nut; 5' sequence + inner sequence + 3' sequence

SEQ ID NO: 19551 - DNA, 76 bp, Artificial Sequence; identical to SEQ ID NO: 8000
  Description of Artificial Sequence: Synthetic hazel nut; 5' sequence + inner sequence + 3' sequence

SEQ ID NO: 19552 - DNA, 76 bp, Artificial Sequence; identical to SEQ ID NO: 3788
  Description of Artificial Sequence: Synthetic hazel nut; 5' sequence + inner sequence + 3' sequence

SEQ ID NO: 19553 - DNA, 76 bp, Artificial Sequence; identical to SEQ ID NO: 3393
  Description of Artificial Sequence: Synthetic hazel nut; 5' sequence + inner sequence + 3' sequence

SEQ ID NO: 19554 - DNA, 76 bp, Artificial Sequence
  Description of Artificial Sequence: Synthetic hazel nut; 5' sequence + inner sequence + 3' sequence
tagggaagagaaggacatatgatccgatgcggaccgacacacctcaccttgcgttgactagtacatgaccacttga

SEQ ID NO: 19555 - DNA, 76 bp, Artificial Sequence
  Description of Artificial Sequence: Synthetic hazel nut; 5' sequence + inner sequence + 3' sequence
tagggaagagaaggacatatgatgccatgcgatgaacgaggcatgatgcgtcattgactagtacatgaccacttga

SEQ ID NO: 19556 - DNA, 76 bp, Artificial Sequence; identical to SEQ ID NO: 7792
  Description of Artificial Sequence: Synthetic hazel nut; 5' sequence + inner sequence + 3' sequence

SEQ ID NO: 19557 - DNA, 74 bp, Artificial Sequence; identical to SEQ ID NO: 7786
  Description of Artificial Sequence: Synthetic hazel nut; 5' sequence + inner sequence + 3' sequence

SEQ ID NO: 19558 - DNA, 76 bp, Artificial Sequence; identical to SEQ ID NO: 3840
  Description of Artificial Sequence: Synthetic hazel nut; 5' sequence + inner sequence + 3' sequence

SEQ ID NO: 19559 - DNA, 76 bp, Artificial Sequence; identical to SEQ ID NO: 3860
  Description of Artificial Sequence: Synthetic hazel nut; 5' sequence + inner sequence + 3' sequence

SEQ ID NO: 19560 - DNA, 76 bp, Artificial Sequence; identical to SEQ ID NO: 3825
  Description of Artificial Sequence: Synthetic hazel nut; 5' sequence + inner sequence + 3' sequence

SEQ ID NO: 19561 - DNA, 76 bp, Artificial Sequence
  Description of Artificial Sequence: Synthetic hazel nut; 5' sequence + inner sequence + 3' sequence
tagggaagagaaggacatatgatggcatgcgatgaacgaggcatgacgcgtcattgactagtacatgaccacttga

SEQ ID NO: 19562 - DNA, 76 bp, Artificial Sequence; identical to SEQ ID NO: 3478
  Description of Artificial Sequence: Synthetic hazel nut; 5' sequence + inner sequence + 3' sequence

SEQ ID NO: 19563 - DNA, 76 bp, Artificial Sequence; identical to SEQ ID NO: 7229
  Description of Artificial Sequence: Synthetic hazel nut; 5' sequence + inner sequence + 3' sequence

SEQ ID NO: 19564 - DNA, 76 bp, Artificial Sequence; identical to SEQ ID NO: 7915
  Description of Artificial Sequence: Synthetic hazel nut; 5' sequence + inner sequence + 3' sequence

SEQ ID NO: 19565 - DNA, 76 bp, Artificial Sequence; identical to SEQ ID NO: 3373
  Description of Artificial Sequence: Synthetic hazel nut; 5' sequence + inner sequence + 3' sequence

SEQ ID NO: 19566 - DNA, 76 bp, Artificial Sequence; identical to SEQ ID NO: 3189
  Description of Artificial Sequence: Synthetic hazel nut; 5' sequence + inner sequence + 3' sequence

SEQ ID NO: 19567 - DNA, 76 bp, Artificial Sequence; identical to SEQ ID NO: 3545
  Description of Artificial Sequence: Synthetic hazel nut; 5' sequence + inner sequence + 3' sequence

SEQ ID NO: 19568 - DNA, 76 bp, Artificial Sequence; identical to SEQ ID NO: 3295
  Description of Artificial Sequence: Synthetic hazel nut; 5' sequence + inner sequence + 3' sequence

SEQ ID NO: 19569 - DNA, 76 bp, Artificial Sequence; identical to SEQ ID NO: 3460
  Description of Artificial Sequence: Synthetic hazel nut; 5' sequence + inner sequence + 3' sequence

SEQ ID NO: 19570 - DNA, 76 bp, Artificial Sequence; identical to SEQ ID NO: 3696
  Description of Artificial Sequence: Synthetic hazel nut; 5' sequence + inner sequence + 3' sequence

SEQ ID NO: 19571 - DNA, 76 bp, Artificial Sequence; identical to SEQ ID NO: 3141
  Description of Artificial Sequence: Synthetic hazel nut; 5' sequence + inner sequence + 3' sequence

SEQ ID NO: 19572 - DNA, 76 bp, Artificial Sequence; identical to SEQ ID NO: 3529
  Description of Artificial Sequence: Synthetic hazel nut; 5' sequence + inner sequence + 3' sequence

SEQ ID NO: 19573 - DNA, 76 bp, Artificial Sequence
  Description of Artificial Sequence: Synthetic hazel nut; 5' sequence + inner sequence + 3' sequence
tagggaagagaaggacatatgatgcgtgtcagcaatacgtcctcatctgcgcgttgactagtacatgaccacttga

SEQ ID NO: 19574 - DNA, 76 bp, Artificial Sequence; identical to SEQ ID NO: 7995
  Description of Artificial Sequence: Synthetic hazel nut; 5' sequence + inner sequence + 3' sequence

SEQ ID NO: 19575 - DNA, 76 bp, Artificial Sequence; identical to SEQ ID NO: 3372
  Description of Artificial Sequence: Synthetic hazel nut; 5' sequence + inner sequence + 3' sequence

SEQ ID NO: 19576 - DNA, 76 bp, Artificial Sequence; identical to SEQ ID NO: 3887
  Description of Artificial Sequence: Synthetic hazel nut; 5' sequence + inner sequence + 3' sequence

SEQ ID NO: 19577 - DNA, 76 bp, Artificial Sequence; identical to SEQ ID NO: 3517
  Description of Artificial Sequence: Synthetic hazel nut; 5' sequence + inner sequence + 3' sequence

SEQ ID NO: 19578 - DNA, 77 bp, Artificial Sequence; identical to SEQ ID NO: 3150
  Description of Artificial Sequence: Synthetic hazel nut; 5' sequence + inner sequence + 3' sequence

SEQ ID NO: 19579 - DNA, 76 bp, Artificial Sequence; identical to SEQ ID NO: 3837
  Description of Artificial Sequence: Synthetic hazel nut; 5' sequence + inner sequence + 3' sequence

SEQ ID NO: 19580 - DNA, 76 bp, Artificial Sequence; identical to SEQ ID NO: 3113
  Description of Artificial Sequence: Synthetic hazel nut; 5' sequence + inner sequence + 3' sequence

SEQ ID NO: 19581 - DNA, 76 bp, Artificial Sequence; identical to SEQ ID NO: 3638
  Description of Artificial Sequence: Synthetic hazel nut; 5' sequence + inner sequence + 3' sequence

SEQ ID NO: 19582 - DNA, 76 bp, Artificial Sequence; identical to SEQ ID NO: 3388
  Description of Artificial Sequence: Synthetic hazel nut; 5' sequence + inner sequence + 3' sequence

SEQ ID NO: 19583 - DNA, 76 bp, Artificial Sequence
  Description of Artificial Sequence: Synthetic hazel nut; 5' sequence + inner sequence + 3' sequence
tagggaagagaaggacatatgatcgcatcgtacgtactcctcgtcactgcgcgttgactagtacatgaccacttga

SEQ ID NO: 19584 - DNA, 76 bp, Artificial Sequence; identical to SEQ ID NO: 3227
  Description of Artificial Sequence: Synthetic hazel nut; 5' sequence + inner sequence + 3' sequence

SEQ ID NO: 19585 - DNA, 76 bp, Artificial Sequence
  Description of Artificial Sequence: Synthetic hazel nut; 5' sequence + inner sequence + 3' sequence
tagggaagagaaggacatatgatcgtaccgcaagtgacgtgtcagtgccgtgattgactagtacatgaccacttga

SEQ ID NO: 19586 - DNA, 76 bp, Artificial Sequence; identical to SEQ ID NO: 7931
  Description of Artificial Sequence: Synthetic hazel nut; 5' sequence + inner sequence + 3' sequence

SEQ ID NO: 19587 - DNA, 76 bp, Artificial Sequence; identical to SEQ ID NO: 3487
  Description of Artificial Sequence: Synthetic hazel nut; 5' sequence + inner sequence + 3' sequence

SEQ ID NO: 19588 - DNA, 76 bp, Artificial Sequence; identical to SEQ ID NO: 7702
  Description of Artificial Sequence: Synthetic hazel nut; 5' sequence + inner sequence + 3' sequence

SEQ ID NO: 19589 - DNA, 76 bp, Artificial Sequence; identical to SEQ ID NO: 7807
  Description of Artificial Sequence: Synthetic hazel nut; 5' sequence + inner sequence + 3' sequence

SEQ ID NO: 19590 - DNA, 76 bp, Artificial Sequence; identical to SEQ ID NO: 7652
  Description of Artificial Sequence: Synthetic hazel nut; 5' sequence + inner sequence + 3' sequence

SEQ ID NO: 19591 - DNA, 76 bp, Artificial Sequence
  Description of Artificial Sequence: Synthetic hazel nut; 5' sequence + inner sequence + 3' sequence
tagggaagagaaggacatatgatggcatgcgatgaacgagacatgatgcgtcattgactagtacatgaccacttga

SEQ ID NO: 19592 - DNA, 76 bp, Artificial Sequence
  Description of Artificial Sequence: Synthetic hazel nut; 5' sequence + inner sequence + 3' sequence
tagggaagagaaggacatatgatggacgacgcgaccaagacagcatgcgcacattgactagtacatgaccacttga

SEQ ID NO: 19593 - DNA, 76 bp, Artificial Sequence; identical to SEQ ID NO: 11816
  Description of Artificial Sequence: Synthetic hazel nut; 5' sequence + inner sequence + 3' sequence

SEQ ID NO: 19594 - DNA, 76 bp, Artificial Sequence; identical to SEQ ID NO: 3910
  Description of Artificial Sequence: Synthetic hazel nut; 5' sequence + inner sequence + 3' sequence

SEQ ID NO: 19595 - DNA, 76 bp, Artificial Sequence
  Description of Artificial Sequence: Synthetic hazel nut; 5' sequence + inner sequence + 3' sequence
tagggaagagaaggacatatgatggcatgcgatgaacgaggcctgatgcgtcattgactagtacatgaccacttga

SEQ ID NO: 19596 - DNA, 76 bp, Artificial Sequence; identical to SEQ ID NO: 3405
  Description of Artificial Sequence: Synthetic hazel nut; 5' sequence + inner sequence + 3' sequence

SEQ ID NO: 19597 - DNA, 76 bp, Artificial Sequence; identical to SEQ ID NO: 15997
  Description of Artificial Sequence: Synthetic hazel nut; 5' sequence + inner sequence + 3' sequence

SEQ ID NO: 19598 - DNA, 76 bp, Artificial Sequence; identical to SEQ ID NO: 3665
  Description of Artificial Sequence: Synthetic hazel nut; 5' sequence + inner sequence + 3' sequence

SEQ ID NO: 19599 - DNA, 76 bp, Artificial Sequence
  Description of Artificial Sequence: Synthetic hazel nut; 5' sequence + inner sequence + 3' sequence
tagggaagagaaggacatatgatgcacgcagtgacaccgttgtggacggcgcattgactagtacatgaccacttga

SEQ ID NO: 19600 - DNA, 76 bp, Artificial Sequence; identical to SEQ ID NO: 3540
  Description of Artificial Sequence: Synthetic hazel nut; 5' sequence + inner sequence + 3' sequence

SEQ ID NO: 19601 - DNA, 76 bp, Artificial Sequence; identical to SEQ ID NO: 3593
  Description of Artificial Sequence: Synthetic hazel nut; 5' sequence + inner sequence + 3' sequence

SEQ ID NO: 19602 - DNA, 76 bp, Artificial Sequence; identical to SEQ ID NO: 3444
  Description of Artificial Sequence: Synthetic hazel nut; 5' sequence + inner sequence + 3' sequence

SEQ ID NO: 19603 - DNA, 76 bp, Artificial Sequence
  Description of Artificial Sequence: Synthetic hazel nut; 5' sequence + inner sequence + 3' sequence
tagggaagagaaggacatatgatcatgcgcgatgatcgcacgcgtacgtcacgttgactagtacatgaccacttga

SEQ ID NO: 19604 - DNA, 76 bp, Artificial Sequence; identical to SEQ ID NO: 3600
  Description of Artificial Sequence: Synthetic hazel nut; 5' sequence + inner sequence + 3' sequence

SEQ ID NO: 19605 - DNA, 76 bp, Artificial Sequence
  Description of Artificial Sequence: Synthetic hazel nut; 5' sequence + inner sequence + 3' sequence
tagggaagagaaggacatatgatggcatgcgatgaaagaggcatgatgcgtcattgactagtacatgaccacttga

SEQ ID NO: 19606 - DNA, 76 bp, Artificial Sequence; identical to SEQ ID NO: 7886
  Description of Artificial Sequence: Synthetic hazel nut; 5' sequence + inner sequence + 3' sequence

SEQ ID NO: 19607 - DNA, 76 bp, Artificial Sequence; identical to SEQ ID NO: 3244
  Description of Artificial Sequence: Synthetic hazel nut; 5' sequence + inner sequence + 3' sequence

SEQ ID NO: 19608 - DNA, 76 bp, Artificial Sequence
  Description of Artificial Sequence: Synthetic hazel nut; 5' sequence + inner sequence + 3' sequence
tagggaagagaaggacatatgatggcatgcgatgaacgaggcatgatgcgtccttgactagtacatgaccacttga

SEQ ID NO: 19609 - DNA, 76 bp, Artificial Sequence
  Description of Artificial Sequence: Synthetic hazel nut; 5' sequence + inner sequence + 3' sequence
tagggaagagaaggacatatgatgcgatccgcgtcctgtcacgttacgcagccttgactagtacatgaccacttga

SEQ ID NO: 19610 - DNA, 76 bp, Artificial Sequence; identical to SEQ ID NO: 7198
  Description of Artificial Sequence: Synthetic hazel nut; 5' sequence + inner sequence + 3' sequence

SEQ ID NO: 19611 - DNA, 76 bp, Artificial Sequence; identical to SEQ ID NO: 3143
  Description of Artificial Sequence: Synthetic hazel nut; 5' sequence + inner sequence + 3' sequence

SEQ ID NO: 19612 - DNA, 76 bp, Artificial Sequence
  Description of Artificial Sequence: Synthetic hazel nut; 5' sequence + inner sequence + 3' sequence
tagggaagagaaggacatatgatcgaaccagcgtcacgtacggcatggcgacattgactagtacatgaccacttga

SEQ ID NO: 19613 - DNA, 76 bp, Artificial Sequence; identical to SEQ ID NO: 3344
  Description of Artificial Sequence: Synthetic hazel nut; 5' sequence + inner sequence + 3' sequence

SEQ ID NO: 19614 - DNA, 76 bp, Artificial Sequence; identical to SEQ ID NO: 3310
  Description of Artificial Sequence: Synthetic hazel nut; 5' sequence + inner sequence + 3' sequence

SEQ ID NO: 19615 - DNA, 76 bp, Artificial Sequence; identical to SEQ ID NO: 3396
  Description of Artificial Sequence: Synthetic hazel nut; 5' sequence + inner sequence + 3' sequence

SEQ ID NO: 19616 - DNA, 76 bp, Artificial Sequence; identical to SEQ ID NO: 3180
  Description of Artificial Sequence: Synthetic hazel nut; 5' sequence + inner sequence + 3' sequence

SEQ ID NO: 19617 - DNA, 76 bp, Artificial Sequence; identical to SEQ ID NO: 3413
  Description of Artificial Sequence: Synthetic hazel nut; 5' sequence + inner sequence + 3' sequence

SEQ ID NO: 19618 - DNA, 75 bp, Artificial Sequence
  Description of Artificial Sequence: Synthetic hazel nut; 5' sequence + inner sequence + 3' sequence
tagggaagagaaggacatatgatgcgtgcatggaagggacgtacgctgcgccttgactagtacatgaccacttga

SEQ ID NO: 19619 - DNA, 76 bp, Artificial Sequence
  Description of Artificial Sequence: Synthetic hazel nut; 5' sequence + inner sequence + 3' sequence
tagggaagagaaggacatatgatccacgcagtgacgaccagccgtacgcaacgttgactagtacatgaccacttga

SEQ ID NO: 19620 - DNA, 76 bp, Artificial Sequence; identical to SEQ ID NO: 7809
  Description of Artificial Sequence: Synthetic hazel nut; 5' sequence + inner sequence + 3' sequence

SEQ ID NO: 19621 - DNA, 76 bp, Artificial Sequence
  Description of Artificial Sequence: Synthetic hazel nut; 5' sequence + inner sequence + 3' sequence
tagggaagagaaggacatatgatgcacacggccgaacgcgtcccacatgcatgttgactagtacatgaccacttga

SEQ ID NO: 19622 - DNA, 76 bp, Artificial Sequence; identical to SEQ ID NO: 3495
  Description of Artificial Sequence: Synthetic hazel nut; 5' sequence + inner sequence + 3' sequence

SEQ ID NO: 19623 - DNA, 76 bp, Artificial Sequence; identical to SEQ ID NO: 3522
  Description of Artificial Sequence: Synthetic hazel nut; 5' sequence + inner sequence + 3' sequence

SEQ ID NO: 19624 - DNA, 76 bp, Artificial Sequence; identical to SEQ ID NO: 3608
  Description of Artificial Sequence: Synthetic hazel nut; 5' sequence + inner sequence + 3' sequence

SEQ ID NO: 19625 - DNA, 76 bp, Artificial Sequence; identical to SEQ ID NO: 3383
  Description of Artificial Sequence: Synthetic hazel nut; 5' sequence + inner sequence + 3' sequence

SEQ ID NO: 19626 - DNA, 76 bp, Artificial Sequence; identical to SEQ ID NO: 3351
  Description of Artificial Sequence: Synthetic hazel nut; 5' sequence + inner sequence + 3' sequence

SEQ ID NO: 19627 - DNA, 76 bp, Artificial Sequence
  Description of Artificial Sequence: Synthetic hazel nut; 5' sequence + inner sequence + 3' sequence
tagggaagagaaggacatatgatggcatgcgatgcacgaggcatgatgcgtcattgactagtacatgaccacttga

SEQ ID NO: 19628 - DNA, 76 bp, Artificial Sequence
  Description of Artificial Sequence: Synthetic hazel nut; 5' sequence + inner sequence + 3' sequence
tagggaagagaaggacatatgatcgcgtgaacggaacgtcctgtcgtcacgtcttgactagtacatgaccacttga

SEQ ID NO: 19629 - DNA, 76 bp, Artificial Sequence
  Description of Artificial Sequence: Synthetic hazel nut; 5' sequence + inner sequence + 3' sequence
tagggaagagaaggacatatgatgcatgccaatcacatgtcgtgtcgcgcacattgactagtacatgaccacttga

SEQ ID NO: 19630 - DNA, 76 bp, Artificial Sequence
  Description of Artificial Sequence: Synthetic hazel nut; 5' sequence + inner sequence + 3' sequence
tagggaagagaaggacatatgatggcctgacacgcatcagcctgaccgtcacattgactagtacatgaccacttga

SEQ ID NO: 19631 - DNA, 76 bp, Artificial Sequence; identical to SEQ ID NO: 11801
  Description of Artificial Sequence: Synthetic hazel nut; 5' sequence + inner sequence + 3' sequence

SEQ ID NO: 19632 - DNA, 76 bp, Artificial Sequence; identical to SEQ ID NO: 3340
  Description of Artificial Sequence: Synthetic hazel nut; 5' sequence + inner sequence + 3' sequence

SEQ ID NO: 19633 - DNA, 76 bp, Artificial Sequence; identical to SEQ ID NO: 3198
  Description of Artificial Sequence: Synthetic hazel nut; 5' sequence + inner sequence + 3' sequence

SEQ ID NO: 19634 - DNA, 76 bp, Artificial Sequence
  Description of Artificial Sequence: Synthetic hazel nut; 5' sequence + inner sequence + 3' sequence
tagggaagagaaggacatatgatgacgcacagcatgagggacgtatcgccacgttgactagtacatgaccacttga

SEQ ID NO: 19635 - DNA, 76 bp, Artificial Sequence; identical to SEQ ID NO: 3264
  Description of Artificial Sequence: Synthetic hazel nut; 5' sequence + inner sequence + 3' sequence

SEQ ID NO: 19636 - DNA, 76 bp, Artificial Sequence; identical to SEQ ID NO: 3590
  Description of Artificial Sequence: Synthetic hazel nut; 5' sequence + inner sequence + 3' sequence

SEQ ID NO: 19637 - DNA, 76 bp, Artificial Sequence
  Description of Artificial Sequence: Synthetic hazel nut; 5' sequence + inner sequence + 3' sequence
tagggaagagaaggacatatgatcgatgcgcaggcaggaggtacgtggccaccttgactagtacatgaccacttga

SEQ ID NO: 19638 - DNA, 76 bp, Artificial Sequence
  Description of Artificial Sequence: Synthetic hazel nut; 5' sequence + inner sequence + 3' sequence
tagggaagagaaggacatatgatcgcatcgagcaacacgtacgcacgacctgcttgactagtacatgaccacttga

SEQ ID NO: 19639 - DNA, 76 bp, Artificial Sequence; identical to SEQ ID NO: 3646
  Description of Artificial Sequence: Synthetic hazel nut; 5' sequence + inner sequence + 3' sequence

SEQ ID NO: 19640 - DNA, 76 bp, Artificial Sequence
  Description of Artificial Sequence: Synthetic hazel nut; 5' sequence + inner sequence + 3' sequence
tagggaagagaaggacatatgatacgtcacgcacagtgtcacgttccgatgcgttgactagtacatgaccacttga

SEQ ID NO: 19641 - DNA, 76 bp, Artificial Sequence; identical to SEQ ID NO: 3354
  Description of Artificial Sequence: Synthetic hazel nut; 5' sequence + inner sequence + 3' sequence

SEQ ID NO: 19642 - DNA, 76 bp, Artificial Sequence; identical to SEQ ID NO: 7539
  Description of Artificial Sequence: Synthetic hazel nut; 5' sequence + inner sequence + 3' sequence

SEQ ID NO: 19643 - DNA, 76 bp, Artificial Sequence
  Description of Artificial Sequence: Synthetic hazel nut; 5' sequence + inner sequence + 3' sequence
tagggaagagaaggacatatgatgcacaaggcgtgacgtaccatgtgtccatcttgactagtacatgaccacttga

SEQ ID NO: 19644 - DNA, 76 bp, Artificial Sequence
  Description of Artificial Sequence: Synthetic hazel nut; 5' sequence + inner sequence + 3' sequence
tagggaagagaaggacatatgatgcacggcgcagctcacgtccttgcgtcaccttgactagtacatgaccacttga

SEQ ID NO: 19645 - DNA, 76 bp, Artificial Sequence; identical to SEQ ID NO: 7642
  Description of Artificial Sequence: Synthetic hazel nut; 5' sequence + inner sequence + 3' sequence

SEQ ID NO: 19646 - DNA, 76 bp, Artificial Sequence; identical to SEQ ID NO: 7687
  Description of Artificial Sequence: Synthetic hazel nut; 5' sequence + inner sequence + 3' sequence

SEQ ID NO: 19647 - DNA, 76 bp, Artificial Sequence; identical to SEQ ID NO: 3994
  Description of Artificial Sequence: Synthetic hazel nut; 5' sequence + inner sequence + 3' sequence

SEQ ID NO: 19648 - DNA, 76 bp, Artificial Sequence; identical to SEQ ID NO: 3482
  Description of Artificial Sequence: Synthetic hazel nut; 5' sequence + inner sequence + 3' sequence

SEQ ID NO: 19649 - DNA, 76 bp, Artificial Sequence
  Description of Artificial Sequence: Synthetic hazel nut; 5' sequence + inner sequence + 3' sequence
tagggaagagaaggacatatgatcgatgcgcatcattggtacgacattgccgtttgactagtacatgaccacttga

SEQ ID NO: 19650 - DNA, 76 bp, Artificial Sequence; identical to SEQ ID NO: 3565
  Description of Artificial Sequence: Synthetic hazel nut; 5' sequence + inner sequence + 3' sequence

SEQ ID NO: 19651 - DNA, 76 bp, Artificial Sequence
  Description of Artificial Sequence: Synthetic hazel nut; 5' sequence + inner sequence + 3' sequence
tagggaagagaaggacatatgatggcatgagatgaacgaggcatgatgcgtcattgactagtacatgaccacttga

SEQ ID NO: 19652 - DNA, 76 bp, Artificial Sequence
  Description of Artificial Sequence: Synthetic hazel nut; 5' sequence + inner sequence + 3' sequence
tagggaagagaaggacatatgatgcacggcagcaacgtgacctgcactgcaccttgactagtacatgaccacttga

SEQ ID NO: 19653 - DNA, 76 bp, Artificial Sequence; identical to SEQ ID NO: 3539
  Description of Artificial Sequence: Synthetic hazel nut; 5' sequence + inner sequence + 3' sequence

SEQ ID NO: 19654 - DNA, 76 bp, Artificial Sequence
  Description of Artificial Sequence: Synthetic hazel nut; 5' sequence + inner sequence + 3' sequence
tagggaagagaaggacatatgatcgcaccgacaacatgttgccttaccgcatgttgactagtacatgaccacttga

SEQ ID NO: 19655 - DNA, 76 bp, Artificial Sequence
  Description of Artificial Sequence: Synthetic hazel nut; 5' sequence + inner sequence + 3' sequence
tagggaagagaaggacatatgatcacgtgacgcatgcacttcgccttgccacattgactagtacatgaccacttga

SEQ ID NO: 19656 - DNA, 76 bp, Artificial Sequence; identical to SEQ ID NO: 3370
  Description of Artificial Sequence: Synthetic hazel nut; 5' sequence + inner sequence + 3' sequence

SEQ ID NO: 19657 - DNA, 76 bp, Artificial Sequence
  Description of Artificial Sequence: Synthetic hazel nut; 5' sequence + inner sequence + 3' sequence
tagggaagagaaggacatatgatcgacgcaccgatacatgaccacgcttcacgttgactagtacatgaccacttga

SEQ ID NO: 19658 - DNA, 76 bp, Artificial Sequence; identical to SEQ ID NO: 7831
  Description of Artificial Sequence: Synthetic hazel nut; 5' sequence + inner sequence + 3' sequence

SEQ ID NO: 19659 - DNA, 76 bp, Artificial Sequence; identical to SEQ ID NO: 3471
  Description of Artificial Sequence: Synthetic hazel nut; 5' sequence + inner sequence + 3' sequence

SEQ ID NO: 19660 - DNA, 76 bp, Artificial Sequence
  Description of Artificial Sequence: Synthetic hazel nut; 5' sequence + inner sequence + 3' sequence
tagggaagagaaggacatatgattgacatcgttacgcacgcactctgcacgtattgactagtacatgaccacttga

SEQ ID NO: 19661 - DNA, 76 bp, Artificial Sequence; identical to SEQ ID NO: 7726
  Description of Artificial Sequence: Synthetic hazel nut; 5' sequence + inner sequence + 3' sequence

SEQ ID NO: 19662 - DNA, 76 bp, Artificial Sequence
  Description of Artificial Sequence: Synthetic hazel nut; 5' sequence + inner sequence + 3' sequence
tagggaagagaaggacatatgatcgtggcagacggcacggaacgcacggtgcattgactagtacatgaccacttga

SEQ ID NO: 19663 - DNA, 76 bp, Artificial Sequence
  Description of Artificial Sequence: Synthetic hazel nut; 5' sequence + inner sequence + 3' sequence
tagggaagagaaggacatatgatggacagcgcgaaggtacgtactgccgtggtttgactagtacatgaccacttga

SEQ ID NO: 19664 - DNA, 76 bp, Artificial Sequence
  Description of Artificial Sequence: Synthetic hazel nut; 5' sequence + inner sequence + 3' sequence
tagggaagagaaggacatatgatcgtaccacgtaacgacagcatgctttcggtttgactagtacatgaccacttga

SEQ ID NO: 19665 - DNA, 75 bp, Artificial Sequence
  Description of Artificial Sequence: Synthetic hazel nut; 5' sequence + inner sequence + 3' sequence
tagggaagagaaggacatatgatcgcaacgacactcacgggcatgacgcgcattgactagtacatgaccacttga

SEQ ID NO: 19666 - DNA, 76 bp, Artificial Sequence; identical to SEQ ID NO: 3512
  Description of Artificial Sequence: Synthetic hazel nut; 5' sequence + inner sequence + 3' sequence

SEQ ID NO: 19667 - DNA, 76 bp, Artificial Sequence; identical to SEQ ID NO: 3556
  Description of Artificial Sequence: Synthetic hazel nut; 5' sequence + inner sequence + 3' sequence

SEQ ID NO: 19668 - DNA, 76 bp, Artificial Sequence
  Description of Artificial Sequence: Synthetic hazel nut; 5' sequence + inner sequence + 3' sequence
tagggaagagaaggacatatgatcgcaccgtgcaacgacagcttggcggcgtgttgactagtacatgaccacttga

SEQ ID NO: 19669 - DNA, 76 bp, Artificial Sequence
  Description of Artificial Sequence: Synthetic hazel nut; 5' sequence + inner sequence + 3' sequence
tagggaagagaaggacatatgatgcgtgaggcacacatgcttgtcgcgtcgcattgactagtacatgaccacttga

SEQ ID NO: 19670 - DNA, 76 bp, Artificial Sequence; identical to SEQ ID NO: 3488
  Description of Artificial Sequence: Synthetic hazel nut; 5' sequence + inner sequence + 3' sequence

SEQ ID NO: 19671 - DNA, 76 bp, Artificial Sequence; identical to SEQ ID NO: 3418
  Description of Artificial Sequence: Synthetic hazel nut; 5' sequence + inner sequence + 3' sequence

SEQ ID NO: 19672 - DNA, 76 bp, Artificial Sequence
  Description of Artificial Sequence: Synthetic hazel nut; 5' sequence + inner sequence + 3' sequence
tagggaagagaaggacatatgatcacgcacagtgtagggaccgttgctgcacgttgactagtacatgaccacttga

SEQ ID NO: 19673 - DNA, 76 bp, Artificial Sequence; identical to SEQ ID NO: 3776
  Description of Artificial Sequence: Synthetic hazel nut; 5' sequence + inner sequence + 3' sequence

SEQ ID NO: 19674 - DNA, 76 bp, Artificial Sequence; identical to SEQ ID NO: 3725
  Description of Artificial Sequence: Synthetic hazel nut; 5' sequence + inner sequence + 3' sequence

SEQ ID NO: 19675 - DNA, 76 bp, Artificial Sequence
  Description of Artificial Sequence: Synthetic hazel nut; 5' sequence + inner sequence + 3' sequence
tagggaagagaaggacatatgatggcatgcgatgaacgaggaatgatgcgtcattgactagtacatgaccacttga

SEQ ID NO: 19676 - DNA, 76 bp, Artificial Sequence
  Description of Artificial Sequence: Synthetic hazel nut; 5' sequence + inner sequence + 3' sequence
tagggaagagaaggacatatgatcacacgtcacatcgtgcacatgcgatcgtattgactagtacatgaccacttga

SEQ ID NO: 19677 - DNA, 76 bp, Artificial Sequence
  Description of Artificial Sequence: Synthetic hazel nut; 5' sequence + inner sequence + 3' sequence
tagggaagagaaggacatatgatcgtgccggcaaggacgcaccatgacgcacattgactagtacatgaccacttga

SEQ ID NO: 19678 - DNA, 76 bp, Artificial Sequence; identical to SEQ ID NO: 3763
  Description of Artificial Sequence: Synthetic hazel nut; 5' sequence + inner sequence + 3' sequence

SEQ ID NO: 19679 - DNA, 76 bp, Artificial Sequence; identical to SEQ ID NO: 3683
  Description of Artificial Sequence: Synthetic hazel nut; 5' sequence + inner sequence + 3' sequence

SEQ ID NO: 19680 - DNA, 76 bp, Artificial Sequence; identical to SEQ ID NO: 7835
  Description of Artificial Sequence: Synthetic hazel nut; 5' sequence + inner sequence + 3' sequence

SEQ ID NO: 19681 - DNA, 76 bp, Artificial Sequence; identical to SEQ ID NO: 3452
  Description of Artificial Sequence: Synthetic hazel nut; 5' sequence + inner sequence + 3' sequence

SEQ ID NO: 19682 - DNA, 76 bp, Artificial Sequence; identical to SEQ ID NO: 3905
  Description of Artificial Sequence: Synthetic hazel nut; 5' sequence + inner sequence + 3' sequence

SEQ ID NO: 19683 - DNA, 76 bp, Artificial Sequence; identical to SEQ ID NO: 3339
  Description of Artificial Sequence: Synthetic hazel nut; 5' sequence + inner sequence + 3' sequence

SEQ ID NO: 19684 - DNA, 76 bp, Artificial Sequence; identical to SEQ ID NO: 15996
  Description of Artificial Sequence: Synthetic hazel nut; 5' sequence + inner sequence + 3' sequence

SEQ ID NO: 19685 - DNA, 76 bp, Artificial Sequence
  Description of Artificial Sequence: Synthetic hazel nut; 5' sequence + inner sequence + 3' sequence
tagggaagagaaggacatatgatgcatgacaatgccatagcgtcacctgcacgttgactagtacatgaccacttga

SEQ ID NO: 19686 - DNA, 76 bp, Artificial Sequence; identical to SEQ ID NO: 3525
  Description of Artificial Sequence: Synthetic hazel nut; 5' sequence + inner sequence + 3' sequence

SEQ ID NO: 19687 - DNA, 76 bp, Artificial Sequence; identical to SEQ ID NO: 3397
  Description of Artificial Sequence: Synthetic hazel nut; 5' sequence + inner sequence + 3' sequence

SEQ ID NO: 19688 - DNA, 76 bp, Artificial Sequence
  Description of Artificial Sequence: Synthetic hazel nut; 5' sequence + inner sequence + 3' sequence
tagggaagagaaggacatatgatggccacagcgtacctcaacgttgacgtgcattgactagtacatgaccacttga

SEQ ID NO: 19689 - DNA, 76 bp, Artificial Sequence; identical to SEQ ID NO: 3717
  Description of Artificial Sequence: Synthetic hazel nut; 5' sequence + inner sequence + 3' sequence

SEQ ID NO: 19690 - DNA, 76 bp, Artificial Sequence
  Description of Artificial Sequence: Synthetic hazel nut; 5' sequence + inner sequence + 3' sequence
tagggaagagaaggacatatgatccgacatcgtaccgatcacgtgcttacgtattgactagtacatgaccacttga

SEQ ID NO: 19691 - DNA, 76 bp, Artificial Sequence; identical to SEQ ID NO: 3650
  Description of Artificial Sequence: Synthetic hazel nut; 5' sequence + inner sequence + 3' sequence

SEQ ID NO: 19692 - DNA, 76 bp, Artificial Sequence
  Description of Artificial Sequence: Synthetic hazel nut; 5' sequence + inner sequence + 3' sequence
tagggaagagaaggacatatgatcgcaccgtcgatacctcatgcacgctgacattgactagtacatgaccacttga

SEQ ID NO: 19693 - DNA, 76 bp, Artificial Sequence; identical to SEQ ID NO: 3743
  Description of Artificial Sequence: Synthetic hazel nut; 5' sequence + inner sequence + 3' sequence

SEQ ID NO: 19694 - DNA, 76 bp, Artificial Sequence; identical to SEQ ID NO: 3980
  Description of Artificial Sequence: Synthetic hazel nut; 5' sequence + inner sequence + 3' sequence

SEQ ID NO: 19695 - DNA, 76 bp, Artificial Sequence
  Description of Artificial Sequence: Synthetic hazel nut; 5' sequence + inner sequence + 3' sequence
tagggaagagaaggacatatgatcgcaccgtgacgagacgtgctagtgtgtcattgactagtacatgaccacttga

SEQ ID NO: 19696 - DNA, 76 bp, Artificial Sequence
  Description of Artificial Sequence: Synthetic hazel nut; 5' sequence + inner sequence + 3' sequence
tagggaagagaaggacatatgatggcatgtgatgaacgaggcatgatgcgtcattgactagtacatgaccacttga

SEQ ID NO: 19697 - DNA, 76 bp, Artificial Sequence; identical to SEQ ID NO: 7376
  Description of Artificial Sequence: Synthetic hazel nut; 5' sequence + inner sequence + 3' sequence

SEQ ID NO: 19698 - DNA, 76 bp, Artificial Sequence
  Description of Artificial Sequence: Synthetic hazel nut; 5' sequence + inner sequence + 3' sequence
tagggaagagaaggacatatgatgcgtgatggcgcaacgtcctgtgcttcgcgttgactagtacatgaccacttga

SEQ ID NO: 19699 - DNA, 76 bp, Artificial Sequence; identical to SEQ ID NO: 3594
  Description of Artificial Sequence: Synthetic hazel nut; 5' sequence + inner sequence + 3' sequence

SEQ ID NO: 19700 - DNA, 76 bp, Artificial Sequence; identical to SEQ ID NO: 3324
  Description of Artificial Sequence: Synthetic hazel nut; 5' sequence + inner sequence + 3' sequence

SEQ ID NO: 19701 - DNA, 76 bp, Artificial Sequence; identical to SEQ ID NO: 3329
  Description of Artificial Sequence: Synthetic hazel nut; 5' sequence + inner sequence + 3' sequence

SEQ ID NO: 19702 - DNA, 76 bp, Artificial Sequence; identical to SEQ ID NO: 3534
  Description of Artificial Sequence: Synthetic hazel nut; 5' sequence + inner sequence + 3' sequence

SEQ ID NO: 19703 - DNA, 76 bp, Artificial Sequence
  Description of Artificial Sequence: Synthetic hazel nut; 5' sequence + inner sequence + 3' sequence
tagggaagagaaggacatatgatcgtcacgcacgtgaacgcgtcattgccgcattgactagtacatgaccacttga

SEQ ID NO: 19704 - DNA, 76 bp, Artificial Sequence; identical to SEQ ID NO: 11960
  Description of Artificial Sequence: Synthetic hazel nut; 5' sequence + inner sequence + 3' sequence

SEQ ID NO: 19705 - DNA, 76 bp, Artificial Sequence
  Description of Artificial Sequence: Synthetic hazel nut; 5' sequence + inner sequence + 3' sequence
tagggaagagaaggacatatgatgcgacgcacatcaccgcactgaccgtgtgtttgactagtacatgaccacttga

SEQ ID NO: 19706 - DNA, 76 bp, Artificial Sequence
  Description of Artificial Sequence: Synthetic hazel nut; 5' sequence + inner sequence + 3' sequence
tagggaagagaaggacatatgatcacacgcagtgcgactgacctgacgtcacgttgactagtacatgaccacttga

SEQ ID NO: 19707 - DNA, 76 bp, Artificial Sequence; identical to SEQ ID NO: 7531
  Description of Artificial Sequence: Synthetic hazel nut; 5' sequence + inner sequence + 3' sequence

SEQ ID NO: 19708 - DNA, 76 bp, Artificial Sequence; identical to SEQ ID NO: 3806
  Description of Artificial Sequence: Synthetic hazel nut; 5' sequence + inner sequence + 3' sequence

SEQ ID NO: 19709 - DNA, 76 bp, Artificial Sequence
  Description of Artificial Sequence: Synthetic hazel nut; 5' sequence + inner sequence + 3' sequence
tagggaagagaaggacatatgatggcatgcgatgaacgaggcatgatgagtcattgactagtacatgaccacttga

SEQ ID NO: 19710 - DNA, 76 bp, Artificial Sequence
  Description of Artificial Sequence: Synthetic hazel nut; 5' sequence + inner sequence + 3' sequence
tagggaagagaaggacatatgatggcacacgggcaggacgtgctactcgcgcattgactagtacatgaccacttga

SEQ ID NO: 19711 - DNA, 75 bp, Artificial Sequence; identical to SEQ ID NO: 3259
  Description of Artificial Sequence: Synthetic hazel nut; 5' sequence + inner sequence + 3' sequence

SEQ ID NO: 19712 - DNA, 76 bp, Artificial Sequence; identical to SEQ ID NO: 11971
  Description of Artificial Sequence: Synthetic hazel nut; 5' sequence + inner sequence + 3' sequence

SEQ ID NO: 19713 - DNA, 76 bp, Artificial Sequence
  Description of Artificial Sequence: Synthetic hazel nut; 5' sequence + inner sequence + 3' sequence
tagggaagagaaggacatatgatgcccagtgcaacgtaggtacgtaccgtgccttgactagtacatgaccacttga

SEQ ID NO: 19714 - DNA, 76 bp, Artificial Sequence; identical to SEQ ID NO: 3668
  Description of Artificial Sequence: Synthetic hazel nut; 5' sequence + inner sequence + 3' sequence

SEQ ID NO: 19715 - DNA, 76 bp, Artificial Sequence
  Description of Artificial Sequence: Synthetic hazel nut; 5' sequence + inner sequence + 3' sequence
tagggaagagaaggacatatgatcgtgaacacgtgccgacgatgcgtaccgtcttgactagtacatgaccacttga

SEQ ID NO: 19716 - DNA, 76 bp, Artificial Sequence; identical to SEQ ID NO: 3305
  Description of Artificial Sequence: Synthetic hazel nut; 5' sequence + inner sequence + 3' sequence

SEQ ID NO: 19717 - DNA, 76 bp, Artificial Sequence; identical to SEQ ID NO: 7610
  Description of Artificial Sequence: Synthetic hazel nut; 5' sequence + inner sequence + 3' sequence

SEQ ID NO: 19718 - DNA, 76 bp, Artificial Sequence
  Description of Artificial Sequence: Synthetic hazel nut; 5' sequence + inner sequence + 3' sequence
tagggaagagaaggacatatgatggcatgcgacgaacgaggcatgatgcgtcattgactagtacatgaccacttga

SEQ ID NO: 19719 - DNA, 76 bp, Artificial Sequence; identical to SEQ ID NO: 3440
  Description of Artificial Sequence: Synthetic hazel nut; 5' sequence + inner sequence + 3' sequence

SEQ ID NO: 19720 - DNA, 76 bp, Artificial Sequence
  Description of Artificial Sequence: Synthetic hazel nut; 5' sequence + inner sequence + 3' sequence
tagggaagagaaggacatatgatggcatgcgatgaatgaggcatgatgcgtcattgactagtacatgaccacttga

SEQ ID NO: 19721 - DNA, 76 bp, Artificial Sequence; identical to SEQ ID NO: 3705
  Description of Artificial Sequence: Synthetic hazel nut; 5' sequence + inner sequence + 3' sequence

SEQ ID NO: 19722 - DNA, 76 bp, Artificial Sequence
  Description of Artificial Sequence: Synthetic hazel nut; 5' sequence + inner sequence + 3' sequence
tagggaagagaaggacatatgatacgcttaggcacatcgtccgctgcttcacgttgactagtacatgaccacttga

SEQ ID NO: 19723 - DNA, 76 bp, Artificial Sequence; identical to SEQ ID NO: 3263
  Description of Artificial Sequence: Synthetic hazel nut; 5' sequence + inner sequence + 3' sequence

SEQ ID NO: 19724 - DNA, 76 bp, Artificial Sequence; identical to SEQ ID NO: 3273
  Description of Artificial Sequence: Synthetic hazel nut; 5' sequence + inner sequence + 3' sequence

SEQ ID NO: 19725 - DNA, 76 bp, Artificial Sequence; identical to SEQ ID NO: 3984
  Description of Artificial Sequence: Synthetic hazel nut; 5' sequence + inner sequence + 3' sequence

SEQ ID NO: 19726 - DNA, 76 bp, Artificial Sequence
  Description of Artificial Sequence: Synthetic hazel nut; 5' sequence + inner sequence + 3' sequence
tagggaagagaaggacatatgatcgtggcgaacgaacatacgcacactgcacgttgactagtacatgaccacttga

SEQ ID NO: 19727 - DNA, 76 bp, Artificial Sequence; identical to SEQ ID NO: 3721
  Description of Artificial Sequence: Synthetic hazel nut; 5' sequence + inner sequence + 3' sequence

SEQ ID NO: 19728 - DNA, 76 bp, Artificial Sequence; identical to SEQ ID NO: 3389
  Description of Artificial Sequence: Synthetic hazel nut; 5' sequence + inner sequence + 3' sequence

SEQ ID NO: 19729 - DNA, 76 bp, Artificial Sequence
  Description of Artificial Sequence: Synthetic hazel nut; 5' sequence + inner sequence + 3' sequence
tagggaagagaaggacatatgatgcgtaaggcaggcaagtacggcacgcatcgttgactagtacatgaccacttga

SEQ ID NO: 19730 - DNA, 76 bp, Artificial Sequence
  Description of Artificial Sequence: Synthetic hazel nut; 5' sequence + inner sequence + 3' sequence
tagggaagagaaggacatatgatggcatgcgatgaacgaggcatgatacgtcattgactagtacatgaccacttga

SEQ ID NO: 19731 - DNA, 76 bp, Artificial Sequence
  Description of Artificial Sequence: Synthetic hazel nut; 5' sequence + inner sequence + 3' sequence
tagggaagagaaggacatatgatggcatgcgatgaacgaggcatgatgcgtgattgactagtacatgaccacttga

SEQ ID NO: 19732 - DNA, 76 bp, Artificial Sequence; identical to SEQ ID NO: 3422
  Description of Artificial Sequence: Synthetic hazel nut; 5' sequence + inner sequence + 3' sequence

SEQ ID NO: 19733 - DNA, 76 bp, Artificial Sequence
  Description of Artificial Sequence: Synthetic hazel nut; 5' sequence + inner sequence + 3' sequence
tagggaagagaaggacatatgatgcgtgaggagtgacgccaccatcatgcacattgactagtacatgaccacttga

SEQ ID NO: 19734 - DNA, 76 bp, Artificial Sequence; identical to SEQ ID NO: 3731
  Description of Artificial Sequence: Synthetic hazel nut; 5' sequence + inner sequence + 3' sequence

SEQ ID NO: 19735 - DNA, 76 bp, Artificial Sequence
  Description of Artificial Sequence: Synthetic hazel nut; 5' sequence + inner sequence + 3' sequence
tagggaagagaaggacatatgatggcctgaccacaccgtatgcatcgcgtccattgactagtacatgaccacttga

SEQ ID NO: 19736 - DNA, 76 bp, Artificial Sequence
  Description of Artificial Sequence: Synthetic hazel nut; 5' sequence + inner sequence + 3' sequence
tagggaagagaaggacatatgatacgcacaacgtcaacatgaggtgcgcaacattgactagtacatgaccacttga

SEQ ID NO: 19737 - DNA, 76 bp, Artificial Sequence; identical to SEQ ID NO: 3087
  Description of Artificial Sequence: Synthetic hazel nut; 5' sequence + inner sequence + 3' sequence

SEQ ID NO: 19738 - DNA, 76 bp, Artificial Sequence; identical to SEQ ID NO: 3779
  Description of Artificial Sequence: Synthetic hazel nut; 5' sequence + inner sequence + 3' sequence

SEQ ID NO: 19739 - DNA, 76 bp, Artificial Sequence
  Description of Artificial Sequence: Synthetic hazel nut; 5' sequence + inner sequence + 3' sequence
tagggaagagaaggacatatgatcgtgacgcagtgcctagctgtgacagtgcattgactagtacatgaccacttga

SEQ ID NO: 19740 - DNA, 76 bp, Artificial Sequence
  Description of Artificial Sequence: Synthetic hazel nut; 5' sequence + inner sequence + 3' sequence
tagggaagagaaggacatatgatcgcaacggagcacgtgacctggcctgcacgttgactagtacatgaccacttga

SEQ ID NO: 19741 - DNA, 76 bp, Artificial Sequence
  Description of Artificial Sequence: Synthetic hazel nut; 5' sequence + inner sequence + 3' sequence
tagggaagagaaggacatatgatgcgacgaagcgacatgtgccttgcgatgccttgactagtacatgaccacttga

SEQ ID NO: 19742 - DNA, 76 bp, Artificial Sequence; identical to SEQ ID NO: 3210
  Description of Artificial Sequence: Synthetic hazel nut; 5' sequence + inner sequence + 3' sequence

SEQ ID NO: 19743 - DNA, 76 bp, Artificial Sequence; identical to SEQ ID NO: 3546
  Description of Artificial Sequence: Synthetic hazel nut; 5' sequence + inner sequence + 3' sequence

SEQ ID NO: 19744 - DNA, 76 bp, Artificial Sequence
  Description of Artificial Sequence: Synthetic hazel nut; 5' sequence + inner sequence + 3' sequence
tagggaagagaaggacatatgatcgtgtgtacgcatcgaccgtctgtgccatgttgactagtacatgaccacttga

SEQ ID NO: 19745 - DNA, 76 bp, Artificial Sequence; identical to SEQ ID NO: 3598
  Description of Artificial Sequence: Synthetic hazel nut; 5' sequence + inner sequence + 3' sequence

SEQ ID NO: 19746 - DNA, 75 bp, Artificial Sequence
  Description of Artificial Sequence: Synthetic hazel nut; 5' sequence + inner sequence + 3' sequence
tagggaagagaaggacatatgatgcatgcgatgaacgaggcatgatgcgtcattgactagtacatgaccacttga

SEQ ID NO: 19747 - DNA, 76 bp, Artificial Sequence; identical to SEQ ID NO: 3589
  Description of Artificial Sequence: Synthetic hazel nut; 5' sequence + inner sequence + 3' sequence

SEQ ID NO: 19748 - DNA, 76 bp, Artificial Sequence
  Description of Artificial Sequence: Synthetic hazel nut; 5' sequence + inner sequence + 3' sequence
tagggaagagaaggacatatgatcgtaccaccgtgtgcatgtgatgcatggcattgactagtacatgaccacttga

SEQ ID NO: 19749 - DNA, 76 bp, Artificial Sequence; identical to SEQ ID NO: 3361
  Description of Artificial Sequence: Synthetic hazel nut; 5' sequence + inner sequence + 3' sequence

SEQ ID NO: 19750 - DNA, 76 bp, Artificial Sequence
  Description of Artificial Sequence: Synthetic hazel nut; 5' sequence + inner sequence + 3' sequence
tagggaagagaaggacatatgatggcatgcgatgaacgaggtatgatgcgtcattgactagtacatgaccacttga

SEQ ID NO: 19751 - DNA, 76 bp, Artificial Sequence; identical to SEQ ID NO: 3486
  Description of Artificial Sequence: Synthetic hazel nut; 5' sequence + inner sequence + 3' sequence

SEQ ID NO: 19752 - DNA, 76 bp, Artificial Sequence
  Description of Artificial Sequence: Synthetic hazel nut; 5' sequence + inner sequence + 3' sequence
tagggaagagaaggacatatgatgcacgtcatgctgaccgaactgcctacgcattgactagtacatgaccacttga

SEQ ID NO: 19753 - DNA, 76 bp, Artificial Sequence
  Description of Artificial Sequence: Synthetic hazel nut; 5' sequence + inner sequence + 3' sequence
tagggaagagaaggacatatgatcacacggaacgcacatggtggtacgacgcgttgactagtacatgaccacttga

SEQ ID NO: 19754 - DNA, 76 bp, Artificial Sequence; identical to SEQ ID NO: 3365
  Description of Artificial Sequence: Synthetic hazel nut; 5' sequence + inner sequence + 3' sequence

SEQ ID NO: 19755 - DNA, 76 bp, Artificial Sequence
  Description of Artificial Sequence: Synthetic hazel nut; 5' sequence + inner sequence + 3' sequence
tagggaagagaaggacatatgatgcgaggaacgtgcacatcgtccgctgcatgttgactagtacatgaccacttga

SEQ ID NO: 19756 - DNA, 76 bp, Artificial Sequence; identical to SEQ ID NO: 3866
  Description of Artificial Sequence: Synthetic hazel nut; 5' sequence + inner sequence + 3' sequence

SEQ ID NO: 19757 - DNA, 76 bp, Artificial Sequence; identical to SEQ ID NO: 3916
  Description of Artificial Sequence: Synthetic hazel nut; 5' sequence + inner sequence + 3' sequence

SEQ ID NO: 19758 - DNA, 76 bp, Artificial Sequence; identical to SEQ ID NO: 7585
  Description of Artificial Sequence: Synthetic hazel nut; 5' sequence + inner sequence + 3' sequence

SEQ ID NO: 19759 - DNA, 76 bp, Artificial Sequence
  Description of Artificial Sequence: Synthetic hazel nut; 5' sequence + inner sequence + 3' sequence
tagggaagagaaggacatatgattgcgcatgcatcgtcggcactgagcttgccttgactagtacatgaccacttga

SEQ ID NO: 19760 - DNA, 76 bp, Artificial Sequence; identical to SEQ ID NO: 3884
  Description of Artificial Sequence: Synthetic hazel nut; 5' sequence + inner sequence + 3' sequence

SEQ ID NO: 19761 - DNA, 76 bp, Artificial Sequence
  Description of Artificial Sequence: Synthetic hazel nut; 5' sequence + inner sequence + 3' sequence
tagggaagagaaggacatatgatccgacacgcatggtaaggtaggcaggcacgttgactagtacatgaccacttga

SEQ ID NO: 19762 - DNA, 76 bp, Artificial Sequence; identical to SEQ ID NO: 3166
  Description of Artificial Sequence: Synthetic hazel nut; 5' sequence + inner sequence + 3' sequence

SEQ ID NO: 19763 - DNA, 76 bp, Artificial Sequence; identical to SEQ ID NO: 7893
  Description of Artificial Sequence: Synthetic hazel nut; 5' sequence + inner sequence + 3' sequence

SEQ ID NO: 19764 - DNA, 76 bp, Artificial Sequence; identical to SEQ ID NO: 7238
  Description of Artificial Sequence: Synthetic hazel nut; 5' sequence + inner sequence + 3' sequence

SEQ ID NO: 19765 - DNA, 76 bp, Artificial Sequence
  Description of Artificial Sequence: Synthetic hazel nut; 5' sequence + inner sequence + 3' sequence
tagggaagagaaggacatatgatcatgtgcgaacggacgtacacgtgtgatcattgactagtacatgaccacttga

SEQ ID NO: 19766 - DNA, 76 bp, Artificial Sequence; identical to SEQ ID NO: 3676
  Description of Artificial Sequence: Synthetic hazel nut; 5' sequence + inner sequence + 3' sequence

SEQ ID NO: 19767 - DNA, 76 bp, Artificial Sequence
  Description of Artificial Sequence: Synthetic hazel nut; 5' sequence + inner sequence + 3' sequence
tagggaagagaaggacatatgatcgaccacactcaggcacgtacggtatgtcattgactagtacatgaccacttga

SEQ ID NO: 19768 - DNA, 76 bp, Artificial Sequence
  Description of Artificial Sequence: Synthetic hazel nut; 5' sequence + inner sequence + 3' sequence
tagggaagagaaggacatatgatcgcaccgtcgatacgtcatgcacgctgagattgactagtacatgaccacttga

SEQ ID NO: 19769 - DNA, 76 bp, Artificial Sequence
  Description of Artificial Sequence: Synthetic hazel nut; 5' sequence + inner sequence + 3' sequence
tagggaagagaaggacatatgattgacgcagcgtaacgttcgagtggtacgtattgactagtacatgaccacttga

SEQ ID NO: 19770 - DNA, 76 bp, Artificial Sequence
  Description of Artificial Sequence: Synthetic hazel nut; 5' sequence + inner sequence + 3' sequence
tagggaagagaaggacatatgatggcatgcgatgaacgaggcatgatgcctcattgactagtacatgaccacttga

SEQ ID NO: 19771 - DNA, 76 bp, Artificial Sequence; identical to SEQ ID NO: 3914
  Description of Artificial Sequence: Synthetic hazel nut; 5' sequence + inner sequence + 3' sequence

SEQ ID NO: 19772 - DNA, 76 bp, Artificial Sequence; identical to SEQ ID NO: 3720
  Description of Artificial Sequence: Synthetic hazel nut; 5' sequence + inner sequence + 3' sequence

SEQ ID NO: 19773 - DNA, 76 bp, Artificial Sequence; identical to SEQ ID NO: 3867
  Description of Artificial Sequence: Synthetic hazel nut; 5' sequence + inner sequence + 3' sequence

SEQ ID NO: 19774 - DNA, 76 bp, Artificial Sequence
  Description of Artificial Sequence: Synthetic hazel nut; 5' sequence + inner sequence + 3' sequence
tagggaagagaaggacatatgatcacgacacgatgtccacgtcccgttcgcgcttgactagtacatgaccacttga

SEQ ID NO: 19775 - DNA, 76 bp, Artificial Sequence; identical to SEQ ID NO: 3989
  Description of Artificial Sequence: Synthetic hazel nut; 5' sequence + inner sequence + 3' sequence

SEQ ID NO: 19776 - DNA, 76 bp, Artificial Sequence
  Description of Artificial Sequence: Synthetic hazel nut; 5' sequence + inner sequence + 3' sequence
tagggaagagaaggacatatgatggcatgcggtgaacgaggcatgatgcgtcattgactagtacatgaccacttga

SEQ ID NO: 19777 - DNA, 76 bp, Artificial Sequence
  Description of Artificial Sequence: Synthetic hazel nut; 5' sequence + inner sequence + 3' sequence
tagggaagagaaggacatatgatcgcatggcaacatgtccgcacgcgtgcacgttgactagtacatgaccacttga

SEQ ID NO: 19778 - DNA, 76 bp, Artificial Sequence
  Description of Artificial Sequence: Synthetic hazel nut; 5' sequence + inner sequence + 3' sequence
tagggaagagaaggacatatgatgccacgtcgatgcccaacgctcactgcgtgttgactagtacatgaccacttga

SEQ ID NO: 19779 - DNA, 76 bp, Artificial Sequence; identical to SEQ ID NO: 3719
  Description of Artificial Sequence: Synthetic hazel nut; 5' sequence + inner sequence + 3' sequence

SEQ ID NO: 19780 - DNA, 76 bp, Artificial Sequence; identical to SEQ ID NO: 3318
  Description of Artificial Sequence: Synthetic hazel nut; 5' sequence + inner sequence + 3' sequence

SEQ ID NO: 19781 - DNA, 76 bp, Artificial Sequence
  Description of Artificial Sequence: Synthetic hazel nut; 5' sequence + inner sequence + 3' sequence
tagggaagagaaggacatatgatggcacgatcgacatgtcacagtgctgcgcattgactagtacatgaccacttga

SEQ ID NO: 19782 - DNA, 76 bp, Artificial Sequence; identical to SEQ ID NO: 3330
  Description of Artificial Sequence: Synthetic hazel nut; 5' sequence + inner sequence + 3' sequence

SEQ ID NO: 19783 - DNA, 76 bp, Artificial Sequence
  Description of Artificial Sequence: Synthetic hazel nut; 5' sequence + inner sequence + 3' sequence
tagggaagagaaggacatatgatggccgacgcggaacggtgcatgaccatgcattgactagtacatgaccacttga

SEQ ID NO: 19784 - DNA, 76 bp, Artificial Sequence; identical to SEQ ID NO: 7875
  Description of Artificial Sequence: Synthetic hazel nut; 5' sequence + inner sequence + 3' sequence

SEQ ID NO: 19785 - DNA, 76 bp, Artificial Sequence
  Description of Artificial Sequence: Synthetic hazel nut; 5' sequence + inner sequence + 3' sequence
tagggaagagaaggacatatgatcgcgtcatgcgtaccgaacgtgtctgcgctttgactagtacatgaccacttga

SEQ ID NO: 19786 - DNA, 76 bp, Artificial Sequence; identical to SEQ ID NO: 3376
  Description of Artificial Sequence: Synthetic hazel nut; 5' sequence + inner sequence + 3' sequence

SEQ ID NO: 19787 - DNA, 76 bp, Artificial Sequence
  Description of Artificial Sequence: Synthetic hazel nut; 5' sequence + inner sequence + 3' sequence
tagggaagagaaggacatatgatggcgtgcgatgaacgaggcatgatgcgtcattgactagtacatgaccacttga

SEQ ID NO: 19788 - DNA, 76 bp, Artificial Sequence; identical to SEQ ID NO: 11792
  Description of Artificial Sequence: Synthetic hazel nut; 5' sequence + inner sequence + 3' sequence

SEQ ID NO: 19789 - DNA, 76 bp, Artificial Sequence; identical to SEQ ID NO: 11758
  Description of Artificial Sequence: Synthetic hazel nut; 5' sequence + inner sequence + 3' sequence

SEQ ID NO: 19790 - DNA, 76 bp, Artificial Sequence; identical to SEQ ID NO: 3335
  Description of Artificial Sequence: Synthetic hazel nut; 5' sequence + inner sequence + 3' sequence

SEQ ID NO: 19791 - DNA, 76 bp, Artificial Sequence
  Description of Artificial Sequence: Synthetic hazel nut; 5' sequence + inner sequence + 3' sequence
tagggaagagaaggacatatgatcgtgcaacaggtcagtgacgacgctgtgccttgactagtacatgaccacttga

SEQ ID NO: 19792 - DNA, 76 bp, Artificial Sequence
  Description of Artificial Sequence: Synthetic hazel nut; 5' sequence + inner sequence + 3' sequence
tagggaagagaaggacatatgattgacacaccgacgagcacgatgacttcgcgttgactagtacatgaccacttga

SEQ ID NO: 19793 - DNA, 76 bp, Artificial Sequence
  Description of Artificial Sequence: Synthetic hazel nut; 5' sequence + inner sequence + 3' sequence
tagggaagagaaggacatatgattgcgttgcatcgtacgtgtgcttgccgacattgactagtacatgaccacttga

SEQ ID NO: 19794 - DNA, 76 bp, Artificial Sequence
  Description of Artificial Sequence: Synthetic hazel nut; 5' sequence + inner sequence + 3' sequence
tagggaagagaaggacatatgatgatgtgccgcctcgacgtaccagctgcgacttgactagtacatgaccacttga

SEQ ID NO: 19795 - DNA, 76 bp, Artificial Sequence
  Description of Artificial Sequence: Synthetic hazel nut; 5' sequence + inner sequence + 3' sequence
tagggaagagaaggacatatgatcacgtgacggcacgggaagtcatgtgcacattgactagtacatgaccacttga

SEQ ID NO: 19796 - DNA, 76 bp, Artificial Sequence; identical to SEQ ID NO: 3128
  Description of Artificial Sequence: Synthetic hazel nut; 5' sequence + inner sequence + 3' sequence

SEQ ID NO: 19797 - DNA, 76 bp, Artificial Sequence; identical to SEQ ID NO: 3218
  Description of Artificial Sequence: Synthetic hazel nut; 5' sequence + inner sequence + 3' sequence

SEQ ID NO: 19798 - DNA, 76 bp, Artificial Sequence; identical to SEQ ID NO: 3636
  Description of Artificial Sequence: Synthetic hazel nut; 5' sequence + inner sequence + 3' sequence

SEQ ID NO: 19799 - DNA, 76 bp, Artificial Sequence
  Description of Artificial Sequence: Synthetic hazel nut; 5' sequence + inner sequence + 3' sequence
tagggaagagaaggacatatgatggcatgcgatgaacgtggcatgatgcgtcattgactagtacatgaccacttga

SEQ ID NO: 19800 - DNA, 76 bp, Artificial Sequence; identical to SEQ ID NO: 3682
  Description of Artificial Sequence: Synthetic hazel nut; 5' sequence + inner sequence + 3' sequence

SEQ ID NO: 19801 - DNA, 76 bp, Artificial Sequence
  Description of Artificial Sequence: Synthetic hazel nut; 5' sequence + inner sequence + 3' sequence
tagggaagagaaggacatatgatccatggcacacggacactaggtccatcgcgttgactagtacatgaccacttga

SEQ ID NO: 19802 - DNA, 74 bp, Artificial Sequence
  Description of Artificial Sequence: Synthetic hazel nut; 5' sequence + inner sequence + 3' sequence
tagggaagagaaggacatatgatgtacgatgctgcccgacatgtgtacgtgttgactagtacatgaccacttga

SEQ ID NO: 19803 - DNA, 76 bp, Artificial Sequence
  Description of Artificial Sequence: Synthetic hazel nut; 5' sequence + inner sequence + 3' sequence
tagggaagagaaggacatatgatcgacccgcatgtacgttggtgcgtgccgctttgactagtacatgaccacttga

SEQ ID NO: 19804 - DNA, 76 bp, Artificial Sequence
  Description of Artificial Sequence: Synthetic hazel nut; 5' sequence + inner sequence + 3' sequence
tagggaagagaaggacatatgatcgcgtacgaagcacaggacgtcactgcacgttgactagtacatgaccacttga

SEQ ID NO: 19805 - DNA, 76 bp, Artificial Sequence; identical to SEQ ID NO: 11925
  Description of Artificial Sequence: Synthetic hazel nut; 5' sequence + inner sequence + 3' sequence

SEQ ID NO: 19806 - DNA, 76 bp, Artificial Sequence; identical to SEQ ID NO: 3337
  Description of Artificial Sequence: Synthetic hazel nut; 5' sequence + inner sequence + 3' sequence

SEQ ID NO: 19807 - DNA, 76 bp, Artificial Sequence; identical to SEQ ID NO: 7419
  Description of Artificial Sequence: Synthetic hazel nut; 5' sequence + inner sequence + 3' sequence

SEQ ID NO: 19808 - DNA, 76 bp, Artificial Sequence
  Description of Artificial Sequence: Synthetic hazel nut; 5' sequence + inner sequence + 3' sequence
tagggaagagaaggacatatgatggcgtagggagcgtaccgtatcgtgcgtcattgactagtacatgaccacttga

SEQ ID NO: 19809 - DNA, 76 bp, Artificial Sequence; identical to SEQ ID NO: 3437
  Description of Artificial Sequence: Synthetic hazel nut; 5' sequence + inner sequence + 3' sequence

SEQ ID NO: 19810 - DNA, 76 bp, Artificial Sequence
  Description of Artificial Sequence: Synthetic hazel nut; 5' sequence + inner sequence + 3' sequence
tagggaagagaaggacatatgatggcatgcgatggatgtgcgttgtgctcggcttgactagtacatgaccacttga

SEQ ID NO: 19811 - DNA, 76 bp, Artificial Sequence
  Description of Artificial Sequence: Synthetic hazel nut; 5' sequence + inner sequence + 3' sequence
tagggaagagaaggacatatgatcgtgcagtcagcgcgtcaccatacggtgtgttgactagtacatgaccacttga

SEQ ID NO: 19812 - DNA, 76 bp, Artificial Sequence; identical to SEQ ID NO: 11770
  Description of Artificial Sequence: Synthetic hazel nut; 5' sequence + inner sequence + 3' sequence

SEQ ID NO: 19813 - DNA, 76 bp, Artificial Sequence
  Description of Artificial Sequence: Synthetic hazel nut; 5' sequence + inner sequence + 3' sequence
tagggaagagaaggacatatgatgccactatgcctgcctgaccgtgacgcacgttgactagtacatgaccacttga

SEQ ID NO: 19814 - DNA, 76 bp, Artificial Sequence
  Description of Artificial Sequence: Synthetic hazel nut; 5' sequence + inner sequence + 3' sequence
tagggaagagaaggacatatgatgcacgcagcgtacggtcactctgaggcacattgactagtacatgaccacttga

SEQ ID NO: 19815 - DNA, 76 bp, Artificial Sequence; identical to SEQ ID NO: 3409
  Description of Artificial Sequence: Synthetic hazel nut; 5' sequence + inner sequence + 3' sequence

SEQ ID NO: 19816 - DNA, 76 bp, Artificial Sequence
  Description of Artificial Sequence: Synthetic hazel nut; 5' sequence + inner sequence + 3' sequence
tagggaagagaaggacatatgatggccgacggaccgacgcaacgtactgcgtgttgactagtacatgaccacttga

SEQ ID NO: 19817 - DNA, 76 bp, Artificial Sequence; identical to SEQ ID NO: 3961
  Description of Artificial Sequence: Synthetic hazel nut; 5' sequence + inner sequence + 3' sequence

SEQ ID NO: 19818 - DNA, 76 bp, Artificial Sequence
  Description of Artificial Sequence: Synthetic hazel nut; 5' sequence + inner sequence + 3' sequence
tagggaagagaaggacatatgataacgtgtgtgcgcaacgactgatgtacgtgttgactagtacatgaccacttga

SEQ ID NO: 19819 - DNA, 76 bp, Artificial Sequence
  Description of Artificial Sequence: Synthetic hazel nut; 5' sequence + inner sequence + 3' sequence
tagggaagagaaggacatatgatacgtcaacgacaccgatgcacgtcactgcgttgactagtacatgaccacttga

SEQ ID NO: 19820 - DNA, 76 bp, Artificial Sequence; identical to SEQ ID NO: 3623
  Description of Artificial Sequence: Synthetic hazel nut; 5' sequence + inner sequence + 3' sequence

SEQ ID NO: 19821 - DNA, 76 bp, Artificial Sequence; identical to SEQ ID NO: 7817
  Description of Artificial Sequence: Synthetic hazel nut; 5' sequence + inner sequence + 3' sequence

SEQ ID NO: 19822 - DNA, 76 bp, Artificial Sequence; identical to SEQ ID NO: 3637
  Description of Artificial Sequence: Synthetic hazel nut; 5' sequence + inner sequence + 3' sequence

SEQ ID NO: 19823 - DNA, 76 bp, Artificial Sequence; identical to SEQ ID NO: 3647
  Description of Artificial Sequence: Synthetic hazel nut; 5' sequence + inner sequence + 3' sequence

SEQ ID NO: 19824 - DNA, 76 bp, Artificial Sequence
  Description of Artificial Sequence: Synthetic hazel nut; 5' sequence + inner sequence + 3' sequence
tagggaagagaaggacatatgatcgcacggtcgatacgtcatgcacgctgacattgactagtacatgaccacttga

SEQ ID NO: 19825 - DNA, 76 bp, Artificial Sequence
  Description of Artificial Sequence: Synthetic hazel nut; 5' sequence + inner sequence + 3' sequence
tagggaagagaaggacatatgatcgtgccgtaacagcaacgtacttggccacattgactagtacatgaccacttga

SEQ ID NO: 19826 - DNA, 76 bp, Artificial Sequence; identical to SEQ ID NO: 3544
  Description of Artificial Sequence: Synthetic hazel nut; 5' sequence + inner sequence + 3' sequence

SEQ ID NO: 19827 - DNA, 76 bp, Artificial Sequence; identical to SEQ ID NO: 3757
  Description of Artificial Sequence: Synthetic hazel nut; 5' sequence + inner sequence + 3' sequence

SEQ ID NO: 19828 - DNA, 76 bp, Artificial Sequence; identical to SEQ ID NO: 3991
  Description of Artificial Sequence: Synthetic hazel nut; 5' sequence + inner sequence + 3' sequence

SEQ ID NO: 19829 - DNA, 76 bp, Artificial Sequence
  Description of Artificial Sequence: Synthetic hazel nut; 5' sequence + inner sequence + 3' sequence
tagggaagagaaggacatatgatcgcatcgcaatggccacgcgcaccgtcacgttgactagtacatgaccacttga

SEQ ID NO: 19830 - DNA, 76 bp, Artificial Sequence; identical to SEQ ID NO: 11999
  Description of Artificial Sequence: Synthetic hazel nut; 5' sequence + inner sequence + 3' sequence

SEQ ID NO: 19831 - DNA, 76 bp, Artificial Sequence; identical to SEQ ID NO: 3890
  Description of Artificial Sequence: Synthetic hazel nut; 5' sequence + inner sequence + 3' sequence

SEQ ID NO: 19832 - DNA, 76 bp, Artificial Sequence
  Description of Artificial Sequence: Synthetic hazel nut; 5' sequence + inner sequence + 3' sequence
tagggaagagaaggacatatgatcgcatcgtagccgtgtgccgtgtacgcaggttgactagtacatgaccacttga

SEQ ID NO: 19833 - DNA, 76 bp, Artificial Sequence; identical to SEQ ID NO: 7710
  Description of Artificial Sequence: Synthetic hazel nut; 5' sequence + inner sequence + 3' sequence

SEQ ID NO: 19834 - DNA, 76 bp, Artificial Sequence; identical to SEQ ID NO: 7958
  Description of Artificial Sequence: Synthetic hazel nut; 5' sequence + inner sequence + 3' sequence

SEQ ID NO: 19835 - DNA, 76 bp, Artificial Sequence; identical to SEQ ID NO: 7852
  Description of Artificial Sequence: Synthetic hazel nut; 5' sequence + inner sequence + 3' sequence

SEQ ID NO: 19836 - DNA, 76 bp, Artificial Sequence
  Description of Artificial Sequence: Synthetic hazel nut; 5' sequence + inner sequence + 3' sequence
tagggaagagaaggacatatgatcgtgccacgacgtatgcctccgcagccacgttgactagtacatgaccacttga

SEQ ID NO: 19837 - DNA, 76 bp, Artificial Sequence
  Description of Artificial Sequence: Synthetic hazel nut; 5' sequence + inner sequence + 3' sequence
tagggaagagaaggacatatgatgcgtcacagcgtggtacgtctcgcaccgtgttgactagtacatgaccacttga

SEQ ID NO: 19838 - DNA, 76 bp, Artificial Sequence
  Description of Artificial Sequence: Synthetic hazel nut; 5' sequence + inner sequence + 3' sequence
tagggaagagaaggacatatgatcggcatgacggcaactgtgctacgtgcgcgttgactagtacatgaccacttga

SEQ ID NO: 19839 - DNA, 76 bp, Artificial Sequence; identical to SEQ ID NO: 3643
  Description of Artificial Sequence: Synthetic hazel nut; 5' sequence + inner sequence + 3' sequence

SEQ ID NO: 19840 - DNA, 76 bp, Artificial Sequence; identical to SEQ ID NO: 3449
  Description of Artificial Sequence: Synthetic hazel nut; 5' sequence + inner sequence + 3' sequence

SEQ ID NO: 19841 - DNA, 76 bp, Artificial Sequence
  Description of Artificial Sequence: Synthetic hazel nut; 5' sequence + inner sequence + 3' sequence
tagggaagagaaggacatatgatcgaccaacgtgatgcaacgtgtacttcggcttgactagtacatgaccacttga

SEQ ID NO: 19842 - DNA, 76 bp, Artificial Sequence; identical to SEQ ID NO: 3349
  Description of Artificial Sequence: Synthetic hazel nut; 5' sequence + inner sequence + 3' sequence

SEQ ID NO: 19843 - DNA, 76 bp, Artificial Sequence; identical to SEQ ID NO: 3260
  Description of Artificial Sequence: Synthetic hazel nut; 5' sequence + inner sequence + 3' sequence

SEQ ID NO: 19844 - DNA, 76 bp, Artificial Sequence
  Description of Artificial Sequence: Synthetic hazel nut; 5' sequence + inner sequence + 3' sequence
tagggaagagaaggacatatgatcgtgaacacgcacaatgacactgccgcacgttgactagtacatgaccacttga

SEQ ID NO: 19845 - DNA, 76 bp, Artificial Sequence; identical to SEQ ID NO: 11860
  Description of Artificial Sequence: Synthetic hazel nut; 5' sequence + inner sequence + 3' sequence

SEQ ID NO: 19846 - DNA, 76 bp, Artificial Sequence
  Description of Artificial Sequence: Synthetic hazel nut; 5' sequence + inner sequence + 3' sequence
tagggaagagaaggacatatgatggcatgcgatgaacgaggcatgatgcgtaattgactagtacatgaccacttga

SEQ ID NO: 19847 - DNA, 76 bp, Artificial Sequence
  Description of Artificial Sequence: Synthetic hazel nut; 5' sequence + inner sequence + 3' sequence
tagggaagagaaggacatatgatgcaccacgccgacaatgtacgctgctgaccttgactagtacatgaccacttga

SEQ ID NO: 19848 - DNA, 76 bp, Artificial Sequence
  Description of Artificial Sequence: Synthetic hazel nut; 5' sequence + inner sequence + 3' sequence
tagggaagagaaggacatatgatcgacacggaccgacctgcgaactgcacgcgttgactagtacatgaccacttga

SEQ ID NO: 19849 - DNA, 76 bp, Artificial Sequence
  Description of Artificial Sequence: Synthetic hazel nut; 5' sequence + inner sequence + 3' sequence
tagggaagagaaggacatatgatgcgaatgcaccgacacgtccctcacgcacgttgactagtacatgaccacttga

SEQ ID NO: 19850 - DNA, 76 bp, Artificial Sequence; identical to SEQ ID NO: 3585
  Description of Artificial Sequence: Synthetic hazel nut; 5' sequence + inner sequence + 3' sequence

SEQ ID NO: 19851 - DNA, 76 bp, Artificial Sequence
  Description of Artificial Sequence: Synthetic hazel nut; 5' sequence + inner sequence + 3' sequence
tagggaagagaaggacatatgatcgtgcgtagcgaccaaccgtcaacgtggccttgactagtacatgaccacttga

SEQ ID NO: 19852 - DNA, 76 bp, Artificial Sequence; identical to SEQ ID NO: 7579
  Description of Artificial Sequence: Synthetic hazel nut; 5' sequence + inner sequence + 3' sequence

SEQ ID NO: 19853 - DNA, 76 bp, Artificial Sequence
  Description of Artificial Sequence: Synthetic hazel nut; 5' sequence + inner sequence + 3' sequence
tagggaagagaaggacatatgatcgacacgacgacctgcacgctacgtgaatgttgactagtacatgaccacttga

SEQ ID NO: 19854 - DNA, 76 bp, Artificial Sequence; identical to SEQ ID NO: 3770
  Description of Artificial Sequence: Synthetic hazel nut; 5' sequence + inner sequence + 3' sequence

SEQ ID NO: 19855 - DNA, 76 bp, Artificial Sequence
  Description of Artificial Sequence: Synthetic hazel nut; 5' sequence + inner sequence + 3' sequence
tagggaagagaaggacatatgatggaccgaacgtgtacggcagatacgtggcattgactagtacatgaccacttga

SEQ ID NO: 19856 - DNA, 76 bp, Artificial Sequence; identical to SEQ ID NO: 7956
  Description of Artificial Sequence: Synthetic hazel nut; 5' sequence + inner sequence + 3' sequence

SEQ ID NO: 19857 - DNA, 76 bp, Artificial Sequence; identical to SEQ ID NO: 3375
  Description of Artificial Sequence: Synthetic hazel nut; 5' sequence + inner sequence + 3' sequence

SEQ ID NO: 19858 - DNA, 76 bp, Artificial Sequence; identical to SEQ ID NO: 3271
  Description of Artificial Sequence: Synthetic hazel nut; 5' sequence + inner sequence + 3' sequence

SEQ ID NO: 19859 - DNA, 76 bp, Artificial Sequence
  Description of Artificial Sequence: Synthetic hazel nut; 5' sequence + inner sequence + 3' sequence
tagggaagagaaggacatatgatcacgtgcacgtggcgtcgttggcctacgcgttgactagtacatgaccacttga

SEQ ID NO: 19860 - DNA, 76 bp, Artificial Sequence; identical to SEQ ID NO: 7273
  Description of Artificial Sequence: Synthetic hazel nut; 5' sequence + inner sequence + 3' sequence

SEQ ID NO: 19861 - DNA, 76 bp, Artificial Sequence
  Description of Artificial Sequence: Synthetic hazel nut; 5' sequence + inner sequence + 3' sequence
tagggaagagaaggacatatgatcgtcacgcagacgtagtgccgcagtacgcattgactagtacatgaccacttga

SEQ ID NO: 19862 - DNA, 76 bp, Artificial Sequence
  Description of Artificial Sequence: Synthetic hazel nut; 5' sequence + inner sequence + 3' sequence
tagggaagagaaggacatatgatggcatgcgattaacgaggcatgatgcgtcattgactagtacatgaccacttga

SEQ ID NO: 19863 - DNA, 76 bp, Artificial Sequence
  Description of Artificial Sequence: Synthetic hazel nut; 5' sequence + inner sequence + 3' sequence
tagggaagagaaggacatatgatcgaccacacgtaagatggcctcgctgcaccttgactagtacatgaccacttga

SEQ ID NO: 19864 - DNA, 76 bp, Artificial Sequence
  Description of Artificial Sequence: Synthetic hazel nut; 5' sequence + inner sequence + 3' sequence
tagggaagagaaggacatatgatcgacggcaggcacggtgacatcagtacgtattgactagtacatgaccacttga

SEQ ID NO: 19865 - DNA, 76 bp, Artificial Sequence; identical to SEQ ID NO: 11994
  Description of Artificial Sequence: Synthetic hazel nut; 5' sequence + inner sequence + 3' sequence

SEQ ID NO: 19866 - DNA, 76 bp, Artificial Sequence
  Description of Artificial Sequence: Synthetic hazel nut; 5' sequence + inner sequence + 3' sequence
tagggaagagaaggacatatgatggcacgcgatgaacgaggcatgatgcgtcattgactagtacatgaccacttga

SEQ ID NO: 19867 - DNA, 76 bp, Artificial Sequence; identical to SEQ ID NO: 3912
  Description of Artificial Sequence: Synthetic hazel nut; 5' sequence + inner sequence + 3' sequence

SEQ ID NO: 19868 - DNA, 76 bp, Artificial Sequence
  Description of Artificial Sequence: Synthetic hazel nut; 5' sequence + inner sequence + 3' sequence
tagggaagagaaggacatatgatgcgtagggcggacggacattgcacttcgccttgactagtacatgaccacttga

SEQ ID NO: 19869 - DNA, 76 bp, Artificial Sequence
  Description of Artificial Sequence: Synthetic hazel nut; 5' sequence + inner sequence + 3' sequence
tagggaagagaaggacatatgatcgaacgcacaaggcaacgtacgcgcagtcattgactagtacatgaccacttga

SEQ ID NO: 19870 - DNA, 76 bp, Artificial Sequence; identical to SEQ ID NO: 3307
  Description of Artificial Sequence: Synthetic hazel nut; 5' sequence + inner sequence + 3' sequence

SEQ ID NO: 19871 - DNA, 76 bp, Artificial Sequence; identical to SEQ ID NO: 3883
  Description of Artificial Sequence: Synthetic hazel nut; 5' sequence + inner sequence + 3' sequence

SEQ ID NO: 19872 - DNA, 75 bp, Artificial Sequence; identical to SEQ ID NO: 3879
  Description of Artificial Sequence: Synthetic hazel nut; 5' sequence + inner sequence + 3' sequence

SEQ ID NO: 19873 - DNA, 76 bp, Artificial Sequence
  Description of Artificial Sequence: Synthetic hazel nut; 5' sequence + inner sequence + 3' sequence
tagggaagagaaggacatatgatacgactcgacctaaccgtactacgtgtgcgttgactagtacatgaccacttga

SEQ ID NO: 19874 - DNA, 76 bp, Artificial Sequence; identical to SEQ ID NO: 3684
  Description of Artificial Sequence: Synthetic hazel nut; 5' sequence + inner sequence + 3' sequence

SEQ ID NO: 19875 - DNA, 76 bp, Artificial Sequence; identical to SEQ ID NO: 3728
  Description of Artificial Sequence: Synthetic hazel nut; 5' sequence + inner sequence + 3' sequence

SEQ ID NO: 19876 - DNA, 76 bp, Artificial Sequence
  Description of Artificial Sequence: Synthetic hazel nut; 5' sequence + inner sequence + 3' sequence
tagggaagagaaggacatatgatcgtaacgtaccacggtgcgtctgtgcgtccttgactagtacatgaccacttga

SEQ ID NO: 19877 - DNA, 76 bp, Artificial Sequence
  Description of Artificial Sequence: Synthetic hazel nut; 5' sequence + inner sequence + 3' sequence
tagggaagagaaggacatatgatacgtcgcagcgtaacggttgggatgtgacattgactagtacatgaccacttga

SEQ ID NO: 19878 - DNA, 76 bp, Artificial Sequence
  Description of Artificial Sequence: Synthetic hazel nut; 5' sequence + inner sequence + 3' sequence
tagggaagagaaggacatatgatccatgcaggacgtagcgtgaccgttgcacattgactagtacatgaccacttga

SEQ ID NO: 19879 - DNA, 76 bp, Artificial Sequence
  Description of Artificial Sequence: Synthetic hazel nut; 5' sequence + inner sequence + 3' sequence
tagggaagagaaggacatatgatcacgtatgcgtaacggacatgcgcttcactttgactagtacatgaccacttga

SEQ ID NO: 19880 - DNA, 76 bp, Artificial Sequence
  Description of Artificial Sequence: Synthetic hazel nut; 5' sequence + inner sequence + 3' sequence
tagggaagagaaggacatatgattcgcaccgtgacagtgaggcattgtggacattgactagtacatgaccacttga

SEQ ID NO: 19881 - DNA, 76 bp, Artificial Sequence; identical to SEQ ID NO: 3645
  Description of Artificial Sequence: Synthetic hazel nut; 5' sequence + inner sequence + 3' sequence

SEQ ID NO: 19882 - DNA, 76 bp, Artificial Sequence; identical to SEQ ID NO: 3932
  Description of Artificial Sequence: Synthetic hazel nut; 5' sequence + inner sequence + 3' sequence

SEQ ID NO: 19883 - DNA, 76 bp, Artificial Sequence
  Description of Artificial Sequence: Synthetic hazel nut; 5' sequence + inner sequence + 3' sequence
tagggaagagaaggacatatgatgcatacggaacgaacgtaatggacgacgtattgactagtacatgaccacttga

SEQ ID NO: 19884 - DNA, 76 bp, Artificial Sequence
  Description of Artificial Sequence: Synthetic hazel nut; 5' sequence + inner sequence + 3' sequence
tagggaagagaaggacatatgatcgtgcagcttgacgtacggttggccacgtattgactagtacatgaccacttga

SEQ ID NO: 19885 - DNA, 76 bp, Artificial Sequence; identical to SEQ ID NO: 7960
  Description of Artificial Sequence: Synthetic hazel nut; 5' sequence + inner sequence + 3' sequence

SEQ ID NO: 19886 - DNA, 76 bp, Artificial Sequence
  Description of Artificial Sequence: Synthetic hazel nut; 5' sequence + inner sequence + 3' sequence
tagggaagagaaggacatatgatccgtcggcacacaggtccactcgctacgcattgactagtacatgaccacttga

SEQ ID NO: 19887 - DNA, 76 bp, Artificial Sequence; identical to SEQ ID NO: 3849
  Description of Artificial Sequence: Synthetic hazel nut; 5' sequence + inner sequence + 3' sequence

SEQ ID NO: 19888 - DNA, 76 bp, Artificial Sequence
  Description of Artificial Sequence: Synthetic hazel nut; 5' sequence + inner sequence + 3' sequence
tagggaagagaaggacatatgatagtgtgccgatgcgtccctatcacgtggcattgactagtacatgaccacttga

SEQ ID NO: 19889 - DNA, 76 bp, Artificial Sequence; identical to SEQ ID NO: 7655
  Description of Artificial Sequence: Synthetic hazel nut; 5' sequence + inner sequence + 3' sequence

SEQ ID NO: 19890 - DNA, 76 bp, Artificial Sequence
  Description of Artificial Sequence: Synthetic hazel nut; 5' sequence + inner sequence + 3' sequence
tagggaagagaaggacatatgatcgatccgacgaacgtgcgtgtcacatcgcgttgactagtacatgaccacttga

SEQ ID NO: 19891 - DNA, 76 bp, Artificial Sequence
  Description of Artificial Sequence: Synthetic hazel nut; 5' sequence + inner sequence + 3' sequence
tagggaagagaaggacatatgatcggtgcagcgtgcatcggaaggtggcgtgattgactagtacatgaccacttga

SEQ ID NO: 19892 - DNA, 76 bp, Artificial Sequence
  Description of Artificial Sequence: Synthetic hazel nut; 5' sequence + inner sequence + 3' sequence
tagggaagagaaggacatatgatggcatgcgatgaacgaggcatggtgcgtcattgactagtacatgaccacttga

SEQ ID NO: 19893 - DNA, 76 bp, Artificial Sequence; identical to SEQ ID NO: 3395
  Description of Artificial Sequence: Synthetic hazel nut; 5' sequence + inner sequence + 3' sequence

SEQ ID NO: 19894 - DNA, 76 bp, Artificial Sequence; identical to SEQ ID NO: 7401
  Description of Artificial Sequence: Synthetic hazel nut; 5' sequence + inner sequence + 3' sequence

SEQ ID NO: 19895 - DNA, 76 bp, Artificial Sequence
  Description of Artificial Sequence: Synthetic hazel nut; 5' sequence + inner sequence + 3' sequence
tagggaagagaaggacatatgatccatgcgtgcaacctcgcccttacgtagcgttgactagtacatgaccacttga

SEQ ID NO: 19896 - DNA, 76 bp, Artificial Sequence
  Description of Artificial Sequence: Synthetic hazel nut; 5' sequence + inner sequence + 3' sequence
tagggaagagaaggacatatgatgcggcacacgtaccttccttgcgcatgggcttgactagtacatgaccacttga

SEQ ID NO: 19897 - DNA, 76 bp, Artificial Sequence; identical to SEQ ID NO: 3514
  Description of Artificial Sequence: Synthetic hazel nut; 5' sequence + inner sequence + 3' sequence

SEQ ID NO: 19898 - DNA, 76 bp, Artificial Sequence; identical to SEQ ID NO: 3602
  Description of Artificial Sequence: Synthetic hazel nut; 5' sequence + inner sequence + 3' sequence

SEQ ID NO: 19899 - DNA, 76 bp, Artificial Sequence
  Description of Artificial Sequence: Synthetic hazel nut; 5' sequence + inner sequence + 3' sequence
tagggaagagaaggacatatgatcgtgacgaacgtaggtcggtcagcttgccattgactagtacatgaccacttga

SEQ ID NO: 19900 - DNA, 76 bp, Artificial Sequence; identical to SEQ ID NO: 3818
  Description of Artificial Sequence: Synthetic hazel nut; 5' sequence + inner sequence + 3' sequence

SEQ ID NO: 19901 - DNA, 76 bp, Artificial Sequence
  Description of Artificial Sequence: Synthetic hazel nut; 5' sequence + inner sequence + 3' sequence
tagggaagagaaggacatatgatcggtacggatgcatcctccttcacggcacgttgactagtacatgaccacttga

SEQ ID NO: 19902 - DNA, 76 bp, Artificial Sequence; identical to SEQ ID NO: 3906
  Description of Artificial Sequence: Synthetic hazel nut; 5' sequence + inner sequence + 3' sequence

SEQ ID NO: 19903 - DNA, 76 bp, Artificial Sequence; identical to SEQ ID NO: 7735
  Description of Artificial Sequence: Synthetic hazel nut; 5' sequence + inner sequence + 3' sequence

SEQ ID NO: 19904 - DNA, 76 bp, Artificial Sequence
  Description of Artificial Sequence: Synthetic hazel nut; 5' sequence + inner sequence + 3' sequence
tagggaagagaaggacatatgattcggtacgtagcatggatcgttgcgacacgttgactagtacatgaccacttga

SEQ ID NO: 19905 - DNA, 76 bp, Artificial Sequence; identical to SEQ ID NO: 3075
  Description of Artificial Sequence: Synthetic hazel nut; 5' sequence + inner sequence + 3' sequence

SEQ ID NO: 19906 - DNA, 76 bp, Artificial Sequence
  Description of Artificial Sequence: Synthetic hazel nut; 5' sequence + inner sequence + 3' sequence
tagggaagagaaggacatatgatcgtgacgcacaacaaggcatgtgaggcacattgactagtacatgaccacttga

SEQ ID NO: 19907 - DNA, 76 bp, Artificial Sequence
  Description of Artificial Sequence: Synthetic hazel nut; 5' sequence + inner sequence + 3' sequence
tagggaagagaaggacatatgatcgcaaggcatgtcgcactctcaccgtgacgttgactagtacatgaccacttga

SEQ ID NO: 19908 - DNA, 76 bp, Artificial Sequence
  Description of Artificial Sequence: Synthetic hazel nut; 5' sequence + inner sequence + 3' sequence
tagggaagagaaggacatatgatggtgacacaacggaggtacgtcgctgcacgttgactagtacatgaccacttga

SEQ ID NO: 19909 - DNA, 76 bp, Artificial Sequence; identical to SEQ ID NO: 7948
  Description of Artificial Sequence: Synthetic hazel nut; 5' sequence + inner sequence + 3' sequence

SEQ ID NO: 19910 - DNA, 76 bp, Artificial Sequence; identical to SEQ ID NO: 11712
  Description of Artificial Sequence: Synthetic hazel nut; 5' sequence + inner sequence + 3' sequence

SEQ ID NO: 19911 - DNA, 76 bp, Artificial Sequence
  Description of Artificial Sequence: Synthetic hazel nut; 5' sequence + inner sequence + 3' sequence
tagggaagagaaggacatatgatgcaatcaggcacactgaccctctcagcacgttgactagtacatgaccacttga

SEQ ID NO: 19912 - DNA, 76 bp, Artificial Sequence
  Description of Artificial Sequence: Synthetic hazel nut; 5' sequence + inner sequence + 3' sequence
tagggaagagaaggacatatgatacgtgcggaacgtcgatcgctgccttgtccttgactagtacatgaccacttga

SEQ ID NO: 19913 - DNA, 76 bp, Artificial Sequence; identical to SEQ ID NO: 15869
  Description of Artificial Sequence: Synthetic hazel nut; 5' sequence + inner sequence + 3' sequence

SEQ ID NO: 19914 - DNA, 76 bp, Artificial Sequence
  Description of Artificial Sequence: Synthetic hazel nut; 5' sequence + inner sequence + 3' sequence
tagggaagagaaggacatatgatcggaccgaagagtgcacgtgctacgtaacgttgactagtacatgaccacttga

SEQ ID NO: 19915 - DNA, 76 bp, Artificial Sequence; identical to SEQ ID NO: 3480
  Description of Artificial Sequence: Synthetic hazel nut; 5' sequence + inner sequence + 3' sequence

SEQ ID NO: 19916 - DNA, 76 bp, Artificial Sequence; identical to SEQ ID NO: 7971
  Description of Artificial Sequence: Synthetic hazel nut; 5' sequence + inner sequence + 3' sequence

SEQ ID NO: 19917 - DNA, 76 bp, Artificial Sequence
  Description of Artificial Sequence: Synthetic hazel nut; 5' sequence + inner sequence + 3' sequence
tagggaagagaaggacatatgatggacgcgcatgaccgtcggatcgcgacacattgactagtacatgaccacttga

SEQ ID NO: 19918 - DNA, 76 bp, Artificial Sequence
  Description of Artificial Sequence: Synthetic hazel nut; 5' sequence + inner sequence + 3' sequence
tagggaagagaaggacatatgatgcaacgcatgacgcaggccagcacttcgcattgactagtacatgaccacttga

SEQ ID NO: 19919 - DNA, 76 bp, Artificial Sequence; identical to SEQ ID NO: 3903
  Description of Artificial Sequence: Synthetic hazel nut; 5' sequence + inner sequence + 3' sequence

SEQ ID NO: 19920 - DNA, 76 bp, Artificial Sequence; identical to SEQ ID NO: 7552
  Description of Artificial Sequence: Synthetic hazel nut; 5' sequence + inner sequence + 3' sequence

SEQ ID NO: 19921 - DNA, 76 bp, Artificial Sequence; identical to SEQ ID NO: 3531
  Description of Artificial Sequence: Synthetic hazel nut; 5' sequence + inner sequence + 3' sequence

SEQ ID NO: 19922 - DNA, 76 bp, Artificial Sequence; identical to SEQ ID NO: 11756
  Description of Artificial Sequence: Synthetic hazel nut; 5' sequence + inner sequence + 3' sequence

SEQ ID NO: 19923 - DNA, 76 bp, Artificial Sequence
  Description of Artificial Sequence: Synthetic hazel nut; 5' sequence + inner sequence + 3' sequence
tagggaagagaaggacatatgatggcacacgtgatggacgacgttcccgatgcttgactagtacatgaccacttga

SEQ ID NO: 19924 - DNA, 76 bp, Artificial Sequence; identical to SEQ ID NO: 3679
  Description of Artificial Sequence: Synthetic hazel nut; 5' sequence + inner sequence + 3' sequence

SEQ ID NO: 19925 - DNA, 76 bp, Artificial Sequence
  Description of Artificial Sequence: Synthetic hazel nut; 5' sequence + inner sequence + 3' sequence
tagggaagagaaggacatatgatcgcgcagtgaccgcatgttccctcgtcacattgactagtacatgaccacttga

SEQ ID NO: 19926 - DNA, 76 bp, Artificial Sequence
  Description of Artificial Sequence: Synthetic hazel nut; 5' sequence + inner sequence + 3' sequence
tagggaagagaaggacatatgatgaccacgcgcatgaccgtacgtgcaccatgttgactagtacatgaccacttga

SEQ ID NO: 19927 - DNA, 71 bp, Artificial Sequence
  Description of Artificial Sequence: Synthetic hazel nut; 5' sequence + inner sequence + 3' sequence
tagggaagagaaggacatatgatcgcaccgtcaagcaggcacgtgtcattgactagtacatgaccacttga

SEQ ID NO: 19928 - DNA, 76 bp, Artificial Sequence
  Description of Artificial Sequence: Synthetic hazel nut; 5' sequence + inner sequence + 3' sequence
tagggaagagaaggacatatgatagcgtggcacggtacggatacgttggcacattgactagtacatgaccacttga

SEQ ID NO: 19929 - DNA, 76 bp, Artificial Sequence; identical to SEQ ID NO: 11968
  Description of Artificial Sequence: Synthetic hazel nut; 5' sequence + inner sequence + 3' sequence

SEQ ID NO: 19930 - DNA, 76 bp, Artificial Sequence
  Description of Artificial Sequence: Synthetic hazel nut; 5' sequence + inner sequence + 3' sequence
tagggaagagaaggacatatgatgcatcatgaccctcactgaccgcatgcgcgttgactagtacatgaccacttga

SEQ ID NO: 19931 - DNA, 76 bp, Artificial Sequence
  Description of Artificial Sequence: Synthetic hazel nut; 5' sequence + inner sequence + 3' sequence
tagggaagagaaggacatatgatcgcaccgtcgatacgtcatgcaggctgacattgactagtacatgaccacttga

SEQ ID NO: 19932 - DNA, 76 bp, Artificial Sequence
  Description of Artificial Sequence: Synthetic hazel nut; 5' sequence + inner sequence + 3' sequence
tagggaagagaaggacatatgatcgaccacgtggcatgacggcgtgcgacgtattgactagtacatgaccacttga

SEQ ID NO: 19933 - DNA, 76 bp, Artificial Sequence
  Description of Artificial Sequence: Synthetic hazel nut; 5' sequence + inner sequence + 3' sequence
tagggaagagaaggacatatgatcgtcgcgacgagcaaggtgaacgtgtcccgttgactagtacatgaccacttga

SEQ ID NO: 19934 - DNA, 76 bp, Artificial Sequence; identical to SEQ ID NO: 7384
  Description of Artificial Sequence: Synthetic hazel nut; 5' sequence + inner sequence + 3' sequence

SEQ ID NO: 19935 - DNA, 76 bp, Artificial Sequence; identical to SEQ ID NO: 3655
  Description of Artificial Sequence: Synthetic hazel nut; 5' sequence + inner sequence + 3' sequence

SEQ ID NO: 19936 - DNA, 76 bp, Artificial Sequence
  Description of Artificial Sequence: Synthetic hazel nut; 5' sequence + inner sequence + 3' sequence
tagggaagagaaggacatatgatgcagcacggcatgtgacgtattcccgctgcttgactagtacatgaccacttga

SEQ ID NO: 19937 - DNA, 76 bp, Artificial Sequence
  Description of Artificial Sequence: Synthetic hazel nut; 5' sequence + inner sequence + 3' sequence
tagggaagagaaggacatatgatacatgcgcatcgagcctacctgtacgcacattgactagtacatgaccacttga

SEQ ID NO: 19938 - DNA, 76 bp, Artificial Sequence
  Description of Artificial Sequence: Synthetic hazel nut; 5' sequence + inner sequence + 3' sequence
tagggaagagaaggacatatgatacacgacatgaggacgatacgcaccgtgccttgactagtacatgaccacttga

SEQ ID NO: 19939 - DNA, 76 bp, Artificial Sequence; identical to SEQ ID NO: 3441
  Description of Artificial Sequence: Synthetic hazel nut; 5' sequence + inner sequence + 3' sequence

SEQ ID NO: 19940 - DNA, 72 bp, Artificial Sequence
  Description of Artificial Sequence: Synthetic hazel nut; 5' sequence + inner sequence + 3' sequence
tagggaagagaaggacatatgatgcatgggtgcgatcgtaacgcgtggtttgactagtacatgaccacttga

SEQ ID NO: 19941 - DNA, 76 bp, Artificial Sequence
  Description of Artificial Sequence: Synthetic hazel nut; 5' sequence + inner sequence + 3' sequence
tagggaagagaaggacatatgatgcatcacaacatcatgccgtgatctgcacattgactagtacatgaccacttga

SEQ ID NO: 19942 - DNA, 76 bp, Artificial Sequence
  Description of Artificial Sequence: Synthetic hazel nut; 5' sequence + inner sequence + 3' sequence
tagggaagagaaggacatatgatgtcaccacgacgatgagcgccatgtcgacgttgactagtacatgaccacttga

SEQ ID NO: 19943 - DNA, 76 bp, Artificial Sequence
  Description of Artificial Sequence: Synthetic hazel nut; 5' sequence + inner sequence + 3' sequence
tagggaagagaaggacatatgatcgtacggcacgcgacatgacatccgccatgttgactagtacatgaccacttga

SEQ ID NO: 19944 - DNA, 76 bp, Artificial Sequence
  Description of Artificial Sequence: Synthetic hazel nut; 5' sequence + inner sequence + 3' sequence
tagggaagagaaggacatatgatgcacacagcacgatgactgcactgatcggtttgactagtacatgaccacttga

SEQ ID NO: 19945 - DNA, 76 bp, Artificial Sequence; identical to SEQ ID NO: 7861
  Description of Artificial Sequence: Synthetic hazel nut; 5' sequence + inner sequence + 3' sequence

SEQ ID NO: 19946 - DNA, 76 bp, Artificial Sequence; identical to SEQ ID NO: 7611
  Description of Artificial Sequence: Synthetic hazel nut; 5' sequence + inner sequence + 3' sequence

SEQ ID NO: 19947 - DNA, 76 bp, Artificial Sequence; identical to SEQ ID NO: 3570
  Description of Artificial Sequence: Synthetic hazel nut; 5' sequence + inner sequence + 3' sequence

SEQ ID NO: 19948 - DNA, 76 bp, Artificial Sequence
  Description of Artificial Sequence: Synthetic hazel nut; 5' sequence + inner sequence + 3' sequence
tagggaagagaaggacatatgatgcgtgtcagcaatacgtcctcatctgcacgttgactagtacatgaccacttga

SEQ ID NO: 19949 - DNA, 76 bp, Artificial Sequence
  Description of Artificial Sequence: Synthetic hazel nut; 5' sequence + inner sequence + 3' sequence
tagggaagagaaggacatatgatcgtaccgcaagcgacgtgtccgtgccgtgattgactagtacatgaccacttga

SEQ ID NO: 19950 - DNA, 76 bp, Artificial Sequence
  Description of Artificial Sequence: Synthetic hazel nut; 5' sequence + inner sequence + 3' sequence
tagggaagagaaggacatatgatcacgcagtgacgcatgtgcaccacgacgcgttgactagtacatgaccacttga

SEQ ID NO: 19951 - DNA, 76 bp, Artificial Sequence
  Description of Artificial Sequence: Synthetic hazel nut; 5' sequence + inner sequence + 3' sequence
tagggaagagaaggacatatgatggcacaccacaggtacgcatcgcctcggtcttgactagtacatgaccacttga

SEQ ID NO: 19952 - DNA, 76 bp, Artificial Sequence
  Description of Artificial Sequence: Synthetic hazel nut; 5' sequence + inner sequence + 3' sequence
tagggaagagaaggacatatgatcgtaccacgcgaggacaagcatgggtcacgttgactagtacatgaccacttga

SEQ ID NO: 19953 - DNA, 76 bp, Artificial Sequence
  Description of Artificial Sequence: Synthetic hazel nut; 5' sequence + inner sequence + 3' sequence
tagggaagagaaggacatatgatcaacgcgcaacggtgaggtaggcctgagcattgactagtacatgaccacttga

SEQ ID NO: 19954 - DNA, 76 bp, Artificial Sequence
  Description of Artificial Sequence: Synthetic hazel nut; 5' sequence + inner sequence + 3' sequence
tagggaagagaaggacatatgatgcacaaggcgataccgtccgcaacgccacgttgactagtacatgaccacttga

SEQ ID NO: 19955 - DNA, 76 bp, Artificial Sequence
  Description of Artificial Sequence: Synthetic hazel nut; 5' sequence + inner sequence + 3' sequence
tagggaagagaaggacatatgatccgacgatgcagtgtggcgtaacgtgcatgttgactagtacatgaccacttga

SEQ ID NO: 19956 - DNA, 76 bp, Artificial Sequence
  Description of Artificial Sequence: Synthetic hazel nut; 5' sequence + inner sequence + 3' sequence
tagggaagagaaggacatatgatcgcaacgcaagatggtgcccgtcctgcacgttgactagtacatgaccacttga

SEQ ID NO: 19957 - DNA, 76 bp, Artificial Sequence
  Description of Artificial Sequence: Synthetic hazel nut; 5' sequence + inner sequence + 3' sequence
tagggaagagaaggacatatgattggacgcaacgaaacgtacgccacttcgcgttgactagtacatgaccacttga

SEQ ID NO: 19958 - DNA, 76 bp, Artificial Sequence; identical to SEQ ID NO: 7254
  Description of Artificial Sequence: Synthetic hazel nut; 5' sequence + inner sequence + 3' sequence

SEQ ID NO: 19959 - DNA, 77 bp, Artificial Sequence; identical to SEQ ID NO: 3652
  Description of Artificial Sequence: Synthetic hazel nut; 5' sequence + inner sequence + 3' sequence

SEQ ID NO: 19960 - DNA, 76 bp, Artificial Sequence; identical to SEQ ID NO: 3784
  Description of Artificial Sequence: Synthetic hazel nut; 5' sequence + inner sequence + 3' sequence

SEQ ID NO: 19961 - DNA, 76 bp, Artificial Sequence; identical to SEQ ID NO: 3601
  Description of Artificial Sequence: Synthetic hazel nut; 5' sequence + inner sequence + 3' sequence

SEQ ID NO: 19962 - DNA, 76 bp, Artificial Sequence
  Description of Artificial Sequence: Synthetic hazel nut; 5' sequence + inner sequence + 3' sequence
tagggaagagaaggacatatgatggcatgcgcgtaccatcgagggggcgtggattgactagtacatgaccacttga

SEQ ID NO: 19963 - DNA, 76 bp, Artificial Sequence; identical to SEQ ID NO: 3187
  Description of Artificial Sequence: Synthetic hazel nut; 5' sequence + inner sequence + 3' sequence

SEQ ID NO: 19964 - DNA, 76 bp, Artificial Sequence
  Description of Artificial Sequence: Synthetic hazel nut; 5' sequence + inner sequence + 3' sequence
tagggaagagaaggacatatgatgcacggaacgcaatgtacgtagcgtcgacattgactagtacatgaccacttga

SEQ ID NO: 19965 - DNA, 76 bp, Artificial Sequence
  Description of Artificial Sequence: Synthetic hazel nut; 5' sequence + inner sequence + 3' sequence
tagggaagagaaggacatatgatacggcacggacactacggcatgtacgcatattgactagtacatgaccacttga

SEQ ID NO: 19966 - DNA, 76 bp, Artificial Sequence
  Description of Artificial Sequence: Synthetic hazel nut; 5' sequence + inner sequence + 3' sequence
tagggaagagaaggacatatgatcgtgacgcacatggcacacaccgctacgcgttgactagtacatgaccacttga

SEQ ID NO: 19967 - DNA, 76 bp, Artificial Sequence; identical to SEQ ID NO: 3811
  Description of Artificial Sequence: Synthetic hazel nut; 5' sequence + inner sequence + 3' sequence

SEQ ID NO: 19968 - DNA, 76 bp, Artificial Sequence
  Description of Artificial Sequence: Synthetic hazel nut; 5' sequence + inner sequence + 3' sequence
tagggaagagaaggacatatgatcctgcctcgtgcctggacgctccatgcgcgttgactagtacatgaccacttga

SEQ ID NO: 19969 - DNA, 76 bp, Artificial Sequence; identical to SEQ ID NO: 7590
  Description of Artificial Sequence: Synthetic hazel nut; 5' sequence + inner sequence + 3' sequence

SEQ ID NO: 19970 - DNA, 76 bp, Artificial Sequence
  Description of Artificial Sequence: Synthetic hazel nut; 5' sequence + inner sequence + 3' sequence
tagggaagagaaggacatatgatgcgcatgcaaggcacggtacgtactgcgcattgactagtacatgaccacttga

SEQ ID NO: 19971 - DNA, 76 bp, Artificial Sequence; identical to SEQ ID NO: 3768
  Description of Artificial Sequence: Synthetic hazel nut; 5' sequence + inner sequence + 3' sequence

SEQ ID NO: 19972 - DNA, 76 bp, Artificial Sequence; identical to SEQ ID NO: 3677
  Description of Artificial Sequence: Synthetic hazel nut; 5' sequence + inner sequence + 3' sequence

SEQ ID NO: 19973 - DNA, 76 bp, Artificial Sequence
  Description of Artificial Sequence: Synthetic hazel nut; 5' sequence + inner sequence + 3' sequence
tagggaagagaaggacatatgatggccgaacggacgtacgtgcacgcagcccgttgactagtacatgaccacttga

SEQ ID NO: 19974 - DNA, 76 bp, Artificial Sequence; identical to SEQ ID NO: 3574
  Description of Artificial Sequence: Synthetic hazel nut; 5' sequence + inner sequence + 3' sequence

SEQ ID NO: 19975 - DNA, 76 bp, Artificial Sequence
  Description of Artificial Sequence: Synthetic hazel nut; 5' sequence + inner sequence + 3' sequence
tagggaagagaaggacatatgatcgatggccgaacgaagcacgttgctacgcgttgactagtacatgaccacttga

SEQ ID NO: 19976 - DNA, 76 bp, Artificial Sequence
  Description of Artificial Sequence: Synthetic hazel nut; 5' sequence + inner sequence + 3' sequence
tagggaagagaaggacatatgatccgtcacatggatcggacctgatgcgcaccttgactagtacatgaccacttga

SEQ ID NO: 19977 - DNA, 76 bp, Artificial Sequence; identical to SEQ ID NO: 3341
  Description of Artificial Sequence: Synthetic hazel nut; 5' sequence + inner sequence + 3' sequence

SEQ ID NO: 19978 - DNA, 76 bp, Artificial Sequence
  Description of Artificial Sequence: Synthetic hazel nut; 5' sequence + inner sequence + 3' sequence
tagggaagagaaggacatatgatcgtgacacgaacgcgatgtacgatgcgacattgactagtacatgaccacttga

SEQ ID NO: 19979 - DNA, 76 bp, Artificial Sequence
  Description of Artificial Sequence: Synthetic hazel nut; 5' sequence + inner sequence + 3' sequence
tagggaagagaaggacatatgatacgatgcggcatacgtacgctacgtggccattgactagtacatgaccacttga

SEQ ID NO: 19980 - DNA, 76 bp, Artificial Sequence
  Description of Artificial Sequence: Synthetic hazel nut; 5' sequence + inner sequence + 3' sequence
tagggaagagaaggacatatgatcgtgccgccaccctgaccgatgcgtggtgattgactagtacatgaccacttga

SEQ ID NO: 19981 - DNA, 76 bp, Artificial Sequence; identical to SEQ ID NO: 3555
  Description of Artificial Sequence: Synthetic hazel nut; 5' sequence + inner sequence + 3' sequence

SEQ ID NO: 19982 - DNA, 76 bp, Artificial Sequence
  Description of Artificial Sequence: Synthetic hazel nut; 5' sequence + inner sequence + 3' sequence
tagggaagagaaggacatatgatggcatgggatgaacgaggcatgatgcgtcattgactagtacatgaccacttga

SEQ ID NO: 19983 - DNA, 76 bp, Artificial Sequence; identical to SEQ ID NO: 3403
  Description of Artificial Sequence: Synthetic hazel nut; 5' sequence + inner sequence + 3' sequence

SEQ ID NO: 19984 - DNA, 76 bp, Artificial Sequence
  Description of Artificial Sequence: Synthetic hazel nut; 5' sequence + inner sequence + 3' sequence
tagggaagagaaggacatatgatccgtgcgcatgaacggtatggtgcttcgtgttgactagtacatgaccacttga

SEQ ID NO: 19985 - DNA, 76 bp, Artificial Sequence
  Description of Artificial Sequence: Synthetic hazel nut; 5' sequence + inner sequence + 3' sequence
tagggaagagaaggacatatgatgcgtgtgcgtacgatgacctgcgatgcgccttgactagtacatgaccacttga

SEQ ID NO: 19986 - DNA, 76 bp, Artificial Sequence
  Description of Artificial Sequence: Synthetic hazel nut; 5' sequence + inner sequence + 3' sequence
tagggaagagaaggacatatgatgcgtgcgatgaccggatcgtgccatgcggattgactagtacatgaccacttga

SEQ ID NO: 19987 - DNA, 76 bp, Artificial Sequence
  Description of Artificial Sequence: Synthetic hazel nut; 5' sequence + inner sequence + 3' sequence
tagggaagagaaggacatatgattgacagcatggccaaacgacatcgtgcacattgactagtacatgaccacttga

SEQ ID NO: 19988 - DNA, 76 bp, Artificial Sequence
  Description of Artificial Sequence: Synthetic hazel nut; 5' sequence + inner sequence + 3' sequence
tagggaagagaaggacatatgatgcaatgcacacgtacgaccttcgcgccacgttgactagtacatgaccacttga

SEQ ID NO: 19989 - DNA, 76 bp, Artificial Sequence
  Description of Artificial Sequence: Synthetic hazel nut; 5' sequence + inner sequence + 3' sequence
tagggaagagaaggacatatgatggcaacacggtgcacatcgggtacatcgcgttgactagtacatgaccacttga

SEQ ID NO: 19990 - DNA, 76 bp, Artificial Sequence; identical to SEQ ID NO: 3799
  Description of Artificial Sequence: Synthetic hazel nut; 5' sequence + inner sequence + 3' sequence

SEQ ID NO: 19991 - DNA, 76 bp, Artificial Sequence; identical to SEQ ID NO: 11579
  Description of Artificial Sequence: Synthetic hazel nut; 5' sequence + inner sequence + 3' sequence

SEQ ID NO: 19992 - DNA, 76 bp, Artificial Sequence; identical to SEQ ID NO: 7761
  Description of Artificial Sequence: Synthetic hazel nut; 5' sequence + inner sequence + 3' sequence

SEQ ID NO: 19993 - DNA, 76 bp, Artificial Sequence
  Description of Artificial Sequence: Synthetic hazel nut; 5' sequence + inner sequence + 3' sequence
tagggaagagaaggacatatgatcacgcagggaacgtatccgtccttgccgcgttgactagtacatgaccacttga

SEQ ID NO: 19994 - DNA, 77 bp, Artificial Sequence; identical to SEQ ID NO: 3971
  Description of Artificial Sequence: Synthetic hazel nut; 5' sequence + inner sequence + 3' sequence

SEQ ID NO: 19995 - DNA, 76 bp, Artificial Sequence; identical to SEQ ID NO: 3621
  Description of Artificial Sequence: Synthetic hazel nut; 5' sequence + inner sequence + 3' sequence

SEQ ID NO: 19996 - DNA, 76 bp, Artificial Sequence; identical to SEQ ID NO: 3901
  Description of Artificial Sequence: Synthetic hazel nut; 5' sequence + inner sequence + 3' sequence

SEQ ID NO: 19997 - DNA, 76 bp, Artificial Sequence
  Description of Artificial Sequence: Synthetic hazel nut; 5' sequence + inner sequence + 3' sequence
tagggaagagaaggacatatgatgcacacataccgttacgttgtggtgcaccattgactagtacatgaccacttga

SEQ ID NO: 19998 - DNA, 76 bp, Artificial Sequence; identical to SEQ ID NO: 3493
  Description of Artificial Sequence: Synthetic hazel nut; 5' sequence + inner sequence + 3' sequence

SEQ ID NO: 19999 - DNA, 76 bp, Artificial Sequence
  Description of Artificial Sequence: Synthetic hazel nut; 5' sequence + inner sequence + 3' sequence
tagggaagagaaggacatatgatggcatgcgttgaacgaggcatgatgcgtcattgactagtacatgaccacttga

SEQ ID NO: 20000 - DNA, 76 bp, Artificial Sequence
  Description of Artificial Sequence: Synthetic hazel nut; 5' sequence + inner sequence + 3' sequence
tagggaagagaaggacatatgatgcaaccacagcacatcgacgccctcgcaccttgactagtacatgaccacttga

SEQ ID NO: 20001 - DNA, 76 bp, Artificial Sequence
  Description of Artificial Sequence: Synthetic hazel nut; 5' sequence + inner sequence + 3' sequence
tagggaagagaaggacatatgatcacgacaagcacacatgtcctgcctgcacgttgactagtacatgaccacttga

SEQ ID NO: 20002 - DNA, 76 bp, Artificial Sequence; identical to SEQ ID NO: 3891
  Description of Artificial Sequence: Synthetic hazel nut; 5' sequence + inner sequence + 3' sequence

SEQ ID NO: 20003 - DNA, 30 bp, Artificial Sequence; identical to SEQ ID NO: 4
  Description of Artificial Sequence: Synthetic pecan; inner sequence

SEQ ID NO: 20004 - DNA, 30 bp, Artificial Sequence; identical to SEQ ID NO: 3
  Description of Artificial Sequence: Synthetic pecan; inner sequence

SEQ ID NO: 20005 - DNA, 30 bp, Artificial Sequence; identical to SEQ ID NO: 7
  Description of Artificial Sequence: Synthetic pecan; inner sequence

SEQ ID NO: 20006 - DNA, 30 bp, Artificial Sequence; identical to SEQ ID NO: 8
  Description of Artificial Sequence: Synthetic pecan; inner sequence

SEQ ID NO: 20007 - DNA, 30 bp, Artificial Sequence; identical to SEQ ID NO: 14
  Description of Artificial Sequence: Synthetic pecan; inner sequence

SEQ ID NO: 20008 - DNA, 30 bp, Artificial Sequence; identical to SEQ ID NO: 5
  Description of Artificial Sequence: Synthetic pecan; inner sequence

SEQ ID NO: 20009 - DNA, 30 bp, Artificial Sequence; identical to SEQ ID NO: 23
  Description of Artificial Sequence: Synthetic pecan; inner sequence

SEQ ID NO: 20010 - DNA, 30 bp, Artificial Sequence; identical to SEQ ID NO: 12
  Description of Artificial Sequence: Synthetic pecan; inner sequence

SEQ ID NO: 20011 - DNA, 30 bp, Artificial Sequence; identical to SEQ ID NO: 11
  Description of Artificial Sequence: Synthetic pecan; inner sequence

SEQ ID NO: 20012 - DNA, 30 bp, Artificial Sequence; identical to SEQ ID NO: 20
  Description of Artificial Sequence: Synthetic pecan; inner sequence

SEQ ID NO: 20013 - DNA, 30 bp, Artificial Sequence; identical to SEQ ID NO: 6
  Description of Artificial Sequence: Synthetic pecan; inner sequence

SEQ ID NO: 20014 - DNA, 30 bp, Artificial Sequence; identical to SEQ ID NO: 9
  Description of Artificial Sequence: Synthetic pecan; inner sequence

SEQ ID NO: 20015 - DNA, 30 bp, Artificial Sequence; identical to SEQ ID NO: 46
  Description of Artificial Sequence: Synthetic pecan; inner sequence

SEQ ID NO: 20016 - DNA, 30 bp, Artificial Sequence; identical to SEQ ID NO: 13
  Description of Artificial Sequence: Synthetic pecan; inner sequence

SEQ ID NO: 20017 - DNA, 30 bp, Artificial Sequence; identical to SEQ ID NO: 10
  Description of Artificial Sequence: Synthetic pecan; inner sequence

SEQ ID NO: 20018 - DNA, 30 bp, Artificial Sequence; identical to SEQ ID NO: 41
  Description of Artificial Sequence: Synthetic pecan; inner sequence

SEQ ID NO: 20019 - DNA, 30 bp, Artificial Sequence; identical to SEQ ID NO: 30
  Description of Artificial Sequence: Synthetic pecan; inner sequence

SEQ ID NO: 20020 - DNA, 30 bp, Artificial Sequence; identical to SEQ ID NO: 21
  Description of Artificial Sequence: Synthetic pecan; inner sequence

SEQ ID NO: 20021 - DNA, 30 bp, Artificial Sequence; identical to SEQ ID NO: 15
  Description of Artificial Sequence: Synthetic pecan; inner sequence

SEQ ID NO: 20022 - DNA, 29 bp, Artificial Sequence
  Description of Artificial Sequence: Synthetic pecan; inner sequence
gcacgccgatgccctcatgtggccgtgga

SEQ ID NO: 20023 - DNA, 30 bp, Artificial Sequence; identical to SEQ ID NO: 28
  Description of Artificial Sequence: Synthetic pecan; inner sequence

SEQ ID NO: 20024 - DNA, 30 bp, Artificial Sequence; identical to SEQ ID NO: 37
  Description of Artificial Sequence: Synthetic pecan; inner sequence

SEQ ID NO: 20025 - DNA, 30 bp, Artificial Sequence; identical to SEQ ID NO: 18
  Description of Artificial Sequence: Synthetic pecan; inner sequence

SEQ ID NO: 20026 - DNA, 30 bp, Artificial Sequence; identical to SEQ ID NO: 45
  Description of Artificial Sequence: Synthetic pecan; inner sequence

SEQ ID NO: 20027 - DNA, 30 bp, Artificial Sequence; identical to SEQ ID NO: 33
  Description of Artificial Sequence: Synthetic pecan; inner sequence

SEQ ID NO: 20028 - DNA, 30 bp, Artificial Sequence; identical to SEQ ID NO: 52
  Description of Artificial Sequence: Synthetic pecan; inner sequence

SEQ ID NO: 20029 - DNA, 30 bp, Artificial Sequence; identical to SEQ ID NO: 49
  Description of Artificial Sequence: Synthetic pecan; inner sequence

SEQ ID NO: 20030 - DNA, 30 bp, Artificial Sequence; identical to SEQ ID NO: 54
  Description of Artificial Sequence: Synthetic pecan; inner sequence

SEQ ID NO: 20031 - DNA, 30 bp, Artificial Sequence; identical to SEQ ID NO: 17
  Description of Artificial Sequence: Synthetic pecan; inner sequence

SEQ ID NO: 20032 - DNA, 30 bp, Artificial Sequence; identical to SEQ ID NO: 77
  Description of Artificial Sequence: Synthetic pecan; inner sequence

SEQ ID NO: 20033 - DNA, 30 bp, Artificial Sequence; identical to SEQ ID NO: 78
  Description of Artificial Sequence: Synthetic pecan; inner sequence

SEQ ID NO: 20034 - DNA, 30 bp, Artificial Sequence; identical to SEQ ID NO: 22
  Description of Artificial Sequence: Synthetic pecan; inner sequence

SEQ ID NO: 20035 - DNA, 30 bp, Artificial Sequence; identical to SEQ ID NO: 81
  Description of Artificial Sequence: Synthetic pecan; inner sequence

SEQ ID NO: 20036 - DNA, 30 bp, Artificial Sequence; identical to SEQ ID NO: 35
  Description of Artificial Sequence: Synthetic pecan; inner sequence

SEQ ID NO: 20037 - DNA, 30 bp, Artificial Sequence; identical to SEQ ID NO: 73
  Description of Artificial Sequence: Synthetic pecan; inner sequence

SEQ ID NO: 20038 - DNA, 30 bp, Artificial Sequence; identical to SEQ ID NO: 59
  Description of Artificial Sequence: Synthetic pecan; inner sequence

SEQ ID NO: 20039 - DNA, 30 bp, Artificial Sequence; identical to SEQ ID NO: 201
  Description of Artificial Sequence: Synthetic pecan; inner sequence

SEQ ID NO: 20040 - DNA, 30 bp, Artificial Sequence; identical to SEQ ID NO: 40
  Description of Artificial Sequence: Synthetic pecan; inner sequence

SEQ ID NO: 20041 - DNA, 30 bp, Artificial Sequence; identical to SEQ ID NO: 220
  Description of Artificial Sequence: Synthetic pecan; inner sequence

SEQ ID NO: 20042 - DNA, 30 bp, Artificial Sequence; identical to SEQ ID NO: 161
  Description of Artificial Sequence: Synthetic pecan; inner sequence

SEQ ID NO: 20043 - DNA, 30 bp, Artificial Sequence; identical to SEQ ID NO: 67
  Description of Artificial Sequence: Synthetic pecan; inner sequence

SEQ ID NO: 20044 - DNA, 30 bp, Artificial Sequence; identical to SEQ ID NO: 74
  Description of Artificial Sequence: Synthetic pecan; inner sequence

SEQ ID NO: 20045 - DNA, 30 bp, Artificial Sequence; identical to SEQ ID NO: 100
  Description of Artificial Sequence: Synthetic pecan; inner sequence

SEQ ID NO: 20046 - DNA, 30 bp, Artificial Sequence; identical to SEQ ID NO: 247
  Description of Artificial Sequence: Synthetic pecan; inner sequence

SEQ ID NO: 20047 - DNA, 30 bp, Artificial Sequence; identical to SEQ ID NO: 71
  Description of Artificial Sequence: Synthetic pecan; inner sequence

SEQ ID NO: 20048 - DNA, 30 bp, Artificial Sequence; identical to SEQ ID NO: 31
  Description of Artificial Sequence: Synthetic pecan; inner sequence

SEQ ID NO: 20049 - DNA, 30 bp, Artificial Sequence; identical to SEQ ID NO: 51
  Description of Artificial Sequence: Synthetic pecan; inner sequence

SEQ ID NO: 20050 - DNA, 30 bp, Artificial Sequence; identical to SEQ ID NO: 55
  Description of Artificial Sequence: Synthetic pecan; inner sequence

SEQ ID NO: 20051 - DNA, 30 bp, Artificial Sequence; identical to SEQ ID NO: 144
  Description of Artificial Sequence: Synthetic pecan; inner sequence

SEQ ID NO: 20052 - DNA, 30 bp, Artificial Sequence; identical to SEQ ID NO: 96
  Description of Artificial Sequence: Synthetic pecan; inner sequence

SEQ ID NO: 20053 - DNA, 28 bp, Artificial Sequence
  Description of Artificial Sequence: Synthetic pecan; inner sequence
ggacgcagctgacctagcatgtgtgtca

SEQ ID NO: 20054 - DNA, 30 bp, Artificial Sequence; identical to SEQ ID NO: 454
  Description of Artificial Sequence: Synthetic pecan; inner sequence

SEQ ID NO: 20055 - DNA, 30 bp, Artificial Sequence; identical to SEQ ID NO: 53
  Description of Artificial Sequence: Synthetic pecan; inner sequence

SEQ ID NO: 20056 - DNA, 30 bp, Artificial Sequence; identical to SEQ ID NO: 50
  Description of Artificial Sequence: Synthetic pecan; inner sequence

SEQ ID NO: 20057 - DNA, 30 bp, Artificial Sequence; identical to SEQ ID NO: 32
  Description of Artificial Sequence: Synthetic pecan; inner sequence

SEQ ID NO: 20058 - DNA, 30 bp, Artificial Sequence; identical to SEQ ID NO: 34
  Description of Artificial Sequence: Synthetic pecan; inner sequence

SEQ ID NO: 20059 - DNA, 30 bp, Artificial Sequence; identical to SEQ ID NO: 185
  Description of Artificial Sequence: Synthetic pecan; inner sequence

SEQ ID NO: 20060 - DNA, 28 bp, Artificial Sequence
  Description of Artificial Sequence: Synthetic pecan; inner sequence
ggacgcaacgtaccgtatcgtggccatg

SEQ ID NO: 20061 - DNA, 30 bp, Artificial Sequence; identical to SEQ ID NO: 29
  Description of Artificial Sequence: Synthetic pecan; inner sequence

SEQ ID NO: 20062 - DNA, 30 bp, Artificial Sequence; identical to SEQ ID NO: 66
  Description of Artificial Sequence: Synthetic pecan; inner sequence

SEQ ID NO: 20063 - DNA, 30 bp, Artificial Sequence; identical to SEQ ID NO: 279
  Description of Artificial Sequence: Synthetic pecan; inner sequence

SEQ ID NO: 20064 - DNA, 30 bp, Artificial Sequence; identical to SEQ ID NO: 80
  Description of Artificial Sequence: Synthetic pecan; inner sequence

SEQ ID NO: 20065 - DNA, 30 bp, Artificial Sequence; identical to SEQ ID NO: 174
  Description of Artificial Sequence: Synthetic pecan; inner sequence

SEQ ID NO: 20066 - DNA, 30 bp, Artificial Sequence; identical to SEQ ID NO: 151
  Description of Artificial Sequence: Synthetic pecan; inner sequence

SEQ ID NO: 20067 - DNA, 30 bp, Artificial Sequence; identical to SEQ ID NO: 506
  Description of Artificial Sequence: Synthetic pecan; inner sequence

SEQ ID NO: 20068 - DNA, 30 bp, Artificial Sequence; identical to SEQ ID NO: 194
  Description of Artificial Sequence: Synthetic pecan; inner sequence

SEQ ID NO: 20069 - DNA, 30 bp, Artificial Sequence; identical to SEQ ID NO: 136
  Description of Artificial Sequence: Synthetic pecan; inner sequence

SEQ ID NO: 20070 - DNA, 30 bp, Artificial Sequence; identical to SEQ ID NO: 901
  Description of Artificial Sequence: Synthetic pecan; inner sequence

SEQ ID NO: 20071 - DNA, 30 bp, Artificial Sequence; identical to SEQ ID NO: 92
  Description of Artificial Sequence: Synthetic pecan; inner sequence

SEQ ID NO: 20072 - DNA, 30 bp, Artificial Sequence; identical to SEQ ID NO: 229
  Description of Artificial Sequence: Synthetic pecan; inner sequence

SEQ ID NO: 20073 - DNA, 30 bp, Artificial Sequence; identical to SEQ ID NO: 323
  Description of Artificial Sequence: Synthetic pecan; inner sequence

SEQ ID NO: 20074 - DNA, 30 bp, Artificial Sequence; identical to SEQ ID NO: 42
  Description of Artificial Sequence: Synthetic pecan; inner sequence

SEQ ID NO: 20075 - DNA, 30 bp, Artificial Sequence; identical to SEQ ID NO: 232
  Description of Artificial Sequence: Synthetic pecan; inner sequence

SEQ ID NO: 20076 - DNA, 30 bp, Artificial Sequence; identical to SEQ ID NO: 48
  Description of Artificial Sequence: Synthetic pecan; inner sequence

SEQ ID NO: 20077 - DNA, 30 bp, Artificial Sequence; identical to SEQ ID NO: 311
  Description of Artificial Sequence: Synthetic pecan; inner sequence

SEQ ID NO: 20078 - DNA, 30 bp, Artificial Sequence; identical to SEQ ID NO: 517
  Description of Artificial Sequence: Synthetic pecan; inner sequence

SEQ ID NO: 20079 - DNA, 30 bp, Artificial Sequence; identical to SEQ ID NO: 115
  Description of Artificial Sequence: Synthetic pecan; inner sequence

SEQ ID NO: 20080 - DNA, 30 bp, Artificial Sequence; identical to SEQ ID NO: 553
  Description of Artificial Sequence: Synthetic pecan; inner sequence

SEQ ID NO: 20081 - DNA, 30 bp, Artificial Sequence; identical to SEQ ID NO: 290
  Description of Artificial Sequence: Synthetic pecan; inner sequence

SEQ ID NO: 20082 - DNA, 30 bp, Artificial Sequence; identical to SEQ ID NO: 207
  Description of Artificial Sequence: Synthetic pecan; inner sequence

SEQ ID NO: 20083 - DNA, 30 bp, Artificial Sequence; identical to SEQ ID NO: 406
  Description of Artificial Sequence: Synthetic pecan; inner sequence

SEQ ID NO: 20084 - DNA, 30 bp, Artificial Sequence; identical to SEQ ID NO: 121
  Description of Artificial Sequence: Synthetic pecan; inner sequence

SEQ ID NO: 20085 - DNA, 30 bp, Artificial Sequence; identical to SEQ ID NO: 145
  Description of Artificial Sequence: Synthetic pecan; inner sequence

SEQ ID NO: 20086 - DNA, 30 bp, Artificial Sequence; identical to SEQ ID NO: 184
  Description of Artificial Sequence: Synthetic pecan; inner sequence

SEQ ID NO: 20087 - DNA, 30 bp, Artificial Sequence; identical to SEQ ID NO: 131
  Description of Artificial Sequence: Synthetic pecan; inner sequence

SEQ ID NO: 20088 - DNA, 30 bp, Artificial Sequence; identical to SEQ ID NO: 117
  Description of Artificial Sequence: Synthetic pecan; inner sequence

SEQ ID NO: 20089 - DNA, 30 bp, Artificial Sequence; identical to SEQ ID NO: 437
  Description of Artificial Sequence: Synthetic pecan; inner sequence

SEQ ID NO: 20090 - DNA, 30 bp, Artificial Sequence; identical to SEQ ID NO: 4472
  Description of Artificial Sequence: Synthetic pecan; inner sequence

SEQ ID NO: 20091 - DNA, 30 bp, Artificial Sequence; identical to SEQ ID NO: 171
  Description of Artificial Sequence: Synthetic pecan; inner sequence

SEQ ID NO: 20092 - DNA, 30 bp, Artificial Sequence; identical to SEQ ID NO: 630
  Description of Artificial Sequence: Synthetic pecan; inner sequence

SEQ ID NO: 20093 - DNA, 30 bp, Artificial Sequence; identical to SEQ ID NO: 285
  Description of Artificial Sequence: Synthetic pecan; inner sequence

SEQ ID NO: 20094 - DNA, 30 bp, Artificial Sequence; identical to SEQ ID NO: 111
  Description of Artificial Sequence: Synthetic pecan; inner sequence

SEQ ID NO: 20095 - DNA, 30 bp, Artificial Sequence; identical to SEQ ID NO: 164
  Description of Artificial Sequence: Synthetic pecan; inner sequence

SEQ ID NO: 20096 - DNA, 30 bp, Artificial Sequence; identical to SEQ ID NO: 257
  Description of Artificial Sequence: Synthetic pecan; inner sequence

SEQ ID NO: 20097 - DNA, 30 bp, Artificial Sequence; identical to SEQ ID NO: 243
  Description of Artificial Sequence: Synthetic pecan; inner sequence

SEQ ID NO: 20098 - DNA, 30 bp, Artificial Sequence; identical to SEQ ID NO: 123
  Description of Artificial Sequence: Synthetic pecan; inner sequence

SEQ ID NO: 20099 - DNA, 30 bp, Artificial Sequence; identical to SEQ ID NO: 141
  Description of Artificial Sequence: Synthetic pecan; inner sequence

SEQ ID NO: 20100 - DNA, 30 bp, Artificial Sequence; identical to SEQ ID NO: 245
  Description of Artificial Sequence: Synthetic pecan; inner sequence

SEQ ID NO: 20101 - DNA, 29 bp, Artificial Sequence
  Description of Artificial Sequence: Synthetic pecan; inner sequence
ggacgccgatgccctcatgtggccgtgga

SEQ ID NO: 20102 - DNA, 29 bp, Artificial Sequence
  Description of Artificial Sequence: Synthetic pecan; inner sequence
ggccgaacggaccgacaagtgcgcatgga

SEQ ID NO: 20103 - DNA, 30 bp, Artificial Sequence; identical to SEQ ID NO: 877
  Description of Artificial Sequence: Synthetic pecan; inner sequence

SEQ ID NO: 20104 - DNA, 30 bp, Artificial Sequence; identical to SEQ ID NO: 126
  Description of Artificial Sequence: Synthetic pecan; inner sequence

SEQ ID NO: 20105 - DNA, 30 bp, Artificial Sequence
  Description of Artificial Sequence: Synthetic pecan; inner sequence
ggacgcagcgtacctcaacgtggacgtgca

SEQ ID NO: 20106 - DNA, 30 bp, Artificial Sequence; identical to SEQ ID NO: 196
  Description of Artificial Sequence: Synthetic pecan; inner sequence

SEQ ID NO: 20107 - DNA, 30 bp, Artificial Sequence; identical to SEQ ID NO: 231
  Description of Artificial Sequence: Synthetic pecan; inner sequence

SEQ ID NO: 20108 - DNA, 30 bp, Artificial Sequence; identical to SEQ ID NO: 787
  Description of Artificial Sequence: Synthetic pecan; inner sequence

SEQ ID NO: 20109 - DNA, 30 bp, Artificial Sequence; identical to SEQ ID NO: 344
  Description of Artificial Sequence: Synthetic pecan; inner sequence

SEQ ID NO: 20110 - DNA, 30 bp, Artificial Sequence; identical to SEQ ID NO: 76
  Description of Artificial Sequence: Synthetic pecan; inner sequence

SEQ ID NO: 20111 - DNA, 30 bp, Artificial Sequence; identical to SEQ ID NO: 365
  Description of Artificial Sequence: Synthetic pecan; inner sequence

SEQ ID NO: 20112 - DNA, 30 bp, Artificial Sequence; identical to SEQ ID NO: 132
  Description of Artificial Sequence: Synthetic pecan; inner sequence

SEQ ID NO: 20113 - DNA, 30 bp, Artificial Sequence; identical to SEQ ID NO: 283
  Description of Artificial Sequence: Synthetic pecan; inner sequence

SEQ ID NO: 20114 - DNA, 30 bp, Artificial Sequence; identical to SEQ ID NO: 212
  Description of Artificial Sequence: Synthetic pecan; inner sequence

SEQ ID NO: 20115 - DNA, 30 bp, Artificial Sequence; identical to SEQ ID NO: 227
  Description of Artificial Sequence: Synthetic pecan; inner sequence

SEQ ID NO: 20116 - DNA, 30 bp, Artificial Sequence; identical to SEQ ID NO: 310
  Description of Artificial Sequence: Synthetic pecan; inner sequence

SEQ ID NO: 20117 - DNA, 30 bp, Artificial Sequence; identical to SEQ ID NO: 39
  Description of Artificial Sequence: Synthetic pecan; inner sequence

SEQ ID NO: 20118 - DNA, 30 bp, Artificial Sequence; identical to SEQ ID NO: 163
  Description of Artificial Sequence: Synthetic pecan; inner sequence

SEQ ID NO: 20119 - DNA, 30 bp, Artificial Sequence
  Description of Artificial Sequence: Synthetic pecan; inner sequence
ggcacaaacggaccgacacgtgcgcatgga

SEQ ID NO: 20120 - DNA, 30 bp, Artificial Sequence; identical to SEQ ID NO: 38
  Description of Artificial Sequence: Synthetic pecan; inner sequence

SEQ ID NO: 20121 - DNA, 31 bp, Artificial Sequence; identical to SEQ ID NO: 250
  Description of Artificial Sequence: Synthetic pecan; inner sequence

SEQ ID NO: 20122 - DNA, 30 bp, Artificial Sequence; identical to SEQ ID NO: 240
  Description of Artificial Sequence: Synthetic pecan; inner sequence

SEQ ID NO: 20123 - DNA, 30 bp, Artificial Sequence; identical to SEQ ID NO: 369
  Description of Artificial Sequence: Synthetic pecan; inner sequence

SEQ ID NO: 20124 - DNA, 30 bp, Artificial Sequence; identical to SEQ ID NO: 149
  Description of Artificial Sequence: Synthetic pecan; inner sequence

SEQ ID NO: 20125 - DNA, 30 bp, Artificial Sequence; identical to SEQ ID NO: 57
  Description of Artificial Sequence: Synthetic pecan; inner sequence

SEQ ID NO: 20126 - DNA, 30 bp, Artificial Sequence; identical to SEQ ID NO: 138
  Description of Artificial Sequence: Synthetic pecan; inner sequence

SEQ ID NO: 20127 - DNA, 30 bp, Artificial Sequence; identical to SEQ ID NO: 470
  Description of Artificial Sequence: Synthetic pecan; inner sequence

SEQ ID NO: 20128 - DNA, 30 bp, Artificial Sequence; identical to SEQ ID NO: 190
  Description of Artificial Sequence: Synthetic pecan; inner sequence

SEQ ID NO: 20129 - DNA, 30 bp, Artificial Sequence; identical to SEQ ID NO: 154
  Description of Artificial Sequence: Synthetic pecan; inner sequence

SEQ ID NO: 20130 - DNA, 30 bp, Artificial Sequence; identical to SEQ ID NO: 114
  Description of Artificial Sequence: Synthetic pecan; inner sequence

SEQ ID NO: 20131 - DNA, 30 bp, Artificial Sequence; identical to SEQ ID NO: 653
  Description of Artificial Sequence: Synthetic pecan; inner sequence

SEQ ID NO: 20132 - DNA, 30 bp, Artificial Sequence; identical to SEQ ID NO: 371
  Description of Artificial Sequence: Synthetic pecan; inner sequence

SEQ ID NO: 20133 - DNA, 30 bp, Artificial Sequence
  Description of Artificial Sequence: Synthetic pecan; inner sequence
gcacgactcgcaccctattatgaggccatg

SEQ ID NO: 20134 - DNA, 30 bp, Artificial Sequence; identical to SEQ ID NO: 4565
  Description of Artificial Sequence: Synthetic pecan; inner sequence

SEQ ID NO: 20135 - DNA, 30 bp, Artificial Sequence; identical to SEQ ID NO: 63
  Description of Artificial Sequence: Synthetic pecan; inner sequence

SEQ ID NO: 20136 - DNA, 25 bp, Artificial Sequence
  Description of Artificial Sequence: Synthetic pecan; inner sequence
ggcatgcacgcacctacacgtgggc

SEQ ID NO: 20137 - DNA, 30 bp, Artificial Sequence; identical to SEQ ID NO: 666
  Description of Artificial Sequence: Synthetic pecan; inner sequence

SEQ ID NO: 20138 - DNA, 30 bp, Artificial Sequence; identical to SEQ ID NO: 352
  Description of Artificial Sequence: Synthetic pecan; inner sequence

SEQ ID NO: 20139 - DNA, 30 bp, Artificial Sequence; identical to SEQ ID NO: 343
  Description of Artificial Sequence: Synthetic pecan; inner sequence

SEQ ID NO: 20140 - DNA, 30 bp, Artificial Sequence; identical to SEQ ID NO: 4691
  Description of Artificial Sequence: Synthetic pecan; inner sequence

SEQ ID NO: 20141 - DNA, 30 bp, Artificial Sequence; identical to SEQ ID NO: 358
  Description of Artificial Sequence: Synthetic pecan; inner sequence

SEQ ID NO: 20142 - DNA, 30 bp, Artificial Sequence; identical to SEQ ID NO: 4503
  Description of Artificial Sequence: Synthetic pecan; inner sequence

SEQ ID NO: 20143 - DNA, 30 bp, Artificial Sequence; identical to SEQ ID NO: 263
  Description of Artificial Sequence: Synthetic pecan; inner sequence

SEQ ID NO: 20144 - DNA, 30 bp, Artificial Sequence; identical to SEQ ID NO: 920
  Description of Artificial Sequence: Synthetic pecan; inner sequence

SEQ ID NO: 20145 - DNA, 30 bp, Artificial Sequence; identical to SEQ ID NO: 125
  Description of Artificial Sequence: Synthetic pecan; inner sequence

SEQ ID NO: 20146 - DNA, 30 bp, Artificial Sequence; identical to SEQ ID NO: 419
  Description of Artificial Sequence: Synthetic pecan; inner sequence

SEQ ID NO: 20147 - DNA, 30 bp, Artificial Sequence; identical to SEQ ID NO: 632
  Description of Artificial Sequence: Synthetic pecan; inner sequence

SEQ ID NO: 20148 - DNA, 30 bp, Artificial Sequence; identical to SEQ ID NO: 340
  Description of Artificial Sequence: Synthetic pecan; inner sequence

SEQ ID NO: 20149 - DNA, 30 bp, Artificial Sequence; identical to SEQ ID NO: 567
  Description of Artificial Sequence: Synthetic pecan; inner sequence

SEQ ID NO: 20150 - DNA, 30 bp, Artificial Sequence; identical to SEQ ID NO: 192
  Description of Artificial Sequence: Synthetic pecan; inner sequence

SEQ ID NO: 20151 - DNA, 30 bp, Artificial Sequence
  Description of Artificial Sequence: Synthetic pecan; inner sequence
ggccacagcgtacctcaacgtggccgtgca

SEQ ID NO: 20152 - DNA, 30 bp, Artificial Sequence; identical to SEQ ID NO: 93
  Description of Artificial Sequence: Synthetic pecan; inner sequence

SEQ ID NO: 20153 - DNA, 30 bp, Artificial Sequence; identical to SEQ ID NO: 884
  Description of Artificial Sequence: Synthetic pecan; inner sequence

SEQ ID NO: 20154 - DNA, 30 bp, Artificial Sequence; identical to SEQ ID NO: 205
  Description of Artificial Sequence: Synthetic pecan; inner sequence

SEQ ID NO: 20155 - DNA, 30 bp, Artificial Sequence; identical to SEQ ID NO: 168
  Description of Artificial Sequence: Synthetic pecan; inner sequence

SEQ ID NO: 20156 - DNA, 30 bp, Artificial Sequence; identical to SEQ ID NO: 274
  Description of Artificial Sequence: Synthetic pecan; inner sequence

SEQ ID NO: 20157 - DNA, 30 bp, Artificial Sequence; identical to SEQ ID NO: 272
  Description of Artificial Sequence: Synthetic pecan; inner sequence

SEQ ID NO: 20158 - DNA, 30 bp, Artificial Sequence; identical to SEQ ID NO: 647
  Description of Artificial Sequence: Synthetic pecan; inner sequence

SEQ ID NO: 20159 - DNA, 30 bp, Artificial Sequence; identical to SEQ ID NO: 4543
  Description of Artificial Sequence: Synthetic pecan; inner sequence

SEQ ID NO: 20160 - DNA, 30 bp, Artificial Sequence; identical to SEQ ID NO: 142
  Description of Artificial Sequence: Synthetic pecan; inner sequence

SEQ ID NO: 20161 - DNA, 30 bp, Artificial Sequence; identical to SEQ ID NO: 113
  Description of Artificial Sequence: Synthetic pecan; inner sequence

SEQ ID NO: 20162 - DNA, 30 bp, Artificial Sequence; identical to SEQ ID NO: 443
  Description of Artificial Sequence: Synthetic pecan; inner sequence

SEQ ID NO: 20163 - DNA, 30 bp, Artificial Sequence; identical to SEQ ID NO: 4405
  Description of Artificial Sequence: Synthetic pecan; inner sequence

SEQ ID NO: 20164 - DNA, 30 bp, Artificial Sequence; identical to SEQ ID NO: 457
  Description of Artificial Sequence: Synthetic pecan; inner sequence

SEQ ID NO: 20165 - DNA, 30 bp, Artificial Sequence
  Description of Artificial Sequence: Synthetic pecan; inner sequence
ccgatcgcacgtcaaggcaggctgtacgcg

SEQ ID NO: 20166 - DNA, 30 bp, Artificial Sequence; identical to SEQ ID NO: 177
  Description of Artificial Sequence: Synthetic pecan; inner sequence

SEQ ID NO: 20167 - DNA, 30 bp, Artificial Sequence; identical to SEQ ID NO: 724
  Description of Artificial Sequence: Synthetic pecan; inner sequence

SEQ ID NO: 20168 - DNA, 30 bp, Artificial Sequence; identical to SEQ ID NO: 188
  Description of Artificial Sequence: Synthetic pecan; inner sequence

SEQ ID NO: 20169 - DNA, 30 bp, Artificial Sequence; identical to SEQ ID NO: 521
  Description of Artificial Sequence: Synthetic pecan; inner sequence

SEQ ID NO: 20170 - DNA, 31 bp, Artificial Sequence; identical to SEQ ID NO: 221
  Description of Artificial Sequence: Synthetic pecan; inner sequence

SEQ ID NO: 20171 - DNA, 31 bp, Artificial Sequence; identical to SEQ ID NO: 971
  Description of Artificial Sequence: Synthetic pecan; inner sequence

SEQ ID NO: 20172 - DNA, 30 bp, Artificial Sequence; identical to SEQ ID NO: 4498
  Description of Artificial Sequence: Synthetic pecan; inner sequence

SEQ ID NO: 20173 - DNA, 30 bp, Artificial Sequence; identical to SEQ ID NO: 673
  Description of Artificial Sequence: Synthetic pecan; inner sequence

SEQ ID NO: 20174 - DNA, 30 bp, Artificial Sequence; identical to SEQ ID NO: 262
  Description of Artificial Sequence: Synthetic pecan; inner sequence

SEQ ID NO: 20175 - DNA, 30 bp, Artificial Sequence; identical to SEQ ID NO: 622
  Description of Artificial Sequence: Synthetic pecan; inner sequence

SEQ ID NO: 20176 - DNA, 30 bp, Artificial Sequence; identical to SEQ ID NO: 615
  Description of Artificial Sequence: Synthetic pecan; inner sequence

SEQ ID NO: 20177 - DNA, 30 bp, Artificial Sequence; identical to SEQ ID NO: 617
  Description of Artificial Sequence: Synthetic pecan; inner sequence

SEQ ID NO: 20178 - DNA, 30 bp, Artificial Sequence; identical to SEQ ID NO: 4336
  Description of Artificial Sequence: Synthetic pecan; inner sequence

SEQ ID NO: 20179 - DNA, 28 bp, Artificial Sequence
  Description of Artificial Sequence: Synthetic pecan; inner sequence
ggcatgcacgcacctacacgtgatcatg

SEQ ID NO: 20180 - DNA, 30 bp, Artificial Sequence
  Description of Artificial Sequence: Synthetic pecan; inner sequence
ggcacaaacggaccgacatgtgcgcatgga

SEQ ID NO: 20181 - DNA, 30 bp, Artificial Sequence; identical to SEQ ID NO: 891
  Description of Artificial Sequence: Synthetic pecan; inner sequence

SEQ ID NO: 20182 - DNA, 30 bp, Artificial Sequence; identical to SEQ ID NO: 728
  Description of Artificial Sequence: Synthetic pecan; inner sequence

SEQ ID NO: 20183 - DNA, 30 bp, Artificial Sequence; identical to SEQ ID NO: 776
  Description of Artificial Sequence: Synthetic pecan; inner sequence

SEQ ID NO: 20184 - DNA, 30 bp, Artificial Sequence; identical to SEQ ID NO: 414
  Description of Artificial Sequence: Synthetic pecan; inner sequence

SEQ ID NO: 20185 - DNA, 30 bp, Artificial Sequence; identical to SEQ ID NO: 8767
  Description of Artificial Sequence: Synthetic pecan; inner sequence

SEQ ID NO: 20186 - DNA, 30 bp, Artificial Sequence; identical to SEQ ID NO: 294
  Description of Artificial Sequence: Synthetic pecan; inner sequence

SEQ ID NO: 20187 - DNA, 31 bp, Artificial Sequence
  Description of Artificial Sequence: Synthetic pecan; inner sequence
ggacgcagcggaacgttcgagtggttgcgta

SEQ ID NO: 20188 - DNA, 30 bp, Artificial Sequence; identical to SEQ ID NO: 12521
  Description of Artificial Sequence: Synthetic pecan; inner sequence

SEQ ID NO: 20189 - DNA, 30 bp, Artificial Sequence; identical to SEQ ID NO: 347
  Description of Artificial Sequence: Synthetic pecan; inner sequence

SEQ ID NO: 20190 - DNA, 30 bp, Artificial Sequence; identical to SEQ ID NO: 61
  Description of Artificial Sequence: Synthetic pecan; inner sequence

SEQ ID NO: 20191 - DNA, 30 bp, Artificial Sequence; identical to SEQ ID NO: 129
  Description of Artificial Sequence: Synthetic pecan; inner sequence

SEQ ID NO: 20192 - DNA, 30 bp, Artificial Sequence; identical to SEQ ID NO: 246
  Description of Artificial Sequence: Synthetic pecan; inner sequence

SEQ ID NO: 20193 - DNA, 30 bp, Artificial Sequence
  Description of Artificial Sequence: Synthetic pecan; inner sequence
ccgcacgtagccctatcactggtgcatgca

SEQ ID NO: 20194 - DNA, 30 bp, Artificial Sequence; identical to SEQ ID NO: 8964
  Description of Artificial Sequence: Synthetic pecan; inner sequence

SEQ ID NO: 20195 - DNA, 30 bp, Artificial Sequence; identical to SEQ ID NO: 104
  Description of Artificial Sequence: Synthetic pecan; inner sequence

SEQ ID NO: 20196 - DNA, 30 bp, Artificial Sequence; identical to SEQ ID NO: 446
  Description of Artificial Sequence: Synthetic pecan; inner sequence

SEQ ID NO: 20197 - DNA, 30 bp, Artificial Sequence; identical to SEQ ID NO: 746
  Description of Artificial Sequence: Synthetic pecan; inner sequence

SEQ ID NO: 20198 - DNA, 30 bp, Artificial Sequence; identical to SEQ ID NO: 118
  Description of Artificial Sequence: Synthetic pecan; inner sequence

SEQ ID NO: 20199 - DNA, 30 bp, Artificial Sequence; identical to SEQ ID NO: 8712
  Description of Artificial Sequence: Synthetic pecan; inner sequence

SEQ ID NO: 20200 - DNA, 30 bp, Artificial Sequence; identical to SEQ ID NO: 900
  Description of Artificial Sequence: Synthetic pecan; inner sequence

SEQ ID NO: 20201 - DNA, 30 bp, Artificial Sequence; identical to SEQ ID NO: 267
  Description of Artificial Sequence: Synthetic pecan; inner sequence

SEQ ID NO: 20202 - DNA, 30 bp, Artificial Sequence; identical to SEQ ID NO: 203
  Description of Artificial Sequence: Synthetic pecan; inner sequence

SEQ ID NO: 20203 - DNA, 30 bp, Artificial Sequence; identical to SEQ ID NO: 12958
  Description of Artificial Sequence: Synthetic pecan; inner sequence

SEQ ID NO: 20204 - DNA, 30 bp, Artificial Sequence; identical to SEQ ID NO: 95
  Description of Artificial Sequence: Synthetic pecan; inner sequence

SEQ ID NO: 20205 - DNA, 30 bp, Artificial Sequence; identical to SEQ ID NO: 204
  Description of Artificial Sequence: Synthetic pecan; inner sequence

SEQ ID NO: 20206 - DNA, 30 bp, Artificial Sequence; identical to SEQ ID NO: 8627
  Description of Artificial Sequence: Synthetic pecan; inner sequence

SEQ ID NO: 20207 - DNA, 30 bp, Artificial Sequence; identical to SEQ ID NO: 485
  Description of Artificial Sequence: Synthetic pecan; inner sequence

SEQ ID NO: 20208 - DNA, 30 bp, Artificial Sequence; identical to SEQ ID NO: 768
  Description of Artificial Sequence: Synthetic pecan; inner sequence

SEQ ID NO: 20209 - DNA, 30 bp, Artificial Sequence; identical to SEQ ID NO: 559
  Description of Artificial Sequence: Synthetic pecan; inner sequence

SEQ ID NO: 20210 - DNA, 30 bp, Artificial Sequence; identical to SEQ ID NO: 390
  Description of Artificial Sequence: Synthetic pecan; inner sequence

SEQ ID NO: 20211 - DNA, 30 bp, Artificial Sequence; identical to SEQ ID NO: 65
  Description of Artificial Sequence: Synthetic pecan; inner sequence

SEQ ID NO: 20212 - DNA, 30 bp, Artificial Sequence; identical to SEQ ID NO: 4748
  Description of Artificial Sequence: Synthetic pecan; inner sequence

SEQ ID NO: 20213 - DNA, 30 bp, Artificial Sequence; identical to SEQ ID NO: 105
  Description of Artificial Sequence: Synthetic pecan; inner sequence

SEQ ID NO: 20214 - DNA, 29 bp, Artificial Sequence
  Description of Artificial Sequence: Synthetic pecan; inner sequence
gtcatgccatcccttcgagtggacaggta

SEQ ID NO: 20215 - DNA, 30 bp, Artificial Sequence; identical to SEQ ID NO: 282
  Description of Artificial Sequence: Synthetic pecan; inner sequence

SEQ ID NO: 20216 - DNA, 30 bp, Artificial Sequence; identical to SEQ ID NO: 628
  Description of Artificial Sequence: Synthetic pecan; inner sequence

SEQ ID NO: 20217 - DNA, 30 bp, Artificial Sequence; identical to SEQ ID NO: 442
  Description of Artificial Sequence: Synthetic pecan; inner sequence

SEQ ID NO: 20218 - DNA, 30 bp, Artificial Sequence; identical to SEQ ID NO: 696
  Description of Artificial Sequence: Synthetic pecan; inner sequence

SEQ ID NO: 20219 - DNA, 30 bp, Artificial Sequence; identical to SEQ ID NO: 137
  Description of Artificial Sequence: Synthetic pecan; inner sequence

SEQ ID NO: 20220 - DNA, 30 bp, Artificial Sequence; identical to SEQ ID NO: 4603
  Description of Artificial Sequence: Synthetic pecan; inner sequence

SEQ ID NO: 20221 - DNA, 30 bp, Artificial Sequence; identical to SEQ ID NO: 359
  Description of Artificial Sequence: Synthetic pecan; inner sequence

SEQ ID NO: 20222 - DNA, 30 bp, Artificial Sequence; identical to SEQ ID NO: 97
  Description of Artificial Sequence: Synthetic pecan; inner sequence

SEQ ID NO: 20223 - DNA, 30 bp, Artificial Sequence; identical to SEQ ID NO: 317
  Description of Artificial Sequence: Synthetic pecan; inner sequence

SEQ ID NO: 20224 - DNA, 26 bp, Artificial Sequence
  Description of Artificial Sequence: Synthetic pecan; inner sequence
ggcatgcacgcacctacacgtggaca

SEQ ID NO: 20225 - DNA, 30 bp, Artificial Sequence; identical to SEQ ID NO: 277
  Description of Artificial Sequence: Synthetic pecan; inner sequence

SEQ ID NO: 20226 - DNA, 30 bp, Artificial Sequence
  Description of Artificial Sequence: Synthetic pecan; inner sequence
ggcatgcacgcacctacatgtgggtatgga

SEQ ID NO: 20227 - DNA, 30 bp, Artificial Sequence
  Description of Artificial Sequence: Synthetic pecan; inner sequence
ccgatcgcacgtcaaggcaggctgtacgtg

SEQ ID NO: 20228 - DNA, 30 bp, Artificial Sequence; identical to SEQ ID NO: 595
  Description of Artificial Sequence: Synthetic pecan; inner sequence

SEQ ID NO: 20229 - DNA, 30 bp, Artificial Sequence
  Description of Artificial Sequence: Synthetic pecan; inner sequence
ggacgcagcttgcctactggtggtcacgtg

SEQ ID NO: 20230 - DNA, 30 bp, Artificial Sequence; identical to SEQ ID NO: 79
  Description of Artificial Sequence: Synthetic pecan; inner sequence

SEQ ID NO: 20231 - DNA, 30 bp, Artificial Sequence; identical to SEQ ID NO: 103
  Description of Artificial Sequence: Synthetic pecan; inner sequence

SEQ ID NO: 20232 - DNA, 30 bp, Artificial Sequence; identical to SEQ ID NO: 89
  Description of Artificial Sequence: Synthetic pecan; inner sequence

SEQ ID NO: 20233 - DNA, 30 bp, Artificial Sequence
  Description of Artificial Sequence: Synthetic pecan; inner sequence
gcacgactcgcaccctataatgaggccatg

SEQ ID NO: 20234 - DNA, 30 bp, Artificial Sequence; identical to SEQ ID NO: 634
  Description of Artificial Sequence: Synthetic pecan; inner sequence

SEQ ID NO: 20235 - DNA, 30 bp, Artificial Sequence; identical to SEQ ID NO: 256
  Description of Artificial Sequence: Synthetic pecan; inner sequence

SEQ ID NO: 20236 - DNA, 30 bp, Artificial Sequence; identical to SEQ ID NO: 12892
  Description of Artificial Sequence: Synthetic pecan; inner sequence

SEQ ID NO: 20237 - DNA, 30 bp, Artificial Sequence; identical to SEQ ID NO: 135
  Description of Artificial Sequence: Synthetic pecan; inner sequence

SEQ ID NO: 20238 - DNA, 30 bp, Artificial Sequence
  Description of Artificial Sequence: Synthetic pecan; inner sequence
ggcgcgaacggaccgacaagtgcgcatgga

SEQ ID NO: 20239 - DNA, 30 bp, Artificial Sequence; identical to SEQ ID NO: 463
  Description of Artificial Sequence: Synthetic pecan; inner sequence

SEQ ID NO: 20240 - DNA, 30 bp, Artificial Sequence; identical to SEQ ID NO: 789
  Description of Artificial Sequence: Synthetic pecan; inner sequence

SEQ ID NO: 20241 - DNA, 30 bp, Artificial Sequence; identical to SEQ ID NO: 8985
  Description of Artificial Sequence: Synthetic pecan; inner sequence

SEQ ID NO: 20242 - DNA, 30 bp, Artificial Sequence; identical to SEQ ID NO: 186
  Description of Artificial Sequence: Synthetic pecan; inner sequence

SEQ ID NO: 20243 - DNA, 30 bp, Artificial Sequence; identical to SEQ ID NO: 94
  Description of Artificial Sequence: Synthetic pecan; inner sequence

SEQ ID NO: 20244 - DNA, 30 bp, Artificial Sequence; identical to SEQ ID NO: 599
  Description of Artificial Sequence: Synthetic pecan; inner sequence

SEQ ID NO: 20245 - DNA, 30 bp, Artificial Sequence; identical to SEQ ID NO: 266
  Description of Artificial Sequence: Synthetic pecan; inner sequence

SEQ ID NO: 20246 - DNA, 30 bp, Artificial Sequence; identical to SEQ ID NO: 12997
  Description of Artificial Sequence: Synthetic pecan; inner sequence

SEQ ID NO: 20247 - DNA, 30 bp, Artificial Sequence; identical to SEQ ID NO: 88
  Description of Artificial Sequence: Synthetic pecan; inner sequence

SEQ ID NO: 20248 - DNA, 30 bp, Artificial Sequence; identical to SEQ ID NO: 244
  Description of Artificial Sequence: Synthetic pecan; inner sequence

SEQ ID NO: 20249 - DNA, 30 bp, Artificial Sequence; identical to SEQ ID NO: 467
  Description of Artificial Sequence: Synthetic pecan; inner sequence

SEQ ID NO: 20250 - DNA, 30 bp, Artificial Sequence; identical to SEQ ID NO: 998
  Description of Artificial Sequence: Synthetic pecan; inner sequence

SEQ ID NO: 20251 - DNA, 30 bp, Artificial Sequence; identical to SEQ ID NO: 611
  Description of Artificial Sequence: Synthetic pecan; inner sequence

SEQ ID NO: 20252 - DNA, 30 bp, Artificial Sequence; identical to SEQ ID NO: 360
  Description of Artificial Sequence: Synthetic pecan; inner sequence

SEQ ID NO: 20253 - DNA, 30 bp, Artificial Sequence; identical to SEQ ID NO: 354
  Description of Artificial Sequence: Synthetic pecan; inner sequence

SEQ ID NO: 20254 - DNA, 30 bp, Artificial Sequence; identical to SEQ ID NO: 5001
  Description of Artificial Sequence: Synthetic pecan; inner sequence

SEQ ID NO: 20255 - DNA, 30 bp, Artificial Sequence; identical to SEQ ID NO: 637
  Description of Artificial Sequence: Synthetic pecan; inner sequence

SEQ ID NO: 20256 - DNA, 26 bp, Artificial Sequence
  Description of Artificial Sequence: Synthetic pecan; inner sequence
ggcacaaacggaccgacaagtgcgca

SEQ ID NO: 20257 - DNA, 30 bp, Artificial Sequence; identical to SEQ ID NO: 12985
  Description of Artificial Sequence: Synthetic pecan; inner sequence

SEQ ID NO: 20258 - DNA, 30 bp, Artificial Sequence; identical to SEQ ID NO: 236
  Description of Artificial Sequence: Synthetic pecan; inner sequence

SEQ ID NO: 20259 - DNA, 30 bp, Artificial Sequence; identical to SEQ ID NO: 4802
  Description of Artificial Sequence: Synthetic pecan; inner sequence

SEQ ID NO: 20260 - DNA, 30 bp, Artificial Sequence; identical to SEQ ID NO: 242
  Description of Artificial Sequence: Synthetic pecan; inner sequence

SEQ ID NO: 20261 - DNA, 30 bp, Artificial Sequence; identical to SEQ ID NO: 509
  Description of Artificial Sequence: Synthetic pecan; inner sequence

SEQ ID NO: 20262 - DNA, 30 bp, Artificial Sequence; identical to SEQ ID NO: 8928
  Description of Artificial Sequence: Synthetic pecan; inner sequence

SEQ ID NO: 20263 - DNA, 29 bp, Artificial Sequence
  Description of Artificial Sequence: Synthetic pecan; inner sequence
gtgcaaacggaccgacaagtgcgcatgga

SEQ ID NO: 20264 - DNA, 30 bp, Artificial Sequence; identical to SEQ ID NO: 158
  Description of Artificial Sequence: Synthetic pecan; inner sequence

SEQ ID NO: 20265 - DNA, 30 bp, Artificial Sequence; identical to SEQ ID NO: 429
  Description of Artificial Sequence: Synthetic pecan; inner sequence

SEQ ID NO: 20266 - DNA, 30 bp, Artificial Sequence; identical to SEQ ID NO: 367
  Description of Artificial Sequence: Synthetic pecan; inner sequence

SEQ ID NO: 20267 - DNA, 30 bp, Artificial Sequence; identical to SEQ ID NO: 362
  Description of Artificial Sequence: Synthetic pecan; inner sequence

SEQ ID NO: 20268 - DNA, 30 bp, Artificial Sequence; identical to SEQ ID NO: 44
  Description of Artificial Sequence: Synthetic pecan; inner sequence

SEQ ID NO: 20269 - DNA, 30 bp, Artificial Sequence
  Description of Artificial Sequence: Synthetic pecan; inner sequence
ccgcacgtagacctatcagtggtgcatgca

SEQ ID NO: 20270 - DNA, 30 bp, Artificial Sequence; identical to SEQ ID NO: 24
  Description of Artificial Sequence: Synthetic pecan; inner sequence

SEQ ID NO: 20271 - DNA, 30 bp, Artificial Sequence; identical to SEQ ID NO: 4638
  Description of Artificial Sequence: Synthetic pecan; inner sequence

SEQ ID NO: 20272 - DNA, 30 bp, Artificial Sequence; identical to SEQ ID NO: 324
  Description of Artificial Sequence: Synthetic pecan; inner sequence

SEQ ID NO: 20273 - DNA, 30 bp, Artificial Sequence; identical to SEQ ID NO: 407
  Description of Artificial Sequence: Synthetic pecan; inner sequence

SEQ ID NO: 20274 - DNA, 30 bp, Artificial Sequence; identical to SEQ ID NO: 783
  Description of Artificial Sequence: Synthetic pecan; inner sequence

SEQ ID NO: 20275 - DNA, 30 bp, Artificial Sequence; identical to SEQ ID NO: 320
  Description of Artificial Sequence: Synthetic pecan; inner sequence

SEQ ID NO: 20276 - DNA, 30 bp, Artificial Sequence; identical to SEQ ID NO: 4988
  Description of Artificial Sequence: Synthetic pecan; inner sequence

SEQ ID NO: 20277 - DNA, 25 bp, Artificial Sequence
  Description of Artificial Sequence: Synthetic pecan; inner sequence
cgcaccgtcaagcaggcacgtgtca

SEQ ID NO: 20278 - DNA, 30 bp, Artificial Sequence; identical to SEQ ID NO: 291
  Description of Artificial Sequence: Synthetic pecan; inner sequence

SEQ ID NO: 20279 - DNA, 30 bp, Artificial Sequence; identical to SEQ ID NO: 82
  Description of Artificial Sequence: Synthetic pecan; inner sequence

SEQ ID NO: 20280 - DNA, 30 bp, Artificial Sequence; identical to SEQ ID NO: 183
  Description of Artificial Sequence: Synthetic pecan; inner sequence

SEQ ID NO: 20281 - DNA, 30 bp, Artificial Sequence; identical to SEQ ID NO: 4837
  Description of Artificial Sequence: Synthetic pecan; inner sequence

SEQ ID NO: 20282 - DNA, 30 bp, Artificial Sequence; identical to SEQ ID NO: 4911
  Description of Artificial Sequence: Synthetic pecan; inner sequence

SEQ ID NO: 20283 - DNA, 30 bp, Artificial Sequence
  Description of Artificial Sequence: Synthetic pecan; inner sequence
ggacgcagcttgcctactcgtggtcacgta

SEQ ID NO: 20284 - DNA, 30 bp, Artificial Sequence; identical to SEQ ID NO: 420
  Description of Artificial Sequence: Synthetic pecan; inner sequence

SEQ ID NO: 20285 - DNA, 30 bp, Artificial Sequence; identical to SEQ ID NO: 662
  Description of Artificial Sequence: Synthetic pecan; inner sequence

SEQ ID NO: 20286 - DNA, 30 bp, Artificial Sequence
  Description of Artificial Sequence: Synthetic pecan; inner sequence
ccgcacgtcgccctatcagtggtgcatgca

SEQ ID NO: 20287 - DNA, 29 bp, Artificial Sequence
  Description of Artificial Sequence: Synthetic pecan; inner sequence
gcacgccgatgccctcatgtggccgtggc

SEQ ID NO: 20288 - DNA, 33 bp, Artificial Sequence; identical to SEQ ID NO: 864
  Description of Artificial Sequence: Synthetic pecan; inner sequence

SEQ ID NO: 20289 - DNA, 30 bp, Artificial Sequence
  Description of Artificial Sequence: Synthetic pecan; inner sequence
ggcatgcacgcacctacacgtggacgtgga

SEQ ID NO: 20290 - DNA, 30 bp, Artificial Sequence; identical to SEQ ID NO: 816
  Description of Artificial Sequence: Synthetic pecan; inner sequence

SEQ ID NO: 20291 - DNA, 30 bp, Artificial Sequence; identical to SEQ ID NO: 399
  Description of Artificial Sequence: Synthetic pecan; inner sequence

SEQ ID NO: 20292 - DNA, 30 bp, Artificial Sequence; identical to SEQ ID NO: 4377
  Description of Artificial Sequence: Synthetic pecan; inner sequence

SEQ ID NO: 20293 - DNA, 30 bp, Artificial Sequence; identical to SEQ ID NO: 576
  Description of Artificial Sequence: Synthetic pecan; inner sequence

SEQ ID NO: 20294 - DNA, 30 bp, Artificial Sequence; identical to SEQ ID NO: 543
  Description of Artificial Sequence: Synthetic pecan; inner sequence

SEQ ID NO: 20295 - DNA, 30 bp, Artificial Sequence
  Description of Artificial Sequence: Synthetic pecan; inner sequence
ggcacaaacggaccgacaagtgcgcatgca

SEQ ID NO: 20296 - DNA, 30 bp, Artificial Sequence; identical to SEQ ID NO: 248
  Description of Artificial Sequence: Synthetic pecan; inner sequence

SEQ ID NO: 20297 - DNA, 30 bp, Artificial Sequence; identical to SEQ ID NO: 288
  Description of Artificial Sequence: Synthetic pecan; inner sequence

SEQ ID NO: 20298 - DNA, 30 bp, Artificial Sequence; identical to SEQ ID NO: 19
  Description of Artificial Sequence: Synthetic pecan; inner sequence

SEQ ID NO: 20299 - DNA, 30 bp, Artificial Sequence; identical to SEQ ID NO: 950
  Description of Artificial Sequence: Synthetic pecan; inner sequence

SEQ ID NO: 20300 - DNA, 30 bp, Artificial Sequence; identical to SEQ ID NO: 4317
  Description of Artificial Sequence: Synthetic pecan; inner sequence

SEQ ID NO: 20301 - DNA, 30 bp, Artificial Sequence; identical to SEQ ID NO: 4312
  Description of Artificial Sequence: Synthetic pecan; inner sequence

SEQ ID NO: 20302 - DNA, 30 bp, Artificial Sequence
  Description of Artificial Sequence: Synthetic pecan; inner sequence
ggccacagcgcacctcaacgtggacgtgca

SEQ ID NO: 20303 - DNA, 30 bp, Artificial Sequence; identical to SEQ ID NO: 4807
  Description of Artificial Sequence: Synthetic pecan; inner sequence

SEQ ID NO: 20304 - DNA, 31 bp, Artificial Sequence; identical to SEQ ID NO: 4434
  Description of Artificial Sequence: Synthetic pecan; inner sequence

SEQ ID NO: 20305 - DNA, 30 bp, Artificial Sequence; identical to SEQ ID NO: 230
  Description of Artificial Sequence: Synthetic pecan; inner sequence

SEQ ID NO: 20306 - DNA, 30 bp, Artificial Sequence; identical to SEQ ID NO: 477
  Description of Artificial Sequence: Synthetic pecan; inner sequence

SEQ ID NO: 20307 - DNA, 30 bp, Artificial Sequence
  Description of Artificial Sequence: Synthetic pecan; inner sequence
ggccacagcgtacctcaatgtggacgtgca

SEQ ID NO: 20308 - DNA, 30 bp, Artificial Sequence; identical to SEQ ID NO: 4918
  Description of Artificial Sequence: Synthetic pecan; inner sequence

SEQ ID NO: 20309 - DNA, 30 bp, Artificial Sequence; identical to SEQ ID NO: 12773
  Description of Artificial Sequence: Synthetic pecan; inner sequence

SEQ ID NO: 20310 - DNA, 30 bp, Artificial Sequence; identical to SEQ ID NO: 106
  Description of Artificial Sequence: Synthetic pecan; inner sequence

SEQ ID NO: 20311 - DNA, 30 bp, Artificial Sequence; identical to SEQ ID NO: 122
  Description of Artificial Sequence: Synthetic pecan; inner sequence

SEQ ID NO: 20312 - DNA, 30 bp, Artificial Sequence
  Description of Artificial Sequence: Synthetic pecan; inner sequence
ccgatcgcacgtcaagtcaggctgtacgag

SEQ ID NO: 20313 - DNA, 30 bp, Artificial Sequence; identical to SEQ ID NO: 303
  Description of Artificial Sequence: Synthetic pecan; inner sequence

SEQ ID NO: 20314 - DNA, 30 bp, Artificial Sequence; identical to SEQ ID NO: 91
  Description of Artificial Sequence: Synthetic pecan; inner sequence

SEQ ID NO: 20315 - DNA, 30 bp, Artificial Sequence; identical to SEQ ID NO: 619
  Description of Artificial Sequence: Synthetic pecan; inner sequence

SEQ ID NO: 20316 - DNA, 30 bp, Artificial Sequence; identical to SEQ ID NO: 4890
  Description of Artificial Sequence: Synthetic pecan; inner sequence

SEQ ID NO: 20317 - DNA, 30 bp, Artificial Sequence; identical to SEQ ID NO: 293
  Description of Artificial Sequence: Synthetic pecan; inner sequence

SEQ ID NO: 20318 - DNA, 30 bp, Artificial Sequence; identical to SEQ ID NO: 8782
  Description of Artificial Sequence: Synthetic pecan; inner sequence

SEQ ID NO: 20319 - DNA, 30 bp, Artificial Sequence; identical to SEQ ID NO: 397
  Description of Artificial Sequence: Synthetic pecan; inner sequence

SEQ ID NO: 20320 - DNA, 30 bp, Artificial Sequence; identical to SEQ ID NO: 253
  Description of Artificial Sequence: Synthetic pecan; inner sequence

SEQ ID NO: 20321 - DNA, 28 bp, Artificial Sequence
  Description of Artificial Sequence: Synthetic pecan; inner sequence
gcacgactcgcaccctatcatgcggtca

SEQ ID NO: 20322 - DNA, 30 bp, Artificial Sequence; identical to SEQ ID NO: 707
  Description of Artificial Sequence: Synthetic pecan; inner sequence

SEQ ID NO: 20323 - DNA, 30 bp, Artificial Sequence; identical to SEQ ID NO: 409
  Description of Artificial Sequence: Synthetic pecan; inner sequence

SEQ ID NO: 20324 - DNA, 30 bp, Artificial Sequence
  Description of Artificial Sequence: Synthetic pecan; inner sequence
ggcatgcacgcacctacacgtggtcacgta

SEQ ID NO: 20325 - DNA, 30 bp, Artificial Sequence; identical to SEQ ID NO: 4667
  Description of Artificial Sequence: Synthetic pecan; inner sequence

SEQ ID NO: 20326 - DNA, 30 bp, Artificial Sequence; identical to SEQ ID NO: 146
  Description of Artificial Sequence: Synthetic pecan; inner sequence

SEQ ID NO: 20327 - DNA, 30 bp, Artificial Sequence
  Description of Artificial Sequence: Synthetic pecan; inner sequence
ggcacaaactgaccgacaagtgcgcatgga

SEQ ID NO: 20328 - DNA, 28 bp, Artificial Sequence
  Description of Artificial Sequence: Synthetic pecan; inner sequence
ggacgcagcttgcctactggtggtcacg

SEQ ID NO: 20329 - DNA, 30 bp, Artificial Sequence; identical to SEQ ID NO: 603
  Description of Artificial Sequence: Synthetic pecan; inner sequence

SEQ ID NO: 20330 - DNA, 30 bp, Artificial Sequence; identical to SEQ ID NO: 281
  Description of Artificial Sequence: Synthetic pecan; inner sequence

SEQ ID NO: 20331 - DNA, 30 bp, Artificial Sequence
  Description of Artificial Sequence: Synthetic pecan; inner sequence
ccgcacgtagccctatcagtggtgtatgca

SEQ ID NO: 20332 - DNA, 30 bp, Artificial Sequence
  Description of Artificial Sequence: Synthetic pecan; inner sequence
ggacgcagcggaacgttcgagtggtacgca

SEQ ID NO: 20333 - DNA, 30 bp, Artificial Sequence; identical to SEQ ID NO: 8798
  Description of Artificial Sequence: Synthetic pecan; inner sequence

SEQ ID NO: 20334 - DNA, 30 bp, Artificial Sequence; identical to SEQ ID NO: 332
  Description of Artificial Sequence: Synthetic pecan; inner sequence

SEQ ID NO: 20335 - DNA, 30 bp, Artificial Sequence
  Description of Artificial Sequence: Synthetic pecan; inner sequence
ggacgccgcttgcctactggtggtcacgta

SEQ ID NO: 20336 - DNA, 30 bp, Artificial Sequence; identical to SEQ ID NO: 389
  Description of Artificial Sequence: Synthetic pecan; inner sequence

SEQ ID NO: 20337 - DNA, 30 bp, Artificial Sequence; identical to SEQ ID NO: 36
  Description of Artificial Sequence: Synthetic pecan; inner sequence

SEQ ID NO: 20338 - DNA, 30 bp, Artificial Sequence; identical to SEQ ID NO: 661
  Description of Artificial Sequence: Synthetic pecan; inner sequence

SEQ ID NO: 20339 - DNA, 30 bp, Artificial Sequence
  Description of Artificial Sequence: Synthetic pecan; inner sequence
ccgcacgtagccatatcagtggtgcatgca

SEQ ID NO: 20340 - DNA, 30 bp, Artificial Sequence; identical to SEQ ID NO: 561
  Description of Artificial Sequence: Synthetic pecan; inner sequence

SEQ ID NO: 20341 - DNA, 30 bp, Artificial Sequence
  Description of Artificial Sequence: Synthetic pecan; inner sequence
gcacgactcgcaccctatgatgaggccatg

SEQ ID NO: 20342 - DNA, 30 bp, Artificial Sequence; identical to SEQ ID NO: 4504
  Description of Artificial Sequence: Synthetic pecan; inner sequence

SEQ ID NO: 20343 - DNA, 30 bp, Artificial Sequence
  Description of Artificial Sequence: Synthetic pecan; inner sequence
gcactgcacgcacctacacgtgggtatgga

SEQ ID NO: 20344 - DNA, 30 bp, Artificial Sequence; identical to SEQ ID NO: 468
  Description of Artificial Sequence: Synthetic pecan; inner sequence

SEQ ID NO: 20345 - DNA, 30 bp, Artificial Sequence; identical to SEQ ID NO: 560
  Description of Artificial Sequence: Synthetic pecan; inner sequence

SEQ ID NO: 20346 - DNA, 30 bp, Artificial Sequence
  Description of Artificial Sequence: Synthetic pecan; inner sequence
ggacgcagcttgcctactggtggacacgta

SEQ ID NO: 20347 - DNA, 30 bp, Artificial Sequence; identical to SEQ ID NO: 780
  Description of Artificial Sequence: Synthetic pecan; inner sequence

SEQ ID NO: 20348 - DNA, 30 bp, Artificial Sequence; identical to SEQ ID NO: 678
  Description of Artificial Sequence: Synthetic pecan; inner sequence

SEQ ID NO: 20349 - DNA, 30 bp, Artificial Sequence; identical to SEQ ID NO: 8936
  Description of Artificial Sequence: Synthetic pecan; inner sequence

SEQ ID NO: 20350 - DNA, 30 bp, Artificial Sequence; identical to SEQ ID NO: 355
  Description of Artificial Sequence: Synthetic pecan; inner sequence

SEQ ID NO: 20351 - DNA, 30 bp, Artificial Sequence; identical to SEQ ID NO: 379
  Description of Artificial Sequence: Synthetic pecan; inner sequence

SEQ ID NO: 20352 - DNA, 30 bp, Artificial Sequence; identical to SEQ ID NO: 860
  Description of Artificial Sequence: Synthetic pecan; inner sequence

SEQ ID NO: 20353 - DNA, 30 bp, Artificial Sequence
  Description of Artificial Sequence: Synthetic pecan; inner sequence
ccgtagcgacattaagcggtggtgtgcgtg

SEQ ID NO: 20354 - DNA, 30 bp, Artificial Sequence; identical to SEQ ID NO: 493
  Description of Artificial Sequence: Synthetic pecan; inner sequence

SEQ ID NO: 20355 - DNA, 30 bp, Artificial Sequence; identical to SEQ ID NO: 881
  Description of Artificial Sequence: Synthetic pecan; inner sequence

SEQ ID NO: 20356 - DNA, 30 bp, Artificial Sequence; identical to SEQ ID NO: 147
  Description of Artificial Sequence: Synthetic pecan; inner sequence

SEQ ID NO: 20357 - DNA, 30 bp, Artificial Sequence; identical to SEQ ID NO: 8810
  Description of Artificial Sequence: Synthetic pecan; inner sequence

SEQ ID NO: 20358 - DNA, 30 bp, Artificial Sequence; identical to SEQ ID NO: 167
  Description of Artificial Sequence: Synthetic pecan; inner sequence

SEQ ID NO: 20359 - DNA, 30 bp, Artificial Sequence; identical to SEQ ID NO: 805
  Description of Artificial Sequence: Synthetic pecan; inner sequence

SEQ ID NO: 20360 - DNA, 30 bp, Artificial Sequence; identical to SEQ ID NO: 685
  Description of Artificial Sequence: Synthetic pecan; inner sequence

SEQ ID NO: 20361 - DNA, 30 bp, Artificial Sequence; identical to SEQ ID NO: 8993
  Description of Artificial Sequence: Synthetic pecan; inner sequence

SEQ ID NO: 20362 - DNA, 30 bp, Artificial Sequence; identical to SEQ ID NO: 919
  Description of Artificial Sequence: Synthetic pecan; inner sequence

SEQ ID NO: 20363 - DNA, 30 bp, Artificial Sequence
  Description of Artificial Sequence: Synthetic pecan; inner sequence
gcacgactcgcatcctatcatgaggccatg

SEQ ID NO: 20364 - DNA, 30 bp, Artificial Sequence; identical to SEQ ID NO: 644
  Description of Artificial Sequence: Synthetic pecan; inner sequence

SEQ ID NO: 20365 - DNA, 30 bp, Artificial Sequence; identical to SEQ ID NO: 979
  Description of Artificial Sequence: Synthetic pecan; inner sequence

SEQ ID NO: 20366 - DNA, 30 bp, Artificial Sequence; identical to SEQ ID NO: 68
  Description of Artificial Sequence: Synthetic pecan; inner sequence

SEQ ID NO: 20367 - DNA, 30 bp, Artificial Sequence
  Description of Artificial Sequence: Synthetic pecan; inner sequence
ccgtagcgacatcgagcggtggtgtgcgtg

SEQ ID NO: 20368 - DNA, 30 bp, Artificial Sequence; identical to SEQ ID NO: 727
  Description of Artificial Sequence: Synthetic pecan; inner sequence

SEQ ID NO: 20369 - DNA, 30 bp, Artificial Sequence; identical to SEQ ID NO: 326
  Description of Artificial Sequence: Synthetic pecan; inner sequence

SEQ ID NO: 20370 - DNA, 30 bp, Artificial Sequence; identical to SEQ ID NO: 8801
  Description of Artificial Sequence: Synthetic pecan; inner sequence

SEQ ID NO: 20371 - DNA, 30 bp, Artificial Sequence
  Description of Artificial Sequence: Synthetic pecan; inner sequence
ccgcacgtagccctatcagtggtacatgca

SEQ ID NO: 20372 - DNA, 30 bp, Artificial Sequence
  Description of Artificial Sequence: Synthetic pecan; inner sequence
ggccacagcgtacctcaacgcggacgtgca

SEQ ID NO: 20373 - DNA, 30 bp, Artificial Sequence; identical to SEQ ID NO: 962
  Description of Artificial Sequence: Synthetic pecan; inner sequence

SEQ ID NO: 20374 - DNA, 30 bp, Artificial Sequence; identical to SEQ ID NO: 64
  Description of Artificial Sequence: Synthetic pecan; inner sequence

SEQ ID NO: 20375 - DNA, 30 bp, Artificial Sequence; identical to SEQ ID NO: 8946
  Description of Artificial Sequence: Synthetic pecan; inner sequence

SEQ ID NO: 20376 - DNA, 30 bp, Artificial Sequence; identical to SEQ ID NO: 4364
  Description of Artificial Sequence: Synthetic pecan; inner sequence

SEQ ID NO: 20377 - DNA, 30 bp, Artificial Sequence; identical to SEQ ID NO: 8769
  Description of Artificial Sequence: Synthetic pecan; inner sequence

SEQ ID NO: 20378 - DNA, 30 bp, Artificial Sequence; identical to SEQ ID NO: 385
  Description of Artificial Sequence: Synthetic pecan; inner sequence

SEQ ID NO: 20379 - DNA, 30 bp, Artificial Sequence; identical to SEQ ID NO: 4653
  Description of Artificial Sequence: Synthetic pecan; inner sequence

SEQ ID NO: 20380 - DNA, 30 bp, Artificial Sequence; identical to SEQ ID NO: 4590
  Description of Artificial Sequence: Synthetic pecan; inner sequence

SEQ ID NO: 20381 - DNA, 30 bp, Artificial Sequence; identical to SEQ ID NO: 481
  Description of Artificial Sequence: Synthetic pecan; inner sequence

SEQ ID NO: 20382 - DNA, 30 bp, Artificial Sequence
  Description of Artificial Sequence: Synthetic pecan; inner sequence
ggcacaaacggaccgacaattgcgcatgga

SEQ ID NO: 20383 - DNA, 30 bp, Artificial Sequence
  Description of Artificial Sequence: Synthetic pecan; inner sequence
ccgcacgtagccctatcaatggtgcatgca

SEQ ID NO: 20384 - DNA, 30 bp, Artificial Sequence; identical to SEQ ID NO: 540
  Description of Artificial Sequence: Synthetic pecan; inner sequence

SEQ ID NO: 20385 - DNA, 30 bp, Artificial Sequence
  Description of Artificial Sequence: Synthetic pecan; inner sequence
gcacgacttgcaccctatcatgaggccatg

SEQ ID NO: 20386 - DNA, 30 bp, Artificial Sequence; identical to SEQ ID NO: 545
  Description of Artificial Sequence: Synthetic pecan; inner sequence

SEQ ID NO: 20387 - DNA, 30 bp, Artificial Sequence; identical to SEQ ID NO: 526
  Description of Artificial Sequence: Synthetic pecan; inner sequence

SEQ ID NO: 20388 - DNA, 30 bp, Artificial Sequence
  Description of Artificial Sequence: Synthetic pecan; inner sequence
ccgcacgtagccctataagtggtgcatgca

SEQ ID NO: 20389 - DNA, 30 bp, Artificial Sequence; identical to SEQ ID NO: 4381
  Description of Artificial Sequence: Synthetic pecan; inner sequence

SEQ ID NO: 20390 - DNA, 30 bp, Artificial Sequence
  Description of Artificial Sequence: Synthetic pecan; inner sequence
ccgatcgcacgtcaaggcaggctgtacgac

SEQ ID NO: 20391 - DNA, 30 bp, Artificial Sequence; identical to SEQ ID NO: 684
  Description of Artificial Sequence: Synthetic pecan; inner sequence

SEQ ID NO: 20392 - DNA, 30 bp, Artificial Sequence; identical to SEQ ID NO: 223
  Description of Artificial Sequence: Synthetic pecan; inner sequence

SEQ ID NO: 20393 - DNA, 30 bp, Artificial Sequence; identical to SEQ ID NO: 4620
  Description of Artificial Sequence: Synthetic pecan; inner sequence

SEQ ID NO: 20394 - DNA, 30 bp, Artificial Sequence; identical to SEQ ID NO: 133
  Description of Artificial Sequence: Synthetic pecan; inner sequence

SEQ ID NO: 20395 - DNA, 30 bp, Artificial Sequence; identical to SEQ ID NO: 591
  Description of Artificial Sequence: Synthetic pecan; inner sequence

SEQ ID NO: 20396 - DNA, 30 bp, Artificial Sequence; identical to SEQ ID NO: 289
  Description of Artificial Sequence: Synthetic pecan; inner sequence

SEQ ID NO: 20397 - DNA, 30 bp, Artificial Sequence
  Description of Artificial Sequence: Synthetic pecan; inner sequence
ggacgcagcttgcctactgggggtcacgta

SEQ ID NO: 20398 - DNA, 30 bp, Artificial Sequence
  Description of Artificial Sequence: Synthetic pecan; inner sequence
ggcatgcacgcacctacacgtgggtatgca

SEQ ID NO: 20399 - DNA, 30 bp, Artificial Sequence; identical to SEQ ID NO: 778
  Description of Artificial Sequence: Synthetic pecan; inner sequence

SEQ ID NO: 20400 - DNA, 30 bp, Artificial Sequence; identical to SEQ ID NO: 4977
  Description of Artificial Sequence: Synthetic pecan; inner sequence

SEQ ID NO: 20401 - DNA, 30 bp, Artificial Sequence; identical to SEQ ID NO: 4658
  Description of Artificial Sequence: Synthetic pecan; inner sequence

SEQ ID NO: 20402 - DNA, 30 bp, Artificial Sequence; identical to SEQ ID NO: 580
  Description of Artificial Sequence: Synthetic pecan; inner sequence

SEQ ID NO: 20403 - DNA, 30 bp, Artificial Sequence; identical to SEQ ID NO: 306
  Description of Artificial Sequence: Synthetic pecan; inner sequence

SEQ ID NO: 20404 - DNA, 30 bp, Artificial Sequence; identical to SEQ ID NO: 4420
  Description of Artificial Sequence: Synthetic pecan; inner sequence

SEQ ID NO: 20405 - DNA, 30 bp, Artificial Sequence; identical to SEQ ID NO: 110
  Description of Artificial Sequence: Synthetic pecan; inner sequence

SEQ ID NO: 20406 - DNA, 30 bp, Artificial Sequence; identical to SEQ ID NO: 4708
  Description of Artificial Sequence: Synthetic pecan; inner sequence

SEQ ID NO: 20407 - DNA, 30 bp, Artificial Sequence
  Description of Artificial Sequence: Synthetic pecan; inner sequence
ggcacaaacggaccgacaagtgcgcatggc

SEQ ID NO: 20408 - DNA, 30 bp, Artificial Sequence
  Description of Artificial Sequence: Synthetic pecan; inner sequence
ggacgcagcttgccgtagggtggcatggga

SEQ ID NO: 20409 - DNA, 30 bp, Artificial Sequence; identical to SEQ ID NO: 4857
  Description of Artificial Sequence: Synthetic pecan; inner sequence

SEQ ID NO: 20410 - DNA, 30 bp, Artificial Sequence
  Description of Artificial Sequence: Synthetic pecan; inner sequence
ccgcacgtagccctctcagtggtgcatgca

SEQ ID NO: 20411 - DNA, 30 bp, Artificial Sequence; identical to SEQ ID NO: 351
  Description of Artificial Sequence: Synthetic pecan; inner sequence

SEQ ID NO: 20412 - DNA, 30 bp, Artificial Sequence; identical to SEQ ID NO: 449
  Description of Artificial Sequence: Synthetic pecan; inner sequence

SEQ ID NO: 20413 - DNA, 30 bp, Artificial Sequence
  Description of Artificial Sequence: Synthetic pecan; inner sequence
ccgcacgtagccctatcagtggtgcattca

SEQ ID NO: 20414 - DNA, 30 bp, Artificial Sequence; identical to SEQ ID NO: 528
  Description of Artificial Sequence: Synthetic pecan; inner sequence

SEQ ID NO: 20415 - DNA, 30 bp, Artificial Sequence
  Description of Artificial Sequence: Synthetic pecan; inner sequence
ccgtacgtagccctatcagtggtgcatgca

SEQ ID NO: 20416 - DNA, 30 bp, Artificial Sequence; identical to SEQ ID NO: 498
  Description of Artificial Sequence: Synthetic pecan; inner sequence

SEQ ID NO: 20417 - DNA, 30 bp, Artificial Sequence
  Description of Artificial Sequence: Synthetic pecan; inner sequence
ccatcgcgtcactatcatttgtgtcacgta

SEQ ID NO: 20418 - DNA, 30 bp, Artificial Sequence
  Description of Artificial Sequence: Synthetic pecan; inner sequence
ggacgcagcttgcctactggtggttacgta

SEQ ID NO: 20419 - DNA, 30 bp, Artificial Sequence; identical to SEQ ID NO: 585
  Description of Artificial Sequence: Synthetic pecan; inner sequence

SEQ ID NO: 20420 - DNA, 30 bp, Artificial Sequence
  Description of Artificial Sequence: Synthetic pecan; inner sequence
ggcatgcacgcacctacaagtgggtatgga

SEQ ID NO: 20421 - DNA, 30 bp, Artificial Sequence; identical to SEQ ID NO: 4933
  Description of Artificial Sequence: Synthetic pecan; inner sequence

SEQ ID NO: 20422 - DNA, 30 bp, Artificial Sequence; identical to SEQ ID NO: 871
  Description of Artificial Sequence: Synthetic pecan; inner sequence

SEQ ID NO: 20423 - DNA, 30 bp, Artificial Sequence; identical to SEQ ID NO: 496
  Description of Artificial Sequence: Synthetic pecan; inner sequence

SEQ ID NO: 20424 - DNA, 30 bp, Artificial Sequence
  Description of Artificial Sequence: Synthetic pecan; inner sequence
ccgcacgtagccctatcagtggtgcacgca

SEQ ID NO: 20425 - DNA, 30 bp, Artificial Sequence; identical to SEQ ID NO: 200
  Description of Artificial Sequence: Synthetic pecan; inner sequence

SEQ ID NO: 20426 - DNA, 30 bp, Artificial Sequence
  Description of Artificial Sequence: Synthetic pecan; inner sequence
ccatcgcgtcactatcatgtttgtcacgta

SEQ ID NO: 20427 - DNA, 30 bp, Artificial Sequence
  Description of Artificial Sequence: Synthetic pecan; inner sequence
ggacgcagcttgcctactggtggtcacgtc

SEQ ID NO: 20428 - DNA, 30 bp, Artificial Sequence
  Description of Artificial Sequence: Synthetic pecan; inner sequence
ggcatgcacgtacctacacgtgggtatgga

SEQ ID NO: 20429 - DNA, 30 bp, Artificial Sequence; identical to SEQ ID NO: 466
  Description of Artificial Sequence: Synthetic pecan; inner sequence

SEQ ID NO: 20430 - DNA, 30 bp, Artificial Sequence
  Description of Artificial Sequence: Synthetic pecan; inner sequence
ccgaacgtagccctatcagtggtgcatgca

SEQ ID NO: 20431 - DNA, 30 bp, Artificial Sequence; identical to SEQ ID NO: 486
  Description of Artificial Sequence: Synthetic pecan; inner sequence

SEQ ID NO: 20432 - DNA, 30 bp, Artificial Sequence; identical to SEQ ID NO: 4867
  Description of Artificial Sequence: Synthetic pecan; inner sequence

SEQ ID NO: 20433 - DNA, 30 bp, Artificial Sequence; identical to SEQ ID NO: 430
  Description of Artificial Sequence: Synthetic pecan; inner sequence

SEQ ID NO: 20434 - DNA, 30 bp, Artificial Sequence; identical to SEQ ID NO: 316
  Description of Artificial Sequence: Synthetic pecan; inner sequence

SEQ ID NO: 20435 - DNA, 30 bp, Artificial Sequence; identical to SEQ ID NO: 331
  Description of Artificial Sequence: Synthetic pecan; inner sequence

SEQ ID NO: 20436 - DNA, 30 bp, Artificial Sequence; identical to SEQ ID NO: 401
  Description of Artificial Sequence: Synthetic pecan; inner sequence

SEQ ID NO: 20437 - DNA, 30 bp, Artificial Sequence; identical to SEQ ID NO: 828
  Description of Artificial Sequence: Synthetic pecan; inner sequence

SEQ ID NO: 20438 - DNA, 30 bp, Artificial Sequence; identical to SEQ ID NO: 772
  Description of Artificial Sequence: Synthetic pecan; inner sequence

SEQ ID NO: 20439 - DNA, 30 bp, Artificial Sequence; identical to SEQ ID NO: 4575
  Description of Artificial Sequence: Synthetic pecan; inner sequence

SEQ ID NO: 20440 - DNA, 27 bp, Artificial Sequence
  Description of Artificial Sequence: Synthetic pecan; inner sequence
ggccaagctgacctagcatgtgtgtca

SEQ ID NO: 20441 - DNA, 30 bp, Artificial Sequence
  Description of Artificial Sequence: Synthetic pecan; inner sequence
ggacgcagcttgcatactggtggtcacgta

SEQ ID NO: 20442 - DNA, 30 bp, Artificial Sequence; identical to SEQ ID NO: 4998
  Description of Artificial Sequence: Synthetic pecan; inner sequence

SEQ ID NO: 20443 - DNA, 30 bp, Artificial Sequence; identical to SEQ ID NO: 945
  Description of Artificial Sequence: Synthetic pecan; inner sequence

SEQ ID NO: 20444 - DNA, 30 bp, Artificial Sequence; identical to SEQ ID NO: 742
  Description of Artificial Sequence: Synthetic pecan; inner sequence

SEQ ID NO: 20445 - DNA, 30 bp, Artificial Sequence
  Description of Artificial Sequence: Synthetic pecan; inner sequence
ggacgcagcttgcctactagtggtcacgta

SEQ ID NO: 20446 - DNA, 30 bp, Artificial Sequence; identical to SEQ ID NO: 756
  Description of Artificial Sequence: Synthetic pecan; inner sequence

SEQ ID NO: 20447 - DNA, 30 bp, Artificial Sequence; identical to SEQ ID NO: 16
  Description of Artificial Sequence: Synthetic pecan; inner sequence

SEQ ID NO: 20448 - DNA, 30 bp, Artificial Sequence; identical to SEQ ID NO: 583
  Description of Artificial Sequence: Synthetic pecan; inner sequence

SEQ ID NO: 20449 - DNA, 30 bp, Artificial Sequence; identical to SEQ ID NO: 8546
  Description of Artificial Sequence: Synthetic pecan; inner sequence

SEQ ID NO: 20450 - DNA, 30 bp, Artificial Sequence; identical to SEQ ID NO: 47
  Description of Artificial Sequence: Synthetic pecan; inner sequence

SEQ ID NO: 20451 - DNA, 30 bp, Artificial Sequence; identical to SEQ ID NO: 512
  Description of Artificial Sequence: Synthetic pecan; inner sequence

SEQ ID NO: 20452 - DNA, 30 bp, Artificial Sequence; identical to SEQ ID NO: 16640
  Description of Artificial Sequence: Synthetic pecan; inner sequence

SEQ ID NO: 20453 - DNA, 30 bp, Artificial Sequence; identical to SEQ ID NO: 4552
  Description of Artificial Sequence: Synthetic pecan; inner sequence

SEQ ID NO: 20454 - DNA, 30 bp, Artificial Sequence; identical to SEQ ID NO: 387
  Description of Artificial Sequence: Synthetic pecan; inner sequence

SEQ ID NO: 20455 - DNA, 31 bp, Artificial Sequence; identical to SEQ ID NO: 4245
  Description of Artificial Sequence: Synthetic pecan; inner sequence

SEQ ID NO: 20456 - DNA, 30 bp, Artificial Sequence; identical to SEQ ID NO: 4888
  Description of Artificial Sequence: Synthetic pecan; inner sequence

SEQ ID NO: 20457 - DNA, 30 bp, Artificial Sequence; identical to SEQ ID NO: 791
  Description of Artificial Sequence: Synthetic pecan; inner sequence

SEQ ID NO: 20458 - DNA, 30 bp, Artificial Sequence
  Description of Artificial Sequence: Synthetic pecan; inner sequence
gtgcgcatcgtcccgtcatgtggttccgta

SEQ ID NO: 20459 - DNA, 30 bp, Artificial Sequence; identical to SEQ ID NO: 4743
  Description of Artificial Sequence: Synthetic pecan; inner sequence

SEQ ID NO: 20460 - DNA, 30 bp, Artificial Sequence; identical to SEQ ID NO: 8949
  Description of Artificial Sequence: Synthetic pecan; inner sequence

SEQ ID NO: 20461 - DNA, 30 bp, Artificial Sequence; identical to SEQ ID NO: 12936
  Description of Artificial Sequence: Synthetic pecan; inner sequence

SEQ ID NO: 20462 - DNA, 30 bp, Artificial Sequence
  Description of Artificial Sequence: Synthetic pecan; inner sequence
gcgcctgatgcgtgccgttcaagtgcgcca

SEQ ID NO: 20463 - DNA, 30 bp, Artificial Sequence
  Description of Artificial Sequence: Synthetic pecan; inner sequence
ggcatgcacgcacctacacgtggttatgga

SEQ ID NO: 20464 - DNA, 30 bp, Artificial Sequence; identical to SEQ ID NO: 912
  Description of Artificial Sequence: Synthetic pecan; inner sequence

SEQ ID NO: 20465 - DNA, 30 bp, Artificial Sequence; identical to SEQ ID NO: 4641
  Description of Artificial Sequence: Synthetic pecan; inner sequence

SEQ ID NO: 20466 - DNA, 30 bp, Artificial Sequence
  Description of Artificial Sequence: Synthetic pecan; inner sequence
gtacgcatcgtcccgtcatgtggttacgta

SEQ ID NO: 20467 - DNA, 30 bp, Artificial Sequence; identical to SEQ ID NO: 16695
  Description of Artificial Sequence: Synthetic pecan; inner sequence

SEQ ID NO: 20468 - DNA, 30 bp, Artificial Sequence
  Description of Artificial Sequence: Synthetic pecan; inner sequence
gtcactgtgcctgaccgtcaagttgcgtca

SEQ ID NO: 20469 - DNA, 29 bp, Artificial Sequence
  Description of Artificial Sequence: Synthetic pecan; inner sequence
gcacgccgatgccctcatgtggccgtggt

SEQ ID NO: 20470 - DNA, 30 bp, Artificial Sequence; identical to SEQ ID NO: 488
  Description of Artificial Sequence: Synthetic pecan; inner sequence

SEQ ID NO: 20471 - DNA, 30 bp, Artificial Sequence; identical to SEQ ID NO: 620
  Description of Artificial Sequence: Synthetic pecan; inner sequence

SEQ ID NO: 20472 - DNA, 30 bp, Artificial Sequence
  Description of Artificial Sequence: Synthetic pecan; inner sequence
ggcacaaacggaccgtcaagtgcgcatgga

SEQ ID NO: 20473 - DNA, 30 bp, Artificial Sequence
  Description of Artificial Sequence: Synthetic pecan; inner sequence
ggacgcagcgaaccgtacgtggacgtggcg

SEQ ID NO: 20474 - DNA, 30 bp, Artificial Sequence; identical to SEQ ID NO: 774
  Description of Artificial Sequence: Synthetic pecan; inner sequence

SEQ ID NO: 20475 - DNA, 30 bp, Artificial Sequence
  Description of Artificial Sequence: Synthetic pecan; inner sequence
ccgcacgtagccccatcagtggtgcatgca

SEQ ID NO: 20476 - DNA, 30 bp, Artificial Sequence; identical to SEQ ID NO: 26
  Description of Artificial Sequence: Synthetic pecan; inner sequence

SEQ ID NO: 20477 - DNA, 30 bp, Artificial Sequence
  Description of Artificial Sequence: Synthetic pecan; inner sequence
ggcacaaacggaacgacaagtgcgcatgga

SEQ ID NO: 20478 - DNA, 30 bp, Artificial Sequence
  Description of Artificial Sequence: Synthetic pecan; inner sequence
gcactgcacgcaccctatcatgttggcatg

SEQ ID NO: 20479 - DNA, 30 bp, Artificial Sequence; identical to SEQ ID NO: 375
  Description of Artificial Sequence: Synthetic pecan; inner sequence

SEQ ID NO: 20480 - DNA, 30 bp, Artificial Sequence; identical to SEQ ID NO: 12866
  Description of Artificial Sequence: Synthetic pecan; inner sequence

SEQ ID NO: 20481 - DNA, 30 bp, Artificial Sequence; identical to SEQ ID NO: 4419
  Description of Artificial Sequence: Synthetic pecan; inner sequence

SEQ ID NO: 20482 - DNA, 30 bp, Artificial Sequence; identical to SEQ ID NO: 237
  Description of Artificial Sequence: Synthetic pecan; inner sequence

SEQ ID NO: 20483 - DNA, 30 bp, Artificial Sequence
  Description of Artificial Sequence: Synthetic pecan; inner sequence
ggcacacacggaccgacaagtgcgcatgga

SEQ ID NO: 20484 - DNA, 30 bp, Artificial Sequence; identical to SEQ ID NO: 4893
  Description of Artificial Sequence: Synthetic pecan; inner sequence

SEQ ID NO: 20485 - DNA, 30 bp, Artificial Sequence
  Description of Artificial Sequence: Synthetic pecan; inner sequence
ccgcacgtagccttatcagtggtgcatgca

SEQ ID NO: 20486 - DNA, 30 bp, Artificial Sequence
  Description of Artificial Sequence: Synthetic pecan; inner sequence
gtcactgtgcatgaccgtcaagttgcggca

SEQ ID NO: 20487 - DNA, 30 bp, Artificial Sequence; identical to SEQ ID NO: 4610
  Description of Artificial Sequence: Synthetic pecan; inner sequence

SEQ ID NO: 20488 - DNA, 30 bp, Artificial Sequence; identical to SEQ ID NO: 527
  Description of Artificial Sequence: Synthetic pecan; inner sequence

SEQ ID NO: 20489 - DNA, 30 bp, Artificial Sequence; identical to SEQ ID NO: 4627
  Description of Artificial Sequence: Synthetic pecan; inner sequence

SEQ ID NO: 20490 - DNA, 30 bp, Artificial Sequence
  Description of Artificial Sequence: Synthetic pecan; inner sequence
ccgcacgtagccctatcagtggtgcatgcc

SEQ ID NO: 20491 - DNA, 30 bp, Artificial Sequence; identical to SEQ ID NO: 4776
  Description of Artificial Sequence: Synthetic pecan; inner sequence

SEQ ID NO: 20492 - DNA, 29 bp, Artificial Sequence
  Description of Artificial Sequence: Synthetic pecan; inner sequence
gtcatgccatcccttcgagtgtgcaggta

SEQ ID NO: 20493 - DNA, 30 bp, Artificial Sequence; identical to SEQ ID NO: 386
  Description of Artificial Sequence: Synthetic pecan; inner sequence

SEQ ID NO: 20494 - DNA, 30 bp, Artificial Sequence; identical to SEQ ID NO: 4898
  Description of Artificial Sequence: Synthetic pecan; inner sequence

SEQ ID NO: 20495 - DNA, 30 bp, Artificial Sequence
  Description of Artificial Sequence: Synthetic pecan; inner sequence
cgcaccgtacgacaacgtgcttgcgtggcg

SEQ ID NO: 20496 - DNA, 30 bp, Artificial Sequence
  Description of Artificial Sequence: Synthetic pecan; inner sequence
gcacgactcgcaccctatcatgtggccatg

SEQ ID NO: 20497 - DNA, 28 bp, Artificial Sequence
  Description of Artificial Sequence: Synthetic pecan; inner sequence
cgcaccgtcgatacgtcatgcacgcacc

SEQ ID NO: 20498 - DNA, 30 bp, Artificial Sequence
  Description of Artificial Sequence: Synthetic pecan; inner sequence
ggacgcagcttgtctactggtggtcacgta

SEQ ID NO: 20499 - DNA, 30 bp, Artificial Sequence; identical to SEQ ID NO: 270
  Description of Artificial Sequence: Synthetic pecan; inner sequence

SEQ ID NO: 20500 - DNA, 30 bp, Artificial Sequence; identical to SEQ ID NO: 754
  Description of Artificial Sequence: Synthetic pecan; inner sequence

SEQ ID NO: 20501 - DNA, 30 bp, Artificial Sequence
  Description of Artificial Sequence: Synthetic pecan; inner sequence
ccgatcgcacgtcaaggcatgctgtacgag

SEQ ID NO: 20502 - DNA, 30 bp, Artificial Sequence
  Description of Artificial Sequence: Synthetic pecan; inner sequence
gcacgactcccaccctatcatgaggccatg

SEQ ID NO: 20503 - DNA, 30 bp, Artificial Sequence; identical to SEQ ID NO: 4943
  Description of Artificial Sequence: Synthetic pecan; inner sequence

SEQ ID NO: 20504 - DNA, 30 bp, Artificial Sequence
  Description of Artificial Sequence: Synthetic pecan; inner sequence
gtacgcatcgtcacgtcatgtggttccgta

SEQ ID NO: 20505 - DNA, 30 bp, Artificial Sequence; identical to SEQ ID NO: 452
  Description of Artificial Sequence: Synthetic pecan; inner sequence

SEQ ID NO: 20506 - DNA, 30 bp, Artificial Sequence
  Description of Artificial Sequence: Synthetic pecan; inner sequence
tgacgcagcttgcctactggtggtcacgta

SEQ ID NO: 20507 - DNA, 30 bp, Artificial Sequence
  Description of Artificial Sequence: Synthetic pecan; inner sequence
ggccacagcgtacctcaaagtggacgtgca

SEQ ID NO: 20508 - DNA, 30 bp, Artificial Sequence; identical to SEQ ID NO: 381
  Description of Artificial Sequence: Synthetic pecan; inner sequence

SEQ ID NO: 20509 - DNA, 30 bp, Artificial Sequence
  Description of Artificial Sequence: Synthetic pecan; inner sequence
ggccgcagcggaacgttcgagtggtacgta

SEQ ID NO: 20510 - DNA, 30 bp, Artificial Sequence
  Description of Artificial Sequence: Synthetic pecan; inner sequence
ggcacaaacggaccgacaggtgcgcatgga

SEQ ID NO: 20511 - DNA, 30 bp, Artificial Sequence; identical to SEQ ID NO: 120
  Description of Artificial Sequence: Synthetic pecan; inner sequence

SEQ ID NO: 20512 - DNA, 30 bp, Artificial Sequence; identical to SEQ ID NO: 448
  Description of Artificial Sequence: Synthetic pecan; inner sequence

SEQ ID NO: 20513 - DNA, 30 bp, Artificial Sequence
  Description of Artificial Sequence: Synthetic pecan; inner sequence
ggcccaaacggaccgacaagtgcgcatgga

SEQ ID NO: 20514 - DNA, 30 bp, Artificial Sequence
  Description of Artificial Sequence: Synthetic pecan; inner sequence
ccgtagcgacgtcaagcggtggtgtgcgtg

SEQ ID NO: 20515 - DNA, 30 bp, Artificial Sequence
  Description of Artificial Sequence: Synthetic pecan; inner sequence
ggccacagcgtacctaaacgtggacgtgca

SEQ ID NO: 20516 - DNA, 30 bp, Artificial Sequence; identical to SEQ ID NO: 4810
  Description of Artificial Sequence: Synthetic pecan; inner sequence

SEQ ID NO: 20517 - DNA, 30 bp, Artificial Sequence; identical to SEQ ID NO: 4921
  Description of Artificial Sequence: Synthetic pecan; inner sequence

SEQ ID NO: 20518 - DNA, 30 bp, Artificial Sequence
  Description of Artificial Sequence: Synthetic pecan; inner sequence
ggcatgcacgcacatacacgtgggcacgta

SEQ ID NO: 20519 - DNA, 30 bp, Artificial Sequence
  Description of Artificial Sequence: Synthetic pecan; inner sequence
gcacgactcgcaccctatcatggcggcatg

SEQ ID NO: 20520 - DNA, 30 bp, Artificial Sequence; identical to SEQ ID NO: 4230
  Description of Artificial Sequence: Synthetic pecan; inner sequence

SEQ ID NO: 20521 - DNA, 30 bp, Artificial Sequence; identical to SEQ ID NO: 176
  Description of Artificial Sequence: Synthetic pecan; inner sequence

SEQ ID NO: 20522 - DNA, 30 bp, Artificial Sequence
  Description of Artificial Sequence: Synthetic pecan; inner sequence
ggcatgcacgcacctacatgtgggcacgta

SEQ ID NO: 20523 - DNA, 30 bp, Artificial Sequence; identical to SEQ ID NO: 27
  Description of Artificial Sequence: Synthetic pecan; inner sequence

SEQ ID NO: 20524 - DNA, 30 bp, Artificial Sequence
  Description of Artificial Sequence: Synthetic pecan; inner sequence
gacactgtgcctgaccgtcaagttgcggca

SEQ ID NO: 20525 - DNA, 30 bp, Artificial Sequence; identical to SEQ ID NO: 321
  Description of Artificial Sequence: Synthetic pecan; inner sequence

SEQ ID NO: 20526 - DNA, 31 bp, Artificial Sequence; identical to SEQ ID NO: 845
  Description of Artificial Sequence: Synthetic pecan; inner sequence

SEQ ID NO: 20527 - DNA, 30 bp, Artificial Sequence
  Description of Artificial Sequence: Synthetic pecan; inner sequence
ggcatgcacgcaactacacgtgggtatgga

SEQ ID NO: 20528 - DNA, 30 bp, Artificial Sequence
  Description of Artificial Sequence: Synthetic pecan; inner sequence
ggccacagcgtacctcaacttggacgtgca

SEQ ID NO: 20529 - DNA, 30 bp, Artificial Sequence; identical to SEQ ID NO: 991
  Description of Artificial Sequence: Synthetic pecan; inner sequence

SEQ ID NO: 20530 - DNA, 30 bp, Artificial Sequence
  Description of Artificial Sequence: Synthetic pecan; inner sequence
gcacgactcgcaccctatcatgaagccatg

SEQ ID NO: 20531 - DNA, 30 bp, Artificial Sequence
  Description of Artificial Sequence: Synthetic pecan; inner sequence
ccgcacgtaggcctatcagtggtgcatgca

SEQ ID NO: 20532 - DNA, 29 bp, Artificial Sequence
  Description of Artificial Sequence: Synthetic pecan; inner sequence
cgcaccgtcaagcgggaaggcactttggc

SEQ ID NO: 20533 - DNA, 30 bp, Artificial Sequence
  Description of Artificial Sequence: Synthetic pecan; inner sequence
ggcatgcacgcacctacacgtgggcacgca

SEQ ID NO: 20534 - DNA, 30 bp, Artificial Sequence
  Description of Artificial Sequence: Synthetic pecan; inner sequence
ccgcacgtagccctatcagtggtgcctgca

SEQ ID NO: 20535 - DNA, 30 bp, Artificial Sequence; identical to SEQ ID NO: 8953
  Description of Artificial Sequence: Synthetic pecan; inner sequence

SEQ ID NO: 20536 - DNA, 30 bp, Artificial Sequence; identical to SEQ ID NO: 172
  Description of Artificial Sequence: Synthetic pecan; inner sequence

SEQ ID NO: 20537 - DNA, 30 bp, Artificial Sequence
  Description of Artificial Sequence: Synthetic pecan; inner sequence
ggacgcagcttgactactggtggtcacgta

SEQ ID NO: 20538 - DNA, 30 bp, Artificial Sequence; identical to SEQ ID NO: 58
  Description of Artificial Sequence: Synthetic pecan; inner sequence

SEQ ID NO: 20539 - DNA, 30 bp, Artificial Sequence; identical to SEQ ID NO: 524
  Description of Artificial Sequence: Synthetic pecan; inner sequence

SEQ ID NO: 20540 - DNA, 30 bp, Artificial Sequence
  Description of Artificial Sequence: Synthetic pecan; inner sequence
ggacgcaacgtacctcaacgtggacgtgca

SEQ ID NO: 20541 - DNA, 30 bp, Artificial Sequence
  Description of Artificial Sequence: Synthetic pecan; inner sequence
gcacgactcgcaccctatcatgaggtcatg

SEQ ID NO: 20542 - DNA, 30 bp, Artificial Sequence; identical to SEQ ID NO: 16750
  Description of Artificial Sequence: Synthetic pecan; inner sequence

SEQ ID NO: 20543 - DNA, 30 bp, Artificial Sequence; identical to SEQ ID NO: 4717
  Description of Artificial Sequence: Synthetic pecan; inner sequence

SEQ ID NO: 20544 - DNA, 30 bp, Artificial Sequence
  Description of Artificial Sequence: Synthetic pecan; inner sequence
ggcatgcactcacctacacgtgggtatgga

SEQ ID NO: 20545 - DNA, 30 bp, Artificial Sequence
  Description of Artificial Sequence: Synthetic pecan; inner sequence
ggacgcagctttcctactggtggtcacgta

SEQ ID NO: 20546 - DNA, 30 bp, Artificial Sequence; identical to SEQ ID NO: 892
  Description of Artificial Sequence: Synthetic pecan; inner sequence

SEQ ID NO: 20547 - DNA, 30 bp, Artificial Sequence; identical to SEQ ID NO: 552
  Description of Artificial Sequence: Synthetic pecan; inner sequence

SEQ ID NO: 20548 - DNA, 30 bp, Artificial Sequence
  Description of Artificial Sequence: Synthetic pecan; inner sequence
cgcaccgtcaagcgggaatgcactttggtg

SEQ ID NO: 20549 - DNA, 30 bp, Artificial Sequence
  Description of Artificial Sequence: Synthetic pecan; inner sequence
gtcgtgactggctatctggacatgcactgc

SEQ ID NO: 20550 - DNA, 30 bp, Artificial Sequence; identical to SEQ ID NO: 857
  Description of Artificial Sequence: Synthetic pecan; inner sequence

SEQ ID NO: 20551 - DNA, 30 bp, Artificial Sequence
  Description of Artificial Sequence: Synthetic pecan; inner sequence
gcactgcacgcacactatcatgtaggcatg

SEQ ID NO: 20552 - DNA, 30 bp, Artificial Sequence
  Description of Artificial Sequence: Synthetic pecan; inner sequence
ccgatcgcacgtcaaggccggctgtacgag

SEQ ID NO: 20553 - DNA, 30 bp, Artificial Sequence
  Description of Artificial Sequence: Synthetic pecan; inner sequence
ccgcacgtagccctatcagtggtgcatgcg

SEQ ID NO: 20554 - DNA, 30 bp, Artificial Sequence; identical to SEQ ID NO: 806
  Description of Artificial Sequence: Synthetic pecan; inner sequence

SEQ ID NO: 20555 - DNA, 30 bp, Artificial Sequence; identical to SEQ ID NO: 523
  Description of Artificial Sequence: Synthetic pecan; inner sequence

SEQ ID NO: 20556 - DNA, 30 bp, Artificial Sequence; identical to SEQ ID NO: 173
  Description of Artificial Sequence: Synthetic pecan; inner sequence

SEQ ID NO: 20557 - DNA, 30 bp, Artificial Sequence; identical to SEQ ID NO: 8618
  Description of Artificial Sequence: Synthetic pecan; inner sequence

SEQ ID NO: 20558 - DNA, 30 bp, Artificial Sequence; identical to SEQ ID NO: 837
  Description of Artificial Sequence: Synthetic pecan; inner sequence

SEQ ID NO: 20559 - DNA, 30 bp, Artificial Sequence
  Description of Artificial Sequence: Synthetic pecan; inner sequence
ccgatcgcacgtcaatgcaggctgtacgag

SEQ ID NO: 20560 - DNA, 30 bp, Artificial Sequence
  Description of Artificial Sequence: Synthetic pecan; inner sequence
ggccacagcgtacctcaacgtggacgtgta

SEQ ID NO: 20561 - DNA, 30 bp, Artificial Sequence; identical to SEQ ID NO: 507
  Description of Artificial Sequence: Synthetic pecan; inner sequence

SEQ ID NO: 20562 - DNA, 30 bp, Artificial Sequence
  Description of Artificial Sequence: Synthetic pecan; inner sequence
ggcacaaacggacctacaagtgcgcatgga

SEQ ID NO: 20563 - DNA, 30 bp, Artificial Sequence; identical to SEQ ID NO: 541
  Description of Artificial Sequence: Synthetic pecan; inner sequence

SEQ ID NO: 20564 - DNA, 30 bp, Artificial Sequence; identical to SEQ ID NO: 4997
  Description of Artificial Sequence: Synthetic pecan; inner sequence

SEQ ID NO: 20565 - DNA, 30 bp, Artificial Sequence
  Description of Artificial Sequence: Synthetic pecan; inner sequence
gtcacaaacggaccgacaagtgcgcatgga

SEQ ID NO: 20566 - DNA, 30 bp, Artificial Sequence; identical to SEQ ID NO: 165
  Description of Artificial Sequence: Synthetic pecan; inner sequence

SEQ ID NO: 20567 - DNA, 30 bp, Artificial Sequence; identical to SEQ ID NO: 233
  Description of Artificial Sequence: Synthetic pecan; inner sequence

SEQ ID NO: 20568 - DNA, 30 bp, Artificial Sequence; identical to SEQ ID NO: 4755
  Description of Artificial Sequence: Synthetic pecan; inner sequence

SEQ ID NO: 20569 - DNA, 30 bp, Artificial Sequence; identical to SEQ ID NO: 683
  Description of Artificial Sequence: Synthetic pecan; inner sequence

SEQ ID NO: 20570 - DNA, 30 bp, Artificial Sequence
  Description of Artificial Sequence: Synthetic pecan; inner sequence
ccgtagcgacatcaaccggtggtgtgcgtg

SEQ ID NO: 20571 - DNA, 30 bp, Artificial Sequence; identical to SEQ ID NO: 497
  Description of Artificial Sequence: Synthetic pecan; inner sequence

SEQ ID NO: 20572 - DNA, 30 bp, Artificial Sequence; identical to SEQ ID NO: 8792
  Description of Artificial Sequence: Synthetic pecan; inner sequence

SEQ ID NO: 20573 - DNA, 30 bp, Artificial Sequence
  Description of Artificial Sequence: Synthetic pecan; inner sequence
ccgtagcgtcatcaagcggtggtgtgcgtg

SEQ ID NO: 20574 - DNA, 30 bp, Artificial Sequence
  Description of Artificial Sequence: Synthetic pecan; inner sequence
ggacgcagcttgcctaatggtggtcacgta

SEQ ID NO: 20575 - DNA, 30 bp, Artificial Sequence; identical to SEQ ID NO: 153
  Description of Artificial Sequence: Synthetic pecan; inner sequence

SEQ ID NO: 20576 - DNA, 30 bp, Artificial Sequence
  Description of Artificial Sequence: Synthetic pecan; inner sequence
gtcatgcactaacactatcatggcggcatg

SEQ ID NO: 20577 - DNA, 30 bp, Artificial Sequence
  Description of Artificial Sequence: Synthetic pecan; inner sequence
ggacgcagcggaccgttcgagtggtacgta

SEQ ID NO: 20578 - DNA, 30 bp, Artificial Sequence
  Description of Artificial Sequence: Synthetic pecan; inner sequence
ccatcgcgtcactatcatctgtgtcacgta

SEQ ID NO: 20579 - DNA, 30 bp, Artificial Sequence
  Description of Artificial Sequence: Synthetic pecan; inner sequence
ccgcacggagccctatcagtggtgcatgca

SEQ ID NO: 20580 - DNA, 30 bp, Artificial Sequence
  Description of Artificial Sequence: Synthetic pecan; inner sequence
ccgtagcgacatcatgcggtggtgtgcgtg

SEQ ID NO: 20581 - DNA, 30 bp, Artificial Sequence
  Description of Artificial Sequence: Synthetic pecan; inner sequence
ccgcacgtagccctatcagtggtgcatgga

SEQ ID NO: 20582 - DNA, 30 bp, Artificial Sequence; identical to SEQ ID NO: 208
  Description of Artificial Sequence: Synthetic pecan; inner sequence

SEQ ID NO: 20583 - DNA, 30 bp, Artificial Sequence
  Description of Artificial Sequence: Synthetic pecan; inner sequence
gcacgattcgcaccctatcatgaggccatg

SEQ ID NO: 20584 - DNA, 30 bp, Artificial Sequence; identical to SEQ ID NO: 312
  Description of Artificial Sequence: Synthetic pecan; inner sequence

SEQ ID NO: 20585 - DNA, 30 bp, Artificial Sequence; identical to SEQ ID NO: 116
  Description of Artificial Sequence: Synthetic pecan; inner sequence

SEQ ID NO: 20586 - DNA, 30 bp, Artificial Sequence; identical to SEQ ID NO: 4429
  Description of Artificial Sequence: Synthetic pecan; inner sequence

SEQ ID NO: 20587 - DNA, 30 bp, Artificial Sequence; identical to SEQ ID NO: 788
  Description of Artificial Sequence: Synthetic pecan; inner sequence

SEQ ID NO: 20588 - DNA, 30 bp, Artificial Sequence; identical to SEQ ID NO: 292
  Description of Artificial Sequence: Synthetic pecan; inner sequence

SEQ ID NO: 20589 - DNA, 30 bp, Artificial Sequence; identical to SEQ ID NO: 8926
  Description of Artificial Sequence: Synthetic pecan; inner sequence

SEQ ID NO: 20590 - DNA, 30 bp, Artificial Sequence
  Description of Artificial Sequence: Synthetic pecan; inner sequence
ggcatgcacgaacctacacgtgggtatgga

SEQ ID NO: 20591 - DNA, 30 bp, Artificial Sequence; identical to SEQ ID NO: 596
  Description of Artificial Sequence: Synthetic pecan; inner sequence

SEQ ID NO: 20592 - DNA, 30 bp, Artificial Sequence
  Description of Artificial Sequence: Synthetic pecan; inner sequence
cgcaccgtcaagcgggaagtcactttggtg

SEQ ID NO: 20593 - DNA, 30 bp, Artificial Sequence; identical to SEQ ID NO: 4579
  Description of Artificial Sequence: Synthetic pecan; inner sequence

SEQ ID NO: 20594 - DNA, 30 bp, Artificial Sequence
  Description of Artificial Sequence: Synthetic pecan; inner sequence
ccgtagcgacatcaagcgggggggtgcgtg

SEQ ID NO: 20595 - DNA, 30 bp, Artificial Sequence; identical to SEQ ID NO: 717
  Description of Artificial Sequence: Synthetic pecan; inner sequence

SEQ ID NO: 20596 - DNA, 30 bp, Artificial Sequence
  Description of Artificial Sequence: Synthetic pecan; inner sequence
gtcatgcacgaacactatcatggtggcatg

SEQ ID NO: 20597 - DNA, 30 bp, Artificial Sequence; identical to SEQ ID NO: 12992
  Description of Artificial Sequence: Synthetic pecan; inner sequence

SEQ ID NO: 20598 - DNA, 30 bp, Artificial Sequence
  Description of Artificial Sequence: Synthetic pecan; inner sequence
ggactcagcttgcctactggtggtcacgta

SEQ ID NO: 20599 - DNA, 30 bp, Artificial Sequence; identical to SEQ ID NO: 268
  Description of Artificial Sequence: Synthetic pecan; inner sequence

SEQ ID NO: 20600 - DNA, 30 bp, Artificial Sequence
  Description of Artificial Sequence: Synthetic pecan; inner sequence
ggcacaaacggaccgacaagtgtgcatgga

SEQ ID NO: 20601 - DNA, 30 bp, Artificial Sequence; identical to SEQ ID NO: 4787
  Description of Artificial Sequence: Synthetic pecan; inner sequence

SEQ ID NO: 20602 - DNA, 30 bp, Artificial Sequence; identical to SEQ ID NO: 12996
  Description of Artificial Sequence: Synthetic pecan; inner sequence

SEQ ID NO: 20603 - DNA, 30 bp, Artificial Sequence
  Description of Artificial Sequence: Synthetic pecan; inner sequence
ggcgtgcggaccggtaagtcgtcatgcaca

SEQ ID NO: 20604 - DNA, 30 bp, Artificial Sequence
  Description of Artificial Sequence: Synthetic pecan; inner sequence
cgcacaaacggaccgacaagtgcgcatgga

SEQ ID NO: 20605 - DNA, 30 bp, Artificial Sequence
  Description of Artificial Sequence: Synthetic pecan; inner sequence
ggacgcagcttgcctactggtggtcatgta

SEQ ID NO: 20606 - DNA, 30 bp, Artificial Sequence; identical to SEQ ID NO: 654
  Description of Artificial Sequence: Synthetic pecan; inner sequence

SEQ ID NO: 20607 - DNA, 30 bp, Artificial Sequence
  Description of Artificial Sequence: Synthetic pecan; inner sequence
gtcattccgcatcctacaagtgggcacgta

SEQ ID NO: 20608 - DNA, 30 bp, Artificial Sequence; identical to SEQ ID NO: 8579
  Description of Artificial Sequence: Synthetic pecan; inner sequence

SEQ ID NO: 20609 - DNA, 30 bp, Artificial Sequence; identical to SEQ ID NO: 4492
  Description of Artificial Sequence: Synthetic pecan; inner sequence

SEQ ID NO: 20610 - DNA, 26 bp, Artificial Sequence
  Description of Artificial Sequence: Synthetic pecan; inner sequence
ccgcacgtcaaggcaggctgtacgag

SEQ ID NO: 20611 - DNA, 30 bp, Artificial Sequence; identical to SEQ ID NO: 4987
  Description of Artificial Sequence: Synthetic pecan; inner sequence

SEQ ID NO: 20612 - DNA, 30 bp, Artificial Sequence; identical to SEQ ID NO: 12945
  Description of Artificial Sequence: Synthetic pecan; inner sequence

SEQ ID NO: 20613 - DNA, 30 bp, Artificial Sequence
  Description of Artificial Sequence: Synthetic pecan; inner sequence
ggccacatcgtacctcaacgtggacgtgca

SEQ ID NO: 20614 - DNA, 30 bp, Artificial Sequence; identical to SEQ ID NO: 520
  Description of Artificial Sequence: Synthetic pecan; inner sequence

SEQ ID NO: 20615 - DNA, 30 bp, Artificial Sequence
  Description of Artificial Sequence: Synthetic pecan; inner sequence
cgcaccgtcaatcgggaaggcactttggtg

SEQ ID NO: 20616 - DNA, 30 bp, Artificial Sequence; identical to SEQ ID NO: 924
  Description of Artificial Sequence: Synthetic pecan; inner sequence

SEQ ID NO: 20617 - DNA, 30 bp, Artificial Sequence
  Description of Artificial Sequence: Synthetic pecan; inner sequence
gtcatgccatctcttcgagtgtgacaggta

SEQ ID NO: 20618 - DNA, 30 bp, Artificial Sequence
  Description of Artificial Sequence: Synthetic pecan; inner sequence
ggcacaaacggaccgacaagtgcgtatgga

SEQ ID NO: 20619 - DNA, 29 bp, Artificial Sequence
  Description of Artificial Sequence: Synthetic pecan; inner sequence
gtacgccgatgccctcatgtggccgtgga

SEQ ID NO: 20620 - DNA, 30 bp, Artificial Sequence; identical to SEQ ID NO: 530
  Description of Artificial Sequence: Synthetic pecan; inner sequence

SEQ ID NO: 20621 - DNA, 30 bp, Artificial Sequence; identical to SEQ ID NO: 107
  Description of Artificial Sequence: Synthetic pecan; inner sequence

SEQ ID NO: 20622 - DNA, 30 bp, Artificial Sequence; identical to SEQ ID NO: 8678
  Description of Artificial Sequence: Synthetic pecan; inner sequence

SEQ ID NO: 20623 - DNA, 30 bp, Artificial Sequence
  Description of Artificial Sequence: Synthetic pecan; inner sequence
gcacgcatcgtcccgtcatgtggttccgta

SEQ ID NO: 20624 - DNA, 30 bp, Artificial Sequence; identical to SEQ ID NO: 4470
  Description of Artificial Sequence: Synthetic pecan; inner sequence

SEQ ID NO: 20625 - DNA, 30 bp, Artificial Sequence
  Description of Artificial Sequence: Synthetic pecan; inner sequence
ggcacaaacggacagacaagtgcgcatgga

SEQ ID NO: 20626 - DNA, 30 bp, Artificial Sequence
  Description of Artificial Sequence: Synthetic pecan; inner sequence
cgcaccgtcgatacgtcgtgcacgctgaca

SEQ ID NO: 20627 - DNA, 30 bp, Artificial Sequence
  Description of Artificial Sequence: Synthetic pecan; inner sequence
ccgcacgtagccctatccgtggtgcatgca

SEQ ID NO: 20628 - DNA, 30 bp, Artificial Sequence; identical to SEQ ID NO: 99
  Description of Artificial Sequence: Synthetic pecan; inner sequence

SEQ ID NO: 20629 - DNA, 30 bp, Artificial Sequence
  Description of Artificial Sequence: Synthetic pecan; inner sequence
ggcacaaacggaccgacaagttcgcatgga

SEQ ID NO: 20630 - DNA, 30 bp, Artificial Sequence; identical to SEQ ID NO: 4916
  Description of Artificial Sequence: Synthetic pecan; inner sequence

SEQ ID NO: 20631 - DNA, 30 bp, Artificial Sequence; identical to SEQ ID NO: 287
  Description of Artificial Sequence: Synthetic pecan; inner sequence

SEQ ID NO: 20632 - DNA, 30 bp, Artificial Sequence; identical to SEQ ID NO: 4761
  Description of Artificial Sequence: Synthetic pecan; inner sequence

SEQ ID NO: 20633 - DNA, 30 bp, Artificial Sequence
  Description of Artificial Sequence: Synthetic pecan; inner sequence
ccgcacgtaaccctatcagtggtgcatgca

SEQ ID NO: 20634 - DNA, 29 bp, Artificial Sequence
  Description of Artificial Sequence: Synthetic pecan; inner sequence
gtcatgccatcccttcgagtgtgacggta

SEQ ID NO: 20635 - DNA, 30 bp, Artificial Sequence
  Description of Artificial Sequence: Synthetic pecan; inner sequence
ggcacaaacggaccgccaagtgcgcatgga

SEQ ID NO: 20636 - DNA, 30 bp, Artificial Sequence; identical to SEQ ID NO: 16688
  Description of Artificial Sequence: Synthetic pecan; inner sequence

SEQ ID NO: 20637 - DNA, 30 bp, Artificial Sequence
  Description of Artificial Sequence: Synthetic pecan; inner sequence
ccgatcgcacgtcaagccaggctgtacgag

SEQ ID NO: 20638 - DNA, 30 bp, Artificial Sequence; identical to SEQ ID NO: 4611
  Description of Artificial Sequence: Synthetic pecan; inner sequence

SEQ ID NO: 20639 - DNA, 30 bp, Artificial Sequence; identical to SEQ ID NO: 43
  Description of Artificial Sequence: Synthetic pecan; inner sequence

SEQ ID NO: 20640 - DNA, 30 bp, Artificial Sequence
  Description of Artificial Sequence: Synthetic pecan; inner sequence
ggacgcatcttgcctactggtggtcacgta

SEQ ID NO: 20641 - DNA, 30 bp, Artificial Sequence; identical to SEQ ID NO: 436
  Description of Artificial Sequence: Synthetic pecan; inner sequence

SEQ ID NO: 20642 - DNA, 30 bp, Artificial Sequence
  Description of Artificial Sequence: Synthetic pecan; inner sequence
cgcaccgtcaagcggtaaggcactttggtg

SEQ ID NO: 20643 - DNA, 30 bp, Artificial Sequence; identical to SEQ ID NO: 8962
  Description of Artificial Sequence: Synthetic pecan; inner sequence

SEQ ID NO: 20644 - DNA, 30 bp, Artificial Sequence
  Description of Artificial Sequence: Synthetic pecan; inner sequence
gtcactgtgcctgaccgttaagttgcggca

SEQ ID NO: 20645 - DNA, 30 bp, Artificial Sequence; identical to SEQ ID NO: 336
  Description of Artificial Sequence: Synthetic pecan; inner sequence

SEQ ID NO: 20646 - DNA, 30 bp, Artificial Sequence
  Description of Artificial Sequence: Synthetic pecan; inner sequence
ccgcacgtagccctaacagtggtgcatgca

SEQ ID NO: 20647 - DNA, 30 bp, Artificial Sequence; identical to SEQ ID NO: 608
  Description of Artificial Sequence: Synthetic pecan; inner sequence

SEQ ID NO: 20648 - DNA, 30 bp, Artificial Sequence
  Description of Artificial Sequence: Synthetic pecan; inner sequence
ccatcgcgtcactattatgtgtgtcacgta

SEQ ID NO: 20649 - DNA, 29 bp, Artificial Sequence
  Description of Artificial Sequence: Synthetic pecan; inner sequence
gtgcgccgatgccctcatgtggccgtgga

SEQ ID NO: 20650 - DNA, 30 bp, Artificial Sequence
  Description of Artificial Sequence: Synthetic pecan; inner sequence
ccatcgcgtcaccatcatgtgtgtcacgta

SEQ ID NO: 20651 - DNA, 30 bp, Artificial Sequence; identical to SEQ ID NO: 348
  Description of Artificial Sequence: Synthetic pecan; inner sequence

SEQ ID NO: 20652 - DNA, 30 bp, Artificial Sequence
  Description of Artificial Sequence: Synthetic pecan; inner sequence
ggacgcagcttgcctactggaggtcacgta

SEQ ID NO: 20653 - DNA, 30 bp, Artificial Sequence
  Description of Artificial Sequence: Synthetic pecan; inner sequence
ccgtagcgacatcaagcgggggcgtgcgtg

SEQ ID NO: 20654 - DNA, 30 bp, Artificial Sequence; identical to SEQ ID NO: 12953
  Description of Artificial Sequence: Synthetic pecan; inner sequence

SEQ ID NO: 20655 - DNA, 30 bp, Artificial Sequence
  Description of Artificial Sequence: Synthetic pecan; inner sequence
ggacgcagcggaacgttctagtggtacgta

SEQ ID NO: 20656 - DNA, 30 bp, Artificial Sequence; identical to SEQ ID NO: 4521
  Description of Artificial Sequence: Synthetic pecan; inner sequence

SEQ ID NO: 20657 - DNA, 30 bp, Artificial Sequence
  Description of Artificial Sequence: Synthetic pecan; inner sequence
gcacgactcgcaccccatcatgaggccatg

SEQ ID NO: 20658 - DNA, 30 bp, Artificial Sequence; identical to SEQ ID NO: 16266
  Description of Artificial Sequence: Synthetic pecan; inner sequence

SEQ ID NO: 20659 - DNA, 30 bp, Artificial Sequence; identical to SEQ ID NO: 228
  Description of Artificial Sequence: Synthetic pecan; inner sequence

SEQ ID NO: 20660 - DNA, 30 bp, Artificial Sequence; identical to SEQ ID NO: 12659
  Description of Artificial Sequence: Synthetic pecan; inner sequence

SEQ ID NO: 20661 - DNA, 30 bp, Artificial Sequence
  Description of Artificial Sequence: Synthetic pecan; inner sequence
gtcatgcacgaacactatcatggaggcatg

SEQ ID NO: 20662 - DNA, 30 bp, Artificial Sequence
  Description of Artificial Sequence: Synthetic pecan; inner sequence
ccctcgcgtcactatcatgtgtgtcacgta

SEQ ID NO: 20663 - DNA, 30 bp, Artificial Sequence; identical to SEQ ID NO: 254
  Description of Artificial Sequence: Synthetic pecan; inner sequence

SEQ ID NO: 20664 - DNA, 30 bp, Artificial Sequence; identical to SEQ ID NO: 249
  Description of Artificial Sequence: Synthetic pecan; inner sequence

SEQ ID NO: 20665 - DNA, 30 bp, Artificial Sequence
  Description of Artificial Sequence: Synthetic pecan; inner sequence
ccgatcgcacgtcaaggcaggctgcacgag

SEQ ID NO: 20666 - DNA, 30 bp, Artificial Sequence
  Description of Artificial Sequence: Synthetic pecan; inner sequence
ggccacagcgtaccttaacgtggacgtgca

SEQ ID NO: 20667 - DNA, 30 bp, Artificial Sequence; identical to SEQ ID NO: 4960
  Description of Artificial Sequence: Synthetic pecan; inner sequence

SEQ ID NO: 20668 - DNA, 30 bp, Artificial Sequence
  Description of Artificial Sequence: Synthetic pecan; inner sequence
cgcaccgtcgatacgtcatgcgcgctgaca

SEQ ID NO: 20669 - DNA, 30 bp, Artificial Sequence
  Description of Artificial Sequence: Synthetic pecan; inner sequence
gtcatgcacgaacactatcatggcggtatg

SEQ ID NO: 20670 - DNA, 31 bp, Artificial Sequence
  Description of Artificial Sequence: Synthetic pecan; inner sequence
gcattggacgatcgtgccctacacgtggaca

SEQ ID NO: 20671 - DNA, 30 bp, Artificial Sequence; identical to SEQ ID NO: 928
  Description of Artificial Sequence: Synthetic pecan; inner sequence

SEQ ID NO: 20672 - DNA, 30 bp, Artificial Sequence
  Description of Artificial Sequence: Synthetic pecan; inner sequence
gcacgactcgcaccctatcctgaggccatg

SEQ ID NO: 20673 - DNA, 30 bp, Artificial Sequence
  Description of Artificial Sequence: Synthetic pecan; inner sequence
gtacgcagcttgcctactggtggtcacgta

SEQ ID NO: 20674 - DNA, 30 bp, Artificial Sequence; identical to SEQ ID NO: 579
  Description of Artificial Sequence: Synthetic pecan; inner sequence

SEQ ID NO: 20675 - DNA, 30 bp, Artificial Sequence; identical to SEQ ID NO: 853
  Description of Artificial Sequence: Synthetic pecan; inner sequence

SEQ ID NO: 20676 - DNA, 30 bp, Artificial Sequence
  Description of Artificial Sequence: Synthetic pecan; inner sequence
ggcatgcacgcacctacacgtgggtctgga

SEQ ID NO: 20677 - DNA, 30 bp, Artificial Sequence
  Description of Artificial Sequence: Synthetic pecan; inner sequence
gtgcgcggcttgcctactggtggtcacgta

SEQ ID NO: 20678 - DNA, 26 bp, Artificial Sequence
  Description of Artificial Sequence: Synthetic pecan; inner sequence
ggcatgcacgcacctacacgtggcca

SEQ ID NO: 20679 - DNA, 30 bp, Artificial Sequence
  Description of Artificial Sequence: Synthetic pecan; inner sequence
ccgatcgcacgtcaaggcaggatgtacgag

SEQ ID NO: 20680 - DNA, 30 bp, Artificial Sequence; identical to SEQ ID NO: 4280
  Description of Artificial Sequence: Synthetic pecan; inner sequence

SEQ ID NO: 20681 - DNA, 30 bp, Artificial Sequence; identical to SEQ ID NO: 909
  Description of Artificial Sequence: Synthetic pecan; inner sequence

SEQ ID NO: 20682 - DNA, 30 bp, Artificial Sequence; identical to SEQ ID NO: 211
  Description of Artificial Sequence: Synthetic pecan; inner sequence

SEQ ID NO: 20683 - DNA, 30 bp, Artificial Sequence
  Description of Artificial Sequence: Synthetic pecan; inner sequence
gtcactgtgcctgaccgtcacgttgcggca

SEQ ID NO: 20684 - DNA, 30 bp, Artificial Sequence; identical to SEQ ID NO: 8876
  Description of Artificial Sequence: Synthetic pecan; inner sequence

SEQ ID NO: 20685 - DNA, 30 bp, Artificial Sequence; identical to SEQ ID NO: 5002
  Description of Artificial Sequence: Synthetic pecan; inner sequence

SEQ ID NO: 20686 - DNA, 30 bp, Artificial Sequence; identical to SEQ ID NO: 4650
  Description of Artificial Sequence: Synthetic pecan; inner sequence

SEQ ID NO: 20687 - DNA, 30 bp, Artificial Sequence; identical to SEQ ID NO: 705
  Description of Artificial Sequence: Synthetic pecan; inner sequence

SEQ ID NO: 20688 - DNA, 30 bp, Artificial Sequence; identical to SEQ ID NO: 572
  Description of Artificial Sequence: Synthetic pecan; inner sequence

SEQ ID NO: 20689 - DNA, 30 bp, Artificial Sequence
  Description of Artificial Sequence: Synthetic pecan; inner sequence
ccatcgcgttactatcatgtgtgtcacgta

SEQ ID NO: 20690 - DNA, 30 bp, Artificial Sequence
  Description of Artificial Sequence: Synthetic pecan; inner sequence
ggccacagcggacctcaacgtggacgtgca

SEQ ID NO: 20691 - DNA, 30 bp, Artificial Sequence
  Description of Artificial Sequence: Synthetic pecan; inner sequence
ccgtagcgacatcaggcggtggtgtgcgtg

SEQ ID NO: 20692 - DNA, 30 bp, Artificial Sequence
  Description of Artificial Sequence: Synthetic pecan; inner sequence
cgccacagcgtacctcaacgtggacgtgca

SEQ ID NO: 20693 - DNA, 30 bp, Artificial Sequence
  Description of Artificial Sequence: Synthetic pecan; inner sequence
ggcatgcacgcacctacacttgggcacgta

SEQ ID NO: 20694 - DNA, 30 bp, Artificial Sequence
  Description of Artificial Sequence: Synthetic pecan; inner sequence
ccatcgcgtcactatcatgggtgtcacgta

SEQ ID NO: 20695 - DNA, 30 bp, Artificial Sequence
  Description of Artificial Sequence: Synthetic pecan; inner sequence
ccgatcgcacgtcgaggcaggctgtacgag

SEQ ID NO: 20696 - DNA, 30 bp, Artificial Sequence
  Description of Artificial Sequence: Synthetic pecan; inner sequence
ccatcgcgtcactatcatgtgcgtcacgta

SEQ ID NO: 20697 - DNA, 30 bp, Artificial Sequence; identical to SEQ ID NO: 8910
  Description of Artificial Sequence: Synthetic pecan; inner sequence

SEQ ID NO: 20698 - DNA, 30 bp, Artificial Sequence
  Description of Artificial Sequence: Synthetic pecan; inner sequence
ccgtagcgacatcaagcggtggtgcgcgcg

SEQ ID NO: 20699 - DNA, 30 bp, Artificial Sequence; identical to SEQ ID NO: 12827
  Description of Artificial Sequence: Synthetic pecan; inner sequence

SEQ ID NO: 20700 - DNA, 30 bp, Artificial Sequence
  Description of Artificial Sequence: Synthetic pecan; inner sequence
ccttagcgacatcaagcggtggtgtgcgtg

SEQ ID NO: 20701 - DNA, 30 bp, Artificial Sequence
  Description of Artificial Sequence: Synthetic pecan; inner sequence
gcacgactcgcaccctatcatgaggccgtg

SEQ ID NO: 20702 - DNA, 30 bp, Artificial Sequence; identical to SEQ ID NO: 534
  Description of Artificial Sequence: Synthetic pecan; inner sequence

SEQ ID NO: 20703 - DNA, 30 bp, Artificial Sequence; identical to SEQ ID NO: 102
  Description of Artificial Sequence: Synthetic pecan; inner sequence

SEQ ID NO: 20704 - DNA, 30 bp, Artificial Sequence; identical to SEQ ID NO: 660
  Description of Artificial Sequence: Synthetic pecan; inner sequence

SEQ ID NO: 20705 - DNA, 29 bp, Artificial Sequence
  Description of Artificial Sequence: Synthetic pecan; inner sequence
ccgcacgtagccctaccagtgtgtcagtg

SEQ ID NO: 20706 - DNA, 30 bp, Artificial Sequence
  Description of Artificial Sequence: Synthetic pecan; inner sequence
ggacgcagcggcacgttcgagtggtacgta

SEQ ID NO: 20707 - DNA, 30 bp, Artificial Sequence; identical to SEQ ID NO: 4872
  Description of Artificial Sequence: Synthetic pecan; inner sequence

SEQ ID NO: 20708 - DNA, 30 bp, Artificial Sequence
  Description of Artificial Sequence: Synthetic pecan; inner sequence
ccatcgcgtcactatcctgtgtgtcacgta

SEQ ID NO: 20709 - DNA, 30 bp, Artificial Sequence
  Description of Artificial Sequence: Synthetic pecan; inner sequence
gcacgactcgcaccctatcataaggccatg

SEQ ID NO: 20710 - DNA, 30 bp, Artificial Sequence
  Description of Artificial Sequence: Synthetic pecan; inner sequence
cgcaccatcgatacgtcatgcacgctgaca

SEQ ID NO: 20711 - DNA, 30 bp, Artificial Sequence
  Description of Artificial Sequence: Synthetic pecan; inner sequence
ccgtagcgacatcaaacggtggtgtgcgtg

SEQ ID NO: 20712 - DNA, 30 bp, Artificial Sequence
  Description of Artificial Sequence: Synthetic pecan; inner sequence
cgacgcagcttgcctactggtggtcacgta

SEQ ID NO: 20713 - DNA, 30 bp, Artificial Sequence; identical to SEQ ID NO: 4845
  Description of Artificial Sequence: Synthetic pecan; inner sequence

SEQ ID NO: 20714 - DNA, 30 bp, Artificial Sequence; identical to SEQ ID NO: 315
  Description of Artificial Sequence: Synthetic pecan; inner sequence

SEQ ID NO: 20715 - DNA, 30 bp, Artificial Sequence
  Description of Artificial Sequence: Synthetic pecan; inner sequence
ggatgcagcttgcctactggtggtcacgta

SEQ ID NO: 20716 - DNA, 30 bp, Artificial Sequence; identical to SEQ ID NO: 182
  Description of Artificial Sequence: Synthetic pecan; inner sequence

SEQ ID NO: 20717 - DNA, 31 bp, Artificial Sequence
  Description of Artificial Sequence: Synthetic pecan; inner sequence
ggcatggcgcgcaccctatcatgaggccatg

SEQ ID NO: 20718 - DNA, 30 bp, Artificial Sequence
  Description of Artificial Sequence: Synthetic pecan; inner sequence
gtcatgccatcccttcgactgtgacaggta

SEQ ID NO: 20719 - DNA, 30 bp, Artificial Sequence
  Description of Artificial Sequence: Synthetic pecan; inner sequence
ccgcacgtagccctatcagtgatgcatgca

SEQ ID NO: 20720 - DNA, 30 bp, Artificial Sequence
  Description of Artificial Sequence: Synthetic pecan; inner sequence
ccgtagcgacttcaagcggtggtgtgcgtg

SEQ ID NO: 20721 - DNA, 30 bp, Artificial Sequence
  Description of Artificial Sequence: Synthetic pecan; inner sequence
cgcaccgtcgatacgtcatgctcgctgaca

SEQ ID NO: 20722 - DNA, 30 bp, Artificial Sequence
  Description of Artificial Sequence: Synthetic pecan; inner sequence
gtcattctgcatcctacacgtgggcacgta

SEQ ID NO: 20723 - DNA, 30 bp, Artificial Sequence
  Description of Artificial Sequence: Synthetic pecan; inner sequence
ccgatcgcacgtcaaggctggctgtacgag

SEQ ID NO: 20724 - DNA, 30 bp, Artificial Sequence
  Description of Artificial Sequence: Synthetic pecan; inner sequence
ccatcgcgtcactatcatgtgtttcacgta

SEQ ID NO: 20725 - DNA, 30 bp, Artificial Sequence
  Description of Artificial Sequence: Synthetic pecan; inner sequence
ccgatcgcacgtcaaggcagtctgtacgag

SEQ ID NO: 20726 - DNA, 30 bp, Artificial Sequence; identical to SEQ ID NO: 8868
  Description of Artificial Sequence: Synthetic pecan; inner sequence

SEQ ID NO: 20727 - DNA, 30 bp, Artificial Sequence; identical to SEQ ID NO: 108
  Description of Artificial Sequence: Synthetic pecan; inner sequence

SEQ ID NO: 20728 - DNA, 30 bp, Artificial Sequence
  Description of Artificial Sequence: Synthetic pecan; inner sequence
ccgcacgtagccctatcagtggtgcataca

SEQ ID NO: 20729 - DNA, 30 bp, Artificial Sequence; identical to SEQ ID NO: 8884
  Description of Artificial Sequence: Synthetic pecan; inner sequence

SEQ ID NO: 20730 - DNA, 30 bp, Artificial Sequence
  Description of Artificial Sequence: Synthetic pecan; inner sequence
gtaatgcacgaacactatcatggcggcatg

SEQ ID NO: 20731 - DNA, 30 bp, Artificial Sequence
  Description of Artificial Sequence: Synthetic pecan; inner sequence
ccgcacctagccctatcagtggtgcatgca

SEQ ID NO: 20732 - DNA, 30 bp, Artificial Sequence
  Description of Artificial Sequence: Synthetic pecan; inner sequence
ggcacaaacggatcgacaagtgcgcatgga

SEQ ID NO: 20733 - DNA, 30 bp, Artificial Sequence
  Description of Artificial Sequence: Synthetic pecan; inner sequence
ggcatgcacgcacctacacgtgtgcacgta

SEQ ID NO: 20734 - DNA, 30 bp, Artificial Sequence; identical to SEQ ID NO: 4301
  Description of Artificial Sequence: Synthetic pecan; inner sequence

SEQ ID NO: 20735 - DNA, 30 bp, Artificial Sequence; identical to SEQ ID NO: 157
  Description of Artificial Sequence: Synthetic pecan; inner sequence

SEQ ID NO: 20736 - DNA, 30 bp, Artificial Sequence
  Description of Artificial Sequence: Synthetic pecan; inner sequence
gtcatgcacgaaaactatcatggcggcatg

SEQ ID NO: 20737 - DNA, 30 bp, Artificial Sequence
  Description of Artificial Sequence: Synthetic pecan; inner sequence
gtcatgcacgaaccctatcatggcggcatg

SEQ ID NO: 20738 - DNA, 31 bp, Artificial Sequence; identical to SEQ ID NO: 258
  Description of Artificial Sequence: Synthetic pecan; inner sequence

SEQ ID NO: 20739 - DNA, 30 bp, Artificial Sequence; identical to SEQ ID NO: 955
  Description of Artificial Sequence: Synthetic pecan; inner sequence

SEQ ID NO: 20740 - DNA, 30 bp, Artificial Sequence
  Description of Artificial Sequence: Synthetic pecan; inner sequence
gcacgactcgcaccctatcttgaggccatg

SEQ ID NO: 20741 - DNA, 25 bp, Artificial Sequence
  Description of Artificial Sequence: Synthetic pecan; inner sequence
gtcattccgcatcctacacgtgggc

SEQ ID NO: 20742 - DNA, 30 bp, Artificial Sequence; identical to SEQ ID NO: 298
  Description of Artificial Sequence: Synthetic pecan; inner sequence

SEQ ID NO: 20743 - DNA, 30 bp, Artificial Sequence
  Description of Artificial Sequence: Synthetic pecan; inner sequence
cgcgtccgtggcgtcacgtcgtggtgtgga

SEQ ID NO: 20744 - DNA, 30 bp, Artificial Sequence
  Description of Artificial Sequence: Synthetic pecan; inner sequence
gcacgcacgatgagcgccaagtgacatgga

SEQ ID NO: 20745 - DNA, 30 bp, Artificial Sequence; identical to SEQ ID NO: 4948
  Description of Artificial Sequence: Synthetic pecan; inner sequence

SEQ ID NO: 20746 - DNA, 30 bp, Artificial Sequence
  Description of Artificial Sequence: Synthetic pecan; inner sequence
ccatcgcgtcattatcatgtgtgtcacgta

SEQ ID NO: 20747 - DNA, 30 bp, Artificial Sequence; identical to SEQ ID NO: 461
  Description of Artificial Sequence: Synthetic pecan; inner sequence

SEQ ID NO: 20748 - DNA, 29 bp, Artificial Sequence
  Description of Artificial Sequence: Synthetic pecan; inner sequence
ggccgatcgaccctatcaagtgcagcatg

SEQ ID NO: 20749 - DNA, 30 bp, Artificial Sequence
  Description of Artificial Sequence: Synthetic pecan; inner sequence
gacacaaacggaccgacaagtgcgcatgga

SEQ ID NO: 20750 - DNA, 30 bp, Artificial Sequence
  Description of Artificial Sequence: Synthetic pecan; inner sequence
gtcgtgactggctagctggacatgcactga

SEQ ID NO: 20751 - DNA, 30 bp, Artificial Sequence; identical to SEQ ID NO: 8978
  Description of Artificial Sequence: Synthetic pecan; inner sequence

SEQ ID NO: 20752 - DNA, 30 bp, Artificial Sequence
  Description of Artificial Sequence: Synthetic pecan; inner sequence
ccatcgcgtcactatcatgtgtgccacgta

SEQ ID NO: 20753 - DNA, 30 bp, Artificial Sequence
  Description of Artificial Sequence: Synthetic pecan; inner sequence
gacatgcacgcacctacacgtgggtatgga

SEQ ID NO: 20754 - DNA, 30 bp, Artificial Sequence
  Description of Artificial Sequence: Synthetic pecan; inner sequence
gtacgcagcggaacgttcgagtggtacgta

SEQ ID NO: 20755 - DNA, 30 bp, Artificial Sequence
  Description of Artificial Sequence: Synthetic pecan; inner sequence
ggacgcagcttgcctcctggtggtcacgta

SEQ ID NO: 20756 - DNA, 30 bp, Artificial Sequence; identical to SEQ ID NO: 4229
  Description of Artificial Sequence: Synthetic pecan; inner sequence

SEQ ID NO: 20757 - DNA, 30 bp, Artificial Sequence; identical to SEQ ID NO: 85
  Description of Artificial Sequence: Synthetic pecan; inner sequence

SEQ ID NO: 20758 - DNA, 30 bp, Artificial Sequence; identical to SEQ ID NO: 12932
  Description of Artificial Sequence: Synthetic pecan; inner sequence

SEQ ID NO: 20759 - DNA, 30 bp, Artificial Sequence; identical to SEQ ID NO: 840
  Description of Artificial Sequence: Synthetic pecan; inner sequence

SEQ ID NO: 20760 - DNA, 30 bp, Artificial Sequence
  Description of Artificial Sequence: Synthetic pecan; inner sequence
ggcattcacgcacctacacgtgggtatgga

SEQ ID NO: 20761 - DNA, 30 bp, Artificial Sequence
  Description of Artificial Sequence: Synthetic pecan; inner sequence
cgcaccgtcggtacgtcatgcacgctgaca

SEQ ID NO: 20762 - DNA, 30 bp, Artificial Sequence; identical to SEQ ID NO: 16399
  Description of Artificial Sequence: Synthetic pecan; inner sequence

SEQ ID NO: 20763 - DNA, 30 bp, Artificial Sequence; identical to SEQ ID NO: 8748
  Description of Artificial Sequence: Synthetic pecan; inner sequence

SEQ ID NO: 20764 - DNA, 30 bp, Artificial Sequence
  Description of Artificial Sequence: Synthetic pecan; inner sequence
ccgcacgtacctctatcagtggtgcatgca

SEQ ID NO: 20765 - DNA, 30 bp, Artificial Sequence; identical to SEQ ID NO: 4856
  Description of Artificial Sequence: Synthetic pecan; inner sequence

SEQ ID NO: 20766 - DNA, 30 bp, Artificial Sequence
  Description of Artificial Sequence: Synthetic pecan; inner sequence
gcacgcagcttgcctactggtggtcacgta

SEQ ID NO: 20767 - DNA, 30 bp, Artificial Sequence
  Description of Artificial Sequence: Synthetic pecan; inner sequence
gcacgactcgcaccctatcgtgaggccatg

SEQ ID NO: 20768 - DNA, 30 bp, Artificial Sequence; identical to SEQ ID NO: 921
  Description of Artificial Sequence: Synthetic pecan; inner sequence

SEQ ID NO: 20769 - DNA, 30 bp, Artificial Sequence
  Description of Artificial Sequence: Synthetic pecan; inner sequence
ggccacagcttacctcaacgtggacgtgca

SEQ ID NO: 20770 - DNA, 30 bp, Artificial Sequence; identical to SEQ ID NO: 4401
  Description of Artificial Sequence: Synthetic pecan; inner sequence

SEQ ID NO: 20771 - DNA, 30 bp, Artificial Sequence
  Description of Artificial Sequence: Synthetic pecan; inner sequence
ccgcacgtagccctattagtggtgcatgca

SEQ ID NO: 20772 - DNA, 30 bp, Artificial Sequence; identical to SEQ ID NO: 753
  Description of Artificial Sequence: Synthetic pecan; inner sequence

SEQ ID NO: 20773 - DNA, 30 bp, Artificial Sequence
  Description of Artificial Sequence: Synthetic pecan; inner sequence
gcactgcacgcaccctatcatgtcggcatg

SEQ ID NO: 20774 - DNA, 30 bp, Artificial Sequence; identical to SEQ ID NO: 264
  Description of Artificial Sequence: Synthetic pecan; inner sequence

SEQ ID NO: 20775 - DNA, 30 bp, Artificial Sequence
  Description of Artificial Sequence: Synthetic pecan; inner sequence
ggacgcagcttgccttctggtggtcacgta

SEQ ID NO: 20776 - DNA, 30 bp, Artificial Sequence
  Description of Artificial Sequence: Synthetic pecan; inner sequence
gtcatgaacgaacactatcatggcggcatg

SEQ ID NO: 20777 - DNA, 30 bp, Artificial Sequence
  Description of Artificial Sequence: Synthetic pecan; inner sequence
cgcgcctacgatgggcaggcacatgtcgca

SEQ ID NO: 20778 - DNA, 30 bp, Artificial Sequence
  Description of Artificial Sequence: Synthetic pecan; inner sequence
gtcatgcacgaacactatgatggcggcatg

SEQ ID NO: 20779 - DNA, 30 bp, Artificial Sequence; identical to SEQ ID NO: 269
  Description of Artificial Sequence: Synthetic pecan; inner sequence

SEQ ID NO: 20780 - DNA, 30 bp, Artificial Sequence
  Description of Artificial Sequence: Synthetic pecan; inner sequence
ggacgcagcggaacgctcgagtggtacgta

SEQ ID NO: 20781 - DNA, 30 bp, Artificial Sequence
  Description of Artificial Sequence: Synthetic pecan; inner sequence
gcacaactcgcaccctatcatgaggccatg

SEQ ID NO: 20782 - DNA, 30 bp, Artificial Sequence; identical to SEQ ID NO: 318
  Description of Artificial Sequence: Synthetic pecan; inner sequence

SEQ ID NO: 20783 - DNA, 30 bp, Artificial Sequence
  Description of Artificial Sequence: Synthetic pecan; inner sequence
ggacgcactcaaccgccaagtgccgtcgtg

SEQ ID NO: 20784 - DNA, 30 bp, Artificial Sequence
  Description of Artificial Sequence: Synthetic pecan; inner sequence
ggccacagcgtacctcaacgtggacgggca

SEQ ID NO: 20785 - DNA, 30 bp, Artificial Sequence
  Description of Artificial Sequence: Synthetic pecan; inner sequence
ccccacgtagccctatcagtggtgcatgca

SEQ ID NO: 20786 - DNA, 30 bp, Artificial Sequence; identical to SEQ ID NO: 943
  Description of Artificial Sequence: Synthetic pecan; inner sequence

SEQ ID NO: 20787 - DNA, 30 bp, Artificial Sequence
  Description of Artificial Sequence: Synthetic pecan; inner sequence
gtcatgcacgaacattatcatggcggcatg

SEQ ID NO: 20788 - DNA, 30 bp, Artificial Sequence
  Description of Artificial Sequence: Synthetic pecan; inner sequence
ggcatgcatgcacctacacgtgggtatgga

SEQ ID NO: 20789 - DNA, 30 bp, Artificial Sequence
  Description of Artificial Sequence: Synthetic pecan; inner sequence
gtcatgccatcccttcgagtgtgacatgta

SEQ ID NO: 20790 - DNA, 30 bp, Artificial Sequence; identical to SEQ ID NO: 156
  Description of Artificial Sequence: Synthetic pecan; inner sequence

SEQ ID NO: 20791 - DNA, 30 bp, Artificial Sequence; identical to SEQ ID NO: 903
  Description of Artificial Sequence: Synthetic pecan; inner sequence

SEQ ID NO: 20792 - DNA, 30 bp, Artificial Sequence
  Description of Artificial Sequence: Synthetic pecan; inner sequence
ccgcacgtagccctaccagtggtgcatgca

SEQ ID NO: 20793 - DNA, 30 bp, Artificial Sequence
  Description of Artificial Sequence: Synthetic pecan; inner sequence
gcccacagcgtacctcaacgtggacgtgca

SEQ ID NO: 20794 - DNA, 30 bp, Artificial Sequence; identical to SEQ ID NO: 16211
  Description of Artificial Sequence: Synthetic pecan; inner sequence

SEQ ID NO: 20795 - DNA, 30 bp, Artificial Sequence
  Description of Artificial Sequence: Synthetic pecan; inner sequence
gtcatgccatccctttgagtgtgacaggta

SEQ ID NO: 20796 - DNA, 30 bp, Artificial Sequence
  Description of Artificial Sequence: Synthetic pecan; inner sequence
ggccaagctgaccgtaaagtcaggcgtgta

SEQ ID NO: 20797 - DNA, 30 bp, Artificial Sequence
  Description of Artificial Sequence: Synthetic pecan; inner sequence
gtcatgcacgaacactatcatggcggcgtg

SEQ ID NO: 20798 - DNA, 30 bp, Artificial Sequence
  Description of Artificial Sequence: Synthetic pecan; inner sequence
ggaagcagcttgcctactggtggtcacgta

SEQ ID NO: 20799 - DNA, 30 bp, Artificial Sequence
  Description of Artificial Sequence: Synthetic pecan; inner sequence
ggcacaaacggaccgacaagtgcgcctgga

SEQ ID NO: 20800 - DNA, 30 bp, Artificial Sequence
  Description of Artificial Sequence: Synthetic pecan; inner sequence
cgcaccgtcgttacgtcatgcacgctgaca

SEQ ID NO: 20801 - DNA, 30 bp, Artificial Sequence
  Description of Artificial Sequence: Synthetic pecan; inner sequence
ccatcgcgtcactatcatgtgtgtcacgtg

SEQ ID NO: 20802 - DNA, 30 bp, Artificial Sequence; identical to SEQ ID NO: 12700
  Description of Artificial Sequence: Synthetic pecan; inner sequence

SEQ ID NO: 20803 - DNA, 30 bp, Artificial Sequence
  Description of Artificial Sequence: Synthetic pecan; inner sequence
gcacgactcgcaccctatcatgagaccatg

SEQ ID NO: 20804 - DNA, 30 bp, Artificial Sequence; identical to SEQ ID NO: 598
  Description of Artificial Sequence: Synthetic pecan; inner sequence

SEQ ID NO: 20805 - DNA, 30 bp, Artificial Sequence; identical to SEQ ID NO: 16692
  Description of Artificial Sequence: Synthetic pecan; inner sequence

SEQ ID NO: 20806 - DNA, 30 bp, Artificial Sequence; identical to SEQ ID NO: 4682
  Description of Artificial Sequence: Synthetic pecan; inner sequence

SEQ ID NO: 20807 - DNA, 30 bp, Artificial Sequence
  Description of Artificial Sequence: Synthetic pecan; inner sequence
ccgtagcgacatcaagcagtggtgtgcgtg

SEQ ID NO: 20808 - DNA, 30 bp, Artificial Sequence; identical to SEQ ID NO: 4938
  Description of Artificial Sequence: Synthetic pecan; inner sequence

SEQ ID NO: 20809 - DNA, 30 bp, Artificial Sequence
  Description of Artificial Sequence: Synthetic pecan; inner sequence
ggcacaaacggaccgacaagtgcacatgga

SEQ ID NO: 20810 - DNA, 30 bp, Artificial Sequence; identical to SEQ ID NO: 4887
  Description of Artificial Sequence: Synthetic pecan; inner sequence

SEQ ID NO: 20811 - DNA, 30 bp, Artificial Sequence
  Description of Artificial Sequence: Synthetic pecan; inner sequence
gtcattcacgaacactatcatggcggcatg

SEQ ID NO: 20812 - DNA, 30 bp, Artificial Sequence; identical to SEQ ID NO: 16675
  Description of Artificial Sequence: Synthetic pecan; inner sequence

SEQ ID NO: 20813 - DNA, 30 bp, Artificial Sequence; identical to SEQ ID NO: 8872
  Description of Artificial Sequence: Synthetic pecan; inner sequence

SEQ ID NO: 20814 - DNA, 30 bp, Artificial Sequence
  Description of Artificial Sequence: Synthetic pecan; inner sequence
ccgcacgtagccctatcggtggtgcatgca

SEQ ID NO: 20815 - DNA, 30 bp, Artificial Sequence
  Description of Artificial Sequence: Synthetic pecan; inner sequence
ccattgcgtcactatcatgtgtgtcacgta

SEQ ID NO: 20816 - DNA, 30 bp, Artificial Sequence; identical to SEQ ID NO: 8891
  Description of Artificial Sequence: Synthetic pecan; inner sequence

SEQ ID NO: 20817 - DNA, 30 bp, Artificial Sequence
  Description of Artificial Sequence: Synthetic pecan; inner sequence
gtcattccgcatcctacacgtggacacgta

SEQ ID NO: 20818 - DNA, 30 bp, Artificial Sequence; identical to SEQ ID NO: 109
  Description of Artificial Sequence: Synthetic pecan; inner sequence

SEQ ID NO: 20819 - DNA, 33 bp, Artificial Sequence
  Description of Artificial Sequence: Synthetic pecan; inner sequence
ggcatgcacgcacctacacgtgggtatggcatg

SEQ ID NO: 20820 - DNA, 30 bp, Artificial Sequence
  Description of Artificial Sequence: Synthetic pecan; inner sequence
ggccacagcgtacctcaacggggacgtgca

SEQ ID NO: 20821 - DNA, 30 bp, Artificial Sequence; identical to SEQ ID NO: 16769
  Description of Artificial Sequence: Synthetic pecan; inner sequence

SEQ ID NO: 20822 - DNA, 30 bp, Artificial Sequence; identical to SEQ ID NO: 130
  Description of Artificial Sequence: Synthetic pecan; inner sequence

SEQ ID NO: 20823 - DNA, 30 bp, Artificial Sequence
  Description of Artificial Sequence: Synthetic pecan; inner sequence
ggcatgcacgcacctacaggtgggtatgga

SEQ ID NO: 20824 - DNA, 30 bp, Artificial Sequence; identical to SEQ ID NO: 398
  Description of Artificial Sequence: Synthetic pecan; inner sequence

SEQ ID NO: 20825 - DNA, 30 bp, Artificial Sequence; identical to SEQ ID NO: 60
  Description of Artificial Sequence: Synthetic pecan; inner sequence

SEQ ID NO: 20826 - DNA, 30 bp, Artificial Sequence
  Description of Artificial Sequence: Synthetic pecan; inner sequence
ggcacaaacggtccgacaagtgcgcatgga

SEQ ID NO: 20827 - DNA, 30 bp, Artificial Sequence; identical to SEQ ID NO: 636
  Description of Artificial Sequence: Synthetic pecan; inner sequence

SEQ ID NO: 20828 - DNA, 30 bp, Artificial Sequence; identical to SEQ ID NO: 4967
  Description of Artificial Sequence: Synthetic pecan; inner sequence

SEQ ID NO: 20829 - DNA, 30 bp, Artificial Sequence
  Description of Artificial Sequence: Synthetic pecan; inner sequence
ggcatgcacgcacctacacgagggtatgga

SEQ ID NO: 20830 - DNA, 30 bp, Artificial Sequence; identical to SEQ ID NO: 8758
  Description of Artificial Sequence: Synthetic pecan; inner sequence

SEQ ID NO: 20831 - DNA, 30 bp, Artificial Sequence
  Description of Artificial Sequence: Synthetic pecan; inner sequence
ccatcgcgtcactatcatgtgtgttacgta

SEQ ID NO: 20832 - DNA, 30 bp, Artificial Sequence; identical to SEQ ID NO: 563
  Description of Artificial Sequence: Synthetic pecan; inner sequence

SEQ ID NO: 20833 - DNA, 30 bp, Artificial Sequence; identical to SEQ ID NO: 4571
  Description of Artificial Sequence: Synthetic pecan; inner sequence

SEQ ID NO: 20834 - DNA, 28 bp, Artificial Sequence
  Description of Artificial Sequence: Synthetic pecan; inner sequence
gtgcgaccgaccctatcatgaggccatg

SEQ ID NO: 20835 - DNA, 30 bp, Artificial Sequence; identical to SEQ ID NO: 305
  Description of Artificial Sequence: Synthetic pecan; inner sequence

SEQ ID NO: 20836 - DNA, 30 bp, Artificial Sequence
  Description of Artificial Sequence: Synthetic pecan; inner sequence
ggccaccgcgtacctcaacgtggacgtgca

SEQ ID NO: 20837 - DNA, 30 bp, Artificial Sequence; identical to SEQ ID NO: 16962
  Description of Artificial Sequence: Synthetic pecan; inner sequence

SEQ ID NO: 20838 - DNA, 30 bp, Artificial Sequence; identical to SEQ ID NO: 12944
  Description of Artificial Sequence: Synthetic pecan; inner sequence

SEQ ID NO: 20839 - DNA, 30 bp, Artificial Sequence; identical to SEQ ID NO: 12922
  Description of Artificial Sequence: Synthetic pecan; inner sequence

SEQ ID NO: 20840 - DNA, 30 bp, Artificial Sequence; identical to SEQ ID NO: 86
  Description of Artificial Sequence: Synthetic pecan; inner sequence

SEQ ID NO: 20841 - DNA, 28 bp, Artificial Sequence
  Description of Artificial Sequence: Synthetic pecan; inner sequence
gtgcgaccgacccgtaagtgtgcatgcg

SEQ ID NO: 20842 - DNA, 30 bp, Artificial Sequence; identical to SEQ ID NO: 793
  Description of Artificial Sequence: Synthetic pecan; inner sequence

SEQ ID NO: 20843 - DNA, 30 bp, Artificial Sequence; identical to SEQ ID NO: 155
  Description of Artificial Sequence: Synthetic pecan; inner sequence

SEQ ID NO: 20844 - DNA, 30 bp, Artificial Sequence; identical to SEQ ID NO: 458
  Description of Artificial Sequence: Synthetic pecan; inner sequence

SEQ ID NO: 20845 - DNA, 30 bp, Artificial Sequence
  Description of Artificial Sequence: Synthetic pecan; inner sequence
cgcaccgtcaagcgggaaggtactttggtg

SEQ ID NO: 20846 - DNA, 30 bp, Artificial Sequence
  Description of Artificial Sequence: Synthetic pecan; inner sequence
gtgcgagcagaccgacgcgagtggtacgta

SEQ ID NO: 20847 - DNA, 30 bp, Artificial Sequence
  Description of Artificial Sequence: Synthetic pecan; inner sequence
ggcatgcacgcaactacacgtgggcacgta

SEQ ID NO: 20848 - DNA, 30 bp, Artificial Sequence
  Description of Artificial Sequence: Synthetic pecan; inner sequence
ggcacaaacggcccgacaagtgcgcatgga

SEQ ID NO: 20849 - DNA, 30 bp, Artificial Sequence
  Description of Artificial Sequence: Synthetic pecan; inner sequence
ggacgcagcggaacgttcgagtggtacgtg

SEQ ID NO: 20850 - DNA, 30 bp, Artificial Sequence
  Description of Artificial Sequence: Synthetic pecan; inner sequence
ccgcacttagccctatcagtggtgcatgca

SEQ ID NO: 20851 - DNA, 30 bp, Artificial Sequence; identical to SEQ ID NO: 8968
  Description of Artificial Sequence: Synthetic pecan; inner sequence

SEQ ID NO: 20852 - DNA, 30 bp, Artificial Sequence; identical to SEQ ID NO: 8564
  Description of Artificial Sequence: Synthetic pecan; inner sequence

SEQ ID NO: 20853 - DNA, 30 bp, Artificial Sequence
  Description of Artificial Sequence: Synthetic pecan; inner sequence
ccgtagcgacatcaagcggtggtgtacgtg

SEQ ID NO: 20854 - DNA, 30 bp, Artificial Sequence
  Description of Artificial Sequence: Synthetic pecan; inner sequence
ggcacaaacgcaccgacaagtgcgcatgga

SEQ ID NO: 20855 - DNA, 30 bp, Artificial Sequence
  Description of Artificial Sequence: Synthetic pecan; inner sequence
ccgcatgtagccctatcagtggtgcatgca

SEQ ID NO: 20856 - DNA, 30 bp, Artificial Sequence; identical to SEQ ID NO: 361
  Description of Artificial Sequence: Synthetic pecan; inner sequence

SEQ ID NO: 20857 - DNA, 30 bp, Artificial Sequence; identical to SEQ ID NO: 532
  Description of Artificial Sequence: Synthetic pecan; inner sequence

SEQ ID NO: 20858 - DNA, 30 bp, Artificial Sequence
  Description of Artificial Sequence: Synthetic pecan; inner sequence
ggcacaaacggaccgacaagtgcgcatgta

SEQ ID NO: 20859 - DNA, 30 bp, Artificial Sequence
  Description of Artificial Sequence: Synthetic pecan; inner sequence
ggccaagctgaccgtaaatgcaggcgtgta

SEQ ID NO: 20860 - DNA, 30 bp, Artificial Sequence; identical to SEQ ID NO: 16980
  Description of Artificial Sequence: Synthetic pecan; inner sequence

SEQ ID NO: 20861 - DNA, 30 bp, Artificial Sequence; identical to SEQ ID NO: 217
  Description of Artificial Sequence: Synthetic pecan; inner sequence

SEQ ID NO: 20862 - DNA, 29 bp, Artificial Sequence
  Description of Artificial Sequence: Synthetic pecan; inner sequence
gcacgccgatgccctcatgttgccgtgga

SEQ ID NO: 20863 - DNA, 30 bp, Artificial Sequence; identical to SEQ ID NO: 134
  Description of Artificial Sequence: Synthetic pecan; inner sequence

SEQ ID NO: 20864 - DNA, 30 bp, Artificial Sequence; identical to SEQ ID NO: 4489
  Description of Artificial Sequence: Synthetic pecan; inner sequence

SEQ ID NO: 20865 - DNA, 30 bp, Artificial Sequence
  Description of Artificial Sequence: Synthetic pecan; inner sequence
ccgtagcgacatcaagcgggggtgcgcgtg

SEQ ID NO: 20866 - DNA, 30 bp, Artificial Sequence
  Description of Artificial Sequence: Synthetic pecan; inner sequence
gcacgactcgcaccctatcatgaggccacg

SEQ ID NO: 20867 - DNA, 30 bp, Artificial Sequence; identical to SEQ ID NO: 4707
  Description of Artificial Sequence: Synthetic pecan; inner sequence

SEQ ID NO: 20868 - DNA, 31 bp, Artificial Sequence
  Description of Artificial Sequence: Synthetic pecan; inner sequence
ggacgcagcggaacgatcgagtggttgcgta

SEQ ID NO: 20869 - DNA, 30 bp, Artificial Sequence
  Description of Artificial Sequence: Synthetic pecan; inner sequence
gcactgcacgcacctacacgtgggcacgta

SEQ ID NO: 20870 - DNA, 31 bp, Artificial Sequence
  Description of Artificial Sequence: Synthetic pecan; inner sequence
gcacgactcgcaccctatcaagtgcagcatg

SEQ ID NO: 20871 - DNA, 30 bp, Artificial Sequence; identical to SEQ ID NO: 4735
  Description of Artificial Sequence: Synthetic pecan; inner sequence

SEQ ID NO: 20872 - DNA, 30 bp, Artificial Sequence
  Description of Artificial Sequence: Synthetic pecan; inner sequence
gcacgactcgcacccgatcatgaggccatg

SEQ ID NO: 20873 - DNA, 30 bp, Artificial Sequence
  Description of Artificial Sequence: Synthetic pecan; inner sequence
ggaatgcacgcacctacacgtgggtatgga

SEQ ID NO: 20874 - DNA, 30 bp, Artificial Sequence
  Description of Artificial Sequence: Synthetic pecan; inner sequence
gcatcatacgacggaccgaccgacgtgggc

SEQ ID NO: 20875 - DNA, 30 bp, Artificial Sequence; identical to SEQ ID NO: 914
  Description of Artificial Sequence: Synthetic pecan; inner sequence

SEQ ID NO: 20876 - DNA, 30 bp, Artificial Sequence; identical to SEQ ID NO: 25
  Description of Artificial Sequence: Synthetic pecan; inner sequence

SEQ ID NO: 20877 - DNA, 30 bp, Artificial Sequence; identical to SEQ ID NO: 874
  Description of Artificial Sequence: Synthetic pecan; inner sequence

SEQ ID NO: 20878 - DNA, 30 bp, Artificial Sequence
  Description of Artificial Sequence: Synthetic pecan; inner sequence
ggacgcagcggaacgttcgcgtggtacgta

SEQ ID NO: 20879 - DNA, 30 bp, Artificial Sequence
  Description of Artificial Sequence: Synthetic pecan; inner sequence
gtcatgccatcccttcgtgtgtgacaggta

SEQ ID NO: 20880 - DNA, 30 bp, Artificial Sequence
  Description of Artificial Sequence: Synthetic pecan; inner sequence
ggcaacagcgtacctcaacgtggacgtgca

SEQ ID NO: 20881 - DNA, 29 bp, Artificial Sequence
  Description of Artificial Sequence: Synthetic pecan; inner sequence
gcacgccgatgccctcatgcggccgtgga

SEQ ID NO: 20882 - DNA, 30 bp, Artificial Sequence
  Description of Artificial Sequence: Synthetic pecan; inner sequence
cgtacgtaccgcgcctacatgtggcatgca

SEQ ID NO: 20883 - DNA, 30 bp, Artificial Sequence
  Description of Artificial Sequence: Synthetic pecan; inner sequence
ggcatgcacgcacctacacgtgggtatggg

SEQ ID NO: 20884 - DNA, 30 bp, Artificial Sequence
  Description of Artificial Sequence: Synthetic pecan; inner sequence
gcattggacgatcgtgccctacacgtgtgc

SEQ ID NO: 20885 - DNA, 30 bp, Artificial Sequence
  Description of Artificial Sequence: Synthetic pecan; inner sequence
gcacgagtcgcaccctatcatgaggccatg

SEQ ID NO: 20886 - DNA, 30 bp, Artificial Sequence; identical to SEQ ID NO: 12853
  Description of Artificial Sequence: Synthetic pecan; inner sequence

SEQ ID NO: 20887 - DNA, 30 bp, Artificial Sequence; identical to SEQ ID NO: 8807
  Description of Artificial Sequence: Synthetic pecan; inner sequence

SEQ ID NO: 20888 - DNA, 30 bp, Artificial Sequence; identical to SEQ ID NO: 4642
  Description of Artificial Sequence: Synthetic pecan; inner sequence

SEQ ID NO: 20889 - DNA, 30 bp, Artificial Sequence
  Description of Artificial Sequence: Synthetic pecan; inner sequence
gtcactgtgccttaccgtcaagttgcggca

SEQ ID NO: 20890 - DNA, 29 bp, Artificial Sequence
  Description of Artificial Sequence: Synthetic pecan; inner sequence
gtcatgccatcccttcgagtgtgacagta

SEQ ID NO: 20891 - DNA, 30 bp, Artificial Sequence
  Description of Artificial Sequence: Synthetic pecan; inner sequence
ccgcacgtagccctagcagtggtgcatgca

SEQ ID NO: 20892 - DNA, 30 bp, Artificial Sequence; identical to SEQ ID NO: 16471
  Description of Artificial Sequence: Synthetic pecan; inner sequence

SEQ ID NO: 20893 - DNA, 30 bp, Artificial Sequence; identical to SEQ ID NO: 16544
  Description of Artificial Sequence: Synthetic pecan; inner sequence

SEQ ID NO: 20894 - DNA, 30 bp, Artificial Sequence
  Description of Artificial Sequence: Synthetic pecan; inner sequence
gtcatgcacgaatactatcatggcggcatg

SEQ ID NO: 20895 - DNA, 30 bp, Artificial Sequence
  Description of Artificial Sequence: Synthetic pecan; inner sequence
gcacgacccgcaccctatcatgaggccatg

SEQ ID NO: 20896 - DNA, 30 bp, Artificial Sequence
  Description of Artificial Sequence: Synthetic pecan; inner sequence
ccgcacgtagccctatcagtggtgcatgaa

SEQ ID NO: 20897 - DNA, 30 bp, Artificial Sequence
  Description of Artificial Sequence: Synthetic pecan; inner sequence
gtcatgcacgaacactatcctggcggcatg

SEQ ID NO: 20898 - DNA, 30 bp, Artificial Sequence; identical to SEQ ID NO: 4394
  Description of Artificial Sequence: Synthetic pecan; inner sequence

SEQ ID NO: 20899 - DNA, 30 bp, Artificial Sequence
  Description of Artificial Sequence: Synthetic pecan; inner sequence
ggcatgaacgcacctacacgtgggcacgta

SEQ ID NO: 20900 - DNA, 30 bp, Artificial Sequence
  Description of Artificial Sequence: Synthetic pecan; inner sequence
ggacgcagtttgcctactggtggtcacgta

SEQ ID NO: 20901 - DNA, 30 bp, Artificial Sequence; identical to SEQ ID NO: 4804
  Description of Artificial Sequence: Synthetic pecan; inner sequence

SEQ ID NO: 20902 - DNA, 30 bp, Artificial Sequence
  Description of Artificial Sequence: Synthetic pecan; inner sequence
cgcaccgtcaagagggaaggcactttggtg

SEQ ID NO: 20903 - DNA, 30 bp, Artificial Sequence
  Description of Artificial Sequence: Synthetic pecan; inner sequence
ggccacagcgtacctcaacgtggacttgca

SEQ ID NO: 20904 - DNA, 30 bp, Artificial Sequence; identical to SEQ ID NO: 4775
  Description of Artificial Sequence: Synthetic pecan; inner sequence

SEQ ID NO: 20905 - DNA, 30 bp, Artificial Sequence
  Description of Artificial Sequence: Synthetic pecan; inner sequence
ccgatcgcacgtcaaggcaggctgtacgat

SEQ ID NO: 20906 - DNA, 30 bp, Artificial Sequence
  Description of Artificial Sequence: Synthetic pecan; inner sequence
ggcacaaacggaccggcaagtgcgcatgga

SEQ ID NO: 20907 - DNA, 25 bp, Artificial Sequence
  Description of Artificial Sequence: Synthetic pecan; inner sequence
ggcatgcacgcacctacacgtggac

SEQ ID NO: 20908 - DNA, 30 bp, Artificial Sequence
  Description of Artificial Sequence: Synthetic pecan; inner sequence
ggcacaaacggaccgacaagtgctcatgga

SEQ ID NO: 20909 - DNA, 30 bp, Artificial Sequence; identical to SEQ ID NO: 8971
  Description of Artificial Sequence: Synthetic pecan; inner sequence

SEQ ID NO: 20910 - DNA, 29 bp, Artificial Sequence
  Description of Artificial Sequence: Synthetic pecan; inner sequence
gcacgccgatgccctcatgtggccgcgga

SEQ ID NO: 20911 - DNA, 30 bp, Artificial Sequence
  Description of Artificial Sequence: Synthetic pecan; inner sequence
ggacgcagctcgcctactggtggtcacgta

SEQ ID NO: 20912 - DNA, 30 bp, Artificial Sequence
  Description of Artificial Sequence: Synthetic pecan; inner sequence
ccgtagcaacatcaagcggtggtgtgcgtg

SEQ ID NO: 20913 - DNA, 30 bp, Artificial Sequence
  Description of Artificial Sequence: Synthetic pecan; inner sequence
ggccacagcgtacctcaacgtggatgtgca

SEQ ID NO: 20914 - DNA, 30 bp, Artificial Sequence
  Description of Artificial Sequence: Synthetic pecan; inner sequence
cgcaccgtcgatgcgtcatgcacgctgaca

SEQ ID NO: 20915 - DNA, 30 bp, Artificial Sequence
  Description of Artificial Sequence: Synthetic pecan; inner sequence
cgcacccgatgtggacgatgtgccttggcc

SEQ ID NO: 20916 - DNA, 30 bp, Artificial Sequence; identical to SEQ ID NO: 370
  Description of Artificial Sequence: Synthetic pecan; inner sequence

SEQ ID NO: 20917 - DNA, 30 bp, Artificial Sequence
  Description of Artificial Sequence: Synthetic pecan; inner sequence
gcgtgacgatgcgtgccgtcctgcgtgacg

SEQ ID NO: 20918 - DNA, 30 bp, Artificial Sequence
  Description of Artificial Sequence: Synthetic pecan; inner sequence
ccgtagggacatcaagcggtggtgtgcgtg

SEQ ID NO: 20919 - DNA, 30 bp, Artificial Sequence
  Description of Artificial Sequence: Synthetic pecan; inner sequence
gtcatgtacgaacactatcatggcggcatg

SEQ ID NO: 20920 - DNA, 30 bp, Artificial Sequence; identical to SEQ ID NO: 932
  Description of Artificial Sequence: Synthetic pecan; inner sequence

SEQ ID NO: 20921 - DNA, 30 bp, Artificial Sequence; identical to SEQ ID NO: 574
  Description of Artificial Sequence: Synthetic pecan; inner sequence

SEQ ID NO: 20922 - DNA, 30 bp, Artificial Sequence
  Description of Artificial Sequence: Synthetic pecan; inner sequence
gtcgtgactggccagctggacatgcactgc

SEQ ID NO: 20923 - DNA, 30 bp, Artificial Sequence
  Description of Artificial Sequence: Synthetic pecan; inner sequence
ggccacagcgaacctcaacgtggacgtgca

SEQ ID NO: 20924 - DNA, 30 bp, Artificial Sequence; identical to SEQ ID NO: 380
  Description of Artificial Sequence: Synthetic pecan; inner sequence

SEQ ID NO: 20925 - DNA, 30 bp, Artificial Sequence; identical to SEQ ID NO: 4679
  Description of Artificial Sequence: Synthetic pecan; inner sequence

SEQ ID NO: 20926 - DNA, 30 bp, Artificial Sequence
  Description of Artificial Sequence: Synthetic pecan; inner sequence
ggcatgcacgcatctacacgtgggtatgga

SEQ ID NO: 20927 - DNA, 30 bp, Artificial Sequence
  Description of Artificial Sequence: Synthetic pecan; inner sequence
ggcaccaacggaccgacaagtgcgcatgga

SEQ ID NO: 20928 - DNA, 30 bp, Artificial Sequence; identical to SEQ ID NO: 275
  Description of Artificial Sequence: Synthetic pecan; inner sequence

SEQ ID NO: 20929 - DNA, 30 bp, Artificial Sequence
  Description of Artificial Sequence: Synthetic pecan; inner sequence
ggcatgcacgcacctacacgcgggcacgta

SEQ ID NO: 20930 - DNA, 29 bp, Artificial Sequence
  Description of Artificial Sequence: Synthetic pecan; inner sequence
gcactccgatgccctcatgtggccgtgga

SEQ ID NO: 20931 - DNA, 30 bp, Artificial Sequence
  Description of Artificial Sequence: Synthetic pecan; inner sequence
gcacgactcggaccctatcatgaggccatg

SEQ ID NO: 20932 - DNA, 30 bp, Artificial Sequence
  Description of Artificial Sequence: Synthetic pecan; inner sequence
ggaacaaacggaccgacaagtgcgcatgga

SEQ ID NO: 20933 - DNA, 30 bp, Artificial Sequence; identical to SEQ ID NO: 16876
  Description of Artificial Sequence: Synthetic pecan; inner sequence

SEQ ID NO: 20934 - DNA, 30 bp, Artificial Sequence
  Description of Artificial Sequence: Synthetic pecan; inner sequence
ggcatgcacgcacctacacgcgggcatgga

SEQ ID NO: 20935 - DNA, 30 bp, Artificial Sequence; identical to SEQ ID NO: 529
  Description of Artificial Sequence: Synthetic pecan; inner sequence

SEQ ID NO: 20936 - DNA, 30 bp, Artificial Sequence
  Description of Artificial Sequence: Synthetic pecan; inner sequence
ggacgcagcggaacgttcgattggtacgta

SEQ ID NO: 20937 - DNA, 30 bp, Artificial Sequence
  Description of Artificial Sequence: Synthetic pecan; inner sequence
ccgcacgtagccctatcagtggtgaatgca

SEQ ID NO: 20938 - DNA, 30 bp, Artificial Sequence; identical to SEQ ID NO: 373
  Description of Artificial Sequence: Synthetic pecan; inner sequence

SEQ ID NO: 20939 - DNA, 30 bp, Artificial Sequence
  Description of Artificial Sequence: Synthetic pecan; inner sequence
ggacgcagctgaacgttcgagtggtacgta

SEQ ID NO: 20940 - DNA, 30 bp, Artificial Sequence; identical to SEQ ID NO: 438
  Description of Artificial Sequence: Synthetic pecan; inner sequence

SEQ ID NO: 20941 - DNA, 30 bp, Artificial Sequence
  Description of Artificial Sequence: Synthetic pecan; inner sequence
ccgcacgtagccctatcagtggtgcgtgca

SEQ ID NO: 20942 - DNA, 26 bp, Artificial Sequence
  Description of Artificial Sequence: Synthetic pecan; inner sequence
cgcaccgtcaaggcaggctgtacgag

SEQ ID NO: 20943 - DNA, 30 bp, Artificial Sequence; identical to SEQ ID NO: 556
  Description of Artificial Sequence: Synthetic pecan; inner sequence

SEQ ID NO: 20944 - DNA, 30 bp, Artificial Sequence
  Description of Artificial Sequence: Synthetic pecan; inner sequence
gtacgcatcgtcccgtcatgtgggtccgta

SEQ ID NO: 20945 - DNA, 30 bp, Artificial Sequence
  Description of Artificial Sequence: Synthetic pecan; inner sequence
ccgcacgaagccctatcagtggtgcatgca

SEQ ID NO: 20946 - DNA, 30 bp, Artificial Sequence
  Description of Artificial Sequence: Synthetic pecan; inner sequence
gtcatgcgcgaacactatcatggcggcatg

SEQ ID NO: 20947 - DNA, 30 bp, Artificial Sequence
  Description of Artificial Sequence: Synthetic pecan; inner sequence
ccgtagcgacatcaagcggaggagtgcgtg

SEQ ID NO: 20948 - DNA, 30 bp, Artificial Sequence
  Description of Artificial Sequence: Synthetic pecan; inner sequence
ggacgcagcggaacggtcgagtggtacgta

SEQ ID NO: 20949 - DNA, 30 bp, Artificial Sequence
  Description of Artificial Sequence: Synthetic pecan; inner sequence
ccgtagcgacatcaagcggcggtgtgcgcg

SEQ ID NO: 20950 - DNA, 30 bp, Artificial Sequence
  Description of Artificial Sequence: Synthetic pecan; inner sequence
ggcacaaccggaccgacaagtgcgcatgga

SEQ ID NO: 20951 - DNA, 29 bp, Artificial Sequence
  Description of Artificial Sequence: Synthetic pecan; inner sequence
gtcatgccatccctcgagtgtgacaggta

SEQ ID NO: 20952 - DNA, 30 bp, Artificial Sequence
  Description of Artificial Sequence: Synthetic pecan; inner sequence
ccatcgcttcactatcatgtgtgtcacgta

SEQ ID NO: 20953 - DNA, 30 bp, Artificial Sequence; identical to SEQ ID NO: 4238
  Description of Artificial Sequence: Synthetic pecan; inner sequence

SEQ ID NO: 20954 - DNA, 30 bp, Artificial Sequence
  Description of Artificial Sequence: Synthetic pecan; inner sequence
cgcaccgtcgaaacgtcatgcacgctgaca

SEQ ID NO: 20955 - DNA, 29 bp, Artificial Sequence
  Description of Artificial Sequence: Synthetic pecan; inner sequence
gcacgccgatgccctcatgtgtccgtgga

SEQ ID NO: 20956 - DNA, 30 bp, Artificial Sequence; identical to SEQ ID NO: 16810
  Description of Artificial Sequence: Synthetic pecan; inner sequence

SEQ ID NO: 20957 - DNA, 30 bp, Artificial Sequence
  Description of Artificial Sequence: Synthetic pecan; inner sequence
ggacgcagcggaacgatcgagtggtacgta

SEQ ID NO: 20958 - DNA, 30 bp, Artificial Sequence; identical to SEQ ID NO: 395
  Description of Artificial Sequence: Synthetic pecan; inner sequence

SEQ ID NO: 20959 - DNA, 30 bp, Artificial Sequence
  Description of Artificial Sequence: Synthetic pecan; inner sequence
ccatcgcgtcactatcatatgtgtcacgta

SEQ ID NO: 20960 - DNA, 30 bp, Artificial Sequence
  Description of Artificial Sequence: Synthetic pecan; inner sequence
gtcattccgcatcctacacgtgggcatgta

SEQ ID NO: 20961 - DNA, 30 bp, Artificial Sequence
  Description of Artificial Sequence: Synthetic pecan; inner sequence
ggccacagcgtacctcaaggtggacgtgca

SEQ ID NO: 20962 - DNA, 30 bp, Artificial Sequence
  Description of Artificial Sequence: Synthetic pecan; inner sequence
gcacgactcgctccctatcatgaggccatg

SEQ ID NO: 20963 - DNA, 30 bp, Artificial Sequence; identical to SEQ ID NO: 12869
  Description of Artificial Sequence: Synthetic pecan; inner sequence

SEQ ID NO: 20964 - DNA, 30 bp, Artificial Sequence
  Description of Artificial Sequence: Synthetic pecan; inner sequence
ggccacagcgtacctcaacgtgggcgtgca

SEQ ID NO: 20965 - DNA, 30 bp, Artificial Sequence
  Description of Artificial Sequence: Synthetic pecan; inner sequence
gcacgactcgcaccctatcatgaggccctg

SEQ ID NO: 20966 - DNA, 30 bp, Artificial Sequence
  Description of Artificial Sequence: Synthetic pecan; inner sequence
gtgctgaacgtactgccaggtgagcatgca

SEQ ID NO: 20967 - DNA, 30 bp, Artificial Sequence
  Description of Artificial Sequence: Synthetic pecan; inner sequence
gcacgactcgcaccctatcatgaggccatt

SEQ ID NO: 20968 - DNA, 30 bp, Artificial Sequence
  Description of Artificial Sequence: Synthetic pecan; inner sequence
gcacgactcgcaccctatcatgaggcaatg

SEQ ID NO: 20969 - DNA, 29 bp, Artificial Sequence
  Description of Artificial Sequence: Synthetic pecan; inner sequence
gcacgccgatgtcctcatgtggccgtgga

SEQ ID NO: 20970 - DNA, 30 bp, Artificial Sequence
  Description of Artificial Sequence: Synthetic pecan; inner sequence
gtcatgccatcccttcgagtgtggcaggta

SEQ ID NO: 20971 - DNA, 30 bp, Artificial Sequence
  Description of Artificial Sequence: Synthetic pecan; inner sequence
cgcaccgtcaagcgggaacgcactttggtg

SEQ ID NO: 20972 - DNA, 30 bp, Artificial Sequence
  Description of Artificial Sequence: Synthetic pecan; inner sequence
ggccacagcgtacctccacgtggacgtgca

SEQ ID NO: 20973 - DNA, 30 bp, Artificial Sequence; identical to SEQ ID NO: 4576
  Description of Artificial Sequence: Synthetic pecan; inner sequence

SEQ ID NO: 20974 - DNA, 30 bp, Artificial Sequence
  Description of Artificial Sequence: Synthetic pecan; inner sequence
gcacgactcgcaccgtatcatgaggccatg

SEQ ID NO: 20975 - DNA, 30 bp, Artificial Sequence; identical to SEQ ID NO: 4351
  Description of Artificial Sequence: Synthetic pecan; inner sequence

SEQ ID NO: 20976 - DNA, 30 bp, Artificial Sequence
  Description of Artificial Sequence: Synthetic pecan; inner sequence
ggcctgcacgcacctacacgtgggcacgta

SEQ ID NO: 20977 - DNA, 30 bp, Artificial Sequence; identical to SEQ ID NO: 677
  Description of Artificial Sequence: Synthetic pecan; inner sequence

SEQ ID NO: 20978 - DNA, 30 bp, Artificial Sequence
  Description of Artificial Sequence: Synthetic pecan; inner sequence
ggcatgcacgcacctaaacgtgggtatgga

SEQ ID NO: 20979 - DNA, 30 bp, Artificial Sequence
  Description of Artificial Sequence: Synthetic pecan; inner sequence
ccatcgcgtcactatcatgtgtggcacgta

SEQ ID NO: 20980 - DNA, 30 bp, Artificial Sequence; identical to SEQ ID NO: 4834
  Description of Artificial Sequence: Synthetic pecan; inner sequence

SEQ ID NO: 20981 - DNA, 30 bp, Artificial Sequence
  Description of Artificial Sequence: Synthetic pecan; inner sequence
ggacacagcttgcctactggtggtcacgta

SEQ ID NO: 20982 - DNA, 30 bp, Artificial Sequence
  Description of Artificial Sequence: Synthetic pecan; inner sequence
tgccacagcgtacctcaacgtggacgtgca

SEQ ID NO: 20983 - DNA, 30 bp, Artificial Sequence
  Description of Artificial Sequence: Synthetic pecan; inner sequence
gtcactgtgcctgactgtcaagttgcggca

SEQ ID NO: 20984 - DNA, 30 bp, Artificial Sequence
  Description of Artificial Sequence: Synthetic pecan; inner sequence
gtcactgtgcctgaccgtcaagttgcgaca

SEQ ID NO: 20985 - DNA, 30 bp, Artificial Sequence
  Description of Artificial Sequence: Synthetic pecan; inner sequence
ggcctgcgcgtaccgtcaagtgcgaatgga

SEQ ID NO: 20986 - DNA, 30 bp, Artificial Sequence
  Description of Artificial Sequence: Synthetic pecan; inner sequence
gtcatgcacgaacactatcatagcggcatg

SEQ ID NO: 20987 - DNA, 30 bp, Artificial Sequence; identical to SEQ ID NO: 12775
  Description of Artificial Sequence: Synthetic pecan; inner sequence

SEQ ID NO: 20988 - DNA, 30 bp, Artificial Sequence
  Description of Artificial Sequence: Synthetic pecan; inner sequence
ccatcgcgccactatcatgtgtgtcacgta

SEQ ID NO: 20989 - DNA, 30 bp, Artificial Sequence
  Description of Artificial Sequence: Synthetic pecan; inner sequence
cgcaccgtcaagctggaaggcactttggtg

SEQ ID NO: 20990 - DNA, 30 bp, Artificial Sequence
  Description of Artificial Sequence: Synthetic pecan; inner sequence
gtcatgcatgaacactatcatggcggcatg

SEQ ID NO: 20991 - DNA, 30 bp, Artificial Sequence
  Description of Artificial Sequence: Synthetic pecan; inner sequence
gcacgactcgcacgctatcatgaggccatg

SEQ ID NO: 20992 - DNA, 27 bp, Artificial Sequence
  Description of Artificial Sequence: Synthetic pecan; inner sequence
ggacgcagcttgcctactggtggtaca

SEQ ID NO: 20993 - DNA, 30 bp, Artificial Sequence
  Description of Artificial Sequence: Synthetic pecan; inner sequence
ggacgcagcttgcctactggtggtcactta

SEQ ID NO: 20994 - DNA, 30 bp, Artificial Sequence
  Description of Artificial Sequence: Synthetic pecan; inner sequence
gtcatgccatcacttcgagtgtgacaggta

SEQ ID NO: 20995 - DNA, 30 bp, Artificial Sequence
  Description of Artificial Sequence: Synthetic pecan; inner sequence
ggacgcagcggaacgttccagtggtacgta

SEQ ID NO: 20996 - DNA, 30 bp, Artificial Sequence; identical to SEQ ID NO: 12821
  Description of Artificial Sequence: Synthetic pecan; inner sequence

SEQ ID NO: 20997 - DNA, 30 bp, Artificial Sequence; identical to SEQ ID NO: 4376
  Description of Artificial Sequence: Synthetic pecan; inner sequence

SEQ ID NO: 20998 - DNA, 30 bp, Artificial Sequence
  Description of Artificial Sequence: Synthetic pecan; inner sequence
gtcattccgcatcctacaggtgggcacgta

SEQ ID NO: 20999 - DNA, 30 bp, Artificial Sequence; identical to SEQ ID NO: 152
  Description of Artificial Sequence: Synthetic pecan; inner sequence

SEQ ID NO: 21000 - DNA, 30 bp, Artificial Sequence
  Description of Artificial Sequence: Synthetic pecan; inner sequence
ggtatgcacgcacctacacgtgggtatgga

SEQ ID NO: 21001 - DNA, 30 bp, Artificial Sequence
  Description of Artificial Sequence: Synthetic pecan; inner sequence
gtcatgccatcccttcgagtttgacaggta

SEQ ID NO: 21002 - DNA, 31 bp, Artificial Sequence
  Description of Artificial Sequence: Synthetic pecan; inner sequence
ccgatcgcacgtcaaggcaggctgtacgtgt

SEQ ID NO: 21003 - DNA, 53 bp, Artificial Sequence; identical to SEQ ID NO: 1004
  Description of Artificial Sequence: Synthetic pecan; 5' sequence and inner sequence

SEQ ID NO: 21004 - DNA, 53 bp, Artificial Sequence; identical to SEQ ID NO: 1003
  Description of Artificial Sequence: Synthetic pecan; 5' sequence and inner sequence

SEQ ID NO: 21005 - DNA, 53 bp, Artificial Sequence; identical to SEQ ID NO: 1007
  Description of Artificial Sequence: Synthetic pecan; 5' sequence and inner sequence

SEQ ID NO: 21006 - DNA, 53 bp, Artificial Sequence; identical to SEQ ID NO: 1008
  Description of Artificial Sequence: Synthetic pecan; 5' sequence and inner sequence

SEQ ID NO: 21007 - DNA, 53 bp, Artificial Sequence; identical to SEQ ID NO: 1014
  Description of Artificial Sequence: Synthetic pecan; 5' sequence and inner sequence

SEQ ID NO: 21008 - DNA, 53 bp, Artificial Sequence; identical to SEQ ID NO: 1005
  Description of Artificial Sequence: Synthetic pecan; 5' sequence and inner sequence

SEQ ID NO: 21009 - DNA, 53 bp, Artificial Sequence; identical to SEQ ID NO: 1023
  Description of Artificial Sequence: Synthetic pecan; 5' sequence and inner sequence

SEQ ID NO: 21010 - DNA, 53 bp, Artificial Sequence; identical to SEQ ID NO: 1012
  Description of Artificial Sequence: Synthetic pecan; 5' sequence and inner sequence

SEQ ID NO: 21011 - DNA, 53 bp, Artificial Sequence; identical to SEQ ID NO: 1011
  Description of Artificial Sequence: Synthetic pecan; 5' sequence and inner sequence

SEQ ID NO: 21012 - DNA, 53 bp, Artificial Sequence; identical to SEQ ID NO: 1020
  Description of Artificial Sequence: Synthetic pecan; 5' sequence and inner sequence

SEQ ID NO: 21013 - DNA, 53 bp, Artificial Sequence; identical to SEQ ID NO: 1006
  Description of Artificial Sequence: Synthetic pecan; 5' sequence and inner sequence

SEQ ID NO: 21014 - DNA, 53 bp, Artificial Sequence; identical to SEQ ID NO: 1009
  Description of Artificial Sequence: Synthetic pecan; 5' sequence and inner sequence

SEQ ID NO: 21015 - DNA, 53 bp, Artificial Sequence; identical to SEQ ID NO: 1046
  Description of Artificial Sequence: Synthetic pecan; 5' sequence and inner sequence

SEQ ID NO: 21016 - DNA, 53 bp, Artificial Sequence; identical to SEQ ID NO: 1013
  Description of Artificial Sequence: Synthetic pecan; 5' sequence and inner sequence

SEQ ID NO: 21017 - DNA, 53 bp, Artificial Sequence; identical to SEQ ID NO: 1010
  Description of Artificial Sequence: Synthetic pecan; 5' sequence and inner sequence

SEQ ID NO: 21018 - DNA, 53 bp, Artificial Sequence; identical to SEQ ID NO: 1041
  Description of Artificial Sequence: Synthetic pecan; 5' sequence and inner sequence

SEQ ID NO: 21019 - DNA, 53 bp, Artificial Sequence; identical to SEQ ID NO: 1030
  Description of Artificial Sequence: Synthetic pecan; 5' sequence and inner sequence

SEQ ID NO: 21020 - DNA, 53 bp, Artificial Sequence; identical to SEQ ID NO: 1021
  Description of Artificial Sequence: Synthetic pecan; 5' sequence and inner sequence

SEQ ID NO: 21021 - DNA, 53 bp, Artificial Sequence; identical to SEQ ID NO: 1015
  Description of Artificial Sequence: Synthetic pecan; 5' sequence and inner sequence

SEQ ID NO: 21022 - DNA, 52 bp, Artificial Sequence; identical to SEQ ID NO: 1070
  Description of Artificial Sequence: Synthetic pecan; 5' sequence and inner sequence

SEQ ID NO: 21023 - DNA, 53 bp, Artificial Sequence; identical to SEQ ID NO: 1028
  Description of Artificial Sequence: Synthetic pecan; 5' sequence and inner sequence

SEQ ID NO: 21024 - DNA, 53 bp, Artificial Sequence; identical to SEQ ID NO: 1037
  Description of Artificial Sequence: Synthetic pecan; 5' sequence and inner sequence

SEQ ID NO: 21025 - DNA, 53 bp, Artificial Sequence; identical to SEQ ID NO: 1018
  Description of Artificial Sequence: Synthetic pecan; 5' sequence and inner sequence

SEQ ID NO: 21026 - DNA, 53 bp, Artificial Sequence; identical to SEQ ID NO: 1045
  Description of Artificial Sequence: Synthetic pecan; 5' sequence and inner sequence

SEQ ID NO: 21027 - DNA, 53 bp, Artificial Sequence; identical to SEQ ID NO: 1033
  Description of Artificial Sequence: Synthetic pecan; 5' sequence and inner sequence

SEQ ID NO: 21028 - DNA, 53 bp, Artificial Sequence; identical to SEQ ID NO: 1052
  Description of Artificial Sequence: Synthetic pecan; 5' sequence and inner sequence

SEQ ID NO: 21029 - DNA, 53 bp, Artificial Sequence; identical to SEQ ID NO: 1049
  Description of Artificial Sequence: Synthetic pecan; 5' sequence and inner sequence

SEQ ID NO: 21030 - DNA, 53 bp, Artificial Sequence; identical to SEQ ID NO: 1054
  Description of Artificial Sequence: Synthetic pecan; 5' sequence and inner sequence

SEQ ID NO: 21031 - DNA, 53 bp, Artificial Sequence; identical to SEQ ID NO: 1017
  Description of Artificial Sequence: Synthetic pecan; 5' sequence and inner sequence

SEQ ID NO: 21032 - DNA, 53 bp, Artificial Sequence; identical to SEQ ID NO: 1077
  Description of Artificial Sequence: Synthetic pecan; 5' sequence and inner sequence

SEQ ID NO: 21033 - DNA, 53 bp, Artificial Sequence; identical to SEQ ID NO: 1078
  Description of Artificial Sequence: Synthetic pecan; 5' sequence and inner sequence

SEQ ID NO: 21034 - DNA, 53 bp, Artificial Sequence; identical to SEQ ID NO: 1022
  Description of Artificial Sequence: Synthetic pecan; 5' sequence and inner sequence

SEQ ID NO: 21035 - DNA, 53 bp, Artificial Sequence; identical to SEQ ID NO: 1081
  Description of Artificial Sequence: Synthetic pecan; 5' sequence and inner sequence

SEQ ID NO: 21036 - DNA, 53 bp, Artificial Sequence; identical to SEQ ID NO: 1035
  Description of Artificial Sequence: Synthetic pecan; 5' sequence and inner sequence

SEQ ID NO: 21037 - DNA, 53 bp, Artificial Sequence; identical to SEQ ID NO: 1073
  Description of Artificial Sequence: Synthetic pecan; 5' sequence and inner sequence

SEQ ID NO: 21038 - DNA, 53 bp, Artificial Sequence; identical to SEQ ID NO: 1059
  Description of Artificial Sequence: Synthetic pecan; 5' sequence and inner sequence

SEQ ID NO: 21039 - DNA, 53 bp, Artificial Sequence; identical to SEQ ID NO: 1201
  Description of Artificial Sequence: Synthetic pecan; 5' sequence and inner sequence

SEQ ID NO: 21040 - DNA, 53 bp, Artificial Sequence; identical to SEQ ID NO: 1040
  Description of Artificial Sequence: Synthetic pecan; 5' sequence and inner sequence

SEQ ID NO: 21041 - DNA, 53 bp, Artificial Sequence; identical to SEQ ID NO: 1220
  Description of Artificial Sequence: Synthetic pecan; 5' sequence and inner sequence

SEQ ID NO: 21042 - DNA, 53 bp, Artificial Sequence; identical to SEQ ID NO: 1161
  Description of Artificial Sequence: Synthetic pecan; 5' sequence and inner sequence

SEQ ID NO: 21043 - DNA, 53 bp, Artificial Sequence; identical to SEQ ID NO: 1067
  Description of Artificial Sequence: Synthetic pecan; 5' sequence and inner sequence

SEQ ID NO: 21044 - DNA, 53 bp, Artificial Sequence; identical to SEQ ID NO: 1074
  Description of Artificial Sequence: Synthetic pecan; 5' sequence and inner sequence

SEQ ID NO: 21045 - DNA, 53 bp, Artificial Sequence; identical to SEQ ID NO: 1100
  Description of Artificial Sequence: Synthetic pecan; 5' sequence and inner sequence

SEQ ID NO: 21046 - DNA, 53 bp, Artificial Sequence; identical to SEQ ID NO: 1247
  Description of Artificial Sequence: Synthetic pecan; 5' sequence and inner sequence

SEQ ID NO: 21047 - DNA, 53 bp, Artificial Sequence; identical to SEQ ID NO: 1071
  Description of Artificial Sequence: Synthetic pecan; 5' sequence and inner sequence

SEQ ID NO: 21048 - DNA, 53 bp, Artificial Sequence; identical to SEQ ID NO: 1031
  Description of Artificial Sequence: Synthetic pecan; 5' sequence and inner sequence

SEQ ID NO: 21049 - DNA, 53 bp, Artificial Sequence; identical to SEQ ID NO: 1051
  Description of Artificial Sequence: Synthetic pecan; 5' sequence and inner sequence

SEQ ID NO: 21050 - DNA, 53 bp, Artificial Sequence; identical to SEQ ID NO: 1055
  Description of Artificial Sequence: Synthetic pecan; 5' sequence and inner sequence

SEQ ID NO: 21051 - DNA, 53 bp, Artificial Sequence; identical to SEQ ID NO: 1144
  Description of Artificial Sequence: Synthetic pecan; 5' sequence and inner sequence

SEQ ID NO: 21052 - DNA, 53 bp, Artificial Sequence; identical to SEQ ID NO: 1096
  Description of Artificial Sequence: Synthetic pecan; 5' sequence and inner sequence

SEQ ID NO: 21053 - DNA, 51 bp, Artificial Sequence; identical to SEQ ID NO: 1148
  Description of Artificial Sequence: Synthetic pecan; 5' sequence and inner sequence

SEQ ID NO: 21054 - DNA, 53 bp, Artificial Sequence; identical to SEQ ID NO: 1454
  Description of Artificial Sequence: Synthetic pecan; 5' sequence and inner sequence

SEQ ID NO: 21055 - DNA, 53 bp, Artificial Sequence; identical to SEQ ID NO: 1053
  Description of Artificial Sequence: Synthetic pecan; 5' sequence and inner sequence

SEQ ID NO: 21056 - DNA, 53 bp, Artificial Sequence; identical to SEQ ID NO: 1050
  Description of Artificial Sequence: Synthetic pecan; 5' sequence and inner sequence

SEQ ID NO: 21057 - DNA, 53 bp, Artificial Sequence; identical to SEQ ID NO: 1032
  Description of Artificial Sequence: Synthetic pecan; 5' sequence and inner sequence

SEQ ID NO: 21058 - DNA, 53 bp, Artificial Sequence; identical to SEQ ID NO: 1034
  Description of Artificial Sequence: Synthetic pecan; 5' sequence and inner sequence

SEQ ID NO: 21059 - DNA, 53 bp, Artificial Sequence; identical to SEQ ID NO: 1185
  Description of Artificial Sequence: Synthetic pecan; 5' sequence and inner sequence

SEQ ID NO: 21060 - DNA, 51 bp, Artificial Sequence; identical to SEQ ID NO: 1241
  Description of Artificial Sequence: Synthetic pecan; 5' sequence and inner sequence

SEQ ID NO: 21061 - DNA, 53 bp, Artificial Sequence; identical to SEQ ID NO: 1029
  Description of Artificial Sequence: Synthetic pecan; 5' sequence and inner sequence

SEQ ID NO: 21062 - DNA, 53 bp, Artificial Sequence; identical to SEQ ID NO: 1066
  Description of Artificial Sequence: Synthetic pecan; 5' sequence and inner sequence

SEQ ID NO: 21063 - DNA, 53 bp, Artificial Sequence; identical to SEQ ID NO: 1279
  Description of Artificial Sequence: Synthetic pecan; 5' sequence and inner sequence

SEQ ID NO: 21064 - DNA, 53 bp, Artificial Sequence; identical to SEQ ID NO: 1080
  Description of Artificial Sequence: Synthetic pecan; 5' sequence and inner sequence

SEQ ID NO: 21065 - DNA, 53 bp, Artificial Sequence; identical to SEQ ID NO: 1174
  Description of Artificial Sequence: Synthetic pecan; 5' sequence and inner sequence

SEQ ID NO: 21066 - DNA, 53 bp, Artificial Sequence; identical to SEQ ID NO: 1151
  Description of Artificial Sequence: Synthetic pecan; 5' sequence and inner sequence

SEQ ID NO: 21067 - DNA, 53 bp, Artificial Sequence; identical to SEQ ID NO: 1506
  Description of Artificial Sequence: Synthetic pecan; 5' sequence and inner sequence

SEQ ID NO: 21068 - DNA, 53 bp, Artificial Sequence; identical to SEQ ID NO: 1194
  Description of Artificial Sequence: Synthetic pecan; 5' sequence and inner sequence

SEQ ID NO: 21069 - DNA, 53 bp, Artificial Sequence; identical to SEQ ID NO: 1136
  Description of Artificial Sequence: Synthetic pecan; 5' sequence and inner sequence

SEQ ID NO: 21070 - DNA, 53 bp, Artificial Sequence; identical to SEQ ID NO: 1901
  Description of Artificial Sequence: Synthetic pecan; 5' sequence and inner sequence

SEQ ID NO: 21071 - DNA, 53 bp, Artificial Sequence; identical to SEQ ID NO: 1092
  Description of Artificial Sequence: Synthetic pecan; 5' sequence and inner sequence

SEQ ID NO: 21072 - DNA, 53 bp, Artificial Sequence; identical to SEQ ID NO: 1229
  Description of Artificial Sequence: Synthetic pecan; 5' sequence and inner sequence

SEQ ID NO: 21073 - DNA, 53 bp, Artificial Sequence; identical to SEQ ID NO: 1323
  Description of Artificial Sequence: Synthetic pecan; 5' sequence and inner sequence

SEQ ID NO: 21074 - DNA, 53 bp, Artificial Sequence; identical to SEQ ID NO: 1042
  Description of Artificial Sequence: Synthetic pecan; 5' sequence and inner sequence

SEQ ID NO: 21075 - DNA, 53 bp, Artificial Sequence; identical to SEQ ID NO: 1232
  Description of Artificial Sequence: Synthetic pecan; 5' sequence and inner sequence

SEQ ID NO: 21076 - DNA, 53 bp, Artificial Sequence; identical to SEQ ID NO: 1048
  Description of Artificial Sequence: Synthetic pecan; 5' sequence and inner sequence

SEQ ID NO: 21077 - DNA, 53 bp, Artificial Sequence; identical to SEQ ID NO: 1311
  Description of Artificial Sequence: Synthetic pecan; 5' sequence and inner sequence

SEQ ID NO: 21078 - DNA, 53 bp, Artificial Sequence; identical to SEQ ID NO: 1517
  Description of Artificial Sequence: Synthetic pecan; 5' sequence and inner sequence

SEQ ID NO: 21079 - DNA, 53 bp, Artificial Sequence; identical to SEQ ID NO: 1115
  Description of Artificial Sequence: Synthetic pecan; 5' sequence and inner sequence

SEQ ID NO: 21080 - DNA, 53 bp, Artificial Sequence; identical to SEQ ID NO: 1553
  Description of Artificial Sequence: Synthetic pecan; 5' sequence and inner sequence

SEQ ID NO: 21081 - DNA, 53 bp, Artificial Sequence; identical to SEQ ID NO: 1290
  Description of Artificial Sequence: Synthetic pecan; 5' sequence and inner sequence

SEQ ID NO: 21082 - DNA, 53 bp, Artificial Sequence; identical to SEQ ID NO: 1207
  Description of Artificial Sequence: Synthetic pecan; 5' sequence and inner sequence

SEQ ID NO: 21083 - DNA, 53 bp, Artificial Sequence; identical to SEQ ID NO: 1406
  Description of Artificial Sequence: Synthetic pecan; 5' sequence and inner sequence

SEQ ID NO: 21084 - DNA, 53 bp, Artificial Sequence; identical to SEQ ID NO: 1121
  Description of Artificial Sequence: Synthetic pecan; 5' sequence and inner sequence

SEQ ID NO: 21085 - DNA, 53 bp, Artificial Sequence; identical to SEQ ID NO: 1145
  Description of Artificial Sequence: Synthetic pecan; 5' sequence and inner sequence

SEQ ID NO: 21086 - DNA, 53 bp, Artificial Sequence; identical to SEQ ID NO: 1184
  Description of Artificial Sequence: Synthetic pecan; 5' sequence and inner sequence

SEQ ID NO: 21087 - DNA, 53 bp, Artificial Sequence; identical to SEQ ID NO: 1131
  Description of Artificial Sequence: Synthetic pecan; 5' sequence and inner sequence

SEQ ID NO: 21088 - DNA, 53 bp, Artificial Sequence; identical to SEQ ID NO: 1117
  Description of Artificial Sequence: Synthetic pecan; 5' sequence and inner sequence

SEQ ID NO: 21089 - DNA, 53 bp, Artificial Sequence; identical to SEQ ID NO: 1437
  Description of Artificial Sequence: Synthetic pecan; 5' sequence and inner sequence

SEQ ID NO: 21090 - DNA, 53 bp, Artificial Sequence; identical to SEQ ID NO: 5472
  Description of Artificial Sequence: Synthetic pecan; 5' sequence and inner sequence

SEQ ID NO: 21091 - DNA, 53 bp, Artificial Sequence; identical to SEQ ID NO: 1171
  Description of Artificial Sequence: Synthetic pecan; 5' sequence and inner sequence

SEQ ID NO: 21092 - DNA, 53 bp, Artificial Sequence; identical to SEQ ID NO: 1630
  Description of Artificial Sequence: Synthetic pecan; 5' sequence and inner sequence

SEQ ID NO: 21093 - DNA, 53 bp, Artificial Sequence; identical to SEQ ID NO: 1285
  Description of Artificial Sequence: Synthetic pecan; 5' sequence and inner sequence

SEQ ID NO: 21094 - DNA, 53 bp, Artificial Sequence; identical to SEQ ID NO: 1111
  Description of Artificial Sequence: Synthetic pecan; 5' sequence and inner sequence

SEQ ID NO: 21095 - DNA, 53 bp, Artificial Sequence; identical to SEQ ID NO: 1164
  Description of Artificial Sequence: Synthetic pecan; 5' sequence and inner sequence

SEQ ID NO: 21096 - DNA, 53 bp, Artificial Sequence; identical to SEQ ID NO: 1257
  Description of Artificial Sequence: Synthetic pecan; 5' sequence and inner sequence

SEQ ID NO: 21097 - DNA, 53 bp, Artificial Sequence; identical to SEQ ID NO: 1243
  Description of Artificial Sequence: Synthetic pecan; 5' sequence and inner sequence

SEQ ID NO: 21098 - DNA, 53 bp, Artificial Sequence; identical to SEQ ID NO: 1123
  Description of Artificial Sequence: Synthetic pecan; 5' sequence and inner sequence

SEQ ID NO: 21099 - DNA, 53 bp, Artificial Sequence; identical to SEQ ID NO: 1141
  Description of Artificial Sequence: Synthetic pecan; 5' sequence and inner sequence

SEQ ID NO: 21100 - DNA, 53 bp, Artificial Sequence; identical to SEQ ID NO: 1245
  Description of Artificial Sequence: Synthetic pecan; 5' sequence and inner sequence

SEQ ID NO: 21101 - DNA, 52 bp, Artificial Sequence; identical to SEQ ID NO: 5763
  Description of Artificial Sequence: Synthetic pecan; 5' sequence and inner sequence

SEQ ID NO: 21102 - DNA, 52 bp, Artificial Sequence; identical to SEQ ID NO: 5559
  Description of Artificial Sequence: Synthetic pecan; 5' sequence and inner sequence

SEQ ID NO: 21103 - DNA, 53 bp, Artificial Sequence; identical to SEQ ID NO: 1877
  Description of Artificial Sequence: Synthetic pecan; 5' sequence and inner sequence

SEQ ID NO: 21104 - DNA, 53 bp, Artificial Sequence; identical to SEQ ID NO: 1126
  Description of Artificial Sequence: Synthetic pecan; 5' sequence and inner sequence

SEQ ID NO: 21105 - DNA, 53 bp, Artificial Sequence
  Description of Artificial Sequence: Synthetic pecan; 5' sequence and inner sequence
tagggaagagaaggacatatgatggacgcagcgtacctcaacgtggacgtgca

SEQ ID NO: 21106 - DNA, 53 bp, Artificial Sequence; identical to SEQ ID NO: 1196
  Description of Artificial Sequence: Synthetic pecan; 5' sequence and inner sequence

SEQ ID NO: 21107 - DNA, 53 bp, Artificial Sequence; identical to SEQ ID NO: 1231
  Description of Artificial Sequence: Synthetic pecan; 5' sequence and inner sequence

SEQ ID NO: 21108 - DNA, 53 bp, Artificial Sequence; identical to SEQ ID NO: 1787
  Description of Artificial Sequence: Synthetic pecan; 5' sequence and inner sequence

SEQ ID NO: 21109 - DNA, 53 bp, Artificial Sequence; identical to SEQ ID NO: 1344
  Description of Artificial Sequence: Synthetic pecan; 5' sequence and inner sequence

SEQ ID NO: 21110 - DNA, 53 bp, Artificial Sequence; identical to SEQ ID NO: 1076
  Description of Artificial Sequence: Synthetic pecan; 5' sequence and inner sequence

SEQ ID NO: 21111 - DNA, 53 bp, Artificial Sequence; identical to SEQ ID NO: 1365
  Description of Artificial Sequence: Synthetic pecan; 5' sequence and inner sequence

SEQ ID NO: 21112 - DNA, 53 bp, Artificial Sequence; identical to SEQ ID NO: 1132
  Description of Artificial Sequence: Synthetic pecan; 5' sequence and inner sequence

SEQ ID NO: 21113 - DNA, 53 bp, Artificial Sequence; identical to SEQ ID NO: 1283
  Description of Artificial Sequence: Synthetic pecan; 5' sequence and inner sequence

SEQ ID NO: 21114 - DNA, 53 bp, Artificial Sequence; identical to SEQ ID NO: 1212
  Description of Artificial Sequence: Synthetic pecan; 5' sequence and inner sequence

SEQ ID NO: 21115 - DNA, 53 bp, Artificial Sequence; identical to SEQ ID NO: 1227
  Description of Artificial Sequence: Synthetic pecan; 5' sequence and inner sequence

SEQ ID NO: 21116 - DNA, 53 bp, Artificial Sequence; identical to SEQ ID NO: 1310
  Description of Artificial Sequence: Synthetic pecan; 5' sequence and inner sequence

SEQ ID NO: 21117 - DNA, 53 bp, Artificial Sequence; identical to SEQ ID NO: 1039
  Description of Artificial Sequence: Synthetic pecan; 5' sequence and inner sequence

SEQ ID NO: 21118 - DNA, 53 bp, Artificial Sequence; identical to SEQ ID NO: 1163
  Description of Artificial Sequence: Synthetic pecan; 5' sequence and inner sequence

SEQ ID NO: 21119 - DNA, 53 bp, Artificial Sequence
  Description of Artificial Sequence: Synthetic pecan; 5' sequence and inner sequence
tagggaagagaaggacatatgatggcacaaacggaccgacacgtgcgcatgga

SEQ ID NO: 21120 - DNA, 53 bp, Artificial Sequence; identical to SEQ ID NO: 1038
  Description of Artificial Sequence: Synthetic pecan; 5' sequence and inner sequence

SEQ ID NO: 21121 - DNA, 54 bp, Artificial Sequence; identical to SEQ ID NO: 1250
  Description of Artificial Sequence: Synthetic pecan; 5' sequence and inner sequence

SEQ ID NO: 21122 - DNA, 53 bp, Artificial Sequence; identical to SEQ ID NO: 1240
  Description of Artificial Sequence: Synthetic pecan; 5' sequence and inner sequence

SEQ ID NO: 21123 - DNA, 53 bp, Artificial Sequence; identical to SEQ ID NO: 1369
  Description of Artificial Sequence: Synthetic pecan; 5' sequence and inner sequence

SEQ ID NO: 21124 - DNA, 53 bp, Artificial Sequence; identical to SEQ ID NO: 1149
  Description of Artificial Sequence: Synthetic pecan; 5' sequence and inner sequence

SEQ ID NO: 21125 - DNA, 53 bp, Artificial Sequence; identical to SEQ ID NO: 1057
  Description of Artificial Sequence: Synthetic pecan; 5' sequence and inner sequence

SEQ ID NO: 21126 - DNA, 53 bp, Artificial Sequence; identical to SEQ ID NO: 1138
  Description of Artificial Sequence: Synthetic pecan; 5' sequence and inner sequence

SEQ ID NO: 21127 - DNA, 53 bp, Artificial Sequence; identical to SEQ ID NO: 1470
  Description of Artificial Sequence: Synthetic pecan; 5' sequence and inner sequence

SEQ ID NO: 21128 - DNA, 53 bp, Artificial Sequence; identical to SEQ ID NO: 1190
  Description of Artificial Sequence: Synthetic pecan; 5' sequence and inner sequence

SEQ ID NO: 21129 - DNA, 53 bp, Artificial Sequence; identical to SEQ ID NO: 1154
  Description of Artificial Sequence: Synthetic pecan; 5' sequence and inner sequence

SEQ ID NO: 21130 - DNA, 53 bp, Artificial Sequence; identical to SEQ ID NO: 1114
  Description of Artificial Sequence: Synthetic pecan; 5' sequence and inner sequence

SEQ ID NO: 21131 - DNA, 53 bp, Artificial Sequence; identical to SEQ ID NO: 1653
  Description of Artificial Sequence: Synthetic pecan; 5' sequence and inner sequence

SEQ ID NO: 21132 - DNA, 53 bp, Artificial Sequence; identical to SEQ ID NO: 1371
  Description of Artificial Sequence: Synthetic pecan; 5' sequence and inner sequence

SEQ ID NO: 21133 - DNA, 53 bp, Artificial Sequence
  Description of Artificial Sequence: Synthetic pecan; 5' sequence and inner sequence
tagggaagagaaggacatatgatgcacgactcgcaccctattatgaggccatg

SEQ ID NO: 21134 - DNA, 53 bp, Artificial Sequence; identical to SEQ ID NO: 5565
  Description of Artificial Sequence: Synthetic pecan; 5' sequence and inner sequence

SEQ ID NO: 21135 - DNA, 53 bp, Artificial Sequence; identical to SEQ ID NO: 1063
  Description of Artificial Sequence: Synthetic pecan; 5' sequence and inner sequence

SEQ ID NO: 21136 - DNA, 48 bp, Artificial Sequence
  Description of Artificial Sequence: Synthetic pecan; 5' sequence and inner sequence
tagggaagagaaggacatatgatggcatgcacgcacctacacgtgggc

SEQ ID NO: 21137 - DNA, 53 bp, Artificial Sequence; identical to SEQ ID NO: 1666
  Description of Artificial Sequence: Synthetic pecan; 5' sequence and inner sequence

SEQ ID NO: 21138 - DNA, 53 bp, Artificial Sequence; identical to SEQ ID NO: 1352
  Description of Artificial Sequence: Synthetic pecan; 5' sequence and inner sequence

SEQ ID NO: 21139 - DNA, 53 bp, Artificial Sequence; identical to SEQ ID NO: 1343
  Description of Artificial Sequence: Synthetic pecan; 5' sequence and inner sequence

SEQ ID NO: 21140 - DNA, 53 bp, Artificial Sequence; identical to SEQ ID NO: 5691
  Description of Artificial Sequence: Synthetic pecan; 5' sequence and inner sequence

SEQ ID NO: 21141 - DNA, 53 bp, Artificial Sequence; identical to SEQ ID NO: 1358
  Description of Artificial Sequence: Synthetic pecan; 5' sequence and inner sequence

SEQ ID NO: 21142 - DNA, 53 bp, Artificial Sequence; identical to SEQ ID NO: 5503
  Description of Artificial Sequence: Synthetic pecan; 5' sequence and inner sequence

SEQ ID NO: 21143 - DNA, 53 bp, Artificial Sequence; identical to SEQ ID NO: 1263
  Description of Artificial Sequence: Synthetic pecan; 5' sequence and inner sequence

SEQ ID NO: 21144 - DNA, 53 bp, Artificial Sequence; identical to SEQ ID NO: 1920
  Description of Artificial Sequence: Synthetic pecan; 5' sequence and inner sequence

SEQ ID NO: 21145 - DNA, 53 bp, Artificial Sequence; identical to SEQ ID NO: 1125
  Description of Artificial Sequence: Synthetic pecan; 5' sequence and inner sequence

SEQ ID NO: 21146 - DNA, 53 bp, Artificial Sequence; identical to SEQ ID NO: 1419
  Description of Artificial Sequence: Synthetic pecan; 5' sequence and inner sequence

SEQ ID NO: 21147 - DNA, 53 bp, Artificial Sequence; identical to SEQ ID NO: 1632
  Description of Artificial Sequence: Synthetic pecan; 5' sequence and inner sequence

SEQ ID NO: 21148 - DNA, 53 bp, Artificial Sequence; identical to SEQ ID NO: 1340
  Description of Artificial Sequence: Synthetic pecan; 5' sequence and inner sequence

SEQ ID NO: 21149 - DNA, 53 bp, Artificial Sequence; identical to SEQ ID NO: 1567
  Description of Artificial Sequence: Synthetic pecan; 5' sequence and inner sequence

SEQ ID NO: 21150 - DNA, 53 bp, Artificial Sequence; identical to SEQ ID NO: 1192
  Description of Artificial Sequence: Synthetic pecan; 5' sequence and inner sequence

SEQ ID NO: 21151 - DNA, 53 bp, Artificial Sequence
  Description of Artificial Sequence: Synthetic pecan; 5' sequence and inner sequence
tagggaagagaaggacatatgatggccacagcgtacctcaacgtggccgtgca

SEQ ID NO: 21152 - DNA, 53 bp, Artificial Sequence; identical to SEQ ID NO: 1093
  Description of Artificial Sequence: Synthetic pecan; 5' sequence and inner sequence

SEQ ID NO: 21153 - DNA, 53 bp, Artificial Sequence; identical to SEQ ID NO: 1884
  Description of Artificial Sequence: Synthetic pecan; 5' sequence and inner sequence

SEQ ID NO: 21154 - DNA, 53 bp, Artificial Sequence; identical to SEQ ID NO: 1205
  Description of Artificial Sequence: Synthetic pecan; 5' sequence and inner sequence

SEQ ID NO: 21155 - DNA, 53 bp, Artificial Sequence; identical to SEQ ID NO: 1168
  Description of Artificial Sequence: Synthetic pecan; 5' sequence and inner sequence

SEQ ID NO: 21156 - DNA, 53 bp, Artificial Sequence; identical to SEQ ID NO: 1274
  Description of Artificial Sequence: Synthetic pecan; 5' sequence and inner sequence

SEQ ID NO: 21157 - DNA, 53 bp, Artificial Sequence; identical to SEQ ID NO: 1272
  Description of Artificial Sequence: Synthetic pecan; 5' sequence and inner sequence

SEQ ID NO: 21158 - DNA, 53 bp, Artificial Sequence; identical to SEQ ID NO: 1647
  Description of Artificial Sequence: Synthetic pecan; 5' sequence and inner sequence

SEQ ID NO: 21159 - DNA, 53 bp, Artificial Sequence; identical to SEQ ID NO: 5543
  Description of Artificial Sequence: Synthetic pecan; 5' sequence and inner sequence

SEQ ID NO: 21160 - DNA, 53 bp, Artificial Sequence; identical to SEQ ID NO: 1142
  Description of Artificial Sequence: Synthetic pecan; 5' sequence and inner sequence

SEQ ID NO: 21161 - DNA, 53 bp, Artificial Sequence; identical to SEQ ID NO: 1113
  Description of Artificial Sequence: Synthetic pecan; 5' sequence and inner sequence

SEQ ID NO: 21162 - DNA, 53 bp, Artificial Sequence; identical to SEQ ID NO: 1443
  Description of Artificial Sequence: Synthetic pecan; 5' sequence and inner sequence

SEQ ID NO: 21163 - DNA, 53 bp, Artificial Sequence; identical to SEQ ID NO: 5405
  Description of Artificial Sequence: Synthetic pecan; 5' sequence and inner sequence

SEQ ID NO: 21164 - DNA, 53 bp, Artificial Sequence; identical to SEQ ID NO: 1457
  Description of Artificial Sequence: Synthetic pecan; 5' sequence and inner sequence

SEQ ID NO: 21165 - DNA, 53 bp, Artificial Sequence
  Description of Artificial Sequence: Synthetic pecan; 5' sequence and inner sequence
tagggaagagaaggacatatgatccgatcgcacgtcaaggcaggctgtacgcg

SEQ ID NO: 21166 - DNA, 53 bp, Artificial Sequence; identical to SEQ ID NO: 1177
  Description of Artificial Sequence: Synthetic pecan; 5' sequence and inner sequence

SEQ ID NO: 21167 - DNA, 53 bp, Artificial Sequence; identical to SEQ ID NO: 1724
  Description of Artificial Sequence: Synthetic pecan; 5' sequence and inner sequence

SEQ ID NO: 21168 - DNA, 53 bp, Artificial Sequence; identical to SEQ ID NO: 1188
  Description of Artificial Sequence: Synthetic pecan; 5' sequence and inner sequence

SEQ ID NO: 21169 - DNA, 53 bp, Artificial Sequence; identical to SEQ ID NO: 1521
  Description of Artificial Sequence: Synthetic pecan; 5' sequence and inner sequence

SEQ ID NO: 21170 - DNA, 54 bp, Artificial Sequence; identical to SEQ ID NO: 1221
  Description of Artificial Sequence: Synthetic pecan; 5' sequence and inner sequence

SEQ ID NO: 21171 - DNA, 54 bp, Artificial Sequence; identical to SEQ ID NO: 1971
  Description of Artificial Sequence: Synthetic pecan; 5' sequence and inner sequence

SEQ ID NO: 21172 - DNA, 53 bp, Artificial Sequence; identical to SEQ ID NO: 5498
  Description of Artificial Sequence: Synthetic pecan; 5' sequence and inner sequence

SEQ ID NO: 21173 - DNA, 53 bp, Artificial Sequence; identical to SEQ ID NO: 1673
  Description of Artificial Sequence: Synthetic pecan; 5' sequence and inner sequence

SEQ ID NO: 21174 - DNA, 53 bp, Artificial Sequence; identical to SEQ ID NO: 1262
  Description of Artificial Sequence: Synthetic pecan; 5' sequence and inner sequence

SEQ ID NO: 21175 - DNA, 53 bp, Artificial Sequence; identical to SEQ ID NO: 1622
  Description of Artificial Sequence: Synthetic pecan; 5' sequence and inner sequence

SEQ ID NO: 21176 - DNA, 53 bp, Artificial Sequence; identical to SEQ ID NO: 1615
  Description of Artificial Sequence: Synthetic pecan; 5' sequence and inner sequence

SEQ ID NO: 21177 - DNA, 53 bp, Artificial Sequence; identical to SEQ ID NO: 1617
  Description of Artificial Sequence: Synthetic pecan; 5' sequence and inner sequence

SEQ ID NO: 21178 - DNA, 53 bp, Artificial Sequence; identical to SEQ ID NO: 5336
  Description of Artificial Sequence: Synthetic pecan; 5' sequence and inner sequence

SEQ ID NO: 21179 - DNA, 51 bp, Artificial Sequence; identical to SEQ ID NO: 5786
  Description of Artificial Sequence: Synthetic pecan; 5' sequence and inner sequence

SEQ ID NO: 21180 - DNA, 53 bp, Artificial Sequence
  Description of Artificial Sequence: Synthetic pecan; 5' sequence and inner sequence
tagggaagagaaggacatatgatggcacaaacggaccgacatgtgcgcatgga

SEQ ID NO: 21181 - DNA, 53 bp, Artificial Sequence; identical to SEQ ID NO: 1891
  Description of Artificial Sequence: Synthetic pecan; 5' sequence and inner sequence

SEQ ID NO: 21182 - DNA, 53 bp, Artificial Sequence; identical to SEQ ID NO: 1728
  Description of Artificial Sequence: Synthetic pecan; 5' sequence and inner sequence

SEQ ID NO: 21183 - DNA, 53 bp, Artificial Sequence; identical to SEQ ID NO: 1776
  Description of Artificial Sequence: Synthetic pecan; 5' sequence and inner sequence

SEQ ID NO: 21184 - DNA, 53 bp, Artificial Sequence; identical to SEQ ID NO: 1414
  Description of Artificial Sequence: Synthetic pecan; 5' sequence and inner sequence

SEQ ID NO: 21185 - DNA, 53 bp, Artificial Sequence; identical to SEQ ID NO: 9767
  Description of Artificial Sequence: Synthetic pecan; 5' sequence and inner sequence

SEQ ID NO: 21186 - DNA, 53 bp, Artificial Sequence; identical to SEQ ID NO: 1294
  Description of Artificial Sequence: Synthetic pecan; 5' sequence and inner sequence

SEQ ID NO: 21187 - DNA, 54 bp, Artificial Sequence
  Description of Artificial Sequence: Synthetic pecan; 5' sequence and inner sequence
tagggaagagaaggacatatgatggacgcagcggaacgttcgagtggttgcgta

SEQ ID NO: 21188 - DNA, 53 bp, Artificial Sequence; identical to SEQ ID NO: 13521
  Description of Artificial Sequence: Synthetic pecan; 5' sequence and inner sequence

SEQ ID NO: 21189 - DNA, 53 bp, Artificial Sequence; identical to SEQ ID NO: 1347
  Description of Artificial Sequence: Synthetic pecan; 5' sequence and inner sequence

SEQ ID NO: 21190 - DNA, 53 bp, Artificial Sequence; identical to SEQ ID NO: 1061
  Description of Artificial Sequence: Synthetic pecan; 5' sequence and inner sequence

SEQ ID NO: 21191 - DNA, 53 bp, Artificial Sequence; identical to SEQ ID NO: 1129
  Description of Artificial Sequence: Synthetic pecan; 5' sequence and inner sequence

SEQ ID NO: 21192 - DNA, 53 bp, Artificial Sequence; identical to SEQ ID NO: 1246
  Description of Artificial Sequence: Synthetic pecan; 5' sequence and inner sequence

SEQ ID NO: 21193 - DNA, 53 bp, Artificial Sequence
  Description of Artificial Sequence: Synthetic pecan; 5' sequence and inner sequence
tagggaagagaaggacatatgatccgcacgtagccctatcactggtgcatgca

SEQ ID NO: 21194 - DNA, 53 bp, Artificial Sequence; identical to SEQ ID NO: 9964
  Description of Artificial Sequence: Synthetic pecan; 5' sequence and inner sequence

SEQ ID NO: 21195 - DNA, 53 bp, Artificial Sequence; identical to SEQ ID NO: 1104
  Description of Artificial Sequence: Synthetic pecan; 5' sequence and inner sequence

SEQ ID NO: 21196 - DNA, 53 bp, Artificial Sequence; identical to SEQ ID NO: 1446
  Description of Artificial Sequence: Synthetic pecan; 5' sequence and inner sequence

SEQ ID NO: 21197 - DNA, 53 bp, Artificial Sequence; identical to SEQ ID NO: 1746
  Description of Artificial Sequence: Synthetic pecan; 5' sequence and inner sequence

SEQ ID NO: 21198 - DNA, 53 bp, Artificial Sequence; identical to SEQ ID NO: 1118
  Description of Artificial Sequence: Synthetic pecan; 5' sequence and inner sequence

SEQ ID NO: 21199 - DNA, 53 bp, Artificial Sequence; identical to SEQ ID NO: 9712
  Description of Artificial Sequence: Synthetic pecan; 5' sequence and inner sequence

SEQ ID NO: 21200 - DNA, 53 bp, Artificial Sequence; identical to SEQ ID NO: 1900
  Description of Artificial Sequence: Synthetic pecan; 5' sequence and inner sequence

SEQ ID NO: 21201 - DNA, 53 bp, Artificial Sequence; identical to SEQ ID NO: 1267
  Description of Artificial Sequence: Synthetic pecan; 5' sequence and inner sequence

SEQ ID NO: 21202 - DNA, 53 bp, Artificial Sequence; identical to SEQ ID NO: 1203
  Description of Artificial Sequence: Synthetic pecan; 5' sequence and inner sequence

SEQ ID NO: 21203 - DNA, 53 bp, Artificial Sequence; identical to SEQ ID NO: 13958
  Description of Artificial Sequence: Synthetic pecan; 5' sequence and inner sequence

SEQ ID NO: 21204 - DNA, 53 bp, Artificial Sequence; identical to SEQ ID NO: 1095
  Description of Artificial Sequence: Synthetic pecan; 5' sequence and inner sequence

SEQ ID NO: 21205 - DNA, 53 bp, Artificial Sequence; identical to SEQ ID NO: 1204
  Description of Artificial Sequence: Synthetic pecan; 5' sequence and inner sequence

SEQ ID NO: 21206 - DNA, 53 bp, Artificial Sequence; identical to SEQ ID NO: 9627
  Description of Artificial Sequence: Synthetic pecan; 5' sequence and inner sequence

SEQ ID NO: 21207 - DNA, 53 bp, Artificial Sequence; identical to SEQ ID NO: 1485
  Description of Artificial Sequence: Synthetic pecan; 5' sequence and inner sequence

SEQ ID NO: 21208 - DNA, 53 bp, Artificial Sequence; identical to SEQ ID NO: 1768
  Description of Artificial Sequence: Synthetic pecan; 5' sequence and inner sequence

SEQ ID NO: 21209 - DNA, 53 bp, Artificial Sequence; identical to SEQ ID NO: 1559
  Description of Artificial Sequence: Synthetic pecan; 5' sequence and inner sequence

SEQ ID NO: 21210 - DNA, 53 bp, Artificial Sequence; identical to SEQ ID NO: 1390
  Description of Artificial Sequence: Synthetic pecan; 5' sequence and inner sequence

SEQ ID NO: 21211 - DNA, 53 bp, Artificial Sequence; identical to SEQ ID NO: 1065
  Description of Artificial Sequence: Synthetic pecan; 5' sequence and inner sequence

SEQ ID NO: 21212 - DNA, 53 bp, Artificial Sequence; identical to SEQ ID NO: 5748
  Description of Artificial Sequence: Synthetic pecan; 5' sequence and inner sequence

SEQ ID NO: 21213 - DNA, 53 bp, Artificial Sequence; identical to SEQ ID NO: 1105
  Description of Artificial Sequence: Synthetic pecan; 5' sequence and inner sequence

SEQ ID NO: 21214 - DNA, 52 bp, Artificial Sequence; identical to SEQ ID NO: 1251
  Description of Artificial Sequence: Synthetic pecan; 5' sequence and inner sequence

SEQ ID NO: 21215 - DNA, 53 bp, Artificial Sequence; identical to SEQ ID NO: 1282
  Description of Artificial Sequence: Synthetic pecan; 5' sequence and inner sequence

SEQ ID NO: 21216 - DNA, 53 bp, Artificial Sequence; identical to SEQ ID NO: 1628
  Description of Artificial Sequence: Synthetic pecan; 5' sequence and inner sequence

SEQ ID NO: 21217 - DNA, 53 bp, Artificial Sequence; identical to SEQ ID NO: 1442
  Description of Artificial Sequence: Synthetic pecan; 5' sequence and inner sequence

SEQ ID NO: 21218 - DNA, 53 bp, Artificial Sequence; identical to SEQ ID NO: 1696
  Description of Artificial Sequence: Synthetic pecan; 5' sequence and inner sequence

SEQ ID NO: 21219 - DNA, 53 bp, Artificial Sequence; identical to SEQ ID NO: 1137
  Description of Artificial Sequence: Synthetic pecan; 5' sequence and inner sequence

SEQ ID NO: 21220 - DNA, 53 bp, Artificial Sequence; identical to SEQ ID NO: 5603
  Description of Artificial Sequence: Synthetic pecan; 5' sequence and inner sequence

SEQ ID NO: 21221 - DNA, 53 bp, Artificial Sequence; identical to SEQ ID NO: 1359
  Description of Artificial Sequence: Synthetic pecan; 5' sequence and inner sequence

SEQ ID NO: 21222 - DNA, 53 bp, Artificial Sequence; identical to SEQ ID NO: 1097
  Description of Artificial Sequence: Synthetic pecan; 5' sequence and inner sequence

SEQ ID NO: 21223 - DNA, 53 bp, Artificial Sequence; identical to SEQ ID NO: 1317
  Description of Artificial Sequence: Synthetic pecan; 5' sequence and inner sequence

SEQ ID NO: 21224 - DNA, 49 bp, Artificial Sequence; identical to SEQ ID NO: 1893
  Description of Artificial Sequence: Synthetic pecan; 5' sequence and inner sequence

SEQ ID NO: 21225 - DNA, 53 bp, Artificial Sequence; identical to SEQ ID NO: 1277
  Description of Artificial Sequence: Synthetic pecan; 5' sequence and inner sequence

SEQ ID NO: 21226 - DNA, 53 bp, Artificial Sequence
  Description of Artificial Sequence: Synthetic pecan; 5' sequence and inner sequence
tagggaagagaaggacatatgatggcatgcacgcacctacatgtgggtatgga

SEQ ID NO: 21227 - DNA, 53 bp, Artificial Sequence
  Description of Artificial Sequence: Synthetic pecan; 5' sequence and inner sequence
tagggaagagaaggacatatgatccgatcgcacgtcaaggcaggctgtacgtg

SEQ ID NO: 21228 - DNA, 53 bp, Artificial Sequence; identical to SEQ ID NO: 1595
  Description of Artificial Sequence: Synthetic pecan; 5' sequence and inner sequence

SEQ ID NO: 21229 - DNA, 53 bp, Artificial Sequence
  Description of Artificial Sequence: Synthetic pecan; 5' sequence and inner sequence
tagggaagagaaggacatatgatggacgcagcttgcctactggtggtcacgtg

SEQ ID NO: 21230 - DNA, 53 bp, Artificial Sequence; identical to SEQ ID NO: 1079
  Description of Artificial Sequence: Synthetic pecan; 5' sequence and inner sequence

SEQ ID NO: 21231 - DNA, 53 bp, Artificial Sequence; identical to SEQ ID NO: 1103
  Description of Artificial Sequence: Synthetic pecan; 5' sequence and inner sequence

SEQ ID NO: 21232 - DNA, 53 bp, Artificial Sequence; identical to SEQ ID NO: 1089
  Description of Artificial Sequence: Synthetic pecan; 5' sequence and inner sequence

SEQ ID NO: 21233 - DNA, 53 bp, Artificial Sequence
  Description of Artificial Sequence: Synthetic pecan; 5' sequence and inner sequence
tagggaagagaaggacatatgatgcacgactcgcaccctataatgaggccatg

SEQ ID NO: 21234 - DNA, 53 bp, Artificial Sequence; identical to SEQ ID NO: 1634
  Description of Artificial Sequence: Synthetic pecan; 5' sequence and inner sequence

SEQ ID NO: 21235 - DNA, 53 bp, Artificial Sequence; identical to SEQ ID NO: 1256
  Description of Artificial Sequence: Synthetic pecan; 5' sequence and inner sequence

SEQ ID NO: 21236 - DNA, 53 bp, Artificial Sequence; identical to SEQ ID NO: 13892
  Description of Artificial Sequence: Synthetic pecan; 5' sequence and inner sequence

SEQ ID NO: 21237 - DNA, 53 bp, Artificial Sequence; identical to SEQ ID NO: 1135
  Description of Artificial Sequence: Synthetic pecan; 5' sequence and inner sequence

SEQ ID NO: 21238 - DNA, 53 bp, Artificial Sequence
  Description of Artificial Sequence: Synthetic pecan; 5' sequence and inner sequence
tagggaagagaaggacatatgatggcgcgaacggaccgacaagtgcgcatgga

SEQ ID NO: 21239 - DNA, 53 bp, Artificial Sequence; identical to SEQ ID NO: 1463
  Description of Artificial Sequence: Synthetic pecan; 5' sequence and inner sequence

SEQ ID NO: 21240 - DNA, 53 bp, Artificial Sequence; identical to SEQ ID NO: 1789
  Description of Artificial Sequence: Synthetic pecan; 5' sequence and inner sequence

SEQ ID NO: 21241 - DNA, 53 bp, Artificial Sequence; identical to SEQ ID NO: 9985
  Description of Artificial Sequence: Synthetic pecan; 5' sequence and inner sequence

SEQ ID NO: 21242 - DNA, 53 bp, Artificial Sequence; identical to SEQ ID NO: 1186
  Description of Artificial Sequence: Synthetic pecan; 5' sequence and inner sequence

SEQ ID NO: 21243 - DNA, 53 bp, Artificial Sequence; identical to SEQ ID NO: 1094
  Description of Artificial Sequence: Synthetic pecan; 5' sequence and inner sequence

SEQ ID NO: 21244 - DNA, 53 bp, Artificial Sequence; identical to SEQ ID NO: 1599
  Description of Artificial Sequence: Synthetic pecan; 5' sequence and inner sequence

SEQ ID NO: 21245 - DNA, 53 bp, Artificial Sequence; identical to SEQ ID NO: 1266
  Description of Artificial Sequence: Synthetic pecan; 5' sequence and inner sequence

SEQ ID NO: 21246 - DNA, 53 bp, Artificial Sequence; identical to SEQ ID NO: 13997
  Description of Artificial Sequence: Synthetic pecan; 5' sequence and inner sequence

SEQ ID NO: 21247 - DNA, 53 bp, Artificial Sequence; identical to SEQ ID NO: 1088
  Description of Artificial Sequence: Synthetic pecan; 5' sequence and inner sequence

SEQ ID NO: 21248 - DNA, 53 bp, Artificial Sequence; identical to SEQ ID NO: 1244
  Description of Artificial Sequence: Synthetic pecan; 5' sequence and inner sequence

SEQ ID NO: 21249 - DNA, 53 bp, Artificial Sequence; identical to SEQ ID NO: 1467
  Description of Artificial Sequence: Synthetic pecan; 5' sequence and inner sequence

SEQ ID NO: 21250 - DNA, 53 bp, Artificial Sequence; identical to SEQ ID NO: 1998
  Description of Artificial Sequence: Synthetic pecan; 5' sequence and inner sequence

SEQ ID NO: 21251 - DNA, 53 bp, Artificial Sequence; identical to SEQ ID NO: 1611
  Description of Artificial Sequence: Synthetic pecan; 5' sequence and inner sequence

SEQ ID NO: 21252 - DNA, 53 bp, Artificial Sequence; identical to SEQ ID NO: 1360
  Description of Artificial Sequence: Synthetic pecan; 5' sequence and inner sequence

SEQ ID NO: 21253 - DNA, 53 bp, Artificial Sequence; identical to SEQ ID NO: 1354
  Description of Artificial Sequence: Synthetic pecan; 5' sequence and inner sequence

SEQ ID NO: 21254 - DNA, 53 bp, Artificial Sequence; identical to SEQ ID NO: 6001
  Description of Artificial Sequence: Synthetic pecan; 5' sequence and inner sequence

SEQ ID NO: 21255 - DNA, 53 bp, Artificial Sequence; identical to SEQ ID NO: 1637
  Description of Artificial Sequence: Synthetic pecan; 5' sequence and inner sequence

SEQ ID NO: 21256 - DNA, 49 bp, Artificial Sequence; identical to SEQ ID NO: 1822
  Description of Artificial Sequence: Synthetic pecan; 5' sequence and inner sequence

SEQ ID NO: 21257 - DNA, 53 bp, Artificial Sequence; identical to SEQ ID NO: 13985
  Description of Artificial Sequence: Synthetic pecan; 5' sequence and inner sequence

SEQ ID NO: 21258 - DNA, 53 bp, Artificial Sequence; identical to SEQ ID NO: 1236
  Description of Artificial Sequence: Synthetic pecan; 5' sequence and inner sequence

SEQ ID NO: 21259 - DNA, 53 bp, Artificial Sequence; identical to SEQ ID NO: 5802
  Description of Artificial Sequence: Synthetic pecan; 5' sequence and inner sequence

SEQ ID NO: 21260 - DNA, 53 bp, Artificial Sequence; identical to SEQ ID NO: 1242
  Description of Artificial Sequence: Synthetic pecan; 5' sequence and inner sequence

SEQ ID NO: 21261 - DNA, 53 bp, Artificial Sequence; identical to SEQ ID NO: 1509
  Description of Artificial Sequence: Synthetic pecan; 5' sequence and inner sequence

SEQ ID NO: 21262 - DNA, 53 bp, Artificial Sequence; identical to SEQ ID NO: 9928
  Description of Artificial Sequence: Synthetic pecan; 5' sequence and inner sequence

SEQ ID NO: 21263 - DNA, 52 bp, Artificial Sequence; identical to SEQ ID NO: 5869
  Description of Artificial Sequence: Synthetic pecan; 5' sequence and inner sequence

SEQ ID NO: 21264 - DNA, 53 bp, Artificial Sequence; identical to SEQ ID NO: 1158
  Description of Artificial Sequence: Synthetic pecan; 5' sequence and inner sequence

SEQ ID NO: 21265 - DNA, 53 bp, Artificial Sequence; identical to SEQ ID NO: 1429
  Description of Artificial Sequence: Synthetic pecan; 5' sequence and inner sequence

SEQ ID NO: 21266 - DNA, 53 bp, Artificial Sequence; identical to SEQ ID NO: 1367
  Description of Artificial Sequence: Synthetic pecan; 5' sequence and inner sequence

SEQ ID NO: 21267 - DNA, 53 bp, Artificial Sequence; identical to SEQ ID NO: 1362
  Description of Artificial Sequence: Synthetic pecan; 5' sequence and inner sequence

SEQ ID NO: 21268 - DNA, 53 bp, Artificial Sequence; identical to SEQ ID NO: 1044
  Description of Artificial Sequence: Synthetic pecan; 5' sequence and inner sequence

SEQ ID NO: 21269 - DNA, 53 bp, Artificial Sequence
  Description of Artificial Sequence: Synthetic pecan; 5' sequence and inner sequence
tagggaagagaaggacatatgatccgcacgtagacctatcagtggtgcatgca

SEQ ID NO: 21270 - DNA, 53 bp, Artificial Sequence; identical to SEQ ID NO: 1024
  Description of Artificial Sequence: Synthetic pecan; 5' sequence and inner sequence

SEQ ID NO: 21271 - DNA, 53 bp, Artificial Sequence; identical to SEQ ID NO: 5638
  Description of Artificial Sequence: Synthetic pecan; 5' sequence and inner sequence

SEQ ID NO: 21272 - DNA, 53 bp, Artificial Sequence; identical to SEQ ID NO: 1324
  Description of Artificial Sequence: Synthetic pecan; 5' sequence and inner sequence

SEQ ID NO: 21273 - DNA, 53 bp, Artificial Sequence; identical to SEQ ID NO: 1407
  Description of Artificial Sequence: Synthetic pecan; 5' sequence and inner sequence

SEQ ID NO: 21274 - DNA, 53 bp, Artificial Sequence; identical to SEQ ID NO: 1783
  Description of Artificial Sequence: Synthetic pecan; 5' sequence and inner sequence

SEQ ID NO: 21275 - DNA, 53 bp, Artificial Sequence; identical to SEQ ID NO: 1320
  Description of Artificial Sequence: Synthetic pecan; 5' sequence and inner sequence

SEQ ID NO: 21276 - DNA, 53 bp, Artificial Sequence; identical to SEQ ID NO: 5988
  Description of Artificial Sequence: Synthetic pecan; 5' sequence and inner sequence

SEQ ID NO: 21277 - DNA, 48 bp, Artificial Sequence; identical to SEQ ID NO: 17927
  Description of Artificial Sequence: Synthetic pecan; 5' sequence and inner sequence

SEQ ID NO: 21278 - DNA, 53 bp, Artificial Sequence; identical to SEQ ID NO: 1291
  Description of Artificial Sequence: Synthetic pecan; 5' sequence and inner sequence

SEQ ID NO: 21279 - DNA, 53 bp, Artificial Sequence; identical to SEQ ID NO: 1082
  Description of Artificial Sequence: Synthetic pecan; 5' sequence and inner sequence

SEQ ID NO: 21280 - DNA, 53 bp, Artificial Sequence; identical to SEQ ID NO: 1183
  Description of Artificial Sequence: Synthetic pecan; 5' sequence and inner sequence

SEQ ID NO: 21281 - DNA, 53 bp, Artificial Sequence; identical to SEQ ID NO: 5837
  Description of Artificial Sequence: Synthetic pecan; 5' sequence and inner sequence

SEQ ID NO: 21282 - DNA, 53 bp, Artificial Sequence; identical to SEQ ID NO: 5911
  Description of Artificial Sequence: Synthetic pecan; 5' sequence and inner sequence

SEQ ID NO: 21283 - DNA, 53 bp, Artificial Sequence
  Description of Artificial Sequence: Synthetic pecan; 5' sequence and inner sequence
tagggaagagaaggacatatgatggacgcagcttgcctactcgtggtcacgta

SEQ ID NO: 21284 - DNA, 53 bp, Artificial Sequence; identical to SEQ ID NO: 1420
  Description of Artificial Sequence: Synthetic pecan; 5' sequence and inner sequence

SEQ ID NO: 21285 - DNA, 53 bp, Artificial Sequence; identical to SEQ ID NO: 1662
  Description of Artificial Sequence: Synthetic pecan; 5' sequence and inner sequence

SEQ ID NO: 21286 - DNA, 53 bp, Artificial Sequence
  Description of Artificial Sequence: Synthetic pecan; 5' sequence and inner sequence
tagggaagagaaggacatatgatccgcacgtcgccctatcagtggtgcatgca

SEQ ID NO: 21287 - DNA, 52 bp, Artificial Sequence
  Description of Artificial Sequence: Synthetic pecan; 5' sequence and inner sequence
tagggaagagaaggacatatgatgcacgccgatgccctcatgtggccgtggc

SEQ ID NO: 21288 - DNA, 56 bp, Artificial Sequence; identical to SEQ ID NO: 1864
  Description of Artificial Sequence: Synthetic pecan; 5' sequence and inner sequence

SEQ ID NO: 21289 - DNA, 53 bp, Artificial Sequence
  Description of Artificial Sequence: Synthetic pecan; 5' sequence and inner sequence
tagggaagagaaggacatatgatggcatgcacgcacctacacgtggacgtgga

SEQ ID NO: 21290 - DNA, 53 bp, Artificial Sequence; identical to SEQ ID NO: 1816
  Description of Artificial Sequence: Synthetic pecan; 5' sequence and inner sequence

SEQ ID NO: 21291 - DNA, 53 bp, Artificial Sequence; identical to SEQ ID NO: 1399
  Description of Artificial Sequence: Synthetic pecan; 5' sequence and inner sequence

SEQ ID NO: 21292 - DNA, 53 bp, Artificial Sequence; identical to SEQ ID NO: 5377
  Description of Artificial Sequence: Synthetic pecan; 5' sequence and inner sequence

SEQ ID NO: 21293 - DNA, 53 bp, Artificial Sequence; identical to SEQ ID NO: 1576
  Description of Artificial Sequence: Synthetic pecan; 5' sequence and inner sequence

SEQ ID NO: 21294 - DNA, 53 bp, Artificial Sequence; identical to SEQ ID NO: 1543
  Description of Artificial Sequence: Synthetic pecan; 5' sequence and inner sequence

SEQ ID NO: 21295 - DNA, 53 bp, Artificial Sequence
  Description of Artificial Sequence: Synthetic pecan; 5' sequence and inner sequence
tagggaagagaaggacatatgatggcacaaacggaccgacaagtgcgcatgca

SEQ ID NO: 21296 - DNA, 53 bp, Artificial Sequence; identical to SEQ ID NO: 1248
  Description of Artificial Sequence: Synthetic pecan; 5' sequence and inner sequence

SEQ ID NO: 21297 - DNA, 53 bp, Artificial Sequence; identical to SEQ ID NO: 1288
  Description of Artificial Sequence: Synthetic pecan; 5' sequence and inner sequence

SEQ ID NO: 21298 - DNA, 53 bp, Artificial Sequence; identical to SEQ ID NO: 1019
  Description of Artificial Sequence: Synthetic pecan; 5' sequence and inner sequence

SEQ ID NO: 21299 - DNA, 53 bp, Artificial Sequence; identical to SEQ ID NO: 1950
  Description of Artificial Sequence: Synthetic pecan; 5' sequence and inner sequence

SEQ ID NO: 21300 - DNA, 53 bp, Artificial Sequence; identical to SEQ ID NO: 5317
  Description of Artificial Sequence: Synthetic pecan; 5' sequence and inner sequence

SEQ ID NO: 21301 - DNA, 53 bp, Artificial Sequence; identical to SEQ ID NO: 5312
  Description of Artificial Sequence: Synthetic pecan; 5' sequence and inner sequence

SEQ ID NO: 21302 - DNA, 53 bp, Artificial Sequence
  Description of Artificial Sequence: Synthetic pecan; 5' sequence and inner sequence
tagggaagagaaggacatatgatggccacagcgcacctcaacgtggacgtgca

SEQ ID NO: 21303 - DNA, 53 bp, Artificial Sequence; identical to SEQ ID NO: 5807
  Description of Artificial Sequence: Synthetic pecan; 5' sequence and inner sequence

SEQ ID NO: 21304 - DNA, 54 bp, Artificial Sequence; identical to SEQ ID NO: 5434
  Description of Artificial Sequence: Synthetic pecan; 5' sequence and inner sequence

SEQ ID NO: 21305 - DNA, 53 bp, Artificial Sequence; identical to SEQ ID NO: 1230
  Description of Artificial Sequence: Synthetic pecan; 5' sequence and inner sequence

SEQ ID NO: 21306 - DNA, 53 bp, Artificial Sequence; identical to SEQ ID NO: 1477
  Description of Artificial Sequence: Synthetic pecan; 5' sequence and inner sequence

SEQ ID NO: 21307 - DNA, 53 bp, Artificial Sequence
  Description of Artificial Sequence: Synthetic pecan; 5' sequence and inner sequence
tagggaagagaaggacatatgatggccacagcgtacctcaatgtggacgtgca

SEQ ID NO: 21308 - DNA, 53 bp, Artificial Sequence; identical to SEQ ID NO: 5918
  Description of Artificial Sequence: Synthetic pecan; 5' sequence and inner sequence

SEQ ID NO: 21309 - DNA, 53 bp, Artificial Sequence; identical to SEQ ID NO: 13773
  Description of Artificial Sequence: Synthetic pecan; 5' sequence and inner sequence

SEQ ID NO: 21310 - DNA, 53 bp, Artificial Sequence; identical to SEQ ID NO: 1106
  Description of Artificial Sequence: Synthetic pecan; 5' sequence and inner sequence

SEQ ID NO: 21311 - DNA, 53 bp, Artificial Sequence; identical to SEQ ID NO: 1122
  Description of Artificial Sequence: Synthetic pecan; 5' sequence and inner sequence

SEQ ID NO: 21312 - DNA, 53 bp, Artificial Sequence
  Description of Artificial Sequence: Synthetic pecan; 5' sequence and inner sequence
tagggaagagaaggacatatgatccgatcgcacgtcaagtcaggctgtacgag

SEQ ID NO: 21313 - DNA, 53 bp, Artificial Sequence; identical to SEQ ID NO: 1303
  Description of Artificial Sequence: Synthetic pecan; 5' sequence and inner sequence

SEQ ID NO: 21314 - DNA, 53 bp, Artificial Sequence; identical to SEQ ID NO: 1091
  Description of Artificial Sequence: Synthetic pecan; 5' sequence and inner sequence

SEQ ID NO: 21315 - DNA, 53 bp, Artificial Sequence; identical to SEQ ID NO: 1619
  Description of Artificial Sequence: Synthetic pecan; 5' sequence and inner sequence

SEQ ID NO: 21316 - DNA, 53 bp, Artificial Sequence; identical to SEQ ID NO: 5890
  Description of Artificial Sequence: Synthetic pecan; 5' sequence and inner sequence

SEQ ID NO: 21317 - DNA, 53 bp, Artificial Sequence; identical to SEQ ID NO: 1293
  Description of Artificial Sequence: Synthetic pecan; 5' sequence and inner sequence

SEQ ID NO: 21318 - DNA, 53 bp, Artificial Sequence; identical to SEQ ID NO: 9782
  Description of Artificial Sequence: Synthetic pecan; 5' sequence and inner sequence

SEQ ID NO: 21319 - DNA, 53 bp, Artificial Sequence; identical to SEQ ID NO: 1397
  Description of Artificial Sequence: Synthetic pecan; 5' sequence and inner sequence

SEQ ID NO: 21320 - DNA, 53 bp, Artificial Sequence; identical to SEQ ID NO: 1253
  Description of Artificial Sequence: Synthetic pecan; 5' sequence and inner sequence

SEQ ID NO: 21321 - DNA, 51 bp, Artificial Sequence
  Description of Artificial Sequence: Synthetic pecan; 5' sequence and inner sequence
tagggaagagaaggacatatgatgcacgactcgcaccctatcatgcggtca

SEQ ID NO: 21322 - DNA, 53 bp, Artificial Sequence; identical to SEQ ID NO: 1707
  Description of Artificial Sequence: Synthetic pecan; 5' sequence and inner sequence

SEQ ID NO: 21323 - DNA, 53 bp, Artificial Sequence; identical to SEQ ID NO: 1409
  Description of Artificial Sequence: Synthetic pecan; 5' sequence and inner sequence

SEQ ID NO: 21324 - DNA, 53 bp, Artificial Sequence
  Description of Artificial Sequence: Synthetic pecan; 5' sequence and inner sequence
tagggaagagaaggacatatgatggcatgcacgcacctacacgtggtcacgta

SEQ ID NO: 21325 - DNA, 53 bp, Artificial Sequence; identical to SEQ ID NO: 5667
  Description of Artificial Sequence: Synthetic pecan; 5' sequence and inner sequence

SEQ ID NO: 21326 - DNA, 53 bp, Artificial Sequence; identical to SEQ ID NO: 1146
  Description of Artificial Sequence: Synthetic pecan; 5' sequence and inner sequence

SEQ ID NO: 21327 - DNA, 53 bp, Artificial Sequence
  Description of Artificial Sequence: Synthetic pecan; 5' sequence and inner sequence
tagggaagagaaggacatatgatggcacaaactgaccgacaagtgcgcatgga

SEQ ID NO: 21328 - DNA, 51 bp, Artificial Sequence
  Description of Artificial Sequence: Synthetic pecan; 5' sequence and inner sequence
tagggaagagaaggacatatgatggacgcagcttgcctactggtggtcacg

SEQ ID NO: 21329 - DNA, 53 bp, Artificial Sequence; identical to SEQ ID NO: 1603
  Description of Artificial Sequence: Synthetic pecan; 5' sequence and inner sequence

SEQ ID NO: 21330 - DNA, 53 bp, Artificial Sequence; identical to SEQ ID NO: 1281
  Description of Artificial Sequence: Synthetic pecan; 5' sequence and inner sequence

SEQ ID NO: 21331 - DNA, 53 bp, Artificial Sequence
  Description of Artificial Sequence: Synthetic pecan; 5' sequence and inner sequence
tagggaagagaaggacatatgatccgcacgtagccctatcagtggtgtatgca

SEQ ID NO: 21332 - DNA, 53 bp, Artificial Sequence
  Description of Artificial Sequence: Synthetic pecan; 5' sequence and inner sequence
tagggaagagaaggacatatgatggacgcagcggaacgttcgagtggtacgca

SEQ ID NO: 21333 - DNA, 53 bp, Artificial Sequence; identical to SEQ ID NO: 9798
  Description of Artificial Sequence: Synthetic pecan; 5' sequence and inner sequence

SEQ ID NO: 21334 - DNA, 53 bp, Artificial Sequence; identical to SEQ ID NO: 1332
  Description of Artificial Sequence: Synthetic pecan; 5' sequence and inner sequence

SEQ ID NO: 21335 - DNA, 53 bp, Artificial Sequence
  Description of Artificial Sequence: Synthetic pecan; 5' sequence and inner sequence
tagggaagagaaggacatatgatggacgccgcttgcctactggtggtcacgta

SEQ ID NO: 21336 - DNA, 53 bp, Artificial Sequence; identical to SEQ ID NO: 1389
  Description of Artificial Sequence: Synthetic pecan; 5' sequence and inner sequence

SEQ ID NO: 21337 - DNA, 53 bp, Artificial Sequence; identical to SEQ ID NO: 1036
  Description of Artificial Sequence: Synthetic pecan; 5' sequence and inner sequence

SEQ ID NO: 21338 - DNA, 53 bp, Artificial Sequence; identical to SEQ ID NO: 1661
  Description of Artificial Sequence: Synthetic pecan; 5' sequence and inner sequence

SEQ ID NO: 21339 - DNA, 53 bp, Artificial Sequence
  Description of Artificial Sequence: Synthetic pecan; 5' sequence and inner sequence
tagggaagagaaggacatatgatccgcacgtagccatatcagtggtgcatgca

SEQ ID NO: 21340 - DNA, 53 bp, Artificial Sequence; identical to SEQ ID NO: 1561
  Description of Artificial Sequence: Synthetic pecan; 5' sequence and inner sequence

SEQ ID NO: 21341 - DNA, 53 bp, Artificial Sequence
  Description of Artificial Sequence: Synthetic pecan; 5' sequence and inner sequence
tagggaagagaaggacatatgatgcacgactcgcaccctatgatgaggccatg

SEQ ID NO: 21342 - DNA, 53 bp, Artificial Sequence; identical to SEQ ID NO: 5504
  Description of Artificial Sequence: Synthetic pecan; 5' sequence and inner sequence

SEQ ID NO: 21343 - DNA, 53 bp, Artificial Sequence
  Description of Artificial Sequence: Synthetic pecan; 5' sequence and inner sequence
tagggaagagaaggacatatgatgcactgcacgcacctacacgtgggtatgga

SEQ ID NO: 21344 - DNA, 53 bp, Artificial Sequence; identical to SEQ ID NO: 1468
  Description of Artificial Sequence: Synthetic pecan; 5' sequence and inner sequence

SEQ ID NO: 21345 - DNA, 53 bp, Artificial Sequence; identical to SEQ ID NO: 1560
  Description of Artificial Sequence: Synthetic pecan; 5' sequence and inner sequence

SEQ ID NO: 21346 - DNA, 53 bp, Artificial Sequence
  Description of Artificial Sequence: Synthetic pecan; 5' sequence and inner sequence
tagggaagagaaggacatatgatggacgcagcttgcctactggtggacacgta

SEQ ID NO: 21347 - DNA, 53 bp, Artificial Sequence; identical to SEQ ID NO: 1780
  Description of Artificial Sequence: Synthetic pecan; 5' sequence and inner sequence

SEQ ID NO: 21348 - DNA, 53 bp, Artificial Sequence; identical to SEQ ID NO: 1678
  Description of Artificial Sequence: Synthetic pecan; 5' sequence and inner sequence

SEQ ID NO: 21349 - DNA, 53 bp, Artificial Sequence; identical to SEQ ID NO: 9936
  Description of Artificial Sequence: Synthetic pecan; 5' sequence and inner sequence

SEQ ID NO: 21350 - DNA, 53 bp, Artificial Sequence; identical to SEQ ID NO: 1355
  Description of Artificial Sequence: Synthetic pecan; 5' sequence and inner sequence

SEQ ID NO: 21351 - DNA, 53 bp, Artificial Sequence; identical to SEQ ID NO: 1379
  Description of Artificial Sequence: Synthetic pecan; 5' sequence and inner sequence

SEQ ID NO: 21352 - DNA, 53 bp, Artificial Sequence; identical to SEQ ID NO: 1860
  Description of Artificial Sequence: Synthetic pecan; 5' sequence and inner sequence

SEQ ID NO: 21353 - DNA, 53 bp, Artificial Sequence
  Description of Artificial Sequence: Synthetic pecan; 5' sequence and inner sequence
tagggaagagaaggacatatgatccgtagcgacattaagcggtggtgtgcgtg

SEQ ID NO: 21354 - DNA, 53 bp, Artificial Sequence; identical to SEQ ID NO: 1493
  Description of Artificial Sequence: Synthetic pecan; 5' sequence and inner sequence

SEQ ID NO: 21355 - DNA, 53 bp, Artificial Sequence; identical to SEQ ID NO: 1881
  Description of Artificial Sequence: Synthetic pecan; 5' sequence and inner sequence

SEQ ID NO: 21356 - DNA, 53 bp, Artificial Sequence; identical to SEQ ID NO: 1147
  Description of Artificial Sequence: Synthetic pecan; 5' sequence and inner sequence

SEQ ID NO: 21357 - DNA, 53 bp, Artificial Sequence; identical to SEQ ID NO: 9810
  Description of Artificial Sequence: Synthetic pecan; 5' sequence and inner sequence

SEQ ID NO: 21358 - DNA, 53 bp, Artificial Sequence; identical to SEQ ID NO: 1167
  Description of Artificial Sequence: Synthetic pecan; 5' sequence and inner sequence

SEQ ID NO: 21359 - DNA, 53 bp, Artificial Sequence; identical to SEQ ID NO: 1805
  Description of Artificial Sequence: Synthetic pecan; 5' sequence and inner sequence

SEQ ID NO: 21360 - DNA, 53 bp, Artificial Sequence; identical to SEQ ID NO: 1685
  Description of Artificial Sequence: Synthetic pecan; 5' sequence and inner sequence

SEQ ID NO: 21361 - DNA, 53 bp, Artificial Sequence; identical to SEQ ID NO: 9993
  Description of Artificial Sequence: Synthetic pecan; 5' sequence and inner sequence

SEQ ID NO: 21362 - DNA, 53 bp, Artificial Sequence; identical to SEQ ID NO: 1919
  Description of Artificial Sequence: Synthetic pecan; 5' sequence and inner sequence

SEQ ID NO: 21363 - DNA, 53 bp, Artificial Sequence
  Description of Artificial Sequence: Synthetic pecan; 5' sequence and inner sequence
tagggaagagaaggacatatgatgcacgactcgcatcctatcatgaggccatg

SEQ ID NO: 21364 - DNA, 53 bp, Artificial Sequence; identical to SEQ ID NO: 1644
  Description of Artificial Sequence: Synthetic pecan; 5' sequence and inner sequence

SEQ ID NO: 21365 - DNA, 53 bp, Artificial Sequence; identical to SEQ ID NO: 1979
  Description of Artificial Sequence: Synthetic pecan; 5' sequence and inner sequence

SEQ ID NO: 21366 - DNA, 53 bp, Artificial Sequence; identical to SEQ ID NO: 1068
  Description of Artificial Sequence: Synthetic pecan; 5' sequence and inner sequence

SEQ ID NO: 21367 - DNA, 53 bp, Artificial Sequence
  Description of Artificial Sequence: Synthetic pecan; 5' sequence and inner sequence
tagggaagagaaggacatatgatccgtagcgacatcgagcggtggtgtgcgtg

SEQ ID NO: 21368 - DNA, 53 bp, Artificial Sequence; identical to SEQ ID NO: 1727
  Description of Artificial Sequence: Synthetic pecan; 5' sequence and inner sequence

SEQ ID NO: 21369 - DNA, 53 bp, Artificial Sequence; identical to SEQ ID NO: 1326
  Description of Artificial Sequence: Synthetic pecan; 5' sequence and inner sequence

SEQ ID NO: 21370 - DNA, 53 bp, Artificial Sequence; identical to SEQ ID NO: 9801
  Description of Artificial Sequence: Synthetic pecan; 5' sequence and inner sequence

SEQ ID NO: 21371 - DNA, 53 bp, Artificial Sequence
  Description of Artificial Sequence: Synthetic pecan; 5' sequence and inner sequence
tagggaagagaaggacatatgatccgcacgtagccctatcagtggtacatgca

SEQ ID NO: 21372 - DNA, 53 bp, Artificial Sequence
  Description of Artificial Sequence: Synthetic pecan; 5' sequence and inner sequence
tagggaagagaaggacatatgatggccacagcgtacctcaacgcggacgtgca

SEQ ID NO: 21373 - DNA, 53 bp, Artificial Sequence; identical to SEQ ID NO: 1962
  Description of Artificial Sequence: Synthetic pecan; 5' sequence and inner sequence

SEQ ID NO: 21374 - DNA, 53 bp, Artificial Sequence; identical to SEQ ID NO: 1064
  Description of Artificial Sequence: Synthetic pecan; 5' sequence and inner sequence

SEQ ID NO: 21375 - DNA, 53 bp, Artificial Sequence; identical to SEQ ID NO: 9946
  Description of Artificial Sequence: Synthetic pecan; 5' sequence and inner sequence

SEQ ID NO: 21376 - DNA, 53 bp, Artificial Sequence; identical to SEQ ID NO: 5364
  Description of Artificial Sequence: Synthetic pecan; 5' sequence and inner sequence

SEQ ID NO: 21377 - DNA, 53 bp, Artificial Sequence; identical to SEQ ID NO: 9769
  Description of Artificial Sequence: Synthetic pecan; 5' sequence and inner sequence

SEQ ID NO: 21378 - DNA, 53 bp, Artificial Sequence; identical to SEQ ID NO: 1385
  Description of Artificial Sequence: Synthetic pecan; 5' sequence and inner sequence

SEQ ID NO: 21379 - DNA, 53 bp, Artificial Sequence; identical to SEQ ID NO: 5653
  Description of Artificial Sequence: Synthetic pecan; 5' sequence and inner sequence

SEQ ID NO: 21380 - DNA, 53 bp, Artificial Sequence; identical to SEQ ID NO: 5590
  Description of Artificial Sequence: Synthetic pecan; 5' sequence and inner sequence

SEQ ID NO: 21381 - DNA, 53 bp, Artificial Sequence; identical to SEQ ID NO: 1481
  Description of Artificial Sequence: Synthetic pecan; 5' sequence and inner sequence

SEQ ID NO: 21382 - DNA, 53 bp, Artificial Sequence
  Description of Artificial Sequence: Synthetic pecan; 5' sequence and inner sequence
tagggaagagaaggacatatgatggcacaaacggaccgacaattgcgcatgga

SEQ ID NO: 21383 - DNA, 53 bp, Artificial Sequence
  Description of Artificial Sequence: Synthetic pecan; 5' sequence and inner sequence
tagggaagagaaggacatatgatccgcacgtagccctatcaatggtgcatgca

SEQ ID NO: 21384 - DNA, 53 bp, Artificial Sequence; identical to SEQ ID NO: 1540
  Description of Artificial Sequence: Synthetic pecan; 5' sequence and inner sequence

SEQ ID NO: 21385 - DNA, 53 bp, Artificial Sequence
  Description of Artificial Sequence: Synthetic pecan; 5' sequence and inner sequence
tagggaagagaaggacatatgatgcacgacttgcaccctatcatgaggccatg

SEQ ID NO: 21386 - DNA, 53 bp, Artificial Sequence; identical to SEQ ID NO: 1545
  Description of Artificial Sequence: Synthetic pecan; 5' sequence and inner sequence

SEQ ID NO: 21387 - DNA, 53 bp, Artificial Sequence; identical to SEQ ID NO: 1526
  Description of Artificial Sequence: Synthetic pecan; 5' sequence and inner sequence

SEQ ID NO: 21388 - DNA, 53 bp, Artificial Sequence
  Description of Artificial Sequence: Synthetic pecan; 5' sequence and inner sequence
tagggaagagaaggacatatgatccgcacgtagccctataagtggtgcatgca

SEQ ID NO: 21389 - DNA, 53 bp, Artificial Sequence; identical to SEQ ID NO: 5381
  Description of Artificial Sequence: Synthetic pecan; 5' sequence and inner sequence

SEQ ID NO: 21390 - DNA, 53 bp, Artificial Sequence
  Description of Artificial Sequence: Synthetic pecan; 5' sequence and inner sequence
tagggaagagaaggacatatgatccgatcgcacgtcaaggcaggctgtacgac

SEQ ID NO: 21391 - DNA, 53 bp, Artificial Sequence; identical to SEQ ID NO: 1684
  Description of Artificial Sequence: Synthetic pecan; 5' sequence and inner sequence

SEQ ID NO: 21392 - DNA, 53 bp, Artificial Sequence; identical to SEQ ID NO: 1223
  Description of Artificial Sequence: Synthetic pecan; 5' sequence and inner sequence

SEQ ID NO: 21393 - DNA, 53 bp, Artificial Sequence; identical to SEQ ID NO: 5620
  Description of Artificial Sequence: Synthetic pecan; 5' sequence and inner sequence

SEQ ID NO: 21394 - DNA, 53 bp, Artificial Sequence; identical to SEQ ID NO: 1133
  Description of Artificial Sequence: Synthetic pecan; 5' sequence and inner sequence

SEQ ID NO: 21395 - DNA, 53 bp, Artificial Sequence; identical to SEQ ID NO: 1591
  Description of Artificial Sequence: Synthetic pecan; 5' sequence and inner sequence

SEQ ID NO: 21396 - DNA, 53 bp, Artificial Sequence; identical to SEQ ID NO: 1289
  Description of Artificial Sequence: Synthetic pecan; 5' sequence and inner sequence

SEQ ID NO: 21397 - DNA, 53 bp, Artificial Sequence
  Description of Artificial Sequence: Synthetic pecan; 5' sequence and inner sequence
tagggaagagaaggacatatgatggacgcagcttgcctactgggggtcacgta

SEQ ID NO: 21398 - DNA, 53 bp, Artificial Sequence
  Description of Artificial Sequence: Synthetic pecan; 5' sequence and inner sequence
tagggaagagaaggacatatgatggcatgcacgcacctacacgtgggtatgca

SEQ ID NO: 21399 - DNA, 53 bp, Artificial Sequence; identical to SEQ ID NO: 1778
  Description of Artificial Sequence: Synthetic pecan; 5' sequence and inner sequence

SEQ ID NO: 21400 - DNA, 53 bp, Artificial Sequence; identical to SEQ ID NO: 5977
  Description of Artificial Sequence: Synthetic pecan; 5' sequence and inner sequence

SEQ ID NO: 21401 - DNA, 53 bp, Artificial Sequence; identical to SEQ ID NO: 5658
  Description of Artificial Sequence: Synthetic pecan; 5' sequence and inner sequence

SEQ ID NO: 21402 - DNA, 53 bp, Artificial Sequence; identical to SEQ ID NO: 1580
  Description of Artificial Sequence: Synthetic pecan; 5' sequence and inner sequence

SEQ ID NO: 21403 - DNA, 53 bp, Artificial Sequence; identical to SEQ ID NO: 1306
  Description of Artificial Sequence: Synthetic pecan; 5' sequence and inner sequence

SEQ ID NO: 21404 - DNA, 53 bp, Artificial Sequence; identical to SEQ ID NO: 5420
  Description of Artificial Sequence: Synthetic pecan; 5' sequence and inner sequence

SEQ ID NO: 21405 - DNA, 53 bp, Artificial Sequence; identical to SEQ ID NO: 1110
  Description of Artificial Sequence: Synthetic pecan; 5' sequence and inner sequence

SEQ ID NO: 21406 - DNA, 53 bp, Artificial Sequence; identical to SEQ ID NO: 5708
  Description of Artificial Sequence: Synthetic pecan; 5' sequence and inner sequence

SEQ ID NO: 21407 - DNA, 53 bp, Artificial Sequence
  Description of Artificial Sequence: Synthetic pecan; 5' sequence and inner sequence
tagggaagagaaggacatatgatggcacaaacggaccgacaagtgcgcatggc

SEQ ID NO: 21408 - DNA, 53 bp, Artificial Sequence
  Description of Artificial Sequence: Synthetic pecan; 5' sequence and inner sequence
tagggaagagaaggacatatgatggacgcagcttgccgtagggtggcatggga

SEQ ID NO: 21409 - DNA, 53 bp, Artificial Sequence; identical to SEQ ID NO: 5857
  Description of Artificial Sequence: Synthetic pecan; 5' sequence and inner sequence

SEQ ID NO: 21410 - DNA, 53 bp, Artificial Sequence
  Description of Artificial Sequence: Synthetic pecan; 5' sequence and inner sequence
tagggaagagaaggacatatgatccgcacgtagccctctcagtggtgcatgca

SEQ ID NO: 21411 - DNA, 53 bp, Artificial Sequence; identical to SEQ ID NO: 1351
  Description of Artificial Sequence: Synthetic pecan; 5' sequence and inner sequence

SEQ ID NO: 21412 - DNA, 53 bp, Artificial Sequence; identical to SEQ ID NO: 1449
  Description of Artificial Sequence: Synthetic pecan; 5' sequence and inner sequence

SEQ ID NO: 21413 - DNA, 53 bp, Artificial Sequence
  Description of Artificial Sequence: Synthetic pecan; 5' sequence and inner sequence
tagggaagagaaggacatatgatccgcacgtagccctatcagtggtgcattca

SEQ ID NO: 21414 - DNA, 53 bp, Artificial Sequence; identical to SEQ ID NO: 1528
  Description of Artificial Sequence: Synthetic pecan; 5' sequence and inner sequence

SEQ ID NO: 21415 - DNA, 53 bp, Artificial Sequence
  Description of Artificial Sequence: Synthetic pecan; 5' sequence and inner sequence
tagggaagagaaggacatatgatccgtacgtagccctatcagtggtgcatgca

SEQ ID NO: 21416 - DNA, 53 bp, Artificial Sequence; identical to SEQ ID NO: 1498
  Description of Artificial Sequence: Synthetic pecan; 5' sequence and inner sequence

SEQ ID NO: 21417 - DNA, 53 bp, Artificial Sequence
  Description of Artificial Sequence: Synthetic pecan; 5' sequence and inner sequence
tagggaagagaaggacatatgatccatcgcgtcactatcatttgtgtcacgta

SEQ ID NO: 21418 - DNA, 53 bp, Artificial Sequence
  Description of Artificial Sequence: Synthetic pecan; 5' sequence and inner sequence
tagggaagagaaggacatatgatggacgcagcttgcctactggtggttacgta

SEQ ID NO: 21419 - DNA, 53 bp, Artificial Sequence; identical to SEQ ID NO: 1585
  Description of Artificial Sequence: Synthetic pecan; 5' sequence and inner sequence

SEQ ID NO: 21420 - DNA, 53 bp, Artificial Sequence
  Description of Artificial Sequence: Synthetic pecan; 5' sequence and inner sequence
tagggaagagaaggacatatgatggcatgcacgcacctacaagtgggtatgga

SEQ ID NO: 21421 - DNA, 53 bp, Artificial Sequence; identical to SEQ ID NO: 5933
  Description of Artificial Sequence: Synthetic pecan; 5' sequence and inner sequence

SEQ ID NO: 21422 - DNA, 53 bp, Artificial Sequence; identical to SEQ ID NO: 1871
  Description of Artificial Sequence: Synthetic pecan; 5' sequence and inner sequence

SEQ ID NO: 21423 - DNA, 53 bp, Artificial Sequence; identical to SEQ ID NO: 1496
  Description of Artificial Sequence: Synthetic pecan; 5' sequence and inner sequence

SEQ ID NO: 21424 - DNA, 53 bp, Artificial Sequence
  Description of Artificial Sequence: Synthetic pecan; 5' sequence and inner sequence
tagggaagagaaggacatatgatccgcacgtagccctatcagtggtgcacgca

SEQ ID NO: 21425 - DNA, 53 bp, Artificial Sequence; identical to SEQ ID NO: 1200
  Description of Artificial Sequence: Synthetic pecan; 5' sequence and inner sequence

SEQ ID NO: 21426 - DNA, 53 bp, Artificial Sequence
  Description of Artificial Sequence: Synthetic pecan; 5' sequence and inner sequence
tagggaagagaaggacatatgatccatcgcgtcactatcatgtttgtcacgta

SEQ ID NO: 21427 - DNA, 53 bp, Artificial Sequence
  Description of Artificial Sequence: Synthetic pecan; 5' sequence and inner sequence
tagggaagagaaggacatatgatggacgcagcttgcctactggtggtcacgtc

SEQ ID NO: 21428 - DNA, 53 bp, Artificial Sequence
  Description of Artificial Sequence: Synthetic pecan; 5' sequence and inner sequence
tagggaagagaaggacatatgatggcatgcacgtacctacacgtgggtatgga

SEQ ID NO: 21429 - DNA, 53 bp, Artificial Sequence; identical to SEQ ID NO: 1466
  Description of Artificial Sequence: Synthetic pecan; 5' sequence and inner sequence

SEQ ID NO: 21430 - DNA, 53 bp, Artificial Sequence
  Description of Artificial Sequence: Synthetic pecan; 5' sequence and inner sequence
tagggaagagaaggacatatgatccgaacgtagccctatcagtggtgcatgca

SEQ ID NO: 21431 - DNA, 53 bp, Artificial Sequence; identical to SEQ ID NO: 1486
  Description of Artificial Sequence: Synthetic pecan; 5' sequence and inner sequence

SEQ ID NO: 21432 - DNA, 53 bp, Artificial Sequence; identical to SEQ ID NO: 5867
  Description of Artificial Sequence: Synthetic pecan; 5' sequence and inner sequence

SEQ ID NO: 21433 - DNA, 53 bp, Artificial Sequence; identical to SEQ ID NO: 1430
  Description of Artificial Sequence: Synthetic pecan; 5' sequence and inner sequence

SEQ ID NO: 21434 - DNA, 53 bp, Artificial Sequence; identical to SEQ ID NO: 1316
  Description of Artificial Sequence: Synthetic pecan; 5' sequence and inner sequence

SEQ ID NO: 21435 - DNA, 53 bp, Artificial Sequence; identical to SEQ ID NO: 1331
  Description of Artificial Sequence: Synthetic pecan; 5' sequence and inner sequence

SEQ ID NO: 21436 - DNA, 53 bp, Artificial Sequence; identical to SEQ ID NO: 1401
  Description of Artificial Sequence: Synthetic pecan; 5' sequence and inner sequence

SEQ ID NO: 21437 - DNA, 53 bp, Artificial Sequence; identical to SEQ ID NO: 1828
  Description of Artificial Sequence: Synthetic pecan; 5' sequence and inner sequence

SEQ ID NO: 21438 - DNA, 53 bp, Artificial Sequence; identical to SEQ ID NO: 1772
  Description of Artificial Sequence: Synthetic pecan; 5' sequence and inner sequence

SEQ ID NO: 21439 - DNA, 53 bp, Artificial Sequence; identical to SEQ ID NO: 5575
  Description of Artificial Sequence: Synthetic pecan; 5' sequence and inner sequence

SEQ ID NO: 21440 - DNA, 50 bp, Artificial Sequence; identical to SEQ ID NO: 1885
  Description of Artificial Sequence: Synthetic pecan; 5' sequence and inner sequence

SEQ ID NO: 21441 - DNA, 53 bp, Artificial Sequence
  Description of Artificial Sequence: Synthetic pecan; 5' sequence and inner sequence
tagggaagagaaggacatatgatggacgcagcttgcatactggtggtcacgta

SEQ ID NO: 21442 - DNA, 53 bp, Artificial Sequence; identical to SEQ ID NO: 5998
  Description of Artificial Sequence: Synthetic pecan; 5' sequence and inner sequence

SEQ ID NO: 21443 - DNA, 53 bp, Artificial Sequence; identical to SEQ ID NO: 1945
  Description of Artificial Sequence: Synthetic pecan; 5' sequence and inner sequence

SEQ ID NO: 21444 - DNA, 53 bp, Artificial Sequence; identical to SEQ ID NO: 1742
  Description of Artificial Sequence: Synthetic pecan; 5' sequence and inner sequence

SEQ ID NO: 21445 - DNA, 53 bp, Artificial Sequence
  Description of Artificial Sequence: Synthetic pecan; 5' sequence and inner sequence
tagggaagagaaggacatatgatggacgcagcttgcctactagtggtcacgta

SEQ ID NO: 21446 - DNA, 53 bp, Artificial Sequence; identical to SEQ ID NO: 1756
  Description of Artificial Sequence: Synthetic pecan; 5' sequence and inner sequence

SEQ ID NO: 21447 - DNA, 53 bp, Artificial Sequence; identical to SEQ ID NO: 1016
  Description of Artificial Sequence: Synthetic pecan; 5' sequence and inner sequence

SEQ ID NO: 21448 - DNA, 53 bp, Artificial Sequence; identical to SEQ ID NO: 1583
  Description of Artificial Sequence: Synthetic pecan; 5' sequence and inner sequence

SEQ ID NO: 21449 - DNA, 53 bp, Artificial Sequence; identical to SEQ ID NO: 9546
  Description of Artificial Sequence: Synthetic pecan; 5' sequence and inner sequence

SEQ ID NO: 21450 - DNA, 53 bp, Artificial Sequence; identical to SEQ ID NO: 1047
  Description of Artificial Sequence: Synthetic pecan; 5' sequence and inner sequence

SEQ ID NO: 21451 - DNA, 53 bp, Artificial Sequence; identical to SEQ ID NO: 1512
  Description of Artificial Sequence: Synthetic pecan; 5' sequence and inner sequence

SEQ ID NO: 21452 - DNA, 53 bp, Artificial Sequence; identical to SEQ ID NO: 17640
  Description of Artificial Sequence: Synthetic pecan; 5' sequence and inner sequence

SEQ ID NO: 21453 - DNA, 53 bp, Artificial Sequence; identical to SEQ ID NO: 5552
  Description of Artificial Sequence: Synthetic pecan; 5' sequence and inner sequence

SEQ ID NO: 21454 - DNA, 53 bp, Artificial Sequence; identical to SEQ ID NO: 1387
  Description of Artificial Sequence: Synthetic pecan; 5' sequence and inner sequence

SEQ ID NO: 21455 - DNA, 54 bp, Artificial Sequence; identical to SEQ ID NO: 5245
  Description of Artificial Sequence: Synthetic pecan; 5' sequence and inner sequence

SEQ ID NO: 21456 - DNA, 53 bp, Artificial Sequence; identical to SEQ ID NO: 5888
  Description of Artificial Sequence: Synthetic pecan; 5' sequence and inner sequence

SEQ ID NO: 21457 - DNA, 53 bp, Artificial Sequence; identical to SEQ ID NO: 1791
  Description of Artificial Sequence: Synthetic pecan; 5' sequence and inner sequence

SEQ ID NO: 21458 - DNA, 53 bp, Artificial Sequence
  Description of Artificial Sequence: Synthetic pecan; 5' sequence and inner sequence
tagggaagagaaggacatatgatgtgcgcatcgtcccgtcatgtggttccgta

SEQ ID NO: 21459 - DNA, 53 bp, Artificial Sequence; identical to SEQ ID NO: 5743
  Description of Artificial Sequence: Synthetic pecan; 5' sequence and inner sequence

SEQ ID NO: 21460 - DNA, 53 bp, Artificial Sequence; identical to SEQ ID NO: 9949
  Description of Artificial Sequence: Synthetic pecan; 5' sequence and inner sequence

SEQ ID NO: 21461 - DNA, 53 bp, Artificial Sequence; identical to SEQ ID NO: 13936
  Description of Artificial Sequence: Synthetic pecan; 5' sequence and inner sequence

SEQ ID NO: 21462 - DNA, 53 bp, Artificial Sequence
  Description of Artificial Sequence: Synthetic pecan; 5' sequence and inner sequence
tagggaagagaaggacatatgatgcgcctgatgcgtgccgttcaagtgcgcca

SEQ ID NO: 21463 - DNA, 53 bp, Artificial Sequence
  Description of Artificial Sequence: Synthetic pecan; 5' sequence and inner sequence
tagggaagagaaggacatatgatggcatgcacgcacctacacgtggttatgga

SEQ ID NO: 21464 - DNA, 53 bp, Artificial Sequence; identical to SEQ ID NO: 1912
  Description of Artificial Sequence: Synthetic pecan; 5' sequence and inner sequence

SEQ ID NO: 21465 - DNA, 53 bp, Artificial Sequence; identical to SEQ ID NO: 5641
  Description of Artificial Sequence: Synthetic pecan; 5' sequence and inner sequence

SEQ ID NO: 21466 - DNA, 53 bp, Artificial Sequence
  Description of Artificial Sequence: Synthetic pecan; 5' sequence and inner sequence
tagggaagagaaggacatatgatgtacgcatcgtcccgtcatgtggttacgta

SEQ ID NO: 21467 - DNA, 53 bp, Artificial Sequence; identical to SEQ ID NO: 17695
  Description of Artificial Sequence: Synthetic pecan; 5' sequence and inner sequence

SEQ ID NO: 21468 - DNA, 53 bp, Artificial Sequence
  Description of Artificial Sequence: Synthetic pecan; 5' sequence and inner sequence
tagggaagagaaggacatatgatgtcactgtgcctgaccgtcaagttgcgtca

SEQ ID NO: 21469 - DNA, 52 bp, Artificial Sequence
  Description of Artificial Sequence: Synthetic pecan; 5' sequence and inner sequence
tagggaagagaaggacatatgatgcacgccgatgccctcatgtggccgtggt

SEQ ID NO: 21470 - DNA, 53 bp, Artificial Sequence; identical to SEQ ID NO: 1488
  Description of Artificial Sequence: Synthetic pecan; 5' sequence and inner sequence

SEQ ID NO: 21471 - DNA, 53 bp, Artificial Sequence; identical to SEQ ID NO: 1620
  Description of Artificial Sequence: Synthetic pecan; 5' sequence and inner sequence

SEQ ID NO: 21472 - DNA, 53 bp, Artificial Sequence
  Description of Artificial Sequence: Synthetic pecan; 5' sequence and inner sequence
tagggaagagaaggacatatgatggcacaaacggaccgtcaagtgcgcatgga

SEQ ID NO: 21473 - DNA, 53 bp, Artificial Sequence
  Description of Artificial Sequence: Synthetic pecan; 5' sequence and inner sequence
tagggaagagaaggacatatgatggacgcagcgaaccgtacgtggacgtggcg

SEQ ID NO: 21474 - DNA, 53 bp, Artificial Sequence; identical to SEQ ID NO: 1774
  Description of Artificial Sequence: Synthetic pecan; 5' sequence and inner sequence

SEQ ID NO: 21475 - DNA, 53 bp, Artificial Sequence
  Description of Artificial Sequence: Synthetic pecan; 5' sequence and inner sequence
tagggaagagaaggacatatgatccgcacgtagccccatcagtggtgcatgca

SEQ ID NO: 21476 - DNA, 53 bp, Artificial Sequence; identical to SEQ ID NO: 1026
  Description of Artificial Sequence: Synthetic pecan; 5' sequence and inner sequence

SEQ ID NO: 21477 - DNA, 53 bp, Artificial Sequence
  Description of Artificial Sequence: Synthetic pecan; 5' sequence and inner sequence
tagggaagagaaggacatatgatggcacaaacggaacgacaagtgcgcatgga

SEQ ID NO: 21478 - DNA, 53 bp, Artificial Sequence
  Description of Artificial Sequence: Synthetic pecan; 5' sequence and inner sequence
tagggaagagaaggacatatgatgcactgcacgcaccctatcatgttggcatg

SEQ ID NO: 21479 - DNA, 53 bp, Artificial Sequence; identical to SEQ ID NO: 1375
  Description of Artificial Sequence: Synthetic pecan; 5' sequence and inner sequence

SEQ ID NO: 21480 - DNA, 53 bp, Artificial Sequence; identical to SEQ ID NO: 13866
  Description of Artificial Sequence: Synthetic pecan; 5' sequence and inner sequence

SEQ ID NO: 21481 - DNA, 53 bp, Artificial Sequence; identical to SEQ ID NO: 5419
  Description of Artificial Sequence: Synthetic pecan; 5' sequence and inner sequence

SEQ ID NO: 21482 - DNA, 53 bp, Artificial Sequence; identical to SEQ ID NO: 1237
  Description of Artificial Sequence: Synthetic pecan; 5' sequence and inner sequence

SEQ ID NO: 21483 - DNA, 53 bp, Artificial Sequence
  Description of Artificial Sequence: Synthetic pecan; 5' sequence and inner sequence
tagggaagagaaggacatatgatggcacacacggaccgacaagtgcgcatgga

SEQ ID NO: 21484 - DNA, 53 bp, Artificial Sequence; identical to SEQ ID NO: 5893
  Description of Artificial Sequence: Synthetic pecan; 5' sequence and inner sequence

SEQ ID NO: 21485 - DNA, 53 bp, Artificial Sequence
  Description of Artificial Sequence: Synthetic pecan; 5' sequence and inner sequence
tagggaagagaaggacatatgatccgcacgtagccttatcagtggtgcatgca

SEQ ID NO: 21486 - DNA, 53 bp, Artificial Sequence
  Description of Artificial Sequence: Synthetic pecan; 5' sequence and inner sequence
tagggaagagaaggacatatgatgtcactgtgcatgaccgtcaagttgcggca

SEQ ID NO: 21487 - DNA, 53 bp, Artificial Sequence; identical to SEQ ID NO: 5610
  Description of Artificial Sequence: Synthetic pecan; 5' sequence and inner sequence

SEQ ID NO: 21488 - DNA, 53 bp, Artificial Sequence; identical to SEQ ID NO: 1527
  Description of Artificial Sequence: Synthetic pecan; 5' sequence and inner sequence

SEQ ID NO: 21489 - DNA, 53 bp, Artificial Sequence; identical to SEQ ID NO: 5627
  Description of Artificial Sequence: Synthetic pecan; 5' sequence and inner sequence

SEQ ID NO: 21490 - DNA, 53 bp, Artificial Sequence
  Description of Artificial Sequence: Synthetic pecan; 5' sequence and inner sequence
tagggaagagaaggacatatgatccgcacgtagccctatcagtggtgcatgcc

SEQ ID NO: 21491 - DNA, 53 bp, Artificial Sequence; identical to SEQ ID NO: 5776
  Description of Artificial Sequence: Synthetic pecan; 5' sequence and inner sequence

SEQ ID NO: 21492 - DNA, 52 bp, Artificial Sequence; identical to SEQ ID NO: 1873
  Description of Artificial Sequence: Synthetic pecan; 5' sequence and inner sequence

SEQ ID NO: 21493 - DNA, 53 bp, Artificial Sequence; identical to SEQ ID NO: 1386
  Description of Artificial Sequence: Synthetic pecan; 5' sequence and inner sequence

SEQ ID NO: 21494 - DNA, 53 bp, Artificial Sequence; identical to SEQ ID NO: 5898
  Description of Artificial Sequence: Synthetic pecan; 5' sequence and inner sequence

SEQ ID NO: 21495 - DNA, 53 bp, Artificial Sequence
  Description of Artificial Sequence: Synthetic pecan; 5' sequence and inner sequence
tagggaagagaaggacatatgatcgcaccgtacgacaacgtgcttgcgtggcg

SEQ ID NO: 21496 - DNA, 53 bp, Artificial Sequence
  Description of Artificial Sequence: Synthetic pecan; 5' sequence and inner sequence
tagggaagagaaggacatatgatgcacgactcgcaccctatcatgtggccatg

SEQ ID NO: 21497 - DNA, 51 bp, Artificial Sequence; identical to SEQ ID NO: 1423
  Description of Artificial Sequence: Synthetic pecan; 5' sequence and inner sequence

SEQ ID NO: 21498 - DNA, 53 bp, Artificial Sequence
  Description of Artificial Sequence: Synthetic pecan; 5' sequence and inner sequence
tagggaagagaaggacatatgatggacgcagcttgtctactggtggtcacgta

SEQ ID NO: 21499 - DNA, 53 bp, Artificial Sequence; identical to SEQ ID NO: 1270
  Description of Artificial Sequence: Synthetic pecan; 5' sequence and inner sequence

SEQ ID NO: 21500 - DNA, 53 bp, Artificial Sequence; identical to SEQ ID NO: 1754
  Description of Artificial Sequence: Synthetic pecan; 5' sequence and inner sequence

SEQ ID NO: 21501 - DNA, 53 bp, Artificial Sequence
  Description of Artificial Sequence: Synthetic pecan; 5' sequence and inner sequence
tagggaagagaaggacatatgatccgatcgcacgtcaaggcatgctgtacgag

SEQ ID NO: 21502 - DNA, 53 bp, Artificial Sequence
  Description of Artificial Sequence: Synthetic pecan; 5' sequence and inner sequence
tagggaagagaaggacatatgatgcacgactcccaccctatcatgaggccatg

SEQ ID NO: 21503 - DNA, 53 bp, Artificial Sequence; identical to SEQ ID NO: 5943
  Description of Artificial Sequence: Synthetic pecan; 5' sequence and inner sequence

SEQ ID NO: 21504 - DNA, 53 bp, Artificial Sequence
  Description of Artificial Sequence: Synthetic pecan; 5' sequence and inner sequence
tagggaagagaaggacatatgatgtacgcatcgtcacgtcatgtggttccgta

SEQ ID NO: 21505 - DNA, 53 bp, Artificial Sequence; identical to SEQ ID NO: 1452
  Description of Artificial Sequence: Synthetic pecan; 5' sequence and inner sequence

SEQ ID NO: 21506 - DNA, 53 bp, Artificial Sequence
  Description of Artificial Sequence: Synthetic pecan; 5' sequence and inner sequence
tagggaagagaaggacatatgattgacgcagcttgcctactggtggtcacgta

SEQ ID NO: 21507 - DNA, 53 bp, Artificial Sequence
  Description of Artificial Sequence: Synthetic pecan; 5' sequence and inner sequence
tagggaagagaaggacatatgatggccacagcgtacctcaaagtggacgtgca

SEQ ID NO: 21508 - DNA, 53 bp, Artificial Sequence; identical to SEQ ID NO: 1381
  Description of Artificial Sequence: Synthetic pecan; 5' sequence and inner sequence

SEQ ID NO: 21509 - DNA, 53 bp, Artificial Sequence
  Description of Artificial Sequence: Synthetic pecan; 5' sequence and inner sequence
tagggaagagaaggacatatgatggccgcagcggaacgttcgagtggtacgta

SEQ ID NO: 21510 - DNA, 53 bp, Artificial Sequence
  Description of Artificial Sequence: Synthetic pecan; 5' sequence and inner sequence
tagggaagagaaggacatatgatggcacaaacggaccgacaggtgcgcatgga

SEQ ID NO: 21511 - DNA, 53 bp, Artificial Sequence; identical to SEQ ID NO: 1120
  Description of Artificial Sequence: Synthetic pecan; 5' sequence and inner sequence

SEQ ID NO: 21512 - DNA, 53 bp, Artificial Sequence; identical to SEQ ID NO: 1448
  Description of Artificial Sequence: Synthetic pecan; 5' sequence and inner sequence

SEQ ID NO: 21513 - DNA, 53 bp, Artificial Sequence
  Description of Artificial Sequence: Synthetic pecan; 5' sequence and inner sequence
tagggaagagaaggacatatgatggcccaaacggaccgacaagtgcgcatgga

SEQ ID NO: 21514 - DNA, 53 bp, Artificial Sequence
  Description of Artificial Sequence: Synthetic pecan; 5' sequence and inner sequence
tagggaagagaaggacatatgatccgtagcgacgtcaagcggtggtgtgcgtg

SEQ ID NO: 21515 - DNA, 53 bp, Artificial Sequence
  Description of Artificial Sequence: Synthetic pecan; 5' sequence and inner sequence
tagggaagagaaggacatatgatggccacagcgtacctaaacgtggacgtgca

SEQ ID NO: 21516 - DNA, 53 bp, Artificial Sequence; identical to SEQ ID NO: 5810
  Description of Artificial Sequence: Synthetic pecan; 5' sequence and inner sequence

SEQ ID NO: 21517 - DNA, 53 bp, Artificial Sequence; identical to SEQ ID NO: 5921
  Description of Artificial Sequence: Synthetic pecan; 5' sequence and inner sequence

SEQ ID NO: 21518 - DNA, 53 bp, Artificial Sequence
  Description of Artificial Sequence: Synthetic pecan; 5' sequence and inner sequence
tagggaagagaaggacatatgatggcatgcacgcacatacacgtgggcacgta

SEQ ID NO: 21519 - DNA, 53 bp, Artificial Sequence
  Description of Artificial Sequence: Synthetic pecan; 5' sequence and inner sequence
tagggaagagaaggacatatgatgcacgactcgcaccctatcatggcggcatg

SEQ ID NO: 21520 - DNA, 53 bp, Artificial Sequence; identical to SEQ ID NO: 5230
  Description of Artificial Sequence: Synthetic pecan; 5' sequence and inner sequence

SEQ ID NO: 21521 - DNA, 53 bp, Artificial Sequence; identical to SEQ ID NO: 1176
  Description of Artificial Sequence: Synthetic pecan; 5' sequence and inner sequence

SEQ ID NO: 21522 - DNA, 53 bp, Artificial Sequence
  Description of Artificial Sequence: Synthetic pecan; 5' sequence and inner sequence
tagggaagagaaggacatatgatggcatgcacgcacctacatgtgggcacgta

SEQ ID NO: 21523 - DNA, 53 bp, Artificial Sequence; identical to SEQ ID NO: 1027
  Description of Artificial Sequence: Synthetic pecan; 5' sequence and inner sequence

SEQ ID NO: 21524 - DNA, 53 bp, Artificial Sequence
  Description of Artificial Sequence: Synthetic pecan; 5' sequence and inner sequence
tagggaagagaaggacatatgatgacactgtgcctgaccgtcaagttgcggca

SEQ ID NO: 21525 - DNA, 53 bp, Artificial Sequence; identical to SEQ ID NO: 1321
  Description of Artificial Sequence: Synthetic pecan; 5' sequence and inner sequence

SEQ ID NO: 21526 - DNA, 54 bp, Artificial Sequence; identical to SEQ ID NO: 1845
  Description of Artificial Sequence: Synthetic pecan; 5' sequence and inner sequence

SEQ ID NO: 21527 - DNA, 53 bp, Artificial Sequence
  Description of Artificial Sequence: Synthetic pecan; 5' sequence and inner sequence
tagggaagagaaggacatatgatggcatgcacgcaactacacgtgggtatgga

SEQ ID NO: 21528 - DNA, 53 bp, Artificial Sequence
  Description of Artificial Sequence: Synthetic pecan; 5' sequence and inner sequence
tagggaagagaaggacatatgatggccacagcgtacctcaacttggacgtgca

SEQ ID NO: 21529 - DNA, 53 bp, Artificial Sequence; identical to SEQ ID NO: 1991
  Description of Artificial Sequence: Synthetic pecan; 5' sequence and inner sequence

SEQ ID NO: 21530 - DNA, 53 bp, Artificial Sequence
  Description of Artificial Sequence: Synthetic pecan; 5' sequence and inner sequence
tagggaagagaaggacatatgatgcacgactcgcaccctatcatgaagccatg

SEQ ID NO: 21531 - DNA, 53 bp, Artificial Sequence
  Description of Artificial Sequence: Synthetic pecan; 5' sequence and inner sequence
tagggaagagaaggacatatgatccgcacgtaggcctatcagtggtgcatgca

SEQ ID NO: 21532 - DNA, 52 bp, Artificial Sequence
  Description of Artificial Sequence: Synthetic pecan; 5' sequence and inner sequence
tagggaagagaaggacatatgatcgcaccgtcaagcgggaaggcactttggc

SEQ ID NO: 21533 - DNA, 53 bp, Artificial Sequence
  Description of Artificial Sequence: Synthetic pecan; 5' sequence and inner sequence
tagggaagagaaggacatatgatggcatgcacgcacctacacgtgggcacgca

SEQ ID NO: 21534 - DNA, 53 bp, Artificial Sequence
  Description of Artificial Sequence: Synthetic pecan; 5' sequence and inner sequence
tagggaagagaaggacatatgatccgcacgtagccctatcagtggtgcctgca

SEQ ID NO: 21535 - DNA, 53 bp, Artificial Sequence; identical to SEQ ID NO: 9953
  Description of Artificial Sequence: Synthetic pecan; 5' sequence and inner sequence

SEQ ID NO: 21536 - DNA, 53 bp, Artificial Sequence; identical to SEQ ID NO: 1172
  Description of Artificial Sequence: Synthetic pecan; 5' sequence and inner sequence

SEQ ID NO: 21537 - DNA, 53 bp, Artificial Sequence
  Description of Artificial Sequence: Synthetic pecan; 5' sequence and inner sequence
tagggaagagaaggacatatgatggacgcagcttgactactggtggtcacgta

SEQ ID NO: 21538 - DNA, 53 bp, Artificial Sequence; identical to SEQ ID NO: 1058
  Description of Artificial Sequence: Synthetic pecan; 5' sequence and inner sequence

SEQ ID NO: 21539 - DNA, 53 bp, Artificial Sequence; identical to SEQ ID NO: 1524
  Description of Artificial Sequence: Synthetic pecan; 5' sequence and inner sequence

SEQ ID NO: 21540 - DNA, 53 bp, Artificial Sequence
  Description of Artificial Sequence: Synthetic pecan; 5' sequence and inner sequence
tagggaagagaaggacatatgatggacgcaacgtacctcaacgtggacgtgca

SEQ ID NO: 21541 - DNA, 53 bp, Artificial Sequence
  Description of Artificial Sequence: Synthetic pecan; 5' sequence and inner sequence
tagggaagagaaggacatatgatgcacgactcgcaccctatcatgaggtcatg

SEQ ID NO: 21542 - DNA, 53 bp, Artificial Sequence; identical to SEQ ID NO: 17750
  Description of Artificial Sequence: Synthetic pecan; 5' sequence and inner sequence

SEQ ID NO: 21543 - DNA, 53 bp, Artificial Sequence; identical to SEQ ID NO: 5717
  Description of Artificial Sequence: Synthetic pecan; 5' sequence and inner sequence

SEQ ID NO: 21544 - DNA, 53 bp, Artificial Sequence
  Description of Artificial Sequence: Synthetic pecan; 5' sequence and inner sequence
tagggaagagaaggacatatgatggcatgcactcacctacacgtgggtatgga

SEQ ID NO: 21545 - DNA, 53 bp, Artificial Sequence
  Description of Artificial Sequence: Synthetic pecan; 5' sequence and inner sequence
tagggaagagaaggacatatgatggacgcagctttcctactggtggtcacgta

SEQ ID NO: 21546 - DNA, 53 bp, Artificial Sequence; identical to SEQ ID NO: 1892
  Description of Artificial Sequence: Synthetic pecan; 5' sequence and inner sequence

SEQ ID NO: 21547 - DNA, 53 bp, Artificial Sequence; identical to SEQ ID NO: 1552
  Description of Artificial Sequence: Synthetic pecan; 5' sequence and inner sequence

SEQ ID NO: 21548 - DNA, 53 bp, Artificial Sequence
  Description of Artificial Sequence: Synthetic pecan; 5' sequence and inner sequence
tagggaagagaaggacatatgatcgcaccgtcaagcgggaatgcactttggtg

SEQ ID NO: 21549 - DNA, 53 bp, Artificial Sequence
  Description of Artificial Sequence: Synthetic pecan; 5' sequence and inner sequence
tagggaagagaaggacatatgatgtcgtgactggctatctggacatgcactgc

SEQ ID NO: 21550 - DNA, 53 bp, Artificial Sequence; identical to SEQ ID NO: 1857
  Description of Artificial Sequence: Synthetic pecan; 5' sequence and inner sequence

SEQ ID NO: 21551 - DNA, 53 bp, Artificial Sequence
  Description of Artificial Sequence: Synthetic pecan; 5' sequence and inner sequence
tagggaagagaaggacatatgatgcactgcacgcacactatcatgtaggcatg

SEQ ID NO: 21552 - DNA, 53 bp, Artificial Sequence
  Description of Artificial Sequence: Synthetic pecan; 5' sequence and inner sequence
tagggaagagaaggacatatgatccgatcgcacgtcaaggccggctgtacgag

SEQ ID NO: 21553 - DNA, 53 bp, Artificial Sequence
  Description of Artificial Sequence: Synthetic pecan; 5' sequence and inner sequence
tagggaagagaaggacatatgatccgcacgtagccctatcagtggtgcatgcg

SEQ ID NO: 21554 - DNA, 53 bp, Artificial Sequence; identical to SEQ ID NO: 1806
  Description of Artificial Sequence: Synthetic pecan; 5' sequence and inner sequence

SEQ ID NO: 21555 - DNA, 53 bp, Artificial Sequence; identical to SEQ ID NO: 1523
  Description of Artificial Sequence: Synthetic pecan; 5' sequence and inner sequence

SEQ ID NO: 21556 - DNA, 53 bp, Artificial Sequence; identical to SEQ ID NO: 1173
  Description of Artificial Sequence: Synthetic pecan; 5' sequence and inner sequence

SEQ ID NO: 21557 - DNA, 53 bp, Artificial Sequence; identical to SEQ ID NO: 9618
  Description of Artificial Sequence: Synthetic pecan; 5' sequence and inner sequence

SEQ ID NO: 21558 - DNA, 53 bp, Artificial Sequence; identical to SEQ ID NO: 1837
  Description of Artificial Sequence: Synthetic pecan; 5' sequence and inner sequence

SEQ ID NO: 21559 - DNA, 53 bp, Artificial Sequence
  Description of Artificial Sequence: Synthetic pecan; 5' sequence and inner sequence
tagggaagagaaggacatatgatccgatcgcacgtcaatgcaggctgtacgag

SEQ ID NO: 21560 - DNA, 53 bp, Artificial Sequence
  Description of Artificial Sequence: Synthetic pecan; 5' sequence and inner sequence
tagggaagagaaggacatatgatggccacagcgtacctcaacgtggacgtgta

SEQ ID NO: 21561 - DNA, 53 bp, Artificial Sequence; identical to SEQ ID NO: 1507
  Description of Artificial Sequence: Synthetic pecan; 5' sequence and inner sequence

SEQ ID NO: 21562 - DNA, 53 bp, Artificial Sequence
  Description of Artificial Sequence: Synthetic pecan; 5' sequence and inner sequence
tagggaagagaaggacatatgatggcacaaacggacctacaagtgcgcatgga

SEQ ID NO: 21563 - DNA, 53 bp, Artificial Sequence; identical to SEQ ID NO: 1541
  Description of Artificial Sequence: Synthetic pecan; 5' sequence and inner sequence

SEQ ID NO: 21564 - DNA, 53 bp, Artificial Sequence; identical to SEQ ID NO: 5997
  Description of Artificial Sequence: Synthetic pecan; 5' sequence and inner sequence

SEQ ID NO: 21565 - DNA, 53 bp, Artificial Sequence
  Description of Artificial Sequence: Synthetic pecan; 5' sequence and inner sequence
tagggaagagaaggacatatgatgtcacaaacggaccgacaagtgcgcatgga

SEQ ID NO: 21566 - DNA, 53 bp, Artificial Sequence; identical to SEQ ID NO: 1165
  Description of Artificial Sequence: Synthetic pecan; 5' sequence and inner sequence

SEQ ID NO: 21567 - DNA, 53 bp, Artificial Sequence; identical to SEQ ID NO: 1233
  Description of Artificial Sequence: Synthetic pecan; 5' sequence and inner sequence

SEQ ID NO: 21568 - DNA, 53 bp, Artificial Sequence; identical to SEQ ID NO: 5755
  Description of Artificial Sequence: Synthetic pecan; 5' sequence and inner sequence

SEQ ID NO: 21569 - DNA, 53 bp, Artificial Sequence; identical to SEQ ID NO: 1683
  Description of Artificial Sequence: Synthetic pecan; 5' sequence and inner sequence

SEQ ID NO: 21570 - DNA, 53 bp, Artificial Sequence
  Description of Artificial Sequence: Synthetic pecan; 5' sequence and inner sequence
tagggaagagaaggacatatgatccgtagcgacatcaaccggtggtgtgcgtg

SEQ ID NO: 21571 - DNA, 53 bp, Artificial Sequence; identical to SEQ ID NO: 1497
  Description of Artificial Sequence: Synthetic pecan; 5' sequence and inner sequence

SEQ ID NO: 21572 - DNA, 53 bp, Artificial Sequence; identical to SEQ ID NO: 9792
  Description of Artificial Sequence: Synthetic pecan; 5' sequence and inner sequence

SEQ ID NO: 21573 - DNA, 53 bp, Artificial Sequence
  Description of Artificial Sequence: Synthetic pecan; 5' sequence and inner sequence
tagggaagagaaggacatatgatccgtagcgtcatcaagcggtggtgtgcgtg

SEQ ID NO: 21574 - DNA, 53 bp, Artificial Sequence
  Description of Artificial Sequence: Synthetic pecan; 5' sequence and inner sequence
tagggaagagaaggacatatgatggacgcagcttgcctaatggtggtcacgta

SEQ ID NO: 21575 - DNA, 53 bp, Artificial Sequence; identical to SEQ ID NO: 1153
  Description of Artificial Sequence: Synthetic pecan; 5' sequence and inner sequence

SEQ ID NO: 21576 - DNA, 53 bp, Artificial Sequence
  Description of Artificial Sequence: Synthetic pecan; 5' sequence and inner sequence
tagggaagagaaggacatatgatgtcatgcactaacactatcatggcggcatg

SEQ ID NO: 21577 - DNA, 53 bp, Artificial Sequence
  Description of Artificial Sequence: Synthetic pecan; 5' sequence and inner sequence
tagggaagagaaggacatatgatggacgcagcggaccgttcgagtggtacgta

SEQ ID NO: 21578 - DNA, 53 bp, Artificial Sequence
  Description of Artificial Sequence: Synthetic pecan; 5' sequence and inner sequence
tagggaagagaaggacatatgatccatcgcgtcactatcatctgtgtcacgta

SEQ ID NO: 21579 - DNA, 53 bp, Artificial Sequence
  Description of Artificial Sequence: Synthetic pecan; 5' sequence and inner sequence
tagggaagagaaggacatatgatccgcacggagccctatcagtggtgcatgca

SEQ ID NO: 21580 - DNA, 53 bp, Artificial Sequence
  Description of Artificial Sequence: Synthetic pecan; 5' sequence and inner sequence
tagggaagagaaggacatatgatccgtagcgacatcatgcggtggtgtgcgtg

SEQ ID NO: 21581 - DNA, 53 bp, Artificial Sequence
  Description of Artificial Sequence: Synthetic pecan; 5' sequence and inner sequence
tagggaagagaaggacatatgatccgcacgtagccctatcagtggtgcatgga

SEQ ID NO: 21582 - DNA, 53 bp, Artificial Sequence; identical to SEQ ID NO: 1208
  Description of Artificial Sequence: Synthetic pecan; 5' sequence and inner sequence

SEQ ID NO: 21583 - DNA, 53 bp, Artificial Sequence
  Description of Artificial Sequence: Synthetic pecan; 5' sequence and inner sequence
tagggaagagaaggacatatgatgcacgattcgcaccctatcatgaggccatg

SEQ ID NO: 21584 - DNA, 53 bp, Artificial Sequence; identical to SEQ ID NO: 1312
  Description of Artificial Sequence: Synthetic pecan; 5' sequence and inner sequence

SEQ ID NO: 21585 - DNA, 53 bp, Artificial Sequence; identical to SEQ ID NO: 1116
  Description of Artificial Sequence: Synthetic pecan; 5' sequence and inner sequence

SEQ ID NO: 21586 - DNA, 53 bp, Artificial Sequence; identical to SEQ ID NO: 5429
  Description of Artificial Sequence: Synthetic pecan; 5' sequence and inner sequence

SEQ ID NO: 21587 - DNA, 53 bp, Artificial Sequence; identical to SEQ ID NO: 1788
  Description of Artificial Sequence: Synthetic pecan; 5' sequence and inner sequence

SEQ ID NO: 21588 - DNA, 53 bp, Artificial Sequence; identical to SEQ ID NO: 1292
  Description of Artificial Sequence: Synthetic pecan; 5' sequence and inner sequence

SEQ ID NO: 21589 - DNA, 53 bp, Artificial Sequence; identical to SEQ ID NO: 9926
  Description of Artificial Sequence: Synthetic pecan; 5' sequence and inner sequence

SEQ ID NO: 21590 - DNA, 53 bp, Artificial Sequence
  Description of Artificial Sequence: Synthetic pecan; 5' sequence and inner sequence
tagggaagagaaggacatatgatggcatgcacgaacctacacgtgggtatgga

SEQ ID NO: 21591 - DNA, 53 bp, Artificial Sequence; identical to SEQ ID NO: 1596
  Description of Artificial Sequence: Synthetic pecan; 5' sequence and inner sequence

SEQ ID NO: 21592 - DNA, 53 bp, Artificial Sequence
  Description of Artificial Sequence: Synthetic pecan; 5' sequence and inner sequence
tagggaagagaaggacatatgatcgcaccgtcaagcgggaagtcactttggtg

SEQ ID NO: 21593 - DNA, 53 bp, Artificial Sequence; identical to SEQ ID NO: 5579
  Description of Artificial Sequence: Synthetic pecan; 5' sequence and inner sequence

SEQ ID NO: 21594 - DNA, 53 bp, Artificial Sequence
  Description of Artificial Sequence: Synthetic pecan; 5' sequence and inner sequence
tagggaagagaaggacatatgatccgtagcgacatcaagcgggggggtgcgtg

SEQ ID NO: 21595 - DNA, 53 bp, Artificial Sequence; identical to SEQ ID NO: 1717
  Description of Artificial Sequence: Synthetic pecan; 5' sequence and inner sequence

SEQ ID NO: 21596 - DNA, 53 bp, Artificial Sequence
  Description of Artificial Sequence: Synthetic pecan; 5' sequence and inner sequence
tagggaagagaaggacatatgatgtcatgcacgaacactatcatggtggcatg

SEQ ID NO: 21597 - DNA, 53 bp, Artificial Sequence; identical to SEQ ID NO: 13992
  Description of Artificial Sequence: Synthetic pecan; 5' sequence and inner sequence

SEQ ID NO: 21598 - DNA, 53 bp, Artificial Sequence
  Description of Artificial Sequence: Synthetic pecan; 5' sequence and inner sequence
tagggaagagaaggacatatgatggactcagcttgcctactggtggtcacgta

SEQ ID NO: 21599 - DNA, 53 bp, Artificial Sequence; identical to SEQ ID NO: 1268
  Description of Artificial Sequence: Synthetic pecan; 5' sequence and inner sequence

SEQ ID NO: 21600 - DNA, 53 bp, Artificial Sequence
  Description of Artificial Sequence: Synthetic pecan; 5' sequence and inner sequence
tagggaagagaaggacatatgatggcacaaacggaccgacaagtgtgcatgga

SEQ ID NO: 21601 - DNA, 53 bp, Artificial Sequence; identical to SEQ ID NO: 5787
  Description of Artificial Sequence: Synthetic pecan; 5' sequence and inner sequence

SEQ ID NO: 21602 - DNA, 53 bp, Artificial Sequence; identical to SEQ ID NO: 13996
  Description of Artificial Sequence: Synthetic pecan; 5' sequence and inner sequence

SEQ ID NO: 21603 - DNA, 53 bp, Artificial Sequence
  Description of Artificial Sequence: Synthetic pecan; 5' sequence and inner sequence
tagggaagagaaggacatatgatggcgtgcggaccggtaagtcgtcatgcaca

SEQ ID NO: 21604 - DNA, 53 bp, Artificial Sequence
  Description of Artificial Sequence: Synthetic pecan; 5' sequence and inner sequence
tagggaagagaaggacatatgatcgcacaaacggaccgacaagtgcgcatgga

SEQ ID NO: 21605 - DNA, 53 bp, Artificial Sequence
  Description of Artificial Sequence: Synthetic pecan; 5' sequence and inner sequence
tagggaagagaaggacatatgatggacgcagcttgcctactggtggtcatgta

SEQ ID NO: 21606 - DNA, 53 bp, Artificial Sequence; identical to SEQ ID NO: 1654
  Description of Artificial Sequence: Synthetic pecan; 5' sequence and inner sequence

SEQ ID NO: 21607 - DNA, 53 bp, Artificial Sequence
  Description of Artificial Sequence: Synthetic pecan; 5' sequence and inner sequence
tagggaagagaaggacatatgatgtcattccgcatcctacaagtgggcacgta

SEQ ID NO: 21608 - DNA, 53 bp, Artificial Sequence; identical to SEQ ID NO: 9579
  Description of Artificial Sequence: Synthetic pecan; 5' sequence and inner sequence

SEQ ID NO: 21609 - DNA, 53 bp, Artificial Sequence; identical to SEQ ID NO: 5492
  Description of Artificial Sequence: Synthetic pecan; 5' sequence and inner sequence

SEQ ID NO: 21610 - DNA, 49 bp, Artificial Sequence
  Description of Artificial Sequence: Synthetic pecan; 5' sequence and inner sequence
tagggaagagaaggacatatgatccgcacgtcaaggcaggctgtacgag

SEQ ID NO: 21611 - DNA, 53 bp, Artificial Sequence; identical to SEQ ID NO: 5987
  Description of Artificial Sequence: Synthetic pecan; 5' sequence and inner sequence

SEQ ID NO: 21612 - DNA, 53 bp, Artificial Sequence; identical to SEQ ID NO: 13945
  Description of Artificial Sequence: Synthetic pecan; 5' sequence and inner sequence

SEQ ID NO: 21613 - DNA, 53 bp, Artificial Sequence
  Description of Artificial Sequence: Synthetic pecan; 5' sequence and inner sequence
tagggaagagaaggacatatgatggccacatcgtacctcaacgtggacgtgca

SEQ ID NO: 21614 - DNA, 53 bp, Artificial Sequence; identical to SEQ ID NO: 1520
  Description of Artificial Sequence: Synthetic pecan; 5' sequence and inner sequence

SEQ ID NO: 21615 - DNA, 53 bp, Artificial Sequence
  Description of Artificial Sequence: Synthetic pecan; 5' sequence and inner sequence
tagggaagagaaggacatatgatcgcaccgtcaatcgggaaggcactttggtg

SEQ ID NO: 21616 - DNA, 53 bp, Artificial Sequence; identical to SEQ ID NO: 1924
  Description of Artificial Sequence: Synthetic pecan; 5' sequence and inner sequence

SEQ ID NO: 21617 - DNA, 53 bp, Artificial Sequence
  Description of Artificial Sequence: Synthetic pecan; 5' sequence and inner sequence
tagggaagagaaggacatatgatgtcatgccatctcttcgagtgtgacaggta

SEQ ID NO: 21618 - DNA, 53 bp, Artificial Sequence
  Description of Artificial Sequence: Synthetic pecan; 5' sequence and inner sequence
tagggaagagaaggacatatgatggcacaaacggaccgacaagtgcgtatgga

SEQ ID NO: 21619 - DNA, 52 bp, Artificial Sequence; identical to SEQ ID NO: 5968
  Description of Artificial Sequence: Synthetic pecan; 5' sequence and inner sequence

SEQ ID NO: 21620 - DNA, 53 bp, Artificial Sequence; identical to SEQ ID NO: 1530
  Description of Artificial Sequence: Synthetic pecan; 5' sequence and inner sequence

SEQ ID NO: 21621 - DNA, 53 bp, Artificial Sequence; identical to SEQ ID NO: 1107
  Description of Artificial Sequence: Synthetic pecan; 5' sequence and inner sequence

SEQ ID NO: 21622 - DNA, 53 bp, Artificial Sequence; identical to SEQ ID NO: 9678
  Description of Artificial Sequence: Synthetic pecan; 5' sequence and inner sequence

SEQ ID NO: 21623 - DNA, 53 bp, Artificial Sequence
  Description of Artificial Sequence: Synthetic pecan; 5' sequence and inner sequence
tagggaagagaaggacatatgatgcacgcatcgtcccgtcatgtggttccgta

SEQ ID NO: 21624 - DNA, 53 bp, Artificial Sequence; identical to SEQ ID NO: 5470
  Description of Artificial Sequence: Synthetic pecan; 5' sequence and inner sequence

SEQ ID NO: 21625 - DNA, 53 bp, Artificial Sequence
  Description of Artificial Sequence: Synthetic pecan; 5' sequence and inner sequence
tagggaagagaaggacatatgatggcacaaacggacagacaagtgcgcatgga

SEQ ID NO: 21626 - DNA, 53 bp, Artificial Sequence
  Description of Artificial Sequence: Synthetic pecan; 5' sequence and inner sequence
tagggaagagaaggacatatgatcgcaccgtcgatacgtcgtgcacgctgaca

SEQ ID NO: 21627 - DNA, 53 bp, Artificial Sequence
  Description of Artificial Sequence: Synthetic pecan; 5' sequence and inner sequence
tagggaagagaaggacatatgatccgcacgtagccctatccgtggtgcatgca

SEQ ID NO: 21628 - DNA, 53 bp, Artificial Sequence; identical to SEQ ID NO: 1099
  Description of Artificial Sequence: Synthetic pecan; 5' sequence and inner sequence

SEQ ID NO: 21629 - DNA, 53 bp, Artificial Sequence
  Description of Artificial Sequence: Synthetic pecan; 5' sequence and inner sequence
tagggaagagaaggacatatgatggcacaaacggaccgacaagttcgcatgga

SEQ ID NO: 21630 - DNA, 53 bp, Artificial Sequence; identical to SEQ ID NO: 5916
  Description of Artificial Sequence: Synthetic pecan; 5' sequence and inner sequence

SEQ ID NO: 21631 - DNA, 53 bp, Artificial Sequence; identical to SEQ ID NO: 1287
  Description of Artificial Sequence: Synthetic pecan; 5' sequence and inner sequence

SEQ ID NO: 21632 - DNA, 53 bp, Artificial Sequence; identical to SEQ ID NO: 5761
  Description of Artificial Sequence: Synthetic pecan; 5' sequence and inner sequence

SEQ ID NO: 21633 - DNA, 53 bp, Artificial Sequence
  Description of Artificial Sequence: Synthetic pecan; 5' sequence and inner sequence
tagggaagagaaggacatatgatccgcacgtaaccctatcagtggtgcatgca

SEQ ID NO: 21634 - DNA, 52 bp, Artificial Sequence; identical to SEQ ID NO: 1975
  Description of Artificial Sequence: Synthetic pecan; 5' sequence and inner sequence

SEQ ID NO: 21635 - DNA, 53 bp, Artificial Sequence
  Description of Artificial Sequence: Synthetic pecan; 5' sequence and inner sequence
tagggaagagaaggacatatgatggcacaaacggaccgccaagtgcgcatgga

SEQ ID NO: 21636 - DNA, 53 bp, Artificial Sequence; identical to SEQ ID NO: 17688
  Description of Artificial Sequence: Synthetic pecan; 5' sequence and inner sequence

SEQ ID NO: 21637 - DNA, 53 bp, Artificial Sequence
  Description of Artificial Sequence: Synthetic pecan; 5' sequence and inner sequence
tagggaagagaaggacatatgatccgatcgcacgtcaagccaggctgtacgag

SEQ ID NO: 21638 - DNA, 53 bp, Artificial Sequence; identical to SEQ ID NO: 5611
  Description of Artificial Sequence: Synthetic pecan; 5' sequence and inner sequence

SEQ ID NO: 21639 - DNA, 53 bp, Artificial Sequence; identical to SEQ ID NO: 1043
  Description of Artificial Sequence: Synthetic pecan; 5' sequence and inner sequence

SEQ ID NO: 21640 - DNA, 53 bp, Artificial Sequence
  Description of Artificial Sequence: Synthetic pecan; 5' sequence and inner sequence
tagggaagagaaggacatatgatggacgcatcttgcctactggtggtcacgta

SEQ ID NO: 21641 - DNA, 53 bp, Artificial Sequence; identical to SEQ ID NO: 1436
  Description of Artificial Sequence: Synthetic pecan; 5' sequence and inner sequence

SEQ ID NO: 21642 - DNA, 53 bp, Artificial Sequence
  Description of Artificial Sequence: Synthetic pecan; 5' sequence and inner sequence
tagggaagagaaggacatatgatcgcaccgtcaagcggtaaggcactttggtg

SEQ ID NO: 21643 - DNA, 53 bp, Artificial Sequence; identical to SEQ ID NO: 9962
  Description of Artificial Sequence: Synthetic pecan; 5' sequence and inner sequence

SEQ ID NO: 21644 - DNA, 53 bp, Artificial Sequence
  Description of Artificial Sequence: Synthetic pecan; 5' sequence and inner sequence
tagggaagagaaggacatatgatgtcactgtgcctgaccgttaagttgcggca

SEQ ID NO: 21645 - DNA, 53 bp, Artificial Sequence; identical to SEQ ID NO: 1336
  Description of Artificial Sequence: Synthetic pecan; 5' sequence and inner sequence

SEQ ID NO: 21646 - DNA, 53 bp, Artificial Sequence
  Description of Artificial Sequence: Synthetic pecan; 5' sequence and inner sequence
tagggaagagaaggacatatgatccgcacgtagccctaacagtggtgcatgca

SEQ ID NO: 21647 - DNA, 53 bp, Artificial Sequence; identical to SEQ ID NO: 1608
  Description of Artificial Sequence: Synthetic pecan; 5' sequence and inner sequence

SEQ ID NO: 21648 - DNA, 53 bp, Artificial Sequence
  Description of Artificial Sequence: Synthetic pecan; 5' sequence and inner sequence
tagggaagagaaggacatatgatccatcgcgtcactattatgtgtgtcacgta

SEQ ID NO: 21649 - DNA, 52 bp, Artificial Sequence
  Description of Artificial Sequence: Synthetic pecan; 5' sequence and inner sequence
tagggaagagaaggacatatgatgtgcgccgatgccctcatgtggccgtgga

SEQ ID NO: 21650 - DNA, 53 bp, Artificial Sequence
  Description of Artificial Sequence: Synthetic pecan; 5' sequence and inner sequence
tagggaagagaaggacatatgatccatcgcgtcaccatcatgtgtgtcacgta

SEQ ID NO: 21651 - DNA, 53 bp, Artificial Sequence; identical to SEQ ID NO: 1348
  Description of Artificial Sequence: Synthetic pecan; 5' sequence and inner sequence

SEQ ID NO: 21652 - DNA, 53 bp, Artificial Sequence
  Description of Artificial Sequence: Synthetic pecan; 5' sequence and inner sequence
tagggaagagaaggacatatgatggacgcagcttgcctactggaggtcacgta

SEQ ID NO: 21653 - DNA, 53 bp, Artificial Sequence
  Description of Artificial Sequence: Synthetic pecan; 5' sequence and inner sequence
tagggaagagaaggacatatgatccgtagcgacatcaagcgggggcgtgcgtg

SEQ ID NO: 21654 - DNA, 53 bp, Artificial Sequence; identical to SEQ ID NO: 13953
  Description of Artificial Sequence: Synthetic pecan; 5' sequence and inner sequence

SEQ ID NO: 21655 - DNA, 53 bp, Artificial Sequence
  Description of Artificial Sequence: Synthetic pecan; 5' sequence and inner sequence
tagggaagagaaggacatatgatggacgcagcggaacgttctagtggtacgta

SEQ ID NO: 21656 - DNA, 53 bp, Artificial Sequence; identical to SEQ ID NO: 5521
  Description of Artificial Sequence: Synthetic pecan; 5' sequence and inner sequence

SEQ ID NO: 21657 - DNA, 53 bp, Artificial Sequence
  Description of Artificial Sequence: Synthetic pecan; 5' sequence and inner sequence
tagggaagagaaggacatatgatgcacgactcgcaccccatcatgaggccatg

SEQ ID NO: 21658 - DNA, 53 bp, Artificial Sequence; identical to SEQ ID NO: 17266
  Description of Artificial Sequence: Synthetic pecan; 5' sequence and inner sequence

SEQ ID NO: 21659 - DNA, 53 bp, Artificial Sequence; identical to SEQ ID NO: 1228
  Description of Artificial Sequence: Synthetic pecan; 5' sequence and inner sequence

SEQ ID NO: 21660 - DNA, 53 bp, Artificial Sequence; identical to SEQ ID NO: 13659
  Description of Artificial Sequence: Synthetic pecan; 5' sequence and inner sequence

SEQ ID NO: 21661 - DNA, 53 bp, Artificial Sequence
  Description of Artificial Sequence: Synthetic pecan; 5' sequence and inner sequence
tagggaagagaaggacatatgatgtcatgcacgaacactatcatggaggcatg

SEQ ID NO: 21662 - DNA, 53 bp, Artificial Sequence
  Description of Artificial Sequence: Synthetic pecan; 5' sequence and inner sequence
tagggaagagaaggacatatgatccctcgcgtcactatcatgtgtgtcacgta

SEQ ID NO: 21663 - DNA, 53 bp, Artificial Sequence; identical to SEQ ID NO: 1254
  Description of Artificial Sequence: Synthetic pecan; 5' sequence and inner sequence

SEQ ID NO: 21664 - DNA, 53 bp, Artificial Sequence; identical to SEQ ID NO: 1249
  Description of Artificial Sequence: Synthetic pecan; 5' sequence and inner sequence

SEQ ID NO: 21665 - DNA, 53 bp, Artificial Sequence
  Description of Artificial Sequence: Synthetic pecan; 5' sequence and inner sequence
tagggaagagaaggacatatgatccgatcgcacgtcaaggcaggctgcacgag

SEQ ID NO: 21666 - DNA, 53 bp, Artificial Sequence
  Description of Artificial Sequence: Synthetic pecan; 5' sequence and inner sequence
tagggaagagaaggacatatgatggccacagcgtaccttaacgtggacgtgca

SEQ ID NO: 21667 - DNA, 53 bp, Artificial Sequence; identical to SEQ ID NO: 5960
  Description of Artificial Sequence: Synthetic pecan; 5' sequence and inner sequence

SEQ ID NO: 21668 - DNA, 53 bp, Artificial Sequence
  Description of Artificial Sequence: Synthetic pecan; 5' sequence and inner sequence
tagggaagagaaggacatatgatcgcaccgtcgatacgtcatgcgcgctgaca

SEQ ID NO: 21669 - DNA, 53 bp, Artificial Sequence
  Description of Artificial Sequence: Synthetic pecan; 5' sequence and inner sequence
tagggaagagaaggacatatgatgtcatgcacgaacactatcatggcggtatg

SEQ ID NO: 21670 - DNA, 54 bp, Artificial Sequence
  Description of Artificial Sequence: Synthetic pecan; 5' sequence and inner sequence
tagggaagagaaggacatatgatgcattggacgatcgtgccctacacgtggaca

SEQ ID NO: 21671 - DNA, 53 bp, Artificial Sequence; identical to SEQ ID NO: 1928
  Description of Artificial Sequence: Synthetic pecan; 5' sequence and inner sequence

SEQ ID NO: 21672 - DNA, 53 bp, Artificial Sequence
  Description of Artificial Sequence: Synthetic pecan; 5' sequence and inner sequence
tagggaagagaaggacatatgatgcacgactcgcaccctatcctgaggccatg

SEQ ID NO: 21673 - DNA, 53 bp, Artificial Sequence
  Description of Artificial Sequence: Synthetic pecan; 5' sequence and inner sequence
tagggaagagaaggacatatgatgtacgcagcttgcctactggtggtcacgta

SEQ ID NO: 21674 - DNA, 53 bp, Artificial Sequence; identical to SEQ ID NO: 1579
  Description of Artificial Sequence: Synthetic pecan; 5' sequence and inner sequence

SEQ ID NO: 21675 - DNA, 53 bp, Artificial Sequence; identical to SEQ ID NO: 1853
  Description of Artificial Sequence: Synthetic pecan; 5' sequence and inner sequence

SEQ ID NO: 21676 - DNA, 53 bp, Artificial Sequence
  Description of Artificial Sequence: Synthetic pecan; 5' sequence and inner sequence
tagggaagagaaggacatatgatggcatgcacgcacctacacgtgggtctgga

SEQ ID NO: 21677 - DNA, 53 bp, Artificial Sequence
  Description of Artificial Sequence: Synthetic pecan; 5' sequence and inner sequence
tagggaagagaaggacatatgatgtgcgcggcttgcctactggtggtcacgta

SEQ ID NO: 21678 - DNA, 49 bp, Artificial Sequence
  Description of Artificial Sequence: Synthetic pecan; 5' sequence and inner sequence
tagggaagagaaggacatatgatggcatgcacgcacctacacgtggcca

SEQ ID NO: 21679 - DNA, 53 bp, Artificial Sequence
  Description of Artificial Sequence: Synthetic pecan; 5' sequence and inner sequence
tagggaagagaaggacatatgatccgatcgcacgtcaaggcaggatgtacgag

SEQ ID NO: 21680 - DNA, 53 bp, Artificial Sequence; identical to SEQ ID NO: 5280
  Description of Artificial Sequence: Synthetic pecan; 5' sequence and inner sequence

SEQ ID NO: 21681 - DNA, 53 bp, Artificial Sequence; identical to SEQ ID NO: 1909
  Description of Artificial Sequence: Synthetic pecan; 5' sequence and inner sequence

SEQ ID NO: 21682 - DNA, 53 bp, Artificial Sequence; identical to SEQ ID NO: 1211
  Description of Artificial Sequence: Synthetic pecan; 5' sequence and inner sequence

SEQ ID NO: 21683 - DNA, 53 bp, Artificial Sequence
  Description of Artificial Sequence: Synthetic pecan; 5' sequence and inner sequence
tagggaagagaaggacatatgatgtcactgtgcctgaccgtcacgttgcggca

SEQ ID NO: 21684 - DNA, 53 bp, Artificial Sequence; identical to SEQ ID NO: 9876
  Description of Artificial Sequence: Synthetic pecan; 5' sequence and inner sequence

SEQ ID NO: 21685 - DNA, 53 bp, Artificial Sequence; identical to SEQ ID NO: 6002
  Description of Artificial Sequence: Synthetic pecan; 5' sequence and inner sequence

SEQ ID NO: 21686 - DNA, 53 bp, Artificial Sequence; identical to SEQ ID NO: 5650
  Description of Artificial Sequence: Synthetic pecan; 5' sequence and inner sequence

SEQ ID NO: 21687 - DNA, 53 bp, Artificial Sequence; identical to SEQ ID NO: 1705
  Description of Artificial Sequence: Synthetic pecan; 5' sequence and inner sequence

SEQ ID NO: 21688 - DNA, 53 bp, Artificial Sequence; identical to SEQ ID NO: 1572
  Description of Artificial Sequence: Synthetic pecan; 5' sequence and inner sequence

SEQ ID NO: 21689 - DNA, 53 bp, Artificial Sequence
  Description of Artificial Sequence: Synthetic pecan; 5' sequence and inner sequence
tagggaagagaaggacatatgatccatcgcgttactatcatgtgtgtcacgta

SEQ ID NO: 21690 - DNA, 53 bp, Artificial Sequence
  Description of Artificial Sequence: Synthetic pecan; 5' sequence and inner sequence
tagggaagagaaggacatatgatggccacagcggacctcaacgtggacgtgca

SEQ ID NO: 21691 - DNA, 53 bp, Artificial Sequence
  Description of Artificial Sequence: Synthetic pecan; 5' sequence and inner sequence
tagggaagagaaggacatatgatccgtagcgacatcaggcggtggtgtgcgtg

SEQ ID NO: 21692 - DNA, 53 bp, Artificial Sequence
  Description of Artificial Sequence: Synthetic pecan; 5' sequence and inner sequence
tagggaagagaaggacatatgatcgccacagcgtacctcaacgtggacgtgca

SEQ ID NO: 21693 - DNA, 53 bp, Artificial Sequence
  Description of Artificial Sequence: Synthetic pecan; 5' sequence and inner sequence
tagggaagagaaggacatatgatggcatgcacgcacctacacttgggcacgta

SEQ ID NO: 21694 - DNA, 53 bp, Artificial Sequence
  Description of Artificial Sequence: Synthetic pecan; 5' sequence and inner sequence
tagggaagagaaggacatatgatccatcgcgtcactatcatgggtgtcacgta

SEQ ID NO: 21695 - DNA, 53 bp, Artificial Sequence
  Description of Artificial Sequence: Synthetic pecan; 5' sequence and inner sequence
tagggaagagaaggacatatgatccgatcgcacgtcgaggcaggctgtacgag

SEQ ID NO: 21696 - DNA, 53 bp, Artificial Sequence
  Description of Artificial Sequence: Synthetic pecan; 5' sequence and inner sequence
tagggaagagaaggacatatgatccatcgcgtcactatcatgtgcgtcacgta

SEQ ID NO: 21697 - DNA, 53 bp, Artificial Sequence; identical to SEQ ID NO: 9910
  Description of Artificial Sequence: Synthetic pecan; 5' sequence and inner sequence

SEQ ID NO: 21698 - DNA, 53 bp, Artificial Sequence
  Description of Artificial Sequence: Synthetic pecan; 5' sequence and inner sequence
tagggaagagaaggacatatgatccgtagcgacatcaagcggtggtgcgcgcg

SEQ ID NO: 21699 - DNA, 53 bp, Artificial Sequence; identical to SEQ ID NO: 13827
  Description of Artificial Sequence: Synthetic pecan; 5' sequence and inner sequence

SEQ ID NO: 21700 - DNA, 53 bp, Artificial Sequence
  Description of Artificial Sequence: Synthetic pecan; 5' sequence and inner sequence
tagggaagagaaggacatatgatccttagcgacatcaagcggtggtgtgcgtg

SEQ ID NO: 21701 - DNA, 53 bp, Artificial Sequence
  Description of Artificial Sequence: Synthetic pecan; 5' sequence and inner sequence
tagggaagagaaggacatatgatgcacgactcgcaccctatcatgaggccgtg

SEQ ID NO: 21702 - DNA, 53 bp, Artificial Sequence; identical to SEQ ID NO: 1534
  Description of Artificial Sequence: Synthetic pecan; 5' sequence and inner sequence

SEQ ID NO: 21703 - DNA, 53 bp, Artificial Sequence; identical to SEQ ID NO: 1102
  Description of Artificial Sequence: Synthetic pecan; 5' sequence and inner sequence

SEQ ID NO: 21704 - DNA, 53 bp, Artificial Sequence; identical to SEQ ID NO: 1660
  Description of Artificial Sequence: Synthetic pecan; 5' sequence and inner sequence

SEQ ID NO: 21705 - DNA, 52 bp, Artificial Sequence
  Description of Artificial Sequence: Synthetic pecan; 5' sequence and inner sequence
tagggaagagaaggacatatgatccgcacgtagccctaccagtgtgtcagtg

SEQ ID NO: 21706 - DNA, 53 bp, Artificial Sequence
  Description of Artificial Sequence: Synthetic pecan; 5' sequence and inner sequence
tagggaagagaaggacatatgatggacgcagcggcacgttcgagtggtacgta

SEQ ID NO: 21707 - DNA, 53 bp, Artificial Sequence; identical to SEQ ID NO: 5872
  Description of Artificial Sequence: Synthetic pecan; 5' sequence and inner sequence

SEQ ID NO: 21708 - DNA, 53 bp, Artificial Sequence
  Description of Artificial Sequence: Synthetic pecan; 5' sequence and inner sequence
tagggaagagaaggacatatgatccatcgcgtcactatcctgtgtgtcacgta

SEQ ID NO: 21709 - DNA, 53 bp, Artificial Sequence
  Description of Artificial Sequence: Synthetic pecan; 5' sequence and inner sequence
tagggaagagaaggacatatgatgcacgactcgcaccctatcataaggccatg

SEQ ID NO: 21710 - DNA, 53 bp, Artificial Sequence
  Description of Artificial Sequence: Synthetic pecan; 5' sequence and inner sequence
tagggaagagaaggacatatgatcgcaccatcgatacgtcatgcacgctgaca

SEQ ID NO: 21711 - DNA, 53 bp, Artificial Sequence
  Description of Artificial Sequence: Synthetic pecan; 5' sequence and inner sequence
tagggaagagaaggacatatgatccgtagcgacatcaaacggtggtgtgcgtg

SEQ ID NO: 21712 - DNA, 53 bp, Artificial Sequence
  Description of Artificial Sequence: Synthetic pecan; 5' sequence and inner sequence
tagggaagagaaggacatatgatcgacgcagcttgcctactggtggtcacgta

SEQ ID NO: 21713 - DNA, 53 bp, Artificial Sequence; identical to SEQ ID NO: 5845
  Description of Artificial Sequence: Synthetic pecan; 5' sequence and inner sequence

SEQ ID NO: 21714 - DNA, 53 bp, Artificial Sequence; identical to SEQ ID NO: 1315
  Description of Artificial Sequence: Synthetic pecan; 5' sequence and inner sequence

SEQ ID NO: 21715 - DNA, 53 bp, Artificial Sequence
  Description of Artificial Sequence: Synthetic pecan; 5' sequence and inner sequence
tagggaagagaaggacatatgatggatgcagcttgcctactggtggtcacgta

SEQ ID NO: 21716 - DNA, 53 bp, Artificial Sequence; identical to SEQ ID NO: 1182
  Description of Artificial Sequence: Synthetic pecan; 5' sequence and inner sequence

SEQ ID NO: 21717 - DNA, 54 bp, Artificial Sequence
  Description of Artificial Sequence: Synthetic pecan; 5' sequence and inner sequence
tagggaagagaaggacatatgatggcatggcgcgcaccctatcatgaggccatg

SEQ ID NO: 21718 - DNA, 53 bp, Artificial Sequence
  Description of Artificial Sequence: Synthetic pecan; 5' sequence and inner sequence
tagggaagagaaggacatatgatgtcatgccatcccttcgactgtgacaggta

SEQ ID NO: 21719 - DNA, 53 bp, Artificial Sequence
  Description of Artificial Sequence: Synthetic pecan; 5' sequence and inner sequence
tagggaagagaaggacatatgatccgcacgtagccctatcagtgatgcatgca

SEQ ID NO: 21720 - DNA, 53 bp, Artificial Sequence
  Description of Artificial Sequence: Synthetic pecan; 5' sequence and inner sequence
tagggaagagaaggacatatgatccgtagcgacttcaagcggtggtgtgcgtg

SEQ ID NO: 21721 - DNA, 53 bp, Artificial Sequence
  Description of Artificial Sequence: Synthetic pecan; 5' sequence and inner sequence
tagggaagagaaggacatatgatcgcaccgtcgatacgtcatgctcgctgaca

SEQ ID NO: 21722 - DNA, 53 bp, Artificial Sequence
  Description of Artificial Sequence: Synthetic pecan; 5' sequence and inner sequence
tagggaagagaaggacatatgatgtcattctgcatcctacacgtgggcacgta

SEQ ID NO: 21723 - DNA, 53 bp, Artificial Sequence
  Description of Artificial Sequence: Synthetic pecan; 5' sequence and inner sequence
tagggaagagaaggacatatgatccgatcgcacgtcaaggctggctgtacgag

SEQ ID NO: 21724 - DNA, 53 bp, Artificial Sequence
  Description of Artificial Sequence: Synthetic pecan; 5' sequence and inner sequence
tagggaagagaaggacatatgatccatcgcgtcactatcatgtgtttcacgta

SEQ ID NO: 21725 - DNA, 53 bp, Artificial Sequence
  Description of Artificial Sequence: Synthetic pecan; 5' sequence and inner sequence
tagggaagagaaggacatatgatccgatcgcacgtcaaggcagtctgtacgag

SEQ ID NO: 21726 - DNA, 53 bp, Artificial Sequence; identical to SEQ ID NO: 9868
  Description of Artificial Sequence: Synthetic pecan; 5' sequence and inner sequence

SEQ ID NO: 21727 - DNA, 53 bp, Artificial Sequence; identical to SEQ ID NO: 1108
  Description of Artificial Sequence: Synthetic pecan; 5' sequence and inner sequence

SEQ ID NO: 21728 - DNA, 53 bp, Artificial Sequence
  Description of Artificial Sequence: Synthetic pecan; 5' sequence and inner sequence
tagggaagagaaggacatatgatccgcacgtagccctatcagtggtgcataca

SEQ ID NO: 21729 - DNA, 53 bp, Artificial Sequence; identical to SEQ ID NO: 9884
  Description of Artificial Sequence: Synthetic pecan; 5' sequence and inner sequence

SEQ ID NO: 21730 - DNA, 53 bp, Artificial Sequence
  Description of Artificial Sequence: Synthetic pecan; 5' sequence and inner sequence
tagggaagagaaggacatatgatgtaatgcacgaacactatcatggcggcatg

SEQ ID NO: 21731 - DNA, 53 bp, Artificial Sequence
  Description of Artificial Sequence: Synthetic pecan; 5' sequence and inner sequence
tagggaagagaaggacatatgatccgcacctagccctatcagtggtgcatgca

SEQ ID NO: 21732 - DNA, 53 bp, Artificial Sequence
  Description of Artificial Sequence: Synthetic pecan; 5' sequence and inner sequence
tagggaagagaaggacatatgatggcacaaacggatcgacaagtgcgcatgga

SEQ ID NO: 21733 - DNA, 53 bp, Artificial Sequence
  Description of Artificial Sequence: Synthetic pecan; 5' sequence and inner sequence
tagggaagagaaggacatatgatggcatgcacgcacctacacgtgtgcacgta

SEQ ID NO: 21734 - DNA, 53 bp, Artificial Sequence; identical to SEQ ID NO: 5301
  Description of Artificial Sequence: Synthetic pecan; 5' sequence and inner sequence

SEQ ID NO: 21735 - DNA, 53 bp, Artificial Sequence; identical to SEQ ID NO: 1157
  Description of Artificial Sequence: Synthetic pecan; 5' sequence and inner sequence

SEQ ID NO: 21736 - DNA, 53 bp, Artificial Sequence
  Description of Artificial Sequence: Synthetic pecan; 5' sequence and inner sequence
tagggaagagaaggacatatgatgtcatgcacgaaaactatcatggcggcatg

SEQ ID NO: 21737 - DNA, 53 bp, Artificial Sequence
  Description of Artificial Sequence: Synthetic pecan; 5' sequence and inner sequence
tagggaagagaaggacatatgatgtcatgcacgaaccctatcatggcggcatg

SEQ ID NO: 21738 - DNA, 54 bp, Artificial Sequence; identical to SEQ ID NO: 1258
  Description of Artificial Sequence: Synthetic pecan; 5' sequence and inner sequence

SEQ ID NO: 21739 - DNA, 53 bp, Artificial Sequence; identical to SEQ ID NO: 1955
  Description of Artificial Sequence: Synthetic pecan; 5' sequence and inner sequence

SEQ ID NO: 21740 - DNA, 53 bp, Artificial Sequence
  Description of Artificial Sequence: Synthetic pecan; 5' sequence and inner sequence
tagggaagagaaggacatatgatgcacgactcgcaccctatcttgaggccatg

SEQ ID NO: 21741 - DNA, 48 bp, Artificial Sequence
  Description of Artificial Sequence: Synthetic pecan; 5' sequence and inner sequence
tagggaagagaaggacatatgatgtcattccgcatcctacacgtgggc

SEQ ID NO: 21742 - DNA, 53 bp, Artificial Sequence; identical to SEQ ID NO: 1298
  Description of Artificial Sequence: Synthetic pecan; 5' sequence and inner sequence

SEQ ID NO: 21743 - DNA, 53 bp, Artificial Sequence
  Description of Artificial Sequence: Synthetic pecan; 5' sequence and inner sequence
tagggaagagaaggacatatgatcgcgtccgtggcgtcacgtcgtggtgtgga

SEQ ID NO: 21744 - DNA, 53 bp, Artificial Sequence
  Description of Artificial Sequence: Synthetic pecan; 5' sequence and inner sequence
tagggaagagaaggacatatgatgcacgcacgatgagcgccaagtgacatgga

SEQ ID NO: 21745 - DNA, 53 bp, Artificial Sequence; identical to SEQ ID NO: 5948
  Description of Artificial Sequence: Synthetic pecan; 5' sequence and inner sequence

SEQ ID NO: 21746 - DNA, 53 bp, Artificial Sequence
  Description of Artificial Sequence: Synthetic pecan; 5' sequence and inner sequence
tagggaagagaaggacatatgatccatcgcgtcattatcatgtgtgtcacgta

SEQ ID NO: 21747 - DNA, 53 bp, Artificial Sequence; identical to SEQ ID NO: 1461
  Description of Artificial Sequence: Synthetic pecan; 5' sequence and inner sequence

SEQ ID NO: 21748 - DNA, 52 bp, Artificial Sequence; identical to SEQ ID NO: 1334
  Description of Artificial Sequence: Synthetic pecan; 5' sequence and inner sequence

SEQ ID NO: 21749 - DNA, 53 bp, Artificial Sequence
  Description of Artificial Sequence: Synthetic pecan; 5' sequence and inner sequence
tagggaagagaaggacatatgatgacacaaacggaccgacaagtgcgcatgga

SEQ ID NO: 21750 - DNA, 53 bp, Artificial Sequence
  Description of Artificial Sequence: Synthetic pecan; 5' sequence and inner sequence
tagggaagagaaggacatatgatgtcgtgactggctagctggacatgcactga

SEQ ID NO: 21751 - DNA, 53 bp, Artificial Sequence; identical to SEQ ID NO: 9978
  Description of Artificial Sequence: Synthetic pecan; 5' sequence and inner sequence

SEQ ID NO: 21752 - DNA, 53 bp, Artificial Sequence
  Description of Artificial Sequence: Synthetic pecan; 5' sequence and inner sequence
tagggaagagaaggacatatgatccatcgcgtcactatcatgtgtgccacgta

SEQ ID NO: 21753 - DNA, 53 bp, Artificial Sequence
  Description of Artificial Sequence: Synthetic pecan; 5' sequence and inner sequence
tagggaagagaaggacatatgatgacatgcacgcacctacacgtgggtatgga

SEQ ID NO: 21754 - DNA, 53 bp, Artificial Sequence
  Description of Artificial Sequence: Synthetic pecan; 5' sequence and inner sequence
tagggaagagaaggacatatgatgtacgcagcggaacgttcgagtggtacgta

SEQ ID NO: 21755 - DNA, 53 bp, Artificial Sequence
  Description of Artificial Sequence: Synthetic pecan; 5' sequence and inner sequence
tagggaagagaaggacatatgatggacgcagcttgcctcctggtggtcacgta

SEQ ID NO: 21756 - DNA, 53 bp, Artificial Sequence; identical to SEQ ID NO: 5229
  Description of Artificial Sequence: Synthetic pecan; 5' sequence and inner sequence

SEQ ID NO: 21757 - DNA, 53 bp, Artificial Sequence; identical to SEQ ID NO: 1085
  Description of Artificial Sequence: Synthetic pecan; 5' sequence and inner sequence

SEQ ID NO: 21758 - DNA, 53 bp, Artificial Sequence; identical to SEQ ID NO: 13932
  Description of Artificial Sequence: Synthetic pecan; 5' sequence and inner sequence

SEQ ID NO: 21759 - DNA, 53 bp, Artificial Sequence; identical to SEQ ID NO: 1840
  Description of Artificial Sequence: Synthetic pecan; 5' sequence and inner sequence

SEQ ID NO: 21760 - DNA, 53 bp, Artificial Sequence
  Description of Artificial Sequence: Synthetic pecan; 5' sequence and inner sequence
tagggaagagaaggacatatgatggcattcacgcacctacacgtgggtatgga

SEQ ID NO: 21761 - DNA, 53 bp, Artificial Sequence
  Description of Artificial Sequence: Synthetic pecan; 5' sequence and inner sequence
tagggaagagaaggacatatgatcgcaccgtcggtacgtcatgcacgctgaca

SEQ ID NO: 21762 - DNA, 53 bp, Artificial Sequence; identical to SEQ ID NO: 17399
  Description of Artificial Sequence: Synthetic pecan; 5' sequence and inner sequence

SEQ ID NO: 21763 - DNA, 53 bp, Artificial Sequence; identical to SEQ ID NO: 9748
  Description of Artificial Sequence: Synthetic pecan; 5' sequence and inner sequence

SEQ ID NO: 21764 - DNA, 53 bp, Artificial Sequence
  Description of Artificial Sequence: Synthetic pecan; 5' sequence and inner sequence
tagggaagagaaggacatatgatccgcacgtacctctatcagtggtgcatgca

SEQ ID NO: 21765 - DNA, 53 bp, Artificial Sequence; identical to SEQ ID NO: 5856
  Description of Artificial Sequence: Synthetic pecan; 5' sequence and inner sequence

SEQ ID NO: 21766 - DNA, 53 bp, Artificial Sequence
  Description of Artificial Sequence: Synthetic pecan; 5' sequence and inner sequence
tagggaagagaaggacatatgatgcacgcagcttgcctactggtggtcacgta

SEQ ID NO: 21767 - DNA, 53 bp, Artificial Sequence
  Description of Artificial Sequence: Synthetic pecan; 5' sequence and inner sequence
tagggaagagaaggacatatgatgcacgactcgcaccctatcgtgaggccatg

SEQ ID NO: 21768 - DNA, 53 bp, Artificial Sequence; identical to SEQ ID NO: 1921
  Description of Artificial Sequence: Synthetic pecan; 5' sequence and inner sequence

SEQ ID NO: 21769 - DNA, 53 bp, Artificial Sequence
  Description of Artificial Sequence: Synthetic pecan; 5' sequence and inner sequence
tagggaagagaaggacatatgatggccacagcttacctcaacgtggacgtgca

SEQ ID NO: 21770 - DNA, 53 bp, Artificial Sequence; identical to SEQ ID NO: 5401
  Description of Artificial Sequence: Synthetic pecan; 5' sequence and inner sequence

SEQ ID NO: 21771 - DNA, 53 bp, Artificial Sequence
  Description of Artificial Sequence: Synthetic pecan; 5' sequence and inner sequence
tagggaagagaaggacatatgatccgcacgtagccctattagtggtgcatgca

SEQ ID NO: 21772 - DNA, 53 bp, Artificial Sequence; identical to SEQ ID NO: 1753
  Description of Artificial Sequence: Synthetic pecan; 5' sequence and inner sequence

SEQ ID NO: 21773 - DNA, 53 bp, Artificial Sequence
  Description of Artificial Sequence: Synthetic pecan; 5' sequence and inner sequence
tagggaagagaaggacatatgatgcactgcacgcaccctatcatgtcggcatg

SEQ ID NO: 21774 - DNA, 53 bp, Artificial Sequence; identical to SEQ ID NO: 1264
  Description of Artificial Sequence: Synthetic pecan; 5' sequence and inner sequence

SEQ ID NO: 21775 - DNA, 53 bp, Artificial Sequence
  Description of Artificial Sequence: Synthetic pecan; 5' sequence and inner sequence
tagggaagagaaggacatatgatggacgcagcttgccttctggtggtcacgta

SEQ ID NO: 21776 - DNA, 53 bp, Artificial Sequence
  Description of Artificial Sequence: Synthetic pecan; 5' sequence and inner sequence
tagggaagagaaggacatatgatgtcatgaacgaacactatcatggcggcatg

SEQ ID NO: 21777 - DNA, 53 bp, Artificial Sequence
  Description of Artificial Sequence: Synthetic pecan; 5' sequence and inner sequence
tagggaagagaaggacatatgatcgcgcctacgatgggcaggcacatgtcgca

SEQ ID NO: 21778 - DNA, 53 bp, Artificial Sequence
  Description of Artificial Sequence: Synthetic pecan; 5' sequence and inner sequence
tagggaagagaaggacatatgatgtcatgcacgaacactatgatggcggcatg

SEQ ID NO: 21779 - DNA, 53 bp, Artificial Sequence; identical to SEQ ID NO: 1269
  Description of Artificial Sequence: Synthetic pecan; 5' sequence and inner sequence

SEQ ID NO: 21780 - DNA, 53 bp, Artificial Sequence
  Description of Artificial Sequence: Synthetic pecan; 5' sequence and inner sequence
tagggaagagaaggacatatgatggacgcagcggaacgctcgagtggtacgta

SEQ ID NO: 21781 - DNA, 53 bp, Artificial Sequence
  Description of Artificial Sequence: Synthetic pecan; 5' sequence and inner sequence
tagggaagagaaggacatatgatgcacaactcgcaccctatcatgaggccatg

SEQ ID NO: 21782 - DNA, 53 bp, Artificial Sequence; identical to SEQ ID NO: 1318
  Description of Artificial Sequence: Synthetic pecan; 5' sequence and inner sequence

SEQ ID NO: 21783 - DNA, 53 bp, Artificial Sequence
  Description of Artificial Sequence: Synthetic pecan; 5' sequence and inner sequence
tagggaagagaaggacatatgatggacgcactcaaccgccaagtgccgtcgtg

SEQ ID NO: 21784 - DNA, 53 bp, Artificial Sequence
  Description of Artificial Sequence: Synthetic pecan; 5' sequence and inner sequence
tagggaagagaaggacatatgatggccacagcgtacctcaacgtggacgggca

SEQ ID NO: 21785 - DNA, 53 bp, Artificial Sequence
  Description of Artificial Sequence: Synthetic pecan; 5' sequence and inner sequence
tagggaagagaaggacatatgatccccacgtagccctatcagtggtgcatgca

SEQ ID NO: 21786 - DNA, 53 bp, Artificial Sequence; identical to SEQ ID NO: 1943
  Description of Artificial Sequence: Synthetic pecan; 5' sequence and inner sequence

SEQ ID NO: 21787 - DNA, 53 bp, Artificial Sequence
  Description of Artificial Sequence: Synthetic pecan; 5' sequence and inner sequence
tagggaagagaaggacatatgatgtcatgcacgaacattatcatggcggcatg

SEQ ID NO: 21788 - DNA, 53 bp, Artificial Sequence
  Description of Artificial Sequence: Synthetic pecan; 5' sequence and inner sequence
tagggaagagaaggacatatgatggcatgcatgcacctacacgtgggtatgga

SEQ ID NO: 21789 - DNA, 53 bp, Artificial Sequence
  Description of Artificial Sequence: Synthetic pecan; 5' sequence and inner sequence
tagggaagagaaggacatatgatgtcatgccatcccttcgagtgtgacatgta

SEQ ID NO: 21790 - DNA, 53 bp, Artificial Sequence; identical to SEQ ID NO: 1156
  Description of Artificial Sequence: Synthetic pecan; 5' sequence and inner sequence

SEQ ID NO: 21791 - DNA, 53 bp, Artificial Sequence; identical to SEQ ID NO: 1903
  Description of Artificial Sequence: Synthetic pecan; 5' sequence and inner sequence

SEQ ID NO: 21792 - DNA, 53 bp, Artificial Sequence
  Description of Artificial Sequence: Synthetic pecan; 5' sequence and inner sequence
tagggaagagaaggacatatgatccgcacgtagccctaccagtggtgcatgca

SEQ ID NO: 21793 - DNA, 53 bp, Artificial Sequence
  Description of Artificial Sequence: Synthetic pecan; 5' sequence and inner sequence
tagggaagagaaggacatatgatgcccacagcgtacctcaacgtggacgtgca

SEQ ID NO: 21794 - DNA, 53 bp, Artificial Sequence; identical to SEQ ID NO: 17211
  Description of Artificial Sequence: Synthetic pecan; 5' sequence and inner sequence

SEQ ID NO: 21795 - DNA, 53 bp, Artificial Sequence
  Description of Artificial Sequence: Synthetic pecan; 5' sequence and inner sequence
tagggaagagaaggacatatgatgtcatgccatccctttgagtgtgacaggta

SEQ ID NO: 21796 - DNA, 53 bp, Artificial Sequence
  Description of Artificial Sequence: Synthetic pecan; 5' sequence and inner sequence
tagggaagagaaggacatatgatggccaagctgaccgtaaagtcaggcgtgta

SEQ ID NO: 21797 - DNA, 53 bp, Artificial Sequence
  Description of Artificial Sequence: Synthetic pecan; 5' sequence and inner sequence
tagggaagagaaggacatatgatgtcatgcacgaacactatcatggcggcgtg

SEQ ID NO: 21798 - DNA, 53 bp, Artificial Sequence
  Description of Artificial Sequence: Synthetic pecan; 5' sequence and inner sequence
tagggaagagaaggacatatgatggaagcagcttgcctactggtggtcacgta

SEQ ID NO: 21799 - DNA, 53 bp, Artificial Sequence
  Description of Artificial Sequence: Synthetic pecan; 5' sequence and inner sequence
tagggaagagaaggacatatgatggcacaaacggaccgacaagtgcgcctgga

SEQ ID NO: 21800 - DNA, 53 bp, Artificial Sequence
  Description of Artificial Sequence: Synthetic pecan; 5' sequence and inner sequence
tagggaagagaaggacatatgatcgcaccgtcgttacgtcatgcacgctgaca

SEQ ID NO: 21801 - DNA, 53 bp, Artificial Sequence
  Description of Artificial Sequence: Synthetic pecan; 5' sequence and inner sequence
tagggaagagaaggacatatgatccatcgcgtcactatcatgtgtgtcacgtg

SEQ ID NO: 21802 - DNA, 53 bp, Artificial Sequence; identical to SEQ ID NO: 13700
  Description of Artificial Sequence: Synthetic pecan; 5' sequence and inner sequence

SEQ ID NO: 21803 - DNA, 53 bp, Artificial Sequence
  Description of Artificial Sequence: Synthetic pecan; 5' sequence and inner sequence
tagggaagagaaggacatatgatgcacgactcgcaccctatcatgagaccatg

SEQ ID NO: 21804 - DNA, 53 bp, Artificial Sequence; identical to SEQ ID NO: 1598
  Description of Artificial Sequence: Synthetic pecan; 5' sequence and inner sequence

SEQ ID NO: 21805 - DNA, 53 bp, Artificial Sequence; identical to SEQ ID NO: 17692
  Description of Artificial Sequence: Synthetic pecan; 5' sequence and inner sequence

SEQ ID NO: 21806 - DNA, 53 bp, Artificial Sequence; identical to SEQ ID NO: 5682
  Description of Artificial Sequence: Synthetic pecan; 5' sequence and inner sequence

SEQ ID NO: 21807 - DNA, 53 bp, Artificial Sequence
  Description of Artificial Sequence: Synthetic pecan; 5' sequence and inner sequence
tagggaagagaaggacatatgatccgtagcgacatcaagcagtggtgtgcgtg

SEQ ID NO: 21808 - DNA, 53 bp, Artificial Sequence; identical to SEQ ID NO: 5938
  Description of Artificial Sequence: Synthetic pecan; 5' sequence and inner sequence

SEQ ID NO: 21809 - DNA, 53 bp, Artificial Sequence
  Description of Artificial Sequence: Synthetic pecan; 5' sequence and inner sequence
tagggaagagaaggacatatgatggcacaaacggaccgacaagtgcacatgga

SEQ ID NO: 21810 - DNA, 53 bp, Artificial Sequence; identical to SEQ ID NO: 5887
  Description of Artificial Sequence: Synthetic pecan; 5' sequence and inner sequence

SEQ ID NO: 21811 - DNA, 53 bp, Artificial Sequence
  Description of Artificial Sequence: Synthetic pecan; 5' sequence and inner sequence
tagggaagagaaggacatatgatgtcattcacgaacactatcatggcggcatg

SEQ ID NO: 21812 - DNA, 53 bp, Artificial Sequence; identical to SEQ ID NO: 17675
  Description of Artificial Sequence: Synthetic pecan; 5' sequence and inner sequence

SEQ ID NO: 21813 - DNA, 53 bp, Artificial Sequence; identical to SEQ ID NO: 9872
  Description of Artificial Sequence: Synthetic pecan; 5' sequence and inner sequence

SEQ ID NO: 21814 - DNA, 53 bp, Artificial Sequence
  Description of Artificial Sequence: Synthetic pecan; 5' sequence and inner sequence
tagggaagagaaggacatatgatccgcacgtagccctatcggtggtgcatgca

SEQ ID NO: 21815 - DNA, 53 bp, Artificial Sequence
  Description of Artificial Sequence: Synthetic pecan; 5' sequence and inner sequence
tagggaagagaaggacatatgatccattgcgtcactatcatgtgtgtcacgta

SEQ ID NO: 21816 - DNA, 53 bp, Artificial Sequence; identical to SEQ ID NO: 9891
  Description of Artificial Sequence: Synthetic pecan; 5' sequence and inner sequence

SEQ ID NO: 21817 - DNA, 53 bp, Artificial Sequence
  Description of Artificial Sequence: Synthetic pecan; 5' sequence and inner sequence
tagggaagagaaggacatatgatgtcattccgcatcctacacgtggacacgta

SEQ ID NO: 21818 - DNA, 53 bp, Artificial Sequence; identical to SEQ ID NO: 1109
  Description of Artificial Sequence: Synthetic pecan; 5' sequence and inner sequence

SEQ ID NO: 21819 - DNA, 56 bp, Artificial Sequence
  Description of Artificial Sequence: Synthetic pecan; 5' sequence and inner sequence
tagggaagagaaggacatatgatggcatgcacgcacctacacgtgggtatggcatg

SEQ ID NO: 21820 - DNA, 53 bp, Artificial Sequence
  Description of Artificial Sequence: Synthetic pecan; 5' sequence and inner sequence
tagggaagagaaggacatatgatggccacagcgtacctcaacggggacgtgca

SEQ ID NO: 21821 - DNA, 53 bp, Artificial Sequence; identical to SEQ ID NO: 17769
  Description of Artificial Sequence: Synthetic pecan; 5' sequence and inner sequence

SEQ ID NO: 21822 - DNA, 53 bp, Artificial Sequence; identical to SEQ ID NO: 1130
  Description of Artificial Sequence: Synthetic pecan; 5' sequence and inner sequence

SEQ ID NO: 21823 - DNA, 53 bp, Artificial Sequence
  Description of Artificial Sequence: Synthetic pecan; 5' sequence and inner sequence
tagggaagagaaggacatatgatggcatgcacgcacctacaggtgggtatgga

SEQ ID NO: 21824 - DNA, 53 bp, Artificial Sequence; identical to SEQ ID NO: 1398
  Description of Artificial Sequence: Synthetic pecan; 5' sequence and inner sequence

SEQ ID NO: 21825 - DNA, 53 bp, Artificial Sequence; identical to SEQ ID NO: 1060
  Description of Artificial Sequence: Synthetic pecan; 5' sequence and inner sequence

SEQ ID NO: 21826 - DNA, 53 bp, Artificial Sequence
  Description of Artificial Sequence: Synthetic pecan; 5' sequence and inner sequence
tagggaagagaaggacatatgatggcacaaacggtccgacaagtgcgcatgga

SEQ ID NO: 21827 - DNA, 53 bp, Artificial Sequence; identical to SEQ ID NO: 1636
  Description of Artificial Sequence: Synthetic pecan; 5' sequence and inner sequence

SEQ ID NO: 21828 - DNA, 53 bp, Artificial Sequence; identical to SEQ ID NO: 5967
  Description of Artificial Sequence: Synthetic pecan; 5' sequence and inner sequence

SEQ ID NO: 21829 - DNA, 53 bp, Artificial Sequence
  Description of Artificial Sequence: Synthetic pecan; 5' sequence and inner sequence
tagggaagagaaggacatatgatggcatgcacgcacctacacgagggtatgga

SEQ ID NO: 21830 - DNA, 53 bp, Artificial Sequence; identical to SEQ ID NO: 9758
  Description of Artificial Sequence: Synthetic pecan; 5' sequence and inner sequence

SEQ ID NO: 21831 - DNA, 53 bp, Artificial Sequence
  Description of Artificial Sequence: Synthetic pecan; 5' sequence and inner sequence
tagggaagagaaggacatatgatccatcgcgtcactatcatgtgtgttacgta

SEQ ID NO: 21832 - DNA, 53 bp, Artificial Sequence; identical to SEQ ID NO: 1563
  Description of Artificial Sequence: Synthetic pecan; 5' sequence and inner sequence

SEQ ID NO: 21833 - DNA, 53 bp, Artificial Sequence; identical to SEQ ID NO: 5571
  Description of Artificial Sequence: Synthetic pecan; 5' sequence and inner sequence

SEQ ID NO: 21834 - DNA, 51 bp, Artificial Sequence; identical to SEQ ID NO: 13885
  Description of Artificial Sequence: Synthetic pecan; 5' sequence and inner sequence

SEQ ID NO: 21835 - DNA, 53 bp, Artificial Sequence; identical to SEQ ID NO: 1305
  Description of Artificial Sequence: Synthetic pecan; 5' sequence and inner sequence

SEQ ID NO: 21836 - DNA, 53 bp, Artificial Sequence
  Description of Artificial Sequence: Synthetic pecan; 5' sequence and inner sequence
tagggaagagaaggacatatgatggccaccgcgtacctcaacgtggacgtgca

SEQ ID NO: 21837 - DNA, 53 bp, Artificial Sequence; identical to SEQ ID NO: 17962
  Description of Artificial Sequence: Synthetic pecan; 5' sequence and inner sequence

SEQ ID NO: 21838 - DNA, 53 bp, Artificial Sequence; identical to SEQ ID NO: 13944
  Description of Artificial Sequence: Synthetic pecan; 5' sequence and inner sequence

SEQ ID NO: 21839 - DNA, 53 bp, Artificial Sequence; identical to SEQ ID NO: 13922
  Description of Artificial Sequence: Synthetic pecan; 5' sequence and inner sequence

SEQ ID NO: 21840 - DNA, 53 bp, Artificial Sequence; identical to SEQ ID NO: 1086
  Description of Artificial Sequence: Synthetic pecan; 5' sequence and inner sequence

SEQ ID NO: 21841 - DNA, 51 bp, Artificial Sequence
  Description of Artificial Sequence: Synthetic pecan; 5' sequence and inner sequence
tagggaagagaaggacatatgatgtgcgaccgacccgtaagtgtgcatgcg

SEQ ID NO: 21842 - DNA, 53 bp, Artificial Sequence; identical to SEQ ID NO: 1793
  Description of Artificial Sequence: Synthetic pecan; 5' sequence and inner sequence

SEQ ID NO: 21843 - DNA, 53 bp, Artificial Sequence; identical to SEQ ID NO: 1155
  Description of Artificial Sequence: Synthetic pecan; 5' sequence and inner sequence

SEQ ID NO: 21844 - DNA, 53 bp, Artificial Sequence; identical to SEQ ID NO: 1458
  Description of Artificial Sequence: Synthetic pecan; 5' sequence and inner sequence

SEQ ID NO: 21845 - DNA, 53 bp, Artificial Sequence
  Description of Artificial Sequence: Synthetic pecan; 5' sequence and inner sequence
tagggaagagaaggacatatgatcgcaccgtcaagcgggaaggtactttggtg

SEQ ID NO: 21846 - DNA, 53 bp, Artificial Sequence
  Description of Artificial Sequence: Synthetic pecan; 5' sequence and inner sequence
tagggaagagaaggacatatgatgtgcgagcagaccgacgcgagtggtacgta

SEQ ID NO: 21847 - DNA, 53 bp, Artificial Sequence
  Description of Artificial Sequence: Synthetic pecan; 5' sequence and inner sequence
tagggaagagaaggacatatgatggcatgcacgcaactacacgtgggcacgta

SEQ ID NO: 21848 - DNA, 53 bp, Artificial Sequence
  Description of Artificial Sequence: Synthetic pecan; 5' sequence and inner sequence
tagggaagagaaggacatatgatggcacaaacggcccgacaagtgcgcatgga

SEQ ID NO: 21849 - DNA, 53 bp, Artificial Sequence
  Description of Artificial Sequence: Synthetic pecan; 5' sequence and inner sequence
tagggaagagaaggacatatgatggacgcagcggaacgttcgagtggtacgtg

SEQ ID NO: 21850 - DNA, 53 bp, Artificial Sequence
  Description of Artificial Sequence: Synthetic pecan; 5' sequence and inner sequence
tagggaagagaaggacatatgatccgcacttagccctatcagtggtgcatgca

SEQ ID NO: 21851 - DNA, 53 bp, Artificial Sequence; identical to SEQ ID NO: 9968
  Description of Artificial Sequence: Synthetic pecan; 5' sequence and inner sequence

SEQ ID NO: 21852 - DNA, 53 bp, Artificial Sequence; identical to SEQ ID NO: 9564
  Description of Artificial Sequence: Synthetic pecan; 5' sequence and inner sequence

SEQ ID NO: 21853 - DNA, 53 bp, Artificial Sequence
  Description of Artificial Sequence: Synthetic pecan; 5' sequence and inner sequence
tagggaagagaaggacatatgatccgtagcgacatcaagcggtggtgtacgtg

SEQ ID NO: 21854 - DNA, 53 bp, Artificial Sequence
  Description of Artificial Sequence: Synthetic pecan; 5' sequence and inner sequence
tagggaagagaaggacatatgatggcacaaacgcaccgacaagtgcgcatgga

SEQ ID NO: 21855 - DNA, 53 bp, Artificial Sequence
  Description of Artificial Sequence: Synthetic pecan; 5' sequence and inner sequence
tagggaagagaaggacatatgatccgcatgtagccctatcagtggtgcatgca

SEQ ID NO: 21856 - DNA, 53 bp, Artificial Sequence; identical to SEQ ID NO: 1361
  Description of Artificial Sequence: Synthetic pecan; 5' sequence and inner sequence

SEQ ID NO: 21857 - DNA, 53 bp, Artificial Sequence; identical to SEQ ID NO: 1532
  Description of Artificial Sequence: Synthetic pecan; 5' sequence and inner sequence

SEQ ID NO: 21858 - DNA, 53 bp, Artificial Sequence
  Description of Artificial Sequence: Synthetic pecan; 5' sequence and inner sequence
tagggaagagaaggacatatgatggcacaaacggaccgacaagtgcgcatgta

SEQ ID NO: 21859 - DNA, 53 bp, Artificial Sequence
  Description of Artificial Sequence: Synthetic pecan; 5' sequence and inner sequence
tagggaagagaaggacatatgatggccaagctgaccgtaaatgcaggcgtgta

SEQ ID NO: 21860 - DNA, 53 bp, Artificial Sequence; identical to SEQ ID NO: 17980
  Description of Artificial Sequence: Synthetic pecan; 5' sequence and inner sequence

SEQ ID NO: 21861 - DNA, 53 bp, Artificial Sequence; identical to SEQ ID NO: 1217
  Description of Artificial Sequence: Synthetic pecan; 5' sequence and inner sequence

SEQ ID NO: 21862 - DNA, 52 bp, Artificial Sequence
  Description of Artificial Sequence: Synthetic pecan; 5' sequence and inner sequence
tagggaagagaaggacatatgatgcacgccgatgccctcatgttgccgtgga

SEQ ID NO: 21863 - DNA, 53 bp, Artificial Sequence; identical to SEQ ID NO: 1134
  Description of Artificial Sequence: Synthetic pecan; 5' sequence and inner sequence

SEQ ID NO: 21864 - DNA, 53 bp, Artificial Sequence; identical to SEQ ID NO: 5489
  Description of Artificial Sequence: Synthetic pecan; 5' sequence and inner sequence

SEQ ID NO: 21865 - DNA, 53 bp, Artificial Sequence
  Description of Artificial Sequence: Synthetic pecan; 5' sequence and inner sequence
tagggaagagaaggacatatgatccgtagcgacatcaagcgggggtgcgcgtg

SEQ ID NO: 21866 - DNA, 53 bp, Artificial Sequence
  Description of Artificial Sequence: Synthetic pecan; 5' sequence and inner sequence
tagggaagagaaggacatatgatgcacgactcgcaccctatcatgaggccacg

SEQ ID NO: 21867 - DNA, 53 bp, Artificial Sequence; identical to SEQ ID NO: 5707
  Description of Artificial Sequence: Synthetic pecan; 5' sequence and inner sequence

SEQ ID NO: 21868 - DNA, 54 bp, Artificial Sequence
  Description of Artificial Sequence: Synthetic pecan; 5' sequence and inner sequence
tagggaagagaaggacatatgatggacgcagcggaacgatcgagtggttgcgta

SEQ ID NO: 21869 - DNA, 53 bp, Artificial Sequence
  Description of Artificial Sequence: Synthetic pecan; 5' sequence and inner sequence
tagggaagagaaggacatatgatgcactgcacgcacctacacgtgggcacgta

SEQ ID NO: 21870 - DNA, 54 bp, Artificial Sequence
  Description of Artificial Sequence: Synthetic pecan; 5' sequence and inner sequence
tagggaagagaaggacatatgatgcacgactcgcaccctatcaagtgcagcatg

SEQ ID NO: 21871 - DNA, 53 bp, Artificial Sequence; identical to SEQ ID NO: 5735
  Description of Artificial Sequence: Synthetic pecan; 5' sequence and inner sequence

SEQ ID NO: 21872 - DNA, 53 bp, Artificial Sequence
  Description of Artificial Sequence: Synthetic pecan; 5' sequence and inner sequence
tagggaagagaaggacatatgatgcacgactcgcacccgatcatgaggccatg

SEQ ID NO: 21873 - DNA, 53 bp, Artificial Sequence
  Description of Artificial Sequence: Synthetic pecan; 5' sequence and inner sequence
tagggaagagaaggacatatgatggaatgcacgcacctacacgtgggtatgga

SEQ ID NO: 21874 - DNA, 53 bp, Artificial Sequence
  Description of Artificial Sequence: Synthetic pecan; 5' sequence and inner sequence
tagggaagagaaggacatatgatgcatcatacgacggaccgaccgacgtgggc

SEQ ID NO: 21875 - DNA, 53 bp, Artificial Sequence; identical to SEQ ID NO: 1914
  Description of Artificial Sequence: Synthetic pecan; 5' sequence and inner sequence

SEQ ID NO: 21876 - DNA, 53 bp, Artificial Sequence; identical to SEQ ID NO: 1025
  Description of Artificial Sequence: Synthetic pecan; 5' sequence and inner sequence

SEQ ID NO: 21877 - DNA, 53 bp, Artificial Sequence; identical to SEQ ID NO: 1874
  Description of Artificial Sequence: Synthetic pecan; 5' sequence and inner sequence

SEQ ID NO: 21878 - DNA, 53 bp, Artificial Sequence
  Description of Artificial Sequence: Synthetic pecan; 5' sequence and inner sequence
tagggaagagaaggacatatgatggacgcagcggaacgttcgcgtggtacgta

SEQ ID NO: 21879 - DNA, 53 bp, Artificial Sequence
  Description of Artificial Sequence: Synthetic pecan; 5' sequence and inner sequence
tagggaagagaaggacatatgatgtcatgccatcccttcgtgtgtgacaggta

SEQ ID NO: 21880 - DNA, 53 bp, Artificial Sequence
  Description of Artificial Sequence: Synthetic pecan; 5' sequence and inner sequence
tagggaagagaaggacatatgatggcaacagcgtacctcaacgtggacgtgca

SEQ ID NO: 21881 - DNA, 52 bp, Artificial Sequence
  Description of Artificial Sequence: Synthetic pecan; 5' sequence and inner sequence
tagggaagagaaggacatatgatgcacgccgatgccctcatgcggccgtgga

SEQ ID NO: 21882 - DNA, 53 bp, Artificial Sequence
  Description of Artificial Sequence: Synthetic pecan; 5' sequence and inner sequence
tagggaagagaaggacatatgatcgtacgtaccgcgcctacatgtggcatgca

SEQ ID NO: 21883 - DNA, 53 bp, Artificial Sequence
  Description of Artificial Sequence: Synthetic pecan; 5' sequence and inner sequence
tagggaagagaaggacatatgatggcatgcacgcacctacacgtgggtatggg

SEQ ID NO: 21884 - DNA, 53 bp, Artificial Sequence
  Description of Artificial Sequence: Synthetic pecan; 5' sequence and inner sequence
tagggaagagaaggacatatgatgcattggacgatcgtgccctacacgtgtgc

SEQ ID NO: 21885 - DNA, 53 bp, Artificial Sequence
  Description of Artificial Sequence: Synthetic pecan; 5' sequence and inner sequence
tagggaagagaaggacatatgatgcacgagtcgcaccctatcatgaggccatg

SEQ ID NO: 21886 - DNA, 53 bp, Artificial Sequence; identical to SEQ ID NO: 13853
  Description of Artificial Sequence: Synthetic pecan; 5' sequence and inner sequence

SEQ ID NO: 21887 - DNA, 53 bp, Artificial Sequence; identical to SEQ ID NO: 9807
  Description of Artificial Sequence: Synthetic pecan; 5' sequence and inner sequence

SEQ ID NO: 21888 - DNA, 53 bp, Artificial Sequence; identical to SEQ ID NO: 5642
  Description of Artificial Sequence: Synthetic pecan; 5' sequence and inner sequence

SEQ ID NO: 21889 - DNA, 53 bp, Artificial Sequence
  Description of Artificial Sequence: Synthetic pecan; 5' sequence and inner sequence
tagggaagagaaggacatatgatgtcactgtgccttaccgtcaagttgcggca

SEQ ID NO: 21890 - DNA, 52 bp, Artificial Sequence
  Description of Artificial Sequence: Synthetic pecan; 5' sequence and inner sequence
tagggaagagaaggacatatgatgtcatgccatcccttcgagtgtgacagta

SEQ ID NO: 21891 - DNA, 53 bp, Artificial Sequence
  Description of Artificial Sequence: Synthetic pecan; 5' sequence and inner sequence
tagggaagagaaggacatatgatccgcacgtagccctagcagtggtgcatgca

SEQ ID NO: 21892 - DNA, 53 bp, Artificial Sequence; identical to SEQ ID NO: 17471
  Description of Artificial Sequence: Synthetic pecan; 5' sequence and inner sequence

SEQ ID NO: 21893 - DNA, 53 bp, Artificial Sequence; identical to SEQ ID NO: 17544
  Description of Artificial Sequence: Synthetic pecan; 5' sequence and inner sequence

SEQ ID NO: 21894 - DNA, 53 bp, Artificial Sequence
  Description of Artificial Sequence: Synthetic pecan; 5' sequence and inner sequence
tagggaagagaaggacatatgatgtcatgcacgaatactatcatggcggcatg

SEQ ID NO: 21895 - DNA, 53 bp, Artificial Sequence
  Description of Artificial Sequence: Synthetic pecan; 5' sequence and inner sequence
tagggaagagaaggacatatgatgcacgacccgcaccctatcatgaggccatg

SEQ ID NO: 21896 - DNA, 53 bp, Artificial Sequence
  Description of Artificial Sequence: Synthetic pecan; 5' sequence and inner sequence
tagggaagagaaggacatatgatccgcacgtagccctatcagtggtgcatgaa

SEQ ID NO: 21897 - DNA, 53 bp, Artificial Sequence
  Description of Artificial Sequence: Synthetic pecan; 5' sequence and inner sequence
tagggaagagaaggacatatgatgtcatgcacgaacactatcctggcggcatg

SEQ ID NO: 21898 - DNA, 53 bp, Artificial Sequence; identical to SEQ ID NO: 5394
  Description of Artificial Sequence: Synthetic pecan; 5' sequence and inner sequence

SEQ ID NO: 21899 - DNA, 53 bp, Artificial Sequence
  Description of Artificial Sequence: Synthetic pecan; 5' sequence and inner sequence
tagggaagagaaggacatatgatggcatgaacgcacctacacgtgggcacgta

SEQ ID NO: 21900 - DNA, 53 bp, Artificial Sequence
  Description of Artificial Sequence: Synthetic pecan; 5' sequence and inner sequence
tagggaagagaaggacatatgatggacgcagtttgcctactggtggtcacgta

SEQ ID NO: 21901 - DNA, 53 bp, Artificial Sequence; identical to SEQ ID NO: 5804
  Description of Artificial Sequence: Synthetic pecan; 5' sequence and inner sequence

SEQ ID NO: 21902 - DNA, 53 bp, Artificial Sequence
  Description of Artificial Sequence: Synthetic pecan; 5' sequence and inner sequence
tagggaagagaaggacatatgatcgcaccgtcaagagggaaggcactttggtg

SEQ ID NO: 21903 - DNA, 53 bp, Artificial Sequence
  Description of Artificial Sequence: Synthetic pecan; 5' sequence and inner sequence
tagggaagagaaggacatatgatggccacagcgtacctcaacgtggacttgca

SEQ ID NO: 21904 - DNA, 53 bp, Artificial Sequence; identical to SEQ ID NO: 5775
  Description of Artificial Sequence: Synthetic pecan; 5' sequence and inner sequence

SEQ ID NO: 21905 - DNA, 53 bp, Artificial Sequence
  Description of Artificial Sequence: Synthetic pecan; 5' sequence and inner sequence
tagggaagagaaggacatatgatccgatcgcacgtcaaggcaggctgtacgat

SEQ ID NO: 21906 - DNA, 53 bp, Artificial Sequence
  Description of Artificial Sequence: Synthetic pecan; 5' sequence and inner sequence
tagggaagagaaggacatatgatggcacaaacggaccggcaagtgcgcatgga

SEQ ID NO: 21907 - DNA, 48 bp, Artificial Sequence
  Description of Artificial Sequence: Synthetic pecan; 5' sequence and inner sequence
tagggaagagaaggacatatgatggcatgcacgcacctacacgtggac

SEQ ID NO: 21908 - DNA, 53 bp, Artificial Sequence
  Description of Artificial Sequence: Synthetic pecan; 5' sequence and inner sequence
tagggaagagaaggacatatgatggcacaaacggaccgacaagtgctcatgga

SEQ ID NO: 21909 - DNA, 53 bp, Artificial Sequence; identical to SEQ ID NO: 9971
  Description of Artificial Sequence: Synthetic pecan; 5' sequence and inner sequence

SEQ ID NO: 21910 - DNA, 52 bp, Artificial Sequence
  Description of Artificial Sequence: Synthetic pecan; 5' sequence and inner sequence
tagggaagagaaggacatatgatgcacgccgatgccctcatgtggccgcgga

SEQ ID NO: 21911 - DNA, 53 bp, Artificial Sequence
  Description of Artificial Sequence: Synthetic pecan; 5' sequence and inner sequence
tagggaagagaaggacatatgatggacgcagctcgcctactggtggtcacgta

SEQ ID NO: 21912 - DNA, 53 bp, Artificial Sequence
  Description of Artificial Sequence: Synthetic pecan; 5' sequence and inner sequence
tagggaagagaaggacatatgatccgtagcaacatcaagcggtggtgtgcgtg

SEQ ID NO: 21913 - DNA, 53 bp, Artificial Sequence
  Description of Artificial Sequence: Synthetic pecan; 5' sequence and inner sequence
tagggaagagaaggacatatgatggccacagcgtacctcaacgtggatgtgca

SEQ ID NO: 21914 - DNA, 53 bp, Artificial Sequence
  Description of Artificial Sequence: Synthetic pecan; 5' sequence and inner sequence
tagggaagagaaggacatatgatcgcaccgtcgatgcgtcatgcacgctgaca

SEQ ID NO: 21915 - DNA, 53 bp, Artificial Sequence
  Description of Artificial Sequence: Synthetic pecan; 5' sequence and inner sequence
tagggaagagaaggacatatgatcgcacccgatgtggacgatgtgccttggcc

SEQ ID NO: 21916 - DNA, 53 bp, Artificial Sequence; identical to SEQ ID NO: 1370
  Description of Artificial Sequence: Synthetic pecan; 5' sequence and inner sequence

SEQ ID NO: 21917 - DNA, 53 bp, Artificial Sequence
  Description of Artificial Sequence: Synthetic pecan; 5' sequence and inner sequence
tagggaagagaaggacatatgatgcgtgacgatgcgtgccgtcctgcgtgacg

SEQ ID NO: 21918 - DNA, 53 bp, Artificial Sequence
  Description of Artificial Sequence: Synthetic pecan; 5' sequence and inner sequence
tagggaagagaaggacatatgatccgtagggacatcaagcggtggtgtgcgtg

SEQ ID NO: 21919 - DNA, 53 bp, Artificial Sequence
  Description of Artificial Sequence: Synthetic pecan; 5' sequence and inner sequence
tagggaagagaaggacatatgatgtcatgtacgaacactatcatggcggcatg

SEQ ID NO: 21920 - DNA, 53 bp, Artificial Sequence; identical to SEQ ID NO: 1932
  Description of Artificial Sequence: Synthetic pecan; 5' sequence and inner sequence

SEQ ID NO: 21921 - DNA, 53 bp, Artificial Sequence; identical to SEQ ID NO: 1574
  Description of Artificial Sequence: Synthetic pecan; 5' sequence and inner sequence

SEQ ID NO: 21922 - DNA, 53 bp, Artificial Sequence
  Description of Artificial Sequence: Synthetic pecan; 5' sequence and inner sequence
tagggaagagaaggacatatgatgtcgtgactggccagctggacatgcactgc

SEQ ID NO: 21923 - DNA, 53 bp, Artificial Sequence
  Description of Artificial Sequence: Synthetic pecan; 5' sequence and inner sequence
tagggaagagaaggacatatgatggccacagcgaacctcaacgtggacgtgca

SEQ ID NO: 21924 - DNA, 53 bp, Artificial Sequence; identical to SEQ ID NO: 1380
  Description of Artificial Sequence: Synthetic pecan; 5' sequence and inner sequence

SEQ ID NO: 21925 - DNA, 53 bp, Artificial Sequence; identical to SEQ ID NO: 5679
  Description of Artificial Sequence: Synthetic pecan; 5' sequence and inner sequence

SEQ ID NO: 21926 - DNA, 53 bp, Artificial Sequence
  Description of Artificial Sequence: Synthetic pecan; 5' sequence and inner sequence
tagggaagagaaggacatatgatggcatgcacgcatctacacgtgggtatgga

SEQ ID NO: 21927 - DNA, 53 bp, Artificial Sequence
  Description of Artificial Sequence: Synthetic pecan; 5' sequence and inner sequence
tagggaagagaaggacatatgatggcaccaacggaccgacaagtgcgcatgga

SEQ ID NO: 21928 - DNA, 53 bp, Artificial Sequence; identical to SEQ ID NO: 1275
  Description of Artificial Sequence: Synthetic pecan; 5' sequence and inner sequence

SEQ ID NO: 21929 - DNA, 53 bp, Artificial Sequence
  Description of Artificial Sequence: Synthetic pecan; 5' sequence and inner sequence
tagggaagagaaggacatatgatggcatgcacgcacctacacgcgggcacgta

SEQ ID NO: 21930 - DNA, 52 bp, Artificial Sequence
  Description of Artificial Sequence: Synthetic pecan; 5' sequence and inner sequence
tagggaagagaaggacatatgatgcactccgatgccctcatgtggccgtgga

SEQ ID NO: 21931 - DNA, 53 bp, Artificial Sequence
  Description of Artificial Sequence: Synthetic pecan; 5' sequence and inner sequence
tagggaagagaaggacatatgatgcacgactcggaccctatcatgaggccatg

SEQ ID NO: 21932 - DNA, 53 bp, Artificial Sequence
  Description of Artificial Sequence: Synthetic pecan; 5' sequence and inner sequence
tagggaagagaaggacatatgatggaacaaacggaccgacaagtgcgcatgga

SEQ ID NO: 21933 - DNA, 53 bp, Artificial Sequence; identical to SEQ ID NO: 17876
  Description of Artificial Sequence: Synthetic pecan; 5' sequence and inner sequence

SEQ ID NO: 21934 - DNA, 53 bp, Artificial Sequence
  Description of Artificial Sequence: Synthetic pecan; 5' sequence and inner sequence
tagggaagagaaggacatatgatggcatgcacgcacctacacgcgggcatgga

SEQ ID NO: 21935 - DNA, 53 bp, Artificial Sequence; identical to SEQ ID NO: 1529
  Description of Artificial Sequence: Synthetic pecan; 5' sequence and inner sequence

SEQ ID NO: 21936 - DNA, 53 bp, Artificial Sequence
  Description of Artificial Sequence: Synthetic pecan; 5' sequence and inner sequence
tagggaagagaaggacatatgatggacgcagcggaacgttcgattggtacgta

SEQ ID NO: 21937 - DNA, 53 bp, Artificial Sequence
  Description of Artificial Sequence: Synthetic pecan; 5' sequence and inner sequence
tagggaagagaaggacatatgatccgcacgtagccctatcagtggtgaatgca

SEQ ID NO: 21938 - DNA, 53 bp, Artificial Sequence; identical to SEQ ID NO: 1373
  Description of Artificial Sequence: Synthetic pecan; 5' sequence and inner sequence

SEQ ID NO: 21939 - DNA, 53 bp, Artificial Sequence
  Description of Artificial Sequence: Synthetic pecan; 5' sequence and inner sequence
tagggaagagaaggacatatgatggacgcagctgaacgttcgagtggtacgta

SEQ ID NO: 21940 - DNA, 53 bp, Artificial Sequence; identical to SEQ ID NO: 1438
  Description of Artificial Sequence: Synthetic pecan; 5' sequence and inner sequence

SEQ ID NO: 21941 - DNA, 53 bp, Artificial Sequence
  Description of Artificial Sequence: Synthetic pecan; 5' sequence and inner sequence
tagggaagagaaggacatatgatccgcacgtagccctatcagtggtgcgtgca

SEQ ID NO: 21942 - DNA, 49 bp, Artificial Sequence
  Description of Artificial Sequence: Synthetic pecan; 5' sequence and inner sequence
tagggaagagaaggacatatgatcgcaccgtcaaggcaggctgtacgag

SEQ ID NO: 21943 - DNA, 53 bp, Artificial Sequence; identical to SEQ ID NO: 1556
  Description of Artificial Sequence: Synthetic pecan; 5' sequence and inner sequence

SEQ ID NO: 21944 - DNA, 53 bp, Artificial Sequence
  Description of Artificial Sequence: Synthetic pecan; 5' sequence and inner sequence
tagggaagagaaggacatatgatgtacgcatcgtcccgtcatgtgggtccgta

SEQ ID NO: 21945 - DNA, 53 bp, Artificial Sequence
  Description of Artificial Sequence: Synthetic pecan; 5' sequence and inner sequence
tagggaagagaaggacatatgatccgcacgaagccctatcagtggtgcatgca

SEQ ID NO: 21946 - DNA, 53 bp, Artificial Sequence
  Description of Artificial Sequence: Synthetic pecan; 5' sequence and inner sequence
tagggaagagaaggacatatgatgtcatgcgcgaacactatcatggcggcatg

SEQ ID NO: 21947 - DNA, 53 bp, Artificial Sequence
  Description of Artificial Sequence: Synthetic pecan; 5' sequence and inner sequence
tagggaagagaaggacatatgatccgtagcgacatcaagcggaggagtgcgtg

SEQ ID NO: 21948 - DNA, 53 bp, Artificial Sequence
  Description of Artificial Sequence: Synthetic pecan; 5' sequence and inner sequence
tagggaagagaaggacatatgatggacgcagcggaacggtcgagtggtacgta

SEQ ID NO: 21949 - DNA, 53 bp, Artificial Sequence
  Description of Artificial Sequence: Synthetic pecan; 5' sequence and inner sequence
tagggaagagaaggacatatgatccgtagcgacatcaagcggcggtgtgcgcg

SEQ ID NO: 21950 - DNA, 53 bp, Artificial Sequence
  Description of Artificial Sequence: Synthetic pecan; 5' sequence and inner sequence
tagggaagagaaggacatatgatggcacaaccggaccgacaagtgcgcatgga

SEQ ID NO: 21951 - DNA, 52 bp, Artificial Sequence
  Description of Artificial Sequence: Synthetic pecan; 5' sequence and inner sequence
tagggaagagaaggacatatgatgtcatgccatccctcgagtgtgacaggta

SEQ ID NO: 21952 - DNA, 53 bp, Artificial Sequence
  Description of Artificial Sequence: Synthetic pecan; 5' sequence and inner sequence
tagggaagagaaggacatatgatccatcgcttcactatcatgtgtgtcacgta

SEQ ID NO: 21953 - DNA, 53 bp, Artificial Sequence; identical to SEQ ID NO: 5238
  Description of Artificial Sequence: Synthetic pecan; 5' sequence and inner sequence

SEQ ID NO: 21954 - DNA, 53 bp, Artificial Sequence
  Description of Artificial Sequence: Synthetic pecan; 5' sequence and inner sequence
tagggaagagaaggacatatgatcgcaccgtcgaaacgtcatgcacgctgaca

SEQ ID NO: 21955 - DNA, 52 bp, Artificial Sequence
  Description of Artificial Sequence: Synthetic pecan; 5' sequence and inner sequence
tagggaagagaaggacatatgatgcacgccgatgccctcatgtgtccgtgga

SEQ ID NO: 21956 - DNA, 53 bp, Artificial Sequence; identical to SEQ ID NO: 17810
  Description of Artificial Sequence: Synthetic pecan; 5' sequence and inner sequence

SEQ ID NO: 21957 - DNA, 53 bp, Artificial Sequence
  Description of Artificial Sequence: Synthetic pecan; 5' sequence and inner sequence
tagggaagagaaggacatatgatggacgcagcggaacgatcgagtggtacgta

SEQ ID NO: 21958 - DNA, 53 bp, Artificial Sequence; identical to SEQ ID NO: 1395
  Description of Artificial Sequence: Synthetic pecan; 5' sequence and inner sequence

SEQ ID NO: 21959 - DNA, 53 bp, Artificial Sequence
  Description of Artificial Sequence: Synthetic pecan; 5' sequence and inner sequence
tagggaagagaaggacatatgatccatcgcgtcactatcatatgtgtcacgta

SEQ ID NO: 21960 - DNA, 53 bp, Artificial Sequence
  Description of Artificial Sequence: Synthetic pecan; 5' sequence and inner sequence
tagggaagagaaggacatatgatgtcattccgcatcctacacgtgggcatgta

SEQ ID NO: 21961 - DNA, 53 bp, Artificial Sequence
  Description of Artificial Sequence: Synthetic pecan; 5' sequence and inner sequence
tagggaagagaaggacatatgatggccacagcgtacctcaaggtggacgtgca

SEQ ID NO: 21962 - DNA, 53 bp, Artificial Sequence
  Description of Artificial Sequence: Synthetic pecan; 5' sequence and inner sequence
tagggaagagaaggacatatgatgcacgactcgctccctatcatgaggccatg

SEQ ID NO: 21963 - DNA, 53 bp, Artificial Sequence; identical to SEQ ID NO: 13869
  Description of Artificial Sequence: Synthetic pecan; 5' sequence and inner sequence

SEQ ID NO: 21964 - DNA, 53 bp, Artificial Sequence
  Description of Artificial Sequence: Synthetic pecan; 5' sequence and inner sequence
tagggaagagaaggacatatgatggccacagcgtacctcaacgtgggcgtgca

SEQ ID NO: 21965 - DNA, 53 bp, Artificial Sequence
  Description of Artificial Sequence: Synthetic pecan; 5' sequence and inner sequence
tagggaagagaaggacatatgatgcacgactcgcaccctatcatgaggccctg

SEQ ID NO: 21966 - DNA, 53 bp, Artificial Sequence
  Description of Artificial Sequence: Synthetic pecan; 5' sequence and inner sequence
tagggaagagaaggacatatgatgtgctgaacgtactgccaggtgagcatgca

SEQ ID NO: 21967 - DNA, 53 bp, Artificial Sequence
  Description of Artificial Sequence: Synthetic pecan; 5' sequence and inner sequence
tagggaagagaaggacatatgatgcacgactcgcaccctatcatgaggccatt

SEQ ID NO: 21968 - DNA, 53 bp, Artificial Sequence
  Description of Artificial Sequence: Synthetic pecan; 5' sequence and inner sequence
tagggaagagaaggacatatgatgcacgactcgcaccctatcatgaggcaatg

SEQ ID NO: 21969 - DNA, 52 bp, Artificial Sequence
  Description of Artificial Sequence: Synthetic pecan; 5' sequence and inner sequence
tagggaagagaaggacatatgatgcacgccgatgtcctcatgtggccgtgga

SEQ ID NO: 21970 - DNA, 53 bp, Artificial Sequence
  Description of Artificial Sequence: Synthetic pecan; 5' sequence and inner sequence
tagggaagagaaggacatatgatgtcatgccatcccttcgagtgtggcaggta

SEQ ID NO: 21971 - DNA, 53 bp, Artificial Sequence
  Description of Artificial Sequence: Synthetic pecan; 5' sequence and inner sequence
tagggaagagaaggacatatgatcgcaccgtcaagcgggaacgcactttggtg

SEQ ID NO: 21972 - DNA, 53 bp, Artificial Sequence
  Description of Artificial Sequence: Synthetic pecan; 5' sequence and inner sequence
tagggaagagaaggacatatgatggccacagcgtacctccacgtggacgtgca

SEQ ID NO: 21973 - DNA, 53 bp, Artificial Sequence; identical to SEQ ID NO: 5576
  Description of Artificial Sequence: Synthetic pecan; 5' sequence and inner sequence

SEQ ID NO: 21974 - DNA, 53 bp, Artificial Sequence
  Description of Artificial Sequence: Synthetic pecan; 5' sequence and inner sequence
tagggaagagaaggacatatgatgcacgactcgcaccgtatcatgaggccatg

SEQ ID NO: 21975 - DNA, 53 bp, Artificial Sequence; identical to SEQ ID NO: 5351
  Description of Artificial Sequence: Synthetic pecan; 5' sequence and inner sequence

SEQ ID NO: 21976 - DNA, 53 bp, Artificial Sequence
  Description of Artificial Sequence: Synthetic pecan; 5' sequence and inner sequence
tagggaagagaaggacatatgatggcctgcacgcacctacacgtgggcacgta

SEQ ID NO: 21977 - DNA, 53 bp, Artificial Sequence; identical to SEQ ID NO: 1677
  Description of Artificial Sequence: Synthetic pecan; 5' sequence and inner sequence

SEQ ID NO: 21978 - DNA, 53 bp, Artificial Sequence
  Description of Artificial Sequence: Synthetic pecan; 5' sequence and inner sequence
tagggaagagaaggacatatgatggcatgcacgcacctaaacgtgggtatgga

SEQ ID NO: 21979 - DNA, 53 bp, Artificial Sequence
  Description of Artificial Sequence: Synthetic pecan; 5' sequence and inner sequence
tagggaagagaaggacatatgatccatcgcgtcactatcatgtgtggcacgta

SEQ ID NO: 21980 - DNA, 53 bp, Artificial Sequence; identical to SEQ ID NO: 5834
  Description of Artificial Sequence: Synthetic pecan; 5' sequence and inner sequence

SEQ ID NO: 21981 - DNA, 53 bp, Artificial Sequence
  Description of Artificial Sequence: Synthetic pecan; 5' sequence and inner sequence
tagggaagagaaggacatatgatggacacagcttgcctactggtggtcacgta

SEQ ID NO: 21982 - DNA, 53 bp, Artificial Sequence
  Description of Artificial Sequence: Synthetic pecan; 5' sequence and inner sequence
tagggaagagaaggacatatgattgccacagcgtacctcaacgtggacgtgca

SEQ ID NO: 21983 - DNA, 53 bp, Artificial Sequence
  Description of Artificial Sequence: Synthetic pecan; 5' sequence and inner sequence
tagggaagagaaggacatatgatgtcactgtgcctgactgtcaagttgcggca

SEQ ID NO: 21984 - DNA, 53 bp, Artificial Sequence
  Description of Artificial Sequence: Synthetic pecan; 5' sequence and inner sequence
tagggaagagaaggacatatgatgtcactgtgcctgaccgtcaagttgcgaca

SEQ ID NO: 21985 - DNA, 53 bp, Artificial Sequence
  Description of Artificial Sequence: Synthetic pecan; 5' sequence and inner sequence
tagggaagagaaggacatatgatggcctgcgcgtaccgtcaagtgcgaatgga

SEQ ID NO: 21986 - DNA, 53 bp, Artificial Sequence
  Description of Artificial Sequence: Synthetic pecan; 5' sequence and inner sequence
tagggaagagaaggacatatgatgtcatgcacgaacactatcatagcggcatg

SEQ ID NO: 21987 - DNA, 53 bp, Artificial Sequence; identical to SEQ ID NO: 13775
  Description of Artificial Sequence: Synthetic pecan; 5' sequence and inner sequence

SEQ ID NO: 21988 - DNA, 53 bp, Artificial Sequence
  Description of Artificial Sequence: Synthetic pecan; 5' sequence and inner sequence
tagggaagagaaggacatatgatccatcgcgccactatcatgtgtgtcacgta

SEQ ID NO: 21989 - DNA, 53 bp, Artificial Sequence
  Description of Artificial Sequence: Synthetic pecan; 5' sequence and inner sequence
tagggaagagaaggacatatgatcgcaccgtcaagctggaaggcactttggtg

SEQ ID NO: 21990 - DNA, 53 bp, Artificial Sequence
  Description of Artificial Sequence: Synthetic pecan; 5' sequence and inner sequence
tagggaagagaaggacatatgatgtcatgcatgaacactatcatggcggcatg

SEQ ID NO: 21991 - DNA, 53 bp, Artificial Sequence
  Description of Artificial Sequence: Synthetic pecan; 5' sequence and inner sequence
tagggaagagaaggacatatgatgcacgactcgcacgctatcatgaggccatg

SEQ ID NO: 21992 - DNA, 50 bp, Artificial Sequence
  Description of Artificial Sequence: Synthetic pecan; 5' sequence and inner sequence
tagggaagagaaggacatatgatggacgcagcttgcctactggtggtaca

SEQ ID NO: 21993 - DNA, 53 bp, Artificial Sequence
  Description of Artificial Sequence: Synthetic pecan; 5' sequence and inner sequence
tagggaagagaaggacatatgatggacgcagcttgcctactggtggtcactta

SEQ ID NO: 21994 - DNA, 53 bp, Artificial Sequence
  Description of Artificial Sequence: Synthetic pecan; 5' sequence and inner sequence
tagggaagagaaggacatatgatgtcatgccatcacttcgagtgtgacaggta

SEQ ID NO: 21995 - DNA, 53 bp, Artificial Sequence
  Description of Artificial Sequence: Synthetic pecan; 5' sequence and inner sequence
tagggaagagaaggacatatgatggacgcagcggaacgttccagtggtacgta

SEQ ID NO: 21996 - DNA, 53 bp, Artificial Sequence; identical to SEQ ID NO: 13821
  Description of Artificial Sequence: Synthetic pecan; 5' sequence and inner sequence

SEQ ID NO: 21997 - DNA, 53 bp, Artificial Sequence; identical to SEQ ID NO: 5376
  Description of Artificial Sequence: Synthetic pecan; 5' sequence and inner sequence

SEQ ID NO: 21998 - DNA, 53 bp, Artificial Sequence
  Description of Artificial Sequence: Synthetic pecan; 5' sequence and inner sequence
tagggaagagaaggacatatgatgtcattccgcatcctacaggtgggcacgta

SEQ ID NO: 21999 - DNA, 53 bp, Artificial Sequence; identical to SEQ ID NO: 1152
  Description of Artificial Sequence: Synthetic pecan; 5' sequence and inner sequence

SEQ ID NO: 22000 - DNA, 53 bp, Artificial Sequence
  Description of Artificial Sequence: Synthetic pecan; 5' sequence and inner sequence
tagggaagagaaggacatatgatggtatgcacgcacctacacgtgggtatgga

SEQ ID NO: 22001 - DNA, 53 bp, Artificial Sequence
  Description of Artificial Sequence: Synthetic pecan; 5' sequence and inner sequence
tagggaagagaaggacatatgatgtcatgccatcccttcgagtttgacaggta

SEQ ID NO: 22002 - DNA, 54 bp, Artificial Sequence
  Description of Artificial Sequence: Synthetic pecan; 5' sequence and inner sequence
tagggaagagaaggacatatgatccgatcgcacgtcaaggcaggctgtacgtgt

SEQ ID NO: 22003 - DNA, 53 bp, Artificial Sequence; identical to SEQ ID NO: 2004
  Description of Artificial Sequence: Synthetic pecan; inner sequence and 3' sequence

SEQ ID NO: 22004 - DNA, 53 bp, Artificial Sequence; identical to SEQ ID NO: 2003
  Description of Artificial Sequence: Synthetic pecan; inner sequence and 3' sequence

SEQ ID NO: 22005 - DNA, 53 bp, Artificial Sequence; identical to SEQ ID NO: 2007
  Description of Artificial Sequence: Synthetic pecan; inner sequence and 3' sequence

SEQ ID NO: 22006 - DNA, 53 bp, Artificial Sequence; identical to SEQ ID NO: 2008
  Description of Artificial Sequence: Synthetic pecan; inner sequence and 3' sequence

SEQ ID NO: 22007 - DNA, 53 bp, Artificial Sequence; identical to SEQ ID NO: 2014
  Description of Artificial Sequence: Synthetic pecan; inner sequence and 3' sequence

SEQ ID NO: 22008 - DNA, 53 bp, Artificial Sequence; identical to SEQ ID NO: 2005
  Description of Artificial Sequence: Synthetic pecan; inner sequence and 3' sequence

SEQ ID NO: 22009 - DNA, 53 bp, Artificial Sequence; identical to SEQ ID NO: 2023
  Description of Artificial Sequence: Synthetic pecan; inner sequence and 3' sequence

SEQ ID NO: 22010 - DNA, 53 bp, Artificial Sequence; identical to SEQ ID NO: 2012
  Description of Artificial Sequence: Synthetic pecan; inner sequence and 3' sequence

SEQ ID NO: 22011 - DNA, 53 bp, Artificial Sequence; identical to SEQ ID NO: 2011
  Description of Artificial Sequence: Synthetic pecan; inner sequence and 3' sequence

SEQ ID NO: 22012 - DNA, 53 bp, Artificial Sequence; identical to SEQ ID NO: 2020
  Description of Artificial Sequence: Synthetic pecan; inner sequence and 3' sequence

SEQ ID NO: 22013 - DNA, 53 bp, Artificial Sequence; identical to SEQ ID NO: 2006
  Description of Artificial Sequence: Synthetic pecan; inner sequence and 3' sequence

SEQ ID NO: 22014 - DNA, 53 bp, Artificial Sequence; identical to SEQ ID NO: 2009
  Description of Artificial Sequence: Synthetic pecan; inner sequence and 3' sequence

SEQ ID NO: 22015 - DNA, 53 bp, Artificial Sequence; identical to SEQ ID NO: 2046
  Description of Artificial Sequence: Synthetic pecan; inner sequence and 3' sequence

SEQ ID NO: 22016 - DNA, 53 bp, Artificial Sequence; identical to SEQ ID NO: 2013
  Description of Artificial Sequence: Synthetic pecan; inner sequence and 3' sequence

SEQ ID NO: 22017 - DNA, 53 bp, Artificial Sequence; identical to SEQ ID NO: 2010
  Description of Artificial Sequence: Synthetic pecan; inner sequence and 3' sequence

SEQ ID NO: 22018 - DNA, 53 bp, Artificial Sequence; identical to SEQ ID NO: 2041
  Description of Artificial Sequence: Synthetic pecan; inner sequence and 3' sequence

SEQ ID NO: 22019 - DNA, 53 bp, Artificial Sequence; identical to SEQ ID NO: 2030
  Description of Artificial Sequence: Synthetic pecan; inner sequence and 3' sequence

SEQ ID NO: 22020 - DNA, 53 bp, Artificial Sequence; identical to SEQ ID NO: 2021
  Description of Artificial Sequence: Synthetic pecan; inner sequence and 3' sequence

SEQ ID NO: 22021 - DNA, 53 bp, Artificial Sequence; identical to SEQ ID NO: 2015
  Description of Artificial Sequence: Synthetic pecan; inner sequence and 3' sequence

SEQ ID NO: 22022 - DNA, 52 bp, Artificial Sequence; identical to SEQ ID NO: 2070
  Description of Artificial Sequence: Synthetic pecan; inner sequence and 3' sequence

SEQ ID NO: 22023 - DNA, 53 bp, Artificial Sequence; identical to SEQ ID NO: 2028
  Description of Artificial Sequence: Synthetic pecan; inner sequence and 3' sequence

SEQ ID NO: 22024 - DNA, 53 bp, Artificial Sequence; identical to SEQ ID NO: 2037
  Description of Artificial Sequence: Synthetic pecan; inner sequence and 3' sequence

SEQ ID NO: 22025 - DNA, 53 bp, Artificial Sequence; identical to SEQ ID NO: 2018
  Description of Artificial Sequence: Synthetic pecan; inner sequence and 3' sequence

SEQ ID NO: 22026 - DNA, 53 bp, Artificial Sequence; identical to SEQ ID NO: 2045
  Description of Artificial Sequence: Synthetic pecan; inner sequence and 3' sequence

SEQ ID NO: 22027 - DNA, 53 bp, Artificial Sequence; identical to SEQ ID NO: 2033
  Description of Artificial Sequence: Synthetic pecan; inner sequence and 3' sequence

SEQ ID NO: 22028 - DNA, 53 bp, Artificial Sequence; identical to SEQ ID NO: 2052
  Description of Artificial Sequence: Synthetic pecan; inner sequence and 3' sequence

SEQ ID NO: 22029 - DNA, 53 bp, Artificial Sequence; identical to SEQ ID NO: 2049
  Description of Artificial Sequence: Synthetic pecan; inner sequence and 3' sequence

SEQ ID NO: 22030 - DNA, 53 bp, Artificial Sequence; identical to SEQ ID NO: 2054
  Description of Artificial Sequence: Synthetic pecan; inner sequence and 3' sequence

SEQ ID NO: 22031 - DNA, 53 bp, Artificial Sequence; identical to SEQ ID NO: 2017
  Description of Artificial Sequence: Synthetic pecan; inner sequence and 3' sequence

SEQ ID NO: 22032 - DNA, 53 bp, Artificial Sequence; identical to SEQ ID NO: 2077
  Description of Artificial Sequence: Synthetic pecan; inner sequence and 3' sequence

SEQ ID NO: 22033 - DNA, 53 bp, Artificial Sequence; identical to SEQ ID NO: 2078
  Description of Artificial Sequence: Synthetic pecan; inner sequence and 3' sequence

SEQ ID NO: 22034 - DNA, 53 bp, Artificial Sequence; identical to SEQ ID NO: 2022
  Description of Artificial Sequence: Synthetic pecan; inner sequence and 3' sequence

SEQ ID NO: 22035 - DNA, 53 bp, Artificial Sequence; identical to SEQ ID NO: 2081
  Description of Artificial Sequence: Synthetic pecan; inner sequence and 3' sequence

SEQ ID NO: 22036 - DNA, 53 bp, Artificial Sequence; identical to SEQ ID NO: 2035
  Description of Artificial Sequence: Synthetic pecan; inner sequence and 3' sequence

SEQ ID NO: 22037 - DNA, 53 bp, Artificial Sequence; identical to SEQ ID NO: 2073
  Description of Artificial Sequence: Synthetic pecan; inner sequence and 3' sequence

SEQ ID NO: 22038 - DNA, 53 bp, Artificial Sequence; identical to SEQ ID NO: 2059
  Description of Artificial Sequence: Synthetic pecan; inner sequence and 3' sequence

SEQ ID NO: 22039 - DNA, 53 bp, Artificial Sequence; identical to SEQ ID NO: 2201
  Description of Artificial Sequence: Synthetic pecan; inner sequence and 3' sequence

SEQ ID NO: 22040 - DNA, 53 bp, Artificial Sequence; identical to SEQ ID NO: 2040
  Description of Artificial Sequence: Synthetic pecan; inner sequence and 3' sequence

SEQ ID NO: 22041 - DNA, 53 bp, Artificial Sequence; identical to SEQ ID NO: 2220
  Description of Artificial Sequence: Synthetic pecan; inner sequence and 3' sequence

SEQ ID NO: 22042 - DNA, 53 bp, Artificial Sequence; identical to SEQ ID NO: 2161
  Description of Artificial Sequence: Synthetic pecan; inner sequence and 3' sequence

SEQ ID NO: 22043 - DNA, 53 bp, Artificial Sequence; identical to SEQ ID NO: 2067
  Description of Artificial Sequence: Synthetic pecan; inner sequence and 3' sequence

SEQ ID NO: 22044 - DNA, 53 bp, Artificial Sequence; identical to SEQ ID NO: 2074
  Description of Artificial Sequence: Synthetic pecan; inner sequence and 3' sequence

SEQ ID NO: 22045 - DNA, 53 bp, Artificial Sequence; identical to SEQ ID NO: 2100
  Description of Artificial Sequence: Synthetic pecan; inner sequence and 3' sequence

SEQ ID NO: 22046 - DNA, 53 bp, Artificial Sequence; identical to SEQ ID NO: 2247
  Description of Artificial Sequence: Synthetic pecan; inner sequence and 3' sequence

SEQ ID NO: 22047 - DNA, 53 bp, Artificial Sequence; identical to SEQ ID NO: 2071
  Description of Artificial Sequence: Synthetic pecan; inner sequence and 3' sequence

SEQ ID NO: 22048 - DNA, 53 bp, Artificial Sequence; identical to SEQ ID NO: 2031
  Description of Artificial Sequence: Synthetic pecan; inner sequence and 3' sequence

SEQ ID NO: 22049 - DNA, 53 bp, Artificial Sequence; identical to SEQ ID NO: 2051
  Description of Artificial Sequence: Synthetic pecan; inner sequence and 3' sequence

SEQ ID NO: 22050 - DNA, 53 bp, Artificial Sequence; identical to SEQ ID NO: 2055
  Description of Artificial Sequence: Synthetic pecan; inner sequence and 3' sequence

SEQ ID NO: 22051 - DNA, 53 bp, Artificial Sequence; identical to SEQ ID NO: 2144
  Description of Artificial Sequence: Synthetic pecan; inner sequence and 3' sequence

SEQ ID NO: 22052 - DNA, 53 bp, Artificial Sequence; identical to SEQ ID NO: 2096
  Description of Artificial Sequence: Synthetic pecan; inner sequence and 3' sequence

SEQ ID NO: 22053 - DNA, 51 bp, Artificial Sequence; identical to SEQ ID NO: 2148
  Description of Artificial Sequence: Synthetic pecan; inner sequence and 3' sequence

SEQ ID NO: 22054 - DNA, 53 bp, Artificial Sequence; identical to SEQ ID NO: 2454
  Description of Artificial Sequence: Synthetic pecan; inner sequence and 3' sequence

SEQ ID NO: 22055 - DNA, 53 bp, Artificial Sequence; identical to SEQ ID NO: 2053
  Description of Artificial Sequence: Synthetic pecan; inner sequence and 3' sequence

SEQ ID NO: 22056 - DNA, 53 bp, Artificial Sequence; identical to SEQ ID NO: 2050
  Description of Artificial Sequence: Synthetic pecan; inner sequence and 3' sequence

SEQ ID NO: 22057 - DNA, 53 bp, Artificial Sequence; identical to SEQ ID NO: 2032
  Description of Artificial Sequence: Synthetic pecan; inner sequence and 3' sequence

SEQ ID NO: 22058 - DNA, 53 bp, Artificial Sequence; identical to SEQ ID NO: 2034
  Description of Artificial Sequence: Synthetic pecan; inner sequence and 3' sequence

SEQ ID NO: 22059 - DNA, 53 bp, Artificial Sequence; identical to SEQ ID NO: 2185
  Description of Artificial Sequence: Synthetic pecan; inner sequence and 3' sequence

SEQ ID NO: 22060 - DNA, 51 bp, Artificial Sequence; identical to SEQ ID NO: 2241
  Description of Artificial Sequence: Synthetic pecan; inner sequence and 3' sequence

SEQ ID NO: 22061 - DNA, 53 bp, Artificial Sequence; identical to SEQ ID NO: 2029
  Description of Artificial Sequence: Synthetic pecan; inner sequence and 3' sequence

SEQ ID NO: 22062 - DNA, 53 bp, Artificial Sequence; identical to SEQ ID NO: 2066
  Description of Artificial Sequence: Synthetic pecan; inner sequence and 3' sequence

SEQ ID NO: 22063 - DNA, 53 bp, Artificial Sequence; identical to SEQ ID NO: 2279
  Description of Artificial Sequence: Synthetic pecan; inner sequence and 3' sequence

SEQ ID NO: 22064 - DNA, 53 bp, Artificial Sequence; identical to SEQ ID NO: 2080
  Description of Artificial Sequence: Synthetic pecan; inner sequence and 3' sequence

SEQ ID NO: 22065 - DNA, 53 bp, Artificial Sequence; identical to SEQ ID NO: 2174
  Description of Artificial Sequence: Synthetic pecan; inner sequence and 3' sequence

SEQ ID NO: 22066 - DNA, 53 bp, Artificial Sequence; identical to SEQ ID NO: 2151
  Description of Artificial Sequence: Synthetic pecan; inner sequence and 3' sequence

SEQ ID NO: 22067 - DNA, 53 bp, Artificial Sequence; identical to SEQ ID NO: 2506
  Description of Artificial Sequence: Synthetic pecan; inner sequence and 3' sequence

SEQ ID NO: 22068 - DNA, 53 bp, Artificial Sequence; identical to SEQ ID NO: 2194
  Description of Artificial Sequence: Synthetic pecan; inner sequence and 3' sequence

SEQ ID NO: 22069 - DNA, 53 bp, Artificial Sequence; identical to SEQ ID NO: 2136
  Description of Artificial Sequence: Synthetic pecan; inner sequence and 3' sequence

SEQ ID NO: 22070 - DNA, 53 bp, Artificial Sequence; identical to SEQ ID NO: 2901
  Description of Artificial Sequence: Synthetic pecan; inner sequence and 3' sequence

SEQ ID NO: 22071 - DNA, 53 bp, Artificial Sequence; identical to SEQ ID NO: 2092
  Description of Artificial Sequence: Synthetic pecan; inner sequence and 3' sequence

SEQ ID NO: 22072 - DNA, 53 bp, Artificial Sequence; identical to SEQ ID NO: 2229
  Description of Artificial Sequence: Synthetic pecan; inner sequence and 3' sequence

SEQ ID NO: 22073 - DNA, 53 bp, Artificial Sequence; identical to SEQ ID NO: 2323
  Description of Artificial Sequence: Synthetic pecan; inner sequence and 3' sequence

SEQ ID NO: 22074 - DNA, 53 bp, Artificial Sequence; identical to SEQ ID NO: 2042
  Description of Artificial Sequence: Synthetic pecan; inner sequence and 3' sequence

SEQ ID NO: 22075 - DNA, 53 bp, Artificial Sequence; identical to SEQ ID NO: 2232
  Description of Artificial Sequence: Synthetic pecan; inner sequence and 3' sequence

SEQ ID NO: 22076 - DNA, 53 bp, Artificial Sequence; identical to SEQ ID NO: 2048
  Description of Artificial Sequence: Synthetic pecan; inner sequence and 3' sequence

SEQ ID NO: 22077 - DNA, 53 bp, Artificial Sequence; identical to SEQ ID NO: 2311
  Description of Artificial Sequence: Synthetic pecan; inner sequence and 3' sequence

SEQ ID NO: 22078 - DNA, 53 bp, Artificial Sequence; identical to SEQ ID NO: 2517
  Description of Artificial Sequence: Synthetic pecan; inner sequence and 3' sequence

SEQ ID NO: 22079 - DNA, 53 bp, Artificial Sequence; identical to SEQ ID NO: 2115
  Description of Artificial Sequence: Synthetic pecan; inner sequence and 3' sequence

SEQ ID NO: 22080 - DNA, 53 bp, Artificial Sequence; identical to SEQ ID NO: 2553
  Description of Artificial Sequence: Synthetic pecan; inner sequence and 3' sequence

SEQ ID NO: 22081 - DNA, 53 bp, Artificial Sequence; identical to SEQ ID NO: 2290
  Description of Artificial Sequence: Synthetic pecan; inner sequence and 3' sequence

SEQ ID NO: 22082 - DNA, 53 bp, Artificial Sequence; identical to SEQ ID NO: 2207
  Description of Artificial Sequence: Synthetic pecan; inner sequence and 3' sequence

SEQ ID NO: 22083 - DNA, 53 bp, Artificial Sequence; identical to SEQ ID NO: 2406
  Description of Artificial Sequence: Synthetic pecan; inner sequence and 3' sequence

SEQ ID NO: 22084 - DNA, 53 bp, Artificial Sequence; identical to SEQ ID NO: 2121
  Description of Artificial Sequence: Synthetic pecan; inner sequence and 3' sequence

SEQ ID NO: 22085 - DNA, 53 bp, Artificial Sequence; identical to SEQ ID NO: 2145
  Description of Artificial Sequence: Synthetic pecan; inner sequence and 3' sequence

SEQ ID NO: 22086 - DNA, 53 bp, Artificial Sequence; identical to SEQ ID NO: 2184
  Description of Artificial Sequence: Synthetic pecan; inner sequence and 3' sequence

SEQ ID NO: 22087 - DNA, 53 bp, Artificial Sequence; identical to SEQ ID NO: 2131
  Description of Artificial Sequence: Synthetic pecan; inner sequence and 3' sequence

SEQ ID NO: 22088 - DNA, 53 bp, Artificial Sequence; identical to SEQ ID NO: 2117
  Description of Artificial Sequence: Synthetic pecan; inner sequence and 3' sequence

SEQ ID NO: 22089 - DNA, 53 bp, Artificial Sequence; identical to SEQ ID NO: 2437
  Description of Artificial Sequence: Synthetic pecan; inner sequence and 3' sequence

SEQ ID NO: 22090 - DNA, 53 bp, Artificial Sequence; identical to SEQ ID NO: 6472
  Description of Artificial Sequence: Synthetic pecan; inner sequence and 3' sequence

SEQ ID NO: 22091 - DNA, 53 bp, Artificial Sequence; identical to SEQ ID NO: 2171
  Description of Artificial Sequence: Synthetic pecan; inner sequence and 3' sequence

SEQ ID NO: 22092 - DNA, 53 bp, Artificial Sequence; identical to SEQ ID NO: 2630
  Description of Artificial Sequence: Synthetic pecan; inner sequence and 3' sequence

SEQ ID NO: 22093 - DNA, 53 bp, Artificial Sequence; identical to SEQ ID NO: 2285
  Description of Artificial Sequence: Synthetic pecan; inner sequence and 3' sequence

SEQ ID NO: 22094 - DNA, 53 bp, Artificial Sequence; identical to SEQ ID NO: 2111
  Description of Artificial Sequence: Synthetic pecan; inner sequence and 3' sequence

SEQ ID NO: 22095 - DNA, 53 bp, Artificial Sequence; identical to SEQ ID NO: 2164
  Description of Artificial Sequence: Synthetic pecan; inner sequence and 3' sequence

SEQ ID NO: 22096 - DNA, 53 bp, Artificial Sequence; identical to SEQ ID NO: 2257
  Description of Artificial Sequence: Synthetic pecan; inner sequence and 3' sequence

SEQ ID NO: 22097 - DNA, 53 bp, Artificial Sequence; identical to SEQ ID NO: 2243
  Description of Artificial Sequence: Synthetic pecan; inner sequence and 3' sequence

SEQ ID NO: 22098 - DNA, 53 bp, Artificial Sequence; identical to SEQ ID NO: 2123
  Description of Artificial Sequence: Synthetic pecan; inner sequence and 3' sequence

SEQ ID NO: 22099 - DNA, 53 bp, Artificial Sequence; identical to SEQ ID NO: 2141
  Description of Artificial Sequence: Synthetic pecan; inner sequence and 3' sequence

SEQ ID NO: 22100 - DNA, 53 bp, Artificial Sequence; identical to SEQ ID NO: 2245
  Description of Artificial Sequence: Synthetic pecan; inner sequence and 3' sequence

SEQ ID NO: 22101 - DNA, 52 bp, Artificial Sequence; identical to SEQ ID NO: 6763
  Description of Artificial Sequence: Synthetic pecan; inner sequence and 3' sequence

SEQ ID NO: 22102 - DNA, 52 bp, Artificial Sequence; identical to SEQ ID NO: 6559
  Description of Artificial Sequence: Synthetic pecan; inner sequence and 3' sequence

SEQ ID NO: 22103 - DNA, 53 bp, Artificial Sequence; identical to SEQ ID NO: 2877
  Description of Artificial Sequence: Synthetic pecan; inner sequence and 3' sequence

SEQ ID NO: 22104 - DNA, 53 bp, Artificial Sequence; identical to SEQ ID NO: 2126
  Description of Artificial Sequence: Synthetic pecan; inner sequence and 3' sequence

SEQ ID NO: 22105 - DNA, 53 bp, Artificial Sequence
  Description of Artificial Sequence: Synthetic pecan; inner sequence and 3' sequence
ggacgcagcgtacctcaacgtggacgtgcattgactagtacatgaccacttga

SEQ ID NO: 22106 - DNA, 53 bp, Artificial Sequence; identical to SEQ ID NO: 2196
  Description of Artificial Sequence: Synthetic pecan; inner sequence and 3' sequence

SEQ ID NO: 22107 - DNA, 53 bp, Artificial Sequence; identical to SEQ ID NO: 2231
  Description of Artificial Sequence: Synthetic pecan; inner sequence and 3' sequence

SEQ ID NO: 22108 - DNA, 53 bp, Artificial Sequence; identical to SEQ ID NO: 2787
  Description of Artificial Sequence: Synthetic pecan; inner sequence and 3' sequence

SEQ ID NO: 22109 - DNA, 53 bp, Artificial Sequence; identical to SEQ ID NO: 2344
  Description of Artificial Sequence: Synthetic pecan; inner sequence and 3' sequence

SEQ ID NO: 22110 - DNA, 53 bp, Artificial Sequence; identical to SEQ ID NO: 2076
  Description of Artificial Sequence: Synthetic pecan; inner sequence and 3' sequence

SEQ ID NO: 22111 - DNA, 53 bp, Artificial Sequence; identical to SEQ ID NO: 2365
  Description of Artificial Sequence: Synthetic pecan; inner sequence and 3' sequence

SEQ ID NO: 22112 - DNA, 53 bp, Artificial Sequence; identical to SEQ ID NO: 2132
  Description of Artificial Sequence: Synthetic pecan; inner sequence and 3' sequence

SEQ ID NO: 22113 - DNA, 53 bp, Artificial Sequence; identical to SEQ ID NO: 2283
  Description of Artificial Sequence: Synthetic pecan; inner sequence and 3' sequence

SEQ ID NO: 22114 - DNA, 53 bp, Artificial Sequence; identical to SEQ ID NO: 2212
  Description of Artificial Sequence: Synthetic pecan; inner sequence and 3' sequence

SEQ ID NO: 22115 - DNA, 53 bp, Artificial Sequence; identical to SEQ ID NO: 2227
  Description of Artificial Sequence: Synthetic pecan; inner sequence and 3' sequence

SEQ ID NO: 22116 - DNA, 53 bp, Artificial Sequence; identical to SEQ ID NO: 2310
  Description of Artificial Sequence: Synthetic pecan; inner sequence and 3' sequence

SEQ ID NO: 22117 - DNA, 53 bp, Artificial Sequence; identical to SEQ ID NO: 2039
  Description of Artificial Sequence: Synthetic pecan; inner sequence and 3' sequence

SEQ ID NO: 22118 - DNA, 53 bp, Artificial Sequence; identical to SEQ ID NO: 2163
  Description of Artificial Sequence: Synthetic pecan; inner sequence and 3' sequence

SEQ ID NO: 22119 - DNA, 53 bp, Artificial Sequence
  Description of Artificial Sequence: Synthetic pecan; inner sequence and 3' sequence
ggcacaaacggaccgacacgtgcgcatggattgactagtacatgaccacttga

SEQ ID NO: 22120 - DNA, 53 bp, Artificial Sequence; identical to SEQ ID NO: 2038
  Description of Artificial Sequence: Synthetic pecan; inner sequence and 3' sequence

SEQ ID NO: 22121 - DNA, 54 bp, Artificial Sequence; identical to SEQ ID NO: 2250
  Description of Artificial Sequence: Synthetic pecan; inner sequence and 3' sequence

SEQ ID NO: 22122 - DNA, 53 bp, Artificial Sequence; identical to SEQ ID NO: 2240
  Description of Artificial Sequence: Synthetic pecan; inner sequence and 3' sequence

SEQ ID NO: 22123 - DNA, 53 bp, Artificial Sequence; identical to SEQ ID NO: 2369
  Description of Artificial Sequence: Synthetic pecan; inner sequence and 3' sequence

SEQ ID NO: 22124 - DNA, 53 bp, Artificial Sequence; identical to SEQ ID NO: 2149
  Description of Artificial Sequence: Synthetic pecan; inner sequence and 3' sequence

SEQ ID NO: 22125 - DNA, 53 bp, Artificial Sequence; identical to SEQ ID NO: 2057
  Description of Artificial Sequence: Synthetic pecan; inner sequence and 3' sequence

SEQ ID NO: 22126 - DNA, 53 bp, Artificial Sequence; identical to SEQ ID NO: 2138
  Description of Artificial Sequence: Synthetic pecan; inner sequence and 3' sequence

SEQ ID NO: 22127 - DNA, 53 bp, Artificial Sequence; identical to SEQ ID NO: 2470
  Description of Artificial Sequence: Synthetic pecan; inner sequence and 3' sequence

SEQ ID NO: 22128 - DNA, 53 bp, Artificial Sequence; identical to SEQ ID NO: 2190
  Description of Artificial Sequence: Synthetic pecan; inner sequence and 3' sequence

SEQ ID NO: 22129 - DNA, 53 bp, Artificial Sequence; identical to SEQ ID NO: 2154
  Description of Artificial Sequence: Synthetic pecan; inner sequence and 3' sequence

SEQ ID NO: 22130 - DNA, 53 bp, Artificial Sequence; identical to SEQ ID NO: 2114
  Description of Artificial Sequence: Synthetic pecan; inner sequence and 3' sequence

SEQ ID NO: 22131 - DNA, 53 bp, Artificial Sequence; identical to SEQ ID NO: 2653
  Description of Artificial Sequence: Synthetic pecan; inner sequence and 3' sequence

SEQ ID NO: 22132 - DNA, 53 bp, Artificial Sequence; identical to SEQ ID NO: 2371
  Description of Artificial Sequence: Synthetic pecan; inner sequence and 3' sequence

SEQ ID NO: 22133 - DNA, 53 bp, Artificial Sequence
  Description of Artificial Sequence: Synthetic pecan; inner sequence and 3' sequence
gcacgactcgcaccctattatgaggccatgttgactagtacatgaccacttga

SEQ ID NO: 22134 - DNA, 53 bp, Artificial Sequence; identical to SEQ ID NO: 6565
  Description of Artificial Sequence: Synthetic pecan; inner sequence and 3' sequence

SEQ ID NO: 22135 - DNA, 53 bp, Artificial Sequence; identical to SEQ ID NO: 2063
  Description of Artificial Sequence: Synthetic pecan; inner sequence and 3' sequence

SEQ ID NO: 22136 - DNA, 48 bp, Artificial Sequence
  Description of Artificial Sequence: Synthetic pecan; inner sequence and 3' sequence
ggcatgcacgcacctacacgtgggcttgactagtacatgaccacttga

SEQ ID NO: 22137 - DNA, 53 bp, Artificial Sequence; identical to SEQ ID NO: 2666
  Description of Artificial Sequence: Synthetic pecan; inner sequence and 3' sequence

SEQ ID NO: 22138 - DNA, 53 bp, Artificial Sequence; identical to SEQ ID NO: 2352
  Description of Artificial Sequence: Synthetic pecan; inner sequence and 3' sequence

SEQ ID NO: 22139 - DNA, 53 bp, Artificial Sequence; identical to SEQ ID NO: 2343
  Description of Artificial Sequence: Synthetic pecan; inner sequence and 3' sequence

SEQ ID NO: 22140 - DNA, 53 bp, Artificial Sequence; identical to SEQ ID NO: 6691
  Description of Artificial Sequence: Synthetic pecan; inner sequence and 3' sequence

SEQ ID NO: 22141 - DNA, 53 bp, Artificial Sequence; identical to SEQ ID NO: 2358
  Description of Artificial Sequence: Synthetic pecan; inner sequence and 3' sequence

SEQ ID NO: 22142 - DNA, 53 bp, Artificial Sequence; identical to SEQ ID NO: 6503
  Description of Artificial Sequence: Synthetic pecan; inner sequence and 3' sequence

SEQ ID NO: 22143 - DNA, 53 bp, Artificial Sequence; identical to SEQ ID NO: 2263
  Description of Artificial Sequence: Synthetic pecan; inner sequence and 3' sequence

SEQ ID NO: 22144 - DNA, 53 bp, Artificial Sequence; identical to SEQ ID NO: 2920
  Description of Artificial Sequence: Synthetic pecan; inner sequence and 3' sequence

SEQ ID NO: 22145 - DNA, 53 bp, Artificial Sequence; identical to SEQ ID NO: 2125
  Description of Artificial Sequence: Synthetic pecan; inner sequence and 3' sequence

SEQ ID NO: 22146 - DNA, 53 bp, Artificial Sequence; identical to SEQ ID NO: 2419
  Description of Artificial Sequence: Synthetic pecan; inner sequence and 3' sequence

SEQ ID NO: 22147 - DNA, 53 bp, Artificial Sequence; identical to SEQ ID NO: 2632
  Description of Artificial Sequence: Synthetic pecan; inner sequence and 3' sequence

SEQ ID NO: 22148 - DNA, 53 bp, Artificial Sequence; identical to SEQ ID NO: 2340
  Description of Artificial Sequence: Synthetic pecan; inner sequence and 3' sequence

SEQ ID NO: 22149 - DNA, 53 bp, Artificial Sequence; identical to SEQ ID NO: 2567
  Description of Artificial Sequence: Synthetic pecan; inner sequence and 3' sequence

SEQ ID NO: 22150 - DNA, 53 bp, Artificial Sequence; identical to SEQ ID NO: 2192
  Description of Artificial Sequence: Synthetic pecan; inner sequence and 3' sequence

SEQ ID NO: 22151 - DNA, 53 bp, Artificial Sequence
  Description of Artificial Sequence: Synthetic pecan; inner sequence and 3' sequence
ggccacagcgtacctcaacgtggccgtgcattgactagtacatgaccacttga

SEQ ID NO: 22152 - DNA, 53 bp, Artificial Sequence; identical to SEQ ID NO: 2093
  Description of Artificial Sequence: Synthetic pecan; inner sequence and 3' sequence

SEQ ID NO: 22153 - DNA, 53 bp, Artificial Sequence; identical to SEQ ID NO: 2884
  Description of Artificial Sequence: Synthetic pecan; inner sequence and 3' sequence

SEQ ID NO: 22154 - DNA, 53 bp, Artificial Sequence; identical to SEQ ID NO: 2205
  Description of Artificial Sequence: Synthetic pecan; inner sequence and 3' sequence

SEQ ID NO: 22155 - DNA, 53 bp, Artificial Sequence; identical to SEQ ID NO: 2168
  Description of Artificial Sequence: Synthetic pecan; inner sequence and 3' sequence

SEQ ID NO: 22156 - DNA, 53 bp, Artificial Sequence; identical to SEQ ID NO: 2274
  Description of Artificial Sequence: Synthetic pecan; inner sequence and 3' sequence

SEQ ID NO: 22157 - DNA, 53 bp, Artificial Sequence; identical to SEQ ID NO: 2272
  Description of Artificial Sequence: Synthetic pecan; inner sequence and 3' sequence

SEQ ID NO: 22158 - DNA, 53 bp, Artificial Sequence; identical to SEQ ID NO: 2647
  Description of Artificial Sequence: Synthetic pecan; inner sequence and 3' sequence

SEQ ID NO: 22159 - DNA, 53 bp, Artificial Sequence; identical to SEQ ID NO: 6543
  Description of Artificial Sequence: Synthetic pecan; inner sequence and 3' sequence

SEQ ID NO: 22160 - DNA, 53 bp, Artificial Sequence; identical to SEQ ID NO: 2142
  Description of Artificial Sequence: Synthetic pecan; inner sequence and 3' sequence

SEQ ID NO: 22161 - DNA, 53 bp, Artificial Sequence; identical to SEQ ID NO: 2113
  Description of Artificial Sequence: Synthetic pecan; inner sequence and 3' sequence

SEQ ID NO: 22162 - DNA, 53 bp, Artificial Sequence; identical to SEQ ID NO: 2443
  Description of Artificial Sequence: Synthetic pecan; inner sequence and 3' sequence

SEQ ID NO: 22163 - DNA, 53 bp, Artificial Sequence; identical to SEQ ID NO: 6405
  Description of Artificial Sequence: Synthetic pecan; inner sequence and 3' sequence

SEQ ID NO: 22164 - DNA, 53 bp, Artificial Sequence; identical to SEQ ID NO: 2457
  Description of Artificial Sequence: Synthetic pecan; inner sequence and 3' sequence

SEQ ID NO: 22165 - DNA, 53 bp, Artificial Sequence
  Description of Artificial Sequence: Synthetic pecan; inner sequence and 3' sequence
ccgatcgcacgtcaaggcaggctgtacgcgttgactagtacatgaccacttga

SEQ ID NO: 22166 - DNA, 53 bp, Artificial Sequence; identical to SEQ ID NO: 2177
  Description of Artificial Sequence: Synthetic pecan; inner sequence and 3' sequence

SEQ ID NO: 22167 - DNA, 53 bp, Artificial Sequence; identical to SEQ ID NO: 2724
  Description of Artificial Sequence: Synthetic pecan; inner sequence and 3' sequence

SEQ ID NO: 22168 - DNA, 53 bp, Artificial Sequence; identical to SEQ ID NO: 2188
  Description of Artificial Sequence: Synthetic pecan; inner sequence and 3' sequence

SEQ ID NO: 22169 - DNA, 53 bp, Artificial Sequence; identical to SEQ ID NO: 2521
  Description of Artificial Sequence: Synthetic pecan; inner sequence and 3' sequence

SEQ ID NO: 22170 - DNA, 54 bp, Artificial Sequence; identical to SEQ ID NO: 2221
  Description of Artificial Sequence: Synthetic pecan; inner sequence and 3' sequence

SEQ ID NO: 22171 - DNA, 54 bp, Artificial Sequence; identical to SEQ ID NO: 2971
  Description of Artificial Sequence: Synthetic pecan; inner sequence and 3' sequence

SEQ ID NO: 22172 - DNA, 53 bp, Artificial Sequence; identical to SEQ ID NO: 6498
  Description of Artificial Sequence: Synthetic pecan; inner sequence and 3' sequence

SEQ ID NO: 22173 - DNA, 53 bp, Artificial Sequence; identical to SEQ ID NO: 2673
  Description of Artificial Sequence: Synthetic pecan; inner sequence and 3' sequence

SEQ ID NO: 22174 - DNA, 53 bp, Artificial Sequence; identical to SEQ ID NO: 2262
  Description of Artificial Sequence: Synthetic pecan; inner sequence and 3' sequence

SEQ ID NO: 22175 - DNA, 53 bp, Artificial Sequence; identical to SEQ ID NO: 2622
  Description of Artificial Sequence: Synthetic pecan; inner sequence and 3' sequence

SEQ ID NO: 22176 - DNA, 53 bp, Artificial Sequence; identical to SEQ ID NO: 2615
  Description of Artificial Sequence: Synthetic pecan; inner sequence and 3' sequence

SEQ ID NO: 22177 - DNA, 53 bp, Artificial Sequence; identical to SEQ ID NO: 2617
  Description of Artificial Sequence: Synthetic pecan; inner sequence and 3' sequence

SEQ ID NO: 22178 - DNA, 53 bp, Artificial Sequence; identical to SEQ ID NO: 6336
  Description of Artificial Sequence: Synthetic pecan; inner sequence and 3' sequence

SEQ ID NO: 22179 - DNA, 51 bp, Artificial Sequence; identical to SEQ ID NO: 6786
  Description of Artificial Sequence: Synthetic pecan; inner sequence and 3' sequence

SEQ ID NO: 22180 - DNA, 53 bp, Artificial Sequence
  Description of Artificial Sequence: Synthetic pecan; inner sequence and 3' sequence
ggcacaaacggaccgacatgtgcgcatggattgactagtacatgaccacttga

SEQ ID NO: 22181 - DNA, 53 bp, Artificial Sequence; identical to SEQ ID NO: 2891
  Description of Artificial Sequence: Synthetic pecan; inner sequence and 3' sequence

SEQ ID NO: 22182 - DNA, 53 bp, Artificial Sequence; identical to SEQ ID NO: 2728
  Description of Artificial Sequence: Synthetic pecan; inner sequence and 3' sequence

SEQ ID NO: 22183 - DNA, 53 bp, Artificial Sequence; identical to SEQ ID NO: 2776
  Description of Artificial Sequence: Synthetic pecan; inner sequence and 3' sequence

SEQ ID NO: 22184 - DNA, 53 bp, Artificial Sequence; identical to SEQ ID NO: 2414
  Description of Artificial Sequence: Synthetic pecan; inner sequence and 3' sequence

SEQ ID NO: 22185 - DNA, 53 bp, Artificial Sequence; identical to SEQ ID NO: 10767
  Description of Artificial Sequence: Synthetic pecan; inner sequence and 3' sequence

SEQ ID NO: 22186 - DNA, 53 bp, Artificial Sequence; identical to SEQ ID NO: 2294
  Description of Artificial Sequence: Synthetic pecan; inner sequence and 3' sequence

SEQ ID NO: 22187 - DNA, 54 bp, Artificial Sequence
  Description of Artificial Sequence: Synthetic pecan; inner sequence and 3' sequence
ggacgcagcggaacgttcgagtggttgcgtattgactagtacatgaccacttga

SEQ ID NO: 22188 - DNA, 53 bp, Artificial Sequence; identical to SEQ ID NO: 14521
  Description of Artificial Sequence: Synthetic pecan; inner sequence and 3' sequence

SEQ ID NO: 22189 - DNA, 53 bp, Artificial Sequence; identical to SEQ ID NO: 2347
  Description of Artificial Sequence: Synthetic pecan; inner sequence and 3' sequence

SEQ ID NO: 22190 - DNA, 53 bp, Artificial Sequence; identical to SEQ ID NO: 2061
  Description of Artificial Sequence: Synthetic pecan; inner sequence and 3' sequence

SEQ ID NO: 22191 - DNA, 53 bp, Artificial Sequence; identical to SEQ ID NO: 2129
  Description of Artificial Sequence: Synthetic pecan; inner sequence and 3' sequence

SEQ ID NO: 22192 - DNA, 53 bp, Artificial Sequence; identical to SEQ ID NO: 2246
  Description of Artificial Sequence: Synthetic pecan; inner sequence and 3' sequence

SEQ ID NO: 22193 - DNA, 53 bp, Artificial Sequence
  Description of Artificial Sequence: Synthetic pecan; inner sequence and 3' sequence
ccgcacgtagccctatcactggtgcatgcattgactagtacatgaccacttga

SEQ ID NO: 22194 - DNA, 53 bp, Artificial Sequence; identical to SEQ ID NO: 10964
  Description of Artificial Sequence: Synthetic pecan; inner sequence and 3' sequence

SEQ ID NO: 22195 - DNA, 53 bp, Artificial Sequence; identical to SEQ ID NO: 2104
  Description of Artificial Sequence: Synthetic pecan; inner sequence and 3' sequence

SEQ ID NO: 22196 - DNA, 53 bp, Artificial Sequence; identical to SEQ ID NO: 2446
  Description of Artificial Sequence: Synthetic pecan; inner sequence and 3' sequence

SEQ ID NO: 22197 - DNA, 53 bp, Artificial Sequence; identical to SEQ ID NO: 2746
  Description of Artificial Sequence: Synthetic pecan; inner sequence and 3' sequence

SEQ ID NO: 22198 - DNA, 53 bp, Artificial Sequence; identical to SEQ ID NO: 2118
  Description of Artificial Sequence: Synthetic pecan; inner sequence and 3' sequence

SEQ ID NO: 22199 - DNA, 53 bp, Artificial Sequence; identical to SEQ ID NO: 10712
  Description of Artificial Sequence: Synthetic pecan; inner sequence and 3' sequence

SEQ ID NO: 22200 - DNA, 53 bp, Artificial Sequence; identical to SEQ ID NO: 2900
  Description of Artificial Sequence: Synthetic pecan; inner sequence and 3' sequence

SEQ ID NO: 22201 - DNA, 53 bp, Artificial Sequence; identical to SEQ ID NO: 2267
  Description of Artificial Sequence: Synthetic pecan; inner sequence and 3' sequence

SEQ ID NO: 22202 - DNA, 53 bp, Artificial Sequence; identical to SEQ ID NO: 2203
  Description of Artificial Sequence: Synthetic pecan; inner sequence and 3' sequence

SEQ ID NO: 22203 - DNA, 53 bp, Artificial Sequence; identical to SEQ ID NO: 14958
  Description of Artificial Sequence: Synthetic pecan; inner sequence and 3' sequence

SEQ ID NO: 22204 - DNA, 53 bp, Artificial Sequence; identical to SEQ ID NO: 2095
  Description of Artificial Sequence: Synthetic pecan; inner sequence and 3' sequence

SEQ ID NO: 22205 - DNA, 53 bp, Artificial Sequence; identical to SEQ ID NO: 2204
  Description of Artificial Sequence: Synthetic pecan; inner sequence and 3' sequence

SEQ ID NO: 22206 - DNA, 53 bp, Artificial Sequence; identical to SEQ ID NO: 10627
  Description of Artificial Sequence: Synthetic pecan; inner sequence and 3' sequence

SEQ ID NO: 22207 - DNA, 53 bp, Artificial Sequence; identical to SEQ ID NO: 2485
  Description of Artificial Sequence: Synthetic pecan; inner sequence and 3' sequence

SEQ ID NO: 22208 - DNA, 53 bp, Artificial Sequence; identical to SEQ ID NO: 2768
  Description of Artificial Sequence: Synthetic pecan; inner sequence and 3' sequence

SEQ ID NO: 22209 - DNA, 53 bp, Artificial Sequence; identical to SEQ ID NO: 2559
  Description of Artificial Sequence: Synthetic pecan; inner sequence and 3' sequence

SEQ ID NO: 22210 - DNA, 53 bp, Artificial Sequence; identical to SEQ ID NO: 2390
  Description of Artificial Sequence: Synthetic pecan; inner sequence and 3' sequence

SEQ ID NO: 22211 - DNA, 53 bp, Artificial Sequence; identical to SEQ ID NO: 2065
  Description of Artificial Sequence: Synthetic pecan; inner sequence and 3' sequence

SEQ ID NO: 22212 - DNA, 53 bp, Artificial Sequence; identical to SEQ ID NO: 6748
  Description of Artificial Sequence: Synthetic pecan; inner sequence and 3' sequence

SEQ ID NO: 22213 - DNA, 53 bp, Artificial Sequence; identical to SEQ ID NO: 2105
  Description of Artificial Sequence: Synthetic pecan; inner sequence and 3' sequence

SEQ ID NO: 22214 - DNA, 52 bp, Artificial Sequence; identical to SEQ ID NO: 2251
  Description of Artificial Sequence: Synthetic pecan; inner sequence and 3' sequence

SEQ ID NO: 22215 - DNA, 53 bp, Artificial Sequence; identical to SEQ ID NO: 2282
  Description of Artificial Sequence: Synthetic pecan; inner sequence and 3' sequence

SEQ ID NO: 22216 - DNA, 53 bp, Artificial Sequence; identical to SEQ ID NO: 2628
  Description of Artificial Sequence: Synthetic pecan; inner sequence and 3' sequence

SEQ ID NO: 22217 - DNA, 53 bp, Artificial Sequence; identical to SEQ ID NO: 2442
  Description of Artificial Sequence: Synthetic pecan; inner sequence and 3' sequence

SEQ ID NO: 22218 - DNA, 53 bp, Artificial Sequence; identical to SEQ ID NO: 2696
  Description of Artificial Sequence: Synthetic pecan; inner sequence and 3' sequence

SEQ ID NO: 22219 - DNA, 53 bp, Artificial Sequence; identical to SEQ ID NO: 2137
  Description of Artificial Sequence: Synthetic pecan; inner sequence and 3' sequence

SEQ ID NO: 22220 - DNA, 53 bp, Artificial Sequence; identical to SEQ ID NO: 6603
  Description of Artificial Sequence: Synthetic pecan; inner sequence and 3' sequence

SEQ ID NO: 22221 - DNA, 53 bp, Artificial Sequence; identical to SEQ ID NO: 2359
  Description of Artificial Sequence: Synthetic pecan; inner sequence and 3' sequence

SEQ ID NO: 22222 - DNA, 53 bp, Artificial Sequence; identical to SEQ ID NO: 2097
  Description of Artificial Sequence: Synthetic pecan; inner sequence and 3' sequence

SEQ ID NO: 22223 - DNA, 53 bp, Artificial Sequence; identical to SEQ ID NO: 2317
  Description of Artificial Sequence: Synthetic pecan; inner sequence and 3' sequence

SEQ ID NO: 22224 - DNA, 49 bp, Artificial Sequence; identical to SEQ ID NO: 2893
  Description of Artificial Sequence: Synthetic pecan; inner sequence and 3' sequence

SEQ ID NO: 22225 - DNA, 53 bp, Artificial Sequence; identical to SEQ ID NO: 2277
  Description of Artificial Sequence: Synthetic pecan; inner sequence and 3' sequence

SEQ ID NO: 22226 - DNA, 53 bp, Artificial Sequence
  Description of Artificial Sequence: Synthetic pecan; inner sequence and 3' sequence
ggcatgcacgcacctacatgtgggtatggattgactagtacatgaccacttga

SEQ ID NO: 22227 - DNA, 53 bp, Artificial Sequence
  Description of Artificial Sequence: Synthetic pecan; inner sequence and 3' sequence
ccgatcgcacgtcaaggcaggctgtacgtgttgactagtacatgaccacttga

SEQ ID NO: 22228 - DNA, 53 bp, Artificial Sequence; identical to SEQ ID NO: 2595
  Description of Artificial Sequence: Synthetic pecan; inner sequence and 3' sequence

SEQ ID NO: 22229 - DNA, 53 bp, Artificial Sequence
  Description of Artificial Sequence: Synthetic pecan; inner sequence and 3' sequence
ggacgcagcttgcctactggtggtcacgtgttgactagtacatgaccacttga

SEQ ID NO: 22230 - DNA, 53 bp, Artificial Sequence; identical to SEQ ID NO: 2079
  Description of Artificial Sequence: Synthetic pecan; inner sequence and 3' sequence

SEQ ID NO: 22231 - DNA, 53 bp, Artificial Sequence; identical to SEQ ID NO: 2103
  Description of Artificial Sequence: Synthetic pecan; inner sequence and 3' sequence

SEQ ID NO: 22232 - DNA, 53 bp, Artificial Sequence; identical to SEQ ID NO: 2089
  Description of Artificial Sequence: Synthetic pecan; inner sequence and 3' sequence

SEQ ID NO: 22233 - DNA, 53 bp, Artificial Sequence
  Description of Artificial Sequence: Synthetic pecan; inner sequence and 3' sequence
gcacgactcgcaccctataatgaggccatgttgactagtacatgaccacttga

SEQ ID NO: 22234 - DNA, 53 bp, Artificial Sequence; identical to SEQ ID NO: 2634
  Description of Artificial Sequence: Synthetic pecan; inner sequence and 3' sequence

SEQ ID NO: 22235 - DNA, 53 bp, Artificial Sequence; identical to SEQ ID NO: 2256
  Description of Artificial Sequence: Synthetic pecan; inner sequence and 3' sequence

SEQ ID NO: 22236 - DNA, 53 bp, Artificial Sequence; identical to SEQ ID NO: 14892
  Description of Artificial Sequence: Synthetic pecan; inner sequence and 3' sequence

SEQ ID NO: 22237 - DNA, 53 bp, Artificial Sequence; identical to SEQ ID NO: 2135
  Description of Artificial Sequence: Synthetic pecan; inner sequence and 3' sequence

SEQ ID NO: 22238 - DNA, 53 bp, Artificial Sequence
  Description of Artificial Sequence: Synthetic pecan; inner sequence and 3' sequence
ggcgcgaacggaccgacaagtgcgcatggattgactagtacatgaccacttga

SEQ ID NO: 22239 - DNA, 53 bp, Artificial Sequence; identical to SEQ ID NO: 2463
  Description of Artificial Sequence: Synthetic pecan; inner sequence and 3' sequence

SEQ ID NO: 22240 - DNA, 53 bp, Artificial Sequence; identical to SEQ ID NO: 2789
  Description of Artificial Sequence: Synthetic pecan; inner sequence and 3' sequence

SEQ ID NO: 22241 - DNA, 53 bp, Artificial Sequence; identical to SEQ ID NO: 10985
  Description of Artificial Sequence: Synthetic pecan; inner sequence and 3' sequence

SEQ ID NO: 22242 - DNA, 53 bp, Artificial Sequence; identical to SEQ ID NO: 2186
  Description of Artificial Sequence: Synthetic pecan; inner sequence and 3' sequence

SEQ ID NO: 22243 - DNA, 53 bp, Artificial Sequence; identical to SEQ ID NO: 2094
  Description of Artificial Sequence: Synthetic pecan; inner sequence and 3' sequence

SEQ ID NO: 22244 - DNA, 53 bp, Artificial Sequence; identical to SEQ ID NO: 2599
  Description of Artificial Sequence: Synthetic pecan; inner sequence and 3' sequence

SEQ ID NO: 22245 - DNA, 53 bp, Artificial Sequence; identical to SEQ ID NO: 2266
  Description of Artificial Sequence: Synthetic pecan; inner sequence and 3' sequence

SEQ ID NO: 22246 - DNA, 53 bp, Artificial Sequence; identical to SEQ ID NO: 14997
  Description of Artificial Sequence: Synthetic pecan; inner sequence and 3' sequence

SEQ ID NO: 22247 - DNA, 53 bp, Artificial Sequence; identical to SEQ ID NO: 2088
  Description of Artificial Sequence: Synthetic pecan; inner sequence and 3' sequence

SEQ ID NO: 22248 - DNA, 53 bp, Artificial Sequence; identical to SEQ ID NO: 2244
  Description of Artificial Sequence: Synthetic pecan; inner sequence and 3' sequence

SEQ ID NO: 22249 - DNA, 53 bp, Artificial Sequence; identical to SEQ ID NO: 2467
  Description of Artificial Sequence: Synthetic pecan; inner sequence and 3' sequence

SEQ ID NO: 22250 - DNA, 53 bp, Artificial Sequence; identical to SEQ ID NO: 2998
  Description of Artificial Sequence: Synthetic pecan; inner sequence and 3' sequence

SEQ ID NO: 22251 - DNA, 53 bp, Artificial Sequence; identical to SEQ ID NO: 2611
  Description of Artificial Sequence: Synthetic pecan; inner sequence and 3' sequence

SEQ ID NO: 22252 - DNA, 53 bp, Artificial Sequence; identical to SEQ ID NO: 2360
  Description of Artificial Sequence: Synthetic pecan; inner sequence and 3' sequence

SEQ ID NO: 22253 - DNA, 53 bp, Artificial Sequence; identical to SEQ ID NO: 2354
  Description of Artificial Sequence: Synthetic pecan; inner sequence and 3' sequence

SEQ ID NO: 22254 - DNA, 53 bp, Artificial Sequence; identical to SEQ ID NO: 7001
  Description of Artificial Sequence: Synthetic pecan; inner sequence and 3' sequence

SEQ ID NO: 22255 - DNA, 53 bp, Artificial Sequence; identical to SEQ ID NO: 2637
  Description of Artificial Sequence: Synthetic pecan; inner sequence and 3' sequence

SEQ ID NO: 22256 - DNA, 49 bp, Artificial Sequence; identical to SEQ ID NO: 2822
  Description of Artificial Sequence: Synthetic pecan; inner sequence and 3' sequence

SEQ ID NO: 22257 - DNA, 53 bp, Artificial Sequence; identical to SEQ ID NO: 14985
  Description of Artificial Sequence: Synthetic pecan; inner sequence and 3' sequence

SEQ ID NO: 22258 - DNA, 53 bp, Artificial Sequence; identical to SEQ ID NO: 2236
  Description of Artificial Sequence: Synthetic pecan; inner sequence and 3' sequence

SEQ ID NO: 22259 - DNA, 53 bp, Artificial Sequence; identical to SEQ ID NO: 6802
  Description of Artificial Sequence: Synthetic pecan; inner sequence and 3' sequence

SEQ ID NO: 22260 - DNA, 53 bp, Artificial Sequence; identical to SEQ ID NO: 2242
  Description of Artificial Sequence: Synthetic pecan; inner sequence and 3' sequence

SEQ ID NO: 22261 - DNA, 53 bp, Artificial Sequence; identical to SEQ ID NO: 2509
  Description of Artificial Sequence: Synthetic pecan; inner sequence and 3' sequence

SEQ ID NO: 22262 - DNA, 53 bp, Artificial Sequence; identical to SEQ ID NO: 10928
  Description of Artificial Sequence: Synthetic pecan; inner sequence and 3' sequence

SEQ ID NO: 22263 - DNA, 52 bp, Artificial Sequence; identical to SEQ ID NO: 6869
  Description of Artificial Sequence: Synthetic pecan; inner sequence and 3' sequence

SEQ ID NO: 22264 - DNA, 53 bp, Artificial Sequence; identical to SEQ ID NO: 2158
  Description of Artificial Sequence: Synthetic pecan; inner sequence and 3' sequence

SEQ ID NO: 22265 - DNA, 53 bp, Artificial Sequence; identical to SEQ ID NO: 2429
  Description of Artificial Sequence: Synthetic pecan; inner sequence and 3' sequence

SEQ ID NO: 22266 - DNA, 53 bp, Artificial Sequence; identical to SEQ ID NO: 2367
  Description of Artificial Sequence: Synthetic pecan; inner sequence and 3' sequence

SEQ ID NO: 22267 - DNA, 53 bp, Artificial Sequence; identical to SEQ ID NO: 2362
  Description of Artificial Sequence: Synthetic pecan; inner sequence and 3' sequence

SEQ ID NO: 22268 - DNA, 53 bp, Artificial Sequence; identical to SEQ ID NO: 2044
  Description of Artificial Sequence: Synthetic pecan; inner sequence and 3' sequence

SEQ ID NO: 22269 - DNA, 53 bp, Artificial Sequence
  Description of Artificial Sequence: Synthetic pecan; inner sequence and 3' sequence
ccgcacgtagacctatcagtggtgcatgcattgactagtacatgaccacttga

SEQ ID NO: 22270 - DNA, 53 bp, Artificial Sequence; identical to SEQ ID NO: 2024
  Description of Artificial Sequence: Synthetic pecan; inner sequence and 3' sequence

SEQ ID NO: 22271 - DNA, 53 bp, Artificial Sequence; identical to SEQ ID NO: 6638
  Description of Artificial Sequence: Synthetic pecan; inner sequence and 3' sequence

SEQ ID NO: 22272 - DNA, 53 bp, Artificial Sequence; identical to SEQ ID NO: 2324
  Description of Artificial Sequence: Synthetic pecan; inner sequence and 3' sequence

SEQ ID NO: 22273 - DNA, 53 bp, Artificial Sequence; identical to SEQ ID NO: 2407
  Description of Artificial Sequence: Synthetic pecan; inner sequence and 3' sequence

SEQ ID NO: 22274 - DNA, 53 bp, Artificial Sequence; identical to SEQ ID NO: 2783
  Description of Artificial Sequence: Synthetic pecan; inner sequence and 3' sequence

SEQ ID NO: 22275 - DNA, 53 bp, Artificial Sequence; identical to SEQ ID NO: 2320
  Description of Artificial Sequence: Synthetic pecan; inner sequence and 3' sequence

SEQ ID NO: 22276 - DNA, 53 bp, Artificial Sequence; identical to SEQ ID NO: 6988
  Description of Artificial Sequence: Synthetic pecan; inner sequence and 3' sequence

SEQ ID NO: 22277 - DNA, 48 bp, Artificial Sequence; identical to SEQ ID NO: 18927
  Description of Artificial Sequence: Synthetic pecan; inner sequence and 3' sequence

SEQ ID NO: 22278 - DNA, 53 bp, Artificial Sequence; identical to SEQ ID NO: 2291
  Description of Artificial Sequence: Synthetic pecan; inner sequence and 3' sequence

SEQ ID NO: 22279 - DNA, 53 bp, Artificial Sequence; identical to SEQ ID NO: 2082
  Description of Artificial Sequence: Synthetic pecan; inner sequence and 3' sequence

SEQ ID NO: 22280 - DNA, 53 bp, Artificial Sequence; identical to SEQ ID NO: 2183
  Description of Artificial Sequence: Synthetic pecan; inner sequence and 3' sequence

SEQ ID NO: 22281 - DNA, 53 bp, Artificial Sequence; identical to SEQ ID NO: 6837
  Description of Artificial Sequence: Synthetic pecan; inner sequence and 3' sequence

SEQ ID NO: 22282 - DNA, 53 bp, Artificial Sequence; identical to SEQ ID NO: 6911
  Description of Artificial Sequence: Synthetic pecan; inner sequence and 3' sequence

SEQ ID NO: 22283 - DNA, 53 bp, Artificial Sequence
  Description of Artificial Sequence: Synthetic pecan; inner sequence and 3' sequence
ggacgcagcttgcctactcgtggtcacgtattgactagtacatgaccacttga

SEQ ID NO: 22284 - DNA, 53 bp, Artificial Sequence; identical to SEQ ID NO: 2420
  Description of Artificial Sequence: Synthetic pecan; inner sequence and 3' sequence

SEQ ID NO: 22285 - DNA, 53 bp, Artificial Sequence; identical to SEQ ID NO: 2662
  Description of Artificial Sequence: Synthetic pecan; inner sequence and 3' sequence

SEQ ID NO: 22286 - DNA, 53 bp, Artificial Sequence
  Description of Artificial Sequence: Synthetic pecan; inner sequence and 3' sequence
ccgcacgtcgccctatcagtggtgcatgcattgactagtacatgaccacttga

SEQ ID NO: 22287 - DNA, 52 bp, Artificial Sequence
  Description of Artificial Sequence: Synthetic pecan; inner sequence and 3' sequence
gcacgccgatgccctcatgtggccgtggcttgactagtacatgaccacttga

SEQ ID NO: 22288 - DNA, 56 bp, Artificial Sequence; identical to SEQ ID NO: 2864
  Description of Artificial Sequence: Synthetic pecan; inner sequence and 3' sequence

SEQ ID NO: 22289 - DNA, 53 bp, Artificial Sequence
  Description of Artificial Sequence: Synthetic pecan; inner sequence and 3' sequence
ggcatgcacgcacctacacgtggacgtggattgactagtacatgaccacttga

SEQ ID NO: 22290 - DNA, 53 bp, Artificial Sequence; identical to SEQ ID NO: 2816
  Description of Artificial Sequence: Synthetic pecan; inner sequence and 3' sequence

SEQ ID NO: 22291 - DNA, 53 bp, Artificial Sequence; identical to SEQ ID NO: 2399
  Description of Artificial Sequence: Synthetic pecan; inner sequence and 3' sequence

SEQ ID NO: 22292 - DNA, 53 bp, Artificial Sequence; identical to SEQ ID NO: 6377
  Description of Artificial Sequence: Synthetic pecan; inner sequence and 3' sequence

SEQ ID NO: 22293 - DNA, 53 bp, Artificial Sequence; identical to SEQ ID NO: 2576
  Description of Artificial Sequence: Synthetic pecan; inner sequence and 3' sequence

SEQ ID NO: 22294 - DNA, 53 bp, Artificial Sequence; identical to SEQ ID NO: 2543
  Description of Artificial Sequence: Synthetic pecan; inner sequence and 3' sequence

SEQ ID NO: 22295 - DNA, 53 bp, Artificial Sequence
  Description of Artificial Sequence: Synthetic pecan; inner sequence and 3' sequence
ggcacaaacggaccgacaagtgcgcatgcattgactagtacatgaccacttga

SEQ ID NO: 22296 - DNA, 53 bp, Artificial Sequence; identical to SEQ ID NO: 2248
  Description of Artificial Sequence: Synthetic pecan; inner sequence and 3' sequence

SEQ ID NO: 22297 - DNA, 53 bp, Artificial Sequence; identical to SEQ ID NO: 2288
  Description of Artificial Sequence: Synthetic pecan; inner sequence and 3' sequence

SEQ ID NO: 22298 - DNA, 53 bp, Artificial Sequence; identical to SEQ ID NO: 2019
  Description of Artificial Sequence: Synthetic pecan; inner sequence and 3' sequence

SEQ ID NO: 22299 - DNA, 53 bp, Artificial Sequence; identical to SEQ ID NO: 2950
  Description of Artificial Sequence: Synthetic pecan; inner sequence and 3' sequence

SEQ ID NO: 22300 - DNA, 53 bp, Artificial Sequence; identical to SEQ ID NO: 6317
  Description of Artificial Sequence: Synthetic pecan; inner sequence and 3' sequence

SEQ ID NO: 22301 - DNA, 53 bp, Artificial Sequence; identical to SEQ ID NO: 6312
  Description of Artificial Sequence: Synthetic pecan; inner sequence and 3' sequence

SEQ ID NO: 22302 - DNA, 53 bp, Artificial Sequence
  Description of Artificial Sequence: Synthetic pecan; inner sequence and 3' sequence
ggccacagcgcacctcaacgtggacgtgcattgactagtacatgaccacttga

SEQ ID NO: 22303 - DNA, 53 bp, Artificial Sequence; identical to SEQ ID NO: 6807
  Description of Artificial Sequence: Synthetic pecan; inner sequence and 3' sequence

SEQ ID NO: 22304 - DNA, 54 bp, Artificial Sequence; identical to SEQ ID NO: 6434
  Description of Artificial Sequence: Synthetic pecan; inner sequence and 3' sequence

SEQ ID NO: 22305 - DNA, 53 bp, Artificial Sequence; identical to SEQ ID NO: 2230
  Description of Artificial Sequence: Synthetic pecan; inner sequence and 3' sequence

SEQ ID NO: 22306 - DNA, 53 bp, Artificial Sequence; identical to SEQ ID NO: 2477
  Description of Artificial Sequence: Synthetic pecan; inner sequence and 3' sequence

SEQ ID NO: 22307 - DNA, 53 bp, Artificial Sequence
  Description of Artificial Sequence: Synthetic pecan; inner sequence and 3' sequence
ggccacagcgtacctcaatgtggacgtgcattgactagtacatgaccacttga

SEQ ID NO: 22308 - DNA, 53 bp, Artificial Sequence; identical to SEQ ID NO: 6918
  Description of Artificial Sequence: Synthetic pecan; inner sequence and 3' sequence

SEQ ID NO: 22309 - DNA, 53 bp, Artificial Sequence; identical to SEQ ID NO: 14773
  Description of Artificial Sequence: Synthetic pecan; inner sequence and 3' sequence

SEQ ID NO: 22310 - DNA, 53 bp, Artificial Sequence; identical to SEQ ID NO: 2106
  Description of Artificial Sequence: Synthetic pecan; inner sequence and 3' sequence

SEQ ID NO: 22311 - DNA, 53 bp, Artificial Sequence; identical to SEQ ID NO: 2122
  Description of Artificial Sequence: Synthetic pecan; inner sequence and 3' sequence

SEQ ID NO: 22312 - DNA, 53 bp, Artificial Sequence
  Description of Artificial Sequence: Synthetic pecan; inner sequence and 3' sequence
ccgatcgcacgtcaagtcaggctgtacgagttgactagtacatgaccacttga

SEQ ID NO: 22313 - DNA, 53 bp, Artificial Sequence; identical to SEQ ID NO: 2303
  Description of Artificial Sequence: Synthetic pecan; inner sequence and 3' sequence

SEQ ID NO: 22314 - DNA, 53 bp, Artificial Sequence; identical to SEQ ID NO: 2091
  Description of Artificial Sequence: Synthetic pecan; inner sequence and 3' sequence

SEQ ID NO: 22315 - DNA, 53 bp, Artificial Sequence; identical to SEQ ID NO: 2619
  Description of Artificial Sequence: Synthetic pecan; inner sequence and 3' sequence

SEQ ID NO: 22316 - DNA, 53 bp, Artificial Sequence; identical to SEQ ID NO: 6890
  Description of Artificial Sequence: Synthetic pecan; inner sequence and 3' sequence

SEQ ID NO: 22317 - DNA, 53 bp, Artificial Sequence; identical to SEQ ID NO: 2293
  Description of Artificial Sequence: Synthetic pecan; inner sequence and 3' sequence

SEQ ID NO: 22318 - DNA, 53 bp, Artificial Sequence; identical to SEQ ID NO: 10782
  Description of Artificial Sequence: Synthetic pecan; inner sequence and 3' sequence

SEQ ID NO: 22319 - DNA, 53 bp, Artificial Sequence; identical to SEQ ID NO: 2397
  Description of Artificial Sequence: Synthetic pecan; inner sequence and 3' sequence

SEQ ID NO: 22320 - DNA, 53 bp, Artificial Sequence; identical to SEQ ID NO: 2253
  Description of Artificial Sequence: Synthetic pecan; inner sequence and 3' sequence

SEQ ID NO: 22321 - DNA, 51 bp, Artificial Sequence
  Description of Artificial Sequence: Synthetic pecan; inner sequence and 3' sequence
gcacgactcgcaccctatcatgcggtcattgactagtacatgaccacttga

SEQ ID NO: 22322 - DNA, 53 bp, Artificial Sequence; identical to SEQ ID NO: 2707
  Description of Artificial Sequence: Synthetic pecan; inner sequence and 3' sequence

SEQ ID NO: 22323 - DNA, 53 bp, Artificial Sequence; identical to SEQ ID NO: 2409
  Description of Artificial Sequence: Synthetic pecan; inner sequence and 3' sequence

SEQ ID NO: 22324 - DNA, 53 bp, Artificial Sequence
  Description of Artificial Sequence: Synthetic pecan; inner sequence and 3' sequence
ggcatgcacgcacctacacgtggtcacgtattgactagtacatgaccacttga

SEQ ID NO: 22325 - DNA, 53 bp, Artificial Sequence; identical to SEQ ID NO: 6667
  Description of Artificial Sequence: Synthetic pecan; inner sequence and 3' sequence

SEQ ID NO: 22326 - DNA, 53 bp, Artificial Sequence; identical to SEQ ID NO: 2146
  Description of Artificial Sequence: Synthetic pecan; inner sequence and 3' sequence

SEQ ID NO: 22327 - DNA, 53 bp, Artificial Sequence
  Description of Artificial Sequence: Synthetic pecan; inner sequence and 3' sequence
ggcacaaactgaccgacaagtgcgcatggattgactagtacatgaccacttga

SEQ ID NO: 22328 - DNA, 51 bp, Artificial Sequence
  Description of Artificial Sequence: Synthetic pecan; inner sequence and 3' sequence
ggacgcagcttgcctactggtggtcacgttgactagtacatgaccacttga

SEQ ID NO: 22329 - DNA, 53 bp, Artificial Sequence; identical to SEQ ID NO: 2603
  Description of Artificial Sequence: Synthetic pecan; inner sequence and 3' sequence

SEQ ID NO: 22330 - DNA, 53 bp, Artificial Sequence; identical to SEQ ID NO: 2281
  Description of Artificial Sequence: Synthetic pecan; inner sequence and 3' sequence

SEQ ID NO: 22331 - DNA, 53 bp, Artificial Sequence
  Description of Artificial Sequence: Synthetic pecan; inner sequence and 3' sequence
ccgcacgtagccctatcagtggtgtatgcattgactagtacatgaccacttga

SEQ ID NO: 22332 - DNA, 53 bp, Artificial Sequence
  Description of Artificial Sequence: Synthetic pecan; inner sequence and 3' sequence
ggacgcagcggaacgttcgagtggtacgcattgactagtacatgaccacttga

SEQ ID NO: 22333 - DNA, 53 bp, Artificial Sequence; identical to SEQ ID NO: 10798
  Description of Artificial Sequence: Synthetic pecan; inner sequence and 3' sequence

SEQ ID NO: 22334 - DNA, 53 bp, Artificial Sequence; identical to SEQ ID NO: 2332
  Description of Artificial Sequence: Synthetic pecan; inner sequence and 3' sequence

SEQ ID NO: 22335 - DNA, 53 bp, Artificial Sequence
  Description of Artificial Sequence: Synthetic pecan; inner sequence and 3' sequence
ggacgccgcttgcctactggtggtcacgtattgactagtacatgaccacttga

SEQ ID NO: 22336 - DNA, 53 bp, Artificial Sequence; identical to SEQ ID NO: 2389
  Description of Artificial Sequence: Synthetic pecan; inner sequence and 3' sequence

SEQ ID NO: 22337 - DNA, 53 bp, Artificial Sequence; identical to SEQ ID NO: 2036
  Description of Artificial Sequence: Synthetic pecan; inner sequence and 3' sequence

SEQ ID NO: 22338 - DNA, 53 bp, Artificial Sequence; identical to SEQ ID NO: 2661
  Description of Artificial Sequence: Synthetic pecan; inner sequence and 3' sequence

SEQ ID NO: 22339 - DNA, 53 bp, Artificial Sequence
  Description of Artificial Sequence: Synthetic pecan; inner sequence and 3' sequence
ccgcacgtagccatatcagtggtgcatgcattgactagtacatgaccacttga

SEQ ID NO: 22340 - DNA, 53 bp, Artificial Sequence; identical to SEQ ID NO: 2561
  Description of Artificial Sequence: Synthetic pecan; inner sequence and 3' sequence

SEQ ID NO: 22341 - DNA, 53 bp, Artificial Sequence
  Description of Artificial Sequence: Synthetic pecan; inner sequence and 3' sequence
gcacgactcgcaccctatgatgaggccatgttgactagtacatgaccacttga

SEQ ID NO: 22342 - DNA, 53 bp, Artificial Sequence; identical to SEQ ID NO: 6504
  Description of Artificial Sequence: Synthetic pecan; inner sequence and 3' sequence

SEQ ID NO: 22343 - DNA, 53 bp, Artificial Sequence
  Description of Artificial Sequence: Synthetic pecan; inner sequence and 3' sequence
gcactgcacgcacctacacgtgggtatggattgactagtacatgaccacttga

SEQ ID NO: 22344 - DNA, 53 bp, Artificial Sequence; identical to SEQ ID NO: 2468
  Description of Artificial Sequence: Synthetic pecan; inner sequence and 3' sequence

SEQ ID NO: 22345 - DNA, 53 bp, Artificial Sequence; identical to SEQ ID NO: 2560
  Description of Artificial Sequence: Synthetic pecan; inner sequence and 3' sequence

SEQ ID NO: 22346 - DNA, 53 bp, Artificial Sequence
  Description of Artificial Sequence: Synthetic pecan; inner sequence and 3' sequence
ggacgcagcttgcctactggtggacacgtattgactagtacatgaccacttga

SEQ ID NO: 22347 - DNA, 53 bp, Artificial Sequence; identical to SEQ ID NO: 2780
  Description of Artificial Sequence: Synthetic pecan; inner sequence and 3' sequence

SEQ ID NO: 22348 - DNA, 53 bp, Artificial Sequence; identical to SEQ ID NO: 2678
  Description of Artificial Sequence: Synthetic pecan; inner sequence and 3' sequence

SEQ ID NO: 22349 - DNA, 53 bp, Artificial Sequence; identical to SEQ ID NO: 10936
  Description of Artificial Sequence: Synthetic pecan; inner sequence and 3' sequence

SEQ ID NO: 22350 - DNA, 53 bp, Artificial Sequence; identical to SEQ ID NO: 2355
  Description of Artificial Sequence: Synthetic pecan; inner sequence and 3' sequence

SEQ ID NO: 22351 - DNA, 53 bp, Artificial Sequence; identical to SEQ ID NO: 2379
  Description of Artificial Sequence: Synthetic pecan; inner sequence and 3' sequence

SEQ ID NO: 22352 - DNA, 53 bp, Artificial Sequence; identical to SEQ ID NO: 2860
  Description of Artificial Sequence: Synthetic pecan; inner sequence and 3' sequence

SEQ ID NO: 22353 - DNA, 53 bp, Artificial Sequence
  Description of Artificial Sequence: Synthetic pecan; inner sequence and 3' sequence
ccgtagcgacattaagcggtggtgtgcgtgttgactagtacatgaccacttga

SEQ ID NO: 22354 - DNA, 53 bp, Artificial Sequence; identical to SEQ ID NO: 2493
  Description of Artificial Sequence: Synthetic pecan; inner sequence and 3' sequence

SEQ ID NO: 22355 - DNA, 53 bp, Artificial Sequence; identical to SEQ ID NO: 2881
  Description of Artificial Sequence: Synthetic pecan; inner sequence and 3' sequence

SEQ ID NO: 22356 - DNA, 53 bp, Artificial Sequence; identical to SEQ ID NO: 2147
  Description of Artificial Sequence: Synthetic pecan; inner sequence and 3' sequence

SEQ ID NO: 22357 - DNA, 53 bp, Artificial Sequence; identical to SEQ ID NO: 10810
  Description of Artificial Sequence: Synthetic pecan; inner sequence and 3' sequence

SEQ ID NO: 22358 - DNA, 53 bp, Artificial Sequence; identical to SEQ ID NO: 2167
  Description of Artificial Sequence: Synthetic pecan; inner sequence and 3' sequence

SEQ ID NO: 22359 - DNA, 53 bp, Artificial Sequence; identical to SEQ ID NO: 2805
  Description of Artificial Sequence: Synthetic pecan; inner sequence and 3' sequence

SEQ ID NO: 22360 - DNA, 53 bp, Artificial Sequence; identical to SEQ ID NO: 2685
  Description of Artificial Sequence: Synthetic pecan; inner sequence and 3' sequence

SEQ ID NO: 22361 - DNA, 53 bp, Artificial Sequence; identical to SEQ ID NO: 10993
  Description of Artificial Sequence: Synthetic pecan; inner sequence and 3' sequence

SEQ ID NO: 22362 - DNA, 53 bp, Artificial Sequence; identical to SEQ ID NO: 2919
  Description of Artificial Sequence: Synthetic pecan; inner sequence and 3' sequence

SEQ ID NO: 22363 - DNA, 53 bp, Artificial Sequence
  Description of Artificial Sequence: Synthetic pecan; inner sequence and 3' sequence
gcacgactcgcatcctatcatgaggccatgttgactagtacatgaccacttga

SEQ ID NO: 22364 - DNA, 53 bp, Artificial Sequence; identical to SEQ ID NO: 2644
  Description of Artificial Sequence: Synthetic pecan; inner sequence and 3' sequence

SEQ ID NO: 22365 - DNA, 53 bp, Artificial Sequence; identical to SEQ ID NO: 2979
  Description of Artificial Sequence: Synthetic pecan; inner sequence and 3' sequence

SEQ ID NO: 22366 - DNA, 53 bp, Artificial Sequence; identical to SEQ ID NO: 2068
  Description of Artificial Sequence: Synthetic pecan; inner sequence and 3' sequence

SEQ ID NO: 22367 - DNA, 53 bp, Artificial Sequence
  Description of Artificial Sequence: Synthetic pecan; inner sequence and 3' sequence
ccgtagcgacatcgagcggtggtgtgcgtgttgactagtacatgaccacttga

SEQ ID NO: 22368 - DNA, 53 bp, Artificial Sequence; identical to SEQ ID NO: 2727
  Description of Artificial Sequence: Synthetic pecan; inner sequence and 3' sequence

SEQ ID NO: 22369 - DNA, 53 bp, Artificial Sequence; identical to SEQ ID NO: 2326
  Description of Artificial Sequence: Synthetic pecan; inner sequence and 3' sequence

SEQ ID NO: 22370 - DNA, 53 bp, Artificial Sequence; identical to SEQ ID NO: 10801
  Description of Artificial Sequence: Synthetic pecan; inner sequence and 3' sequence

SEQ ID NO: 22371 - DNA, 53 bp, Artificial Sequence
  Description of Artificial Sequence: Synthetic pecan; inner sequence and 3' sequence
ccgcacgtagccctatcagtggtacatgcattgactagtacatgaccacttga

SEQ ID NO: 22372 - DNA, 53 bp, Artificial Sequence
  Description of Artificial Sequence: Synthetic pecan; inner sequence and 3' sequence
ggccacagcgtacctcaacgcggacgtgcattgactagtacatgaccacttga

SEQ ID NO: 22373 - DNA, 53 bp, Artificial Sequence; identical to SEQ ID NO: 2962
  Description of Artificial Sequence: Synthetic pecan; inner sequence and 3' sequence

SEQ ID NO: 22374 - DNA, 53 bp, Artificial Sequence; identical to SEQ ID NO: 2064
  Description of Artificial Sequence: Synthetic pecan; inner sequence and 3' sequence

SEQ ID NO: 22375 - DNA, 53 bp, Artificial Sequence; identical to SEQ ID NO: 10946
  Description of Artificial Sequence: Synthetic pecan; inner sequence and 3' sequence

SEQ ID NO: 22376 - DNA, 53 bp, Artificial Sequence; identical to SEQ ID NO: 6364
  Description of Artificial Sequence: Synthetic pecan; inner sequence and 3' sequence

SEQ ID NO: 22377 - DNA, 53 bp, Artificial Sequence; identical to SEQ ID NO: 10769
  Description of Artificial Sequence: Synthetic pecan; inner sequence and 3' sequence

SEQ ID NO: 22378 - DNA, 53 bp, Artificial Sequence; identical to SEQ ID NO: 2385
  Description of Artificial Sequence: Synthetic pecan; inner sequence and 3' sequence

SEQ ID NO: 22379 - DNA, 53 bp, Artificial Sequence; identical to SEQ ID NO: 6653
  Description of Artificial Sequence: Synthetic pecan; inner sequence and 3' sequence

SEQ ID NO: 22380 - DNA, 53 bp, Artificial Sequence; identical to SEQ ID NO: 6590
  Description of Artificial Sequence: Synthetic pecan; inner sequence and 3' sequence

SEQ ID NO: 22381 - DNA, 53 bp, Artificial Sequence; identical to SEQ ID NO: 2481
  Description of Artificial Sequence: Synthetic pecan; inner sequence and 3' sequence

SEQ ID NO: 22382 - DNA, 53 bp, Artificial Sequence
  Description of Artificial Sequence: Synthetic pecan; inner sequence and 3' sequence
ggcacaaacggaccgacaattgcgcatggattgactagtacatgaccacttga

SEQ ID NO: 22383 - DNA, 53 bp, Artificial Sequence
  Description of Artificial Sequence: Synthetic pecan; inner sequence and 3' sequence
ccgcacgtagccctatcaatggtgcatgcattgactagtacatgaccacttga

SEQ ID NO: 22384 - DNA, 53 bp, Artificial Sequence; identical to SEQ ID NO: 2540
  Description of Artificial Sequence: Synthetic pecan; inner sequence and 3' sequence

SEQ ID NO: 22385 - DNA, 53 bp, Artificial Sequence
  Description of Artificial Sequence: Synthetic pecan; inner sequence and 3' sequence
gcacgacttgcaccctatcatgaggccatgttgactagtacatgaccacttga

SEQ ID NO: 22386 - DNA, 53 bp, Artificial Sequence; identical to SEQ ID NO: 2545
  Description of Artificial Sequence: Synthetic pecan; inner sequence and 3' sequence

SEQ ID NO: 22387 - DNA, 53 bp, Artificial Sequence; identical to SEQ ID NO: 2526
  Description of Artificial Sequence: Synthetic pecan; inner sequence and 3' sequence

SEQ ID NO: 22388 - DNA, 53 bp, Artificial Sequence
  Description of Artificial Sequence: Synthetic pecan; inner sequence and 3' sequence
ccgcacgtagccctataagtggtgcatgcattgactagtacatgaccacttga

SEQ ID NO: 22389 - DNA, 53 bp, Artificial Sequence; identical to SEQ ID NO: 6381
  Description of Artificial Sequence: Synthetic pecan; inner sequence and 3' sequence

SEQ ID NO: 22390 - DNA, 53 bp, Artificial Sequence
  Description of Artificial Sequence: Synthetic pecan; inner sequence and 3' sequence
ccgatcgcacgtcaaggcaggctgtacgacttgactagtacatgaccacttga

SEQ ID NO: 22391 - DNA, 53 bp, Artificial Sequence; identical to SEQ ID NO: 2684
  Description of Artificial Sequence: Synthetic pecan; inner sequence and 3' sequence

SEQ ID NO: 22392 - DNA, 53 bp, Artificial Sequence; identical to SEQ ID NO: 2223
  Description of Artificial Sequence: Synthetic pecan; inner sequence and 3' sequence

SEQ ID NO: 22393 - DNA, 53 bp, Artificial Sequence; identical to SEQ ID NO: 6620
  Description of Artificial Sequence: Synthetic pecan; inner sequence and 3' sequence

SEQ ID NO: 22394 - DNA, 53 bp, Artificial Sequence; identical to SEQ ID NO: 2133
  Description of Artificial Sequence: Synthetic pecan; inner sequence and 3' sequence

SEQ ID NO: 22395 - DNA, 53 bp, Artificial Sequence; identical to SEQ ID NO: 2591
  Description of Artificial Sequence: Synthetic pecan; inner sequence and 3' sequence

SEQ ID NO: 22396 - DNA, 53 bp, Artificial Sequence; identical to SEQ ID NO: 2289
  Description of Artificial Sequence: Synthetic pecan; inner sequence and 3' sequence

SEQ ID NO: 22397 - DNA, 53 bp, Artificial Sequence
  Description of Artificial Sequence: Synthetic pecan; inner sequence and 3' sequence
ggacgcagcttgcctactgggggtcacgtattgactagtacatgaccacttga

SEQ ID NO: 22398 - DNA, 53 bp, Artificial Sequence
  Description of Artificial Sequence: Synthetic pecan; inner sequence and 3' sequence
ggcatgcacgcacctacacgtgggtatgcattgactagtacatgaccacttga

SEQ ID NO: 22399 - DNA, 53 bp, Artificial Sequence; identical to SEQ ID NO: 2778
  Description of Artificial Sequence: Synthetic pecan; inner sequence and 3' sequence

SEQ ID NO: 22400 - DNA, 53 bp, Artificial Sequence; identical to SEQ ID NO: 6977
  Description of Artificial Sequence: Synthetic pecan; inner sequence and 3' sequence

SEQ ID NO: 22401 - DNA, 53 bp, Artificial Sequence; identical to SEQ ID NO: 6658
  Description of Artificial Sequence: Synthetic pecan; inner sequence and 3' sequence

SEQ ID NO: 22402 - DNA, 53 bp, Artificial Sequence; identical to SEQ ID NO: 2580
  Description of Artificial Sequence: Synthetic pecan; inner sequence and 3' sequence

SEQ ID NO: 22403 - DNA, 53 bp, Artificial Sequence; identical to SEQ ID NO: 2306
  Description of Artificial Sequence: Synthetic pecan; inner sequence and 3' sequence

SEQ ID NO: 22404 - DNA, 53 bp, Artificial Sequence; identical to SEQ ID NO: 6420
  Description of Artificial Sequence: Synthetic pecan; inner sequence and 3' sequence

SEQ ID NO: 22405 - DNA, 53 bp, Artificial Sequence; identical to SEQ ID NO: 2110
  Description of Artificial Sequence: Synthetic pecan; inner sequence and 3' sequence

SEQ ID NO: 22406 - DNA, 53 bp, Artificial Sequence; identical to SEQ ID NO: 6708
  Description of Artificial Sequence: Synthetic pecan; inner sequence and 3' sequence

SEQ ID NO: 22407 - DNA, 53 bp, Artificial Sequence
  Description of Artificial Sequence: Synthetic pecan; inner sequence and 3' sequence
ggcacaaacggaccgacaagtgcgcatggcttgactagtacatgaccacttga

SEQ ID NO: 22408 - DNA, 53 bp, Artificial Sequence
  Description of Artificial Sequence: Synthetic pecan; inner sequence and 3' sequence
ggacgcagcttgccgtagggtggcatgggattgactagtacatgaccacttga

SEQ ID NO: 22409 - DNA, 53 bp, Artificial Sequence; identical to SEQ ID NO: 6857
  Description of Artificial Sequence: Synthetic pecan; inner sequence and 3' sequence

SEQ ID NO: 22410 - DNA, 53 bp, Artificial Sequence
  Description of Artificial Sequence: Synthetic pecan; inner sequence and 3' sequence
ccgcacgtagccctctcagtggtgcatgcattgactagtacatgaccacttga

SEQ ID NO: 22411 - DNA, 53 bp, Artificial Sequence; identical to SEQ ID NO: 2351
  Description of Artificial Sequence: Synthetic pecan; inner sequence and 3' sequence

SEQ ID NO: 22412 - DNA, 53 bp, Artificial Sequence; identical to SEQ ID NO: 2449
  Description of Artificial Sequence: Synthetic pecan; inner sequence and 3' sequence

SEQ ID NO: 22413 - DNA, 53 bp, Artificial Sequence
  Description of Artificial Sequence: Synthetic pecan; inner sequence and 3' sequence
ccgcacgtagccctatcagtggtgcattcattgactagtacatgaccacttga

SEQ ID NO: 22414 - DNA, 53 bp, Artificial Sequence; identical to SEQ ID NO: 2528
  Description of Artificial Sequence: Synthetic pecan; inner sequence and 3' sequence

SEQ ID NO: 22415 - DNA, 53 bp, Artificial Sequence
  Description of Artificial Sequence: Synthetic pecan; inner sequence and 3' sequence
ccgtacgtagccctatcagtggtgcatgcattgactagtacatgaccacttga

SEQ ID NO: 22416 - DNA, 53 bp, Artificial Sequence; identical to SEQ ID NO: 2498
  Description of Artificial Sequence: Synthetic pecan; inner sequence and 3' sequence

SEQ ID NO: 22417 - DNA, 53 bp, Artificial Sequence
  Description of Artificial Sequence: Synthetic pecan; inner sequence and 3' sequence
ccatcgcgtcactatcatttgtgtcacgtattgactagtacatgaccacttga

SEQ ID NO: 22418 - DNA, 53 bp, Artificial Sequence
  Description of Artificial Sequence: Synthetic pecan; inner sequence and 3' sequence
ggacgcagcttgcctactggtggttacgtattgactagtacatgaccacttga

SEQ ID NO: 22419 - DNA, 53 bp, Artificial Sequence; identical to SEQ ID NO: 2585
  Description of Artificial Sequence: Synthetic pecan; inner sequence and 3' sequence

SEQ ID NO: 22420 - DNA, 53 bp, Artificial Sequence
  Description of Artificial Sequence: Synthetic pecan; inner sequence and 3' sequence
ggcatgcacgcacctacaagtgggtatggattgactagtacatgaccacttga

SEQ ID NO: 22421 - DNA, 53 bp, Artificial Sequence; identical to SEQ ID NO: 6933
  Description of Artificial Sequence: Synthetic pecan; inner sequence and 3' sequence

SEQ ID NO: 22422 - DNA, 53 bp, Artificial Sequence; identical to SEQ ID NO: 2871
  Description of Artificial Sequence: Synthetic pecan; inner sequence and 3' sequence

SEQ ID NO: 22423 - DNA, 53 bp, Artificial Sequence; identical to SEQ ID NO: 2496
  Description of Artificial Sequence: Synthetic pecan; inner sequence and 3' sequence

SEQ ID NO: 22424 - DNA, 53 bp, Artificial Sequence
  Description of Artificial Sequence: Synthetic pecan; inner sequence and 3' sequence
ccgcacgtagccctatcagtggtgcacgcattgactagtacatgaccacttga

SEQ ID NO: 22425 - DNA, 53 bp, Artificial Sequence; identical to SEQ ID NO: 2200
  Description of Artificial Sequence: Synthetic pecan; inner sequence and 3' sequence

SEQ ID NO: 22426 - DNA, 53 bp, Artificial Sequence
  Description of Artificial Sequence: Synthetic pecan; inner sequence and 3' sequence
ccatcgcgtcactatcatgtttgtcacgtattgactagtacatgaccacttga

SEQ ID NO: 22427 - DNA, 53 bp, Artificial Sequence
  Description of Artificial Sequence: Synthetic pecan; inner sequence and 3' sequence
ggacgcagcttgcctactggtggtcacgtcttgactagtacatgaccacttga

SEQ ID NO: 22428 - DNA, 53 bp, Artificial Sequence
  Description of Artificial Sequence: Synthetic pecan; inner sequence and 3' sequence
ggcatgcacgtacctacacgtgggtatggattgactagtacatgaccacttga

SEQ ID NO: 22429 - DNA, 53 bp, Artificial Sequence; identical to SEQ ID NO: 2466
  Description of Artificial Sequence: Synthetic pecan; inner sequence and 3' sequence

SEQ ID NO: 22430 - DNA, 53 bp, Artificial Sequence
  Description of Artificial Sequence: Synthetic pecan; inner sequence and 3' sequence
ccgaacgtagccctatcagtggtgcatgcattgactagtacatgaccacttga

SEQ ID NO: 22431 - DNA, 53 bp, Artificial Sequence; identical to SEQ ID NO: 2486
  Description of Artificial Sequence: Synthetic pecan; inner sequence and 3' sequence

SEQ ID NO: 22432 - DNA, 53 bp, Artificial Sequence; identical to SEQ ID NO: 6867
  Description of Artificial Sequence: Synthetic pecan; inner sequence and 3' sequence

SEQ ID NO: 22433 - DNA, 53 bp, Artificial Sequence; identical to SEQ ID NO: 2430
  Description of Artificial Sequence: Synthetic pecan; inner sequence and 3' sequence

SEQ ID NO: 22434 - DNA, 53 bp, Artificial Sequence; identical to SEQ ID NO: 2316
  Description of Artificial Sequence: Synthetic pecan; inner sequence and 3' sequence

SEQ ID NO: 22435 - DNA, 53 bp, Artificial Sequence; identical to SEQ ID NO: 2331
  Description of Artificial Sequence: Synthetic pecan; inner sequence and 3' sequence

SEQ ID NO: 22436 - DNA, 53 bp, Artificial Sequence; identical to SEQ ID NO: 2401
  Description of Artificial Sequence: Synthetic pecan; inner sequence and 3' sequence

SEQ ID NO: 22437 - DNA, 53 bp, Artificial Sequence; identical to SEQ ID NO: 2828
  Description of Artificial Sequence: Synthetic pecan; inner sequence and 3' sequence

SEQ ID NO: 22438 - DNA, 53 bp, Artificial Sequence; identical to SEQ ID NO: 2772
  Description of Artificial Sequence: Synthetic pecan; inner sequence and 3' sequence

SEQ ID NO: 22439 - DNA, 53 bp, Artificial Sequence; identical to SEQ ID NO: 6575
  Description of Artificial Sequence: Synthetic pecan; inner sequence and 3' sequence

SEQ ID NO: 22440 - DNA, 50 bp, Artificial Sequence; identical to SEQ ID NO: 2885
  Description of Artificial Sequence: Synthetic pecan; inner sequence and 3' sequence

SEQ ID NO: 22441 - DNA, 53 bp, Artificial Sequence
  Description of Artificial Sequence: Synthetic pecan; inner sequence and 3' sequence
ggacgcagcttgcatactggtggtcacgtattgactagtacatgaccacttga

SEQ ID NO: 22442 - DNA, 53 bp, Artificial Sequence; identical to SEQ ID NO: 6998
  Description of Artificial Sequence: Synthetic pecan; inner sequence and 3' sequence

SEQ ID NO: 22443 - DNA, 53 bp, Artificial Sequence; identical to SEQ ID NO: 2945
  Description of Artificial Sequence: Synthetic pecan; inner sequence and 3' sequence

SEQ ID NO: 22444 - DNA, 53 bp, Artificial Sequence; identical to SEQ ID NO: 2742
  Description of Artificial Sequence: Synthetic pecan; inner sequence and 3' sequence

SEQ ID NO: 22445 - DNA, 53 bp, Artificial Sequence
  Description of Artificial Sequence: Synthetic pecan; inner sequence and 3' sequence
ggacgcagcttgcctactagtggtcacgtattgactagtacatgaccacttga

SEQ ID NO: 22446 - DNA, 53 bp, Artificial Sequence; identical to SEQ ID NO: 2756
  Description of Artificial Sequence: Synthetic pecan; inner sequence and 3' sequence

SEQ ID NO: 22447 - DNA, 53 bp, Artificial Sequence; identical to SEQ ID NO: 2016
  Description of Artificial Sequence: Synthetic pecan; inner sequence and 3' sequence

SEQ ID NO: 22448 - DNA, 53 bp, Artificial Sequence; identical to SEQ ID NO: 2583
  Description of Artificial Sequence: Synthetic pecan; inner sequence and 3' sequence

SEQ ID NO: 22449 - DNA, 53 bp, Artificial Sequence; identical to SEQ ID NO: 10546
  Description of Artificial Sequence: Synthetic pecan; inner sequence and 3' sequence

SEQ ID NO: 22450 - DNA, 53 bp, Artificial Sequence; identical to SEQ ID NO: 2047
  Description of Artificial Sequence: Synthetic pecan; inner sequence and 3' sequence

SEQ ID NO: 22451 - DNA, 53 bp, Artificial Sequence; identical to SEQ ID NO: 2512
  Description of Artificial Sequence: Synthetic pecan; inner sequence and 3' sequence

SEQ ID NO: 22452 - DNA, 53 bp, Artificial Sequence; identical to SEQ ID NO: 18640
  Description of Artificial Sequence: Synthetic pecan; inner sequence and 3' sequence

SEQ ID NO: 22453 - DNA, 53 bp, Artificial Sequence; identical to SEQ ID NO: 6552
  Description of Artificial Sequence: Synthetic pecan; inner sequence and 3' sequence

SEQ ID NO: 22454 - DNA, 53 bp, Artificial Sequence; identical to SEQ ID NO: 2387
  Description of Artificial Sequence: Synthetic pecan; inner sequence and 3' sequence

SEQ ID NO: 22455 - DNA, 54 bp, Artificial Sequence; identical to SEQ ID NO: 6245
  Description of Artificial Sequence: Synthetic pecan; inner sequence and 3' sequence

SEQ ID NO: 22456 - DNA, 53 bp, Artificial Sequence; identical to SEQ ID NO: 6888
  Description of Artificial Sequence: Synthetic pecan; inner sequence and 3' sequence

SEQ ID NO: 22457 - DNA, 53 bp, Artificial Sequence; identical to SEQ ID NO: 2791
  Description of Artificial Sequence: Synthetic pecan; inner sequence and 3' sequence

SEQ ID NO: 22458 - DNA, 53 bp, Artificial Sequence
  Description of Artificial Sequence: Synthetic pecan; inner sequence and 3' sequence
gtgcgcatcgtcccgtcatgtggttccgtattgactagtacatgaccacttga

SEQ ID NO: 22459 - DNA, 53 bp, Artificial Sequence; identical to SEQ ID NO: 6743
  Description of Artificial Sequence: Synthetic pecan; inner sequence and 3' sequence

SEQ ID NO: 22460 - DNA, 53 bp, Artificial Sequence; identical to SEQ ID NO: 10949
  Description of Artificial Sequence: Synthetic pecan; inner sequence and 3' sequence

SEQ ID NO: 22461 - DNA, 53 bp, Artificial Sequence; identical to SEQ ID NO: 14936
  Description of Artificial Sequence: Synthetic pecan; inner sequence and 3' sequence

SEQ ID NO: 22462 - DNA, 53 bp, Artificial Sequence
  Description of Artificial Sequence: Synthetic pecan; inner sequence and 3' sequence
gcgcctgatgcgtgccgttcaagtgcgccattgactagtacatgaccacttga

SEQ ID NO: 22463 - DNA, 53 bp, Artificial Sequence
  Description of Artificial Sequence: Synthetic pecan; inner sequence and 3' sequence
ggcatgcacgcacctacacgtggttatggattgactagtacatgaccacttga

SEQ ID NO: 22464 - DNA, 53 bp, Artificial Sequence; identical to SEQ ID NO: 2912
  Description of Artificial Sequence: Synthetic pecan; inner sequence and 3' sequence

SEQ ID NO: 22465 - DNA, 53 bp, Artificial Sequence; identical to SEQ ID NO: 6641
  Description of Artificial Sequence: Synthetic pecan; inner sequence and 3' sequence

SEQ ID NO: 22466 - DNA, 53 bp, Artificial Sequence
  Description of Artificial Sequence: Synthetic pecan; inner sequence and 3' sequence
gtacgcatcgtcccgtcatgtggttacgtattgactagtacatgaccacttga

SEQ ID NO: 22467 - DNA, 53 bp, Artificial Sequence; identical to SEQ ID NO: 18695
  Description of Artificial Sequence: Synthetic pecan; inner sequence and 3' sequence

SEQ ID NO: 22468 - DNA, 53 bp, Artificial Sequence
  Description of Artificial Sequence: Synthetic pecan; inner sequence and 3' sequence
gtcactgtgcctgaccgtcaagttgcgtcattgactagtacatgaccacttga

SEQ ID NO: 22469 - DNA, 52 bp, Artificial Sequence
  Description of Artificial Sequence: Synthetic pecan; inner sequence and 3' sequence
gcacgccgatgccctcatgtggccgtggtttgactagtacatgaccacttga

SEQ ID NO: 22470 - DNA, 53 bp, Artificial Sequence; identical to SEQ ID NO: 2488
  Description of Artificial Sequence: Synthetic pecan; inner sequence and 3' sequence

SEQ ID NO: 22471 - DNA, 53 bp, Artificial Sequence; identical to SEQ ID NO: 2620
  Description of Artificial Sequence: Synthetic pecan; inner sequence and 3' sequence

SEQ ID NO: 22472 - DNA, 53 bp, Artificial Sequence
  Description of Artificial Sequence: Synthetic pecan; inner sequence and 3' sequence
ggcacaaacggaccgtcaagtgcgcatggattgactagtacatgaccacttga

SEQ ID NO: 22473 - DNA, 53 bp, Artificial Sequence
  Description of Artificial Sequence: Synthetic pecan; inner sequence and 3' sequence
ggacgcagcgaaccgtacgtggacgtggcgttgactagtacatgaccacttga

SEQ ID NO: 22474 - DNA, 53 bp, Artificial Sequence; identical to SEQ ID NO: 2774
  Description of Artificial Sequence: Synthetic pecan; inner sequence and 3' sequence

SEQ ID NO: 22475 - DNA, 53 bp, Artificial Sequence
  Description of Artificial Sequence: Synthetic pecan; inner sequence and 3' sequence
ccgcacgtagccccatcagtggtgcatgcattgactagtacatgaccacttga

SEQ ID NO: 22476 - DNA, 53 bp, Artificial Sequence; identical to SEQ ID NO: 2026
  Description of Artificial Sequence: Synthetic pecan; inner sequence and 3' sequence

SEQ ID NO: 22477 - DNA, 53 bp, Artificial Sequence
  Description of Artificial Sequence: Synthetic pecan; inner sequence and 3' sequence
ggcacaaacggaacgacaagtgcgcatggattgactagtacatgaccacttga

SEQ ID NO: 22478 - DNA, 53 bp, Artificial Sequence
  Description of Artificial Sequence: Synthetic pecan; inner sequence and 3' sequence
gcactgcacgcaccctatcatgttggcatgttgactagtacatgaccacttga

SEQ ID NO: 22479 - DNA, 53 bp, Artificial Sequence; identical to SEQ ID NO: 2375
  Description of Artificial Sequence: Synthetic pecan; inner sequence and 3' sequence

SEQ ID NO: 22480 - DNA, 53 bp, Artificial Sequence; identical to SEQ ID NO: 14866
  Description of Artificial Sequence: Synthetic pecan; inner sequence and 3' sequence

SEQ ID NO: 22481 - DNA, 53 bp, Artificial Sequence; identical to SEQ ID NO: 6419
  Description of Artificial Sequence: Synthetic pecan; inner sequence and 3' sequence

SEQ ID NO: 22482 - DNA, 53 bp, Artificial Sequence; identical to SEQ ID NO: 2237
  Description of Artificial Sequence: Synthetic pecan; inner sequence and 3' sequence

SEQ ID NO: 22483 - DNA, 53 bp, Artificial Sequence
  Description of Artificial Sequence: Synthetic pecan; inner sequence and 3' sequence
ggcacacacggaccgacaagtgcgcatggattgactagtacatgaccacttga

SEQ ID NO: 22484 - DNA, 53 bp, Artificial Sequence; identical to SEQ ID NO: 6893
  Description of Artificial Sequence: Synthetic pecan; inner sequence and 3' sequence

SEQ ID NO: 22485 - DNA, 53 bp, Artificial Sequence
  Description of Artificial Sequence: Synthetic pecan; inner sequence and 3' sequence
ccgcacgtagccttatcagtggtgcatgcattgactagtacatgaccacttga

SEQ ID NO: 22486 - DNA, 53 bp, Artificial Sequence
  Description of Artificial Sequence: Synthetic pecan; inner sequence and 3' sequence
gtcactgtgcatgaccgtcaagttgcggcattgactagtacatgaccacttga

SEQ ID NO: 22487 - DNA, 53 bp, Artificial Sequence; identical to SEQ ID NO: 6610
  Description of Artificial Sequence: Synthetic pecan; inner sequence and 3' sequence

SEQ ID NO: 22488 - DNA, 53 bp, Artificial Sequence; identical to SEQ ID NO: 2527
  Description of Artificial Sequence: Synthetic pecan; inner sequence and 3' sequence

SEQ ID NO: 22489 - DNA, 53 bp, Artificial Sequence; identical to SEQ ID NO: 6627
  Description of Artificial Sequence: Synthetic pecan; inner sequence and 3' sequence

SEQ ID NO: 22490 - DNA, 53 bp, Artificial Sequence
  Description of Artificial Sequence: Synthetic pecan; inner sequence and 3' sequence
ccgcacgtagccctatcagtggtgcatgccttgactagtacatgaccacttga

SEQ ID NO: 22491 - DNA, 53 bp, Artificial Sequence; identical to SEQ ID NO: 6776
  Description of Artificial Sequence: Synthetic pecan; inner sequence and 3' sequence

SEQ ID NO: 22492 - DNA, 52 bp, Artificial Sequence; identical to SEQ ID NO: 2873
  Description of Artificial Sequence: Synthetic pecan; inner sequence and 3' sequence

SEQ ID NO: 22493 - DNA, 53 bp, Artificial Sequence; identical to SEQ ID NO: 2386
  Description of Artificial Sequence: Synthetic pecan; inner sequence and 3' sequence

SEQ ID NO: 22494 - DNA, 53 bp, Artificial Sequence; identical to SEQ ID NO: 6898
  Description of Artificial Sequence: Synthetic pecan; inner sequence and 3' sequence

SEQ ID NO: 22495 - DNA, 53 bp, Artificial Sequence
  Description of Artificial Sequence: Synthetic pecan; inner sequence and 3' sequence
cgcaccgtacgacaacgtgcttgcgtggcgttgactagtacatgaccacttga

SEQ ID NO: 22496 - DNA, 53 bp, Artificial Sequence
  Description of Artificial Sequence: Synthetic pecan; inner sequence and 3' sequence
gcacgactcgcaccctatcatgtggccatgttgactagtacatgaccacttga

SEQ ID NO: 22497 - DNA, 51 bp, Artificial Sequence; identical to SEQ ID NO: 2423
  Description of Artificial Sequence: Synthetic pecan; inner sequence and 3' sequence

SEQ ID NO: 22498 - DNA, 53 bp, Artificial Sequence
  Description of Artificial Sequence: Synthetic pecan; inner sequence and 3' sequence
ggacgcagcttgtctactggtggtcacgtattgactagtacatgaccacttga

SEQ ID NO: 22499 - DNA, 53 bp, Artificial Sequence; identical to SEQ ID NO: 2270
  Description of Artificial Sequence: Synthetic pecan; inner sequence and 3' sequence

SEQ ID NO: 22500 - DNA, 53 bp, Artificial Sequence; identical to SEQ ID NO: 2754
  Description of Artificial Sequence: Synthetic pecan; inner sequence and 3' sequence

SEQ ID NO: 22501 - DNA, 53 bp, Artificial Sequence
  Description of Artificial Sequence: Synthetic pecan; inner sequence and 3' sequence
ccgatcgcacgtcaaggcatgctgtacgagttgactagtacatgaccacttga

SEQ ID NO: 22502 - DNA, 53 bp, Artificial Sequence
  Description of Artificial Sequence: Synthetic pecan; inner sequence and 3' sequence
gcacgactcccaccctatcatgaggccatgttgactagtacatgaccacttga

SEQ ID NO: 22503 - DNA, 53 bp, Artificial Sequence; identical to SEQ ID NO: 6943
  Description of Artificial Sequence: Synthetic pecan; inner sequence and 3' sequence

SEQ ID NO: 22504 - DNA, 53 bp, Artificial Sequence
  Description of Artificial Sequence: Synthetic pecan; inner sequence and 3' sequence
gtacgcatcgtcacgtcatgtggttccgtattgactagtacatgaccacttga

SEQ ID NO: 22505 - DNA, 53 bp, Artificial Sequence; identical to SEQ ID NO: 2452
  Description of Artificial Sequence: Synthetic pecan; inner sequence and 3' sequence

SEQ ID NO: 22506 - DNA, 53 bp, Artificial Sequence
  Description of Artificial Sequence: Synthetic pecan; inner sequence and 3' sequence
tgacgcagcttgcctactggtggtcacgtattgactagtacatgaccacttga

SEQ ID NO: 22507 - DNA, 53 bp, Artificial Sequence
  Description of Artificial Sequence: Synthetic pecan; inner sequence and 3' sequence
ggccacagcgtacctcaaagtggacgtgcattgactagtacatgaccacttga

SEQ ID NO: 22508 - DNA, 53 bp, Artificial Sequence; identical to SEQ ID NO: 2381
  Description of Artificial Sequence: Synthetic pecan; inner sequence and 3' sequence

SEQ ID NO: 22509 - DNA, 53 bp, Artificial Sequence
  Description of Artificial Sequence: Synthetic pecan; inner sequence and 3' sequence
ggccgcagcggaacgttcgagtggtacgtattgactagtacatgaccacttga

SEQ ID NO: 22510 - DNA, 53 bp, Artificial Sequence
  Description of Artificial Sequence: Synthetic pecan; inner sequence and 3' sequence
ggcacaaacggaccgacaggtgcgcatggattgactagtacatgaccacttga

SEQ ID NO: 22511 - DNA, 53 bp, Artificial Sequence; identical to SEQ ID NO: 2120
  Description of Artificial Sequence: Synthetic pecan; inner sequence and 3' sequence

SEQ ID NO: 22512 - DNA, 53 bp, Artificial Sequence; identical to SEQ ID NO: 2448
  Description of Artificial Sequence: Synthetic pecan; inner sequence and 3' sequence

SEQ ID NO: 22513 - DNA, 53 bp, Artificial Sequence
  Description of Artificial Sequence: Synthetic pecan; inner sequence and 3' sequence
ggcccaaacggaccgacaagtgcgcatggattgactagtacatgaccacttga

SEQ ID NO: 22514 - DNA, 53 bp, Artificial Sequence
  Description of Artificial Sequence: Synthetic pecan; inner sequence and 3' sequence
ccgtagcgacgtcaagcggtggtgtgcgtgttgactagtacatgaccacttga

SEQ ID NO: 22515 - DNA, 53 bp, Artificial Sequence
  Description of Artificial Sequence: Synthetic pecan; inner sequence and 3' sequence
ggccacagcgtacctaaacgtggacgtgcattgactagtacatgaccacttga

SEQ ID NO: 22516 - DNA, 53 bp, Artificial Sequence; identical to SEQ ID NO: 6810
  Description of Artificial Sequence: Synthetic pecan; inner sequence and 3' sequence

SEQ ID NO: 22517 - DNA, 53 bp, Artificial Sequence; identical to SEQ ID NO: 6921
  Description of Artificial Sequence: Synthetic pecan; inner sequence and 3' sequence

SEQ ID NO: 22518 - DNA, 53 bp, Artificial Sequence
  Description of Artificial Sequence: Synthetic pecan; inner sequence and 3' sequence
ggcatgcacgcacatacacgtgggcacgtattgactagtacatgaccacttga

SEQ ID NO: 22519 - DNA, 53 bp, Artificial Sequence
  Description of Artificial Sequence: Synthetic pecan; inner sequence and 3' sequence
gcacgactcgcaccctatcatggcggcatgttgactagtacatgaccacttga

SEQ ID NO: 22520 - DNA, 53 bp, Artificial Sequence; identical to SEQ ID NO: 6230
  Description of Artificial Sequence: Synthetic pecan; inner sequence and 3' sequence

SEQ ID NO: 22521 - DNA, 53 bp, Artificial Sequence; identical to SEQ ID NO: 2176
  Description of Artificial Sequence: Synthetic pecan; inner sequence and 3' sequence

SEQ ID NO: 22522 - DNA, 53 bp, Artificial Sequence
  Description of Artificial Sequence: Synthetic pecan; inner sequence and 3' sequence
ggcatgcacgcacctacatgtgggcacgtattgactagtacatgaccacttga

SEQ ID NO: 22523 - DNA, 53 bp, Artificial Sequence; identical to SEQ ID NO: 2027
  Description of Artificial Sequence: Synthetic pecan; inner sequence and 3' sequence

SEQ ID NO: 22524 - DNA, 53 bp, Artificial Sequence
  Description of Artificial Sequence: Synthetic pecan; inner sequence and 3' sequence
gacactgtgcctgaccgtcaagttgcggcattgactagtacatgaccacttga

SEQ ID NO: 22525 - DNA, 53 bp, Artificial Sequence; identical to SEQ ID NO: 2321
  Description of Artificial Sequence: Synthetic pecan; inner sequence and 3' sequence

SEQ ID NO: 22526 - DNA, 54 bp, Artificial Sequence; identical to SEQ ID NO: 2845
  Description of Artificial Sequence: Synthetic pecan; inner sequence and 3' sequence

SEQ ID NO: 22527 - DNA, 53 bp, Artificial Sequence
  Description of Artificial Sequence: Synthetic pecan; inner sequence and 3' sequence
ggcatgcacgcaactacacgtgggtatggattgactagtacatgaccacttga

SEQ ID NO: 22528 - DNA, 53 bp, Artificial Sequence
  Description of Artificial Sequence: Synthetic pecan; inner sequence and 3' sequence
ggccacagcgtacctcaacttggacgtgcattgactagtacatgaccacttga

SEQ ID NO: 22529 - DNA, 53 bp, Artificial Sequence; identical to SEQ ID NO: 2991
  Description of Artificial Sequence: Synthetic pecan; inner sequence and 3' sequence

SEQ ID NO: 22530 - DNA, 53 bp, Artificial Sequence
  Description of Artificial Sequence: Synthetic pecan; inner sequence and 3' sequence
gcacgactcgcaccctatcatgaagccatgttgactagtacatgaccacttga

SEQ ID NO: 22531 - DNA, 53 bp, Artificial Sequence
  Description of Artificial Sequence: Synthetic pecan; inner sequence and 3' sequence
ccgcacgtaggcctatcagtggtgcatgcattgactagtacatgaccacttga

SEQ ID NO: 22532 - DNA, 52 bp, Artificial Sequence
  Description of Artificial Sequence: Synthetic pecan; inner sequence and 3' sequence
cgcaccgtcaagcgggaaggcactttggcttgactagtacatgaccacttga

SEQ ID NO: 22533 - DNA, 53 bp, Artificial Sequence
  Description of Artificial Sequence: Synthetic pecan; inner sequence and 3' sequence
ggcatgcacgcacctacacgtgggcacgcattgactagtacatgaccacttga

SEQ ID NO: 22534 - DNA, 53 bp, Artificial Sequence
  Description of Artificial Sequence: Synthetic pecan; inner sequence and 3' sequence
ccgcacgtagccctatcagtggtgcctgcattgactagtacatgaccacttga

SEQ ID NO: 22535 - DNA, 53 bp, Artificial Sequence; identical to SEQ ID NO: 10953
  Description of Artificial Sequence: Synthetic pecan; inner sequence and 3' sequence

SEQ ID NO: 22536 - DNA, 53 bp, Artificial Sequence; identical to SEQ ID NO: 2172
  Description of Artificial Sequence: Synthetic pecan; inner sequence and 3' sequence

SEQ ID NO: 22537 - DNA, 53 bp, Artificial Sequence
  Description of Artificial Sequence: Synthetic pecan; inner sequence and 3' sequence
ggacgcagcttgactactggtggtcacgtattgactagtacatgaccacttga

SEQ ID NO: 22538 - DNA, 53 bp, Artificial Sequence; identical to SEQ ID NO: 2058
  Description of Artificial Sequence: Synthetic pecan; inner sequence and 3' sequence

SEQ ID NO: 22539 - DNA, 53 bp, Artificial Sequence; identical to SEQ ID NO: 2524
  Description of Artificial Sequence: Synthetic pecan; inner sequence and 3' sequence

SEQ ID NO: 22540 - DNA, 53 bp, Artificial Sequence
  Description of Artificial Sequence: Synthetic pecan; inner sequence and 3' sequence
ggacgcaacgtacctcaacgtggacgtgcattgactagtacatgaccacttga

SEQ ID NO: 22541 - DNA, 53 bp, Artificial Sequence
  Description of Artificial Sequence: Synthetic pecan; inner sequence and 3' sequence
gcacgactcgcaccctatcatgaggtcatgttgactagtacatgaccacttga

SEQ ID NO: 22542 - DNA, 53 bp, Artificial Sequence; identical to SEQ ID NO: 18750
  Description of Artificial Sequence: Synthetic pecan; inner sequence and 3' sequence

SEQ ID NO: 22543 - DNA, 53 bp, Artificial Sequence; identical to SEQ ID NO: 6717
  Description of Artificial Sequence: Synthetic pecan; inner sequence and 3' sequence

SEQ ID NO: 22544 - DNA, 53 bp, Artificial Sequence
  Description of Artificial Sequence: Synthetic pecan; inner sequence and 3' sequence
ggcatgcactcacctacacgtgggtatggattgactagtacatgaccacttga

SEQ ID NO: 22545 - DNA, 53 bp, Artificial Sequence
  Description of Artificial Sequence: Synthetic pecan; inner sequence and 3' sequence
ggacgcagctttcctactggtggtcacgtattgactagtacatgaccacttga

SEQ ID NO: 22546 - DNA, 53 bp, Artificial Sequence; identical to SEQ ID NO: 2892
  Description of Artificial Sequence: Synthetic pecan; inner sequence and 3' sequence

SEQ ID NO: 22547 - DNA, 53 bp, Artificial Sequence; identical to SEQ ID NO: 2552
  Description of Artificial Sequence: Synthetic pecan; inner sequence and 3' sequence

SEQ ID NO: 22548 - DNA, 53 bp, Artificial Sequence
  Description of Artificial Sequence: Synthetic pecan; inner sequence and 3' sequence
cgcaccgtcaagcgggaatgcactttggtgttgactagtacatgaccacttga

SEQ ID NO: 22549 - DNA, 53 bp, Artificial Sequence
  Description of Artificial Sequence: Synthetic pecan; inner sequence and 3' sequence
gtcgtgactggctatctggacatgcactgcttgactagtacatgaccacttga

SEQ ID NO: 22550 - DNA, 53 bp, Artificial Sequence; identical to SEQ ID NO: 2857
  Description of Artificial Sequence: Synthetic pecan; inner sequence and 3' sequence

SEQ ID NO: 22551 - DNA, 53 bp, Artificial Sequence
  Description of Artificial Sequence: Synthetic pecan; inner sequence and 3' sequence
gcactgcacgcacactatcatgtaggcatgttgactagtacatgaccacttga

SEQ ID NO: 22552 - DNA, 53 bp, Artificial Sequence
  Description of Artificial Sequence: Synthetic pecan; inner sequence and 3' sequence
ccgatcgcacgtcaaggccggctgtacgagttgactagtacatgaccacttga

SEQ ID NO: 22553 - DNA, 53 bp, Artificial Sequence
  Description of Artificial Sequence: Synthetic pecan; inner sequence and 3' sequence
ccgcacgtagccctatcagtggtgcatgcgttgactagtacatgaccacttga

SEQ ID NO: 22554 - DNA, 53 bp, Artificial Sequence; identical to SEQ ID NO: 2806
  Description of Artificial Sequence: Synthetic pecan; inner sequence and 3' sequence

SEQ ID NO: 22555 - DNA, 53 bp, Artificial Sequence; identical to SEQ ID NO: 2523
  Description of Artificial Sequence: Synthetic pecan; inner sequence and 3' sequence

SEQ ID NO: 22556 - DNA, 53 bp, Artificial Sequence; identical to SEQ ID NO: 2173
  Description of Artificial Sequence: Synthetic pecan; inner sequence and 3' sequence

SEQ ID NO: 22557 - DNA, 53 bp, Artificial Sequence; identical to SEQ ID NO: 10618
  Description of Artificial Sequence: Synthetic pecan; inner sequence and 3' sequence

SEQ ID NO: 22558 - DNA, 53 bp, Artificial Sequence; identical to SEQ ID NO: 2837
  Description of Artificial Sequence: Synthetic pecan; inner sequence and 3' sequence

SEQ ID NO: 22559 - DNA, 53 bp, Artificial Sequence
  Description of Artificial Sequence: Synthetic pecan; inner sequence and 3' sequence
ccgatcgcacgtcaatgcaggctgtacgagttgactagtacatgaccacttga

SEQ ID NO: 22560 - DNA, 53 bp, Artificial Sequence
  Description of Artificial Sequence: Synthetic pecan; inner sequence and 3' sequence
ggccacagcgtacctcaacgtggacgtgtattgactagtacatgaccacttga

SEQ ID NO: 22561 - DNA, 53 bp, Artificial Sequence; identical to SEQ ID NO: 2507
  Description of Artificial Sequence: Synthetic pecan; inner sequence and 3' sequence

SEQ ID NO: 22562 - DNA, 53 bp, Artificial Sequence
  Description of Artificial Sequence: Synthetic pecan; inner sequence and 3' sequence
ggcacaaacggacctacaagtgcgcatggattgactagtacatgaccacttga

SEQ ID NO: 22563 - DNA, 53 bp, Artificial Sequence; identical to SEQ ID NO: 2541
  Description of Artificial Sequence: Synthetic pecan; inner sequence and 3' sequence

SEQ ID NO: 22564 - DNA, 53 bp, Artificial Sequence; identical to SEQ ID NO: 6997
  Description of Artificial Sequence: Synthetic pecan; inner sequence and 3' sequence

SEQ ID NO: 22565 - DNA, 53 bp, Artificial Sequence
  Description of Artificial Sequence: Synthetic pecan; inner sequence and 3' sequence
gtcacaaacggaccgacaagtgcgcatggattgactagtacatgaccacttga

SEQ ID NO: 22566 - DNA, 53 bp, Artificial Sequence; identical to SEQ ID NO: 2165
  Description of Artificial Sequence: Synthetic pecan; inner sequence and 3' sequence

SEQ ID NO: 22567 - DNA, 53 bp, Artificial Sequence; identical to SEQ ID NO: 2233
  Description of Artificial Sequence: Synthetic pecan; inner sequence and 3' sequence

SEQ ID NO: 22568 - DNA, 53 bp, Artificial Sequence; identical to SEQ ID NO: 6755
  Description of Artificial Sequence: Synthetic pecan; inner sequence and 3' sequence

SEQ ID NO: 22569 - DNA, 53 bp, Artificial Sequence; identical to SEQ ID NO: 2683
  Description of Artificial Sequence: Synthetic pecan; inner sequence and 3' sequence

SEQ ID NO: 22570 - DNA, 53 bp, Artificial Sequence
  Description of Artificial Sequence: Synthetic pecan; inner sequence and 3' sequence
ccgtagcgacatcaaccggtggtgtgcgtgttgactagtacatgaccacttga

SEQ ID NO: 22571 - DNA, 53 bp, Artificial Sequence; identical to SEQ ID NO: 2497
  Description of Artificial Sequence: Synthetic pecan; inner sequence and 3' sequence

SEQ ID NO: 22572 - DNA, 53 bp, Artificial Sequence; identical to SEQ ID NO: 10792
  Description of Artificial Sequence: Synthetic pecan; inner sequence and 3' sequence

SEQ ID NO: 22573 - DNA, 53 bp, Artificial Sequence
  Description of Artificial Sequence: Synthetic pecan; inner sequence and 3' sequence
ccgtagcgtcatcaagcggtggtgtgcgtgttgactagtacatgaccacttga

SEQ ID NO: 22574 - DNA, 53 bp, Artificial Sequence
  Description of Artificial Sequence: Synthetic pecan; inner sequence and 3' sequence
ggacgcagcttgcctaatggtggtcacgtattgactagtacatgaccacttga

SEQ ID NO: 22575 - DNA, 53 bp, Artificial Sequence; identical to SEQ ID NO: 2153
  Description of Artificial Sequence: Synthetic pecan; inner sequence and 3' sequence

SEQ ID NO: 22576 - DNA, 53 bp, Artificial Sequence
  Description of Artificial Sequence: Synthetic pecan; inner sequence and 3' sequence
gtcatgcactaacactatcatggcggcatgttgactagtacatgaccacttga

SEQ ID NO: 22577 - DNA, 53 bp, Artificial Sequence
  Description of Artificial Sequence: Synthetic pecan; inner sequence and 3' sequence
ggacgcagcggaccgttcgagtggtacgtattgactagtacatgaccacttga

SEQ ID NO: 22578 - DNA, 53 bp, Artificial Sequence
  Description of Artificial Sequence: Synthetic pecan; inner sequence and 3' sequence
ccatcgcgtcactatcatctgtgtcacgtattgactagtacatgaccacttga

SEQ ID NO: 22579 - DNA, 53 bp, Artificial Sequence
  Description of Artificial Sequence: Synthetic pecan; inner sequence and 3' sequence
ccgcacggagccctatcagtggtgcatgcattgactagtacatgaccacttga

SEQ ID NO: 22580 - DNA, 53 bp, Artificial Sequence
  Description of Artificial Sequence: Synthetic pecan; inner sequence and 3' sequence
ccgtagcgacatcatgcggtggtgtgcgtgttgactagtacatgaccacttga

SEQ ID NO: 22581 - DNA, 53 bp, Artificial Sequence
  Description of Artificial Sequence: Synthetic pecan; inner sequence and 3' sequence
ccgcacgtagccctatcagtggtgcatggattgactagtacatgaccacttga

SEQ ID NO: 22582 - DNA, 53 bp, Artificial Sequence; identical to SEQ ID NO: 2208
  Description of Artificial Sequence: Synthetic pecan; inner sequence and 3' sequence

SEQ ID NO: 22583 - DNA, 53 bp, Artificial Sequence
  Description of Artificial Sequence: Synthetic pecan; inner sequence and 3' sequence
gcacgattcgcaccctatcatgaggccatgttgactagtacatgaccacttga

SEQ ID NO: 22584 - DNA, 53 bp, Artificial Sequence; identical to SEQ ID NO: 2312
  Description of Artificial Sequence: Synthetic pecan; inner sequence and 3' sequence

SEQ ID NO: 22585 - DNA, 53 bp, Artificial Sequence; identical to SEQ ID NO: 2116
  Description of Artificial Sequence: Synthetic pecan; inner sequence and 3' sequence

SEQ ID NO: 22586 - DNA, 53 bp, Artificial Sequence; identical to SEQ ID NO: 6429
  Description of Artificial Sequence: Synthetic pecan; inner sequence and 3' sequence

SEQ ID NO: 22587 - DNA, 53 bp, Artificial Sequence; identical to SEQ ID NO: 2788
  Description of Artificial Sequence: Synthetic pecan; inner sequence and 3' sequence

SEQ ID NO: 22588 - DNA, 53 bp, Artificial Sequence; identical to SEQ ID NO: 2292
  Description of Artificial Sequence: Synthetic pecan; inner sequence and 3' sequence

SEQ ID NO: 22589 - DNA, 53 bp, Artificial Sequence; identical to SEQ ID NO: 10926
  Description of Artificial Sequence: Synthetic pecan; inner sequence and 3' sequence

SEQ ID NO: 22590 - DNA, 53 bp, Artificial Sequence
  Description of Artificial Sequence: Synthetic pecan; inner sequence and 3' sequence
ggcatgcacgaacctacacgtgggtatggattgactagtacatgaccacttga

SEQ ID NO: 22591 - DNA, 53 bp, Artificial Sequence; identical to SEQ ID NO: 2596
  Description of Artificial Sequence: Synthetic pecan; inner sequence and 3' sequence

SEQ ID NO: 22592 - DNA, 53 bp, Artificial Sequence
  Description of Artificial Sequence: Synthetic pecan; inner sequence and 3' sequence
cgcaccgtcaagcgggaagtcactttggtgttgactagtacatgaccacttga

SEQ ID NO: 22593 - DNA, 53 bp, Artificial Sequence; identical to SEQ ID NO: 6579
  Description of Artificial Sequence: Synthetic pecan; inner sequence and 3' sequence

SEQ ID NO: 22594 - DNA, 53 bp, Artificial Sequence
  Description of Artificial Sequence: Synthetic pecan; inner sequence and 3' sequence
ccgtagcgacatcaagcgggggggtgcgtgttgactagtacatgaccacttga

SEQ ID NO: 22595 - DNA, 53 bp, Artificial Sequence; identical to SEQ ID NO: 2717
  Description of Artificial Sequence: Synthetic pecan; inner sequence and 3' sequence

SEQ ID NO: 22596 - DNA, 53 bp, Artificial Sequence
  Description of Artificial Sequence: Synthetic pecan; inner sequence and 3' sequence
gtcatgcacgaacactatcatggtggcatgttgactagtacatgaccacttga

SEQ ID NO: 22597 - DNA, 53 bp, Artificial Sequence; identical to SEQ ID NO: 14992
  Description of Artificial Sequence: Synthetic pecan; inner sequence and 3' sequence

SEQ ID NO: 22598 - DNA, 53 bp, Artificial Sequence
  Description of Artificial Sequence: Synthetic pecan; inner sequence and 3' sequence
ggactcagcttgcctactggtggtcacgtattgactagtacatgaccacttga

SEQ ID NO: 22599 - DNA, 53 bp, Artificial Sequence; identical to SEQ ID NO: 2268
  Description of Artificial Sequence: Synthetic pecan; inner sequence and 3' sequence

SEQ ID NO: 22600 - DNA, 53 bp, Artificial Sequence
  Description of Artificial Sequence: Synthetic pecan; inner sequence and 3' sequence
ggcacaaacggaccgacaagtgtgcatggattgactagtacatgaccacttga

SEQ ID NO: 22601 - DNA, 53 bp, Artificial Sequence; identical to SEQ ID NO: 6787
  Description of Artificial Sequence: Synthetic pecan; inner sequence and 3' sequence

SEQ ID NO: 22602 - DNA, 53 bp, Artificial Sequence; identical to SEQ ID NO: 14996
  Description of Artificial Sequence: Synthetic pecan; inner sequence and 3' sequence

SEQ ID NO: 22603 - DNA, 53 bp, Artificial Sequence
  Description of Artificial Sequence: Synthetic pecan; inner sequence and 3' sequence
ggcgtgcggaccggtaagtcgtcatgcacattgactagtacatgaccacttga

SEQ ID NO: 22604 - DNA, 53 bp, Artificial Sequence
  Description of Artificial Sequence: Synthetic pecan; inner sequence and 3' sequence
cgcacaaacggaccgacaagtgcgcatggattgactagtacatgaccacttga

SEQ ID NO: 22605 - DNA, 53 bp, Artificial Sequence
  Description of Artificial Sequence: Synthetic pecan; inner sequence and 3' sequence
ggacgcagcttgcctactggtggtcatgtattgactagtacatgaccacttga

SEQ ID NO: 22606 - DNA, 53 bp, Artificial Sequence; identical to SEQ ID NO: 2654
  Description of Artificial Sequence: Synthetic pecan; inner sequence and 3' sequence

SEQ ID NO: 22607 - DNA, 53 bp, Artificial Sequence
  Description of Artificial Sequence: Synthetic pecan; inner sequence and 3' sequence
gtcattccgcatcctacaagtgggcacgtattgactagtacatgaccacttga

SEQ ID NO: 22608 - DNA, 53 bp, Artificial Sequence; identical to SEQ ID NO: 10579
  Description of Artificial Sequence: Synthetic pecan; inner sequence and 3' sequence

SEQ ID NO: 22609 - DNA, 53 bp, Artificial Sequence; identical to SEQ ID NO: 6492
  Description of Artificial Sequence: Synthetic pecan; inner sequence and 3' sequence

SEQ ID NO: 22610 - DNA, 49 bp, Artificial Sequence
  Description of Artificial Sequence: Synthetic pecan; inner sequence and 3' sequence
ccgcacgtcaaggcaggctgtacgagttgactagtacatgaccacttga

SEQ ID NO: 22611 - DNA, 53 bp, Artificial Sequence; identical to SEQ ID NO: 6987
  Description of Artificial Sequence: Synthetic pecan; inner sequence and 3' sequence

SEQ ID NO: 22612 - DNA, 53 bp, Artificial Sequence; identical to SEQ ID NO: 14945
  Description of Artificial Sequence: Synthetic pecan; inner sequence and 3' sequence

SEQ ID NO: 22613 - DNA, 53 bp, Artificial Sequence
  Description of Artificial Sequence: Synthetic pecan; inner sequence and 3' sequence
ggccacatcgtacctcaacgtggacgtgcattgactagtacatgaccacttga

SEQ ID NO: 22614 - DNA, 53 bp, Artificial Sequence; identical to SEQ ID NO: 2520
  Description of Artificial Sequence: Synthetic pecan; inner sequence and 3' sequence

SEQ ID NO: 22615 - DNA, 53 bp, Artificial Sequence
  Description of Artificial Sequence: Synthetic pecan; inner sequence and 3' sequence
cgcaccgtcaatcgggaaggcactttggtgttgactagtacatgaccacttga

SEQ ID NO: 22616 - DNA, 53 bp, Artificial Sequence; identical to SEQ ID NO: 2924
  Description of Artificial Sequence: Synthetic pecan; inner sequence and 3' sequence

SEQ ID NO: 22617 - DNA, 53 bp, Artificial Sequence
  Description of Artificial Sequence: Synthetic pecan; inner sequence and 3' sequence
gtcatgccatctcttcgagtgtgacaggtattgactagtacatgaccacttga

SEQ ID NO: 22618 - DNA, 53 bp, Artificial Sequence
  Description of Artificial Sequence: Synthetic pecan; inner sequence and 3' sequence
ggcacaaacggaccgacaagtgcgtatggattgactagtacatgaccacttga

SEQ ID NO: 22619 - DNA, 52 bp, Artificial Sequence; identical to SEQ ID NO: 6968
  Description of Artificial Sequence: Synthetic pecan; inner sequence and 3' sequence

SEQ ID NO: 22620 - DNA, 53 bp, Artificial Sequence; identical to SEQ ID NO: 2530
  Description of Artificial Sequence: Synthetic pecan; inner sequence and 3' sequence

SEQ ID NO: 22621 - DNA, 53 bp, Artificial Sequence; identical to SEQ ID NO: 2107
  Description of Artificial Sequence: Synthetic pecan; inner sequence and 3' sequence

SEQ ID NO: 22622 - DNA, 53 bp, Artificial Sequence; identical to SEQ ID NO: 10678
  Description of Artificial Sequence: Synthetic pecan; inner sequence and 3' sequence

SEQ ID NO: 22623 - DNA, 53 bp, Artificial Sequence
  Description of Artificial Sequence: Synthetic pecan; inner sequence and 3' sequence
gcacgcatcgtcccgtcatgtggttccgtattgactagtacatgaccacttga

SEQ ID NO: 22624 - DNA, 53 bp, Artificial Sequence; identical to SEQ ID NO: 6470
  Description of Artificial Sequence: Synthetic pecan; inner sequence and 3' sequence

SEQ ID NO: 22625 - DNA, 53 bp, Artificial Sequence
  Description of Artificial Sequence: Synthetic pecan; inner sequence and 3' sequence
ggcacaaacggacagacaagtgcgcatggattgactagtacatgaccacttga

SEQ ID NO: 22626 - DNA, 53 bp, Artificial Sequence
  Description of Artificial Sequence: Synthetic pecan; inner sequence and 3' sequence
cgcaccgtcgatacgtcgtgcacgctgacattgactagtacatgaccacttga

SEQ ID NO: 22627 - DNA, 53 bp, Artificial Sequence
  Description of Artificial Sequence: Synthetic pecan; inner sequence and 3' sequence
ccgcacgtagccctatccgtggtgcatgcattgactagtacatgaccacttga

SEQ ID NO: 22628 - DNA, 53 bp, Artificial Sequence; identical to SEQ ID NO: 2099
  Description of Artificial Sequence: Synthetic pecan; inner sequence and 3' sequence

SEQ ID NO: 22629 - DNA, 53 bp, Artificial Sequence
  Description of Artificial Sequence: Synthetic pecan; inner sequence and 3' sequence
ggcacaaacggaccgacaagttcgcatggattgactagtacatgaccacttga

SEQ ID NO: 22630 - DNA, 53 bp, Artificial Sequence; identical to SEQ ID NO: 6916
  Description of Artificial Sequence: Synthetic pecan; inner sequence and 3' sequence

SEQ ID NO: 22631 - DNA, 53 bp, Artificial Sequence; identical to SEQ ID NO: 2287
  Description of Artificial Sequence: Synthetic pecan; inner sequence and 3' sequence

SEQ ID NO: 22632 - DNA, 53 bp, Artificial Sequence; identical to SEQ ID NO: 6761
  Description of Artificial Sequence: Synthetic pecan; inner sequence and 3' sequence

SEQ ID NO: 22633 - DNA, 53 bp, Artificial Sequence
  Description of Artificial Sequence: Synthetic pecan; inner sequence and 3' sequence
ccgcacgtaaccctatcagtggtgcatgcattgactagtacatgaccacttga

SEQ ID NO: 22634 - DNA, 52 bp, Artificial Sequence; identical to SEQ ID NO: 2975
  Description of Artificial Sequence: Synthetic pecan; inner sequence and 3' sequence

SEQ ID NO: 22635 - DNA, 53 bp, Artificial Sequence
  Description of Artificial Sequence: Synthetic pecan; inner sequence and 3' sequence
ggcacaaacggaccgccaagtgcgcatggattgactagtacatgaccacttga

SEQ ID NO: 22636 - DNA, 53 bp, Artificial Sequence; identical to SEQ ID NO: 18688
  Description of Artificial Sequence: Synthetic pecan; inner sequence and 3' sequence

SEQ ID NO: 22637 - DNA, 53 bp, Artificial Sequence
  Description of Artificial Sequence: Synthetic pecan; inner sequence and 3' sequence
ccgatcgcacgtcaagccaggctgtacgagttgactagtacatgaccacttga

SEQ ID NO: 22638 - DNA, 53 bp, Artificial Sequence; identical to SEQ ID NO: 6611
  Description of Artificial Sequence: Synthetic pecan; inner sequence and 3' sequence

SEQ ID NO: 22639 - DNA, 53 bp, Artificial Sequence; identical to SEQ ID NO: 2043
  Description of Artificial Sequence: Synthetic pecan; inner sequence and 3' sequence

SEQ ID NO: 22640 - DNA, 53 bp, Artificial Sequence
  Description of Artificial Sequence: Synthetic pecan; inner sequence and 3' sequence
ggacgcatcttgcctactggtggtcacgtattgactagtacatgaccacttga

SEQ ID NO: 22641 - DNA, 53 bp, Artificial Sequence; identical to SEQ ID NO: 2436
  Description of Artificial Sequence: Synthetic pecan; inner sequence and 3' sequence

SEQ ID NO: 22642 - DNA, 53 bp, Artificial Sequence
  Description of Artificial Sequence: Synthetic pecan; inner sequence and 3' sequence
cgcaccgtcaagcggtaaggcactttggtgttgactagtacatgaccacttga

SEQ ID NO: 22643 - DNA, 53 bp, Artificial Sequence; identical to SEQ ID NO: 10962
  Description of Artificial Sequence: Synthetic pecan; inner sequence and 3' sequence

SEQ ID NO: 22644 - DNA, 53 bp, Artificial Sequence
  Description of Artificial Sequence: Synthetic pecan; inner sequence and 3' sequence
gtcactgtgcctgaccgttaagttgcggcattgactagtacatgaccacttga

SEQ ID NO: 22645 - DNA, 53 bp, Artificial Sequence; identical to SEQ ID NO: 2336
  Description of Artificial Sequence: Synthetic pecan; inner sequence and 3' sequence

SEQ ID NO: 22646 - DNA, 53 bp, Artificial Sequence
  Description of Artificial Sequence: Synthetic pecan; inner sequence and 3' sequence
ccgcacgtagccctaacagtggtgcatgcattgactagtacatgaccacttga

SEQ ID NO: 22647 - DNA, 53 bp, Artificial Sequence; identical to SEQ ID NO: 2608
  Description of Artificial Sequence: Synthetic pecan; inner sequence and 3' sequence

SEQ ID NO: 22648 - DNA, 53 bp, Artificial Sequence
  Description of Artificial Sequence: Synthetic pecan; inner sequence and 3' sequence
ccatcgcgtcactattatgtgtgtcacgtattgactagtacatgaccacttga

SEQ ID NO: 22649 - DNA, 52 bp, Artificial Sequence
  Description of Artificial Sequence: Synthetic pecan; inner sequence and 3' sequence
gtgcgccgatgccctcatgtggccgtggattgactagtacatgaccacttga

SEQ ID NO: 22650 - DNA, 53 bp, Artificial Sequence
  Description of Artificial Sequence: Synthetic pecan; inner sequence and 3' sequence
ccatcgcgtcaccatcatgtgtgtcacgtattgactagtacatgaccacttga

SEQ ID NO: 22651 - DNA, 53 bp, Artificial Sequence; identical to SEQ ID NO: 2348
  Description of Artificial Sequence: Synthetic pecan; inner sequence and 3' sequence

SEQ ID NO: 22652 - DNA, 53 bp, Artificial Sequence
  Description of Artificial Sequence: Synthetic pecan; inner sequence and 3' sequence
ggacgcagcttgcctactggaggtcacgtattgactagtacatgaccacttga

SEQ ID NO: 22653 - DNA, 53 bp, Artificial Sequence
  Description of Artificial Sequence: Synthetic pecan; inner sequence and 3' sequence
ccgtagcgacatcaagcgggggcgtgcgtgttgactagtacatgaccacttga

SEQ ID NO: 22654 - DNA, 53 bp, Artificial Sequence; identical to SEQ ID NO: 14953
  Description of Artificial Sequence: Synthetic pecan; inner sequence and 3' sequence

SEQ ID NO: 22655 - DNA, 53 bp, Artificial Sequence
  Description of Artificial Sequence: Synthetic pecan; inner sequence and 3' sequence
ggacgcagcggaacgttctagtggtacgtattgactagtacatgaccacttga

SEQ ID NO: 22656 - DNA, 53 bp, Artificial Sequence; identical to SEQ ID NO: 6521
  Description of Artificial Sequence: Synthetic pecan; inner sequence and 3' sequence

SEQ ID NO: 22657 - DNA, 53 bp, Artificial Sequence
  Description of Artificial Sequence: Synthetic pecan; inner sequence and 3' sequence
gcacgactcgcaccccatcatgaggccatgttgactagtacatgaccacttga

SEQ ID NO: 22658 - DNA, 53 bp, Artificial Sequence; identical to SEQ ID NO: 18266
  Description of Artificial Sequence: Synthetic pecan; inner sequence and 3' sequence

SEQ ID NO: 22659 - DNA, 53 bp, Artificial Sequence; identical to SEQ ID NO: 2228
  Description of Artificial Sequence: Synthetic pecan; inner sequence and 3' sequence

SEQ ID NO: 22660 - DNA, 53 bp, Artificial Sequence; identical to SEQ ID NO: 14659
  Description of Artificial Sequence: Synthetic pecan; inner sequence and 3' sequence

SEQ ID NO: 22661 - DNA, 53 bp, Artificial Sequence
  Description of Artificial Sequence: Synthetic pecan; inner sequence and 3' sequence
gtcatgcacgaacactatcatggaggcatgttgactagtacatgaccacttga

SEQ ID NO: 22662 - DNA, 53 bp, Artificial Sequence
  Description of Artificial Sequence: Synthetic pecan; inner sequence and 3' sequence
ccctcgcgtcactatcatgtgtgtcacgtattgactagtacatgaccacttga

SEQ ID NO: 22663 - DNA, 53 bp, Artificial Sequence; identical to SEQ ID NO: 2254
  Description of Artificial Sequence: Synthetic pecan; inner sequence and 3' sequence

SEQ ID NO: 22664 - DNA, 53 bp, Artificial Sequence; identical to SEQ ID NO: 2249
  Description of Artificial Sequence: Synthetic pecan; inner sequence and 3' sequence

SEQ ID NO: 22665 - DNA, 53 bp, Artificial Sequence
  Description of Artificial Sequence: Synthetic pecan; inner sequence and 3' sequence
ccgatcgcacgtcaaggcaggctgcacgagttgactagtacatgaccacttga

SEQ ID NO: 22666 - DNA, 53 bp, Artificial Sequence
  Description of Artificial Sequence: Synthetic pecan; inner sequence and 3' sequence
ggccacagcgtaccttaacgtggacgtgcattgactagtacatgaccacttga

SEQ ID NO: 22667 - DNA, 53 bp, Artificial Sequence; identical to SEQ ID NO: 6960
  Description of Artificial Sequence: Synthetic pecan; inner sequence and 3' sequence

SEQ ID NO: 22668 - DNA, 53 bp, Artificial Sequence
  Description of Artificial Sequence: Synthetic pecan; inner sequence and 3' sequence
cgcaccgtcgatacgtcatgcgcgctgacattgactagtacatgaccacttga

SEQ ID NO: 22669 - DNA, 53 bp, Artificial Sequence
  Description of Artificial Sequence: Synthetic pecan; inner sequence and 3' sequence
gtcatgcacgaacactatcatggcggtatgttgactagtacatgaccacttga

SEQ ID NO: 22670 - DNA, 54 bp, Artificial Sequence
  Description of Artificial Sequence: Synthetic pecan; inner sequence and 3' sequence
gcattggacgatcgtgccctacacgtggacattgactagtacatgaccacttga

SEQ ID NO: 22671 - DNA, 53 bp, Artificial Sequence; identical to SEQ ID NO: 2928
  Description of Artificial Sequence: Synthetic pecan; inner sequence and 3' sequence

SEQ ID NO: 22672 - DNA, 53 bp, Artificial Sequence
  Description of Artificial Sequence: Synthetic pecan; inner sequence and 3' sequence
gcacgactcgcaccctatcctgaggccatgttgactagtacatgaccacttga

SEQ ID NO: 22673 - DNA, 53 bp, Artificial Sequence
  Description of Artificial Sequence: Synthetic pecan; inner sequence and 3' sequence
gtacgcagcttgcctactggtggtcacgtattgactagtacatgaccacttga

SEQ ID NO: 22674 - DNA, 53 bp, Artificial Sequence; identical to SEQ ID NO: 2579
  Description of Artificial Sequence: Synthetic pecan; inner sequence and 3' sequence

SEQ ID NO: 22675 - DNA, 53 bp, Artificial Sequence; identical to SEQ ID NO: 2853
  Description of Artificial Sequence: Synthetic pecan; inner sequence and 3' sequence

SEQ ID NO: 22676 - DNA, 53 bp, Artificial Sequence
  Description of Artificial Sequence: Synthetic pecan; inner sequence and 3' sequence
ggcatgcacgcacctacacgtgggtctggattgactagtacatgaccacttga

SEQ ID NO: 22677 - DNA, 53 bp, Artificial Sequence
  Description of Artificial Sequence: Synthetic pecan; inner sequence and 3' sequence
gtgcgcggcttgcctactggtggtcacgtattgactagtacatgaccacttga

SEQ ID NO: 22678 - DNA, 49 bp, Artificial Sequence
  Description of Artificial Sequence: Synthetic pecan; inner sequence and 3' sequence
ggcatgcacgcacctacacgtggccattgactagtacatgaccacttga

SEQ ID NO: 22679 - DNA, 53 bp, Artificial Sequence
  Description of Artificial Sequence: Synthetic pecan; inner sequence and 3' sequence
ccgatcgcacgtcaaggcaggatgtacgagttgactagtacatgaccacttga

SEQ ID NO: 22680 - DNA, 53 bp, Artificial Sequence; identical to SEQ ID NO: 6280
  Description of Artificial Sequence: Synthetic pecan; inner sequence and 3' sequence

SEQ ID NO: 22681 - DNA, 53 bp, Artificial Sequence; identical to SEQ ID NO: 2909
  Description of Artificial Sequence: Synthetic pecan; inner sequence and 3' sequence

SEQ ID NO: 22682 - DNA, 53 bp, Artificial Sequence; identical to SEQ ID NO: 2211
  Description of Artificial Sequence: Synthetic pecan; inner sequence and 3' sequence

SEQ ID NO: 22683 - DNA, 53 bp, Artificial Sequence
  Description of Artificial Sequence: Synthetic pecan; inner sequence and 3' sequence
gtcactgtgcctgaccgtcacgttgcggcattgactagtacatgaccacttga

SEQ ID NO: 22684 - DNA, 53 bp, Artificial Sequence; identical to SEQ ID NO: 10876
  Description of Artificial Sequence: Synthetic pecan; inner sequence and 3' sequence

SEQ ID NO: 22685 - DNA, 53 bp, Artificial Sequence; identical to SEQ ID NO: 7002
  Description of Artificial Sequence: Synthetic pecan; inner sequence and 3' sequence

SEQ ID NO: 22686 - DNA, 53 bp, Artificial Sequence; identical to SEQ ID NO: 6650
  Description of Artificial Sequence: Synthetic pecan; inner sequence and 3' sequence

SEQ ID NO: 22687 - DNA, 53 bp, Artificial Sequence; identical to SEQ ID NO: 2705
  Description of Artificial Sequence: Synthetic pecan; inner sequence and 3' sequence

SEQ ID NO: 22688 - DNA, 53 bp, Artificial Sequence; identical to SEQ ID NO: 2572
  Description of Artificial Sequence: Synthetic pecan; inner sequence and 3' sequence

SEQ ID NO: 22689 - DNA, 53 bp, Artificial Sequence
  Description of Artificial Sequence: Synthetic pecan; inner sequence and 3' sequence
ccatcgcgttactatcatgtgtgtcacgtattgactagtacatgaccacttga

SEQ ID NO: 22690 - DNA, 53 bp, Artificial Sequence
  Description of Artificial Sequence: Synthetic pecan; inner sequence and 3' sequence
ggccacagcggacctcaacgtggacgtgcattgactagtacatgaccacttga

SEQ ID NO: 22691 - DNA, 53 bp, Artificial Sequence
  Description of Artificial Sequence: Synthetic pecan; inner sequence and 3' sequence
ccgtagcgacatcaggcggtggtgtgcgtgttgactagtacatgaccacttga

SEQ ID NO: 22692 - DNA, 53 bp, Artificial Sequence
  Description of Artificial Sequence: Synthetic pecan; inner sequence and 3' sequence
cgccacagcgtacctcaacgtggacgtgcattgactagtacatgaccacttga

SEQ ID NO: 22693 - DNA, 53 bp, Artificial Sequence
  Description of Artificial Sequence: Synthetic pecan; inner sequence and 3' sequence
ggcatgcacgcacctacacttgggcacgtattgactagtacatgaccacttga

SEQ ID NO: 22694 - DNA, 53 bp, Artificial Sequence
  Description of Artificial Sequence: Synthetic pecan; inner sequence and 3' sequence
ccatcgcgtcactatcatgggtgtcacgtattgactagtacatgaccacttga

SEQ ID NO: 22695 - DNA, 53 bp, Artificial Sequence
  Description of Artificial Sequence: Synthetic pecan; inner sequence and 3' sequence
ccgatcgcacgtcgaggcaggctgtacgagttgactagtacatgaccacttga

SEQ ID NO: 22696 - DNA, 53 bp, Artificial Sequence
  Description of Artificial Sequence: Synthetic pecan; inner sequence and 3' sequence
ccatcgcgtcactatcatgtgcgtcacgtattgactagtacatgaccacttga

SEQ ID NO: 22697 - DNA, 53 bp, Artificial Sequence; identical to SEQ ID NO: 10910
  Description of Artificial Sequence: Synthetic pecan; inner sequence and 3' sequence

SEQ ID NO: 22698 - DNA, 53 bp, Artificial Sequence
  Description of Artificial Sequence: Synthetic pecan; inner sequence and 3' sequence
ccgtagcgacatcaagcggtggtgcgcgcgttgactagtacatgaccacttga

SEQ ID NO: 22699 - DNA, 53 bp, Artificial Sequence; identical to SEQ ID NO: 14827
  Description of Artificial Sequence: Synthetic pecan; inner sequence and 3' sequence

SEQ ID NO: 22700 - DNA, 53 bp, Artificial Sequence
  Description of Artificial Sequence: Synthetic pecan; inner sequence and 3' sequence
ccttagcgacatcaagcggtggtgtgcgtgttgactagtacatgaccacttga

SEQ ID NO: 22701 - DNA, 53 bp, Artificial Sequence
  Description of Artificial Sequence: Synthetic pecan; inner sequence and 3' sequence
gcacgactcgcaccctatcatgaggccgtgttgactagtacatgaccacttga

SEQ ID NO: 22702 - DNA, 53 bp, Artificial Sequence; identical to SEQ ID NO: 2534
  Description of Artificial Sequence: Synthetic pecan; inner sequence and 3' sequence

SEQ ID NO: 22703 - DNA, 53 bp, Artificial Sequence; identical to SEQ ID NO: 2102
  Description of Artificial Sequence: Synthetic pecan; inner sequence and 3' sequence

SEQ ID NO: 22704 - DNA, 53 bp, Artificial Sequence; identical to SEQ ID NO: 2660
  Description of Artificial Sequence: Synthetic pecan; inner sequence and 3' sequence

SEQ ID NO: 22705 - DNA, 52 bp, Artificial Sequence
  Description of Artificial Sequence: Synthetic pecan; inner sequence and 3' sequence
ccgcacgtagccctaccagtgtgtcagtgttgactagtacatgaccacttga

SEQ ID NO: 22706 - DNA, 53 bp, Artificial Sequence
  Description of Artificial Sequence: Synthetic pecan; inner sequence and 3' sequence
ggacgcagcggcacgttcgagtggtacgtattgactagtacatgaccacttga

SEQ ID NO: 22707 - DNA, 53 bp, Artificial Sequence; identical to SEQ ID NO: 6872
  Description of Artificial Sequence: Synthetic pecan; inner sequence and 3' sequence

SEQ ID NO: 22708 - DNA, 53 bp, Artificial Sequence
  Description of Artificial Sequence: Synthetic pecan; inner sequence and 3' sequence
ccatcgcgtcactatcctgtgtgtcacgtattgactagtacatgaccacttga

SEQ ID NO: 22709 - DNA, 53 bp, Artificial Sequence
  Description of Artificial Sequence: Synthetic pecan; inner sequence and 3' sequence
gcacgactcgcaccctatcataaggccatgttgactagtacatgaccacttga

SEQ ID NO: 22710 - DNA, 53 bp, Artificial Sequence
  Description of Artificial Sequence: Synthetic pecan; inner sequence and 3' sequence
cgcaccatcgatacgtcatgcacgctgacattgactagtacatgaccacttga

SEQ ID NO: 22711 - DNA, 53 bp, Artificial Sequence
  Description of Artificial Sequence: Synthetic pecan; inner sequence and 3' sequence
ccgtagcgacatcaaacggtggtgtgcgtgttgactagtacatgaccacttga

SEQ ID NO: 22712 - DNA, 53 bp, Artificial Sequence
  Description of Artificial Sequence: Synthetic pecan; inner sequence and 3' sequence
cgacgcagcttgcctactggtggtcacgtattgactagtacatgaccacttga

SEQ ID NO: 22713 - DNA, 53 bp, Artificial Sequence; identical to SEQ ID NO: 6845
  Description of Artificial Sequence: Synthetic pecan; inner sequence and 3' sequence

SEQ ID NO: 22714 - DNA, 53 bp, Artificial Sequence; identical to SEQ ID NO: 2315
  Description of Artificial Sequence: Synthetic pecan; inner sequence and 3' sequence

SEQ ID NO: 22715 - DNA, 53 bp, Artificial Sequence
  Description of Artificial Sequence: Synthetic pecan; inner sequence and 3' sequence
ggatgcagcttgcctactggtggtcacgtattgactagtacatgaccacttga

SEQ ID NO: 22716 - DNA, 53 bp, Artificial Sequence; identical to SEQ ID NO: 2182
  Description of Artificial Sequence: Synthetic pecan; inner sequence and 3' sequence

SEQ ID NO: 22717 - DNA, 54 bp, Artificial Sequence
  Description of Artificial Sequence: Synthetic pecan; inner sequence and 3' sequence
ggcatggcgcgcaccctatcatgaggccatgttgactagtacatgaccacttga

SEQ ID NO: 22718 - DNA, 53 bp, Artificial Sequence
  Description of Artificial Sequence: Synthetic pecan; inner sequence and 3' sequence
gtcatgccatcccttcgactgtgacaggtattgactagtacatgaccacttga

SEQ ID NO: 22719 - DNA, 53 bp, Artificial Sequence
  Description of Artificial Sequence: Synthetic pecan; inner sequence and 3' sequence
ccgcacgtagccctatcagtgatgcatgcattgactagtacatgaccacttga

SEQ ID NO: 22720 - DNA, 53 bp, Artificial Sequence
  Description of Artificial Sequence: Synthetic pecan; inner sequence and 3' sequence
ccgtagcgacttcaagcggtggtgtgcgtgttgactagtacatgaccacttga

SEQ ID NO: 22721 - DNA, 53 bp, Artificial Sequence
  Description of Artificial Sequence: Synthetic pecan; inner sequence and 3' sequence
cgcaccgtcgatacgtcatgctcgctgacattgactagtacatgaccacttga

SEQ ID NO: 22722 - DNA, 53 bp, Artificial Sequence
  Description of Artificial Sequence: Synthetic pecan; inner sequence and 3' sequence
gtcattctgcatcctacacgtgggcacgtattgactagtacatgaccacttga

SEQ ID NO: 22723 - DNA, 53 bp, Artificial Sequence
  Description of Artificial Sequence: Synthetic pecan; inner sequence and 3' sequence
ccgatcgcacgtcaaggctggctgtacgagttgactagtacatgaccacttga

SEQ ID NO: 22724 - DNA, 53 bp, Artificial Sequence
  Description of Artificial Sequence: Synthetic pecan; inner sequence and 3' sequence
ccatcgcgtcactatcatgtgtttcacgtattgactagtacatgaccacttga

SEQ ID NO: 22725 - DNA, 53 bp, Artificial Sequence
  Description of Artificial Sequence: Synthetic pecan; inner sequence and 3' sequence
ccgatcgcacgtcaaggcagtctgtacgagttgactagtacatgaccacttga

SEQ ID NO: 22726 - DNA, 53 bp, Artificial Sequence; identical to SEQ ID NO: 10868
  Description of Artificial Sequence: Synthetic pecan; inner sequence and 3' sequence

SEQ ID NO: 22727 - DNA, 53 bp, Artificial Sequence; identical to SEQ ID NO: 2108
  Description of Artificial Sequence: Synthetic pecan; inner sequence and 3' sequence

SEQ ID NO: 22728 - DNA, 53 bp, Artificial Sequence
  Description of Artificial Sequence: Synthetic pecan; inner sequence and 3' sequence
ccgcacgtagccctatcagtggtgcatacattgactagtacatgaccacttga

SEQ ID NO: 22729 - DNA, 53 bp, Artificial Sequence; identical to SEQ ID NO: 10884
  Description of Artificial Sequence: Synthetic pecan; inner sequence and 3' sequence

SEQ ID NO: 22730 - DNA, 53 bp, Artificial Sequence
  Description of Artificial Sequence: Synthetic pecan; inner sequence and 3' sequence
gtaatgcacgaacactatcatggcggcatgttgactagtacatgaccacttga

SEQ ID NO: 22731 - DNA, 53 bp, Artificial Sequence
  Description of Artificial Sequence: Synthetic pecan; inner sequence and 3' sequence
ccgcacctagccctatcagtggtgcatgcattgactagtacatgaccacttga

SEQ ID NO: 22732 - DNA, 53 bp, Artificial Sequence
  Description of Artificial Sequence: Synthetic pecan; inner sequence and 3' sequence
ggcacaaacggatcgacaagtgcgcatggattgactagtacatgaccacttga

SEQ ID NO: 22733 - DNA, 53 bp, Artificial Sequence
  Description of Artificial Sequence: Synthetic pecan; inner sequence and 3' sequence
ggcatgcacgcacctacacgtgtgcacgtattgactagtacatgaccacttga

SEQ ID NO: 22734 - DNA, 53 bp, Artificial Sequence; identical to SEQ ID NO: 6301
  Description of Artificial Sequence: Synthetic pecan; inner sequence and 3' sequence

SEQ ID NO: 22735 - DNA, 53 bp, Artificial Sequence; identical to SEQ ID NO: 2157
  Description of Artificial Sequence: Synthetic pecan; inner sequence and 3' sequence

SEQ ID NO: 22736 - DNA, 53 bp, Artificial Sequence
  Description of Artificial Sequence: Synthetic pecan; inner sequence and 3' sequence
gtcatgcacgaaaactatcatggcggcatgttgactagtacatgaccacttga

SEQ ID NO: 22737 - DNA, 53 bp, Artificial Sequence
  Description of Artificial Sequence: Synthetic pecan; inner sequence and 3' sequence
gtcatgcacgaaccctatcatggcggcatgttgactagtacatgaccacttga

SEQ ID NO: 22738 - DNA, 54 bp, Artificial Sequence; identical to SEQ ID NO: 2258
  Description of Artificial Sequence: Synthetic pecan; inner sequence and 3' sequence

SEQ ID NO: 22739 - DNA, 53 bp, Artificial Sequence; identical to SEQ ID NO: 2955
  Description of Artificial Sequence: Synthetic pecan; inner sequence and 3' sequence

SEQ ID NO: 22740 - DNA, 53 bp, Artificial Sequence
  Description of Artificial Sequence: Synthetic pecan; inner sequence and 3' sequence
gcacgactcgcaccctatcttgaggccatgttgactagtacatgaccacttga

SEQ ID NO: 22741 - DNA, 48 bp, Artificial Sequence
  Description of Artificial Sequence: Synthetic pecan; inner sequence and 3' sequence
gtcattccgcatcctacacgtgggcttgactagtacatgaccacttga

SEQ ID NO: 22742 - DNA, 53 bp, Artificial Sequence; identical to SEQ ID NO: 2298
  Description of Artificial Sequence: Synthetic pecan; inner sequence and 3' sequence

SEQ ID NO: 22743 - DNA, 53 bp, Artificial Sequence
  Description of Artificial Sequence: Synthetic pecan; inner sequence and 3' sequence
cgcgtccgtggcgtcacgtcgtggtgtggattgactagtacatgaccacttga

SEQ ID NO: 22744 - DNA, 53 bp, Artificial Sequence
  Description of Artificial Sequence: Synthetic pecan; inner sequence and 3' sequence
gcacgcacgatgagcgccaagtgacatggattgactagtacatgaccacttga

SEQ ID NO: 22745 - DNA, 53 bp, Artificial Sequence; identical to SEQ ID NO: 6948
  Description of Artificial Sequence: Synthetic pecan; inner sequence and 3' sequence

SEQ ID NO: 22746 - DNA, 53 bp, Artificial Sequence
  Description of Artificial Sequence: Synthetic pecan; inner sequence and 3' sequence
ccatcgcgtcattatcatgtgtgtcacgtattgactagtacatgaccacttga

SEQ ID NO: 22747 - DNA, 53 bp, Artificial Sequence; identical to SEQ ID NO: 2461
  Description of Artificial Sequence: Synthetic pecan; inner sequence and 3' sequence

SEQ ID NO: 22748 - DNA, 52 bp, Artificial Sequence; identical to SEQ ID NO: 2334
  Description of Artificial Sequence: Synthetic pecan; inner sequence and 3' sequence

SEQ ID NO: 22749 - DNA, 53 bp, Artificial Sequence
  Description of Artificial Sequence: Synthetic pecan; inner sequence and 3' sequence
gacacaaacggaccgacaagtgcgcatggattgactagtacatgaccacttga

SEQ ID NO: 22750 - DNA, 53 bp, Artificial Sequence
  Description of Artificial Sequence: Synthetic pecan; inner sequence and 3' sequence
gtcgtgactggctagctggacatgcactgattgactagtacatgaccacttga

SEQ ID NO: 22751 - DNA, 53 bp, Artificial Sequence; identical to SEQ ID NO: 10978
  Description of Artificial Sequence: Synthetic pecan; inner sequence and 3' sequence

SEQ ID NO: 22752 - DNA, 53 bp, Artificial Sequence
  Description of Artificial Sequence: Synthetic pecan; inner sequence and 3' sequence
ccatcgcgtcactatcatgtgtgccacgtattgactagtacatgaccacttga

SEQ ID NO: 22753 - DNA, 53 bp, Artificial Sequence
  Description of Artificial Sequence: Synthetic pecan; inner sequence and 3' sequence
gacatgcacgcacctacacgtgggtatggattgactagtacatgaccacttga

SEQ ID NO: 22754 - DNA, 53 bp, Artificial Sequence
  Description of Artificial Sequence: Synthetic pecan; inner sequence and 3' sequence
gtacgcagcggaacgttcgagtggtacgtattgactagtacatgaccacttga

SEQ ID NO: 22755 - DNA, 53 bp, Artificial Sequence
  Description of Artificial Sequence: Synthetic pecan; inner sequence and 3' sequence
ggacgcagcttgcctcctggtggtcacgtattgactagtacatgaccacttga

SEQ ID NO: 22756 - DNA, 53 bp, Artificial Sequence; identical to SEQ ID NO: 6229
  Description of Artificial Sequence: Synthetic pecan; inner sequence and 3' sequence

SEQ ID NO: 22757 - DNA, 53 bp, Artificial Sequence; identical to SEQ ID NO: 2085
  Description of Artificial Sequence: Synthetic pecan; inner sequence and 3' sequence

SEQ ID NO: 22758 - DNA, 53 bp, Artificial Sequence; identical to SEQ ID NO: 14932
  Description of Artificial Sequence: Synthetic pecan; inner sequence and 3' sequence

SEQ ID NO: 22759 - DNA, 53 bp, Artificial Sequence; identical to SEQ ID NO: 2840
  Description of Artificial Sequence: Synthetic pecan; inner sequence and 3' sequence

SEQ ID NO: 22760 - DNA, 53 bp, Artificial Sequence
  Description of Artificial Sequence: Synthetic pecan; inner sequence and 3' sequence
ggcattcacgcacctacacgtgggtatggattgactagtacatgaccacttga

SEQ ID NO: 22761 - DNA, 53 bp, Artificial Sequence
  Description of Artificial Sequence: Synthetic pecan; inner sequence and 3' sequence
cgcaccgtcggtacgtcatgcacgctgacattgactagtacatgaccacttga

SEQ ID NO: 22762 - DNA, 53 bp, Artificial Sequence; identical to SEQ ID NO: 18399
  Description of Artificial Sequence: Synthetic pecan; inner sequence and 3' sequence

SEQ ID NO: 22763 - DNA, 53 bp, Artificial Sequence; identical to SEQ ID NO: 10748
  Description of Artificial Sequence: Synthetic pecan; inner sequence and 3' sequence

SEQ ID NO: 22764 - DNA, 53 bp, Artificial Sequence
  Description of Artificial Sequence: Synthetic pecan; inner sequence and 3' sequence
ccgcacgtacctctatcagtggtgcatgcattgactagtacatgaccacttga

SEQ ID NO: 22765 - DNA, 53 bp, Artificial Sequence; identical to SEQ ID NO: 6856
  Description of Artificial Sequence: Synthetic pecan; inner sequence and 3' sequence

SEQ ID NO: 22766 - DNA, 53 bp, Artificial Sequence
  Description of Artificial Sequence: Synthetic pecan; inner sequence and 3' sequence
gcacgcagcttgcctactggtggtcacgtattgactagtacatgaccacttga

SEQ ID NO: 22767 - DNA, 53 bp, Artificial Sequence
  Description of Artificial Sequence: Synthetic pecan; inner sequence and 3' sequence
gcacgactcgcaccctatcgtgaggccatgttgactagtacatgaccacttga

SEQ ID NO: 22768 - DNA, 53 bp, Artificial Sequence; identical to SEQ ID NO: 2921
  Description of Artificial Sequence: Synthetic pecan; inner sequence and 3' sequence

SEQ ID NO: 22769 - DNA, 53 bp, Artificial Sequence
  Description of Artificial Sequence: Synthetic pecan; inner sequence and 3' sequence
ggccacagcttacctcaacgtggacgtgcattgactagtacatgaccacttga

SEQ ID NO: 22770 - DNA, 53 bp, Artificial Sequence; identical to SEQ ID NO: 6401
  Description of Artificial Sequence: Synthetic pecan; inner sequence and 3' sequence

SEQ ID NO: 22771 - DNA, 53 bp, Artificial Sequence
  Description of Artificial Sequence: Synthetic pecan; inner sequence and 3' sequence
ccgcacgtagccctattagtggtgcatgcattgactagtacatgaccacttga

SEQ ID NO: 22772 - DNA, 53 bp, Artificial Sequence; identical to SEQ ID NO: 2753
  Description of Artificial Sequence: Synthetic pecan; inner sequence and 3' sequence

SEQ ID NO: 22773 - DNA, 53 bp, Artificial Sequence
  Description of Artificial Sequence: Synthetic pecan; inner sequence and 3' sequence
gcactgcacgcaccctatcatgtcggcatgttgactagtacatgaccacttga

SEQ ID NO: 22774 - DNA, 53 bp, Artificial Sequence; identical to SEQ ID NO: 2264
  Description of Artificial Sequence: Synthetic pecan; inner sequence and 3' sequence

SEQ ID NO: 22775 - DNA, 53 bp, Artificial Sequence
  Description of Artificial Sequence: Synthetic pecan; inner sequence and 3' sequence
ggacgcagcttgccttctggtggtcacgtattgactagtacatgaccacttga

SEQ ID NO: 22776 - DNA, 53 bp, Artificial Sequence
  Description of Artificial Sequence: Synthetic pecan; inner sequence and 3' sequence
gtcatgaacgaacactatcatggcggcatgttgactagtacatgaccacttga

SEQ ID NO: 22777 - DNA, 53 bp, Artificial Sequence
  Description of Artificial Sequence: Synthetic pecan; inner sequence and 3' sequence
cgcgcctacgatgggcaggcacatgtcgcattgactagtacatgaccacttga

SEQ ID NO: 22778 - DNA, 53 bp, Artificial Sequence
  Description of Artificial Sequence: Synthetic pecan; inner sequence and 3' sequence
gtcatgcacgaacactatgatggcggcatgttgactagtacatgaccacttga

SEQ ID NO: 22779 - DNA, 53 bp, Artificial Sequence; identical to SEQ ID NO: 2269
  Description of Artificial Sequence: Synthetic pecan; inner sequence and 3' sequence

SEQ ID NO: 22780 - DNA, 53 bp, Artificial Sequence
  Description of Artificial Sequence: Synthetic pecan; inner sequence and 3' sequence
ggacgcagcggaacgctcgagtggtacgtattgactagtacatgaccacttga

SEQ ID NO: 22781 - DNA, 53 bp, Artificial Sequence
  Description of Artificial Sequence: Synthetic pecan; inner sequence and 3' sequence
gcacaactcgcaccctatcatgaggccatgttgactagtacatgaccacttga

SEQ ID NO: 22782 - DNA, 53 bp, Artificial Sequence; identical to SEQ ID NO: 2318
  Description of Artificial Sequence: Synthetic pecan; inner sequence and 3' sequence

SEQ ID NO: 22783 - DNA, 53 bp, Artificial Sequence
  Description of Artificial Sequence: Synthetic pecan; inner sequence and 3' sequence
ggacgcactcaaccgccaagtgccgtcgtgttgactagtacatgaccacttga

SEQ ID NO: 22784 - DNA, 53 bp, Artificial Sequence
  Description of Artificial Sequence: Synthetic pecan; inner sequence and 3' sequence
ggccacagcgtacctcaacgtggacgggcattgactagtacatgaccacttga

SEQ ID NO: 22785 - DNA, 53 bp, Artificial Sequence
  Description of Artificial Sequence: Synthetic pecan; inner sequence and 3' sequence
ccccacgtagccctatcagtggtgcatgcattgactagtacatgaccacttga

SEQ ID NO: 22786 - DNA, 53 bp, Artificial Sequence; identical to SEQ ID NO: 2943
  Description of Artificial Sequence: Synthetic pecan; inner sequence and 3' sequence

SEQ ID NO: 22787 - DNA, 53 bp, Artificial Sequence
  Description of Artificial Sequence: Synthetic pecan; inner sequence and 3' sequence
gtcatgcacgaacattatcatggcggcatgttgactagtacatgaccacttga

SEQ ID NO: 22788 - DNA, 53 bp, Artificial Sequence
  Description of Artificial Sequence: Synthetic pecan; inner sequence and 3' sequence
ggcatgcatgcacctacacgtgggtatggattgactagtacatgaccacttga

SEQ ID NO: 22789 - DNA, 53 bp, Artificial Sequence
  Description of Artificial Sequence: Synthetic pecan; inner sequence and 3' sequence
gtcatgccatcccttcgagtgtgacatgtattgactagtacatgaccacttga

SEQ ID NO: 22790 - DNA, 53 bp, Artificial Sequence; identical to SEQ ID NO: 2156
  Description of Artificial Sequence: Synthetic pecan; inner sequence and 3' sequence

SEQ ID NO: 22791 - DNA, 53 bp, Artificial Sequence; identical to SEQ ID NO: 2903
  Description of Artificial Sequence: Synthetic pecan; inner sequence and 3' sequence

SEQ ID NO: 22792 - DNA, 53 bp, Artificial Sequence
  Description of Artificial Sequence: Synthetic pecan; inner sequence and 3' sequence
ccgcacgtagccctaccagtggtgcatgcattgactagtacatgaccacttga

SEQ ID NO: 22793 - DNA, 53 bp, Artificial Sequence
  Description of Artificial Sequence: Synthetic pecan; inner sequence and 3' sequence
gcccacagcgtacctcaacgtggacgtgcattgactagtacatgaccacttga

SEQ ID NO: 22794 - DNA, 53 bp, Artificial Sequence; identical to SEQ ID NO: 18211
  Description of Artificial Sequence: Synthetic pecan; inner sequence and 3' sequence

SEQ ID NO: 22795 - DNA, 53 bp, Artificial Sequence
  Description of Artificial Sequence: Synthetic pecan; inner sequence and 3' sequence
gtcatgccatccctttgagtgtgacaggtattgactagtacatgaccacttga

SEQ ID NO: 22796 - DNA, 53 bp, Artificial Sequence
  Description of Artificial Sequence: Synthetic pecan; inner sequence and 3' sequence
ggccaagctgaccgtaaagtcaggcgtgtattgactagtacatgaccacttga

SEQ ID NO: 22797 - DNA, 53 bp, Artificial Sequence
  Description of Artificial Sequence: Synthetic pecan; inner sequence and 3' sequence
gtcatgcacgaacactatcatggcggcgtgttgactagtacatgaccacttga

SEQ ID NO: 22798 - DNA, 53 bp, Artificial Sequence
  Description of Artificial Sequence: Synthetic pecan; inner sequence and 3' sequence
ggaagcagcttgcctactggtggtcacgtattgactagtacatgaccacttga

SEQ ID NO: 22799 - DNA, 53 bp, Artificial Sequence
  Description of Artificial Sequence: Synthetic pecan; inner sequence and 3' sequence
ggcacaaacggaccgacaagtgcgcctggattgactagtacatgaccacttga

SEQ ID NO: 22800 - DNA, 53 bp, Artificial Sequence
  Description of Artificial Sequence: Synthetic pecan; inner sequence and 3' sequence
cgcaccgtcgttacgtcatgcacgctgacattgactagtacatgaccacttga

SEQ ID NO: 22801 - DNA, 53 bp, Artificial Sequence
  Description of Artificial Sequence: Synthetic pecan; inner sequence and 3' sequence
ccatcgcgtcactatcatgtgtgtcacgtgttgactagtacatgaccacttga

SEQ ID NO: 22802 - DNA, 53 bp, Artificial Sequence; identical to SEQ ID NO: 14700
  Description of Artificial Sequence: Synthetic pecan; inner sequence and 3' sequence

SEQ ID NO: 22803 - DNA, 53 bp, Artificial Sequence
  Description of Artificial Sequence: Synthetic pecan; inner sequence and 3' sequence
gcacgactcgcaccctatcatgagaccatgttgactagtacatgaccacttga

SEQ ID NO: 22804 - DNA, 53 bp, Artificial Sequence; identical to SEQ ID NO: 2598
  Description of Artificial Sequence: Synthetic pecan; inner sequence and 3' sequence

SEQ ID NO: 22805 - DNA, 53 bp, Artificial Sequence; identical to SEQ ID NO: 18692
  Description of Artificial Sequence: Synthetic pecan; inner sequence and 3' sequence

SEQ ID NO: 22806 - DNA, 53 bp, Artificial Sequence; identical to SEQ ID NO: 6682
  Description of Artificial Sequence: Synthetic pecan; inner sequence and 3' sequence

SEQ ID NO: 22807 - DNA, 53 bp, Artificial Sequence
  Description of Artificial Sequence: Synthetic pecan; inner sequence and 3' sequence
ccgtagcgacatcaagcagtggtgtgcgtgttgactagtacatgaccacttga

SEQ ID NO: 22808 - DNA, 53 bp, Artificial Sequence; identical to SEQ ID NO: 6938
  Description of Artificial Sequence: Synthetic pecan; inner sequence and 3' sequence

SEQ ID NO: 22809 - DNA, 53 bp, Artificial Sequence
  Description of Artificial Sequence: Synthetic pecan; inner sequence and 3' sequence
ggcacaaacggaccgacaagtgcacatggattgactagtacatgaccacttga

SEQ ID NO: 22810 - DNA, 53 bp, Artificial Sequence; identical to SEQ ID NO: 6887
  Description of Artificial Sequence: Synthetic pecan; inner sequence and 3' sequence

SEQ ID NO: 22811 - DNA, 53 bp, Artificial Sequence
  Description of Artificial Sequence: Synthetic pecan; inner sequence and 3' sequence
gtcattcacgaacactatcatggcggcatgttgactagtacatgaccacttga

SEQ ID NO: 22812 - DNA, 53 bp, Artificial Sequence; identical to SEQ ID NO: 18675
  Description of Artificial Sequence: Synthetic pecan; inner sequence and 3' sequence

SEQ ID NO: 22813 - DNA, 53 bp, Artificial Sequence; identical to SEQ ID NO: 10872
  Description of Artificial Sequence: Synthetic pecan; inner sequence and 3' sequence

SEQ ID NO: 22814 - DNA, 53 bp, Artificial Sequence
  Description of Artificial Sequence: Synthetic pecan; inner sequence and 3' sequence
ccgcacgtagccctatcggtggtgcatgcattgactagtacatgaccacttga

SEQ ID NO: 22815 - DNA, 53 bp, Artificial Sequence
  Description of Artificial Sequence: Synthetic pecan; inner sequence and 3' sequence
ccattgcgtcactatcatgtgtgtcacgtattgactagtacatgaccacttga

SEQ ID NO: 22816 - DNA, 53 bp, Artificial Sequence; identical to SEQ ID NO: 10891
  Description of Artificial Sequence: Synthetic pecan; inner sequence and 3' sequence

SEQ ID NO: 22817 - DNA, 53 bp, Artificial Sequence
  Description of Artificial Sequence: Synthetic pecan; inner sequence and 3' sequence
gtcattccgcatcctacacgtggacacgtattgactagtacatgaccacttga

SEQ ID NO: 22818 - DNA, 53 bp, Artificial Sequence; identical to SEQ ID NO: 2109
  Description of Artificial Sequence: Synthetic pecan; inner sequence and 3' sequence

SEQ ID NO: 22819 - DNA, 56 bp, Artificial Sequence
  Description of Artificial Sequence: Synthetic pecan; inner sequence and 3' sequence
ggcatgcacgcacctacacgtgggtatggcatgttgactagtacatgaccacttga

SEQ ID NO: 22820 - DNA, 53 bp, Artificial Sequence
  Description of Artificial Sequence: Synthetic pecan; inner sequence and 3' sequence
ggccacagcgtacctcaacggggacgtgcattgactagtacatgaccacttga

SEQ ID NO: 22821 - DNA, 53 bp, Artificial Sequence; identical to SEQ ID NO: 18769
  Description of Artificial Sequence: Synthetic pecan; inner sequence and 3' sequence

SEQ ID NO: 22822 - DNA, 53 bp, Artificial Sequence; identical to SEQ ID NO: 2130
  Description of Artificial Sequence: Synthetic pecan; inner sequence and 3' sequence

SEQ ID NO: 22823 - DNA, 53 bp, Artificial Sequence
  Description of Artificial Sequence: Synthetic pecan; inner sequence and 3' sequence
ggcatgcacgcacctacaggtgggtatggattgactagtacatgaccacttga

SEQ ID NO: 22824 - DNA, 53 bp, Artificial Sequence; identical to SEQ ID NO: 2398
  Description of Artificial Sequence: Synthetic pecan; inner sequence and 3' sequence

SEQ ID NO: 22825 - DNA, 53 bp, Artificial Sequence; identical to SEQ ID NO: 2060
  Description of Artificial Sequence: Synthetic pecan; inner sequence and 3' sequence

SEQ ID NO: 22826 - DNA, 53 bp, Artificial Sequence
  Description of Artificial Sequence: Synthetic pecan; inner sequence and 3' sequence
ggcacaaacggtccgacaagtgcgcatggattgactagtacatgaccacttga

SEQ ID NO: 22827 - DNA, 53 bp, Artificial Sequence; identical to SEQ ID NO: 2636
  Description of Artificial Sequence: Synthetic pecan; inner sequence and 3' sequence

SEQ ID NO: 22828 - DNA, 53 bp, Artificial Sequence; identical to SEQ ID NO: 6967
  Description of Artificial Sequence: Synthetic pecan; inner sequence and 3' sequence

SEQ ID NO: 22829 - DNA, 53 bp, Artificial Sequence
  Description of Artificial Sequence: Synthetic pecan; inner sequence and 3' sequence
ggcatgcacgcacctacacgagggtatggattgactagtacatgaccacttga

SEQ ID NO: 22830 - DNA, 53 bp, Artificial Sequence; identical to SEQ ID NO: 10758
  Description of Artificial Sequence: Synthetic pecan; inner sequence and 3' sequence

SEQ ID NO: 22831 - DNA, 53 bp, Artificial Sequence
  Description of Artificial Sequence: Synthetic pecan; inner sequence and 3' sequence
ccatcgcgtcactatcatgtgtgttacgtattgactagtacatgaccacttga

SEQ ID NO: 22832 - DNA, 53 bp, Artificial Sequence; identical to SEQ ID NO: 2563
  Description of Artificial Sequence: Synthetic pecan; inner sequence and 3' sequence

SEQ ID NO: 22833 - DNA, 53 bp, Artificial Sequence; identical to SEQ ID NO: 6571
  Description of Artificial Sequence: Synthetic pecan; inner sequence and 3' sequence

SEQ ID NO: 22834 - DNA, 51 bp, Artificial Sequence; identical to SEQ ID NO: 14885
  Description of Artificial Sequence: Synthetic pecan; inner sequence and 3' sequence

SEQ ID NO: 22835 - DNA, 53 bp, Artificial Sequence; identical to SEQ ID NO: 2305
  Description of Artificial Sequence: Synthetic pecan; inner sequence and 3' sequence

SEQ ID NO: 22836 - DNA, 53 bp, Artificial Sequence
  Description of Artificial Sequence: Synthetic pecan; inner sequence and 3' sequence
ggccaccgcgtacctcaacgtggacgtgcattgactagtacatgaccacttga

SEQ ID NO: 22837 - DNA, 53 bp, Artificial Sequence; identical to SEQ ID NO: 18962
  Description of Artificial Sequence: Synthetic pecan; inner sequence and 3' sequence

SEQ ID NO: 22838 - DNA, 53 bp, Artificial Sequence; identical to SEQ ID NO: 14944
  Description of Artificial Sequence: Synthetic pecan; inner sequence and 3' sequence

SEQ ID NO: 22839 - DNA, 53 bp, Artificial Sequence; identical to SEQ ID NO: 14922
  Description of Artificial Sequence: Synthetic pecan; inner sequence and 3' sequence

SEQ ID NO: 22840 - DNA, 53 bp, Artificial Sequence; identical to SEQ ID NO: 2086
  Description of Artificial Sequence: Synthetic pecan; inner sequence and 3' sequence

SEQ ID NO: 22841 - DNA, 51 bp, Artificial Sequence
  Description of Artificial Sequence: Synthetic pecan; inner sequence and 3' sequence
gtgcgaccgacccgtaagtgtgcatgcgttgactagtacatgaccacttga

SEQ ID NO: 22842 - DNA, 53 bp, Artificial Sequence; identical to SEQ ID NO: 2793
  Description of Artificial Sequence: Synthetic pecan; inner sequence and 3' sequence

SEQ ID NO: 22843 - DNA, 53 bp, Artificial Sequence; identical to SEQ ID NO: 2155
  Description of Artificial Sequence: Synthetic pecan; inner sequence and 3' sequence

SEQ ID NO: 22844 - DNA, 53 bp, Artificial Sequence; identical to SEQ ID NO: 2458
  Description of Artificial Sequence: Synthetic pecan; inner sequence and 3' sequence

SEQ ID NO: 22845 - DNA, 53 bp, Artificial Sequence
  Description of Artificial Sequence: Synthetic pecan; inner sequence and 3' sequence
cgcaccgtcaagcgggaaggtactttggtgttgactagtacatgaccacttga

SEQ ID NO: 22846 - DNA, 53 bp, Artificial Sequence
  Description of Artificial Sequence: Synthetic pecan; inner sequence and 3' sequence
gtgcgagcagaccgacgcgagtggtacgtattgactagtacatgaccacttga

SEQ ID NO: 22847 - DNA, 53 bp, Artificial Sequence
  Description of Artificial Sequence: Synthetic pecan; inner sequence and 3' sequence
ggcatgcacgcaactacacgtgggcacgtattgactagtacatgaccacttga

SEQ ID NO: 22848 - DNA, 53 bp, Artificial Sequence
  Description of Artificial Sequence: Synthetic pecan; inner sequence and 3' sequence
ggcacaaacggcccgacaagtgcgcatggattgactagtacatgaccacttga

SEQ ID NO: 22849 - DNA, 53 bp, Artificial Sequence
  Description of Artificial Sequence: Synthetic pecan; inner sequence and 3' sequence
ggacgcagcggaacgttcgagtggtacgtgttgactagtacatgaccacttga

SEQ ID NO: 22850 - DNA, 53 bp, Artificial Sequence
  Description of Artificial Sequence: Synthetic pecan; inner sequence and 3' sequence
ccgcacttagccctatcagtggtgcatgcattgactagtacatgaccacttga

SEQ ID NO: 22851 - DNA, 53 bp, Artificial Sequence; identical to SEQ ID NO: 10968
  Description of Artificial Sequence: Synthetic pecan; inner sequence and 3' sequence

SEQ ID NO: 22852 - DNA, 53 bp, Artificial Sequence; identical to SEQ ID NO: 10564
  Description of Artificial Sequence: Synthetic pecan; inner sequence and 3' sequence

SEQ ID NO: 22853 - DNA, 53 bp, Artificial Sequence
  Description of Artificial Sequence: Synthetic pecan; inner sequence and 3' sequence
ccgtagcgacatcaagcggtggtgtacgtgttgactagtacatgaccacttga

SEQ ID NO: 22854 - DNA, 53 bp, Artificial Sequence
  Description of Artificial Sequence: Synthetic pecan; inner sequence and 3' sequence
ggcacaaacgcaccgacaagtgcgcatggattgactagtacatgaccacttga

SEQ ID NO: 22855 - DNA, 53 bp, Artificial Sequence
  Description of Artificial Sequence: Synthetic pecan; inner sequence and 3' sequence
ccgcatgtagccctatcagtggtgcatgcattgactagtacatgaccacttga

SEQ ID NO: 22856 - DNA, 53 bp, Artificial Sequence; identical to SEQ ID NO: 2361
  Description of Artificial Sequence: Synthetic pecan; inner sequence and 3' sequence

SEQ ID NO: 22857 - DNA, 53 bp, Artificial Sequence; identical to SEQ ID NO: 2532
  Description of Artificial Sequence: Synthetic pecan; inner sequence and 3' sequence

SEQ ID NO: 22858 - DNA, 53 bp, Artificial Sequence
  Description of Artificial Sequence: Synthetic pecan; inner sequence and 3' sequence
ggcacaaacggaccgacaagtgcgcatgtattgactagtacatgaccacttga

SEQ ID NO: 22859 - DNA, 53 bp, Artificial Sequence
  Description of Artificial Sequence: Synthetic pecan; inner sequence and 3' sequence
ggccaagctgaccgtaaatgcaggcgtgtattgactagtacatgaccacttga

SEQ ID NO: 22860 - DNA, 53 bp, Artificial Sequence; identical to SEQ ID NO: 18980
  Description of Artificial Sequence: Synthetic pecan; inner sequence and 3' sequence

SEQ ID NO: 22861 - DNA, 53 bp, Artificial Sequence; identical to SEQ ID NO: 2217
  Description of Artificial Sequence: Synthetic pecan; inner sequence and 3' sequence

SEQ ID NO: 22862 - DNA, 52 bp, Artificial Sequence
  Description of Artificial Sequence: Synthetic pecan; inner sequence and 3' sequence
gcacgccgatgccctcatgttgccgtggattgactagtacatgaccacttga

SEQ ID NO: 22863 - DNA, 53 bp, Artificial Sequence; identical to SEQ ID NO: 2134
  Description of Artificial Sequence: Synthetic pecan; inner sequence and 3' sequence

SEQ ID NO: 22864 - DNA, 53 bp, Artificial Sequence; identical to SEQ ID NO: 6489
  Description of Artificial Sequence: Synthetic pecan; inner sequence and 3' sequence

SEQ ID NO: 22865 - DNA, 53 bp, Artificial Sequence
  Description of Artificial Sequence: Synthetic pecan; inner sequence and 3' sequence
ccgtagcgacatcaagcgggggtgcgcgtgttgactagtacatgaccacttga

SEQ ID NO: 22866 - DNA, 53 bp, Artificial Sequence
  Description of Artificial Sequence: Synthetic pecan; inner sequence and 3' sequence
gcacgactcgcaccctatcatgaggccacgttgactagtacatgaccacttga

SEQ ID NO: 22867 - DNA, 53 bp, Artificial Sequence; identical to SEQ ID NO: 6707
  Description of Artificial Sequence: Synthetic pecan; inner sequence and 3' sequence

SEQ ID NO: 22868 - DNA, 54 bp, Artificial Sequence
  Description of Artificial Sequence: Synthetic pecan; inner sequence and 3' sequence
ggacgcagcggaacgatcgagtggttgcgtattgactagtacatgaccacttga

SEQ ID NO: 22869 - DNA, 53 bp, Artificial Sequence
  Description of Artificial Sequence: Synthetic pecan; inner sequence and 3' sequence
gcactgcacgcacctacacgtgggcacgtattgactagtacatgaccacttga

SEQ ID NO: 22870 - DNA, 54 bp, Artificial Sequence
  Description of Artificial Sequence: Synthetic pecan; inner sequence and 3' sequence
gcacgactcgcaccctatcaagtgcagcatgttgactagtacatgaccacttga

SEQ ID NO: 22871 - DNA, 53 bp, Artificial Sequence; identical to SEQ ID NO: 6735
  Description of Artificial Sequence: Synthetic pecan; inner sequence and 3' sequence

SEQ ID NO: 22872 - DNA, 53 bp, Artificial Sequence
  Description of Artificial Sequence: Synthetic pecan; inner sequence and 3' sequence
gcacgactcgcacccgatcatgaggccatgttgactagtacatgaccacttga

SEQ ID NO: 22873 - DNA, 53 bp, Artificial Sequence
  Description of Artificial Sequence: Synthetic pecan; inner sequence and 3' sequence
ggaatgcacgcacctacacgtgggtatggattgactagtacatgaccacttga

SEQ ID NO: 22874 - DNA, 53 bp, Artificial Sequence
  Description of Artificial Sequence: Synthetic pecan; inner sequence and 3' sequence
gcatcatacgacggaccgaccgacgtgggcttgactagtacatgaccacttga

SEQ ID NO: 22875 - DNA, 53 bp, Artificial Sequence; identical to SEQ ID NO: 2914
  Description of Artificial Sequence: Synthetic pecan; inner sequence and 3' sequence

SEQ ID NO: 22876 - DNA, 53 bp, Artificial Sequence; identical to SEQ ID NO: 2025
  Description of Artificial Sequence: Synthetic pecan; inner sequence and 3' sequence

SEQ ID NO: 22877 - DNA, 53 bp, Artificial Sequence; identical to SEQ ID NO: 2874
  Description of Artificial Sequence: Synthetic pecan; inner sequence and 3' sequence

SEQ ID NO: 22878 - DNA, 53 bp, Artificial Sequence
  Description of Artificial Sequence: Synthetic pecan; inner sequence and 3' sequence
ggacgcagcggaacgttcgcgtggtacgtattgactagtacatgaccacttga

SEQ ID NO: 22879 - DNA, 53 bp, Artificial Sequence
  Description of Artificial Sequence: Synthetic pecan; inner sequence and 3' sequence
gtcatgccatcccttcgtgtgtgacaggtattgactagtacatgaccacttga

SEQ ID NO: 22880 - DNA, 53 bp, Artificial Sequence
  Description of Artificial Sequence: Synthetic pecan; inner sequence and 3' sequence
ggcaacagcgtacctcaacgtggacgtgcattgactagtacatgaccacttga

SEQ ID NO: 22881 - DNA, 52 bp, Artificial Sequence
  Description of Artificial Sequence: Synthetic pecan; inner sequence and 3' sequence
gcacgccgatgccctcatgcggccgtggattgactagtacatgaccacttga

SEQ ID NO: 22882 - DNA, 53 bp, Artificial Sequence
  Description of Artificial Sequence: Synthetic pecan; inner sequence and 3' sequence
cgtacgtaccgcgcctacatgtggcatgcattgactagtacatgaccacttga

SEQ ID NO: 22883 - DNA, 53 bp, Artificial Sequence
  Description of Artificial Sequence: Synthetic pecan; inner sequence and 3' sequence
ggcatgcacgcacctacacgtgggtatgggttgactagtacatgaccacttga

SEQ ID NO: 22884 - DNA, 53 bp, Artificial Sequence
  Description of Artificial Sequence: Synthetic pecan; inner sequence and 3' sequence
gcattggacgatcgtgccctacacgtgtgcttgactagtacatgaccacttga

SEQ ID NO: 22885 - DNA, 53 bp, Artificial Sequence
  Description of Artificial Sequence: Synthetic pecan; inner sequence and 3' sequence
gcacgagtcgcaccctatcatgaggccatgttgactagtacatgaccacttga

SEQ ID NO: 22886 - DNA, 53 bp, Artificial Sequence; identical to SEQ ID NO: 14853
  Description of Artificial Sequence: Synthetic pecan; inner sequence and 3' sequence

SEQ ID NO: 22887 - DNA, 53 bp, Artificial Sequence; identical to SEQ ID NO: 10807
  Description of Artificial Sequence: Synthetic pecan; inner sequence and 3' sequence

SEQ ID NO: 22888 - DNA, 53 bp, Artificial Sequence; identical to SEQ ID NO: 6642
  Description of Artificial Sequence: Synthetic pecan; inner sequence and 3' sequence

SEQ ID NO: 22889 - DNA, 53 bp, Artificial Sequence
  Description of Artificial Sequence: Synthetic pecan; inner sequence and 3' sequence
gtcactgtgccttaccgtcaagttgcggcattgactagtacatgaccacttga

SEQ ID NO: 22890 - DNA, 52 bp, Artificial Sequence
  Description of Artificial Sequence: Synthetic pecan; inner sequence and 3' sequence
gtcatgccatcccttcgagtgtgacagtattgactagtacatgaccacttga

SEQ ID NO: 22891 - DNA, 53 bp, Artificial Sequence
  Description of Artificial Sequence: Synthetic pecan; inner sequence and 3' sequence
ccgcacgtagccctagcagtggtgcatgcattgactagtacatgaccacttga

SEQ ID NO: 22892 - DNA, 53 bp, Artificial Sequence; identical to SEQ ID NO: 18471
  Description of Artificial Sequence: Synthetic pecan; inner sequence and 3' sequence

SEQ ID NO: 22893 - DNA, 53 bp, Artificial Sequence; identical to SEQ ID NO: 18544
  Description of Artificial Sequence: Synthetic pecan; inner sequence and 3' sequence

SEQ ID NO: 22894 - DNA, 53 bp, Artificial Sequence
  Description of Artificial Sequence: Synthetic pecan; inner sequence and 3' sequence
gtcatgcacgaatactatcatggcggcatgttgactagtacatgaccacttga

SEQ ID NO: 22895 - DNA, 53 bp, Artificial Sequence
  Description of Artificial Sequence: Synthetic pecan; inner sequence and 3' sequence
gcacgacccgcaccctatcatgaggccatgttgactagtacatgaccacttga

SEQ ID NO: 22896 - DNA, 53 bp, Artificial Sequence
  Description of Artificial Sequence: Synthetic pecan; inner sequence and 3' sequence
ccgcacgtagccctatcagtggtgcatgaattgactagtacatgaccacttga

SEQ ID NO: 22897 - DNA, 53 bp, Artificial Sequence
  Description of Artificial Sequence: Synthetic pecan; inner sequence and 3' sequence
gtcatgcacgaacactatcctggcggcatgttgactagtacatgaccacttga

SEQ ID NO: 22898 - DNA, 53 bp, Artificial Sequence; identical to SEQ ID NO: 6394
  Description of Artificial Sequence: Synthetic pecan; inner sequence and 3' sequence

SEQ ID NO: 22899 - DNA, 53 bp, Artificial Sequence
  Description of Artificial Sequence: Synthetic pecan; inner sequence and 3' sequence
ggcatgaacgcacctacacgtgggcacgtattgactagtacatgaccacttga

SEQ ID NO: 22900 - DNA, 53 bp, Artificial Sequence
  Description of Artificial Sequence: Synthetic pecan; inner sequence and 3' sequence
ggacgcagtttgcctactggtggtcacgtattgactagtacatgaccacttga

SEQ ID NO: 22901 - DNA, 53 bp, Artificial Sequence; identical to SEQ ID NO: 6804
  Description of Artificial Sequence: Synthetic pecan; inner sequence and 3' sequence

SEQ ID NO: 22902 - DNA, 53 bp, Artificial Sequence
  Description of Artificial Sequence: Synthetic pecan; inner sequence and 3' sequence
cgcaccgtcaagagggaaggcactttggtgttgactagtacatgaccacttga

SEQ ID NO: 22903 - DNA, 53 bp, Artificial Sequence
  Description of Artificial Sequence: Synthetic pecan; inner sequence and 3' sequence
ggccacagcgtacctcaacgtggacttgcattgactagtacatgaccacttga

SEQ ID NO: 22904 - DNA, 53 bp, Artificial Sequence; identical to SEQ ID NO: 6775
  Description of Artificial Sequence: Synthetic pecan; inner sequence and 3' sequence

SEQ ID NO: 22905 - DNA, 53 bp, Artificial Sequence
  Description of Artificial Sequence: Synthetic pecan; inner sequence and 3' sequence
ccgatcgcacgtcaaggcaggctgtacgatttgactagtacatgaccacttga

SEQ ID NO: 22906 - DNA, 53 bp, Artificial Sequence
  Description of Artificial Sequence: Synthetic pecan; inner sequence and 3' sequence
ggcacaaacggaccggcaagtgcgcatggattgactagtacatgaccacttga

SEQ ID NO: 22907 - DNA, 48 bp, Artificial Sequence
  Description of Artificial Sequence: Synthetic pecan; inner sequence and 3' sequence
ggcatgcacgcacctacacgtggacttgactagtacatgaccacttga

SEQ ID NO: 22908 - DNA, 53 bp, Artificial Sequence
  Description of Artificial Sequence: Synthetic pecan; inner sequence and 3' sequence
ggcacaaacggaccgacaagtgctcatggattgactagtacatgaccacttga

SEQ ID NO: 22909 - DNA, 53 bp, Artificial Sequence; identical to SEQ ID NO: 10971
  Description of Artificial Sequence: Synthetic pecan; inner sequence and 3' sequence

SEQ ID NO: 22910 - DNA, 52 bp, Artificial Sequence
  Description of Artificial Sequence: Synthetic pecan; inner sequence and 3' sequence
gcacgccgatgccctcatgtggccgcggattgactagtacatgaccacttga

SEQ ID NO: 22911 - DNA, 53 bp, Artificial Sequence
  Description of Artificial Sequence: Synthetic pecan; inner sequence and 3' sequence
ggacgcagctcgcctactggtggtcacgtattgactagtacatgaccacttga

SEQ ID NO: 22912 - DNA, 53 bp, Artificial Sequence
  Description of Artificial Sequence: Synthetic pecan; inner sequence and 3' sequence
ccgtagcaacatcaagcggtggtgtgcgtgttgactagtacatgaccacttga

SEQ ID NO: 22913 - DNA, 53 bp, Artificial Sequence
  Description of Artificial Sequence: Synthetic pecan; inner sequence and 3' sequence
ggccacagcgtacctcaacgtggatgtgcattgactagtacatgaccacttga

SEQ ID NO: 22914 - DNA, 53 bp, Artificial Sequence
  Description of Artificial Sequence: Synthetic pecan; inner sequence and 3' sequence
cgcaccgtcgatgcgtcatgcacgctgacattgactagtacatgaccacttga

SEQ ID NO: 22915 - DNA, 53 bp, Artificial Sequence
  Description of Artificial Sequence: Synthetic pecan; inner sequence and 3' sequence
cgcacccgatgtggacgatgtgccttggccttgactagtacatgaccacttga

SEQ ID NO: 22916 - DNA, 53 bp, Artificial Sequence; identical to SEQ ID NO: 2370
  Description of Artificial Sequence: Synthetic pecan; inner sequence and 3' sequence

SEQ ID NO: 22917 - DNA, 53 bp, Artificial Sequence
  Description of Artificial Sequence: Synthetic pecan; inner sequence and 3' sequence
gcgtgacgatgcgtgccgtcctgcgtgacgttgactagtacatgaccacttga

SEQ ID NO: 22918 - DNA, 53 bp, Artificial Sequence
  Description of Artificial Sequence: Synthetic pecan; inner sequence and 3' sequence
ccgtagggacatcaagcggtggtgtgcgtgttgactagtacatgaccacttga

SEQ ID NO: 22919 - DNA, 53 bp, Artificial Sequence
  Description of Artificial Sequence: Synthetic pecan; inner sequence and 3' sequence
gtcatgtacgaacactatcatggcggcatgttgactagtacatgaccacttga

SEQ ID NO: 22920 - DNA, 53 bp, Artificial Sequence; identical to SEQ ID NO: 2932
  Description of Artificial Sequence: Synthetic pecan; inner sequence and 3' sequence

SEQ ID NO: 22921 - DNA, 53 bp, Artificial Sequence; identical to SEQ ID NO: 2574
  Description of Artificial Sequence: Synthetic pecan; inner sequence and 3' sequence

SEQ ID NO: 22922 - DNA, 53 bp, Artificial Sequence
  Description of Artificial Sequence: Synthetic pecan; inner sequence and 3' sequence
gtcgtgactggccagctggacatgcactgcttgactagtacatgaccacttga

SEQ ID NO: 22923 - DNA, 53 bp, Artificial Sequence
  Description of Artificial Sequence: Synthetic pecan; inner sequence and 3' sequence
ggccacagcgaacctcaacgtggacgtgcattgactagtacatgaccacttga

SEQ ID NO: 22924 - DNA, 53 bp, Artificial Sequence; identical to SEQ ID NO: 2380
  Description of Artificial Sequence: Synthetic pecan; inner sequence and 3' sequence

SEQ ID NO: 22925 - DNA, 53 bp, Artificial Sequence; identical to SEQ ID NO: 6679
  Description of Artificial Sequence: Synthetic pecan; inner sequence and 3' sequence

SEQ ID NO: 22926 - DNA, 53 bp, Artificial Sequence
  Description of Artificial Sequence: Synthetic pecan; inner sequence and 3' sequence
ggcatgcacgcatctacacgtgggtatggattgactagtacatgaccacttga

SEQ ID NO: 22927 - DNA, 53 bp, Artificial Sequence
  Description of Artificial Sequence: Synthetic pecan; inner sequence and 3' sequence
ggcaccaacggaccgacaagtgcgcatggattgactagtacatgaccacttga

SEQ ID NO: 22928 - DNA, 53 bp, Artificial Sequence; identical to SEQ ID NO: 2275
  Description of Artificial Sequence: Synthetic pecan; inner sequence and 3' sequence

SEQ ID NO: 22929 - DNA, 53 bp, Artificial Sequence
  Description of Artificial Sequence: Synthetic pecan; inner sequence and 3' sequence
ggcatgcacgcacctacacgcgggcacgtattgactagtacatgaccacttga

SEQ ID NO: 22930 - DNA, 52 bp, Artificial Sequence
  Description of Artificial Sequence: Synthetic pecan; inner sequence and 3' sequence
gcactccgatgccctcatgtggccgtggattgactagtacatgaccacttga

SEQ ID NO: 22931 - DNA, 53 bp, Artificial Sequence
  Description of Artificial Sequence: Synthetic pecan; inner sequence and 3' sequence
gcacgactcggaccctatcatgaggccatgttgactagtacatgaccacttga

SEQ ID NO: 22932 - DNA, 53 bp, Artificial Sequence
  Description of Artificial Sequence: Synthetic pecan; inner sequence and 3' sequence
ggaacaaacggaccgacaagtgcgcatggattgactagtacatgaccacttga

SEQ ID NO: 22933 - DNA, 53 bp, Artificial Sequence; identical to SEQ ID NO: 18876
  Description of Artificial Sequence: Synthetic pecan; inner sequence and 3' sequence

SEQ ID NO: 22934 - DNA, 53 bp, Artificial Sequence
  Description of Artificial Sequence: Synthetic pecan; inner sequence and 3' sequence
ggcatgcacgcacctacacgcgggcatggattgactagtacatgaccacttga

SEQ ID NO: 22935 - DNA, 53 bp, Artificial Sequence; identical to SEQ ID NO: 2529
  Description of Artificial Sequence: Synthetic pecan; inner sequence and 3' sequence

SEQ ID NO: 22936 - DNA, 53 bp, Artificial Sequence
  Description of Artificial Sequence: Synthetic pecan; inner sequence and 3' sequence
ggacgcagcggaacgttcgattggtacgtattgactagtacatgaccacttga

SEQ ID NO: 22937 - DNA, 53 bp, Artificial Sequence
  Description of Artificial Sequence: Synthetic pecan; inner sequence and 3' sequence
ccgcacgtagccctatcagtggtgaatgcattgactagtacatgaccacttga

SEQ ID NO: 22938 - DNA, 53 bp, Artificial Sequence; identical to SEQ ID NO: 2373
  Description of Artificial Sequence: Synthetic pecan; inner sequence and 3' sequence

SEQ ID NO: 22939 - DNA, 53 bp, Artificial Sequence
  Description of Artificial Sequence: Synthetic pecan; inner sequence and 3' sequence
ggacgcagctgaacgttcgagtggtacgtattgactagtacatgaccacttga

SEQ ID NO: 22940 - DNA, 53 bp, Artificial Sequence; identical to SEQ ID NO: 2438
  Description of Artificial Sequence: Synthetic pecan; inner sequence and 3' sequence

SEQ ID NO: 22941 - DNA, 53 bp, Artificial Sequence
  Description of Artificial Sequence: Synthetic pecan; inner sequence and 3' sequence
ccgcacgtagccctatcagtggtgcgtgcattgactagtacatgaccacttga

SEQ ID NO: 22942 - DNA, 49 bp, Artificial Sequence
  Description of Artificial Sequence: Synthetic pecan; inner sequence and 3' sequence
cgcaccgtcaaggcaggctgtacgagttgactagtacatgaccacttga

SEQ ID NO: 22943 - DNA, 53 bp, Artificial Sequence; identical to SEQ ID NO: 2556
  Description of Artificial Sequence: Synthetic pecan; inner sequence and 3' sequence

SEQ ID NO: 22944 - DNA, 53 bp, Artificial Sequence
  Description of Artificial Sequence: Synthetic pecan; inner sequence and 3' sequence
gtacgcatcgtcccgtcatgtgggtccgtattgactagtacatgaccacttga

SEQ ID NO: 22945 - DNA, 53 bp, Artificial Sequence
  Description of Artificial Sequence: Synthetic pecan; inner sequence and 3' sequence
ccgcacgaagccctatcagtggtgcatgcattgactagtacatgaccacttga

SEQ ID NO: 22946 - DNA, 53 bp, Artificial Sequence
  Description of Artificial Sequence: Synthetic pecan; inner sequence and 3' sequence
gtcatgcgcgaacactatcatggcggcatgttgactagtacatgaccacttga

SEQ ID NO: 22947 - DNA, 53 bp, Artificial Sequence
  Description of Artificial Sequence: Synthetic pecan; inner sequence and 3' sequence
ccgtagcgacatcaagcggaggagtgcgtgttgactagtacatgaccacttga

SEQ ID NO: 22948 - DNA, 53 bp, Artificial Sequence
  Description of Artificial Sequence: Synthetic pecan; inner sequence and 3' sequence
ggacgcagcggaacggtcgagtggtacgtattgactagtacatgaccacttga

SEQ ID NO: 22949 - DNA, 53 bp, Artificial Sequence
  Description of Artificial Sequence: Synthetic pecan; inner sequence and 3' sequence
ccgtagcgacatcaagcggcggtgtgcgcgttgactagtacatgaccacttga

SEQ ID NO: 22950 - DNA, 53 bp, Artificial Sequence
  Description of Artificial Sequence: Synthetic pecan; inner sequence and 3' sequence
ggcacaaccggaccgacaagtgcgcatggattgactagtacatgaccacttga

SEQ ID NO: 22951 - DNA, 52 bp, Artificial Sequence
  Description of Artificial Sequence: Synthetic pecan; inner sequence and 3' sequence
gtcatgccatccctcgagtgtgacaggtattgactagtacatgaccacttga

SEQ ID NO: 22952 - DNA, 53 bp, Artificial Sequence
  Description of Artificial Sequence: Synthetic pecan; inner sequence and 3' sequence
ccatcgcttcactatcatgtgtgtcacgtattgactagtacatgaccacttga

SEQ ID NO: 22953 - DNA, 53 bp, Artificial Sequence; identical to SEQ ID NO: 6238
  Description of Artificial Sequence: Synthetic pecan; inner sequence and 3' sequence

SEQ ID NO: 22954 - DNA, 53 bp, Artificial Sequence
  Description of Artificial Sequence: Synthetic pecan; inner sequence and 3' sequence
cgcaccgtcgaaacgtcatgcacgctgacattgactagtacatgaccacttga

SEQ ID NO: 22955 - DNA, 52 bp, Artificial Sequence
  Description of Artificial Sequence: Synthetic pecan; inner sequence and 3' sequence
gcacgccgatgccctcatgtgtccgtggattgactagtacatgaccacttga

SEQ ID NO: 22956 - DNA, 53 bp, Artificial Sequence; identical to SEQ ID NO: 18810
  Description of Artificial Sequence: Synthetic pecan; inner sequence and 3' sequence

SEQ ID NO: 22957 - DNA, 53 bp, Artificial Sequence
  Description of Artificial Sequence: Synthetic pecan; inner sequence and 3' sequence
ggacgcagcggaacgatcgagtggtacgtattgactagtacatgaccacttga

SEQ ID NO: 22958 - DNA, 53 bp, Artificial Sequence; identical to SEQ ID NO: 2395
  Description of Artificial Sequence: Synthetic pecan; inner sequence and 3' sequence

SEQ ID NO: 22959 - DNA, 53 bp, Artificial Sequence
  Description of Artificial Sequence: Synthetic pecan; inner sequence and 3' sequence
ccatcgcgtcactatcatatgtgtcacgtattgactagtacatgaccacttga

SEQ ID NO: 22960 - DNA, 53 bp, Artificial Sequence
  Description of Artificial Sequence: Synthetic pecan; inner sequence and 3' sequence
gtcattccgcatcctacacgtgggcatgtattgactagtacatgaccacttga

SEQ ID NO: 22961 - DNA, 53 bp, Artificial Sequence
  Description of Artificial Sequence: Synthetic pecan; inner sequence and 3' sequence
ggccacagcgtacctcaaggtggacgtgcattgactagtacatgaccacttga

SEQ ID NO: 22962 - DNA, 53 bp, Artificial Sequence
  Description of Artificial Sequence: Synthetic pecan; inner sequence and 3' sequence
gcacgactcgctccctatcatgaggccatgttgactagtacatgaccacttga

SEQ ID NO: 22963 - DNA, 53 bp, Artificial Sequence; identical to SEQ ID NO: 14869
  Description of Artificial Sequence: Synthetic pecan; inner sequence and 3' sequence

SEQ ID NO: 22964 - DNA, 53 bp, Artificial Sequence
  Description of Artificial Sequence: Synthetic pecan; inner sequence and 3' sequence
ggccacagcgtacctcaacgtgggcgtgcattgactagtacatgaccacttga

SEQ ID NO: 22965 - DNA, 53 bp, Artificial Sequence
  Description of Artificial Sequence: Synthetic pecan; inner sequence and 3' sequence
gcacgactcgcaccctatcatgaggccctgttgactagtacatgaccacttga

SEQ ID NO: 22966 - DNA, 53 bp, Artificial Sequence
  Description of Artificial Sequence: Synthetic pecan; inner sequence and 3' sequence
gtgctgaacgtactgccaggtgagcatgcattgactagtacatgaccacttga

SEQ ID NO: 22967 - DNA, 53 bp, Artificial Sequence
  Description of Artificial Sequence: Synthetic pecan; inner sequence and 3' sequence
gcacgactcgcaccctatcatgaggccattttgactagtacatgaccacttga

SEQ ID NO: 22968 - DNA, 53 bp, Artificial Sequence
  Description of Artificial Sequence: Synthetic pecan; inner sequence and 3' sequence
gcacgactcgcaccctatcatgaggcaatgttgactagtacatgaccacttga

SEQ ID NO: 22969 - DNA, 52 bp, Artificial Sequence
  Description of Artificial Sequence: Synthetic pecan; inner sequence and 3' sequence
gcacgccgatgtcctcatgtggccgtggattgactagtacatgaccacttga

SEQ ID NO: 22970 - DNA, 53 bp, Artificial Sequence
  Description of Artificial Sequence: Synthetic pecan; inner sequence and 3' sequence
gtcatgccatcccttcgagtgtggcaggtattgactagtacatgaccacttga

SEQ ID NO: 22971 - DNA, 53 bp, Artificial Sequence
  Description of Artificial Sequence: Synthetic pecan; inner sequence and 3' sequence
cgcaccgtcaagcgggaacgcactttggtgttgactagtacatgaccacttga

SEQ ID NO: 22972 - DNA, 53 bp, Artificial Sequence
  Description of Artificial Sequence: Synthetic pecan; inner sequence and 3' sequence
ggccacagcgtacctccacgtggacgtgcattgactagtacatgaccacttga

SEQ ID NO: 22973 - DNA, 53 bp, Artificial Sequence; identical to SEQ ID NO: 6576
  Description of Artificial Sequence: Synthetic pecan; inner sequence and 3' sequence

SEQ ID NO: 22974 - DNA, 53 bp, Artificial Sequence
  Description of Artificial Sequence: Synthetic pecan; inner sequence and 3' sequence
gcacgactcgcaccgtatcatgaggccatgttgactagtacatgaccacttga

SEQ ID NO: 22975 - DNA, 53 bp, Artificial Sequence; identical to SEQ ID NO: 6351
  Description of Artificial Sequence: Synthetic pecan; inner sequence and 3' sequence

SEQ ID NO: 22976 - DNA, 53 bp, Artificial Sequence
  Description of Artificial Sequence: Synthetic pecan; inner sequence and 3' sequence
ggcctgcacgcacctacacgtgggcacgtattgactagtacatgaccacttga

SEQ ID NO: 22977 - DNA, 53 bp, Artificial Sequence; identical to SEQ ID NO: 2677
  Description of Artificial Sequence: Synthetic pecan; inner sequence and 3' sequence

SEQ ID NO: 22978 - DNA, 53 bp, Artificial Sequence
  Description of Artificial Sequence: Synthetic pecan; inner sequence and 3' sequence
ggcatgcacgcacctaaacgtgggtatggattgactagtacatgaccacttga

SEQ ID NO: 22979 - DNA, 53 bp, Artificial Sequence
  Description of Artificial Sequence: Synthetic pecan; inner sequence and 3' sequence
ccatcgcgtcactatcatgtgtggcacgtattgactagtacatgaccacttga

SEQ ID NO: 22980 - DNA, 53 bp, Artificial Sequence; identical to SEQ ID NO: 6834
  Description of Artificial Sequence: Synthetic pecan; inner sequence and 3' sequence

SEQ ID NO: 22981 - DNA, 53 bp, Artificial Sequence
  Description of Artificial Sequence: Synthetic pecan; inner sequence and 3' sequence
ggacacagcttgcctactggtggtcacgtattgactagtacatgaccacttga

SEQ ID NO: 22982 - DNA, 53 bp, Artificial Sequence
  Description of Artificial Sequence: Synthetic pecan; inner sequence and 3' sequence
tgccacagcgtacctcaacgtggacgtgcattgactagtacatgaccacttga

SEQ ID NO: 22983 - DNA, 53 bp, Artificial Sequence
  Description of Artificial Sequence: Synthetic pecan; inner sequence and 3' sequence
gtcactgtgcctgactgtcaagttgcggcattgactagtacatgaccacttga

SEQ ID NO: 22984 - DNA, 53 bp, Artificial Sequence
  Description of Artificial Sequence: Synthetic pecan; inner sequence and 3' sequence
gtcactgtgcctgaccgtcaagttgcgacattgactagtacatgaccacttga

SEQ ID NO: 22985 - DNA, 53 bp, Artificial Sequence
  Description of Artificial Sequence: Synthetic pecan; inner sequence and 3' sequence
ggcctgcgcgtaccgtcaagtgcgaatggattgactagtacatgaccacttga

SEQ ID NO: 22986 - DNA, 53 bp, Artificial Sequence
  Description of Artificial Sequence: Synthetic pecan; inner sequence and 3' sequence
gtcatgcacgaacactatcatagcggcatgttgactagtacatgaccacttga

SEQ ID NO: 22987 - DNA, 53 bp, Artificial Sequence; identical to SEQ ID NO: 14775
  Description of Artificial Sequence: Synthetic pecan; inner sequence and 3' sequence

SEQ ID NO: 22988 - DNA, 53 bp, Artificial Sequence
  Description of Artificial Sequence: Synthetic pecan; inner sequence and 3' sequence
ccatcgcgccactatcatgtgtgtcacgtattgactagtacatgaccacttga

SEQ ID NO: 22989 - DNA, 53 bp, Artificial Sequence
  Description of Artificial Sequence: Synthetic pecan; inner sequence and 3' sequence
cgcaccgtcaagctggaaggcactttggtgttgactagtacatgaccacttga

SEQ ID NO: 22990 - DNA, 53 bp, Artificial Sequence
  Description of Artificial Sequence: Synthetic pecan; inner sequence and 3' sequence
gtcatgcatgaacactatcatggcggcatgttgactagtacatgaccacttga

SEQ ID NO: 22991 - DNA, 53 bp, Artificial Sequence
  Description of Artificial Sequence: Synthetic pecan; inner sequence and 3' sequence
gcacgactcgcacgctatcatgaggccatgttgactagtacatgaccacttga

SEQ ID NO: 22992 - DNA, 50 bp, Artificial Sequence
  Description of Artificial Sequence: Synthetic pecan; inner sequence and 3' sequence
ggacgcagcttgcctactggtggtacattgactagtacatgaccacttga

SEQ ID NO: 22993 - DNA, 53 bp, Artificial Sequence
  Description of Artificial Sequence: Synthetic pecan; inner sequence and 3' sequence
ggacgcagcttgcctactggtggtcacttattgactagtacatgaccacttga

SEQ ID NO: 22994 - DNA, 53 bp, Artificial Sequence
  Description of Artificial Sequence: Synthetic pecan; inner sequence and 3' sequence
gtcatgccatcacttcgagtgtgacaggtattgactagtacatgaccacttga

SEQ ID NO: 22995 - DNA, 53 bp, Artificial Sequence
  Description of Artificial Sequence: Synthetic pecan; inner sequence and 3' sequence
ggacgcagcggaacgttccagtggtacgtattgactagtacatgaccacttga

SEQ ID NO: 22996 - DNA, 53 bp, Artificial Sequence; identical to SEQ ID NO: 14821
  Description of Artificial Sequence: Synthetic pecan; inner sequence and 3' sequence

SEQ ID NO: 22997 - DNA, 53 bp, Artificial Sequence; identical to SEQ ID NO: 6376
  Description of Artificial Sequence: Synthetic pecan; inner sequence and 3' sequence

SEQ ID NO: 22998 - DNA, 53 bp, Artificial Sequence
  Description of Artificial Sequence: Synthetic pecan; inner sequence and 3' sequence
gtcattccgcatcctacaggtgggcacgtattgactagtacatgaccacttga

SEQ ID NO: 22999 - DNA, 53 bp, Artificial Sequence; identical to SEQ ID NO: 2152
  Description of Artificial Sequence: Synthetic pecan; inner sequence and 3' sequence

SEQ ID NO: 23000 - DNA, 53 bp, Artificial Sequence
  Description of Artificial Sequence: Synthetic pecan; inner sequence and 3' sequence
ggtatgcacgcacctacacgtgggtatggattgactagtacatgaccacttga

SEQ ID NO: 23001 - DNA, 53 bp, Artificial Sequence
  Description of Artificial Sequence: Synthetic pecan; inner sequence and 3' sequence
gtcatgccatcccttcgagtttgacaggtattgactagtacatgaccacttga

SEQ ID NO: 23002 - DNA, 54 bp, Artificial Sequence
  Description of Artificial Sequence: Synthetic pecan; inner sequence and 3' sequence
ccgatcgcacgtcaaggcaggctgtacgtgtttgactagtacatgaccacttga

SEQ ID NO: 23003 - DNA, 76 bp, Artificial Sequence; identical to SEQ ID NO: 3004
  Description of Artificial Sequence: Synthetic pecan; 5' sequence + inner sequence + 3' sequence

SEQ ID NO: 23004 - DNA, 76 bp, Artificial Sequence; identical to SEQ ID NO: 3003
  Description of Artificial Sequence: Synthetic pecan; 5' sequence + inner sequence + 3' sequence

SEQ ID NO: 23005 - DNA, 76 bp, Artificial Sequence; identical to SEQ ID NO: 3007
  Description of Artificial Sequence: Synthetic pecan; 5' sequence + inner sequence + 3' sequence

SEQ ID NO: 23006 - DNA, 76 bp, Artificial Sequence; identical to SEQ ID NO: 3008
  Description of Artificial Sequence: Synthetic pecan; 5' sequence + inner sequence + 3' sequence

SEQ ID NO: 23007 - DNA, 76 bp, Artificial Sequence; identical to SEQ ID NO: 3014
  Description of Artificial Sequence: Synthetic pecan; 5' sequence + inner sequence + 3' sequence

SEQ ID NO: 23008 - DNA, 76 bp, Artificial Sequence; identical to SEQ ID NO: 3005
  Description of Artificial Sequence: Synthetic pecan; 5' sequence + inner sequence + 3' sequence

SEQ ID NO: 23009 - DNA, 76 bp, Artificial Sequence; identical to SEQ ID NO: 3023
  Description of Artificial Sequence: Synthetic pecan; 5' sequence + inner sequence + 3' sequence

SEQ ID NO: 23010 - DNA, 76 bp, Artificial Sequence; identical to SEQ ID NO: 3012
  Description of Artificial Sequence: Synthetic pecan; 5' sequence + inner sequence + 3' sequence

SEQ ID NO: 23011 - DNA, 76 bp, Artificial Sequence; identical to SEQ ID NO: 3011
  Description of Artificial Sequence: Synthetic pecan; 5' sequence + inner sequence + 3' sequence

SEQ ID NO: 23012 - DNA, 76 bp, Artificial Sequence; identical to SEQ ID NO: 3020
  Description of Artificial Sequence: Synthetic pecan; 5' sequence + inner sequence + 3' sequence

SEQ ID NO: 23013 - DNA, 76 bp, Artificial Sequence; identical to SEQ ID NO: 3006
  Description of Artificial Sequence: Synthetic pecan; 5' sequence + inner sequence + 3' sequence

SEQ ID NO: 23014 - DNA, 76 bp, Artificial Sequence; identical to SEQ ID NO: 3009
  Description of Artificial Sequence: Synthetic pecan; 5' sequence + inner sequence + 3' sequence

SEQ ID NO: 23015 - DNA, 76 bp, Artificial Sequence; identical to SEQ ID NO: 3046
  Description of Artificial Sequence: Synthetic pecan; 5' sequence + inner sequence + 3' sequence

SEQ ID NO: 23016 - DNA, 76 bp, Artificial Sequence; identical to SEQ ID NO: 3013
  Description of Artificial Sequence: Synthetic pecan; 5' sequence + inner sequence + 3' sequence

SEQ ID NO: 23017 - DNA, 76 bp, Artificial Sequence; identical to SEQ ID NO: 3010
  Description of Artificial Sequence: Synthetic pecan; 5' sequence + inner sequence + 3' sequence

SEQ ID NO: 23018 - DNA, 76 bp, Artificial Sequence; identical to SEQ ID NO: 3041
  Description of Artificial Sequence: Synthetic pecan; 5' sequence + inner sequence + 3' sequence

SEQ ID NO: 23019 - DNA, 76 bp, Artificial Sequence; identical to SEQ ID NO: 3030
  Description of Artificial Sequence: Synthetic pecan; 5' sequence + inner sequence + 3' sequence

SEQ ID NO: 23020 - DNA, 76 bp, Artificial Sequence; identical to SEQ ID NO: 3021
  Description of Artificial Sequence: Synthetic pecan; 5' sequence + inner sequence + 3' sequence

SEQ ID NO: 23021 - DNA, 76 bp, Artificial Sequence; identical to SEQ ID NO: 3015
  Description of Artificial Sequence: Synthetic pecan; 5' sequence + inner sequence + 3' sequence

SEQ ID NO: 23022 - DNA, 75 bp, Artificial Sequence; identical to SEQ ID NO: 3070
  Description of Artificial Sequence: Synthetic pecan; 5' sequence + inner sequence + 3' sequence

SEQ ID NO: 23023 - DNA, 76 bp, Artificial Sequence; identical to SEQ ID NO: 3028
  Description of Artificial Sequence: Synthetic pecan; 5' sequence + inner sequence + 3' sequence

SEQ ID NO: 23024 - DNA, 76 bp, Artificial Sequence; identical to SEQ ID NO: 3037
  Description of Artificial Sequence: Synthetic pecan; 5' sequence + inner sequence + 3' sequence

SEQ ID NO: 23025 - DNA, 76 bp, Artificial Sequence; identical to SEQ ID NO: 3018
  Description of Artificial Sequence: Synthetic pecan; 5' sequence + inner sequence + 3' sequence

SEQ ID NO: 23026 - DNA, 76 bp, Artificial Sequence; identical to SEQ ID NO: 3045
  Description of Artificial Sequence: Synthetic pecan; 5' sequence + inner sequence + 3' sequence

SEQ ID NO: 23027 - DNA, 76 bp, Artificial Sequence; identical to SEQ ID NO: 3033
  Description of Artificial Sequence: Synthetic pecan; 5' sequence + inner sequence + 3' sequence

SEQ ID NO: 23028 - DNA, 76 bp, Artificial Sequence; identical to SEQ ID NO: 3052
  Description of Artificial Sequence: Synthetic pecan; 5' sequence + inner sequence + 3' sequence

SEQ ID NO: 23029 - DNA, 76 bp, Artificial Sequence; identical to SEQ ID NO: 3049
  Description of Artificial Sequence: Synthetic pecan; 5' sequence + inner sequence + 3' sequence

SEQ ID NO: 23030 - DNA, 76 bp, Artificial Sequence; identical to SEQ ID NO: 3054
  Description of Artificial Sequence: Synthetic pecan; 5' sequence + inner sequence + 3' sequence

SEQ ID NO: 23031 - DNA, 76 bp, Artificial Sequence; identical to SEQ ID NO: 3017
  Description of Artificial Sequence: Synthetic pecan; 5' sequence + inner sequence + 3' sequence

SEQ ID NO: 23032 - DNA, 76 bp, Artificial Sequence; identical to SEQ ID NO: 3077
  Description of Artificial Sequence: Synthetic pecan; 5' sequence + inner sequence + 3' sequence

SEQ ID NO: 23033 - DNA, 76 bp, Artificial Sequence; identical to SEQ ID NO: 3078
  Description of Artificial Sequence: Synthetic pecan; 5' sequence + inner sequence + 3' sequence

SEQ ID NO: 23034 - DNA, 76 bp, Artificial Sequence; identical to SEQ ID NO: 3022
  Description of Artificial Sequence: Synthetic pecan; 5' sequence + inner sequence + 3' sequence

SEQ ID NO: 23035 - DNA, 76 bp, Artificial Sequence; identical to SEQ ID NO: 3081
  Description of Artificial Sequence: Synthetic pecan; 5' sequence + inner sequence + 3' sequence

SEQ ID NO: 23036 - DNA, 76 bp, Artificial Sequence; identical to SEQ ID NO: 3035
  Description of Artificial Sequence: Synthetic pecan; 5' sequence + inner sequence + 3' sequence

SEQ ID NO: 23037 - DNA, 76 bp, Artificial Sequence; identical to SEQ ID NO: 3073
  Description of Artificial Sequence: Synthetic pecan; 5' sequence + inner sequence + 3' sequence

SEQ ID NO: 23038 - DNA, 76 bp, Artificial Sequence; identical to SEQ ID NO: 3059
  Description of Artificial Sequence: Synthetic pecan; 5' sequence + inner sequence + 3' sequence

SEQ ID NO: 23039 - DNA, 76 bp, Artificial Sequence; identical to SEQ ID NO: 3201
  Description of Artificial Sequence: Synthetic pecan; 5' sequence + inner sequence + 3' sequence

SEQ ID NO: 23040 - DNA, 76 bp, Artificial Sequence; identical to SEQ ID NO: 3040
  Description of Artificial Sequence: Synthetic pecan; 5' sequence + inner sequence + 3' sequence

SEQ ID NO: 23041 - DNA, 76 bp, Artificial Sequence; identical to SEQ ID NO: 3220
  Description of Artificial Sequence: Synthetic pecan; 5' sequence + inner sequence + 3' sequence

SEQ ID NO: 23042 - DNA, 76 bp, Artificial Sequence; identical to SEQ ID NO: 3161
  Description of Artificial Sequence: Synthetic pecan; 5' sequence + inner sequence + 3' sequence

SEQ ID NO: 23043 - DNA, 76 bp, Artificial Sequence; identical to SEQ ID NO: 3067
  Description of Artificial Sequence: Synthetic pecan; 5' sequence + inner sequence + 3' sequence

SEQ ID NO: 23044 - DNA, 76 bp, Artificial Sequence; identical to SEQ ID NO: 3074
  Description of Artificial Sequence: Synthetic pecan; 5' sequence + inner sequence + 3' sequence

SEQ ID NO: 23045 - DNA, 76 bp, Artificial Sequence; identical to SEQ ID NO: 3100
  Description of Artificial Sequence: Synthetic pecan; 5' sequence + inner sequence + 3' sequence

SEQ ID NO: 23046 - DNA, 76 bp, Artificial Sequence; identical to SEQ ID NO: 3247
  Description of Artificial Sequence: Synthetic pecan; 5' sequence + inner sequence + 3' sequence

SEQ ID NO: 23047 - DNA, 76 bp, Artificial Sequence; identical to SEQ ID NO: 3071
  Description of Artificial Sequence: Synthetic pecan; 5' sequence + inner sequence + 3' sequence

SEQ ID NO: 23048 - DNA, 76 bp, Artificial Sequence; identical to SEQ ID NO: 3031
  Description of Artificial Sequence: Synthetic pecan; 5' sequence + inner sequence + 3' sequence

SEQ ID NO: 23049 - DNA, 76 bp, Artificial Sequence; identical to SEQ ID NO: 3051
  Description of Artificial Sequence: Synthetic pecan; 5' sequence + inner sequence + 3' sequence

SEQ ID NO: 23050 - DNA, 76 bp, Artificial Sequence; identical to SEQ ID NO: 3055
  Description of Artificial Sequence: Synthetic pecan; 5' sequence + inner sequence + 3' sequence

SEQ ID NO: 23051 - DNA, 76 bp, Artificial Sequence; identical to SEQ ID NO: 3144
  Description of Artificial Sequence: Synthetic pecan; 5' sequence + inner sequence + 3' sequence

SEQ ID NO: 23052 - DNA, 76 bp, Artificial Sequence; identical to SEQ ID NO: 3096
  Description of Artificial Sequence: Synthetic pecan; 5' sequence + inner sequence + 3' sequence

SEQ ID NO: 23053 - DNA, 74 bp, Artificial Sequence; identical to SEQ ID NO: 3148
  Description of Artificial Sequence: Synthetic pecan; 5' sequence + inner sequence + 3' sequence

SEQ ID NO: 23054 - DNA, 76 bp, Artificial Sequence; identical to SEQ ID NO: 3454
  Description of Artificial Sequence: Synthetic pecan; 5' sequence + inner sequence + 3' sequence

SEQ ID NO: 23055 - DNA, 76 bp, Artificial Sequence; identical to SEQ ID NO: 3053
  Description of Artificial Sequence: Synthetic pecan; 5' sequence + inner sequence + 3' sequence

SEQ ID NO: 23056 - DNA, 76 bp, Artificial Sequence; identical to SEQ ID NO: 3050
  Description of Artificial Sequence: Synthetic pecan; 5' sequence + inner sequence + 3' sequence

SEQ ID NO: 23057 - DNA, 76 bp, Artificial Sequence; identical to SEQ ID NO: 3032
  Description of Artificial Sequence: Synthetic pecan; 5' sequence + inner sequence + 3' sequence

SEQ ID NO: 23058 - DNA, 76 bp, Artificial Sequence; identical to SEQ ID NO: 3034
  Description of Artificial Sequence: Synthetic pecan; 5' sequence + inner sequence + 3' sequence

SEQ ID NO: 23059 - DNA, 76 bp, Artificial Sequence; identical to SEQ ID NO: 3185
  Description of Artificial Sequence: Synthetic pecan; 5' sequence + inner sequence + 3' sequence

SEQ ID NO: 23060 - DNA, 74 bp, Artificial Sequence; identical to SEQ ID NO: 3241
  Description of Artificial Sequence: Synthetic pecan; 5' sequence + inner sequence + 3' sequence

SEQ ID NO: 23061 - DNA, 76 bp, Artificial Sequence; identical to SEQ ID NO: 3029
  Description of Artificial Sequence: Synthetic pecan; 5' sequence + inner sequence + 3' sequence

SEQ ID NO: 23062 - DNA, 76 bp, Artificial Sequence; identical to SEQ ID NO: 3066
  Description of Artificial Sequence: Synthetic pecan; 5' sequence + inner sequence + 3' sequence

SEQ ID NO: 23063 - DNA, 76 bp, Artificial Sequence; identical to SEQ ID NO: 3279
  Description of Artificial Sequence: Synthetic pecan; 5' sequence + inner sequence + 3' sequence

SEQ ID NO: 23064 - DNA, 76 bp, Artificial Sequence; identical to SEQ ID NO: 3080
  Description of Artificial Sequence: Synthetic pecan; 5' sequence + inner sequence + 3' sequence

SEQ ID NO: 23065 - DNA, 76 bp, Artificial Sequence; identical to SEQ ID NO: 3174
  Description of Artificial Sequence: Synthetic pecan; 5' sequence + inner sequence + 3' sequence

SEQ ID NO: 23066 - DNA, 76 bp, Artificial Sequence; identical to SEQ ID NO: 3151
  Description of Artificial Sequence: Synthetic pecan; 5' sequence + inner sequence + 3' sequence

SEQ ID NO: 23067 - DNA, 76 bp, Artificial Sequence; identical to SEQ ID NO: 3506
  Description of Artificial Sequence: Synthetic pecan; 5' sequence + inner sequence + 3' sequence

SEQ ID NO: 23068 - DNA, 76 bp, Artificial Sequence; identical to SEQ ID NO: 3194
  Description of Artificial Sequence: Synthetic pecan; 5' sequence + inner sequence + 3' sequence

SEQ ID NO: 23069 - DNA, 76 bp, Artificial Sequence; identical to SEQ ID NO: 3136
  Description of Artificial Sequence: Synthetic pecan; 5' sequence + inner sequence + 3' sequence

SEQ ID NO: 23070 - DNA, 76 bp, Artificial Sequence; identical to SEQ ID NO: 3901
  Description of Artificial Sequence: Synthetic pecan; 5' sequence + inner sequence + 3' sequence

SEQ ID NO: 23071 - DNA, 76 bp, Artificial Sequence; identical to SEQ ID NO: 3092
  Description of Artificial Sequence: Synthetic pecan; 5' sequence + inner sequence + 3' sequence

SEQ ID NO: 23072 - DNA, 76 bp, Artificial Sequence; identical to SEQ ID NO: 3229
  Description of Artificial Sequence: Synthetic pecan; 5' sequence + inner sequence + 3' sequence

SEQ ID NO: 23073 - DNA, 76 bp, Artificial Sequence; identical to SEQ ID NO: 3323
  Description of Artificial Sequence: Synthetic pecan; 5' sequence + inner sequence + 3' sequence

SEQ ID NO: 23074 - DNA, 76 bp, Artificial Sequence; identical to SEQ ID NO: 3042
  Description of Artificial Sequence: Synthetic pecan; 5' sequence + inner sequence + 3' sequence

SEQ ID NO: 23075 - DNA, 76 bp, Artificial Sequence; identical to SEQ ID NO: 3232
  Description of Artificial Sequence: Synthetic pecan; 5' sequence + inner sequence + 3' sequence

SEQ ID NO: 23076 - DNA, 76 bp, Artificial Sequence; identical to SEQ ID NO: 3048
  Description of Artificial Sequence: Synthetic pecan; 5' sequence + inner sequence + 3' sequence

SEQ ID NO: 23077 - DNA, 76 bp, Artificial Sequence; identical to SEQ ID NO: 3311
  Description of Artificial Sequence: Synthetic pecan; 5' sequence + inner sequence + 3' sequence

SEQ ID NO: 23078 - DNA, 76 bp, Artificial Sequence; identical to SEQ ID NO: 3517
  Description of Artificial Sequence: Synthetic pecan; 5' sequence + inner sequence + 3' sequence

SEQ ID NO: 23079 - DNA, 76 bp, Artificial Sequence; identical to SEQ ID NO: 3115
  Description of Artificial Sequence: Synthetic pecan; 5' sequence + inner sequence + 3' sequence

SEQ ID NO: 23080 - DNA, 76 bp, Artificial Sequence; identical to SEQ ID NO: 3553
  Description of Artificial Sequence: Synthetic pecan; 5' sequence + inner sequence + 3' sequence

SEQ ID NO: 23081 - DNA, 76 bp, Artificial Sequence; identical to SEQ ID NO: 3290
  Description of Artificial Sequence: Synthetic pecan; 5' sequence + inner sequence + 3' sequence

SEQ ID NO: 23082 - DNA, 76 bp, Artificial Sequence; identical to SEQ ID NO: 3207
  Description of Artificial Sequence: Synthetic pecan; 5' sequence + inner sequence + 3' sequence

SEQ ID NO: 23083 - DNA, 76 bp, Artificial Sequence; identical to SEQ ID NO: 3406
  Description of Artificial Sequence: Synthetic pecan; 5' sequence + inner sequence + 3' sequence

SEQ ID NO: 23084 - DNA, 76 bp, Artificial Sequence; identical to SEQ ID NO: 3121
  Description of Artificial Sequence: Synthetic pecan; 5' sequence + inner sequence + 3' sequence

SEQ ID NO: 23085 - DNA, 76 bp, Artificial Sequence; identical to SEQ ID NO: 3145
  Description of Artificial Sequence: Synthetic pecan; 5' sequence + inner sequence + 3' sequence

SEQ ID NO: 23086 - DNA, 76 bp, Artificial Sequence; identical to SEQ ID NO: 3184
  Description of Artificial Sequence: Synthetic pecan; 5' sequence + inner sequence + 3' sequence

SEQ ID NO: 23087 - DNA, 76 bp, Artificial Sequence; identical to SEQ ID NO: 3131
  Description of Artificial Sequence: Synthetic pecan; 5' sequence + inner sequence + 3' sequence

SEQ ID NO: 23088 - DNA, 76 bp, Artificial Sequence; identical to SEQ ID NO: 3117
  Description of Artificial Sequence: Synthetic pecan; 5' sequence + inner sequence + 3' sequence

SEQ ID NO: 23089 - DNA, 76 bp, Artificial Sequence; identical to SEQ ID NO: 3437
  Description of Artificial Sequence: Synthetic pecan; 5' sequence + inner sequence + 3' sequence

SEQ ID NO: 23090 - DNA, 76 bp, Artificial Sequence; identical to SEQ ID NO: 7472
  Description of Artificial Sequence: Synthetic pecan; 5' sequence + inner sequence + 3' sequence

SEQ ID NO: 23091 - DNA, 76 bp, Artificial Sequence; identical to SEQ ID NO: 3171
  Description of Artificial Sequence: Synthetic pecan; 5' sequence + inner sequence + 3' sequence

SEQ ID NO: 23092 - DNA, 76 bp, Artificial Sequence; identical to SEQ ID NO: 3630
  Description of Artificial Sequence: Synthetic pecan; 5' sequence + inner sequence + 3' sequence

SEQ ID NO: 23093 - DNA, 76 bp, Artificial Sequence; identical to SEQ ID NO: 3285
  Description of Artificial Sequence: Synthetic pecan; 5' sequence + inner sequence + 3' sequence

SEQ ID NO: 23094 - DNA, 76 bp, Artificial Sequence; identical to SEQ ID NO: 3111
  Description of Artificial Sequence: Synthetic pecan; 5' sequence + inner sequence + 3' sequence

SEQ ID NO: 23095 - DNA, 76 bp, Artificial Sequence; identical to SEQ ID NO: 3164
  Description of Artificial Sequence: Synthetic pecan; 5' sequence + inner sequence + 3' sequence

SEQ ID NO: 23096 - DNA, 76 bp, Artificial Sequence; identical to SEQ ID NO: 3257
  Description of Artificial Sequence: Synthetic pecan; 5' sequence + inner sequence + 3' sequence

SEQ ID NO: 23097 - DNA, 76 bp, Artificial Sequence; identical to SEQ ID NO: 3243
  Description of Artificial Sequence: Synthetic pecan; 5' sequence + inner sequence + 3' sequence

SEQ ID NO: 23098 - DNA, 76 bp, Artificial Sequence; identical to SEQ ID NO: 3123
  Description of Artificial Sequence: Synthetic pecan; 5' sequence + inner sequence + 3' sequence

SEQ ID NO: 23099 - DNA, 76 bp, Artificial Sequence; identical to SEQ ID NO: 3141
  Description of Artificial Sequence: Synthetic pecan; 5' sequence + inner sequence + 3' sequence

SEQ ID NO: 23100 - DNA, 76 bp, Artificial Sequence; identical to SEQ ID NO: 3245
  Description of Artificial Sequence: Synthetic pecan; 5' sequence + inner sequence + 3' sequence

SEQ ID NO: 23101 - DNA, 75 bp, Artificial Sequence; identical to SEQ ID NO: 7763
  Description of Artificial Sequence: Synthetic pecan; 5' sequence + inner sequence + 3' sequence

SEQ ID NO: 23102 - DNA, 75 bp, Artificial Sequence; identical to SEQ ID NO: 7559
  Description of Artificial Sequence: Synthetic pecan; 5' sequence + inner sequence + 3' sequence

SEQ ID NO: 23103 - DNA, 76 bp, Artificial Sequence; identical to SEQ ID NO: 3877
  Description of Artificial Sequence: Synthetic pecan; 5' sequence + inner sequence + 3' sequence

SEQ ID NO: 23104 - DNA, 76 bp, Artificial Sequence; identical to SEQ ID NO: 3126
  Description of Artificial Sequence: Synthetic pecan; 5' sequence + inner sequence + 3' sequence

SEQ ID NO: 23105 - DNA, 76 bp, Artificial Sequence
  Description of Artificial Sequence: Synthetic pecan; 5' sequence + inner sequence + 3' sequence
tagggaagagaaggacatatgatggacgcagcgtacctcaacgtggacgtgcattgactagtacatgaccacttga

SEQ ID NO: 23106 - DNA, 76 bp, Artificial Sequence; identical to SEQ ID NO: 3196
  Description of Artificial Sequence: Synthetic pecan; 5' sequence + inner sequence + 3' sequence

SEQ ID NO: 23107 - DNA, 76 bp, Artificial Sequence; identical to SEQ ID NO: 3231
  Description of Artificial Sequence: Synthetic pecan; 5' sequence + inner sequence + 3' sequence

SEQ ID NO: 23108 - DNA, 76 bp, Artificial Sequence; identical to SEQ ID NO: 3787
  Description of Artificial Sequence: Synthetic pecan; 5' sequence + inner sequence + 3' sequence

SEQ ID NO: 23109 - DNA, 76 bp, Artificial Sequence; identical to SEQ ID NO: 3344
  Description of Artificial Sequence: Synthetic pecan; 5' sequence + inner sequence + 3' sequence

SEQ ID NO: 23110 - DNA, 76 bp, Artificial Sequence; identical to SEQ ID NO: 3076
  Description of Artificial Sequence: Synthetic pecan; 5' sequence + inner sequence + 3' sequence

SEQ ID NO: 23111 - DNA, 76 bp, Artificial Sequence; identical to SEQ ID NO: 3365
  Description of Artificial Sequence: Synthetic pecan; 5' sequence + inner sequence + 3' sequence

SEQ ID NO: 23112 - DNA, 76 bp, Artificial Sequence; identical to SEQ ID NO: 3132
  Description of Artificial Sequence: Synthetic pecan; 5' sequence + inner sequence + 3' sequence

SEQ ID NO: 23113 - DNA, 76 bp, Artificial Sequence; identical to SEQ ID NO: 3283
  Description of Artificial Sequence: Synthetic pecan; 5' sequence + inner sequence + 3' sequence

SEQ ID NO: 23114 - DNA, 76 bp, Artificial Sequence; identical to SEQ ID NO: 3212
  Description of Artificial Sequence: Synthetic pecan; 5' sequence + inner sequence + 3' sequence

SEQ ID NO: 23115 - DNA, 76 bp, Artificial Sequence; identical to SEQ ID NO: 3227
  Description of Artificial Sequence: Synthetic pecan; 5' sequence + inner sequence + 3' sequence

SEQ ID NO: 23116 - DNA, 76 bp, Artificial Sequence; identical to SEQ ID NO: 3310
  Description of Artificial Sequence: Synthetic pecan; 5' sequence + inner sequence + 3' sequence

SEQ ID NO: 23117 - DNA, 76 bp, Artificial Sequence; identical to SEQ ID NO: 3039
  Description of Artificial Sequence: Synthetic pecan; 5' sequence + inner sequence + 3' sequence

SEQ ID NO: 23118 - DNA, 76 bp, Artificial Sequence; identical to SEQ ID NO: 3163
  Description of Artificial Sequence: Synthetic pecan; 5' sequence + inner sequence + 3' sequence

SEQ ID NO: 23119 - DNA, 76 bp, Artificial Sequence
  Description of Artificial Sequence: Synthetic pecan; 5' sequence + inner sequence + 3' sequence
tagggaagagaaggacatatgatggcacaaacggaccgacacgtgcgcatggattgactagtacatgaccacttga

SEQ ID NO: 23120 - DNA, 76 bp, Artificial Sequence; identical to SEQ ID NO: 3038
  Description of Artificial Sequence: Synthetic pecan; 5' sequence + inner sequence + 3' sequence

SEQ ID NO: 23121 - DNA, 77 bp, Artificial Sequence; identical to SEQ ID NO: 3250
  Description of Artificial Sequence: Synthetic pecan; 5' sequence + inner sequence + 3' sequence

SEQ ID NO: 23122 - DNA, 76 bp, Artificial Sequence; identical to SEQ ID NO: 3240
  Description of Artificial Sequence: Synthetic pecan; 5' sequence + inner sequence + 3' sequence

SEQ ID NO: 23123 - DNA, 76 bp, Artificial Sequence; identical to SEQ ID NO: 3369
  Description of Artificial Sequence: Synthetic pecan; 5' sequence + inner sequence + 3' sequence

SEQ ID NO: 23124 - DNA, 76 bp, Artificial Sequence; identical to SEQ ID NO: 3149
  Description of Artificial Sequence: Synthetic pecan; 5' sequence + inner sequence + 3' sequence

SEQ ID NO: 23125 - DNA, 76 bp, Artificial Sequence; identical to SEQ ID NO: 3057
  Description of Artificial Sequence: Synthetic pecan; 5' sequence + inner sequence + 3' sequence

SEQ ID NO: 23126 - DNA, 76 bp, Artificial Sequence; identical to SEQ ID NO: 3138
  Description of Artificial Sequence: Synthetic pecan; 5' sequence + inner sequence + 3' sequence

SEQ ID NO: 23127 - DNA, 76 bp, Artificial Sequence; identical to SEQ ID NO: 3470
  Description of Artificial Sequence: Synthetic pecan; 5' sequence + inner sequence + 3' sequence

SEQ ID NO: 23128 - DNA, 76 bp, Artificial Sequence; identical to SEQ ID NO: 3190
  Description of Artificial Sequence: Synthetic pecan; 5' sequence + inner sequence + 3' sequence

SEQ ID NO: 23129 - DNA, 76 bp, Artificial Sequence; identical to SEQ ID NO: 3154
  Description of Artificial Sequence: Synthetic pecan; 5' sequence + inner sequence + 3' sequence

SEQ ID NO: 23130 - DNA, 76 bp, Artificial Sequence; identical to SEQ ID NO: 3114
  Description of Artificial Sequence: Synthetic pecan; 5' sequence + inner sequence + 3' sequence

SEQ ID NO: 23131 - DNA, 76 bp, Artificial Sequence; identical to SEQ ID NO: 3653
  Description of Artificial Sequence: Synthetic pecan; 5' sequence + inner sequence + 3' sequence

SEQ ID NO: 23132 - DNA, 76 bp, Artificial Sequence; identical to SEQ ID NO: 3371
  Description of Artificial Sequence: Synthetic pecan; 5' sequence + inner sequence + 3' sequence

SEQ ID NO: 23133 - DNA, 76 bp, Artificial Sequence
  Description of Artificial Sequence: Synthetic pecan; 5' sequence + inner sequence + 3' sequence
tagggaagagaaggacatatgatgcacgactcgcaccctattatgaggccatgttgactagtacatgaccacttga

SEQ ID NO: 23134 - DNA, 76 bp, Artificial Sequence; identical to SEQ ID NO: 7565
  Description of Artificial Sequence: Synthetic pecan; 5' sequence + inner sequence + 3' sequence

SEQ ID NO: 23135 - DNA, 76 bp, Artificial Sequence; identical to SEQ ID NO: 3063
  Description of Artificial Sequence: Synthetic pecan; 5' sequence + inner sequence + 3' sequence

SEQ ID NO: 23136 - DNA, 71 bp, Artificial Sequence
  Description of Artificial Sequence: Synthetic pecan; 5' sequence + inner sequence + 3' sequence
tagggaagagaaggacatatgatggcatgcacgcacctacacgtgggcttgactagtacatgaccacttga

SEQ ID NO: 23137 - DNA, 76 bp, Artificial Sequence; identical to SEQ ID NO: 3666
  Description of Artificial Sequence: Synthetic pecan; 5' sequence + inner sequence + 3' sequence

SEQ ID NO: 23138 - DNA, 76 bp, Artificial Sequence; identical to SEQ ID NO: 3352
  Description of Artificial Sequence: Synthetic pecan; 5' sequence + inner sequence + 3' sequence

SEQ ID NO: 23139 - DNA, 76 bp, Artificial Sequence; identical to SEQ ID NO: 3343
  Description of Artificial Sequence: Synthetic pecan; 5' sequence + inner sequence + 3' sequence

SEQ ID NO: 23140 - DNA, 76 bp, Artificial Sequence; identical to SEQ ID NO: 7691
  Description of Artificial Sequence: Synthetic pecan; 5' sequence + inner sequence + 3' sequence

SEQ ID NO: 23141 - DNA, 76 bp, Artificial Sequence; identical to SEQ ID NO: 3358
  Description of Artificial Sequence: Synthetic pecan; 5' sequence + inner sequence + 3' sequence

SEQ ID NO: 23142 - DNA, 76 bp, Artificial Sequence; identical to SEQ ID NO: 7503
  Description of Artificial Sequence: Synthetic pecan; 5' sequence + inner sequence + 3' sequence

SEQ ID NO: 23143 - DNA, 76 bp, Artificial Sequence; identical to SEQ ID NO: 3263
  Description of Artificial Sequence: Synthetic pecan; 5' sequence + inner sequence + 3' sequence

SEQ ID NO: 23144 - DNA, 76 bp, Artificial Sequence; identical to SEQ ID NO: 3920
  Description of Artificial Sequence: Synthetic pecan; 5' sequence + inner sequence + 3' sequence

SEQ ID NO: 23145 - DNA, 76 bp, Artificial Sequence; identical to SEQ ID NO: 3125
  Description of Artificial Sequence: Synthetic pecan; 5' sequence + inner sequence + 3' sequence

SEQ ID NO: 23146 - DNA, 76 bp, Artificial Sequence; identical to SEQ ID NO: 3419
  Description of Artificial Sequence: Synthetic pecan; 5' sequence + inner sequence + 3' sequence

SEQ ID NO: 23147 - DNA, 76 bp, Artificial Sequence; identical to SEQ ID NO: 3632
  Description of Artificial Sequence: Synthetic pecan; 5' sequence + inner sequence + 3' sequence

SEQ ID NO: 23148 - DNA, 76 bp, Artificial Sequence; identical to SEQ ID NO: 3340
  Description of Artificial Sequence: Synthetic pecan; 5' sequence + inner sequence + 3' sequence

SEQ ID NO: 23149 - DNA, 76 bp, Artificial Sequence; identical to SEQ ID NO: 3567
  Description of Artificial Sequence: Synthetic pecan; 5' sequence + inner sequence + 3' sequence

SEQ ID NO: 23150 - DNA, 76 bp, Artificial Sequence; identical to SEQ ID NO: 3192
  Description of Artificial Sequence: Synthetic pecan; 5' sequence + inner sequence + 3' sequence

SEQ ID NO: 23151 - DNA, 76 bp, Artificial Sequence
  Description of Artificial Sequence: Synthetic pecan; 5' sequence + inner sequence + 3' sequence
tagggaagagaaggacatatgatggccacagcgtacctcaacgtggccgtgcattgactagtacatgaccacttga

SEQ ID NO: 23152 - DNA, 76 bp, Artificial Sequence; identical to SEQ ID NO: 3093
  Description of Artificial Sequence: Synthetic pecan; 5' sequence + inner sequence + 3' sequence

SEQ ID NO: 23153 - DNA, 76 bp, Artificial Sequence; identical to SEQ ID NO: 3884
  Description of Artificial Sequence: Synthetic pecan; 5' sequence + inner sequence + 3' sequence

SEQ ID NO: 23154 - DNA, 76 bp, Artificial Sequence; identical to SEQ ID NO: 3205
  Description of Artificial Sequence: Synthetic pecan; 5' sequence + inner sequence + 3' sequence

SEQ ID NO: 23155 - DNA, 76 bp, Artificial Sequence; identical to SEQ ID NO: 3168
  Description of Artificial Sequence: Synthetic pecan; 5' sequence + inner sequence + 3' sequence

SEQ ID NO: 23156 - DNA, 76 bp, Artificial Sequence; identical to SEQ ID NO: 3274
  Description of Artificial Sequence: Synthetic pecan; 5' sequence + inner sequence + 3' sequence

SEQ ID NO: 23157 - DNA, 76 bp, Artificial Sequence; identical to SEQ ID NO: 3272
  Description of Artificial Sequence: Synthetic pecan; 5' sequence + inner sequence + 3' sequence

SEQ ID NO: 23158 - DNA, 76 bp, Artificial Sequence; identical to SEQ ID NO: 3647
  Description of Artificial Sequence: Synthetic pecan; 5' sequence + inner sequence + 3' sequence

SEQ ID NO: 23159 - DNA, 76 bp, Artificial Sequence; identical to SEQ ID NO: 7543
  Description of Artificial Sequence: Synthetic pecan; 5' sequence + inner sequence + 3' sequence

SEQ ID NO: 23160 - DNA, 76 bp, Artificial Sequence; identical to SEQ ID NO: 3142
  Description of Artificial Sequence: Synthetic pecan; 5' sequence + inner sequence + 3' sequence

SEQ ID NO: 23161 - DNA, 76 bp, Artificial Sequence; identical to SEQ ID NO: 3113
  Description of Artificial Sequence: Synthetic pecan; 5' sequence + inner sequence + 3' sequence

SEQ ID NO: 23162 - DNA, 76 bp, Artificial Sequence; identical to SEQ ID NO: 3443
  Description of Artificial Sequence: Synthetic pecan; 5' sequence + inner sequence + 3' sequence

SEQ ID NO: 23163 - DNA, 76 bp, Artificial Sequence; identical to SEQ ID NO: 7405
  Description of Artificial Sequence: Synthetic pecan; 5' sequence + inner sequence + 3' sequence

SEQ ID NO: 23164 - DNA, 76 bp, Artificial Sequence; identical to SEQ ID NO: 3457
  Description of Artificial Sequence: Synthetic pecan; 5' sequence + inner sequence + 3' sequence

SEQ ID NO: 23165 - DNA, 76 bp, Artificial Sequence
  Description of Artificial Sequence: Synthetic pecan; 5' sequence + inner sequence + 3' sequence
tagggaagagaaggacatatgatccgatcgcacgtcaaggcaggctgtacgcgttgactagtacatgaccacttga

SEQ ID NO: 23166 - DNA, 76 bp, Artificial Sequence; identical to SEQ ID NO: 3177
  Description of Artificial Sequence: Synthetic pecan; 5' sequence + inner sequence + 3' sequence

SEQ ID NO: 23167 - DNA, 76 bp, Artificial Sequence; identical to SEQ ID NO: 3724
  Description of Artificial Sequence: Synthetic pecan; 5' sequence + inner sequence + 3' sequence

SEQ ID NO: 23168 - DNA, 76 bp, Artificial Sequence; identical to SEQ ID NO: 3188
  Description of Artificial Sequence: Synthetic pecan; 5' sequence + inner sequence + 3' sequence

SEQ ID NO: 23169 - DNA, 76 bp, Artificial Sequence; identical to SEQ ID NO: 3521
  Description of Artificial Sequence: Synthetic pecan; 5' sequence + inner sequence + 3' sequence

SEQ ID NO: 23170 - DNA, 77 bp, Artificial Sequence; identical to SEQ ID NO: 3221
  Description of Artificial Sequence: Synthetic pecan; 5' sequence + inner sequence + 3' sequence

SEQ ID NO: 23171 - DNA, 77 bp, Artificial Sequence; identical to SEQ ID NO: 3971
  Description of Artificial Sequence: Synthetic pecan; 5' sequence + inner sequence + 3' sequence

SEQ ID NO: 23172 - DNA, 76 bp, Artificial Sequence; identical to SEQ ID NO: 7498
  Description of Artificial Sequence: Synthetic pecan; 5' sequence + inner sequence + 3' sequence

SEQ ID NO: 23173 - DNA, 76 bp, Artificial Sequence; identical to SEQ ID NO: 3673
  Description of Artificial Sequence: Synthetic pecan; 5' sequence + inner sequence + 3' sequence

SEQ ID NO: 23174 - DNA, 76 bp, Artificial Sequence; identical to SEQ ID NO: 3262
  Description of Artificial Sequence: Synthetic pecan; 5' sequence + inner sequence + 3' sequence

SEQ ID NO: 23175 - DNA, 76 bp, Artificial Sequence; identical to SEQ ID NO: 3622
  Description of Artificial Sequence: Synthetic pecan; 5' sequence + inner sequence + 3' sequence

SEQ ID NO: 23176 - DNA, 76 bp, Artificial Sequence; identical to SEQ ID NO: 3615
  Description of Artificial Sequence: Synthetic pecan; 5' sequence + inner sequence + 3' sequence

SEQ ID NO: 23177 - DNA, 76 bp, Artificial Sequence; identical to SEQ ID NO: 3617
  Description of Artificial Sequence: Synthetic pecan; 5' sequence + inner sequence + 3' sequence

SEQ ID NO: 23178 - DNA, 76 bp, Artificial Sequence; identical to SEQ ID NO: 7336
  Description of Artificial Sequence: Synthetic pecan; 5' sequence + inner sequence + 3' sequence

SEQ ID NO: 23179 - DNA, 74 bp, Artificial Sequence; identical to SEQ ID NO: 7786
  Description of Artificial Sequence: Synthetic pecan; 5' sequence + inner sequence + 3' sequence

SEQ ID NO: 23180 - DNA, 76 bp, Artificial Sequence
  Description of Artificial Sequence: Synthetic pecan; 5' sequence + inner sequence + 3' sequence
tagggaagagaaggacatatgatggcacaaacggaccgacatgtgcgcatggattgactagtacatgaccacttga

SEQ ID NO: 23181 - DNA, 76 bp, Artificial Sequence; identical to SEQ ID NO: 3891
  Description of Artificial Sequence: Synthetic pecan; 5' sequence + inner sequence + 3' sequence

SEQ ID NO: 23182 - DNA, 76 bp, Artificial Sequence; identical to SEQ ID NO: 3728
  Description of Artificial Sequence: Synthetic pecan; 5' sequence + inner sequence + 3' sequence

SEQ ID NO: 23183 - DNA, 76 bp, Artificial Sequence; identical to SEQ ID NO: 3776
  Description of Artificial Sequence: Synthetic pecan; 5' sequence + inner sequence + 3' sequence

SEQ ID NO: 23184 - DNA, 76 bp, Artificial Sequence; identical to SEQ ID NO: 3414
  Description of Artificial Sequence: Synthetic pecan; 5' sequence + inner sequence + 3' sequence

SEQ ID NO: 23185 - DNA, 76 bp, Artificial Sequence; identical to SEQ ID NO: 11767
  Description of Artificial Sequence: Synthetic pecan; 5' sequence + inner sequence + 3' sequence

SEQ ID NO: 23186 - DNA, 76 bp, Artificial Sequence; identical to SEQ ID NO: 3294
  Description of Artificial Sequence: Synthetic pecan; 5' sequence + inner sequence + 3' sequence

SEQ ID NO: 23187 - DNA, 77 bp, Artificial Sequence
  Description of Artificial Sequence: Synthetic pecan; 5' sequence + inner sequence + 3' sequence
tagggaagagaaggacatatgatggacgcagcggaacgttcgagtggttgcgtattgactagtacatgaccacttga

SEQ ID NO: 23188 - DNA, 76 bp, Artificial Sequence; identical to SEQ ID NO: 15521
  Description of Artificial Sequence: Synthetic pecan; 5' sequence + inner sequence + 3' sequence

SEQ ID NO: 23189 - DNA, 76 bp, Artificial Sequence; identical to SEQ ID NO: 3347
  Description of Artificial Sequence: Synthetic pecan; 5' sequence + inner sequence + 3' sequence

SEQ ID NO: 23190 - DNA, 76 bp, Artificial Sequence; identical to SEQ ID NO: 3061
  Description of Artificial Sequence: Synthetic pecan; 5' sequence + inner sequence + 3' sequence

SEQ ID NO: 23191 - DNA, 76 bp, Artificial Sequence; identical to SEQ ID NO: 3129
  Description of Artificial Sequence: Synthetic pecan; 5' sequence + inner sequence + 3' sequence

SEQ ID NO: 23192 - DNA, 76 bp, Artificial Sequence; identical to SEQ ID NO: 3246
  Description of Artificial Sequence: Synthetic pecan; 5' sequence + inner sequence + 3' sequence

SEQ ID NO: 23193 - DNA, 76 bp, Artificial Sequence
  Description of Artificial Sequence: Synthetic pecan; 5' sequence + inner sequence + 3' sequence
tagggaagagaaggacatatgatccgcacgtagccctatcactggtgcatgcattgactagtacatgaccacttga

SEQ ID NO: 23194 - DNA, 76 bp, Artificial Sequence; identical to SEQ ID NO: 11964
  Description of Artificial Sequence: Synthetic pecan; 5' sequence + inner sequence + 3' sequence

SEQ ID NO: 23195 - DNA, 76 bp, Artificial Sequence; identical to SEQ ID NO: 3104
  Description of Artificial Sequence: Synthetic pecan; 5' sequence + inner sequence + 3' sequence

SEQ ID NO: 23196 - DNA, 76 bp, Artificial Sequence; identical to SEQ ID NO: 3446
  Description of Artificial Sequence: Synthetic pecan; 5' sequence + inner sequence + 3' sequence

SEQ ID NO: 23197 - DNA, 76 bp, Artificial Sequence; identical to SEQ ID NO: 3746
  Description of Artificial Sequence: Synthetic pecan; 5' sequence + inner sequence + 3' sequence

SEQ ID NO: 23198 - DNA, 76 bp, Artificial Sequence; identical to SEQ ID NO: 3118
  Description of Artificial Sequence: Synthetic pecan; 5' sequence + inner sequence + 3' sequence

SEQ ID NO: 23199 - DNA, 76 bp, Artificial Sequence; identical to SEQ ID NO: 11712
  Description of Artificial Sequence: Synthetic pecan; 5' sequence + inner sequence + 3' sequence

SEQ ID NO: 23200 - DNA, 76 bp, Artificial Sequence; identical to SEQ ID NO: 3900
  Description of Artificial Sequence: Synthetic pecan; 5' sequence + inner sequence + 3' sequence

SEQ ID NO: 23201 - DNA, 76 bp, Artificial Sequence; identical to SEQ ID NO: 3267
  Description of Artificial Sequence: Synthetic pecan; 5' sequence + inner sequence + 3' sequence

SEQ ID NO: 23202 - DNA, 76 bp, Artificial Sequence; identical to SEQ ID NO: 3203
  Description of Artificial Sequence: Synthetic pecan; 5' sequence + inner sequence + 3' sequence

SEQ ID NO: 23203 - DNA, 76 bp, Artificial Sequence; identical to SEQ ID NO: 15958
  Description of Artificial Sequence: Synthetic pecan; 5' sequence + inner sequence + 3' sequence

SEQ ID NO: 23204 - DNA, 76 bp, Artificial Sequence; identical to SEQ ID NO: 3095
  Description of Artificial Sequence: Synthetic pecan; 5' sequence + inner sequence + 3' sequence

SEQ ID NO: 23205 - DNA, 76 bp, Artificial Sequence; identical to SEQ ID NO: 3204
  Description of Artificial Sequence: Synthetic pecan; 5' sequence + inner sequence + 3' sequence

SEQ ID NO: 23206 - DNA, 76 bp, Artificial Sequence; identical to SEQ ID NO: 11627
  Description of Artificial Sequence: Synthetic pecan; 5' sequence + inner sequence + 3' sequence

SEQ ID NO: 23207 - DNA, 76 bp, Artificial Sequence; identical to SEQ ID NO: 3485
  Description of Artificial Sequence: Synthetic pecan; 5' sequence + inner sequence + 3' sequence

SEQ ID NO: 23208 - DNA, 76 bp, Artificial Sequence; identical to SEQ ID NO: 3768
  Description of Artificial Sequence: Synthetic pecan; 5' sequence + inner sequence + 3' sequence

SEQ ID NO: 23209 - DNA, 76 bp, Artificial Sequence; identical to SEQ ID NO: 3559
  Description of Artificial Sequence: Synthetic pecan; 5' sequence + inner sequence + 3' sequence

SEQ ID NO: 23210 - DNA, 76 bp, Artificial Sequence; identical to SEQ ID NO: 3390
  Description of Artificial Sequence: Synthetic pecan; 5' sequence + inner sequence + 3' sequence

SEQ ID NO: 23211 - DNA, 76 bp, Artificial Sequence; identical to SEQ ID NO: 3065
  Description of Artificial Sequence: Synthetic pecan; 5' sequence + inner sequence + 3' sequence

SEQ ID NO: 23212 - DNA, 76 bp, Artificial Sequence; identical to SEQ ID NO: 7748
  Description of Artificial Sequence: Synthetic pecan; 5' sequence + inner sequence + 3' sequence

SEQ ID NO: 23213 - DNA, 76 bp, Artificial Sequence; identical to SEQ ID NO: 3105
  Description of Artificial Sequence: Synthetic pecan; 5' sequence + inner sequence + 3' sequence

SEQ ID NO: 23214 - DNA, 75 bp, Artificial Sequence; identical to SEQ ID NO: 3251
  Description of Artificial Sequence: Synthetic pecan; 5' sequence + inner sequence + 3' sequence

SEQ ID NO: 23215 - DNA, 76 bp, Artificial Sequence; identical to SEQ ID NO: 3282
  Description of Artificial Sequence: Synthetic pecan; 5' sequence + inner sequence + 3' sequence

SEQ ID NO: 23216 - DNA, 76 bp, Artificial Sequence; identical to SEQ ID NO: 3628
  Description of Artificial Sequence: Synthetic pecan; 5' sequence + inner sequence + 3' sequence

SEQ ID NO: 23217 - DNA, 76 bp, Artificial Sequence; identical to SEQ ID NO: 3442
  Description of Artificial Sequence: Synthetic pecan; 5' sequence + inner sequence + 3' sequence

SEQ ID NO: 23218 - DNA, 76 bp, Artificial Sequence; identical to SEQ ID NO: 3696
  Description of Artificial Sequence: Synthetic pecan; 5' sequence + inner sequence + 3' sequence

SEQ ID NO: 23219 - DNA, 76 bp, Artificial Sequence; identical to SEQ ID NO: 3137
  Description of Artificial Sequence: Synthetic pecan; 5' sequence + inner sequence + 3' sequence

SEQ ID NO: 23220 - DNA, 76 bp, Artificial Sequence; identical to SEQ ID NO: 7603
  Description of Artificial Sequence: Synthetic pecan; 5' sequence + inner sequence + 3' sequence

SEQ ID NO: 23221 - DNA, 76 bp, Artificial Sequence; identical to SEQ ID NO: 3359
  Description of Artificial Sequence: Synthetic pecan; 5' sequence + inner sequence + 3' sequence

SEQ ID NO: 23222 - DNA, 76 bp, Artificial Sequence; identical to SEQ ID NO: 3097
  Description of Artificial Sequence: Synthetic pecan; 5' sequence + inner sequence + 3' sequence

SEQ ID NO: 23223 - DNA, 76 bp, Artificial Sequence; identical to SEQ ID NO: 3317
  Description of Artificial Sequence: Synthetic pecan; 5' sequence + inner sequence + 3' sequence

SEQ ID NO: 23224 - DNA, 72 bp, Artificial Sequence; identical to SEQ ID NO: 3893
  Description of Artificial Sequence: Synthetic pecan; 5' sequence + inner sequence + 3' sequence

SEQ ID NO: 23225 - DNA, 76 bp, Artificial Sequence; identical to SEQ ID NO: 3277
  Description of Artificial Sequence: Synthetic pecan; 5' sequence + inner sequence + 3' sequence

SEQ ID NO: 23226 - DNA, 76 bp, Artificial Sequence
  Description of Artificial Sequence: Synthetic pecan; 5' sequence + inner sequence + 3' sequence
tagggaagagaaggacatatgatggcatgcacgcacctacatgtgggtatggattgactagtacatgaccacttga

SEQ ID NO: 23227 - DNA, 76 bp, Artificial Sequence
  Description of Artificial Sequence: Synthetic pecan; 5' sequence + inner sequence + 3' sequence
tagggaagagaaggacatatgatccgatcgcacgtcaaggcaggctgtacgtgttgactagtacatgaccacttga

SEQ ID NO: 23228 - DNA, 76 bp, Artificial Sequence; identical to SEQ ID NO: 3595
  Description of Artificial Sequence: Synthetic pecan; 5' sequence + inner sequence + 3' sequence

SEQ ID NO: 23229 - DNA, 76 bp, Artificial Sequence
  Description of Artificial Sequence: Synthetic pecan; 5' sequence + inner sequence + 3' sequence
tagggaagagaaggacatatgatggacgcagcttgcctactggtggtcacgtgttgactagtacatgaccacttga

SEQ ID NO: 23230 - DNA, 76 bp, Artificial Sequence; identical to SEQ ID NO: 3079
  Description of Artificial Sequence: Synthetic pecan; 5' sequence + inner sequence + 3' sequence

SEQ ID NO: 23231 - DNA, 76 bp, Artificial Sequence; identical to SEQ ID NO: 3103
  Description of Artificial Sequence: Synthetic pecan; 5' sequence + inner sequence + 3' sequence

SEQ ID NO: 23232 - DNA, 76 bp, Artificial Sequence; identical to SEQ ID NO: 3089
  Description of Artificial Sequence: Synthetic pecan; 5' sequence + inner sequence + 3' sequence

SEQ ID NO: 23233 - DNA, 76 bp, Artificial Sequence
  Description of Artificial Sequence: Synthetic pecan; 5' sequence + inner sequence + 3' sequence
tagggaagagaaggacatatgatgcacgactcgcaccctataatgaggccatgttgactagtacatgaccacttga

SEQ ID NO: 23234 - DNA, 76 bp, Artificial Sequence; identical to SEQ ID NO: 3634
  Description of Artificial Sequence: Synthetic pecan; 5' sequence + inner sequence + 3' sequence

SEQ ID NO: 23235 - DNA, 76 bp, Artificial Sequence; identical to SEQ ID NO: 3256
  Description of Artificial Sequence: Synthetic pecan; 5' sequence + inner sequence + 3' sequence

SEQ ID NO: 23236 - DNA, 76 bp, Artificial Sequence; identical to SEQ ID NO: 15892
  Description of Artificial Sequence: Synthetic pecan; 5' sequence + inner sequence + 3' sequence

SEQ ID NO: 23237 - DNA, 76 bp, Artificial Sequence; identical to SEQ ID NO: 3135
  Description of Artificial Sequence: Synthetic pecan; 5' sequence + inner sequence + 3' sequence

SEQ ID NO: 23238 - DNA, 76 bp, Artificial Sequence
  Description of Artificial Sequence: Synthetic pecan; 5' sequence + inner sequence + 3' sequence
tagggaagagaaggacatatgatggcgcgaacggaccgacaagtgcgcatggattgactagtacatgaccacttga

SEQ ID NO: 23239 - DNA, 76 bp, Artificial Sequence; identical to SEQ ID NO: 3463
  Description of Artificial Sequence: Synthetic pecan; 5' sequence + inner sequence + 3' sequence

SEQ ID NO: 23240 - DNA, 76 bp, Artificial Sequence; identical to SEQ ID NO: 3789
  Description of Artificial Sequence: Synthetic pecan; 5' sequence + inner sequence + 3' sequence

SEQ ID NO: 23241 - DNA, 76 bp, Artificial Sequence; identical to SEQ ID NO: 11985
  Description of Artificial Sequence: Synthetic pecan; 5' sequence + inner sequence + 3' sequence

SEQ ID NO: 23242 - DNA, 76 bp, Artificial Sequence; identical to SEQ ID NO: 3186
  Description of Artificial Sequence: Synthetic pecan; 5' sequence + inner sequence + 3' sequence

SEQ ID NO: 23243 - DNA, 76 bp, Artificial Sequence; identical to SEQ ID NO: 3094
  Description of Artificial Sequence: Synthetic pecan; 5' sequence + inner sequence + 3' sequence

SEQ ID NO: 23244 - DNA, 76 bp, Artificial Sequence; identical to SEQ ID NO: 3599
  Description of Artificial Sequence: Synthetic pecan; 5' sequence + inner sequence + 3' sequence

SEQ ID NO: 23245 - DNA, 76 bp, Artificial Sequence; identical to SEQ ID NO: 3266
  Description of Artificial Sequence: Synthetic pecan; 5' sequence + inner sequence + 3' sequence

SEQ ID NO: 23246 - DNA, 76 bp, Artificial Sequence; identical to SEQ ID NO: 15997
  Description of Artificial Sequence: Synthetic pecan; 5' sequence + inner sequence + 3' sequence

SEQ ID NO: 23247 - DNA, 76 bp, Artificial Sequence; identical to SEQ ID NO: 3088
  Description of Artificial Sequence: Synthetic pecan; 5' sequence + inner sequence + 3' sequence

SEQ ID NO: 23248 - DNA, 76 bp, Artificial Sequence; identical to SEQ ID NO: 3244
  Description of Artificial Sequence: Synthetic pecan; 5' sequence + inner sequence + 3' sequence

SEQ ID NO: 23249 - DNA, 76 bp, Artificial Sequence; identical to SEQ ID NO: 3467
  Description of Artificial Sequence: Synthetic pecan; 5' sequence + inner sequence + 3' sequence

SEQ ID NO: 23250 - DNA, 76 bp, Artificial Sequence; identical to SEQ ID NO: 3998
  Description of Artificial Sequence: Synthetic pecan; 5' sequence + inner sequence + 3' sequence

SEQ ID NO: 23251 - DNA, 76 bp, Artificial Sequence; identical to SEQ ID NO: 3611
  Description of Artificial Sequence: Synthetic pecan; 5' sequence + inner sequence + 3' sequence

SEQ ID NO: 23252 - DNA, 76 bp, Artificial Sequence; identical to SEQ ID NO: 3360
  Description of Artificial Sequence: Synthetic pecan; 5' sequence + inner sequence + 3' sequence

SEQ ID NO: 23253 - DNA, 76 bp, Artificial Sequence; identical to SEQ ID NO: 3354
  Description of Artificial Sequence: Synthetic pecan; 5' sequence + inner sequence + 3' sequence

SEQ ID NO: 23254 - DNA, 76 bp, Artificial Sequence; identical to SEQ ID NO: 8001
  Description of Artificial Sequence: Synthetic pecan; 5' sequence + inner sequence + 3' sequence

SEQ ID NO: 23255 - DNA, 76 bp, Artificial Sequence; identical to SEQ ID NO: 3637
  Description of Artificial Sequence: Synthetic pecan; 5' sequence + inner sequence + 3' sequence

SEQ ID NO: 23256 - DNA, 72 bp, Artificial Sequence; identical to SEQ ID NO: 3822
  Description of Artificial Sequence: Synthetic pecan; 5' sequence + inner sequence + 3' sequence

SEQ ID NO: 23257 - DNA, 76 bp, Artificial Sequence; identical to SEQ ID NO: 15985
  Description of Artificial Sequence: Synthetic pecan; 5' sequence + inner sequence + 3' sequence

SEQ ID NO: 23258 - DNA, 76 bp, Artificial Sequence; identical to SEQ ID NO: 3236
  Description of Artificial Sequence: Synthetic pecan; 5' sequence + inner sequence + 3' sequence

SEQ ID NO: 23259 - DNA, 76 bp, Artificial Sequence; identical to SEQ ID NO: 7802
  Description of Artificial Sequence: Synthetic pecan; 5' sequence + inner sequence + 3' sequence

SEQ ID NO: 23260 - DNA, 76 bp, Artificial Sequence; identical to SEQ ID NO: 3242
  Description of Artificial Sequence: Synthetic pecan; 5' sequence + inner sequence + 3' sequence

SEQ ID NO: 23261 - DNA, 76 bp, Artificial Sequence; identical to SEQ ID NO: 3509
  Description of Artificial Sequence: Synthetic pecan; 5' sequence + inner sequence + 3' sequence

SEQ ID NO: 23262 - DNA, 76 bp, Artificial Sequence; identical to SEQ ID NO: 11928
  Description of Artificial Sequence: Synthetic pecan; 5' sequence + inner sequence + 3' sequence

SEQ ID NO: 23263 - DNA, 75 bp, Artificial Sequence; identical to SEQ ID NO: 7869
  Description of Artificial Sequence: Synthetic pecan; 5' sequence + inner sequence + 3' sequence

SEQ ID NO: 23264 - DNA, 76 bp, Artificial Sequence; identical to SEQ ID NO: 3158
  Description of Artificial Sequence: Synthetic pecan; 5' sequence + inner sequence + 3' sequence

SEQ ID NO: 23265 - DNA, 76 bp, Artificial Sequence; identical to SEQ ID NO: 3429
  Description of Artificial Sequence: Synthetic pecan; 5' sequence + inner sequence + 3' sequence

SEQ ID NO: 23266 - DNA, 76 bp, Artificial Sequence; identical to SEQ ID NO: 3367
  Description of Artificial Sequence: Synthetic pecan; 5' sequence + inner sequence + 3' sequence

SEQ ID NO: 23267 - DNA, 76 bp, Artificial Sequence; identical to SEQ ID NO: 3362
  Description of Artificial Sequence: Synthetic pecan; 5' sequence + inner sequence + 3' sequence

SEQ ID NO: 23268 - DNA, 76 bp, Artificial Sequence; identical to SEQ ID NO: 3044
  Description of Artificial Sequence: Synthetic pecan; 5' sequence + inner sequence + 3' sequence

SEQ ID NO: 23269 - DNA, 76 bp, Artificial Sequence
  Description of Artificial Sequence: Synthetic pecan; 5' sequence + inner sequence + 3' sequence
tagggaagagaaggacatatgatccgcacgtagacctatcagtggtgcatgcattgactagtacatgaccacttga

SEQ ID NO: 23270 - DNA, 76 bp, Artificial Sequence; identical to SEQ ID NO: 3024
  Description of Artificial Sequence: Synthetic pecan; 5' sequence + inner sequence + 3' sequence

SEQ ID NO: 23271 - DNA, 76 bp, Artificial Sequence; identical to SEQ ID NO: 7638
  Description of Artificial Sequence: Synthetic pecan; 5' sequence + inner sequence + 3' sequence

SEQ ID NO: 23272 - DNA, 76 bp, Artificial Sequence; identical to SEQ ID NO: 3324
  Description of Artificial Sequence: Synthetic pecan; 5' sequence + inner sequence + 3' sequence

SEQ ID NO: 23273 - DNA, 76 bp, Artificial Sequence; identical to SEQ ID NO: 3407
  Description of Artificial Sequence: Synthetic pecan; 5' sequence + inner sequence + 3' sequence

SEQ ID NO: 23274 - DNA, 76 bp, Artificial Sequence; identical to SEQ ID NO: 3783
  Description of Artificial Sequence: Synthetic pecan; 5' sequence + inner sequence + 3' sequence

SEQ ID NO: 23275 - DNA, 76 bp, Artificial Sequence; identical to SEQ ID NO: 3320
  Description of Artificial Sequence: Synthetic pecan; 5' sequence + inner sequence + 3' sequence

SEQ ID NO: 23276 - DNA, 76 bp, Artificial Sequence; identical to SEQ ID NO: 7988
  Description of Artificial Sequence: Synthetic pecan; 5' sequence + inner sequence + 3' sequence

SEQ ID NO: 23277 - DNA, 71 bp, Artificial Sequence; identical to SEQ ID NO: 19927
  Description of Artificial Sequence: Synthetic pecan; 5' sequence + inner sequence + 3' sequence

SEQ ID NO: 23278 - DNA, 76 bp, Artificial Sequence; identical to SEQ ID NO: 3291
  Description of Artificial Sequence: Synthetic pecan; 5' sequence + inner sequence + 3' sequence

SEQ ID NO: 23279 - DNA, 76 bp, Artificial Sequence; identical to SEQ ID NO: 3082
  Description of Artificial Sequence: Synthetic pecan; 5' sequence + inner sequence + 3' sequence

SEQ ID NO: 23280 - DNA, 76 bp, Artificial Sequence; identical to SEQ ID NO: 3183
  Description of Artificial Sequence: Synthetic pecan; 5' sequence + inner sequence + 3' sequence

SEQ ID NO: 23281 - DNA, 76 bp, Artificial Sequence; identical to SEQ ID NO: 7837
  Description of Artificial Sequence: Synthetic pecan; 5' sequence + inner sequence + 3' sequence

SEQ ID NO: 23282 - DNA, 76 bp, Artificial Sequence; identical to SEQ ID NO: 7911
  Description of Artificial Sequence: Synthetic pecan; 5' sequence + inner sequence + 3' sequence

SEQ ID NO: 23283 - DNA, 76 bp, Artificial Sequence
  Description of Artificial Sequence: Synthetic pecan; 5' sequence + inner sequence + 3' sequence
tagggaagagaaggacatatgatggacgcagcttgcctactcgtggtcacgtattgactagtacatgaccacttga

SEQ ID NO: 23284 - DNA, 76 bp, Artificial Sequence; identical to SEQ ID NO: 3420
  Description of Artificial Sequence: Synthetic pecan; 5' sequence + inner sequence + 3' sequence

SEQ ID NO: 23285 - DNA, 76 bp, Artificial Sequence; identical to SEQ ID NO: 3662
  Description of Artificial Sequence: Synthetic pecan; 5' sequence + inner sequence + 3' sequence

SEQ ID NO: 23286 - DNA, 76 bp, Artificial Sequence
  Description of Artificial Sequence: Synthetic pecan; 5' sequence + inner sequence + 3' sequence
tagggaagagaaggacatatgatccgcacgtcgccctatcagtggtgcatgcattgactagtacatgaccacttga

SEQ ID NO: 23287 - DNA, 75 bp, Artificial Sequence
  Description of Artificial Sequence: Synthetic pecan; 5' sequence + inner sequence + 3' sequence
tagggaagagaaggacatatgatgcacgccgatgccctcatgtggccgtggcttgactagtacatgaccacttga

SEQ ID NO: 23288 - DNA, 79 bp, Artificial Sequence; identical to SEQ ID NO: 3864
  Description of Artificial Sequence: Synthetic pecan; 5' sequence + inner sequence + 3' sequence

SEQ ID NO: 23289 - DNA, 76 bp, Artificial Sequence
  Description of Artificial Sequence: Synthetic pecan; 5' sequence + inner sequence + 3' sequence
tagggaagagaaggacatatgatggcatgcacgcacctacacgtggacgtggattgactagtacatgaccacttga

SEQ ID NO: 23290 - DNA, 76 bp, Artificial Sequence; identical to SEQ ID NO: 3816
  Description of Artificial Sequence: Synthetic pecan; 5' sequence + inner sequence + 3' sequence

SEQ ID NO: 23291 - DNA, 76 bp, Artificial Sequence; identical to SEQ ID NO: 3399
  Description of Artificial Sequence: Synthetic pecan; 5' sequence + inner sequence + 3' sequence

SEQ ID NO: 23292 - DNA, 76 bp, Artificial Sequence; identical to SEQ ID NO: 7377
  Description of Artificial Sequence: Synthetic pecan; 5' sequence + inner sequence + 3' sequence

SEQ ID NO: 23293 - DNA, 76 bp, Artificial Sequence; identical to SEQ ID NO: 3576
  Description of Artificial Sequence: Synthetic pecan; 5' sequence + inner sequence + 3' sequence

SEQ ID NO: 23294 - DNA, 76 bp, Artificial Sequence; identical to SEQ ID NO: 3543
  Description of Artificial Sequence: Synthetic pecan; 5' sequence + inner sequence + 3' sequence

SEQ ID NO: 23295 - DNA, 76 bp, Artificial Sequence
  Description of Artificial Sequence: Synthetic pecan; 5' sequence + inner sequence + 3' sequence
tagggaagagaaggacatatgatggcacaaacggaccgacaagtgcgcatgcattgactagtacatgaccacttga

SEQ ID NO: 23296 - DNA, 76 bp, Artificial Sequence; identical to SEQ ID NO: 3248
  Description of Artificial Sequence: Synthetic pecan; 5' sequence + inner sequence + 3' sequence

SEQ ID NO: 23297 - DNA, 76 bp, Artificial Sequence; identical to SEQ ID NO: 3288
  Description of Artificial Sequence: Synthetic pecan; 5' sequence + inner sequence + 3' sequence

SEQ ID NO: 23298 - DNA, 76 bp, Artificial Sequence; identical to SEQ ID NO: 3019
  Description of Artificial Sequence: Synthetic pecan; 5' sequence + inner sequence + 3' sequence

SEQ ID NO: 23299 - DNA, 76 bp, Artificial Sequence; identical to SEQ ID NO: 3950
  Description of Artificial Sequence: Synthetic pecan; 5' sequence + inner sequence + 3' sequence

SEQ ID NO: 23300 - DNA, 76 bp, Artificial Sequence; identical to SEQ ID NO: 7317
  Description of Artificial Sequence: Synthetic pecan; 5' sequence + inner sequence + 3' sequence

SEQ ID NO: 23301 - DNA, 76 bp, Artificial Sequence; identical to SEQ ID NO: 7312
  Description of Artificial Sequence: Synthetic pecan; 5' sequence + inner sequence + 3' sequence

SEQ ID NO: 23302 - DNA, 76 bp, Artificial Sequence
  Description of Artificial Sequence: Synthetic pecan; 5' sequence + inner sequence + 3' sequence
tagggaagagaaggacatatgatggccacagcgcacctcaacgtggacgtgcattgactagtacatgaccacttga

SEQ ID NO: 23303 - DNA, 76 bp, Artificial Sequence; identical to SEQ ID NO: 7807
  Description of Artificial Sequence: Synthetic pecan; 5' sequence + inner sequence + 3' sequence

SEQ ID NO: 23304 - DNA, 77 bp, Artificial Sequence; identical to SEQ ID NO: 7434
  Description of Artificial Sequence: Synthetic pecan; 5' sequence + inner sequence + 3' sequence

SEQ ID NO: 23305 - DNA, 76 bp, Artificial Sequence; identical to SEQ ID NO: 3230
  Description of Artificial Sequence: Synthetic pecan; 5' sequence + inner sequence + 3' sequence

SEQ ID NO: 23306 - DNA, 76 bp, Artificial Sequence; identical to SEQ ID NO: 3477
  Description of Artificial Sequence: Synthetic pecan; 5' sequence + inner sequence + 3' sequence

SEQ ID NO: 23307 - DNA, 76 bp, Artificial Sequence
  Description of Artificial Sequence: Synthetic pecan; 5' sequence + inner sequence + 3' sequence
tagggaagagaaggacatatgatggccacagcgtacctcaatgtggacgtgcattgactagtacatgaccacttga

SEQ ID NO: 23308 - DNA, 76 bp, Artificial Sequence; identical to SEQ ID NO: 7918
  Description of Artificial Sequence: Synthetic pecan; 5' sequence + inner sequence + 3' sequence

SEQ ID NO: 23309 - DNA, 76 bp, Artificial Sequence; identical to SEQ ID NO: 15773
  Description of Artificial Sequence: Synthetic pecan; 5' sequence + inner sequence + 3' sequence

SEQ ID NO: 23310 - DNA, 76 bp, Artificial Sequence; identical to SEQ ID NO: 3106
  Description of Artificial Sequence: Synthetic pecan; 5' sequence + inner sequence + 3' sequence

SEQ ID NO: 23311 - DNA, 76 bp, Artificial Sequence; identical to SEQ ID NO: 3122
  Description of Artificial Sequence: Synthetic pecan; 5' sequence + inner sequence + 3' sequence

SEQ ID NO: 23312 - DNA, 76 bp, Artificial Sequence
  Description of Artificial Sequence: Synthetic pecan; 5' sequence + inner sequence + 3' sequence
tagggaagagaaggacatatgatccgatcgcacgtcaagtcaggctgtacgagttgactagtacatgaccacttga

SEQ ID NO: 23313 - DNA, 76 bp, Artificial Sequence; identical to SEQ ID NO: 3303
  Description of Artificial Sequence: Synthetic pecan; 5' sequence + inner sequence + 3' sequence

SEQ ID NO: 23314 - DNA, 76 bp, Artificial Sequence; identical to SEQ ID NO: 3091
  Description of Artificial Sequence: Synthetic pecan; 5' sequence + inner sequence + 3' sequence

SEQ ID NO: 23315 - DNA, 76 bp, Artificial Sequence; identical to SEQ ID NO: 3619
  Description of Artificial Sequence: Synthetic pecan; 5' sequence + inner sequence + 3' sequence

SEQ ID NO: 23316 - DNA, 76 bp, Artificial Sequence; identical to SEQ ID NO: 7890
  Description of Artificial Sequence: Synthetic pecan; 5' sequence + inner sequence + 3' sequence

SEQ ID NO: 23317 - DNA, 76 bp, Artificial Sequence; identical to SEQ ID NO: 3293
  Description of Artificial Sequence: Synthetic pecan; 5' sequence + inner sequence + 3' sequence

SEQ ID NO: 23318 - DNA, 76 bp, Artificial Sequence; identical to SEQ ID NO: 11782
  Description of Artificial Sequence: Synthetic pecan; 5' sequence + inner sequence + 3' sequence

SEQ ID NO: 23319 - DNA, 76 bp, Artificial Sequence; identical to SEQ ID NO: 3397
  Description of Artificial Sequence: Synthetic pecan; 5' sequence + inner sequence + 3' sequence

SEQ ID NO: 23320 - DNA, 76 bp, Artificial Sequence; identical to SEQ ID NO: 3253
  Description of Artificial Sequence: Synthetic pecan; 5' sequence + inner sequence + 3' sequence

SEQ ID NO: 23321 - DNA, 74 bp, Artificial Sequence
  Description of Artificial Sequence: Synthetic pecan; 5' sequence + inner sequence + 3' sequence
tagggaagagaaggacatatgatgcacgactcgcaccctatcatgcggtcattgactagtacatgaccacttga

SEQ ID NO: 23322 - DNA, 76 bp, Artificial Sequence; identical to SEQ ID NO: 3707
  Description of Artificial Sequence: Synthetic pecan; 5' sequence + inner sequence + 3' sequence

SEQ ID NO: 23323 - DNA, 76 bp, Artificial Sequence; identical to SEQ ID NO: 3409
  Description of Artificial Sequence: Synthetic pecan; 5' sequence + inner sequence + 3' sequence

SEQ ID NO: 23324 - DNA, 76 bp, Artificial Sequence
  Description of Artificial Sequence: Synthetic pecan; 5' sequence + inner sequence + 3' sequence
tagggaagagaaggacatatgatggcatgcacgcacctacacgtggtcacgtattgactagtacatgaccacttga

SEQ ID NO: 23325 - DNA, 76 bp, Artificial Sequence; identical to SEQ ID NO: 7667
  Description of Artificial Sequence: Synthetic pecan; 5' sequence + inner sequence + 3' sequence

SEQ ID NO: 23326 - DNA, 76 bp, Artificial Sequence; identical to SEQ ID NO: 3146
  Description of Artificial Sequence: Synthetic pecan; 5' sequence + inner sequence + 3' sequence

SEQ ID NO: 23327 - DNA, 76 bp, Artificial Sequence
  Description of Artificial Sequence: Synthetic pecan; 5' sequence + inner sequence + 3' sequence
tagggaagagaaggacatatgatggcacaaactgaccgacaagtgcgcatggattgactagtacatgaccacttga

SEQ ID NO: 23328 - DNA, 74 bp, Artificial Sequence
  Description of Artificial Sequence: Synthetic pecan; 5' sequence + inner sequence + 3' sequence
tagggaagagaaggacatatgatggacgcagcttgcctactggtggtcacgttgactagtacatgaccacttga

SEQ ID NO: 23329 - DNA, 76 bp, Artificial Sequence; identical to SEQ ID NO: 3603
  Description of Artificial Sequence: Synthetic pecan; 5' sequence + inner sequence + 3' sequence

SEQ ID NO: 23330 - DNA, 76 bp, Artificial Sequence; identical to SEQ ID NO: 3281
  Description of Artificial Sequence: Synthetic pecan; 5' sequence + inner sequence + 3' sequence

SEQ ID NO: 23331 - DNA, 76 bp, Artificial Sequence
  Description of Artificial Sequence: Synthetic pecan; 5' sequence + inner sequence + 3' sequence
tagggaagagaaggacatatgatccgcacgtagccctatcagtggtgtatgcattgactagtacatgaccacttga

SEQ ID NO: 23332 - DNA, 76 bp, Artificial Sequence
  Description of Artificial Sequence: Synthetic pecan; 5' sequence + inner sequence + 3' sequence
tagggaagagaaggacatatgatggacgcagcggaacgttcgagtggtacgcattgactagtacatgaccacttga

SEQ ID NO: 23333 - DNA, 76 bp, Artificial Sequence; identical to SEQ ID NO: 11798
  Description of Artificial Sequence: Synthetic pecan; 5' sequence + inner sequence + 3' sequence

SEQ ID NO: 23334 - DNA, 76 bp, Artificial Sequence; identical to SEQ ID NO: 3332
  Description of Artificial Sequence: Synthetic pecan; 5' sequence + inner sequence + 3' sequence

SEQ ID NO: 23335 - DNA, 76 bp, Artificial Sequence
  Description of Artificial Sequence: Synthetic pecan; 5' sequence + inner sequence + 3' sequence
tagggaagagaaggacatatgatggacgccgcttgcctactggtggtcacgtattgactagtacatgaccacttga

SEQ ID NO: 23336 - DNA, 76 bp, Artificial Sequence; identical to SEQ ID NO: 3389
  Description of Artificial Sequence: Synthetic pecan; 5' sequence + inner sequence + 3' sequence

SEQ ID NO: 23337 - DNA, 76 bp, Artificial Sequence; identical to SEQ ID NO: 3036
  Description of Artificial Sequence: Synthetic pecan; 5' sequence + inner sequence + 3' sequence

SEQ ID NO: 23338 - DNA, 76 bp, Artificial Sequence; identical to SEQ ID NO: 3661
  Description of Artificial Sequence: Synthetic pecan; 5' sequence + inner sequence + 3' sequence

SEQ ID NO: 23339 - DNA, 76 bp, Artificial Sequence
  Description of Artificial Sequence: Synthetic pecan; 5' sequence + inner sequence + 3' sequence
tagggaagagaaggacatatgatccgcacgtagccatatcagtggtgcatgcattgactagtacatgaccacttga

SEQ ID NO: 23340 - DNA, 76 bp, Artificial Sequence; identical to SEQ ID NO: 3561
  Description of Artificial Sequence: Synthetic pecan; 5' sequence + inner sequence + 3' sequence

SEQ ID NO: 23341 - DNA, 76 bp, Artificial Sequence
  Description of Artificial Sequence: Synthetic pecan; 5' sequence + inner sequence + 3' sequence
tagggaagagaaggacatatgatgcacgactcgcaccctatgatgaggccatgttgactagtacatgaccacttga

SEQ ID NO: 23342 - DNA, 76 bp, Artificial Sequence; identical to SEQ ID NO: 7504
  Description of Artificial Sequence: Synthetic pecan; 5' sequence + inner sequence + 3' sequence

SEQ ID NO: 23343 - DNA, 76 bp, Artificial Sequence
  Description of Artificial Sequence: Synthetic pecan; 5' sequence + inner sequence + 3' sequence
tagggaagagaaggacatatgatgcactgcacgcacctacacgtgggtatggattgactagtacatgaccacttga

SEQ ID NO: 23344 - DNA, 76 bp, Artificial Sequence; identical to SEQ ID NO: 3468
  Description of Artificial Sequence: Synthetic pecan; 5' sequence + inner sequence + 3' sequence

SEQ ID NO: 23345 - DNA, 76 bp, Artificial Sequence; identical to SEQ ID NO: 3560
  Description of Artificial Sequence: Synthetic pecan; 5' sequence + inner sequence + 3' sequence

SEQ ID NO: 23346 - DNA, 76 bp, Artificial Sequence
  Description of Artificial Sequence: Synthetic pecan; 5' sequence + inner sequence + 3' sequence
tagggaagagaaggacatatgatggacgcagcttgcctactggtggacacgtattgactagtacatgaccacttga

SEQ ID NO: 23347 - DNA, 76 bp, Artificial Sequence; identical to SEQ ID NO: 3780
  Description of Artificial Sequence: Synthetic pecan; 5' sequence + inner sequence + 3' sequence

SEQ ID NO: 23348 - DNA, 76 bp, Artificial Sequence; identical to SEQ ID NO: 3678
  Description of Artificial Sequence: Synthetic pecan; 5' sequence + inner sequence + 3' sequence

SEQ ID NO: 23349 - DNA, 76 bp, Artificial Sequence; identical to SEQ ID NO: 11936
  Description of Artificial Sequence: Synthetic pecan; 5' sequence + inner sequence + 3' sequence

SEQ ID NO: 23350 - DNA, 76 bp, Artificial Sequence; identical to SEQ ID NO: 3355
  Description of Artificial Sequence: Synthetic pecan; 5' sequence + inner sequence + 3' sequence

SEQ ID NO: 23351 - DNA, 76 bp, Artificial Sequence; identical to SEQ ID NO: 3379
  Description of Artificial Sequence: Synthetic pecan; 5' sequence + inner sequence + 3' sequence

SEQ ID NO: 23352 - DNA, 76 bp, Artificial Sequence; identical to SEQ ID NO: 3860
  Description of Artificial Sequence: Synthetic pecan; 5' sequence + inner sequence + 3' sequence

SEQ ID NO: 23353 - DNA, 76 bp, Artificial Sequence
  Description of Artificial Sequence: Synthetic pecan; 5' sequence + inner sequence + 3' sequence
tagggaagagaaggacatatgatccgtagcgacattaagcggtggtgtgcgtgttgactagtacatgaccacttga

SEQ ID NO: 23354 - DNA, 76 bp, Artificial Sequence; identical to SEQ ID NO: 3493
  Description of Artificial Sequence: Synthetic pecan; 5' sequence + inner sequence + 3' sequence

SEQ ID NO: 23355 - DNA, 76 bp, Artificial Sequence; identical to SEQ ID NO: 3881
  Description of Artificial Sequence: Synthetic pecan; 5' sequence + inner sequence + 3' sequence

SEQ ID NO: 23356 - DNA, 76 bp, Artificial Sequence; identical to SEQ ID NO: 3147
  Description of Artificial Sequence: Synthetic pecan; 5' sequence + inner sequence + 3' sequence

SEQ ID NO: 23357 - DNA, 76 bp, Artificial Sequence; identical to SEQ ID NO: 11810
  Description of Artificial Sequence: Synthetic pecan; 5' sequence + inner sequence + 3' sequence

SEQ ID NO: 23358 - DNA, 76 bp, Artificial Sequence; identical to SEQ ID NO: 3167
  Description of Artificial Sequence: Synthetic pecan; 5' sequence + inner sequence + 3' sequence

SEQ ID NO: 23359 - DNA, 76 bp, Artificial Sequence; identical to SEQ ID NO: 3805
  Description of Artificial Sequence: Synthetic pecan; 5' sequence + inner sequence + 3' sequence

SEQ ID NO: 23360 - DNA, 76 bp, Artificial Sequence; identical to SEQ ID NO: 3685
  Description of Artificial Sequence: Synthetic pecan; 5' sequence + inner sequence + 3' sequence

SEQ ID NO: 23361 - DNA, 76 bp, Artificial Sequence; identical to SEQ ID NO: 11993
  Description of Artificial Sequence: Synthetic pecan; 5' sequence + inner sequence + 3' sequence

SEQ ID NO: 23362 - DNA, 76 bp, Artificial Sequence; identical to SEQ ID NO: 3919
  Description of Artificial Sequence: Synthetic pecan; 5' sequence + inner sequence + 3' sequence

SEQ ID NO: 23363 - DNA, 76 bp, Artificial Sequence
  Description of Artificial Sequence: Synthetic pecan; 5' sequence + inner sequence + 3' sequence
tagggaagagaaggacatatgatgcacgactcgcatcctatcatgaggccatgttgactagtacatgaccacttga

SEQ ID NO: 23364 - DNA, 76 bp, Artificial Sequence; identical to SEQ ID NO: 3644
  Description of Artificial Sequence: Synthetic pecan; 5' sequence + inner sequence + 3' sequence

SEQ ID NO: 23365 - DNA, 76 bp, Artificial Sequence; identical to SEQ ID NO: 3979
  Description of Artificial Sequence: Synthetic pecan; 5' sequence + inner sequence + 3' sequence

SEQ ID NO: 23366 - DNA, 76 bp, Artificial Sequence; identical to SEQ ID NO: 3068
  Description of Artificial Sequence: Synthetic pecan; 5' sequence + inner sequence + 3' sequence

SEQ ID NO: 23367 - DNA, 76 bp, Artificial Sequence
  Description of Artificial Sequence: Synthetic pecan; 5' sequence + inner sequence + 3' sequence
tagggaagagaaggacatatgatccgtagcgacatcgagcggtggtgtgcgtgttgactagtacatgaccacttga

SEQ ID NO: 23368 - DNA, 76 bp, Artificial Sequence; identical to SEQ ID NO: 3727
  Description of Artificial Sequence: Synthetic pecan; 5' sequence + inner sequence + 3' sequence

SEQ ID NO: 23369 - DNA, 76 bp, Artificial Sequence; identical to SEQ ID NO: 3326
  Description of Artificial Sequence: Synthetic pecan; 5' sequence + inner sequence + 3' sequence

SEQ ID NO: 23370 - DNA, 76 bp, Artificial Sequence; identical to SEQ ID NO: 11801
  Description of Artificial Sequence: Synthetic pecan; 5' sequence + inner sequence + 3' sequence

SEQ ID NO: 23371 - DNA, 76 bp, Artificial Sequence
  Description of Artificial Sequence: Synthetic pecan; 5' sequence + inner sequence + 3' sequence
tagggaagagaaggacatatgatccgcacgtagccctatcagtggtacatgcattgactagtacatgaccacttga

SEQ ID NO: 23372 - DNA, 76 bp, Artificial Sequence
  Description of Artificial Sequence: Synthetic pecan; 5' sequence + inner sequence + 3' sequence
tagggaagagaaggacatatgatggccacagcgtacctcaacgcggacgtgcattgactagtacatgaccacttga

SEQ ID NO: 23373 - DNA, 76 bp, Artificial Sequence; identical to SEQ ID NO: 3962
  Description of Artificial Sequence: Synthetic pecan; 5' sequence + inner sequence + 3' sequence

SEQ ID NO: 23374 - DNA, 76 bp, Artificial Sequence; identical to SEQ ID NO: 3064
  Description of Artificial Sequence: Synthetic pecan; 5' sequence + inner sequence + 3' sequence

SEQ ID NO: 23375 - DNA, 76 bp, Artificial Sequence; identical to SEQ ID NO: 11946
  Description of Artificial Sequence: Synthetic pecan; 5' sequence + inner sequence + 3' sequence

SEQ ID NO: 23376 - DNA, 76 bp, Artificial Sequence; identical to SEQ ID NO: 7364
  Description of Artificial Sequence: Synthetic pecan; 5' sequence + inner sequence + 3' sequence

SEQ ID NO: 23377 - DNA, 76 bp, Artificial Sequence; identical to SEQ ID NO: 11769
  Description of Artificial Sequence: Synthetic pecan; 5' sequence + inner sequence + 3' sequence

SEQ ID NO: 23378 - DNA, 76 bp, Artificial Sequence; identical to SEQ ID NO: 3385
  Description of Artificial Sequence: Synthetic pecan; 5' sequence + inner sequence + 3' sequence

SEQ ID NO: 23379 - DNA, 76 bp, Artificial Sequence; identical to SEQ ID NO: 7653
  Description of Artificial Sequence: Synthetic pecan; 5' sequence + inner sequence + 3' sequence

SEQ ID NO: 23380 - DNA, 76 bp, Artificial Sequence; identical to SEQ ID NO: 7590
  Description of Artificial Sequence: Synthetic pecan; 5' sequence + inner sequence + 3' sequence

SEQ ID NO: 23381 - DNA, 76 bp, Artificial Sequence; identical to SEQ ID NO: 3481
  Description of Artificial Sequence: Synthetic pecan; 5' sequence + inner sequence + 3' sequence

SEQ ID NO: 23382 - DNA, 76 bp, Artificial Sequence
  Description of Artificial Sequence: Synthetic pecan; 5' sequence + inner sequence + 3' sequence
tagggaagagaaggacatatgatggcacaaacggaccgacaattgcgcatggattgactagtacatgaccacttga

SEQ ID NO: 23383 - DNA, 76 bp, Artificial Sequence
  Description of Artificial Sequence: Synthetic pecan; 5' sequence + inner sequence + 3' sequence
tagggaagagaaggacatatgatccgcacgtagccctatcaatggtgcatgcattgactagtacatgaccacttga

SEQ ID NO: 23384 - DNA, 76 bp, Artificial Sequence; identical to SEQ ID NO: 3540
  Description of Artificial Sequence: Synthetic pecan; 5' sequence + inner sequence + 3' sequence

SEQ ID NO: 23385 - DNA, 76 bp, Artificial Sequence
  Description of Artificial Sequence: Synthetic pecan; 5' sequence + inner sequence + 3' sequence
tagggaagagaaggacatatgatgcacgacttgcaccctatcatgaggccatgttgactagtacatgaccacttga

SEQ ID NO: 23386 - DNA, 76 bp, Artificial Sequence; identical to SEQ ID NO: 3545
  Description of Artificial Sequence: Synthetic pecan; 5' sequence + inner sequence + 3' sequence

SEQ ID NO: 23387 - DNA, 76 bp, Artificial Sequence; identical to SEQ ID NO: 3526
  Description of Artificial Sequence: Synthetic pecan; 5' sequence + inner sequence + 3' sequence

SEQ ID NO: 23388 - DNA, 76 bp, Artificial Sequence
  Description of Artificial Sequence: Synthetic pecan; 5' sequence + inner sequence + 3' sequence
tagggaagagaaggacatatgatccgcacgtagccctataagtggtgcatgcattgactagtacatgaccacttga

SEQ ID NO: 23389 - DNA, 76 bp, Artificial Sequence; identical to SEQ ID NO: 7381
  Description of Artificial Sequence: Synthetic pecan; 5' sequence + inner sequence + 3' sequence

SEQ ID NO: 23390 - DNA, 76 bp, Artificial Sequence
  Description of Artificial Sequence: Synthetic pecan; 5' sequence + inner sequence + 3' sequence
tagggaagagaaggacatatgatccgatcgcacgtcaaggcaggctgtacgacttgactagtacatgaccacttga

SEQ ID NO: 23391 - DNA, 76 bp, Artificial Sequence; identical to SEQ ID NO: 3684
  Description of Artificial Sequence: Synthetic pecan; 5' sequence + inner sequence + 3' sequence

SEQ ID NO: 23392 - DNA, 76 bp, Artificial Sequence; identical to SEQ ID NO: 3223
  Description of Artificial Sequence: Synthetic pecan; 5' sequence + inner sequence + 3' sequence

SEQ ID NO: 23393 - DNA, 76 bp, Artificial Sequence; identical to SEQ ID NO: 7620
  Description of Artificial Sequence: Synthetic pecan; 5' sequence + inner sequence + 3' sequence

SEQ ID NO: 23394 - DNA, 76 bp, Artificial Sequence; identical to SEQ ID NO: 3133
  Description of Artificial Sequence: Synthetic pecan; 5' sequence + inner sequence + 3' sequence

SEQ ID NO: 23395 - DNA, 76 bp, Artificial Sequence; identical to SEQ ID NO: 3591
  Description of Artificial Sequence: Synthetic pecan; 5' sequence + inner sequence + 3' sequence

SEQ ID NO: 23396 - DNA, 76 bp, Artificial Sequence; identical to SEQ ID NO: 3289
  Description of Artificial Sequence: Synthetic pecan; 5' sequence + inner sequence + 3' sequence

SEQ ID NO: 23397 - DNA, 76 bp, Artificial Sequence
  Description of Artificial Sequence: Synthetic pecan; 5' sequence + inner sequence + 3' sequence
tagggaagagaaggacatatgatggacgcagcttgcctactgggggtcacgtattgactagtacatgaccacttga

SEQ ID NO: 23398 - DNA, 76 bp, Artificial Sequence
  Description of Artificial Sequence: Synthetic pecan; 5' sequence + inner sequence + 3' sequence
tagggaagagaaggacatatgatggcatgcacgcacctacacgtgggtatgcattgactagtacatgaccacttga

SEQ ID NO: 23399 - DNA, 76 bp, Artificial Sequence; identical to SEQ ID NO: 3778
  Description of Artificial Sequence: Synthetic pecan; 5' sequence + inner sequence + 3' sequence

SEQ ID NO: 23400 - DNA, 76 bp, Artificial Sequence; identical to SEQ ID NO: 7977
  Description of Artificial Sequence: Synthetic pecan; 5' sequence + inner sequence + 3' sequence

SEQ ID NO: 23401 - DNA, 76 bp, Artificial Sequence; identical to SEQ ID NO: 7658
  Description of Artificial Sequence: Synthetic pecan; 5' sequence + inner sequence + 3' sequence

SEQ ID NO: 23402 - DNA, 76 bp, Artificial Sequence; identical to SEQ ID NO: 3580
  Description of Artificial Sequence: Synthetic pecan; 5' sequence + inner sequence + 3' sequence

SEQ ID NO: 23403 - DNA, 76 bp, Artificial Sequence; identical to SEQ ID NO: 3306
  Description of Artificial Sequence: Synthetic pecan; 5' sequence + inner sequence + 3' sequence

SEQ ID NO: 23404 - DNA, 76 bp, Artificial Sequence; identical to SEQ ID NO: 7420
  Description of Artificial Sequence: Synthetic pecan; 5' sequence + inner sequence + 3' sequence

SEQ ID NO: 23405 - DNA, 76 bp, Artificial Sequence; identical to SEQ ID NO: 3110
  Description of Artificial Sequence: Synthetic pecan; 5' sequence + inner sequence + 3' sequence

SEQ ID NO: 23406 - DNA, 76 bp, Artificial Sequence; identical to SEQ ID NO: 7708
  Description of Artificial Sequence: Synthetic pecan; 5' sequence + inner sequence + 3' sequence

SEQ ID NO: 23407 - DNA, 76 bp, Artificial Sequence
  Description of Artificial Sequence: Synthetic pecan; 5' sequence + inner sequence + 3' sequence
tagggaagagaaggacatatgatggcacaaacggaccgacaagtgcgcatggcttgactagtacatgaccacttga

SEQ ID NO: 23408 - DNA, 76 bp, Artificial Sequence
  Description of Artificial Sequence: Synthetic pecan; 5' sequence + inner sequence + 3' sequence
tagggaagagaaggacatatgatggacgcagcttgccgtagggtggcatgggattgactagtacatgaccacttga

SEQ ID NO: 23409 - DNA, 76 bp, Artificial Sequence; identical to SEQ ID NO: 7857
  Description of Artificial Sequence: Synthetic pecan; 5' sequence + inner sequence + 3' sequence

SEQ ID NO: 23410 - DNA, 76 bp, Artificial Sequence
  Description of Artificial Sequence: Synthetic pecan; 5' sequence + inner sequence + 3' sequence
tagggaagagaaggacatatgatccgcacgtagccctctcagtggtgcatgcattgactagtacatgaccacttga

SEQ ID NO: 23411 - DNA, 76 bp, Artificial Sequence; identical to SEQ ID NO: 3351
  Description of Artificial Sequence: Synthetic pecan; 5' sequence + inner sequence + 3' sequence

SEQ ID NO: 23412 - DNA, 76 bp, Artificial Sequence; identical to SEQ ID NO: 3449
  Description of Artificial Sequence: Synthetic pecan; 5' sequence + inner sequence + 3' sequence

SEQ ID NO: 23413 - DNA, 76 bp, Artificial Sequence
  Description of Artificial Sequence: Synthetic pecan; 5' sequence + inner sequence + 3' sequence
tagggaagagaaggacatatgatccgcacgtagccctatcagtggtgcattcattgactagtacatgaccacttga

SEQ ID NO: 23414 - DNA, 76 bp, Artificial Sequence; identical to SEQ ID NO: 3528
  Description of Artificial Sequence: Synthetic pecan; 5' sequence + inner sequence + 3' sequence

SEQ ID NO: 23415 - DNA, 76 bp, Artificial Sequence
  Description of Artificial Sequence: Synthetic pecan; 5' sequence + inner sequence + 3' sequence
tagggaagagaaggacatatgatccgtacgtagccctatcagtggtgcatgcattgactagtacatgaccacttga

SEQ ID NO: 23416 - DNA, 76 bp, Artificial Sequence; identical to SEQ ID NO: 3498
  Description of Artificial Sequence: Synthetic pecan; 5' sequence + inner sequence + 3' sequence

SEQ ID NO: 23417 - DNA, 76 bp, Artificial Sequence
  Description of Artificial Sequence: Synthetic pecan; 5' sequence + inner sequence + 3' sequence
tagggaagagaaggacatatgatccatcgcgtcactatcatttgtgtcacgtattgactagtacatgaccacttga

SEQ ID NO: 23418 - DNA, 76 bp, Artificial Sequence
  Description of Artificial Sequence: Synthetic pecan; 5' sequence + inner sequence + 3' sequence
tagggaagagaaggacatatgatggacgcagcttgcctactggtggttacgtattgactagtacatgaccacttga

SEQ ID NO: 23419 - DNA, 76 bp, Artificial Sequence; identical to SEQ ID NO: 3585
  Description of Artificial Sequence: Synthetic pecan; 5' sequence + inner sequence + 3' sequence

SEQ ID NO: 23420 - DNA, 76 bp, Artificial Sequence
  Description of Artificial Sequence: Synthetic pecan; 5' sequence + inner sequence + 3' sequence
tagggaagagaaggacatatgatggcatgcacgcacctacaagtgggtatggattgactagtacatgaccacttga

SEQ ID NO: 23421 - DNA, 76 bp, Artificial Sequence; identical to SEQ ID NO: 7933
  Description of Artificial Sequence: Synthetic pecan; 5' sequence + inner sequence + 3' sequence

SEQ ID NO: 23422 - DNA, 76 bp, Artificial Sequence; identical to SEQ ID NO: 3871
  Description of Artificial Sequence: Synthetic pecan; 5' sequence + inner sequence + 3' sequence

SEQ ID NO: 23423 - DNA, 76 bp, Artificial Sequence; identical to SEQ ID NO: 3496
  Description of Artificial Sequence: Synthetic pecan; 5' sequence + inner sequence + 3' sequence

SEQ ID NO: 23424 - DNA, 76 bp, Artificial Sequence
  Description of Artificial Sequence: Synthetic pecan; 5' sequence + inner sequence + 3' sequence
tagggaagagaaggacatatgatccgcacgtagccctatcagtggtgcacgcattgactagtacatgaccacttga

SEQ ID NO: 23425 - DNA, 76 bp, Artificial Sequence; identical to SEQ ID NO: 3200
  Description of Artificial Sequence: Synthetic pecan; 5' sequence + inner sequence + 3' sequence

SEQ ID NO: 23426 - DNA, 76 bp, Artificial Sequence
  Description of Artificial Sequence: Synthetic pecan; 5' sequence + inner sequence + 3' sequence
tagggaagagaaggacatatgatccatcgcgtcactatcatgtttgtcacgtattgactagtacatgaccacttga

SEQ ID NO: 23427 - DNA, 76 bp, Artificial Sequence
  Description of Artificial Sequence: Synthetic pecan; 5' sequence + inner sequence + 3' sequence
tagggaagagaaggacatatgatggacgcagcttgcctactggtggtcacgtcttgactagtacatgaccacttga

SEQ ID NO: 23428 - DNA, 76 bp, Artificial Sequence
  Description of Artificial Sequence: Synthetic pecan; 5' sequence + inner sequence + 3' sequence
tagggaagagaaggacatatgatggcatgcacgtacctacacgtgggtatggattgactagtacatgaccacttga

SEQ ID NO: 23429 - DNA, 76 bp, Artificial Sequence; identical to SEQ ID NO: 3466
  Description of Artificial Sequence: Synthetic pecan; 5' sequence + inner sequence + 3' sequence

SEQ ID NO: 23430 - DNA, 76 bp, Artificial Sequence
  Description of Artificial Sequence: Synthetic pecan; 5' sequence + inner sequence + 3' sequence
tagggaagagaaggacatatgatccgaacgtagccctatcagtggtgcatgcattgactagtacatgaccacttga

SEQ ID NO: 23431 - DNA, 76 bp, Artificial Sequence; identical to SEQ ID NO: 3486
  Description of Artificial Sequence: Synthetic pecan; 5' sequence + inner sequence + 3' sequence

SEQ ID NO: 23432 - DNA, 76 bp, Artificial Sequence; identical to SEQ ID NO: 7867
  Description of Artificial Sequence: Synthetic pecan; 5' sequence + inner sequence + 3' sequence

SEQ ID NO: 23433 - DNA, 76 bp, Artificial Sequence; identical to SEQ ID NO: 3430
  Description of Artificial Sequence: Synthetic pecan; 5' sequence + inner sequence + 3' sequence

SEQ ID NO: 23434 - DNA, 76 bp, Artificial Sequence; identical to SEQ ID NO: 3316
  Description of Artificial Sequence: Synthetic pecan; 5' sequence + inner sequence + 3' sequence

SEQ ID NO: 23435 - DNA, 76 bp, Artificial Sequence; identical to SEQ ID NO: 3331
  Description of Artificial Sequence: Synthetic pecan; 5' sequence + inner sequence + 3' sequence

SEQ ID NO: 23436 - DNA, 76 bp, Artificial Sequence; identical to SEQ ID NO: 3401
  Description of Artificial Sequence: Synthetic pecan; 5' sequence + inner sequence + 3' sequence

SEQ ID NO: 23437 - DNA, 76 bp, Artificial Sequence; identical to SEQ ID NO: 3828
  Description of Artificial Sequence: Synthetic pecan; 5' sequence + inner sequence + 3' sequence

SEQ ID NO: 23438 - DNA, 76 bp, Artificial Sequence; identical to SEQ ID NO: 3772
  Description of Artificial Sequence: Synthetic pecan; 5' sequence + inner sequence + 3' sequence

SEQ ID NO: 23439 - DNA, 76 bp, Artificial Sequence; identical to SEQ ID NO: 7575
  Description of Artificial Sequence: Synthetic pecan; 5' sequence + inner sequence + 3' sequence

SEQ ID NO: 23440 - DNA, 73 bp, Artificial Sequence; identical to SEQ ID NO: 3885
  Description of Artificial Sequence: Synthetic pecan; 5' sequence + inner sequence + 3' sequence

SEQ ID NO: 23441 - DNA, 76 bp, Artificial Sequence
  Description of Artificial Sequence: Synthetic pecan; 5' sequence + inner sequence + 3' sequence
tagggaagagaaggacatatgatggacgcagcttgcatactggtggtcacgtattgactagtacatgaccacttga

SEQ ID NO: 23442 - DNA, 76 bp, Artificial Sequence; identical to SEQ ID NO: 7998
  Description of Artificial Sequence: Synthetic pecan; 5' sequence + inner sequence + 3' sequence

SEQ ID NO: 23443 - DNA, 76 bp, Artificial Sequence; identical to SEQ ID NO: 3945
  Description of Artificial Sequence: Synthetic pecan; 5' sequence + inner sequence + 3' sequence

SEQ ID NO: 23444 - DNA, 76 bp, Artificial Sequence; identical to SEQ ID NO: 3742
  Description of Artificial Sequence: Synthetic pecan; 5' sequence + inner sequence + 3' sequence

SEQ ID NO: 23445 - DNA, 76 bp, Artificial Sequence
  Description of Artificial Sequence: Synthetic pecan; 5' sequence + inner sequence + 3' sequence
tagggaagagaaggacatatgatggacgcagcttgcctactagtggtcacgtattgactagtacatgaccacttga

SEQ ID NO: 23446 - DNA, 76 bp, Artificial Sequence; identical to SEQ ID NO: 3756
  Description of Artificial Sequence: Synthetic pecan; 5' sequence + inner sequence + 3' sequence

SEQ ID NO: 23447 - DNA, 76 bp, Artificial Sequence; identical to SEQ ID NO: 3016
  Description of Artificial Sequence: Synthetic pecan; 5' sequence + inner sequence + 3' sequence

SEQ ID NO: 23448 - DNA, 76 bp, Artificial Sequence; identical to SEQ ID NO: 3583
  Description of Artificial Sequence: Synthetic pecan; 5' sequence + inner sequence + 3' sequence

SEQ ID NO: 23449 - DNA, 76 bp, Artificial Sequence; identical to SEQ ID NO: 11546
  Description of Artificial Sequence: Synthetic pecan; 5' sequence + inner sequence + 3' sequence

SEQ ID NO: 23450 - DNA, 76 bp, Artificial Sequence; identical to SEQ ID NO: 3047
  Description of Artificial Sequence: Synthetic pecan; 5' sequence + inner sequence + 3' sequence

SEQ ID NO: 23451 - DNA, 76 bp, Artificial Sequence; identical to SEQ ID NO: 3512
  Description of Artificial Sequence: Synthetic pecan; 5' sequence + inner sequence + 3' sequence

SEQ ID NO: 23452 - DNA, 76 bp, Artificial Sequence; identical to SEQ ID NO: 19640
  Description of Artificial Sequence: Synthetic pecan; 5' sequence + inner sequence + 3' sequence

SEQ ID NO: 23453 - DNA, 76 bp, Artificial Sequence; identical to SEQ ID NO: 7552
  Description of Artificial Sequence: Synthetic pecan; 5' sequence + inner sequence + 3' sequence

SEQ ID NO: 23454 - DNA, 76 bp, Artificial Sequence; identical to SEQ ID NO: 3387
  Description of Artificial Sequence: Synthetic pecan; 5' sequence + inner sequence + 3' sequence

SEQ ID NO: 23455 - DNA, 77 bp, Artificial Sequence; identical to SEQ ID NO: 7245
  Description of Artificial Sequence: Synthetic pecan; 5' sequence + inner sequence + 3' sequence

SEQ ID NO: 23456 - DNA, 76 bp, Artificial Sequence; identical to SEQ ID NO: 7888
  Description of Artificial Sequence: Synthetic pecan; 5' sequence + inner sequence + 3' sequence

SEQ ID NO: 23457 - DNA, 76 bp, Artificial Sequence; identical to SEQ ID NO: 3791
  Description of Artificial Sequence: Synthetic pecan; 5' sequence + inner sequence + 3' sequence

SEQ ID NO: 23458 - DNA, 76 bp, Artificial Sequence
  Description of Artificial Sequence: Synthetic pecan; 5' sequence + inner sequence + 3' sequence
tagggaagagaaggacatatgatgtgcgcatcgtcccgtcatgtggttccgtattgactagtacatgaccacttga

SEQ ID NO: 23459 - DNA, 76 bp, Artificial Sequence; identical to SEQ ID NO: 7743
  Description of Artificial Sequence: Synthetic pecan; 5' sequence + inner sequence + 3' sequence

SEQ ID NO: 23460 - DNA, 76 bp, Artificial Sequence; identical to SEQ ID NO: 11949
  Description of Artificial Sequence: Synthetic pecan; 5' sequence + inner sequence + 3' sequence

SEQ ID NO: 23461 - DNA, 76 bp, Artificial Sequence; identical to SEQ ID NO: 15936
  Description of Artificial Sequence: Synthetic pecan; 5' sequence + inner sequence + 3' sequence

SEQ ID NO: 23462 - DNA, 76 bp, Artificial Sequence
  Description of Artificial Sequence: Synthetic pecan; 5' sequence + inner sequence + 3' sequence
tagggaagagaaggacatatgatgcgcctgatgcgtgccgttcaagtgcgccattgactagtacatgaccacttga

SEQ ID NO: 23463 - DNA, 76 bp, Artificial Sequence
  Description of Artificial Sequence: Synthetic pecan; 5' sequence + inner sequence + 3' sequence
tagggaagagaaggacatatgatggcatgcacgcacctacacgtggttatggattgactagtacatgaccacttga

SEQ ID NO: 23464 - DNA, 76 bp, Artificial Sequence; identical to SEQ ID NO: 3912
  Description of Artificial Sequence: Synthetic pecan; 5' sequence + inner sequence + 3' sequence

SEQ ID NO: 23465 - DNA, 76 bp, Artificial Sequence; identical to SEQ ID NO: 7641
  Description of Artificial Sequence: Synthetic pecan; 5' sequence + inner sequence + 3' sequence

SEQ ID NO: 23466 - DNA, 76 bp, Artificial Sequence
  Description of Artificial Sequence: Synthetic pecan; 5' sequence + inner sequence + 3' sequence
tagggaagagaaggacatatgatgtacgcatcgtcccgtcatgtggttacgtattgactagtacatgaccacttga

SEQ ID NO: 23467 - DNA, 76 bp, Artificial Sequence; identical to SEQ ID NO: 19695
  Description of Artificial Sequence: Synthetic pecan; 5' sequence + inner sequence + 3' sequence

SEQ ID NO: 23468 - DNA, 76 bp, Artificial Sequence
  Description of Artificial Sequence: Synthetic pecan; 5' sequence + inner sequence + 3' sequence
tagggaagagaaggacatatgatgtcactgtgcctgaccgtcaagttgcgtcattgactagtacatgaccacttga

SEQ ID NO: 23469 - DNA, 75 bp, Artificial Sequence
  Description of Artificial Sequence: Synthetic pecan; 5' sequence + inner sequence + 3' sequence
tagggaagagaaggacatatgatgcacgccgatgccctcatgtggccgtggtttgactagtacatgaccacttga

SEQ ID NO: 23470 - DNA, 76 bp, Artificial Sequence; identical to SEQ ID NO: 3488
  Description of Artificial Sequence: Synthetic pecan; 5' sequence + inner sequence + 3' sequence

SEQ ID NO: 23471 - DNA, 76 bp, Artificial Sequence; identical to SEQ ID NO: 3620
  Description of Artificial Sequence: Synthetic pecan; 5' sequence + inner sequence + 3' sequence

SEQ ID NO: 23472 - DNA, 76 bp, Artificial Sequence
  Description of Artificial Sequence: Synthetic pecan; 5' sequence + inner sequence + 3' sequence
tagggaagagaaggacatatgatggcacaaacggaccgtcaagtgcgcatggattgactagtacatgaccacttga

SEQ ID NO: 23473 - DNA, 76 bp, Artificial Sequence
  Description of Artificial Sequence: Synthetic pecan; 5' sequence + inner sequence + 3' sequence
tagggaagagaaggacatatgatggacgcagcgaaccgtacgtggacgtggcgttgactagtacatgaccacttga

SEQ ID NO: 23474 - DNA, 76 bp, Artificial Sequence; identical to SEQ ID NO: 3774
  Description of Artificial Sequence: Synthetic pecan; 5' sequence + inner sequence + 3' sequence

SEQ ID NO: 23475 - DNA, 76 bp, Artificial Sequence
  Description of Artificial Sequence: Synthetic pecan; 5' sequence + inner sequence + 3' sequence
tagggaagagaaggacatatgatccgcacgtagccccatcagtggtgcatgcattgactagtacatgaccacttga

SEQ ID NO: 23476 - DNA, 76 bp, Artificial Sequence; identical to SEQ ID NO: 3026
  Description of Artificial Sequence: Synthetic pecan; 5' sequence + inner sequence + 3' sequence

SEQ ID NO: 23477 - DNA, 76 bp, Artificial Sequence
  Description of Artificial Sequence: Synthetic pecan; 5' sequence + inner sequence + 3' sequence
tagggaagagaaggacatatgatggcacaaacggaacgacaagtgcgcatggattgactagtacatgaccacttga

SEQ ID NO: 23478 - DNA, 76 bp, Artificial Sequence
  Description of Artificial Sequence: Synthetic pecan; 5' sequence + inner sequence + 3' sequence
tagggaagagaaggacatatgatgcactgcacgcaccctatcatgttggcatgttgactagtacatgaccacttga

SEQ ID NO: 23479 - DNA, 76 bp, Artificial Sequence; identical to SEQ ID NO: 3375
  Description of Artificial Sequence: Synthetic pecan; 5' sequence + inner sequence + 3' sequence

SEQ ID NO: 23480 - DNA, 76 bp, Artificial Sequence; identical to SEQ ID NO: 15866
  Description of Artificial Sequence: Synthetic pecan; 5' sequence + inner sequence + 3' sequence

SEQ ID NO: 23481 - DNA, 76 bp, Artificial Sequence; identical to SEQ ID NO: 7419
  Description of Artificial Sequence: Synthetic pecan; 5' sequence + inner sequence + 3' sequence

SEQ ID NO: 23482 - DNA, 76 bp, Artificial Sequence; identical to SEQ ID NO: 3237
  Description of Artificial Sequence: Synthetic pecan; 5' sequence + inner sequence + 3' sequence

SEQ ID NO: 23483 - DNA, 76 bp, Artificial Sequence
  Description of Artificial Sequence: Synthetic pecan; 5' sequence + inner sequence + 3' sequence
tagggaagagaaggacatatgatggcacacacggaccgacaagtgcgcatggattgactagtacatgaccacttga

SEQ ID NO: 23484 - DNA, 76 bp, Artificial Sequence; identical to SEQ ID NO: 7893
  Description of Artificial Sequence: Synthetic pecan; 5' sequence + inner sequence + 3' sequence

SEQ ID NO: 23485 - DNA, 76 bp, Artificial Sequence
  Description of Artificial Sequence: Synthetic pecan; 5' sequence + inner sequence + 3' sequence
tagggaagagaaggacatatgatccgcacgtagccttatcagtggtgcatgcattgactagtacatgaccacttga

SEQ ID NO: 23486 - DNA, 76 bp, Artificial Sequence
  Description of Artificial Sequence: Synthetic pecan; 5' sequence + inner sequence + 3' sequence
tagggaagagaaggacatatgatgtcactgtgcatgaccgtcaagttgcggcattgactagtacatgaccacttga

SEQ ID NO: 23487 - DNA, 76 bp, Artificial Sequence; identical to SEQ ID NO: 7610
  Description of Artificial Sequence: Synthetic pecan; 5' sequence + inner sequence + 3' sequence

SEQ ID NO: 23488 - DNA, 76 bp, Artificial Sequence; identical to SEQ ID NO: 3527
  Description of Artificial Sequence: Synthetic pecan; 5' sequence + inner sequence + 3' sequence

SEQ ID NO: 23489 - DNA, 76 bp, Artificial Sequence; identical to SEQ ID NO: 7627
  Description of Artificial Sequence: Synthetic pecan; 5' sequence + inner sequence + 3' sequence

SEQ ID NO: 23490 - DNA, 76 bp, Artificial Sequence
  Description of Artificial Sequence: Synthetic pecan; 5' sequence + inner sequence + 3' sequence
tagggaagagaaggacatatgatccgcacgtagccctatcagtggtgcatgccttgactagtacatgaccacttga

SEQ ID NO: 23491 - DNA, 76 bp, Artificial Sequence; identical to SEQ ID NO: 7776
  Description of Artificial Sequence: Synthetic pecan; 5' sequence + inner sequence + 3' sequence

SEQ ID NO: 23492 - DNA, 75 bp, Artificial Sequence; identical to SEQ ID NO: 3873
  Description of Artificial Sequence: Synthetic pecan; 5' sequence + inner sequence + 3' sequence

SEQ ID NO: 23493 - DNA, 76 bp, Artificial Sequence; identical to SEQ ID NO: 3386
  Description of Artificial Sequence: Synthetic pecan; 5' sequence + inner sequence + 3' sequence

SEQ ID NO: 23494 - DNA, 76 bp, Artificial Sequence; identical to SEQ ID NO: 7898
  Description of Artificial Sequence: Synthetic pecan; 5' sequence + inner sequence + 3' sequence

SEQ ID NO: 23495 - DNA, 76 bp, Artificial Sequence
  Description of Artificial Sequence: Synthetic pecan; 5' sequence + inner sequence + 3' sequence
tagggaagagaaggacatatgatcgcaccgtacgacaacgtgcttgcgtggcgttgactagtacatgaccacttga

SEQ ID NO: 23496 - DNA, 76 bp, Artificial Sequence
  Description of Artificial Sequence: Synthetic pecan; 5' sequence + inner sequence + 3' sequence
tagggaagagaaggacatatgatgcacgactcgcaccctatcatgtggccatgttgactagtacatgaccacttga

SEQ ID NO: 23497 - DNA, 74 bp, Artificial Sequence; identical to SEQ ID NO: 3423
  Description of Artificial Sequence: Synthetic pecan; 5' sequence + inner sequence + 3' sequence

SEQ ID NO: 23498 - DNA, 76 bp, Artificial Sequence
  Description of Artificial Sequence: Synthetic pecan; 5' sequence + inner sequence + 3' sequence
tagggaagagaaggacatatgatggacgcagcttgtctactggtggtcacgtattgactagtacatgaccacttga

SEQ ID NO: 23499 - DNA, 76 bp, Artificial Sequence; identical to SEQ ID NO: 3270
  Description of Artificial Sequence: Synthetic pecan; 5' sequence + inner sequence + 3' sequence

SEQ ID NO: 23500 - DNA, 76 bp, Artificial Sequence; identical to SEQ ID NO: 3754
  Description of Artificial Sequence: Synthetic pecan; 5' sequence + inner sequence + 3' sequence

SEQ ID NO: 23501 - DNA, 76 bp, Artificial Sequence
  Description of Artificial Sequence: Synthetic pecan; 5' sequence + inner sequence + 3' sequence
tagggaagagaaggacatatgatccgatcgcacgtcaaggcatgctgtacgagttgactagtacatgaccacttga

SEQ ID NO: 23502 - DNA, 76 bp, Artificial Sequence
  Description of Artificial Sequence: Synthetic pecan; 5' sequence + inner sequence + 3' sequence
tagggaagagaaggacatatgatgcacgactcccaccctatcatgaggccatgttgactagtacatgaccacttga

SEQ ID NO: 23503 - DNA, 76 bp, Artificial Sequence; identical to SEQ ID NO: 7943
  Description of Artificial Sequence: Synthetic pecan; 5' sequence + inner sequence + 3' sequence

SEQ ID NO: 23504 - DNA, 76 bp, Artificial Sequence
  Description of Artificial Sequence: Synthetic pecan; 5' sequence + inner sequence + 3' sequence
tagggaagagaaggacatatgatgtacgcatcgtcacgtcatgtggttccgtattgactagtacatgaccacttga

SEQ ID NO: 23505 - DNA, 76 bp, Artificial Sequence; identical to SEQ ID NO: 3452
  Description of Artificial Sequence: Synthetic pecan; 5' sequence + inner sequence + 3' sequence

SEQ ID NO: 23506 - DNA, 76 bp, Artificial Sequence
  Description of Artificial Sequence: Synthetic pecan; 5' sequence + inner sequence + 3' sequence
tagggaagagaaggacatatgattgacgcagcttgcctactggtggtcacgtattgactagtacatgaccacttga

SEQ ID NO: 23507 - DNA, 76 bp, Artificial Sequence
  Description of Artificial Sequence: Synthetic pecan; 5' sequence + inner sequence + 3' sequence
tagggaagagaaggacatatgatggccacagcgtacctcaaagtggacgtgcattgactagtacatgaccacttga

SEQ ID NO: 23508 - DNA, 76 bp, Artificial Sequence; identical to SEQ ID NO: 3381
  Description of Artificial Sequence: Synthetic pecan; 5' sequence + inner sequence + 3' sequence

SEQ ID NO: 23509 - DNA, 76 bp, Artificial Sequence
  Description of Artificial Sequence: Synthetic pecan; 5' sequence + inner sequence + 3' sequence
tagggaagagaaggacatatgatggccgcagcggaacgttcgagtggtacgtattgactagtacatgaccacttga

SEQ ID NO: 23510 - DNA, 76 bp, Artificial Sequence
  Description of Artificial Sequence: Synthetic pecan; 5' sequence + inner sequence + 3' sequence
tagggaagagaaggacatatgatggcacaaacggaccgacaggtgcgcatggattgactagtacatgaccacttga

SEQ ID NO: 23511 - DNA, 76 bp, Artificial Sequence; identical to SEQ ID NO: 3120
  Description of Artificial Sequence: Synthetic pecan; 5' sequence + inner sequence + 3' sequence

SEQ ID NO: 23512 - DNA, 76 bp, Artificial Sequence; identical to SEQ ID NO: 3448
  Description of Artificial Sequence: Synthetic pecan; 5' sequence + inner sequence + 3' sequence

SEQ ID NO: 23513 - DNA, 76 bp, Artificial Sequence
  Description of Artificial Sequence: Synthetic pecan; 5' sequence + inner sequence + 3' sequence
tagggaagagaaggacatatgatggcccaaacggaccgacaagtgcgcatggattgactagtacatgaccacttga

SEQ ID NO: 23514 - DNA, 76 bp, Artificial Sequence
  Description of Artificial Sequence: Synthetic pecan; 5' sequence + inner sequence + 3' sequence
tagggaagagaaggacatatgatccgtagcgacgtcaagcggtggtgtgcgtgttgactagtacatgaccacttga

SEQ ID NO: 23515 - DNA, 76 bp, Artificial Sequence
  Description of Artificial Sequence: Synthetic pecan; 5' sequence + inner sequence + 3' sequence
tagggaagagaaggacatatgatggccacagcgtacctaaacgtggacgtgcattgactagtacatgaccacttga

SEQ ID NO: 23516 - DNA, 76 bp, Artificial Sequence; identical to SEQ ID NO: 7810
  Description of Artificial Sequence: Synthetic pecan; 5' sequence + inner sequence + 3' sequence

SEQ ID NO: 23517 - DNA, 76 bp, Artificial Sequence; identical to SEQ ID NO: 7921
  Description of Artificial Sequence: Synthetic pecan; 5' sequence + inner sequence + 3' sequence

SEQ ID NO: 23518 - DNA, 76 bp, Artificial Sequence
  Description of Artificial Sequence: Synthetic pecan; 5' sequence + inner sequence + 3' sequence
tagggaagagaaggacatatgatggcatgcacgcacatacacgtgggcacgtattgactagtacatgaccacttga

SEQ ID NO: 23519 - DNA, 76 bp, Artificial Sequence
  Description of Artificial Sequence: Synthetic pecan; 5' sequence + inner sequence + 3' sequence
tagggaagagaaggacatatgatgcacgactcgcaccctatcatggcggcatgttgactagtacatgaccacttga

SEQ ID NO: 23520 - DNA, 76 bp, Artificial Sequence; identical to SEQ ID NO: 7230
  Description of Artificial Sequence: Synthetic pecan; 5' sequence + inner sequence + 3' sequence

SEQ ID NO: 23521 - DNA, 76 bp, Artificial Sequence; identical to SEQ ID NO: 3176
  Description of Artificial Sequence: Synthetic pecan; 5' sequence + inner sequence + 3' sequence

SEQ ID NO: 23522 - DNA, 76 bp, Artificial Sequence
  Description of Artificial Sequence: Synthetic pecan; 5' sequence + inner sequence + 3' sequence
tagggaagagaaggacatatgatggcatgcacgcacctacatgtgggcacgtattgactagtacatgaccacttga

SEQ ID NO: 23523 - DNA, 76 bp, Artificial Sequence; identical to SEQ ID NO: 3027
  Description of Artificial Sequence: Synthetic pecan; 5' sequence + inner sequence + 3' sequence

SEQ ID NO: 23524 - DNA, 76 bp, Artificial Sequence
  Description of Artificial Sequence: Synthetic pecan; 5' sequence + inner sequence + 3' sequence
tagggaagagaaggacatatgatgacactgtgcctgaccgtcaagttgcggcattgactagtacatgaccacttga

SEQ ID NO: 23525 - DNA, 76 bp, Artificial Sequence; identical to SEQ ID NO: 3321
  Description of Artificial Sequence: Synthetic pecan; 5' sequence + inner sequence + 3' sequence

SEQ ID NO: 23526 - DNA, 77 bp, Artificial Sequence; identical to SEQ ID NO: 3845
  Description of Artificial Sequence: Synthetic pecan; 5' sequence + inner sequence + 3' sequence

SEQ ID NO: 23527 - DNA, 76 bp, Artificial Sequence
  Description of Artificial Sequence: Synthetic pecan; 5' sequence + inner sequence + 3' sequence
tagggaagagaaggacatatgatggcatgcacgcaactacacgtgggtatggattgactagtacatgaccacttga

SEQ ID NO: 23528 - DNA, 76 bp, Artificial Sequence
  Description of Artificial Sequence: Synthetic pecan; 5' sequence + inner sequence + 3' sequence
tagggaagagaaggacatatgatggccacagcgtacctcaacttggacgtgcattgactagtacatgaccacttga

SEQ ID NO: 23529 - DNA, 76 bp, Artificial Sequence; identical to SEQ ID NO: 3991
  Description of Artificial Sequence: Synthetic pecan; 5' sequence + inner sequence + 3' sequence

SEQ ID NO: 23530 - DNA, 76 bp, Artificial Sequence
  Description of Artificial Sequence: Synthetic pecan; 5' sequence + inner sequence + 3' sequence
tagggaagagaaggacatatgatgcacgactcgcaccctatcatgaagccatgttgactagtacatgaccacttga

SEQ ID NO: 23531 - DNA, 76 bp, Artificial Sequence
  Description of Artificial Sequence: Synthetic pecan; 5' sequence + inner sequence + 3' sequence
tagggaagagaaggacatatgatccgcacgtaggcctatcagtggtgcatgcattgactagtacatgaccacttga

SEQ ID NO: 23532 - DNA, 75 bp, Artificial Sequence
  Description of Artificial Sequence: Synthetic pecan; 5' sequence + inner sequence + 3' sequence
tagggaagagaaggacatatgatcgcaccgtcaagcgggaaggcactttggcttgactagtacatgaccacttga

SEQ ID NO: 23533 - DNA, 76 bp, Artificial Sequence
  Description of Artificial Sequence: Synthetic pecan; 5' sequence + inner sequence + 3' sequence
tagggaagagaaggacatatgatggcatgcacgcacctacacgtgggcacgcattgactagtacatgaccacttga

SEQ ID NO: 23534 - DNA, 76 bp, Artificial Sequence
  Description of Artificial Sequence: Synthetic pecan; 5' sequence + inner sequence + 3' sequence
tagggaagagaaggacatatgatccgcacgtagccctatcagtggtgcctgcattgactagtacatgaccacttga

SEQ ID NO: 23535 - DNA, 76 bp, Artificial Sequence; identical to SEQ ID NO: 11953
  Description of Artificial Sequence: Synthetic pecan; 5' sequence + inner sequence + 3' sequence

SEQ ID NO: 23536 - DNA, 76 bp, Artificial Sequence; identical to SEQ ID NO: 3172
  Description of Artificial Sequence: Synthetic pecan; 5' sequence + inner sequence + 3' sequence

SEQ ID NO: 23537 - DNA, 76 bp, Artificial Sequence
  Description of Artificial Sequence: Synthetic pecan; 5' sequence + inner sequence + 3' sequence
tagggaagagaaggacatatgatggacgcagcttgactactggtggtcacgtattgactagtacatgaccacttga

SEQ ID NO: 23538 - DNA, 76 bp, Artificial Sequence; identical to SEQ ID NO: 3058
  Description of Artificial Sequence: Synthetic pecan; 5' sequence + inner sequence + 3' sequence

SEQ ID NO: 23539 - DNA, 76 bp, Artificial Sequence; identical to SEQ ID NO: 3524
  Description of Artificial Sequence: Synthetic pecan; 5' sequence + inner sequence + 3' sequence

SEQ ID NO: 23540 - DNA, 76 bp, Artificial Sequence
  Description of Artificial Sequence: Synthetic pecan; 5' sequence + inner sequence + 3' sequence
tagggaagagaaggacatatgatggacgcaacgtacctcaacgtggacgtgcattgactagtacatgaccacttga

SEQ ID NO: 23541 - DNA, 76 bp, Artificial Sequence
  Description of Artificial Sequence: Synthetic pecan; 5' sequence + inner sequence + 3' sequence
tagggaagagaaggacatatgatgcacgactcgcaccctatcatgaggtcatgttgactagtacatgaccacttga

SEQ ID NO: 23542 - DNA, 76 bp, Artificial Sequence; identical to SEQ ID NO: 19750
  Description of Artificial Sequence: Synthetic pecan; 5' sequence + inner sequence + 3' sequence

SEQ ID NO: 23543 - DNA, 76 bp, Artificial Sequence; identical to SEQ ID NO: 7717
  Description of Artificial Sequence: Synthetic pecan; 5' sequence + inner sequence + 3' sequence

SEQ ID NO: 23544 - DNA, 76 bp, Artificial Sequence
  Description of Artificial Sequence: Synthetic pecan; 5' sequence + inner sequence + 3' sequence
tagggaagagaaggacatatgatggcatgcactcacctacacgtgggtatggattgactagtacatgaccacttga

SEQ ID NO: 23545 - DNA, 76 bp, Artificial Sequence
  Description of Artificial Sequence: Synthetic pecan; 5' sequence + inner sequence + 3' sequence
tagggaagagaaggacatatgatggacgcagctttcctactggtggtcacgtattgactagtacatgaccacttga

SEQ ID NO: 23546 - DNA, 76 bp, Artificial Sequence; identical to SEQ ID NO: 3892
  Description of Artificial Sequence: Synthetic pecan; 5' sequence + inner sequence + 3' sequence

SEQ ID NO: 23547 - DNA, 76 bp, Artificial Sequence; identical to SEQ ID NO: 3552
  Description of Artificial Sequence: Synthetic pecan; 5' sequence + inner sequence + 3' sequence

SEQ ID NO: 23548 - DNA, 76 bp, Artificial Sequence
  Description of Artificial Sequence: Synthetic pecan; 5' sequence + inner sequence + 3' sequence
tagggaagagaaggacatatgatcgcaccgtcaagcgggaatgcactttggtgttgactagtacatgaccacttga

SEQ ID NO: 23549 - DNA, 76 bp, Artificial Sequence
  Description of Artificial Sequence: Synthetic pecan; 5' sequence + inner sequence + 3' sequence
tagggaagagaaggacatatgatgtcgtgactggctatctggacatgcactgcttgactagtacatgaccacttga

SEQ ID NO: 23550 - DNA, 76 bp, Artificial Sequence; identical to SEQ ID NO: 3857
  Description of Artificial Sequence: Synthetic pecan; 5' sequence + inner sequence + 3' sequence

SEQ ID NO: 23551 - DNA, 76 bp, Artificial Sequence
  Description of Artificial Sequence: Synthetic pecan; 5' sequence + inner sequence + 3' sequence
tagggaagagaaggacatatgatgcactgcacgcacactatcatgtaggcatgttgactagtacatgaccacttga

SEQ ID NO: 23552 - DNA, 76 bp, Artificial Sequence
  Description of Artificial Sequence: Synthetic pecan; 5' sequence + inner sequence + 3' sequence
tagggaagagaaggacatatgatccgatcgcacgtcaaggccggctgtacgagttgactagtacatgaccacttga

SEQ ID NO: 23553 - DNA, 76 bp, Artificial Sequence
  Description of Artificial Sequence: Synthetic pecan; 5' sequence + inner sequence + 3' sequence
tagggaagagaaggacatatgatccgcacgtagccctatcagtggtgcatgcgttgactagtacatgaccacttga

SEQ ID NO: 23554 - DNA, 76 bp, Artificial Sequence; identical to SEQ ID NO: 3806
  Description of Artificial Sequence: Synthetic pecan; 5' sequence + inner sequence + 3' sequence

SEQ ID NO: 23555 - DNA, 76 bp, Artificial Sequence; identical to SEQ ID NO: 3523
  Description of Artificial Sequence: Synthetic pecan; 5' sequence + inner sequence + 3' sequence

SEQ ID NO: 23556 - DNA, 76 bp, Artificial Sequence; identical to SEQ ID NO: 3173
  Description of Artificial Sequence: Synthetic pecan; 5' sequence + inner sequence + 3' sequence

SEQ ID NO: 23557 - DNA, 76 bp, Artificial Sequence; identical to SEQ ID NO: 11618
  Description of Artificial Sequence: Synthetic pecan; 5' sequence + inner sequence + 3' sequence

SEQ ID NO: 23558 - DNA, 76 bp, Artificial Sequence; identical to SEQ ID NO: 3837
  Description of Artificial Sequence: Synthetic pecan; 5' sequence + inner sequence + 3' sequence

SEQ ID NO: 23559 - DNA, 76 bp, Artificial Sequence
  Description of Artificial Sequence: Synthetic pecan; 5' sequence + inner sequence + 3' sequence
tagggaagagaaggacatatgatccgatcgcacgtcaatgcaggctgtacgagttgactagtacatgaccacttga

SEQ ID NO: 23560 - DNA, 76 bp, Artificial Sequence
  Description of Artificial Sequence: Synthetic pecan; 5' sequence + inner sequence + 3' sequence
tagggaagagaaggacatatgatggccacagcgtacctcaacgtggacgtgtattgactagtacatgaccacttga

SEQ ID NO: 23561 - DNA, 76 bp, Artificial Sequence; identical to SEQ ID NO: 3507
  Description of Artificial Sequence: Synthetic pecan; 5' sequence + inner sequence + 3' sequence

SEQ ID NO: 23562 - DNA, 76 bp, Artificial Sequence
  Description of Artificial Sequence: Synthetic pecan; 5' sequence + inner sequence + 3' sequence
tagggaagagaaggacatatgatggcacaaacggacctacaagtgcgcatggattgactagtacatgaccacttga

SEQ ID NO: 23563 - DNA, 76 bp, Artificial Sequence; identical to SEQ ID NO: 3541
  Description of Artificial Sequence: Synthetic pecan; 5' sequence + inner sequence + 3' sequence

SEQ ID NO: 23564 - DNA, 76 bp, Artificial Sequence; identical to SEQ ID NO: 7997
  Description of Artificial Sequence: Synthetic pecan; 5' sequence + inner sequence + 3' sequence

SEQ ID NO: 23565 - DNA, 76 bp, Artificial Sequence
  Description of Artificial Sequence: Synthetic pecan; 5' sequence + inner sequence + 3' sequence
tagggaagagaaggacatatgatgtcacaaacggaccgacaagtgcgcatggattgactagtacatgaccacttga

SEQ ID NO: 23566 - DNA, 76 bp, Artificial Sequence; identical to SEQ ID NO: 3165
  Description of Artificial Sequence: Synthetic pecan; 5' sequence + inner sequence + 3' sequence

SEQ ID NO: 23567 - DNA, 76 bp, Artificial Sequence; identical to SEQ ID NO: 3233
  Description of Artificial Sequence: Synthetic pecan; 5' sequence + inner sequence + 3' sequence

SEQ ID NO: 23568 - DNA, 76 bp, Artificial Sequence; identical to SEQ ID NO: 7755
  Description of Artificial Sequence: Synthetic pecan; 5' sequence + inner sequence + 3' sequence

SEQ ID NO: 23569 - DNA, 76 bp, Artificial Sequence; identical to SEQ ID NO: 3683
  Description of Artificial Sequence: Synthetic pecan; 5' sequence + inner sequence + 3' sequence

SEQ ID NO: 23570 - DNA, 76 bp, Artificial Sequence
  Description of Artificial Sequence: Synthetic pecan; 5' sequence + inner sequence + 3' sequence
tagggaagagaaggacatatgatccgtagcgacatcaaccggtggtgtgcgtgttgactagtacatgaccacttga

SEQ ID NO: 23571 - DNA, 76 bp, Artificial Sequence; identical to SEQ ID NO: 3497
  Description of Artificial Sequence: Synthetic pecan; 5' sequence + inner sequence + 3' sequence

SEQ ID NO: 23572 - DNA, 76 bp, Artificial Sequence; identical to SEQ ID NO: 11792
  Description of Artificial Sequence: Synthetic pecan; 5' sequence + inner sequence + 3' sequence

SEQ ID NO: 23573 - DNA, 76 bp, Artificial Sequence
  Description of Artificial Sequence: Synthetic pecan; 5' sequence + inner sequence + 3' sequence
tagggaagagaaggacatatgatccgtagcgtcatcaagcggtggtgtgcgtgttgactagtacatgaccacttga

SEQ ID NO: 23574 - DNA, 76 bp, Artificial Sequence
  Description of Artificial Sequence: Synthetic pecan; 5' sequence + inner sequence + 3' sequence
tagggaagagaaggacatatgatggacgcagcttgcctaatggtggtcacgtattgactagtacatgaccacttga

SEQ ID NO: 23575 - DNA, 76 bp, Artificial Sequence; identical to SEQ ID NO: 3153
  Description of Artificial Sequence: Synthetic pecan; 5' sequence + inner sequence + 3' sequence

SEQ ID NO: 23576 - DNA, 76 bp, Artificial Sequence
  Description of Artificial Sequence: Synthetic pecan; 5' sequence + inner sequence + 3' sequence
tagggaagagaaggacatatgatgtcatgcactaacactatcatggcggcatgttgactagtacatgaccacttga

SEQ ID NO: 23577 - DNA, 76 bp, Artificial Sequence
  Description of Artificial Sequence: Synthetic pecan; 5' sequence + inner sequence + 3' sequence
tagggaagagaaggacatatgatggacgcagcggaccgttcgagtggtacgtattgactagtacatgaccacttga

SEQ ID NO: 23578 - DNA, 76 bp, Artificial Sequence
  Description of Artificial Sequence: Synthetic pecan; 5' sequence + inner sequence + 3' sequence
tagggaagagaaggacatatgatccatcgcgtcactatcatctgtgtcacgtattgactagtacatgaccacttga

SEQ ID NO: 23579 - DNA, 76 bp, Artificial Sequence
  Description of Artificial Sequence: Synthetic pecan; 5' sequence + inner sequence + 3' sequence
tagggaagagaaggacatatgatccgcacggagccctatcagtggtgcatgcattgactagtacatgaccacttga

SEQ ID NO: 23580 - DNA, 76 bp, Artificial Sequence
  Description of Artificial Sequence: Synthetic pecan; 5' sequence + inner sequence + 3' sequence
tagggaagagaaggacatatgatccgtagcgacatcatgcggtggtgtgcgtgttgactagtacatgaccacttga

SEQ ID NO: 23581 - DNA, 76 bp, Artificial Sequence
  Description of Artificial Sequence: Synthetic pecan; 5' sequence + inner sequence + 3' sequence
tagggaagagaaggacatatgatccgcacgtagccctatcagtggtgcatggattgactagtacatgaccacttga

SEQ ID NO: 23582 - DNA, 76 bp, Artificial Sequence; identical to SEQ ID NO: 3208
  Description of Artificial Sequence: Synthetic pecan; 5' sequence + inner sequence + 3' sequence

SEQ ID NO: 23583 - DNA, 76 bp, Artificial Sequence
  Description of Artificial Sequence: Synthetic pecan; 5' sequence + inner sequence + 3' sequence
tagggaagagaaggacatatgatgcacgattcgcaccctatcatgaggccatgttgactagtacatgaccacttga

SEQ ID NO: 23584 - DNA, 76 bp, Artificial Sequence; identical to SEQ ID NO: 3312
  Description of Artificial Sequence: Synthetic pecan; 5' sequence + inner sequence + 3' sequence

SEQ ID NO: 23585 - DNA, 76 bp, Artificial Sequence; identical to SEQ ID NO: 3116
  Description of Artificial Sequence: Synthetic pecan; 5' sequence + inner sequence + 3' sequence

SEQ ID NO: 23586 - DNA, 76 bp, Artificial Sequence; identical to SEQ ID NO: 7429
  Description of Artificial Sequence: Synthetic pecan; 5' sequence + inner sequence + 3' sequence

SEQ ID NO: 23587 - DNA, 76 bp, Artificial Sequence; identical to SEQ ID NO: 3788
  Description of Artificial Sequence: Synthetic pecan; 5' sequence + inner sequence + 3' sequence

SEQ ID NO: 23588 - DNA, 76 bp, Artificial Sequence; identical to SEQ ID NO: 3292
  Description of Artificial Sequence: Synthetic pecan; 5' sequence + inner sequence + 3' sequence

SEQ ID NO: 23589 - DNA, 76 bp, Artificial Sequence; identical to SEQ ID NO: 11926
  Description of Artificial Sequence: Synthetic pecan; 5' sequence + inner sequence + 3' sequence

SEQ ID NO: 23590 - DNA, 76 bp, Artificial Sequence
  Description of Artificial Sequence: Synthetic pecan; 5' sequence + inner sequence + 3' sequence
tagggaagagaaggacatatgatggcatgcacgaacctacacgtgggtatggattgactagtacatgaccacttga

SEQ ID NO: 23591 - DNA, 76 bp, Artificial Sequence; identical to SEQ ID NO: 3596
  Description of Artificial Sequence: Synthetic pecan; 5' sequence + inner sequence + 3' sequence

SEQ ID NO: 23592 - DNA, 76 bp, Artificial Sequence
  Description of Artificial Sequence: Synthetic pecan; 5' sequence + inner sequence + 3' sequence
tagggaagagaaggacatatgatcgcaccgtcaagcgggaagtcactttggtgttgactagtacatgaccacttga

SEQ ID NO: 23593 - DNA, 76 bp, Artificial Sequence; identical to SEQ ID NO: 7579
  Description of Artificial Sequence: Synthetic pecan; 5' sequence + inner sequence + 3' sequence

SEQ ID NO: 23594 - DNA, 76 bp, Artificial Sequence
  Description of Artificial Sequence: Synthetic pecan; 5' sequence + inner sequence + 3' sequence
tagggaagagaaggacatatgatccgtagcgacatcaagcgggggggtgcgtgttgactagtacatgaccacttga

SEQ ID NO: 23595 - DNA, 76 bp, Artificial Sequence; identical to SEQ ID NO: 3717
  Description of Artificial Sequence: Synthetic pecan; 5' sequence + inner sequence + 3' sequence

SEQ ID NO: 23596 - DNA, 76 bp, Artificial Sequence
  Description of Artificial Sequence: Synthetic pecan; 5' sequence + inner sequence + 3' sequence
tagggaagagaaggacatatgatgtcatgcacgaacactatcatggtggcatgttgactagtacatgaccacttga

SEQ ID NO: 23597 - DNA, 76 bp, Artificial Sequence; identical to SEQ ID NO: 15992
  Description of Artificial Sequence: Synthetic pecan; 5' sequence + inner sequence + 3' sequence

SEQ ID NO: 23598 - DNA, 76 bp, Artificial Sequence
  Description of Artificial Sequence: Synthetic pecan; 5' sequence + inner sequence + 3' sequence
tagggaagagaaggacatatgatggactcagcttgcctactggtggtcacgtattgactagtacatgaccacttga

SEQ ID NO: 23599 - DNA, 76 bp, Artificial Sequence; identical to SEQ ID NO: 3268
  Description of Artificial Sequence: Synthetic pecan; 5' sequence + inner sequence + 3' sequence

SEQ ID NO: 23600 - DNA, 76 bp, Artificial Sequence
  Description of Artificial Sequence: Synthetic pecan; 5' sequence + inner sequence + 3' sequence
tagggaagagaaggacatatgatggcacaaacggaccgacaagtgtgcatggattgactagtacatgaccacttga

SEQ ID NO: 23601 - DNA, 76 bp, Artificial Sequence; identical to SEQ ID NO: 7787
  Description of Artificial Sequence: Synthetic pecan; 5' sequence + inner sequence + 3' sequence

SEQ ID NO: 23602 - DNA, 76 bp, Artificial Sequence; identical to SEQ ID NO: 15996
  Description of Artificial Sequence: Synthetic pecan; 5' sequence + inner sequence + 3' sequence

SEQ ID NO: 23603 - DNA, 76 bp, Artificial Sequence
  Description of Artificial Sequence: Synthetic pecan; 5' sequence + inner sequence + 3' sequence
tagggaagagaaggacatatgatggcgtgcggaccggtaagtcgtcatgcacattgactagtacatgaccacttga

SEQ ID NO: 23604 - DNA, 76 bp, Artificial Sequence
  Description of Artificial Sequence: Synthetic pecan; 5' sequence + inner sequence + 3' sequence
tagggaagagaaggacatatgatcgcacaaacggaccgacaagtgcgcatggattgactagtacatgaccacttga

SEQ ID NO: 23605 - DNA, 76 bp, Artificial Sequence
  Description of Artificial Sequence: Synthetic pecan; 5' sequence + inner sequence + 3' sequence
tagggaagagaaggacatatgatggacgcagcttgcctactggtggtcatgtattgactagtacatgaccacttga

SEQ ID NO: 23606 - DNA, 76 bp, Artificial Sequence; identical to SEQ ID NO: 3654
  Description of Artificial Sequence: Synthetic pecan; 5' sequence + inner sequence + 3' sequence

SEQ ID NO: 23607 - DNA, 76 bp, Artificial Sequence
  Description of Artificial Sequence: Synthetic pecan; 5' sequence + inner sequence + 3' sequence
tagggaagagaaggacatatgatgtcattccgcatcctacaagtgggcacgtattgactagtacatgaccacttga

SEQ ID NO: 23608 - DNA, 76 bp, Artificial Sequence; identical to SEQ ID NO: 11579
  Description of Artificial Sequence: Synthetic pecan; 5' sequence + inner sequence + 3' sequence

SEQ ID NO: 23609 - DNA, 76 bp, Artificial Sequence; identical to SEQ ID NO: 7492
  Description of Artificial Sequence: Synthetic pecan; 5' sequence + inner sequence + 3' sequence

SEQ ID NO: 23610 - DNA, 72 bp, Artificial Sequence
  Description of Artificial Sequence: Synthetic pecan; 5' sequence + inner sequence + 3' sequence
tagggaagagaaggacatatgatccgcacgtcaaggcaggctgtacgagttgactagtacatgaccacttga

SEQ ID NO: 23611 - DNA, 76 bp, Artificial Sequence; identical to SEQ ID NO: 7987
  Description of Artificial Sequence: Synthetic pecan; 5' sequence + inner sequence + 3' sequence

SEQ ID NO: 23612 - DNA, 76 bp, Artificial Sequence; identical to SEQ ID NO: 15945
  Description of Artificial Sequence: Synthetic pecan; 5' sequence + inner sequence + 3' sequence

SEQ ID NO: 23613 - DNA, 76 bp, Artificial Sequence
  Description of Artificial Sequence: Synthetic pecan; 5' sequence + inner sequence + 3' sequence
tagggaagagaaggacatatgatggccacatcgtacctcaacgtggacgtgcattgactagtacatgaccacttga

SEQ ID NO: 23614 - DNA, 76 bp, Artificial Sequence; identical to SEQ ID NO: 3520
  Description of Artificial Sequence: Synthetic pecan; 5' sequence + inner sequence + 3' sequence

SEQ ID NO: 23615 - DNA, 76 bp, Artificial Sequence
  Description of Artificial Sequence: Synthetic pecan; 5' sequence + inner sequence + 3' sequence
tagggaagagaaggacatatgatcgcaccgtcaatcgggaaggcactttggtgttgactagtacatgaccacttga

SEQ ID NO: 23616 - DNA, 76 bp, Artificial Sequence; identical to SEQ ID NO: 3924
  Description of Artificial Sequence: Synthetic pecan; 5' sequence + inner sequence + 3' sequence

SEQ ID NO: 23617 - DNA, 76 bp, Artificial Sequence
  Description of Artificial Sequence: Synthetic pecan; 5' sequence + inner sequence + 3' sequence
tagggaagagaaggacatatgatgtcatgccatctcttcgagtgtgacaggtattgactagtacatgaccacttga

SEQ ID NO: 23618 - DNA, 76 bp, Artificial Sequence
  Description of Artificial Sequence: Synthetic pecan; 5' sequence + inner sequence + 3' sequence
tagggaagagaaggacatatgatggcacaaacggaccgacaagtgcgtatggattgactagtacatgaccacttga

SEQ ID NO: 23619 - DNA, 75 bp, Artificial Sequence; identical to SEQ ID NO: 7968
  Description of Artificial Sequence: Synthetic pecan; 5' sequence + inner sequence + 3' sequence

SEQ ID NO: 23620 - DNA, 76 bp, Artificial Sequence; identical to SEQ ID NO: 3530
  Description of Artificial Sequence: Synthetic pecan; 5' sequence + inner sequence + 3' sequence

SEQ ID NO: 23621 - DNA, 76 bp, Artificial Sequence; identical to SEQ ID NO: 3107
  Description of Artificial Sequence: Synthetic pecan; 5' sequence + inner sequence + 3' sequence

SEQ ID NO: 23622 - DNA, 76 bp, Artificial Sequence; identical to SEQ ID NO: 11678
  Description of Artificial Sequence: Synthetic pecan; 5' sequence + inner sequence + 3' sequence

SEQ ID NO: 23623 - DNA, 76 bp, Artificial Sequence
  Description of Artificial Sequence: Synthetic pecan; 5' sequence + inner sequence + 3' sequence
tagggaagagaaggacatatgatgcacgcatcgtcccgtcatgtggttccgtattgactagtacatgaccacttga

SEQ ID NO: 23624 - DNA, 76 bp, Artificial Sequence; identical to SEQ ID NO: 7470
  Description of Artificial Sequence: Synthetic pecan; 5' sequence + inner sequence + 3' sequence

SEQ ID NO: 23625 - DNA, 76 bp, Artificial Sequence
  Description of Artificial Sequence: Synthetic pecan; 5' sequence + inner sequence + 3' sequence
tagggaagagaaggacatatgatggcacaaacggacagacaagtgcgcatggattgactagtacatgaccacttga

SEQ ID NO: 23626 - DNA, 76 bp, Artificial Sequence
  Description of Artificial Sequence: Synthetic pecan; 5' sequence + inner sequence + 3' sequence
tagggaagagaaggacatatgatcgcaccgtcgatacgtcgtgcacgctgacattgactagtacatgaccacttga

SEQ ID NO: 23627 - DNA, 76 bp, Artificial Sequence
  Description of Artificial Sequence: Synthetic pecan; 5' sequence + inner sequence + 3' sequence
tagggaagagaaggacatatgatccgcacgtagccctatccgtggtgcatgcattgactagtacatgaccacttga

SEQ ID NO: 23628 - DNA, 76 bp, Artificial Sequence; identical to SEQ ID NO: 3099
  Description of Artificial Sequence: Synthetic pecan; 5' sequence + inner sequence + 3' sequence

SEQ ID NO: 23629 - DNA, 76 bp, Artificial Sequence
  Description of Artificial Sequence: Synthetic pecan; 5' sequence + inner sequence + 3' sequence
tagggaagagaaggacatatgatggcacaaacggaccgacaagttcgcatggattgactagtacatgaccacttga

SEQ ID NO: 23630 - DNA, 76 bp, Artificial Sequence; identical to SEQ ID NO: 7916
  Description of Artificial Sequence: Synthetic pecan; 5' sequence + inner sequence + 3' sequence

SEQ ID NO: 23631 - DNA, 76 bp, Artificial Sequence; identical to SEQ ID NO: 3287
  Description of Artificial Sequence: Synthetic pecan; 5' sequence + inner sequence + 3' sequence

SEQ ID NO: 23632 - DNA, 76 bp, Artificial Sequence; identical to SEQ ID NO: 7761
  Description of Artificial Sequence: Synthetic pecan; 5' sequence + inner sequence + 3' sequence

SEQ ID NO: 23633 - DNA, 76 bp, Artificial Sequence
  Description of Artificial Sequence: Synthetic pecan; 5' sequence + inner sequence + 3' sequence
tagggaagagaaggacatatgatccgcacgtaaccctatcagtggtgcatgcattgactagtacatgaccacttga

SEQ ID NO: 23634 - DNA, 75 bp, Artificial Sequence; identical to SEQ ID NO: 3975
  Description of Artificial Sequence: Synthetic pecan; 5' sequence + inner sequence + 3' sequence

SEQ ID NO: 23635 - DNA, 76 bp, Artificial Sequence
  Description of Artificial Sequence: Synthetic pecan; 5' sequence + inner sequence + 3' sequence
tagggaagagaaggacatatgatggcacaaacggaccgccaagtgcgcatggattgactagtacatgaccacttga

SEQ ID NO: 23636 - DNA, 76 bp, Artificial Sequence; identical to SEQ ID NO: 19688
  Description of Artificial Sequence: Synthetic pecan; 5' sequence + inner sequence + 3' sequence

SEQ ID NO: 23637 - DNA, 76 bp, Artificial Sequence
  Description of Artificial Sequence: Synthetic pecan; 5' sequence + inner sequence + 3' sequence
tagggaagagaaggacatatgatccgatcgcacgtcaagccaggctgtacgagttgactagtacatgaccacttga

SEQ ID NO: 23638 - DNA, 76 bp, Artificial Sequence; identical to SEQ ID NO: 7611
  Description of Artificial Sequence: Synthetic pecan; 5' sequence + inner sequence + 3' sequence

SEQ ID NO: 23639 - DNA, 76 bp, Artificial Sequence; identical to SEQ ID NO: 3043
  Description of Artificial Sequence: Synthetic pecan; 5' sequence + inner sequence + 3' sequence

SEQ ID NO: 23640 - DNA, 76 bp, Artificial Sequence
  Description of Artificial Sequence: Synthetic pecan; 5' sequence + inner sequence + 3' sequence
tagggaagagaaggacatatgatggacgcatcttgcctactggtggtcacgtattgactagtacatgaccacttga

SEQ ID NO: 23641 - DNA, 76 bp, Artificial Sequence; identical to SEQ ID NO: 3436
  Description of Artificial Sequence: Synthetic pecan; 5' sequence + inner sequence + 3' sequence

SEQ ID NO: 23642 - DNA, 76 bp, Artificial Sequence
  Description of Artificial Sequence: Synthetic pecan; 5' sequence + inner sequence + 3' sequence
tagggaagagaaggacatatgatcgcaccgtcaagcggtaaggcactttggtgttgactagtacatgaccacttga

SEQ ID NO: 23643 - DNA, 76 bp, Artificial Sequence; identical to SEQ ID NO: 11962
  Description of Artificial Sequence: Synthetic pecan; 5' sequence + inner sequence + 3' sequence

SEQ ID NO: 23644 - DNA, 76 bp, Artificial Sequence
  Description of Artificial Sequence: Synthetic pecan; 5' sequence + inner sequence + 3' sequence
tagggaagagaaggacatatgatgtcactgtgcctgaccgttaagttgcggcattgactagtacatgaccacttga

SEQ ID NO: 23645 - DNA, 76 bp, Artificial Sequence; identical to SEQ ID NO: 3336
  Description of Artificial Sequence: Synthetic pecan; 5' sequence + inner sequence + 3' sequence

SEQ ID NO: 23646 - DNA, 76 bp, Artificial Sequence
  Description of Artificial Sequence: Synthetic pecan; 5' sequence + inner sequence + 3' sequence
tagggaagagaaggacatatgatccgcacgtagccctaacagtggtgcatgcattgactagtacatgaccacttga

SEQ ID NO: 23647 - DNA, 76 bp, Artificial Sequence; identical to SEQ ID NO: 3608
  Description of Artificial Sequence: Synthetic pecan; 5' sequence + inner sequence + 3' sequence

SEQ ID NO: 23648 - DNA, 76 bp, Artificial Sequence
  Description of Artificial Sequence: Synthetic pecan; 5' sequence + inner sequence + 3' sequence
tagggaagagaaggacatatgatccatcgcgtcactattatgtgtgtcacgtattgactagtacatgaccacttga

SEQ ID NO: 23649 - DNA, 75 bp, Artificial Sequence
  Description of Artificial Sequence: Synthetic pecan; 5' sequence + inner sequence + 3' sequence
tagggaagagaaggacatatgatgtgcgccgatgccctcatgtggccgtggattgactagtacatgaccacttga

SEQ ID NO: 23650 - DNA, 76 bp, Artificial Sequence
  Description of Artificial Sequence: Synthetic pecan; 5' sequence + inner sequence + 3' sequence
tagggaagagaaggacatatgatccatcgcgtcaccatcatgtgtgtcacgtattgactagtacatgaccacttga

SEQ ID NO: 23651 - DNA, 76 bp, Artificial Sequence; identical to SEQ ID NO: 3348
  Description of Artificial Sequence: Synthetic pecan; 5' sequence + inner sequence + 3' sequence

SEQ ID NO: 23652 - DNA, 76 bp, Artificial Sequence
  Description of Artificial Sequence: Synthetic pecan; 5' sequence + inner sequence + 3' sequence
tagggaagagaaggacatatgatggacgcagcttgcctactggaggtcacgtattgactagtacatgaccacttga

SEQ ID NO: 23653 - DNA, 76 bp, Artificial Sequence
  Description of Artificial Sequence: Synthetic pecan; 5' sequence + inner sequence + 3' sequence
tagggaagagaaggacatatgatccgtagcgacatcaagcgggggcgtgcgtgttgactagtacatgaccacttga

SEQ ID NO: 23654 - DNA, 76 bp, Artificial Sequence; identical to SEQ ID NO: 15953
  Description of Artificial Sequence: Synthetic pecan; 5' sequence + inner sequence + 3' sequence

SEQ ID NO: 23655 - DNA, 76 bp, Artificial Sequence
  Description of Artificial Sequence: Synthetic pecan; 5' sequence + inner sequence + 3' sequence
tagggaagagaaggacatatgatggacgcagcggaacgttctagtggtacgtattgactagtacatgaccacttga

SEQ ID NO: 23656 - DNA, 76 bp, Artificial Sequence; identical to SEQ ID NO: 7521
  Description of Artificial Sequence: Synthetic pecan; 5' sequence + inner sequence + 3' sequence

SEQ ID NO: 23657 - DNA, 76 bp, Artificial Sequence
  Description of Artificial Sequence: Synthetic pecan; 5' sequence + inner sequence + 3' sequence
tagggaagagaaggacatatgatgcacgactcgcaccccatcatgaggccatgttgactagtacatgaccacttga

SEQ ID NO: 23658 - DNA, 76 bp, Artificial Sequence; identical to SEQ ID NO: 19266
  Description of Artificial Sequence: Synthetic pecan; 5' sequence + inner sequence + 3' sequence

SEQ ID NO: 23659 - DNA, 76 bp, Artificial Sequence; identical to SEQ ID NO: 3228
  Description of Artificial Sequence: Synthetic pecan; 5' sequence + inner sequence + 3' sequence

SEQ ID NO: 23660 - DNA, 76 bp, Artificial Sequence; identical to SEQ ID NO: 15659
  Description of Artificial Sequence: Synthetic pecan; 5' sequence + inner sequence + 3' sequence

SEQ ID NO: 23661 - DNA, 76 bp, Artificial Sequence
  Description of Artificial Sequence: Synthetic pecan; 5' sequence + inner sequence + 3' sequence
tagggaagagaaggacatatgatgtcatgcacgaacactatcatggaggcatgttgactagtacatgaccacttga

SEQ ID NO: 23662 - DNA, 76 bp, Artificial Sequence
  Description of Artificial Sequence: Synthetic pecan; 5' sequence + inner sequence + 3' sequence
tagggaagagaaggacatatgatccctcgcgtcactatcatgtgtgtcacgtattgactagtacatgaccacttga

SEQ ID NO: 23663 - DNA, 76 bp, Artificial Sequence; identical to SEQ ID NO: 3254
  Description of Artificial Sequence: Synthetic pecan; 5' sequence + inner sequence + 3' sequence

SEQ ID NO: 23664 - DNA, 76 bp, Artificial Sequence; identical to SEQ ID NO: 3249
  Description of Artificial Sequence: Synthetic pecan; 5' sequence + inner sequence + 3' sequence

SEQ ID NO: 23665 - DNA, 76 bp, Artificial Sequence
  Description of Artificial Sequence: Synthetic pecan; 5' sequence + inner sequence + 3' sequence
tagggaagagaaggacatatgatccgatcgcacgtcaaggcaggctgcacgagttgactagtacatgaccacttga

SEQ ID NO: 23666 - DNA, 76 bp, Artificial Sequence
  Description of Artificial Sequence: Synthetic pecan; 5' sequence + inner sequence + 3' sequence
tagggaagagaaggacatatgatggccacagcgtaccttaacgtggacgtgcattgactagtacatgaccacttga

SEQ ID NO: 23667 - DNA, 76 bp, Artificial Sequence; identical to SEQ ID NO: 7960
  Description of Artificial Sequence: Synthetic pecan; 5' sequence + inner sequence + 3' sequence

SEQ ID NO: 23668 - DNA, 76 bp, Artificial Sequence
  Description of Artificial Sequence: Synthetic pecan; 5' sequence + inner sequence + 3' sequence
tagggaagagaaggacatatgatcgcaccgtcgatacgtcatgcgcgctgacattgactagtacatgaccacttga

SEQ ID NO: 23669 - DNA, 76 bp, Artificial Sequence
  Description of Artificial Sequence: Synthetic pecan; 5' sequence + inner sequence + 3' sequence
tagggaagagaaggacatatgatgtcatgcacgaacactatcatggcggtatgttgactagtacatgaccacttga

SEQ ID NO: 23670 - DNA, 77 bp, Artificial Sequence
  Description of Artificial Sequence: Synthetic pecan; 5' sequence + inner sequence + 3' sequence
tagggaagagaaggacatatgatgcattggacgatcgtgccctacacgtggacattgactagtacatgaccacttga

SEQ ID NO: 23671 - DNA, 76 bp, Artificial Sequence; identical to SEQ ID NO: 3928
  Description of Artificial Sequence: Synthetic pecan; 5' sequence + inner sequence + 3' sequence

SEQ ID NO: 23672 - DNA, 76 bp, Artificial Sequence
  Description of Artificial Sequence: Synthetic pecan; 5' sequence + inner sequence + 3' sequence
tagggaagagaaggacatatgatgcacgactcgcaccctatcctgaggccatgttgactagtacatgaccacttga

SEQ ID NO: 23673 - DNA, 76 bp, Artificial Sequence
  Description of Artificial Sequence: Synthetic pecan; 5' sequence + inner sequence + 3' sequence
tagggaagagaaggacatatgatgtacgcagcttgcctactggtggtcacgtattgactagtacatgaccacttga

SEQ ID NO: 23674 - DNA, 76 bp, Artificial Sequence; identical to SEQ ID NO: 3579
  Description of Artificial Sequence: Synthetic pecan; 5' sequence + inner sequence + 3' sequence

SEQ ID NO: 23675 - DNA, 76 bp, Artificial Sequence; identical to SEQ ID NO: 3853
  Description of Artificial Sequence: Synthetic pecan; 5' sequence + inner sequence + 3' sequence

SEQ ID NO: 23676 - DNA, 76 bp, Artificial Sequence
  Description of Artificial Sequence: Synthetic pecan; 5' sequence + inner sequence + 3' sequence
tagggaagagaaggacatatgatggcatgcacgcacctacacgtgggtctggattgactagtacatgaccacttga

SEQ ID NO: 23677 - DNA, 76 bp, Artificial Sequence
  Description of Artificial Sequence: Synthetic pecan; 5' sequence + inner sequence + 3' sequence
tagggaagagaaggacatatgatgtgcgcggcttgcctactggtggtcacgtattgactagtacatgaccacttga

SEQ ID NO: 23678 - DNA, 72 bp, Artificial Sequence
  Description of Artificial Sequence: Synthetic pecan; 5' sequence + inner sequence + 3' sequence
tagggaagagaaggacatatgatggcatgcacgcacctacacgtggccattgactagtacatgaccacttga

SEQ ID NO: 23679 - DNA, 76 bp, Artificial Sequence
  Description of Artificial Sequence: Synthetic pecan; 5' sequence + inner sequence + 3' sequence
tagggaagagaaggacatatgatccgatcgcacgtcaaggcaggatgtacgagttgactagtacatgaccacttga

SEQ ID NO: 23680 - DNA, 76 bp, Artificial Sequence; identical to SEQ ID NO: 7280
  Description of Artificial Sequence: Synthetic pecan; 5' sequence + inner sequence + 3' sequence

SEQ ID NO: 23681 - DNA, 76 bp, Artificial Sequence; identical to SEQ ID NO: 3909
  Description of Artificial Sequence: Synthetic pecan; 5' sequence + inner sequence + 3' sequence

SEQ ID NO: 23682 - DNA, 76 bp, Artificial Sequence; identical to SEQ ID NO: 3211
  Description of Artificial Sequence: Synthetic pecan; 5' sequence + inner sequence + 3' sequence

SEQ ID NO: 23683 - DNA, 76 bp, Artificial Sequence
  Description of Artificial Sequence: Synthetic pecan; 5' sequence + inner sequence + 3' sequence
tagggaagagaaggacatatgatgtcactgtgcctgaccgtcacgttgcggcattgactagtacatgaccacttga

SEQ ID NO: 23684 - DNA, 76 bp, Artificial Sequence; identical to SEQ ID NO: 11876
  Description of Artificial Sequence: Synthetic pecan; 5' sequence + inner sequence + 3' sequence

SEQ ID NO: 23685 - DNA, 76 bp, Artificial Sequence; identical to SEQ ID NO: 8002
  Description of Artificial Sequence: Synthetic pecan; 5' sequence + inner sequence + 3' sequence

SEQ ID NO: 23686 - DNA, 76 bp, Artificial Sequence; identical to SEQ ID NO: 7650
  Description of Artificial Sequence: Synthetic pecan; 5' sequence + inner sequence + 3' sequence

SEQ ID NO: 23687 - DNA, 76 bp, Artificial Sequence; identical to SEQ ID NO: 3705
  Description of Artificial Sequence: Synthetic pecan; 5' sequence + inner sequence + 3' sequence

SEQ ID NO: 23688 - DNA, 76 bp, Artificial Sequence; identical to SEQ ID NO: 3572
  Description of Artificial Sequence: Synthetic pecan; 5' sequence + inner sequence + 3' sequence

SEQ ID NO: 23689 - DNA, 76 bp, Artificial Sequence
  Description of Artificial Sequence: Synthetic pecan; 5' sequence + inner sequence + 3' sequence
tagggaagagaaggacatatgatccatcgcgttactatcatgtgtgtcacgtattgactagtacatgaccacttga

SEQ ID NO: 23690 - DNA, 76 bp, Artificial Sequence
  Description of Artificial Sequence: Synthetic pecan; 5' sequence + inner sequence + 3' sequence
tagggaagagaaggacatatgatggccacagcggacctcaacgtggacgtgcattgactagtacatgaccacttga

SEQ ID NO: 23691 - DNA, 76 bp, Artificial Sequence
  Description of Artificial Sequence: Synthetic pecan; 5' sequence + inner sequence + 3' sequence
tagggaagagaaggacatatgatccgtagcgacatcaggcggtggtgtgcgtgttgactagtacatgaccacttga

SEQ ID NO: 23692 - DNA, 76 bp, Artificial Sequence
  Description of Artificial Sequence: Synthetic pecan; 5' sequence + inner sequence + 3' sequence
tagggaagagaaggacatatgatcgccacagcgtacctcaacgtggacgtgcattgactagtacatgaccacttga

SEQ ID NO: 23693 - DNA, 76 bp, Artificial Sequence
  Description of Artificial Sequence: Synthetic pecan; 5' sequence + inner sequence + 3' sequence
tagggaagagaaggacatatgatggcatgcacgcacctacacttgggcacgtattgactagtacatgaccacttga

SEQ ID NO: 23694 - DNA, 76 bp, Artificial Sequence
  Description of Artificial Sequence: Synthetic pecan; 5' sequence + inner sequence + 3' sequence
tagggaagagaaggacatatgatccatcgcgtcactatcatgggtgtcacgtattgactagtacatgaccacttga

SEQ ID NO: 23695 - DNA, 76 bp, Artificial Sequence
  Description of Artificial Sequence: Synthetic pecan; 5' sequence + inner sequence + 3' sequence
tagggaagagaaggacatatgatccgatcgcacgtcgaggcaggctgtacgagttgactagtacatgaccacttga

SEQ ID NO: 23696 - DNA, 76 bp, Artificial Sequence
  Description of Artificial Sequence: Synthetic pecan; 5' sequence + inner sequence + 3' sequence
tagggaagagaaggacatatgatccatcgcgtcactatcatgtgcgtcacgtattgactagtacatgaccacttga

SEQ ID NO: 23697 - DNA, 76 bp, Artificial Sequence; identical to SEQ ID NO: 11910
  Description of Artificial Sequence: Synthetic pecan; 5' sequence + inner sequence + 3' sequence

SEQ ID NO: 23698 - DNA, 76 bp, Artificial Sequence
  Description of Artificial Sequence: Synthetic pecan; 5' sequence + inner sequence + 3' sequence
tagggaagagaaggacatatgatccgtagcgacatcaagcggtggtgcgcgcgttgactagtacatgaccacttga

SEQ ID NO: 23699 - DNA, 76 bp, Artificial Sequence; identical to SEQ ID NO: 15827
  Description of Artificial Sequence: Synthetic pecan; 5' sequence + inner sequence + 3' sequence

SEQ ID NO: 23700 - DNA, 76 bp, Artificial Sequence
  Description of Artificial Sequence: Synthetic pecan; 5' sequence + inner sequence + 3' sequence
tagggaagagaaggacatatgatccttagcgacatcaagcggtggtgtgcgtgttgactagtacatgaccacttga

SEQ ID NO: 23701 - DNA, 76 bp, Artificial Sequence
  Description of Artificial Sequence: Synthetic pecan; 5' sequence + inner sequence + 3' sequence
tagggaagagaaggacatatgatgcacgactcgcaccctatcatgaggccgtgttgactagtacatgaccacttga

SEQ ID NO: 23702 - DNA, 76 bp, Artificial Sequence; identical to SEQ ID NO: 3534
  Description of Artificial Sequence: Synthetic pecan; 5' sequence + inner sequence + 3' sequence

SEQ ID NO: 23703 - DNA, 76 bp, Artificial Sequence; identical to SEQ ID NO: 3102
  Description of Artificial Sequence: Synthetic pecan; 5' sequence + inner sequence + 3' sequence

SEQ ID NO: 23704 - DNA, 76 bp, Artificial Sequence; identical to SEQ ID NO: 3660
  Description of Artificial Sequence: Synthetic pecan; 5' sequence + inner sequence + 3' sequence

SEQ ID NO: 23705 - DNA, 75 bp, Artificial Sequence
  Description of Artificial Sequence: Synthetic pecan; 5' sequence + inner sequence + 3' sequence
tagggaagagaaggacatatgatccgcacgtagccctaccagtgtgtcagtgttgactagtacatgaccacttga

SEQ ID NO: 23706 - DNA, 76 bp, Artificial Sequence
  Description of Artificial Sequence: Synthetic pecan; 5' sequence + inner sequence + 3' sequence
tagggaagagaaggacatatgatggacgcagcggcacgttcgagtggtacgtattgactagtacatgaccacttga

SEQ ID NO: 23707 - DNA, 76 bp, Artificial Sequence; identical to SEQ ID NO: 7872
  Description of Artificial Sequence: Synthetic pecan; 5' sequence + inner sequence + 3' sequence

SEQ ID NO: 23708 - DNA, 76 bp, Artificial Sequence
  Description of Artificial Sequence: Synthetic pecan; 5' sequence + inner sequence + 3' sequence
tagggaagagaaggacatatgatccatcgcgtcactatcctgtgtgtcacgtattgactagtacatgaccacttga

SEQ ID NO: 23709 - DNA, 76 bp, Artificial Sequence
  Description of Artificial Sequence: Synthetic pecan; 5' sequence + inner sequence + 3' sequence
tagggaagagaaggacatatgatgcacgactcgcaccctatcataaggccatgttgactagtacatgaccacttga

SEQ ID NO: 23710 - DNA, 76 bp, Artificial Sequence
  Description of Artificial Sequence: Synthetic pecan; 5' sequence + inner sequence + 3' sequence
tagggaagagaaggacatatgatcgcaccatcgatacgtcatgcacgctgacattgactagtacatgaccacttga

SEQ ID NO: 23711 - DNA, 76 bp, Artificial Sequence
  Description of Artificial Sequence: Synthetic pecan; 5' sequence + inner sequence + 3' sequence
tagggaagagaaggacatatgatccgtagcgacatcaaacggtggtgtgcgtgttgactagtacatgaccacttga

SEQ ID NO: 23712 - DNA, 76 bp, Artificial Sequence
  Description of Artificial Sequence: Synthetic pecan; 5' sequence + inner sequence + 3' sequence
tagggaagagaaggacatatgatcgacgcagcttgcctactggtggtcacgtattgactagtacatgaccacttga

SEQ ID NO: 23713 - DNA, 76 bp, Artificial Sequence; identical to SEQ ID NO: 7845
  Description of Artificial Sequence: Synthetic pecan; 5' sequence + inner sequence + 3' sequence

SEQ ID NO: 23714 - DNA, 76 bp, Artificial Sequence; identical to SEQ ID NO: 3315
  Description of Artificial Sequence: Synthetic pecan; 5' sequence + inner sequence + 3' sequence

SEQ ID NO: 23715 - DNA, 76 bp, Artificial Sequence
  Description of Artificial Sequence: Synthetic pecan; 5' sequence + inner sequence + 3' sequence
tagggaagagaaggacatatgatggatgcagcttgcctactggtggtcacgtattgactagtacatgaccacttga

SEQ ID NO: 23716 - DNA, 76 bp, Artificial Sequence; identical to SEQ ID NO: 3182
  Description of Artificial Sequence: Synthetic pecan; 5' sequence + inner sequence + 3' sequence

SEQ ID NO: 23717 - DNA, 77 bp, Artificial Sequence
  Description of Artificial Sequence: Synthetic pecan; 5' sequence + inner sequence + 3' sequence
tagggaagagaaggacatatgatggcatggcgcgcaccctatcatgaggccatgttgactagtacatgaccacttga

SEQ ID NO: 23718 - DNA, 76 bp, Artificial Sequence
  Description of Artificial Sequence: Synthetic pecan; 5' sequence + inner sequence + 3' sequence
tagggaagagaaggacatatgatgtcatgccatcccttcgactgtgacaggtattgactagtacatgaccacttga

SEQ ID NO: 23719 - DNA, 76 bp, Artificial Sequence
  Description of Artificial Sequence: Synthetic pecan; 5' sequence + inner sequence + 3' sequence
tagggaagagaaggacatatgatccgcacgtagccctatcagtgatgcatgcattgactagtacatgaccacttga

SEQ ID NO: 23720 - DNA, 76 bp, Artificial Sequence
  Description of Artificial Sequence: Synthetic pecan; 5' sequence + inner sequence + 3' sequence
tagggaagagaaggacatatgatccgtagcgacttcaagcggtggtgtgcgtgttgactagtacatgaccacttga

SEQ ID NO: 23721 - DNA, 76 bp, Artificial Sequence
  Description of Artificial Sequence: Synthetic pecan; 5' sequence + inner sequence + 3' sequence
tagggaagagaaggacatatgatcgcaccgtcgatacgtcatgctcgctgacattgactagtacatgaccacttga

SEQ ID NO: 23722 - DNA, 76 bp, Artificial Sequence
  Description of Artificial Sequence: Synthetic pecan; 5' sequence + inner sequence + 3' sequence
tagggaagagaaggacatatgatgtcattctgcatcctacacgtgggcacgtattgactagtacatgaccacttga

SEQ ID NO: 23723 - DNA, 76 bp, Artificial Sequence
  Description of Artificial Sequence: Synthetic pecan; 5' sequence + inner sequence + 3' sequence
tagggaagagaaggacatatgatccgatcgcacgtcaaggctggctgtacgagttgactagtacatgaccacttga

SEQ ID NO: 23724 - DNA, 76 bp, Artificial Sequence
  Description of Artificial Sequence: Synthetic pecan; 5' sequence + inner sequence + 3' sequence
tagggaagagaaggacatatgatccatcgcgtcactatcatgtgtttcacgtattgactagtacatgaccacttga

SEQ ID NO: 23725 - DNA, 76 bp, Artificial Sequence
  Description of Artificial Sequence: Synthetic pecan; 5' sequence + inner sequence + 3' sequence
tagggaagagaaggacatatgatccgatcgcacgtcaaggcagtctgtacgagttgactagtacatgaccacttga

SEQ ID NO: 23726 - DNA, 76 bp, Artificial Sequence; identical to SEQ ID NO: 11868
  Description of Artificial Sequence: Synthetic pecan; 5' sequence + inner sequence + 3' sequence

SEQ ID NO: 23727 - DNA, 76 bp, Artificial Sequence; identical to SEQ ID NO: 3108
  Description of Artificial Sequence: Synthetic pecan; 5' sequence + inner sequence + 3' sequence

SEQ ID NO: 23728 - DNA, 76 bp, Artificial Sequence
  Description of Artificial Sequence: Synthetic pecan; 5' sequence + inner sequence + 3' sequence
tagggaagagaaggacatatgatccgcacgtagccctatcagtggtgcatacattgactagtacatgaccacttga

SEQ ID NO: 23729 - DNA, 76 bp, Artificial Sequence; identical to SEQ ID NO: 11884
  Description of Artificial Sequence: Synthetic pecan; 5' sequence + inner sequence + 3' sequence

SEQ ID NO: 23730 - DNA, 76 bp, Artificial Sequence
  Description of Artificial Sequence: Synthetic pecan; 5' sequence + inner sequence + 3' sequence
tagggaagagaaggacatatgatgtaatgcacgaacactatcatggcggcatgttgactagtacatgaccacttga

SEQ ID NO: 23731 - DNA, 76 bp, Artificial Sequence
  Description of Artificial Sequence: Synthetic pecan; 5' sequence + inner sequence + 3' sequence
tagggaagagaaggacatatgatccgcacctagccctatcagtggtgcatgcattgactagtacatgaccacttga

SEQ ID NO: 23732 - DNA, 76 bp, Artificial Sequence
  Description of Artificial Sequence: Synthetic pecan; 5' sequence + inner sequence + 3' sequence
tagggaagagaaggacatatgatggcacaaacggatcgacaagtgcgcatggattgactagtacatgaccacttga

SEQ ID NO: 23733 - DNA, 76 bp, Artificial Sequence
  Description of Artificial Sequence: Synthetic pecan; 5' sequence + inner sequence + 3' sequence
tagggaagagaaggacatatgatggcatgcacgcacctacacgtgtgcacgtattgactagtacatgaccacttga

SEQ ID NO: 23734 - DNA, 76 bp, Artificial Sequence; identical to SEQ ID NO: 7301
  Description of Artificial Sequence: Synthetic pecan; 5' sequence + inner sequence + 3' sequence

SEQ ID NO: 23735 - DNA, 76 bp, Artificial Sequence; identical to SEQ ID NO: 3157
  Description of Artificial Sequence: Synthetic pecan; 5' sequence + inner sequence + 3' sequence

SEQ ID NO: 23736 - DNA, 76 bp, Artificial Sequence
  Description of Artificial Sequence: Synthetic pecan; 5' sequence + inner sequence + 3' sequence
tagggaagagaaggacatatgatgtcatgcacgaaaactatcatggcggcatgttgactagtacatgaccacttga

SEQ ID NO: 23737 - DNA, 76 bp, Artificial Sequence
  Description of Artificial Sequence: Synthetic pecan; 5' sequence + inner sequence + 3' sequence
tagggaagagaaggacatatgatgtcatgcacgaaccctatcatggcggcatgttgactagtacatgaccacttga

SEQ ID NO: 23738 - DNA, 77 bp, Artificial Sequence; identical to SEQ ID NO: 3258
  Description of Artificial Sequence: Synthetic pecan; 5' sequence + inner sequence + 3' sequence

SEQ ID NO: 23739 - DNA, 76 bp, Artificial Sequence; identical to SEQ ID NO: 3955
  Description of Artificial Sequence: Synthetic pecan; 5' sequence + inner sequence + 3' sequence

SEQ ID NO: 23740 - DNA, 76 bp, Artificial Sequence
  Description of Artificial Sequence: Synthetic pecan; 5' sequence + inner sequence + 3' sequence
tagggaagagaaggacatatgatgcacgactcgcaccctatcttgaggccatgttgactagtacatgaccacttga

SEQ ID NO: 23741 - DNA, 71 bp, Artificial Sequence
  Description of Artificial Sequence: Synthetic pecan; 5' sequence + inner sequence + 3' sequence
tagggaagagaaggacatatgatgtcattccgcatcctacacgtgggcttgactagtacatgaccacttga

SEQ ID NO: 23742 - DNA, 76 bp, Artificial Sequence; identical to SEQ ID NO: 3298
  Description of Artificial Sequence: Synthetic pecan; 5' sequence + inner sequence + 3' sequence

SEQ ID NO: 23743 - DNA, 76 bp, Artificial Sequence
  Description of Artificial Sequence: Synthetic pecan; 5' sequence + inner sequence + 3' sequence
tagggaagagaaggacatatgatcgcgtccgtggcgtcacgtcgtggtgtggattgactagtacatgaccacttga

SEQ ID NO: 23744 - DNA, 76 bp, Artificial Sequence
  Description of Artificial Sequence: Synthetic pecan; 5' sequence + inner sequence + 3' sequence
tagggaagagaaggacatatgatgcacgcacgatgagcgccaagtgacatggattgactagtacatgaccacttga

SEQ ID NO: 23745 - DNA, 76 bp, Artificial Sequence; identical to SEQ ID NO: 7948
  Description of Artificial Sequence: Synthetic pecan; 5' sequence + inner sequence + 3' sequence

SEQ ID NO: 23746 - DNA, 76 bp, Artificial Sequence
  Description of Artificial Sequence: Synthetic pecan; 5' sequence + inner sequence + 3' sequence
tagggaagagaaggacatatgatccatcgcgtcattatcatgtgtgtcacgtattgactagtacatgaccacttga

SEQ ID NO: 23747 - DNA, 76 bp, Artificial Sequence; identical to SEQ ID NO: 3461
  Description of Artificial Sequence: Synthetic pecan; 5' sequence + inner sequence + 3' sequence

SEQ ID NO: 23748 - DNA, 75 bp, Artificial Sequence; identical to SEQ ID NO: 3334
  Description of Artificial Sequence: Synthetic pecan; 5' sequence + inner sequence + 3' sequence

SEQ ID NO: 23749 - DNA, 76 bp, Artificial Sequence
  Description of Artificial Sequence: Synthetic pecan; 5' sequence + inner sequence + 3' sequence
tagggaagagaaggacatatgatgacacaaacggaccgacaagtgcgcatggattgactagtacatgaccacttga

SEQ ID NO: 23750 - DNA, 76 bp, Artificial Sequence
  Description of Artificial Sequence: Synthetic pecan; 5' sequence + inner sequence + 3' sequence
tagggaagagaaggacatatgatgtcgtgactggctagctggacatgcactgattgactagtacatgaccacttga

SEQ ID NO: 23751 - DNA, 76 bp, Artificial Sequence; identical to SEQ ID NO: 11978
  Description of Artificial Sequence: Synthetic pecan; 5' sequence + inner sequence + 3' sequence

SEQ ID NO: 23752 - DNA, 76 bp, Artificial Sequence
  Description of Artificial Sequence: Synthetic pecan; 5' sequence + inner sequence + 3' sequence
tagggaagagaaggacatatgatccatcgcgtcactatcatgtgtgccacgtattgactagtacatgaccacttga

SEQ ID NO: 23753 - DNA, 76 bp, Artificial Sequence
  Description of Artificial Sequence: Synthetic pecan; 5' sequence + inner sequence + 3' sequence
tagggaagagaaggacatatgatgacatgcacgcacctacacgtgggtatggattgactagtacatgaccacttga

SEQ ID NO: 23754 - DNA, 76 bp, Artificial Sequence
  Description of Artificial Sequence: Synthetic pecan; 5' sequence + inner sequence + 3' sequence
tagggaagagaaggacatatgatgtacgcagcggaacgttcgagtggtacgtattgactagtacatgaccacttga

SEQ ID NO: 23755 - DNA, 76 bp, Artificial Sequence
  Description of Artificial Sequence: Synthetic pecan; 5' sequence + inner sequence + 3' sequence
tagggaagagaaggacatatgatggacgcagcttgcctcctggtggtcacgtattgactagtacatgaccacttga

SEQ ID NO: 23756 - DNA, 76 bp, Artificial Sequence; identical to SEQ ID NO: 7229
  Description of Artificial Sequence: Synthetic pecan; 5' sequence + inner sequence + 3' sequence

SEQ ID NO: 23757 - DNA, 76 bp, Artificial Sequence; identical to SEQ ID NO: 3085
  Description of Artificial Sequence: Synthetic pecan; 5' sequence + inner sequence + 3' sequence

SEQ ID NO: 23758 - DNA, 76 bp, Artificial Sequence; identical to SEQ ID NO: 15932
  Description of Artificial Sequence: Synthetic pecan; 5' sequence + inner sequence + 3' sequence

SEQ ID NO: 23759 - DNA, 76 bp, Artificial Sequence; identical to SEQ ID NO: 3840
  Description of Artificial Sequence: Synthetic pecan; 5' sequence + inner sequence + 3' sequence

SEQ ID NO: 23760 - DNA, 76 bp, Artificial Sequence
  Description of Artificial Sequence: Synthetic pecan; 5' sequence + inner sequence + 3' sequence
tagggaagagaaggacatatgatggcattcacgcacctacacgtgggtatggattgactagtacatgaccacttga

SEQ ID NO: 23761 - DNA, 76 bp, Artificial Sequence
  Description of Artificial Sequence: Synthetic pecan; 5' sequence + inner sequence + 3' sequence
tagggaagagaaggacatatgatcgcaccgtcggtacgtcatgcacgctgacattgactagtacatgaccacttga

SEQ ID NO: 23762 - DNA, 76 bp, Artificial Sequence; identical to SEQ ID NO: 19399
  Description of Artificial Sequence: Synthetic pecan; 5' sequence + inner sequence + 3' sequence

SEQ ID NO: 23763 - DNA, 76 bp, Artificial Sequence; identical to SEQ ID NO: 11748
  Description of Artificial Sequence: Synthetic pecan; 5' sequence + inner sequence + 3' sequence

SEQ ID NO: 23764 - DNA, 76 bp, Artificial Sequence
  Description of Artificial Sequence: Synthetic pecan; 5' sequence + inner sequence + 3' sequence
tagggaagagaaggacatatgatccgcacgtacctctatcagtggtgcatgcattgactagtacatgaccacttga

SEQ ID NO: 23765 - DNA, 76 bp, Artificial Sequence; identical to SEQ ID NO: 7856
  Description of Artificial Sequence: Synthetic pecan; 5' sequence + inner sequence + 3' sequence

SEQ ID NO: 23766 - DNA, 76 bp, Artificial Sequence
  Description of Artificial Sequence: Synthetic pecan; 5' sequence + inner sequence + 3' sequence
tagggaagagaaggacatatgatgcacgcagcttgcctactggtggtcacgtattgactagtacatgaccacttga

SEQ ID NO: 23767 - DNA, 76 bp, Artificial Sequence
  Description of Artificial Sequence: Synthetic pecan; 5' sequence + inner sequence + 3' sequence
tagggaagagaaggacatatgatgcacgactcgcaccctatcgtgaggccatgttgactagtacatgaccacttga

SEQ ID NO: 23768 - DNA, 76 bp, Artificial Sequence; identical to SEQ ID NO: 3921
  Description of Artificial Sequence: Synthetic pecan; 5' sequence + inner sequence + 3' sequence

SEQ ID NO: 23769 - DNA, 76 bp, Artificial Sequence
  Description of Artificial Sequence: Synthetic pecan; 5' sequence + inner sequence + 3' sequence
tagggaagagaaggacatatgatggccacagcttacctcaacgtggacgtgcattgactagtacatgaccacttga

SEQ ID NO: 23770 - DNA, 76 bp, Artificial Sequence; identical to SEQ ID NO: 7401
  Description of Artificial Sequence: Synthetic pecan; 5' sequence + inner sequence + 3' sequence

SEQ ID NO: 23771 - DNA, 76 bp, Artificial Sequence
  Description of Artificial Sequence: Synthetic pecan; 5' sequence + inner sequence + 3' sequence
tagggaagagaaggacatatgatccgcacgtagccctattagtggtgcatgcattgactagtacatgaccacttga

SEQ ID NO: 23772 - DNA, 76 bp, Artificial Sequence; identical to SEQ ID NO: 3753
  Description of Artificial Sequence: Synthetic pecan; 5' sequence + inner sequence + 3' sequence

SEQ ID NO: 23773 - DNA, 76 bp, Artificial Sequence
  Description of Artificial Sequence: Synthetic pecan; 5' sequence + inner sequence + 3' sequence
tagggaagagaaggacatatgatgcactgcacgcaccctatcatgtcggcatgttgactagtacatgaccacttga

SEQ ID NO: 23774 - DNA, 76 bp, Artificial Sequence; identical to SEQ ID NO: 3264
  Description of Artificial Sequence: Synthetic pecan; 5' sequence + inner sequence + 3' sequence

SEQ ID NO: 23775 - DNA, 76 bp, Artificial Sequence
  Description of Artificial Sequence: Synthetic pecan; 5' sequence + inner sequence + 3' sequence
tagggaagagaaggacatatgatggacgcagcttgccttctggtggtcacgtattgactagtacatgaccacttga

SEQ ID NO: 23776 - DNA, 76 bp, Artificial Sequence
  Description of Artificial Sequence: Synthetic pecan; 5' sequence + inner sequence + 3' sequence
tagggaagagaaggacatatgatgtcatgaacgaacactatcatggcggcatgttgactagtacatgaccacttga

SEQ ID NO: 23777 - DNA, 76 bp, Artificial Sequence
  Description of Artificial Sequence: Synthetic pecan; 5' sequence + inner sequence + 3' sequence
tagggaagagaaggacatatgatcgcgcctacgatgggcaggcacatgtcgcattgactagtacatgaccacttga

SEQ ID NO: 23778 - DNA, 76 bp, Artificial Sequence
  Description of Artificial Sequence: Synthetic pecan; 5' sequence + inner sequence + 3' sequence
tagggaagagaaggacatatgatgtcatgcacgaacactatgatggcggcatgttgactagtacatgaccacttga

SEQ ID NO: 23779 - DNA, 76 bp, Artificial Sequence; identical to SEQ ID NO: 3269
  Description of Artificial Sequence: Synthetic pecan; 5' sequence + inner sequence + 3' sequence

SEQ ID NO: 23780 - DNA, 76 bp, Artificial Sequence
  Description of Artificial Sequence: Synthetic pecan; 5' sequence + inner sequence + 3' sequence
tagggaagagaaggacatatgatggacgcagcggaacgctcgagtggtacgtattgactagtacatgaccacttga

SEQ ID NO: 23781 - DNA, 76 bp, Artificial Sequence
  Description of Artificial Sequence: Synthetic pecan; 5' sequence + inner sequence + 3' sequence
tagggaagagaaggacatatgatgcacaactcgcaccctatcatgaggccatgttgactagtacatgaccacttga

SEQ ID NO: 23782 - DNA, 76 bp, Artificial Sequence; identical to SEQ ID NO: 3318
  Description of Artificial Sequence: Synthetic pecan; 5' sequence + inner sequence + 3' sequence

SEQ ID NO: 23783 - DNA, 76 bp, Artificial Sequence
  Description of Artificial Sequence: Synthetic pecan; 5' sequence + inner sequence + 3' sequence
tagggaagagaaggacatatgatggacgcactcaaccgccaagtgccgtcgtgttgactagtacatgaccacttga

SEQ ID NO: 23784 - DNA, 76 bp, Artificial Sequence
  Description of Artificial Sequence: Synthetic pecan; 5' sequence + inner sequence + 3' sequence
tagggaagagaaggacatatgatggccacagcgtacctcaacgtggacgggcattgactagtacatgaccacttga

SEQ ID NO: 23785 - DNA, 76 bp, Artificial Sequence
  Description of Artificial Sequence: Synthetic pecan; 5' sequence + inner sequence + 3' sequence
tagggaagagaaggacatatgatccccacgtagccctatcagtggtgcatgcattgactagtacatgaccacttga

SEQ ID NO: 23786 - DNA, 76 bp, Artificial Sequence; identical to SEQ ID NO: 3943
  Description of Artificial Sequence: Synthetic pecan; 5' sequence + inner sequence + 3' sequence

SEQ ID NO: 23787 - DNA, 76 bp, Artificial Sequence
  Description of Artificial Sequence: Synthetic pecan; 5' sequence + inner sequence + 3' sequence
tagggaagagaaggacatatgatgtcatgcacgaacattatcatggcggcatgttgactagtacatgaccacttga

SEQ ID NO: 23788 - DNA, 76 bp, Artificial Sequence
  Description of Artificial Sequence: Synthetic pecan; 5' sequence + inner sequence + 3' sequence
tagggaagagaaggacatatgatggcatgcatgcacctacacgtgggtatggattgactagtacatgaccacttga

SEQ ID NO: 23789 - DNA, 76 bp, Artificial Sequence
  Description of Artificial Sequence: Synthetic pecan; 5' sequence + inner sequence + 3' sequence
tagggaagagaaggacatatgatgtcatgccatcccttcgagtgtgacatgtattgactagtacatgaccacttga

SEQ ID NO: 23790 - DNA, 76 bp, Artificial Sequence; identical to SEQ ID NO: 3156
  Description of Artificial Sequence: Synthetic pecan; 5' sequence + inner sequence + 3' sequence

SEQ ID NO: 23791 - DNA, 76 bp, Artificial Sequence; identical to SEQ ID NO: 3903
  Description of Artificial Sequence: Synthetic pecan; 5' sequence + inner sequence + 3' sequence

SEQ ID NO: 23792 - DNA, 76 bp, Artificial Sequence
  Description of Artificial Sequence: Synthetic pecan; 5' sequence + inner sequence + 3' sequence
tagggaagagaaggacatatgatccgcacgtagccctaccagtggtgcatgcattgactagtacatgaccacttga

SEQ ID NO: 23793 - DNA, 76 bp, Artificial Sequence
  Description of Artificial Sequence: Synthetic pecan; 5' sequence + inner sequence + 3' sequence
tagggaagagaaggacatatgatgcccacagcgtacctcaacgtggacgtgcattgactagtacatgaccacttga

SEQ ID NO: 23794 - DNA, 76 bp, Artificial Sequence; identical to SEQ ID NO: 19211
  Description of Artificial Sequence: Synthetic pecan; 5' sequence + inner sequence + 3' sequence

SEQ ID NO: 23795 - DNA, 76 bp, Artificial Sequence
  Description of Artificial Sequence: Synthetic pecan; 5' sequence + inner sequence + 3' sequence
tagggaagagaaggacatatgatgtcatgccatccctttgagtgtgacaggtattgactagtacatgaccacttga

SEQ ID NO: 23796 - DNA, 76 bp, Artificial Sequence
  Description of Artificial Sequence: Synthetic pecan; 5' sequence + inner sequence + 3' sequence
tagggaagagaaggacatatgatggccaagctgaccgtaaagtcaggcgtgtattgactagtacatgaccacttga

SEQ ID NO: 23797 - DNA, 76 bp, Artificial Sequence
  Description of Artificial Sequence: Synthetic pecan; 5' sequence + inner sequence + 3' sequence
tagggaagagaaggacatatgatgtcatgcacgaacactatcatggcggcgtgttgactagtacatgaccacttga

SEQ ID NO: 23798 - DNA, 76 bp, Artificial Sequence
  Description of Artificial Sequence: Synthetic pecan; 5' sequence + inner sequence + 3' sequence
tagggaagagaaggacatatgatggaagcagcttgcctactggtggtcacgtattgactagtacatgaccacttga

SEQ ID NO: 23799 - DNA, 76 bp, Artificial Sequence
  Description of Artificial Sequence: Synthetic pecan; 5' sequence + inner sequence + 3' sequence
tagggaagagaaggacatatgatggcacaaacggaccgacaagtgcgcctggattgactagtacatgaccacttga

SEQ ID NO: 23800 - DNA, 76 bp, Artificial Sequence
  Description of Artificial Sequence: Synthetic pecan; 5' sequence + inner sequence + 3' sequence
tagggaagagaaggacatatgatcgcaccgtcgttacgtcatgcacgctgacattgactagtacatgaccacttga

SEQ ID NO: 23801 - DNA, 76 bp, Artificial Sequence
  Description of Artificial Sequence: Synthetic pecan; 5' sequence + inner sequence + 3' sequence
tagggaagagaaggacatatgatccatcgcgtcactatcatgtgtgtcacgtgttgactagtacatgaccacttga

SEQ ID NO: 23802 - DNA, 76 bp, Artificial Sequence; identical to SEQ ID NO: 15700
  Description of Artificial Sequence: Synthetic pecan; 5' sequence + inner sequence + 3' sequence

SEQ ID NO: 23803 - DNA, 76 bp, Artificial Sequence
  Description of Artificial Sequence: Synthetic pecan; 5' sequence + inner sequence + 3' sequence
tagggaagagaaggacatatgatgcacgactcgcaccctatcatgagaccatgttgactagtacatgaccacttga

SEQ ID NO: 23804 - DNA, 76 bp, Artificial Sequence; identical to SEQ ID NO: 3598
  Description of Artificial Sequence: Synthetic pecan; 5' sequence + inner sequence + 3' sequence

SEQ ID NO: 23805 - DNA, 76 bp, Artificial Sequence; identical to SEQ ID NO: 19692
  Description of Artificial Sequence: Synthetic pecan; 5' sequence + inner sequence + 3' sequence

SEQ ID NO: 23806 - DNA, 76 bp, Artificial Sequence; identical to SEQ ID NO: 7682
  Description of Artificial Sequence: Synthetic pecan; 5' sequence + inner sequence + 3' sequence

SEQ ID NO: 23807 - DNA, 76 bp, Artificial Sequence
  Description of Artificial Sequence: Synthetic pecan; 5' sequence + inner sequence + 3' sequence
tagggaagagaaggacatatgatccgtagcgacatcaagcagtggtgtgcgtgttgactagtacatgaccacttga

SEQ ID NO: 23808 - DNA, 76 bp, Artificial Sequence; identical to SEQ ID NO: 7938
  Description of Artificial Sequence: Synthetic pecan; 5' sequence + inner sequence + 3' sequence

SEQ ID NO: 23809 - DNA, 76 bp, Artificial Sequence
  Description of Artificial Sequence: Synthetic pecan; 5' sequence + inner sequence + 3' sequence
tagggaagagaaggacatatgatggcacaaacggaccgacaagtgcacatggattgactagtacatgaccacttga

SEQ ID NO: 23810 - DNA, 76 bp, Artificial Sequence; identical to SEQ ID NO: 7887
  Description of Artificial Sequence: Synthetic pecan; 5' sequence + inner sequence + 3' sequence

SEQ ID NO: 23811 - DNA, 76 bp, Artificial Sequence
  Description of Artificial Sequence: Synthetic pecan; 5' sequence + inner sequence + 3' sequence
tagggaagagaaggacatatgatgtcattcacgaacactatcatggcggcatgttgactagtacatgaccacttga

SEQ ID NO: 23812 - DNA, 76 bp, Artificial Sequence; identical to SEQ ID NO: 19675
  Description of Artificial Sequence: Synthetic pecan; 5' sequence + inner sequence + 3' sequence

SEQ ID NO: 23813 - DNA, 76 bp, Artificial Sequence; identical to SEQ ID NO: 11872
  Description of Artificial Sequence: Synthetic pecan; 5' sequence + inner sequence + 3' sequence

SEQ ID NO: 23814 - DNA, 76 bp, Artificial Sequence
  Description of Artificial Sequence: Synthetic pecan; 5' sequence + inner sequence + 3' sequence
tagggaagagaaggacatatgatccgcacgtagccctatcggtggtgcatgcattgactagtacatgaccacttga

SEQ ID NO: 23815 - DNA, 76 bp, Artificial Sequence
  Description of Artificial Sequence: Synthetic pecan; 5' sequence + inner sequence + 3' sequence
tagggaagagaaggacatatgatccattgcgtcactatcatgtgtgtcacgtattgactagtacatgaccacttga

SEQ ID NO: 23816 - DNA, 76 bp, Artificial Sequence; identical to SEQ ID NO: 11891
  Description of Artificial Sequence: Synthetic pecan; 5' sequence + inner sequence + 3' sequence

SEQ ID NO: 23817 - DNA, 76 bp, Artificial Sequence
  Description of Artificial Sequence: Synthetic pecan; 5' sequence + inner sequence + 3' sequence
tagggaagagaaggacatatgatgtcattccgcatcctacacgtggacacgtattgactagtacatgaccacttga

SEQ ID NO: 23818 - DNA, 76 bp, Artificial Sequence; identical to SEQ ID NO: 3109
  Description of Artificial Sequence: Synthetic pecan; 5' sequence + inner sequence + 3' sequence

SEQ ID NO: 23819 - DNA, 79 bp, Artificial Sequence
  Description of Artificial Sequence: Synthetic pecan; 5' sequence + inner sequence + 3' sequence
tagggaagagaaggacatatgatggcatgcacgcacctacacgtgggtatggcatgttgactagtacatgaccacttga

SEQ ID NO: 23820 - DNA, 76 bp, Artificial Sequence
  Description of Artificial Sequence: Synthetic pecan; 5' sequence + inner sequence + 3' sequence
tagggaagagaaggacatatgatggccacagcgtacctcaacggggacgtgcattgactagtacatgaccacttga

SEQ ID NO: 23821 - DNA, 76 bp, Artificial Sequence; identical to SEQ ID NO: 19769
  Description of Artificial Sequence: Synthetic pecan; 5' sequence + inner sequence + 3' sequence

SEQ ID NO: 23822 - DNA, 76 bp, Artificial Sequence; identical to SEQ ID NO: 3130
  Description of Artificial Sequence: Synthetic pecan; 5' sequence + inner sequence + 3' sequence

SEQ ID NO: 23823 - DNA, 76 bp, Artificial Sequence
  Description of Artificial Sequence: Synthetic pecan; 5' sequence + inner sequence + 3' sequence
tagggaagagaaggacatatgatggcatgcacgcacctacaggtgggtatggattgactagtacatgaccacttga

SEQ ID NO: 23824 - DNA, 76 bp, Artificial Sequence; identical to SEQ ID NO: 3398
  Description of Artificial Sequence: Synthetic pecan; 5' sequence + inner sequence + 3' sequence

SEQ ID NO: 23825 - DNA, 76 bp, Artificial Sequence; identical to SEQ ID NO: 3060
  Description of Artificial Sequence: Synthetic pecan; 5' sequence + inner sequence + 3' sequence

SEQ ID NO: 23826 - DNA, 76 bp, Artificial Sequence
  Description of Artificial Sequence: Synthetic pecan; 5' sequence + inner sequence + 3' sequence
tagggaagagaaggacatatgatggcacaaacggtccgacaagtgcgcatggattgactagtacatgaccacttga

SEQ ID NO: 23827 - DNA, 76 bp, Artificial Sequence; identical to SEQ ID NO: 3636
  Description of Artificial Sequence: Synthetic pecan; 5' sequence + inner sequence + 3' sequence

SEQ ID NO: 23828 - DNA, 76 bp, Artificial Sequence; identical to SEQ ID NO: 7967
  Description of Artificial Sequence: Synthetic pecan; 5' sequence + inner sequence + 3' sequence

SEQ ID NO: 23829 - DNA, 76 bp, Artificial Sequence
  Description of Artificial Sequence: Synthetic pecan; 5' sequence + inner sequence + 3' sequence
tagggaagagaaggacatatgatggcatgcacgcacctacacgagggtatggattgactagtacatgaccacttga

SEQ ID NO: 23830 - DNA, 76 bp, Artificial Sequence; identical to SEQ ID NO: 11758
  Description of Artificial Sequence: Synthetic pecan; 5' sequence + inner sequence + 3' sequence

SEQ ID NO: 23831 - DNA, 76 bp, Artificial Sequence
  Description of Artificial Sequence: Synthetic pecan; 5' sequence + inner sequence + 3' sequence
tagggaagagaaggacatatgatccatcgcgtcactatcatgtgtgttacgtattgactagtacatgaccacttga

SEQ ID NO: 23832 - DNA, 76 bp, Artificial Sequence; identical to SEQ ID NO: 3563
  Description of Artificial Sequence: Synthetic pecan; 5' sequence + inner sequence + 3' sequence

SEQ ID NO: 23833 - DNA, 76 bp, Artificial Sequence; identical to SEQ ID NO: 7571
  Description of Artificial Sequence: Synthetic pecan; 5' sequence + inner sequence + 3' sequence

SEQ ID NO: 23834 - DNA, 74 bp, Artificial Sequence; identical to SEQ ID NO: 15885
  Description of Artificial Sequence: Synthetic pecan; 5' sequence + inner sequence + 3' sequence

SEQ ID NO: 23835 - DNA, 76 bp, Artificial Sequence; identical to SEQ ID NO: 3305
  Description of Artificial Sequence: Synthetic pecan; 5' sequence + inner sequence + 3' sequence

SEQ ID NO: 23836 - DNA, 76 bp, Artificial Sequence
  Description of Artificial Sequence: Synthetic pecan; 5' sequence + inner sequence + 3' sequence
tagggaagagaaggacatatgatggccaccgcgtacctcaacgtggacgtgcattgactagtacatgaccacttga

SEQ ID NO: 23837 - DNA, 76 bp, Artificial Sequence; identical to SEQ ID NO: 19962
  Description of Artificial Sequence: Synthetic pecan; 5' sequence + inner sequence + 3' sequence

SEQ ID NO: 23838 - DNA, 76 bp, Artificial Sequence; identical to SEQ ID NO: 15944
  Description of Artificial Sequence: Synthetic pecan; 5' sequence + inner sequence + 3' sequence

SEQ ID NO: 23839 - DNA, 76 bp, Artificial Sequence; identical to SEQ ID NO: 15922
  Description of Artificial Sequence: Synthetic pecan; 5' sequence + inner sequence + 3' sequence

SEQ ID NO: 23840 - DNA, 76 bp, Artificial Sequence; identical to SEQ ID NO: 3086
  Description of Artificial Sequence: Synthetic pecan; 5' sequence + inner sequence + 3' sequence

SEQ ID NO: 23841 - DNA, 74 bp, Artificial Sequence
  Description of Artificial Sequence: Synthetic pecan; 5' sequence + inner sequence + 3' sequence
tagggaagagaaggacatatgatgtgcgaccgacccgtaagtgtgcatgcgttgactagtacatgaccacttga

SEQ ID NO: 23842 - DNA, 76 bp, Artificial Sequence; identical to SEQ ID NO: 3793
  Description of Artificial Sequence: Synthetic pecan; 5' sequence + inner sequence + 3' sequence

SEQ ID NO: 23843 - DNA, 76 bp, Artificial Sequence; identical to SEQ ID NO: 3155
  Description of Artificial Sequence: Synthetic pecan; 5' sequence + inner sequence + 3' sequence

SEQ ID NO: 23844 - DNA, 76 bp, Artificial Sequence; identical to SEQ ID NO: 3458
  Description of Artificial Sequence: Synthetic pecan; 5' sequence + inner sequence + 3' sequence

SEQ ID NO: 23845 - DNA, 76 bp, Artificial Sequence
  Description of Artificial Sequence: Synthetic pecan; 5' sequence + inner sequence + 3' sequence
tagggaagagaaggacatatgatcgcaccgtcaagcgggaaggtactttggtgttgactagtacatgaccacttga

SEQ ID NO: 23846 - DNA, 76 bp, Artificial Sequence
  Description of Artificial Sequence: Synthetic pecan; 5' sequence + inner sequence + 3' sequence
tagggaagagaaggacatatgatgtgcgagcagaccgacgcgagtggtacgtattgactagtacatgaccacttga

SEQ ID NO: 23847 - DNA, 76 bp, Artificial Sequence
  Description of Artificial Sequence: Synthetic pecan; 5' sequence + inner sequence + 3' sequence
tagggaagagaaggacatatgatggcatgcacgcaactacacgtgggcacgtattgactagtacatgaccacttga

SEQ ID NO: 23848 - DNA, 76 bp, Artificial Sequence
  Description of Artificial Sequence: Synthetic pecan; 5' sequence + inner sequence + 3' sequence
tagggaagagaaggacatatgatggcacaaacggcccgacaagtgcgcatggattgactagtacatgaccacttga

SEQ ID NO: 23849 - DNA, 76 bp, Artificial Sequence
  Description of Artificial Sequence: Synthetic pecan; 5' sequence + inner sequence + 3' sequence
tagggaagagaaggacatatgatggacgcagcggaacgttcgagtggtacgtgttgactagtacatgaccacttga

SEQ ID NO: 23850 - DNA, 76 bp, Artificial Sequence
  Description of Artificial Sequence: Synthetic pecan; 5' sequence + inner sequence + 3' sequence
tagggaagagaaggacatatgatccgcacttagccctatcagtggtgcatgcattgactagtacatgaccacttga

SEQ ID NO: 23851 - DNA, 76 bp, Artificial Sequence; identical to SEQ ID NO: 11968
  Description of Artificial Sequence: Synthetic pecan; 5' sequence + inner sequence + 3' sequence

SEQ ID NO: 23852 - DNA, 76 bp, Artificial Sequence; identical to SEQ ID NO: 11564
  Description of Artificial Sequence: Synthetic pecan; 5' sequence + inner sequence + 3' sequence

SEQ ID NO: 23853 - DNA, 76 bp, Artificial Sequence
  Description of Artificial Sequence: Synthetic pecan; 5' sequence + inner sequence + 3' sequence
tagggaagagaaggacatatgatccgtagcgacatcaagcggtggtgtacgtgttgactagtacatgaccacttga

SEQ ID NO: 23854 - DNA, 76 bp, Artificial Sequence
  Description of Artificial Sequence: Synthetic pecan; 5' sequence + inner sequence + 3' sequence
tagggaagagaaggacatatgatggcacaaacgcaccgacaagtgcgcatggattgactagtacatgaccacttga

SEQ ID NO: 23855 - DNA, 76 bp, Artificial Sequence
  Description of Artificial Sequence: Synthetic pecan; 5' sequence + inner sequence + 3' sequence
tagggaagagaaggacatatgatccgcatgtagccctatcagtggtgcatgcattgactagtacatgaccacttga

SEQ ID NO: 23856 - DNA, 76 bp, Artificial Sequence; identical to SEQ ID NO: 3361
  Description of Artificial Sequence: Synthetic pecan; 5' sequence + inner sequence + 3' sequence

SEQ ID NO: 23857 - DNA, 76 bp, Artificial Sequence; identical to SEQ ID NO: 3532
  Description of Artificial Sequence: Synthetic pecan; 5' sequence + inner sequence + 3' sequence

SEQ ID NO: 23858 - DNA, 76 bp, Artificial Sequence
  Description of Artificial Sequence: Synthetic pecan; 5' sequence + inner sequence + 3' sequence
tagggaagagaaggacatatgatggcacaaacggaccgacaagtgcgcatgtattgactagtacatgaccacttga

SEQ ID NO: 23859 - DNA, 76 bp, Artificial Sequence
  Description of Artificial Sequence: Synthetic pecan; 5' sequence + inner sequence + 3' sequence
tagggaagagaaggacatatgatggccaagctgaccgtaaatgcaggcgtgtattgactagtacatgaccacttga

SEQ ID NO: 23860 - DNA, 76 bp, Artificial Sequence; identical to SEQ ID NO: 19980
  Description of Artificial Sequence: Synthetic pecan; 5' sequence + inner sequence + 3' sequence

SEQ ID NO: 23861 - DNA, 76 bp, Artificial Sequence; identical to SEQ ID NO: 3217
  Description of Artificial Sequence: Synthetic pecan; 5' sequence + inner sequence + 3' sequence

SEQ ID NO: 23862 - DNA, 75 bp, Artificial Sequence
  Description of Artificial Sequence: Synthetic pecan; 5' sequence + inner sequence + 3' sequence
tagggaagagaaggacatatgatgcacgccgatgccctcatgttgccgtggattgactagtacatgaccacttga

SEQ ID NO: 23863 - DNA, 76 bp, Artificial Sequence; identical to SEQ ID NO: 3134
  Description of Artificial Sequence: Synthetic pecan; 5' sequence + inner sequence + 3' sequence

SEQ ID NO: 23864 - DNA, 76 bp, Artificial Sequence; identical to SEQ ID NO: 7489
  Description of Artificial Sequence: Synthetic pecan; 5' sequence + inner sequence + 3' sequence

SEQ ID NO: 23865 - DNA, 76 bp, Artificial Sequence
  Description of Artificial Sequence: Synthetic pecan; 5' sequence + inner sequence + 3' sequence
tagggaagagaaggacatatgatccgtagcgacatcaagcgggggtgcgcgtgttgactagtacatgaccacttga

SEQ ID NO: 23866 - DNA, 76 bp, Artificial Sequence
  Description of Artificial Sequence: Synthetic pecan; 5' sequence + inner sequence + 3' sequence
tagggaagagaaggacatatgatgcacgactcgcaccctatcatgaggccacgttgactagtacatgaccacttga

SEQ ID NO: 23867 - DNA, 76 bp, Artificial Sequence; identical to SEQ ID NO: 7707
  Description of Artificial Sequence: Synthetic pecan; 5' sequence + inner sequence + 3' sequence

SEQ ID NO: 23868 - DNA, 77 bp, Artificial Sequence
  Description of Artificial Sequence: Synthetic pecan; 5' sequence + inner sequence + 3' sequence
tagggaagagaaggacatatgatggacgcagcggaacgatcgagtggttgcgtattgactagtacatgaccacttga

SEQ ID NO: 23869 - DNA, 76 bp, Artificial Sequence
  Description of Artificial Sequence: Synthetic pecan; 5' sequence + inner sequence + 3' sequence
tagggaagagaaggacatatgatgcactgcacgcacctacacgtgggcacgtattgactagtacatgaccacttga

SEQ ID NO: 23870 - DNA, 77 bp, Artificial Sequence
  Description of Artificial Sequence: Synthetic pecan; 5' sequence + inner sequence + 3' sequence
tagggaagagaaggacatatgatgcacgactcgcaccctatcaagtgcagcatgttgactagtacatgaccacttga

SEQ ID NO: 23871 - DNA, 76 bp, Artificial Sequence; identical to SEQ ID NO: 7735
  Description of Artificial Sequence: Synthetic pecan; 5' sequence + inner sequence + 3' sequence

SEQ ID NO: 23872 - DNA, 76 bp, Artificial Sequence
  Description of Artificial Sequence: Synthetic pecan; 5' sequence + inner sequence + 3' sequence
tagggaagagaaggacatatgatgcacgactcgcacccgatcatgaggccatgttgactagtacatgaccacttga

SEQ ID NO: 23873 - DNA, 76 bp, Artificial Sequence
  Description of Artificial Sequence: Synthetic pecan; 5' sequence + inner sequence + 3' sequence
tagggaagagaaggacatatgatggaatgcacgcacctacacgtgggtatggattgactagtacatgaccacttga

SEQ ID NO: 23874 - DNA, 76 bp, Artificial Sequence
  Description of Artificial Sequence: Synthetic pecan; 5' sequence + inner sequence + 3' sequence
tagggaagagaaggacatatgatgcatcatacgacggaccgaccgacgtgggcttgactagtacatgaccacttga

SEQ ID NO: 23875 - DNA, 76 bp, Artificial Sequence; identical to SEQ ID NO: 3914
  Description of Artificial Sequence: Synthetic pecan; 5' sequence + inner sequence + 3' sequence

SEQ ID NO: 23876 - DNA, 76 bp, Artificial Sequence; identical to SEQ ID NO: 3025
  Description of Artificial Sequence: Synthetic pecan; 5' sequence + inner sequence + 3' sequence

SEQ ID NO: 23877 - DNA, 76 bp, Artificial Sequence; identical to SEQ ID NO: 3874
  Description of Artificial Sequence: Synthetic pecan; 5' sequence + inner sequence + 3' sequence

SEQ ID NO: 23878 - DNA, 76 bp, Artificial Sequence
  Description of Artificial Sequence: Synthetic pecan; 5' sequence + inner sequence + 3' sequence
tagggaagagaaggacatatgatggacgcagcggaacgttcgcgtggtacgtattgactagtacatgaccacttga

SEQ ID NO: 23879 - DNA, 76 bp, Artificial Sequence
  Description of Artificial Sequence: Synthetic pecan; 5' sequence + inner sequence + 3' sequence
tagggaagagaaggacatatgatgtcatgccatcccttcgtgtgtgacaggtattgactagtacatgaccacttga

SEQ ID NO: 23880 - DNA, 76 bp, Artificial Sequence
  Description of Artificial Sequence: Synthetic pecan; 5' sequence + inner sequence + 3' sequence
tagggaagagaaggacatatgatggcaacagcgtacctcaacgtggacgtgcattgactagtacatgaccacttga

SEQ ID NO: 23881 - DNA, 75 bp, Artificial Sequence
  Description of Artificial Sequence: Synthetic pecan; 5' sequence + inner sequence + 3' sequence
tagggaagagaaggacatatgatgcacgccgatgccctcatgcggccgtggattgactagtacatgaccacttga

SEQ ID NO: 23882 - DNA, 76 bp, Artificial Sequence
  Description of Artificial Sequence: Synthetic pecan; 5' sequence + inner sequence + 3' sequence
tagggaagagaaggacatatgatcgtacgtaccgcgcctacatgtggcatgcattgactagtacatgaccacttga

SEQ ID NO: 23883 - DNA, 76 bp, Artificial Sequence
  Description of Artificial Sequence: Synthetic pecan; 5' sequence + inner sequence + 3' sequence
tagggaagagaaggacatatgatggcatgcacgcacctacacgtgggtatgggttgactagtacatgaccacttga

SEQ ID NO: 23884 - DNA, 76 bp, Artificial Sequence
  Description of Artificial Sequence: Synthetic pecan; 5' sequence + inner sequence + 3' sequence
tagggaagagaaggacatatgatgcattggacgatcgtgccctacacgtgtgcttgactagtacatgaccacttga

SEQ ID NO: 23885 - DNA, 76 bp, Artificial Sequence
  Description of Artificial Sequence: Synthetic pecan; 5' sequence + inner sequence + 3' sequence
tagggaagagaaggacatatgatgcacgagtcgcaccctatcatgaggccatgttgactagtacatgaccacttga

SEQ ID NO: 23886 - DNA, 76 bp, Artificial Sequence; identical to SEQ ID NO: 15853
  Description of Artificial Sequence: Synthetic pecan; 5' sequence + inner sequence + 3' sequence

SEQ ID NO: 23887 - DNA, 76 bp, Artificial Sequence; identical to SEQ ID NO: 11807
  Description of Artificial Sequence: Synthetic pecan; 5' sequence + inner sequence + 3' sequence

SEQ ID NO: 23888 - DNA, 76 bp, Artificial Sequence; identical to SEQ ID NO: 7642
  Description of Artificial Sequence: Synthetic pecan; 5' sequence + inner sequence + 3' sequence

SEQ ID NO: 23889 - DNA, 76 bp, Artificial Sequence
  Description of Artificial Sequence: Synthetic pecan; 5' sequence + inner sequence + 3' sequence
tagggaagagaaggacatatgatgtcactgtgccttaccgtcaagttgcggcattgactagtacatgaccacttga

SEQ ID NO: 23890 - DNA, 75 bp, Artificial Sequence
  Description of Artificial Sequence: Synthetic pecan; 5' sequence + inner sequence + 3' sequence
tagggaagagaaggacatatgatgtcatgccatcccttcgagtgtgacagtattgactagtacatgaccacttga

SEQ ID NO: 23891 - DNA, 76 bp, Artificial Sequence
  Description of Artificial Sequence: Synthetic pecan; 5' sequence + inner sequence + 3' sequence
tagggaagagaaggacatatgatccgcacgtagccctagcagtggtgcatgcattgactagtacatgaccacttga

SEQ ID NO: 23892 - DNA, 76 bp, Artificial Sequence; identical to SEQ ID NO: 19471
  Description of Artificial Sequence: Synthetic pecan; 5' sequence + inner sequence + 3' sequence

SEQ ID NO: 23893 - DNA, 76 bp, Artificial Sequence; identical to SEQ ID NO: 19544
  Description of Artificial Sequence: Synthetic pecan; 5' sequence + inner sequence + 3' sequence

SEQ ID NO: 23894 - DNA, 76 bp, Artificial Sequence
  Description of Artificial Sequence: Synthetic pecan; 5' sequence + inner sequence + 3' sequence
tagggaagagaaggacatatgatgtcatgcacgaatactatcatggcggcatgttgactagtacatgaccacttga

SEQ ID NO: 23895 - DNA, 76 bp, Artificial Sequence
  Description of Artificial Sequence: Synthetic pecan; 5' sequence + inner sequence + 3' sequence
tagggaagagaaggacatatgatgcacgacccgcaccctatcatgaggccatgttgactagtacatgaccacttga

SEQ ID NO: 23896 - DNA, 76 bp, Artificial Sequence
  Description of Artificial Sequence: Synthetic pecan; 5' sequence + inner sequence + 3' sequence
tagggaagagaaggacatatgatccgcacgtagccctatcagtggtgcatgaattgactagtacatgaccacttga

SEQ ID NO: 23897 - DNA, 76 bp, Artificial Sequence
  Description of Artificial Sequence: Synthetic pecan; 5' sequence + inner sequence + 3' sequence
tagggaagagaaggacatatgatgtcatgcacgaacactatcctggcggcatgttgactagtacatgaccacttga

SEQ ID NO: 23898 - DNA, 76 bp, Artificial Sequence; identical to SEQ ID NO: 7394
  Description of Artificial Sequence: Synthetic pecan; 5' sequence + inner sequence + 3' sequence

SEQ ID NO: 23899 - DNA, 76 bp, Artificial Sequence
  Description of Artificial Sequence: Synthetic pecan; 5' sequence + inner sequence + 3' sequence
tagggaagagaaggacatatgatggcatgaacgcacctacacgtgggcacgtattgactagtacatgaccacttga

SEQ ID NO: 23900 - DNA, 76 bp, Artificial Sequence
  Description of Artificial Sequence: Synthetic pecan; 5' sequence + inner sequence + 3' sequence
tagggaagagaaggacatatgatggacgcagtttgcctactggtggtcacgtattgactagtacatgaccacttga

SEQ ID NO: 23901 - DNA, 76 bp, Artificial Sequence; identical to SEQ ID NO: 7804
  Description of Artificial Sequence: Synthetic pecan; 5' sequence + inner sequence + 3' sequence

SEQ ID NO: 23902 - DNA, 76 bp, Artificial Sequence
  Description of Artificial Sequence: Synthetic pecan; 5' sequence + inner sequence + 3' sequence
tagggaagagaaggacatatgatcgcaccgtcaagagggaaggcactttggtgttgactagtacatgaccacttga

SEQ ID NO: 23903 - DNA, 76 bp, Artificial Sequence
  Description of Artificial Sequence: Synthetic pecan; 5' sequence + inner sequence + 3' sequence
tagggaagagaaggacatatgatggccacagcgtacctcaacgtggacttgcattgactagtacatgaccacttga

SEQ ID NO: 23904 - DNA, 76 bp, Artificial Sequence; identical to SEQ ID NO: 7775
  Description of Artificial Sequence: Synthetic pecan; 5' sequence + inner sequence + 3' sequence

SEQ ID NO: 23905 - DNA, 76 bp, Artificial Sequence
  Description of Artificial Sequence: Synthetic pecan; 5' sequence + inner sequence + 3' sequence
tagggaagagaaggacatatgatccgatcgcacgtcaaggcaggctgtacgatttgactagtacatgaccacttga

SEQ ID NO: 23906 - DNA, 76 bp, Artificial Sequence
  Description of Artificial Sequence: Synthetic pecan; 5' sequence + inner sequence + 3' sequence
tagggaagagaaggacatatgatggcacaaacggaccggcaagtgcgcatggattgactagtacatgaccacttga

SEQ ID NO: 23907 - DNA, 71 bp, Artificial Sequence
  Description of Artificial Sequence: Synthetic pecan; 5' sequence + inner sequence + 3' sequence
tagggaagagaaggacatatgatggcatgcacgcacctacacgtggacttgactagtacatgaccacttga

SEQ ID NO: 23908 - DNA, 76 bp, Artificial Sequence
  Description of Artificial Sequence: Synthetic pecan; 5' sequence + inner sequence + 3' sequence
tagggaagagaaggacatatgatggcacaaacggaccgacaagtgctcatggattgactagtacatgaccacttga

SEQ ID NO: 23909 - DNA, 76 bp, Artificial Sequence; identical to SEQ ID NO: 11971
  Description of Artificial Sequence: Synthetic pecan; 5' sequence + inner sequence + 3' sequence

SEQ ID NO: 23910 - DNA, 75 bp, Artificial Sequence
  Description of Artificial Sequence: Synthetic pecan; 5' sequence + inner sequence + 3' sequence
tagggaagagaaggacatatgatgcacgccgatgccctcatgtggccgcggattgactagtacatgaccacttga

SEQ ID NO: 23911 - DNA, 76 bp, Artificial Sequence
  Description of Artificial Sequence: Synthetic pecan; 5' sequence + inner sequence + 3' sequence
tagggaagagaaggacatatgatggacgcagctcgcctactggtggtcacgtattgactagtacatgaccacttga

SEQ ID NO: 23912 - DNA, 76 bp, Artificial Sequence
  Description of Artificial Sequence: Synthetic pecan; 5' sequence + inner sequence + 3' sequence
tagggaagagaaggacatatgatccgtagcaacatcaagcggtggtgtgcgtgttgactagtacatgaccacttga

SEQ ID NO: 23913 - DNA, 76 bp, Artificial Sequence
  Description of Artificial Sequence: Synthetic pecan; 5' sequence + inner sequence + 3' sequence
tagggaagagaaggacatatgatggccacagcgtacctcaacgtggatgtgcattgactagtacatgaccacttga

SEQ ID NO: 23914 - DNA, 76 bp, Artificial Sequence
  Description of Artificial Sequence: Synthetic pecan; 5' sequence + inner sequence + 3' sequence
tagggaagagaaggacatatgatcgcaccgtcgatgcgtcatgcacgctgacattgactagtacatgaccacttga

SEQ ID NO: 23915 - DNA, 76 bp, Artificial Sequence
  Description of Artificial Sequence: Synthetic pecan; 5' sequence + inner sequence + 3' sequence
tagggaagagaaggacatatgatcgcacccgatgtggacgatgtgccttggccttgactagtacatgaccacttga

SEQ ID NO: 23916 - DNA, 76 bp, Artificial Sequence; identical to SEQ ID NO: 3370
  Description of Artificial Sequence: Synthetic pecan; 5' sequence + inner sequence + 3' sequence

SEQ ID NO: 23917 - DNA, 76 bp, Artificial Sequence
  Description of Artificial Sequence: Synthetic pecan; 5' sequence + inner sequence + 3' sequence
tagggaagagaaggacatatgatgcgtgacgatgcgtgccgtcctgcgtgacgttgactagtacatgaccacttga

SEQ ID NO: 23918 - DNA, 76 bp, Artificial Sequence
  Description of Artificial Sequence: Synthetic pecan; 5' sequence + inner sequence + 3' sequence
tagggaagagaaggacatatgatccgtagggacatcaagcggtggtgtgcgtgttgactagtacatgaccacttga

SEQ ID NO: 23919 - DNA, 76 bp, Artificial Sequence
  Description of Artificial Sequence: Synthetic pecan; 5' sequence + inner sequence + 3' sequence
tagggaagagaaggacatatgatgtcatgtacgaacactatcatggcggcatgttgactagtacatgaccacttga

SEQ ID NO: 23920 - DNA, 76 bp, Artificial Sequence; identical to SEQ ID NO: 3932
  Description of Artificial Sequence: Synthetic pecan; 5' sequence + inner sequence + 3' sequence

SEQ ID NO: 23921 - DNA, 76 bp, Artificial Sequence; identical to SEQ ID NO: 3574
  Description of Artificial Sequence: Synthetic pecan; 5' sequence + inner sequence + 3' sequence

SEQ ID NO: 23922 - DNA, 76 bp, Artificial Sequence
  Description of Artificial Sequence: Synthetic pecan; 5' sequence + inner sequence + 3' sequence
tagggaagagaaggacatatgatgtcgtgactggccagctggacatgcactgcttgactagtacatgaccacttga

SEQ ID NO: 23923 - DNA, 76 bp, Artificial Sequence
  Description of Artificial Sequence: Synthetic pecan; 5' sequence + inner sequence + 3' sequence
tagggaagagaaggacatatgatggccacagcgaacctcaacgtggacgtgcattgactagtacatgaccacttga

SEQ ID NO: 23924 - DNA, 76 bp, Artificial Sequence; identical to SEQ ID NO: 3380
  Description of Artificial Sequence: Synthetic pecan; 5' sequence + inner sequence + 3' sequence

SEQ ID NO: 23925 - DNA, 76 bp, Artificial Sequence; identical to SEQ ID NO: 7679
  Description of Artificial Sequence: Synthetic pecan; 5' sequence + inner sequence + 3' sequence

SEQ ID NO: 23926 - DNA, 76 bp, Artificial Sequence
  Description of Artificial Sequence: Synthetic pecan; 5' sequence + inner sequence + 3' sequence
tagggaagagaaggacatatgatggcatgcacgcatctacacgtgggtatggattgactagtacatgaccacttga

SEQ ID NO: 23927 - DNA, 76 bp, Artificial Sequence
  Description of Artificial Sequence: Synthetic pecan; 5' sequence + inner sequence + 3' sequence
tagggaagagaaggacatatgatggcaccaacggaccgacaagtgcgcatggattgactagtacatgaccacttga

SEQ ID NO: 23928 - DNA, 76 bp, Artificial Sequence; identical to SEQ ID NO: 3275
  Description of Artificial Sequence: Synthetic pecan; 5' sequence + inner sequence + 3' sequence

SEQ ID NO: 23929 - DNA, 76 bp, Artificial Sequence
  Description of Artificial Sequence: Synthetic pecan; 5' sequence + inner sequence + 3' sequence
tagggaagagaaggacatatgatggcatgcacgcacctacacgcgggcacgtattgactagtacatgaccacttga

SEQ ID NO: 23930 - DNA, 75 bp, Artificial Sequence
  Description of Artificial Sequence: Synthetic pecan; 5' sequence + inner sequence + 3' sequence
tagggaagagaaggacatatgatgcactccgatgccctcatgtggccgtggattgactagtacatgaccacttga

SEQ ID NO: 23931 - DNA, 76 bp, Artificial Sequence
  Description of Artificial Sequence: Synthetic pecan; 5' sequence + inner sequence + 3' sequence
tagggaagagaaggacatatgatgcacgactcggaccctatcatgaggccatgttgactagtacatgaccacttga

SEQ ID NO: 23932 - DNA, 76 bp, Artificial Sequence
  Description of Artificial Sequence: Synthetic pecan; 5' sequence + inner sequence + 3' sequence
tagggaagagaaggacatatgatggaacaaacggaccgacaagtgcgcatggattgactagtacatgaccacttga

SEQ ID NO: 23933 - DNA, 76 bp, Artificial Sequence; identical to SEQ ID NO: 19876
  Description of Artificial Sequence: Synthetic pecan; 5' sequence + inner sequence + 3' sequence

SEQ ID NO: 23934 - DNA, 76 bp, Artificial Sequence
  Description of Artificial Sequence: Synthetic pecan; 5' sequence + inner sequence + 3' sequence
tagggaagagaaggacatatgatggcatgcacgcacctacacgcgggcatggattgactagtacatgaccacttga

SEQ ID NO: 23935 - DNA, 76 bp, Artificial Sequence; identical to SEQ ID NO: 3529
  Description of Artificial Sequence: Synthetic pecan; 5' sequence + inner sequence + 3' sequence

SEQ ID NO: 23936 - DNA, 76 bp, Artificial Sequence
  Description of Artificial Sequence: Synthetic pecan; 5' sequence + inner sequence + 3' sequence
tagggaagagaaggacatatgatggacgcagcggaacgttcgattggtacgtattgactagtacatgaccacttga

SEQ ID NO: 23937 - DNA, 76 bp, Artificial Sequence
  Description of Artificial Sequence: Synthetic pecan; 5' sequence + inner sequence + 3' sequence
tagggaagagaaggacatatgatccgcacgtagccctatcagtggtgaatgcattgactagtacatgaccacttga

SEQ ID NO: 23938 - DNA, 76 bp, Artificial Sequence; identical to SEQ ID NO: 3373
  Description of Artificial Sequence: Synthetic pecan; 5' sequence + inner sequence + 3' sequence

SEQ ID NO: 23939 - DNA, 76 bp, Artificial Sequence
  Description of Artificial Sequence: Synthetic pecan; 5' sequence + inner sequence + 3' sequence
tagggaagagaaggacatatgatggacgcagctgaacgttcgagtggtacgtattgactagtacatgaccacttga

SEQ ID NO: 23940 - DNA, 76 bp, Artificial Sequence; identical to SEQ ID NO: 3438
  Description of Artificial Sequence: Synthetic pecan; 5' sequence + inner sequence + 3' sequence

SEQ ID NO: 23941 - DNA, 76 bp, Artificial Sequence
  Description of Artificial Sequence: Synthetic pecan; 5' sequence + inner sequence + 3' sequence
tagggaagagaaggacatatgatccgcacgtagccctatcagtggtgcgtgcattgactagtacatgaccacttga

SEQ ID NO: 23942 - DNA, 72 bp, Artificial Sequence
  Description of Artificial Sequence: Synthetic pecan; 5' sequence + inner sequence + 3' sequence
tagggaagagaaggacatatgatcgcaccgtcaaggcaggctgtacgagttgactagtacatgaccacttga

SEQ ID NO: 23943 - DNA, 76 bp, Artificial Sequence; identical to SEQ ID NO: 3556
  Description of Artificial Sequence: Synthetic pecan; 5' sequence + inner sequence + 3' sequence

SEQ ID NO: 23944 - DNA, 76 bp, Artificial Sequence
  Description of Artificial Sequence: Synthetic pecan; 5' sequence + inner sequence + 3' sequence
tagggaagagaaggacatatgatgtacgcatcgtcccgtcatgtgggtccgtattgactagtacatgaccacttga

SEQ ID NO: 23945 - DNA, 76 bp, Artificial Sequence
  Description of Artificial Sequence: Synthetic pecan; 5' sequence + inner sequence + 3' sequence
tagggaagagaaggacatatgatccgcacgaagccctatcagtggtgcatgcattgactagtacatgaccacttga

SEQ ID NO: 23946 - DNA, 76 bp, Artificial Sequence
  Description of Artificial Sequence: Synthetic pecan; 5' sequence + inner sequence + 3' sequence
tagggaagagaaggacatatgatgtcatgcgcgaacactatcatggcggcatgttgactagtacatgaccacttga

SEQ ID NO: 23947 - DNA, 76 bp, Artificial Sequence
  Description of Artificial Sequence: Synthetic pecan; 5' sequence + inner sequence + 3' sequence
tagggaagagaaggacatatgatccgtagcgacatcaagcggaggagtgcgtgttgactagtacatgaccacttga

SEQ ID NO: 23948 - DNA, 76 bp, Artificial Sequence
  Description of Artificial Sequence: Synthetic pecan; 5' sequence + inner sequence + 3' sequence
tagggaagagaaggacatatgatggacgcagcggaacggtcgagtggtacgtattgactagtacatgaccacttga

SEQ ID NO: 23949 - DNA, 76 bp, Artificial Sequence
  Description of Artificial Sequence: Synthetic pecan; 5' sequence + inner sequence + 3' sequence
tagggaagagaaggacatatgatccgtagcgacatcaagcggcggtgtgcgcgttgactagtacatgaccacttga

SEQ ID NO: 23950 - DNA, 76 bp, Artificial Sequence
  Description of Artificial Sequence: Synthetic pecan; 5' sequence + inner sequence + 3' sequence
tagggaagagaaggacatatgatggcacaaccggaccgacaagtgcgcatggattgactagtacatgaccacttga

SEQ ID NO: 23951 - DNA, 75 bp, Artificial Sequence
  Description of Artificial Sequence: Synthetic pecan; 5' sequence + inner sequence + 3' sequence
tagggaagagaaggacatatgatgtcatgccatccctcgagtgtgacaggtattgactagtacatgaccacttga

SEQ ID NO: 23952 - DNA, 76 bp, Artificial Sequence
  Description of Artificial Sequence: Synthetic pecan; 5' sequence + inner sequence + 3' sequence
tagggaagagaaggacatatgatccatcgcttcactatcatgtgtgtcacgtattgactagtacatgaccacttga

SEQ ID NO: 23953 - DNA, 76 bp, Artificial Sequence; identical to SEQ ID NO: 7238
  Description of Artificial Sequence: Synthetic pecan; 5' sequence + inner sequence + 3' sequence

SEQ ID NO: 23954 - DNA, 76 bp, Artificial Sequence
  Description of Artificial Sequence: Synthetic pecan; 5' sequence + inner sequence + 3' sequence
tagggaagagaaggacatatgatcgcaccgtcgaaacgtcatgcacgctgacattgactagtacatgaccacttga

SEQ ID NO: 23955 - DNA, 75 bp, Artificial Sequence
  Description of Artificial Sequence: Synthetic pecan; 5' sequence + inner sequence + 3' sequence
tagggaagagaaggacatatgatgcacgccgatgccctcatgtgtccgtggattgactagtacatgaccacttga

SEQ ID NO: 23956 - DNA, 76 bp, Artificial Sequence; identical to SEQ ID NO: 19810
  Description of Artificial Sequence: Synthetic pecan; 5' sequence + inner sequence + 3' sequence

SEQ ID NO: 23957 - DNA, 76 bp, Artificial Sequence
  Description of Artificial Sequence: Synthetic pecan; 5' sequence + inner sequence + 3' sequence
tagggaagagaaggacatatgatggacgcagcggaacgatcgagtggtacgtattgactagtacatgaccacttga

SEQ ID NO: 23958 - DNA, 76 bp, Artificial Sequence; identical to SEQ ID NO: 3395
  Description of Artificial Sequence: Synthetic pecan; 5' sequence + inner sequence + 3' sequence

SEQ ID NO: 23959 - DNA, 76 bp, Artificial Sequence
  Description of Artificial Sequence: Synthetic pecan; 5' sequence + inner sequence + 3' sequence
tagggaagagaaggacatatgatccatcgcgtcactatcatatgtgtcacgtattgactagtacatgaccacttga

SEQ ID NO: 23960 - DNA, 76 bp, Artificial Sequence
  Description of Artificial Sequence: Synthetic pecan; 5' sequence + inner sequence + 3' sequence
tagggaagagaaggacatatgatgtcattccgcatcctacacgtgggcatgtattgactagtacatgaccacttga

SEQ ID NO: 23961 - DNA, 76 bp, Artificial Sequence
  Description of Artificial Sequence: Synthetic pecan; 5' sequence + inner sequence + 3' sequence
tagggaagagaaggacatatgatggccacagcgtacctcaaggtggacgtgcattgactagtacatgaccacttga

SEQ ID NO: 23962 - DNA, 76 bp, Artificial Sequence
  Description of Artificial Sequence: Synthetic pecan; 5' sequence + inner sequence + 3' sequence
tagggaagagaaggacatatgatgcacgactcgctccctatcatgaggccatgttgactagtacatgaccacttga

SEQ ID NO: 23963 - DNA, 76 bp, Artificial Sequence; identical to SEQ ID NO: 15869
  Description of Artificial Sequence: Synthetic pecan; 5' sequence + inner sequence + 3' sequence

SEQ ID NO: 23964 - DNA, 76 bp, Artificial Sequence
  Description of Artificial Sequence: Synthetic pecan; 5' sequence + inner sequence + 3' sequence
tagggaagagaaggacatatgatggccacagcgtacctcaacgtgggcgtgcattgactagtacatgaccacttga

SEQ ID NO: 23965 - DNA, 76 bp, Artificial Sequence
  Description of Artificial Sequence: Synthetic pecan; 5' sequence + inner sequence + 3' sequence
tagggaagagaaggacatatgatgcacgactcgcaccctatcatgaggccctgttgactagtacatgaccacttga

SEQ ID NO: 23966 - DNA, 76 bp, Artificial Sequence
  Description of Artificial Sequence: Synthetic pecan; 5' sequence + inner sequence + 3' sequence
tagggaagagaaggacatatgatgtgctgaacgtactgccaggtgagcatgcattgactagtacatgaccacttga

SEQ ID NO: 23967 - DNA, 76 bp, Artificial Sequence
  Description of Artificial Sequence: Synthetic pecan; 5' sequence + inner sequence + 3' sequence
tagggaagagaaggacatatgatgcacgactcgcaccctatcatgaggccattttgactagtacatgaccacttga

SEQ ID NO: 23968 - DNA, 76 bp, Artificial Sequence
  Description of Artificial Sequence: Synthetic pecan; 5' sequence + inner sequence + 3' sequence
tagggaagagaaggacatatgatgcacgactcgcaccctatcatgaggcaatgttgactagtacatgaccacttga

SEQ ID NO: 23969 - DNA, 75 bp, Artificial Sequence
  Description of Artificial Sequence: Synthetic pecan; 5' sequence + inner sequence + 3' sequence
tagggaagagaaggacatatgatgcacgccgatgtcctcatgtggccgtggattgactagtacatgaccacttga

SEQ ID NO: 23970 - DNA, 76 bp, Artificial Sequence
  Description of Artificial Sequence: Synthetic pecan; 5' sequence + inner sequence + 3' sequence
tagggaagagaaggacatatgatgtcatgccatcccttcgagtgtggcaggtattgactagtacatgaccacttga

SEQ ID NO: 23971 - DNA, 76 bp, Artificial Sequence
  Description of Artificial Sequence: Synthetic pecan; 5' sequence + inner sequence + 3' sequence
tagggaagagaaggacatatgatcgcaccgtcaagcgggaacgcactttggtgttgactagtacatgaccacttga

SEQ ID NO: 23972 - DNA, 76 bp, Artificial Sequence
  Description of Artificial Sequence: Synthetic pecan; 5' sequence + inner sequence + 3' sequence
tagggaagagaaggacatatgatggccacagcgtacctccacgtggacgtgcattgactagtacatgaccacttga

SEQ ID NO: 23973 - DNA, 76 bp, Artificial Sequence; identical to SEQ ID NO: 7576
  Description of Artificial Sequence: Synthetic pecan; 5' sequence + inner sequence + 3' sequence

SEQ ID NO: 23974 - DNA, 76 bp, Artificial Sequence
  Description of Artificial Sequence: Synthetic pecan; 5' sequence + inner sequence + 3' sequence
tagggaagagaaggacatatgatgcacgactcgcaccgtatcatgaggccatgttgactagtacatgaccacttga

SEQ ID NO: 23975 - DNA, 76 bp, Artificial Sequence; identical to SEQ ID NO: 7351
  Description of Artificial Sequence: Synthetic pecan; 5' sequence + inner sequence + 3' sequence

SEQ ID NO: 23976 - DNA, 76 bp, Artificial Sequence
  Description of Artificial Sequence: Synthetic pecan; 5' sequence + inner sequence + 3' sequence
tagggaagagaaggacatatgatggcctgcacgcacctacacgtgggcacgtattgactagtacatgaccacttga

SEQ ID NO: 23977 - DNA, 76 bp, Artificial Sequence; identical to SEQ ID NO: 3677
  Description of Artificial Sequence: Synthetic pecan; 5' sequence + inner sequence + 3' sequence

SEQ ID NO: 23978 - DNA, 76 bp, Artificial Sequence
  Description of Artificial Sequence: Synthetic pecan; 5' sequence + inner sequence + 3' sequence
tagggaagagaaggacatatgatggcatgcacgcacctaaacgtgggtatggattgactagtacatgaccacttga

SEQ ID NO: 23979 - DNA, 76 bp, Artificial Sequence
  Description of Artificial Sequence: Synthetic pecan; 5' sequence + inner sequence + 3' sequence
tagggaagagaaggacatatgatccatcgcgtcactatcatgtgtggcacgtattgactagtacatgaccacttga

SEQ ID NO: 23980 - DNA, 76 bp, Artificial Sequence; identical to SEQ ID NO: 7834
  Description of Artificial Sequence: Synthetic pecan; 5' sequence + inner sequence + 3' sequence

SEQ ID NO: 23981 - DNA, 76 bp, Artificial Sequence
  Description of Artificial Sequence: Synthetic pecan; 5' sequence + inner sequence + 3' sequence
tagggaagagaaggacatatgatggacacagcttgcctactggtggtcacgtattgactagtacatgaccacttga

SEQ ID NO: 23982 - DNA, 76 bp, Artificial Sequence
  Description of Artificial Sequence: Synthetic pecan; 5' sequence + inner sequence + 3' sequence
tagggaagagaaggacatatgattgccacagcgtacctcaacgtggacgtgcattgactagtacatgaccacttga

SEQ ID NO: 23983 - DNA, 76 bp, Artificial Sequence
  Description of Artificial Sequence: Synthetic pecan; 5' sequence + inner sequence + 3' sequence
tagggaagagaaggacatatgatgtcactgtgcctgactgtcaagttgcggcattgactagtacatgaccacttga

SEQ ID NO: 23984 - DNA, 76 bp, Artificial Sequence
  Description of Artificial Sequence: Synthetic pecan; 5' sequence + inner sequence + 3' sequence
tagggaagagaaggacatatgatgtcactgtgcctgaccgtcaagttgcgacattgactagtacatgaccacttga

SEQ ID NO: 23985 - DNA, 76 bp, Artificial Sequence
  Description of Artificial Sequence: Synthetic pecan; 5' sequence + inner sequence + 3' sequence
tagggaagagaaggacatatgatggcctgcgcgtaccgtcaagtgcgaatggattgactagtacatgaccacttga

SEQ ID NO: 23986 - DNA, 76 bp, Artificial Sequence
  Description of Artificial Sequence: Synthetic pecan; 5' sequence + inner sequence + 3' sequence
tagggaagagaaggacatatgatgtcatgcacgaacactatcatagcggcatgttgactagtacatgaccacttga

SEQ ID NO: 23987 - DNA, 76 bp, Artificial Sequence; identical to SEQ ID NO: 15775
  Description of Artificial Sequence: Synthetic pecan; 5' sequence + inner sequence + 3' sequence

SEQ ID NO: 23988 - DNA, 76 bp, Artificial Sequence
  Description of Artificial Sequence: Synthetic pecan; 5' sequence + inner sequence + 3' sequence
tagggaagagaaggacatatgatccatcgcgccactatcatgtgtgtcacgtattgactagtacatgaccacttga

SEQ ID NO: 23989 - DNA, 76 bp, Artificial Sequence
  Description of Artificial Sequence: Synthetic pecan; 5' sequence + inner sequence + 3' sequence
tagggaagagaaggacatatgatcgcaccgtcaagctggaaggcactttggtgttgactagtacatgaccacttga

SEQ ID NO: 23990 - DNA, 76 bp, Artificial Sequence
  Description of Artificial Sequence: Synthetic pecan; 5' sequence + inner sequence + 3' sequence
tagggaagagaaggacatatgatgtcatgcatgaacactatcatggcggcatgttgactagtacatgaccacttga

SEQ ID NO: 23991 - DNA, 76 bp, Artificial Sequence
  Description of Artificial Sequence: Synthetic pecan; 5' sequence + inner sequence + 3' sequence
tagggaagagaaggacatatgatgcacgactcgcacgctatcatgaggccatgttgactagtacatgaccacttga

SEQ ID NO: 23992 - DNA, 73 bp, Artificial Sequence
  Description of Artificial Sequence: Synthetic pecan; 5' sequence + inner sequence + 3' sequence
tagggaagagaaggacatatgatggacgcagcttgcctactggtggtacattgactagtacatgaccacttga

SEQ ID NO: 23993 - DNA, 76 bp, Artificial Sequence
  Description of Artificial Sequence: Synthetic pecan; 5' sequence + inner sequence + 3' sequence
tagggaagagaaggacatatgatggacgcagcttgcctactggtggtcacttattgactagtacatgaccacttga

SEQ ID NO: 23994 - DNA, 76 bp, Artificial Sequence
  Description of Artificial Sequence: Synthetic pecan; 5' sequence + inner sequence + 3' sequence
tagggaagagaaggacatatgatgtcatgccatcacttcgagtgtgacaggtattgactagtacatgaccacttga

SEQ ID NO: 23995 - DNA, 76 bp, Artificial Sequence
  Description of Artificial Sequence: Synthetic pecan; 5' sequence + inner sequence + 3' sequence
tagggaagagaaggacatatgatggacgcagcggaacgttccagtggtacgtattgactagtacatgaccacttga

SEQ ID NO: 23996 - DNA, 76 bp, Artificial Sequence; identical to SEQ ID NO: 15821
  Description of Artificial Sequence: Synthetic pecan; 5' sequence + inner sequence + 3' sequence

SEQ ID NO: 23997 - DNA, 76 bp, Artificial Sequence; identical to SEQ ID NO: 7376
  Description of Artificial Sequence: Synthetic pecan; 5' sequence + inner sequence + 3' sequence

SEQ ID NO: 23998 - DNA, 76 bp, Artificial Sequence
  Description of Artificial Sequence: Synthetic pecan; 5' sequence + inner sequence + 3' sequence
tagggaagagaaggacatatgatgtcattccgcatcctacaggtgggcacgtattgactagtacatgaccacttga

SEQ ID NO: 23999 - DNA, 76 bp, Artificial Sequence; identical to SEQ ID NO: 3152
  Description of Artificial Sequence: Synthetic pecan; 5' sequence + inner sequence + 3' sequence

SEQ ID NO: 24000 - DNA, 76 bp, Artificial Sequence
  Description of Artificial Sequence: Synthetic pecan; 5' sequence + inner sequence + 3' sequence
tagggaagagaaggacatatgatggtatgcacgcacctacacgtgggtatggattgactagtacatgaccacttga

SEQ ID NO: 24001 - DNA, 76 bp, Artificial Sequence
  Description of Artificial Sequence: Synthetic pecan; 5' sequence + inner sequence + 3' sequence
tagggaagagaaggacatatgatgtcatgccatcccttcgagtttgacaggtattgactagtacatgaccacttga

SEQ ID NO: 24002 - DNA, 77 bp, Artificial Sequence
  Description of Artificial Sequence: Synthetic pecan; 5' sequence + inner sequence + 3' sequence
tagggaagagaaggacatatgatccgatcgcacgtcaaggcaggctgtacgtgtttgactagtacatgaccacttga

SEQ ID NO: 24003 - DNA, 30 bp, Artificial Sequence; identical to SEQ ID NO: 3
  Description of Artificial Sequence: Synthetic pistachio; inner sequence

SEQ ID NO: 24004 - DNA, 30 bp, Artificial Sequence; identical to SEQ ID NO: 4
  Description of Artificial Sequence: Synthetic pistachio; inner sequence

SEQ ID NO: 24005 - DNA, 30 bp, Artificial Sequence; identical to SEQ ID NO: 7
  Description of Artificial Sequence: Synthetic pistachio; inner sequence

SEQ ID NO: 24006 - DNA, 30 bp, Artificial Sequence; identical to SEQ ID NO: 8
  Description of Artificial Sequence: Synthetic pistachio; inner sequence

SEQ ID NO: 24007 - DNA, 30 bp, Artificial Sequence; identical to SEQ ID NO: 5
  Description of Artificial Sequence: Synthetic pistachio; inner sequence

SEQ ID NO: 24008 - DNA, 30 bp, Artificial Sequence; identical to SEQ ID NO: 9
  Description of Artificial Sequence: Synthetic pistachio; inner sequence

SEQ ID NO: 24009 - DNA, 30 bp, Artificial Sequence; identical to SEQ ID NO: 14
  Description of Artificial Sequence: Synthetic pistachio; inner sequence

SEQ ID NO: 24010 - DNA, 30 bp, Artificial Sequence; identical to SEQ ID NO: 13
  Description of Artificial Sequence: Synthetic pistachio; inner sequence

SEQ ID NO: 24011 - DNA, 30 bp, Artificial Sequence; identical to SEQ ID NO: 12
  Description of Artificial Sequence: Synthetic pistachio; inner sequence

SEQ ID NO: 24012 - DNA, 30 bp, Artificial Sequence; identical to SEQ ID NO: 6
  Description of Artificial Sequence: Synthetic pistachio; inner sequence

SEQ ID NO: 24013 - DNA, 30 bp, Artificial Sequence; identical to SEQ ID NO: 11
  Description of Artificial Sequence: Synthetic pistachio; inner sequence

SEQ ID NO: 24014 - DNA, 30 bp, Artificial Sequence; identical to SEQ ID NO: 23
  Description of Artificial Sequence: Synthetic pistachio; inner sequence

SEQ ID NO: 24015 - DNA, 30 bp, Artificial Sequence; identical to SEQ ID NO: 17
  Description of Artificial Sequence: Synthetic pistachio; inner sequence

SEQ ID NO: 24016 - DNA, 30 bp, Artificial Sequence; identical to SEQ ID NO: 10
  Description of Artificial Sequence: Synthetic pistachio; inner sequence

SEQ ID NO: 24017 - DNA, 30 bp, Artificial Sequence; identical to SEQ ID NO: 18
  Description of Artificial Sequence: Synthetic pistachio; inner sequence

SEQ ID NO: 24018 - DNA, 30 bp, Artificial Sequence; identical to SEQ ID NO: 37
  Description of Artificial Sequence: Synthetic pistachio; inner sequence

SEQ ID NO: 24019 - DNA, 30 bp, Artificial Sequence; identical to SEQ ID NO: 15
  Description of Artificial Sequence: Synthetic pistachio; inner sequence

SEQ ID NO: 24020 - DNA, 30 bp, Artificial Sequence; identical to SEQ ID NO: 46
  Description of Artificial Sequence: Synthetic pistachio; inner sequence

SEQ ID NO: 24021 - DNA, 30 bp, Artificial Sequence; identical to SEQ ID NO: 28
  Description of Artificial Sequence: Synthetic pistachio; inner sequence

SEQ ID NO: 24022 - DNA, 30 bp, Artificial Sequence; identical to SEQ ID NO: 49
  Description of Artificial Sequence: Synthetic pistachio; inner sequence

SEQ ID NO: 24023 - DNA, 30 bp, Artificial Sequence; identical to SEQ ID NO: 16
  Description of Artificial Sequence: Synthetic pistachio; inner sequence

SEQ ID NO: 24024 - DNA, 30 bp, Artificial Sequence; identical to SEQ ID NO: 22
  Description of Artificial Sequence: Synthetic pistachio; inner sequence

SEQ ID NO: 24025 - DNA, 30 bp, Artificial Sequence; identical to SEQ ID NO: 55
  Description of Artificial Sequence: Synthetic pistachio; inner sequence

SEQ ID NO: 24026 - DNA, 30 bp, Artificial Sequence; identical to SEQ ID NO: 41
  Description of Artificial Sequence: Synthetic pistachio; inner sequence

SEQ ID NO: 24027 - DNA, 30 bp, Artificial Sequence; identical to SEQ ID NO: 45
  Description of Artificial Sequence: Synthetic pistachio; inner sequence

SEQ ID NO: 24028 - DNA, 30 bp, Artificial Sequence; identical to SEQ ID NO: 33
  Description of Artificial Sequence: Synthetic pistachio; inner sequence

SEQ ID NO: 24029 - DNA, 30 bp, Artificial Sequence; identical to SEQ ID NO: 34
  Description of Artificial Sequence: Synthetic pistachio; inner sequence

SEQ ID NO: 24030 - DNA, 30 bp, Artificial Sequence; identical to SEQ ID NO: 20
  Description of Artificial Sequence: Synthetic pistachio; inner sequence

SEQ ID NO: 24031 - DNA, 30 bp, Artificial Sequence; identical to SEQ ID NO: 32
  Description of Artificial Sequence: Synthetic pistachio; inner sequence

SEQ ID NO: 24032 - DNA, 30 bp, Artificial Sequence; identical to SEQ ID NO: 54
  Description of Artificial Sequence: Synthetic pistachio; inner sequence

SEQ ID NO: 24033 - DNA, 30 bp, Artificial Sequence; identical to SEQ ID NO: 30
  Description of Artificial Sequence: Synthetic pistachio; inner sequence

SEQ ID NO: 24034 - DNA, 29 bp, Artificial Sequence
  Description of Artificial Sequence: Synthetic pistachio; inner sequence
gcacgccgatgccctcatgtggccgtgga

SEQ ID NO: 24035 - DNA, 30 bp, Artificial Sequence; identical to SEQ ID NO: 40
  Description of Artificial Sequence: Synthetic pistachio; inner sequence

SEQ ID NO: 24036 - DNA, 30 bp, Artificial Sequence; identical to SEQ ID NO: 39
  Description of Artificial Sequence: Synthetic pistachio; inner sequence

SEQ ID NO: 24037 - DNA, 30 bp, Artificial Sequence; identical to SEQ ID NO: 38
  Description of Artificial Sequence: Synthetic pistachio; inner sequence

SEQ ID NO: 24038 - DNA, 30 bp, Artificial Sequence; identical to SEQ ID NO: 35
  Description of Artificial Sequence: Synthetic pistachio; inner sequence

SEQ ID NO: 24039 - DNA, 30 bp, Artificial Sequence; identical to SEQ ID NO: 21
  Description of Artificial Sequence: Synthetic pistachio; inner sequence

SEQ ID NO: 24040 - DNA, 30 bp, Artificial Sequence; identical to SEQ ID NO: 48
  Description of Artificial Sequence: Synthetic pistachio; inner sequence

SEQ ID NO: 24041 - DNA, 30 bp, Artificial Sequence; identical to SEQ ID NO: 31
  Description of Artificial Sequence: Synthetic pistachio; inner sequence

SEQ ID NO: 24042 - DNA, 30 bp, Artificial Sequence; identical to SEQ ID NO: 24
  Description of Artificial Sequence: Synthetic pistachio; inner sequence

SEQ ID NO: 24043 - DNA, 30 bp, Artificial Sequence; identical to SEQ ID NO: 29
  Description of Artificial Sequence: Synthetic pistachio; inner sequence

SEQ ID NO: 24044 - DNA, 30 bp, Artificial Sequence; identical to SEQ ID NO: 25
  Description of Artificial Sequence: Synthetic pistachio; inner sequence

SEQ ID NO: 24045 - DNA, 30 bp, Artificial Sequence; identical to SEQ ID NO: 51
  Description of Artificial Sequence: Synthetic pistachio; inner sequence

SEQ ID NO: 24046 - DNA, 30 bp, Artificial Sequence; identical to SEQ ID NO: 19
  Description of Artificial Sequence: Synthetic pistachio; inner sequence

SEQ ID NO: 24047 - DNA, 30 bp, Artificial Sequence; identical to SEQ ID NO: 53
  Description of Artificial Sequence: Synthetic pistachio; inner sequence

SEQ ID NO: 24048 - DNA, 30 bp, Artificial Sequence; identical to SEQ ID NO: 59
  Description of Artificial Sequence: Synthetic pistachio; inner sequence

SEQ ID NO: 24049 - DNA, 30 bp, Artificial Sequence; identical to SEQ ID NO: 50
  Description of Artificial Sequence: Synthetic pistachio; inner sequence

SEQ ID NO: 24050 - DNA, 30 bp, Artificial Sequence; identical to SEQ ID NO: 82
  Description of Artificial Sequence: Synthetic pistachio; inner sequence

SEQ ID NO: 24051 - DNA, 30 bp, Artificial Sequence; identical to SEQ ID NO: 77
  Description of Artificial Sequence: Synthetic pistachio; inner sequence

SEQ ID NO: 24052 - DNA, 30 bp, Artificial Sequence; identical to SEQ ID NO: 67
  Description of Artificial Sequence: Synthetic pistachio; inner sequence

SEQ ID NO: 24053 - DNA, 30 bp, Artificial Sequence; identical to SEQ ID NO: 63
  Description of Artificial Sequence: Synthetic pistachio; inner sequence

SEQ ID NO: 24054 - DNA, 30 bp, Artificial Sequence; identical to SEQ ID NO: 74
  Description of Artificial Sequence: Synthetic pistachio; inner sequence

SEQ ID NO: 24055 - DNA, 30 bp, Artificial Sequence; identical to SEQ ID NO: 76
  Description of Artificial Sequence: Synthetic pistachio; inner sequence

SEQ ID NO: 24056 - DNA, 30 bp, Artificial Sequence; identical to SEQ ID NO: 57
  Description of Artificial Sequence: Synthetic pistachio; inner sequence

SEQ ID NO: 24057 - DNA, 30 bp, Artificial Sequence; identical to SEQ ID NO: 73
  Description of Artificial Sequence: Synthetic pistachio; inner sequence

SEQ ID NO: 24058 - DNA, 30 bp, Artificial Sequence; identical to SEQ ID NO: 81
  Description of Artificial Sequence: Synthetic pistachio; inner sequence

SEQ ID NO: 24059 - DNA, 30 bp, Artificial Sequence; identical to SEQ ID NO: 44
  Description of Artificial Sequence: Synthetic pistachio; inner sequence

SEQ ID NO: 24060 - DNA, 30 bp, Artificial Sequence; identical to SEQ ID NO: 42
  Description of Artificial Sequence: Synthetic pistachio; inner sequence

SEQ ID NO: 24061 - DNA, 30 bp, Artificial Sequence; identical to SEQ ID NO: 117
  Description of Artificial Sequence: Synthetic pistachio; inner sequence

SEQ ID NO: 24062 - DNA, 30 bp, Artificial Sequence; identical to SEQ ID NO: 78
  Description of Artificial Sequence: Synthetic pistachio; inner sequence

SEQ ID NO: 24063 - DNA, 30 bp, Artificial Sequence; identical to SEQ ID NO: 131
  Description of Artificial Sequence: Synthetic pistachio; inner sequence

SEQ ID NO: 24064 - DNA, 30 bp, Artificial Sequence; identical to SEQ ID NO: 26
  Description of Artificial Sequence: Synthetic pistachio; inner sequence

SEQ ID NO: 24065 - DNA, 30 bp, Artificial Sequence; identical to SEQ ID NO: 43
  Description of Artificial Sequence: Synthetic pistachio; inner sequence

SEQ ID NO: 24066 - DNA, 30 bp, Artificial Sequence; identical to SEQ ID NO: 66
  Description of Artificial Sequence: Synthetic pistachio; inner sequence

SEQ ID NO: 24067 - DNA, 30 bp, Artificial Sequence; identical to SEQ ID NO: 58
  Description of Artificial Sequence: Synthetic pistachio; inner sequence

SEQ ID NO: 24068 - DNA, 30 bp, Artificial Sequence; identical to SEQ ID NO: 80
  Description of Artificial Sequence: Synthetic pistachio; inner sequence

SEQ ID NO: 24069 - DNA, 30 bp, Artificial Sequence; identical to SEQ ID NO: 65
  Description of Artificial Sequence: Synthetic pistachio; inner sequence

SEQ ID NO: 24070 - DNA, 30 bp, Artificial Sequence; identical to SEQ ID NO: 100
  Description of Artificial Sequence: Synthetic pistachio; inner sequence

SEQ ID NO: 24071 - DNA, 30 bp, Artificial Sequence; identical to SEQ ID NO: 36
  Description of Artificial Sequence: Synthetic pistachio; inner sequence

SEQ ID NO: 24072 - DNA, 30 bp, Artificial Sequence; identical to SEQ ID NO: 64
  Description of Artificial Sequence: Synthetic pistachio; inner sequence

SEQ ID NO: 24073 - DNA, 30 bp, Artificial Sequence; identical to SEQ ID NO: 92
  Description of Artificial Sequence: Synthetic pistachio; inner sequence

SEQ ID NO: 24074 - DNA, 30 bp, Artificial Sequence; identical to SEQ ID NO: 61
  Description of Artificial Sequence: Synthetic pistachio; inner sequence

SEQ ID NO: 24075 - DNA, 30 bp, Artificial Sequence; identical to SEQ ID NO: 113
  Description of Artificial Sequence: Synthetic pistachio; inner sequence

SEQ ID NO: 24076 - DNA, 30 bp, Artificial Sequence; identical to SEQ ID NO: 111
  Description of Artificial Sequence: Synthetic pistachio; inner sequence

SEQ ID NO: 24077 - DNA, 30 bp, Artificial Sequence; identical to SEQ ID NO: 91
  Description of Artificial Sequence: Synthetic pistachio; inner sequence

SEQ ID NO: 24078 - DNA, 30 bp, Artificial Sequence; identical to SEQ ID NO: 93
  Description of Artificial Sequence: Synthetic pistachio; inner sequence

SEQ ID NO: 24079 - DNA, 30 bp, Artificial Sequence; identical to SEQ ID NO: 136
  Description of Artificial Sequence: Synthetic pistachio; inner sequence

SEQ ID NO: 24080 - DNA, 30 bp, Artificial Sequence; identical to SEQ ID NO: 186
  Description of Artificial Sequence: Synthetic pistachio; inner sequence

SEQ ID NO: 24081 - DNA, 30 bp, Artificial Sequence; identical to SEQ ID NO: 27
  Description of Artificial Sequence: Synthetic pistachio; inner sequence

SEQ ID NO: 24082 - DNA, 30 bp, Artificial Sequence; identical to SEQ ID NO: 161
  Description of Artificial Sequence: Synthetic pistachio; inner sequence

SEQ ID NO: 24083 - DNA, 30 bp, Artificial Sequence; identical to SEQ ID NO: 154
  Description of Artificial Sequence: Synthetic pistachio; inner sequence

SEQ ID NO: 24084 - DNA, 30 bp, Artificial Sequence; identical to SEQ ID NO: 168
  Description of Artificial Sequence: Synthetic pistachio; inner sequence

SEQ ID NO: 24085 - DNA, 30 bp, Artificial Sequence; identical to SEQ ID NO: 68
  Description of Artificial Sequence: Synthetic pistachio; inner sequence

SEQ ID NO: 24086 - DNA, 30 bp, Artificial Sequence; identical to SEQ ID NO: 88
  Description of Artificial Sequence: Synthetic pistachio; inner sequence

SEQ ID NO: 24087 - DNA, 30 bp, Artificial Sequence; identical to SEQ ID NO: 89
  Description of Artificial Sequence: Synthetic pistachio; inner sequence

SEQ ID NO: 24088 - DNA, 30 bp, Artificial Sequence; identical to SEQ ID NO: 47
  Description of Artificial Sequence: Synthetic pistachio; inner sequence

SEQ ID NO: 24089 - DNA, 28 bp, Artificial Sequence
  Description of Artificial Sequence: Synthetic pistachio; inner sequence
ggacgcagctgacctagcatgtgtgtca

SEQ ID NO: 24090 - DNA, 30 bp, Artificial Sequence; identical to SEQ ID NO: 185
  Description of Artificial Sequence: Synthetic pistachio; inner sequence

SEQ ID NO: 24091 - DNA, 30 bp, Artificial Sequence; identical to SEQ ID NO: 129
  Description of Artificial Sequence: Synthetic pistachio; inner sequence

SEQ ID NO: 24092 - DNA, 30 bp, Artificial Sequence; identical to SEQ ID NO: 183
  Description of Artificial Sequence: Synthetic pistachio; inner sequence

SEQ ID NO: 24093 - DNA, 30 bp, Artificial Sequence; identical to SEQ ID NO: 83
  Description of Artificial Sequence: Synthetic pistachio; inner sequence

SEQ ID NO: 24094 - DNA, 30 bp, Artificial Sequence; identical to SEQ ID NO: 52
  Description of Artificial Sequence: Synthetic pistachio; inner sequence

SEQ ID NO: 24095 - DNA, 30 bp, Artificial Sequence; identical to SEQ ID NO: 126
  Description of Artificial Sequence: Synthetic pistachio; inner sequence

SEQ ID NO: 24096 - DNA, 30 bp, Artificial Sequence; identical to SEQ ID NO: 94
  Description of Artificial Sequence: Synthetic pistachio; inner sequence

SEQ ID NO: 24097 - DNA, 30 bp, Artificial Sequence; identical to SEQ ID NO: 71
  Description of Artificial Sequence: Synthetic pistachio; inner sequence

SEQ ID NO: 24098 - DNA, 30 bp, Artificial Sequence; identical to SEQ ID NO: 257
  Description of Artificial Sequence: Synthetic pistachio; inner sequence

SEQ ID NO: 24099 - DNA, 30 bp, Artificial Sequence; identical to SEQ ID NO: 142
  Description of Artificial Sequence: Synthetic pistachio; inner sequence

SEQ ID NO: 24100 - DNA, 30 bp, Artificial Sequence; identical to SEQ ID NO: 95
  Description of Artificial Sequence: Synthetic pistachio; inner sequence

SEQ ID NO: 24101 - DNA, 30 bp, Artificial Sequence; identical to SEQ ID NO: 103
  Description of Artificial Sequence: Synthetic pistachio; inner sequence

SEQ ID NO: 24102 - DNA, 30 bp, Artificial Sequence; identical to SEQ ID NO: 115
  Description of Artificial Sequence: Synthetic pistachio; inner sequence

SEQ ID NO: 24103 - DNA, 30 bp, Artificial Sequence; identical to SEQ ID NO: 138
  Description of Artificial Sequence: Synthetic pistachio; inner sequence

SEQ ID NO: 24104 - DNA, 30 bp, Artificial Sequence; identical to SEQ ID NO: 262
  Description of Artificial Sequence: Synthetic pistachio; inner sequence

SEQ ID NO: 24105 - DNA, 30 bp, Artificial Sequence; identical to SEQ ID NO: 99
  Description of Artificial Sequence: Synthetic pistachio; inner sequence

SEQ ID NO: 24106 - DNA, 30 bp, Artificial Sequence; identical to SEQ ID NO: 207
  Description of Artificial Sequence: Synthetic pistachio; inner sequence

SEQ ID NO: 24107 - DNA, 30 bp, Artificial Sequence; identical to SEQ ID NO: 287
  Description of Artificial Sequence: Synthetic pistachio; inner sequence

SEQ ID NO: 24108 - DNA, 30 bp, Artificial Sequence; identical to SEQ ID NO: 56
  Description of Artificial Sequence: Synthetic pistachio; inner sequence

SEQ ID NO: 24109 - DNA, 30 bp, Artificial Sequence; identical to SEQ ID NO: 247
  Description of Artificial Sequence: Synthetic pistachio; inner sequence

SEQ ID NO: 24110 - DNA, 30 bp, Artificial Sequence; identical to SEQ ID NO: 133
  Description of Artificial Sequence: Synthetic pistachio; inner sequence

SEQ ID NO: 24111 - DNA, 30 bp, Artificial Sequence; identical to SEQ ID NO: 120
  Description of Artificial Sequence: Synthetic pistachio; inner sequence

SEQ ID NO: 24112 - DNA, 30 bp, Artificial Sequence; identical to SEQ ID NO: 96
  Description of Artificial Sequence: Synthetic pistachio; inner sequence

SEQ ID NO: 24113 - DNA, 30 bp, Artificial Sequence; identical to SEQ ID NO: 62
  Description of Artificial Sequence: Synthetic pistachio; inner sequence

SEQ ID NO: 24114 - DNA, 30 bp, Artificial Sequence; identical to SEQ ID NO: 145
  Description of Artificial Sequence: Synthetic pistachio; inner sequence

SEQ ID NO: 24115 - DNA, 30 bp, Artificial Sequence; identical to SEQ ID NO: 60
  Description of Artificial Sequence: Synthetic pistachio; inner sequence

SEQ ID NO: 24116 - DNA, 30 bp, Artificial Sequence; identical to SEQ ID NO: 75
  Description of Artificial Sequence: Synthetic pistachio; inner sequence

SEQ ID NO: 24117 - DNA, 30 bp, Artificial Sequence; identical to SEQ ID NO: 105
  Description of Artificial Sequence: Synthetic pistachio; inner sequence

SEQ ID NO: 24118 - DNA, 30 bp, Artificial Sequence; identical to SEQ ID NO: 122
  Description of Artificial Sequence: Synthetic pistachio; inner sequence

SEQ ID NO: 24119 - DNA, 30 bp, Artificial Sequence; identical to SEQ ID NO: 354
  Description of Artificial Sequence: Synthetic pistachio; inner sequence

SEQ ID NO: 24120 - DNA, 30 bp, Artificial Sequence; identical to SEQ ID NO: 112
  Description of Artificial Sequence: Synthetic pistachio; inner sequence

SEQ ID NO: 24121 - DNA, 30 bp, Artificial Sequence; identical to SEQ ID NO: 116
  Description of Artificial Sequence: Synthetic pistachio; inner sequence

SEQ ID NO: 24122 - DNA, 30 bp, Artificial Sequence; identical to SEQ ID NO: 290
  Description of Artificial Sequence: Synthetic pistachio; inner sequence

SEQ ID NO: 24123 - DNA, 30 bp, Artificial Sequence; identical to SEQ ID NO: 106
  Description of Artificial Sequence: Synthetic pistachio; inner sequence

SEQ ID NO: 24124 - DNA, 30 bp, Artificial Sequence; identical to SEQ ID NO: 196
  Description of Artificial Sequence: Synthetic pistachio; inner sequence

SEQ ID NO: 24125 - DNA, 30 bp, Artificial Sequence; identical to SEQ ID NO: 98
  Description of Artificial Sequence: Synthetic pistachio; inner sequence

SEQ ID NO: 24126 - DNA, 30 bp, Artificial Sequence; identical to SEQ ID NO: 157
  Description of Artificial Sequence: Synthetic pistachio; inner sequence

SEQ ID NO: 24127 - DNA, 30 bp, Artificial Sequence; identical to SEQ ID NO: 79
  Description of Artificial Sequence: Synthetic pistachio; inner sequence

SEQ ID NO: 24128 - DNA, 30 bp, Artificial Sequence; identical to SEQ ID NO: 171
  Description of Artificial Sequence: Synthetic pistachio; inner sequence

SEQ ID NO: 24129 - DNA, 30 bp, Artificial Sequence; identical to SEQ ID NO: 97
  Description of Artificial Sequence: Synthetic pistachio; inner sequence

SEQ ID NO: 24130 - DNA, 30 bp, Artificial Sequence; identical to SEQ ID NO: 69
  Description of Artificial Sequence: Synthetic pistachio; inner sequence

SEQ ID NO: 24131 - DNA, 30 bp, Artificial Sequence; identical to SEQ ID NO: 163
  Description of Artificial Sequence: Synthetic pistachio; inner sequence

SEQ ID NO: 24132 - DNA, 30 bp, Artificial Sequence; identical to SEQ ID NO: 125
  Description of Artificial Sequence: Synthetic pistachio; inner sequence

SEQ ID NO: 24133 - DNA, 30 bp, Artificial Sequence; identical to SEQ ID NO: 84
  Description of Artificial Sequence: Synthetic pistachio; inner sequence

SEQ ID NO: 24134 - DNA, 30 bp, Artificial Sequence; identical to SEQ ID NO: 201
  Description of Artificial Sequence: Synthetic pistachio; inner sequence

SEQ ID NO: 24135 - DNA, 30 bp, Artificial Sequence; identical to SEQ ID NO: 118
  Description of Artificial Sequence: Synthetic pistachio; inner sequence

SEQ ID NO: 24136 - DNA, 30 bp, Artificial Sequence; identical to SEQ ID NO: 107
  Description of Artificial Sequence: Synthetic pistachio; inner sequence

SEQ ID NO: 24137 - DNA, 30 bp, Artificial Sequence; identical to SEQ ID NO: 164
  Description of Artificial Sequence: Synthetic pistachio; inner sequence

SEQ ID NO: 24138 - DNA, 30 bp, Artificial Sequence; identical to SEQ ID NO: 311
  Description of Artificial Sequence: Synthetic pistachio; inner sequence

SEQ ID NO: 24139 - DNA, 30 bp, Artificial Sequence; identical to SEQ ID NO: 282
  Description of Artificial Sequence: Synthetic pistachio; inner sequence

SEQ ID NO: 24140 - DNA, 31 bp, Artificial Sequence; identical to SEQ ID NO: 221
  Description of Artificial Sequence: Synthetic pistachio; inner sequence

SEQ ID NO: 24141 - DNA, 30 bp, Artificial Sequence; identical to SEQ ID NO: 229
  Description of Artificial Sequence: Synthetic pistachio; inner sequence

SEQ ID NO: 24142 - DNA, 30 bp, Artificial Sequence; identical to SEQ ID NO: 147
  Description of Artificial Sequence: Synthetic pistachio; inner sequence

SEQ ID NO: 24143 - DNA, 30 bp, Artificial Sequence; identical to SEQ ID NO: 205
  Description of Artificial Sequence: Synthetic pistachio; inner sequence

SEQ ID NO: 24144 - DNA, 30 bp, Artificial Sequence; identical to SEQ ID NO: 208
  Description of Artificial Sequence: Synthetic pistachio; inner sequence

SEQ ID NO: 24145 - DNA, 30 bp, Artificial Sequence; identical to SEQ ID NO: 285
  Description of Artificial Sequence: Synthetic pistachio; inner sequence

SEQ ID NO: 24146 - DNA, 30 bp, Artificial Sequence; identical to SEQ ID NO: 230
  Description of Artificial Sequence: Synthetic pistachio; inner sequence

SEQ ID NO: 24147 - DNA, 30 bp, Artificial Sequence; identical to SEQ ID NO: 188
  Description of Artificial Sequence: Synthetic pistachio; inner sequence

SEQ ID NO: 24148 - DNA, 30 bp, Artificial Sequence; identical to SEQ ID NO: 158
  Description of Artificial Sequence: Synthetic pistachio; inner sequence

SEQ ID NO: 24149 - DNA, 30 bp, Artificial Sequence; identical to SEQ ID NO: 288
  Description of Artificial Sequence: Synthetic pistachio; inner sequence

SEQ ID NO: 24150 - DNA, 30 bp, Artificial Sequence; identical to SEQ ID NO: 254
  Description of Artificial Sequence: Synthetic pistachio; inner sequence

SEQ ID NO: 24151 - DNA, 30 bp, Artificial Sequence; identical to SEQ ID NO: 211
  Description of Artificial Sequence: Synthetic pistachio; inner sequence

SEQ ID NO: 24152 - DNA, 30 bp, Artificial Sequence; identical to SEQ ID NO: 159
  Description of Artificial Sequence: Synthetic pistachio; inner sequence

SEQ ID NO: 24153 - DNA, 30 bp, Artificial Sequence; identical to SEQ ID NO: 243
  Description of Artificial Sequence: Synthetic pistachio; inner sequence

SEQ ID NO: 24154 - DNA, 30 bp, Artificial Sequence; identical to SEQ ID NO: 109
  Description of Artificial Sequence: Synthetic pistachio; inner sequence

SEQ ID NO: 24155 - DNA, 30 bp, Artificial Sequence; identical to SEQ ID NO: 132
  Description of Artificial Sequence: Synthetic pistachio; inner sequence

SEQ ID NO: 24156 - DNA, 30 bp, Artificial Sequence; identical to SEQ ID NO: 144
  Description of Artificial Sequence: Synthetic pistachio; inner sequence

SEQ ID NO: 24157 - DNA, 30 bp, Artificial Sequence; identical to SEQ ID NO: 165
  Description of Artificial Sequence: Synthetic pistachio; inner sequence

SEQ ID NO: 24158 - DNA, 30 bp, Artificial Sequence; identical to SEQ ID NO: 121
  Description of Artificial Sequence: Synthetic pistachio; inner sequence

SEQ ID NO: 24159 - DNA, 30 bp, Artificial Sequence; identical to SEQ ID NO: 245
  Description of Artificial Sequence: Synthetic pistachio; inner sequence

SEQ ID NO: 24160 - DNA, 30 bp, Artificial Sequence; identical to SEQ ID NO: 155
  Description of Artificial Sequence: Synthetic pistachio; inner sequence

SEQ ID NO: 24161 - DNA, 30 bp, Artificial Sequence; identical to SEQ ID NO: 104
  Description of Artificial Sequence: Synthetic pistachio; inner sequence

SEQ ID NO: 24162 - DNA, 30 bp, Artificial Sequence; identical to SEQ ID NO: 151
  Description of Artificial Sequence: Synthetic pistachio; inner sequence

SEQ ID NO: 24163 - DNA, 30 bp, Artificial Sequence; identical to SEQ ID NO: 85
  Description of Artificial Sequence: Synthetic pistachio; inner sequence

SEQ ID NO: 24164 - DNA, 30 bp, Artificial Sequence; identical to SEQ ID NO: 198
  Description of Artificial Sequence: Synthetic pistachio; inner sequence

SEQ ID NO: 24165 - DNA, 30 bp, Artificial Sequence; identical to SEQ ID NO: 237
  Description of Artificial Sequence: Synthetic pistachio; inner sequence

SEQ ID NO: 24166 - DNA, 30 bp, Artificial Sequence; identical to SEQ ID NO: 240
  Description of Artificial Sequence: Synthetic pistachio; inner sequence

SEQ ID NO: 24167 - DNA, 30 bp, Artificial Sequence; identical to SEQ ID NO: 468
  Description of Artificial Sequence: Synthetic pistachio; inner sequence

SEQ ID NO: 24168 - DNA, 30 bp, Artificial Sequence; identical to SEQ ID NO: 901
  Description of Artificial Sequence: Synthetic pistachio; inner sequence

SEQ ID NO: 24169 - DNA, 30 bp, Artificial Sequence; identical to SEQ ID NO: 87
  Description of Artificial Sequence: Synthetic pistachio; inner sequence

SEQ ID NO: 24170 - DNA, 30 bp, Artificial Sequence; identical to SEQ ID NO: 146
  Description of Artificial Sequence: Synthetic pistachio; inner sequence

SEQ ID NO: 24171 - DNA, 30 bp, Artificial Sequence; identical to SEQ ID NO: 153
  Description of Artificial Sequence: Synthetic pistachio; inner sequence

SEQ ID NO: 24172 - DNA, 30 bp, Artificial Sequence; identical to SEQ ID NO: 179
  Description of Artificial Sequence: Synthetic pistachio; inner sequence

SEQ ID NO: 24173 - DNA, 30 bp, Artificial Sequence; identical to SEQ ID NO: 123
  Description of Artificial Sequence: Synthetic pistachio; inner sequence

SEQ ID NO: 24174 - DNA, 30 bp, Artificial Sequence; identical to SEQ ID NO: 152
  Description of Artificial Sequence: Synthetic pistachio; inner sequence

SEQ ID NO: 24175 - DNA, 30 bp, Artificial Sequence; identical to SEQ ID NO: 86
  Description of Artificial Sequence: Synthetic pistachio; inner sequence

SEQ ID NO: 24176 - DNA, 30 bp, Artificial Sequence; identical to SEQ ID NO: 108
  Description of Artificial Sequence: Synthetic pistachio; inner sequence

SEQ ID NO: 24177 - DNA, 30 bp, Artificial Sequence; identical to SEQ ID NO: 293
  Description of Artificial Sequence: Synthetic pistachio; inner sequence

SEQ ID NO: 24178 - DNA, 30 bp, Artificial Sequence; identical to SEQ ID NO: 110
  Description of Artificial Sequence: Synthetic pistachio; inner sequence

SEQ ID NO: 24179 - DNA, 31 bp, Artificial Sequence; identical to SEQ ID NO: 250
  Description of Artificial Sequence: Synthetic pistachio; inner sequence

SEQ ID NO: 24180 - DNA, 30 bp, Artificial Sequence; identical to SEQ ID NO: 270
  Description of Artificial Sequence: Synthetic pistachio; inner sequence

SEQ ID NO: 24181 - DNA, 30 bp, Artificial Sequence; identical to SEQ ID NO: 360
  Description of Artificial Sequence: Synthetic pistachio; inner sequence

SEQ ID NO: 24182 - DNA, 30 bp, Artificial Sequence; identical to SEQ ID NO: 323
  Description of Artificial Sequence: Synthetic pistachio; inner sequence

SEQ ID NO: 24183 - DNA, 30 bp, Artificial Sequence; identical to SEQ ID NO: 114
  Description of Artificial Sequence: Synthetic pistachio; inner sequence

SEQ ID NO: 24184 - DNA, 30 bp, Artificial Sequence; identical to SEQ ID NO: 214
  Description of Artificial Sequence: Synthetic pistachio; inner sequence

SEQ ID NO: 24185 - DNA, 30 bp, Artificial Sequence; identical to SEQ ID NO: 585
  Description of Artificial Sequence: Synthetic pistachio; inner sequence

SEQ ID NO: 24186 - DNA, 30 bp, Artificial Sequence; identical to SEQ ID NO: 135
  Description of Artificial Sequence: Synthetic pistachio; inner sequence

SEQ ID NO: 24187 - DNA, 30 bp, Artificial Sequence; identical to SEQ ID NO: 172
  Description of Artificial Sequence: Synthetic pistachio; inner sequence

SEQ ID NO: 24188 - DNA, 30 bp, Artificial Sequence; identical to SEQ ID NO: 189
  Description of Artificial Sequence: Synthetic pistachio; inner sequence

SEQ ID NO: 24189 - DNA, 30 bp, Artificial Sequence; identical to SEQ ID NO: 430
  Description of Artificial Sequence: Synthetic pistachio; inner sequence

SEQ ID NO: 24190 - DNA, 30 bp, Artificial Sequence; identical to SEQ ID NO: 170
  Description of Artificial Sequence: Synthetic pistachio; inner sequence

SEQ ID NO: 24191 - DNA, 30 bp, Artificial Sequence; identical to SEQ ID NO: 149
  Description of Artificial Sequence: Synthetic pistachio; inner sequence

SEQ ID NO: 24192 - DNA, 30 bp, Artificial Sequence; identical to SEQ ID NO: 174
  Description of Artificial Sequence: Synthetic pistachio; inner sequence

SEQ ID NO: 24193 - DNA, 30 bp, Artificial Sequence; identical to SEQ ID NO: 134
  Description of Artificial Sequence: Synthetic pistachio; inner sequence

SEQ ID NO: 24194 - DNA, 30 bp, Artificial Sequence; identical to SEQ ID NO: 454
  Description of Artificial Sequence: Synthetic pistachio; inner sequence

SEQ ID NO: 24195 - DNA, 30 bp, Artificial Sequence; identical to SEQ ID NO: 308
  Description of Artificial Sequence: Synthetic pistachio; inner sequence

SEQ ID NO: 24196 - DNA, 30 bp, Artificial Sequence; identical to SEQ ID NO: 406
  Description of Artificial Sequence: Synthetic pistachio; inner sequence

SEQ ID NO: 24197 - DNA, 30 bp, Artificial Sequence; identical to SEQ ID NO: 630
  Description of Artificial Sequence: Synthetic pistachio; inner sequence

SEQ ID NO: 24198 - DNA, 31 bp, Artificial Sequence; identical to SEQ ID NO: 150
  Description of Artificial Sequence: Synthetic pistachio; inner sequence

SEQ ID NO: 24199 - DNA, 30 bp, Artificial Sequence; identical to SEQ ID NO: 212
  Description of Artificial Sequence: Synthetic pistachio; inner sequence

SEQ ID NO: 24200 - DNA, 30 bp, Artificial Sequence; identical to SEQ ID NO: 204
  Description of Artificial Sequence: Synthetic pistachio; inner sequence

SEQ ID NO: 24201 - DNA, 30 bp, Artificial Sequence; identical to SEQ ID NO: 313
  Description of Artificial Sequence: Synthetic pistachio; inner sequence

SEQ ID NO: 24202 - DNA, 30 bp, Artificial Sequence; identical to SEQ ID NO: 101
  Description of Artificial Sequence: Synthetic pistachio; inner sequence

SEQ ID NO: 24203 - DNA, 30 bp, Artificial Sequence; identical to SEQ ID NO: 203
  Description of Artificial Sequence: Synthetic pistachio; inner sequence

SEQ ID NO: 24204 - DNA, 30 bp, Artificial Sequence; identical to SEQ ID NO: 194
  Description of Artificial Sequence: Synthetic pistachio; inner sequence

SEQ ID NO: 24205 - DNA, 30 bp, Artificial Sequence; identical to SEQ ID NO: 385
  Description of Artificial Sequence: Synthetic pistachio; inner sequence

SEQ ID NO: 24206 - DNA, 30 bp, Artificial Sequence; identical to SEQ ID NO: 347
  Description of Artificial Sequence: Synthetic pistachio; inner sequence

SEQ ID NO: 24207 - DNA, 30 bp, Artificial Sequence; identical to SEQ ID NO: 355
  Description of Artificial Sequence: Synthetic pistachio; inner sequence

SEQ ID NO: 24208 - DNA, 30 bp, Artificial Sequence; identical to SEQ ID NO: 130
  Description of Artificial Sequence: Synthetic pistachio; inner sequence

SEQ ID NO: 24209 - DNA, 30 bp, Artificial Sequence; identical to SEQ ID NO: 72
  Description of Artificial Sequence: Synthetic pistachio; inner sequence

SEQ ID NO: 24210 - DNA, 30 bp, Artificial Sequence; identical to SEQ ID NO: 156
  Description of Artificial Sequence: Synthetic pistachio; inner sequence

SEQ ID NO: 24211 - DNA, 30 bp, Artificial Sequence; identical to SEQ ID NO: 365
  Description of Artificial Sequence: Synthetic pistachio; inner sequence

SEQ ID NO: 24212 - DNA, 30 bp, Artificial Sequence; identical to SEQ ID NO: 369
  Description of Artificial Sequence: Synthetic pistachio; inner sequence

SEQ ID NO: 24213 - DNA, 30 bp, Artificial Sequence; identical to SEQ ID NO: 178
  Description of Artificial Sequence: Synthetic pistachio; inner sequence

SEQ ID NO: 24214 - DNA, 30 bp, Artificial Sequence; identical to SEQ ID NO: 192
  Description of Artificial Sequence: Synthetic pistachio; inner sequence

SEQ ID NO: 24215 - DNA, 30 bp, Artificial Sequence; identical to SEQ ID NO: 137
  Description of Artificial Sequence: Synthetic pistachio; inner sequence

SEQ ID NO: 24216 - DNA, 30 bp, Artificial Sequence; identical to SEQ ID NO: 371
  Description of Artificial Sequence: Synthetic pistachio; inner sequence

SEQ ID NO: 24217 - DNA, 30 bp, Artificial Sequence; identical to SEQ ID NO: 344
  Description of Artificial Sequence: Synthetic pistachio; inner sequence

SEQ ID NO: 24218 - DNA, 30 bp, Artificial Sequence; identical to SEQ ID NO: 376
  Description of Artificial Sequence: Synthetic pistachio; inner sequence

SEQ ID NO: 24219 - DNA, 30 bp, Artificial Sequence; identical to SEQ ID NO: 389
  Description of Artificial Sequence: Synthetic pistachio; inner sequence

SEQ ID NO: 24220 - DNA, 30 bp, Artificial Sequence; identical to SEQ ID NO: 310
  Description of Artificial Sequence: Synthetic pistachio; inner sequence

SEQ ID NO: 24221 - DNA, 30 bp, Artificial Sequence; identical to SEQ ID NO: 90
  Description of Artificial Sequence: Synthetic pistachio; inner sequence

SEQ ID NO: 24222 - DNA, 30 bp, Artificial Sequence; identical to SEQ ID NO: 552
  Description of Artificial Sequence: Synthetic pistachio; inner sequence

SEQ ID NO: 24223 - DNA, 30 bp, Artificial Sequence; identical to SEQ ID NO: 184
  Description of Artificial Sequence: Synthetic pistachio; inner sequence

SEQ ID NO: 24224 - DNA, 30 bp, Artificial Sequence; identical to SEQ ID NO: 141
  Description of Artificial Sequence: Synthetic pistachio; inner sequence

SEQ ID NO: 24225 - DNA, 30 bp, Artificial Sequence; identical to SEQ ID NO: 362
  Description of Artificial Sequence: Synthetic pistachio; inner sequence

SEQ ID NO: 24226 - DNA, 30 bp, Artificial Sequence; identical to SEQ ID NO: 140
  Description of Artificial Sequence: Synthetic pistachio; inner sequence

SEQ ID NO: 24227 - DNA, 30 bp, Artificial Sequence; identical to SEQ ID NO: 253
  Description of Artificial Sequence: Synthetic pistachio; inner sequence

SEQ ID NO: 24228 - DNA, 30 bp, Artificial Sequence; identical to SEQ ID NO: 437
  Description of Artificial Sequence: Synthetic pistachio; inner sequence

SEQ ID NO: 24229 - DNA, 30 bp, Artificial Sequence; identical to SEQ ID NO: 409
  Description of Artificial Sequence: Synthetic pistachio; inner sequence

SEQ ID NO: 24230 - DNA, 30 bp, Artificial Sequence; identical to SEQ ID NO: 436
  Description of Artificial Sequence: Synthetic pistachio; inner sequence

SEQ ID NO: 24231 - DNA, 30 bp, Artificial Sequence; identical to SEQ ID NO: 139
  Description of Artificial Sequence: Synthetic pistachio; inner sequence

SEQ ID NO: 24232 - DNA, 30 bp, Artificial Sequence; identical to SEQ ID NO: 209
  Description of Artificial Sequence: Synthetic pistachio; inner sequence

SEQ ID NO: 24233 - DNA, 30 bp, Artificial Sequence; identical to SEQ ID NO: 200
  Description of Artificial Sequence: Synthetic pistachio; inner sequence

SEQ ID NO: 24234 - DNA, 30 bp, Artificial Sequence; identical to SEQ ID NO: 532
  Description of Artificial Sequence: Synthetic pistachio; inner sequence

SEQ ID NO: 24235 - DNA, 30 bp, Artificial Sequence; identical to SEQ ID NO: 553
  Description of Artificial Sequence: Synthetic pistachio; inner sequence

SEQ ID NO: 24236 - DNA, 30 bp, Artificial Sequence; identical to SEQ ID NO: 527
  Description of Artificial Sequence: Synthetic pistachio; inner sequence

SEQ ID NO: 24237 - DNA, 29 bp, Artificial Sequence
  Description of Artificial Sequence: Synthetic pistachio; inner sequence
cgaccagcgcaagtaagtggcgtgatgca

SEQ ID NO: 24238 - DNA, 30 bp, Artificial Sequence; identical to SEQ ID NO: 312
  Description of Artificial Sequence: Synthetic pistachio; inner sequence

SEQ ID NO: 24239 - DNA, 30 bp, Artificial Sequence; identical to SEQ ID NO: 202
  Description of Artificial Sequence: Synthetic pistachio; inner sequence

SEQ ID NO: 24240 - DNA, 30 bp, Artificial Sequence; identical to SEQ ID NO: 102
  Description of Artificial Sequence: Synthetic pistachio; inner sequence

SEQ ID NO: 24241 - DNA, 30 bp, Artificial Sequence; identical to SEQ ID NO: 692
  Description of Artificial Sequence: Synthetic pistachio; inner sequence

SEQ ID NO: 24242 - DNA, 30 bp, Artificial Sequence; identical to SEQ ID NO: 299
  Description of Artificial Sequence: Synthetic pistachio; inner sequence

SEQ ID NO: 24243 - DNA, 30 bp, Artificial Sequence; identical to SEQ ID NO: 294
  Description of Artificial Sequence: Synthetic pistachio; inner sequence

SEQ ID NO: 24244 - DNA, 30 bp, Artificial Sequence; identical to SEQ ID NO: 284
  Description of Artificial Sequence: Synthetic pistachio; inner sequence

SEQ ID NO: 24245 - DNA, 30 bp, Artificial Sequence; identical to SEQ ID NO: 177
  Description of Artificial Sequence: Synthetic pistachio; inner sequence

SEQ ID NO: 24246 - DNA, 30 bp, Artificial Sequence; identical to SEQ ID NO: 4301
  Description of Artificial Sequence: Synthetic pistachio; inner sequence

SEQ ID NO: 24247 - DNA, 30 bp, Artificial Sequence; identical to SEQ ID NO: 280
  Description of Artificial Sequence: Synthetic pistachio; inner sequence

SEQ ID NO: 24248 - DNA, 30 bp, Artificial Sequence; identical to SEQ ID NO: 696
  Description of Artificial Sequence: Synthetic pistachio; inner sequence

SEQ ID NO: 24249 - DNA, 30 bp, Artificial Sequence; identical to SEQ ID NO: 166
  Description of Artificial Sequence: Synthetic pistachio; inner sequence

SEQ ID NO: 24250 - DNA, 30 bp, Artificial Sequence; identical to SEQ ID NO: 567
  Description of Artificial Sequence: Synthetic pistachio; inner sequence

SEQ ID NO: 24251 - DNA, 30 bp, Artificial Sequence; identical to SEQ ID NO: 268
  Description of Artificial Sequence: Synthetic pistachio; inner sequence

SEQ ID NO: 24252 - DNA, 30 bp, Artificial Sequence; identical to SEQ ID NO: 660
  Description of Artificial Sequence: Synthetic pistachio; inner sequence

SEQ ID NO: 24253 - DNA, 30 bp, Artificial Sequence; identical to SEQ ID NO: 522
  Description of Artificial Sequence: Synthetic pistachio; inner sequence

SEQ ID NO: 24254 - DNA, 30 bp, Artificial Sequence; identical to SEQ ID NO: 195
  Description of Artificial Sequence: Synthetic pistachio; inner sequence

SEQ ID NO: 24255 - DNA, 29 bp, Artificial Sequence
  Description of Artificial Sequence: Synthetic pistachio; inner sequence
ggccgatcgaccctatcaagtgcagcatg

SEQ ID NO: 24256 - DNA, 30 bp, Artificial Sequence; identical to SEQ ID NO: 127
  Description of Artificial Sequence: Synthetic pistachio; inner sequence

SEQ ID NO: 24257 - DNA, 30 bp, Artificial Sequence; identical to SEQ ID NO: 227
  Description of Artificial Sequence: Synthetic pistachio; inner sequence

SEQ ID NO: 24258 - DNA, 30 bp, Artificial Sequence; identical to SEQ ID NO: 341
  Description of Artificial Sequence: Synthetic pistachio; inner sequence

SEQ ID NO: 24259 - DNA, 30 bp, Artificial Sequence; identical to SEQ ID NO: 124
  Description of Artificial Sequence: Synthetic pistachio; inner sequence

SEQ ID NO: 24260 - DNA, 30 bp, Artificial Sequence; identical to SEQ ID NO: 222
  Description of Artificial Sequence: Synthetic pistachio; inner sequence

SEQ ID NO: 24261 - DNA, 30 bp, Artificial Sequence; identical to SEQ ID NO: 264
  Description of Artificial Sequence: Synthetic pistachio; inner sequence

SEQ ID NO: 24262 - DNA, 30 bp, Artificial Sequence; identical to SEQ ID NO: 266
  Description of Artificial Sequence: Synthetic pistachio; inner sequence

SEQ ID NO: 24263 - DNA, 30 bp, Artificial Sequence; identical to SEQ ID NO: 401
  Description of Artificial Sequence: Synthetic pistachio; inner sequence

SEQ ID NO: 24264 - DNA, 30 bp, Artificial Sequence; identical to SEQ ID NO: 232
  Description of Artificial Sequence: Synthetic pistachio; inner sequence

SEQ ID NO: 24265 - DNA, 30 bp, Artificial Sequence; identical to SEQ ID NO: 787
  Description of Artificial Sequence: Synthetic pistachio; inner sequence

SEQ ID NO: 24266 - DNA, 30 bp, Artificial Sequence; identical to SEQ ID NO: 160
  Description of Artificial Sequence: Synthetic pistachio; inner sequence

SEQ ID NO: 24267 - DNA, 30 bp, Artificial Sequence; identical to SEQ ID NO: 615
  Description of Artificial Sequence: Synthetic pistachio; inner sequence

SEQ ID NO: 24268 - DNA, 30 bp, Artificial Sequence; identical to SEQ ID NO: 900
  Description of Artificial Sequence: Synthetic pistachio; inner sequence

SEQ ID NO: 24269 - DNA, 29 bp, Artificial Sequence
  Description of Artificial Sequence: Synthetic pistachio; inner sequence
gtcatgccatcccttcgagtggacaggta

SEQ ID NO: 24270 - DNA, 30 bp, Artificial Sequence; identical to SEQ ID NO: 175
  Description of Artificial Sequence: Synthetic pistachio; inner sequence

SEQ ID NO: 24271 - DNA, 30 bp, Artificial Sequence; identical to SEQ ID NO: 485
  Description of Artificial Sequence: Synthetic pistachio; inner sequence

SEQ ID NO: 24272 - DNA, 30 bp, Artificial Sequence; identical to SEQ ID NO: 513
  Description of Artificial Sequence: Synthetic pistachio; inner sequence

SEQ ID NO: 24273 - DNA, 30 bp, Artificial Sequence; identical to SEQ ID NO: 400
  Description of Artificial Sequence: Synthetic pistachio; inner sequence

SEQ ID NO: 24274 - DNA, 30 bp, Artificial Sequence; identical to SEQ ID NO: 306
  Description of Artificial Sequence: Synthetic pistachio; inner sequence

SEQ ID NO: 24275 - DNA, 30 bp, Artificial Sequence; identical to SEQ ID NO: 666
  Description of Artificial Sequence: Synthetic pistachio; inner sequence

SEQ ID NO: 24276 - DNA, 30 bp, Artificial Sequence; identical to SEQ ID NO: 249
  Description of Artificial Sequence: Synthetic pistachio; inner sequence

SEQ ID NO: 24277 - DNA, 30 bp, Artificial Sequence; identical to SEQ ID NO: 298
  Description of Artificial Sequence: Synthetic pistachio; inner sequence

SEQ ID NO: 24278 - DNA, 30 bp, Artificial Sequence; identical to SEQ ID NO: 470
  Description of Artificial Sequence: Synthetic pistachio; inner sequence

SEQ ID NO: 24279 - DNA, 30 bp, Artificial Sequence; identical to SEQ ID NO: 325
  Description of Artificial Sequence: Synthetic pistachio; inner sequence

SEQ ID NO: 24280 - DNA, 30 bp, Artificial Sequence; identical to SEQ ID NO: 269
  Description of Artificial Sequence: Synthetic pistachio; inner sequence

SEQ ID NO: 24281 - DNA, 30 bp, Artificial Sequence; identical to SEQ ID NO: 238
  Description of Artificial Sequence: Synthetic pistachio; inner sequence

SEQ ID NO: 24282 - DNA, 30 bp, Artificial Sequence; identical to SEQ ID NO: 429
  Description of Artificial Sequence: Synthetic pistachio; inner sequence

SEQ ID NO: 24283 - DNA, 30 bp, Artificial Sequence; identical to SEQ ID NO: 213
  Description of Artificial Sequence: Synthetic pistachio; inner sequence

SEQ ID NO: 24284 - DNA, 30 bp, Artificial Sequence; identical to SEQ ID NO: 206
  Description of Artificial Sequence: Synthetic pistachio; inner sequence

SEQ ID NO: 24285 - DNA, 30 bp, Artificial Sequence; identical to SEQ ID NO: 377
  Description of Artificial Sequence: Synthetic pistachio; inner sequence

SEQ ID NO: 24286 - DNA, 30 bp, Artificial Sequence; identical to SEQ ID NO: 340
  Description of Artificial Sequence: Synthetic pistachio; inner sequence

SEQ ID NO: 24287 - DNA, 30 bp, Artificial Sequence; identical to SEQ ID NO: 617
  Description of Artificial Sequence: Synthetic pistachio; inner sequence

SEQ ID NO: 24288 - DNA, 30 bp, Artificial Sequence; identical to SEQ ID NO: 541
  Description of Artificial Sequence: Synthetic pistachio; inner sequence

SEQ ID NO: 24289 - DNA, 30 bp, Artificial Sequence; identical to SEQ ID NO: 218
  Description of Artificial Sequence: Synthetic pistachio; inner sequence

SEQ ID NO: 24290 - DNA, 30 bp, Artificial Sequence; identical to SEQ ID NO: 233
  Description of Artificial Sequence: Synthetic pistachio; inner sequence

SEQ ID NO: 24291 - DNA, 30 bp, Artificial Sequence; identical to SEQ ID NO: 413
  Description of Artificial Sequence: Synthetic pistachio; inner sequence

SEQ ID NO: 24292 - DNA, 30 bp, Artificial Sequence; identical to SEQ ID NO: 187
  Description of Artificial Sequence: Synthetic pistachio; inner sequence

SEQ ID NO: 24293 - DNA, 30 bp, Artificial Sequence; identical to SEQ ID NO: 190
  Description of Artificial Sequence: Synthetic pistachio; inner sequence

SEQ ID NO: 24294 - DNA, 30 bp, Artificial Sequence; identical to SEQ ID NO: 511
  Description of Artificial Sequence: Synthetic pistachio; inner sequence

SEQ ID NO: 24295 - DNA, 30 bp, Artificial Sequence; identical to SEQ ID NO: 783
  Description of Artificial Sequence: Synthetic pistachio; inner sequence

SEQ ID NO: 24296 - DNA, 30 bp, Artificial Sequence; identical to SEQ ID NO: 419
  Description of Artificial Sequence: Synthetic pistachio; inner sequence

SEQ ID NO: 24297 - DNA, 30 bp, Artificial Sequence; identical to SEQ ID NO: 361
  Description of Artificial Sequence: Synthetic pistachio; inner sequence

SEQ ID NO: 24298 - DNA, 30 bp, Artificial Sequence; identical to SEQ ID NO: 272
  Description of Artificial Sequence: Synthetic pistachio; inner sequence

SEQ ID NO: 24299 - DNA, 30 bp, Artificial Sequence; identical to SEQ ID NO: 314
  Description of Artificial Sequence: Synthetic pistachio; inner sequence

SEQ ID NO: 24300 - DNA, 30 bp, Artificial Sequence; identical to SEQ ID NO: 446
  Description of Artificial Sequence: Synthetic pistachio; inner sequence

SEQ ID NO: 24301 - DNA, 30 bp, Artificial Sequence; identical to SEQ ID NO: 173
  Description of Artificial Sequence: Synthetic pistachio; inner sequence

SEQ ID NO: 24302 - DNA, 30 bp, Artificial Sequence; identical to SEQ ID NO: 220
  Description of Artificial Sequence: Synthetic pistachio; inner sequence

SEQ ID NO: 24303 - DNA, 30 bp, Artificial Sequence; identical to SEQ ID NO: 305
  Description of Artificial Sequence: Synthetic pistachio; inner sequence

SEQ ID NO: 24304 - DNA, 30 bp, Artificial Sequence; identical to SEQ ID NO: 673
  Description of Artificial Sequence: Synthetic pistachio; inner sequence

SEQ ID NO: 24305 - DNA, 31 bp, Artificial Sequence; identical to SEQ ID NO: 258
  Description of Artificial Sequence: Synthetic pistachio; inner sequence

SEQ ID NO: 24306 - DNA, 30 bp, Artificial Sequence; identical to SEQ ID NO: 521
  Description of Artificial Sequence: Synthetic pistachio; inner sequence

SEQ ID NO: 24307 - DNA, 30 bp, Artificial Sequence; identical to SEQ ID NO: 4381
  Description of Artificial Sequence: Synthetic pistachio; inner sequence

SEQ ID NO: 24308 - DNA, 30 bp, Artificial Sequence; identical to SEQ ID NO: 645
  Description of Artificial Sequence: Synthetic pistachio; inner sequence

SEQ ID NO: 24309 - DNA, 30 bp, Artificial Sequence; identical to SEQ ID NO: 336
  Description of Artificial Sequence: Synthetic pistachio; inner sequence

SEQ ID NO: 24310 - DNA, 30 bp, Artificial Sequence; identical to SEQ ID NO: 4229
  Description of Artificial Sequence: Synthetic pistachio; inner sequence

SEQ ID NO: 24311 - DNA, 30 bp, Artificial Sequence; identical to SEQ ID NO: 321
  Description of Artificial Sequence: Synthetic pistachio; inner sequence

SEQ ID NO: 24312 - DNA, 30 bp, Artificial Sequence; identical to SEQ ID NO: 244
  Description of Artificial Sequence: Synthetic pistachio; inner sequence

SEQ ID NO: 24313 - DNA, 30 bp, Artificial Sequence; identical to SEQ ID NO: 374
  Description of Artificial Sequence: Synthetic pistachio; inner sequence

SEQ ID NO: 24314 - DNA, 30 bp, Artificial Sequence; identical to SEQ ID NO: 801
  Description of Artificial Sequence: Synthetic pistachio; inner sequence

SEQ ID NO: 24315 - DNA, 30 bp, Artificial Sequence; identical to SEQ ID NO: 653
  Description of Artificial Sequence: Synthetic pistachio; inner sequence

SEQ ID NO: 24316 - DNA, 30 bp, Artificial Sequence; identical to SEQ ID NO: 182
  Description of Artificial Sequence: Synthetic pistachio; inner sequence

SEQ ID NO: 24317 - DNA, 30 bp, Artificial Sequence; identical to SEQ ID NO: 563
  Description of Artificial Sequence: Synthetic pistachio; inner sequence

SEQ ID NO: 24318 - DNA, 30 bp, Artificial Sequence; identical to SEQ ID NO: 638
  Description of Artificial Sequence: Synthetic pistachio; inner sequence

SEQ ID NO: 24319 - DNA, 30 bp, Artificial Sequence; identical to SEQ ID NO: 236
  Description of Artificial Sequence: Synthetic pistachio; inner sequence

SEQ ID NO: 24320 - DNA, 30 bp, Artificial Sequence; identical to SEQ ID NO: 414
  Description of Artificial Sequence: Synthetic pistachio; inner sequence

SEQ ID NO: 24321 - DNA, 30 bp, Artificial Sequence; identical to SEQ ID NO: 234
  Description of Artificial Sequence: Synthetic pistachio; inner sequence

SEQ ID NO: 24322 - DNA, 30 bp, Artificial Sequence; identical to SEQ ID NO: 560
  Description of Artificial Sequence: Synthetic pistachio; inner sequence

SEQ ID NO: 24323 - DNA, 30 bp, Artificial Sequence; identical to SEQ ID NO: 301
  Description of Artificial Sequence: Synthetic pistachio; inner sequence

SEQ ID NO: 24324 - DNA, 30 bp, Artificial Sequence; identical to SEQ ID NO: 283
  Description of Artificial Sequence: Synthetic pistachio; inner sequence

SEQ ID NO: 24325 - DNA, 30 bp, Artificial Sequence; identical to SEQ ID NO: 529
  Description of Artificial Sequence: Synthetic pistachio; inner sequence

SEQ ID NO: 24326 - DNA, 30 bp, Artificial Sequence; identical to SEQ ID NO: 176
  Description of Artificial Sequence: Synthetic pistachio; inner sequence

SEQ ID NO: 24327 - DNA, 30 bp, Artificial Sequence; identical to SEQ ID NO: 390
  Description of Artificial Sequence: Synthetic pistachio; inner sequence

SEQ ID NO: 24328 - DNA, 30 bp, Artificial Sequence; identical to SEQ ID NO: 215
  Description of Artificial Sequence: Synthetic pistachio; inner sequence

SEQ ID NO: 24329 - DNA, 30 bp, Artificial Sequence; identical to SEQ ID NO: 622
  Description of Artificial Sequence: Synthetic pistachio; inner sequence

SEQ ID NO: 24330 - DNA, 30 bp, Artificial Sequence; identical to SEQ ID NO: 316
  Description of Artificial Sequence: Synthetic pistachio; inner sequence

SEQ ID NO: 24331 - DNA, 30 bp, Artificial Sequence; identical to SEQ ID NO: 274
  Description of Artificial Sequence: Synthetic pistachio; inner sequence

SEQ ID NO: 24332 - DNA, 30 bp, Artificial Sequence; identical to SEQ ID NO: 920
  Description of Artificial Sequence: Synthetic pistachio; inner sequence

SEQ ID NO: 24333 - DNA, 31 bp, Artificial Sequence; identical to SEQ ID NO: 4434
  Description of Artificial Sequence: Synthetic pistachio; inner sequence

SEQ ID NO: 24334 - DNA, 30 bp, Artificial Sequence; identical to SEQ ID NO: 572
  Description of Artificial Sequence: Synthetic pistachio; inner sequence

SEQ ID NO: 24335 - DNA, 30 bp, Artificial Sequence; identical to SEQ ID NO: 352
  Description of Artificial Sequence: Synthetic pistachio; inner sequence

SEQ ID NO: 24336 - DNA, 30 bp, Artificial Sequence; identical to SEQ ID NO: 358
  Description of Artificial Sequence: Synthetic pistachio; inner sequence

SEQ ID NO: 24337 - DNA, 30 bp, Artificial Sequence; identical to SEQ ID NO: 559
  Description of Artificial Sequence: Synthetic pistachio; inner sequence

SEQ ID NO: 24338 - DNA, 30 bp, Artificial Sequence; identical to SEQ ID NO: 197
  Description of Artificial Sequence: Synthetic pistachio; inner sequence

SEQ ID NO: 24339 - DNA, 30 bp, Artificial Sequence; identical to SEQ ID NO: 343
  Description of Artificial Sequence: Synthetic pistachio; inner sequence

SEQ ID NO: 24340 - DNA, 30 bp, Artificial Sequence; identical to SEQ ID NO: 267
  Description of Artificial Sequence: Synthetic pistachio; inner sequence

SEQ ID NO: 24341 - DNA, 30 bp, Artificial Sequence; identical to SEQ ID NO: 231
  Description of Artificial Sequence: Synthetic pistachio; inner sequence

SEQ ID NO: 24342 - DNA, 30 bp, Artificial Sequence; identical to SEQ ID NO: 297
  Description of Artificial Sequence: Synthetic pistachio; inner sequence

SEQ ID NO: 24343 - DNA, 30 bp, Artificial Sequence; identical to SEQ ID NO: 597
  Description of Artificial Sequence: Synthetic pistachio; inner sequence

SEQ ID NO: 24344 - DNA, 30 bp, Artificial Sequence; identical to SEQ ID NO: 877
  Description of Artificial Sequence: Synthetic pistachio; inner sequence

SEQ ID NO: 24345 - DNA, 30 bp, Artificial Sequence; identical to SEQ ID NO: 379
  Description of Artificial Sequence: Synthetic pistachio; inner sequence

SEQ ID NO: 24346 - DNA, 30 bp, Artificial Sequence; identical to SEQ ID NO: 242
  Description of Artificial Sequence: Synthetic pistachio; inner sequence

SEQ ID NO: 24347 - DNA, 30 bp, Artificial Sequence; identical to SEQ ID NO: 620
  Description of Artificial Sequence: Synthetic pistachio; inner sequence

SEQ ID NO: 24348 - DNA, 30 bp, Artificial Sequence; identical to SEQ ID NO: 728
  Description of Artificial Sequence: Synthetic pistachio; inner sequence

SEQ ID NO: 24349 - DNA, 30 bp, Artificial Sequence; identical to SEQ ID NO: 640
  Description of Artificial Sequence: Synthetic pistachio; inner sequence

SEQ ID NO: 24350 - DNA, 30 bp, Artificial Sequence; identical to SEQ ID NO: 528
  Description of Artificial Sequence: Synthetic pistachio; inner sequence

SEQ ID NO: 24351 - DNA, 33 bp, Artificial Sequence; identical to SEQ ID NO: 864
  Description of Artificial Sequence: Synthetic pistachio; inner sequence

SEQ ID NO: 24352 - DNA, 30 bp, Artificial Sequence; identical to SEQ ID NO: 320
  Description of Artificial Sequence: Synthetic pistachio; inner sequence

SEQ ID NO: 24353 - DNA, 30 bp, Artificial Sequence; identical to SEQ ID NO: 271
  Description of Artificial Sequence: Synthetic pistachio; inner sequence

SEQ ID NO: 24354 - DNA, 30 bp, Artificial Sequence; identical to SEQ ID NO: 481
  Description of Artificial Sequence: Synthetic pistachio; inner sequence

SEQ ID NO: 24355 - DNA, 30 bp, Artificial Sequence; identical to SEQ ID NO: 520
  Description of Artificial Sequence: Synthetic pistachio; inner sequence

SEQ ID NO: 24356 - DNA, 30 bp, Artificial Sequence; identical to SEQ ID NO: 226
  Description of Artificial Sequence: Synthetic pistachio; inner sequence

SEQ ID NO: 24357 - DNA, 30 bp, Artificial Sequence; identical to SEQ ID NO: 386
  Description of Artificial Sequence: Synthetic pistachio; inner sequence

SEQ ID NO: 24358 - DNA, 30 bp, Artificial Sequence; identical to SEQ ID NO: 224
  Description of Artificial Sequence: Synthetic pistachio; inner sequence

SEQ ID NO: 24359 - DNA, 30 bp, Artificial Sequence; identical to SEQ ID NO: 12892
  Description of Artificial Sequence: Synthetic pistachio; inner sequence

SEQ ID NO: 24360 - DNA, 30 bp, Artificial Sequence; identical to SEQ ID NO: 417
  Description of Artificial Sequence: Synthetic pistachio; inner sequence

SEQ ID NO: 24361 - DNA, 30 bp, Artificial Sequence; identical to SEQ ID NO: 448
  Description of Artificial Sequence: Synthetic pistachio; inner sequence

SEQ ID NO: 24362 - DNA, 30 bp, Artificial Sequence; identical to SEQ ID NO: 524
  Description of Artificial Sequence: Synthetic pistachio; inner sequence

SEQ ID NO: 24363 - DNA, 30 bp, Artificial Sequence; identical to SEQ ID NO: 647
  Description of Artificial Sequence: Synthetic pistachio; inner sequence

SEQ ID NO: 24364 - DNA, 30 bp, Artificial Sequence; identical to SEQ ID NO: 789
  Description of Artificial Sequence: Synthetic pistachio; inner sequence

SEQ ID NO: 24365 - DNA, 30 bp, Artificial Sequence; identical to SEQ ID NO: 223
  Description of Artificial Sequence: Synthetic pistachio; inner sequence

SEQ ID NO: 24366 - DNA, 30 bp, Artificial Sequence; identical to SEQ ID NO: 916
  Description of Artificial Sequence: Synthetic pistachio; inner sequence

SEQ ID NO: 24367 - DNA, 30 bp, Artificial Sequence; identical to SEQ ID NO: 119
  Description of Artificial Sequence: Synthetic pistachio; inner sequence

SEQ ID NO: 24368 - DNA, 30 bp, Artificial Sequence; identical to SEQ ID NO: 210
  Description of Artificial Sequence: Synthetic pistachio; inner sequence

SEQ ID NO: 24369 - DNA, 30 bp, Artificial Sequence; identical to SEQ ID NO: 315
  Description of Artificial Sequence: Synthetic pistachio; inner sequence

SEQ ID NO: 24370 - DNA, 30 bp, Artificial Sequence; identical to SEQ ID NO: 496
  Description of Artificial Sequence: Synthetic pistachio; inner sequence

SEQ ID NO: 24371 - DNA, 30 bp, Artificial Sequence; identical to SEQ ID NO: 246
  Description of Artificial Sequence: Synthetic pistachio; inner sequence

SEQ ID NO: 24372 - DNA, 30 bp, Artificial Sequence; identical to SEQ ID NO: 329
  Description of Artificial Sequence: Synthetic pistachio; inner sequence

SEQ ID NO: 24373 - DNA, 30 bp, Artificial Sequence; identical to SEQ ID NO: 319
  Description of Artificial Sequence: Synthetic pistachio; inner sequence

SEQ ID NO: 24374 - DNA, 30 bp, Artificial Sequence; identical to SEQ ID NO: 359
  Description of Artificial Sequence: Synthetic pistachio; inner sequence

SEQ ID NO: 24375 - DNA, 30 bp, Artificial Sequence; identical to SEQ ID NO: 263
  Description of Artificial Sequence: Synthetic pistachio; inner sequence

SEQ ID NO: 24376 - DNA, 30 bp, Artificial Sequence; identical to SEQ ID NO: 128
  Description of Artificial Sequence: Synthetic pistachio; inner sequence

SEQ ID NO: 24377 - DNA, 30 bp, Artificial Sequence; identical to SEQ ID NO: 534
  Description of Artificial Sequence: Synthetic pistachio; inner sequence

SEQ ID NO: 24378 - DNA, 30 bp, Artificial Sequence; identical to SEQ ID NO: 350
  Description of Artificial Sequence: Synthetic pistachio; inner sequence

SEQ ID NO: 24379 - DNA, 30 bp, Artificial Sequence; identical to SEQ ID NO: 167
  Description of Artificial Sequence: Synthetic pistachio; inner sequence

SEQ ID NO: 24380 - DNA, 30 bp, Artificial Sequence; identical to SEQ ID NO: 574
  Description of Artificial Sequence: Synthetic pistachio; inner sequence

SEQ ID NO: 24381 - DNA, 30 bp, Artificial Sequence; identical to SEQ ID NO: 478
  Description of Artificial Sequence: Synthetic pistachio; inner sequence

SEQ ID NO: 24382 - DNA, 30 bp, Artificial Sequence; identical to SEQ ID NO: 500
  Description of Artificial Sequence: Synthetic pistachio; inner sequence

SEQ ID NO: 24383 - DNA, 30 bp, Artificial Sequence; identical to SEQ ID NO: 530
  Description of Artificial Sequence: Synthetic pistachio; inner sequence

SEQ ID NO: 24384 - DNA, 30 bp, Artificial Sequence; identical to SEQ ID NO: 432
  Description of Artificial Sequence: Synthetic pistachio; inner sequence

SEQ ID NO: 24385 - DNA, 30 bp, Artificial Sequence; identical to SEQ ID NO: 373
  Description of Artificial Sequence: Synthetic pistachio; inner sequence

SEQ ID NO: 24386 - DNA, 30 bp, Artificial Sequence; identical to SEQ ID NO: 654
  Description of Artificial Sequence: Synthetic pistachio; inner sequence

SEQ ID NO: 24387 - DNA, 30 bp, Artificial Sequence; identical to SEQ ID NO: 504
  Description of Artificial Sequence: Synthetic pistachio; inner sequence

SEQ ID NO: 24388 - DNA, 30 bp, Artificial Sequence; identical to SEQ ID NO: 757
  Description of Artificial Sequence: Synthetic pistachio; inner sequence

SEQ ID NO: 24389 - DNA, 30 bp, Artificial Sequence; identical to SEQ ID NO: 339
  Description of Artificial Sequence: Synthetic pistachio; inner sequence

SEQ ID NO: 24390 - DNA, 30 bp, Artificial Sequence; identical to SEQ ID NO: 606
  Description of Artificial Sequence: Synthetic pistachio; inner sequence

SEQ ID NO: 24391 - DNA, 30 bp, Artificial Sequence; identical to SEQ ID NO: 395
  Description of Artificial Sequence: Synthetic pistachio; inner sequence

SEQ ID NO: 24392 - DNA, 30 bp, Artificial Sequence; identical to SEQ ID NO: 4543
  Description of Artificial Sequence: Synthetic pistachio; inner sequence

SEQ ID NO: 24393 - DNA, 30 bp, Artificial Sequence; identical to SEQ ID NO: 248
  Description of Artificial Sequence: Synthetic pistachio; inner sequence

SEQ ID NO: 24394 - DNA, 30 bp, Artificial Sequence; identical to SEQ ID NO: 275
  Description of Artificial Sequence: Synthetic pistachio; inner sequence

SEQ ID NO: 24395 - DNA, 29 bp, Artificial Sequence
  Description of Artificial Sequence: Synthetic pistachio; inner sequence
gcacgtcgaaacacgtagccatgcacggt

SEQ ID NO: 24396 - DNA, 30 bp, Artificial Sequence; identical to SEQ ID NO: 928
  Description of Artificial Sequence: Synthetic pistachio; inner sequence

SEQ ID NO: 24397 - DNA, 30 bp, Artificial Sequence; identical to SEQ ID NO: 370
  Description of Artificial Sequence: Synthetic pistachio; inner sequence

SEQ ID NO: 24398 - DNA, 30 bp, Artificial Sequence; identical to SEQ ID NO: 181
  Description of Artificial Sequence: Synthetic pistachio; inner sequence

SEQ ID NO: 24399 - DNA, 30 bp, Artificial Sequence; identical to SEQ ID NO: 919
  Description of Artificial Sequence: Synthetic pistachio; inner sequence

SEQ ID NO: 24400 - DNA, 30 bp, Artificial Sequence; identical to SEQ ID NO: 777
  Description of Artificial Sequence: Synthetic pistachio; inner sequence

SEQ ID NO: 24401 - DNA, 30 bp, Artificial Sequence; identical to SEQ ID NO: 405
  Description of Artificial Sequence: Synthetic pistachio; inner sequence

SEQ ID NO: 24402 - DNA, 30 bp, Artificial Sequence; identical to SEQ ID NO: 476
  Description of Artificial Sequence: Synthetic pistachio; inner sequence

SEQ ID NO: 24403 - DNA, 30 bp, Artificial Sequence; identical to SEQ ID NO: 410
  Description of Artificial Sequence: Synthetic pistachio; inner sequence

SEQ ID NO: 24404 - DNA, 30 bp, Artificial Sequence; identical to SEQ ID NO: 399
  Description of Artificial Sequence: Synthetic pistachio; inner sequence

SEQ ID NO: 24405 - DNA, 30 bp, Artificial Sequence; identical to SEQ ID NO: 628
  Description of Artificial Sequence: Synthetic pistachio; inner sequence

SEQ ID NO: 24406 - DNA, 30 bp, Artificial Sequence; identical to SEQ ID NO: 8564
  Description of Artificial Sequence: Synthetic pistachio; inner sequence

SEQ ID NO: 24407 - DNA, 30 bp, Artificial Sequence; identical to SEQ ID NO: 764
  Description of Artificial Sequence: Synthetic pistachio; inner sequence

SEQ ID NO: 24408 - DNA, 30 bp, Artificial Sequence; identical to SEQ ID NO: 487
  Description of Artificial Sequence: Synthetic pistachio; inner sequence

SEQ ID NO: 24409 - DNA, 30 bp, Artificial Sequence; identical to SEQ ID NO: 517
  Description of Artificial Sequence: Synthetic pistachio; inner sequence

SEQ ID NO: 24410 - DNA, 30 bp, Artificial Sequence; identical to SEQ ID NO: 391
  Description of Artificial Sequence: Synthetic pistachio; inner sequence

SEQ ID NO: 24411 - DNA, 30 bp, Artificial Sequence; identical to SEQ ID NO: 20615
  Description of Artificial Sequence: Synthetic pistachio; inner sequence

SEQ ID NO: 24412 - DNA, 30 bp, Artificial Sequence; identical to SEQ ID NO: 387
  Description of Artificial Sequence: Synthetic pistachio; inner sequence

SEQ ID NO: 24413 - DNA, 30 bp, Artificial Sequence; identical to SEQ ID NO: 143
  Description of Artificial Sequence: Synthetic pistachio; inner sequence

SEQ ID NO: 24414 - DNA, 30 bp, Artificial Sequence; identical to SEQ ID NO: 255
  Description of Artificial Sequence: Synthetic pistachio; inner sequence

SEQ ID NO: 24415 - DNA, 30 bp, Artificial Sequence; identical to SEQ ID NO: 228
  Description of Artificial Sequence: Synthetic pistachio; inner sequence

SEQ ID NO: 24416 - DNA, 30 bp, Artificial Sequence; identical to SEQ ID NO: 219
  Description of Artificial Sequence: Synthetic pistachio; inner sequence

SEQ ID NO: 24417 - DNA, 30 bp, Artificial Sequence; identical to SEQ ID NO: 4503
  Description of Artificial Sequence: Synthetic pistachio; inner sequence

SEQ ID NO: 24418 - DNA, 30 bp, Artificial Sequence; identical to SEQ ID NO: 438
  Description of Artificial Sequence: Synthetic pistachio; inner sequence

SEQ ID NO: 24419 - DNA, 30 bp, Artificial Sequence; identical to SEQ ID NO: 891
  Description of Artificial Sequence: Synthetic pistachio; inner sequence

SEQ ID NO: 24420 - DNA, 30 bp, Artificial Sequence; identical to SEQ ID NO: 349
  Description of Artificial Sequence: Synthetic pistachio; inner sequence

SEQ ID NO: 24421 - DNA, 30 bp, Artificial Sequence; identical to SEQ ID NO: 260
  Description of Artificial Sequence: Synthetic pistachio; inner sequence

SEQ ID NO: 24422 - DNA, 30 bp, Artificial Sequence; identical to SEQ ID NO: 338
  Description of Artificial Sequence: Synthetic pistachio; inner sequence

SEQ ID NO: 24423 - DNA, 30 bp, Artificial Sequence; identical to SEQ ID NO: 475
  Description of Artificial Sequence: Synthetic pistachio; inner sequence

SEQ ID NO: 24424 - DNA, 30 bp, Artificial Sequence; identical to SEQ ID NO: 332
  Description of Artificial Sequence: Synthetic pistachio; inner sequence

SEQ ID NO: 24425 - DNA, 30 bp, Artificial Sequence; identical to SEQ ID NO: 418
  Description of Artificial Sequence: Synthetic pistachio; inner sequence

SEQ ID NO: 24426 - DNA, 30 bp, Artificial Sequence; identical to SEQ ID NO: 545
  Description of Artificial Sequence: Synthetic pistachio; inner sequence

SEQ ID NO: 24427 - DNA, 31 bp, Artificial Sequence; identical to SEQ ID NO: 4245
  Description of Artificial Sequence: Synthetic pistachio; inner sequence

SEQ ID NO: 24428 - DNA, 30 bp, Artificial Sequence; identical to SEQ ID NO: 884
  Description of Artificial Sequence: Synthetic pistachio; inner sequence

SEQ ID NO: 24429 - DNA, 30 bp, Artificial Sequence; identical to SEQ ID NO: 685
  Description of Artificial Sequence: Synthetic pistachio; inner sequence

SEQ ID NO: 24430 - DNA, 30 bp, Artificial Sequence; identical to SEQ ID NO: 637
  Description of Artificial Sequence: Synthetic pistachio; inner sequence

SEQ ID NO: 24431 - DNA, 30 bp, Artificial Sequence; identical to SEQ ID NO: 8712
  Description of Artificial Sequence: Synthetic pistachio; inner sequence

SEQ ID NO: 24432 - DNA, 30 bp, Artificial Sequence; identical to SEQ ID NO: 291
  Description of Artificial Sequence: Synthetic pistachio; inner sequence

SEQ ID NO: 24433 - DNA, 30 bp, Artificial Sequence; identical to SEQ ID NO: 392
  Description of Artificial Sequence: Synthetic pistachio; inner sequence

SEQ ID NO: 24434 - DNA, 30 bp, Artificial Sequence; identical to SEQ ID NO: 398
  Description of Artificial Sequence: Synthetic pistachio; inner sequence

SEQ ID NO: 24435 - DNA, 30 bp, Artificial Sequence; identical to SEQ ID NO: 4451
  Description of Artificial Sequence: Synthetic pistachio; inner sequence

SEQ ID NO: 24436 - DNA, 30 bp, Artificial Sequence; identical to SEQ ID NO: 364
  Description of Artificial Sequence: Synthetic pistachio; inner sequence

SEQ ID NO: 24437 - DNA, 30 bp, Artificial Sequence; identical to SEQ ID NO: 621
  Description of Artificial Sequence: Synthetic pistachio; inner sequence

SEQ ID NO: 24438 - DNA, 30 bp, Artificial Sequence; identical to SEQ ID NO: 289
  Description of Artificial Sequence: Synthetic pistachio; inner sequence

SEQ ID NO: 24439 - DNA, 30 bp, Artificial Sequence; identical to SEQ ID NO: 330
  Description of Artificial Sequence: Synthetic pistachio; inner sequence

SEQ ID NO: 24440 - DNA, 30 bp, Artificial Sequence; identical to SEQ ID NO: 403
  Description of Artificial Sequence: Synthetic pistachio; inner sequence

SEQ ID NO: 24441 - DNA, 30 bp, Artificial Sequence; identical to SEQ ID NO: 724
  Description of Artificial Sequence: Synthetic pistachio; inner sequence

SEQ ID NO: 24442 - DNA, 30 bp, Artificial Sequence; identical to SEQ ID NO: 4238
  Description of Artificial Sequence: Synthetic pistachio; inner sequence

SEQ ID NO: 24443 - DNA, 30 bp, Artificial Sequence; identical to SEQ ID NO: 296
  Description of Artificial Sequence: Synthetic pistachio; inner sequence

SEQ ID NO: 24444 - DNA, 30 bp, Artificial Sequence; identical to SEQ ID NO: 676
  Description of Artificial Sequence: Synthetic pistachio; inner sequence

SEQ ID NO: 24445 - DNA, 30 bp, Artificial Sequence; identical to SEQ ID NO: 800
  Description of Artificial Sequence: Synthetic pistachio; inner sequence

SEQ ID NO: 24446 - DNA, 30 bp, Artificial Sequence; identical to SEQ ID NO: 375
  Description of Artificial Sequence: Synthetic pistachio; inner sequence

SEQ ID NO: 24447 - DNA, 25 bp, Artificial Sequence
  Description of Artificial Sequence: Synthetic pistachio; inner sequence
ggcatgcacgcacctacacgtgggc

SEQ ID NO: 24448 - DNA, 30 bp, Artificial Sequence; identical to SEQ ID NO: 930
  Description of Artificial Sequence: Synthetic pistachio; inner sequence

SEQ ID NO: 24449 - DNA, 30 bp, Artificial Sequence; identical to SEQ ID NO: 331
  Description of Artificial Sequence: Synthetic pistachio; inner sequence

SEQ ID NO: 24450 - DNA, 30 bp, Artificial Sequence; identical to SEQ ID NO: 217
  Description of Artificial Sequence: Synthetic pistachio; inner sequence

SEQ ID NO: 24451 - DNA, 30 bp, Artificial Sequence; identical to SEQ ID NO: 523
  Description of Artificial Sequence: Synthetic pistachio; inner sequence

SEQ ID NO: 24452 - DNA, 30 bp, Artificial Sequence; identical to SEQ ID NO: 180
  Description of Artificial Sequence: Synthetic pistachio; inner sequence

SEQ ID NO: 24453 - DNA, 30 bp, Artificial Sequence; identical to SEQ ID NO: 239
  Description of Artificial Sequence: Synthetic pistachio; inner sequence

SEQ ID NO: 24454 - DNA, 30 bp, Artificial Sequence; identical to SEQ ID NO: 4658
  Description of Artificial Sequence: Synthetic pistachio; inner sequence

SEQ ID NO: 24455 - DNA, 30 bp, Artificial Sequence; identical to SEQ ID NO: 20133
  Description of Artificial Sequence: Synthetic pistachio; inner sequence

SEQ ID NO: 24456 - DNA, 30 bp, Artificial Sequence; identical to SEQ ID NO: 394
  Description of Artificial Sequence: Synthetic pistachio; inner sequence

SEQ ID NO: 24457 - DNA, 30 bp, Artificial Sequence; identical to SEQ ID NO: 4234
  Description of Artificial Sequence: Synthetic pistachio; inner sequence

SEQ ID NO: 24458 - DNA, 30 bp, Artificial Sequence; identical to SEQ ID NO: 557
  Description of Artificial Sequence: Synthetic pistachio; inner sequence

SEQ ID NO: 24459 - DNA, 30 bp, Artificial Sequence; identical to SEQ ID NO: 746
  Description of Artificial Sequence: Synthetic pistachio; inner sequence

SEQ ID NO: 24460 - DNA, 30 bp, Artificial Sequence; identical to SEQ ID NO: 457
  Description of Artificial Sequence: Synthetic pistachio; inner sequence

SEQ ID NO: 24461 - DNA, 30 bp, Artificial Sequence; identical to SEQ ID NO: 303
  Description of Artificial Sequence: Synthetic pistachio; inner sequence

SEQ ID NO: 24462 - DNA, 30 bp, Artificial Sequence; identical to SEQ ID NO: 680
  Description of Artificial Sequence: Synthetic pistachio; inner sequence

SEQ ID NO: 24463 - DNA, 30 bp, Artificial Sequence; identical to SEQ ID NO: 611
  Description of Artificial Sequence: Synthetic pistachio; inner sequence

SEQ ID NO: 24464 - DNA, 30 bp, Artificial Sequence; identical to SEQ ID NO: 169
  Description of Artificial Sequence: Synthetic pistachio; inner sequence

SEQ ID NO: 24465 - DNA, 30 bp, Artificial Sequence; identical to SEQ ID NO: 4336
  Description of Artificial Sequence: Synthetic pistachio; inner sequence

SEQ ID NO: 24466 - DNA, 31 bp, Artificial Sequence; identical to SEQ ID NO: 216
  Description of Artificial Sequence: Synthetic pistachio; inner sequence

SEQ ID NO: 24467 - DNA, 30 bp, Artificial Sequence; identical to SEQ ID NO: 518
  Description of Artificial Sequence: Synthetic pistachio; inner sequence

SEQ ID NO: 24468 - DNA, 30 bp, Artificial Sequence; identical to SEQ ID NO: 515
  Description of Artificial Sequence: Synthetic pistachio; inner sequence

SEQ ID NO: 24469 - DNA, 30 bp, Artificial Sequence; identical to SEQ ID NO: 8763
  Description of Artificial Sequence: Synthetic pistachio; inner sequence

SEQ ID NO: 24470 - DNA, 30 bp, Artificial Sequence; identical to SEQ ID NO: 791
  Description of Artificial Sequence: Synthetic pistachio; inner sequence

SEQ ID NO: 24471 - DNA, 29 bp, Artificial Sequence
  Description of Artificial Sequence: Synthetic pistachio; inner sequence
gtcatgccatcccttcgagtgtgcaggta

SEQ ID NO: 24472 - DNA, 30 bp, Artificial Sequence; identical to SEQ ID NO: 326
  Description of Artificial Sequence: Synthetic pistachio; inner sequence

SEQ ID NO: 24473 - DNA, 30 bp, Artificial Sequence; identical to SEQ ID NO: 4317
  Description of Artificial Sequence: Synthetic pistachio; inner sequence

SEQ ID NO: 24474 - DNA, 30 bp, Artificial Sequence; identical to SEQ ID NO: 276
  Description of Artificial Sequence: Synthetic pistachio; inner sequence

SEQ ID NO: 24475 - DNA, 30 bp, Artificial Sequence; identical to SEQ ID NO: 671
  Description of Artificial Sequence: Synthetic pistachio; inner sequence

SEQ ID NO: 24476 - DNA, 30 bp, Artificial Sequence; identical to SEQ ID NO: 850
  Description of Artificial Sequence: Synthetic pistachio; inner sequence

SEQ ID NO: 24477 - DNA, 30 bp, Artificial Sequence; identical to SEQ ID NO: 191
  Description of Artificial Sequence: Synthetic pistachio; inner sequence

SEQ ID NO: 24478 - DNA, 30 bp, Artificial Sequence; identical to SEQ ID NO: 4748
  Description of Artificial Sequence: Synthetic pistachio; inner sequence

SEQ ID NO: 24479 - DNA, 30 bp, Artificial Sequence; identical to SEQ ID NO: 4351
  Description of Artificial Sequence: Synthetic pistachio; inner sequence

SEQ ID NO: 24480 - DNA, 30 bp, Artificial Sequence; identical to SEQ ID NO: 442
  Description of Artificial Sequence: Synthetic pistachio; inner sequence

SEQ ID NO: 24481 - DNA, 30 bp, Artificial Sequence; identical to SEQ ID NO: 4691
  Description of Artificial Sequence: Synthetic pistachio; inner sequence

SEQ ID NO: 24482 - DNA, 30 bp, Artificial Sequence; identical to SEQ ID NO: 540
  Description of Artificial Sequence: Synthetic pistachio; inner sequence

SEQ ID NO: 24483 - DNA, 30 bp, Artificial Sequence; identical to SEQ ID NO: 317
  Description of Artificial Sequence: Synthetic pistachio; inner sequence

SEQ ID NO: 24484 - DNA, 30 bp, Artificial Sequence; identical to SEQ ID NO: 596
  Description of Artificial Sequence: Synthetic pistachio; inner sequence

SEQ ID NO: 24485 - DNA, 28 bp, Artificial Sequence
  Description of Artificial Sequence: Synthetic pistachio; inner sequence
cgcaccgtcgatacgtcatgcacgcacc

SEQ ID NO: 24486 - DNA, 30 bp, Artificial Sequence; identical to SEQ ID NO: 4312
  Description of Artificial Sequence: Synthetic pistachio; inner sequence

SEQ ID NO: 24487 - DNA, 30 bp, Artificial Sequence; identical to SEQ ID NO: 443
  Description of Artificial Sequence: Synthetic pistachio; inner sequence

SEQ ID NO: 24488 - DNA, 30 bp, Artificial Sequence; identical to SEQ ID NO: 345
  Description of Artificial Sequence: Synthetic pistachio; inner sequence

SEQ ID NO: 24489 - DNA, 30 bp, Artificial Sequence; identical to SEQ ID NO: 461
  Description of Artificial Sequence: Synthetic pistachio; inner sequence

SEQ ID NO: 24490 - DNA, 30 bp, Artificial Sequence; identical to SEQ ID NO: 277
  Description of Artificial Sequence: Synthetic pistachio; inner sequence

SEQ ID NO: 24491 - DNA, 30 bp, Artificial Sequence; identical to SEQ ID NO: 625
  Description of Artificial Sequence: Synthetic pistachio; inner sequence

SEQ ID NO: 24492 - DNA, 30 bp, Artificial Sequence; identical to SEQ ID NO: 256
  Description of Artificial Sequence: Synthetic pistachio; inner sequence

SEQ ID NO: 24493 - DNA, 30 bp, Artificial Sequence; identical to SEQ ID NO: 591
  Description of Artificial Sequence: Synthetic pistachio; inner sequence

SEQ ID NO: 24494 - DNA, 30 bp, Artificial Sequence; identical to SEQ ID NO: 519
  Description of Artificial Sequence: Synthetic pistachio; inner sequence

SEQ ID NO: 24495 - DNA, 30 bp, Artificial Sequence; identical to SEQ ID NO: 556
  Description of Artificial Sequence: Synthetic pistachio; inner sequence

SEQ ID NO: 24496 - DNA, 30 bp, Artificial Sequence; identical to SEQ ID NO: 699
  Description of Artificial Sequence: Synthetic pistachio; inner sequence

SEQ ID NO: 24497 - DNA, 30 bp, Artificial Sequence; identical to SEQ ID NO: 493
  Description of Artificial Sequence: Synthetic pistachio; inner sequence

SEQ ID NO: 24498 - DNA, 30 bp, Artificial Sequence; identical to SEQ ID NO: 823
  Description of Artificial Sequence: Synthetic pistachio; inner sequence

SEQ ID NO: 24499 - DNA, 30 bp, Artificial Sequence; identical to SEQ ID NO: 8869
  Description of Artificial Sequence: Synthetic pistachio; inner sequence

SEQ ID NO: 24500 - DNA, 30 bp, Artificial Sequence; identical to SEQ ID NO: 962
  Description of Artificial Sequence: Synthetic pistachio; inner sequence

SEQ ID NO: 24501 - DNA, 30 bp, Artificial Sequence; identical to SEQ ID NO: 4472
  Description of Artificial Sequence: Synthetic pistachio; inner sequence

SEQ ID NO: 24502 - DNA, 30 bp, Artificial Sequence; identical to SEQ ID NO: 378
  Description of Artificial Sequence: Synthetic pistachio; inner sequence

SEQ ID NO: 24503 - DNA, 30 bp, Artificial Sequence; identical to SEQ ID NO: 278
  Description of Artificial Sequence: Synthetic pistachio; inner sequence

SEQ ID NO: 24504 - DNA, 30 bp, Artificial Sequence; identical to SEQ ID NO: 322
  Description of Artificial Sequence: Synthetic pistachio; inner sequence

SEQ ID NO: 24505 - DNA, 30 bp, Artificial Sequence; identical to SEQ ID NO: 4230
  Description of Artificial Sequence: Synthetic pistachio; inner sequence

SEQ ID NO: 24506 - DNA, 30 bp, Artificial Sequence; identical to SEQ ID NO: 346
  Description of Artificial Sequence: Synthetic pistachio; inner sequence

SEQ ID NO: 24507 - DNA, 30 bp, Artificial Sequence; identical to SEQ ID NO: 8769
  Description of Artificial Sequence: Synthetic pistachio; inner sequence

SEQ ID NO: 24508 - DNA, 30 bp, Artificial Sequence; identical to SEQ ID NO: 324
  Description of Artificial Sequence: Synthetic pistachio; inner sequence

SEQ ID NO: 24509 - DNA, 30 bp, Artificial Sequence; identical to SEQ ID NO: 846
  Description of Artificial Sequence: Synthetic pistachio; inner sequence

SEQ ID NO: 24510 - DNA, 30 bp, Artificial Sequence; identical to SEQ ID NO: 8801
  Description of Artificial Sequence: Synthetic pistachio; inner sequence

SEQ ID NO: 24511 - DNA, 30 bp, Artificial Sequence; identical to SEQ ID NO: 435
  Description of Artificial Sequence: Synthetic pistachio; inner sequence

SEQ ID NO: 24512 - DNA, 30 bp, Artificial Sequence; identical to SEQ ID NO: 945
  Description of Artificial Sequence: Synthetic pistachio; inner sequence

SEQ ID NO: 24513 - DNA, 30 bp, Artificial Sequence; identical to SEQ ID NO: 678
  Description of Artificial Sequence: Synthetic pistachio; inner sequence

SEQ ID NO: 24514 - DNA, 30 bp, Artificial Sequence; identical to SEQ ID NO: 484
  Description of Artificial Sequence: Synthetic pistachio; inner sequence

SEQ ID NO: 24515 - DNA, 30 bp, Artificial Sequence; identical to SEQ ID NO: 367
  Description of Artificial Sequence: Synthetic pistachio; inner sequence

SEQ ID NO: 24516 - DNA, 28 bp, Artificial Sequence
  Description of Artificial Sequence: Synthetic pistachio; inner sequence
ggacgcaacgtaccgtatcgtggccatg

SEQ ID NO: 24517 - DNA, 30 bp, Artificial Sequence; identical to SEQ ID NO: 490
  Description of Artificial Sequence: Synthetic pistachio; inner sequence

SEQ ID NO: 24518 - DNA, 30 bp, Artificial Sequence; identical to SEQ ID NO: 467
  Description of Artificial Sequence: Synthetic pistachio; inner sequence

SEQ ID NO: 24519 - DNA, 30 bp, Artificial Sequence; identical to SEQ ID NO: 780
  Description of Artificial Sequence: Synthetic pistachio; inner sequence

SEQ ID NO: 24520 - DNA, 30 bp, Artificial Sequence; identical to SEQ ID NO: 281
  Description of Artificial Sequence: Synthetic pistachio; inner sequence

SEQ ID NO: 24521 - DNA, 30 bp, Artificial Sequence; identical to SEQ ID NO: 4804
  Description of Artificial Sequence: Synthetic pistachio; inner sequence

SEQ ID NO: 24522 - DNA, 30 bp, Artificial Sequence; identical to SEQ ID NO: 420
  Description of Artificial Sequence: Synthetic pistachio; inner sequence

SEQ ID NO: 24523 - DNA, 30 bp, Artificial Sequence; identical to SEQ ID NO: 12958
  Description of Artificial Sequence: Synthetic pistachio; inner sequence

SEQ ID NO: 24524 - DNA, 30 bp, Artificial Sequence; identical to SEQ ID NO: 862
  Description of Artificial Sequence: Synthetic pistachio; inner sequence

SEQ ID NO: 24525 - DNA, 30 bp, Artificial Sequence; identical to SEQ ID NO: 4887
  Description of Artificial Sequence: Synthetic pistachio; inner sequence

SEQ ID NO: 24526 - DNA, 30 bp, Artificial Sequence; identical to SEQ ID NO: 463
  Description of Artificial Sequence: Synthetic pistachio; inner sequence

SEQ ID NO: 24527 - DNA, 30 bp, Artificial Sequence
  Description of Artificial Sequence: Synthetic pistachio; inner sequence
cgtgcaacggcaggtcacttcccttggtcg

SEQ ID NO: 24528 - DNA, 30 bp, Artificial Sequence; identical to SEQ ID NO: 774
  Description of Artificial Sequence: Synthetic pistachio; inner sequence

SEQ ID NO: 24529 - DNA, 30 bp, Artificial Sequence; identical to SEQ ID NO: 348
  Description of Artificial Sequence: Synthetic pistachio; inner sequence

SEQ ID NO: 24530 - DNA, 30 bp, Artificial Sequence; identical to SEQ ID NO: 380
  Description of Artificial Sequence: Synthetic pistachio; inner sequence

SEQ ID NO: 24531 - DNA, 30 bp, Artificial Sequence; identical to SEQ ID NO: 318
  Description of Artificial Sequence: Synthetic pistachio; inner sequence

SEQ ID NO: 24532 - DNA, 29 bp, Artificial Sequence
  Description of Artificial Sequence: Synthetic pistachio; inner sequence
ggccgaacggaccgacaagtgcgcatgga

SEQ ID NO: 24533 - DNA, 30 bp, Artificial Sequence; identical to SEQ ID NO: 772
  Description of Artificial Sequence: Synthetic pistachio; inner sequence

SEQ ID NO: 24534 - DNA, 30 bp, Artificial Sequence; identical to SEQ ID NO: 4690
  Description of Artificial Sequence: Synthetic pistachio; inner sequence

SEQ ID NO: 24535 - DNA, 27 bp, Artificial Sequence
  Description of Artificial Sequence: Synthetic pistachio; inner sequence
ggccaagctgacctagcatgtgtgtca

SEQ ID NO: 24536 - DNA, 30 bp, Artificial Sequence; identical to SEQ ID NO: 357
  Description of Artificial Sequence: Synthetic pistachio; inner sequence

SEQ ID NO: 24537 - DNA, 30 bp, Artificial Sequence; identical to SEQ ID NO: 4405
  Description of Artificial Sequence: Synthetic pistachio; inner sequence

SEQ ID NO: 24538 - DNA, 30 bp, Artificial Sequence; identical to SEQ ID NO: 426
  Description of Artificial Sequence: Synthetic pistachio; inner sequence

SEQ ID NO: 24539 - DNA, 30 bp, Artificial Sequence; identical to SEQ ID NO: 407
  Description of Artificial Sequence: Synthetic pistachio; inner sequence

SEQ ID NO: 24540 - DNA, 30 bp, Artificial Sequence; identical to SEQ ID NO: 4967
  Description of Artificial Sequence: Synthetic pistachio; inner sequence

SEQ ID NO: 24541 - DNA, 30 bp, Artificial Sequence; identical to SEQ ID NO: 807
  Description of Artificial Sequence: Synthetic pistachio; inner sequence

SEQ ID NO: 24542 - DNA, 30 bp, Artificial Sequence; identical to SEQ ID NO: 4775
  Description of Artificial Sequence: Synthetic pistachio; inner sequence

SEQ ID NO: 24543 - DNA, 30 bp, Artificial Sequence; identical to SEQ ID NO: 677
  Description of Artificial Sequence: Synthetic pistachio; inner sequence

SEQ ID NO: 24544 - DNA, 30 bp, Artificial Sequence; identical to SEQ ID NO: 20119
  Description of Artificial Sequence: Synthetic pistachio; inner sequence

SEQ ID NO: 24545 - DNA, 30 bp, Artificial Sequence; identical to SEQ ID NO: 477
  Description of Artificial Sequence: Synthetic pistachio; inner sequence

SEQ ID NO: 24546 - DNA, 30 bp, Artificial Sequence; identical to SEQ ID NO: 4651
  Description of Artificial Sequence: Synthetic pistachio; inner sequence

SEQ ID NO: 24547 - DNA, 30 bp, Artificial Sequence; identical to SEQ ID NO: 776
  Description of Artificial Sequence: Synthetic pistachio; inner sequence

SEQ ID NO: 24548 - DNA, 30 bp, Artificial Sequence; identical to SEQ ID NO: 397
  Description of Artificial Sequence: Synthetic pistachio; inner sequence

SEQ ID NO: 24549 - DNA, 30 bp, Artificial Sequence; identical to SEQ ID NO: 808
  Description of Artificial Sequence: Synthetic pistachio; inner sequence

SEQ ID NO: 24550 - DNA, 30 bp, Artificial Sequence; identical to SEQ ID NO: 353
  Description of Artificial Sequence: Synthetic pistachio; inner sequence

SEQ ID NO: 24551 - DNA, 30 bp, Artificial Sequence; identical to SEQ ID NO: 932
  Description of Artificial Sequence: Synthetic pistachio; inner sequence

SEQ ID NO: 24552 - DNA, 30 bp, Artificial Sequence; identical to SEQ ID NO: 12985
  Description of Artificial Sequence: Synthetic pistachio; inner sequence

SEQ ID NO: 24553 - DNA, 30 bp, Artificial Sequence; identical to SEQ ID NO: 450
  Description of Artificial Sequence: Synthetic pistachio; inner sequence

SEQ ID NO: 24554 - DNA, 30 bp, Artificial Sequence; identical to SEQ ID NO: 465
  Description of Artificial Sequence: Synthetic pistachio; inner sequence

SEQ ID NO: 24555 - DNA, 30 bp, Artificial Sequence; identical to SEQ ID NO: 695
  Description of Artificial Sequence: Synthetic pistachio; inner sequence

SEQ ID NO: 24556 - DNA, 30 bp, Artificial Sequence; identical to SEQ ID NO: 8962
  Description of Artificial Sequence: Synthetic pistachio; inner sequence

SEQ ID NO: 24557 - DNA, 30 bp, Artificial Sequence; identical to SEQ ID NO: 805
  Description of Artificial Sequence: Synthetic pistachio; inner sequence

SEQ ID NO: 24558 - DNA, 30 bp, Artificial Sequence; identical to SEQ ID NO: 452
  Description of Artificial Sequence: Synthetic pistachio; inner sequence

SEQ ID NO: 24559 - DNA, 30 bp, Artificial Sequence; identical to SEQ ID NO: 634
  Description of Artificial Sequence: Synthetic pistachio; inner sequence

SEQ ID NO: 24560 - DNA, 30 bp, Artificial Sequence; identical to SEQ ID NO: 741
  Description of Artificial Sequence: Synthetic pistachio; inner sequence

SEQ ID NO: 24561 - DNA, 30 bp, Artificial Sequence; identical to SEQ ID NO: 292
  Description of Artificial Sequence: Synthetic pistachio; inner sequence

SEQ ID NO: 24562 - DNA, 30 bp, Artificial Sequence; identical to SEQ ID NO: 998
  Description of Artificial Sequence: Synthetic pistachio; inner sequence

SEQ ID NO: 24563 - DNA, 30 bp, Artificial Sequence; identical to SEQ ID NO: 662
  Description of Artificial Sequence: Synthetic pistachio; inner sequence

SEQ ID NO: 24564 - DNA, 30 bp, Artificial Sequence; identical to SEQ ID NO: 4638
  Description of Artificial Sequence: Synthetic pistachio; inner sequence

SEQ ID NO: 24565 - DNA, 30 bp, Artificial Sequence; identical to SEQ ID NO: 994
  Description of Artificial Sequence: Synthetic pistachio; inner sequence

SEQ ID NO: 24566 - DNA, 30 bp, Artificial Sequence; identical to SEQ ID NO: 768
  Description of Artificial Sequence: Synthetic pistachio; inner sequence

SEQ ID NO: 24567 - DNA, 30 bp, Artificial Sequence; identical to SEQ ID NO: 613
  Description of Artificial Sequence: Synthetic pistachio; inner sequence

SEQ ID NO: 24568 - DNA, 30 bp, Artificial Sequence; identical to SEQ ID NO: 225
  Description of Artificial Sequence: Synthetic pistachio; inner sequence

SEQ ID NO: 24569 - DNA, 30 bp, Artificial Sequence; identical to SEQ ID NO: 506
  Description of Artificial Sequence: Synthetic pistachio; inner sequence

SEQ ID NO: 24570 - DNA, 30 bp, Artificial Sequence; identical to SEQ ID NO: 8928
  Description of Artificial Sequence: Synthetic pistachio; inner sequence

SEQ ID NO: 24571 - DNA, 30 bp, Artificial Sequence; identical to SEQ ID NO: 644
  Description of Artificial Sequence: Synthetic pistachio; inner sequence

SEQ ID NO: 24572 - DNA, 30 bp, Artificial Sequence; identical to SEQ ID NO: 351
  Description of Artificial Sequence: Synthetic pistachio; inner sequence

SEQ ID NO: 24573 - DNA, 30 bp, Artificial Sequence; identical to SEQ ID NO: 4708
  Description of Artificial Sequence: Synthetic pistachio; inner sequence

SEQ ID NO: 24574 - DNA, 30 bp, Artificial Sequence; identical to SEQ ID NO: 20506
  Description of Artificial Sequence: Synthetic pistachio; inner sequence

SEQ ID NO: 24575 - DNA, 30 bp, Artificial Sequence; identical to SEQ ID NO: 404
  Description of Artificial Sequence: Synthetic pistachio; inner sequence

SEQ ID NO: 24576 - DNA, 30 bp, Artificial Sequence; identical to SEQ ID NO: 408
  Description of Artificial Sequence: Synthetic pistachio; inner sequence

SEQ ID NO: 24577 - DNA, 30 bp, Artificial Sequence; identical to SEQ ID NO: 199
  Description of Artificial Sequence: Synthetic pistachio; inner sequence

SEQ ID NO: 24578 - DNA, 30 bp, Artificial Sequence; identical to SEQ ID NO: 586
  Description of Artificial Sequence: Synthetic pistachio; inner sequence

SEQ ID NO: 24579 - DNA, 30 bp, Artificial Sequence; identical to SEQ ID NO: 953
  Description of Artificial Sequence: Synthetic pistachio; inner sequence

SEQ ID NO: 24580 - DNA, 30 bp, Artificial Sequence; identical to SEQ ID NO: 302
  Description of Artificial Sequence: Synthetic pistachio; inner sequence

SEQ ID NO: 24581 - DNA, 29 bp, Artificial Sequence
  Description of Artificial Sequence: Synthetic pistachio; inner sequence
gtgcgaccgaccctatcaagtgcagcatg

SEQ ID NO: 24582 - DNA, 30 bp, Artificial Sequence; identical to SEQ ID NO: 20269
  Description of Artificial Sequence: Synthetic pistachio; inner sequence

SEQ ID NO: 24583 - DNA, 30 bp, Artificial Sequence; identical to SEQ ID NO: 8458
  Description of Artificial Sequence: Synthetic pistachio; inner sequence

SEQ ID NO: 24584 - DNA, 30 bp, Artificial Sequence; identical to SEQ ID NO: 433
  Description of Artificial Sequence: Synthetic pistachio; inner sequence

SEQ ID NO: 24585 - DNA, 30 bp, Artificial Sequence; identical to SEQ ID NO: 551
  Description of Artificial Sequence: Synthetic pistachio; inner sequence

SEQ ID NO: 24586 - DNA, 30 bp, Artificial Sequence; identical to SEQ ID NO: 663
  Description of Artificial Sequence: Synthetic pistachio; inner sequence

SEQ ID NO: 24587 - DNA, 30 bp, Artificial Sequence; identical to SEQ ID NO: 914
  Description of Artificial Sequence: Synthetic pistachio; inner sequence

SEQ ID NO: 24588 - DNA, 30 bp, Artificial Sequence; identical to SEQ ID NO: 881
  Description of Artificial Sequence: Synthetic pistachio; inner sequence

SEQ ID NO: 24589 - DNA, 30 bp, Artificial Sequence; identical to SEQ ID NO: 20388
  Description of Artificial Sequence: Synthetic pistachio; inner sequence

SEQ ID NO: 24590 - DNA, 30 bp, Artificial Sequence; identical to SEQ ID NO: 1002
  Description of Artificial Sequence: Synthetic pistachio; inner sequence

SEQ ID NO: 24591 - DNA, 30 bp, Artificial Sequence; identical to SEQ ID NO: 8546
  Description of Artificial Sequence: Synthetic pistachio; inner sequence

SEQ ID NO: 24592 - DNA, 30 bp, Artificial Sequence; identical to SEQ ID NO: 439
  Description of Artificial Sequence: Synthetic pistachio; inner sequence

SEQ ID NO: 24593 - DNA, 30 bp, Artificial Sequence; identical to SEQ ID NO: 570
  Description of Artificial Sequence: Synthetic pistachio; inner sequence

SEQ ID NO: 24594 - DNA, 30 bp, Artificial Sequence; identical to SEQ ID NO: 261
  Description of Artificial Sequence: Synthetic pistachio; inner sequence

SEQ ID NO: 24595 - DNA, 30 bp, Artificial Sequence; identical to SEQ ID NO: 4449
  Description of Artificial Sequence: Synthetic pistachio; inner sequence

SEQ ID NO: 24596 - DNA, 30 bp, Artificial Sequence; identical to SEQ ID NO: 4856
  Description of Artificial Sequence: Synthetic pistachio; inner sequence

SEQ ID NO: 24597 - DNA, 30 bp, Artificial Sequence; identical to SEQ ID NO: 12521
  Description of Artificial Sequence: Synthetic pistachio; inner sequence

SEQ ID NO: 24598 - DNA, 30 bp, Artificial Sequence; identical to SEQ ID NO: 668
  Description of Artificial Sequence: Synthetic pistachio; inner sequence

SEQ ID NO: 24599 - DNA, 30 bp, Artificial Sequence; identical to SEQ ID NO: 589
  Description of Artificial Sequence: Synthetic pistachio; inner sequence

SEQ ID NO: 24600 - DNA, 30 bp, Artificial Sequence; identical to SEQ ID NO: 943
  Description of Artificial Sequence: Synthetic pistachio; inner sequence

SEQ ID NO: 24601 - DNA, 30 bp, Artificial Sequence; identical to SEQ ID NO: 4590
  Description of Artificial Sequence: Synthetic pistachio; inner sequence

SEQ ID NO: 24602 - DNA, 30 bp, Artificial Sequence; identical to SEQ ID NO: 775
  Description of Artificial Sequence: Synthetic pistachio; inner sequence

SEQ ID NO: 24603 - DNA, 30 bp, Artificial Sequence; identical to SEQ ID NO: 561
  Description of Artificial Sequence: Synthetic pistachio; inner sequence

SEQ ID NO: 24604 - DNA, 30 bp, Artificial Sequence; identical to SEQ ID NO: 670
  Description of Artificial Sequence: Synthetic pistachio; inner sequence

SEQ ID NO: 24605 - DNA, 30 bp, Artificial Sequence; identical to SEQ ID NO: 568
  Description of Artificial Sequence: Synthetic pistachio; inner sequence

SEQ ID NO: 24606 - DNA, 30 bp, Artificial Sequence; identical to SEQ ID NO: 486
  Description of Artificial Sequence: Synthetic pistachio; inner sequence

SEQ ID NO: 24607 - DNA, 30 bp, Artificial Sequence; identical to SEQ ID NO: 498
  Description of Artificial Sequence: Synthetic pistachio; inner sequence

SEQ ID NO: 24608 - DNA, 30 bp, Artificial Sequence; identical to SEQ ID NO: 793
  Description of Artificial Sequence: Synthetic pistachio; inner sequence

SEQ ID NO: 24609 - DNA, 30 bp, Artificial Sequence; identical to SEQ ID NO: 727
  Description of Artificial Sequence: Synthetic pistachio; inner sequence

SEQ ID NO: 24610 - DNA, 25 bp, Artificial Sequence
  Description of Artificial Sequence: Synthetic pistachio; inner sequence
ggcctgcgatggatgtgtgcgtgta

SEQ ID NO: 24611 - DNA, 30 bp, Artificial Sequence; identical to SEQ ID NO: 363
  Description of Artificial Sequence: Synthetic pistachio; inner sequence

SEQ ID NO: 24612 - DNA, 30 bp, Artificial Sequence; identical to SEQ ID NO: 20286
  Description of Artificial Sequence: Synthetic pistachio; inner sequence

SEQ ID NO: 24613 - DNA, 30 bp, Artificial Sequence; identical to SEQ ID NO: 632
  Description of Artificial Sequence: Synthetic pistachio; inner sequence

SEQ ID NO: 24614 - DNA, 30 bp, Artificial Sequence; identical to SEQ ID NO: 20193
  Description of Artificial Sequence: Synthetic pistachio; inner sequence

SEQ ID NO: 24615 - DNA, 30 bp, Artificial Sequence; identical to SEQ ID NO: 479
  Description of Artificial Sequence: Synthetic pistachio; inner sequence

SEQ ID NO: 24616 - DNA, 30 bp, Artificial Sequence; identical to SEQ ID NO: 672
  Description of Artificial Sequence: Synthetic pistachio; inner sequence

SEQ ID NO: 24617 - DNA, 30 bp, Artificial Sequence; identical to SEQ ID NO: 20413
  Description of Artificial Sequence: Synthetic pistachio; inner sequence

SEQ ID NO: 24618 - DNA, 30 bp, Artificial Sequence; identical to SEQ ID NO: 8787
  Description of Artificial Sequence: Synthetic pistachio; inner sequence

SEQ ID NO: 24619 - DNA, 30 bp, Artificial Sequence; identical to SEQ ID NO: 488
  Description of Artificial Sequence: Synthetic pistachio; inner sequence

SEQ ID NO: 24620 - DNA, 30 bp, Artificial Sequence; identical to SEQ ID NO: 669
  Description of Artificial Sequence: Synthetic pistachio; inner sequence

SEQ ID NO: 24621 - DNA, 30 bp, Artificial Sequence; identical to SEQ ID NO: 4988
  Description of Artificial Sequence: Synthetic pistachio; inner sequence

SEQ ID NO: 24622 - DNA, 30 bp, Artificial Sequence; identical to SEQ ID NO: 661
  Description of Artificial Sequence: Synthetic pistachio; inner sequence

SEQ ID NO: 24623 - DNA, 30 bp, Artificial Sequence; identical to SEQ ID NO: 434
  Description of Artificial Sequence: Synthetic pistachio; inner sequence

SEQ ID NO: 24624 - DNA, 30 bp, Artificial Sequence; identical to SEQ ID NO: 543
  Description of Artificial Sequence: Synthetic pistachio; inner sequence

SEQ ID NO: 24625 - DNA, 30 bp, Artificial Sequence; identical to SEQ ID NO: 915
  Description of Artificial Sequence: Synthetic pistachio; inner sequence

SEQ ID NO: 24626 - DNA, 30 bp, Artificial Sequence; identical to SEQ ID NO: 510
  Description of Artificial Sequence: Synthetic pistachio; inner sequence

SEQ ID NO: 24627 - DNA, 30 bp, Artificial Sequence; identical to SEQ ID NO: 393
  Description of Artificial Sequence: Synthetic pistachio; inner sequence

SEQ ID NO: 24628 - DNA, 30 bp, Artificial Sequence; identical to SEQ ID NO: 580
  Description of Artificial Sequence: Synthetic pistachio; inner sequence

SEQ ID NO: 24629 - DNA, 30 bp, Artificial Sequence; identical to SEQ ID NO: 366
  Description of Artificial Sequence: Synthetic pistachio; inner sequence

SEQ ID NO: 24630 - DNA, 30 bp, Artificial Sequence
  Description of Artificial Sequence: Synthetic pistachio; inner sequence
tggccgatcgaccctatcaagtgccgcatg

SEQ ID NO: 24631 - DNA, 30 bp, Artificial Sequence; identical to SEQ ID NO: 4918
  Description of Artificial Sequence: Synthetic pistachio; inner sequence

SEQ ID NO: 24632 - DNA, 30 bp, Artificial Sequence; identical to SEQ ID NO: 279
  Description of Artificial Sequence: Synthetic pistachio; inner sequence

SEQ ID NO: 24633 - DNA, 30 bp, Artificial Sequence; identical to SEQ ID NO: 497
  Description of Artificial Sequence: Synthetic pistachio; inner sequence

SEQ ID NO: 24634 - DNA, 30 bp, Artificial Sequence; identical to SEQ ID NO: 718
  Description of Artificial Sequence: Synthetic pistachio; inner sequence

SEQ ID NO: 24635 - DNA, 30 bp, Artificial Sequence; identical to SEQ ID NO: 4610
  Description of Artificial Sequence: Synthetic pistachio; inner sequence

SEQ ID NO: 24636 - DNA, 30 bp, Artificial Sequence; identical to SEQ ID NO: 836
  Description of Artificial Sequence: Synthetic pistachio; inner sequence

SEQ ID NO: 24637 - DNA, 30 bp, Artificial Sequence; identical to SEQ ID NO: 533
  Description of Artificial Sequence: Synthetic pistachio; inner sequence

SEQ ID NO: 24638 - DNA, 30 bp, Artificial Sequence; identical to SEQ ID NO: 300
  Description of Artificial Sequence: Synthetic pistachio; inner sequence

SEQ ID NO: 24639 - DNA, 30 bp, Artificial Sequence; identical to SEQ ID NO: 8844
  Description of Artificial Sequence: Synthetic pistachio; inner sequence

SEQ ID NO: 24640 - DNA, 30 bp, Artificial Sequence; identical to SEQ ID NO: 539
  Description of Artificial Sequence: Synthetic pistachio; inner sequence

SEQ ID NO: 24641 - DNA, 30 bp, Artificial Sequence; identical to SEQ ID NO: 356
  Description of Artificial Sequence: Synthetic pistachio; inner sequence

SEQ ID NO: 24642 - DNA, 30 bp, Artificial Sequence; identical to SEQ ID NO: 333
  Description of Artificial Sequence: Synthetic pistachio; inner sequence

SEQ ID NO: 24643 - DNA, 30 bp, Artificial Sequence; identical to SEQ ID NO: 459
  Description of Artificial Sequence: Synthetic pistachio; inner sequence

SEQ ID NO: 24644 - DNA, 30 bp, Artificial Sequence; identical to SEQ ID NO: 657
  Description of Artificial Sequence: Synthetic pistachio; inner sequence

SEQ ID NO: 24645 - DNA, 30 bp, Artificial Sequence; identical to SEQ ID NO: 514
  Description of Artificial Sequence: Synthetic pistachio; inner sequence

SEQ ID NO: 24646 - DNA, 30 bp, Artificial Sequence; identical to SEQ ID NO: 4603
  Description of Artificial Sequence: Synthetic pistachio; inner sequence

SEQ ID NO: 24647 - DNA, 30 bp, Artificial Sequence; identical to SEQ ID NO: 20233
  Description of Artificial Sequence: Synthetic pistachio; inner sequence

SEQ ID NO: 24648 - DNA, 30 bp, Artificial Sequence; identical to SEQ ID NO: 763
  Description of Artificial Sequence: Synthetic pistachio; inner sequence

SEQ ID NO: 24649 - DNA, 30 bp, Artificial Sequence; identical to SEQ ID NO: 309
  Description of Artificial Sequence: Synthetic pistachio; inner sequence

SEQ ID NO: 24650 - DNA, 30 bp, Artificial Sequence; identical to SEQ ID NO: 8767
  Description of Artificial Sequence: Synthetic pistachio; inner sequence

SEQ ID NO: 24651 - DNA, 30 bp, Artificial Sequence; identical to SEQ ID NO: 594
  Description of Artificial Sequence: Synthetic pistachio; inner sequence

SEQ ID NO: 24652 - DNA, 30 bp, Artificial Sequence; identical to SEQ ID NO: 8633
  Description of Artificial Sequence: Synthetic pistachio; inner sequence

SEQ ID NO: 24653 - DNA, 30 bp, Artificial Sequence; identical to SEQ ID NO: 626
  Description of Artificial Sequence: Synthetic pistachio; inner sequence

SEQ ID NO: 24654 - DNA, 30 bp, Artificial Sequence; identical to SEQ ID NO: 579
  Description of Artificial Sequence: Synthetic pistachio; inner sequence

SEQ ID NO: 24655 - DNA, 30 bp, Artificial Sequence; identical to SEQ ID NO: 20592
  Description of Artificial Sequence: Synthetic pistachio; inner sequence

SEQ ID NO: 24656 - DNA, 30 bp, Artificial Sequence; identical to SEQ ID NO: 4565
  Description of Artificial Sequence: Synthetic pistachio; inner sequence

SEQ ID NO: 24657 - DNA, 30 bp, Artificial Sequence; identical to SEQ ID NO: 4667
  Description of Artificial Sequence: Synthetic pistachio; inner sequence

SEQ ID NO: 24658 - DNA, 30 bp, Artificial Sequence; identical to SEQ ID NO: 664
  Description of Artificial Sequence: Synthetic pistachio; inner sequence

SEQ ID NO: 24659 - DNA, 28 bp, Artificial Sequence
  Description of Artificial Sequence: Synthetic pistachio; inner sequence
gtgcgaccgaccctatcatgaggccatg

SEQ ID NO: 24660 - DNA, 30 bp, Artificial Sequence; identical to SEQ ID NO: 473
  Description of Artificial Sequence: Synthetic pistachio; inner sequence

SEQ ID NO: 24661 - DNA, 30 bp, Artificial Sequence; identical to SEQ ID NO: 162
  Description of Artificial Sequence: Synthetic pistachio; inner sequence

SEQ ID NO: 24662 - DNA, 30 bp, Artificial Sequence; identical to SEQ ID NO: 12932
  Description of Artificial Sequence: Synthetic pistachio; inner sequence

SEQ ID NO: 24663 - DNA, 30 bp, Artificial Sequence; identical to SEQ ID NO: 495
  Description of Artificial Sequence: Synthetic pistachio; inner sequence

SEQ ID NO: 24664 - DNA, 30 bp, Artificial Sequence; identical to SEQ ID NO: 4999
  Description of Artificial Sequence: Synthetic pistachio; inner sequence

SEQ ID NO: 24665 - DNA, 30 bp, Artificial Sequence; identical to SEQ ID NO: 571
  Description of Artificial Sequence: Synthetic pistachio; inner sequence

SEQ ID NO: 24666 - DNA, 30 bp, Artificial Sequence; identical to SEQ ID NO: 595
  Description of Artificial Sequence: Synthetic pistachio; inner sequence

SEQ ID NO: 24667 - DNA, 30 bp, Artificial Sequence; identical to SEQ ID NO: 4530
  Description of Artificial Sequence: Synthetic pistachio; inner sequence

SEQ ID NO: 24668 - DNA, 30 bp, Artificial Sequence; identical to SEQ ID NO: 603
  Description of Artificial Sequence: Synthetic pistachio; inner sequence

SEQ ID NO: 24669 - DNA, 30 bp, Artificial Sequence; identical to SEQ ID NO: 20226
  Description of Artificial Sequence: Synthetic pistachio; inner sequence

SEQ ID NO: 24670 - DNA, 30 bp, Artificial Sequence; identical to SEQ ID NO: 749
  Description of Artificial Sequence: Synthetic pistachio; inner sequence

SEQ ID NO: 24671 - DNA, 29 bp, Artificial Sequence
  Description of Artificial Sequence: Synthetic pistachio; inner sequence
ggacgccgatgccctcatgtggccgtgga

SEQ ID NO: 24672 - DNA, 30 bp, Artificial Sequence; identical to SEQ ID NO: 342
  Description of Artificial Sequence: Synthetic pistachio; inner sequence

SEQ ID NO: 24673 - DNA, 30 bp, Artificial Sequence; identical to SEQ ID NO: 576
  Description of Artificial Sequence: Synthetic pistachio; inner sequence

SEQ ID NO: 24674 - DNA, 30 bp, Artificial Sequence; identical to SEQ ID NO: 608
  Description of Artificial Sequence: Synthetic pistachio; inner sequence

SEQ ID NO: 24675 - DNA, 30 bp, Artificial Sequence; identical to SEQ ID NO: 482
  Description of Artificial Sequence: Synthetic pistachio; inner sequence

SEQ ID NO: 24676 - DNA, 30 bp, Artificial Sequence; identical to SEQ ID NO: 926
  Description of Artificial Sequence: Synthetic pistachio; inner sequence

SEQ ID NO: 24677 - DNA, 30 bp, Artificial Sequence; identical to SEQ ID NO: 8670
  Description of Artificial Sequence: Synthetic pistachio; inner sequence

SEQ ID NO: 24678 - DNA, 30 bp, Artificial Sequence; identical to SEQ ID NO: 509
  Description of Artificial Sequence: Synthetic pistachio; inner sequence

SEQ ID NO: 24679 - DNA, 30 bp, Artificial Sequence; identical to SEQ ID NO: 4526
  Description of Artificial Sequence: Synthetic pistachio; inner sequence

SEQ ID NO: 24680 - DNA, 30 bp, Artificial Sequence; identical to SEQ ID NO: 307
  Description of Artificial Sequence: Synthetic pistachio; inner sequence

SEQ ID NO: 24681 - DNA, 29 bp, Artificial Sequence
  Description of Artificial Sequence: Synthetic pistachio; inner sequence
ggcctgcgatggatgtggacgtacgtggc

SEQ ID NO: 24682 - DNA, 30 bp, Artificial Sequence; identical to SEQ ID NO: 12827
  Description of Artificial Sequence: Synthetic pistachio; inner sequence

SEQ ID NO: 24683 - DNA, 30 bp, Artificial Sequence; identical to SEQ ID NO: 956
  Description of Artificial Sequence: Synthetic pistachio; inner sequence

SEQ ID NO: 24684 - DNA, 30 bp, Artificial Sequence; identical to SEQ ID NO: 4575
  Description of Artificial Sequence: Synthetic pistachio; inner sequence

SEQ ID NO: 24685 - DNA, 30 bp, Artificial Sequence; identical to SEQ ID NO: 20229
  Description of Artificial Sequence: Synthetic pistachio; inner sequence

SEQ ID NO: 24686 - DNA, 30 bp, Artificial Sequence; identical to SEQ ID NO: 707
  Description of Artificial Sequence: Synthetic pistachio; inner sequence

SEQ ID NO: 24687 - DNA, 30 bp, Artificial Sequence; identical to SEQ ID NO: 912
  Description of Artificial Sequence: Synthetic pistachio; inner sequence

SEQ ID NO: 24688 - DNA, 30 bp, Artificial Sequence; identical to SEQ ID NO: 20430
  Description of Artificial Sequence: Synthetic pistachio; inner sequence

SEQ ID NO: 24689 - DNA, 30 bp, Artificial Sequence; identical to SEQ ID NO: 4792
  Description of Artificial Sequence: Synthetic pistachio; inner sequence

SEQ ID NO: 24690 - DNA, 30 bp, Artificial Sequence; identical to SEQ ID NO: 535
  Description of Artificial Sequence: Synthetic pistachio; inner sequence

SEQ ID NO: 24691 - DNA, 29 bp, Artificial Sequence
  Description of Artificial Sequence: Synthetic pistachio; inner sequence
gcacgccgatgccctcatgtgtccgtgga

SEQ ID NO: 24692 - DNA, 30 bp, Artificial Sequence; identical to SEQ ID NO: 979
  Description of Artificial Sequence: Synthetic pistachio; inner sequence

SEQ ID NO: 24693 - DNA, 30 bp, Artificial Sequence; identical to SEQ ID NO: 588
  Description of Artificial Sequence: Synthetic pistachio; inner sequence

SEQ ID NO: 24694 - DNA, 30 bp, Artificial Sequence; identical to SEQ ID NO: 4552
  Description of Artificial Sequence: Synthetic pistachio; inner sequence

SEQ ID NO: 24695 - DNA, 30 bp, Artificial Sequence; identical to SEQ ID NO: 4810
  Description of Artificial Sequence: Synthetic pistachio; inner sequence

SEQ ID NO: 24696 - DNA, 30 bp, Artificial Sequence; identical to SEQ ID NO: 456
  Description of Artificial Sequence: Synthetic pistachio; inner sequence

SEQ ID NO: 24697 - DNA, 30 bp, Artificial Sequence; identical to SEQ ID NO: 4425
  Description of Artificial Sequence: Synthetic pistachio; inner sequence

SEQ ID NO: 24698 - DNA, 30 bp, Artificial Sequence; identical to SEQ ID NO: 337
  Description of Artificial Sequence: Synthetic pistachio; inner sequence

SEQ ID NO: 24699 - DNA, 30 bp, Artificial Sequence; identical to SEQ ID NO: 771
  Description of Artificial Sequence: Synthetic pistachio; inner sequence

SEQ ID NO: 24700 - DNA, 30 bp, Artificial Sequence; identical to SEQ ID NO: 472
  Description of Artificial Sequence: Synthetic pistachio; inner sequence

SEQ ID NO: 24701 - DNA, 30 bp, Artificial Sequence; identical to SEQ ID NO: 422
  Description of Artificial Sequence: Synthetic pistachio; inner sequence

SEQ ID NO: 24702 - DNA, 30 bp, Artificial Sequence; identical to SEQ ID NO: 863
  Description of Artificial Sequence: Synthetic pistachio; inner sequence

SEQ ID NO: 24703 - DNA, 30 bp, Artificial Sequence; identical to SEQ ID NO: 4837
  Description of Artificial Sequence: Synthetic pistachio; inner sequence

SEQ ID NO: 24704 - DNA, 30 bp, Artificial Sequence; identical to SEQ ID NO: 8964
  Description of Artificial Sequence: Synthetic pistachio; inner sequence

SEQ ID NO: 24705 - DNA, 30 bp, Artificial Sequence; identical to SEQ ID NO: 4498
  Description of Artificial Sequence: Synthetic pistachio; inner sequence

SEQ ID NO: 24706 - DNA, 30 bp, Artificial Sequence; identical to SEQ ID NO: 4205
  Description of Artificial Sequence: Synthetic pistachio; inner sequence

SEQ ID NO: 24707 - DNA, 30 bp, Artificial Sequence; identical to SEQ ID NO: 421
  Description of Artificial Sequence: Synthetic pistachio; inner sequence

SEQ ID NO: 24708 - DNA, 30 bp, Artificial Sequence
  Description of Artificial Sequence: Synthetic pistachio; inner sequence
cgttgcgcatgtgtcgtgactggcttgggc

SEQ ID NO: 24709 - DNA, 30 bp, Artificial Sequence; identical to SEQ ID NO: 265
  Description of Artificial Sequence: Synthetic pistachio; inner sequence

SEQ ID NO: 24710 - DNA, 30 bp, Artificial Sequence; identical to SEQ ID NO: 507
  Description of Artificial Sequence: Synthetic pistachio; inner sequence

SEQ ID NO: 24711 - DNA, 30 bp, Artificial Sequence; identical to SEQ ID NO: 4380
  Description of Artificial Sequence: Synthetic pistachio; inner sequence

SEQ ID NO: 24712 - DNA, 30 bp, Artificial Sequence; identical to SEQ ID NO: 441
  Description of Artificial Sequence: Synthetic pistachio; inner sequence

SEQ ID NO: 24713 - DNA, 30 bp, Artificial Sequence; identical to SEQ ID NO: 624
  Description of Artificial Sequence: Synthetic pistachio; inner sequence

SEQ ID NO: 24714 - DNA, 30 bp, Artificial Sequence; identical to SEQ ID NO: 460
  Description of Artificial Sequence: Synthetic pistachio; inner sequence

SEQ ID NO: 24715 - DNA, 30 bp, Artificial Sequence; identical to SEQ ID NO: 656
  Description of Artificial Sequence: Synthetic pistachio; inner sequence

SEQ ID NO: 24716 - DNA, 30 bp, Artificial Sequence; identical to SEQ ID NO: 599
  Description of Artificial Sequence: Synthetic pistachio; inner sequence

SEQ ID NO: 24717 - DNA, 30 bp, Artificial Sequence; identical to SEQ ID NO: 636
  Description of Artificial Sequence: Synthetic pistachio; inner sequence

SEQ ID NO: 24718 - DNA, 30 bp, Artificial Sequence; identical to SEQ ID NO: 931
  Description of Artificial Sequence: Synthetic pistachio; inner sequence

SEQ ID NO: 24719 - DNA, 30 bp, Artificial Sequence; identical to SEQ ID NO: 555
  Description of Artificial Sequence: Synthetic pistachio; inner sequence

SEQ ID NO: 24720 - DNA, 30 bp, Artificial Sequence; identical to SEQ ID NO: 8618
  Description of Artificial Sequence: Synthetic pistachio; inner sequence

SEQ ID NO: 24721 - DNA, 30 bp, Artificial Sequence; identical to SEQ ID NO: 451
  Description of Artificial Sequence: Synthetic pistachio; inner sequence

SEQ ID NO: 24722 - DNA, 30 bp, Artificial Sequence; identical to SEQ ID NO: 4956
  Description of Artificial Sequence: Synthetic pistachio; inner sequence

SEQ ID NO: 24723 - DNA, 30 bp, Artificial Sequence; identical to SEQ ID NO: 12931
  Description of Artificial Sequence: Synthetic pistachio; inner sequence

SEQ ID NO: 24724 - DNA, 30 bp, Artificial Sequence; identical to SEQ ID NO: 466
  Description of Artificial Sequence: Synthetic pistachio; inner sequence

SEQ ID NO: 24725 - DNA, 30 bp, Artificial Sequence; identical to SEQ ID NO: 4700
  Description of Artificial Sequence: Synthetic pistachio; inner sequence

SEQ ID NO: 24726 - DNA, 30 bp, Artificial Sequence; identical to SEQ ID NO: 4787
  Description of Artificial Sequence: Synthetic pistachio; inner sequence

SEQ ID NO: 24727 - DNA, 30 bp, Artificial Sequence; identical to SEQ ID NO: 20989
  Description of Artificial Sequence: Synthetic pistachio; inner sequence

SEQ ID NO: 24728 - DNA, 30 bp, Artificial Sequence; identical to SEQ ID NO: 512
  Description of Artificial Sequence: Synthetic pistachio; inner sequence

SEQ ID NO: 24729 - DNA, 31 bp, Artificial Sequence; identical to SEQ ID NO: 20870
  Description of Artificial Sequence: Synthetic pistachio; inner sequence

SEQ ID NO: 24730 - DNA, 30 bp, Artificial Sequence; identical to SEQ ID NO: 713
  Description of Artificial Sequence: Synthetic pistachio; inner sequence

SEQ ID NO: 24731 - DNA, 30 bp, Artificial Sequence; identical to SEQ ID NO: 396
  Description of Artificial Sequence: Synthetic pistachio; inner sequence

SEQ ID NO: 24732 - DNA, 30 bp, Artificial Sequence; identical to SEQ ID NO: 601
  Description of Artificial Sequence: Synthetic pistachio; inner sequence

SEQ ID NO: 24733 - DNA, 30 bp, Artificial Sequence; identical to SEQ ID NO: 592
  Description of Artificial Sequence: Synthetic pistachio; inner sequence

SEQ ID NO: 24734 - DNA, 30 bp, Artificial Sequence; identical to SEQ ID NO: 717
  Description of Artificial Sequence: Synthetic pistachio; inner sequence

SEQ ID NO: 24735 - DNA, 30 bp, Artificial Sequence; identical to SEQ ID NO: 445
  Description of Artificial Sequence: Synthetic pistachio; inner sequence

SEQ ID NO: 24736 - DNA, 30 bp, Artificial Sequence; identical to SEQ ID NO: 4890
  Description of Artificial Sequence: Synthetic pistachio; inner sequence

SEQ ID NO: 24737 - DNA, 30 bp, Artificial Sequence; identical to SEQ ID NO: 505
  Description of Artificial Sequence: Synthetic pistachio; inner sequence

SEQ ID NO: 24738 - DNA, 30 bp, Artificial Sequence; identical to SEQ ID NO: 4254
  Description of Artificial Sequence: Synthetic pistachio; inner sequence

SEQ ID NO: 24739 - DNA, 30 bp, Artificial Sequence; identical to SEQ ID NO: 760
  Description of Artificial Sequence: Synthetic pistachio; inner sequence

SEQ ID NO: 24740 - DNA, 29 bp, Artificial Sequence
  Description of Artificial Sequence: Synthetic pistachio; inner sequence
cgtacgacacgacagacatgcacgacgca

SEQ ID NO: 24741 - DNA, 30 bp, Artificial Sequence; identical to SEQ ID NO: 4364
  Description of Artificial Sequence: Synthetic pistachio; inner sequence

SEQ ID NO: 24742 - DNA, 30 bp, Artificial Sequence; identical to SEQ ID NO: 8627
  Description of Artificial Sequence: Synthetic pistachio; inner sequence

SEQ ID NO: 24743 - DNA, 30 bp, Artificial Sequence; identical to SEQ ID NO: 8985
  Description of Artificial Sequence: Synthetic pistachio; inner sequence

SEQ ID NO: 24744 - DNA, 30 bp, Artificial Sequence; identical to SEQ ID NO: 869
  Description of Artificial Sequence: Synthetic pistachio; inner sequence

SEQ ID NO: 24745 - DNA, 30 bp, Artificial Sequence; identical to SEQ ID NO: 5001
  Description of Artificial Sequence: Synthetic pistachio; inner sequence

SEQ ID NO: 24746 - DNA, 30 bp, Artificial Sequence; identical to SEQ ID NO: 273
  Description of Artificial Sequence: Synthetic pistachio; inner sequence

SEQ ID NO: 24747 - DNA, 30 bp, Artificial Sequence; identical to SEQ ID NO: 20415
  Description of Artificial Sequence: Synthetic pistachio; inner sequence

SEQ ID NO: 24748 - DNA, 30 bp, Artificial Sequence; identical to SEQ ID NO: 381
  Description of Artificial Sequence: Synthetic pistachio; inner sequence

SEQ ID NO: 24749 - DNA, 30 bp, Artificial Sequence; identical to SEQ ID NO: 8659
  Description of Artificial Sequence: Synthetic pistachio; inner sequence

SEQ ID NO: 24750 - DNA, 30 bp, Artificial Sequence; identical to SEQ ID NO: 8837
  Description of Artificial Sequence: Synthetic pistachio; inner sequence

SEQ ID NO: 24751 - DNA, 30 bp, Artificial Sequence; identical to SEQ ID NO: 20426
  Description of Artificial Sequence: Synthetic pistachio; inner sequence

SEQ ID NO: 24752 - DNA, 30 bp, Artificial Sequence; identical to SEQ ID NO: 471
  Description of Artificial Sequence: Synthetic pistachio; inner sequence

SEQ ID NO: 24753 - DNA, 30 bp, Artificial Sequence; identical to SEQ ID NO: 4377
  Description of Artificial Sequence: Synthetic pistachio; inner sequence

SEQ ID NO: 24754 - DNA, 30 bp, Artificial Sequence; identical to SEQ ID NO: 8993
  Description of Artificial Sequence: Synthetic pistachio; inner sequence

SEQ ID NO: 24755 - DNA, 30 bp, Artificial Sequence; identical to SEQ ID NO: 235
  Description of Artificial Sequence: Synthetic pistachio; inner sequence

SEQ ID NO: 24756 - DNA, 30 bp, Artificial Sequence; identical to SEQ ID NO: 327
  Description of Artificial Sequence: Synthetic pistachio; inner sequence

SEQ ID NO: 24757 - DNA, 30 bp, Artificial Sequence; identical to SEQ ID NO: 4802
  Description of Artificial Sequence: Synthetic pistachio; inner sequence

SEQ ID NO: 24758 - DNA, 30 bp, Artificial Sequence; identical to SEQ ID NO: 501
  Description of Artificial Sequence: Synthetic pistachio; inner sequence

SEQ ID NO: 24759 - DNA, 30 bp, Artificial Sequence; identical to SEQ ID NO: 4620
  Description of Artificial Sequence: Synthetic pistachio; inner sequence

SEQ ID NO: 24760 - DNA, 29 bp, Artificial Sequence
  Description of Artificial Sequence: Synthetic pistachio; inner sequence
ccgcacgtagccctaccagtgtgtcagtg

SEQ ID NO: 24761 - DNA, 30 bp, Artificial Sequence; identical to SEQ ID NO: 449
  Description of Artificial Sequence: Synthetic pistachio; inner sequence

SEQ ID NO: 24762 - DNA, 30 bp, Artificial Sequence
  Description of Artificial Sequence: Synthetic pistachio; inner sequence
cgaacgaaccgaggacatgcgctaggcaca

SEQ ID NO: 24763 - DNA, 30 bp, Artificial Sequence; identical to SEQ ID NO: 843
  Description of Artificial Sequence: Synthetic pistachio; inner sequence

SEQ ID NO: 24764 - DNA, 30 bp, Artificial Sequence; identical to SEQ ID NO: 984
  Description of Artificial Sequence: Synthetic pistachio; inner sequence

SEQ ID NO: 24765 - DNA, 30 bp, Artificial Sequence; identical to SEQ ID NO: 424
  Description of Artificial Sequence: Synthetic pistachio; inner sequence

SEQ ID NO: 24766 - DNA, 30 bp, Artificial Sequence; identical to SEQ ID NO: 714
  Description of Artificial Sequence: Synthetic pistachio; inner sequence

SEQ ID NO: 24767 - DNA, 30 bp, Artificial Sequence; identical to SEQ ID NO: 4740
  Description of Artificial Sequence: Synthetic pistachio; inner sequence

SEQ ID NO: 24768 - DNA, 30 bp, Artificial Sequence; identical to SEQ ID NO: 906
  Description of Artificial Sequence: Synthetic pistachio; inner sequence

SEQ ID NO: 24769 - DNA, 30 bp, Artificial Sequence; identical to SEQ ID NO: 655
  Description of Artificial Sequence: Synthetic pistachio; inner sequence

SEQ ID NO: 24770 - DNA, 30 bp, Artificial Sequence; identical to SEQ ID NO: 8937
  Description of Artificial Sequence: Synthetic pistachio; inner sequence

SEQ ID NO: 24771 - DNA, 30 bp, Artificial Sequence; identical to SEQ ID NO: 698
  Description of Artificial Sequence: Synthetic pistachio; inner sequence

SEQ ID NO: 24772 - DNA, 30 bp, Artificial Sequence; identical to SEQ ID NO: 4870
  Description of Artificial Sequence: Synthetic pistachio; inner sequence

SEQ ID NO: 24773 - DNA, 28 bp, Artificial Sequence
  Description of Artificial Sequence: Synthetic pistachio; inner sequence
ggcatgcacgcacctacacgtgatcatg

SEQ ID NO: 24774 - DNA, 30 bp, Artificial Sequence; identical to SEQ ID NO: 4376
  Description of Artificial Sequence: Synthetic pistachio; inner sequence

SEQ ID NO: 24775 - DNA, 30 bp, Artificial Sequence; identical to SEQ ID NO: 643
  Description of Artificial Sequence: Synthetic pistachio; inner sequence

SEQ ID NO: 24776 - DNA, 30 bp, Artificial Sequence; identical to SEQ ID NO: 4921
  Description of Artificial Sequence: Synthetic pistachio; inner sequence

SEQ ID NO: 24777 - DNA, 31 bp, Artificial Sequence; identical to SEQ ID NO: 971
  Description of Artificial Sequence: Synthetic pistachio; inner sequence

SEQ ID NO: 24778 - DNA, 30 bp, Artificial Sequence; identical to SEQ ID NO: 951
  Description of Artificial Sequence: Synthetic pistachio; inner sequence

SEQ ID NO: 24779 - DNA, 30 bp, Artificial Sequence; identical to SEQ ID NO: 921
  Description of Artificial Sequence: Synthetic pistachio; inner sequence

SEQ ID NO: 24780 - DNA, 30 bp, Artificial Sequence; identical to SEQ ID NO: 842
  Description of Artificial Sequence: Synthetic pistachio; inner sequence

SEQ ID NO: 24781 - DNA, 30 bp, Artificial Sequence; identical to SEQ ID NO: 494
  Description of Artificial Sequence: Synthetic pistachio; inner sequence

SEQ ID NO: 24782 - DNA, 30 bp, Artificial Sequence; identical to SEQ ID NO: 830
  Description of Artificial Sequence: Synthetic pistachio; inner sequence

SEQ ID NO: 24783 - DNA, 30 bp, Artificial Sequence; identical to SEQ ID NO: 619
  Description of Artificial Sequence: Synthetic pistachio; inner sequence

SEQ ID NO: 24784 - DNA, 30 bp, Artificial Sequence; identical to SEQ ID NO: 593
  Description of Artificial Sequence: Synthetic pistachio; inner sequence

SEQ ID NO: 24785 - DNA, 30 bp, Artificial Sequence; identical to SEQ ID NO: 835
  Description of Artificial Sequence: Synthetic pistachio; inner sequence

SEQ ID NO: 24786 - DNA, 30 bp, Artificial Sequence; identical to SEQ ID NO: 753
  Description of Artificial Sequence: Synthetic pistachio; inner sequence

SEQ ID NO: 24787 - DNA, 30 bp, Artificial Sequence; identical to SEQ ID NO: 8825
  Description of Artificial Sequence: Synthetic pistachio; inner sequence

SEQ ID NO: 24788 - DNA, 30 bp, Artificial Sequence; identical to SEQ ID NO: 20339
  Description of Artificial Sequence: Synthetic pistachio; inner sequence

SEQ ID NO: 24789 - DNA, 30 bp, Artificial Sequence; identical to SEQ ID NO: 4719
  Description of Artificial Sequence: Synthetic pistachio; inner sequence

SEQ ID NO: 24790 - DNA, 30 bp, Artificial Sequence; identical to SEQ ID NO: 981
  Description of Artificial Sequence: Synthetic pistachio; inner sequence

SEQ ID NO: 24791 - DNA, 30 bp, Artificial Sequence; identical to SEQ ID NO: 4976
  Description of Artificial Sequence: Synthetic pistachio; inner sequence

SEQ ID NO: 24792 - DNA, 30 bp, Artificial Sequence; identical to SEQ ID NO: 8810
  Description of Artificial Sequence: Synthetic pistachio; inner sequence

SEQ ID NO: 24793 - DNA, 30 bp, Artificial Sequence; identical to SEQ ID NO: 665
  Description of Artificial Sequence: Synthetic pistachio; inner sequence

SEQ ID NO: 24794 - DNA, 30 bp, Artificial Sequence; identical to SEQ ID NO: 20789
  Description of Artificial Sequence: Synthetic pistachio; inner sequence

SEQ ID NO: 24795 - DNA, 30 bp, Artificial Sequence; identical to SEQ ID NO: 679
  Description of Artificial Sequence: Synthetic pistachio; inner sequence

SEQ ID NO: 24796 - DNA, 30 bp, Artificial Sequence; identical to SEQ ID NO: 4799
  Description of Artificial Sequence: Synthetic pistachio; inner sequence

SEQ ID NO: 24797 - DNA, 30 bp, Artificial Sequence; identical to SEQ ID NO: 649
  Description of Artificial Sequence: Synthetic pistachio; inner sequence

SEQ ID NO: 24798 - DNA, 30 bp, Artificial Sequence; identical to SEQ ID NO: 682
  Description of Artificial Sequence: Synthetic pistachio; inner sequence

SEQ ID NO: 24799 - DNA, 30 bp, Artificial Sequence; identical to SEQ ID NO: 20548
  Description of Artificial Sequence: Synthetic pistachio; inner sequence

SEQ ID NO: 24800 - DNA, 30 bp, Artificial Sequence; identical to SEQ ID NO: 867
  Description of Artificial Sequence: Synthetic pistachio; inner sequence

SEQ ID NO: 24801 - DNA, 30 bp, Artificial Sequence
  Description of Artificial Sequence: Synthetic pistachio; inner sequence
ggatgtaacgcaccgttcaattgcggcatg

SEQ ID NO: 24802 - DNA, 30 bp, Artificial Sequence; identical to SEQ ID NO: 4816
  Description of Artificial Sequence: Synthetic pistachio; inner sequence

SEQ ID NO: 24803 - DNA, 30 bp, Artificial Sequence; identical to SEQ ID NO: 4745
  Description of Artificial Sequence: Synthetic pistachio; inner sequence

SEQ ID NO: 24804 - DNA, 30 bp, Artificial Sequence; identical to SEQ ID NO: 700
  Description of Artificial Sequence: Synthetic pistachio; inner sequence

SEQ ID NO: 24805 - DNA, 30 bp, Artificial Sequence; identical to SEQ ID NO: 388
  Description of Artificial Sequence: Synthetic pistachio; inner sequence

SEQ ID NO: 24806 - DNA, 30 bp, Artificial Sequence; identical to SEQ ID NO: 4755
  Description of Artificial Sequence: Synthetic pistachio; inner sequence

SEQ ID NO: 24807 - DNA, 30 bp, Artificial Sequence; identical to SEQ ID NO: 20410
  Description of Artificial Sequence: Synthetic pistachio; inner sequence

SEQ ID NO: 24808 - DNA, 30 bp, Artificial Sequence; identical to SEQ ID NO: 860
  Description of Artificial Sequence: Synthetic pistachio; inner sequence

SEQ ID NO: 24809 - DNA, 30 bp, Artificial Sequence; identical to SEQ ID NO: 252
  Description of Artificial Sequence: Synthetic pistachio; inner sequence

SEQ ID NO: 24810 - DNA, 30 bp, Artificial Sequence
  Description of Artificial Sequence: Synthetic pistachio; inner sequence
cgcgctcgtaccgtaggtcttgtcgtggga

SEQ ID NO: 24811 - DNA, 30 bp, Artificial Sequence; identical to SEQ ID NO: 20519
  Description of Artificial Sequence: Synthetic pistachio; inner sequence

SEQ ID NO: 24812 - DNA, 30 bp, Artificial Sequence
  Description of Artificial Sequence: Synthetic pistachio; inner sequence
cgcactacaagggggaggtgacgttgcgcc

SEQ ID NO: 24813 - DNA, 30 bp, Artificial Sequence; identical to SEQ ID NO: 4873
  Description of Artificial Sequence: Synthetic pistachio; inner sequence

SEQ ID NO: 24814 - DNA, 30 bp, Artificial Sequence; identical to SEQ ID NO: 4592
  Description of Artificial Sequence: Synthetic pistachio; inner sequence

SEQ ID NO: 24815 - DNA, 30 bp, Artificial Sequence; identical to SEQ ID NO: 4348
  Description of Artificial Sequence: Synthetic pistachio; inner sequence

SEQ ID NO: 24816 - DNA, 30 bp, Artificial Sequence; identical to SEQ ID NO: 4955
  Description of Artificial Sequence: Synthetic pistachio; inner sequence

SEQ ID NO: 24817 - DNA, 30 bp, Artificial Sequence; identical to SEQ ID NO: 4817
  Description of Artificial Sequence: Synthetic pistachio; inner sequence

SEQ ID NO: 24818 - DNA, 30 bp, Artificial Sequence; identical to SEQ ID NO: 8798
  Description of Artificial Sequence: Synthetic pistachio; inner sequence

SEQ ID NO: 24819 - DNA, 30 bp, Artificial Sequence; identical to SEQ ID NO: 950
  Description of Artificial Sequence: Synthetic pistachio; inner sequence

SEQ ID NO: 24820 - DNA, 30 bp, Artificial Sequence; identical to SEQ ID NO: 12791
  Description of Artificial Sequence: Synthetic pistachio; inner sequence

SEQ ID NO: 24821 - DNA, 30 bp, Artificial Sequence; identical to SEQ ID NO: 725
  Description of Artificial Sequence: Synthetic pistachio; inner sequence

SEQ ID NO: 24822 - DNA, 30 bp, Artificial Sequence; identical to SEQ ID NO: 4963
  Description of Artificial Sequence: Synthetic pistachio; inner sequence

SEQ ID NO: 24823 - DNA, 30 bp, Artificial Sequence; identical to SEQ ID NO: 8949
  Description of Artificial Sequence: Synthetic pistachio; inner sequence

SEQ ID NO: 24824 - DNA, 30 bp, Artificial Sequence; identical to SEQ ID NO: 686
  Description of Artificial Sequence: Synthetic pistachio; inner sequence

SEQ ID NO: 24825 - DNA, 30 bp, Artificial Sequence; identical to SEQ ID NO: 720
  Description of Artificial Sequence: Synthetic pistachio; inner sequence

SEQ ID NO: 24826 - DNA, 30 bp, Artificial Sequence; identical to SEQ ID NO: 440
  Description of Artificial Sequence: Synthetic pistachio; inner sequence

SEQ ID NO: 24827 - DNA, 30 bp, Artificial Sequence; identical to SEQ ID NO: 20165
  Description of Artificial Sequence: Synthetic pistachio; inner sequence

SEQ ID NO: 24828 - DNA, 30 bp, Artificial Sequence; identical to SEQ ID NO: 4509
  Description of Artificial Sequence: Synthetic pistachio; inner sequence

SEQ ID NO: 24829 - DNA, 30 bp, Artificial Sequence; identical to SEQ ID NO: 4776
  Description of Artificial Sequence: Synthetic pistachio; inner sequence

SEQ ID NO: 24830 - DNA, 30 bp, Artificial Sequence; identical to SEQ ID NO: 4504
  Description of Artificial Sequence: Synthetic pistachio; inner sequence

SEQ ID NO: 24831 - DNA, 30 bp, Artificial Sequence; identical to SEQ ID NO: 4394
  Description of Artificial Sequence: Synthetic pistachio; inner sequence

SEQ ID NO: 24832 - DNA, 30 bp, Artificial Sequence; identical to SEQ ID NO: 761
  Description of Artificial Sequence: Synthetic pistachio; inner sequence

SEQ ID NO: 24833 - DNA, 30 bp, Artificial Sequence; identical to SEQ ID NO: 778
  Description of Artificial Sequence: Synthetic pistachio; inner sequence

SEQ ID NO: 24834 - DNA, 30 bp, Artificial Sequence; identical to SEQ ID NO: 590
  Description of Artificial Sequence: Synthetic pistachio; inner sequence

SEQ ID NO: 24835 - DNA, 30 bp, Artificial Sequence; identical to SEQ ID NO: 4616
  Description of Artificial Sequence: Synthetic pistachio; inner sequence

SEQ ID NO: 24836 - DNA, 30 bp, Artificial Sequence; identical to SEQ ID NO: 691
  Description of Artificial Sequence: Synthetic pistachio; inner sequence

SEQ ID NO: 24837 - DNA, 30 bp, Artificial Sequence; identical to SEQ ID NO: 940
  Description of Artificial Sequence: Synthetic pistachio; inner sequence

SEQ ID NO: 24838 - DNA, 30 bp, Artificial Sequence; identical to SEQ ID NO: 4717
  Description of Artificial Sequence: Synthetic pistachio; inner sequence

SEQ ID NO: 24839 - DNA, 30 bp, Artificial Sequence
  Description of Artificial Sequence: Synthetic pistachio; inner sequence
cgcaccggcatggcgtaggcagtcgtgaca

SEQ ID NO: 24840 - DNA, 30 bp, Artificial Sequence; identical to SEQ ID NO: 20335
  Description of Artificial Sequence: Synthetic pistachio; inner sequence

SEQ ID NO: 24841 - DNA, 30 bp, Artificial Sequence; identical to SEQ ID NO: 415
  Description of Artificial Sequence: Synthetic pistachio; inner sequence

SEQ ID NO: 24842 - DNA, 30 bp, Artificial Sequence; identical to SEQ ID NO: 598
  Description of Artificial Sequence: Synthetic pistachio; inner sequence

SEQ ID NO: 24843 - DNA, 30 bp, Artificial Sequence
  Description of Artificial Sequence: Synthetic pistachio; inner sequence
ggacgcatcgccccttcatgttgtcgtgta

SEQ ID NO: 24844 - DNA, 29 bp, Artificial Sequence
  Description of Artificial Sequence: Synthetic pistachio; inner sequence
gtgcaaacggaccgacaagtgcgcatgga

SEQ ID NO: 24845 - DNA, 30 bp, Artificial Sequence; identical to SEQ ID NO: 604
  Description of Artificial Sequence: Synthetic pistachio; inner sequence

SEQ ID NO: 24846 - DNA, 30 bp, Artificial Sequence; identical to SEQ ID NO: 961
  Description of Artificial Sequence: Synthetic pistachio; inner sequence

SEQ ID NO: 24847 - DNA, 30 bp, Artificial Sequence; identical to SEQ ID NO: 542
  Description of Artificial Sequence: Synthetic pistachio; inner sequence

SEQ ID NO: 24848 - DNA, 31 bp, Artificial Sequence; identical to SEQ ID NO: 503
  Description of Artificial Sequence: Synthetic pistachio; inner sequence

SEQ ID NO: 24849 - DNA, 30 bp, Artificial Sequence; identical to SEQ ID NO: 382
  Description of Artificial Sequence: Synthetic pistachio; inner sequence

SEQ ID NO: 24850 - DNA, 30 bp, Artificial Sequence; identical to SEQ ID NO: 8816
  Description of Artificial Sequence: Synthetic pistachio; inner sequence

SEQ ID NO: 24851 - DNA, 30 bp, Artificial Sequence; identical to SEQ ID NO: 4830
  Description of Artificial Sequence: Synthetic pistachio; inner sequence

SEQ ID NO: 24852 - DNA, 30 bp, Artificial Sequence
  Description of Artificial Sequence: Synthetic pistachio; inner sequence
gcatcgcgtcactatcatgtgtgtcacgta

SEQ ID NO: 24853 - DNA, 30 bp, Artificial Sequence; identical to SEQ ID NO: 286
  Description of Artificial Sequence: Synthetic pistachio; inner sequence

SEQ ID NO: 24854 - DNA, 30 bp, Artificial Sequence; identical to SEQ ID NO: 384
  Description of Artificial Sequence: Synthetic pistachio; inner sequence

SEQ ID NO: 24855 - DNA, 30 bp, Artificial Sequence; identical to SEQ ID NO: 4894
  Description of Artificial Sequence: Synthetic pistachio; inner sequence

SEQ ID NO: 24856 - DNA, 30 bp, Artificial Sequence; identical to SEQ ID NO: 4280
  Description of Artificial Sequence: Synthetic pistachio; inner sequence

SEQ ID NO: 24857 - DNA, 30 bp, Artificial Sequence
  Description of Artificial Sequence: Synthetic pistachio; inner sequence
cgaccgtgagtggcgatgtgtctcggtgca

SEQ ID NO: 24858 - DNA, 30 bp, Artificial Sequence; identical to SEQ ID NO: 701
  Description of Artificial Sequence: Synthetic pistachio; inner sequence

SEQ ID NO: 24859 - DNA, 30 bp, Artificial Sequence; identical to SEQ ID NO: 4692
  Description of Artificial Sequence: Synthetic pistachio; inner sequence

SEQ ID NO: 24860 - DNA, 30 bp, Artificial Sequence; identical to SEQ ID NO: 857
  Description of Artificial Sequence: Synthetic pistachio; inner sequence

SEQ ID NO: 24861 - DNA, 30 bp, Artificial Sequence; identical to SEQ ID NO: 20331
  Description of Artificial Sequence: Synthetic pistachio; inner sequence

SEQ ID NO: 24862 - DNA, 30 bp, Artificial Sequence; identical to SEQ ID NO: 4790
  Description of Artificial Sequence: Synthetic pistachio; inner sequence

SEQ ID NO: 24863 - DNA, 30 bp, Artificial Sequence; identical to SEQ ID NO: 722
  Description of Artificial Sequence: Synthetic pistachio; inner sequence

SEQ ID NO: 24864 - DNA, 30 bp, Artificial Sequence; identical to SEQ ID NO: 4682
  Description of Artificial Sequence: Synthetic pistachio; inner sequence

SEQ ID NO: 24865 - DNA, 30 bp, Artificial Sequence; identical to SEQ ID NO: 20760
  Description of Artificial Sequence: Synthetic pistachio; inner sequence

SEQ ID NO: 24866 - DNA, 30 bp, Artificial Sequence; identical to SEQ ID NO: 4491
  Description of Artificial Sequence: Synthetic pistachio; inner sequence

SEQ ID NO: 24867 - DNA, 30 bp, Artificial Sequence; identical to SEQ ID NO: 444
  Description of Artificial Sequence: Synthetic pistachio; inner sequence

SEQ ID NO: 24868 - DNA, 30 bp, Artificial Sequence; identical to SEQ ID NO: 960
  Description of Artificial Sequence: Synthetic pistachio; inner sequence

SEQ ID NO: 24869 - DNA, 30 bp, Artificial Sequence; identical to SEQ ID NO: 996
  Description of Artificial Sequence: Synthetic pistachio; inner sequence

SEQ ID NO: 24870 - DNA, 30 bp, Artificial Sequence
  Description of Artificial Sequence: Synthetic pistachio; inner sequence
cgcgccgagcatgcctagcgatgctgcaca

SEQ ID NO: 24871 - DNA, 30 bp, Artificial Sequence; identical to SEQ ID NO: 1001
  Description of Artificial Sequence: Synthetic pistachio; inner sequence

SEQ ID NO: 24872 - DNA, 30 bp, Artificial Sequence
  Description of Artificial Sequence: Synthetic pistachio; inner sequence
tgacgcacgcagaccttcaagtcggccatg

SEQ ID NO: 24873 - DNA, 30 bp, Artificial Sequence; identical to SEQ ID NO: 8850
  Description of Artificial Sequence: Synthetic pistachio; inner sequence

SEQ ID NO: 24874 - DNA, 30 bp, Artificial Sequence; identical to SEQ ID NO: 731
  Description of Artificial Sequence: Synthetic pistachio; inner sequence

SEQ ID NO: 24875 - DNA, 30 bp, Artificial Sequence
  Description of Artificial Sequence: Synthetic pistachio; inner sequence
ggatgcggctgacctgatcaatgtgcgcca

SEQ ID NO: 24876 - DNA, 30 bp, Artificial Sequence; identical to SEQ ID NO: 871
  Description of Artificial Sequence: Synthetic pistachio; inner sequence

SEQ ID NO: 24877 - DNA, 30 bp, Artificial Sequence
  Description of Artificial Sequence: Synthetic pistachio; inner sequence
gtcatgcgcggacattcacgttggcgtgga

SEQ ID NO: 24878 - DNA, 30 bp, Artificial Sequence; identical to SEQ ID NO: 526
  Description of Artificial Sequence: Synthetic pistachio; inner sequence

SEQ ID NO: 24879 - DNA, 30 bp, Artificial Sequence; identical to SEQ ID NO: 8868
  Description of Artificial Sequence: Synthetic pistachio; inner sequence

SEQ ID NO: 24880 - DNA, 30 bp, Artificial Sequence; identical to SEQ ID NO: 20544
  Description of Artificial Sequence: Synthetic pistachio; inner sequence

SEQ ID NO: 24881 - DNA, 30 bp, Artificial Sequence; identical to SEQ ID NO: 12933
  Description of Artificial Sequence: Synthetic pistachio; inner sequence

SEQ ID NO: 24882 - DNA, 30 bp, Artificial Sequence; identical to SEQ ID NO: 12986
  Description of Artificial Sequence: Synthetic pistachio; inner sequence

SEQ ID NO: 24883 - DNA, 30 bp, Artificial Sequence; identical to SEQ ID NO: 674
  Description of Artificial Sequence: Synthetic pistachio; inner sequence

SEQ ID NO: 24884 - DNA, 31 bp, Artificial Sequence; identical to SEQ ID NO: 489
  Description of Artificial Sequence: Synthetic pistachio; inner sequence

SEQ ID NO: 24885 - DNA, 28 bp, Artificial Sequence
  Description of Artificial Sequence: Synthetic pistachio; inner sequence
gcacgactcgcaccctatcatgcggtca

SEQ ID NO: 24886 - DNA, 30 bp, Artificial Sequence; identical to SEQ ID NO: 547
  Description of Artificial Sequence: Synthetic pistachio; inner sequence

SEQ ID NO: 24887 - DNA, 30 bp, Artificial Sequence; identical to SEQ ID NO: 554
  Description of Artificial Sequence: Synthetic pistachio; inner sequence

SEQ ID NO: 24888 - DNA, 30 bp, Artificial Sequence; identical to SEQ ID NO: 12853
  Description of Artificial Sequence: Synthetic pistachio; inner sequence

SEQ ID NO: 24889 - DNA, 30 bp, Artificial Sequence; identical to SEQ ID NO: 683
  Description of Artificial Sequence: Synthetic pistachio; inner sequence

SEQ ID NO: 24890 - DNA, 30 bp, Artificial Sequence; identical to SEQ ID NO: 610
  Description of Artificial Sequence: Synthetic pistachio; inner sequence

SEQ ID NO: 24891 - DNA, 30 bp, Artificial Sequence; identical to SEQ ID NO: 709
  Description of Artificial Sequence: Synthetic pistachio; inner sequence

SEQ ID NO: 24892 - DNA, 30 bp, Artificial Sequence; identical to SEQ ID NO: 948
  Description of Artificial Sequence: Synthetic pistachio; inner sequence

SEQ ID NO: 24893 - DNA, 30 bp, Artificial Sequence; identical to SEQ ID NO: 20902
  Description of Artificial Sequence: Synthetic pistachio; inner sequence

SEQ ID NO: 24894 - DNA, 30 bp, Artificial Sequence; identical to SEQ ID NO: 295
  Description of Artificial Sequence: Synthetic pistachio; inner sequence

SEQ ID NO: 24895 - DNA, 30 bp, Artificial Sequence; identical to SEQ ID NO: 739
  Description of Artificial Sequence: Synthetic pistachio; inner sequence

SEQ ID NO: 24896 - DNA, 30 bp, Artificial Sequence; identical to SEQ ID NO: 4807
  Description of Artificial Sequence: Synthetic pistachio; inner sequence

SEQ ID NO: 24897 - DNA, 30 bp, Artificial Sequence; identical to SEQ ID NO: 726
  Description of Artificial Sequence: Synthetic pistachio; inner sequence

SEQ ID NO: 24898 - DNA, 30 bp, Artificial Sequence; identical to SEQ ID NO: 831
  Description of Artificial Sequence: Synthetic pistachio; inner sequence

SEQ ID NO: 24899 - DNA, 30 bp, Artificial Sequence; identical to SEQ ID NO: 12799
  Description of Artificial Sequence: Synthetic pistachio; inner sequence

SEQ ID NO: 24900 - DNA, 30 bp, Artificial Sequence; identical to SEQ ID NO: 20590
  Description of Artificial Sequence: Synthetic pistachio; inner sequence

SEQ ID NO: 24901 - DNA, 30 bp, Artificial Sequence; identical to SEQ ID NO: 688
  Description of Artificial Sequence: Synthetic pistachio; inner sequence

SEQ ID NO: 24902 - DNA, 27 bp, Artificial Sequence
  Description of Artificial Sequence: Synthetic pistachio; inner sequence
gcatgcgatgatccttcgagtgcgtca

SEQ ID NO: 24903 - DNA, 30 bp, Artificial Sequence; identical to SEQ ID NO: 4591
  Description of Artificial Sequence: Synthetic pistachio; inner sequence

SEQ ID NO: 24904 - DNA, 30 bp, Artificial Sequence; identical to SEQ ID NO: 4857
  Description of Artificial Sequence: Synthetic pistachio; inner sequence

SEQ ID NO: 24905 - DNA, 30 bp, Artificial Sequence; identical to SEQ ID NO: 917
  Description of Artificial Sequence: Synthetic pistachio; inner sequence

SEQ ID NO: 24906 - DNA, 30 bp, Artificial Sequence
  Description of Artificial Sequence: Synthetic pistachio; inner sequence
cggcacgtagccctatcagtggtgcatgca

SEQ ID NO: 24907 - DNA, 30 bp, Artificial Sequence; identical to SEQ ID NO: 20642
  Description of Artificial Sequence: Synthetic pistachio; inner sequence

SEQ ID NO: 24908 - DNA, 30 bp, Artificial Sequence; identical to SEQ ID NO: 474
  Description of Artificial Sequence: Synthetic pistachio; inner sequence

SEQ ID NO: 24909 - DNA, 30 bp, Artificial Sequence; identical to SEQ ID NO: 8892
  Description of Artificial Sequence: Synthetic pistachio; inner sequence

SEQ ID NO: 24910 - DNA, 30 bp, Artificial Sequence; identical to SEQ ID NO: 20424
  Description of Artificial Sequence: Synthetic pistachio; inner sequence

SEQ ID NO: 24911 - DNA, 30 bp, Artificial Sequence; identical to SEQ ID NO: 4580
  Description of Artificial Sequence: Synthetic pistachio; inner sequence

SEQ ID NO: 24912 - DNA, 30 bp, Artificial Sequence; identical to SEQ ID NO: 12971
  Description of Artificial Sequence: Synthetic pistachio; inner sequence

SEQ ID NO: 24913 - DNA, 30 bp, Artificial Sequence; identical to SEQ ID NO: 458
  Description of Artificial Sequence: Synthetic pistachio; inner sequence

SEQ ID NO: 24914 - DNA, 30 bp, Artificial Sequence; identical to SEQ ID NO: 12866
  Description of Artificial Sequence: Synthetic pistachio; inner sequence

SEQ ID NO: 24915 - DNA, 30 bp, Artificial Sequence; identical to SEQ ID NO: 758
  Description of Artificial Sequence: Synthetic pistachio; inner sequence

SEQ ID NO: 24916 - DNA, 30 bp, Artificial Sequence; identical to SEQ ID NO: 4393
  Description of Artificial Sequence: Synthetic pistachio; inner sequence

SEQ ID NO: 24917 - DNA, 30 bp, Artificial Sequence; identical to SEQ ID NO: 600
  Description of Artificial Sequence: Synthetic pistachio; inner sequence

SEQ ID NO: 24918 - DNA, 30 bp, Artificial Sequence; identical to SEQ ID NO: 4641
  Description of Artificial Sequence: Synthetic pistachio; inner sequence

SEQ ID NO: 24919 - DNA, 30 bp, Artificial Sequence; identical to SEQ ID NO: 4907
  Description of Artificial Sequence: Synthetic pistachio; inner sequence

SEQ ID NO: 24920 - DNA, 30 bp, Artificial Sequence; identical to SEQ ID NO: 4419
  Description of Artificial Sequence: Synthetic pistachio; inner sequence

SEQ ID NO: 24921 - DNA, 30 bp, Artificial Sequence; identical to SEQ ID NO: 8682
  Description of Artificial Sequence: Synthetic pistachio; inner sequence

SEQ ID NO: 24922 - DNA, 30 bp, Artificial Sequence; identical to SEQ ID NO: 4997
  Description of Artificial Sequence: Synthetic pistachio; inner sequence

SEQ ID NO: 24923 - DNA, 30 bp, Artificial Sequence; identical to SEQ ID NO: 383
  Description of Artificial Sequence: Synthetic pistachio; inner sequence

SEQ ID NO: 24924 - DNA, 30 bp, Artificial Sequence; identical to SEQ ID NO: 8960
  Description of Artificial Sequence: Synthetic pistachio; inner sequence

SEQ ID NO: 24925 - DNA, 30 bp, Artificial Sequence; identical to SEQ ID NO: 12996
  Description of Artificial Sequence: Synthetic pistachio; inner sequence

SEQ ID NO: 24926 - DNA, 30 bp, Artificial Sequence; identical to SEQ ID NO: 721
  Description of Artificial Sequence: Synthetic pistachio; inner sequence

SEQ ID NO: 24927 - DNA, 30 bp, Artificial Sequence
  Description of Artificial Sequence: Synthetic pistachio; inner sequence
tggccgatcgaccctaccaagtgcagcatg

SEQ ID NO: 24928 - DNA, 30 bp, Artificial Sequence; identical to SEQ ID NO: 20576
  Description of Artificial Sequence: Synthetic pistachio; inner sequence

SEQ ID NO: 24929 - DNA, 30 bp, Artificial Sequence; identical to SEQ ID NO: 819
  Description of Artificial Sequence: Synthetic pistachio; inner sequence

SEQ ID NO: 24930 - DNA, 30 bp, Artificial Sequence; identical to SEQ ID NO: 4739
  Description of Artificial Sequence: Synthetic pistachio; inner sequence

SEQ ID NO: 24931 - DNA, 30 bp, Artificial Sequence; identical to SEQ ID NO: 20327
  Description of Artificial Sequence: Synthetic pistachio; inner sequence

SEQ ID NO: 24932 - DNA, 30 bp, Artificial Sequence; identical to SEQ ID NO: 12773
  Description of Artificial Sequence: Synthetic pistachio; inner sequence

SEQ ID NO: 24933 - DNA, 31 bp, Artificial Sequence; identical to SEQ ID NO: 845
  Description of Artificial Sequence: Synthetic pistachio; inner sequence

SEQ ID NO: 24934 - DNA, 30 bp, Artificial Sequence; identical to SEQ ID NO: 826
  Description of Artificial Sequence: Synthetic pistachio; inner sequence

SEQ ID NO: 24935 - DNA, 30 bp, Artificial Sequence; identical to SEQ ID NO: 849
  Description of Artificial Sequence: Synthetic pistachio; inner sequence

SEQ ID NO: 24936 - DNA, 30 bp, Artificial Sequence; identical to SEQ ID NO: 629
  Description of Artificial Sequence: Synthetic pistachio; inner sequence

SEQ ID NO: 24937 - DNA, 30 bp, Artificial Sequence; identical to SEQ ID NO: 565
  Description of Artificial Sequence: Synthetic pistachio; inner sequence

SEQ ID NO: 24938 - DNA, 30 bp, Artificial Sequence; identical to SEQ ID NO: 4711
  Description of Artificial Sequence: Synthetic pistachio; inner sequence

SEQ ID NO: 24939 - DNA, 30 bp, Artificial Sequence; identical to SEQ ID NO: 4499
  Description of Artificial Sequence: Synthetic pistachio; inner sequence

SEQ ID NO: 24940 - DNA, 30 bp, Artificial Sequence; identical to SEQ ID NO: 4881
  Description of Artificial Sequence: Synthetic pistachio; inner sequence

SEQ ID NO: 24941 - DNA, 30 bp, Artificial Sequence; identical to SEQ ID NO: 705
  Description of Artificial Sequence: Synthetic pistachio; inner sequence

SEQ ID NO: 24942 - DNA, 30 bp, Artificial Sequence; identical to SEQ ID NO: 20441
  Description of Artificial Sequence: Synthetic pistachio; inner sequence

SEQ ID NO: 24943 - DNA, 30 bp, Artificial Sequence
  Description of Artificial Sequence: Synthetic pistachio; inner sequence
cgcaacgtcaagcgggaaggcactttggtg

SEQ ID NO: 24944 - DNA, 30 bp, Artificial Sequence; identical to SEQ ID NO: 781
  Description of Artificial Sequence: Synthetic pistachio; inner sequence

SEQ ID NO: 24945 - DNA, 30 bp, Artificial Sequence; identical to SEQ ID NO: 558
  Description of Artificial Sequence: Synthetic pistachio; inner sequence

SEQ ID NO: 24946 - DNA, 30 bp, Artificial Sequence; identical to SEQ ID NO: 20385
  Description of Artificial Sequence: Synthetic pistachio; inner sequence

SEQ ID NO: 24947 - DNA, 30 bp, Artificial Sequence; identical to SEQ ID NO: 4653
  Description of Artificial Sequence: Synthetic pistachio; inner sequence

SEQ ID NO: 24948 - DNA, 30 bp, Artificial Sequence
  Description of Artificial Sequence: Synthetic pistachio; inner sequence
tgcgtcagatgcatcgtgttcccctgggca

SEQ ID NO: 24949 - DNA, 30 bp, Artificial Sequence; identical to SEQ ID NO: 874
  Description of Artificial Sequence: Synthetic pistachio; inner sequence

SEQ ID NO: 24950 - DNA, 30 bp, Artificial Sequence; identical to SEQ ID NO: 20549
  Description of Artificial Sequence: Synthetic pistachio; inner sequence

SEQ ID NO: 24951 - DNA, 30 bp, Artificial Sequence; identical to SEQ ID NO: 21001
  Description of Artificial Sequence: Synthetic pistachio; inner sequence

SEQ ID NO: 24952 - DNA, 30 bp, Artificial Sequence; identical to SEQ ID NO: 635
  Description of Artificial Sequence: Synthetic pistachio; inner sequence

SEQ ID NO: 24953 - DNA, 30 bp, Artificial Sequence; identical to SEQ ID NO: 4905
  Description of Artificial Sequence: Synthetic pistachio; inner sequence

SEQ ID NO: 24954 - DNA, 30 bp, Artificial Sequence; identical to SEQ ID NO: 4407
  Description of Artificial Sequence: Synthetic pistachio; inner sequence

SEQ ID NO: 24955 - DNA, 30 bp, Artificial Sequence; identical to SEQ ID NO: 8579
  Description of Artificial Sequence: Synthetic pistachio; inner sequence

SEQ ID NO: 24956 - DNA, 30 bp, Artificial Sequence; identical to SEQ ID NO: 4987
  Description of Artificial Sequence: Synthetic pistachio; inner sequence

SEQ ID NO: 24957 - DNA, 30 bp, Artificial Sequence; identical to SEQ ID NO: 16769
  Description of Artificial Sequence: Synthetic pistachio; inner sequence

SEQ ID NO: 24958 - DNA, 30 bp, Artificial Sequence; identical to SEQ ID NO: 832
  Description of Artificial Sequence: Synthetic pistachio; inner sequence

SEQ ID NO: 24959 - DNA, 30 bp, Artificial Sequence; identical to SEQ ID NO: 834
  Description of Artificial Sequence: Synthetic pistachio; inner sequence

SEQ ID NO: 24960 - DNA, 26 bp, Artificial Sequence
  Description of Artificial Sequence: Synthetic pistachio; inner sequence
gacgtgagcacgtaatggcctgcgcg

SEQ ID NO: 24961 - DNA, 30 bp, Artificial Sequence; identical to SEQ ID NO: 20673
  Description of Artificial Sequence: Synthetic pistachio; inner sequence

SEQ ID NO: 24962 - DNA, 30 bp, Artificial Sequence; identical to SEQ ID NO: 815
  Description of Artificial Sequence: Synthetic pistachio; inner sequence

SEQ ID NO: 24963 - DNA, 29 bp, Artificial Sequence
  Description of Artificial Sequence: Synthetic pistachio; inner sequence
cgacatgacccaggcgacgtgactgcatg

SEQ ID NO: 24964 - DNA, 30 bp, Artificial Sequence; identical to SEQ ID NO: 973
  Description of Artificial Sequence: Synthetic pistachio; inner sequence

SEQ ID NO: 24965 - DNA, 30 bp, Artificial Sequence; identical to SEQ ID NO: 20803
  Description of Artificial Sequence: Synthetic pistachio; inner sequence

SEQ ID NO: 24966 - DNA, 30 bp, Artificial Sequence; identical to SEQ ID NO: 4867
  Description of Artificial Sequence: Synthetic pistachio; inner sequence

SEQ ID NO: 24967 - DNA, 30 bp, Artificial Sequence
  Description of Artificial Sequence: Synthetic pistachio; inner sequence
cgaccatgggcaggtacgtcccaatgcgag

SEQ ID NO: 24968 - DNA, 30 bp, Artificial Sequence; identical to SEQ ID NO: 4494
  Description of Artificial Sequence: Synthetic pistachio; inner sequence

SEQ ID NO: 24969 - DNA, 30 bp, Artificial Sequence
  Description of Artificial Sequence: Synthetic pistachio; inner sequence
cgaccaagccgtacgacaagtgctgccacg

SEQ ID NO: 24970 - DNA, 30 bp, Artificial Sequence; identical to SEQ ID NO: 8946
  Description of Artificial Sequence: Synthetic pistachio; inner sequence

SEQ ID NO: 24971 - DNA, 30 bp, Artificial Sequence; identical to SEQ ID NO: 4555
  Description of Artificial Sequence: Synthetic pistachio; inner sequence

SEQ ID NO: 24972 - DNA, 30 bp, Artificial Sequence; identical to SEQ ID NO: 20295
  Description of Artificial Sequence: Synthetic pistachio; inner sequence

SEQ ID NO: 24973 - DNA, 30 bp, Artificial Sequence; identical to SEQ ID NO: 957
  Description of Artificial Sequence: Synthetic pistachio; inner sequence

SEQ ID NO: 24974 - DNA, 30 bp, Artificial Sequence; identical to SEQ ID NO: 431
  Description of Artificial Sequence: Synthetic pistachio; inner sequence

SEQ ID NO: 24975 - DNA, 30 bp, Artificial Sequence; identical to SEQ ID NO: 20312
  Description of Artificial Sequence: Synthetic pistachio; inner sequence

SEQ ID NO: 24976 - DNA, 30 bp, Artificial Sequence
  Description of Artificial Sequence: Synthetic pistachio; inner sequence
cgtgtggacgtcgcacctatcgagtcggca

SEQ ID NO: 24977 - DNA, 30 bp, Artificial Sequence; identical to SEQ ID NO: 809
  Description of Artificial Sequence: Synthetic pistachio; inner sequence

SEQ ID NO: 24978 - DNA, 30 bp, Artificial Sequence
  Description of Artificial Sequence: Synthetic pistachio; inner sequence
cgcaccgactacgcaaagtgcaagtgcgta

SEQ ID NO: 24979 - DNA, 30 bp, Artificial Sequence; identical to SEQ ID NO: 811
  Description of Artificial Sequence: Synthetic pistachio; inner sequence

SEQ ID NO: 24980 - DNA, 30 bp, Artificial Sequence; identical to SEQ ID NO: 8792
  Description of Artificial Sequence: Synthetic pistachio; inner sequence

SEQ ID NO: 24981 - DNA, 30 bp, Artificial Sequence; identical to SEQ ID NO: 837
  Description of Artificial Sequence: Synthetic pistachio; inner sequence

SEQ ID NO: 24982 - DNA, 30 bp, Artificial Sequence; identical to SEQ ID NO: 8994
  Description of Artificial Sequence: Synthetic pistachio; inner sequence

SEQ ID NO: 24983 - DNA, 30 bp, Artificial Sequence
  Description of Artificial Sequence: Synthetic pistachio; inner sequence
cgcaacggtacgccgtccatgcctcgcggc

SEQ ID NO: 24984 - DNA, 30 bp, Artificial Sequence
  Description of Artificial Sequence: Synthetic pistachio; inner sequence
gtcatgcacgaacactatcatgaggccatg

SEQ ID NO: 24985 - DNA, 30 bp, Artificial Sequence; identical to SEQ ID NO: 955
  Description of Artificial Sequence: Synthetic pistachio; inner sequence

SEQ ID NO: 24986 - DNA, 30 bp, Artificial Sequence; identical to SEQ ID NO: 880
  Description of Artificial Sequence: Synthetic pistachio; inner sequence

SEQ ID NO: 24987 - DNA, 30 bp, Artificial Sequence; identical to SEQ ID NO: 4535
  Description of Artificial Sequence: Synthetic pistachio; inner sequence

SEQ ID NO: 24988 - DNA, 30 bp, Artificial Sequence; identical to SEQ ID NO: 20617
  Description of Artificial Sequence: Synthetic pistachio; inner sequence

SEQ ID NO: 24989 - DNA, 30 bp, Artificial Sequence; identical to SEQ ID NO: 925
  Description of Artificial Sequence: Synthetic pistachio; inner sequence

SEQ ID NO: 24990 - DNA, 30 bp, Artificial Sequence; identical to SEQ ID NO: 538
  Description of Artificial Sequence: Synthetic pistachio; inner sequence

SEQ ID NO: 24991 - DNA, 30 bp, Artificial Sequence
  Description of Artificial Sequence: Synthetic pistachio; inner sequence
cgaccagcagcggtaggctgacgaggcatg

SEQ ID NO: 24992 - DNA, 30 bp, Artificial Sequence; identical to SEQ ID NO: 4743
  Description of Artificial Sequence: Synthetic pistachio; inner sequence

SEQ ID NO: 24993 - DNA, 27 bp, Artificial Sequence
  Description of Artificial Sequence: Synthetic pistachio; inner sequence
gtgcgaccgaccctatcaagtacgtca

SEQ ID NO: 24994 - DNA, 30 bp, Artificial Sequence; identical to SEQ ID NO: 4971
  Description of Artificial Sequence: Synthetic pistachio; inner sequence

SEQ ID NO: 24995 - DNA, 30 bp, Artificial Sequence; identical to SEQ ID NO: 782
  Description of Artificial Sequence: Synthetic pistachio; inner sequence

SEQ ID NO: 24996 - DNA, 30 bp, Artificial Sequence; identical to SEQ ID NO: 816
  Description of Artificial Sequence: Synthetic pistachio; inner sequence

SEQ ID NO: 24997 - DNA, 30 bp, Artificial Sequence; identical to SEQ ID NO: 711
  Description of Artificial Sequence: Synthetic pistachio; inner sequence

SEQ ID NO: 24998 - DNA, 30 bp, Artificial Sequence; identical to SEQ ID NO: 633
  Description of Artificial Sequence: Synthetic pistachio; inner sequence

SEQ ID NO: 24999 - DNA, 30 bp, Artificial Sequence; identical to SEQ ID NO: 8782
  Description of Artificial Sequence: Synthetic pistachio; inner sequence

SEQ ID NO: 25000 - DNA, 30 bp, Artificial Sequence; identical to SEQ ID NO: 12914
  Description of Artificial Sequence: Synthetic pistachio; inner sequence

SEQ ID NO: 25001 - DNA, 30 bp, Artificial Sequence; identical to SEQ ID NO: 4833
  Description of Artificial Sequence: Synthetic pistachio; inner sequence

SEQ ID NO: 25002 - DNA, 30 bp, Artificial Sequence; identical to SEQ ID NO: 4960
  Description of Artificial Sequence: Synthetic pistachio; inner sequence

SEQ ID NO: 25003 - DNA, 53 bp, Artificial Sequence; identical to SEQ ID NO: 1003
  Description of Artificial Sequence: Synthetic pistachio; 5' sequence and inner sequence

SEQ ID NO: 25004 - DNA, 53 bp, Artificial Sequence; identical to SEQ ID NO: 1004
  Description of Artificial Sequence: Synthetic pistachio; 5' sequence and inner sequence

SEQ ID NO: 25005 - DNA, 53 bp, Artificial Sequence; identical to SEQ ID NO: 1007
  Description of Artificial Sequence: Synthetic pistachio; 5' sequence and inner sequence

SEQ ID NO: 25006 - DNA, 53 bp, Artificial Sequence; identical to SEQ ID NO: 1008
  Description of Artificial Sequence: Synthetic pistachio; 5' sequence and inner sequence

SEQ ID NO: 25007 - DNA, 53 bp, Artificial Sequence; identical to SEQ ID NO: 1005
  Description of Artificial Sequence: Synthetic pistachio; 5' sequence and inner sequence

SEQ ID NO: 25008 - DNA, 53 bp, Artificial Sequence; identical to SEQ ID NO: 1009
  Description of Artificial Sequence: Synthetic pistachio; 5' sequence and inner sequence

SEQ ID NO: 25009 - DNA, 53 bp, Artificial Sequence; identical to SEQ ID NO: 1014
  Description of Artificial Sequence: Synthetic pistachio; 5' sequence and inner sequence

SEQ ID NO: 25010 - DNA, 53 bp, Artificial Sequence; identical to SEQ ID NO: 1013
  Description of Artificial Sequence: Synthetic pistachio; 5' sequence and inner sequence

SEQ ID NO: 25011 - DNA, 53 bp, Artificial Sequence; identical to SEQ ID NO: 1012
  Description of Artificial Sequence: Synthetic pistachio; 5' sequence and inner sequence

SEQ ID NO: 25012 - DNA, 53 bp, Artificial Sequence; identical to SEQ ID NO: 1006
  Description of Artificial Sequence: Synthetic pistachio; 5' sequence and inner sequence

SEQ ID NO: 25013 - DNA, 53 bp, Artificial Sequence; identical to SEQ ID NO: 1011
  Description of Artificial Sequence: Synthetic pistachio; 5' sequence and inner sequence

SEQ ID NO: 25014 - DNA, 53 bp, Artificial Sequence; identical to SEQ ID NO: 1023
  Description of Artificial Sequence: Synthetic pistachio; 5' sequence and inner sequence

SEQ ID NO: 25015 - DNA, 53 bp, Artificial Sequence; identical to SEQ ID NO: 1017
  Description of Artificial Sequence: Synthetic pistachio; 5' sequence and inner sequence

SEQ ID NO: 25016 - DNA, 53 bp, Artificial Sequence; identical to SEQ ID NO: 1010
  Description of Artificial Sequence: Synthetic pistachio; 5' sequence and inner sequence

SEQ ID NO: 25017 - DNA, 53 bp, Artificial Sequence; identical to SEQ ID NO: 1018
  Description of Artificial Sequence: Synthetic pistachio; 5' sequence and inner sequence

SEQ ID NO: 25018 - DNA, 53 bp, Artificial Sequence; identical to SEQ ID NO: 1037
  Description of Artificial Sequence: Synthetic pistachio; 5' sequence and inner sequence

SEQ ID NO: 25019 - DNA, 53 bp, Artificial Sequence; identical to SEQ ID NO: 1015
  Description of Artificial Sequence: Synthetic pistachio; 5' sequence and inner sequence

SEQ ID NO: 25020 - DNA, 53 bp, Artificial Sequence; identical to SEQ ID NO: 1046
  Description of Artificial Sequence: Synthetic pistachio; 5' sequence and inner sequence

SEQ ID NO: 25021 - DNA, 53 bp, Artificial Sequence; identical to SEQ ID NO: 1028
  Description of Artificial Sequence: Synthetic pistachio; 5' sequence and inner sequence

SEQ ID NO: 25022 - DNA, 53 bp, Artificial Sequence; identical to SEQ ID NO: 1049
  Description of Artificial Sequence: Synthetic pistachio; 5' sequence and inner sequence

SEQ ID NO: 25023 - DNA, 53 bp, Artificial Sequence; identical to SEQ ID NO: 1016
  Description of Artificial Sequence: Synthetic pistachio; 5' sequence and inner sequence

SEQ ID NO: 25024 - DNA, 53 bp, Artificial Sequence; identical to SEQ ID NO: 1022
  Description of Artificial Sequence: Synthetic pistachio; 5' sequence and inner sequence

SEQ ID NO: 25025 - DNA, 53 bp, Artificial Sequence; identical to SEQ ID NO: 1055
  Description of Artificial Sequence: Synthetic pistachio; 5' sequence and inner sequence

SEQ ID NO: 25026 - DNA, 53 bp, Artificial Sequence; identical to SEQ ID NO: 1041
  Description of Artificial Sequence: Synthetic pistachio; 5' sequence and inner sequence

SEQ ID NO: 25027 - DNA, 53 bp, Artificial Sequence; identical to SEQ ID NO: 1045
  Description of Artificial Sequence: Synthetic pistachio; 5' sequence and inner sequence

SEQ ID NO: 25028 - DNA, 53 bp, Artificial Sequence; identical to SEQ ID NO: 1033
  Description of Artificial Sequence: Synthetic pistachio; 5' sequence and inner sequence

SEQ ID NO: 25029 - DNA, 53 bp, Artificial Sequence; identical to SEQ ID NO: 1034
  Description of Artificial Sequence: Synthetic pistachio; 5' sequence and inner sequence

SEQ ID NO: 25030 - DNA, 53 bp, Artificial Sequence; identical to SEQ ID NO: 1020
  Description of Artificial Sequence: Synthetic pistachio; 5' sequence and inner sequence

SEQ ID NO: 25031 - DNA, 53 bp, Artificial Sequence; identical to SEQ ID NO: 1032
  Description of Artificial Sequence: Synthetic pistachio; 5' sequence and inner sequence

SEQ ID NO: 25032 - DNA, 53 bp, Artificial Sequence; identical to SEQ ID NO: 1054
  Description of Artificial Sequence: Synthetic pistachio; 5' sequence and inner sequence

SEQ ID NO: 25033 - DNA, 53 bp, Artificial Sequence; identical to SEQ ID NO: 1030
  Description of Artificial Sequence: Synthetic pistachio; 5' sequence and inner sequence

SEQ ID NO: 25034 - DNA, 52 bp, Artificial Sequence; identical to SEQ ID NO: 1070
  Description of Artificial Sequence: Synthetic pistachio; 5' sequence and inner sequence

SEQ ID NO: 25035 - DNA, 53 bp, Artificial Sequence; identical to SEQ ID NO: 1040
  Description of Artificial Sequence: Synthetic pistachio; 5' sequence and inner sequence

SEQ ID NO: 25036 - DNA, 53 bp, Artificial Sequence; identical to SEQ ID NO: 1039
  Description of Artificial Sequence: Synthetic pistachio; 5' sequence and inner sequence

SEQ ID NO: 25037 - DNA, 53 bp, Artificial Sequence; identical to SEQ ID NO: 1038
  Description of Artificial Sequence: Synthetic pistachio; 5' sequence and inner sequence

SEQ ID NO: 25038 - DNA, 53 bp, Artificial Sequence; identical to SEQ ID NO: 1035
  Description of Artificial Sequence: Synthetic pistachio; 5' sequence and inner sequence

SEQ ID NO: 25039 - DNA, 53 bp, Artificial Sequence; identical to SEQ ID NO: 1021
  Description of Artificial Sequence: Synthetic pistachio; 5' sequence and inner sequence

SEQ ID NO: 25040 - DNA, 53 bp, Artificial Sequence; identical to SEQ ID NO: 1048
  Description of Artificial Sequence: Synthetic pistachio; 5' sequence and inner sequence

SEQ ID NO: 25041 - DNA, 53 bp, Artificial Sequence; identical to SEQ ID NO: 1031
  Description of Artificial Sequence: Synthetic pistachio; 5' sequence and inner sequence

SEQ ID NO: 25042 - DNA, 53 bp, Artificial Sequence; identical to SEQ ID NO: 1024
  Description of Artificial Sequence: Synthetic pistachio; 5' sequence and inner sequence

SEQ ID NO: 25043 - DNA, 53 bp, Artificial Sequence; identical to SEQ ID NO: 1029
  Description of Artificial Sequence: Synthetic pistachio; 5' sequence and inner sequence

SEQ ID NO: 25044 - DNA, 53 bp, Artificial Sequence; identical to SEQ ID NO: 1025
  Description of Artificial Sequence: Synthetic pistachio; 5' sequence and inner sequence

SEQ ID NO: 25045 - DNA, 53 bp, Artificial Sequence; identical to SEQ ID NO: 1051
  Description of Artificial Sequence: Synthetic pistachio; 5' sequence and inner sequence

SEQ ID NO: 25046 - DNA, 53 bp, Artificial Sequence; identical to SEQ ID NO: 1019
  Description of Artificial Sequence: Synthetic pistachio; 5' sequence and inner sequence

SEQ ID NO: 25047 - DNA, 53 bp, Artificial Sequence; identical to SEQ ID NO: 1053
  Description of Artificial Sequence: Synthetic pistachio; 5' sequence and inner sequence

SEQ ID NO: 25048 - DNA, 53 bp, Artificial Sequence; identical to SEQ ID NO: 1059
  Description of Artificial Sequence: Synthetic pistachio; 5' sequence and inner sequence

SEQ ID NO: 25049 - DNA, 53 bp, Artificial Sequence; identical to SEQ ID NO: 1050
  Description of Artificial Sequence: Synthetic pistachio; 5' sequence and inner sequence

SEQ ID NO: 25050 - DNA, 53 bp, Artificial Sequence; identical to SEQ ID NO: 1082
  Description of Artificial Sequence: Synthetic pistachio; 5' sequence and inner sequence

SEQ ID NO: 25051 - DNA, 53 bp, Artificial Sequence; identical to SEQ ID NO: 1077
  Description of Artificial Sequence: Synthetic pistachio; 5' sequence and inner sequence

SEQ ID NO: 25052 - DNA, 53 bp, Artificial Sequence; identical to SEQ ID NO: 1067
  Description of Artificial Sequence: Synthetic pistachio; 5' sequence and inner sequence

SEQ ID NO: 25053 - DNA, 53 bp, Artificial Sequence; identical to SEQ ID NO: 1063
  Description of Artificial Sequence: Synthetic pistachio; 5' sequence and inner sequence

SEQ ID NO: 25054 - DNA, 53 bp, Artificial Sequence; identical to SEQ ID NO: 1074
  Description of Artificial Sequence: Synthetic pistachio; 5' sequence and inner sequence

SEQ ID NO: 25055 - DNA, 53 bp, Artificial Sequence; identical to SEQ ID NO: 1076
  Description of Artificial Sequence: Synthetic pistachio; 5' sequence and inner sequence

SEQ ID NO: 25056 - DNA, 53 bp, Artificial Sequence; identical to SEQ ID NO: 1057
  Description of Artificial Sequence: Synthetic pistachio; 5' sequence and inner sequence

SEQ ID NO: 25057 - DNA, 53 bp, Artificial Sequence; identical to SEQ ID NO: 1073
  Description of Artificial Sequence: Synthetic pistachio; 5' sequence and inner sequence

SEQ ID NO: 25058 - DNA, 53 bp, Artificial Sequence; identical to SEQ ID NO: 1081
  Description of Artificial Sequence: Synthetic pistachio; 5' sequence and inner sequence

SEQ ID NO: 25059 - DNA, 53 bp, Artificial Sequence; identical to SEQ ID NO: 1044
  Description of Artificial Sequence: Synthetic pistachio; 5' sequence and inner sequence

SEQ ID NO: 25060 - DNA, 53 bp, Artificial Sequence; identical to SEQ ID NO: 1042
  Description of Artificial Sequence: Synthetic pistachio; 5' sequence and inner sequence

SEQ ID NO: 25061 - DNA, 53 bp, Artificial Sequence; identical to SEQ ID NO: 1117
  Description of Artificial Sequence: Synthetic pistachio; 5' sequence and inner sequence

SEQ ID NO: 25062 - DNA, 53 bp, Artificial Sequence; identical to SEQ ID NO: 1078
  Description of Artificial Sequence: Synthetic pistachio; 5' sequence and inner sequence

SEQ ID NO: 25063 - DNA, 53 bp, Artificial Sequence; identical to SEQ ID NO: 1131
  Description of Artificial Sequence: Synthetic pistachio; 5' sequence and inner sequence

SEQ ID NO: 25064 - DNA, 53 bp, Artificial Sequence; identical to SEQ ID NO: 1026
  Description of Artificial Sequence: Synthetic pistachio; 5' sequence and inner sequence

SEQ ID NO: 25065 - DNA, 53 bp, Artificial Sequence; identical to SEQ ID NO: 1043
  Description of Artificial Sequence: Synthetic pistachio; 5' sequence and inner sequence

SEQ ID NO: 25066 - DNA, 53 bp, Artificial Sequence; identical to SEQ ID NO: 1066
  Description of Artificial Sequence: Synthetic pistachio; 5' sequence and inner sequence

SEQ ID NO: 25067 - DNA, 53 bp, Artificial Sequence; identical to SEQ ID NO: 1058
  Description of Artificial Sequence: Synthetic pistachio; 5' sequence and inner sequence

SEQ ID NO: 25068 - DNA, 53 bp, Artificial Sequence; identical to SEQ ID NO: 1080
  Description of Artificial Sequence: Synthetic pistachio; 5' sequence and inner sequence

SEQ ID NO: 25069 - DNA, 53 bp, Artificial Sequence; identical to SEQ ID NO: 1065
  Description of Artificial Sequence: Synthetic pistachio; 5' sequence and inner sequence

SEQ ID NO: 25070 - DNA, 53 bp, Artificial Sequence; identical to SEQ ID NO: 1100
  Description of Artificial Sequence: Synthetic pistachio; 5' sequence and inner sequence

SEQ ID NO: 25071 - DNA, 53 bp, Artificial Sequence; identical to SEQ ID NO: 1036
  Description of Artificial Sequence: Synthetic pistachio; 5' sequence and inner sequence

SEQ ID NO: 25072 - DNA, 53 bp, Artificial Sequence; identical to SEQ ID NO: 1064
  Description of Artificial Sequence: Synthetic pistachio; 5' sequence and inner sequence

SEQ ID NO: 25073 - DNA, 53 bp, Artificial Sequence; identical to SEQ ID NO: 1092
  Description of Artificial Sequence: Synthetic pistachio; 5' sequence and inner sequence

SEQ ID NO: 25074 - DNA, 53 bp, Artificial Sequence; identical to SEQ ID NO: 1061
  Description of Artificial Sequence: Synthetic pistachio; 5' sequence and inner sequence

SEQ ID NO: 25075 - DNA, 53 bp, Artificial Sequence; identical to SEQ ID NO: 1113
  Description of Artificial Sequence: Synthetic pistachio; 5' sequence and inner sequence

SEQ ID NO: 25076 - DNA, 53 bp, Artificial Sequence; identical to SEQ ID NO: 1111
  Description of Artificial Sequence: Synthetic pistachio; 5' sequence and inner sequence

SEQ ID NO: 25077 - DNA, 53 bp, Artificial Sequence; identical to SEQ ID NO: 1091
  Description of Artificial Sequence: Synthetic pistachio; 5' sequence and inner sequence

SEQ ID NO: 25078 - DNA, 53 bp, Artificial Sequence; identical to SEQ ID NO: 1093
  Description of Artificial Sequence: Synthetic pistachio; 5' sequence and inner sequence

SEQ ID NO: 25079 - DNA, 53 bp, Artificial Sequence; identical to SEQ ID NO: 1136
  Description of Artificial Sequence: Synthetic pistachio; 5' sequence and inner sequence

SEQ ID NO: 25080 - DNA, 53 bp, Artificial Sequence; identical to SEQ ID NO: 1186
  Description of Artificial Sequence: Synthetic pistachio; 5' sequence and inner sequence

SEQ ID NO: 25081 - DNA, 53 bp, Artificial Sequence; identical to SEQ ID NO: 1027
  Description of Artificial Sequence: Synthetic pistachio; 5' sequence and inner sequence

SEQ ID NO: 25082 - DNA, 53 bp, Artificial Sequence; identical to SEQ ID NO: 1161
  Description of Artificial Sequence: Synthetic pistachio; 5' sequence and inner sequence

SEQ ID NO: 25083 - DNA, 53 bp, Artificial Sequence; identical to SEQ ID NO: 1154
  Description of Artificial Sequence: Synthetic pistachio; 5' sequence and inner sequence

SEQ ID NO: 25084 - DNA, 53 bp, Artificial Sequence; identical to SEQ ID NO: 1168
  Description of Artificial Sequence: Synthetic pistachio; 5' sequence and inner sequence

SEQ ID NO: 25085 - DNA, 53 bp, Artificial Sequence; identical to SEQ ID NO: 1068
  Description of Artificial Sequence: Synthetic pistachio; 5' sequence and inner sequence

SEQ ID NO: 25086 - DNA, 53 bp, Artificial Sequence; identical to SEQ ID NO: 1088
  Description of Artificial Sequence: Synthetic pistachio; 5' sequence and inner sequence

SEQ ID NO: 25087 - DNA, 53 bp, Artificial Sequence; identical to SEQ ID NO: 1089
  Description of Artificial Sequence: Synthetic pistachio; 5' sequence and inner sequence

SEQ ID NO: 25088 - DNA, 53 bp, Artificial Sequence; identical to SEQ ID NO: 1047
  Description of Artificial Sequence: Synthetic pistachio; 5' sequence and inner sequence

SEQ ID NO: 25089 - DNA, 51 bp, Artificial Sequence; identical to SEQ ID NO: 1148
  Description of Artificial Sequence: Synthetic pistachio; 5' sequence and inner sequence

SEQ ID NO: 25090 - DNA, 53 bp, Artificial Sequence; identical to SEQ ID NO: 1185
  Description of Artificial Sequence: Synthetic pistachio; 5' sequence and inner sequence

SEQ ID NO: 25091 - DNA, 53 bp, Artificial Sequence; identical to SEQ ID NO: 1129
  Description of Artificial Sequence: Synthetic pistachio; 5' sequence and inner sequence

SEQ ID NO: 25092 - DNA, 53 bp, Artificial Sequence; identical to SEQ ID NO: 1183
  Description of Artificial Sequence: Synthetic pistachio; 5' sequence and inner sequence

SEQ ID NO: 25093 - DNA, 53 bp, Artificial Sequence; identical to SEQ ID NO: 1083
  Description of Artificial Sequence: Synthetic pistachio; 5' sequence and inner sequence

SEQ ID NO: 25094 - DNA, 53 bp, Artificial Sequence; identical to SEQ ID NO: 1052
  Description of Artificial Sequence: Synthetic pistachio; 5' sequence and inner sequence

SEQ ID NO: 25095 - DNA, 53 bp, Artificial Sequence; identical to SEQ ID NO: 1126
  Description of Artificial Sequence: Synthetic pistachio; 5' sequence and inner sequence

SEQ ID NO: 25096 - DNA, 53 bp, Artificial Sequence; identical to SEQ ID NO: 1094
  Description of Artificial Sequence: Synthetic pistachio; 5' sequence and inner sequence

SEQ ID NO: 25097 - DNA, 53 bp, Artificial Sequence; identical to SEQ ID NO: 1071
  Description of Artificial Sequence: Synthetic pistachio; 5' sequence and inner sequence

SEQ ID NO: 25098 - DNA, 53 bp, Artificial Sequence; identical to SEQ ID NO: 1257
  Description of Artificial Sequence: Synthetic pistachio; 5' sequence and inner sequence

SEQ ID NO: 25099 - DNA, 53 bp, Artificial Sequence; identical to SEQ ID NO: 1142
  Description of Artificial Sequence: Synthetic pistachio; 5' sequence and inner sequence

SEQ ID NO: 25100 - DNA, 53 bp, Artificial Sequence; identical to SEQ ID NO: 1095
  Description of Artificial Sequence: Synthetic pistachio; 5' sequence and inner sequence

SEQ ID NO: 25101 - DNA, 53 bp, Artificial Sequence; identical to SEQ ID NO: 1103
  Description of Artificial Sequence: Synthetic pistachio; 5' sequence and inner sequence

SEQ ID NO: 25102 - DNA, 53 bp, Artificial Sequence; identical to SEQ ID NO: 1115
  Description of Artificial Sequence: Synthetic pistachio; 5' sequence and inner sequence

SEQ ID NO: 25103 - DNA, 53 bp, Artificial Sequence; identical to SEQ ID NO: 1138
  Description of Artificial Sequence: Synthetic pistachio; 5' sequence and inner sequence

SEQ ID NO: 25104 - DNA, 53 bp, Artificial Sequence; identical to SEQ ID NO: 1262
  Description of Artificial Sequence: Synthetic pistachio; 5' sequence and inner sequence

SEQ ID NO: 25105 - DNA, 53 bp, Artificial Sequence; identical to SEQ ID NO: 1099
  Description of Artificial Sequence: Synthetic pistachio; 5' sequence and inner sequence

SEQ ID NO: 25106 - DNA, 53 bp, Artificial Sequence; identical to SEQ ID NO: 1207
  Description of Artificial Sequence: Synthetic pistachio; 5' sequence and inner sequence

SEQ ID NO: 25107 - DNA, 53 bp, Artificial Sequence; identical to SEQ ID NO: 1287
  Description of Artificial Sequence: Synthetic pistachio; 5' sequence and inner sequence

SEQ ID NO: 25108 - DNA, 53 bp, Artificial Sequence; identical to SEQ ID NO: 1056
  Description of Artificial Sequence: Synthetic pistachio; 5' sequence and inner sequence

SEQ ID NO: 25109 - DNA, 53 bp, Artificial Sequence; identical to SEQ ID NO: 1247
  Description of Artificial Sequence: Synthetic pistachio; 5' sequence and inner sequence

SEQ ID NO: 25110 - DNA, 53 bp, Artificial Sequence; identical to SEQ ID NO: 1133
  Description of Artificial Sequence: Synthetic pistachio; 5' sequence and inner sequence

SEQ ID NO: 25111 - DNA, 53 bp, Artificial Sequence; identical to SEQ ID NO: 1120
  Description of Artificial Sequence: Synthetic pistachio; 5' sequence and inner sequence

SEQ ID NO: 25112 - DNA, 53 bp, Artificial Sequence; identical to SEQ ID NO: 1096
  Description of Artificial Sequence: Synthetic pistachio; 5' sequence and inner sequence

SEQ ID NO: 25113 - DNA, 53 bp, Artificial Sequence; identical to SEQ ID NO: 1062
  Description of Artificial Sequence: Synthetic pistachio; 5' sequence and inner sequence

SEQ ID NO: 25114 - DNA, 53 bp, Artificial Sequence; identical to SEQ ID NO: 1145
  Description of Artificial Sequence: Synthetic pistachio; 5' sequence and inner sequence

SEQ ID NO: 25115 - DNA, 53 bp, Artificial Sequence; identical to SEQ ID NO: 1060
  Description of Artificial Sequence: Synthetic pistachio; 5' sequence and inner sequence

SEQ ID NO: 25116 - DNA, 53 bp, Artificial Sequence; identical to SEQ ID NO: 1075
  Description of Artificial Sequence: Synthetic pistachio; 5' sequence and inner sequence

SEQ ID NO: 25117 - DNA, 53 bp, Artificial Sequence; identical to SEQ ID NO: 1105
  Description of Artificial Sequence: Synthetic pistachio; 5' sequence and inner sequence

SEQ ID NO: 25118 - DNA, 53 bp, Artificial Sequence; identical to SEQ ID NO: 1122
  Description of Artificial Sequence: Synthetic pistachio; 5' sequence and inner sequence

SEQ ID NO: 25119 - DNA, 53 bp, Artificial Sequence; identical to SEQ ID NO: 1354
  Description of Artificial Sequence: Synthetic pistachio; 5' sequence and inner sequence

SEQ ID NO: 25120 - DNA, 53 bp, Artificial Sequence; identical to SEQ ID NO: 1112
  Description of Artificial Sequence: Synthetic pistachio; 5' sequence and inner sequence

SEQ ID NO: 25121 - DNA, 53 bp, Artificial Sequence; identical to SEQ ID NO: 1116
  Description of Artificial Sequence: Synthetic pistachio; 5' sequence and inner sequence

SEQ ID NO: 25122 - DNA, 53 bp, Artificial Sequence; identical to SEQ ID NO: 1290
  Description of Artificial Sequence: Synthetic pistachio; 5' sequence and inner sequence

SEQ ID NO: 25123 - DNA, 53 bp, Artificial Sequence; identical to SEQ ID NO: 1106
  Description of Artificial Sequence: Synthetic pistachio; 5' sequence and inner sequence

SEQ ID NO: 25124 - DNA, 53 bp, Artificial Sequence; identical to SEQ ID NO: 1196
  Description of Artificial Sequence: Synthetic pistachio; 5' sequence and inner sequence

SEQ ID NO: 25125 - DNA, 53 bp, Artificial Sequence; identical to SEQ ID NO: 1098
  Description of Artificial Sequence: Synthetic pistachio; 5' sequence and inner sequence

SEQ ID NO: 25126 - DNA, 53 bp, Artificial Sequence; identical to SEQ ID NO: 1157
  Description of Artificial Sequence: Synthetic pistachio; 5' sequence and inner sequence

SEQ ID NO: 25127 - DNA, 53 bp, Artificial Sequence; identical to SEQ ID NO: 1079
  Description of Artificial Sequence: Synthetic pistachio; 5' sequence and inner sequence

SEQ ID NO: 25128 - DNA, 53 bp, Artificial Sequence; identical to SEQ ID NO: 1171
  Description of Artificial Sequence: Synthetic pistachio; 5' sequence and inner sequence

SEQ ID NO: 25129 - DNA, 53 bp, Artificial Sequence; identical to SEQ ID NO: 1097
  Description of Artificial Sequence: Synthetic pistachio; 5' sequence and inner sequence

SEQ ID NO: 25130 - DNA, 53 bp, Artificial Sequence; identical to SEQ ID NO: 1069
  Description of Artificial Sequence: Synthetic pistachio; 5' sequence and inner sequence

SEQ ID NO: 25131 - DNA, 53 bp, Artificial Sequence; identical to SEQ ID NO: 1163
  Description of Artificial Sequence: Synthetic pistachio; 5' sequence and inner sequence

SEQ ID NO: 25132 - DNA, 53 bp, Artificial Sequence; identical to SEQ ID NO: 1125
  Description of Artificial Sequence: Synthetic pistachio; 5' sequence and inner sequence

SEQ ID NO: 25133 - DNA, 53 bp, Artificial Sequence; identical to SEQ ID NO: 1084
  Description of Artificial Sequence: Synthetic pistachio; 5' sequence and inner sequence

SEQ ID NO: 25134 - DNA, 53 bp, Artificial Sequence; identical to SEQ ID NO: 1201
  Description of Artificial Sequence: Synthetic pistachio; 5' sequence and inner sequence

SEQ ID NO: 25135 - DNA, 53 bp, Artificial Sequence; identical to SEQ ID NO: 1118
  Description of Artificial Sequence: Synthetic pistachio; 5' sequence and inner sequence

SEQ ID NO: 25136 - DNA, 53 bp, Artificial Sequence; identical to SEQ ID NO: 1107
  Description of Artificial Sequence: Synthetic pistachio; 5' sequence and inner sequence

SEQ ID NO: 25137 - DNA, 53 bp, Artificial Sequence; identical to SEQ ID NO: 1164
  Description of Artificial Sequence: Synthetic pistachio; 5' sequence and inner sequence

SEQ ID NO: 25138 - DNA, 53 bp, Artificial Sequence; identical to SEQ ID NO: 1311
  Description of Artificial Sequence: Synthetic pistachio; 5' sequence and inner sequence

SEQ ID NO: 25139 - DNA, 53 bp, Artificial Sequence; identical to SEQ ID NO: 1282
  Description of Artificial Sequence: Synthetic pistachio; 5' sequence and inner sequence

SEQ ID NO: 25140 - DNA, 54 bp, Artificial Sequence; identical to SEQ ID NO: 1221
  Description of Artificial Sequence: Synthetic pistachio; 5' sequence and inner sequence

SEQ ID NO: 25141 - DNA, 53 bp, Artificial Sequence; identical to SEQ ID NO: 1229
  Description of Artificial Sequence: Synthetic pistachio; 5' sequence and inner sequence

SEQ ID NO: 25142 - DNA, 53 bp, Artificial Sequence; identical to SEQ ID NO: 1147
  Description of Artificial Sequence: Synthetic pistachio; 5' sequence and inner sequence

SEQ ID NO: 25143 - DNA, 53 bp, Artificial Sequence; identical to SEQ ID NO: 1205
  Description of Artificial Sequence: Synthetic pistachio; 5' sequence and inner sequence

SEQ ID NO: 25144 - DNA, 53 bp, Artificial Sequence; identical to SEQ ID NO: 1208
  Description of Artificial Sequence: Synthetic pistachio; 5' sequence and inner sequence

SEQ ID NO: 25145 - DNA, 53 bp, Artificial Sequence; identical to SEQ ID NO: 1285
  Description of Artificial Sequence: Synthetic pistachio; 5' sequence and inner sequence

SEQ ID NO: 25146 - DNA, 53 bp, Artificial Sequence; identical to SEQ ID NO: 1230
  Description of Artificial Sequence: Synthetic pistachio; 5' sequence and inner sequence

SEQ ID NO: 25147 - DNA, 53 bp, Artificial Sequence; identical to SEQ ID NO: 1188
  Description of Artificial Sequence: Synthetic pistachio; 5' sequence and inner sequence

SEQ ID NO: 25148 - DNA, 53 bp, Artificial Sequence; identical to SEQ ID NO: 1158
  Description of Artificial Sequence: Synthetic pistachio; 5' sequence and inner sequence

SEQ ID NO: 25149 - DNA, 53 bp, Artificial Sequence; identical to SEQ ID NO: 1288
  Description of Artificial Sequence: Synthetic pistachio; 5' sequence and inner sequence

SEQ ID NO: 25150 - DNA, 53 bp, Artificial Sequence; identical to SEQ ID NO: 1254
  Description of Artificial Sequence: Synthetic pistachio; 5' sequence and inner sequence

SEQ ID NO: 25151 - DNA, 53 bp, Artificial Sequence; identical to SEQ ID NO: 1211
  Description of Artificial Sequence: Synthetic pistachio; 5' sequence and inner sequence

SEQ ID NO: 25152 - DNA, 53 bp, Artificial Sequence; identical to SEQ ID NO: 1159
  Description of Artificial Sequence: Synthetic pistachio; 5' sequence and inner sequence

SEQ ID NO: 25153 - DNA, 53 bp, Artificial Sequence; identical to SEQ ID NO: 1243
  Description of Artificial Sequence: Synthetic pistachio; 5' sequence and inner sequence

SEQ ID NO: 25154 - DNA, 53 bp, Artificial Sequence; identical to SEQ ID NO: 1109
  Description of Artificial Sequence: Synthetic pistachio; 5' sequence and inner sequence

SEQ ID NO: 25155 - DNA, 53 bp, Artificial Sequence; identical to SEQ ID NO: 1132
  Description of Artificial Sequence: Synthetic pistachio; 5' sequence and inner sequence

SEQ ID NO: 25156 - DNA, 53 bp, Artificial Sequence; identical to SEQ ID NO: 1144
  Description of Artificial Sequence: Synthetic pistachio; 5' sequence and inner sequence

SEQ ID NO: 25157 - DNA, 53 bp, Artificial Sequence; identical to SEQ ID NO: 1165
  Description of Artificial Sequence: Synthetic pistachio; 5' sequence and inner sequence

SEQ ID NO: 25158 - DNA, 53 bp, Artificial Sequence; identical to SEQ ID NO: 1121
  Description of Artificial Sequence: Synthetic pistachio; 5' sequence and inner sequence

SEQ ID NO: 25159 - DNA, 53 bp, Artificial Sequence; identical to SEQ ID NO: 1245
  Description of Artificial Sequence: Synthetic pistachio; 5' sequence and inner sequence

SEQ ID NO: 25160 - DNA, 53 bp, Artificial Sequence; identical to SEQ ID NO: 1155
  Description of Artificial Sequence: Synthetic pistachio; 5' sequence and inner sequence

SEQ ID NO: 25161 - DNA, 53 bp, Artificial Sequence; identical to SEQ ID NO: 1104
  Description of Artificial Sequence: Synthetic pistachio; 5' sequence and inner sequence

SEQ ID NO: 25162 - DNA, 53 bp, Artificial Sequence; identical to SEQ ID NO: 1151
  Description of Artificial Sequence: Synthetic pistachio; 5' sequence and inner sequence

SEQ ID NO: 25163 - DNA, 53 bp, Artificial Sequence; identical to SEQ ID NO: 1085
  Description of Artificial Sequence: Synthetic pistachio; 5' sequence and inner sequence

SEQ ID NO: 25164 - DNA, 53 bp, Artificial Sequence; identical to SEQ ID NO: 1198
  Description of Artificial Sequence: Synthetic pistachio; 5' sequence and inner sequence

SEQ ID NO: 25165 - DNA, 53 bp, Artificial Sequence; identical to SEQ ID NO: 1237
  Description of Artificial Sequence: Synthetic pistachio; 5' sequence and inner sequence

SEQ ID NO: 25166 - DNA, 53 bp, Artificial Sequence; identical to SEQ ID NO: 1240
  Description of Artificial Sequence: Synthetic pistachio; 5' sequence and inner sequence

SEQ ID NO: 25167 - DNA, 53 bp, Artificial Sequence; identical to SEQ ID NO: 1468
  Description of Artificial Sequence: Synthetic pistachio; 5' sequence and inner sequence

SEQ ID NO: 25168 - DNA, 53 bp, Artificial Sequence; identical to SEQ ID NO: 1901
  Description of Artificial Sequence: Synthetic pistachio; 5' sequence and inner sequence

SEQ ID NO: 25169 - DNA, 53 bp, Artificial Sequence; identical to SEQ ID NO: 1087
  Description of Artificial Sequence: Synthetic pistachio; 5' sequence and inner sequence

SEQ ID NO: 25170 - DNA, 53 bp, Artificial Sequence; identical to SEQ ID NO: 1146
  Description of Artificial Sequence: Synthetic pistachio; 5' sequence and inner sequence

SEQ ID NO: 25171 - DNA, 53 bp, Artificial Sequence; identical to SEQ ID NO: 1153
  Description of Artificial Sequence: Synthetic pistachio; 5' sequence and inner sequence

SEQ ID NO: 25172 - DNA, 53 bp, Artificial Sequence; identical to SEQ ID NO: 1179
  Description of Artificial Sequence: Synthetic pistachio; 5' sequence and inner sequence

SEQ ID NO: 25173 - DNA, 53 bp, Artificial Sequence; identical to SEQ ID NO: 1123
  Description of Artificial Sequence: Synthetic pistachio; 5' sequence and inner sequence

SEQ ID NO: 25174 - DNA, 53 bp, Artificial Sequence; identical to SEQ ID NO: 1152
  Description of Artificial Sequence: Synthetic pistachio; 5' sequence and inner sequence

SEQ ID NO: 25175 - DNA, 53 bp, Artificial Sequence; identical to SEQ ID NO: 1086
  Description of Artificial Sequence: Synthetic pistachio; 5' sequence and inner sequence

SEQ ID NO: 25176 - DNA, 53 bp, Artificial Sequence; identical to SEQ ID NO: 1108
  Description of Artificial Sequence: Synthetic pistachio; 5' sequence and inner sequence

SEQ ID NO: 25177 - DNA, 53 bp, Artificial Sequence; identical to SEQ ID NO: 1293
  Description of Artificial Sequence: Synthetic pistachio; 5' sequence and inner sequence

SEQ ID NO: 25178 - DNA, 53 bp, Artificial Sequence; identical to SEQ ID NO: 1110
  Description of Artificial Sequence: Synthetic pistachio; 5' sequence and inner sequence

SEQ ID NO: 25179 - DNA, 54 bp, Artificial Sequence; identical to SEQ ID NO: 1250
  Description of Artificial Sequence: Synthetic pistachio; 5' sequence and inner sequence

SEQ ID NO: 25180 - DNA, 53 bp, Artificial Sequence; identical to SEQ ID NO: 1270
  Description of Artificial Sequence: Synthetic pistachio; 5' sequence and inner sequence

SEQ ID NO: 25181 - DNA, 53 bp, Artificial Sequence; identical to SEQ ID NO: 1360
  Description of Artificial Sequence: Synthetic pistachio; 5' sequence and inner sequence

SEQ ID NO: 25182 - DNA, 53 bp, Artificial Sequence; identical to SEQ ID NO: 1323
  Description of Artificial Sequence: Synthetic pistachio; 5' sequence and inner sequence

SEQ ID NO: 25183 - DNA, 53 bp, Artificial Sequence; identical to SEQ ID NO: 1114
  Description of Artificial Sequence: Synthetic pistachio; 5' sequence and inner sequence

SEQ ID NO: 25184 - DNA, 53 bp, Artificial Sequence; identical to SEQ ID NO: 1214
  Description of Artificial Sequence: Synthetic pistachio; 5' sequence and inner sequence

SEQ ID NO: 25185 - DNA, 53 bp, Artificial Sequence; identical to SEQ ID NO: 1585
  Description of Artificial Sequence: Synthetic pistachio; 5' sequence and inner sequence

SEQ ID NO: 25186 - DNA, 53 bp, Artificial Sequence; identical to SEQ ID NO: 1135
  Description of Artificial Sequence: Synthetic pistachio; 5' sequence and inner sequence

SEQ ID NO: 25187 - DNA, 53 bp, Artificial Sequence; identical to SEQ ID NO: 1172
  Description of Artificial Sequence: Synthetic pistachio; 5' sequence and inner sequence

SEQ ID NO: 25188 - DNA, 53 bp, Artificial Sequence; identical to SEQ ID NO: 1189
  Description of Artificial Sequence: Synthetic pistachio; 5' sequence and inner sequence

SEQ ID NO: 25189 - DNA, 53 bp, Artificial Sequence; identical to SEQ ID NO: 1430
  Description of Artificial Sequence: Synthetic pistachio; 5' sequence and inner sequence

SEQ ID NO: 25190 - DNA, 53 bp, Artificial Sequence; identical to SEQ ID NO: 1170
  Description of Artificial Sequence: Synthetic pistachio; 5' sequence and inner sequence

SEQ ID NO: 25191 - DNA, 53 bp, Artificial Sequence; identical to SEQ ID NO: 1149
  Description of Artificial Sequence: Synthetic pistachio; 5' sequence and inner sequence

SEQ ID NO: 25192 - DNA, 53 bp, Artificial Sequence; identical to SEQ ID NO: 1174
  Description of Artificial Sequence: Synthetic pistachio; 5' sequence and inner sequence

SEQ ID NO: 25193 - DNA, 53 bp, Artificial Sequence; identical to SEQ ID NO: 1134
  Description of Artificial Sequence: Synthetic pistachio; 5' sequence and inner sequence

SEQ ID NO: 25194 - DNA, 53 bp, Artificial Sequence; identical to SEQ ID NO: 1454
  Description of Artificial Sequence: Synthetic pistachio; 5' sequence and inner sequence

SEQ ID NO: 25195 - DNA, 53 bp, Artificial Sequence; identical to SEQ ID NO: 1308
  Description of Artificial Sequence: Synthetic pistachio; 5' sequence and inner sequence

SEQ ID NO: 25196 - DNA, 53 bp, Artificial Sequence; identical to SEQ ID NO: 1406
  Description of Artificial Sequence: Synthetic pistachio; 5' sequence and inner sequence

SEQ ID NO: 25197 - DNA, 53 bp, Artificial Sequence; identical to SEQ ID NO: 1630
  Description of Artificial Sequence: Synthetic pistachio; 5' sequence and inner sequence

SEQ ID NO: 25198 - DNA, 54 bp, Artificial Sequence; identical to SEQ ID NO: 1150
  Description of Artificial Sequence: Synthetic pistachio; 5' sequence and inner sequence

SEQ ID NO: 25199 - DNA, 53 bp, Artificial Sequence; identical to SEQ ID NO: 1212
  Description of Artificial Sequence: Synthetic pistachio; 5' sequence and inner sequence

SEQ ID NO: 25200 - DNA, 53 bp, Artificial Sequence; identical to SEQ ID NO: 1204
  Description of Artificial Sequence: Synthetic pistachio; 5' sequence and inner sequence

SEQ ID NO: 25201 - DNA, 53 bp, Artificial Sequence; identical to SEQ ID NO: 1313
  Description of Artificial Sequence: Synthetic pistachio; 5' sequence and inner sequence

SEQ ID NO: 25202 - DNA, 53 bp, Artificial Sequence; identical to SEQ ID NO: 1101
  Description of Artificial Sequence: Synthetic pistachio; 5' sequence and inner sequence

SEQ ID NO: 25203 - DNA, 53 bp, Artificial Sequence; identical to SEQ ID NO: 1203
  Description of Artificial Sequence: Synthetic pistachio; 5' sequence and inner sequence

SEQ ID NO: 25204 - DNA, 53 bp, Artificial Sequence; identical to SEQ ID NO: 1194
  Description of Artificial Sequence: Synthetic pistachio; 5' sequence and inner sequence

SEQ ID NO: 25205 - DNA, 53 bp, Artificial Sequence; identical to SEQ ID NO: 1385
  Description of Artificial Sequence: Synthetic pistachio; 5' sequence and inner sequence

SEQ ID NO: 25206 - DNA, 53 bp, Artificial Sequence; identical to SEQ ID NO: 1347
  Description of Artificial Sequence: Synthetic pistachio; 5' sequence and inner sequence

SEQ ID NO: 25207 - DNA, 53 bp, Artificial Sequence; identical to SEQ ID NO: 1355
  Description of Artificial Sequence: Synthetic pistachio; 5' sequence and inner sequence

SEQ ID NO: 25208 - DNA, 53 bp, Artificial Sequence; identical to SEQ ID NO: 1130
  Description of Artificial Sequence: Synthetic pistachio; 5' sequence and inner sequence

SEQ ID NO: 25209 - DNA, 53 bp, Artificial Sequence; identical to SEQ ID NO: 1072
  Description of Artificial Sequence: Synthetic pistachio; 5' sequence and inner sequence

SEQ ID NO: 25210 - DNA, 53 bp, Artificial Sequence; identical to SEQ ID NO: 1156
  Description of Artificial Sequence: Synthetic pistachio; 5' sequence and inner sequence

SEQ ID NO: 25211 - DNA, 53 bp, Artificial Sequence; identical to SEQ ID NO: 1365
  Description of Artificial Sequence: Synthetic pistachio; 5' sequence and inner sequence

SEQ ID NO: 25212 - DNA, 53 bp, Artificial Sequence; identical to SEQ ID NO: 1369
  Description of Artificial Sequence: Synthetic pistachio; 5' sequence and inner sequence

SEQ ID NO: 25213 - DNA, 53 bp, Artificial Sequence; identical to SEQ ID NO: 1178
  Description of Artificial Sequence: Synthetic pistachio; 5' sequence and inner sequence

SEQ ID NO: 25214 - DNA, 53 bp, Artificial Sequence; identical to SEQ ID NO: 1192
  Description of Artificial Sequence: Synthetic pistachio; 5' sequence and inner sequence

SEQ ID NO: 25215 - DNA, 53 bp, Artificial Sequence; identical to SEQ ID NO: 1137
  Description of Artificial Sequence: Synthetic pistachio; 5' sequence and inner sequence

SEQ ID NO: 25216 - DNA, 53 bp, Artificial Sequence; identical to SEQ ID NO: 1371
  Description of Artificial Sequence: Synthetic pistachio; 5' sequence and inner sequence

SEQ ID NO: 25217 - DNA, 53 bp, Artificial Sequence; identical to SEQ ID NO: 1344
  Description of Artificial Sequence: Synthetic pistachio; 5' sequence and inner sequence

SEQ ID NO: 25218 - DNA, 53 bp, Artificial Sequence; identical to SEQ ID NO: 1376
  Description of Artificial Sequence: Synthetic pistachio; 5' sequence and inner sequence

SEQ ID NO: 25219 - DNA, 53 bp, Artificial Sequence; identical to SEQ ID NO: 1389
  Description of Artificial Sequence: Synthetic pistachio; 5' sequence and inner sequence

SEQ ID NO: 25220 - DNA, 53 bp, Artificial Sequence; identical to SEQ ID NO: 1310
  Description of Artificial Sequence: Synthetic pistachio; 5' sequence and inner sequence

SEQ ID NO: 25221 - DNA, 53 bp, Artificial Sequence; identical to SEQ ID NO: 1090
  Description of Artificial Sequence: Synthetic pistachio; 5' sequence and inner sequence

SEQ ID NO: 25222 - DNA, 53 bp, Artificial Sequence; identical to SEQ ID NO: 1552
  Description of Artificial Sequence: Synthetic pistachio; 5' sequence and inner sequence

SEQ ID NO: 25223 - DNA, 53 bp, Artificial Sequence; identical to SEQ ID NO: 1184
  Description of Artificial Sequence: Synthetic pistachio; 5' sequence and inner sequence

SEQ ID NO: 25224 - DNA, 53 bp, Artificial Sequence; identical to SEQ ID NO: 1141
  Description of Artificial Sequence: Synthetic pistachio; 5' sequence and inner sequence

SEQ ID NO: 25225 - DNA, 53 bp, Artificial Sequence; identical to SEQ ID NO: 1362
  Description of Artificial Sequence: Synthetic pistachio; 5' sequence and inner sequence

SEQ ID NO: 25226 - DNA, 53 bp, Artificial Sequence; identical to SEQ ID NO: 1140
  Description of Artificial Sequence: Synthetic pistachio; 5' sequence and inner sequence

SEQ ID NO: 25227 - DNA, 53 bp, Artificial Sequence; identical to SEQ ID NO: 1253
  Description of Artificial Sequence: Synthetic pistachio; 5' sequence and inner sequence

SEQ ID NO: 25228 - DNA, 53 bp, Artificial Sequence; identical to SEQ ID NO: 1437
  Description of Artificial Sequence: Synthetic pistachio; 5' sequence and inner sequence

SEQ ID NO: 25229 - DNA, 53 bp, Artificial Sequence; identical to SEQ ID NO: 1409
  Description of Artificial Sequence: Synthetic pistachio; 5' sequence and inner sequence

SEQ ID NO: 25230 - DNA, 53 bp, Artificial Sequence; identical to SEQ ID NO: 1436
  Description of Artificial Sequence: Synthetic pistachio; 5' sequence and inner sequence

SEQ ID NO: 25231 - DNA, 53 bp, Artificial Sequence; identical to SEQ ID NO: 1139
  Description of Artificial Sequence: Synthetic pistachio; 5' sequence and inner sequence

SEQ ID NO: 25232 - DNA, 53 bp, Artificial Sequence; identical to SEQ ID NO: 1209
  Description of Artificial Sequence: Synthetic pistachio; 5' sequence and inner sequence

SEQ ID NO: 25233 - DNA, 53 bp, Artificial Sequence; identical to SEQ ID NO: 1200
  Description of Artificial Sequence: Synthetic pistachio; 5' sequence and inner sequence

SEQ ID NO: 25234 - DNA, 53 bp, Artificial Sequence; identical to SEQ ID NO: 1532
  Description of Artificial Sequence: Synthetic pistachio; 5' sequence and inner sequence

SEQ ID NO: 25235 - DNA, 53 bp, Artificial Sequence; identical to SEQ ID NO: 1553
  Description of Artificial Sequence: Synthetic pistachio; 5' sequence and inner sequence

SEQ ID NO: 25236 - DNA, 53 bp, Artificial Sequence; identical to SEQ ID NO: 1527
  Description of Artificial Sequence: Synthetic pistachio; 5' sequence and inner sequence

SEQ ID NO: 25237 - DNA, 52 bp, Artificial Sequence; identical to SEQ ID NO: 1259
  Description of Artificial Sequence: Synthetic pistachio; 5' sequence and inner sequence

SEQ ID NO: 25238 - DNA, 53 bp, Artificial Sequence; identical to SEQ ID NO: 1312
  Description of Artificial Sequence: Synthetic pistachio; 5' sequence and inner sequence

SEQ ID NO: 25239 - DNA, 53 bp, Artificial Sequence; identical to SEQ ID NO: 1202
  Description of Artificial Sequence: Synthetic pistachio; 5' sequence and inner sequence

SEQ ID NO: 25240 - DNA, 53 bp, Artificial Sequence; identical to SEQ ID NO: 1102
  Description of Artificial Sequence: Synthetic pistachio; 5' sequence and inner sequence

SEQ ID NO: 25241 - DNA, 53 bp, Artificial Sequence; identical to SEQ ID NO: 1692
  Description of Artificial Sequence: Synthetic pistachio; 5' sequence and inner sequence

SEQ ID NO: 25242 - DNA, 53 bp, Artificial Sequence; identical to SEQ ID NO: 1299
  Description of Artificial Sequence: Synthetic pistachio; 5' sequence and inner sequence

SEQ ID NO: 25243 - DNA, 53 bp, Artificial Sequence; identical to SEQ ID NO: 1294
  Description of Artificial Sequence: Synthetic pistachio; 5' sequence and inner sequence

SEQ ID NO: 25244 - DNA, 53 bp, Artificial Sequence; identical to SEQ ID NO: 1284
  Description of Artificial Sequence: Synthetic pistachio; 5' sequence and inner sequence

SEQ ID NO: 25245 - DNA, 53 bp, Artificial Sequence; identical to SEQ ID NO: 1177
  Description of Artificial Sequence: Synthetic pistachio; 5' sequence and inner sequence

SEQ ID NO: 25246 - DNA, 53 bp, Artificial Sequence; identical to SEQ ID NO: 5301
  Description of Artificial Sequence: Synthetic pistachio; 5' sequence and inner sequence

SEQ ID NO: 25247 - DNA, 53 bp, Artificial Sequence; identical to SEQ ID NO: 1280
  Description of Artificial Sequence: Synthetic pistachio; 5' sequence and inner sequence

SEQ ID NO: 25248 - DNA, 53 bp, Artificial Sequence; identical to SEQ ID NO: 1696
  Description of Artificial Sequence: Synthetic pistachio; 5' sequence and inner sequence

SEQ ID NO: 25249 - DNA, 53 bp, Artificial Sequence; identical to SEQ ID NO: 1166
  Description of Artificial Sequence: Synthetic pistachio; 5' sequence and inner sequence

SEQ ID NO: 25250 - DNA, 53 bp, Artificial Sequence; identical to SEQ ID NO: 1567
  Description of Artificial Sequence: Synthetic pistachio; 5' sequence and inner sequence

SEQ ID NO: 25251 - DNA, 53 bp, Artificial Sequence; identical to SEQ ID NO: 1268
  Description of Artificial Sequence: Synthetic pistachio; 5' sequence and inner sequence

SEQ ID NO: 25252 - DNA, 53 bp, Artificial Sequence; identical to SEQ ID NO: 1660
  Description of Artificial Sequence: Synthetic pistachio; 5' sequence and inner sequence

SEQ ID NO: 25253 - DNA, 53 bp, Artificial Sequence; identical to SEQ ID NO: 1522
  Description of Artificial Sequence: Synthetic pistachio; 5' sequence and inner sequence

SEQ ID NO: 25254 - DNA, 53 bp, Artificial Sequence; identical to SEQ ID NO: 1195
  Description of Artificial Sequence: Synthetic pistachio; 5' sequence and inner sequence

SEQ ID NO: 25255 - DNA, 52 bp, Artificial Sequence; identical to SEQ ID NO: 1334
  Description of Artificial Sequence: Synthetic pistachio; 5' sequence and inner sequence

SEQ ID NO: 25256 - DNA, 53 bp, Artificial Sequence; identical to SEQ ID NO: 1127
  Description of Artificial Sequence: Synthetic pistachio; 5' sequence and inner sequence

SEQ ID NO: 25257 - DNA, 53 bp, Artificial Sequence; identical to SEQ ID NO: 1227
  Description of Artificial Sequence: Synthetic pistachio; 5' sequence and inner sequence

SEQ ID NO: 25258 - DNA, 53 bp, Artificial Sequence; identical to SEQ ID NO: 1341
  Description of Artificial Sequence: Synthetic pistachio; 5' sequence and inner sequence

SEQ ID NO: 25259 - DNA, 53 bp, Artificial Sequence; identical to SEQ ID NO: 1124
  Description of Artificial Sequence: Synthetic pistachio; 5' sequence and inner sequence

SEQ ID NO: 25260 - DNA, 53 bp, Artificial Sequence; identical to SEQ ID NO: 1222
  Description of Artificial Sequence: Synthetic pistachio; 5' sequence and inner sequence

SEQ ID NO: 25261 - DNA, 53 bp, Artificial Sequence; identical to SEQ ID NO: 1264
  Description of Artificial Sequence: Synthetic pistachio; 5' sequence and inner sequence

SEQ ID NO: 25262 - DNA, 53 bp, Artificial Sequence; identical to SEQ ID NO: 1266
  Description of Artificial Sequence: Synthetic pistachio; 5' sequence and inner sequence

SEQ ID NO: 25263 - DNA, 53 bp, Artificial Sequence; identical to SEQ ID NO: 1401
  Description of Artificial Sequence: Synthetic pistachio; 5' sequence and inner sequence

SEQ ID NO: 25264 - DNA, 53 bp, Artificial Sequence; identical to SEQ ID NO: 1232
  Description of Artificial Sequence: Synthetic pistachio; 5' sequence and inner sequence

SEQ ID NO: 25265 - DNA, 53 bp, Artificial Sequence; identical to SEQ ID NO: 1787
  Description of Artificial Sequence: Synthetic pistachio; 5' sequence and inner sequence

SEQ ID NO: 25266 - DNA, 53 bp, Artificial Sequence; identical to SEQ ID NO: 1160
  Description of Artificial Sequence: Synthetic pistachio; 5' sequence and inner sequence

SEQ ID NO: 25267 - DNA, 53 bp, Artificial Sequence; identical to SEQ ID NO: 1615
  Description of Artificial Sequence: Synthetic pistachio; 5' sequence and inner sequence

SEQ ID NO: 25268 - DNA, 53 bp, Artificial Sequence; identical to SEQ ID NO: 1900
  Description of Artificial Sequence: Synthetic pistachio; 5' sequence and inner sequence

SEQ ID NO: 25269 - DNA, 52 bp, Artificial Sequence; identical to SEQ ID NO: 1251
  Description of Artificial Sequence: Synthetic pistachio; 5' sequence and inner sequence

SEQ ID NO: 25270 - DNA, 53 bp, Artificial Sequence; identical to SEQ ID NO: 1175
  Description of Artificial Sequence: Synthetic pistachio; 5' sequence and inner sequence

SEQ ID NO: 25271 - DNA, 53 bp, Artificial Sequence; identical to SEQ ID NO: 1485
  Description of Artificial Sequence: Synthetic pistachio; 5' sequence and inner sequence

SEQ ID NO: 25272 - DNA, 53 bp, Artificial Sequence; identical to SEQ ID NO: 1513
  Description of Artificial Sequence: Synthetic pistachio; 5' sequence and inner sequence

SEQ ID NO: 25273 - DNA, 53 bp, Artificial Sequence; identical to SEQ ID NO: 1400
  Description of Artificial Sequence: Synthetic pistachio; 5' sequence and inner sequence

SEQ ID NO: 25274 - DNA, 53 bp, Artificial Sequence; identical to SEQ ID NO: 1306
  Description of Artificial Sequence: Synthetic pistachio; 5' sequence and inner sequence

SEQ ID NO: 25275 - DNA, 53 bp, Artificial Sequence; identical to SEQ ID NO: 1666
  Description of Artificial Sequence: Synthetic pistachio; 5' sequence and inner sequence

SEQ ID NO: 25276 - DNA, 53 bp, Artificial Sequence; identical to SEQ ID NO: 1249
  Description of Artificial Sequence: Synthetic pistachio; 5' sequence and inner sequence

SEQ ID NO: 25277 - DNA, 53 bp, Artificial Sequence; identical to SEQ ID NO: 1298
  Description of Artificial Sequence: Synthetic pistachio; 5' sequence and inner sequence

SEQ ID NO: 25278 - DNA, 53 bp, Artificial Sequence; identical to SEQ ID NO: 1470
  Description of Artificial Sequence: Synthetic pistachio; 5' sequence and inner sequence

SEQ ID NO: 25279 - DNA, 53 bp, Artificial Sequence; identical to SEQ ID NO: 1325
  Description of Artificial Sequence: Synthetic pistachio; 5' sequence and inner sequence

SEQ ID NO: 25280 - DNA, 53 bp, Artificial Sequence; identical to SEQ ID NO: 1269
  Description of Artificial Sequence: Synthetic pistachio; 5' sequence and inner sequence

SEQ ID NO: 25281 - DNA, 53 bp, Artificial Sequence; identical to SEQ ID NO: 1238
  Description of Artificial Sequence: Synthetic pistachio; 5' sequence and inner sequence

SEQ ID NO: 25282 - DNA, 53 bp, Artificial Sequence; identical to SEQ ID NO: 1429
  Description of Artificial Sequence: Synthetic pistachio; 5' sequence and inner sequence

SEQ ID NO: 25283 - DNA, 53 bp, Artificial Sequence; identical to SEQ ID NO: 1213
  Description of Artificial Sequence: Synthetic pistachio; 5' sequence and inner sequence

SEQ ID NO: 25284 - DNA, 53 bp, Artificial Sequence; identical to SEQ ID NO: 1206
  Description of Artificial Sequence: Synthetic pistachio; 5' sequence and inner sequence

SEQ ID NO: 25285 - DNA, 53 bp, Artificial Sequence; identical to SEQ ID NO: 1377
  Description of Artificial Sequence: Synthetic pistachio; 5' sequence and inner sequence

SEQ ID NO: 25286 - DNA, 53 bp, Artificial Sequence; identical to SEQ ID NO: 1340
  Description of Artificial Sequence: Synthetic pistachio; 5' sequence and inner sequence

SEQ ID NO: 25287 - DNA, 53 bp, Artificial Sequence; identical to SEQ ID NO: 1617
  Description of Artificial Sequence: Synthetic pistachio; 5' sequence and inner sequence

SEQ ID NO: 25288 - DNA, 53 bp, Artificial Sequence; identical to SEQ ID NO: 1541
  Description of Artificial Sequence: Synthetic pistachio; 5' sequence and inner sequence

SEQ ID NO: 25289 - DNA, 53 bp, Artificial Sequence; identical to SEQ ID NO: 1218
  Description of Artificial Sequence: Synthetic pistachio; 5' sequence and inner sequence

SEQ ID NO: 25290 - DNA, 53 bp, Artificial Sequence; identical to SEQ ID NO: 1233
  Description of Artificial Sequence: Synthetic pistachio; 5' sequence and inner sequence

SEQ ID NO: 25291 - DNA, 53 bp, Artificial Sequence; identical to SEQ ID NO: 1413
  Description of Artificial Sequence: Synthetic pistachio; 5' sequence and inner sequence

SEQ ID NO: 25292 - DNA, 53 bp, Artificial Sequence; identical to SEQ ID NO: 1187
  Description of Artificial Sequence: Synthetic pistachio; 5' sequence and inner sequence

SEQ ID NO: 25293 - DNA, 53 bp, Artificial Sequence; identical to SEQ ID NO: 1190
  Description of Artificial Sequence: Synthetic pistachio; 5' sequence and inner sequence

SEQ ID NO: 25294 - DNA, 53 bp, Artificial Sequence; identical to SEQ ID NO: 1511
  Description of Artificial Sequence: Synthetic pistachio; 5' sequence and inner sequence

SEQ ID NO: 25295 - DNA, 53 bp, Artificial Sequence; identical to SEQ ID NO: 1783
  Description of Artificial Sequence: Synthetic pistachio; 5' sequence and inner sequence

SEQ ID NO: 25296 - DNA, 53 bp, Artificial Sequence; identical to SEQ ID NO: 1419
  Description of Artificial Sequence: Synthetic pistachio; 5' sequence and inner sequence

SEQ ID NO: 25297 - DNA, 53 bp, Artificial Sequence; identical to SEQ ID NO: 1361
  Description of Artificial Sequence: Synthetic pistachio; 5' sequence and inner sequence

SEQ ID NO: 25298 - DNA, 53 bp, Artificial Sequence; identical to SEQ ID NO: 1272
  Description of Artificial Sequence: Synthetic pistachio; 5' sequence and inner sequence

SEQ ID NO: 25299 - DNA, 53 bp, Artificial Sequence; identical to SEQ ID NO: 1314
  Description of Artificial Sequence: Synthetic pistachio; 5' sequence and inner sequence

SEQ ID NO: 25300 - DNA, 53 bp, Artificial Sequence; identical to SEQ ID NO: 1446
  Description of Artificial Sequence: Synthetic pistachio; 5' sequence and inner sequence

SEQ ID NO: 25301 - DNA, 53 bp, Artificial Sequence; identical to SEQ ID NO: 1173
  Description of Artificial Sequence: Synthetic pistachio; 5' sequence and inner sequence

SEQ ID NO: 25302 - DNA, 53 bp, Artificial Sequence; identical to SEQ ID NO: 1220
  Description of Artificial Sequence: Synthetic pistachio; 5' sequence and inner sequence

SEQ ID NO: 25303 - DNA, 53 bp, Artificial Sequence; identical to SEQ ID NO: 1305
  Description of Artificial Sequence: Synthetic pistachio; 5' sequence and inner sequence

SEQ ID NO: 25304 - DNA, 53 bp, Artificial Sequence; identical to SEQ ID NO: 1673
  Description of Artificial Sequence: Synthetic pistachio; 5' sequence and inner sequence

SEQ ID NO: 25305 - DNA, 54 bp, Artificial Sequence; identical to SEQ ID NO: 1258
  Description of Artificial Sequence: Synthetic pistachio; 5' sequence and inner sequence

SEQ ID NO: 25306 - DNA, 53 bp, Artificial Sequence; identical to SEQ ID NO: 1521
  Description of Artificial Sequence: Synthetic pistachio; 5' sequence and inner sequence

SEQ ID NO: 25307 - DNA, 53 bp, Artificial Sequence; identical to SEQ ID NO: 5381
  Description of Artificial Sequence: Synthetic pistachio; 5' sequence and inner sequence

SEQ ID NO: 25308 - DNA, 53 bp, Artificial Sequence; identical to SEQ ID NO: 1645
  Description of Artificial Sequence: Synthetic pistachio; 5' sequence and inner sequence

SEQ ID NO: 25309 - DNA, 53 bp, Artificial Sequence; identical to SEQ ID NO: 1336
  Description of Artificial Sequence: Synthetic pistachio; 5' sequence and inner sequence

SEQ ID NO: 25310 - DNA, 53 bp, Artificial Sequence; identical to SEQ ID NO: 5229
  Description of Artificial Sequence: Synthetic pistachio; 5' sequence and inner sequence

SEQ ID NO: 25311 - DNA, 53 bp, Artificial Sequence; identical to SEQ ID NO: 1321
  Description of Artificial Sequence: Synthetic pistachio; 5' sequence and inner sequence

SEQ ID NO: 25312 - DNA, 53 bp, Artificial Sequence; identical to SEQ ID NO: 1244
  Description of Artificial Sequence: Synthetic pistachio; 5' sequence and inner sequence

SEQ ID NO: 25313 - DNA, 53 bp, Artificial Sequence; identical to SEQ ID NO: 1374
  Description of Artificial Sequence: Synthetic pistachio; 5' sequence and inner sequence

SEQ ID NO: 25314 - DNA, 53 bp, Artificial Sequence; identical to SEQ ID NO: 1801
  Description of Artificial Sequence: Synthetic pistachio; 5' sequence and inner sequence

SEQ ID NO: 25315 - DNA, 53 bp, Artificial Sequence; identical to SEQ ID NO: 1653
  Description of Artificial Sequence: Synthetic pistachio; 5' sequence and inner sequence

SEQ ID NO: 25316 - DNA, 53 bp, Artificial Sequence; identical to SEQ ID NO: 1182
  Description of Artificial Sequence: Synthetic pistachio; 5' sequence and inner sequence

SEQ ID NO: 25317 - DNA, 53 bp, Artificial Sequence; identical to SEQ ID NO: 1563
  Description of Artificial Sequence: Synthetic pistachio; 5' sequence and inner sequence

SEQ ID NO: 25318 - DNA, 53 bp, Artificial Sequence; identical to SEQ ID NO: 1638
  Description of Artificial Sequence: Synthetic pistachio; 5' sequence and inner sequence

SEQ ID NO: 25319 - DNA, 53 bp, Artificial Sequence; identical to SEQ ID NO: 1236
  Description of Artificial Sequence: Synthetic pistachio; 5' sequence and inner sequence

SEQ ID NO: 25320 - DNA, 53 bp, Artificial Sequence; identical to SEQ ID NO: 1414
  Description of Artificial Sequence: Synthetic pistachio; 5' sequence and inner sequence

SEQ ID NO: 25321 - DNA, 53 bp, Artificial Sequence; identical to SEQ ID NO: 1234
  Description of Artificial Sequence: Synthetic pistachio; 5' sequence and inner sequence

SEQ ID NO: 25322 - DNA, 53 bp, Artificial Sequence; identical to SEQ ID NO: 1560
  Description of Artificial Sequence: Synthetic pistachio; 5' sequence and inner sequence

SEQ ID NO: 25323 - DNA, 53 bp, Artificial Sequence; identical to SEQ ID NO: 1301
  Description of Artificial Sequence: Synthetic pistachio; 5' sequence and inner sequence

SEQ ID NO: 25324 - DNA, 53 bp, Artificial Sequence; identical to SEQ ID NO: 1283
  Description of Artificial Sequence: Synthetic pistachio; 5' sequence and inner sequence

SEQ ID NO: 25325 - DNA, 53 bp, Artificial Sequence; identical to SEQ ID NO: 1529
  Description of Artificial Sequence: Synthetic pistachio; 5' sequence and inner sequence

SEQ ID NO: 25326 - DNA, 53 bp, Artificial Sequence; identical to SEQ ID NO: 1176
  Description of Artificial Sequence: Synthetic pistachio; 5' sequence and inner sequence

SEQ ID NO: 25327 - DNA, 53 bp, Artificial Sequence; identical to SEQ ID NO: 1390
  Description of Artificial Sequence: Synthetic pistachio; 5' sequence and inner sequence

SEQ ID NO: 25328 - DNA, 53 bp, Artificial Sequence; identical to SEQ ID NO: 1215
  Description of Artificial Sequence: Synthetic pistachio; 5' sequence and inner sequence

SEQ ID NO: 25329 - DNA, 53 bp, Artificial Sequence; identical to SEQ ID NO: 1622
  Description of Artificial Sequence: Synthetic pistachio; 5' sequence and inner sequence

SEQ ID NO: 25330 - DNA, 53 bp, Artificial Sequence; identical to SEQ ID NO: 1316
  Description of Artificial Sequence: Synthetic pistachio; 5' sequence and inner sequence

SEQ ID NO: 25331 - DNA, 53 bp, Artificial Sequence; identical to SEQ ID NO: 1274
  Description of Artificial Sequence: Synthetic pistachio; 5' sequence and inner sequence

SEQ ID NO: 25332 - DNA, 53 bp, Artificial Sequence; identical to SEQ ID NO: 1920
  Description of Artificial Sequence: Synthetic pistachio; 5' sequence and inner sequence

SEQ ID NO: 25333 - DNA, 54 bp, Artificial Sequence; identical to SEQ ID NO: 5434
  Description of Artificial Sequence: Synthetic pistachio; 5' sequence and inner sequence

SEQ ID NO: 25334 - DNA, 53 bp, Artificial Sequence; identical to SEQ ID NO: 1572
  Description of Artificial Sequence: Synthetic pistachio; 5' sequence and inner sequence

SEQ ID NO: 25335 - DNA, 53 bp, Artificial Sequence; identical to SEQ ID NO: 1352
  Description of Artificial Sequence: Synthetic pistachio; 5' sequence and inner sequence

SEQ ID NO: 25336 - DNA, 53 bp, Artificial Sequence; identical to SEQ ID NO: 1358
  Description of Artificial Sequence: Synthetic pistachio; 5' sequence and inner sequence

SEQ ID NO: 25337 - DNA, 53 bp, Artificial Sequence; identical to SEQ ID NO: 1559
  Description of Artificial Sequence: Synthetic pistachio; 5' sequence and inner sequence

SEQ ID NO: 25338 - DNA, 53 bp, Artificial Sequence; identical to SEQ ID NO: 1197
  Description of Artificial Sequence: Synthetic pistachio; 5' sequence and inner sequence

SEQ ID NO: 25339 - DNA, 53 bp, Artificial Sequence; identical to SEQ ID NO: 1343
  Description of Artificial Sequence: Synthetic pistachio; 5' sequence and inner sequence

SEQ ID NO: 25340 - DNA, 53 bp, Artificial Sequence; identical to SEQ ID NO: 1267
  Description of Artificial Sequence: Synthetic pistachio; 5' sequence and inner sequence

SEQ ID NO: 25341 - DNA, 53 bp, Artificial Sequence; identical to SEQ ID NO: 1231
  Description of Artificial Sequence: Synthetic pistachio; 5' sequence and inner sequence

SEQ ID NO: 25342 - DNA, 53 bp, Artificial Sequence; identical to SEQ ID NO: 1297
  Description of Artificial Sequence: Synthetic pistachio; 5' sequence and inner sequence

SEQ ID NO: 25343 - DNA, 53 bp, Artificial Sequence; identical to SEQ ID NO: 1597
  Description of Artificial Sequence: Synthetic pistachio; 5' sequence and inner sequence

SEQ ID NO: 25344 - DNA, 53 bp, Artificial Sequence; identical to SEQ ID NO: 1877
  Description of Artificial Sequence: Synthetic pistachio; 5' sequence and inner sequence

SEQ ID NO: 25345 - DNA, 53 bp, Artificial Sequence; identical to SEQ ID NO: 1379
  Description of Artificial Sequence: Synthetic pistachio; 5' sequence and inner sequence

SEQ ID NO: 25346 - DNA, 53 bp, Artificial Sequence; identical to SEQ ID NO: 1242
  Description of Artificial Sequence: Synthetic pistachio; 5' sequence and inner sequence

SEQ ID NO: 25347 - DNA, 53 bp, Artificial Sequence; identical to SEQ ID NO: 1620
  Description of Artificial Sequence: Synthetic pistachio; 5' sequence and inner sequence

SEQ ID NO: 25348 - DNA, 53 bp, Artificial Sequence; identical to SEQ ID NO: 1728
  Description of Artificial Sequence: Synthetic pistachio; 5' sequence and inner sequence

SEQ ID NO: 25349 - DNA, 53 bp, Artificial Sequence; identical to SEQ ID NO: 1640
  Description of Artificial Sequence: Synthetic pistachio; 5' sequence and inner sequence

SEQ ID NO: 25350 - DNA, 53 bp, Artificial Sequence; identical to SEQ ID NO: 1528
  Description of Artificial Sequence: Synthetic pistachio; 5' sequence and inner sequence

SEQ ID NO: 25351 - DNA, 56 bp, Artificial Sequence; identical to SEQ ID NO: 1864
  Description of Artificial Sequence: Synthetic pistachio; 5' sequence and inner sequence

SEQ ID NO: 25352 - DNA, 53 bp, Artificial Sequence; identical to SEQ ID NO: 1320
  Description of Artificial Sequence: Synthetic pistachio; 5' sequence and inner sequence

SEQ ID NO: 25353 - DNA, 53 bp, Artificial Sequence; identical to SEQ ID NO: 1271
  Description of Artificial Sequence: Synthetic pistachio; 5' sequence and inner sequence

SEQ ID NO: 25354 - DNA, 53 bp, Artificial Sequence; identical to SEQ ID NO: 1481
  Description of Artificial Sequence: Synthetic pistachio; 5' sequence and inner sequence

SEQ ID NO: 25355 - DNA, 53 bp, Artificial Sequence; identical to SEQ ID NO: 1520
  Description of Artificial Sequence: Synthetic pistachio; 5' sequence and inner sequence

SEQ ID NO: 25356 - DNA, 53 bp, Artificial Sequence; identical to SEQ ID NO: 1226
  Description of Artificial Sequence: Synthetic pistachio; 5' sequence and inner sequence

SEQ ID NO: 25357 - DNA, 53 bp, Artificial Sequence; identical to SEQ ID NO: 1386
  Description of Artificial Sequence: Synthetic pistachio; 5' sequence and inner sequence

SEQ ID NO: 25358 - DNA, 53 bp, Artificial Sequence; identical to SEQ ID NO: 1224
  Description of Artificial Sequence: Synthetic pistachio; 5' sequence and inner sequence

SEQ ID NO: 25359 - DNA, 53 bp, Artificial Sequence; identical to SEQ ID NO: 13892
  Description of Artificial Sequence: Synthetic pistachio; 5' sequence and inner sequence

SEQ ID NO: 25360 - DNA, 53 bp, Artificial Sequence; identical to SEQ ID NO: 1417
  Description of Artificial Sequence: Synthetic pistachio; 5' sequence and inner sequence

SEQ ID NO: 25361 - DNA, 53 bp, Artificial Sequence; identical to SEQ ID NO: 1448
  Description of Artificial Sequence: Synthetic pistachio; 5' sequence and inner sequence

SEQ ID NO: 25362 - DNA, 53 bp, Artificial Sequence; identical to SEQ ID NO: 1524
  Description of Artificial Sequence: Synthetic pistachio; 5' sequence and inner sequence

SEQ ID NO: 25363 - DNA, 53 bp, Artificial Sequence; identical to SEQ ID NO: 1647
  Description of Artificial Sequence: Synthetic pistachio; 5' sequence and inner sequence

SEQ ID NO: 25364 - DNA, 53 bp, Artificial Sequence; identical to SEQ ID NO: 1789
  Description of Artificial Sequence: Synthetic pistachio; 5' sequence and inner sequence

SEQ ID NO: 25365 - DNA, 53 bp, Artificial Sequence; identical to SEQ ID NO: 1223
  Description of Artificial Sequence: Synthetic pistachio; 5' sequence and inner sequence

SEQ ID NO: 25366 - DNA, 53 bp, Artificial Sequence; identical to SEQ ID NO: 1916
  Description of Artificial Sequence: Synthetic pistachio; 5' sequence and inner sequence

SEQ ID NO: 25367 - DNA, 53 bp, Artificial Sequence; identical to SEQ ID NO: 1119
  Description of Artificial Sequence: Synthetic pistachio; 5' sequence and inner sequence

SEQ ID NO: 25368 - DNA, 53 bp, Artificial Sequence; identical to SEQ ID NO: 1210
  Description of Artificial Sequence: Synthetic pistachio; 5' sequence and inner sequence

SEQ ID NO: 25369 - DNA, 53 bp, Artificial Sequence; identical to SEQ ID NO: 1315
  Description of Artificial Sequence: Synthetic pistachio; 5' sequence and inner sequence

SEQ ID NO: 25370 - DNA, 53 bp, Artificial Sequence; identical to SEQ ID NO: 1496
  Description of Artificial Sequence: Synthetic pistachio; 5' sequence and inner sequence

SEQ ID NO: 25371 - DNA, 53 bp, Artificial Sequence; identical to SEQ ID NO: 1246
  Description of Artificial Sequence: Synthetic pistachio; 5' sequence and inner sequence

SEQ ID NO: 25372 - DNA, 53 bp, Artificial Sequence; identical to SEQ ID NO: 1329
  Description of Artificial Sequence: Synthetic pistachio; 5' sequence and inner sequence

SEQ ID NO: 25373 - DNA, 53 bp, Artificial Sequence; identical to SEQ ID NO: 1319
  Description of Artificial Sequence: Synthetic pistachio; 5' sequence and inner sequence

SEQ ID NO: 25374 - DNA, 53 bp, Artificial Sequence; identical to SEQ ID NO: 1359
  Description of Artificial Sequence: Synthetic pistachio; 5' sequence and inner sequence

SEQ ID NO: 25375 - DNA, 53 bp, Artificial Sequence; identical to SEQ ID NO: 1263
  Description of Artificial Sequence: Synthetic pistachio; 5' sequence and inner sequence

SEQ ID NO: 25376 - DNA, 53 bp, Artificial Sequence; identical to SEQ ID NO: 1128
  Description of Artificial Sequence: Synthetic pistachio; 5' sequence and inner sequence

SEQ ID NO: 25377 - DNA, 53 bp, Artificial Sequence; identical to SEQ ID NO: 1534
  Description of Artificial Sequence: Synthetic pistachio; 5' sequence and inner sequence

SEQ ID NO: 25378 - DNA, 53 bp, Artificial Sequence; identical to SEQ ID NO: 1350
  Description of Artificial Sequence: Synthetic pistachio; 5' sequence and inner sequence

SEQ ID NO: 25379 - DNA, 53 bp, Artificial Sequence; identical to SEQ ID NO: 1167
  Description of Artificial Sequence: Synthetic pistachio; 5' sequence and inner sequence

SEQ ID NO: 25380 - DNA, 53 bp, Artificial Sequence; identical to SEQ ID NO: 1574
  Description of Artificial Sequence: Synthetic pistachio; 5' sequence and inner sequence

SEQ ID NO: 25381 - DNA, 53 bp, Artificial Sequence; identical to SEQ ID NO: 1478
  Description of Artificial Sequence: Synthetic pistachio; 5' sequence and inner sequence

SEQ ID NO: 25382 - DNA, 53 bp, Artificial Sequence; identical to SEQ ID NO: 1500
  Description of Artificial Sequence: Synthetic pistachio; 5' sequence and inner sequence

SEQ ID NO: 25383 - DNA, 53 bp, Artificial Sequence; identical to SEQ ID NO: 1530
  Description of Artificial Sequence: Synthetic pistachio; 5' sequence and inner sequence

SEQ ID NO: 25384 - DNA, 53 bp, Artificial Sequence; identical to SEQ ID NO: 1432
  Description of Artificial Sequence: Synthetic pistachio; 5' sequence and inner sequence

SEQ ID NO: 25385 - DNA, 53 bp, Artificial Sequence; identical to SEQ ID NO: 1373
  Description of Artificial Sequence: Synthetic pistachio; 5' sequence and inner sequence

SEQ ID NO: 25386 - DNA, 53 bp, Artificial Sequence; identical to SEQ ID NO: 1654
  Description of Artificial Sequence: Synthetic pistachio; 5' sequence and inner sequence

SEQ ID NO: 25387 - DNA, 53 bp, Artificial Sequence; identical to SEQ ID NO: 1504
  Description of Artificial Sequence: Synthetic pistachio; 5' sequence and inner sequence

SEQ ID NO: 25388 - DNA, 53 bp, Artificial Sequence; identical to SEQ ID NO: 1757
  Description of Artificial Sequence: Synthetic pistachio; 5' sequence and inner sequence

SEQ ID NO: 25389 - DNA, 53 bp, Artificial Sequence; identical to SEQ ID NO: 1339
  Description of Artificial Sequence: Synthetic pistachio; 5' sequence and inner sequence

SEQ ID NO: 25390 - DNA, 53 bp, Artificial Sequence; identical to SEQ ID NO: 1606
  Description of Artificial Sequence: Synthetic pistachio; 5' sequence and inner sequence

SEQ ID NO: 25391 - DNA, 53 bp, Artificial Sequence; identical to SEQ ID NO: 1395
  Description of Artificial Sequence: Synthetic pistachio; 5' sequence and inner sequence

SEQ ID NO: 25392 - DNA, 53 bp, Artificial Sequence; identical to SEQ ID NO: 5543
  Description of Artificial Sequence: Synthetic pistachio; 5' sequence and inner sequence

SEQ ID NO: 25393 - DNA, 53 bp, Artificial Sequence; identical to SEQ ID NO: 1248
  Description of Artificial Sequence: Synthetic pistachio; 5' sequence and inner sequence

SEQ ID NO: 25394 - DNA, 53 bp, Artificial Sequence; identical to SEQ ID NO: 1275
  Description of Artificial Sequence: Synthetic pistachio; 5' sequence and inner sequence

SEQ ID NO: 25395 - DNA, 52 bp, Artificial Sequence; identical to SEQ ID NO: 1193
  Description of Artificial Sequence: Synthetic pistachio; 5' sequence and inner sequence

SEQ ID NO: 25396 - DNA, 53 bp, Artificial Sequence; identical to SEQ ID NO: 1928
  Description of Artificial Sequence: Synthetic pistachio; 5' sequence and inner sequence

SEQ ID NO: 25397 - DNA, 53 bp, Artificial Sequence; identical to SEQ ID NO: 1370
  Description of Artificial Sequence: Synthetic pistachio; 5' sequence and inner sequence

SEQ ID NO: 25398 - DNA, 53 bp, Artificial Sequence; identical to SEQ ID NO: 1181
  Description of Artificial Sequence: Synthetic pistachio; 5' sequence and inner sequence

SEQ ID NO: 25399 - DNA, 53 bp, Artificial Sequence; identical to SEQ ID NO: 1919
  Description of Artificial Sequence: Synthetic pistachio; 5' sequence and inner sequence

SEQ ID NO: 25400 - DNA, 53 bp, Artificial Sequence; identical to SEQ ID NO: 1777
  Description of Artificial Sequence: Synthetic pistachio; 5' sequence and inner sequence

SEQ ID NO: 25401 - DNA, 53 bp, Artificial Sequence; identical to SEQ ID NO: 1405
  Description of Artificial Sequence: Synthetic pistachio; 5' sequence and inner sequence

SEQ ID NO: 25402 - DNA, 53 bp, Artificial Sequence; identical to SEQ ID NO: 1476
  Description of Artificial Sequence: Synthetic pistachio; 5' sequence and inner sequence

SEQ ID NO: 25403 - DNA, 53 bp, Artificial Sequence; identical to SEQ ID NO: 1410
  Description of Artificial Sequence: Synthetic pistachio; 5' sequence and inner sequence

SEQ ID NO: 25404 - DNA, 53 bp, Artificial Sequence; identical to SEQ ID NO: 1399
  Description of Artificial Sequence: Synthetic pistachio; 5' sequence and inner sequence

SEQ ID NO: 25405 - DNA, 53 bp, Artificial Sequence; identical to SEQ ID NO: 1628
  Description of Artificial Sequence: Synthetic pistachio; 5' sequence and inner sequence

SEQ ID NO: 25406 - DNA, 53 bp, Artificial Sequence; identical to SEQ ID NO: 9564
  Description of Artificial Sequence: Synthetic pistachio; 5' sequence and inner sequence

SEQ ID NO: 25407 - DNA, 53 bp, Artificial Sequence; identical to SEQ ID NO: 1764
  Description of Artificial Sequence: Synthetic pistachio; 5' sequence and inner sequence

SEQ ID NO: 25408 - DNA, 53 bp, Artificial Sequence; identical to SEQ ID NO: 1487
  Description of Artificial Sequence: Synthetic pistachio; 5' sequence and inner sequence

SEQ ID NO: 25409 - DNA, 53 bp, Artificial Sequence; identical to SEQ ID NO: 1517
  Description of Artificial Sequence: Synthetic pistachio; 5' sequence and inner sequence

SEQ ID NO: 25410 - DNA, 53 bp, Artificial Sequence; identical to SEQ ID NO: 1391
  Description of Artificial Sequence: Synthetic pistachio; 5' sequence and inner sequence

SEQ ID NO: 25411 - DNA, 53 bp, Artificial Sequence; identical to SEQ ID NO: 21615
  Description of Artificial Sequence: Synthetic pistachio; 5' sequence and inner sequence

SEQ ID NO: 25412 - DNA, 53 bp, Artificial Sequence; identical to SEQ ID NO: 1387
  Description of Artificial Sequence: Synthetic pistachio; 5' sequence and inner sequence

SEQ ID NO: 25413 - DNA, 53 bp, Artificial Sequence; identical to SEQ ID NO: 1143
  Description of Artificial Sequence: Synthetic pistachio; 5' sequence and inner sequence

SEQ ID NO: 25414 - DNA, 53 bp, Artificial Sequence; identical to SEQ ID NO: 1255
  Description of Artificial Sequence: Synthetic pistachio; 5' sequence and inner sequence

SEQ ID NO: 25415 - DNA, 53 bp, Artificial Sequence; identical to SEQ ID NO: 1228
  Description of Artificial Sequence: Synthetic pistachio; 5' sequence and inner sequence

SEQ ID NO: 25416 - DNA, 53 bp, Artificial Sequence; identical to SEQ ID NO: 1219
  Description of Artificial Sequence: Synthetic pistachio; 5' sequence and inner sequence

SEQ ID NO: 25417 - DNA, 53 bp, Artificial Sequence; identical to SEQ ID NO: 5503
  Description of Artificial Sequence: Synthetic pistachio; 5' sequence and inner sequence

SEQ ID NO: 25418 - DNA, 53 bp, Artificial Sequence; identical to SEQ ID NO: 1438
  Description of Artificial Sequence: Synthetic pistachio; 5' sequence and inner sequence

SEQ ID NO: 25419 - DNA, 53 bp, Artificial Sequence; identical to SEQ ID NO: 1891
  Description of Artificial Sequence: Synthetic pistachio; 5' sequence and inner sequence

SEQ ID NO: 25420 - DNA, 53 bp, Artificial Sequence; identical to SEQ ID NO: 1349
  Description of Artificial Sequence: Synthetic pistachio; 5' sequence and inner sequence

SEQ ID NO: 25421 - DNA, 53 bp, Artificial Sequence; identical to SEQ ID NO: 1260
  Description of Artificial Sequence: Synthetic pistachio; 5' sequence and inner sequence

SEQ ID NO: 25422 - DNA, 53 bp, Artificial Sequence; identical to SEQ ID NO: 1338
  Description of Artificial Sequence: Synthetic pistachio; 5' sequence and inner sequence

SEQ ID NO: 25423 - DNA, 53 bp, Artificial Sequence; identical to SEQ ID NO: 1475
  Description of Artificial Sequence: Synthetic pistachio; 5' sequence and inner sequence

SEQ ID NO: 25424 - DNA, 53 bp, Artificial Sequence; identical to SEQ ID NO: 1332
  Description of Artificial Sequence: Synthetic pistachio; 5' sequence and inner sequence

SEQ ID NO: 25425 - DNA, 53 bp, Artificial Sequence; identical to SEQ ID NO: 1418
  Description of Artificial Sequence: Synthetic pistachio; 5' sequence and inner sequence

SEQ ID NO: 25426 - DNA, 53 bp, Artificial Sequence; identical to SEQ ID NO: 1545
  Description of Artificial Sequence: Synthetic pistachio; 5' sequence and inner sequence

SEQ ID NO: 25427 - DNA, 54 bp, Artificial Sequence; identical to SEQ ID NO: 5245
  Description of Artificial Sequence: Synthetic pistachio; 5' sequence and inner sequence

SEQ ID NO: 25428 - DNA, 53 bp, Artificial Sequence; identical to SEQ ID NO: 1884
  Description of Artificial Sequence: Synthetic pistachio; 5' sequence and inner sequence

SEQ ID NO: 25429 - DNA, 53 bp, Artificial Sequence; identical to SEQ ID NO: 1685
  Description of Artificial Sequence: Synthetic pistachio; 5' sequence and inner sequence

SEQ ID NO: 25430 - DNA, 53 bp, Artificial Sequence; identical to SEQ ID NO: 1637
  Description of Artificial Sequence: Synthetic pistachio; 5' sequence and inner sequence

SEQ ID NO: 25431 - DNA, 53 bp, Artificial Sequence; identical to SEQ ID NO: 9712
  Description of Artificial Sequence: Synthetic pistachio; 5' sequence and inner sequence

SEQ ID NO: 25432 - DNA, 53 bp, Artificial Sequence; identical to SEQ ID NO: 1291
  Description of Artificial Sequence: Synthetic pistachio; 5' sequence and inner sequence

SEQ ID NO: 25433 - DNA, 53 bp, Artificial Sequence; identical to SEQ ID NO: 1392
  Description of Artificial Sequence: Synthetic pistachio; 5' sequence and inner sequence

SEQ ID NO: 25434 - DNA, 53 bp, Artificial Sequence; identical to SEQ ID NO: 1398
  Description of Artificial Sequence: Synthetic pistachio; 5' sequence and inner sequence

SEQ ID NO: 25435 - DNA, 53 bp, Artificial Sequence; identical to SEQ ID NO: 5451
  Description of Artificial Sequence: Synthetic pistachio; 5' sequence and inner sequence

SEQ ID NO: 25436 - DNA, 53 bp, Artificial Sequence; identical to SEQ ID NO: 1364
  Description of Artificial Sequence: Synthetic pistachio; 5' sequence and inner sequence

SEQ ID NO: 25437 - DNA, 53 bp, Artificial Sequence; identical to SEQ ID NO: 1621
  Description of Artificial Sequence: Synthetic pistachio; 5' sequence and inner sequence

SEQ ID NO: 25438 - DNA, 53 bp, Artificial Sequence; identical to SEQ ID NO: 1289
  Description of Artificial Sequence: Synthetic pistachio; 5' sequence and inner sequence

SEQ ID NO: 25439 - DNA, 53 bp, Artificial Sequence; identical to SEQ ID NO: 1330
  Description of Artificial Sequence: Synthetic pistachio; 5' sequence and inner sequence

SEQ ID NO: 25440 - DNA, 53 bp, Artificial Sequence; identical to SEQ ID NO: 1403
  Description of Artificial Sequence: Synthetic pistachio; 5' sequence and inner sequence

SEQ ID NO: 25441 - DNA, 53 bp, Artificial Sequence; identical to SEQ ID NO: 1724
  Description of Artificial Sequence: Synthetic pistachio; 5' sequence and inner sequence

SEQ ID NO: 25442 - DNA, 53 bp, Artificial Sequence; identical to SEQ ID NO: 5238
  Description of Artificial Sequence: Synthetic pistachio; 5' sequence and inner sequence

SEQ ID NO: 25443 - DNA, 53 bp, Artificial Sequence; identical to SEQ ID NO: 1296
  Description of Artificial Sequence: Synthetic pistachio; 5' sequence and inner sequence

SEQ ID NO: 25444 - DNA, 53 bp, Artificial Sequence; identical to SEQ ID NO: 1676
  Description of Artificial Sequence: Synthetic pistachio; 5' sequence and inner sequence

SEQ ID NO: 25445 - DNA, 53 bp, Artificial Sequence; identical to SEQ ID NO: 1800
  Description of Artificial Sequence: Synthetic pistachio; 5' sequence and inner sequence

SEQ ID NO: 25446 - DNA, 53 bp, Artificial Sequence; identical to SEQ ID NO: 1375
  Description of Artificial Sequence: Synthetic pistachio; 5' sequence and inner sequence

SEQ ID NO: 25447 - DNA, 48 bp, Artificial Sequence; identical to SEQ ID NO: 21136
  Description of Artificial Sequence: Synthetic pistachio; 5' sequence and inner sequence

SEQ ID NO: 25448 - DNA, 53 bp, Artificial Sequence; identical to SEQ ID NO: 1930
  Description of Artificial Sequence: Synthetic pistachio; 5' sequence and inner sequence

SEQ ID NO: 25449 - DNA, 53 bp, Artificial Sequence; identical to SEQ ID NO: 1331
  Description of Artificial Sequence: Synthetic pistachio; 5' sequence and inner sequence

SEQ ID NO: 25450 - DNA, 53 bp, Artificial Sequence; identical to SEQ ID NO: 1217
  Description of Artificial Sequence: Synthetic pistachio; 5' sequence and inner sequence

SEQ ID NO: 25451 - DNA, 53 bp, Artificial Sequence; identical to SEQ ID NO: 1523
  Description of Artificial Sequence: Synthetic pistachio; 5' sequence and inner sequence

SEQ ID NO: 25452 - DNA, 53 bp, Artificial Sequence; identical to SEQ ID NO: 1180
  Description of Artificial Sequence: Synthetic pistachio; 5' sequence and inner sequence

SEQ ID NO: 25453 - DNA, 53 bp, Artificial Sequence; identical to SEQ ID NO: 1239
  Description of Artificial Sequence: Synthetic pistachio; 5' sequence and inner sequence

SEQ ID NO: 25454 - DNA, 53 bp, Artificial Sequence; identical to SEQ ID NO: 5658
  Description of Artificial Sequence: Synthetic pistachio; 5' sequence and inner sequence

SEQ ID NO: 25455 - DNA, 53 bp, Artificial Sequence; identical to SEQ ID NO: 21133
  Description of Artificial Sequence: Synthetic pistachio; 5' sequence and inner sequence

SEQ ID NO: 25456 - DNA, 53 bp, Artificial Sequence; identical to SEQ ID NO: 1394
  Description of Artificial Sequence: Synthetic pistachio; 5' sequence and inner sequence

SEQ ID NO: 25457 - DNA, 53 bp, Artificial Sequence; identical to SEQ ID NO: 5234
  Description of Artificial Sequence: Synthetic pistachio; 5' sequence and inner sequence

SEQ ID NO: 25458 - DNA, 53 bp, Artificial Sequence; identical to SEQ ID NO: 1557
  Description of Artificial Sequence: Synthetic pistachio; 5' sequence and inner sequence

SEQ ID NO: 25459 - DNA, 53 bp, Artificial Sequence; identical to SEQ ID NO: 1746
  Description of Artificial Sequence: Synthetic pistachio; 5' sequence and inner sequence

SEQ ID NO: 25460 - DNA, 53 bp, Artificial Sequence; identical to SEQ ID NO: 1457
  Description of Artificial Sequence: Synthetic pistachio; 5' sequence and inner sequence

SEQ ID NO: 25461 - DNA, 53 bp, Artificial Sequence; identical to SEQ ID NO: 1303
  Description of Artificial Sequence: Synthetic pistachio; 5' sequence and inner sequence

SEQ ID NO: 25462 - DNA, 53 bp, Artificial Sequence; identical to SEQ ID NO: 1680
  Description of Artificial Sequence: Synthetic pistachio; 5' sequence and inner sequence

SEQ ID NO: 25463 - DNA, 53 bp, Artificial Sequence; identical to SEQ ID NO: 1611
  Description of Artificial Sequence: Synthetic pistachio; 5' sequence and inner sequence

SEQ ID NO: 25464 - DNA, 53 bp, Artificial Sequence; identical to SEQ ID NO: 1169
  Description of Artificial Sequence: Synthetic pistachio; 5' sequence and inner sequence

SEQ ID NO: 25465 - DNA, 53 bp, Artificial Sequence; identical to SEQ ID NO: 5336
  Description of Artificial Sequence: Synthetic pistachio; 5' sequence and inner sequence

SEQ ID NO: 25466 - DNA, 54 bp, Artificial Sequence; identical to SEQ ID NO: 1216
  Description of Artificial Sequence: Synthetic pistachio; 5' sequence and inner sequence

SEQ ID NO: 25467 - DNA, 53 bp, Artificial Sequence; identical to SEQ ID NO: 1518
  Description of Artificial Sequence: Synthetic pistachio; 5' sequence and inner sequence

SEQ ID NO: 25468 - DNA, 53 bp, Artificial Sequence; identical to SEQ ID NO: 1515
  Description of Artificial Sequence: Synthetic pistachio; 5' sequence and inner sequence

SEQ ID NO: 25469 - DNA, 53 bp, Artificial Sequence; identical to SEQ ID NO: 9763
  Description of Artificial Sequence: Synthetic pistachio; 5' sequence and inner sequence

SEQ ID NO: 25470 - DNA, 53 bp, Artificial Sequence; identical to SEQ ID NO: 1791
  Description of Artificial Sequence: Synthetic pistachio; 5' sequence and inner sequence

SEQ ID NO: 25471 - DNA, 52 bp, Artificial Sequence; identical to SEQ ID NO: 1873
  Description of Artificial Sequence: Synthetic pistachio; 5' sequence and inner sequence

SEQ ID NO: 25472 - DNA, 53 bp, Artificial Sequence; identical to SEQ ID NO: 1326
  Description of Artificial Sequence: Synthetic pistachio; 5' sequence and inner sequence

SEQ ID NO: 25473 - DNA, 53 bp, Artificial Sequence; identical to SEQ ID NO: 5317
  Description of Artificial Sequence: Synthetic pistachio; 5' sequence and inner sequence

SEQ ID NO: 25474 - DNA, 53 bp, Artificial Sequence; identical to SEQ ID NO: 1276
  Description of Artificial Sequence: Synthetic pistachio; 5' sequence and inner sequence

SEQ ID NO: 25475 - DNA, 53 bp, Artificial Sequence; identical to SEQ ID NO: 1671
  Description of Artificial Sequence: Synthetic pistachio; 5' sequence and inner sequence

SEQ ID NO: 25476 - DNA, 53 bp, Artificial Sequence; identical to SEQ ID NO: 1850
  Description of Artificial Sequence: Synthetic pistachio; 5' sequence and inner sequence

SEQ ID NO: 25477 - DNA, 53 bp, Artificial Sequence; identical to SEQ ID NO: 1191
  Description of Artificial Sequence: Synthetic pistachio; 5' sequence and inner sequence

SEQ ID NO: 25478 - DNA, 53 bp, Artificial Sequence; identical to SEQ ID NO: 5748
  Description of Artificial Sequence: Synthetic pistachio; 5' sequence and inner sequence

SEQ ID NO: 25479 - DNA, 53 bp, Artificial Sequence; identical to SEQ ID NO: 5351
  Description of Artificial Sequence: Synthetic pistachio; 5' sequence and inner sequence

SEQ ID NO: 25480 - DNA, 53 bp, Artificial Sequence; identical to SEQ ID NO: 1442
  Description of Artificial Sequence: Synthetic pistachio; 5' sequence and inner sequence

SEQ ID NO: 25481 - DNA, 53 bp, Artificial Sequence; identical to SEQ ID NO: 5691
  Description of Artificial Sequence: Synthetic pistachio; 5' sequence and inner sequence

SEQ ID NO: 25482 - DNA, 53 bp, Artificial Sequence; identical to SEQ ID NO: 1540
  Description of Artificial Sequence: Synthetic pistachio; 5' sequence and inner sequence

SEQ ID NO: 25483 - DNA, 53 bp, Artificial Sequence; identical to SEQ ID NO: 1317
  Description of Artificial Sequence: Synthetic pistachio; 5' sequence and inner sequence

SEQ ID NO: 25484 - DNA, 53 bp, Artificial Sequence; identical to SEQ ID NO: 1596
  Description of Artificial Sequence: Synthetic pistachio; 5' sequence and inner sequence

SEQ ID NO: 25485 - DNA, 51 bp, Artificial Sequence; identical to SEQ ID NO: 1423
  Description of Artificial Sequence: Synthetic pistachio; 5' sequence and inner sequence

SEQ ID NO: 25486 - DNA, 53 bp, Artificial Sequence; identical to SEQ ID NO: 5312
  Description of Artificial Sequence: Synthetic pistachio; 5' sequence and inner sequence

SEQ ID NO: 25487 - DNA, 53 bp, Artificial Sequence; identical to SEQ ID NO: 1443
  Description of Artificial Sequence: Synthetic pistachio; 5' sequence and inner sequence

SEQ ID NO: 25488 - DNA, 53 bp, Artificial Sequence; identical to SEQ ID NO: 1345
  Description of Artificial Sequence: Synthetic pistachio; 5' sequence and inner sequence

SEQ ID NO: 25489 - DNA, 53 bp, Artificial Sequence; identical to SEQ ID NO: 1461
  Description of Artificial Sequence: Synthetic pistachio; 5' sequence and inner sequence

SEQ ID NO: 25490 - DNA, 53 bp, Artificial Sequence; identical to SEQ ID NO: 1277
  Description of Artificial Sequence: Synthetic pistachio; 5' sequence and inner sequence

SEQ ID NO: 25491 - DNA, 53 bp, Artificial Sequence; identical to SEQ ID NO: 1625
  Description of Artificial Sequence: Synthetic pistachio; 5' sequence and inner sequence

SEQ ID NO: 25492 - DNA, 53 bp, Artificial Sequence; identical to SEQ ID NO: 1256
  Description of Artificial Sequence: Synthetic pistachio; 5' sequence and inner sequence

SEQ ID NO: 25493 - DNA, 53 bp, Artificial Sequence; identical to SEQ ID NO: 1591
  Description of Artificial Sequence: Synthetic pistachio; 5' sequence and inner sequence

SEQ ID NO: 25494 - DNA, 53 bp, Artificial Sequence; identical to SEQ ID NO: 1519
  Description of Artificial Sequence: Synthetic pistachio; 5' sequence and inner sequence

SEQ ID NO: 25495 - DNA, 53 bp, Artificial Sequence; identical to SEQ ID NO: 1556
  Description of Artificial Sequence: Synthetic pistachio; 5' sequence and inner sequence

SEQ ID NO: 25496 - DNA, 53 bp, Artificial Sequence; identical to SEQ ID NO: 1699
  Description of Artificial Sequence: Synthetic pistachio; 5' sequence and inner sequence

SEQ ID NO: 25497 - DNA, 53 bp, Artificial Sequence; identical to SEQ ID NO: 1493
  Description of Artificial Sequence: Synthetic pistachio; 5' sequence and inner sequence

SEQ ID NO: 25498 - DNA, 53 bp, Artificial Sequence; identical to SEQ ID NO: 1823
  Description of Artificial Sequence: Synthetic pistachio; 5' sequence and inner sequence

SEQ ID NO: 25499 - DNA, 53 bp, Artificial Sequence; identical to SEQ ID NO: 9869
  Description of Artificial Sequence: Synthetic pistachio; 5' sequence and inner sequence

SEQ ID NO: 25500 - DNA, 53 bp, Artificial Sequence; identical to SEQ ID NO: 1962
  Description of Artificial Sequence: Synthetic pistachio; 5' sequence and inner sequence

SEQ ID NO: 25501 - DNA, 53 bp, Artificial Sequence; identical to SEQ ID NO: 5472
  Description of Artificial Sequence: Synthetic pistachio; 5' sequence and inner sequence

SEQ ID NO: 25502 - DNA, 53 bp, Artificial Sequence; identical to SEQ ID NO: 1378
  Description of Artificial Sequence: Synthetic pistachio; 5' sequence and inner sequence

SEQ ID NO: 25503 - DNA, 53 bp, Artificial Sequence; identical to SEQ ID NO: 1278
  Description of Artificial Sequence: Synthetic pistachio; 5' sequence and inner sequence

SEQ ID NO: 25504 - DNA, 53 bp, Artificial Sequence; identical to SEQ ID NO: 1322
  Description of Artificial Sequence: Synthetic pistachio; 5' sequence and inner sequence

SEQ ID NO: 25505 - DNA, 53 bp, Artificial Sequence; identical to SEQ ID NO: 5230
  Description of Artificial Sequence: Synthetic pistachio; 5' sequence and inner sequence

SEQ ID NO: 25506 - DNA, 53 bp, Artificial Sequence; identical to SEQ ID NO: 1346
  Description of Artificial Sequence: Synthetic pistachio; 5' sequence and inner sequence

SEQ ID NO: 25507 - DNA, 53 bp, Artificial Sequence; identical to SEQ ID NO: 9769
  Description of Artificial Sequence: Synthetic pistachio; 5' sequence and inner sequence

SEQ ID NO: 25508 - DNA, 53 bp, Artificial Sequence; identical to SEQ ID NO: 1324
  Description of Artificial Sequence: Synthetic pistachio; 5' sequence and inner sequence

SEQ ID NO: 25509 - DNA, 53 bp, Artificial Sequence; identical to SEQ ID NO: 1846
  Description of Artificial Sequence: Synthetic pistachio; 5' sequence and inner sequence

SEQ ID NO: 25510 - DNA, 53 bp, Artificial Sequence; identical to SEQ ID NO: 9801
  Description of Artificial Sequence: Synthetic pistachio; 5' sequence and inner sequence

SEQ ID NO: 25511 - DNA, 53 bp, Artificial Sequence; identical to SEQ ID NO: 1435
  Description of Artificial Sequence: Synthetic pistachio; 5' sequence and inner sequence

SEQ ID NO: 25512 - DNA, 53 bp, Artificial Sequence; identical to SEQ ID NO: 1945
  Description of Artificial Sequence: Synthetic pistachio; 5' sequence and inner sequence

SEQ ID NO: 25513 - DNA, 53 bp, Artificial Sequence; identical to SEQ ID NO: 1678
  Description of Artificial Sequence: Synthetic pistachio; 5' sequence and inner sequence

SEQ ID NO: 25514 - DNA, 53 bp, Artificial Sequence; identical to SEQ ID NO: 1484
  Description of Artificial Sequence: Synthetic pistachio; 5' sequence and inner sequence

SEQ ID NO: 25515 - DNA, 53 bp, Artificial Sequence; identical to SEQ ID NO: 1367
  Description of Artificial Sequence: Synthetic pistachio; 5' sequence and inner sequence

SEQ ID NO: 25516 - DNA, 51 bp, Artificial Sequence; identical to SEQ ID NO: 1241
  Description of Artificial Sequence: Synthetic pistachio; 5' sequence and inner sequence

SEQ ID NO: 25517 - DNA, 53 bp, Artificial Sequence; identical to SEQ ID NO: 1490
  Description of Artificial Sequence: Synthetic pistachio; 5' sequence and inner sequence

SEQ ID NO: 25518 - DNA, 53 bp, Artificial Sequence; identical to SEQ ID NO: 1467
  Description of Artificial Sequence: Synthetic pistachio; 5' sequence and inner sequence

SEQ ID NO: 25519 - DNA, 53 bp, Artificial Sequence; identical to SEQ ID NO: 1780
  Description of Artificial Sequence: Synthetic pistachio; 5' sequence and inner sequence

SEQ ID NO: 25520 - DNA, 53 bp, Artificial Sequence; identical to SEQ ID NO: 1281
  Description of Artificial Sequence: Synthetic pistachio; 5' sequence and inner sequence

SEQ ID NO: 25521 - DNA, 53 bp, Artificial Sequence; identical to SEQ ID NO: 5804
  Description of Artificial Sequence: Synthetic pistachio; 5' sequence and inner sequence

SEQ ID NO: 25522 - DNA, 53 bp, Artificial Sequence; identical to SEQ ID NO: 1420
  Description of Artificial Sequence: Synthetic pistachio; 5' sequence and inner sequence

SEQ ID NO: 25523 - DNA, 53 bp, Artificial Sequence; identical to SEQ ID NO: 13958
  Description of Artificial Sequence: Synthetic pistachio; 5' sequence and inner sequence

SEQ ID NO: 25524 - DNA, 53 bp, Artificial Sequence; identical to SEQ ID NO: 1862
  Description of Artificial Sequence: Synthetic pistachio; 5' sequence and inner sequence

SEQ ID NO: 25525 - DNA, 53 bp, Artificial Sequence; identical to SEQ ID NO: 5887
  Description of Artificial Sequence: Synthetic pistachio; 5' sequence and inner sequence

SEQ ID NO: 25526 - DNA, 53 bp, Artificial Sequence; identical to SEQ ID NO: 1463
  Description of Artificial Sequence: Synthetic pistachio; 5' sequence and inner sequence

SEQ ID NO: 25527 - DNA, 53 bp, Artificial Sequence
  Description of Artificial Sequence: Synthetic pistachio; 5' sequence and inner sequence
tagggaagagaaggacatatgatcgtgcaacggcaggtcacttcccttggtcg

SEQ ID NO: 25528 - DNA, 53 bp, Artificial Sequence; identical to SEQ ID NO: 1774
  Description of Artificial Sequence: Synthetic pistachio; 5' sequence and inner sequence

SEQ ID NO: 25529 - DNA, 53 bp, Artificial Sequence; identical to SEQ ID NO: 1348
  Description of Artificial Sequence: Synthetic pistachio; 5' sequence and inner sequence

SEQ ID NO: 25530 - DNA, 53 bp, Artificial Sequence; identical to SEQ ID NO: 1380
  Description of Artificial Sequence: Synthetic pistachio; 5' sequence and inner sequence

SEQ ID NO: 25531 - DNA, 53 bp, Artificial Sequence; identical to SEQ ID NO: 1318
  Description of Artificial Sequence: Synthetic pistachio; 5' sequence and inner sequence

SEQ ID NO: 25532 - DNA, 52 bp, Artificial Sequence; identical to SEQ ID NO: 5559
  Description of Artificial Sequence: Synthetic pistachio; 5' sequence and inner sequence

SEQ ID NO: 25533 - DNA, 53 bp, Artificial Sequence; identical to SEQ ID NO: 1772
  Description of Artificial Sequence: Synthetic pistachio; 5' sequence and inner sequence

SEQ ID NO: 25534 - DNA, 53 bp, Artificial Sequence; identical to SEQ ID NO: 5690
  Description of Artificial Sequence: Synthetic pistachio; 5' sequence and inner sequence

SEQ ID NO: 25535 - DNA, 50 bp, Artificial Sequence; identical to SEQ ID NO: 1885
  Description of Artificial Sequence: Synthetic pistachio; 5' sequence and inner sequence

SEQ ID NO: 25536 - DNA, 53 bp, Artificial Sequence; identical to SEQ ID NO: 1357
  Description of Artificial Sequence: Synthetic pistachio; 5' sequence and inner sequence

SEQ ID NO: 25537 - DNA, 53 bp, Artificial Sequence; identical to SEQ ID NO: 5405
  Description of Artificial Sequence: Synthetic pistachio; 5' sequence and inner sequence

SEQ ID NO: 25538 - DNA, 53 bp, Artificial Sequence; identical to SEQ ID NO: 1426
  Description of Artificial Sequence: Synthetic pistachio; 5' sequence and inner sequence

SEQ ID NO: 25539 - DNA, 53 bp, Artificial Sequence; identical to SEQ ID NO: 1407
  Description of Artificial Sequence: Synthetic pistachio; 5' sequence and inner sequence

SEQ ID NO: 25540 - DNA, 53 bp, Artificial Sequence; identical to SEQ ID NO: 5967
  Description of Artificial Sequence: Synthetic pistachio; 5' sequence and inner sequence

SEQ ID NO: 25541 - DNA, 53 bp, Artificial Sequence; identical to SEQ ID NO: 1807
  Description of Artificial Sequence: Synthetic pistachio; 5' sequence and inner sequence

SEQ ID NO: 25542 - DNA, 53 bp, Artificial Sequence; identical to SEQ ID NO: 5775
  Description of Artificial Sequence: Synthetic pistachio; 5' sequence and inner sequence

SEQ ID NO: 25543 - DNA, 53 bp, Artificial Sequence; identical to SEQ ID NO: 1677
  Description of Artificial Sequence: Synthetic pistachio; 5' sequence and inner sequence

SEQ ID NO: 25544 - DNA, 53 bp, Artificial Sequence; identical to SEQ ID NO: 21119
  Description of Artificial Sequence: Synthetic pistachio; 5' sequence and inner sequence

SEQ ID NO: 25545 - DNA, 53 bp, Artificial Sequence; identical to SEQ ID NO: 1477
  Description of Artificial Sequence: Synthetic pistachio; 5' sequence and inner sequence

SEQ ID NO: 25546 - DNA, 53 bp, Artificial Sequence; identical to SEQ ID NO: 5651
  Description of Artificial Sequence: Synthetic pistachio; 5' sequence and inner sequence

SEQ ID NO: 25547 - DNA, 53 bp, Artificial Sequence; identical to SEQ ID NO: 1776
  Description of Artificial Sequence: Synthetic pistachio; 5' sequence and inner sequence

SEQ ID NO: 25548 - DNA, 53 bp, Artificial Sequence; identical to SEQ ID NO: 1397
  Description of Artificial Sequence: Synthetic pistachio; 5' sequence and inner sequence

SEQ ID NO: 25549 - DNA, 53 bp, Artificial Sequence; identical to SEQ ID NO: 1808
  Description of Artificial Sequence: Synthetic pistachio; 5' sequence and inner sequence

SEQ ID NO: 25550 - DNA, 53 bp, Artificial Sequence; identical to SEQ ID NO: 1353
  Description of Artificial Sequence: Synthetic pistachio; 5' sequence and inner sequence

SEQ ID NO: 25551 - DNA, 53 bp, Artificial Sequence; identical to SEQ ID NO: 1932
  Description of Artificial Sequence: Synthetic pistachio; 5' sequence and inner sequence

SEQ ID NO: 25552 - DNA, 53 bp, Artificial Sequence; identical to SEQ ID NO: 13985
  Description of Artificial Sequence: Synthetic pistachio; 5' sequence and inner sequence

SEQ ID NO: 25553 - DNA, 53 bp, Artificial Sequence; identical to SEQ ID NO: 1450
  Description of Artificial Sequence: Synthetic pistachio; 5' sequence and inner sequence

SEQ ID NO: 25554 - DNA, 53 bp, Artificial Sequence; identical to SEQ ID NO: 1465
  Description of Artificial Sequence: Synthetic pistachio; 5' sequence and inner sequence

SEQ ID NO: 25555 - DNA, 53 bp, Artificial Sequence; identical to SEQ ID NO: 1695
  Description of Artificial Sequence: Synthetic pistachio; 5' sequence and inner sequence

SEQ ID NO: 25556 - DNA, 53 bp, Artificial Sequence; identical to SEQ ID NO: 9962
  Description of Artificial Sequence: Synthetic pistachio; 5' sequence and inner sequence

SEQ ID NO: 25557 - DNA, 53 bp, Artificial Sequence; identical to SEQ ID NO: 1805
  Description of Artificial Sequence: Synthetic pistachio; 5' sequence and inner sequence

SEQ ID NO: 25558 - DNA, 53 bp, Artificial Sequence; identical to SEQ ID NO: 1452
  Description of Artificial Sequence: Synthetic pistachio; 5' sequence and inner sequence

SEQ ID NO: 25559 - DNA, 53 bp, Artificial Sequence; identical to SEQ ID NO: 1634
  Description of Artificial Sequence: Synthetic pistachio; 5' sequence and inner sequence

SEQ ID NO: 25560 - DNA, 53 bp, Artificial Sequence; identical to SEQ ID NO: 1741
  Description of Artificial Sequence: Synthetic pistachio; 5' sequence and inner sequence

SEQ ID NO: 25561 - DNA, 53 bp, Artificial Sequence; identical to SEQ ID NO: 1292
  Description of Artificial Sequence: Synthetic pistachio; 5' sequence and inner sequence

SEQ ID NO: 25562 - DNA, 53 bp, Artificial Sequence; identical to SEQ ID NO: 1998
  Description of Artificial Sequence: Synthetic pistachio; 5' sequence and inner sequence

SEQ ID NO: 25563 - DNA, 53 bp, Artificial Sequence; identical to SEQ ID NO: 1662
  Description of Artificial Sequence: Synthetic pistachio; 5' sequence and inner sequence

SEQ ID NO: 25564 - DNA, 53 bp, Artificial Sequence; identical to SEQ ID NO: 5638
  Description of Artificial Sequence: Synthetic pistachio; 5' sequence and inner sequence

SEQ ID NO: 25565 - DNA, 53 bp, Artificial Sequence; identical to SEQ ID NO: 1994
  Description of Artificial Sequence: Synthetic pistachio; 5' sequence and inner sequence

SEQ ID NO: 25566 - DNA, 53 bp, Artificial Sequence; identical to SEQ ID NO: 1768
  Description of Artificial Sequence: Synthetic pistachio; 5' sequence and inner sequence

SEQ ID NO: 25567 - DNA, 53 bp, Artificial Sequence; identical to SEQ ID NO: 1613
  Description of Artificial Sequence: Synthetic pistachio; 5' sequence and inner sequence

SEQ ID NO: 25568 - DNA, 53 bp, Artificial Sequence; identical to SEQ ID NO: 1225
  Description of Artificial Sequence: Synthetic pistachio; 5' sequence and inner sequence

SEQ ID NO: 25569 - DNA, 53 bp, Artificial Sequence; identical to SEQ ID NO: 1506
  Description of Artificial Sequence: Synthetic pistachio; 5' sequence and inner sequence

SEQ ID NO: 25570 - DNA, 53 bp, Artificial Sequence; identical to SEQ ID NO: 9928
  Description of Artificial Sequence: Synthetic pistachio; 5' sequence and inner sequence

SEQ ID NO: 25571 - DNA, 53 bp, Artificial Sequence; identical to SEQ ID NO: 1644
  Description of Artificial Sequence: Synthetic pistachio; 5' sequence and inner sequence

SEQ ID NO: 25572 - DNA, 53 bp, Artificial Sequence; identical to SEQ ID NO: 1351
  Description of Artificial Sequence: Synthetic pistachio; 5' sequence and inner sequence

SEQ ID NO: 25573 - DNA, 53 bp, Artificial Sequence; identical to SEQ ID NO: 5708
  Description of Artificial Sequence: Synthetic pistachio; 5' sequence and inner sequence

SEQ ID NO: 25574 - DNA, 53 bp, Artificial Sequence; identical to SEQ ID NO: 21506
  Description of Artificial Sequence: Synthetic pistachio; 5' sequence and inner sequence

SEQ ID NO: 25575 - DNA, 53 bp, Artificial Sequence; identical to SEQ ID NO: 1404
  Description of Artificial Sequence: Synthetic pistachio; 5' sequence and inner sequence

SEQ ID NO: 25576 - DNA, 53 bp, Artificial Sequence; identical to SEQ ID NO: 1408
  Description of Artificial Sequence: Synthetic pistachio; 5' sequence and inner sequence

SEQ ID NO: 25577 - DNA, 53 bp, Artificial Sequence; identical to SEQ ID NO: 1199
  Description of Artificial Sequence: Synthetic pistachio; 5' sequence and inner sequence

SEQ ID NO: 25578 - DNA, 53 bp, Artificial Sequence; identical to SEQ ID NO: 1586
  Description of Artificial Sequence: Synthetic pistachio; 5' sequence and inner sequence

SEQ ID NO: 25579 - DNA, 53 bp, Artificial Sequence; identical to SEQ ID NO: 1953
  Description of Artificial Sequence: Synthetic pistachio; 5' sequence and inner sequence

SEQ ID NO: 25580 - DNA, 53 bp, Artificial Sequence; identical to SEQ ID NO: 1302
  Description of Artificial Sequence: Synthetic pistachio; 5' sequence and inner sequence

SEQ ID NO: 25581 - DNA, 52 bp, Artificial Sequence; identical to SEQ ID NO: 1648
  Description of Artificial Sequence: Synthetic pistachio; 5' sequence and inner sequence

SEQ ID NO: 25582 - DNA, 53 bp, Artificial Sequence; identical to SEQ ID NO: 21269
  Description of Artificial Sequence: Synthetic pistachio; 5' sequence and inner sequence

SEQ ID NO: 25583 - DNA, 53 bp, Artificial Sequence; identical to SEQ ID NO: 9458
  Description of Artificial Sequence: Synthetic pistachio; 5' sequence and inner sequence

SEQ ID NO: 25584 - DNA, 53 bp, Artificial Sequence; identical to SEQ ID NO: 1433
  Description of Artificial Sequence: Synthetic pistachio; 5' sequence and inner sequence

SEQ ID NO: 25585 - DNA, 53 bp, Artificial Sequence; identical to SEQ ID NO: 1551
  Description of Artificial Sequence: Synthetic pistachio; 5' sequence and inner sequence

SEQ ID NO: 25586 - DNA, 53 bp, Artificial Sequence; identical to SEQ ID NO: 1663
  Description of Artificial Sequence: Synthetic pistachio; 5' sequence and inner sequence

SEQ ID NO: 25587 - DNA, 53 bp, Artificial Sequence; identical to SEQ ID NO: 1914
  Description of Artificial Sequence: Synthetic pistachio; 5' sequence and inner sequence

SEQ ID NO: 25588 - DNA, 53 bp, Artificial Sequence; identical to SEQ ID NO: 1881
  Description of Artificial Sequence: Synthetic pistachio; 5' sequence and inner sequence

SEQ ID NO: 25589 - DNA, 53 bp, Artificial Sequence; identical to SEQ ID NO: 21388
  Description of Artificial Sequence: Synthetic pistachio; 5' sequence and inner sequence

SEQ ID NO: 25590 - DNA, 53 bp, Artificial Sequence; identical to SEQ ID NO: 2002
  Description of Artificial Sequence: Synthetic pistachio; 5' sequence and inner sequence

SEQ ID NO: 25591 - DNA, 53 bp, Artificial Sequence; identical to SEQ ID NO: 9546
  Description of Artificial Sequence: Synthetic pistachio; 5' sequence and inner sequence

SEQ ID NO: 25592 - DNA, 53 bp, Artificial Sequence; identical to SEQ ID NO: 1439
  Description of Artificial Sequence: Synthetic pistachio; 5' sequence and inner sequence

SEQ ID NO: 25593 - DNA, 53 bp, Artificial Sequence; identical to SEQ ID NO: 1570
  Description of Artificial Sequence: Synthetic pistachio; 5' sequence and inner sequence

SEQ ID NO: 25594 - DNA, 53 bp, Artificial Sequence; identical to SEQ ID NO: 1261
  Description of Artificial Sequence: Synthetic pistachio; 5' sequence and inner sequence

SEQ ID NO: 25595 - DNA, 53 bp, Artificial Sequence; identical to SEQ ID NO: 5449
  Description of Artificial Sequence: Synthetic pistachio; 5' sequence and inner sequence

SEQ ID NO: 25596 - DNA, 53 bp, Artificial Sequence; identical to SEQ ID NO: 5856
  Description of Artificial Sequence: Synthetic pistachio; 5' sequence and inner sequence

SEQ ID NO: 25597 - DNA, 53 bp, Artificial Sequence; identical to SEQ ID NO: 13521
  Description of Artificial Sequence: Synthetic pistachio; 5' sequence and inner sequence

SEQ ID NO: 25598 - DNA, 53 bp, Artificial Sequence; identical to SEQ ID NO: 1668
  Description of Artificial Sequence: Synthetic pistachio; 5' sequence and inner sequence

SEQ ID NO: 25599 - DNA, 53 bp, Artificial Sequence; identical to SEQ ID NO: 1589
  Description of Artificial Sequence: Synthetic pistachio; 5' sequence and inner sequence

SEQ ID NO: 25600 - DNA, 53 bp, Artificial Sequence; identical to SEQ ID NO: 1943
  Description of Artificial Sequence: Synthetic pistachio; 5' sequence and inner sequence

SEQ ID NO: 25601 - DNA, 53 bp, Artificial Sequence; identical to SEQ ID NO: 5590
  Description of Artificial Sequence: Synthetic pistachio; 5' sequence and inner sequence

SEQ ID NO: 25602 - DNA, 53 bp, Artificial Sequence; identical to SEQ ID NO: 1775
  Description of Artificial Sequence: Synthetic pistachio; 5' sequence and inner sequence

SEQ ID NO: 25603 - DNA, 53 bp, Artificial Sequence; identical to SEQ ID NO: 1561
  Description of Artificial Sequence: Synthetic pistachio; 5' sequence and inner sequence

SEQ ID NO: 25604 - DNA, 53 bp, Artificial Sequence; identical to SEQ ID NO: 1670
  Description of Artificial Sequence: Synthetic pistachio; 5' sequence and inner sequence

SEQ ID NO: 25605 - DNA, 53 bp, Artificial Sequence; identical to SEQ ID NO: 1568
  Description of Artificial Sequence: Synthetic pistachio; 5' sequence and inner sequence

SEQ ID NO: 25606 - DNA, 53 bp, Artificial Sequence; identical to SEQ ID NO: 1486
  Description of Artificial Sequence: Synthetic pistachio; 5' sequence and inner sequence

SEQ ID NO: 25607 - DNA, 53 bp, Artificial Sequence; identical to SEQ ID NO: 1498
  Description of Artificial Sequence: Synthetic pistachio; 5' sequence and inner sequence

SEQ ID NO: 25608 - DNA, 53 bp, Artificial Sequence; identical to SEQ ID NO: 1793
  Description of Artificial Sequence: Synthetic pistachio; 5' sequence and inner sequence

SEQ ID NO: 25609 - DNA, 53 bp, Artificial Sequence; identical to SEQ ID NO: 1727
  Description of Artificial Sequence: Synthetic pistachio; 5' sequence and inner sequence

SEQ ID NO: 25610 - DNA, 48 bp, Artificial Sequence; identical to SEQ ID NO: 1427
  Description of Artificial Sequence: Synthetic pistachio; 5' sequence and inner sequence

SEQ ID NO: 25611 - DNA, 53 bp, Artificial Sequence; identical to SEQ ID NO: 1363
  Description of Artificial Sequence: Synthetic pistachio; 5' sequence and inner sequence

SEQ ID NO: 25612 - DNA, 53 bp, Artificial Sequence; identical to SEQ ID NO: 21286
  Description of Artificial Sequence: Synthetic pistachio; 5' sequence and inner sequence

SEQ ID NO: 25613 - DNA, 53 bp, Artificial Sequence; identical to SEQ ID NO: 1632
  Description of Artificial Sequence: Synthetic pistachio; 5' sequence and inner sequence

SEQ ID NO: 25614 - DNA, 53 bp, Artificial Sequence; identical to SEQ ID NO: 21193
  Description of Artificial Sequence: Synthetic pistachio; 5' sequence and inner sequence

SEQ ID NO: 25615 - DNA, 53 bp, Artificial Sequence; identical to SEQ ID NO: 1479
  Description of Artificial Sequence: Synthetic pistachio; 5' sequence and inner sequence

SEQ ID NO: 25616 - DNA, 53 bp, Artificial Sequence; identical to SEQ ID NO: 1672
  Description of Artificial Sequence: Synthetic pistachio; 5' sequence and inner sequence

SEQ ID NO: 25617 - DNA, 53 bp, Artificial Sequence; identical to SEQ ID NO: 21413
  Description of Artificial Sequence: Synthetic pistachio; 5' sequence and inner sequence

SEQ ID NO: 25618 - DNA, 53 bp, Artificial Sequence; identical to SEQ ID NO: 9787
  Description of Artificial Sequence: Synthetic pistachio; 5' sequence and inner sequence

SEQ ID NO: 25619 - DNA, 53 bp, Artificial Sequence; identical to SEQ ID NO: 1488
  Description of Artificial Sequence: Synthetic pistachio; 5' sequence and inner sequence

SEQ ID NO: 25620 - DNA, 53 bp, Artificial Sequence; identical to SEQ ID NO: 1669
  Description of Artificial Sequence: Synthetic pistachio; 5' sequence and inner sequence

SEQ ID NO: 25621 - DNA, 53 bp, Artificial Sequence; identical to SEQ ID NO: 5988
  Description of Artificial Sequence: Synthetic pistachio; 5' sequence and inner sequence

SEQ ID NO: 25622 - DNA, 53 bp, Artificial Sequence; identical to SEQ ID NO: 1661
  Description of Artificial Sequence: Synthetic pistachio; 5' sequence and inner sequence

SEQ ID NO: 25623 - DNA, 53 bp, Artificial Sequence; identical to SEQ ID NO: 1434
  Description of Artificial Sequence: Synthetic pistachio; 5' sequence and inner sequence

SEQ ID NO: 25624 - DNA, 53 bp, Artificial Sequence; identical to SEQ ID NO: 1543
  Description of Artificial Sequence: Synthetic pistachio; 5' sequence and inner sequence

SEQ ID NO: 25625 - DNA, 53 bp, Artificial Sequence; identical to SEQ ID NO: 1915
  Description of Artificial Sequence: Synthetic pistachio; 5' sequence and inner sequence

SEQ ID NO: 25626 - DNA, 53 bp, Artificial Sequence; identical to SEQ ID NO: 1510
  Description of Artificial Sequence: Synthetic pistachio; 5' sequence and inner sequence

SEQ ID NO: 25627 - DNA, 53 bp, Artificial Sequence; identical to SEQ ID NO: 1393
  Description of Artificial Sequence: Synthetic pistachio; 5' sequence and inner sequence

SEQ ID NO: 25628 - DNA, 53 bp, Artificial Sequence; identical to SEQ ID NO: 1580
  Description of Artificial Sequence: Synthetic pistachio; 5' sequence and inner sequence

SEQ ID NO: 25629 - DNA, 53 bp, Artificial Sequence; identical to SEQ ID NO: 1366
  Description of Artificial Sequence: Synthetic pistachio; 5' sequence and inner sequence

SEQ ID NO: 25630 - DNA, 53 bp, Artificial Sequence
  Description of Artificial Sequence: Synthetic pistachio; 5' sequence and inner sequence
tagggaagagaaggacatatgattggccgatcgaccctatcaagtgccgcatg

SEQ ID NO: 25631 - DNA, 53 bp, Artificial Sequence; identical to SEQ ID NO: 5918
  Description of Artificial Sequence: Synthetic pistachio; 5' sequence and inner sequence

SEQ ID NO: 25632 - DNA, 53 bp, Artificial Sequence; identical to SEQ ID NO: 1279
  Description of Artificial Sequence: Synthetic pistachio; 5' sequence and inner sequence

SEQ ID NO: 25633 - DNA, 53 bp, Artificial Sequence; identical to SEQ ID NO: 1497
  Description of Artificial Sequence: Synthetic pistachio; 5' sequence and inner sequence

SEQ ID NO: 25634 - DNA, 53 bp, Artificial Sequence; identical to SEQ ID NO: 1718
  Description of Artificial Sequence: Synthetic pistachio; 5' sequence and inner sequence

SEQ ID NO: 25635 - DNA, 53 bp, Artificial Sequence; identical to SEQ ID NO: 5610
  Description of Artificial Sequence: Synthetic pistachio; 5' sequence and inner sequence

SEQ ID NO: 25636 - DNA, 53 bp, Artificial Sequence; identical to SEQ ID NO: 1836
  Description of Artificial Sequence: Synthetic pistachio; 5' sequence and inner sequence

SEQ ID NO: 25637 - DNA, 53 bp, Artificial Sequence; identical to SEQ ID NO: 1533
  Description of Artificial Sequence: Synthetic pistachio; 5' sequence and inner sequence

SEQ ID NO: 25638 - DNA, 53 bp, Artificial Sequence; identical to SEQ ID NO: 1300
  Description of Artificial Sequence: Synthetic pistachio; 5' sequence and inner sequence

SEQ ID NO: 25639 - DNA, 53 bp, Artificial Sequence; identical to SEQ ID NO: 9844
  Description of Artificial Sequence: Synthetic pistachio; 5' sequence and inner sequence

SEQ ID NO: 25640 - DNA, 53 bp, Artificial Sequence; identical to SEQ ID NO: 1539
  Description of Artificial Sequence: Synthetic pistachio; 5' sequence and inner sequence

SEQ ID NO: 25641 - DNA, 53 bp, Artificial Sequence; identical to SEQ ID NO: 1356
  Description of Artificial Sequence: Synthetic pistachio; 5' sequence and inner sequence

SEQ ID NO: 25642 - DNA, 53 bp, Artificial Sequence; identical to SEQ ID NO: 1333
  Description of Artificial Sequence: Synthetic pistachio; 5' sequence and inner sequence

SEQ ID NO: 25643 - DNA, 53 bp, Artificial Sequence; identical to SEQ ID NO: 1459
  Description of Artificial Sequence: Synthetic pistachio; 5' sequence and inner sequence

SEQ ID NO: 25644 - DNA, 53 bp, Artificial Sequence; identical to SEQ ID NO: 1657
  Description of Artificial Sequence: Synthetic pistachio; 5' sequence and inner sequence

SEQ ID NO: 25645 - DNA, 53 bp, Artificial Sequence; identical to SEQ ID NO: 1514
  Description of Artificial Sequence: Synthetic pistachio; 5' sequence and inner sequence

SEQ ID NO: 25646 - DNA, 53 bp, Artificial Sequence; identical to SEQ ID NO: 5603
  Description of Artificial Sequence: Synthetic pistachio; 5' sequence and inner sequence

SEQ ID NO: 25647 - DNA, 53 bp, Artificial Sequence; identical to SEQ ID NO: 21233
  Description of Artificial Sequence: Synthetic pistachio; 5' sequence and inner sequence

SEQ ID NO: 25648 - DNA, 53 bp, Artificial Sequence; identical to SEQ ID NO: 1763
  Description of Artificial Sequence: Synthetic pistachio; 5' sequence and inner sequence

SEQ ID NO: 25649 - DNA, 53 bp, Artificial Sequence; identical to SEQ ID NO: 1309
  Description of Artificial Sequence: Synthetic pistachio; 5' sequence and inner sequence

SEQ ID NO: 25650 - DNA, 53 bp, Artificial Sequence; identical to SEQ ID NO: 9767
  Description of Artificial Sequence: Synthetic pistachio; 5' sequence and inner sequence

SEQ ID NO: 25651 - DNA, 53 bp, Artificial Sequence; identical to SEQ ID NO: 1594
  Description of Artificial Sequence: Synthetic pistachio; 5' sequence and inner sequence

SEQ ID NO: 25652 - DNA, 53 bp, Artificial Sequence; identical to SEQ ID NO: 9633
  Description of Artificial Sequence: Synthetic pistachio; 5' sequence and inner sequence

SEQ ID NO: 25653 - DNA, 53 bp, Artificial Sequence; identical to SEQ ID NO: 1626
  Description of Artificial Sequence: Synthetic pistachio; 5' sequence and inner sequence

SEQ ID NO: 25654 - DNA, 53 bp, Artificial Sequence; identical to SEQ ID NO: 1579
  Description of Artificial Sequence: Synthetic pistachio; 5' sequence and inner sequence

SEQ ID NO: 25655 - DNA, 53 bp, Artificial Sequence; identical to SEQ ID NO: 21592
  Description of Artificial Sequence: Synthetic pistachio; 5' sequence and inner sequence

SEQ ID NO: 25656 - DNA, 53 bp, Artificial Sequence; identical to SEQ ID NO: 5565
  Description of Artificial Sequence: Synthetic pistachio; 5' sequence and inner sequence

SEQ ID NO: 25657 - DNA, 53 bp, Artificial Sequence; identical to SEQ ID NO: 5667
  Description of Artificial Sequence: Synthetic pistachio; 5' sequence and inner sequence

SEQ ID NO: 25658 - DNA, 53 bp, Artificial Sequence; identical to SEQ ID NO: 1664
  Description of Artificial Sequence: Synthetic pistachio; 5' sequence and inner sequence

SEQ ID NO: 25659 - DNA, 51 bp, Artificial Sequence; identical to SEQ ID NO: 13885
  Description of Artificial Sequence: Synthetic pistachio; 5' sequence and inner sequence

SEQ ID NO: 25660 - DNA, 53 bp, Artificial Sequence; identical to SEQ ID NO: 1473
  Description of Artificial Sequence: Synthetic pistachio; 5' sequence and inner sequence

SEQ ID NO: 25661 - DNA, 53 bp, Artificial Sequence; identical to SEQ ID NO: 1162
  Description of Artificial Sequence: Synthetic pistachio; 5' sequence and inner sequence

SEQ ID NO: 25662 - DNA, 53 bp, Artificial Sequence; identical to SEQ ID NO: 13932
  Description of Artificial Sequence: Synthetic pistachio; 5' sequence and inner sequence

SEQ ID NO: 25663 - DNA, 53 bp, Artificial Sequence; identical to SEQ ID NO: 1495
  Description of Artificial Sequence: Synthetic pistachio; 5' sequence and inner sequence

SEQ ID NO: 25664 - DNA, 53 bp, Artificial Sequence; identical to SEQ ID NO: 5999
  Description of Artificial Sequence: Synthetic pistachio; 5' sequence and inner sequence

SEQ ID NO: 25665 - DNA, 53 bp, Artificial Sequence; identical to SEQ ID NO: 1571
  Description of Artificial Sequence: Synthetic pistachio; 5' sequence and inner sequence

SEQ ID NO: 25666 - DNA, 53 bp, Artificial Sequence; identical to SEQ ID NO: 1595
  Description of Artificial Sequence: Synthetic pistachio; 5' sequence and inner sequence

SEQ ID NO: 25667 - DNA, 53 bp, Artificial Sequence; identical to SEQ ID NO: 5530
  Description of Artificial Sequence: Synthetic pistachio; 5' sequence and inner sequence

SEQ ID NO: 25668 - DNA, 53 bp, Artificial Sequence; identical to SEQ ID NO: 1603
  Description of Artificial Sequence: Synthetic pistachio; 5' sequence and inner sequence

SEQ ID NO: 25669 - DNA, 53 bp, Artificial Sequence; identical to SEQ ID NO: 21226
  Description of Artificial Sequence: Synthetic pistachio; 5' sequence and inner sequence

SEQ ID NO: 25670 - DNA, 53 bp, Artificial Sequence; identical to SEQ ID NO: 1749
  Description of Artificial Sequence: Synthetic pistachio; 5' sequence and inner sequence

SEQ ID NO: 25671 - DNA, 52 bp, Artificial Sequence; identical to SEQ ID NO: 5763
  Description of Artificial Sequence: Synthetic pistachio; 5' sequence and inner sequence

SEQ ID NO: 25672 - DNA, 53 bp, Artificial Sequence; identical to SEQ ID NO: 1342
  Description of Artificial Sequence: Synthetic pistachio; 5' sequence and inner sequence

SEQ ID NO: 25673 - DNA, 53 bp, Artificial Sequence; identical to SEQ ID NO: 1576
  Description of Artificial Sequence: Synthetic pistachio; 5' sequence and inner sequence

SEQ ID NO: 25674 - DNA, 53 bp, Artificial Sequence; identical to SEQ ID NO: 1608
  Description of Artificial Sequence: Synthetic pistachio; 5' sequence and inner sequence

SEQ ID NO: 25675 - DNA, 53 bp, Artificial Sequence; identical to SEQ ID NO: 1482
  Description of Artificial Sequence: Synthetic pistachio; 5' sequence and inner sequence

SEQ ID NO: 25676 - DNA, 53 bp, Artificial Sequence; identical to SEQ ID NO: 1926
  Description of Artificial Sequence: Synthetic pistachio; 5' sequence and inner sequence

SEQ ID NO: 25677 - DNA, 53 bp, Artificial Sequence; identical to SEQ ID NO: 9670
  Description of Artificial Sequence: Synthetic pistachio; 5' sequence and inner sequence

SEQ ID NO: 25678 - DNA, 53 bp, Artificial Sequence; identical to SEQ ID NO: 1509
  Description of Artificial Sequence: Synthetic pistachio; 5' sequence and inner sequence

SEQ ID NO: 25679 - DNA, 53 bp, Artificial Sequence; identical to SEQ ID NO: 5526
  Description of Artificial Sequence: Synthetic pistachio; 5' sequence and inner sequence

SEQ ID NO: 25680 - DNA, 53 bp, Artificial Sequence; identical to SEQ ID NO: 1307
  Description of Artificial Sequence: Synthetic pistachio; 5' sequence and inner sequence

SEQ ID NO: 25681 - DNA, 52 bp, Artificial Sequence; identical to SEQ ID NO: 1453
  Description of Artificial Sequence: Synthetic pistachio; 5' sequence and inner sequence

SEQ ID NO: 25682 - DNA, 53 bp, Artificial Sequence; identical to SEQ ID NO: 13827
  Description of Artificial Sequence: Synthetic pistachio; 5' sequence and inner sequence

SEQ ID NO: 25683 - DNA, 53 bp, Artificial Sequence; identical to SEQ ID NO: 1956
  Description of Artificial Sequence: Synthetic pistachio; 5' sequence and inner sequence

SEQ ID NO: 25684 - DNA, 53 bp, Artificial Sequence; identical to SEQ ID NO: 5575
  Description of Artificial Sequence: Synthetic pistachio; 5' sequence and inner sequence

SEQ ID NO: 25685 - DNA, 53 bp, Artificial Sequence; identical to SEQ ID NO: 21229
  Description of Artificial Sequence: Synthetic pistachio; 5' sequence and inner sequence

SEQ ID NO: 25686 - DNA, 53 bp, Artificial Sequence; identical to SEQ ID NO: 1707
  Description of Artificial Sequence: Synthetic pistachio; 5' sequence and inner sequence

SEQ ID NO: 25687 - DNA, 53 bp, Artificial Sequence; identical to SEQ ID NO: 1912
  Description of Artificial Sequence: Synthetic pistachio; 5' sequence and inner sequence

SEQ ID NO: 25688 - DNA, 53 bp, Artificial Sequence; identical to SEQ ID NO: 21430
  Description of Artificial Sequence: Synthetic pistachio; 5' sequence and inner sequence

SEQ ID NO: 25689 - DNA, 53 bp, Artificial Sequence; identical to SEQ ID NO: 5792
  Description of Artificial Sequence: Synthetic pistachio; 5' sequence and inner sequence

SEQ ID NO: 25690 - DNA, 53 bp, Artificial Sequence; identical to SEQ ID NO: 1535
  Description of Artificial Sequence: Synthetic pistachio; 5' sequence and inner sequence

SEQ ID NO: 25691 - DNA, 52 bp, Artificial Sequence; identical to SEQ ID NO: 21955
  Description of Artificial Sequence: Synthetic pistachio; 5' sequence and inner sequence

SEQ ID NO: 25692 - DNA, 53 bp, Artificial Sequence; identical to SEQ ID NO: 1979
  Description of Artificial Sequence: Synthetic pistachio; 5' sequence and inner sequence

SEQ ID NO: 25693 - DNA, 53 bp, Artificial Sequence; identical to SEQ ID NO: 1588
  Description of Artificial Sequence: Synthetic pistachio; 5' sequence and inner sequence

SEQ ID NO: 25694 - DNA, 53 bp, Artificial Sequence; identical to SEQ ID NO: 5552
  Description of Artificial Sequence: Synthetic pistachio; 5' sequence and inner sequence

SEQ ID NO: 25695 - DNA, 53 bp, Artificial Sequence; identical to SEQ ID NO: 5810
  Description of Artificial Sequence: Synthetic pistachio; 5' sequence and inner sequence

SEQ ID NO: 25696 - DNA, 53 bp, Artificial Sequence; identical to SEQ ID NO: 1456
  Description of Artificial Sequence: Synthetic pistachio; 5' sequence and inner sequence

SEQ ID NO: 25697 - DNA, 53 bp, Artificial Sequence; identical to SEQ ID NO: 5425
  Description of Artificial Sequence: Synthetic pistachio; 5' sequence and inner sequence

SEQ ID NO: 25698 - DNA, 53 bp, Artificial Sequence; identical to SEQ ID NO: 1337
  Description of Artificial Sequence: Synthetic pistachio; 5' sequence and inner sequence

SEQ ID NO: 25699 - DNA, 53 bp, Artificial Sequence; identical to SEQ ID NO: 1771
  Description of Artificial Sequence: Synthetic pistachio; 5' sequence and inner sequence

SEQ ID NO: 25700 - DNA, 53 bp, Artificial Sequence; identical to SEQ ID NO: 1472
  Description of Artificial Sequence: Synthetic pistachio; 5' sequence and inner sequence

SEQ ID NO: 25701 - DNA, 53 bp, Artificial Sequence; identical to SEQ ID NO: 1422
  Description of Artificial Sequence: Synthetic pistachio; 5' sequence and inner sequence

SEQ ID NO: 25702 - DNA, 53 bp, Artificial Sequence; identical to SEQ ID NO: 1863
  Description of Artificial Sequence: Synthetic pistachio; 5' sequence and inner sequence

SEQ ID NO: 25703 - DNA, 53 bp, Artificial Sequence; identical to SEQ ID NO: 5837
  Description of Artificial Sequence: Synthetic pistachio; 5' sequence and inner sequence

SEQ ID NO: 25704 - DNA, 53 bp, Artificial Sequence; identical to SEQ ID NO: 9964
  Description of Artificial Sequence: Synthetic pistachio; 5' sequence and inner sequence

SEQ ID NO: 25705 - DNA, 53 bp, Artificial Sequence; identical to SEQ ID NO: 5498
  Description of Artificial Sequence: Synthetic pistachio; 5' sequence and inner sequence

SEQ ID NO: 25706 - DNA, 53 bp, Artificial Sequence; identical to SEQ ID NO: 5205
  Description of Artificial Sequence: Synthetic pistachio; 5' sequence and inner sequence

SEQ ID NO: 25707 - DNA, 53 bp, Artificial Sequence; identical to SEQ ID NO: 1421
  Description of Artificial Sequence: Synthetic pistachio; 5' sequence and inner sequence

SEQ ID NO: 25708 - DNA, 53 bp, Artificial Sequence
  Description of Artificial Sequence: Synthetic pistachio; 5' sequence and inner sequence
tagggaagagaaggacatatgatcgttgcgcatgtgtcgtgactggcttgggc

SEQ ID NO: 25709 - DNA, 53 bp, Artificial Sequence; identical to SEQ ID NO: 1265
  Description of Artificial Sequence: Synthetic pistachio; 5' sequence and inner sequence

SEQ ID NO: 25710 - DNA, 53 bp, Artificial Sequence; identical to SEQ ID NO: 1507
  Description of Artificial Sequence: Synthetic pistachio; 5' sequence and inner sequence

SEQ ID NO: 25711 - DNA, 53 bp, Artificial Sequence; identical to SEQ ID NO: 5380
  Description of Artificial Sequence: Synthetic pistachio; 5' sequence and inner sequence

SEQ ID NO: 25712 - DNA, 53 bp, Artificial Sequence; identical to SEQ ID NO: 1441
  Description of Artificial Sequence: Synthetic pistachio; 5' sequence and inner sequence

SEQ ID NO: 25713 - DNA, 53 bp, Artificial Sequence; identical to SEQ ID NO: 1624
  Description of Artificial Sequence: Synthetic pistachio; 5' sequence and inner sequence

SEQ ID NO: 25714 - DNA, 53 bp, Artificial Sequence; identical to SEQ ID NO: 1460
  Description of Artificial Sequence: Synthetic pistachio; 5' sequence and inner sequence

SEQ ID NO: 25715 - DNA, 53 bp, Artificial Sequence; identical to SEQ ID NO: 1656
  Description of Artificial Sequence: Synthetic pistachio; 5' sequence and inner sequence

SEQ ID NO: 25716 - DNA, 53 bp, Artificial Sequence; identical to SEQ ID NO: 1599
  Description of Artificial Sequence: Synthetic pistachio; 5' sequence and inner sequence

SEQ ID NO: 25717 - DNA, 53 bp, Artificial Sequence; identical to SEQ ID NO: 1636
  Description of Artificial Sequence: Synthetic pistachio; 5' sequence and inner sequence

SEQ ID NO: 25718 - DNA, 53 bp, Artificial Sequence; identical to SEQ ID NO: 1931
  Description of Artificial Sequence: Synthetic pistachio; 5' sequence and inner sequence

SEQ ID NO: 25719 - DNA, 53 bp, Artificial Sequence; identical to SEQ ID NO: 1555
  Description of Artificial Sequence: Synthetic pistachio; 5' sequence and inner sequence

SEQ ID NO: 25720 - DNA, 53 bp, Artificial Sequence; identical to SEQ ID NO: 9618
  Description of Artificial Sequence: Synthetic pistachio; 5' sequence and inner sequence

SEQ ID NO: 25721 - DNA, 53 bp, Artificial Sequence; identical to SEQ ID NO: 1451
  Description of Artificial Sequence: Synthetic pistachio; 5' sequence and inner sequence

SEQ ID NO: 25722 - DNA, 53 bp, Artificial Sequence; identical to SEQ ID NO: 5956
  Description of Artificial Sequence: Synthetic pistachio; 5' sequence and inner sequence

SEQ ID NO: 25723 - DNA, 53 bp, Artificial Sequence; identical to SEQ ID NO: 13931
  Description of Artificial Sequence: Synthetic pistachio; 5' sequence and inner sequence

SEQ ID NO: 25724 - DNA, 53 bp, Artificial Sequence; identical to SEQ ID NO: 1466
  Description of Artificial Sequence: Synthetic pistachio; 5' sequence and inner sequence

SEQ ID NO: 25725 - DNA, 53 bp, Artificial Sequence; identical to SEQ ID NO: 5700
  Description of Artificial Sequence: Synthetic pistachio; 5' sequence and inner sequence

SEQ ID NO: 25726 - DNA, 53 bp, Artificial Sequence; identical to SEQ ID NO: 5787
  Description of Artificial Sequence: Synthetic pistachio; 5' sequence and inner sequence

SEQ ID NO: 25727 - DNA, 53 bp, Artificial Sequence; identical to SEQ ID NO: 21989
  Description of Artificial Sequence: Synthetic pistachio; 5' sequence and inner sequence

SEQ ID NO: 25728 - DNA, 53 bp, Artificial Sequence; identical to SEQ ID NO: 1512
  Description of Artificial Sequence: Synthetic pistachio; 5' sequence and inner sequence

SEQ ID NO: 25729 - DNA, 54 bp, Artificial Sequence; identical to SEQ ID NO: 21870
  Description of Artificial Sequence: Synthetic pistachio; 5' sequence and inner sequence

SEQ ID NO: 25730 - DNA, 53 bp, Artificial Sequence; identical to SEQ ID NO: 1713
  Description of Artificial Sequence: Synthetic pistachio; 5' sequence and inner sequence

SEQ ID NO: 25731 - DNA, 53 bp, Artificial Sequence; identical to SEQ ID NO: 1396
  Description of Artificial Sequence: Synthetic pistachio; 5' sequence and inner sequence

SEQ ID NO: 25732 - DNA, 53 bp, Artificial Sequence; identical to SEQ ID NO: 1601
  Description of Artificial Sequence: Synthetic pistachio; 5' sequence and inner sequence

SEQ ID NO: 25733 - DNA, 53 bp, Artificial Sequence; identical to SEQ ID NO: 1592
  Description of Artificial Sequence: Synthetic pistachio; 5' sequence and inner sequence

SEQ ID NO: 25734 - DNA, 53 bp, Artificial Sequence; identical to SEQ ID NO: 1717
  Description of Artificial Sequence: Synthetic pistachio; 5' sequence and inner sequence

SEQ ID NO: 25735 - DNA, 53 bp, Artificial Sequence; identical to SEQ ID NO: 1445
  Description of Artificial Sequence: Synthetic pistachio; 5' sequence and inner sequence

SEQ ID NO: 25736 - DNA, 53 bp, Artificial Sequence; identical to SEQ ID NO: 5890
  Description of Artificial Sequence: Synthetic pistachio; 5' sequence and inner sequence

SEQ ID NO: 25737 - DNA, 53 bp, Artificial Sequence; identical to SEQ ID NO: 1505
  Description of Artificial Sequence: Synthetic pistachio; 5' sequence and inner sequence

SEQ ID NO: 25738 - DNA, 53 bp, Artificial Sequence; identical to SEQ ID NO: 5254
  Description of Artificial Sequence: Synthetic pistachio; 5' sequence and inner sequence

SEQ ID NO: 25739 - DNA, 53 bp, Artificial Sequence; identical to SEQ ID NO: 1760
  Description of Artificial Sequence: Synthetic pistachio; 5' sequence and inner sequence

SEQ ID NO: 25740 - DNA, 52 bp, Artificial Sequence; identical to SEQ ID NO: 1549
  Description of Artificial Sequence: Synthetic pistachio; 5' sequence and inner sequence

SEQ ID NO: 25741 - DNA, 53 bp, Artificial Sequence; identical to SEQ ID NO: 5364
  Description of Artificial Sequence: Synthetic pistachio; 5' sequence and inner sequence

SEQ ID NO: 25742 - DNA, 53 bp, Artificial Sequence; identical to SEQ ID NO: 9627
  Description of Artificial Sequence: Synthetic pistachio; 5' sequence and inner sequence

SEQ ID NO: 25743 - DNA, 53 bp, Artificial Sequence; identical to SEQ ID NO: 9985
  Description of Artificial Sequence: Synthetic pistachio; 5' sequence and inner sequence

SEQ ID NO: 25744 - DNA, 53 bp, Artificial Sequence; identical to SEQ ID NO: 1869
  Description of Artificial Sequence: Synthetic pistachio; 5' sequence and inner sequence

SEQ ID NO: 25745 - DNA, 53 bp, Artificial Sequence; identical to SEQ ID NO: 6001
  Description of Artificial Sequence: Synthetic pistachio; 5' sequence and inner sequence

SEQ ID NO: 25746 - DNA, 53 bp, Artificial Sequence; identical to SEQ ID NO: 1273
  Description of Artificial Sequence: Synthetic pistachio; 5' sequence and inner sequence

SEQ ID NO: 25747 - DNA, 53 bp, Artificial Sequence; identical to SEQ ID NO: 21415
  Description of Artificial Sequence: Synthetic pistachio; 5' sequence and inner sequence

SEQ ID NO: 25748 - DNA, 53 bp, Artificial Sequence; identical to SEQ ID NO: 1381
  Description of Artificial Sequence: Synthetic pistachio; 5' sequence and inner sequence

SEQ ID NO: 25749 - DNA, 53 bp, Artificial Sequence; identical to SEQ ID NO: 9659
  Description of Artificial Sequence: Synthetic pistachio; 5' sequence and inner sequence

SEQ ID NO: 25750 - DNA, 53 bp, Artificial Sequence; identical to SEQ ID NO: 9837
  Description of Artificial Sequence: Synthetic pistachio; 5' sequence and inner sequence

SEQ ID NO: 25751 - DNA, 53 bp, Artificial Sequence; identical to SEQ ID NO: 21426
  Description of Artificial Sequence: Synthetic pistachio; 5' sequence and inner sequence

SEQ ID NO: 25752 - DNA, 53 bp, Artificial Sequence; identical to SEQ ID NO: 1471
  Description of Artificial Sequence: Synthetic pistachio; 5' sequence and inner sequence

SEQ ID NO: 25753 - DNA, 53 bp, Artificial Sequence; identical to SEQ ID NO: 5377
  Description of Artificial Sequence: Synthetic pistachio; 5' sequence and inner sequence

SEQ ID NO: 25754 - DNA, 53 bp, Artificial Sequence; identical to SEQ ID NO: 9993
  Description of Artificial Sequence: Synthetic pistachio; 5' sequence and inner sequence

SEQ ID NO: 25755 - DNA, 53 bp, Artificial Sequence; identical to SEQ ID NO: 1235
  Description of Artificial Sequence: Synthetic pistachio; 5' sequence and inner sequence

SEQ ID NO: 25756 - DNA, 53 bp, Artificial Sequence; identical to SEQ ID NO: 1327
  Description of Artificial Sequence: Synthetic pistachio; 5' sequence and inner sequence

SEQ ID NO: 25757 - DNA, 53 bp, Artificial Sequence; identical to SEQ ID NO: 5802
  Description of Artificial Sequence: Synthetic pistachio; 5' sequence and inner sequence

SEQ ID NO: 25758 - DNA, 53 bp, Artificial Sequence; identical to SEQ ID NO: 1501
  Description of Artificial Sequence: Synthetic pistachio; 5' sequence and inner sequence

SEQ ID NO: 25759 - DNA, 53 bp, Artificial Sequence; identical to SEQ ID NO: 5620
  Description of Artificial Sequence: Synthetic pistachio; 5' sequence and inner sequence

SEQ ID NO: 25760 - DNA, 52 bp, Artificial Sequence; identical to SEQ ID NO: 21705
  Description of Artificial Sequence: Synthetic pistachio; 5' sequence and inner sequence

SEQ ID NO: 25761 - DNA, 53 bp, Artificial Sequence; identical to SEQ ID NO: 1449
  Description of Artificial Sequence: Synthetic pistachio; 5' sequence and inner sequence

SEQ ID NO: 25762 - DNA, 53 bp, Artificial Sequence
  Description of Artificial Sequence: Synthetic pistachio; 5' sequence and inner sequence
tagggaagagaaggacatatgatcgaacgaaccgaggacatgcgctaggcaca

SEQ ID NO: 25763 - DNA, 53 bp, Artificial Sequence; identical to SEQ ID NO: 1843
  Description of Artificial Sequence: Synthetic pistachio; 5' sequence and inner sequence

SEQ ID NO: 25764 - DNA, 53 bp, Artificial Sequence; identical to SEQ ID NO: 1984
  Description of Artificial Sequence: Synthetic pistachio; 5' sequence and inner sequence

SEQ ID NO: 25765 - DNA, 53 bp, Artificial Sequence; identical to SEQ ID NO: 1424
  Description of Artificial Sequence: Synthetic pistachio; 5' sequence and inner sequence

SEQ ID NO: 25766 - DNA, 53 bp, Artificial Sequence; identical to SEQ ID NO: 1714
  Description of Artificial Sequence: Synthetic pistachio; 5' sequence and inner sequence

SEQ ID NO: 25767 - DNA, 53 bp, Artificial Sequence; identical to SEQ ID NO: 5740
  Description of Artificial Sequence: Synthetic pistachio; 5' sequence and inner sequence

SEQ ID NO: 25768 - DNA, 53 bp, Artificial Sequence; identical to SEQ ID NO: 1906
  Description of Artificial Sequence: Synthetic pistachio; 5' sequence and inner sequence

SEQ ID NO: 25769 - DNA, 53 bp, Artificial Sequence; identical to SEQ ID NO: 1655
  Description of Artificial Sequence: Synthetic pistachio; 5' sequence and inner sequence

SEQ ID NO: 25770 - DNA, 53 bp, Artificial Sequence; identical to SEQ ID NO: 9937
  Description of Artificial Sequence: Synthetic pistachio; 5' sequence and inner sequence

SEQ ID NO: 25771 - DNA, 53 bp, Artificial Sequence; identical to SEQ ID NO: 1698
  Description of Artificial Sequence: Synthetic pistachio; 5' sequence and inner sequence

SEQ ID NO: 25772 - DNA, 53 bp, Artificial Sequence; identical to SEQ ID NO: 5870
  Description of Artificial Sequence: Synthetic pistachio; 5' sequence and inner sequence

SEQ ID NO: 25773 - DNA, 51 bp, Artificial Sequence; identical to SEQ ID NO: 5786
  Description of Artificial Sequence: Synthetic pistachio; 5' sequence and inner sequence

SEQ ID NO: 25774 - DNA, 53 bp, Artificial Sequence; identical to SEQ ID NO: 5376
  Description of Artificial Sequence: Synthetic pistachio; 5' sequence and inner sequence

SEQ ID NO: 25775 - DNA, 53 bp, Artificial Sequence; identical to SEQ ID NO: 1643
  Description of Artificial Sequence: Synthetic pistachio; 5' sequence and inner sequence

SEQ ID NO: 25776 - DNA, 53 bp, Artificial Sequence; identical to SEQ ID NO: 5921
  Description of Artificial Sequence: Synthetic pistachio; 5' sequence and inner sequence

SEQ ID NO: 25777 - DNA, 54 bp, Artificial Sequence; identical to SEQ ID NO: 1971
  Description of Artificial Sequence: Synthetic pistachio; 5' sequence and inner sequence

SEQ ID NO: 25778 - DNA, 53 bp, Artificial Sequence; identical to SEQ ID NO: 1951
  Description of Artificial Sequence: Synthetic pistachio; 5' sequence and inner sequence

SEQ ID NO: 25779 - DNA, 53 bp, Artificial Sequence; identical to SEQ ID NO: 1921
  Description of Artificial Sequence: Synthetic pistachio; 5' sequence and inner sequence

SEQ ID NO: 25780 - DNA, 53 bp, Artificial Sequence; identical to SEQ ID NO: 1842
  Description of Artificial Sequence: Synthetic pistachio; 5' sequence and inner sequence

SEQ ID NO: 25781 - DNA, 53 bp, Artificial Sequence; identical to SEQ ID NO: 1494
  Description of Artificial Sequence: Synthetic pistachio; 5' sequence and inner sequence

SEQ ID NO: 25782 - DNA, 53 bp, Artificial Sequence; identical to SEQ ID NO: 1830
  Description of Artificial Sequence: Synthetic pistachio; 5' sequence and inner sequence

SEQ ID NO: 25783 - DNA, 53 bp, Artificial Sequence; identical to SEQ ID NO: 1619
  Description of Artificial Sequence: Synthetic pistachio; 5' sequence and inner sequence

SEQ ID NO: 25784 - DNA, 53 bp, Artificial Sequence; identical to SEQ ID NO: 1593
  Description of Artificial Sequence: Synthetic pistachio; 5' sequence and inner sequence

SEQ ID NO: 25785 - DNA, 53 bp, Artificial Sequence; identical to SEQ ID NO: 1835
  Description of Artificial Sequence: Synthetic pistachio; 5' sequence and inner sequence

SEQ ID NO: 25786 - DNA, 53 bp, Artificial Sequence; identical to SEQ ID NO: 1753
  Description of Artificial Sequence: Synthetic pistachio; 5' sequence and inner sequence

SEQ ID NO: 25787 - DNA, 53 bp, Artificial Sequence; identical to SEQ ID NO: 9825
  Description of Artificial Sequence: Synthetic pistachio; 5' sequence and inner sequence

SEQ ID NO: 25788 - DNA, 53 bp, Artificial Sequence; identical to SEQ ID NO: 21339
  Description of Artificial Sequence: Synthetic pistachio; 5' sequence and inner sequence

SEQ ID NO: 25789 - DNA, 53 bp, Artificial Sequence; identical to SEQ ID NO: 5719
  Description of Artificial Sequence: Synthetic pistachio; 5' sequence and inner sequence

SEQ ID NO: 25790 - DNA, 53 bp, Artificial Sequence; identical to SEQ ID NO: 1981
  Description of Artificial Sequence: Synthetic pistachio; 5' sequence and inner sequence

SEQ ID NO: 25791 - DNA, 53 bp, Artificial Sequence; identical to SEQ ID NO: 5976
  Description of Artificial Sequence: Synthetic pistachio; 5' sequence and inner sequence

SEQ ID NO: 25792 - DNA, 53 bp, Artificial Sequence; identical to SEQ ID NO: 9810
  Description of Artificial Sequence: Synthetic pistachio; 5' sequence and inner sequence

SEQ ID NO: 25793 - DNA, 53 bp, Artificial Sequence; identical to SEQ ID NO: 1665
  Description of Artificial Sequence: Synthetic pistachio; 5' sequence and inner sequence

SEQ ID NO: 25794 - DNA, 53 bp, Artificial Sequence; identical to SEQ ID NO: 21789
  Description of Artificial Sequence: Synthetic pistachio; 5' sequence and inner sequence

SEQ ID NO: 25795 - DNA, 53 bp, Artificial Sequence; identical to SEQ ID NO: 1679
  Description of Artificial Sequence: Synthetic pistachio; 5' sequence and inner sequence

SEQ ID NO: 25796 - DNA, 53 bp, Artificial Sequence; identical to SEQ ID NO: 5799
  Description of Artificial Sequence: Synthetic pistachio; 5' sequence and inner sequence

SEQ ID NO: 25797 - DNA, 53 bp, Artificial Sequence; identical to SEQ ID NO: 1649
  Description of Artificial Sequence: Synthetic pistachio; 5' sequence and inner sequence

SEQ ID NO: 25798 - DNA, 53 bp, Artificial Sequence; identical to SEQ ID NO: 1682
  Description of Artificial Sequence: Synthetic pistachio; 5' sequence and inner sequence

SEQ ID NO: 25799 - DNA, 53 bp, Artificial Sequence; identical to SEQ ID NO: 21548
  Description of Artificial Sequence: Synthetic pistachio; 5' sequence and inner sequence

SEQ ID NO: 25800 - DNA, 53 bp, Artificial Sequence; identical to SEQ ID NO: 1867
  Description of Artificial Sequence: Synthetic pistachio; 5' sequence and inner sequence

SEQ ID NO: 25801 - DNA, 53 bp, Artificial Sequence
  Description of Artificial Sequence: Synthetic pistachio; 5' sequence and inner sequence
tagggaagagaaggacatatgatggatgtaacgcaccgttcaattgcggcatg

SEQ ID NO: 25802 - DNA, 53 bp, Artificial Sequence; identical to SEQ ID NO: 5816
  Description of Artificial Sequence: Synthetic pistachio; 5' sequence and inner sequence

SEQ ID NO: 25803 - DNA, 53 bp, Artificial Sequence; identical to SEQ ID NO: 5745
  Description of Artificial Sequence: Synthetic pistachio; 5' sequence and inner sequence

SEQ ID NO: 25804 - DNA, 53 bp, Artificial Sequence; identical to SEQ ID NO: 1700
  Description of Artificial Sequence: Synthetic pistachio; 5' sequence and inner sequence

SEQ ID NO: 25805 - DNA, 53 bp, Artificial Sequence; identical to SEQ ID NO: 1388
  Description of Artificial Sequence: Synthetic pistachio; 5' sequence and inner sequence

SEQ ID NO: 25806 - DNA, 53 bp, Artificial Sequence; identical to SEQ ID NO: 5755
  Description of Artificial Sequence: Synthetic pistachio; 5' sequence and inner sequence

SEQ ID NO: 25807 - DNA, 53 bp, Artificial Sequence; identical to SEQ ID NO: 21410
  Description of Artificial Sequence: Synthetic pistachio; 5' sequence and inner sequence

SEQ ID NO: 25808 - DNA, 53 bp, Artificial Sequence; identical to SEQ ID NO: 1860
  Description of Artificial Sequence: Synthetic pistachio; 5' sequence and inner sequence

SEQ ID NO: 25809 - DNA, 53 bp, Artificial Sequence; identical to SEQ ID NO: 1252
  Description of Artificial Sequence: Synthetic pistachio; 5' sequence and inner sequence

SEQ ID NO: 25810 - DNA, 53 bp, Artificial Sequence
  Description of Artificial Sequence: Synthetic pistachio; 5' sequence and inner sequence
tagggaagagaaggacatatgatcgcgctcgtaccgtaggtcttgtcgtggga

SEQ ID NO: 25811 - DNA, 53 bp, Artificial Sequence; identical to SEQ ID NO: 21519
  Description of Artificial Sequence: Synthetic pistachio; 5' sequence and inner sequence

SEQ ID NO: 25812 - DNA, 53 bp, Artificial Sequence
  Description of Artificial Sequence: Synthetic pistachio; 5' sequence and inner sequence
tagggaagagaaggacatatgatcgcactacaagggggaggtgacgttgcgcc

SEQ ID NO: 25813 - DNA, 53 bp, Artificial Sequence; identical to SEQ ID NO: 5873
  Description of Artificial Sequence: Synthetic pistachio; 5' sequence and inner sequence

SEQ ID NO: 25814 - DNA, 53 bp, Artificial Sequence; identical to SEQ ID NO: 5592
  Description of Artificial Sequence: Synthetic pistachio; 5' sequence and inner sequence

SEQ ID NO: 25815 - DNA, 53 bp, Artificial Sequence; identical to SEQ ID NO: 5348
  Description of Artificial Sequence: Synthetic pistachio; 5' sequence and inner sequence

SEQ ID NO: 25816 - DNA, 53 bp, Artificial Sequence; identical to SEQ ID NO: 5955
  Description of Artificial Sequence: Synthetic pistachio; 5' sequence and inner sequence

SEQ ID NO: 25817 - DNA, 53 bp, Artificial Sequence; identical to SEQ ID NO: 5817
  Description of Artificial Sequence: Synthetic pistachio; 5' sequence and inner sequence

SEQ ID NO: 25818 - DNA, 53 bp, Artificial Sequence; identical to SEQ ID NO: 9798
  Description of Artificial Sequence: Synthetic pistachio; 5' sequence and inner sequence

SEQ ID NO: 25819 - DNA, 53 bp, Artificial Sequence; identical to SEQ ID NO: 1950
  Description of Artificial Sequence: Synthetic pistachio; 5' sequence and inner sequence

SEQ ID NO: 25820 - DNA, 53 bp, Artificial Sequence; identical to SEQ ID NO: 13791
  Description of Artificial Sequence: Synthetic pistachio; 5' sequence and inner sequence

SEQ ID NO: 25821 - DNA, 53 bp, Artificial Sequence; identical to SEQ ID NO: 1725
  Description of Artificial Sequence: Synthetic pistachio; 5' sequence and inner sequence

SEQ ID NO: 25822 - DNA, 53 bp, Artificial Sequence; identical to SEQ ID NO: 5963
  Description of Artificial Sequence: Synthetic pistachio; 5' sequence and inner sequence

SEQ ID NO: 25823 - DNA, 53 bp, Artificial Sequence; identical to SEQ ID NO: 9949
  Description of Artificial Sequence: Synthetic pistachio; 5' sequence and inner sequence

SEQ ID NO: 25824 - DNA, 53 bp, Artificial Sequence; identical to SEQ ID NO: 1686
  Description of Artificial Sequence: Synthetic pistachio; 5' sequence and inner sequence

SEQ ID NO: 25825 - DNA, 53 bp, Artificial Sequence; identical to SEQ ID NO: 1720
  Description of Artificial Sequence: Synthetic pistachio; 5' sequence and inner sequence

SEQ ID NO: 25826 - DNA, 53 bp, Artificial Sequence; identical to SEQ ID NO: 1440
  Description of Artificial Sequence: Synthetic pistachio; 5' sequence and inner sequence

SEQ ID NO: 25827 - DNA, 53 bp, Artificial Sequence; identical to SEQ ID NO: 21165
  Description of Artificial Sequence: Synthetic pistachio; 5' sequence and inner sequence

SEQ ID NO: 25828 - DNA, 53 bp, Artificial Sequence; identical to SEQ ID NO: 5509
  Description of Artificial Sequence: Synthetic pistachio; 5' sequence and inner sequence

SEQ ID NO: 25829 - DNA, 53 bp, Artificial Sequence; identical to SEQ ID NO: 5776
  Description of Artificial Sequence: Synthetic pistachio; 5' sequence and inner sequence

SEQ ID NO: 25830 - DNA, 53 bp, Artificial Sequence; identical to SEQ ID NO: 5504
  Description of Artificial Sequence: Synthetic pistachio; 5' sequence and inner sequence

SEQ ID NO: 25831 - DNA, 53 bp, Artificial Sequence; identical to SEQ ID NO: 5394
  Description of Artificial Sequence: Synthetic pistachio; 5' sequence and inner sequence

SEQ ID NO: 25832 - DNA, 53 bp, Artificial Sequence; identical to SEQ ID NO: 1761
  Description of Artificial Sequence: Synthetic pistachio; 5' sequence and inner sequence

SEQ ID NO: 25833 - DNA, 53 bp, Artificial Sequence; identical to SEQ ID NO: 1778
  Description of Artificial Sequence: Synthetic pistachio; 5' sequence and inner sequence

SEQ ID NO: 25834 - DNA, 53 bp, Artificial Sequence; identical to SEQ ID NO: 1590
  Description of Artificial Sequence: Synthetic pistachio; 5' sequence and inner sequence

SEQ ID NO: 25835 - DNA, 53 bp, Artificial Sequence; identical to SEQ ID NO: 5616
  Description of Artificial Sequence: Synthetic pistachio; 5' sequence and inner sequence

SEQ ID NO: 25836 - DNA, 53 bp, Artificial Sequence; identical to SEQ ID NO: 1691
  Description of Artificial Sequence: Synthetic pistachio; 5' sequence and inner sequence

SEQ ID NO: 25837 - DNA, 53 bp, Artificial Sequence; identical to SEQ ID NO: 1940
  Description of Artificial Sequence: Synthetic pistachio; 5' sequence and inner sequence

SEQ ID NO: 25838 - DNA, 53 bp, Artificial Sequence; identical to SEQ ID NO: 5717
  Description of Artificial Sequence: Synthetic pistachio; 5' sequence and inner sequence

SEQ ID NO: 25839 - DNA, 53 bp, Artificial Sequence
  Description of Artificial Sequence: Synthetic pistachio; 5' sequence and inner sequence
tagggaagagaaggacatatgatcgcaccggcatggcgtaggcagtcgtgaca

SEQ ID NO: 25840 - DNA, 53 bp, Artificial Sequence; identical to SEQ ID NO: 21335
  Description of Artificial Sequence: Synthetic pistachio; 5' sequence and inner sequence

SEQ ID NO: 25841 - DNA, 53 bp, Artificial Sequence; identical to SEQ ID NO: 1415
  Description of Artificial Sequence: Synthetic pistachio; 5' sequence and inner sequence

SEQ ID NO: 25842 - DNA, 53 bp, Artificial Sequence; identical to SEQ ID NO: 1598
  Description of Artificial Sequence: Synthetic pistachio; 5' sequence and inner sequence

SEQ ID NO: 25843 - DNA, 53 bp, Artificial Sequence
  Description of Artificial Sequence: Synthetic pistachio; 5' sequence and inner sequence
tagggaagagaaggacatatgatggacgcatcgccccttcatgttgtcgtgta

SEQ ID NO: 25844 - DNA, 52 bp, Artificial Sequence; identical to SEQ ID NO: 5869
  Description of Artificial Sequence: Synthetic pistachio; 5' sequence and inner sequence

SEQ ID NO: 25845 - DNA, 53 bp, Artificial Sequence; identical to SEQ ID NO: 1604
  Description of Artificial Sequence: Synthetic pistachio; 5' sequence and inner sequence

SEQ ID NO: 25846 - DNA, 53 bp, Artificial Sequence; identical to SEQ ID NO: 1961
  Description of Artificial Sequence: Synthetic pistachio; 5' sequence and inner sequence

SEQ ID NO: 25847 - DNA, 53 bp, Artificial Sequence; identical to SEQ ID NO: 1542
  Description of Artificial Sequence: Synthetic pistachio; 5' sequence and inner sequence

SEQ ID NO: 25848 - DNA, 54 bp, Artificial Sequence; identical to SEQ ID NO: 1503
  Description of Artificial Sequence: Synthetic pistachio; 5' sequence and inner sequence

SEQ ID NO: 25849 - DNA, 53 bp, Artificial Sequence; identical to SEQ ID NO: 1382
  Description of Artificial Sequence: Synthetic pistachio; 5' sequence and inner sequence

SEQ ID NO: 25850 - DNA, 53 bp, Artificial Sequence; identical to SEQ ID NO: 9816
  Description of Artificial Sequence: Synthetic pistachio; 5' sequence and inner sequence

SEQ ID NO: 25851 - DNA, 53 bp, Artificial Sequence; identical to SEQ ID NO: 5830
  Description of Artificial Sequence: Synthetic pistachio; 5' sequence and inner sequence

SEQ ID NO: 25852 - DNA, 53 bp, Artificial Sequence
  Description of Artificial Sequence: Synthetic pistachio; 5' sequence and inner sequence
tagggaagagaaggacatatgatgcatcgcgtcactatcatgtgtgtcacgta

SEQ ID NO: 25853 - DNA, 53 bp, Artificial Sequence; identical to SEQ ID NO: 1286
  Description of Artificial Sequence: Synthetic pistachio; 5' sequence and inner sequence

SEQ ID NO: 25854 - DNA, 53 bp, Artificial Sequence; identical to SEQ ID NO: 1384
  Description of Artificial Sequence: Synthetic pistachio; 5' sequence and inner sequence

SEQ ID NO: 25855 - DNA, 53 bp, Artificial Sequence; identical to SEQ ID NO: 5894
  Description of Artificial Sequence: Synthetic pistachio; 5' sequence and inner sequence

SEQ ID NO: 25856 - DNA, 53 bp, Artificial Sequence; identical to SEQ ID NO: 5280
  Description of Artificial Sequence: Synthetic pistachio; 5' sequence and inner sequence

SEQ ID NO: 25857 - DNA, 53 bp, Artificial Sequence
  Description of Artificial Sequence: Synthetic pistachio; 5' sequence and inner sequence
tagggaagagaaggacatatgatcgaccgtgagtggcgatgtgtctcggtgca

SEQ ID NO: 25858 - DNA, 53 bp, Artificial Sequence; identical to SEQ ID NO: 1701
  Description of Artificial Sequence: Synthetic pistachio; 5' sequence and inner sequence

SEQ ID NO: 25859 - DNA, 53 bp, Artificial Sequence; identical to SEQ ID NO: 5692
  Description of Artificial Sequence: Synthetic pistachio; 5' sequence and inner sequence

SEQ ID NO: 25860 - DNA, 53 bp, Artificial Sequence; identical to SEQ ID NO: 1857
  Description of Artificial Sequence: Synthetic pistachio; 5' sequence and inner sequence

SEQ ID NO: 25861 - DNA, 53 bp, Artificial Sequence; identical to SEQ ID NO: 21331
  Description of Artificial Sequence: Synthetic pistachio; 5' sequence and inner sequence

SEQ ID NO: 25862 - DNA, 53 bp, Artificial Sequence; identical to SEQ ID NO: 5790
  Description of Artificial Sequence: Synthetic pistachio; 5' sequence and inner sequence

SEQ ID NO: 25863 - DNA, 53 bp, Artificial Sequence; identical to SEQ ID NO: 1722
  Description of Artificial Sequence: Synthetic pistachio; 5' sequence and inner sequence

SEQ ID NO: 25864 - DNA, 53 bp, Artificial Sequence; identical to SEQ ID NO: 5682
  Description of Artificial Sequence: Synthetic pistachio; 5' sequence and inner sequence

SEQ ID NO: 25865 - DNA, 53 bp, Artificial Sequence; identical to SEQ ID NO: 21760
  Description of Artificial Sequence: Synthetic pistachio; 5' sequence and inner sequence

SEQ ID NO: 25866 - DNA, 53 bp, Artificial Sequence; identical to SEQ ID NO: 5491
  Description of Artificial Sequence: Synthetic pistachio; 5' sequence and inner sequence

SEQ ID NO: 25867 - DNA, 53 bp, Artificial Sequence; identical to SEQ ID NO: 1444
  Description of Artificial Sequence: Synthetic pistachio; 5' sequence and inner sequence

SEQ ID NO: 25868 - DNA, 53 bp, Artificial Sequence; identical to SEQ ID NO: 1960
  Description of Artificial Sequence: Synthetic pistachio; 5' sequence and inner sequence

SEQ ID NO: 25869 - DNA, 53 bp, Artificial Sequence; identical to SEQ ID NO: 1996
  Description of Artificial Sequence: Synthetic pistachio; 5' sequence and inner sequence

SEQ ID NO: 25870 - DNA, 53 bp, Artificial Sequence
  Description of Artificial Sequence: Synthetic pistachio; 5' sequence and inner sequence
tagggaagagaaggacatatgatcgcgccgagcatgcctagcgatgctgcaca

SEQ ID NO: 25871 - DNA, 53 bp, Artificial Sequence; identical to SEQ ID NO: 2001
  Description of Artificial Sequence: Synthetic pistachio; 5' sequence and inner sequence

SEQ ID NO: 25872 - DNA, 53 bp, Artificial Sequence
  Description of Artificial Sequence: Synthetic pistachio; 5' sequence and inner sequence
tagggaagagaaggacatatgattgacgcacgcagaccttcaagtcggccatg

SEQ ID NO: 25873 - DNA, 53 bp, Artificial Sequence; identical to SEQ ID NO: 9850
  Description of Artificial Sequence: Synthetic pistachio; 5' sequence and inner sequence

SEQ ID NO: 25874 - DNA, 53 bp, Artificial Sequence; identical to SEQ ID NO: 1731
  Description of Artificial Sequence: Synthetic pistachio; 5' sequence and inner sequence

SEQ ID NO: 25875 - DNA, 53 bp, Artificial Sequence
  Description of Artificial Sequence: Synthetic pistachio; 5' sequence and inner sequence
tagggaagagaaggacatatgatggatgcggctgacctgatcaatgtgcgcca

SEQ ID NO: 25876 - DNA, 53 bp, Artificial Sequence; identical to SEQ ID NO: 1871
  Description of Artificial Sequence: Synthetic pistachio; 5' sequence and inner sequence

SEQ ID NO: 25877 - DNA, 53 bp, Artificial Sequence
  Description of Artificial Sequence: Synthetic pistachio; 5' sequence and inner sequence
tagggaagagaaggacatatgatgtcatgcgcggacattcacgttggcgtgga

SEQ ID NO: 25878 - DNA, 53 bp, Artificial Sequence; identical to SEQ ID NO: 1526
  Description of Artificial Sequence: Synthetic pistachio; 5' sequence and inner sequence

SEQ ID NO: 25879 - DNA, 53 bp, Artificial Sequence; identical to SEQ ID NO: 9868
  Description of Artificial Sequence: Synthetic pistachio; 5' sequence and inner sequence

SEQ ID NO: 25880 - DNA, 53 bp, Artificial Sequence; identical to SEQ ID NO: 21544
  Description of Artificial Sequence: Synthetic pistachio; 5' sequence and inner sequence

SEQ ID NO: 25881 - DNA, 53 bp, Artificial Sequence; identical to SEQ ID NO: 13933
  Description of Artificial Sequence: Synthetic pistachio; 5' sequence and inner sequence

SEQ ID NO: 25882 - DNA, 53 bp, Artificial Sequence; identical to SEQ ID NO: 13986
  Description of Artificial Sequence: Synthetic pistachio; 5' sequence and inner sequence

SEQ ID NO: 25883 - DNA, 53 bp, Artificial Sequence; identical to SEQ ID NO: 1674
  Description of Artificial Sequence: Synthetic pistachio; 5' sequence and inner sequence

SEQ ID NO: 25884 - DNA, 54 bp, Artificial Sequence; identical to SEQ ID NO: 1489
  Description of Artificial Sequence: Synthetic pistachio; 5' sequence and inner sequence

SEQ ID NO: 25885 - DNA, 51 bp, Artificial Sequence; identical to SEQ ID NO: 21321
  Description of Artificial Sequence: Synthetic pistachio; 5' sequence and inner sequence

SEQ ID NO: 25886 - DNA, 53 bp, Artificial Sequence; identical to SEQ ID NO: 1547
  Description of Artificial Sequence: Synthetic pistachio; 5' sequence and inner sequence

SEQ ID NO: 25887 - DNA, 53 bp, Artificial Sequence; identical to SEQ ID NO: 1554
  Description of Artificial Sequence: Synthetic pistachio; 5' sequence and inner sequence

SEQ ID NO: 25888 - DNA, 53 bp, Artificial Sequence; identical to SEQ ID NO: 13853
  Description of Artificial Sequence: Synthetic pistachio; 5' sequence and inner sequence

SEQ ID NO: 25889 - DNA, 53 bp, Artificial Sequence; identical to SEQ ID NO: 1683
  Description of Artificial Sequence: Synthetic pistachio; 5' sequence and inner sequence

SEQ ID NO: 25890 - DNA, 53 bp, Artificial Sequence; identical to SEQ ID NO: 1610
  Description of Artificial Sequence: Synthetic pistachio; 5' sequence and inner sequence

SEQ ID NO: 25891 - DNA, 53 bp, Artificial Sequence; identical to SEQ ID NO: 1709
  Description of Artificial Sequence: Synthetic pistachio; 5' sequence and inner sequence

SEQ ID NO: 25892 - DNA, 53 bp, Artificial Sequence; identical to SEQ ID NO: 1948
  Description of Artificial Sequence: Synthetic pistachio; 5' sequence and inner sequence

SEQ ID NO: 25893 - DNA, 53 bp, Artificial Sequence; identical to SEQ ID NO: 21902
  Description of Artificial Sequence: Synthetic pistachio; 5' sequence and inner sequence

SEQ ID NO: 25894 - DNA, 53 bp, Artificial Sequence; identical to SEQ ID NO: 1295
  Description of Artificial Sequence: Synthetic pistachio; 5' sequence and inner sequence

SEQ ID NO: 25895 - DNA, 53 bp, Artificial Sequence; identical to SEQ ID NO: 1739
  Description of Artificial Sequence: Synthetic pistachio; 5' sequence and inner sequence

SEQ ID NO: 25896 - DNA, 53 bp, Artificial Sequence; identical to SEQ ID NO: 5807
  Description of Artificial Sequence: Synthetic pistachio; 5' sequence and inner sequence

SEQ ID NO: 25897 - DNA, 53 bp, Artificial Sequence; identical to SEQ ID NO: 1726
  Description of Artificial Sequence: Synthetic pistachio; 5' sequence and inner sequence

SEQ ID NO: 25898 - DNA, 53 bp, Artificial Sequence; identical to SEQ ID NO: 1831
  Description of Artificial Sequence: Synthetic pistachio; 5' sequence and inner sequence

SEQ ID NO: 25899 - DNA, 53 bp, Artificial Sequence; identical to SEQ ID NO: 13799
  Description of Artificial Sequence: Synthetic pistachio; 5' sequence and inner sequence

SEQ ID NO: 25900 - DNA, 53 bp, Artificial Sequence; identical to SEQ ID NO: 21590
  Description of Artificial Sequence: Synthetic pistachio; 5' sequence and inner sequence

SEQ ID NO: 25901 - DNA, 53 bp, Artificial Sequence; identical to SEQ ID NO: 1688
  Description of Artificial Sequence: Synthetic pistachio; 5' sequence and inner sequence

SEQ ID NO: 25902 - DNA, 50 bp, Artificial Sequence
  Description of Artificial Sequence: Synthetic pistachio; 5' sequence and inner sequence
tagggaagagaaggacatatgatgcatgcgatgatccttcgagtgcgtca

SEQ ID NO: 25903 - DNA, 53 bp, Artificial Sequence; identical to SEQ ID NO: 5591
  Description of Artificial Sequence: Synthetic pistachio; 5' sequence and inner sequence

SEQ ID NO: 25904 - DNA, 53 bp, Artificial Sequence; identical to SEQ ID NO: 5857
  Description of Artificial Sequence: Synthetic pistachio; 5' sequence and inner sequence

SEQ ID NO: 25905 - DNA, 53 bp, Artificial Sequence; identical to SEQ ID NO: 1917
  Description of Artificial Sequence: Synthetic pistachio; 5' sequence and inner sequence

SEQ ID NO: 25906 - DNA, 53 bp, Artificial Sequence
  Description of Artificial Sequence: Synthetic pistachio; 5' sequence and inner sequence
tagggaagagaaggacatatgatcggcacgtagccctatcagtggtgcatgca

SEQ ID NO: 25907 - DNA, 53 bp, Artificial Sequence; identical to SEQ ID NO: 21642
  Description of Artificial Sequence: Synthetic pistachio; 5' sequence and inner sequence

SEQ ID NO: 25908 - DNA, 53 bp, Artificial Sequence; identical to SEQ ID NO: 1474
  Description of Artificial Sequence: Synthetic pistachio; 5' sequence and inner sequence

SEQ ID NO: 25909 - DNA, 53 bp, Artificial Sequence; identical to SEQ ID NO: 9892
  Description of Artificial Sequence: Synthetic pistachio; 5' sequence and inner sequence

SEQ ID NO: 25910 - DNA, 53 bp, Artificial Sequence; identical to SEQ ID NO: 21424
  Description of Artificial Sequence: Synthetic pistachio; 5' sequence and inner sequence

SEQ ID NO: 25911 - DNA, 53 bp, Artificial Sequence; identical to SEQ ID NO: 5580
  Description of Artificial Sequence: Synthetic pistachio; 5' sequence and inner sequence

SEQ ID NO: 25912 - DNA, 53 bp, Artificial Sequence; identical to SEQ ID NO: 13971
  Description of Artificial Sequence: Synthetic pistachio; 5' sequence and inner sequence

SEQ ID NO: 25913 - DNA, 53 bp, Artificial Sequence; identical to SEQ ID NO: 1458
  Description of Artificial Sequence: Synthetic pistachio; 5' sequence and inner sequence

SEQ ID NO: 25914 - DNA, 53 bp, Artificial Sequence; identical to SEQ ID NO: 13866
  Description of Artificial Sequence: Synthetic pistachio; 5' sequence and inner sequence

SEQ ID NO: 25915 - DNA, 53 bp, Artificial Sequence; identical to SEQ ID NO: 1758
  Description of Artificial Sequence: Synthetic pistachio; 5' sequence and inner sequence

SEQ ID NO: 25916 - DNA, 53 bp, Artificial Sequence; identical to SEQ ID NO: 5393
  Description of Artificial Sequence: Synthetic pistachio; 5' sequence and inner sequence

SEQ ID NO: 25917 - DNA, 53 bp, Artificial Sequence; identical to SEQ ID NO: 1600
  Description of Artificial Sequence: Synthetic pistachio; 5' sequence and inner sequence

SEQ ID NO: 25918 - DNA, 53 bp, Artificial Sequence; identical to SEQ ID NO: 5641
  Description of Artificial Sequence: Synthetic pistachio; 5' sequence and inner sequence

SEQ ID NO: 25919 - DNA, 53 bp, Artificial Sequence; identical to SEQ ID NO: 5907
  Description of Artificial Sequence: Synthetic pistachio; 5' sequence and inner sequence

SEQ ID NO: 25920 - DNA, 53 bp, Artificial Sequence; identical to SEQ ID NO: 5419
  Description of Artificial Sequence: Synthetic pistachio; 5' sequence and inner sequence

SEQ ID NO: 25921 - DNA, 53 bp, Artificial Sequence; identical to SEQ ID NO: 9682
  Description of Artificial Sequence: Synthetic pistachio; 5' sequence and inner sequence

SEQ ID NO: 25922 - DNA, 53 bp, Artificial Sequence; identical to SEQ ID NO: 5997
  Description of Artificial Sequence: Synthetic pistachio; 5' sequence and inner sequence

SEQ ID NO: 25923 - DNA, 53 bp, Artificial Sequence; identical to SEQ ID NO: 1383
  Description of Artificial Sequence: Synthetic pistachio; 5' sequence and inner sequence

SEQ ID NO: 25924 - DNA, 53 bp, Artificial Sequence; identical to SEQ ID NO: 9960
  Description of Artificial Sequence: Synthetic pistachio; 5' sequence and inner sequence

SEQ ID NO: 25925 - DNA, 53 bp, Artificial Sequence; identical to SEQ ID NO: 13996
  Description of Artificial Sequence: Synthetic pistachio; 5' sequence and inner sequence

SEQ ID NO: 25926 - DNA, 53 bp, Artificial Sequence; identical to SEQ ID NO: 1721
  Description of Artificial Sequence: Synthetic pistachio; 5' sequence and inner sequence

SEQ ID NO: 25927 - DNA, 53 bp, Artificial Sequence
  Description of Artificial Sequence: Synthetic pistachio; 5' sequence and inner sequence
tagggaagagaaggacatatgattggccgatcgaccctaccaagtgcagcatg

SEQ ID NO: 25928 - DNA, 53 bp, Artificial Sequence; identical to SEQ ID NO: 21576
  Description of Artificial Sequence: Synthetic pistachio; 5' sequence and inner sequence

SEQ ID NO: 25929 - DNA, 53 bp, Artificial Sequence; identical to SEQ ID NO: 1819
  Description of Artificial Sequence: Synthetic pistachio; 5' sequence and inner sequence

SEQ ID NO: 25930 - DNA, 53 bp, Artificial Sequence; identical to SEQ ID NO: 5739
  Description of Artificial Sequence: Synthetic pistachio; 5' sequence and inner sequence

SEQ ID NO: 25931 - DNA, 53 bp, Artificial Sequence; identical to SEQ ID NO: 21327
  Description of Artificial Sequence: Synthetic pistachio; 5' sequence and inner sequence

SEQ ID NO: 25932 - DNA, 53 bp, Artificial Sequence; identical to SEQ ID NO: 13773
  Description of Artificial Sequence: Synthetic pistachio; 5' sequence and inner sequence

SEQ ID NO: 25933 - DNA, 54 bp, Artificial Sequence; identical to SEQ ID NO: 1845
  Description of Artificial Sequence: Synthetic pistachio; 5' sequence and inner sequence

SEQ ID NO: 25934 - DNA, 53 bp, Artificial Sequence; identical to SEQ ID NO: 1826
  Description of Artificial Sequence: Synthetic pistachio; 5' sequence and inner sequence

SEQ ID NO: 25935 - DNA, 53 bp, Artificial Sequence; identical to SEQ ID NO: 1849
  Description of Artificial Sequence: Synthetic pistachio; 5' sequence and inner sequence

SEQ ID NO: 25936 - DNA, 53 bp, Artificial Sequence; identical to SEQ ID NO: 1629
  Description of Artificial Sequence: Synthetic pistachio; 5' sequence and inner sequence

SEQ ID NO: 25937 - DNA, 53 bp, Artificial Sequence; identical to SEQ ID NO: 1565
  Description of Artificial Sequence: Synthetic pistachio; 5' sequence and inner sequence

SEQ ID NO: 25938 - DNA, 53 bp, Artificial Sequence; identical to SEQ ID NO: 5711
  Description of Artificial Sequence: Synthetic pistachio; 5' sequence and inner sequence

SEQ ID NO: 25939 - DNA, 53 bp, Artificial Sequence; identical to SEQ ID NO: 5499
  Description of Artificial Sequence: Synthetic pistachio; 5' sequence and inner sequence

SEQ ID NO: 25940 - DNA, 53 bp, Artificial Sequence; identical to SEQ ID NO: 5881
  Description of Artificial Sequence: Synthetic pistachio; 5' sequence and inner sequence

SEQ ID NO: 25941 - DNA, 53 bp, Artificial Sequence; identical to SEQ ID NO: 1705
  Description of Artificial Sequence: Synthetic pistachio; 5' sequence and inner sequence

SEQ ID NO: 25942 - DNA, 53 bp, Artificial Sequence; identical to SEQ ID NO: 21441
  Description of Artificial Sequence: Synthetic pistachio; 5' sequence and inner sequence

SEQ ID NO: 25943 - DNA, 53 bp, Artificial Sequence
  Description of Artificial Sequence: Synthetic pistachio; 5' sequence and inner sequence
tagggaagagaaggacatatgatcgcaacgtcaagcgggaaggcactttggtg

SEQ ID NO: 25944 - DNA, 53 bp, Artificial Sequence; identical to SEQ ID NO: 1781
  Description of Artificial Sequence: Synthetic pistachio; 5' sequence and inner sequence

SEQ ID NO: 25945 - DNA, 53 bp, Artificial Sequence; identical to SEQ ID NO: 1558
  Description of Artificial Sequence: Synthetic pistachio; 5' sequence and inner sequence

SEQ ID NO: 25946 - DNA, 53 bp, Artificial Sequence; identical to SEQ ID NO: 21385
  Description of Artificial Sequence: Synthetic pistachio; 5' sequence and inner sequence

SEQ ID NO: 25947 - DNA, 53 bp, Artificial Sequence; identical to SEQ ID NO: 5653
  Description of Artificial Sequence: Synthetic pistachio; 5' sequence and inner sequence

SEQ ID NO: 25948 - DNA, 53 bp, Artificial Sequence
  Description of Artificial Sequence: Synthetic pistachio; 5' sequence and inner sequence
tagggaagagaaggacatatgattgcgtcagatgcatcgtgttcccctgggca

SEQ ID NO: 25949 - DNA, 53 bp, Artificial Sequence; identical to SEQ ID NO: 1874
  Description of Artificial Sequence: Synthetic pistachio; 5' sequence and inner sequence

SEQ ID NO: 25950 - DNA, 53 bp, Artificial Sequence; identical to SEQ ID NO: 21549
  Description of Artificial Sequence: Synthetic pistachio; 5' sequence and inner sequence

SEQ ID NO: 25951 - DNA, 53 bp, Artificial Sequence; identical to SEQ ID NO: 22001
  Description of Artificial Sequence: Synthetic pistachio; 5' sequence and inner sequence

SEQ ID NO: 25952 - DNA, 53 bp, Artificial Sequence; identical to SEQ ID NO: 1635
  Description of Artificial Sequence: Synthetic pistachio; 5' sequence and inner sequence

SEQ ID NO: 25953 - DNA, 53 bp, Artificial Sequence; identical to SEQ ID NO: 5905
  Description of Artificial Sequence: Synthetic pistachio; 5' sequence and inner sequence

SEQ ID NO: 25954 - DNA, 53 bp, Artificial Sequence; identical to SEQ ID NO: 5407
  Description of Artificial Sequence: Synthetic pistachio; 5' sequence and inner sequence

SEQ ID NO: 25955 - DNA, 53 bp, Artificial Sequence; identical to SEQ ID NO: 9579
  Description of Artificial Sequence: Synthetic pistachio; 5' sequence and inner sequence

SEQ ID NO: 25956 - DNA, 53 bp, Artificial Sequence; identical to SEQ ID NO: 5987
  Description of Artificial Sequence: Synthetic pistachio; 5' sequence and inner sequence

SEQ ID NO: 25957 - DNA, 53 bp, Artificial Sequence; identical to SEQ ID NO: 17769
  Description of Artificial Sequence: Synthetic pistachio; 5' sequence and inner sequence

SEQ ID NO: 25958 - DNA, 53 bp, Artificial Sequence; identical to SEQ ID NO: 1832
  Description of Artificial Sequence: Synthetic pistachio; 5' sequence and inner sequence

SEQ ID NO: 25959 - DNA, 53 bp, Artificial Sequence; identical to SEQ ID NO: 1834
  Description of Artificial Sequence: Synthetic pistachio; 5' sequence and inner sequence

SEQ ID NO: 25960 - DNA, 49 bp, Artificial Sequence; identical to SEQ ID NO: 1516
  Description of Artificial Sequence: Synthetic pistachio; 5' sequence and inner sequence

SEQ ID NO: 25961 - DNA, 53 bp, Artificial Sequence; identical to SEQ ID NO: 21673
  Description of Artificial Sequence: Synthetic pistachio; 5' sequence and inner sequence

SEQ ID NO: 25962 - DNA, 53 bp, Artificial Sequence; identical to SEQ ID NO: 1815
  Description of Artificial Sequence: Synthetic pistachio; 5' sequence and inner sequence

SEQ ID NO: 25963 - DNA, 52 bp, Artificial Sequence; identical to SEQ ID NO: 1689
  Description of Artificial Sequence: Synthetic pistachio; 5' sequence and inner sequence

SEQ ID NO: 25964 - DNA, 53 bp, Artificial Sequence; identical to SEQ ID NO: 1973
  Description of Artificial Sequence: Synthetic pistachio; 5' sequence and inner sequence

SEQ ID NO: 25965 - DNA, 53 bp, Artificial Sequence; identical to SEQ ID NO: 21803
  Description of Artificial Sequence: Synthetic pistachio; 5' sequence and inner sequence

SEQ ID NO: 25966 - DNA, 53 bp, Artificial Sequence; identical to SEQ ID NO: 5867
  Description of Artificial Sequence: Synthetic pistachio; 5' sequence and inner sequence

SEQ ID NO: 25967 - DNA, 53 bp, Artificial Sequence
  Description of Artificial Sequence: Synthetic pistachio; 5' sequence and inner sequence
tagggaagagaaggacatatgatcgaccatgggcaggtacgtcccaatgcgag

SEQ ID NO: 25968 - DNA, 53 bp, Artificial Sequence; identical to SEQ ID NO: 5494
  Description of Artificial Sequence: Synthetic pistachio; 5' sequence and inner sequence

SEQ ID NO: 25969 - DNA, 53 bp, Artificial Sequence
  Description of Artificial Sequence: Synthetic pistachio; 5' sequence and inner sequence
tagggaagagaaggacatatgatcgaccaagccgtacgacaagtgctgccacg

SEQ ID NO: 25970 - DNA, 53 bp, Artificial Sequence; identical to SEQ ID NO: 9946
  Description of Artificial Sequence: Synthetic pistachio; 5' sequence and inner sequence

SEQ ID NO: 25971 - DNA, 53 bp, Artificial Sequence; identical to SEQ ID NO: 5555
  Description of Artificial Sequence: Synthetic pistachio; 5' sequence and inner sequence

SEQ ID NO: 25972 - DNA, 53 bp, Artificial Sequence; identical to SEQ ID NO: 21295
  Description of Artificial Sequence: Synthetic pistachio; 5' sequence and inner sequence

SEQ ID NO: 25973 - DNA, 53 bp, Artificial Sequence; identical to SEQ ID NO: 1957
  Description of Artificial Sequence: Synthetic pistachio; 5' sequence and inner sequence

SEQ ID NO: 25974 - DNA, 53 bp, Artificial Sequence; identical to SEQ ID NO: 1431
  Description of Artificial Sequence: Synthetic pistachio; 5' sequence and inner sequence

SEQ ID NO: 25975 - DNA, 53 bp, Artificial Sequence; identical to SEQ ID NO: 21312
  Description of Artificial Sequence: Synthetic pistachio; 5' sequence and inner sequence

SEQ ID NO: 25976 - DNA, 53 bp, Artificial Sequence
  Description of Artificial Sequence: Synthetic pistachio; 5' sequence and inner sequence
tagggaagagaaggacatatgatcgtgtggacgtcgcacctatcgagtcggca

SEQ ID NO: 25977 - DNA, 53 bp, Artificial Sequence; identical to SEQ ID NO: 1809
  Description of Artificial Sequence: Synthetic pistachio; 5' sequence and inner sequence

SEQ ID NO: 25978 - DNA, 53 bp, Artificial Sequence
  Description of Artificial Sequence: Synthetic pistachio; 5' sequence and inner sequence
tagggaagagaaggacatatgatcgcaccgactacgcaaagtgcaagtgcgta

SEQ ID NO: 25979 - DNA, 53 bp, Artificial Sequence; identical to SEQ ID NO: 1811
  Description of Artificial Sequence: Synthetic pistachio; 5' sequence and inner sequence

SEQ ID NO: 25980 - DNA, 53 bp, Artificial Sequence; identical to SEQ ID NO: 9792
  Description of Artificial Sequence: Synthetic pistachio; 5' sequence and inner sequence

SEQ ID NO: 25981 - DNA, 53 bp, Artificial Sequence; identical to SEQ ID NO: 1837
  Description of Artificial Sequence: Synthetic pistachio; 5' sequence and inner sequence

SEQ ID NO: 25982 - DNA, 53 bp, Artificial Sequence; identical to SEQ ID NO: 9994
  Description of Artificial Sequence: Synthetic pistachio; 5' sequence and inner sequence

SEQ ID NO: 25983 - DNA, 53 bp, Artificial Sequence
  Description of Artificial Sequence: Synthetic pistachio; 5' sequence and inner sequence
tagggaagagaaggacatatgatcgcaacggtacgccgtccatgcctcgcggc

SEQ ID NO: 25984 - DNA, 53 bp, Artificial Sequence
  Description of Artificial Sequence: Synthetic pistachio; 5' sequence and inner sequence
tagggaagagaaggacatatgatgtcatgcacgaacactatcatgaggccatg

SEQ ID NO: 25985 - DNA, 53 bp, Artificial Sequence; identical to SEQ ID NO: 1955
  Description of Artificial Sequence: Synthetic pistachio; 5' sequence and inner sequence

SEQ ID NO: 25986 - DNA, 53 bp, Artificial Sequence; identical to SEQ ID NO: 1880
  Description of Artificial Sequence: Synthetic pistachio; 5' sequence and inner sequence

SEQ ID NO: 25987 - DNA, 53 bp, Artificial Sequence; identical to SEQ ID NO: 5535
  Description of Artificial Sequence: Synthetic pistachio; 5' sequence and inner sequence

SEQ ID NO: 25988 - DNA, 53 bp, Artificial Sequence; identical to SEQ ID NO: 21617
  Description of Artificial Sequence: Synthetic pistachio; 5' sequence and inner sequence

SEQ ID NO: 25989 - DNA, 53 bp, Artificial Sequence; identical to SEQ ID NO: 1925
  Description of Artificial Sequence: Synthetic pistachio; 5' sequence and inner sequence

SEQ ID NO: 25990 - DNA, 53 bp, Artificial Sequence; identical to SEQ ID NO: 1538
  Description of Artificial Sequence: Synthetic pistachio; 5' sequence and inner sequence

SEQ ID NO: 25991 - DNA, 53 bp, Artificial Sequence
  Description of Artificial Sequence: Synthetic pistachio; 5' sequence and inner sequence
tagggaagagaaggacatatgatcgaccagcagcggtaggctgacgaggcatg

SEQ ID NO: 25992 - DNA, 53 bp, Artificial Sequence; identical to SEQ ID NO: 5743
  Description of Artificial Sequence: Synthetic pistachio; 5' sequence and inner sequence

SEQ ID NO: 25993 - DNA, 50 bp, Artificial Sequence
  Description of Artificial Sequence: Synthetic pistachio; 5' sequence and inner sequence
tagggaagagaaggacatatgatgtgcgaccgaccctatcaagtacgtca

SEQ ID NO: 25994 - DNA, 53 bp, Artificial Sequence; identical to SEQ ID NO: 5971
  Description of Artificial Sequence: Synthetic pistachio; 5' sequence and inner sequence

SEQ ID NO: 25995 - DNA, 53 bp, Artificial Sequence; identical to SEQ ID NO: 1782
  Description of Artificial Sequence: Synthetic pistachio; 5' sequence and inner sequence

SEQ ID NO: 25996 - DNA, 53 bp, Artificial Sequence; identical to SEQ ID NO: 1816
  Description of Artificial Sequence: Synthetic pistachio; 5' sequence and inner sequence

SEQ ID NO: 25997 - DNA, 53 bp, Artificial Sequence; identical to SEQ ID NO: 1711
  Description of Artificial Sequence: Synthetic pistachio; 5' sequence and inner sequence

SEQ ID NO: 25998 - DNA, 53 bp, Artificial Sequence; identical to SEQ ID NO: 1633
  Description of Artificial Sequence: Synthetic pistachio; 5' sequence and inner sequence

SEQ ID NO: 25999 - DNA, 53 bp, Artificial Sequence; identical to SEQ ID NO: 9782
  Description of Artificial Sequence: Synthetic pistachio; 5' sequence and inner sequence

SEQ ID NO: 26000 - DNA, 53 bp, Artificial Sequence; identical to SEQ ID NO: 13914
  Description of Artificial Sequence: Synthetic pistachio; 5' sequence and inner sequence

SEQ ID NO: 26001 - DNA, 53 bp, Artificial Sequence; identical to SEQ ID NO: 5833
  Description of Artificial Sequence: Synthetic pistachio; 5' sequence and inner sequence

SEQ ID NO: 26002 - DNA, 53 bp, Artificial Sequence; identical to SEQ ID NO: 5960
  Description of Artificial Sequence: Synthetic pistachio; 5' sequence and inner sequence

SEQ ID NO: 26003 - DNA, 53 bp, Artificial Sequence; identical to SEQ ID NO: 2003
  Description of Artificial Sequence: Synthetic pistachio; inner sequence and 3' sequence

SEQ ID NO: 26004 - DNA, 53 bp, Artificial Sequence; identical to SEQ ID NO: 2004
  Description of Artificial Sequence: Synthetic pistachio; inner sequence and 3' sequence

SEQ ID NO: 26005 - DNA, 53 bp, Artificial Sequence; identical to SEQ ID NO: 2007
  Description of Artificial Sequence: Synthetic pistachio; inner sequence and 3' sequence

SEQ ID NO: 26006 - DNA, 53 bp, Artificial Sequence; identical to SEQ ID NO: 2008
  Description of Artificial Sequence: Synthetic pistachio; inner sequence and 3' sequence

SEQ ID NO: 26007 - DNA, 53 bp, Artificial Sequence; identical to SEQ ID NO: 2005
  Description of Artificial Sequence: Synthetic pistachio; inner sequence and 3' sequence

SEQ ID NO: 26008 - DNA, 53 bp, Artificial Sequence; identical to SEQ ID NO: 2009
  Description of Artificial Sequence: Synthetic pistachio; inner sequence and 3' sequence

SEQ ID NO: 26009 - DNA, 53 bp, Artificial Sequence; identical to SEQ ID NO: 2014
  Description of Artificial Sequence: Synthetic pistachio; inner sequence and 3' sequence

SEQ ID NO: 26010 - DNA, 53 bp, Artificial Sequence; identical to SEQ ID NO: 2013
  Description of Artificial Sequence: Synthetic pistachio; inner sequence and 3' sequence

SEQ ID NO: 26011 - DNA, 53 bp, Artificial Sequence; identical to SEQ ID NO: 2012
  Description of Artificial Sequence: Synthetic pistachio; inner sequence and 3' sequence

SEQ ID NO: 26012 - DNA, 53 bp, Artificial Sequence; identical to SEQ ID NO: 2006
  Description of Artificial Sequence: Synthetic pistachio; inner sequence and 3' sequence

SEQ ID NO: 26013 - DNA, 53 bp, Artificial Sequence; identical to SEQ ID NO: 2011
  Description of Artificial Sequence: Synthetic pistachio; inner sequence and 3' sequence

SEQ ID NO: 26014 - DNA, 53 bp, Artificial Sequence; identical to SEQ ID NO: 2023
  Description of Artificial Sequence: Synthetic pistachio; inner sequence and 3' sequence

SEQ ID NO: 26015 - DNA, 53 bp, Artificial Sequence; identical to SEQ ID NO: 2017
  Description of Artificial Sequence: Synthetic pistachio; inner sequence and 3' sequence

SEQ ID NO: 26016 - DNA, 53 bp, Artificial Sequence; identical to SEQ ID NO: 2010
  Description of Artificial Sequence: Synthetic pistachio; inner sequence and 3' sequence

SEQ ID NO: 26017 - DNA, 53 bp, Artificial Sequence; identical to SEQ ID NO: 2018
  Description of Artificial Sequence: Synthetic pistachio; inner sequence and 3' sequence

SEQ ID NO: 26018 - DNA, 53 bp, Artificial Sequence; identical to SEQ ID NO: 2037
  Description of Artificial Sequence: Synthetic pistachio; inner sequence and 3' sequence

SEQ ID NO: 26019 - DNA, 53 bp, Artificial Sequence; identical to SEQ ID NO: 2015
  Description of Artificial Sequence: Synthetic pistachio; inner sequence and 3' sequence

SEQ ID NO: 26020 - DNA, 53 bp, Artificial Sequence; identical to SEQ ID NO: 2046
  Description of Artificial Sequence: Synthetic pistachio; inner sequence and 3' sequence

SEQ ID NO: 26021 - DNA, 53 bp, Artificial Sequence; identical to SEQ ID NO: 2028
  Description of Artificial Sequence: Synthetic pistachio; inner sequence and 3' sequence

SEQ ID NO: 26022 - DNA, 53 bp, Artificial Sequence; identical to SEQ ID NO: 2049
  Description of Artificial Sequence: Synthetic pistachio; inner sequence and 3' sequence

SEQ ID NO: 26023 - DNA, 53 bp, Artificial Sequence; identical to SEQ ID NO: 2016
  Description of Artificial Sequence: Synthetic pistachio; inner sequence and 3' sequence

SEQ ID NO: 26024 - DNA, 53 bp, Artificial Sequence; identical to SEQ ID NO: 2022
  Description of Artificial Sequence: Synthetic pistachio; inner sequence and 3' sequence

SEQ ID NO: 26025 - DNA, 53 bp, Artificial Sequence; identical to SEQ ID NO: 2055
  Description of Artificial Sequence: Synthetic pistachio; inner sequence and 3' sequence

SEQ ID NO: 26026 - DNA, 53 bp, Artificial Sequence; identical to SEQ ID NO: 2041
  Description of Artificial Sequence: Synthetic pistachio; inner sequence and 3' sequence

SEQ ID NO: 26027 - DNA, 53 bp, Artificial Sequence; identical to SEQ ID NO: 2045
  Description of Artificial Sequence: Synthetic pistachio; inner sequence and 3' sequence

SEQ ID NO: 26028 - DNA, 53 bp, Artificial Sequence; identical to SEQ ID NO: 2033
  Description of Artificial Sequence: Synthetic pistachio; inner sequence and 3' sequence

SEQ ID NO: 26029 - DNA, 53 bp, Artificial Sequence; identical to SEQ ID NO: 2034
  Description of Artificial Sequence: Synthetic pistachio; inner sequence and 3' sequence

SEQ ID NO: 26030 - DNA, 53 bp, Artificial Sequence; identical to SEQ ID NO: 2020
  Description of Artificial Sequence: Synthetic pistachio; inner sequence and 3' sequence

SEQ ID NO: 26031 - DNA, 53 bp, Artificial Sequence; identical to SEQ ID NO: 2032
  Description of Artificial Sequence: Synthetic pistachio; inner sequence and 3' sequence

SEQ ID NO: 26032 - DNA, 53 bp, Artificial Sequence; identical to SEQ ID NO: 2054
  Description of Artificial Sequence: Synthetic pistachio; inner sequence and 3' sequence

SEQ ID NO: 26033 - DNA, 53 bp, Artificial Sequence; identical to SEQ ID NO: 2030
  Description of Artificial Sequence: Synthetic pistachio; inner sequence and 3' sequence

SEQ ID NO: 26034 - DNA, 52 bp, Artificial Sequence; identical to SEQ ID NO: 2070
  Description of Artificial Sequence: Synthetic pistachio; inner sequence and 3' sequence

SEQ ID NO: 26035 - DNA, 53 bp, Artificial Sequence; identical to SEQ ID NO: 2040
  Description of Artificial Sequence: Synthetic pistachio; inner sequence and 3' sequence

SEQ ID NO: 26036 - DNA, 53 bp, Artificial Sequence; identical to SEQ ID NO: 2039
  Description of Artificial Sequence: Synthetic pistachio; inner sequence and 3' sequence

SEQ ID NO: 26037 - DNA, 53 bp, Artificial Sequence; identical to SEQ ID NO: 2038
  Description of Artificial Sequence: Synthetic pistachio; inner sequence and 3' sequence

SEQ ID NO: 26038 - DNA, 53 bp, Artificial Sequence; identical to SEQ ID NO: 2035
  Description of Artificial Sequence: Synthetic pistachio; inner sequence and 3' sequence

SEQ ID NO: 26039 - DNA, 53 bp, Artificial Sequence; identical to SEQ ID NO: 2021
  Description of Artificial Sequence: Synthetic pistachio; inner sequence and 3' sequence

SEQ ID NO: 26040 - DNA, 53 bp, Artificial Sequence; identical to SEQ ID NO: 2048
  Description of Artificial Sequence: Synthetic pistachio; inner sequence and 3' sequence

SEQ ID NO: 26041 - DNA, 53 bp, Artificial Sequence; identical to SEQ ID NO: 2031
  Description of Artificial Sequence: Synthetic pistachio; inner sequence and 3' sequence

SEQ ID NO: 26042 - DNA, 53 bp, Artificial Sequence; identical to SEQ ID NO: 2024
  Description of Artificial Sequence: Synthetic pistachio; inner sequence and 3' sequence

SEQ ID NO: 26043 - DNA, 53 bp, Artificial Sequence; identical to SEQ ID NO: 2029
  Description of Artificial Sequence: Synthetic pistachio; inner sequence and 3' sequence

SEQ ID NO: 26044 - DNA, 53 bp, Artificial Sequence; identical to SEQ ID NO: 2025
  Description of Artificial Sequence: Synthetic pistachio; inner sequence and 3' sequence

SEQ ID NO: 26045 - DNA, 53 bp, Artificial Sequence; identical to SEQ ID NO: 2051
  Description of Artificial Sequence: Synthetic pistachio; inner sequence and 3' sequence

SEQ ID NO: 26046 - DNA, 53 bp, Artificial Sequence; identical to SEQ ID NO: 2019
  Description of Artificial Sequence: Synthetic pistachio; inner sequence and 3' sequence

SEQ ID NO: 26047 - DNA, 53 bp, Artificial Sequence; identical to SEQ ID NO: 2053
  Description of Artificial Sequence: Synthetic pistachio; inner sequence and 3' sequence

SEQ ID NO: 26048 - DNA, 53 bp, Artificial Sequence; identical to SEQ ID NO: 2059
  Description of Artificial Sequence: Synthetic pistachio; inner sequence and 3' sequence

SEQ ID NO: 26049 - DNA, 53 bp, Artificial Sequence; identical to SEQ ID NO: 2050
  Description of Artificial Sequence: Synthetic pistachio; inner sequence and 3' sequence

SEQ ID NO: 26050 - DNA, 53 bp, Artificial Sequence; identical to SEQ ID NO: 2082
  Description of Artificial Sequence: Synthetic pistachio; inner sequence and 3' sequence

SEQ ID NO: 26051 - DNA, 53 bp, Artificial Sequence; identical to SEQ ID NO: 2077
  Description of Artificial Sequence: Synthetic pistachio; inner sequence and 3' sequence

SEQ ID NO: 26052 - DNA, 53 bp, Artificial Sequence; identical to SEQ ID NO: 2067
  Description of Artificial Sequence: Synthetic pistachio; inner sequence and 3' sequence

SEQ ID NO: 26053 - DNA, 53 bp, Artificial Sequence; identical to SEQ ID NO: 2063
  Description of Artificial Sequence: Synthetic pistachio; inner sequence and 3' sequence

SEQ ID NO: 26054 - DNA, 53 bp, Artificial Sequence; identical to SEQ ID NO: 2074
  Description of Artificial Sequence: Synthetic pistachio; inner sequence and 3' sequence

SEQ ID NO: 26055 - DNA, 53 bp, Artificial Sequence; identical to SEQ ID NO: 2076
  Description of Artificial Sequence: Synthetic pistachio; inner sequence and 3' sequence

SEQ ID NO: 26056 - DNA, 53 bp, Artificial Sequence; identical to SEQ ID NO: 2057
  Description of Artificial Sequence: Synthetic pistachio; inner sequence and 3' sequence

SEQ ID NO: 26057 - DNA, 53 bp, Artificial Sequence; identical to SEQ ID NO: 2073
  Description of Artificial Sequence: Synthetic pistachio; inner sequence and 3' sequence

SEQ ID NO: 26058 - DNA, 53 bp, Artificial Sequence; identical to SEQ ID NO: 2081
  Description of Artificial Sequence: Synthetic pistachio; inner sequence and 3' sequence

SEQ ID NO: 26059 - DNA, 53 bp, Artificial Sequence; identical to SEQ ID NO: 2044
  Description of Artificial Sequence: Synthetic pistachio; inner sequence and 3' sequence

SEQ ID NO: 26060 - DNA, 53 bp, Artificial Sequence; identical to SEQ ID NO: 2042
  Description of Artificial Sequence: Synthetic pistachio; inner sequence and 3' sequence

SEQ ID NO: 26061 - DNA, 53 bp, Artificial Sequence; identical to SEQ ID NO: 2117
  Description of Artificial Sequence: Synthetic pistachio; inner sequence and 3' sequence

SEQ ID NO: 26062 - DNA, 53 bp, Artificial Sequence; identical to SEQ ID NO: 2078
  Description of Artificial Sequence: Synthetic pistachio; inner sequence and 3' sequence

SEQ ID NO: 26063 - DNA, 53 bp, Artificial Sequence; identical to SEQ ID NO: 2131
  Description of Artificial Sequence: Synthetic pistachio; inner sequence and 3' sequence

SEQ ID NO: 26064 - DNA, 53 bp, Artificial Sequence; identical to SEQ ID NO: 2026
  Description of Artificial Sequence: Synthetic pistachio; inner sequence and 3' sequence

SEQ ID NO: 26065 - DNA, 53 bp, Artificial Sequence; identical to SEQ ID NO: 2043
  Description of Artificial Sequence: Synthetic pistachio; inner sequence and 3' sequence

SEQ ID NO: 26066 - DNA, 53 bp, Artificial Sequence; identical to SEQ ID NO: 2066
  Description of Artificial Sequence: Synthetic pistachio; inner sequence and 3' sequence

SEQ ID NO: 26067 - DNA, 53 bp, Artificial Sequence; identical to SEQ ID NO: 2058
  Description of Artificial Sequence: Synthetic pistachio; inner sequence and 3' sequence

SEQ ID NO: 26068 - DNA, 53 bp, Artificial Sequence; identical to SEQ ID NO: 2080
  Description of Artificial Sequence: Synthetic pistachio; inner sequence and 3' sequence

SEQ ID NO: 26069 - DNA, 53 bp, Artificial Sequence; identical to SEQ ID NO: 2065
  Description of Artificial Sequence: Synthetic pistachio; inner sequence and 3' sequence

SEQ ID NO: 26070 - DNA, 53 bp, Artificial Sequence; identical to SEQ ID NO: 2100
  Description of Artificial Sequence: Synthetic pistachio; inner sequence and 3' sequence

SEQ ID NO: 26071 - DNA, 53 bp, Artificial Sequence; identical to SEQ ID NO: 2036
  Description of Artificial Sequence: Synthetic pistachio; inner sequence and 3' sequence

SEQ ID NO: 26072 - DNA, 53 bp, Artificial Sequence; identical to SEQ ID NO: 2064
  Description of Artificial Sequence: Synthetic pistachio; inner sequence and 3' sequence

SEQ ID NO: 26073 - DNA, 53 bp, Artificial Sequence; identical to SEQ ID NO: 2092
  Description of Artificial Sequence: Synthetic pistachio; inner sequence and 3' sequence

SEQ ID NO: 26074 - DNA, 53 bp, Artificial Sequence; identical to SEQ ID NO: 2061
  Description of Artificial Sequence: Synthetic pistachio; inner sequence and 3' sequence

SEQ ID NO: 26075 - DNA, 53 bp, Artificial Sequence; identical to SEQ ID NO: 2113
  Description of Artificial Sequence: Synthetic pistachio; inner sequence and 3' sequence

SEQ ID NO: 26076 - DNA, 53 bp, Artificial Sequence; identical to SEQ ID NO: 2111
  Description of Artificial Sequence: Synthetic pistachio; inner sequence and 3' sequence

SEQ ID NO: 26077 - DNA, 53 bp, Artificial Sequence; identical to SEQ ID NO: 2091
  Description of Artificial Sequence: Synthetic pistachio; inner sequence and 3' sequence

SEQ ID NO: 26078 - DNA, 53 bp, Artificial Sequence; identical to SEQ ID NO: 2093
  Description of Artificial Sequence: Synthetic pistachio; inner sequence and 3' sequence

SEQ ID NO: 26079 - DNA, 53 bp, Artificial Sequence; identical to SEQ ID NO: 2136
  Description of Artificial Sequence: Synthetic pistachio; inner sequence and 3' sequence

SEQ ID NO: 26080 - DNA, 53 bp, Artificial Sequence; identical to SEQ ID NO: 2186
  Description of Artificial Sequence: Synthetic pistachio; inner sequence and 3' sequence

SEQ ID NO: 26081 - DNA, 53 bp, Artificial Sequence; identical to SEQ ID NO: 2027
  Description of Artificial Sequence: Synthetic pistachio; inner sequence and 3' sequence

SEQ ID NO: 26082 - DNA, 53 bp, Artificial Sequence; identical to SEQ ID NO: 2161
  Description of Artificial Sequence: Synthetic pistachio; inner sequence and 3' sequence

SEQ ID NO: 26083 - DNA, 53 bp, Artificial Sequence; identical to SEQ ID NO: 2154
  Description of Artificial Sequence: Synthetic pistachio; inner sequence and 3' sequence

SEQ ID NO: 26084 - DNA, 53 bp, Artificial Sequence; identical to SEQ ID NO: 2168
  Description of Artificial Sequence: Synthetic pistachio; inner sequence and 3' sequence

SEQ ID NO: 26085 - DNA, 53 bp, Artificial Sequence; identical to SEQ ID NO: 2068
  Description of Artificial Sequence: Synthetic pistachio; inner sequence and 3' sequence

SEQ ID NO: 26086 - DNA, 53 bp, Artificial Sequence; identical to SEQ ID NO: 2088
  Description of Artificial Sequence: Synthetic pistachio; inner sequence and 3' sequence

SEQ ID NO: 26087 - DNA, 53 bp, Artificial Sequence; identical to SEQ ID NO: 2089
  Description of Artificial Sequence: Synthetic pistachio; inner sequence and 3' sequence

SEQ ID NO: 26088 - DNA, 53 bp, Artificial Sequence; identical to SEQ ID NO: 2047
  Description of Artificial Sequence: Synthetic pistachio; inner sequence and 3' sequence

SEQ ID NO: 26089 - DNA, 51 bp, Artificial Sequence; identical to SEQ ID NO: 2148
  Description of Artificial Sequence: Synthetic pistachio; inner sequence and 3' sequence

SEQ ID NO: 26090 - DNA, 53 bp, Artificial Sequence; identical to SEQ ID NO: 2185
  Description of Artificial Sequence: Synthetic pistachio; inner sequence and 3' sequence

SEQ ID NO: 26091 - DNA, 53 bp, Artificial Sequence; identical to SEQ ID NO: 2129
  Description of Artificial Sequence: Synthetic pistachio; inner sequence and 3' sequence

SEQ ID NO: 26092 - DNA, 53 bp, Artificial Sequence; identical to SEQ ID NO: 2183
  Description of Artificial Sequence: Synthetic pistachio; inner sequence and 3' sequence

SEQ ID NO: 26093 - DNA, 53 bp, Artificial Sequence; identical to SEQ ID NO: 2083
  Description of Artificial Sequence: Synthetic pistachio; inner sequence and 3' sequence

SEQ ID NO: 26094 - DNA, 53 bp, Artificial Sequence; identical to SEQ ID NO: 2052
  Description of Artificial Sequence: Synthetic pistachio; inner sequence and 3' sequence

SEQ ID NO: 26095 - DNA, 53 bp, Artificial Sequence; identical to SEQ ID NO: 2126
  Description of Artificial Sequence: Synthetic pistachio; inner sequence and 3' sequence

SEQ ID NO: 26096 - DNA, 53 bp, Artificial Sequence; identical to SEQ ID NO: 2094
  Description of Artificial Sequence: Synthetic pistachio; inner sequence and 3' sequence

SEQ ID NO: 26097 - DNA, 53 bp, Artificial Sequence; identical to SEQ ID NO: 2071
  Description of Artificial Sequence: Synthetic pistachio; inner sequence and 3' sequence

SEQ ID NO: 26098 - DNA, 53 bp, Artificial Sequence; identical to SEQ ID NO: 2257
  Description of Artificial Sequence: Synthetic pistachio; inner sequence and 3' sequence

SEQ ID NO: 26099 - DNA, 53 bp, Artificial Sequence; identical to SEQ ID NO: 2142
  Description of Artificial Sequence: Synthetic pistachio; inner sequence and 3' sequence

SEQ ID NO: 26100 - DNA, 53 bp, Artificial Sequence; identical to SEQ ID NO: 2095
  Description of Artificial Sequence: Synthetic pistachio; inner sequence and 3' sequence

SEQ ID NO: 26101 - DNA, 53 bp, Artificial Sequence; identical to SEQ ID NO: 2103
  Description of Artificial Sequence: Synthetic pistachio; inner sequence and 3' sequence

SEQ ID NO: 26102 - DNA, 53 bp, Artificial Sequence; identical to SEQ ID NO: 2115
  Description of Artificial Sequence: Synthetic pistachio; inner sequence and 3' sequence

SEQ ID NO: 26103 - DNA, 53 bp, Artificial Sequence; identical to SEQ ID NO: 2138
  Description of Artificial Sequence: Synthetic pistachio; inner sequence and 3' sequence

SEQ ID NO: 26104 - DNA, 53 bp, Artificial Sequence; identical to SEQ ID NO: 2262
  Description of Artificial Sequence: Synthetic pistachio; inner sequence and 3' sequence

SEQ ID NO: 26105 - DNA, 53 bp, Artificial Sequence; identical to SEQ ID NO: 2099
  Description of Artificial Sequence: Synthetic pistachio; inner sequence and 3' sequence

SEQ ID NO: 26106 - DNA, 53 bp, Artificial Sequence; identical to SEQ ID NO: 2207
  Description of Artificial Sequence: Synthetic pistachio; inner sequence and 3' sequence

SEQ ID NO: 26107 - DNA, 53 bp, Artificial Sequence; identical to SEQ ID NO: 2287
  Description of Artificial Sequence: Synthetic pistachio; inner sequence and 3' sequence

SEQ ID NO: 26108 - DNA, 53 bp, Artificial Sequence; identical to SEQ ID NO: 2056
  Description of Artificial Sequence: Synthetic pistachio; inner sequence and 3' sequence

SEQ ID NO: 26109 - DNA, 53 bp, Artificial Sequence; identical to SEQ ID NO: 2247
  Description of Artificial Sequence: Synthetic pistachio; inner sequence and 3' sequence

SEQ ID NO: 26110 - DNA, 53 bp, Artificial Sequence; identical to SEQ ID NO: 2133
  Description of Artificial Sequence: Synthetic pistachio; inner sequence and 3' sequence

SEQ ID NO: 26111 - DNA, 53 bp, Artificial Sequence; identical to SEQ ID NO: 2120
  Description of Artificial Sequence: Synthetic pistachio; inner sequence and 3' sequence

SEQ ID NO: 26112 - DNA, 53 bp, Artificial Sequence; identical to SEQ ID NO: 2096
  Description of Artificial Sequence: Synthetic pistachio; inner sequence and 3' sequence

SEQ ID NO: 26113 - DNA, 53 bp, Artificial Sequence; identical to SEQ ID NO: 2062
  Description of Artificial Sequence: Synthetic pistachio; inner sequence and 3' sequence

SEQ ID NO: 26114 - DNA, 53 bp, Artificial Sequence; identical to SEQ ID NO: 2145
  Description of Artificial Sequence: Synthetic pistachio; inner sequence and 3' sequence

SEQ ID NO: 26115 - DNA, 53 bp, Artificial Sequence; identical to SEQ ID NO: 2060
  Description of Artificial Sequence: Synthetic pistachio; inner sequence and 3' sequence

SEQ ID NO: 26116 - DNA, 53 bp, Artificial Sequence; identical to SEQ ID NO: 2075
  Description of Artificial Sequence: Synthetic pistachio; inner sequence and 3' sequence

SEQ ID NO: 26117 - DNA, 53 bp, Artificial Sequence; identical to SEQ ID NO: 2105
  Description of Artificial Sequence: Synthetic pistachio; inner sequence and 3' sequence

SEQ ID NO: 26118 - DNA, 53 bp, Artificial Sequence; identical to SEQ ID NO: 2122
  Description of Artificial Sequence: Synthetic pistachio; inner sequence and 3' sequence

SEQ ID NO: 26119 - DNA, 53 bp, Artificial Sequence; identical to SEQ ID NO: 2354
  Description of Artificial Sequence: Synthetic pistachio; inner sequence and 3' sequence

SEQ ID NO: 26120 - DNA, 53 bp, Artificial Sequence; identical to SEQ ID NO: 2112
  Description of Artificial Sequence: Synthetic pistachio; inner sequence and 3' sequence

SEQ ID NO: 26121 - DNA, 53 bp, Artificial Sequence; identical to SEQ ID NO: 2116
  Description of Artificial Sequence: Synthetic pistachio; inner sequence and 3' sequence

SEQ ID NO: 26122 - DNA, 53 bp, Artificial Sequence; identical to SEQ ID NO: 2290
  Description of Artificial Sequence: Synthetic pistachio; inner sequence and 3' sequence

SEQ ID NO: 26123 - DNA, 53 bp, Artificial Sequence; identical to SEQ ID NO: 2106
  Description of Artificial Sequence: Synthetic pistachio; inner sequence and 3' sequence

SEQ ID NO: 26124 - DNA, 53 bp, Artificial Sequence; identical to SEQ ID NO: 2196
  Description of Artificial Sequence: Synthetic pistachio; inner sequence and 3' sequence

SEQ ID NO: 26125 - DNA, 53 bp, Artificial Sequence; identical to SEQ ID NO: 2098
  Description of Artificial Sequence: Synthetic pistachio; inner sequence and 3' sequence

SEQ ID NO: 26126 - DNA, 53 bp, Artificial Sequence; identical to SEQ ID NO: 2157
  Description of Artificial Sequence: Synthetic pistachio; inner sequence and 3' sequence

SEQ ID NO: 26127 - DNA, 53 bp, Artificial Sequence; identical to SEQ ID NO: 2079
  Description of Artificial Sequence: Synthetic pistachio; inner sequence and 3' sequence

SEQ ID NO: 26128 - DNA, 53 bp, Artificial Sequence; identical to SEQ ID NO: 2171
  Description of Artificial Sequence: Synthetic pistachio; inner sequence and 3' sequence

SEQ ID NO: 26129 - DNA, 53 bp, Artificial Sequence; identical to SEQ ID NO: 2097
  Description of Artificial Sequence: Synthetic pistachio; inner sequence and 3' sequence

SEQ ID NO: 26130 - DNA, 53 bp, Artificial Sequence; identical to SEQ ID NO: 2069
  Description of Artificial Sequence: Synthetic pistachio; inner sequence and 3' sequence

SEQ ID NO: 26131 - DNA, 53 bp, Artificial Sequence; identical to SEQ ID NO: 2163
  Description of Artificial Sequence: Synthetic pistachio; inner sequence and 3' sequence

SEQ ID NO: 26132 - DNA, 53 bp, Artificial Sequence; identical to SEQ ID NO: 2125
  Description of Artificial Sequence: Synthetic pistachio; inner sequence and 3' sequence

SEQ ID NO: 26133 - DNA, 53 bp, Artificial Sequence; identical to SEQ ID NO: 2084
  Description of Artificial Sequence: Synthetic pistachio; inner sequence and 3' sequence

SEQ ID NO: 26134 - DNA, 53 bp, Artificial Sequence; identical to SEQ ID NO: 2201
  Description of Artificial Sequence: Synthetic pistachio; inner sequence and 3' sequence

SEQ ID NO: 26135 - DNA, 53 bp, Artificial Sequence; identical to SEQ ID NO: 2118
  Description of Artificial Sequence: Synthetic pistachio; inner sequence and 3' sequence

SEQ ID NO: 26136 - DNA, 53 bp, Artificial Sequence; identical to SEQ ID NO: 2107
  Description of Artificial Sequence: Synthetic pistachio; inner sequence and 3' sequence

SEQ ID NO: 26137 - DNA, 53 bp, Artificial Sequence; identical to SEQ ID NO: 2164
  Description of Artificial Sequence: Synthetic pistachio; inner sequence and 3' sequence

SEQ ID NO: 26138 - DNA, 53 bp, Artificial Sequence; identical to SEQ ID NO: 2311
  Description of Artificial Sequence: Synthetic pistachio; inner sequence and 3' sequence

SEQ ID NO: 26139 - DNA, 53 bp, Artificial Sequence; identical to SEQ ID NO: 2282
  Description of Artificial Sequence: Synthetic pistachio; inner sequence and 3' sequence

SEQ ID NO: 26140 - DNA, 54 bp, Artificial Sequence; identical to SEQ ID NO: 2221
  Description of Artificial Sequence: Synthetic pistachio; inner sequence and 3' sequence

SEQ ID NO: 26141 - DNA, 53 bp, Artificial Sequence; identical to SEQ ID NO: 2229
  Description of Artificial Sequence: Synthetic pistachio; inner sequence and 3' sequence

SEQ ID NO: 26142 - DNA, 53 bp, Artificial Sequence; identical to SEQ ID NO: 2147
  Description of Artificial Sequence: Synthetic pistachio; inner sequence and 3' sequence

SEQ ID NO: 26143 - DNA, 53 bp, Artificial Sequence; identical to SEQ ID NO: 2205
  Description of Artificial Sequence: Synthetic pistachio; inner sequence and 3' sequence

SEQ ID NO: 26144 - DNA, 53 bp, Artificial Sequence; identical to SEQ ID NO: 2208
  Description of Artificial Sequence: Synthetic pistachio; inner sequence and 3' sequence

SEQ ID NO: 26145 - DNA, 53 bp, Artificial Sequence; identical to SEQ ID NO: 2285
  Description of Artificial Sequence: Synthetic pistachio; inner sequence and 3' sequence

SEQ ID NO: 26146 - DNA, 53 bp, Artificial Sequence; identical to SEQ ID NO: 2230
  Description of Artificial Sequence: Synthetic pistachio; inner sequence and 3' sequence

SEQ ID NO: 26147 - DNA, 53 bp, Artificial Sequence; identical to SEQ ID NO: 2188
  Description of Artificial Sequence: Synthetic pistachio; inner sequence and 3' sequence

SEQ ID NO: 26148 - DNA, 53 bp, Artificial Sequence; identical to SEQ ID NO: 2158
  Description of Artificial Sequence: Synthetic pistachio; inner sequence and 3' sequence

SEQ ID NO: 26149 - DNA, 53 bp, Artificial Sequence; identical to SEQ ID NO: 2288
  Description of Artificial Sequence: Synthetic pistachio; inner sequence and 3' sequence

SEQ ID NO: 26150 - DNA, 53 bp, Artificial Sequence; identical to SEQ ID NO: 2254
  Description of Artificial Sequence: Synthetic pistachio; inner sequence and 3' sequence

SEQ ID NO: 26151 - DNA, 53 bp, Artificial Sequence; identical to SEQ ID NO: 2211
  Description of Artificial Sequence: Synthetic pistachio; inner sequence and 3' sequence

SEQ ID NO: 26152 - DNA, 53 bp, Artificial Sequence; identical to SEQ ID NO: 2159
  Description of Artificial Sequence: Synthetic pistachio; inner sequence and 3' sequence

SEQ ID NO: 26153 - DNA, 53 bp, Artificial Sequence; identical to SEQ ID NO: 2243
  Description of Artificial Sequence: Synthetic pistachio; inner sequence and 3' sequence

SEQ ID NO: 26154 - DNA, 53 bp, Artificial Sequence; identical to SEQ ID NO: 2109
  Description of Artificial Sequence: Synthetic pistachio; inner sequence and 3' sequence

SEQ ID NO: 26155 - DNA, 53 bp, Artificial Sequence; identical to SEQ ID NO: 2132
  Description of Artificial Sequence: Synthetic pistachio; inner sequence and 3' sequence

SEQ ID NO: 26156 - DNA, 53 bp, Artificial Sequence; identical to SEQ ID NO: 2144
  Description of Artificial Sequence: Synthetic pistachio; inner sequence and 3' sequence

SEQ ID NO: 26157 - DNA, 53 bp, Artificial Sequence; identical to SEQ ID NO: 2165
  Description of Artificial Sequence: Synthetic pistachio; inner sequence and 3' sequence

SEQ ID NO: 26158 - DNA, 53 bp, Artificial Sequence; identical to SEQ ID NO: 2121
  Description of Artificial Sequence: Synthetic pistachio; inner sequence and 3' sequence

SEQ ID NO: 26159 - DNA, 53 bp, Artificial Sequence; identical to SEQ ID NO: 2245
  Description of Artificial Sequence: Synthetic pistachio; inner sequence and 3' sequence

SEQ ID NO: 26160 - DNA, 53 bp, Artificial Sequence; identical to SEQ ID NO: 2155
  Description of Artificial Sequence: Synthetic pistachio; inner sequence and 3' sequence

SEQ ID NO: 26161 - DNA, 53 bp, Artificial Sequence; identical to SEQ ID NO: 2104
  Description of Artificial Sequence: Synthetic pistachio; inner sequence and 3' sequence

SEQ ID NO: 26162 - DNA, 53 bp, Artificial Sequence; identical to SEQ ID NO: 2151
  Description of Artificial Sequence: Synthetic pistachio; inner sequence and 3' sequence

SEQ ID NO: 26163 - DNA, 53 bp, Artificial Sequence; identical to SEQ ID NO: 2085
  Description of Artificial Sequence: Synthetic pistachio; inner sequence and 3' sequence

SEQ ID NO: 26164 - DNA, 53 bp, Artificial Sequence; identical to SEQ ID NO: 2198
  Description of Artificial Sequence: Synthetic pistachio; inner sequence and 3' sequence

SEQ ID NO: 26165 - DNA, 53 bp, Artificial Sequence; identical to SEQ ID NO: 2237
  Description of Artificial Sequence: Synthetic pistachio; inner sequence and 3' sequence

SEQ ID NO: 26166 - DNA, 53 bp, Artificial Sequence; identical to SEQ ID NO: 2240
  Description of Artificial Sequence: Synthetic pistachio; inner sequence and 3' sequence

SEQ ID NO: 26167 - DNA, 53 bp, Artificial Sequence; identical to SEQ ID NO: 2468
  Description of Artificial Sequence: Synthetic pistachio; inner sequence and 3' sequence

SEQ ID NO: 26168 - DNA, 53 bp, Artificial Sequence; identical to SEQ ID NO: 2901
  Description of Artificial Sequence: Synthetic pistachio; inner sequence and 3' sequence

SEQ ID NO: 26169 - DNA, 53 bp, Artificial Sequence; identical to SEQ ID NO: 2087
  Description of Artificial Sequence: Synthetic pistachio; inner sequence and 3' sequence

SEQ ID NO: 26170 - DNA, 53 bp, Artificial Sequence; identical to SEQ ID NO: 2146
  Description of Artificial Sequence: Synthetic pistachio; inner sequence and 3' sequence

SEQ ID NO: 26171 - DNA, 53 bp, Artificial Sequence; identical to SEQ ID NO: 2153
  Description of Artificial Sequence: Synthetic pistachio; inner sequence and 3' sequence

SEQ ID NO: 26172 - DNA, 53 bp, Artificial Sequence; identical to SEQ ID NO: 2179
  Description of Artificial Sequence: Synthetic pistachio; inner sequence and 3' sequence

SEQ ID NO: 26173 - DNA, 53 bp, Artificial Sequence; identical to SEQ ID NO: 2123
  Description of Artificial Sequence: Synthetic pistachio; inner sequence and 3' sequence

SEQ ID NO: 26174 - DNA, 53 bp, Artificial Sequence; identical to SEQ ID NO: 2152
  Description of Artificial Sequence: Synthetic pistachio; inner sequence and 3' sequence

SEQ ID NO: 26175 - DNA, 53 bp, Artificial Sequence; identical to SEQ ID NO: 2086
  Description of Artificial Sequence: Synthetic pistachio; inner sequence and 3' sequence

SEQ ID NO: 26176 - DNA, 53 bp, Artificial Sequence; identical to SEQ ID NO: 2108
  Description of Artificial Sequence: Synthetic pistachio; inner sequence and 3' sequence

SEQ ID NO: 26177 - DNA, 53 bp, Artificial Sequence; identical to SEQ ID NO: 2293
  Description of Artificial Sequence: Synthetic pistachio; inner sequence and 3' sequence

SEQ ID NO: 26178 - DNA, 53 bp, Artificial Sequence; identical to SEQ ID NO: 2110
  Description of Artificial Sequence: Synthetic pistachio; inner sequence and 3' sequence

SEQ ID NO: 26179 - DNA, 54 bp, Artificial Sequence; identical to SEQ ID NO: 2250
  Description of Artificial Sequence: Synthetic pistachio; inner sequence and 3' sequence

SEQ ID NO: 26180 - DNA, 53 bp, Artificial Sequence; identical to SEQ ID NO: 2270
  Description of Artificial Sequence: Synthetic pistachio; inner sequence and 3' sequence

SEQ ID NO: 26181 - DNA, 53 bp, Artificial Sequence; identical to SEQ ID NO: 2360
  Description of Artificial Sequence: Synthetic pistachio; inner sequence and 3' sequence

SEQ ID NO: 26182 - DNA, 53 bp, Artificial Sequence; identical to SEQ ID NO: 2323
  Description of Artificial Sequence: Synthetic pistachio; inner sequence and 3' sequence

SEQ ID NO: 26183 - DNA, 53 bp, Artificial Sequence; identical to SEQ ID NO: 2114
  Description of Artificial Sequence: Synthetic pistachio; inner sequence and 3' sequence

SEQ ID NO: 26184 - DNA, 53 bp, Artificial Sequence; identical to SEQ ID NO: 2214
  Description of Artificial Sequence: Synthetic pistachio; inner sequence and 3' sequence

SEQ ID NO: 26185 - DNA, 53 bp, Artificial Sequence; identical to SEQ ID NO: 2585
  Description of Artificial Sequence: Synthetic pistachio; inner sequence and 3' sequence

SEQ ID NO: 26186 - DNA, 53 bp, Artificial Sequence; identical to SEQ ID NO: 2135
  Description of Artificial Sequence: Synthetic pistachio; inner sequence and 3' sequence

SEQ ID NO: 26187 - DNA, 53 bp, Artificial Sequence; identical to SEQ ID NO: 2172
  Description of Artificial Sequence: Synthetic pistachio; inner sequence and 3' sequence

SEQ ID NO: 26188 - DNA, 53 bp, Artificial Sequence; identical to SEQ ID NO: 2189
  Description of Artificial Sequence: Synthetic pistachio; inner sequence and 3' sequence

SEQ ID NO: 26189 - DNA, 53 bp, Artificial Sequence; identical to SEQ ID NO: 2430
  Description of Artificial Sequence: Synthetic pistachio; inner sequence and 3' sequence

SEQ ID NO: 26190 - DNA, 53 bp, Artificial Sequence; identical to SEQ ID NO: 2170
  Description of Artificial Sequence: Synthetic pistachio; inner sequence and 3' sequence

SEQ ID NO: 26191 - DNA, 53 bp, Artificial Sequence; identical to SEQ ID NO: 2149
  Description of Artificial Sequence: Synthetic pistachio; inner sequence and 3' sequence

SEQ ID NO: 26192 - DNA, 53 bp, Artificial Sequence; identical to SEQ ID NO: 2174
  Description of Artificial Sequence: Synthetic pistachio; inner sequence and 3' sequence

SEQ ID NO: 26193 - DNA, 53 bp, Artificial Sequence; identical to SEQ ID NO: 2134
  Description of Artificial Sequence: Synthetic pistachio; inner sequence and 3' sequence

SEQ ID NO: 26194 - DNA, 53 bp, Artificial Sequence; identical to SEQ ID NO: 2454
  Description of Artificial Sequence: Synthetic pistachio; inner sequence and 3' sequence

SEQ ID NO: 26195 - DNA, 53 bp, Artificial Sequence; identical to SEQ ID NO: 2308
  Description of Artificial Sequence: Synthetic pistachio; inner sequence and 3' sequence

SEQ ID NO: 26196 - DNA, 53 bp, Artificial Sequence; identical to SEQ ID NO: 2406
  Description of Artificial Sequence: Synthetic pistachio; inner sequence and 3' sequence

SEQ ID NO: 26197 - DNA, 53 bp, Artificial Sequence; identical to SEQ ID NO: 2630
  Description of Artificial Sequence: Synthetic pistachio; inner sequence and 3' sequence

SEQ ID NO: 26198 - DNA, 54 bp, Artificial Sequence; identical to SEQ ID NO: 2150
  Description of Artificial Sequence: Synthetic pistachio; inner sequence and 3' sequence

SEQ ID NO: 26199 - DNA, 53 bp, Artificial Sequence; identical to SEQ ID NO: 2212
  Description of Artificial Sequence: Synthetic pistachio; inner sequence and 3' sequence

SEQ ID NO: 26200 - DNA, 53 bp, Artificial Sequence; identical to SEQ ID NO: 2204
  Description of Artificial Sequence: Synthetic pistachio; inner sequence and 3' sequence

SEQ ID NO: 26201 - DNA, 53 bp, Artificial Sequence; identical to SEQ ID NO: 2313
  Description of Artificial Sequence: Synthetic pistachio; inner sequence and 3' sequence

SEQ ID NO: 26202 - DNA, 53 bp, Artificial Sequence; identical to SEQ ID NO: 2101
  Description of Artificial Sequence: Synthetic pistachio; inner sequence and 3' sequence

SEQ ID NO: 26203 - DNA, 53 bp, Artificial Sequence; identical to SEQ ID NO: 2203
  Description of Artificial Sequence: Synthetic pistachio; inner sequence and 3' sequence

SEQ ID NO: 26204 - DNA, 53 bp, Artificial Sequence; identical to SEQ ID NO: 2194
  Description of Artificial Sequence: Synthetic pistachio; inner sequence and 3' sequence

SEQ ID NO: 26205 - DNA, 53 bp, Artificial Sequence; identical to SEQ ID NO: 2385
  Description of Artificial Sequence: Synthetic pistachio; inner sequence and 3' sequence

SEQ ID NO: 26206 - DNA, 53 bp, Artificial Sequence; identical to SEQ ID NO: 2347
  Description of Artificial Sequence: Synthetic pistachio; inner sequence and 3' sequence

SEQ ID NO: 26207 - DNA, 53 bp, Artificial Sequence; identical to SEQ ID NO: 2355
  Description of Artificial Sequence: Synthetic pistachio; inner sequence and 3' sequence

SEQ ID NO: 26208 - DNA, 53 bp, Artificial Sequence; identical to SEQ ID NO: 2130
  Description of Artificial Sequence: Synthetic pistachio; inner sequence and 3' sequence

SEQ ID NO: 26209 - DNA, 53 bp, Artificial Sequence; identical to SEQ ID NO: 2072
  Description of Artificial Sequence: Synthetic pistachio; inner sequence and 3' sequence

SEQ ID NO: 26210 - DNA, 53 bp, Artificial Sequence; identical to SEQ ID NO: 2156
  Description of Artificial Sequence: Synthetic pistachio; inner sequence and 3' sequence

SEQ ID NO: 26211 - DNA, 53 bp, Artificial Sequence; identical to SEQ ID NO: 2365
  Description of Artificial Sequence: Synthetic pistachio; inner sequence and 3' sequence

SEQ ID NO: 26212 - DNA, 53 bp, Artificial Sequence; identical to SEQ ID NO: 2369
  Description of Artificial Sequence: Synthetic pistachio; inner sequence and 3' sequence

SEQ ID NO: 26213 - DNA, 53 bp, Artificial Sequence; identical to SEQ ID NO: 2178
  Description of Artificial Sequence: Synthetic pistachio; inner sequence and 3' sequence

SEQ ID NO: 26214 - DNA, 53 bp, Artificial Sequence; identical to SEQ ID NO: 2192
  Description of Artificial Sequence: Synthetic pistachio; inner sequence and 3' sequence

SEQ ID NO: 26215 - DNA, 53 bp, Artificial Sequence; identical to SEQ ID NO: 2137
  Description of Artificial Sequence: Synthetic pistachio; inner sequence and 3' sequence

SEQ ID NO: 26216 - DNA, 53 bp, Artificial Sequence; identical to SEQ ID NO: 2371
  Description of Artificial Sequence: Synthetic pistachio; inner sequence and 3' sequence

SEQ ID NO: 26217 - DNA, 53 bp, Artificial Sequence; identical to SEQ ID NO: 2344
  Description of Artificial Sequence: Synthetic pistachio; inner sequence and 3' sequence

SEQ ID NO: 26218 - DNA, 53 bp, Artificial Sequence; identical to SEQ ID NO: 2376
  Description of Artificial Sequence: Synthetic pistachio; inner sequence and 3' sequence

SEQ ID NO: 26219 - DNA, 53 bp, Artificial Sequence; identical to SEQ ID NO: 2389
  Description of Artificial Sequence: Synthetic pistachio; inner sequence and 3' sequence

SEQ ID NO: 26220 - DNA, 53 bp, Artificial Sequence; identical to SEQ ID NO: 2310
  Description of Artificial Sequence: Synthetic pistachio; inner sequence and 3' sequence

SEQ ID NO: 26221 - DNA, 53 bp, Artificial Sequence; identical to SEQ ID NO: 2090
  Description of Artificial Sequence: Synthetic pistachio; inner sequence and 3' sequence

SEQ ID NO: 26222 - DNA, 53 bp, Artificial Sequence; identical to SEQ ID NO: 2552
  Description of Artificial Sequence: Synthetic pistachio; inner sequence and 3' sequence

SEQ ID NO: 26223 - DNA, 53 bp, Artificial Sequence; identical to SEQ ID NO: 2184
  Description of Artificial Sequence: Synthetic pistachio; inner sequence and 3' sequence

SEQ ID NO: 26224 - DNA, 53 bp, Artificial Sequence; identical to SEQ ID NO: 2141
  Description of Artificial Sequence: Synthetic pistachio; inner sequence and 3' sequence

SEQ ID NO: 26225 - DNA, 53 bp, Artificial Sequence; identical to SEQ ID NO: 2362
  Description of Artificial Sequence: Synthetic pistachio; inner sequence and 3' sequence

SEQ ID NO: 26226 - DNA, 53 bp, Artificial Sequence; identical to SEQ ID NO: 2140
  Description of Artificial Sequence: Synthetic pistachio; inner sequence and 3' sequence

SEQ ID NO: 26227 - DNA, 53 bp, Artificial Sequence; identical to SEQ ID NO: 2253
  Description of Artificial Sequence: Synthetic pistachio; inner sequence and 3' sequence

SEQ ID NO: 26228 - DNA, 53 bp, Artificial Sequence; identical to SEQ ID NO: 2437
  Description of Artificial Sequence: Synthetic pistachio; inner sequence and 3' sequence

SEQ ID NO: 26229 - DNA, 53 bp, Artificial Sequence; identical to SEQ ID NO: 2409
  Description of Artificial Sequence: Synthetic pistachio; inner sequence and 3' sequence

SEQ ID NO: 26230 - DNA, 53 bp, Artificial Sequence; identical to SEQ ID NO: 2436
  Description of Artificial Sequence: Synthetic pistachio; inner sequence and 3' sequence

SEQ ID NO: 26231 - DNA, 53 bp, Artificial Sequence; identical to SEQ ID NO: 2139
  Description of Artificial Sequence: Synthetic pistachio; inner sequence and 3' sequence

SEQ ID NO: 26232 - DNA, 53 bp, Artificial Sequence; identical to SEQ ID NO: 2209
  Description of Artificial Sequence: Synthetic pistachio; inner sequence and 3' sequence

SEQ ID NO: 26233 - DNA, 53 bp, Artificial Sequence; identical to SEQ ID NO: 2200
  Description of Artificial Sequence: Synthetic pistachio; inner sequence and 3' sequence

SEQ ID NO: 26234 - DNA, 53 bp, Artificial Sequence; identical to SEQ ID NO: 2532
  Description of Artificial Sequence: Synthetic pistachio; inner sequence and 3' sequence

SEQ ID NO: 26235 - DNA, 53 bp, Artificial Sequence; identical to SEQ ID NO: 2553
  Description of Artificial Sequence: Synthetic pistachio; inner sequence and 3' sequence

SEQ ID NO: 26236 - DNA, 53 bp, Artificial Sequence; identical to SEQ ID NO: 2527
  Description of Artificial Sequence: Synthetic pistachio; inner sequence and 3' sequence

SEQ ID NO: 26237 - DNA, 52 bp, Artificial Sequence; identical to SEQ ID NO: 2259
  Description of Artificial Sequence: Synthetic pistachio; inner sequence and 3' sequence

SEQ ID NO: 26238 - DNA, 53 bp, Artificial Sequence; identical to SEQ ID NO: 2312
  Description of Artificial Sequence: Synthetic pistachio; inner sequence and 3' sequence

SEQ ID NO: 26239 - DNA, 53 bp, Artificial Sequence; identical to SEQ ID NO: 2202
  Description of Artificial Sequence: Synthetic pistachio; inner sequence and 3' sequence

SEQ ID NO: 26240 - DNA, 53 bp, Artificial Sequence; identical to SEQ ID NO: 2102
  Description of Artificial Sequence: Synthetic pistachio; inner sequence and 3' sequence

SEQ ID NO: 26241 - DNA, 53 bp, Artificial Sequence; identical to SEQ ID NO: 2692
  Description of Artificial Sequence: Synthetic pistachio; inner sequence and 3' sequence

SEQ ID NO: 26242 - DNA, 53 bp, Artificial Sequence; identical to SEQ ID NO: 2299
  Description of Artificial Sequence: Synthetic pistachio; inner sequence and 3' sequence

SEQ ID NO: 26243 - DNA, 53 bp, Artificial Sequence; identical to SEQ ID NO: 2294
  Description of Artificial Sequence: Synthetic pistachio; inner sequence and 3' sequence

SEQ ID NO: 26244 - DNA, 53 bp, Artificial Sequence; identical to SEQ ID NO: 2284
  Description of Artificial Sequence: Synthetic pistachio; inner sequence and 3' sequence

SEQ ID NO: 26245 - DNA, 53 bp, Artificial Sequence; identical to SEQ ID NO: 2177
  Description of Artificial Sequence: Synthetic pistachio; inner sequence and 3' sequence

SEQ ID NO: 26246 - DNA, 53 bp, Artificial Sequence; identical to SEQ ID NO: 6301
  Description of Artificial Sequence: Synthetic pistachio; inner sequence and 3' sequence

SEQ ID NO: 26247 - DNA, 53 bp, Artificial Sequence; identical to SEQ ID NO: 2280
  Description of Artificial Sequence: Synthetic pistachio; inner sequence and 3' sequence

SEQ ID NO: 26248 - DNA, 53 bp, Artificial Sequence; identical to SEQ ID NO: 2696
  Description of Artificial Sequence: Synthetic pistachio; inner sequence and 3' sequence

SEQ ID NO: 26249 - DNA, 53 bp, Artificial Sequence; identical to SEQ ID NO: 2166
  Description of Artificial Sequence: Synthetic pistachio; inner sequence and 3' sequence

SEQ ID NO: 26250 - DNA, 53 bp, Artificial Sequence; identical to SEQ ID NO: 2567
  Description of Artificial Sequence: Synthetic pistachio; inner sequence and 3' sequence

SEQ ID NO: 26251 - DNA, 53 bp, Artificial Sequence; identical to SEQ ID NO: 2268
  Description of Artificial Sequence: Synthetic pistachio; inner sequence and 3' sequence

SEQ ID NO: 26252 - DNA, 53 bp, Artificial Sequence; identical to SEQ ID NO: 2660
  Description of Artificial Sequence: Synthetic pistachio; inner sequence and 3' sequence

SEQ ID NO: 26253 - DNA, 53 bp, Artificial Sequence; identical to SEQ ID NO: 2522
  Description of Artificial Sequence: Synthetic pistachio; inner sequence and 3' sequence

SEQ ID NO: 26254 - DNA, 53 bp, Artificial Sequence; identical to SEQ ID NO: 2195
  Description of Artificial Sequence: Synthetic pistachio; inner sequence and 3' sequence

SEQ ID NO: 26255 - DNA, 52 bp, Artificial Sequence; identical to SEQ ID NO: 2334
  Description of Artificial Sequence: Synthetic pistachio; inner sequence and 3' sequence

SEQ ID NO: 26256 - DNA, 53 bp, Artificial Sequence; identical to SEQ ID NO: 2127
  Description of Artificial Sequence: Synthetic pistachio; inner sequence and 3' sequence

SEQ ID NO: 26257 - DNA, 53 bp, Artificial Sequence; identical to SEQ ID NO: 2227
  Description of Artificial Sequence: Synthetic pistachio; inner sequence and 3' sequence

SEQ ID NO: 26258 - DNA, 53 bp, Artificial Sequence; identical to SEQ ID NO: 2341
  Description of Artificial Sequence: Synthetic pistachio; inner sequence and 3' sequence

SEQ ID NO: 26259 - DNA, 53 bp, Artificial Sequence; identical to SEQ ID NO: 2124
  Description of Artificial Sequence: Synthetic pistachio; inner sequence and 3' sequence

SEQ ID NO: 26260 - DNA, 53 bp, Artificial Sequence; identical to SEQ ID NO: 2222
  Description of Artificial Sequence: Synthetic pistachio; inner sequence and 3' sequence

SEQ ID NO: 26261 - DNA, 53 bp, Artificial Sequence; identical to SEQ ID NO: 2264
  Description of Artificial Sequence: Synthetic pistachio; inner sequence and 3' sequence

SEQ ID NO: 26262 - DNA, 53 bp, Artificial Sequence; identical to SEQ ID NO: 2266
  Description of Artificial Sequence: Synthetic pistachio; inner sequence and 3' sequence

SEQ ID NO: 26263 - DNA, 53 bp, Artificial Sequence; identical to SEQ ID NO: 2401
  Description of Artificial Sequence: Synthetic pistachio; inner sequence and 3' sequence

SEQ ID NO: 26264 - DNA, 53 bp, Artificial Sequence; identical to SEQ ID NO: 2232
  Description of Artificial Sequence: Synthetic pistachio; inner sequence and 3' sequence

SEQ ID NO: 26265 - DNA, 53 bp, Artificial Sequence; identical to SEQ ID NO: 2787
  Description of Artificial Sequence: Synthetic pistachio; inner sequence and 3' sequence

SEQ ID NO: 26266 - DNA, 53 bp, Artificial Sequence; identical to SEQ ID NO: 2160
  Description of Artificial Sequence: Synthetic pistachio; inner sequence and 3' sequence

SEQ ID NO: 26267 - DNA, 53 bp, Artificial Sequence; identical to SEQ ID NO: 2615
  Description of Artificial Sequence: Synthetic pistachio; inner sequence and 3' sequence

SEQ ID NO: 26268 - DNA, 53 bp, Artificial Sequence; identical to SEQ ID NO: 2900
  Description of Artificial Sequence: Synthetic pistachio; inner sequence and 3' sequence

SEQ ID NO: 26269 - DNA, 52 bp, Artificial Sequence; identical to SEQ ID NO: 2251
  Description of Artificial Sequence: Synthetic pistachio; inner sequence and 3' sequence

SEQ ID NO: 26270 - DNA, 53 bp, Artificial Sequence; identical to SEQ ID NO: 2175
  Description of Artificial Sequence: Synthetic pistachio; inner sequence and 3' sequence

SEQ ID NO: 26271 - DNA, 53 bp, Artificial Sequence; identical to SEQ ID NO: 2485
  Description of Artificial Sequence: Synthetic pistachio; inner sequence and 3' sequence

SEQ ID NO: 26272 - DNA, 53 bp, Artificial Sequence; identical to SEQ ID NO: 2513
  Description of Artificial Sequence: Synthetic pistachio; inner sequence and 3' sequence

SEQ ID NO: 26273 - DNA, 53 bp, Artificial Sequence; identical to SEQ ID NO: 2400
  Description of Artificial Sequence: Synthetic pistachio; inner sequence and 3' sequence

SEQ ID NO: 26274 - DNA, 53 bp, Artificial Sequence; identical to SEQ ID NO: 2306
  Description of Artificial Sequence: Synthetic pistachio; inner sequence and 3' sequence

SEQ ID NO: 26275 - DNA, 53 bp, Artificial Sequence; identical to SEQ ID NO: 2666
  Description of Artificial Sequence: Synthetic pistachio; inner sequence and 3' sequence

SEQ ID NO: 26276 - DNA, 53 bp, Artificial Sequence; identical to SEQ ID NO: 2249
  Description of Artificial Sequence: Synthetic pistachio; inner sequence and 3' sequence

SEQ ID NO: 26277 - DNA, 53 bp, Artificial Sequence; identical to SEQ ID NO: 2298
  Description of Artificial Sequence: Synthetic pistachio; inner sequence and 3' sequence

SEQ ID NO: 26278 - DNA, 53 bp, Artificial Sequence; identical to SEQ ID NO: 2470
  Description of Artificial Sequence: Synthetic pistachio; inner sequence and 3' sequence

SEQ ID NO: 26279 - DNA, 53 bp, Artificial Sequence; identical to SEQ ID NO: 2325
  Description of Artificial Sequence: Synthetic pistachio; inner sequence and 3' sequence

SEQ ID NO: 26280 - DNA, 53 bp, Artificial Sequence; identical to SEQ ID NO: 2269
  Description of Artificial Sequence: Synthetic pistachio; inner sequence and 3' sequence

SEQ ID NO: 26281 - DNA, 53 bp, Artificial Sequence; identical to SEQ ID NO: 2238
  Description of Artificial Sequence: Synthetic pistachio; inner sequence and 3' sequence

SEQ ID NO: 26282 - DNA, 53 bp, Artificial Sequence; identical to SEQ ID NO: 2429
  Description of Artificial Sequence: Synthetic pistachio; inner sequence and 3' sequence

SEQ ID NO: 26283 - DNA, 53 bp, Artificial Sequence; identical to SEQ ID NO: 2213
  Description of Artificial Sequence: Synthetic pistachio; inner sequence and 3' sequence

SEQ ID NO: 26284 - DNA, 53 bp, Artificial Sequence; identical to SEQ ID NO: 2206
  Description of Artificial Sequence: Synthetic pistachio; inner sequence and 3' sequence

SEQ ID NO: 26285 - DNA, 53 bp, Artificial Sequence; identical to SEQ ID NO: 2377
  Description of Artificial Sequence: Synthetic pistachio; inner sequence and 3' sequence

SEQ ID NO: 26286 - DNA, 53 bp, Artificial Sequence; identical to SEQ ID NO: 2340
  Description of Artificial Sequence: Synthetic pistachio; inner sequence and 3' sequence

SEQ ID NO: 26287 - DNA, 53 bp, Artificial Sequence; identical to SEQ ID NO: 2617
  Description of Artificial Sequence: Synthetic pistachio; inner sequence and 3' sequence

SEQ ID NO: 26288 - DNA, 53 bp, Artificial Sequence; identical to SEQ ID NO: 2541
  Description of Artificial Sequence: Synthetic pistachio; inner sequence and 3' sequence

SEQ ID NO: 26289 - DNA, 53 bp, Artificial Sequence; identical to SEQ ID NO: 2218
  Description of Artificial Sequence: Synthetic pistachio; inner sequence and 3' sequence

SEQ ID NO: 26290 - DNA, 53 bp, Artificial Sequence; identical to SEQ ID NO: 2233
  Description of Artificial Sequence: Synthetic pistachio; inner sequence and 3' sequence

SEQ ID NO: 26291 - DNA, 53 bp, Artificial Sequence; identical to SEQ ID NO: 2413
  Description of Artificial Sequence: Synthetic pistachio; inner sequence and 3' sequence

SEQ ID NO: 26292 - DNA, 53 bp, Artificial Sequence; identical to SEQ ID NO: 2187
  Description of Artificial Sequence: Synthetic pistachio; inner sequence and 3' sequence

SEQ ID NO: 26293 - DNA, 53 bp, Artificial Sequence; identical to SEQ ID NO: 2190
  Description of Artificial Sequence: Synthetic pistachio; inner sequence and 3' sequence

SEQ ID NO: 26294 - DNA, 53 bp, Artificial Sequence; identical to SEQ ID NO: 2511
  Description of Artificial Sequence: Synthetic pistachio; inner sequence and 3' sequence

SEQ ID NO: 26295 - DNA, 53 bp, Artificial Sequence; identical to SEQ ID NO: 2783
  Description of Artificial Sequence: Synthetic pistachio; inner sequence and 3' sequence

SEQ ID NO: 26296 - DNA, 53 bp, Artificial Sequence; identical to SEQ ID NO: 2419
  Description of Artificial Sequence: Synthetic pistachio; inner sequence and 3' sequence

SEQ ID NO: 26297 - DNA, 53 bp, Artificial Sequence; identical to SEQ ID NO: 2361
  Description of Artificial Sequence: Synthetic pistachio; inner sequence and 3' sequence

SEQ ID NO: 26298 - DNA, 53 bp, Artificial Sequence; identical to SEQ ID NO: 2272
  Description of Artificial Sequence: Synthetic pistachio; inner sequence and 3' sequence

SEQ ID NO: 26299 - DNA, 53 bp, Artificial Sequence; identical to SEQ ID NO: 2314
  Description of Artificial Sequence: Synthetic pistachio; inner sequence and 3' sequence

SEQ ID NO: 26300 - DNA, 53 bp, Artificial Sequence; identical to SEQ ID NO: 2446
  Description of Artificial Sequence: Synthetic pistachio; inner sequence and 3' sequence

SEQ ID NO: 26301 - DNA, 53 bp, Artificial Sequence; identical to SEQ ID NO: 2173
  Description of Artificial Sequence: Synthetic pistachio; inner sequence and 3' sequence

SEQ ID NO: 26302 - DNA, 53 bp, Artificial Sequence; identical to SEQ ID NO: 2220
  Description of Artificial Sequence: Synthetic pistachio; inner sequence and 3' sequence

SEQ ID NO: 26303 - DNA, 53 bp, Artificial Sequence; identical to SEQ ID NO: 2305
  Description of Artificial Sequence: Synthetic pistachio; inner sequence and 3' sequence

SEQ ID NO: 26304 - DNA, 53 bp, Artificial Sequence; identical to SEQ ID NO: 2673
  Description of Artificial Sequence: Synthetic pistachio; inner sequence and 3' sequence

SEQ ID NO: 26305 - DNA, 54 bp, Artificial Sequence; identical to SEQ ID NO: 2258
  Description of Artificial Sequence: Synthetic pistachio; inner sequence and 3' sequence

SEQ ID NO: 26306 - DNA, 53 bp, Artificial Sequence; identical to SEQ ID NO: 2521
  Description of Artificial Sequence: Synthetic pistachio; inner sequence and 3' sequence

SEQ ID NO: 26307 - DNA, 53 bp, Artificial Sequence; identical to SEQ ID NO: 6381
  Description of Artificial Sequence: Synthetic pistachio; inner sequence and 3' sequence

SEQ ID NO: 26308 - DNA, 53 bp, Artificial Sequence; identical to SEQ ID NO: 2645
  Description of Artificial Sequence: Synthetic pistachio; inner sequence and 3' sequence

SEQ ID NO: 26309 - DNA, 53 bp, Artificial Sequence; identical to SEQ ID NO: 2336
  Description of Artificial Sequence: Synthetic pistachio; inner sequence and 3' sequence

SEQ ID NO: 26310 - DNA, 53 bp, Artificial Sequence; identical to SEQ ID NO: 6229
  Description of Artificial Sequence: Synthetic pistachio; inner sequence and 3' sequence

SEQ ID NO: 26311 - DNA, 53 bp, Artificial Sequence; identical to SEQ ID NO: 2321
  Description of Artificial Sequence: Synthetic pistachio; inner sequence and 3' sequence

SEQ ID NO: 26312 - DNA, 53 bp, Artificial Sequence; identical to SEQ ID NO: 2244
  Description of Artificial Sequence: Synthetic pistachio; inner sequence and 3' sequence

SEQ ID NO: 26313 - DNA, 53 bp, Artificial Sequence; identical to SEQ ID NO: 2374
  Description of Artificial Sequence: Synthetic pistachio; inner sequence and 3' sequence

SEQ ID NO: 26314 - DNA, 53 bp, Artificial Sequence; identical to SEQ ID NO: 2801
  Description of Artificial Sequence: Synthetic pistachio; inner sequence and 3' sequence

SEQ ID NO: 26315 - DNA, 53 bp, Artificial Sequence; identical to SEQ ID NO: 2653
  Description of Artificial Sequence: Synthetic pistachio; inner sequence and 3' sequence

SEQ ID NO: 26316 - DNA, 53 bp, Artificial Sequence; identical to SEQ ID NO: 2182
  Description of Artificial Sequence: Synthetic pistachio; inner sequence and 3' sequence

SEQ ID NO: 26317 - DNA, 53 bp, Artificial Sequence; identical to SEQ ID NO: 2563
  Description of Artificial Sequence: Synthetic pistachio; inner sequence and 3' sequence

SEQ ID NO: 26318 - DNA, 53 bp, Artificial Sequence; identical to SEQ ID NO: 2638
  Description of Artificial Sequence: Synthetic pistachio; inner sequence and 3' sequence

SEQ ID NO: 26319 - DNA, 53 bp, Artificial Sequence; identical to SEQ ID NO: 2236
  Description of Artificial Sequence: Synthetic pistachio; inner sequence and 3' sequence

SEQ ID NO: 26320 - DNA, 53 bp, Artificial Sequence; identical to SEQ ID NO: 2414
  Description of Artificial Sequence: Synthetic pistachio; inner sequence and 3' sequence

SEQ ID NO: 26321 - DNA, 53 bp, Artificial Sequence; identical to SEQ ID NO: 2234
  Description of Artificial Sequence: Synthetic pistachio; inner sequence and 3' sequence

SEQ ID NO: 26322 - DNA, 53 bp, Artificial Sequence; identical to SEQ ID NO: 2560
  Description of Artificial Sequence: Synthetic pistachio; inner sequence and 3' sequence

SEQ ID NO: 26323 - DNA, 53 bp, Artificial Sequence; identical to SEQ ID NO: 2301
  Description of Artificial Sequence: Synthetic pistachio; inner sequence and 3' sequence

SEQ ID NO: 26324 - DNA, 53 bp, Artificial Sequence; identical to SEQ ID NO: 2283
  Description of Artificial Sequence: Synthetic pistachio; inner sequence and 3' sequence

SEQ ID NO: 26325 - DNA, 53 bp, Artificial Sequence; identical to SEQ ID NO: 2529
  Description of Artificial Sequence: Synthetic pistachio; inner sequence and 3' sequence

SEQ ID NO: 26326 - DNA, 53 bp, Artificial Sequence; identical to SEQ ID NO: 2176
  Description of Artificial Sequence: Synthetic pistachio; inner sequence and 3' sequence

SEQ ID NO: 26327 - DNA, 53 bp, Artificial Sequence; identical to SEQ ID NO: 2390
  Description of Artificial Sequence: Synthetic pistachio; inner sequence and 3' sequence

SEQ ID NO: 26328 - DNA, 53 bp, Artificial Sequence; identical to SEQ ID NO: 2215
  Description of Artificial Sequence: Synthetic pistachio; inner sequence and 3' sequence

SEQ ID NO: 26329 - DNA, 53 bp, Artificial Sequence; identical to SEQ ID NO: 2622
  Description of Artificial Sequence: Synthetic pistachio; inner sequence and 3' sequence

SEQ ID NO: 26330 - DNA, 53 bp, Artificial Sequence; identical to SEQ ID NO: 2316
  Description of Artificial Sequence: Synthetic pistachio; inner sequence and 3' sequence

SEQ ID NO: 26331 - DNA, 53 bp, Artificial Sequence; identical to SEQ ID NO: 2274
  Description of Artificial Sequence: Synthetic pistachio; inner sequence and 3' sequence

SEQ ID NO: 26332 - DNA, 53 bp, Artificial Sequence; identical to SEQ ID NO: 2920
  Description of Artificial Sequence: Synthetic pistachio; inner sequence and 3' sequence

SEQ ID NO: 26333 - DNA, 54 bp, Artificial Sequence; identical to SEQ ID NO: 6434
  Description of Artificial Sequence: Synthetic pistachio; inner sequence and 3' sequence

SEQ ID NO: 26334 - DNA, 53 bp, Artificial Sequence; identical to SEQ ID NO: 2572
  Description of Artificial Sequence: Synthetic pistachio; inner sequence and 3' sequence

SEQ ID NO: 26335 - DNA, 53 bp, Artificial Sequence; identical to SEQ ID NO: 2352
  Description of Artificial Sequence: Synthetic pistachio; inner sequence and 3' sequence

SEQ ID NO: 26336 - DNA, 53 bp, Artificial Sequence; identical to SEQ ID NO: 2358
  Description of Artificial Sequence: Synthetic pistachio; inner sequence and 3' sequence

SEQ ID NO: 26337 - DNA, 53 bp, Artificial Sequence; identical to SEQ ID NO: 2559
  Description of Artificial Sequence: Synthetic pistachio; inner sequence and 3' sequence

SEQ ID NO: 26338 - DNA, 53 bp, Artificial Sequence; identical to SEQ ID NO: 2197
  Description of Artificial Sequence: Synthetic pistachio; inner sequence and 3' sequence

SEQ ID NO: 26339 - DNA, 53 bp, Artificial Sequence; identical to SEQ ID NO: 2343
  Description of Artificial Sequence: Synthetic pistachio; inner sequence and 3' sequence

SEQ ID NO: 26340 - DNA, 53 bp, Artificial Sequence; identical to SEQ ID NO: 2267
  Description of Artificial Sequence: Synthetic pistachio; inner sequence and 3' sequence

SEQ ID NO: 26341 - DNA, 53 bp, Artificial Sequence; identical to SEQ ID NO: 2231
  Description of Artificial Sequence: Synthetic pistachio; inner sequence and 3' sequence

SEQ ID NO: 26342 - DNA, 53 bp, Artificial Sequence; identical to SEQ ID NO: 2297
  Description of Artificial Sequence: Synthetic pistachio; inner sequence and 3' sequence

SEQ ID NO: 26343 - DNA, 53 bp, Artificial Sequence; identical to SEQ ID NO: 2597
  Description of Artificial Sequence: Synthetic pistachio; inner sequence and 3' sequence

SEQ ID NO: 26344 - DNA, 53 bp, Artificial Sequence; identical to SEQ ID NO: 2877
  Description of Artificial Sequence: Synthetic pistachio; inner sequence and 3' sequence

SEQ ID NO: 26345 - DNA, 53 bp, Artificial Sequence; identical to SEQ ID NO: 2379
  Description of Artificial Sequence: Synthetic pistachio; inner sequence and 3' sequence

SEQ ID NO: 26346 - DNA, 53 bp, Artificial Sequence; identical to SEQ ID NO: 2242
  Description of Artificial Sequence: Synthetic pistachio; inner sequence and 3' sequence

SEQ ID NO: 26347 - DNA, 53 bp, Artificial Sequence; identical to SEQ ID NO: 2620
  Description of Artificial Sequence: Synthetic pistachio; inner sequence and 3' sequence

SEQ ID NO: 26348 - DNA, 53 bp, Artificial Sequence; identical to SEQ ID NO: 2728
  Description of Artificial Sequence: Synthetic pistachio; inner sequence and 3' sequence

SEQ ID NO: 26349 - DNA, 53 bp, Artificial Sequence; identical to SEQ ID NO: 2640
  Description of Artificial Sequence: Synthetic pistachio; inner sequence and 3' sequence

SEQ ID NO: 26350 - DNA, 53 bp, Artificial Sequence; identical to SEQ ID NO: 2528
  Description of Artificial Sequence: Synthetic pistachio; inner sequence and 3' sequence

SEQ ID NO: 26351 - DNA, 56 bp, Artificial Sequence; identical to SEQ ID NO: 2864
  Description of Artificial Sequence: Synthetic pistachio; inner sequence and 3' sequence

SEQ ID NO: 26352 - DNA, 53 bp, Artificial Sequence; identical to SEQ ID NO: 2320
  Description of Artificial Sequence: Synthetic pistachio; inner sequence and 3' sequence

SEQ ID NO: 26353 - DNA, 53 bp, Artificial Sequence; identical to SEQ ID NO: 2271
  Description of Artificial Sequence: Synthetic pistachio; inner sequence and 3' sequence

SEQ ID NO: 26354 - DNA, 53 bp, Artificial Sequence; identical to SEQ ID NO: 2481
  Description of Artificial Sequence: Synthetic pistachio; inner sequence and 3' sequence

SEQ ID NO: 26355 - DNA, 53 bp, Artificial Sequence; identical to SEQ ID NO: 2520
  Description of Artificial Sequence: Synthetic pistachio; inner sequence and 3' sequence

SEQ ID NO: 26356 - DNA, 53 bp, Artificial Sequence; identical to SEQ ID NO: 2226
  Description of Artificial Sequence: Synthetic pistachio; inner sequence and 3' sequence

SEQ ID NO: 26357 - DNA, 53 bp, Artificial Sequence; identical to SEQ ID NO: 2386
  Description of Artificial Sequence: Synthetic pistachio; inner sequence and 3' sequence

SEQ ID NO: 26358 - DNA, 53 bp, Artificial Sequence; identical to SEQ ID NO: 2224
  Description of Artificial Sequence: Synthetic pistachio; inner sequence and 3' sequence

SEQ ID NO: 26359 - DNA, 53 bp, Artificial Sequence; identical to SEQ ID NO: 14892
  Description of Artificial Sequence: Synthetic pistachio; inner sequence and 3' sequence

SEQ ID NO: 26360 - DNA, 53 bp, Artificial Sequence; identical to SEQ ID NO: 2417
  Description of Artificial Sequence: Synthetic pistachio; inner sequence and 3' sequence

SEQ ID NO: 26361 - DNA, 53 bp, Artificial Sequence; identical to SEQ ID NO: 2448
  Description of Artificial Sequence: Synthetic pistachio; inner sequence and 3' sequence

SEQ ID NO: 26362 - DNA, 53 bp, Artificial Sequence; identical to SEQ ID NO: 2524
  Description of Artificial Sequence: Synthetic pistachio; inner sequence and 3' sequence

SEQ ID NO: 26363 - DNA, 53 bp, Artificial Sequence; identical to SEQ ID NO: 2647
  Description of Artificial Sequence: Synthetic pistachio; inner sequence and 3' sequence

SEQ ID NO: 26364 - DNA, 53 bp, Artificial Sequence; identical to SEQ ID NO: 2789
  Description of Artificial Sequence: Synthetic pistachio; inner sequence and 3' sequence

SEQ ID NO: 26365 - DNA, 53 bp, Artificial Sequence; identical to SEQ ID NO: 2223
  Description of Artificial Sequence: Synthetic pistachio; inner sequence and 3' sequence

SEQ ID NO: 26366 - DNA, 53 bp, Artificial Sequence; identical to SEQ ID NO: 2916
  Description of Artificial Sequence: Synthetic pistachio; inner sequence and 3' sequence

SEQ ID NO: 26367 - DNA, 53 bp, Artificial Sequence; identical to SEQ ID NO: 2119
  Description of Artificial Sequence: Synthetic pistachio; inner sequence and 3' sequence

SEQ ID NO: 26368 - DNA, 53 bp, Artificial Sequence; identical to SEQ ID NO: 2210
  Description of Artificial Sequence: Synthetic pistachio; inner sequence and 3' sequence

SEQ ID NO: 26369 - DNA, 53 bp, Artificial Sequence; identical to SEQ ID NO: 2315
  Description of Artificial Sequence: Synthetic pistachio; inner sequence and 3' sequence

SEQ ID NO: 26370 - DNA, 53 bp, Artificial Sequence; identical to SEQ ID NO: 2496
  Description of Artificial Sequence: Synthetic pistachio; inner sequence and 3' sequence

SEQ ID NO: 26371 - DNA, 53 bp, Artificial Sequence; identical to SEQ ID NO: 2246
  Description of Artificial Sequence: Synthetic pistachio; inner sequence and 3' sequence

SEQ ID NO: 26372 - DNA, 53 bp, Artificial Sequence; identical to SEQ ID NO: 2329
  Description of Artificial Sequence: Synthetic pistachio; inner sequence and 3' sequence

SEQ ID NO: 26373 - DNA, 53 bp, Artificial Sequence; identical to SEQ ID NO: 2319
  Description of Artificial Sequence: Synthetic pistachio; inner sequence and 3' sequence

SEQ ID NO: 26374 - DNA, 53 bp, Artificial Sequence; identical to SEQ ID NO: 2359
  Description of Artificial Sequence: Synthetic pistachio; inner sequence and 3' sequence

SEQ ID NO: 26375 - DNA, 53 bp, Artificial Sequence; identical to SEQ ID NO: 2263
  Description of Artificial Sequence: Synthetic pistachio; inner sequence and 3' sequence

SEQ ID NO: 26376 - DNA, 53 bp, Artificial Sequence; identical to SEQ ID NO: 2128
  Description of Artificial Sequence: Synthetic pistachio; inner sequence and 3' sequence

SEQ ID NO: 26377 - DNA, 53 bp, Artificial Sequence; identical to SEQ ID NO: 2534
  Description of Artificial Sequence: Synthetic pistachio; inner sequence and 3' sequence

SEQ ID NO: 26378 - DNA, 53 bp, Artificial Sequence; identical to SEQ ID NO: 2350
  Description of Artificial Sequence: Synthetic pistachio; inner sequence and 3' sequence

SEQ ID NO: 26379 - DNA, 53 bp, Artificial Sequence; identical to SEQ ID NO: 2167
  Description of Artificial Sequence: Synthetic pistachio; inner sequence and 3' sequence

SEQ ID NO: 26380 - DNA, 53 bp, Artificial Sequence; identical to SEQ ID NO: 2574
  Description of Artificial Sequence: Synthetic pistachio; inner sequence and 3' sequence

SEQ ID NO: 26381 - DNA, 53 bp, Artificial Sequence; identical to SEQ ID NO: 2478
  Description of Artificial Sequence: Synthetic pistachio; inner sequence and 3' sequence

SEQ ID NO: 26382 - DNA, 53 bp, Artificial Sequence; identical to SEQ ID NO: 2500
  Description of Artificial Sequence: Synthetic pistachio; inner sequence and 3' sequence

SEQ ID NO: 26383 - DNA, 53 bp, Artificial Sequence; identical to SEQ ID NO: 2530
  Description of Artificial Sequence: Synthetic pistachio; inner sequence and 3' sequence

SEQ ID NO: 26384 - DNA, 53 bp, Artificial Sequence; identical to SEQ ID NO: 2432
  Description of Artificial Sequence: Synthetic pistachio; inner sequence and 3' sequence

SEQ ID NO: 26385 - DNA, 53 bp, Artificial Sequence; identical to SEQ ID NO: 2373
  Description of Artificial Sequence: Synthetic pistachio; inner sequence and 3' sequence

SEQ ID NO: 26386 - DNA, 53 bp, Artificial Sequence; identical to SEQ ID NO: 2654
  Description of Artificial Sequence: Synthetic pistachio; inner sequence and 3' sequence

SEQ ID NO: 26387 - DNA, 53 bp, Artificial Sequence; identical to SEQ ID NO: 2504
  Description of Artificial Sequence: Synthetic pistachio; inner sequence and 3' sequence

SEQ ID NO: 26388 - DNA, 53 bp, Artificial Sequence; identical to SEQ ID NO: 2757
  Description of Artificial Sequence: Synthetic pistachio; inner sequence and 3' sequence

SEQ ID NO: 26389 - DNA, 53 bp, Artificial Sequence; identical to SEQ ID NO: 2339
  Description of Artificial Sequence: Synthetic pistachio; inner sequence and 3' sequence

SEQ ID NO: 26390 - DNA, 53 bp, Artificial Sequence; identical to SEQ ID NO: 2606
  Description of Artificial Sequence: Synthetic pistachio; inner sequence and 3' sequence

SEQ ID NO: 26391 - DNA, 53 bp, Artificial Sequence; identical to SEQ ID NO: 2395
  Description of Artificial Sequence: Synthetic pistachio; inner sequence and 3' sequence

SEQ ID NO: 26392 - DNA, 53 bp, Artificial Sequence; identical to SEQ ID NO: 6543
  Description of Artificial Sequence: Synthetic pistachio; inner sequence and 3' sequence

SEQ ID NO: 26393 - DNA, 53 bp, Artificial Sequence; identical to SEQ ID NO: 2248
  Description of Artificial Sequence: Synthetic pistachio; inner sequence and 3' sequence

SEQ ID NO: 26394 - DNA, 53 bp, Artificial Sequence; identical to SEQ ID NO: 2275
  Description of Artificial Sequence: Synthetic pistachio; inner sequence and 3' sequence

SEQ ID NO: 26395 - DNA, 52 bp, Artificial Sequence; identical to SEQ ID NO: 2193
  Description of Artificial Sequence: Synthetic pistachio; inner sequence and 3' sequence

SEQ ID NO: 26396 - DNA, 53 bp, Artificial Sequence; identical to SEQ ID NO: 2928
  Description of Artificial Sequence: Synthetic pistachio; inner sequence and 3' sequence

SEQ ID NO: 26397 - DNA, 53 bp, Artificial Sequence; identical to SEQ ID NO: 2370
  Description of Artificial Sequence: Synthetic pistachio; inner sequence and 3' sequence

SEQ ID NO: 26398 - DNA, 53 bp, Artificial Sequence; identical to SEQ ID NO: 2181
  Description of Artificial Sequence: Synthetic pistachio; inner sequence and 3' sequence

SEQ ID NO: 26399 - DNA, 53 bp, Artificial Sequence; identical to SEQ ID NO: 2919
  Description of Artificial Sequence: Synthetic pistachio; inner sequence and 3' sequence

SEQ ID NO: 26400 - DNA, 53 bp, Artificial Sequence; identical to SEQ ID NO: 2777
  Description of Artificial Sequence: Synthetic pistachio; inner sequence and 3' sequence

SEQ ID NO: 26401 - DNA, 53 bp, Artificial Sequence; identical to SEQ ID NO: 2405
  Description of Artificial Sequence: Synthetic pistachio; inner sequence and 3' sequence

SEQ ID NO: 26402 - DNA, 53 bp, Artificial Sequence; identical to SEQ ID NO: 2476
  Description of Artificial Sequence: Synthetic pistachio; inner sequence and 3' sequence

SEQ ID NO: 26403 - DNA, 53 bp, Artificial Sequence; identical to SEQ ID NO: 2410
  Description of Artificial Sequence: Synthetic pistachio; inner sequence and 3' sequence

SEQ ID NO: 26404 - DNA, 53 bp, Artificial Sequence; identical to SEQ ID NO: 2399
  Description of Artificial Sequence: Synthetic pistachio; inner sequence and 3' sequence

SEQ ID NO: 26405 - DNA, 53 bp, Artificial Sequence; identical to SEQ ID NO: 2628
  Description of Artificial Sequence: Synthetic pistachio; inner sequence and 3' sequence

SEQ ID NO: 26406 - DNA, 53 bp, Artificial Sequence; identical to SEQ ID NO: 10564
  Description of Artificial Sequence: Synthetic pistachio; inner sequence and 3' sequence

SEQ ID NO: 26407 - DNA, 53 bp, Artificial Sequence; identical to SEQ ID NO: 2764
  Description of Artificial Sequence: Synthetic pistachio; inner sequence and 3' sequence

SEQ ID NO: 26408 - DNA, 53 bp, Artificial Sequence; identical to SEQ ID NO: 2487
  Description of Artificial Sequence: Synthetic pistachio; inner sequence and 3' sequence

SEQ ID NO: 26409 - DNA, 53 bp, Artificial Sequence; identical to SEQ ID NO: 2517
  Description of Artificial Sequence: Synthetic pistachio; inner sequence and 3' sequence

SEQ ID NO: 26410 - DNA, 53 bp, Artificial Sequence; identical to SEQ ID NO: 2391
  Description of Artificial Sequence: Synthetic pistachio; inner sequence and 3' sequence

SEQ ID NO: 26411 - DNA, 53 bp, Artificial Sequence; identical to SEQ ID NO: 22615
  Description of Artificial Sequence: Synthetic pistachio; inner sequence and 3' sequence

SEQ ID NO: 26412 - DNA, 53 bp, Artificial Sequence; identical to SEQ ID NO: 2387
  Description of Artificial Sequence: Synthetic pistachio; inner sequence and 3' sequence

SEQ ID NO: 26413 - DNA, 53 bp, Artificial Sequence; identical to SEQ ID NO: 2143
  Description of Artificial Sequence: Synthetic pistachio; inner sequence and 3' sequence

SEQ ID NO: 26414 - DNA, 53 bp, Artificial Sequence; identical to SEQ ID NO: 2255
  Description of Artificial Sequence: Synthetic pistachio; inner sequence and 3' sequence

SEQ ID NO: 26415 - DNA, 53 bp, Artificial Sequence; identical to SEQ ID NO: 2228
  Description of Artificial Sequence: Synthetic pistachio; inner sequence and 3' sequence

SEQ ID NO: 26416 - DNA, 53 bp, Artificial Sequence; identical to SEQ ID NO: 2219
  Description of Artificial Sequence: Synthetic pistachio; inner sequence and 3' sequence

SEQ ID NO: 26417 - DNA, 53 bp, Artificial Sequence; identical to SEQ ID NO: 6503
  Description of Artificial Sequence: Synthetic pistachio; inner sequence and 3' sequence

SEQ ID NO: 26418 - DNA, 53 bp, Artificial Sequence; identical to SEQ ID NO: 2438
  Description of Artificial Sequence: Synthetic pistachio; inner sequence and 3' sequence

SEQ ID NO: 26419 - DNA, 53 bp, Artificial Sequence; identical to SEQ ID NO: 2891
  Description of Artificial Sequence: Synthetic pistachio; inner sequence and 3' sequence

SEQ ID NO: 26420 - DNA, 53 bp, Artificial Sequence; identical to SEQ ID NO: 2349
  Description of Artificial Sequence: Synthetic pistachio; inner sequence and 3' sequence

SEQ ID NO: 26421 - DNA, 53 bp, Artificial Sequence; identical to SEQ ID NO: 2260
  Description of Artificial Sequence: Synthetic pistachio; inner sequence and 3' sequence

SEQ ID NO: 26422 - DNA, 53 bp, Artificial Sequence; identical to SEQ ID NO: 2338
  Description of Artificial Sequence: Synthetic pistachio; inner sequence and 3' sequence

SEQ ID NO: 26423 - DNA, 53 bp, Artificial Sequence; identical to SEQ ID NO: 2475
  Description of Artificial Sequence: Synthetic pistachio; inner sequence and 3' sequence

SEQ ID NO: 26424 - DNA, 53 bp, Artificial Sequence; identical to SEQ ID NO: 2332
  Description of Artificial Sequence: Synthetic pistachio; inner sequence and 3' sequence

SEQ ID NO: 26425 - DNA, 53 bp, Artificial Sequence; identical to SEQ ID NO: 2418
  Description of Artificial Sequence: Synthetic pistachio; inner sequence and 3' sequence

SEQ ID NO: 26426 - DNA, 53 bp, Artificial Sequence; identical to SEQ ID NO: 2545
  Description of Artificial Sequence: Synthetic pistachio; inner sequence and 3' sequence

SEQ ID NO: 26427 - DNA, 54 bp, Artificial Sequence; identical to SEQ ID NO: 6245
  Description of Artificial Sequence: Synthetic pistachio; inner sequence and 3' sequence

SEQ ID NO: 26428 - DNA, 53 bp, Artificial Sequence; identical to SEQ ID NO: 2884
  Description of Artificial Sequence: Synthetic pistachio; inner sequence and 3' sequence

SEQ ID NO: 26429 - DNA, 53 bp, Artificial Sequence; identical to SEQ ID NO: 2685
  Description of Artificial Sequence: Synthetic pistachio; inner sequence and 3' sequence

SEQ ID NO: 26430 - DNA, 53 bp, Artificial Sequence; identical to SEQ ID NO: 2637
  Description of Artificial Sequence: Synthetic pistachio; inner sequence and 3' sequence

SEQ ID NO: 26431 - DNA, 53 bp, Artificial Sequence; identical to SEQ ID NO: 10712
  Description of Artificial Sequence: Synthetic pistachio; inner sequence and 3' sequence

SEQ ID NO: 26432 - DNA, 53 bp, Artificial Sequence; identical to SEQ ID NO: 2291
  Description of Artificial Sequence: Synthetic pistachio; inner sequence and 3' sequence

SEQ ID NO: 26433 - DNA, 53 bp, Artificial Sequence; identical to SEQ ID NO: 2392
  Description of Artificial Sequence: Synthetic pistachio; inner sequence and 3' sequence

SEQ ID NO: 26434 - DNA, 53 bp, Artificial Sequence; identical to SEQ ID NO: 2398
  Description of Artificial Sequence: Synthetic pistachio; inner sequence and 3' sequence

SEQ ID NO: 26435 - DNA, 53 bp, Artificial Sequence; identical to SEQ ID NO: 6451
  Description of Artificial Sequence: Synthetic pistachio; inner sequence and 3' sequence

SEQ ID NO: 26436 - DNA, 53 bp, Artificial Sequence; identical to SEQ ID NO: 2364
  Description of Artificial Sequence: Synthetic pistachio; inner sequence and 3' sequence

SEQ ID NO: 26437 - DNA, 53 bp, Artificial Sequence; identical to SEQ ID NO: 2621
  Description of Artificial Sequence: Synthetic pistachio; inner sequence and 3' sequence

SEQ ID NO: 26438 - DNA, 53 bp, Artificial Sequence; identical to SEQ ID NO: 2289
  Description of Artificial Sequence: Synthetic pistachio; inner sequence and 3' sequence

SEQ ID NO: 26439 - DNA, 53 bp, Artificial Sequence; identical to SEQ ID NO: 2330
  Description of Artificial Sequence: Synthetic pistachio; inner sequence and 3' sequence

SEQ ID NO: 26440 - DNA, 53 bp, Artificial Sequence; identical to SEQ ID NO: 2403
  Description of Artificial Sequence: Synthetic pistachio; inner sequence and 3' sequence

SEQ ID NO: 26441 - DNA, 53 bp, Artificial Sequence; identical to SEQ ID NO: 2724
  Description of Artificial Sequence: Synthetic pistachio; inner sequence and 3' sequence

SEQ ID NO: 26442 - DNA, 53 bp, Artificial Sequence; identical to SEQ ID NO: 6238
  Description of Artificial Sequence: Synthetic pistachio; inner sequence and 3' sequence

SEQ ID NO: 26443 - DNA, 53 bp, Artificial Sequence; identical to SEQ ID NO: 2296
  Description of Artificial Sequence: Synthetic pistachio; inner sequence and 3' sequence

SEQ ID NO: 26444 - DNA, 53 bp, Artificial Sequence; identical to SEQ ID NO: 2676
  Description of Artificial Sequence: Synthetic pistachio; inner sequence and 3' sequence

SEQ ID NO: 26445 - DNA, 53 bp, Artificial Sequence; identical to SEQ ID NO: 2800
  Description of Artificial Sequence: Synthetic pistachio; inner sequence and 3' sequence

SEQ ID NO: 26446 - DNA, 53 bp, Artificial Sequence; identical to SEQ ID NO: 2375
  Description of Artificial Sequence: Synthetic pistachio; inner sequence and 3' sequence

SEQ ID NO: 26447 - DNA, 48 bp, Artificial Sequence; identical to SEQ ID NO: 22136
  Description of Artificial Sequence: Synthetic pistachio; inner sequence and 3' sequence

SEQ ID NO: 26448 - DNA, 53 bp, Artificial Sequence; identical to SEQ ID NO: 2930
  Description of Artificial Sequence: Synthetic pistachio; inner sequence and 3' sequence

SEQ ID NO: 26449 - DNA, 53 bp, Artificial Sequence; identical to SEQ ID NO: 2331
  Description of Artificial Sequence: Synthetic pistachio; inner sequence and 3' sequence

SEQ ID NO: 26450 - DNA, 53 bp, Artificial Sequence; identical to SEQ ID NO: 2217
  Description of Artificial Sequence: Synthetic pistachio; inner sequence and 3' sequence

SEQ ID NO: 26451 - DNA, 53 bp, Artificial Sequence; identical to SEQ ID NO: 2523
  Description of Artificial Sequence: Synthetic pistachio; inner sequence and 3' sequence

SEQ ID NO: 26452 - DNA, 53 bp, Artificial Sequence; identical to SEQ ID NO: 2180
  Description of Artificial Sequence: Synthetic pistachio; inner sequence and 3' sequence

SEQ ID NO: 26453 - DNA, 53 bp, Artificial Sequence; identical to SEQ ID NO: 2239
  Description of Artificial Sequence: Synthetic pistachio; inner sequence and 3' sequence

SEQ ID NO: 26454 - DNA, 53 bp, Artificial Sequence; identical to SEQ ID NO: 6658
  Description of Artificial Sequence: Synthetic pistachio; inner sequence and 3' sequence

SEQ ID NO: 26455 - DNA, 53 bp, Artificial Sequence; identical to SEQ ID NO: 22133
  Description of Artificial Sequence: Synthetic pistachio; inner sequence and 3' sequence

SEQ ID NO: 26456 - DNA, 53 bp, Artificial Sequence; identical to SEQ ID NO: 2394
  Description of Artificial Sequence: Synthetic pistachio; inner sequence and 3' sequence

SEQ ID NO: 26457 - DNA, 53 bp, Artificial Sequence; identical to SEQ ID NO: 6234
  Description of Artificial Sequence: Synthetic pistachio; inner sequence and 3' sequence

SEQ ID NO: 26458 - DNA, 53 bp, Artificial Sequence; identical to SEQ ID NO: 2557
  Description of Artificial Sequence: Synthetic pistachio; inner sequence and 3' sequence

SEQ ID NO: 26459 - DNA, 53 bp, Artificial Sequence; identical to SEQ ID NO: 2746
  Description of Artificial Sequence: Synthetic pistachio; inner sequence and 3' sequence

SEQ ID NO: 26460 - DNA, 53 bp, Artificial Sequence; identical to SEQ ID NO: 2457
  Description of Artificial Sequence: Synthetic pistachio; inner sequence and 3' sequence

SEQ ID NO: 26461 - DNA, 53 bp, Artificial Sequence; identical to SEQ ID NO: 2303
  Description of Artificial Sequence: Synthetic pistachio; inner sequence and 3' sequence

SEQ ID NO: 26462 - DNA, 53 bp, Artificial Sequence; identical to SEQ ID NO: 2680
  Description of Artificial Sequence: Synthetic pistachio; inner sequence and 3' sequence

SEQ ID NO: 26463 - DNA, 53 bp, Artificial Sequence; identical to SEQ ID NO: 2611
  Description of Artificial Sequence: Synthetic pistachio; inner sequence and 3' sequence

SEQ ID NO: 26464 - DNA, 53 bp, Artificial Sequence; identical to SEQ ID NO: 2169
  Description of Artificial Sequence: Synthetic pistachio; inner sequence and 3' sequence

SEQ ID NO: 26465 - DNA, 53 bp, Artificial Sequence; identical to SEQ ID NO: 6336
  Description of Artificial Sequence: Synthetic pistachio; inner sequence and 3' sequence

SEQ ID NO: 26466 - DNA, 54 bp, Artificial Sequence; identical to SEQ ID NO: 2216
  Description of Artificial Sequence: Synthetic pistachio; inner sequence and 3' sequence

SEQ ID NO: 26467 - DNA, 53 bp, Artificial Sequence; identical to SEQ ID NO: 2518
  Description of Artificial Sequence: Synthetic pistachio; inner sequence and 3' sequence

SEQ ID NO: 26468 - DNA, 53 bp, Artificial Sequence; identical to SEQ ID NO: 2515
  Description of Artificial Sequence: Synthetic pistachio; inner sequence and 3' sequence

SEQ ID NO: 26469 - DNA, 53 bp, Artificial Sequence; identical to SEQ ID NO: 10763
  Description of Artificial Sequence: Synthetic pistachio; inner sequence and 3' sequence

SEQ ID NO: 26470 - DNA, 53 bp, Artificial Sequence; identical to SEQ ID NO: 2791
  Description of Artificial Sequence: Synthetic pistachio; inner sequence and 3' sequence

SEQ ID NO: 26471 - DNA, 52 bp, Artificial Sequence; identical to SEQ ID NO: 2873
  Description of Artificial Sequence: Synthetic pistachio; inner sequence and 3' sequence

SEQ ID NO: 26472 - DNA, 53 bp, Artificial Sequence; identical to SEQ ID NO: 2326
  Description of Artificial Sequence: Synthetic pistachio; inner sequence and 3' sequence

SEQ ID NO: 26473 - DNA, 53 bp, Artificial Sequence; identical to SEQ ID NO: 6317
  Description of Artificial Sequence: Synthetic pistachio; inner sequence and 3' sequence

SEQ ID NO: 26474 - DNA, 53 bp, Artificial Sequence; identical to SEQ ID NO: 2276
  Description of Artificial Sequence: Synthetic pistachio; inner sequence and 3' sequence

SEQ ID NO: 26475 - DNA, 53 bp, Artificial Sequence; identical to SEQ ID NO: 2671
  Description of Artificial Sequence: Synthetic pistachio; inner sequence and 3' sequence

SEQ ID NO: 26476 - DNA, 53 bp, Artificial Sequence; identical to SEQ ID NO: 2850
  Description of Artificial Sequence: Synthetic pistachio; inner sequence and 3' sequence

SEQ ID NO: 26477 - DNA, 53 bp, Artificial Sequence; identical to SEQ ID NO: 2191
  Description of Artificial Sequence: Synthetic pistachio; inner sequence and 3' sequence

SEQ ID NO: 26478 - DNA, 53 bp, Artificial Sequence; identical to SEQ ID NO: 6748
  Description of Artificial Sequence: Synthetic pistachio; inner sequence and 3' sequence

SEQ ID NO: 26479 - DNA, 53 bp, Artificial Sequence; identical to SEQ ID NO: 6351
  Description of Artificial Sequence: Synthetic pistachio; inner sequence and 3' sequence

SEQ ID NO: 26480 - DNA, 53 bp, Artificial Sequence; identical to SEQ ID NO: 2442
  Description of Artificial Sequence: Synthetic pistachio; inner sequence and 3' sequence

SEQ ID NO: 26481 - DNA, 53 bp, Artificial Sequence; identical to SEQ ID NO: 6691
  Description of Artificial Sequence: Synthetic pistachio; inner sequence and 3' sequence

SEQ ID NO: 26482 - DNA, 53 bp, Artificial Sequence; identical to SEQ ID NO: 2540
  Description of Artificial Sequence: Synthetic pistachio; inner sequence and 3' sequence

SEQ ID NO: 26483 - DNA, 53 bp, Artificial Sequence; identical to SEQ ID NO: 2317
  Description of Artificial Sequence: Synthetic pistachio; inner sequence and 3' sequence

SEQ ID NO: 26484 - DNA, 53 bp, Artificial Sequence; identical to SEQ ID NO: 2596
  Description of Artificial Sequence: Synthetic pistachio; inner sequence and 3' sequence

SEQ ID NO: 26485 - DNA, 51 bp, Artificial Sequence; identical to SEQ ID NO: 2423
  Description of Artificial Sequence: Synthetic pistachio; inner sequence and 3' sequence

SEQ ID NO: 26486 - DNA, 53 bp, Artificial Sequence; identical to SEQ ID NO: 6312
  Description of Artificial Sequence: Synthetic pistachio; inner sequence and 3' sequence

SEQ ID NO: 26487 - DNA, 53 bp, Artificial Sequence; identical to SEQ ID NO: 2443
  Description of Artificial Sequence: Synthetic pistachio; inner sequence and 3' sequence

SEQ ID NO: 26488 - DNA, 53 bp, Artificial Sequence; identical to SEQ ID NO: 2345
  Description of Artificial Sequence: Synthetic pistachio; inner sequence and 3' sequence

SEQ ID NO: 26489 - DNA, 53 bp, Artificial Sequence; identical to SEQ ID NO: 2461
  Description of Artificial Sequence: Synthetic pistachio; inner sequence and 3' sequence

SEQ ID NO: 26490 - DNA, 53 bp, Artificial Sequence; identical to SEQ ID NO: 2277
  Description of Artificial Sequence: Synthetic pistachio; inner sequence and 3' sequence

SEQ ID NO: 26491 - DNA, 53 bp, Artificial Sequence; identical to SEQ ID NO: 2625
  Description of Artificial Sequence: Synthetic pistachio; inner sequence and 3' sequence

SEQ ID NO: 26492 - DNA, 53 bp, Artificial Sequence; identical to SEQ ID NO: 2256
  Description of Artificial Sequence: Synthetic pistachio; inner sequence and 3' sequence

SEQ ID NO: 26493 - DNA, 53 bp, Artificial Sequence; identical to SEQ ID NO: 2591
  Description of Artificial Sequence: Synthetic pistachio; inner sequence and 3' sequence

SEQ ID NO: 26494 - DNA, 53 bp, Artificial Sequence; identical to SEQ ID NO: 2519
  Description of Artificial Sequence: Synthetic pistachio; inner sequence and 3' sequence

SEQ ID NO: 26495 - DNA, 53 bp, Artificial Sequence; identical to SEQ ID NO: 2556
  Description of Artificial Sequence: Synthetic pistachio; inner sequence and 3' sequence

SEQ ID NO: 26496 - DNA, 53 bp, Artificial Sequence; identical to SEQ ID NO: 2699
  Description of Artificial Sequence: Synthetic pistachio; inner sequence and 3' sequence

SEQ ID NO: 26497 - DNA, 53 bp, Artificial Sequence; identical to SEQ ID NO: 2493
  Description of Artificial Sequence: Synthetic pistachio; inner sequence and 3' sequence

SEQ ID NO: 26498 - DNA, 53 bp, Artificial Sequence; identical to SEQ ID NO: 2823
  Description of Artificial Sequence: Synthetic pistachio; inner sequence and 3' sequence

SEQ ID NO: 26499 - DNA, 53 bp, Artificial Sequence; identical to SEQ ID NO: 10869
  Description of Artificial Sequence: Synthetic pistachio; inner sequence and 3' sequence

SEQ ID NO: 26500 - DNA, 53 bp, Artificial Sequence; identical to SEQ ID NO: 2962
  Description of Artificial Sequence: Synthetic pistachio; inner sequence and 3' sequence

SEQ ID NO: 26501 - DNA, 53 bp, Artificial Sequence; identical to SEQ ID NO: 6472
  Description of Artificial Sequence: Synthetic pistachio; inner sequence and 3' sequence

SEQ ID NO: 26502 - DNA, 53 bp, Artificial Sequence; identical to SEQ ID NO: 2378
  Description of Artificial Sequence: Synthetic pistachio; inner sequence and 3' sequence

SEQ ID NO: 26503 - DNA, 53 bp, Artificial Sequence; identical to SEQ ID NO: 2278
  Description of Artificial Sequence: Synthetic pistachio; inner sequence and 3' sequence

SEQ ID NO: 26504 - DNA, 53 bp, Artificial Sequence; identical to SEQ ID NO: 2322
  Description of Artificial Sequence: Synthetic pistachio; inner sequence and 3' sequence

SEQ ID NO: 26505 - DNA, 53 bp, Artificial Sequence; identical to SEQ ID NO: 6230
  Description of Artificial Sequence: Synthetic pistachio; inner sequence and 3' sequence

SEQ ID NO: 26506 - DNA, 53 bp, Artificial Sequence; identical to SEQ ID NO: 2346
  Description of Artificial Sequence: Synthetic pistachio; inner sequence and 3' sequence

SEQ ID NO: 26507 - DNA, 53 bp, Artificial Sequence; identical to SEQ ID NO: 10769
  Description of Artificial Sequence: Synthetic pistachio; inner sequence and 3' sequence

SEQ ID NO: 26508 - DNA, 53 bp, Artificial Sequence; identical to SEQ ID NO: 2324
  Description of Artificial Sequence: Synthetic pistachio; inner sequence and 3' sequence

SEQ ID NO: 26509 - DNA, 53 bp, Artificial Sequence; identical to SEQ ID NO: 2846
  Description of Artificial Sequence: Synthetic pistachio; inner sequence and 3' sequence

SEQ ID NO: 26510 - DNA, 53 bp, Artificial Sequence; identical to SEQ ID NO: 10801
  Description of Artificial Sequence: Synthetic pistachio; inner sequence and 3' sequence

SEQ ID NO: 26511 - DNA, 53 bp, Artificial Sequence; identical to SEQ ID NO: 2435
  Description of Artificial Sequence: Synthetic pistachio; inner sequence and 3' sequence

SEQ ID NO: 26512 - DNA, 53 bp, Artificial Sequence; identical to SEQ ID NO: 2945
  Description of Artificial Sequence: Synthetic pistachio; inner sequence and 3' sequence

SEQ ID NO: 26513 - DNA, 53 bp, Artificial Sequence; identical to SEQ ID NO: 2678
  Description of Artificial Sequence: Synthetic pistachio; inner sequence and 3' sequence

SEQ ID NO: 26514 - DNA, 53 bp, Artificial Sequence; identical to SEQ ID NO: 2484
  Description of Artificial Sequence: Synthetic pistachio; inner sequence and 3' sequence

SEQ ID NO: 26515 - DNA, 53 bp, Artificial Sequence; identical to SEQ ID NO: 2367
  Description of Artificial Sequence: Synthetic pistachio; inner sequence and 3' sequence

SEQ ID NO: 26516 - DNA, 51 bp, Artificial Sequence; identical to SEQ ID NO: 2241
  Description of Artificial Sequence: Synthetic pistachio; inner sequence and 3' sequence

SEQ ID NO: 26517 - DNA, 53 bp, Artificial Sequence; identical to SEQ ID NO: 2490
  Description of Artificial Sequence: Synthetic pistachio; inner sequence and 3' sequence

SEQ ID NO: 26518 - DNA, 53 bp, Artificial Sequence; identical to SEQ ID NO: 2467
  Description of Artificial Sequence: Synthetic pistachio; inner sequence and 3' sequence

SEQ ID NO: 26519 - DNA, 53 bp, Artificial Sequence; identical to SEQ ID NO: 2780
  Description of Artificial Sequence: Synthetic pistachio; inner sequence and 3' sequence

SEQ ID NO: 26520 - DNA, 53 bp, Artificial Sequence; identical to SEQ ID NO: 2281
  Description of Artificial Sequence: Synthetic pistachio; inner sequence and 3' sequence

SEQ ID NO: 26521 - DNA, 53 bp, Artificial Sequence; identical to SEQ ID NO: 6804
  Description of Artificial Sequence: Synthetic pistachio; inner sequence and 3' sequence

SEQ ID NO: 26522 - DNA, 53 bp, Artificial Sequence; identical to SEQ ID NO: 2420
  Description of Artificial Sequence: Synthetic pistachio; inner sequence and 3' sequence

SEQ ID NO: 26523 - DNA, 53 bp, Artificial Sequence; identical to SEQ ID NO: 14958
  Description of Artificial Sequence: Synthetic pistachio; inner sequence and 3' sequence

SEQ ID NO: 26524 - DNA, 53 bp, Artificial Sequence; identical to SEQ ID NO: 2862
  Description of Artificial Sequence: Synthetic pistachio; inner sequence and 3' sequence

SEQ ID NO: 26525 - DNA, 53 bp, Artificial Sequence; identical to SEQ ID NO: 6887
  Description of Artificial Sequence: Synthetic pistachio; inner sequence and 3' sequence

SEQ ID NO: 26526 - DNA, 53 bp, Artificial Sequence; identical to SEQ ID NO: 2463
  Description of Artificial Sequence: Synthetic pistachio; inner sequence and 3' sequence

SEQ ID NO: 26527 - DNA, 53 bp, Artificial Sequence
  Description of Artificial Sequence: Synthetic pistachio; inner sequence and 3' sequence
cgtgcaacggcaggtcacttcccttggtcgttgactagtacatgaccacttga

SEQ ID NO: 26528 - DNA, 53 bp, Artificial Sequence; identical to SEQ ID NO: 2774
  Description of Artificial Sequence: Synthetic pistachio; inner sequence and 3' sequence

SEQ ID NO: 26529 - DNA, 53 bp, Artificial Sequence; identical to SEQ ID NO: 2348
  Description of Artificial Sequence: Synthetic pistachio; inner sequence and 3' sequence

SEQ ID NO: 26530 - DNA, 53 bp, Artificial Sequence; identical to SEQ ID NO: 2380
  Description of Artificial Sequence: Synthetic pistachio; inner sequence and 3' sequence

SEQ ID NO: 26531 - DNA, 53 bp, Artificial Sequence; identical to SEQ ID NO: 2318
  Description of Artificial Sequence: Synthetic pistachio; inner sequence and 3' sequence

SEQ ID NO: 26532 - DNA, 52 bp, Artificial Sequence; identical to SEQ ID NO: 6559
  Description of Artificial Sequence: Synthetic pistachio; inner sequence and 3' sequence

SEQ ID NO: 26533 - DNA, 53 bp, Artificial Sequence; identical to SEQ ID NO: 2772
  Description of Artificial Sequence: Synthetic pistachio; inner sequence and 3' sequence

SEQ ID NO: 26534 - DNA, 53 bp, Artificial Sequence; identical to SEQ ID NO: 6690
  Description of Artificial Sequence: Synthetic pistachio; inner sequence and 3' sequence

SEQ ID NO: 26535 - DNA, 50 bp, Artificial Sequence; identical to SEQ ID NO: 2885
  Description of Artificial Sequence: Synthetic pistachio; inner sequence and 3' sequence

SEQ ID NO: 26536 - DNA, 53 bp, Artificial Sequence; identical to SEQ ID NO: 2357
  Description of Artificial Sequence: Synthetic pistachio; inner sequence and 3' sequence

SEQ ID NO: 26537 - DNA, 53 bp, Artificial Sequence; identical to SEQ ID NO: 6405
  Description of Artificial Sequence: Synthetic pistachio; inner sequence and 3' sequence

SEQ ID NO: 26538 - DNA, 53 bp, Artificial Sequence; identical to SEQ ID NO: 2426
  Description of Artificial Sequence: Synthetic pistachio; inner sequence and 3' sequence

SEQ ID NO: 26539 - DNA, 53 bp, Artificial Sequence; identical to SEQ ID NO: 2407
  Description of Artificial Sequence: Synthetic pistachio; inner sequence and 3' sequence

SEQ ID NO: 26540 - DNA, 53 bp, Artificial Sequence; identical to SEQ ID NO: 6967
  Description of Artificial Sequence: Synthetic pistachio; inner sequence and 3' sequence

SEQ ID NO: 26541 - DNA, 53 bp, Artificial Sequence; identical to SEQ ID NO: 2807
  Description of Artificial Sequence: Synthetic pistachio; inner sequence and 3' sequence

SEQ ID NO: 26542 - DNA, 53 bp, Artificial Sequence; identical to SEQ ID NO: 6775
  Description of Artificial Sequence: Synthetic pistachio; inner sequence and 3' sequence

SEQ ID NO: 26543 - DNA, 53 bp, Artificial Sequence; identical to SEQ ID NO: 2677
  Description of Artificial Sequence: Synthetic pistachio; inner sequence and 3' sequence

SEQ ID NO: 26544 - DNA, 53 bp, Artificial Sequence; identical to SEQ ID NO: 22119
  Description of Artificial Sequence: Synthetic pistachio; inner sequence and 3' sequence

SEQ ID NO: 26545 - DNA, 53 bp, Artificial Sequence; identical to SEQ ID NO: 2477
  Description of Artificial Sequence: Synthetic pistachio; inner sequence and 3' sequence

SEQ ID NO: 26546 - DNA, 53 bp, Artificial Sequence; identical to SEQ ID NO: 6651
  Description of Artificial Sequence: Synthetic pistachio; inner sequence and 3' sequence

SEQ ID NO: 26547 - DNA, 53 bp, Artificial Sequence; identical to SEQ ID NO: 2776
  Description of Artificial Sequence: Synthetic pistachio; inner sequence and 3' sequence

SEQ ID NO: 26548 - DNA, 53 bp, Artificial Sequence; identical to SEQ ID NO: 2397
  Description of Artificial Sequence: Synthetic pistachio; inner sequence and 3' sequence

SEQ ID NO: 26549 - DNA, 53 bp, Artificial Sequence; identical to SEQ ID NO: 2808
  Description of Artificial Sequence: Synthetic pistachio; inner sequence and 3' sequence

SEQ ID NO: 26550 - DNA, 53 bp, Artificial Sequence; identical to SEQ ID NO: 2353
  Description of Artificial Sequence: Synthetic pistachio; inner sequence and 3' sequence

SEQ ID NO: 26551 - DNA, 53 bp, Artificial Sequence; identical to SEQ ID NO: 2932
  Description of Artificial Sequence: Synthetic pistachio; inner sequence and 3' sequence

SEQ ID NO: 26552 - DNA, 53 bp, Artificial Sequence; identical to SEQ ID NO: 14985
  Description of Artificial Sequence: Synthetic pistachio; inner sequence and 3' sequence

SEQ ID NO: 26553 - DNA, 53 bp, Artificial Sequence; identical to SEQ ID NO: 2450
  Description of Artificial Sequence: Synthetic pistachio; inner sequence and 3' sequence

SEQ ID NO: 26554 - DNA, 53 bp, Artificial Sequence; identical to SEQ ID NO: 2465
  Description of Artificial Sequence: Synthetic pistachio; inner sequence and 3' sequence

SEQ ID NO: 26555 - DNA, 53 bp, Artificial Sequence; identical to SEQ ID NO: 2695
  Description of Artificial Sequence: Synthetic pistachio; inner sequence and 3' sequence

SEQ ID NO: 26556 - DNA, 53 bp, Artificial Sequence; identical to SEQ ID NO: 10962
  Description of Artificial Sequence: Synthetic pistachio; inner sequence and 3' sequence

SEQ ID NO: 26557 - DNA, 53 bp, Artificial Sequence; identical to SEQ ID NO: 2805
  Description of Artificial Sequence: Synthetic pistachio; inner sequence and 3' sequence

SEQ ID NO: 26558 - DNA, 53 bp, Artificial Sequence; identical to SEQ ID NO: 2452
  Description of Artificial Sequence: Synthetic pistachio; inner sequence and 3' sequence

SEQ ID NO: 26559 - DNA, 53 bp, Artificial Sequence; identical to SEQ ID NO: 2634
  Description of Artificial Sequence: Synthetic pistachio; inner sequence and 3' sequence

SEQ ID NO: 26560 - DNA, 53 bp, Artificial Sequence; identical to SEQ ID NO: 2741
  Description of Artificial Sequence: Synthetic pistachio; inner sequence and 3' sequence

SEQ ID NO: 26561 - DNA, 53 bp, Artificial Sequence; identical to SEQ ID NO: 2292
  Description of Artificial Sequence: Synthetic pistachio; inner sequence and 3' sequence

SEQ ID NO: 26562 - DNA, 53 bp, Artificial Sequence; identical to SEQ ID NO: 2998
  Description of Artificial Sequence: Synthetic pistachio; inner sequence and 3' sequence

SEQ ID NO: 26563 - DNA, 53 bp, Artificial Sequence; identical to SEQ ID NO: 2662
  Description of Artificial Sequence: Synthetic pistachio; inner sequence and 3' sequence

SEQ ID NO: 26564 - DNA, 53 bp, Artificial Sequence; identical to SEQ ID NO: 6638
  Description of Artificial Sequence: Synthetic pistachio; inner sequence and 3' sequence

SEQ ID NO: 26565 - DNA, 53 bp, Artificial Sequence; identical to SEQ ID NO: 2994
  Description of Artificial Sequence: Synthetic pistachio; inner sequence and 3' sequence

SEQ ID NO: 26566 - DNA, 53 bp, Artificial Sequence; identical to SEQ ID NO: 2768
  Description of Artificial Sequence: Synthetic pistachio; inner sequence and 3' sequence

SEQ ID NO: 26567 - DNA, 53 bp, Artificial Sequence; identical to SEQ ID NO: 2613
  Description of Artificial Sequence: Synthetic pistachio; inner sequence and 3' sequence

SEQ ID NO: 26568 - DNA, 53 bp, Artificial Sequence; identical to SEQ ID NO: 2225
  Description of Artificial Sequence: Synthetic pistachio; inner sequence and 3' sequence

SEQ ID NO: 26569 - DNA, 53 bp, Artificial Sequence; identical to SEQ ID NO: 2506
  Description of Artificial Sequence: Synthetic pistachio; inner sequence and 3' sequence

SEQ ID NO: 26570 - DNA, 53 bp, Artificial Sequence; identical to SEQ ID NO: 10928
  Description of Artificial Sequence: Synthetic pistachio; inner sequence and 3' sequence

SEQ ID NO: 26571 - DNA, 53 bp, Artificial Sequence; identical to SEQ ID NO: 2644
  Description of Artificial Sequence: Synthetic pistachio; inner sequence and 3' sequence

SEQ ID NO: 26572 - DNA, 53 bp, Artificial Sequence; identical to SEQ ID NO: 2351
  Description of Artificial Sequence: Synthetic pistachio; inner sequence and 3' sequence

SEQ ID NO: 26573 - DNA, 53 bp, Artificial Sequence; identical to SEQ ID NO: 6708
  Description of Artificial Sequence: Synthetic pistachio; inner sequence and 3' sequence

SEQ ID NO: 26574 - DNA, 53 bp, Artificial Sequence; identical to SEQ ID NO: 22506
  Description of Artificial Sequence: Synthetic pistachio; inner sequence and 3' sequence

SEQ ID NO: 26575 - DNA, 53 bp, Artificial Sequence; identical to SEQ ID NO: 2404
  Description of Artificial Sequence: Synthetic pistachio; inner sequence and 3' sequence

SEQ ID NO: 26576 - DNA, 53 bp, Artificial Sequence; identical to SEQ ID NO: 2408
  Description of Artificial Sequence: Synthetic pistachio; inner sequence and 3' sequence

SEQ ID NO: 26577 - DNA, 53 bp, Artificial Sequence; identical to SEQ ID NO: 2199
  Description of Artificial Sequence: Synthetic pistachio; inner sequence and 3' sequence

SEQ ID NO: 26578 - DNA, 53 bp, Artificial Sequence; identical to SEQ ID NO: 2586
  Description of Artificial Sequence: Synthetic pistachio; inner sequence and 3' sequence

SEQ ID NO: 26579 - DNA, 53 bp, Artificial Sequence; identical to SEQ ID NO: 2953
  Description of Artificial Sequence: Synthetic pistachio; inner sequence and 3' sequence

SEQ ID NO: 26580 - DNA, 53 bp, Artificial Sequence; identical to SEQ ID NO: 2302
  Description of Artificial Sequence: Synthetic pistachio; inner sequence and 3' sequence

SEQ ID NO: 26581 - DNA, 52 bp, Artificial Sequence; identical to SEQ ID NO: 2648
  Description of Artificial Sequence: Synthetic pistachio; inner sequence and 3' sequence

SEQ ID NO: 26582 - DNA, 53 bp, Artificial Sequence; identical to SEQ ID NO: 22269
  Description of Artificial Sequence: Synthetic pistachio; inner sequence and 3' sequence

SEQ ID NO: 26583 - DNA, 53 bp, Artificial Sequence; identical to SEQ ID NO: 10458
  Description of Artificial Sequence: Synthetic pistachio; inner sequence and 3' sequence

SEQ ID NO: 26584 - DNA, 53 bp, Artificial Sequence; identical to SEQ ID NO: 2433
  Description of Artificial Sequence: Synthetic pistachio; inner sequence and 3' sequence

SEQ ID NO: 26585 - DNA, 53 bp, Artificial Sequence; identical to SEQ ID NO: 2551
  Description of Artificial Sequence: Synthetic pistachio; inner sequence and 3' sequence

SEQ ID NO: 26586 - DNA, 53 bp, Artificial Sequence; identical to SEQ ID NO: 2663
  Description of Artificial Sequence: Synthetic pistachio; inner sequence and 3' sequence

SEQ ID NO: 26587 - DNA, 53 bp, Artificial Sequence; identical to SEQ ID NO: 2914
  Description of Artificial Sequence: Synthetic pistachio; inner sequence and 3' sequence

SEQ ID NO: 26588 - DNA, 53 bp, Artificial Sequence; identical to SEQ ID NO: 2881
  Description of Artificial Sequence: Synthetic pistachio; inner sequence and 3' sequence

SEQ ID NO: 26589 - DNA, 53 bp, Artificial Sequence; identical to SEQ ID NO: 22388
  Description of Artificial Sequence: Synthetic pistachio; inner sequence and 3' sequence

SEQ ID NO: 26590 - DNA, 53 bp, Artificial Sequence; identical to SEQ ID NO: 3002
  Description of Artificial Sequence: Synthetic pistachio; inner sequence and 3' sequence

SEQ ID NO: 26591 - DNA, 53 bp, Artificial Sequence; identical to SEQ ID NO: 10546
  Description of Artificial Sequence: Synthetic pistachio; inner sequence and 3' sequence

SEQ ID NO: 26592 - DNA, 53 bp, Artificial Sequence; identical to SEQ ID NO: 2439
  Description of Artificial Sequence: Synthetic pistachio; inner sequence and 3' sequence

SEQ ID NO: 26593 - DNA, 53 bp, Artificial Sequence; identical to SEQ ID NO: 2570
  Description of Artificial Sequence: Synthetic pistachio; inner sequence and 3' sequence

SEQ ID NO: 26594 - DNA, 53 bp, Artificial Sequence; identical to SEQ ID NO: 2261
  Description of Artificial Sequence: Synthetic pistachio; inner sequence and 3' sequence

SEQ ID NO: 26595 - DNA, 53 bp, Artificial Sequence; identical to SEQ ID NO: 6449
  Description of Artificial Sequence: Synthetic pistachio; inner sequence and 3' sequence

SEQ ID NO: 26596 - DNA, 53 bp, Artificial Sequence; identical to SEQ ID NO: 6856
  Description of Artificial Sequence: Synthetic pistachio; inner sequence and 3' sequence

SEQ ID NO: 26597 - DNA, 53 bp, Artificial Sequence; identical to SEQ ID NO: 14521
  Description of Artificial Sequence: Synthetic pistachio; inner sequence and 3' sequence

SEQ ID NO: 26598 - DNA, 53 bp, Artificial Sequence; identical to SEQ ID NO: 2668
  Description of Artificial Sequence: Synthetic pistachio; inner sequence and 3' sequence

SEQ ID NO: 26599 - DNA, 53 bp, Artificial Sequence; identical to SEQ ID NO: 2589
  Description of Artificial Sequence: Synthetic pistachio; inner sequence and 3' sequence

SEQ ID NO: 26600 - DNA, 53 bp, Artificial Sequence; identical to SEQ ID NO: 2943
  Description of Artificial Sequence: Synthetic pistachio; inner sequence and 3' sequence

SEQ ID NO: 26601 - DNA, 53 bp, Artificial Sequence; identical to SEQ ID NO: 6590
  Description of Artificial Sequence: Synthetic pistachio; inner sequence and 3' sequence

SEQ ID NO: 26602 - DNA, 53 bp, Artificial Sequence; identical to SEQ ID NO: 2775
  Description of Artificial Sequence: Synthetic pistachio; inner sequence and 3' sequence

SEQ ID NO: 26603 - DNA, 53 bp, Artificial Sequence; identical to SEQ ID NO: 2561
  Description of Artificial Sequence: Synthetic pistachio; inner sequence and 3' sequence

SEQ ID NO: 26604 - DNA, 53 bp, Artificial Sequence; identical to SEQ ID NO: 2670
  Description of Artificial Sequence: Synthetic pistachio; inner sequence and 3' sequence

SEQ ID NO: 26605 - DNA, 53 bp, Artificial Sequence; identical to SEQ ID NO: 2568
  Description of Artificial Sequence: Synthetic pistachio; inner sequence and 3' sequence

SEQ ID NO: 26606 - DNA, 53 bp, Artificial Sequence; identical to SEQ ID NO: 2486
  Description of Artificial Sequence: Synthetic pistachio; inner sequence and 3' sequence

SEQ ID NO: 26607 - DNA, 53 bp, Artificial Sequence; identical to SEQ ID NO: 2498
  Description of Artificial Sequence: Synthetic pistachio; inner sequence and 3' sequence

SEQ ID NO: 26608 - DNA, 53 bp, Artificial Sequence; identical to SEQ ID NO: 2793
  Description of Artificial Sequence: Synthetic pistachio; inner sequence and 3' sequence

SEQ ID NO: 26609 - DNA, 53 bp, Artificial Sequence; identical to SEQ ID NO: 2727
  Description of Artificial Sequence: Synthetic pistachio; inner sequence and 3' sequence

SEQ ID NO: 26610 - DNA, 48 bp, Artificial Sequence; identical to SEQ ID NO: 2427
  Description of Artificial Sequence: Synthetic pistachio; inner sequence and 3' sequence

SEQ ID NO: 26611 - DNA, 53 bp, Artificial Sequence; identical to SEQ ID NO: 2363
  Description of Artificial Sequence: Synthetic pistachio; inner sequence and 3' sequence

SEQ ID NO: 26612 - DNA, 53 bp, Artificial Sequence; identical to SEQ ID NO: 22286
  Description of Artificial Sequence: Synthetic pistachio; inner sequence and 3' sequence

SEQ ID NO: 26613 - DNA, 53 bp, Artificial Sequence; identical to SEQ ID NO: 2632
  Description of Artificial Sequence: Synthetic pistachio; inner sequence and 3' sequence

SEQ ID NO: 26614 - DNA, 53 bp, Artificial Sequence; identical to SEQ ID NO: 22193
  Description of Artificial Sequence: Synthetic pistachio; inner sequence and 3' sequence

SEQ ID NO: 26615 - DNA, 53 bp, Artificial Sequence; identical to SEQ ID NO: 2479
  Description of Artificial Sequence: Synthetic pistachio; inner sequence and 3' sequence

SEQ ID NO: 26616 - DNA, 53 bp, Artificial Sequence; identical to SEQ ID NO: 2672
  Description of Artificial Sequence: Synthetic pistachio; inner sequence and 3' sequence

SEQ ID NO: 26617 - DNA, 53 bp, Artificial Sequence; identical to SEQ ID NO: 22413
  Description of Artificial Sequence: Synthetic pistachio; inner sequence and 3' sequence

SEQ ID NO: 26618 - DNA, 53 bp, Artificial Sequence; identical to SEQ ID NO: 10787
  Description of Artificial Sequence: Synthetic pistachio; inner sequence and 3' sequence

SEQ ID NO: 26619 - DNA, 53 bp, Artificial Sequence; identical to SEQ ID NO: 2488
  Description of Artificial Sequence: Synthetic pistachio; inner sequence and 3' sequence

SEQ ID NO: 26620 - DNA, 53 bp, Artificial Sequence; identical to SEQ ID NO: 2669
  Description of Artificial Sequence: Synthetic pistachio; inner sequence and 3' sequence

SEQ ID NO: 26621 - DNA, 53 bp, Artificial Sequence; identical to SEQ ID NO: 6988
  Description of Artificial Sequence: Synthetic pistachio; inner sequence and 3' sequence

SEQ ID NO: 26622 - DNA, 53 bp, Artificial Sequence; identical to SEQ ID NO: 2661
  Description of Artificial Sequence: Synthetic pistachio; inner sequence and 3' sequence

SEQ ID NO: 26623 - DNA, 53 bp, Artificial Sequence; identical to SEQ ID NO: 2434
  Description of Artificial Sequence: Synthetic pistachio; inner sequence and 3' sequence

SEQ ID NO: 26624 - DNA, 53 bp, Artificial Sequence; identical to SEQ ID NO: 2543
  Description of Artificial Sequence: Synthetic pistachio; inner sequence and 3' sequence

SEQ ID NO: 26625 - DNA, 53 bp, Artificial Sequence; identical to SEQ ID NO: 2915
  Description of Artificial Sequence: Synthetic pistachio; inner sequence and 3' sequence

SEQ ID NO: 26626 - DNA, 53 bp, Artificial Sequence; identical to SEQ ID NO: 2510
  Description of Artificial Sequence: Synthetic pistachio; inner sequence and 3' sequence

SEQ ID NO: 26627 - DNA, 53 bp, Artificial Sequence; identical to SEQ ID NO: 2393
  Description of Artificial Sequence: Synthetic pistachio; inner sequence and 3' sequence

SEQ ID NO: 26628 - DNA, 53 bp, Artificial Sequence; identical to SEQ ID NO: 2580
  Description of Artificial Sequence: Synthetic pistachio; inner sequence and 3' sequence

SEQ ID NO: 26629 - DNA, 53 bp, Artificial Sequence; identical to SEQ ID NO: 2366
  Description of Artificial Sequence: Synthetic pistachio; inner sequence and 3' sequence

SEQ ID NO: 26630 - DNA, 53 bp, Artificial Sequence
  Description of Artificial Sequence: Synthetic pistachio; inner sequence and 3' sequence
tggccgatcgaccctatcaagtgccgcatgttgactagtacatgaccacttga

SEQ ID NO: 26631 - DNA, 53 bp, Artificial Sequence; identical to SEQ ID NO: 6918
  Description of Artificial Sequence: Synthetic pistachio; inner sequence and 3' sequence

SEQ ID NO: 26632 - DNA, 53 bp, Artificial Sequence; identical to SEQ ID NO: 2279
  Description of Artificial Sequence: Synthetic pistachio; inner sequence and 3' sequence

SEQ ID NO: 26633 - DNA, 53 bp, Artificial Sequence; identical to SEQ ID NO: 2497
  Description of Artificial Sequence: Synthetic pistachio; inner sequence and 3' sequence

SEQ ID NO: 26634 - DNA, 53 bp, Artificial Sequence; identical to SEQ ID NO: 2718
  Description of Artificial Sequence: Synthetic pistachio; inner sequence and 3' sequence

SEQ ID NO: 26635 - DNA, 53 bp, Artificial Sequence; identical to SEQ ID NO: 6610
  Description of Artificial Sequence: Synthetic pistachio; inner sequence and 3' sequence

SEQ ID NO: 26636 - DNA, 53 bp, Artificial Sequence; identical to SEQ ID NO: 2836
  Description of Artificial Sequence: Synthetic pistachio; inner sequence and 3' sequence

SEQ ID NO: 26637 - DNA, 53 bp, Artificial Sequence; identical to SEQ ID NO: 2533
  Description of Artificial Sequence: Synthetic pistachio; inner sequence and 3' sequence

SEQ ID NO: 26638 - DNA, 53 bp, Artificial Sequence; identical to SEQ ID NO: 2300
  Description of Artificial Sequence: Synthetic pistachio; inner sequence and 3' sequence

SEQ ID NO: 26639 - DNA, 53 bp, Artificial Sequence; identical to SEQ ID NO: 10844
  Description of Artificial Sequence: Synthetic pistachio; inner sequence and 3' sequence

SEQ ID NO: 26640 - DNA, 53 bp, Artificial Sequence; identical to SEQ ID NO: 2539
  Description of Artificial Sequence: Synthetic pistachio; inner sequence and 3' sequence

SEQ ID NO: 26641 - DNA, 53 bp, Artificial Sequence; identical to SEQ ID NO: 2356
  Description of Artificial Sequence: Synthetic pistachio; inner sequence and 3' sequence

SEQ ID NO: 26642 - DNA, 53 bp, Artificial Sequence; identical to SEQ ID NO: 2333
  Description of Artificial Sequence: Synthetic pistachio; inner sequence and 3' sequence

SEQ ID NO: 26643 - DNA, 53 bp, Artificial Sequence; identical to SEQ ID NO: 2459
  Description of Artificial Sequence: Synthetic pistachio; inner sequence and 3' sequence

SEQ ID NO: 26644 - DNA, 53 bp, Artificial Sequence; identical to SEQ ID NO: 2657
  Description of Artificial Sequence: Synthetic pistachio; inner sequence and 3' sequence

SEQ ID NO: 26645 - DNA, 53 bp, Artificial Sequence; identical to SEQ ID NO: 2514
  Description of Artificial Sequence: Synthetic pistachio; inner sequence and 3' sequence

SEQ ID NO: 26646 - DNA, 53 bp, Artificial Sequence; identical to SEQ ID NO: 6603
  Description of Artificial Sequence: Synthetic pistachio; inner sequence and 3' sequence

SEQ ID NO: 26647 - DNA, 53 bp, Artificial Sequence; identical to SEQ ID NO: 22233
  Description of Artificial Sequence: Synthetic pistachio; inner sequence and 3' sequence

SEQ ID NO: 26648 - DNA, 53 bp, Artificial Sequence; identical to SEQ ID NO: 2763
  Description of Artificial Sequence: Synthetic pistachio; inner sequence and 3' sequence

SEQ ID NO: 26649 - DNA, 53 bp, Artificial Sequence; identical to SEQ ID NO: 2309
  Description of Artificial Sequence: Synthetic pistachio; inner sequence and 3' sequence

SEQ ID NO: 26650 - DNA, 53 bp, Artificial Sequence; identical to SEQ ID NO: 10767
  Description of Artificial Sequence: Synthetic pistachio; inner sequence and 3' sequence

SEQ ID NO: 26651 - DNA, 53 bp, Artificial Sequence; identical to SEQ ID NO: 2594
  Description of Artificial Sequence: Synthetic pistachio; inner sequence and 3' sequence

SEQ ID NO: 26652 - DNA, 53 bp, Artificial Sequence; identical to SEQ ID NO: 10633
  Description of Artificial Sequence: Synthetic pistachio; inner sequence and 3' sequence

SEQ ID NO: 26653 - DNA, 53 bp, Artificial Sequence; identical to SEQ ID NO: 2626
  Description of Artificial Sequence: Synthetic pistachio; inner sequence and 3' sequence

SEQ ID NO: 26654 - DNA, 53 bp, Artificial Sequence; identical to SEQ ID NO: 2579
  Description of Artificial Sequence: Synthetic pistachio; inner sequence and 3' sequence

SEQ ID NO: 26655 - DNA, 53 bp, Artificial Sequence; identical to SEQ ID NO: 22592
  Description of Artificial Sequence: Synthetic pistachio; inner sequence and 3' sequence

SEQ ID NO: 26656 - DNA, 53 bp, Artificial Sequence; identical to SEQ ID NO: 6565
  Description of Artificial Sequence: Synthetic pistachio; inner sequence and 3' sequence

SEQ ID NO: 26657 - DNA, 53 bp, Artificial Sequence; identical to SEQ ID NO: 6667
  Description of Artificial Sequence: Synthetic pistachio; inner sequence and 3' sequence

SEQ ID NO: 26658 - DNA, 53 bp, Artificial Sequence; identical to SEQ ID NO: 2664
  Description of Artificial Sequence: Synthetic pistachio; inner sequence and 3' sequence

SEQ ID NO: 26659 - DNA, 51 bp, Artificial Sequence; identical to SEQ ID NO: 14885
  Description of Artificial Sequence: Synthetic pistachio; inner sequence and 3' sequence

SEQ ID NO: 26660 - DNA, 53 bp, Artificial Sequence; identical to SEQ ID NO: 2473
  Description of Artificial Sequence: Synthetic pistachio; inner sequence and 3' sequence

SEQ ID NO: 26661 - DNA, 53 bp, Artificial Sequence; identical to SEQ ID NO: 2162
  Description of Artificial Sequence: Synthetic pistachio; inner sequence and 3' sequence

SEQ ID NO: 26662 - DNA, 53 bp, Artificial Sequence; identical to SEQ ID NO: 14932
  Description of Artificial Sequence: Synthetic pistachio; inner sequence and 3' sequence

SEQ ID NO: 26663 - DNA, 53 bp, Artificial Sequence; identical to SEQ ID NO: 2495
  Description of Artificial Sequence: Synthetic pistachio; inner sequence and 3' sequence

SEQ ID NO: 26664 - DNA, 53 bp, Artificial Sequence; identical to SEQ ID NO: 6999
  Description of Artificial Sequence: Synthetic pistachio; inner sequence and 3' sequence

SEQ ID NO: 26665 - DNA, 53 bp, Artificial Sequence; identical to SEQ ID NO: 2571
  Description of Artificial Sequence: Synthetic pistachio; inner sequence and 3' sequence

SEQ ID NO: 26666 - DNA, 53 bp, Artificial Sequence; identical to SEQ ID NO: 2595
  Description of Artificial Sequence: Synthetic pistachio; inner sequence and 3' sequence

SEQ ID NO: 26667 - DNA, 53 bp, Artificial Sequence; identical to SEQ ID NO: 6530
  Description of Artificial Sequence: Synthetic pistachio; inner sequence and 3' sequence

SEQ ID NO: 26668 - DNA, 53 bp, Artificial Sequence; identical to SEQ ID NO: 2603
  Description of Artificial Sequence: Synthetic pistachio; inner sequence and 3' sequence

SEQ ID NO: 26669 - DNA, 53 bp, Artificial Sequence; identical to SEQ ID NO: 22226
  Description of Artificial Sequence: Synthetic pistachio; inner sequence and 3' sequence

SEQ ID NO: 26670 - DNA, 53 bp, Artificial Sequence; identical to SEQ ID NO: 2749
  Description of Artificial Sequence: Synthetic pistachio; inner sequence and 3' sequence

SEQ ID NO: 26671 - DNA, 52 bp, Artificial Sequence; identical to SEQ ID NO: 6763
  Description of Artificial Sequence: Synthetic pistachio; inner sequence and 3' sequence

SEQ ID NO: 26672 - DNA, 53 bp, Artificial Sequence; identical to SEQ ID NO: 2342
  Description of Artificial Sequence: Synthetic pistachio; inner sequence and 3' sequence

SEQ ID NO: 26673 - DNA, 53 bp, Artificial Sequence; identical to SEQ ID NO: 2576
  Description of Artificial Sequence: Synthetic pistachio; inner sequence and 3' sequence

SEQ ID NO: 26674 - DNA, 53 bp, Artificial Sequence; identical to SEQ ID NO: 2608
  Description of Artificial Sequence: Synthetic pistachio; inner sequence and 3' sequence

SEQ ID NO: 26675 - DNA, 53 bp, Artificial Sequence; identical to SEQ ID NO: 2482
  Description of Artificial Sequence: Synthetic pistachio; inner sequence and 3' sequence

SEQ ID NO: 26676 - DNA, 53 bp, Artificial Sequence; identical to SEQ ID NO: 2926
  Description of Artificial Sequence: Synthetic pistachio; inner sequence and 3' sequence

SEQ ID NO: 26677 - DNA, 53 bp, Artificial Sequence; identical to SEQ ID NO: 10670
  Description of Artificial Sequence: Synthetic pistachio; inner sequence and 3' sequence

SEQ ID NO: 26678 - DNA, 53 bp, Artificial Sequence; identical to SEQ ID NO: 2509
  Description of Artificial Sequence: Synthetic pistachio; inner sequence and 3' sequence

SEQ ID NO: 26679 - DNA, 53 bp, Artificial Sequence; identical to SEQ ID NO: 6526
  Description of Artificial Sequence: Synthetic pistachio; inner sequence and 3' sequence

SEQ ID NO: 26680 - DNA, 53 bp, Artificial Sequence; identical to SEQ ID NO: 2307
  Description of Artificial Sequence: Synthetic pistachio; inner sequence and 3' sequence

SEQ ID NO: 26681 - DNA, 52 bp, Artificial Sequence; identical to SEQ ID NO: 2453
  Description of Artificial Sequence: Synthetic pistachio; inner sequence and 3' sequence

SEQ ID NO: 26682 - DNA, 53 bp, Artificial Sequence; identical to SEQ ID NO: 14827
  Description of Artificial Sequence: Synthetic pistachio; inner sequence and 3' sequence

SEQ ID NO: 26683 - DNA, 53 bp, Artificial Sequence; identical to SEQ ID NO: 2956
  Description of Artificial Sequence: Synthetic pistachio; inner sequence and 3' sequence

SEQ ID NO: 26684 - DNA, 53 bp, Artificial Sequence; identical to SEQ ID NO: 6575
  Description of Artificial Sequence: Synthetic pistachio; inner sequence and 3' sequence

SEQ ID NO: 26685 - DNA, 53 bp, Artificial Sequence; identical to SEQ ID NO: 22229
  Description of Artificial Sequence: Synthetic pistachio; inner sequence and 3' sequence

SEQ ID NO: 26686 - DNA, 53 bp, Artificial Sequence; identical to SEQ ID NO: 2707
  Description of Artificial Sequence: Synthetic pistachio; inner sequence and 3' sequence

SEQ ID NO: 26687 - DNA, 53 bp, Artificial Sequence; identical to SEQ ID NO: 2912
  Description of Artificial Sequence: Synthetic pistachio; inner sequence and 3' sequence

SEQ ID NO: 26688 - DNA, 53 bp, Artificial Sequence; identical to SEQ ID NO: 22430
  Description of Artificial Sequence: Synthetic pistachio; inner sequence and 3' sequence

SEQ ID NO: 26689 - DNA, 53 bp, Artificial Sequence; identical to SEQ ID NO: 6792
  Description of Artificial Sequence: Synthetic pistachio; inner sequence and 3' sequence

SEQ ID NO: 26690 - DNA, 53 bp, Artificial Sequence; identical to SEQ ID NO: 2535
  Description of Artificial Sequence: Synthetic pistachio; inner sequence and 3' sequence

SEQ ID NO: 26691 - DNA, 52 bp, Artificial Sequence; identical to SEQ ID NO: 22955
  Description of Artificial Sequence: Synthetic pistachio; inner sequence and 3' sequence

SEQ ID NO: 26692 - DNA, 53 bp, Artificial Sequence; identical to SEQ ID NO: 2979
  Description of Artificial Sequence: Synthetic pistachio; inner sequence and 3' sequence

SEQ ID NO: 26693 - DNA, 53 bp, Artificial Sequence; identical to SEQ ID NO: 2588
  Description of Artificial Sequence: Synthetic pistachio; inner sequence and 3' sequence

SEQ ID NO: 26694 - DNA, 53 bp, Artificial Sequence; identical to SEQ ID NO: 6552
  Description of Artificial Sequence: Synthetic pistachio; inner sequence and 3' sequence

SEQ ID NO: 26695 - DNA, 53 bp, Artificial Sequence; identical to SEQ ID NO: 6810
  Description of Artificial Sequence: Synthetic pistachio; inner sequence and 3' sequence

SEQ ID NO: 26696 - DNA, 53 bp, Artificial Sequence; identical to SEQ ID NO: 2456
  Description of Artificial Sequence: Synthetic pistachio; inner sequence and 3' sequence

SEQ ID NO: 26697 - DNA, 53 bp, Artificial Sequence; identical to SEQ ID NO: 6425
  Description of Artificial Sequence: Synthetic pistachio; inner sequence and 3' sequence

SEQ ID NO: 26698 - DNA, 53 bp, Artificial Sequence; identical to SEQ ID NO: 2337
  Description of Artificial Sequence: Synthetic pistachio; inner sequence and 3' sequence

SEQ ID NO: 26699 - DNA, 53 bp, Artificial Sequence; identical to SEQ ID NO: 2771
  Description of Artificial Sequence: Synthetic pistachio; inner sequence and 3' sequence

SEQ ID NO: 26700 - DNA, 53 bp, Artificial Sequence; identical to SEQ ID NO: 2472
  Description of Artificial Sequence: Synthetic pistachio; inner sequence and 3' sequence

SEQ ID NO: 26701 - DNA, 53 bp, Artificial Sequence; identical to SEQ ID NO: 2422
  Description of Artificial Sequence: Synthetic pistachio; inner sequence and 3' sequence

SEQ ID NO: 26702 - DNA, 53 bp, Artificial Sequence; identical to SEQ ID NO: 2863
  Description of Artificial Sequence: Synthetic pistachio; inner sequence and 3' sequence

SEQ ID NO: 26703 - DNA, 53 bp, Artificial Sequence; identical to SEQ ID NO: 6837
  Description of Artificial Sequence: Synthetic pistachio; inner sequence and 3' sequence

SEQ ID NO: 26704 - DNA, 53 bp, Artificial Sequence; identical to SEQ ID NO: 10964
  Description of Artificial Sequence: Synthetic pistachio; inner sequence and 3' sequence

SEQ ID NO: 26705 - DNA, 53 bp, Artificial Sequence; identical to SEQ ID NO: 6498
  Description of Artificial Sequence: Synthetic pistachio; inner sequence and 3' sequence

SEQ ID NO: 26706 - DNA, 53 bp, Artificial Sequence; identical to SEQ ID NO: 6205
  Description of Artificial Sequence: Synthetic pistachio; inner sequence and 3' sequence

SEQ ID NO: 26707 - DNA, 53 bp, Artificial Sequence; identical to SEQ ID NO: 2421
  Description of Artificial Sequence: Synthetic pistachio; inner sequence and 3' sequence

SEQ ID NO: 26708 - DNA, 53 bp, Artificial Sequence
  Description of Artificial Sequence: Synthetic pistachio; inner sequence and 3' sequence
cgttgcgcatgtgtcgtgactggcttgggcttgactagtacatgaccacttga

SEQ ID NO: 26709 - DNA, 53 bp, Artificial Sequence; identical to SEQ ID NO: 2265
  Description of Artificial Sequence: Synthetic pistachio; inner sequence and 3' sequence

SEQ ID NO: 26710 - DNA, 53 bp, Artificial Sequence; identical to SEQ ID NO: 2507
  Description of Artificial Sequence: Synthetic pistachio; inner sequence and 3' sequence

SEQ ID NO: 26711 - DNA, 53 bp, Artificial Sequence; identical to SEQ ID NO: 6380
  Description of Artificial Sequence: Synthetic pistachio; inner sequence and 3' sequence

SEQ ID NO: 26712 - DNA, 53 bp, Artificial Sequence; identical to SEQ ID NO: 2441
  Description of Artificial Sequence: Synthetic pistachio; inner sequence and 3' sequence

SEQ ID NO: 26713 - DNA, 53 bp, Artificial Sequence; identical to SEQ ID NO: 2624
  Description of Artificial Sequence: Synthetic pistachio; inner sequence and 3' sequence

SEQ ID NO: 26714 - DNA, 53 bp, Artificial Sequence; identical to SEQ ID NO: 2460
  Description of Artificial Sequence: Synthetic pistachio; inner sequence and 3' sequence

SEQ ID NO: 26715 - DNA, 53 bp, Artificial Sequence; identical to SEQ ID NO: 2656
  Description of Artificial Sequence: Synthetic pistachio; inner sequence and 3' sequence

SEQ ID NO: 26716 - DNA, 53 bp, Artificial Sequence; identical to SEQ ID NO: 2599
  Description of Artificial Sequence: Synthetic pistachio; inner sequence and 3' sequence

SEQ ID NO: 26717 - DNA, 53 bp, Artificial Sequence; identical to SEQ ID NO: 2636
  Description of Artificial Sequence: Synthetic pistachio; inner sequence and 3' sequence

SEQ ID NO: 26718 - DNA, 53 bp, Artificial Sequence; identical to SEQ ID NO: 2931
  Description of Artificial Sequence: Synthetic pistachio; inner sequence and 3' sequence

SEQ ID NO: 26719 - DNA, 53 bp, Artificial Sequence; identical to SEQ ID NO: 2555
  Description of Artificial Sequence: Synthetic pistachio; inner sequence and 3' sequence

SEQ ID NO: 26720 - DNA, 53 bp, Artificial Sequence; identical to SEQ ID NO: 10618
  Description of Artificial Sequence: Synthetic pistachio; inner sequence and 3' sequence

SEQ ID NO: 26721 - DNA, 53 bp, Artificial Sequence; identical to SEQ ID NO: 2451
  Description of Artificial Sequence: Synthetic pistachio; inner sequence and 3' sequence

SEQ ID NO: 26722 - DNA, 53 bp, Artificial Sequence; identical to SEQ ID NO: 6956
  Description of Artificial Sequence: Synthetic pistachio; inner sequence and 3' sequence

SEQ ID NO: 26723 - DNA, 53 bp, Artificial Sequence; identical to SEQ ID NO: 14931
  Description of Artificial Sequence: Synthetic pistachio; inner sequence and 3' sequence

SEQ ID NO: 26724 - DNA, 53 bp, Artificial Sequence; identical to SEQ ID NO: 2466
  Description of Artificial Sequence: Synthetic pistachio; inner sequence and 3' sequence

SEQ ID NO: 26725 - DNA, 53 bp, Artificial Sequence; identical to SEQ ID NO: 6700
  Description of Artificial Sequence: Synthetic pistachio; inner sequence and 3' sequence

SEQ ID NO: 26726 - DNA, 53 bp, Artificial Sequence; identical to SEQ ID NO: 6787
  Description of Artificial Sequence: Synthetic pistachio; inner sequence and 3' sequence

SEQ ID NO: 26727 - DNA, 53 bp, Artificial Sequence; identical to SEQ ID NO: 22989
  Description of Artificial Sequence: Synthetic pistachio; inner sequence and 3' sequence

SEQ ID NO: 26728 - DNA, 53 bp, Artificial Sequence; identical to SEQ ID NO: 2512
  Description of Artificial Sequence: Synthetic pistachio; inner sequence and 3' sequence

SEQ ID NO: 26729 - DNA, 54 bp, Artificial Sequence; identical to SEQ ID NO: 22870
  Description of Artificial Sequence: Synthetic pistachio; inner sequence and 3' sequence

SEQ ID NO: 26730 - DNA, 53 bp, Artificial Sequence; identical to SEQ ID NO: 2713
  Description of Artificial Sequence: Synthetic pistachio; inner sequence and 3' sequence

SEQ ID NO: 26731 - DNA, 53 bp, Artificial Sequence; identical to SEQ ID NO: 2396
  Description of Artificial Sequence: Synthetic pistachio; inner sequence and 3' sequence

SEQ ID NO: 26732 - DNA, 53 bp, Artificial Sequence; identical to SEQ ID NO: 2601
  Description of Artificial Sequence: Synthetic pistachio; inner sequence and 3' sequence

SEQ ID NO: 26733 - DNA, 53 bp, Artificial Sequence; identical to SEQ ID NO: 2592
  Description of Artificial Sequence: Synthetic pistachio; inner sequence and 3' sequence

SEQ ID NO: 26734 - DNA, 53 bp, Artificial Sequence; identical to SEQ ID NO: 2717
  Description of Artificial Sequence: Synthetic pistachio; inner sequence and 3' sequence

SEQ ID NO: 26735 - DNA, 53 bp, Artificial Sequence; identical to SEQ ID NO: 2445
  Description of Artificial Sequence: Synthetic pistachio; inner sequence and 3' sequence

SEQ ID NO: 26736 - DNA, 53 bp, Artificial Sequence; identical to SEQ ID NO: 6890
  Description of Artificial Sequence: Synthetic pistachio; inner sequence and 3' sequence

SEQ ID NO: 26737 - DNA, 53 bp, Artificial Sequence; identical to SEQ ID NO: 2505
  Description of Artificial Sequence: Synthetic pistachio; inner sequence and 3' sequence

SEQ ID NO: 26738 - DNA, 53 bp, Artificial Sequence; identical to SEQ ID NO: 6254
  Description of Artificial Sequence: Synthetic pistachio; inner sequence and 3' sequence

SEQ ID NO: 26739 - DNA, 53 bp, Artificial Sequence; identical to SEQ ID NO: 2760
  Description of Artificial Sequence: Synthetic pistachio; inner sequence and 3' sequence

SEQ ID NO: 26740 - DNA, 52 bp, Artificial Sequence; identical to SEQ ID NO: 2549
  Description of Artificial Sequence: Synthetic pistachio; inner sequence and 3' sequence

SEQ ID NO: 26741 - DNA, 53 bp, Artificial Sequence; identical to SEQ ID NO: 6364
  Description of Artificial Sequence: Synthetic pistachio; inner sequence and 3' sequence

SEQ ID NO: 26742 - DNA, 53 bp, Artificial Sequence; identical to SEQ ID NO: 10627
  Description of Artificial Sequence: Synthetic pistachio; inner sequence and 3' sequence

SEQ ID NO: 26743 - DNA, 53 bp, Artificial Sequence; identical to SEQ ID NO: 10985
  Description of Artificial Sequence: Synthetic pistachio; inner sequence and 3' sequence

SEQ ID NO: 26744 - DNA, 53 bp, Artificial Sequence; identical to SEQ ID NO: 2869
  Description of Artificial Sequence: Synthetic pistachio; inner sequence and 3' sequence

SEQ ID NO: 26745 - DNA, 53 bp, Artificial Sequence; identical to SEQ ID NO: 7001
  Description of Artificial Sequence: Synthetic pistachio; inner sequence and 3' sequence

SEQ ID NO: 26746 - DNA, 53 bp, Artificial Sequence; identical to SEQ ID NO: 2273
  Description of Artificial Sequence: Synthetic pistachio; inner sequence and 3' sequence

SEQ ID NO: 26747 - DNA, 53 bp, Artificial Sequence; identical to SEQ ID NO: 22415
  Description of Artificial Sequence: Synthetic pistachio; inner sequence and 3' sequence

SEQ ID NO: 26748 - DNA, 53 bp, Artificial Sequence; identical to SEQ ID NO: 2381
  Description of Artificial Sequence: Synthetic pistachio; inner sequence and 3' sequence

SEQ ID NO: 26749 - DNA, 53 bp, Artificial Sequence; identical to SEQ ID NO: 10659
  Description of Artificial Sequence: Synthetic pistachio; inner sequence and 3' sequence

SEQ ID NO: 26750 - DNA, 53 bp, Artificial Sequence; identical to SEQ ID NO: 10837
  Description of Artificial Sequence: Synthetic pistachio; inner sequence and 3' sequence

SEQ ID NO: 26751 - DNA, 53 bp, Artificial Sequence; identical to SEQ ID NO: 22426
  Description of Artificial Sequence: Synthetic pistachio; inner sequence and 3' sequence

SEQ ID NO: 26752 - DNA, 53 bp, Artificial Sequence; identical to SEQ ID NO: 2471
  Description of Artificial Sequence: Synthetic pistachio; inner sequence and 3' sequence

SEQ ID NO: 26753 - DNA, 53 bp, Artificial Sequence; identical to SEQ ID NO: 6377
  Description of Artificial Sequence: Synthetic pistachio; inner sequence and 3' sequence

SEQ ID NO: 26754 - DNA, 53 bp, Artificial Sequence; identical to SEQ ID NO: 10993
  Description of Artificial Sequence: Synthetic pistachio; inner sequence and 3' sequence

SEQ ID NO: 26755 - DNA, 53 bp, Artificial Sequence; identical to SEQ ID NO: 2235
  Description of Artificial Sequence: Synthetic pistachio; inner sequence and 3' sequence

SEQ ID NO: 26756 - DNA, 53 bp, Artificial Sequence; identical to SEQ ID NO: 2327
  Description of Artificial Sequence: Synthetic pistachio; inner sequence and 3' sequence

SEQ ID NO: 26757 - DNA, 53 bp, Artificial Sequence; identical to SEQ ID NO: 6802
  Description of Artificial Sequence: Synthetic pistachio; inner sequence and 3' sequence

SEQ ID NO: 26758 - DNA, 53 bp, Artificial Sequence; identical to SEQ ID NO: 2501
  Description of Artificial Sequence: Synthetic pistachio; inner sequence and 3' sequence

SEQ ID NO: 26759 - DNA, 53 bp, Artificial Sequence; identical to SEQ ID NO: 6620
  Description of Artificial Sequence: Synthetic pistachio; inner sequence and 3' sequence

SEQ ID NO: 26760 - DNA, 52 bp, Artificial Sequence; identical to SEQ ID NO: 22705
  Description of Artificial Sequence: Synthetic pistachio; inner sequence and 3' sequence

SEQ ID NO: 26761 - DNA, 53 bp, Artificial Sequence; identical to SEQ ID NO: 2449
  Description of Artificial Sequence: Synthetic pistachio; inner sequence and 3' sequence

SEQ ID NO: 26762 - DNA, 53 bp, Artificial Sequence
  Description of Artificial Sequence: Synthetic pistachio; inner sequence and 3' sequence
cgaacgaaccgaggacatgcgctaggcacattgactagtacatgaccacttga

SEQ ID NO: 26763 - DNA, 53 bp, Artificial Sequence; identical to SEQ ID NO: 2843
  Description of Artificial Sequence: Synthetic pistachio; inner sequence and 3' sequence

SEQ ID NO: 26764 - DNA, 53 bp, Artificial Sequence; identical to SEQ ID NO: 2984
  Description of Artificial Sequence: Synthetic pistachio; inner sequence and 3' sequence

SEQ ID NO: 26765 - DNA, 53 bp, Artificial Sequence; identical to SEQ ID NO: 2424
  Description of Artificial Sequence: Synthetic pistachio; inner sequence and 3' sequence

SEQ ID NO: 26766 - DNA, 53 bp, Artificial Sequence; identical to SEQ ID NO: 2714
  Description of Artificial Sequence: Synthetic pistachio; inner sequence and 3' sequence

SEQ ID NO: 26767 - DNA, 53 bp, Artificial Sequence; identical to SEQ ID NO: 6740
  Description of Artificial Sequence: Synthetic pistachio; inner sequence and 3' sequence

SEQ ID NO: 26768 - DNA, 53 bp, Artificial Sequence; identical to SEQ ID NO: 2906
  Description of Artificial Sequence: Synthetic pistachio; inner sequence and 3' sequence

SEQ ID NO: 26769 - DNA, 53 bp, Artificial Sequence; identical to SEQ ID NO: 2655
  Description of Artificial Sequence: Synthetic pistachio; inner sequence and 3' sequence

SEQ ID NO: 26770 - DNA, 53 bp, Artificial Sequence; identical to SEQ ID NO: 10937
  Description of Artificial Sequence: Synthetic pistachio; inner sequence and 3' sequence

SEQ ID NO: 26771 - DNA, 53 bp, Artificial Sequence; identical to SEQ ID NO: 2698
  Description of Artificial Sequence: Synthetic pistachio; inner sequence and 3' sequence

SEQ ID NO: 26772 - DNA, 53 bp, Artificial Sequence; identical to SEQ ID NO: 6870
  Description of Artificial Sequence: Synthetic pistachio; inner sequence and 3' sequence

SEQ ID NO: 26773 - DNA, 51 bp, Artificial Sequence; identical to SEQ ID NO: 6786
  Description of Artificial Sequence: Synthetic pistachio; inner sequence and 3' sequence

SEQ ID NO: 26774 - DNA, 53 bp, Artificial Sequence; identical to SEQ ID NO: 6376
  Description of Artificial Sequence: Synthetic pistachio; inner sequence and 3' sequence

SEQ ID NO: 26775 - DNA, 53 bp, Artificial Sequence; identical to SEQ ID NO: 2643
  Description of Artificial Sequence: Synthetic pistachio; inner sequence and 3' sequence

SEQ ID NO: 26776 - DNA, 53 bp, Artificial Sequence; identical to SEQ ID NO: 6921
  Description of Artificial Sequence: Synthetic pistachio; inner sequence and 3' sequence

SEQ ID NO: 26777 - DNA, 54 bp, Artificial Sequence; identical to SEQ ID NO: 2971
  Description of Artificial Sequence: Synthetic pistachio; inner sequence and 3' sequence

SEQ ID NO: 26778 - DNA, 53 bp, Artificial Sequence; identical to SEQ ID NO: 2951
  Description of Artificial Sequence: Synthetic pistachio; inner sequence and 3' sequence

SEQ ID NO: 26779 - DNA, 53 bp, Artificial Sequence; identical to SEQ ID NO: 2921
  Description of Artificial Sequence: Synthetic pistachio; inner sequence and 3' sequence

SEQ ID NO: 26780 - DNA, 53 bp, Artificial Sequence; identical to SEQ ID NO: 2842
  Description of Artificial Sequence: Synthetic pistachio; inner sequence and 3' sequence

SEQ ID NO: 26781 - DNA, 53 bp, Artificial Sequence; identical to SEQ ID NO: 2494
  Description of Artificial Sequence: Synthetic pistachio; inner sequence and 3' sequence

SEQ ID NO: 26782 - DNA, 53 bp, Artificial Sequence; identical to SEQ ID NO: 2830
  Description of Artificial Sequence: Synthetic pistachio; inner sequence and 3' sequence

SEQ ID NO: 26783 - DNA, 53 bp, Artificial Sequence; identical to SEQ ID NO: 2619
  Description of Artificial Sequence: Synthetic pistachio; inner sequence and 3' sequence

SEQ ID NO: 26784 - DNA, 53 bp, Artificial Sequence; identical to SEQ ID NO: 2593
  Description of Artificial Sequence: Synthetic pistachio; inner sequence and 3' sequence

SEQ ID NO: 26785 - DNA, 53 bp, Artificial Sequence; identical to SEQ ID NO: 2835
  Description of Artificial Sequence: Synthetic pistachio; inner sequence and 3' sequence

SEQ ID NO: 26786 - DNA, 53 bp, Artificial Sequence; identical to SEQ ID NO: 2753
  Description of Artificial Sequence: Synthetic pistachio; inner sequence and 3' sequence

SEQ ID NO: 26787 - DNA, 53 bp, Artificial Sequence; identical to SEQ ID NO: 10825
  Description of Artificial Sequence: Synthetic pistachio; inner sequence and 3' sequence

SEQ ID NO: 26788 - DNA, 53 bp, Artificial Sequence; identical to SEQ ID NO: 22339
  Description of Artificial Sequence: Synthetic pistachio; inner sequence and 3' sequence

SEQ ID NO: 26789 - DNA, 53 bp, Artificial Sequence; identical to SEQ ID NO: 6719
  Description of Artificial Sequence: Synthetic pistachio; inner sequence and 3' sequence

SEQ ID NO: 26790 - DNA, 53 bp, Artificial Sequence; identical to SEQ ID NO: 2981
  Description of Artificial Sequence: Synthetic pistachio; inner sequence and 3' sequence

SEQ ID NO: 26791 - DNA, 53 bp, Artificial Sequence; identical to SEQ ID NO: 6976
  Description of Artificial Sequence: Synthetic pistachio; inner sequence and 3' sequence

SEQ ID NO: 26792 - DNA, 53 bp, Artificial Sequence; identical to SEQ ID NO: 10810
  Description of Artificial Sequence: Synthetic pistachio; inner sequence and 3' sequence

SEQ ID NO: 26793 - DNA, 53 bp, Artificial Sequence; identical to SEQ ID NO: 2665
  Description of Artificial Sequence: Synthetic pistachio; inner sequence and 3' sequence

SEQ ID NO: 26794 - DNA, 53 bp, Artificial Sequence; identical to SEQ ID NO: 22789
  Description of Artificial Sequence: Synthetic pistachio; inner sequence and 3' sequence

SEQ ID NO: 26795 - DNA, 53 bp, Artificial Sequence; identical to SEQ ID NO: 2679
  Description of Artificial Sequence: Synthetic pistachio; inner sequence and 3' sequence

SEQ ID NO: 26796 - DNA, 53 bp, Artificial Sequence; identical to SEQ ID NO: 6799
  Description of Artificial Sequence: Synthetic pistachio; inner sequence and 3' sequence

SEQ ID NO: 26797 - DNA, 53 bp, Artificial Sequence; identical to SEQ ID NO: 2649
  Description of Artificial Sequence: Synthetic pistachio; inner sequence and 3' sequence

SEQ ID NO: 26798 - DNA, 53 bp, Artificial Sequence; identical to SEQ ID NO: 2682
  Description of Artificial Sequence: Synthetic pistachio; inner sequence and 3' sequence

SEQ ID NO: 26799 - DNA, 53 bp, Artificial Sequence; identical to SEQ ID NO: 22548
  Description of Artificial Sequence: Synthetic pistachio; inner sequence and 3' sequence

SEQ ID NO: 26800 - DNA, 53 bp, Artificial Sequence; identical to SEQ ID NO: 2867
  Description of Artificial Sequence: Synthetic pistachio; inner sequence and 3' sequence

SEQ ID NO: 26801 - DNA, 53 bp, Artificial Sequence
  Description of Artificial Sequence: Synthetic pistachio; inner sequence and 3' sequence
ggatgtaacgcaccgttcaattgcggcatgttgactagtacatgaccacttga

SEQ ID NO: 26802 - DNA, 53 bp, Artificial Sequence; identical to SEQ ID NO: 6816
  Description of Artificial Sequence: Synthetic pistachio; inner sequence and 3' sequence

SEQ ID NO: 26803 - DNA, 53 bp, Artificial Sequence; identical to SEQ ID NO: 6745
  Description of Artificial Sequence: Synthetic pistachio; inner sequence and 3' sequence

SEQ ID NO: 26804 - DNA, 53 bp, Artificial Sequence; identical to SEQ ID NO: 2700
  Description of Artificial Sequence: Synthetic pistachio; inner sequence and 3' sequence

SEQ ID NO: 26805 - DNA, 53 bp, Artificial Sequence; identical to SEQ ID NO: 2388
  Description of Artificial Sequence: Synthetic pistachio; inner sequence and 3' sequence

SEQ ID NO: 26806 - DNA, 53 bp, Artificial Sequence; identical to SEQ ID NO: 6755
  Description of Artificial Sequence: Synthetic pistachio; inner sequence and 3' sequence

SEQ ID NO: 26807 - DNA, 53 bp, Artificial Sequence; identical to SEQ ID NO: 22410
  Description of Artificial Sequence: Synthetic pistachio; inner sequence and 3' sequence

SEQ ID NO: 26808 - DNA, 53 bp, Artificial Sequence; identical to SEQ ID NO: 2860
  Description of Artificial Sequence: Synthetic pistachio; inner sequence and 3' sequence

SEQ ID NO: 26809 - DNA, 53 bp, Artificial Sequence; identical to SEQ ID NO: 2252
  Description of Artificial Sequence: Synthetic pistachio; inner sequence and 3' sequence

SEQ ID NO: 26810 - DNA, 53 bp, Artificial Sequence
  Description of Artificial Sequence: Synthetic pistachio; inner sequence and 3' sequence
cgcgctcgtaccgtaggtcttgtcgtgggattgactagtacatgaccacttga

SEQ ID NO: 26811 - DNA, 53 bp, Artificial Sequence; identical to SEQ ID NO: 22519
  Description of Artificial Sequence: Synthetic pistachio; inner sequence and 3' sequence

SEQ ID NO: 26812 - DNA, 53 bp, Artificial Sequence
  Description of Artificial Sequence: Synthetic pistachio; inner sequence and 3' sequence
cgcactacaagggggaggtgacgttgcgccttgactagtacatgaccacttga

SEQ ID NO: 26813 - DNA, 53 bp, Artificial Sequence; identical to SEQ ID NO: 6873
  Description of Artificial Sequence: Synthetic pistachio; inner sequence and 3' sequence

SEQ ID NO: 26814 - DNA, 53 bp, Artificial Sequence; identical to SEQ ID NO: 6592
  Description of Artificial Sequence: Synthetic pistachio; inner sequence and 3' sequence

SEQ ID NO: 26815 - DNA, 53 bp, Artificial Sequence; identical to SEQ ID NO: 6348
  Description of Artificial Sequence: Synthetic pistachio; inner sequence and 3' sequence

SEQ ID NO: 26816 - DNA, 53 bp, Artificial Sequence; identical to SEQ ID NO: 6955
  Description of Artificial Sequence: Synthetic pistachio; inner sequence and 3' sequence

SEQ ID NO: 26817 - DNA, 53 bp, Artificial Sequence; identical to SEQ ID NO: 6817
  Description of Artificial Sequence: Synthetic pistachio; inner sequence and 3' sequence

SEQ ID NO: 26818 - DNA, 53 bp, Artificial Sequence; identical to SEQ ID NO: 10798
  Description of Artificial Sequence: Synthetic pistachio; inner sequence and 3' sequence

SEQ ID NO: 26819 - DNA, 53 bp, Artificial Sequence; identical to SEQ ID NO: 2950
  Description of Artificial Sequence: Synthetic pistachio; inner sequence and 3' sequence

SEQ ID NO: 26820 - DNA, 53 bp, Artificial Sequence; identical to SEQ ID NO: 14791
  Description of Artificial Sequence: Synthetic pistachio; inner sequence and 3' sequence

SEQ ID NO: 26821 - DNA, 53 bp, Artificial Sequence; identical to SEQ ID NO: 2725
  Description of Artificial Sequence: Synthetic pistachio; inner sequence and 3' sequence

SEQ ID NO: 26822 - DNA, 53 bp, Artificial Sequence; identical to SEQ ID NO: 6963
  Description of Artificial Sequence: Synthetic pistachio; inner sequence and 3' sequence

SEQ ID NO: 26823 - DNA, 53 bp, Artificial Sequence; identical to SEQ ID NO: 10949
  Description of Artificial Sequence: Synthetic pistachio; inner sequence and 3' sequence

SEQ ID NO: 26824 - DNA, 53 bp, Artificial Sequence; identical to SEQ ID NO: 2686
  Description of Artificial Sequence: Synthetic pistachio; inner sequence and 3' sequence

SEQ ID NO: 26825 - DNA, 53 bp, Artificial Sequence; identical to SEQ ID NO: 2720
  Description of Artificial Sequence: Synthetic pistachio; inner sequence and 3' sequence

SEQ ID NO: 26826 - DNA, 53 bp, Artificial Sequence; identical to SEQ ID NO: 2440
  Description of Artificial Sequence: Synthetic pistachio; inner sequence and 3' sequence

SEQ ID NO: 26827 - DNA, 53 bp, Artificial Sequence; identical to SEQ ID NO: 22165
  Description of Artificial Sequence: Synthetic pistachio; inner sequence and 3' sequence

SEQ ID NO: 26828 - DNA, 53 bp, Artificial Sequence; identical to SEQ ID NO: 6509
  Description of Artificial Sequence: Synthetic pistachio; inner sequence and 3' sequence

SEQ ID NO: 26829 - DNA, 53 bp, Artificial Sequence; identical to SEQ ID NO: 6776
  Description of Artificial Sequence: Synthetic pistachio; inner sequence and 3' sequence

SEQ ID NO: 26830 - DNA, 53 bp, Artificial Sequence; identical to SEQ ID NO: 6504
  Description of Artificial Sequence: Synthetic pistachio; inner sequence and 3' sequence

SEQ ID NO: 26831 - DNA, 53 bp, Artificial Sequence; identical to SEQ ID NO: 6394
  Description of Artificial Sequence: Synthetic pistachio; inner sequence and 3' sequence

SEQ ID NO: 26832 - DNA, 53 bp, Artificial Sequence; identical to SEQ ID NO: 2761
  Description of Artificial Sequence: Synthetic pistachio; inner sequence and 3' sequence

SEQ ID NO: 26833 - DNA, 53 bp, Artificial Sequence; identical to SEQ ID NO: 2778
  Description of Artificial Sequence: Synthetic pistachio; inner sequence and 3' sequence

SEQ ID NO: 26834 - DNA, 53 bp, Artificial Sequence; identical to SEQ ID NO: 2590
  Description of Artificial Sequence: Synthetic pistachio; inner sequence and 3' sequence

SEQ ID NO: 26835 - DNA, 53 bp, Artificial Sequence; identical to SEQ ID NO: 6616
  Description of Artificial Sequence: Synthetic pistachio; inner sequence and 3' sequence

SEQ ID NO: 26836 - DNA, 53 bp, Artificial Sequence; identical to SEQ ID NO: 2691
  Description of Artificial Sequence: Synthetic pistachio; inner sequence and 3' sequence

SEQ ID NO: 26837 - DNA, 53 bp, Artificial Sequence; identical to SEQ ID NO: 2940
  Description of Artificial Sequence: Synthetic pistachio; inner sequence and 3' sequence

SEQ ID NO: 26838 - DNA, 53 bp, Artificial Sequence; identical to SEQ ID NO: 6717
  Description of Artificial Sequence: Synthetic pistachio; inner sequence and 3' sequence

SEQ ID NO: 26839 - DNA, 53 bp, Artificial Sequence
  Description of Artificial Sequence: Synthetic pistachio; inner sequence and 3' sequence
cgcaccggcatggcgtaggcagtcgtgacattgactagtacatgaccacttga

SEQ ID NO: 26840 - DNA, 53 bp, Artificial Sequence; identical to SEQ ID NO: 22335
  Description of Artificial Sequence: Synthetic pistachio; inner sequence and 3' sequence

SEQ ID NO: 26841 - DNA, 53 bp, Artificial Sequence; identical to SEQ ID NO: 2415
  Description of Artificial Sequence: Synthetic pistachio; inner sequence and 3' sequence

SEQ ID NO: 26842 - DNA, 53 bp, Artificial Sequence; identical to SEQ ID NO: 2598
  Description of Artificial Sequence: Synthetic pistachio; inner sequence and 3' sequence

SEQ ID NO: 26843 - DNA, 53 bp, Artificial Sequence
  Description of Artificial Sequence: Synthetic pistachio; inner sequence and 3' sequence
ggacgcatcgccccttcatgttgtcgtgtattgactagtacatgaccacttga

SEQ ID NO: 26844 - DNA, 52 bp, Artificial Sequence; identical to SEQ ID NO: 6869
  Description of Artificial Sequence: Synthetic pistachio; inner sequence and 3' sequence

SEQ ID NO: 26845 - DNA, 53 bp, Artificial Sequence; identical to SEQ ID NO: 2604
  Description of Artificial Sequence: Synthetic pistachio; inner sequence and 3' sequence

SEQ ID NO: 26846 - DNA, 53 bp, Artificial Sequence; identical to SEQ ID NO: 2961
  Description of Artificial Sequence: Synthetic pistachio; inner sequence and 3' sequence

SEQ ID NO: 26847 - DNA, 53 bp, Artificial Sequence; identical to SEQ ID NO: 2542
  Description of Artificial Sequence: Synthetic pistachio; inner sequence and 3' sequence

SEQ ID NO: 26848 - DNA, 54 bp, Artificial Sequence; identical to SEQ ID NO: 2503
  Description of Artificial Sequence: Synthetic pistachio; inner sequence and 3' sequence

SEQ ID NO: 26849 - DNA, 53 bp, Artificial Sequence; identical to SEQ ID NO: 2382
  Description of Artificial Sequence: Synthetic pistachio; inner sequence and 3' sequence

SEQ ID NO: 26850 - DNA, 53 bp, Artificial Sequence; identical to SEQ ID NO: 10816
  Description of Artificial Sequence: Synthetic pistachio; inner sequence and 3' sequence

SEQ ID NO: 26851 - DNA, 53 bp, Artificial Sequence; identical to SEQ ID NO: 6830
  Description of Artificial Sequence: Synthetic pistachio; inner sequence and 3' sequence

SEQ ID NO: 26852 - DNA, 53 bp, Artificial Sequence
  Description of Artificial Sequence: Synthetic pistachio; inner sequence and 3' sequence
gcatcgcgtcactatcatgtgtgtcacgtattgactagtacatgaccacttga

SEQ ID NO: 26853 - DNA, 53 bp, Artificial Sequence; identical to SEQ ID NO: 2286
  Description of Artificial Sequence: Synthetic pistachio; inner sequence and 3' sequence

SEQ ID NO: 26854 - DNA, 53 bp, Artificial Sequence; identical to SEQ ID NO: 2384
  Description of Artificial Sequence: Synthetic pistachio; inner sequence and 3' sequence

SEQ ID NO: 26855 - DNA, 53 bp, Artificial Sequence; identical to SEQ ID NO: 6894
  Description of Artificial Sequence: Synthetic pistachio; inner sequence and 3' sequence

SEQ ID NO: 26856 - DNA, 53 bp, Artificial Sequence; identical to SEQ ID NO: 6280
  Description of Artificial Sequence: Synthetic pistachio; inner sequence and 3' sequence

SEQ ID NO: 26857 - DNA, 53 bp, Artificial Sequence
  Description of Artificial Sequence: Synthetic pistachio; inner sequence and 3' sequence
cgaccgtgagtggcgatgtgtctcggtgcattgactagtacatgaccacttga

SEQ ID NO: 26858 - DNA, 53 bp, Artificial Sequence; identical to SEQ ID NO: 2701
  Description of Artificial Sequence: Synthetic pistachio; inner sequence and 3' sequence

SEQ ID NO: 26859 - DNA, 53 bp, Artificial Sequence; identical to SEQ ID NO: 6692
  Description of Artificial Sequence: Synthetic pistachio; inner sequence and 3' sequence

SEQ ID NO: 26860 - DNA, 53 bp, Artificial Sequence; identical to SEQ ID NO: 2857
  Description of Artificial Sequence: Synthetic pistachio; inner sequence and 3' sequence

SEQ ID NO: 26861 - DNA, 53 bp, Artificial Sequence; identical to SEQ ID NO: 22331
  Description of Artificial Sequence: Synthetic pistachio; inner sequence and 3' sequence

SEQ ID NO: 26862 - DNA, 53 bp, Artificial Sequence; identical to SEQ ID NO: 6790
  Description of Artificial Sequence: Synthetic pistachio; inner sequence and 3' sequence

SEQ ID NO: 26863 - DNA, 53 bp, Artificial Sequence; identical to SEQ ID NO: 2722
  Description of Artificial Sequence: Synthetic pistachio; inner sequence and 3' sequence

SEQ ID NO: 26864 - DNA, 53 bp, Artificial Sequence; identical to SEQ ID NO: 6682
  Description of Artificial Sequence: Synthetic pistachio; inner sequence and 3' sequence

SEQ ID NO: 26865 - DNA, 53 bp, Artificial Sequence; identical to SEQ ID NO: 22760
  Description of Artificial Sequence: Synthetic pistachio; inner sequence and 3' sequence

SEQ ID NO: 26866 - DNA, 53 bp, Artificial Sequence; identical to SEQ ID NO: 6491
  Description of Artificial Sequence: Synthetic pistachio; inner sequence and 3' sequence

SEQ ID NO: 26867 - DNA, 53 bp, Artificial Sequence; identical to SEQ ID NO: 2444
  Description of Artificial Sequence: Synthetic pistachio; inner sequence and 3' sequence

SEQ ID NO: 26868 - DNA, 53 bp, Artificial Sequence; identical to SEQ ID NO: 2960
  Description of Artificial Sequence: Synthetic pistachio; inner sequence and 3' sequence

SEQ ID NO: 26869 - DNA, 53 bp, Artificial Sequence; identical to SEQ ID NO: 2996
  Description of Artificial Sequence: Synthetic pistachio; inner sequence and 3' sequence

SEQ ID NO: 26870 - DNA, 53 bp, Artificial Sequence
  Description of Artificial Sequence: Synthetic pistachio; inner sequence and 3' sequence
cgcgccgagcatgcctagcgatgctgcacattgactagtacatgaccacttga

SEQ ID NO: 26871 - DNA, 53 bp, Artificial Sequence; identical to SEQ ID NO: 3001
  Description of Artificial Sequence: Synthetic pistachio; inner sequence and 3' sequence

SEQ ID NO: 26872 - DNA, 53 bp, Artificial Sequence
  Description of Artificial Sequence: Synthetic pistachio; inner sequence and 3' sequence
tgacgcacgcagaccttcaagtcggccatgttgactagtacatgaccacttga

SEQ ID NO: 26873 - DNA, 53 bp, Artificial Sequence; identical to SEQ ID NO: 10850
  Description of Artificial Sequence: Synthetic pistachio; inner sequence and 3' sequence

SEQ ID NO: 26874 - DNA, 53 bp, Artificial Sequence; identical to SEQ ID NO: 2731
  Description of Artificial Sequence: Synthetic pistachio; inner sequence and 3' sequence

SEQ ID NO: 26875 - DNA, 53 bp, Artificial Sequence
  Description of Artificial Sequence: Synthetic pistachio; inner sequence and 3' sequence
ggatgcggctgacctgatcaatgtgcgccattgactagtacatgaccacttga

SEQ ID NO: 26876 - DNA, 53 bp, Artificial Sequence; identical to SEQ ID NO: 2871
  Description of Artificial Sequence: Synthetic pistachio; inner sequence and 3' sequence

SEQ ID NO: 26877 - DNA, 53 bp, Artificial Sequence
  Description of Artificial Sequence: Synthetic pistachio; inner sequence and 3' sequence
gtcatgcgcggacattcacgttggcgtggattgactagtacatgaccacttga

SEQ ID NO: 26878 - DNA, 53 bp, Artificial Sequence; identical to SEQ ID NO: 2526
  Description of Artificial Sequence: Synthetic pistachio; inner sequence and 3' sequence

SEQ ID NO: 26879 - DNA, 53 bp, Artificial Sequence; identical to SEQ ID NO: 10868
  Description of Artificial Sequence: Synthetic pistachio; inner sequence and 3' sequence

SEQ ID NO: 26880 - DNA, 53 bp, Artificial Sequence; identical to SEQ ID NO: 22544
  Description of Artificial Sequence: Synthetic pistachio; inner sequence and 3' sequence

SEQ ID NO: 26881 - DNA, 53 bp, Artificial Sequence; identical to SEQ ID NO: 14933
  Description of Artificial Sequence: Synthetic pistachio; inner sequence and 3' sequence

SEQ ID NO: 26882 - DNA, 53 bp, Artificial Sequence; identical to SEQ ID NO: 14986
  Description of Artificial Sequence: Synthetic pistachio; inner sequence and 3' sequence

SEQ ID NO: 26883 - DNA, 53 bp, Artificial Sequence; identical to SEQ ID NO: 2674
  Description of Artificial Sequence: Synthetic pistachio; inner sequence and 3' sequence

SEQ ID NO: 26884 - DNA, 54 bp, Artificial Sequence; identical to SEQ ID NO: 2489
  Description of Artificial Sequence: Synthetic pistachio; inner sequence and 3' sequence

SEQ ID NO: 26885 - DNA, 51 bp, Artificial Sequence; identical to SEQ ID NO: 22321
  Description of Artificial Sequence: Synthetic pistachio; inner sequence and 3' sequence

SEQ ID NO: 26886 - DNA, 53 bp, Artificial Sequence; identical to SEQ ID NO: 2547
  Description of Artificial Sequence: Synthetic pistachio; inner sequence and 3' sequence

SEQ ID NO: 26887 - DNA, 53 bp, Artificial Sequence; identical to SEQ ID NO: 2554
  Description of Artificial Sequence: Synthetic pistachio; inner sequence and 3' sequence

SEQ ID NO: 26888 - DNA, 53 bp, Artificial Sequence; identical to SEQ ID NO: 14853
  Description of Artificial Sequence: Synthetic pistachio; inner sequence and 3' sequence

SEQ ID NO: 26889 - DNA, 53 bp, Artificial Sequence; identical to SEQ ID NO: 2683
  Description of Artificial Sequence: Synthetic pistachio; inner sequence and 3' sequence

SEQ ID NO: 26890 - DNA, 53 bp, Artificial Sequence; identical to SEQ ID NO: 2610
  Description of Artificial Sequence: Synthetic pistachio; inner sequence and 3' sequence

SEQ ID NO: 26891 - DNA, 53 bp, Artificial Sequence; identical to SEQ ID NO: 2709
  Description of Artificial Sequence: Synthetic pistachio; inner sequence and 3' sequence

SEQ ID NO: 26892 - DNA, 53 bp, Artificial Sequence; identical to SEQ ID NO: 2948
  Description of Artificial Sequence: Synthetic pistachio; inner sequence and 3' sequence

SEQ ID NO: 26893 - DNA, 53 bp, Artificial Sequence; identical to SEQ ID NO: 22902
  Description of Artificial Sequence: Synthetic pistachio; inner sequence and 3' sequence

SEQ ID NO: 26894 - DNA, 53 bp, Artificial Sequence; identical to SEQ ID NO: 2295
  Description of Artificial Sequence: Synthetic pistachio; inner sequence and 3' sequence

SEQ ID NO: 26895 - DNA, 53 bp, Artificial Sequence; identical to SEQ ID NO: 2739
  Description of Artificial Sequence: Synthetic pistachio; inner sequence and 3' sequence

SEQ ID NO: 26896 - DNA, 53 bp, Artificial Sequence; identical to SEQ ID NO: 6807
  Description of Artificial Sequence: Synthetic pistachio; inner sequence and 3' sequence

SEQ ID NO: 26897 - DNA, 53 bp, Artificial Sequence; identical to SEQ ID NO: 2726
  Description of Artificial Sequence: Synthetic pistachio; inner sequence and 3' sequence

SEQ ID NO: 26898 - DNA, 53 bp, Artificial Sequence; identical to SEQ ID NO: 2831
  Description of Artificial Sequence: Synthetic pistachio; inner sequence and 3' sequence

SEQ ID NO: 26899 - DNA, 53 bp, Artificial Sequence; identical to SEQ ID NO: 14799
  Description of Artificial Sequence: Synthetic pistachio; inner sequence and 3' sequence

SEQ ID NO: 26900 - DNA, 53 bp, Artificial Sequence; identical to SEQ ID NO: 22590
  Description of Artificial Sequence: Synthetic pistachio; inner sequence and 3' sequence

SEQ ID NO: 26901 - DNA, 53 bp, Artificial Sequence; identical to SEQ ID NO: 2688
  Description of Artificial Sequence: Synthetic pistachio; inner sequence and 3' sequence

SEQ ID NO: 26902 - DNA, 50 bp, Artificial Sequence
  Description of Artificial Sequence: Synthetic pistachio; inner sequence and 3' sequence
gcatgcgatgatccttcgagtgcgtcattgactagtacatgaccacttga

SEQ ID NO: 26903 - DNA, 53 bp, Artificial Sequence; identical to SEQ ID NO: 6591
  Description of Artificial Sequence: Synthetic pistachio; inner sequence and 3' sequence

SEQ ID NO: 26904 - DNA, 53 bp, Artificial Sequence; identical to SEQ ID NO: 6857
  Description of Artificial Sequence: Synthetic pistachio; inner sequence and 3' sequence

SEQ ID NO: 26905 - DNA, 53 bp, Artificial Sequence; identical to SEQ ID NO: 2917
  Description of Artificial Sequence: Synthetic pistachio; inner sequence and 3' sequence

SEQ ID NO: 26906 - DNA, 53 bp, Artificial Sequence
  Description of Artificial Sequence: Synthetic pistachio; inner sequence and 3' sequence
cggcacgtagccctatcagtggtgcatgcattgactagtacatgaccacttga

SEQ ID NO: 26907 - DNA, 53 bp, Artificial Sequence; identical to SEQ ID NO: 22642
  Description of Artificial Sequence: Synthetic pistachio; inner sequence and 3' sequence

SEQ ID NO: 26908 - DNA, 53 bp, Artificial Sequence; identical to SEQ ID NO: 2474
  Description of Artificial Sequence: Synthetic pistachio; inner sequence and 3' sequence

SEQ ID NO: 26909 - DNA, 53 bp, Artificial Sequence; identical to SEQ ID NO: 10892
  Description of Artificial Sequence: Synthetic pistachio; inner sequence and 3' sequence

SEQ ID NO: 26910 - DNA, 53 bp, Artificial Sequence; identical to SEQ ID NO: 22424
  Description of Artificial Sequence: Synthetic pistachio; inner sequence and 3' sequence

SEQ ID NO: 26911 - DNA, 53 bp, Artificial Sequence; identical to SEQ ID NO: 6580
  Description of Artificial Sequence: Synthetic pistachio; inner sequence and 3' sequence

SEQ ID NO: 26912 - DNA, 53 bp, Artificial Sequence; identical to SEQ ID NO: 14971
  Description of Artificial Sequence: Synthetic pistachio; inner sequence and 3' sequence

SEQ ID NO: 26913 - DNA, 53 bp, Artificial Sequence; identical to SEQ ID NO: 2458
  Description of Artificial Sequence: Synthetic pistachio; inner sequence and 3' sequence

SEQ ID NO: 26914 - DNA, 53 bp, Artificial Sequence; identical to SEQ ID NO: 14866
  Description of Artificial Sequence: Synthetic pistachio; inner sequence and 3' sequence

SEQ ID NO: 26915 - DNA, 53 bp, Artificial Sequence; identical to SEQ ID NO: 2758
  Description of Artificial Sequence: Synthetic pistachio; inner sequence and 3' sequence

SEQ ID NO: 26916 - DNA, 53 bp, Artificial Sequence; identical to SEQ ID NO: 6393
  Description of Artificial Sequence: Synthetic pistachio; inner sequence and 3' sequence

SEQ ID NO: 26917 - DNA, 53 bp, Artificial Sequence; identical to SEQ ID NO: 2600
  Description of Artificial Sequence: Synthetic pistachio; inner sequence and 3' sequence

SEQ ID NO: 26918 - DNA, 53 bp, Artificial Sequence; identical to SEQ ID NO: 6641
  Description of Artificial Sequence: Synthetic pistachio; inner sequence and 3' sequence

SEQ ID NO: 26919 - DNA, 53 bp, Artificial Sequence; identical to SEQ ID NO: 6907
  Description of Artificial Sequence: Synthetic pistachio; inner sequence and 3' sequence

SEQ ID NO: 26920 - DNA, 53 bp, Artificial Sequence; identical to SEQ ID NO: 6419
  Description of Artificial Sequence: Synthetic pistachio; inner sequence and 3' sequence

SEQ ID NO: 26921 - DNA, 53 bp, Artificial Sequence; identical to SEQ ID NO: 10682
  Description of Artificial Sequence: Synthetic pistachio; inner sequence and 3' sequence

SEQ ID NO: 26922 - DNA, 53 bp, Artificial Sequence; identical to SEQ ID NO: 6997
  Description of Artificial Sequence: Synthetic pistachio; inner sequence and 3' sequence

SEQ ID NO: 26923 - DNA, 53 bp, Artificial Sequence; identical to SEQ ID NO: 2383
  Description of Artificial Sequence: Synthetic pistachio; inner sequence and 3' sequence

SEQ ID NO: 26924 - DNA, 53 bp, Artificial Sequence; identical to SEQ ID NO: 10960
  Description of Artificial Sequence: Synthetic pistachio; inner sequence and 3' sequence

SEQ ID NO: 26925 - DNA, 53 bp, Artificial Sequence; identical to SEQ ID NO: 14996
  Description of Artificial Sequence: Synthetic pistachio; inner sequence and 3' sequence

SEQ ID NO: 26926 - DNA, 53 bp, Artificial Sequence; identical to SEQ ID NO: 2721
  Description of Artificial Sequence: Synthetic pistachio; inner sequence and 3' sequence

SEQ ID NO: 26927 - DNA, 53 bp, Artificial Sequence
  Description of Artificial Sequence: Synthetic pistachio; inner sequence and 3' sequence
tggccgatcgaccctaccaagtgcagcatgttgactagtacatgaccacttga

SEQ ID NO: 26928 - DNA, 53 bp, Artificial Sequence; identical to SEQ ID NO: 22576
  Description of Artificial Sequence: Synthetic pistachio; inner sequence and 3' sequence

SEQ ID NO: 26929 - DNA, 53 bp, Artificial Sequence; identical to SEQ ID NO: 2819
  Description of Artificial Sequence: Synthetic pistachio; inner sequence and 3' sequence

SEQ ID NO: 26930 - DNA, 53 bp, Artificial Sequence; identical to SEQ ID NO: 6739
  Description of Artificial Sequence: Synthetic pistachio; inner sequence and 3' sequence

SEQ ID NO: 26931 - DNA, 53 bp, Artificial Sequence; identical to SEQ ID NO: 22327
  Description of Artificial Sequence: Synthetic pistachio; inner sequence and 3' sequence

SEQ ID NO: 26932 - DNA, 53 bp, Artificial Sequence; identical to SEQ ID NO: 14773
  Description of Artificial Sequence: Synthetic pistachio; inner sequence and 3' sequence

SEQ ID NO: 26933 - DNA, 54 bp, Artificial Sequence; identical to SEQ ID NO: 2845
  Description of Artificial Sequence: Synthetic pistachio; inner sequence and 3' sequence

SEQ ID NO: 26934 - DNA, 53 bp, Artificial Sequence; identical to SEQ ID NO: 2826
  Description of Artificial Sequence: Synthetic pistachio; inner sequence and 3' sequence

SEQ ID NO: 26935 - DNA, 53 bp, Artificial Sequence; identical to SEQ ID NO: 2849
  Description of Artificial Sequence: Synthetic pistachio; inner sequence and 3' sequence

SEQ ID NO: 26936 - DNA, 53 bp, Artificial Sequence; identical to SEQ ID NO: 2629
  Description of Artificial Sequence: Synthetic pistachio; inner sequence and 3' sequence

SEQ ID NO: 26937 - DNA, 53 bp, Artificial Sequence; identical to SEQ ID NO: 2565
  Description of Artificial Sequence: Synthetic pistachio; inner sequence and 3' sequence

SEQ ID NO: 26938 - DNA, 53 bp, Artificial Sequence; identical to SEQ ID NO: 6711
  Description of Artificial Sequence: Synthetic pistachio; inner sequence and 3' sequence

SEQ ID NO: 26939 - DNA, 53 bp, Artificial Sequence; identical to SEQ ID NO: 6499
  Description of Artificial Sequence: Synthetic pistachio; inner sequence and 3' sequence

SEQ ID NO: 26940 - DNA, 53 bp, Artificial Sequence; identical to SEQ ID NO: 6881
  Description of Artificial Sequence: Synthetic pistachio; inner sequence and 3' sequence

SEQ ID NO: 26941 - DNA, 53 bp, Artificial Sequence; identical to SEQ ID NO: 2705
  Description of Artificial Sequence: Synthetic pistachio; inner sequence and 3' sequence

SEQ ID NO: 26942 - DNA, 53 bp, Artificial Sequence; identical to SEQ ID NO: 22441
  Description of Artificial Sequence: Synthetic pistachio; inner sequence and 3' sequence

SEQ ID NO: 26943 - DNA, 53 bp, Artificial Sequence
  Description of Artificial Sequence: Synthetic pistachio; inner sequence and 3' sequence
cgcaacgtcaagcgggaaggcactttggtgttgactagtacatgaccacttga

SEQ ID NO: 26944 - DNA, 53 bp, Artificial Sequence; identical to SEQ ID NO: 2781
  Description of Artificial Sequence: Synthetic pistachio; inner sequence and 3' sequence

SEQ ID NO: 26945 - DNA, 53 bp, Artificial Sequence; identical to SEQ ID NO: 2558
  Description of Artificial Sequence: Synthetic pistachio; inner sequence and 3' sequence

SEQ ID NO: 26946 - DNA, 53 bp, Artificial Sequence; identical to SEQ ID NO: 22385
  Description of Artificial Sequence: Synthetic pistachio; inner sequence and 3' sequence

SEQ ID NO: 26947 - DNA, 53 bp, Artificial Sequence; identical to SEQ ID NO: 6653
  Description of Artificial Sequence: Synthetic pistachio; inner sequence and 3' sequence

SEQ ID NO: 26948 - DNA, 53 bp, Artificial Sequence
  Description of Artificial Sequence: Synthetic pistachio; inner sequence and 3' sequence
tgcgtcagatgcatcgtgttcccctgggcattgactagtacatgaccacttga

SEQ ID NO: 26949 - DNA, 53 bp, Artificial Sequence; identical to SEQ ID NO: 2874
  Description of Artificial Sequence: Synthetic pistachio; inner sequence and 3' sequence

SEQ ID NO: 26950 - DNA, 53 bp, Artificial Sequence; identical to SEQ ID NO: 22549
  Description of Artificial Sequence: Synthetic pistachio; inner sequence and 3' sequence

SEQ ID NO: 26951 - DNA, 53 bp, Artificial Sequence; identical to SEQ ID NO: 23001
  Description of Artificial Sequence: Synthetic pistachio; inner sequence and 3' sequence

SEQ ID NO: 26952 - DNA, 53 bp, Artificial Sequence; identical to SEQ ID NO: 2635
  Description of Artificial Sequence: Synthetic pistachio; inner sequence and 3' sequence

SEQ ID NO: 26953 - DNA, 53 bp, Artificial Sequence; identical to SEQ ID NO: 6905
  Description of Artificial Sequence: Synthetic pistachio; inner sequence and 3' sequence

SEQ ID NO: 26954 - DNA, 53 bp, Artificial Sequence; identical to SEQ ID NO: 6407
  Description of Artificial Sequence: Synthetic pistachio; inner sequence and 3' sequence

SEQ ID NO: 26955 - DNA, 53 bp, Artificial Sequence; identical to SEQ ID NO: 10579
  Description of Artificial Sequence: Synthetic pistachio; inner sequence and 3' sequence

SEQ ID NO: 26956 - DNA, 53 bp, Artificial Sequence; identical to SEQ ID NO: 6987
  Description of Artificial Sequence: Synthetic pistachio; inner sequence and 3' sequence

SEQ ID NO: 26957 - DNA, 53 bp, Artificial Sequence; identical to SEQ ID NO: 18769
  Description of Artificial Sequence: Synthetic pistachio; inner sequence and 3' sequence

SEQ ID NO: 26958 - DNA, 53 bp, Artificial Sequence; identical to SEQ ID NO: 2832
  Description of Artificial Sequence: Synthetic pistachio; inner sequence and 3' sequence

SEQ ID NO: 26959 - DNA, 53 bp, Artificial Sequence; identical to SEQ ID NO: 2834
  Description of Artificial Sequence: Synthetic pistachio; inner sequence and 3' sequence

SEQ ID NO: 26960 - DNA, 49 bp, Artificial Sequence; identical to SEQ ID NO: 2516
  Description of Artificial Sequence: Synthetic pistachio; inner sequence and 3' sequence

SEQ ID NO: 26961 - DNA, 53 bp, Artificial Sequence; identical to SEQ ID NO: 22673
  Description of Artificial Sequence: Synthetic pistachio; inner sequence and 3' sequence

SEQ ID NO: 26962 - DNA, 53 bp, Artificial Sequence; identical to SEQ ID NO: 2815
  Description of Artificial Sequence: Synthetic pistachio; inner sequence and 3' sequence

SEQ ID NO: 26963 - DNA, 52 bp, Artificial Sequence; identical to SEQ ID NO: 2689
  Description of Artificial Sequence: Synthetic pistachio; inner sequence and 3' sequence

SEQ ID NO: 26964 - DNA, 53 bp, Artificial Sequence; identical to SEQ ID NO: 2973
  Description of Artificial Sequence: Synthetic pistachio; inner sequence and 3' sequence

SEQ ID NO: 26965 - DNA, 53 bp, Artificial Sequence; identical to SEQ ID NO: 22803
  Description of Artificial Sequence: Synthetic pistachio; inner sequence and 3' sequence

SEQ ID NO: 26966 - DNA, 53 bp, Artificial Sequence; identical to SEQ ID NO: 6867
  Description of Artificial Sequence: Synthetic pistachio; inner sequence and 3' sequence

SEQ ID NO: 26967 - DNA, 53 bp, Artificial Sequence
  Description of Artificial Sequence: Synthetic pistachio; inner sequence and 3' sequence
cgaccatgggcaggtacgtcccaatgcgagttgactagtacatgaccacttga

SEQ ID NO: 26968 - DNA, 53 bp, Artificial Sequence; identical to SEQ ID NO: 6494
  Description of Artificial Sequence: Synthetic pistachio; inner sequence and 3' sequence

SEQ ID NO: 26969 - DNA, 53 bp, Artificial Sequence
  Description of Artificial Sequence: Synthetic pistachio; inner sequence and 3' sequence
cgaccaagccgtacgacaagtgctgccacgttgactagtacatgaccacttga

SEQ ID NO: 26970 - DNA, 53 bp, Artificial Sequence; identical to SEQ ID NO: 10946
  Description of Artificial Sequence: Synthetic pistachio; inner sequence and 3' sequence

SEQ ID NO: 26971 - DNA, 53 bp, Artificial Sequence; identical to SEQ ID NO: 6555
  Description of Artificial Sequence: Synthetic pistachio; inner sequence and 3' sequence

SEQ ID NO: 26972 - DNA, 53 bp, Artificial Sequence; identical to SEQ ID NO: 22295
  Description of Artificial Sequence: Synthetic pistachio; inner sequence and 3' sequence

SEQ ID NO: 26973 - DNA, 53 bp, Artificial Sequence; identical to SEQ ID NO: 2957
  Description of Artificial Sequence: Synthetic pistachio; inner sequence and 3' sequence

SEQ ID NO: 26974 - DNA, 53 bp, Artificial Sequence; identical to SEQ ID NO: 2431
  Description of Artificial Sequence: Synthetic pistachio; inner sequence and 3' sequence

SEQ ID NO: 26975 - DNA, 53 bp, Artificial Sequence; identical to SEQ ID NO: 22312
  Description of Artificial Sequence: Synthetic pistachio; inner sequence and 3' sequence

SEQ ID NO: 26976 - DNA, 53 bp, Artificial Sequence
  Description of Artificial Sequence: Synthetic pistachio; inner sequence and 3' sequence
cgtgtggacgtcgcacctatcgagtcggcattgactagtacatgaccacttga

SEQ ID NO: 26977 - DNA, 53 bp, Artificial Sequence; identical to SEQ ID NO: 2809
  Description of Artificial Sequence: Synthetic pistachio; inner sequence and 3' sequence

SEQ ID NO: 26978 - DNA, 53 bp, Artificial Sequence
  Description of Artificial Sequence: Synthetic pistachio; inner sequence and 3' sequence
cgcaccgactacgcaaagtgcaagtgcgtattgactagtacatgaccacttga

SEQ ID NO: 26979 - DNA, 53 bp, Artificial Sequence; identical to SEQ ID NO: 2811
  Description of Artificial Sequence: Synthetic pistachio; inner sequence and 3' sequence

SEQ ID NO: 26980 - DNA, 53 bp, Artificial Sequence; identical to SEQ ID NO: 10792
  Description of Artificial Sequence: Synthetic pistachio; inner sequence and 3' sequence

SEQ ID NO: 26981 - DNA, 53 bp, Artificial Sequence; identical to SEQ ID NO: 2837
  Description of Artificial Sequence: Synthetic pistachio; inner sequence and 3' sequence

SEQ ID NO: 26982 - DNA, 53 bp, Artificial Sequence; identical to SEQ ID NO: 10994
  Description of Artificial Sequence: Synthetic pistachio; inner sequence and 3' sequence

SEQ ID NO: 26983 - DNA, 53 bp, Artificial Sequence
  Description of Artificial Sequence: Synthetic pistachio; inner sequence and 3' sequence
cgcaacggtacgccgtccatgcctcgcggcttgactagtacatgaccacttga

SEQ ID NO: 26984 - DNA, 53 bp, Artificial Sequence
  Description of Artificial Sequence: Synthetic pistachio; inner sequence and 3' sequence
gtcatgcacgaacactatcatgaggccatgttgactagtacatgaccacttga

SEQ ID NO: 26985 - DNA, 53 bp, Artificial Sequence; identical to SEQ ID NO: 2955
  Description of Artificial Sequence: Synthetic pistachio; inner sequence and 3' sequence

SEQ ID NO: 26986 - DNA, 53 bp, Artificial Sequence; identical to SEQ ID NO: 2880
  Description of Artificial Sequence: Synthetic pistachio; inner sequence and 3' sequence

SEQ ID NO: 26987 - DNA, 53 bp, Artificial Sequence; identical to SEQ ID NO: 6535
  Description of Artificial Sequence: Synthetic pistachio; inner sequence and 3' sequence

SEQ ID NO: 26988 - DNA, 53 bp, Artificial Sequence; identical to SEQ ID NO: 22617
  Description of Artificial Sequence: Synthetic pistachio; inner sequence and 3' sequence

SEQ ID NO: 26989 - DNA, 53 bp, Artificial Sequence; identical to SEQ ID NO: 2925
  Description of Artificial Sequence: Synthetic pistachio; inner sequence and 3' sequence

SEQ ID NO: 26990 - DNA, 53 bp, Artificial Sequence; identical to SEQ ID NO: 2538
  Description of Artificial Sequence: Synthetic pistachio; inner sequence and 3' sequence

SEQ ID NO: 26991 - DNA, 53 bp, Artificial Sequence
  Description of Artificial Sequence: Synthetic pistachio; inner sequence and 3' sequence
cgaccagcagcggtaggctgacgaggcatgttgactagtacatgaccacttga

SEQ ID NO: 26992 - DNA, 53 bp, Artificial Sequence; identical to SEQ ID NO: 6743
  Description of Artificial Sequence: Synthetic pistachio; inner sequence and 3' sequence

SEQ ID NO: 26993 - DNA, 50 bp, Artificial Sequence
  Description of Artificial Sequence: Synthetic pistachio; inner sequence and 3' sequence
gtgcgaccgaccctatcaagtacgtcattgactagtacatgaccacttga

SEQ ID NO: 26994 - DNA, 53 bp, Artificial Sequence; identical to SEQ ID NO: 6971
  Description of Artificial Sequence: Synthetic pistachio; inner sequence and 3' sequence

SEQ ID NO: 26995 - DNA, 53 bp, Artificial Sequence; identical to SEQ ID NO: 2782
  Description of Artificial Sequence: Synthetic pistachio; inner sequence and 3' sequence

SEQ ID NO: 26996 - DNA, 53 bp, Artificial Sequence; identical to SEQ ID NO: 2816
  Description of Artificial Sequence: Synthetic pistachio; inner sequence and 3' sequence

SEQ ID NO: 26997 - DNA, 53 bp, Artificial Sequence; identical to SEQ ID NO: 2711
  Description of Artificial Sequence: Synthetic pistachio; inner sequence and 3' sequence

SEQ ID NO: 26998 - DNA, 53 bp, Artificial Sequence; identical to SEQ ID NO: 2633
  Description of Artificial Sequence: Synthetic pistachio; inner sequence and 3' sequence

SEQ ID NO: 26999 - DNA, 53 bp, Artificial Sequence; identical to SEQ ID NO: 10782
  Description of Artificial Sequence: Synthetic pistachio; inner sequence and 3' sequence

SEQ ID NO: 27000 - DNA, 53 bp, Artificial Sequence; identical to SEQ ID NO: 14914
  Description of Artificial Sequence: Synthetic pistachio; inner sequence and 3' sequence

SEQ ID NO: 27001 - DNA, 53 bp, Artificial Sequence; identical to SEQ ID NO: 6833
  Description of Artificial Sequence: Synthetic pistachio; inner sequence and 3' sequence

SEQ ID NO: 27002 - DNA, 53 bp, Artificial Sequence; identical to SEQ ID NO: 6960
  Description of Artificial Sequence: Synthetic pistachio; inner sequence and 3' sequence

SEQ ID NO: 27003 - DNA, 76 bp, Artificial Sequence; identical to SEQ ID NO: 3003
  Description of Artificial Sequence: Synthetic pistachio; 5' sequence + inner sequence + 3' sequence

SEQ ID NO: 27004 - DNA, 76 bp, Artificial Sequence; identical to SEQ ID NO: 3004
  Description of Artificial Sequence: Synthetic pistachio; 5' sequence + inner sequence + 3' sequence

SEQ ID NO: 27005 - DNA, 76 bp, Artificial Sequence; identical to SEQ ID NO: 3007
  Description of Artificial Sequence: Synthetic pistachio; 5' sequence + inner sequence + 3' sequence

SEQ ID NO: 27006 - DNA, 76 bp, Artificial Sequence; identical to SEQ ID NO: 3008
  Description of Artificial Sequence: Synthetic pistachio; 5' sequence + inner sequence + 3' sequence

SEQ ID NO: 27007 - DNA, 76 bp, Artificial Sequence; identical to SEQ ID NO: 3005
  Description of Artificial Sequence: Synthetic pistachio; 5' sequence + inner sequence + 3' sequence

SEQ ID NO: 27008 - DNA, 76 bp, Artificial Sequence; identical to SEQ ID NO: 3009
  Description of Artificial Sequence: Synthetic pistachio; 5' sequence + inner sequence + 3' sequence

SEQ ID NO: 27009 - DNA, 76 bp, Artificial Sequence; identical to SEQ ID NO: 3014
  Description of Artificial Sequence: Synthetic pistachio; 5' sequence + inner sequence + 3' sequence

SEQ ID NO: 27010 - DNA, 76 bp, Artificial Sequence; identical to SEQ ID NO: 3013
  Description of Artificial Sequence: Synthetic pistachio; 5' sequence + inner sequence + 3' sequence

SEQ ID NO: 27011 - DNA, 76 bp, Artificial Sequence; identical to SEQ ID NO: 3012
  Description of Artificial Sequence: Synthetic pistachio; 5' sequence + inner sequence + 3' sequence

SEQ ID NO: 27012 - DNA, 76 bp, Artificial Sequence; identical to SEQ ID NO: 3006
  Description of Artificial Sequence: Synthetic pistachio; 5' sequence + inner sequence + 3' sequence

SEQ ID NO: 27013 - DNA, 76 bp, Artificial Sequence; identical to SEQ ID NO: 3011
  Description of Artificial Sequence: Synthetic pistachio; 5' sequence + inner sequence + 3' sequence

SEQ ID NO: 27014 - DNA, 76 bp, Artificial Sequence; identical to SEQ ID NO: 3023
  Description of Artificial Sequence: Synthetic pistachio; 5' sequence + inner sequence + 3' sequence

SEQ ID NO: 27015 - DNA, 76 bp, Artificial Sequence; identical to SEQ ID NO: 3017
  Description of Artificial Sequence: Synthetic pistachio; 5' sequence + inner sequence + 3' sequence

SEQ ID NO: 27016 - DNA, 76 bp, Artificial Sequence; identical to SEQ ID NO: 3010
  Description of Artificial Sequence: Synthetic pistachio; 5' sequence + inner sequence + 3' sequence

SEQ ID NO: 27017 - DNA, 76 bp, Artificial Sequence; identical to SEQ ID NO: 3018
  Description of Artificial Sequence: Synthetic pistachio; 5' sequence + inner sequence + 3' sequence

SEQ ID NO: 27018 - DNA, 76 bp, Artificial Sequence; identical to SEQ ID NO: 3037
  Description of Artificial Sequence: Synthetic pistachio; 5' sequence + inner sequence + 3' sequence

SEQ ID NO: 27019 - DNA, 76 bp, Artificial Sequence; identical to SEQ ID NO: 3015
  Description of Artificial Sequence: Synthetic pistachio; 5' sequence + inner sequence + 3' sequence

SEQ ID NO: 27020 - DNA, 76 bp, Artificial Sequence; identical to SEQ ID NO: 3046
  Description of Artificial Sequence: Synthetic pistachio; 5' sequence + inner sequence + 3' sequence

SEQ ID NO: 27021 - DNA, 76 bp, Artificial Sequence; identical to SEQ ID NO: 3028
  Description of Artificial Sequence: Synthetic pistachio; 5' sequence + inner sequence + 3' sequence

SEQ ID NO: 27022 - DNA, 76 bp, Artificial Sequence; identical to SEQ ID NO: 3049
  Description of Artificial Sequence: Synthetic pistachio; 5' sequence + inner sequence + 3' sequence

SEQ ID NO: 27023 - DNA, 76 bp, Artificial Sequence; identical to SEQ ID NO: 3016
  Description of Artificial Sequence: Synthetic pistachio; 5' sequence + inner sequence + 3' sequence

SEQ ID NO: 27024 - DNA, 76 bp, Artificial Sequence; identical to SEQ ID NO: 3022
  Description of Artificial Sequence: Synthetic pistachio; 5' sequence + inner sequence + 3' sequence

SEQ ID NO: 27025 - DNA, 76 bp, Artificial Sequence; identical to SEQ ID NO: 3055
  Description of Artificial Sequence: Synthetic pistachio; 5' sequence + inner sequence + 3' sequence

SEQ ID NO: 27026 - DNA, 76 bp, Artificial Sequence; identical to SEQ ID NO: 3041
  Description of Artificial Sequence: Synthetic pistachio; 5' sequence + inner sequence + 3' sequence

SEQ ID NO: 27027 - DNA, 76 bp, Artificial Sequence; identical to SEQ ID NO: 3045
  Description of Artificial Sequence: Synthetic pistachio; 5' sequence + inner sequence + 3' sequence

SEQ ID NO: 27028 - DNA, 76 bp, Artificial Sequence; identical to SEQ ID NO: 3033
  Description of Artificial Sequence: Synthetic pistachio; 5' sequence + inner sequence + 3' sequence

SEQ ID NO: 27029 - DNA, 76 bp, Artificial Sequence; identical to SEQ ID NO: 3034
  Description of Artificial Sequence: Synthetic pistachio; 5' sequence + inner sequence + 3' sequence

SEQ ID NO: 27030 - DNA, 76 bp, Artificial Sequence; identical to SEQ ID NO: 3020
  Description of Artificial Sequence: Synthetic pistachio; 5' sequence + inner sequence + 3' sequence

SEQ ID NO: 27031 - DNA, 76 bp, Artificial Sequence; identical to SEQ ID NO: 3032
  Description of Artificial Sequence: Synthetic pistachio; 5' sequence + inner sequence + 3' sequence

SEQ ID NO: 27032 - DNA, 76 bp, Artificial Sequence; identical to SEQ ID NO: 3054
  Description of Artificial Sequence: Synthetic pistachio; 5' sequence + inner sequence + 3' sequence

SEQ ID NO: 27033 - DNA, 76 bp, Artificial Sequence; identical to SEQ ID NO: 3030
  Description of Artificial Sequence: Synthetic pistachio; 5' sequence + inner sequence + 3' sequence

SEQ ID NO: 27034 - DNA, 75 bp, Artificial Sequence; identical to SEQ ID NO: 3070
  Description of Artificial Sequence: Synthetic pistachio; 5' sequence + inner sequence + 3' sequence

SEQ ID NO: 27035 - DNA, 76 bp, Artificial Sequence; identical to SEQ ID NO: 3040
  Description of Artificial Sequence: Synthetic pistachio; 5' sequence + inner sequence + 3' sequence

SEQ ID NO: 27036 - DNA, 76 bp, Artificial Sequence; identical to SEQ ID NO: 3039
  Description of Artificial Sequence: Synthetic pistachio; 5' sequence + inner sequence + 3' sequence

SEQ ID NO: 27037 - DNA, 76 bp, Artificial Sequence; identical to SEQ ID NO: 3038
  Description of Artificial Sequence: Synthetic pistachio; 5' sequence + inner sequence + 3' sequence

SEQ ID NO: 27038 - DNA, 76 bp, Artificial Sequence; identical to SEQ ID NO: 3035
  Description of Artificial Sequence: Synthetic pistachio; 5' sequence + inner sequence + 3' sequence

SEQ ID NO: 27039 - DNA, 76 bp, Artificial Sequence; identical to SEQ ID NO: 3021
  Description of Artificial Sequence: Synthetic pistachio; 5' sequence + inner sequence + 3' sequence

SEQ ID NO: 27040 - DNA, 76 bp, Artificial Sequence; identical to SEQ ID NO: 3048
  Description of Artificial Sequence: Synthetic pistachio; 5' sequence + inner sequence + 3' sequence

SEQ ID NO: 27041 - DNA, 76 bp, Artificial Sequence; identical to SEQ ID NO: 3031
  Description of Artificial Sequence: Synthetic pistachio; 5' sequence + inner sequence + 3' sequence

SEQ ID NO: 27042 - DNA, 76 bp, Artificial Sequence; identical to SEQ ID NO: 3024
  Description of Artificial Sequence: Synthetic pistachio; 5' sequence + inner sequence + 3' sequence

SEQ ID NO: 27043 - DNA, 76 bp, Artificial Sequence; identical to SEQ ID NO: 3029
  Description of Artificial Sequence: Synthetic pistachio; 5' sequence + inner sequence + 3' sequence

SEQ ID NO: 27044 - DNA, 76 bp, Artificial Sequence; identical to SEQ ID NO: 3025
  Description of Artificial Sequence: Synthetic pistachio; 5' sequence + inner sequence + 3' sequence

SEQ ID NO: 27045 - DNA, 76 bp, Artificial Sequence; identical to SEQ ID NO: 3051
  Description of Artificial Sequence: Synthetic pistachio; 5' sequence + inner sequence + 3' sequence

SEQ ID NO: 27046 - DNA, 76 bp, Artificial Sequence; identical to SEQ ID NO: 3019
  Description of Artificial Sequence: Synthetic pistachio; 5' sequence + inner sequence + 3' sequence

SEQ ID NO: 27047 - DNA, 76 bp, Artificial Sequence; identical to SEQ ID NO: 3053
  Description of Artificial Sequence: Synthetic pistachio; 5' sequence + inner sequence + 3' sequence

SEQ ID NO: 27048 - DNA, 76 bp, Artificial Sequence; identical to SEQ ID NO: 3059
  Description of Artificial Sequence: Synthetic pistachio; 5' sequence + inner sequence + 3' sequence

SEQ ID NO: 27049 - DNA, 76 bp, Artificial Sequence; identical to SEQ ID NO: 3050
  Description of Artificial Sequence: Synthetic pistachio; 5' sequence + inner sequence + 3' sequence

SEQ ID NO: 27050 - DNA, 76 bp, Artificial Sequence; identical to SEQ ID NO: 3082
  Description of Artificial Sequence: Synthetic pistachio; 5' sequence + inner sequence + 3' sequence

SEQ ID NO: 27051 - DNA, 76 bp, Artificial Sequence; identical to SEQ ID NO: 3077
  Description of Artificial Sequence: Synthetic pistachio; 5' sequence + inner sequence + 3' sequence

SEQ ID NO: 27052 - DNA, 76 bp, Artificial Sequence; identical to SEQ ID NO: 3067
  Description of Artificial Sequence: Synthetic pistachio; 5' sequence + inner sequence + 3' sequence

SEQ ID NO: 27053 - DNA, 76 bp, Artificial Sequence; identical to SEQ ID NO: 3063
  Description of Artificial Sequence: Synthetic pistachio; 5' sequence + inner sequence + 3' sequence

SEQ ID NO: 27054 - DNA, 76 bp, Artificial Sequence; identical to SEQ ID NO: 3074
  Description of Artificial Sequence: Synthetic pistachio; 5' sequence + inner sequence + 3' sequence

SEQ ID NO: 27055 - DNA, 76 bp, Artificial Sequence; identical to SEQ ID NO: 3076
  Description of Artificial Sequence: Synthetic pistachio; 5' sequence + inner sequence + 3' sequence

SEQ ID NO: 27056 - DNA, 76 bp, Artificial Sequence; identical to SEQ ID NO: 3057
  Description of Artificial Sequence: Synthetic pistachio; 5' sequence + inner sequence + 3' sequence

SEQ ID NO: 27057 - DNA, 76 bp, Artificial Sequence; identical to SEQ ID NO: 3073
  Description of Artificial Sequence: Synthetic pistachio; 5' sequence + inner sequence + 3' sequence

SEQ ID NO: 27058 - DNA, 76 bp, Artificial Sequence; identical to SEQ ID NO: 3081
  Description of Artificial Sequence: Synthetic pistachio; 5' sequence + inner sequence + 3' sequence

SEQ ID NO: 27059 - DNA, 76 bp, Artificial Sequence; identical to SEQ ID NO: 3044
  Description of Artificial Sequence: Synthetic pistachio; 5' sequence + inner sequence + 3' sequence

SEQ ID NO: 27060 - DNA, 76 bp, Artificial Sequence; identical to SEQ ID NO: 3042
  Description of Artificial Sequence: Synthetic pistachio; 5' sequence + inner sequence + 3' sequence

SEQ ID NO: 27061 - DNA, 76 bp, Artificial Sequence; identical to SEQ ID NO: 3117
  Description of Artificial Sequence: Synthetic pistachio; 5' sequence + inner sequence + 3' sequence

SEQ ID NO: 27062 - DNA, 76 bp, Artificial Sequence; identical to SEQ ID NO: 3078
  Description of Artificial Sequence: Synthetic pistachio; 5' sequence + inner sequence + 3' sequence

SEQ ID NO: 27063 - DNA, 76 bp, Artificial Sequence; identical to SEQ ID NO: 3131
  Description of Artificial Sequence: Synthetic pistachio; 5' sequence + inner sequence + 3' sequence

SEQ ID NO: 27064 - DNA, 76 bp, Artificial Sequence; identical to SEQ ID NO: 3026
  Description of Artificial Sequence: Synthetic pistachio; 5' sequence + inner sequence + 3' sequence

SEQ ID NO: 27065 - DNA, 76 bp, Artificial Sequence; identical to SEQ ID NO: 3043
  Description of Artificial Sequence: Synthetic pistachio; 5' sequence + inner sequence + 3' sequence

SEQ ID NO: 27066 - DNA, 76 bp, Artificial Sequence; identical to SEQ ID NO: 3066
  Description of Artificial Sequence: Synthetic pistachio; 5' sequence + inner sequence + 3' sequence

SEQ ID NO: 27067 - DNA, 76 bp, Artificial Sequence; identical to SEQ ID NO: 3058
  Description of Artificial Sequence: Synthetic pistachio; 5' sequence + inner sequence + 3' sequence

SEQ ID NO: 27068 - DNA, 76 bp, Artificial Sequence; identical to SEQ ID NO: 3080
  Description of Artificial Sequence: Synthetic pistachio; 5' sequence + inner sequence + 3' sequence

SEQ ID NO: 27069 - DNA, 76 bp, Artificial Sequence; identical to SEQ ID NO: 3065
  Description of Artificial Sequence: Synthetic pistachio; 5' sequence + inner sequence + 3' sequence

SEQ ID NO: 27070 - DNA, 76 bp, Artificial Sequence; identical to SEQ ID NO: 3100
  Description of Artificial Sequence: Synthetic pistachio; 5' sequence + inner sequence + 3' sequence

SEQ ID NO: 27071 - DNA, 76 bp, Artificial Sequence; identical to SEQ ID NO: 3036
  Description of Artificial Sequence: Synthetic pistachio; 5' sequence + inner sequence + 3' sequence

SEQ ID NO: 27072 - DNA, 76 bp, Artificial Sequence; identical to SEQ ID NO: 3064
  Description of Artificial Sequence: Synthetic pistachio; 5' sequence + inner sequence + 3' sequence

SEQ ID NO: 27073 - DNA, 76 bp, Artificial Sequence; identical to SEQ ID NO: 3092
  Description of Artificial Sequence: Synthetic pistachio; 5' sequence + inner sequence + 3' sequence

SEQ ID NO: 27074 - DNA, 76 bp, Artificial Sequence; identical to SEQ ID NO: 3061
  Description of Artificial Sequence: Synthetic pistachio; 5' sequence + inner sequence + 3' sequence

SEQ ID NO: 27075 - DNA, 76 bp, Artificial Sequence; identical to SEQ ID NO: 3113
  Description of Artificial Sequence: Synthetic pistachio; 5' sequence + inner sequence + 3' sequence

SEQ ID NO: 27076 - DNA, 76 bp, Artificial Sequence; identical to SEQ ID NO: 3111
  Description of Artificial Sequence: Synthetic pistachio; 5' sequence + inner sequence + 3' sequence

SEQ ID NO: 27077 - DNA, 76 bp, Artificial Sequence; identical to SEQ ID NO: 3091
  Description of Artificial Sequence: Synthetic pistachio; 5' sequence + inner sequence + 3' sequence

SEQ ID NO: 27078 - DNA, 76 bp, Artificial Sequence; identical to SEQ ID NO: 3093
  Description of Artificial Sequence: Synthetic pistachio; 5' sequence + inner sequence + 3' sequence

SEQ ID NO: 27079 - DNA, 76 bp, Artificial Sequence; identical to SEQ ID NO: 3136
  Description of Artificial Sequence: Synthetic pistachio; 5' sequence + inner sequence + 3' sequence

SEQ ID NO: 27080 - DNA, 76 bp, Artificial Sequence; identical to SEQ ID NO: 3186
  Description of Artificial Sequence: Synthetic pistachio; 5' sequence + inner sequence + 3' sequence

SEQ ID NO: 27081 - DNA, 76 bp, Artificial Sequence; identical to SEQ ID NO: 3027
  Description of Artificial Sequence: Synthetic pistachio; 5' sequence + inner sequence + 3' sequence

SEQ ID NO: 27082 - DNA, 76 bp, Artificial Sequence; identical to SEQ ID NO: 3161
  Description of Artificial Sequence: Synthetic pistachio; 5' sequence + inner sequence + 3' sequence

SEQ ID NO: 27083 - DNA, 76 bp, Artificial Sequence; identical to SEQ ID NO: 3154
  Description of Artificial Sequence: Synthetic pistachio; 5' sequence + inner sequence + 3' sequence

SEQ ID NO: 27084 - DNA, 76 bp, Artificial Sequence; identical to SEQ ID NO: 3168
  Description of Artificial Sequence: Synthetic pistachio; 5' sequence + inner sequence + 3' sequence

SEQ ID NO: 27085 - DNA, 76 bp, Artificial Sequence; identical to SEQ ID NO: 3068
  Description of Artificial Sequence: Synthetic pistachio; 5' sequence + inner sequence + 3' sequence

SEQ ID NO: 27086 - DNA, 76 bp, Artificial Sequence; identical to SEQ ID NO: 3088
  Description of Artificial Sequence: Synthetic pistachio; 5' sequence + inner sequence + 3' sequence

SEQ ID NO: 27087 - DNA, 76 bp, Artificial Sequence; identical to SEQ ID NO: 3089
  Description of Artificial Sequence: Synthetic pistachio; 5' sequence + inner sequence + 3' sequence

SEQ ID NO: 27088 - DNA, 76 bp, Artificial Sequence; identical to SEQ ID NO: 3047
  Description of Artificial Sequence: Synthetic pistachio; 5' sequence + inner sequence + 3' sequence

SEQ ID NO: 27089 - DNA, 74 bp, Artificial Sequence; identical to SEQ ID NO: 3148
  Description of Artificial Sequence: Synthetic pistachio; 5' sequence + inner sequence + 3' sequence

SEQ ID NO: 27090 - DNA, 76 bp, Artificial Sequence; identical to SEQ ID NO: 3185
  Description of Artificial Sequence: Synthetic pistachio; 5' sequence + inner sequence + 3' sequence

SEQ ID NO: 27091 - DNA, 76 bp, Artificial Sequence; identical to SEQ ID NO: 3129
  Description of Artificial Sequence: Synthetic pistachio; 5' sequence + inner sequence + 3' sequence

SEQ ID NO: 27092 - DNA, 76 bp, Artificial Sequence; identical to SEQ ID NO: 3183
  Description of Artificial Sequence: Synthetic pistachio; 5' sequence + inner sequence + 3' sequence

SEQ ID NO: 27093 - DNA, 76 bp, Artificial Sequence; identical to SEQ ID NO: 3083
  Description of Artificial Sequence: Synthetic pistachio; 5' sequence + inner sequence + 3' sequence

SEQ ID NO: 27094 - DNA, 76 bp, Artificial Sequence; identical to SEQ ID NO: 3052
  Description of Artificial Sequence: Synthetic pistachio; 5' sequence + inner sequence + 3' sequence

SEQ ID NO: 27095 - DNA, 76 bp, Artificial Sequence; identical to SEQ ID NO: 3126
  Description of Artificial Sequence: Synthetic pistachio; 5' sequence + inner sequence + 3' sequence

SEQ ID NO: 27096 - DNA, 76 bp, Artificial Sequence; identical to SEQ ID NO: 3094
  Description of Artificial Sequence: Synthetic pistachio; 5' sequence + inner sequence + 3' sequence

SEQ ID NO: 27097 - DNA, 76 bp, Artificial Sequence; identical to SEQ ID NO: 3071
  Description of Artificial Sequence: Synthetic pistachio; 5' sequence + inner sequence + 3' sequence

SEQ ID NO: 27098 - DNA, 76 bp, Artificial Sequence; identical to SEQ ID NO: 3257
  Description of Artificial Sequence: Synthetic pistachio; 5' sequence + inner sequence + 3' sequence

SEQ ID NO: 27099 - DNA, 76 bp, Artificial Sequence; identical to SEQ ID NO: 3142
  Description of Artificial Sequence: Synthetic pistachio; 5' sequence + inner sequence + 3' sequence

SEQ ID NO: 27100 - DNA, 76 bp, Artificial Sequence; identical to SEQ ID NO: 3095
  Description of Artificial Sequence: Synthetic pistachio; 5' sequence + inner sequence + 3' sequence

SEQ ID NO: 27101 - DNA, 76 bp, Artificial Sequence; identical to SEQ ID NO: 3103
  Description of Artificial Sequence: Synthetic pistachio; 5' sequence + inner sequence + 3' sequence

SEQ ID NO: 27102 - DNA, 76 bp, Artificial Sequence; identical to SEQ ID NO: 3115
  Description of Artificial Sequence: Synthetic pistachio; 5' sequence + inner sequence + 3' sequence

SEQ ID NO: 27103 - DNA, 76 bp, Artificial Sequence; identical to SEQ ID NO: 3138
  Description of Artificial Sequence: Synthetic pistachio; 5' sequence + inner sequence + 3' sequence

SEQ ID NO: 27104 - DNA, 76 bp, Artificial Sequence; identical to SEQ ID NO: 3262
  Description of Artificial Sequence: Synthetic pistachio; 5' sequence + inner sequence + 3' sequence

SEQ ID NO: 27105 - DNA, 76 bp, Artificial Sequence; identical to SEQ ID NO: 3099
  Description of Artificial Sequence: Synthetic pistachio; 5' sequence + inner sequence + 3' sequence

SEQ ID NO: 27106 - DNA, 76 bp, Artificial Sequence; identical to SEQ ID NO: 3207
  Description of Artificial Sequence: Synthetic pistachio; 5' sequence + inner sequence + 3' sequence

SEQ ID NO: 27107 - DNA, 76 bp, Artificial Sequence; identical to SEQ ID NO: 3287
  Description of Artificial Sequence: Synthetic pistachio; 5' sequence + inner sequence + 3' sequence

SEQ ID NO: 27108 - DNA, 76 bp, Artificial Sequence; identical to SEQ ID NO: 3056
  Description of Artificial Sequence: Synthetic pistachio; 5' sequence + inner sequence + 3' sequence

SEQ ID NO: 27109 - DNA, 76 bp, Artificial Sequence; identical to SEQ ID NO: 3247
  Description of Artificial Sequence: Synthetic pistachio; 5' sequence + inner sequence + 3' sequence

SEQ ID NO: 27110 - DNA, 76 bp, Artificial Sequence; identical to SEQ ID NO: 3133
  Description of Artificial Sequence: Synthetic pistachio; 5' sequence + inner sequence + 3' sequence

SEQ ID NO: 27111 - DNA, 76 bp, Artificial Sequence; identical to SEQ ID NO: 3120
  Description of Artificial Sequence: Synthetic pistachio; 5' sequence + inner sequence + 3' sequence

SEQ ID NO: 27112 - DNA, 76 bp, Artificial Sequence; identical to SEQ ID NO: 3096
  Description of Artificial Sequence: Synthetic pistachio; 5' sequence + inner sequence + 3' sequence

SEQ ID NO: 27113 - DNA, 76 bp, Artificial Sequence; identical to SEQ ID NO: 3062
  Description of Artificial Sequence: Synthetic pistachio; 5' sequence + inner sequence + 3' sequence

SEQ ID NO: 27114 - DNA, 76 bp, Artificial Sequence; identical to SEQ ID NO: 3145
  Description of Artificial Sequence: Synthetic pistachio; 5' sequence + inner sequence + 3' sequence

SEQ ID NO: 27115 - DNA, 76 bp, Artificial Sequence; identical to SEQ ID NO: 3060
  Description of Artificial Sequence: Synthetic pistachio; 5' sequence + inner sequence + 3' sequence

SEQ ID NO: 27116 - DNA, 76 bp, Artificial Sequence; identical to SEQ ID NO: 3075
  Description of Artificial Sequence: Synthetic pistachio; 5' sequence + inner sequence + 3' sequence

SEQ ID NO: 27117 - DNA, 76 bp, Artificial Sequence; identical to SEQ ID NO: 3105
  Description of Artificial Sequence: Synthetic pistachio; 5' sequence + inner sequence + 3' sequence

SEQ ID NO: 27118 - DNA, 76 bp, Artificial Sequence; identical to SEQ ID NO: 3122
  Description of Artificial Sequence: Synthetic pistachio; 5' sequence + inner sequence + 3' sequence

SEQ ID NO: 27119 - DNA, 76 bp, Artificial Sequence; identical to SEQ ID NO: 3354
  Description of Artificial Sequence: Synthetic pistachio; 5' sequence + inner sequence + 3' sequence

SEQ ID NO: 27120 - DNA, 76 bp, Artificial Sequence; identical to SEQ ID NO: 3112
  Description of Artificial Sequence: Synthetic pistachio; 5' sequence + inner sequence + 3' sequence

SEQ ID NO: 27121 - DNA, 76 bp, Artificial Sequence; identical to SEQ ID NO: 3116
  Description of Artificial Sequence: Synthetic pistachio; 5' sequence + inner sequence + 3' sequence

SEQ ID NO: 27122 - DNA, 76 bp, Artificial Sequence; identical to SEQ ID NO: 3290
  Description of Artificial Sequence: Synthetic pistachio; 5' sequence + inner sequence + 3' sequence

SEQ ID NO: 27123 - DNA, 76 bp, Artificial Sequence; identical to SEQ ID NO: 3106
  Description of Artificial Sequence: Synthetic pistachio; 5' sequence + inner sequence + 3' sequence

SEQ ID NO: 27124 - DNA, 76 bp, Artificial Sequence; identical to SEQ ID NO: 3196
  Description of Artificial Sequence: Synthetic pistachio; 5' sequence + inner sequence + 3' sequence

SEQ ID NO: 27125 - DNA, 76 bp, Artificial Sequence; identical to SEQ ID NO: 3098
  Description of Artificial Sequence: Synthetic pistachio; 5' sequence + inner sequence + 3' sequence

SEQ ID NO: 27126 - DNA, 76 bp, Artificial Sequence; identical to SEQ ID NO: 3157
  Description of Artificial Sequence: Synthetic pistachio; 5' sequence + inner sequence + 3' sequence

SEQ ID NO: 27127 - DNA, 76 bp, Artificial Sequence; identical to SEQ ID NO: 3079
  Description of Artificial Sequence: Synthetic pistachio; 5' sequence + inner sequence + 3' sequence

SEQ ID NO: 27128 - DNA, 76 bp, Artificial Sequence; identical to SEQ ID NO: 3171
  Description of Artificial Sequence: Synthetic pistachio; 5' sequence + inner sequence + 3' sequence

SEQ ID NO: 27129 - DNA, 76 bp, Artificial Sequence; identical to SEQ ID NO: 3097
  Description of Artificial Sequence: Synthetic pistachio; 5' sequence + inner sequence + 3' sequence

SEQ ID NO: 27130 - DNA, 76 bp, Artificial Sequence; identical to SEQ ID NO: 3069
  Description of Artificial Sequence: Synthetic pistachio; 5' sequence + inner sequence + 3' sequence

SEQ ID NO: 27131 - DNA, 76 bp, Artificial Sequence; identical to SEQ ID NO: 3163
  Description of Artificial Sequence: Synthetic pistachio; 5' sequence + inner sequence + 3' sequence

SEQ ID NO: 27132 - DNA, 76 bp, Artificial Sequence; identical to SEQ ID NO: 3125
  Description of Artificial Sequence: Synthetic pistachio; 5' sequence + inner sequence + 3' sequence

SEQ ID NO: 27133 - DNA, 76 bp, Artificial Sequence; identical to SEQ ID NO: 3084
  Description of Artificial Sequence: Synthetic pistachio; 5' sequence + inner sequence + 3' sequence

SEQ ID NO: 27134 - DNA, 76 bp, Artificial Sequence; identical to SEQ ID NO: 3201
  Description of Artificial Sequence: Synthetic pistachio; 5' sequence + inner sequence + 3' sequence

SEQ ID NO: 27135 - DNA, 76 bp, Artificial Sequence; identical to SEQ ID NO: 3118
  Description of Artificial Sequence: Synthetic pistachio; 5' sequence + inner sequence + 3' sequence

SEQ ID NO: 27136 - DNA, 76 bp, Artificial Sequence; identical to SEQ ID NO: 3107
  Description of Artificial Sequence: Synthetic pistachio; 5' sequence + inner sequence + 3' sequence

SEQ ID NO: 27137 - DNA, 76 bp, Artificial Sequence; identical to SEQ ID NO: 3164
  Description of Artificial Sequence: Synthetic pistachio; 5' sequence + inner sequence + 3' sequence

SEQ ID NO: 27138 - DNA, 76 bp, Artificial Sequence; identical to SEQ ID NO: 3311
  Description of Artificial Sequence: Synthetic pistachio; 5' sequence + inner sequence + 3' sequence

SEQ ID NO: 27139 - DNA, 76 bp, Artificial Sequence; identical to SEQ ID NO: 3282
  Description of Artificial Sequence: Synthetic pistachio; 5' sequence + inner sequence + 3' sequence

SEQ ID NO: 27140 - DNA, 77 bp, Artificial Sequence; identical to SEQ ID NO: 3221
  Description of Artificial Sequence: Synthetic pistachio; 5' sequence + inner sequence + 3' sequence

SEQ ID NO: 27141 - DNA, 76 bp, Artificial Sequence; identical to SEQ ID NO: 3229
  Description of Artificial Sequence: Synthetic pistachio; 5' sequence + inner sequence + 3' sequence

SEQ ID NO: 27142 - DNA, 76 bp, Artificial Sequence; identical to SEQ ID NO: 3147
  Description of Artificial Sequence: Synthetic pistachio; 5' sequence + inner sequence + 3' sequence

SEQ ID NO: 27143 - DNA, 76 bp, Artificial Sequence; identical to SEQ ID NO: 3205
  Description of Artificial Sequence: Synthetic pistachio; 5' sequence + inner sequence + 3' sequence

SEQ ID NO: 27144 - DNA, 76 bp, Artificial Sequence; identical to SEQ ID NO: 3208
  Description of Artificial Sequence: Synthetic pistachio; 5' sequence + inner sequence + 3' sequence

SEQ ID NO: 27145 - DNA, 76 bp, Artificial Sequence; identical to SEQ ID NO: 3285
  Description of Artificial Sequence: Synthetic pistachio; 5' sequence + inner sequence + 3' sequence

SEQ ID NO: 27146 - DNA, 76 bp, Artificial Sequence; identical to SEQ ID NO: 3230
  Description of Artificial Sequence: Synthetic pistachio; 5' sequence + inner sequence + 3' sequence

SEQ ID NO: 27147 - DNA, 76 bp, Artificial Sequence; identical to SEQ ID NO: 3188
  Description of Artificial Sequence: Synthetic pistachio; 5' sequence + inner sequence + 3' sequence

SEQ ID NO: 27148 - DNA, 76 bp, Artificial Sequence; identical to SEQ ID NO: 3158
  Description of Artificial Sequence: Synthetic pistachio; 5' sequence + inner sequence + 3' sequence

SEQ ID NO: 27149 - DNA, 76 bp, Artificial Sequence; identical to SEQ ID NO: 3288
  Description of Artificial Sequence: Synthetic pistachio; 5' sequence + inner sequence + 3' sequence

SEQ ID NO: 27150 - DNA, 76 bp, Artificial Sequence; identical to SEQ ID NO: 3254
  Description of Artificial Sequence: Synthetic pistachio; 5' sequence + inner sequence + 3' sequence

SEQ ID NO: 27151 - DNA, 76 bp, Artificial Sequence; identical to SEQ ID NO: 3211
  Description of Artificial Sequence: Synthetic pistachio; 5' sequence + inner sequence + 3' sequence

SEQ ID NO: 27152 - DNA, 76 bp, Artificial Sequence; identical to SEQ ID NO: 3159
  Description of Artificial Sequence: Synthetic pistachio; 5' sequence + inner sequence + 3' sequence

SEQ ID NO: 27153 - DNA, 76 bp, Artificial Sequence; identical to SEQ ID NO: 3243
  Description of Artificial Sequence: Synthetic pistachio; 5' sequence + inner sequence + 3' sequence

SEQ ID NO: 27154 - DNA, 76 bp, Artificial Sequence; identical to SEQ ID NO: 3109
  Description of Artificial Sequence: Synthetic pistachio; 5' sequence + inner sequence + 3' sequence

SEQ ID NO: 27155 - DNA, 76 bp, Artificial Sequence; identical to SEQ ID NO: 3132
  Description of Artificial Sequence: Synthetic pistachio; 5' sequence + inner sequence + 3' sequence

SEQ ID NO: 27156 - DNA, 76 bp, Artificial Sequence; identical to SEQ ID NO: 3144
  Description of Artificial Sequence: Synthetic pistachio; 5' sequence + inner sequence + 3' sequence

SEQ ID NO: 27157 - DNA, 76 bp, Artificial Sequence; identical to SEQ ID NO: 3165
  Description of Artificial Sequence: Synthetic pistachio; 5' sequence + inner sequence + 3' sequence

SEQ ID NO: 27158 - DNA, 76 bp, Artificial Sequence; identical to SEQ ID NO: 3121
  Description of Artificial Sequence: Synthetic pistachio; 5' sequence + inner sequence + 3' sequence

SEQ ID NO: 27159 - DNA, 76 bp, Artificial Sequence; identical to SEQ ID NO: 3245
  Description of Artificial Sequence: Synthetic pistachio; 5' sequence + inner sequence + 3' sequence

SEQ ID NO: 27160 - DNA, 76 bp, Artificial Sequence; identical to SEQ ID NO: 3155
  Description of Artificial Sequence: Synthetic pistachio; 5' sequence + inner sequence + 3' sequence

SEQ ID NO: 27161 - DNA, 76 bp, Artificial Sequence; identical to SEQ ID NO: 3104
  Description of Artificial Sequence: Synthetic pistachio; 5' sequence + inner sequence + 3' sequence

SEQ ID NO: 27162 - DNA, 76 bp, Artificial Sequence; identical to SEQ ID NO: 3151
  Description of Artificial Sequence: Synthetic pistachio; 5' sequence + inner sequence + 3' sequence

SEQ ID NO: 27163 - DNA, 76 bp, Artificial Sequence; identical to SEQ ID NO: 3085
  Description of Artificial Sequence: Synthetic pistachio; 5' sequence + inner sequence + 3' sequence

SEQ ID NO: 27164 - DNA, 76 bp, Artificial Sequence; identical to SEQ ID NO: 3198
  Description of Artificial Sequence: Synthetic pistachio; 5' sequence + inner sequence + 3' sequence

SEQ ID NO: 27165 - DNA, 76 bp, Artificial Sequence; identical to SEQ ID NO: 3237
  Description of Artificial Sequence: Synthetic pistachio; 5' sequence + inner sequence + 3' sequence

SEQ ID NO: 27166 - DNA, 76 bp, Artificial Sequence; identical to SEQ ID NO: 3240
  Description of Artificial Sequence: Synthetic pistachio; 5' sequence + inner sequence + 3' sequence

SEQ ID NO: 27167 - DNA, 76 bp, Artificial Sequence; identical to SEQ ID NO: 3468
  Description of Artificial Sequence: Synthetic pistachio; 5' sequence + inner sequence + 3' sequence

SEQ ID NO: 27168 - DNA, 76 bp, Artificial Sequence; identical to SEQ ID NO: 3901
  Description of Artificial Sequence: Synthetic pistachio; 5' sequence + inner sequence + 3' sequence

SEQ ID NO: 27169 - DNA, 76 bp, Artificial Sequence; identical to SEQ ID NO: 3087
  Description of Artificial Sequence: Synthetic pistachio; 5' sequence + inner sequence + 3' sequence

SEQ ID NO: 27170 - DNA, 76 bp, Artificial Sequence; identical to SEQ ID NO: 3146
  Description of Artificial Sequence: Synthetic pistachio; 5' sequence + inner sequence + 3' sequence

SEQ ID NO: 27171 - DNA, 76 bp, Artificial Sequence; identical to SEQ ID NO: 3153
  Description of Artificial Sequence: Synthetic pistachio; 5' sequence + inner sequence + 3' sequence

SEQ ID NO: 27172 - DNA, 76 bp, Artificial Sequence; identical to SEQ ID NO: 3179
  Description of Artificial Sequence: Synthetic pistachio; 5' sequence + inner sequence + 3' sequence

SEQ ID NO: 27173 - DNA, 76 bp, Artificial Sequence; identical to SEQ ID NO: 3123
  Description of Artificial Sequence: Synthetic pistachio; 5' sequence + inner sequence + 3' sequence

SEQ ID NO: 27174 - DNA, 76 bp, Artificial Sequence; identical to SEQ ID NO: 3152
  Description of Artificial Sequence: Synthetic pistachio; 5' sequence + inner sequence + 3' sequence

SEQ ID NO: 27175 - DNA, 76 bp, Artificial Sequence; identical to SEQ ID NO: 3086
  Description of Artificial Sequence: Synthetic pistachio; 5' sequence + inner sequence + 3' sequence

SEQ ID NO: 27176 - DNA, 76 bp, Artificial Sequence; identical to SEQ ID NO: 3108
  Description of Artificial Sequence: Synthetic pistachio; 5' sequence + inner sequence + 3' sequence

SEQ ID NO: 27177 - DNA, 76 bp, Artificial Sequence; identical to SEQ ID NO: 3293
  Description of Artificial Sequence: Synthetic pistachio; 5' sequence + inner sequence + 3' sequence

SEQ ID NO: 27178 - DNA, 76 bp, Artificial Sequence; identical to SEQ ID NO: 3110
  Description of Artificial Sequence: Synthetic pistachio; 5' sequence + inner sequence + 3' sequence

SEQ ID NO: 27179 - DNA, 77 bp, Artificial Sequence; identical to SEQ ID NO: 3250
  Description of Artificial Sequence: Synthetic pistachio; 5' sequence + inner sequence + 3' sequence

SEQ ID NO: 27180 - DNA, 76 bp, Artificial Sequence; identical to SEQ ID NO: 3270
  Description of Artificial Sequence: Synthetic pistachio; 5' sequence + inner sequence + 3' sequence

SEQ ID NO: 27181 - DNA, 76 bp, Artificial Sequence; identical to SEQ ID NO: 3360
  Description of Artificial Sequence: Synthetic pistachio; 5' sequence + inner sequence + 3' sequence

SEQ ID NO: 27182 - DNA, 76 bp, Artificial Sequence; identical to SEQ ID NO: 3323
  Description of Artificial Sequence: Synthetic pistachio; 5' sequence + inner sequence + 3' sequence

SEQ ID NO: 27183 - DNA, 76 bp, Artificial Sequence; identical to SEQ ID NO: 3114
  Description of Artificial Sequence: Synthetic pistachio; 5' sequence + inner sequence + 3' sequence

SEQ ID NO: 27184 - DNA, 76 bp, Artificial Sequence; identical to SEQ ID NO: 3214
  Description of Artificial Sequence: Synthetic pistachio; 5' sequence + inner sequence + 3' sequence

SEQ ID NO: 27185 - DNA, 76 bp, Artificial Sequence; identical to SEQ ID NO: 3585
  Description of Artificial Sequence: Synthetic pistachio; 5' sequence + inner sequence + 3' sequence

SEQ ID NO: 27186 - DNA, 76 bp, Artificial Sequence; identical to SEQ ID NO: 3135
  Description of Artificial Sequence: Synthetic pistachio; 5' sequence + inner sequence + 3' sequence

SEQ ID NO: 27187 - DNA, 76 bp, Artificial Sequence; identical to SEQ ID NO: 3172
  Description of Artificial Sequence: Synthetic pistachio; 5' sequence + inner sequence + 3' sequence

SEQ ID NO: 27188 - DNA, 76 bp, Artificial Sequence; identical to SEQ ID NO: 3189
  Description of Artificial Sequence: Synthetic pistachio; 5' sequence + inner sequence + 3' sequence

SEQ ID NO: 27189 - DNA, 76 bp, Artificial Sequence; identical to SEQ ID NO: 3430
  Description of Artificial Sequence: Synthetic pistachio; 5' sequence + inner sequence + 3' sequence

SEQ ID NO: 27190 - DNA, 76 bp, Artificial Sequence; identical to SEQ ID NO: 3170
  Description of Artificial Sequence: Synthetic pistachio; 5' sequence + inner sequence + 3' sequence

SEQ ID NO: 27191 - DNA, 76 bp, Artificial Sequence; identical to SEQ ID NO: 3149
  Description of Artificial Sequence: Synthetic pistachio; 5' sequence + inner sequence + 3' sequence

SEQ ID NO: 27192 - DNA, 76 bp, Artificial Sequence; identical to SEQ ID NO: 3174
  Description of Artificial Sequence: Synthetic pistachio; 5' sequence + inner sequence + 3' sequence

SEQ ID NO: 27193 - DNA, 76 bp, Artificial Sequence; identical to SEQ ID NO: 3134
  Description of Artificial Sequence: Synthetic pistachio; 5' sequence + inner sequence + 3' sequence

SEQ ID NO: 27194 - DNA, 76 bp, Artificial Sequence; identical to SEQ ID NO: 3454
  Description of Artificial Sequence: Synthetic pistachio; 5' sequence + inner sequence + 3' sequence

SEQ ID NO: 27195 - DNA, 76 bp, Artificial Sequence; identical to SEQ ID NO: 3308
  Description of Artificial Sequence: Synthetic pistachio; 5' sequence + inner sequence + 3' sequence

SEQ ID NO: 27196 - DNA, 76 bp, Artificial Sequence; identical to SEQ ID NO: 3406
  Description of Artificial Sequence: Synthetic pistachio; 5' sequence + inner sequence + 3' sequence

SEQ ID NO: 27197 - DNA, 76 bp, Artificial Sequence; identical to SEQ ID NO: 3630
  Description of Artificial Sequence: Synthetic pistachio; 5' sequence + inner sequence + 3' sequence

SEQ ID NO: 27198 - DNA, 77 bp, Artificial Sequence; identical to SEQ ID NO: 3150
  Description of Artificial Sequence: Synthetic pistachio; 5' sequence + inner sequence + 3' sequence

SEQ ID NO: 27199 - DNA, 76 bp, Artificial Sequence; identical to SEQ ID NO: 3212
  Description of Artificial Sequence: Synthetic pistachio; 5' sequence + inner sequence + 3' sequence

SEQ ID NO: 27200 - DNA, 76 bp, Artificial Sequence; identical to SEQ ID NO: 3204
  Description of Artificial Sequence: Synthetic pistachio; 5' sequence + inner sequence + 3' sequence

SEQ ID NO: 27201 - DNA, 76 bp, Artificial Sequence; identical to SEQ ID NO: 3313
  Description of Artificial Sequence: Synthetic pistachio; 5' sequence + inner sequence + 3' sequence

SEQ ID NO: 27202 - DNA, 76 bp, Artificial Sequence; identical to SEQ ID NO: 3101
  Description of Artificial Sequence: Synthetic pistachio; 5' sequence + inner sequence + 3' sequence

SEQ ID NO: 27203 - DNA, 76 bp, Artificial Sequence; identical to SEQ ID NO: 3203
  Description of Artificial Sequence: Synthetic pistachio; 5' sequence + inner sequence + 3' sequence

SEQ ID NO: 27204 - DNA, 76 bp, Artificial Sequence; identical to SEQ ID NO: 3194
  Description of Artificial Sequence: Synthetic pistachio; 5' sequence + inner sequence + 3' sequence

SEQ ID NO: 27205 - DNA, 76 bp, Artificial Sequence; identical to SEQ ID NO: 3385
  Description of Artificial Sequence: Synthetic pistachio; 5' sequence + inner sequence + 3' sequence

SEQ ID NO: 27206 - DNA, 76 bp, Artificial Sequence; identical to SEQ ID NO: 3347
  Description of Artificial Sequence: Synthetic pistachio; 5' sequence + inner sequence + 3' sequence

SEQ ID NO: 27207 - DNA, 76 bp, Artificial Sequence; identical to SEQ ID NO: 3355
  Description of Artificial Sequence: Synthetic pistachio; 5' sequence + inner sequence + 3' sequence

SEQ ID NO: 27208 - DNA, 76 bp, Artificial Sequence; identical to SEQ ID NO: 3130
  Description of Artificial Sequence: Synthetic pistachio; 5' sequence + inner sequence + 3' sequence

SEQ ID NO: 27209 - DNA, 76 bp, Artificial Sequence; identical to SEQ ID NO: 3072
  Description of Artificial Sequence: Synthetic pistachio; 5' sequence + inner sequence + 3' sequence

SEQ ID NO: 27210 - DNA, 76 bp, Artificial Sequence; identical to SEQ ID NO: 3156
  Description of Artificial Sequence: Synthetic pistachio; 5' sequence + inner sequence + 3' sequence

SEQ ID NO: 27211 - DNA, 76 bp, Artificial Sequence; identical to SEQ ID NO: 3365
  Description of Artificial Sequence: Synthetic pistachio; 5' sequence + inner sequence + 3' sequence

SEQ ID NO: 27212 - DNA, 76 bp, Artificial Sequence; identical to SEQ ID NO: 3369
  Description of Artificial Sequence: Synthetic pistachio; 5' sequence + inner sequence + 3' sequence

SEQ ID NO: 27213 - DNA, 76 bp, Artificial Sequence; identical to SEQ ID NO: 3178
  Description of Artificial Sequence: Synthetic pistachio; 5' sequence + inner sequence + 3' sequence

SEQ ID NO: 27214 - DNA, 76 bp, Artificial Sequence; identical to SEQ ID NO: 3192
  Description of Artificial Sequence: Synthetic pistachio; 5' sequence + inner sequence + 3' sequence

SEQ ID NO: 27215 - DNA, 76 bp, Artificial Sequence; identical to SEQ ID NO: 3137
  Description of Artificial Sequence: Synthetic pistachio; 5' sequence + inner sequence + 3' sequence

SEQ ID NO: 27216 - DNA, 76 bp, Artificial Sequence; identical to SEQ ID NO: 3371
  Description of Artificial Sequence: Synthetic pistachio; 5' sequence + inner sequence + 3' sequence

SEQ ID NO: 27217 - DNA, 76 bp, Artificial Sequence; identical to SEQ ID NO: 3344
  Description of Artificial Sequence: Synthetic pistachio; 5' sequence + inner sequence + 3' sequence

SEQ ID NO: 27218 - DNA, 76 bp, Artificial Sequence; identical to SEQ ID NO: 3376
  Description of Artificial Sequence: Synthetic pistachio; 5' sequence + inner sequence + 3' sequence

SEQ ID NO: 27219 - DNA, 76 bp, Artificial Sequence; identical to SEQ ID NO: 3389
  Description of Artificial Sequence: Synthetic pistachio; 5' sequence + inner sequence + 3' sequence

SEQ ID NO: 27220 - DNA, 76 bp, Artificial Sequence; identical to SEQ ID NO: 3310
  Description of Artificial Sequence: Synthetic pistachio; 5' sequence + inner sequence + 3' sequence

SEQ ID NO: 27221 - DNA, 76 bp, Artificial Sequence; identical to SEQ ID NO: 3090
  Description of Artificial Sequence: Synthetic pistachio; 5' sequence + inner sequence + 3' sequence

SEQ ID NO: 27222 - DNA, 76 bp, Artificial Sequence; identical to SEQ ID NO: 3552
  Description of Artificial Sequence: Synthetic pistachio; 5' sequence + inner sequence + 3' sequence

SEQ ID NO: 27223 - DNA, 76 bp, Artificial Sequence; identical to SEQ ID NO: 3184
  Description of Artificial Sequence: Synthetic pistachio; 5' sequence + inner sequence + 3' sequence

SEQ ID NO: 27224 - DNA, 76 bp, Artificial Sequence; identical to SEQ ID NO: 3141
  Description of Artificial Sequence: Synthetic pistachio; 5' sequence + inner sequence + 3' sequence

SEQ ID NO: 27225 - DNA, 76 bp, Artificial Sequence; identical to SEQ ID NO: 3362
  Description of Artificial Sequence: Synthetic pistachio; 5' sequence + inner sequence + 3' sequence

SEQ ID NO: 27226 - DNA, 76 bp, Artificial Sequence; identical to SEQ ID NO: 3140
  Description of Artificial Sequence: Synthetic pistachio; 5' sequence + inner sequence + 3' sequence

SEQ ID NO: 27227 - DNA, 76 bp, Artificial Sequence; identical to SEQ ID NO: 3253
  Description of Artificial Sequence: Synthetic pistachio; 5' sequence + inner sequence + 3' sequence

SEQ ID NO: 27228 - DNA, 76 bp, Artificial Sequence; identical to SEQ ID NO: 3437
  Description of Artificial Sequence: Synthetic pistachio; 5' sequence + inner sequence + 3' sequence

SEQ ID NO: 27229 - DNA, 76 bp, Artificial Sequence; identical to SEQ ID NO: 3409
  Description of Artificial Sequence: Synthetic pistachio; 5' sequence + inner sequence + 3' sequence

SEQ ID NO: 27230 - DNA, 76 bp, Artificial Sequence; identical to SEQ ID NO: 3436
  Description of Artificial Sequence: Synthetic pistachio; 5' sequence + inner sequence + 3' sequence

SEQ ID NO: 27231 - DNA, 76 bp, Artificial Sequence; identical to SEQ ID NO: 3139
  Description of Artificial Sequence: Synthetic pistachio; 5' sequence + inner sequence + 3' sequence

SEQ ID NO: 27232 - DNA, 76 bp, Artificial Sequence; identical to SEQ ID NO: 3209
  Description of Artificial Sequence: Synthetic pistachio; 5' sequence + inner sequence + 3' sequence

SEQ ID NO: 27233 - DNA, 76 bp, Artificial Sequence; identical to SEQ ID NO: 3200
  Description of Artificial Sequence: Synthetic pistachio; 5' sequence + inner sequence + 3' sequence

SEQ ID NO: 27234 - DNA, 76 bp, Artificial Sequence; identical to SEQ ID NO: 3532
  Description of Artificial Sequence: Synthetic pistachio; 5' sequence + inner sequence + 3' sequence

SEQ ID NO: 27235 - DNA, 76 bp, Artificial Sequence; identical to SEQ ID NO: 3553
  Description of Artificial Sequence: Synthetic pistachio; 5' sequence + inner sequence + 3' sequence

SEQ ID NO: 27236 - DNA, 76 bp, Artificial Sequence; identical to SEQ ID NO: 3527
  Description of Artificial Sequence: Synthetic pistachio; 5' sequence + inner sequence + 3' sequence

SEQ ID NO: 27237 - DNA, 75 bp, Artificial Sequence; identical to SEQ ID NO: 3259
  Description of Artificial Sequence: Synthetic pistachio; 5' sequence + inner sequence + 3' sequence

SEQ ID NO: 27238 - DNA, 76 bp, Artificial Sequence; identical to SEQ ID NO: 3312
  Description of Artificial Sequence: Synthetic pistachio; 5' sequence + inner sequence + 3' sequence

SEQ ID NO: 27239 - DNA, 76 bp, Artificial Sequence; identical to SEQ ID NO: 3202
  Description of Artificial Sequence: Synthetic pistachio; 5' sequence + inner sequence + 3' sequence

SEQ ID NO: 27240 - DNA, 76 bp, Artificial Sequence; identical to SEQ ID NO: 3102
  Description of Artificial Sequence: Synthetic pistachio; 5' sequence + inner sequence + 3' sequence

SEQ ID NO: 27241 - DNA, 76 bp, Artificial Sequence; identical to SEQ ID NO: 3692
  Description of Artificial Sequence: Synthetic pistachio; 5' sequence + inner sequence + 3' sequence

SEQ ID NO: 27242 - DNA, 76 bp, Artificial Sequence; identical to SEQ ID NO: 3299
  Description of Artificial Sequence: Synthetic pistachio; 5' sequence + inner sequence + 3' sequence

SEQ ID NO: 27243 - DNA, 76 bp, Artificial Sequence; identical to SEQ ID NO: 3294
  Description of Artificial Sequence: Synthetic pistachio; 5' sequence + inner sequence + 3' sequence

SEQ ID NO: 27244 - DNA, 76 bp, Artificial Sequence; identical to SEQ ID NO: 3284
  Description of Artificial Sequence: Synthetic pistachio; 5' sequence + inner sequence + 3' sequence

SEQ ID NO: 27245 - DNA, 76 bp, Artificial Sequence; identical to SEQ ID NO: 3177
  Description of Artificial Sequence: Synthetic pistachio; 5' sequence + inner sequence + 3' sequence

SEQ ID NO: 27246 - DNA, 76 bp, Artificial Sequence; identical to SEQ ID NO: 7301
  Description of Artificial Sequence: Synthetic pistachio; 5' sequence + inner sequence + 3' sequence

SEQ ID NO: 27247 - DNA, 76 bp, Artificial Sequence; identical to SEQ ID NO: 3280
  Description of Artificial Sequence: Synthetic pistachio; 5' sequence + inner sequence + 3' sequence

SEQ ID NO: 27248 - DNA, 76 bp, Artificial Sequence; identical to SEQ ID NO: 3696
  Description of Artificial Sequence: Synthetic pistachio; 5' sequence + inner sequence + 3' sequence

SEQ ID NO: 27249 - DNA, 76 bp, Artificial Sequence; identical to SEQ ID NO: 3166
  Description of Artificial Sequence: Synthetic pistachio; 5' sequence + inner sequence + 3' sequence

SEQ ID NO: 27250 - DNA, 76 bp, Artificial Sequence; identical to SEQ ID NO: 3567
  Description of Artificial Sequence: Synthetic pistachio; 5' sequence + inner sequence + 3' sequence

SEQ ID NO: 27251 - DNA, 76 bp, Artificial Sequence; identical to SEQ ID NO: 3268
  Description of Artificial Sequence: Synthetic pistachio; 5' sequence + inner sequence + 3' sequence

SEQ ID NO: 27252 - DNA, 76 bp, Artificial Sequence; identical to SEQ ID NO: 3660
  Description of Artificial Sequence: Synthetic pistachio; 5' sequence + inner sequence + 3' sequence

SEQ ID NO: 27253 - DNA, 76 bp, Artificial Sequence; identical to SEQ ID NO: 3522
  Description of Artificial Sequence: Synthetic pistachio; 5' sequence + inner sequence + 3' sequence

SEQ ID NO: 27254 - DNA, 76 bp, Artificial Sequence; identical to SEQ ID NO: 3195
  Description of Artificial Sequence: Synthetic pistachio; 5' sequence + inner sequence + 3' sequence

SEQ ID NO: 27255 - DNA, 75 bp, Artificial Sequence; identical to SEQ ID NO: 3334
  Description of Artificial Sequence: Synthetic pistachio; 5' sequence + inner sequence + 3' sequence

SEQ ID NO: 27256 - DNA, 76 bp, Artificial Sequence; identical to SEQ ID NO: 3127
  Description of Artificial Sequence: Synthetic pistachio; 5' sequence + inner sequence + 3' sequence

SEQ ID NO: 27257 - DNA, 76 bp, Artificial Sequence; identical to SEQ ID NO: 3227
  Description of Artificial Sequence: Synthetic pistachio; 5' sequence + inner sequence + 3' sequence

SEQ ID NO: 27258 - DNA, 76 bp, Artificial Sequence; identical to SEQ ID NO: 3341
  Description of Artificial Sequence: Synthetic pistachio; 5' sequence + inner sequence + 3' sequence

SEQ ID NO: 27259 - DNA, 76 bp, Artificial Sequence; identical to SEQ ID NO: 3124
  Description of Artificial Sequence: Synthetic pistachio; 5' sequence + inner sequence + 3' sequence

SEQ ID NO: 27260 - DNA, 76 bp, Artificial Sequence; identical to SEQ ID NO: 3222
  Description of Artificial Sequence: Synthetic pistachio; 5' sequence + inner sequence + 3' sequence

SEQ ID NO: 27261 - DNA, 76 bp, Artificial Sequence; identical to SEQ ID NO: 3264
  Description of Artificial Sequence: Synthetic pistachio; 5' sequence + inner sequence + 3' sequence

SEQ ID NO: 27262 - DNA, 76 bp, Artificial Sequence; identical to SEQ ID NO: 3266
  Description of Artificial Sequence: Synthetic pistachio; 5' sequence + inner sequence + 3' sequence

SEQ ID NO: 27263 - DNA, 76 bp, Artificial Sequence; identical to SEQ ID NO: 3401
  Description of Artificial Sequence: Synthetic pistachio; 5' sequence + inner sequence + 3' sequence

SEQ ID NO: 27264 - DNA, 76 bp, Artificial Sequence; identical to SEQ ID NO: 3232
  Description of Artificial Sequence: Synthetic pistachio; 5' sequence + inner sequence + 3' sequence

SEQ ID NO: 27265 - DNA, 76 bp, Artificial Sequence; identical to SEQ ID NO: 3787
  Description of Artificial Sequence: Synthetic pistachio; 5' sequence + inner sequence + 3' sequence

SEQ ID NO: 27266 - DNA, 76 bp, Artificial Sequence; identical to SEQ ID NO: 3160
  Description of Artificial Sequence: Synthetic pistachio; 5' sequence + inner sequence + 3' sequence

SEQ ID NO: 27267 - DNA, 76 bp, Artificial Sequence; identical to SEQ ID NO: 3615
  Description of Artificial Sequence: Synthetic pistachio; 5' sequence + inner sequence + 3' sequence

SEQ ID NO: 27268 - DNA, 76 bp, Artificial Sequence; identical to SEQ ID NO: 3900
  Description of Artificial Sequence: Synthetic pistachio; 5' sequence + inner sequence + 3' sequence

SEQ ID NO: 27269 - DNA, 75 bp, Artificial Sequence; identical to SEQ ID NO: 3251
  Description of Artificial Sequence: Synthetic pistachio; 5' sequence + inner sequence + 3' sequence

SEQ ID NO: 27270 - DNA, 76 bp, Artificial Sequence; identical to SEQ ID NO: 3175
  Description of Artificial Sequence: Synthetic pistachio; 5' sequence + inner sequence + 3' sequence

SEQ ID NO: 27271 - DNA, 76 bp, Artificial Sequence; identical to SEQ ID NO: 3485
  Description of Artificial Sequence: Synthetic pistachio; 5' sequence + inner sequence + 3' sequence

SEQ ID NO: 27272 - DNA, 76 bp, Artificial Sequence; identical to SEQ ID NO: 3513
  Description of Artificial Sequence: Synthetic pistachio; 5' sequence + inner sequence + 3' sequence

SEQ ID NO: 27273 - DNA, 76 bp, Artificial Sequence; identical to SEQ ID NO: 3400
  Description of Artificial Sequence: Synthetic pistachio; 5' sequence + inner sequence + 3' sequence

SEQ ID NO: 27274 - DNA, 76 bp, Artificial Sequence; identical to SEQ ID NO: 3306
  Description of Artificial Sequence: Synthetic pistachio; 5' sequence + inner sequence + 3' sequence

SEQ ID NO: 27275 - DNA, 76 bp, Artificial Sequence; identical to SEQ ID NO: 3666
  Description of Artificial Sequence: Synthetic pistachio; 5' sequence + inner sequence + 3' sequence

SEQ ID NO: 27276 - DNA, 76 bp, Artificial Sequence; identical to SEQ ID NO: 3249
  Description of Artificial Sequence: Synthetic pistachio; 5' sequence + inner sequence + 3' sequence

SEQ ID NO: 27277 - DNA, 76 bp, Artificial Sequence; identical to SEQ ID NO: 3298
  Description of Artificial Sequence: Synthetic pistachio; 5' sequence + inner sequence + 3' sequence

SEQ ID NO: 27278 - DNA, 76 bp, Artificial Sequence; identical to SEQ ID NO: 3470
  Description of Artificial Sequence: Synthetic pistachio; 5' sequence + inner sequence + 3' sequence

SEQ ID NO: 27279 - DNA, 76 bp, Artificial Sequence; identical to SEQ ID NO: 3325
  Description of Artificial Sequence: Synthetic pistachio; 5' sequence + inner sequence + 3' sequence

SEQ ID NO: 27280 - DNA, 76 bp, Artificial Sequence; identical to SEQ ID NO: 3269
  Description of Artificial Sequence: Synthetic pistachio; 5' sequence + inner sequence + 3' sequence

SEQ ID NO: 27281 - DNA, 76 bp, Artificial Sequence; identical to SEQ ID NO: 3238
  Description of Artificial Sequence: Synthetic pistachio; 5' sequence + inner sequence + 3' sequence

SEQ ID NO: 27282 - DNA, 76 bp, Artificial Sequence; identical to SEQ ID NO: 3429
  Description of Artificial Sequence: Synthetic pistachio; 5' sequence + inner sequence + 3' sequence

SEQ ID NO: 27283 - DNA, 76 bp, Artificial Sequence; identical to SEQ ID NO: 3213
  Description of Artificial Sequence: Synthetic pistachio; 5' sequence + inner sequence + 3' sequence

SEQ ID NO: 27284 - DNA, 76 bp, Artificial Sequence; identical to SEQ ID NO: 3206
  Description of Artificial Sequence: Synthetic pistachio; 5' sequence + inner sequence + 3' sequence

SEQ ID NO: 27285 - DNA, 76 bp, Artificial Sequence; identical to SEQ ID NO: 3377
  Description of Artificial Sequence: Synthetic pistachio; 5' sequence + inner sequence + 3' sequence

SEQ ID NO: 27286 - DNA, 76 bp, Artificial Sequence; identical to SEQ ID NO: 3340
  Description of Artificial Sequence: Synthetic pistachio; 5' sequence + inner sequence + 3' sequence

SEQ ID NO: 27287 - DNA, 76 bp, Artificial Sequence; identical to SEQ ID NO: 3617
  Description of Artificial Sequence: Synthetic pistachio; 5' sequence + inner sequence + 3' sequence

SEQ ID NO: 27288 - DNA, 76 bp, Artificial Sequence; identical to SEQ ID NO: 3541
  Description of Artificial Sequence: Synthetic pistachio; 5' sequence + inner sequence + 3' sequence

SEQ ID NO: 27289 - DNA, 76 bp, Artificial Sequence; identical to SEQ ID NO: 3218
  Description of Artificial Sequence: Synthetic pistachio; 5' sequence + inner sequence + 3' sequence

SEQ ID NO: 27290 - DNA, 76 bp, Artificial Sequence; identical to SEQ ID NO: 3233
  Description of Artificial Sequence: Synthetic pistachio; 5' sequence + inner sequence + 3' sequence

SEQ ID NO: 27291 - DNA, 76 bp, Artificial Sequence; identical to SEQ ID NO: 3413
  Description of Artificial Sequence: Synthetic pistachio; 5' sequence + inner sequence + 3' sequence

SEQ ID NO: 27292 - DNA, 76 bp, Artificial Sequence; identical to SEQ ID NO: 3187
  Description of Artificial Sequence: Synthetic pistachio; 5' sequence + inner sequence + 3' sequence

SEQ ID NO: 27293 - DNA, 76 bp, Artificial Sequence; identical to SEQ ID NO: 3190
  Description of Artificial Sequence: Synthetic pistachio; 5' sequence + inner sequence + 3' sequence

SEQ ID NO: 27294 - DNA, 76 bp, Artificial Sequence; identical to SEQ ID NO: 3511
  Description of Artificial Sequence: Synthetic pistachio; 5' sequence + inner sequence + 3' sequence

SEQ ID NO: 27295 - DNA, 76 bp, Artificial Sequence; identical to SEQ ID NO: 3783
  Description of Artificial Sequence: Synthetic pistachio; 5' sequence + inner sequence + 3' sequence

SEQ ID NO: 27296 - DNA, 76 bp, Artificial Sequence; identical to SEQ ID NO: 3419
  Description of Artificial Sequence: Synthetic pistachio; 5' sequence + inner sequence + 3' sequence

SEQ ID NO: 27297 - DNA, 76 bp, Artificial Sequence; identical to SEQ ID NO: 3361
  Description of Artificial Sequence: Synthetic pistachio; 5' sequence + inner sequence + 3' sequence

SEQ ID NO: 27298 - DNA, 76 bp, Artificial Sequence; identical to SEQ ID NO: 3272
  Description of Artificial Sequence: Synthetic pistachio; 5' sequence + inner sequence + 3' sequence

SEQ ID NO: 27299 - DNA, 76 bp, Artificial Sequence; identical to SEQ ID NO: 3314
  Description of Artificial Sequence: Synthetic pistachio; 5' sequence + inner sequence + 3' sequence

SEQ ID NO: 27300 - DNA, 76 bp, Artificial Sequence; identical to SEQ ID NO: 3446
  Description of Artificial Sequence: Synthetic pistachio; 5' sequence + inner sequence + 3' sequence

SEQ ID NO: 27301 - DNA, 76 bp, Artificial Sequence; identical to SEQ ID NO: 3173
  Description of Artificial Sequence: Synthetic pistachio; 5' sequence + inner sequence + 3' sequence

SEQ ID NO: 27302 - DNA, 76 bp, Artificial Sequence; identical to SEQ ID NO: 3220
  Description of Artificial Sequence: Synthetic pistachio; 5' sequence + inner sequence + 3' sequence

SEQ ID NO: 27303 - DNA, 76 bp, Artificial Sequence; identical to SEQ ID NO: 3305
  Description of Artificial Sequence: Synthetic pistachio; 5' sequence + inner sequence + 3' sequence

SEQ ID NO: 27304 - DNA, 76 bp, Artificial Sequence; identical to SEQ ID NO: 3673
  Description of Artificial Sequence: Synthetic pistachio; 5' sequence + inner sequence + 3' sequence

SEQ ID NO: 27305 - DNA, 77 bp, Artificial Sequence; identical to SEQ ID NO: 3258
  Description of Artificial Sequence: Synthetic pistachio; 5' sequence + inner sequence + 3' sequence

SEQ ID NO: 27306 - DNA, 76 bp, Artificial Sequence; identical to SEQ ID NO: 3521
  Description of Artificial Sequence: Synthetic pistachio; 5' sequence + inner sequence + 3' sequence

SEQ ID NO: 27307 - DNA, 76 bp, Artificial Sequence; identical to SEQ ID NO: 7381
  Description of Artificial Sequence: Synthetic pistachio; 5' sequence + inner sequence + 3' sequence

SEQ ID NO: 27308 - DNA, 76 bp, Artificial Sequence; identical to SEQ ID NO: 3645
  Description of Artificial Sequence: Synthetic pistachio; 5' sequence + inner sequence + 3' sequence

SEQ ID NO: 27309 - DNA, 76 bp, Artificial Sequence; identical to SEQ ID NO: 3336
  Description of Artificial Sequence: Synthetic pistachio; 5' sequence + inner sequence + 3' sequence

SEQ ID NO: 27310 - DNA, 76 bp, Artificial Sequence; identical to SEQ ID NO: 7229
  Description of Artificial Sequence: Synthetic pistachio; 5' sequence + inner sequence + 3' sequence

SEQ ID NO: 27311 - DNA, 76 bp, Artificial Sequence; identical to SEQ ID NO: 3321
  Description of Artificial Sequence: Synthetic pistachio; 5' sequence + inner sequence + 3' sequence

SEQ ID NO: 27312 - DNA, 76 bp, Artificial Sequence; identical to SEQ ID NO: 3244
  Description of Artificial Sequence: Synthetic pistachio; 5' sequence + inner sequence + 3' sequence

SEQ ID NO: 27313 - DNA, 76 bp, Artificial Sequence; identical to SEQ ID NO: 3374
  Description of Artificial Sequence: Synthetic pistachio; 5' sequence + inner sequence + 3' sequence

SEQ ID NO: 27314 - DNA, 76 bp, Artificial Sequence; identical to SEQ ID NO: 3801
  Description of Artificial Sequence: Synthetic pistachio; 5' sequence + inner sequence + 3' sequence

SEQ ID NO: 27315 - DNA, 76 bp, Artificial Sequence; identical to SEQ ID NO: 3653
  Description of Artificial Sequence: Synthetic pistachio; 5' sequence + inner sequence + 3' sequence

SEQ ID NO: 27316 - DNA, 76 bp, Artificial Sequence; identical to SEQ ID NO: 3182
  Description of Artificial Sequence: Synthetic pistachio; 5' sequence + inner sequence + 3' sequence

SEQ ID NO: 27317 - DNA, 76 bp, Artificial Sequence; identical to SEQ ID NO: 3563
  Description of Artificial Sequence: Synthetic pistachio; 5' sequence + inner sequence + 3' sequence

SEQ ID NO: 27318 - DNA, 76 bp, Artificial Sequence; identical to SEQ ID NO: 3638
  Description of Artificial Sequence: Synthetic pistachio; 5' sequence + inner sequence + 3' sequence

SEQ ID NO: 27319 - DNA, 76 bp, Artificial Sequence; identical to SEQ ID NO: 3236
  Description of Artificial Sequence: Synthetic pistachio; 5' sequence + inner sequence + 3' sequence

SEQ ID NO: 27320 - DNA, 76 bp, Artificial Sequence; identical to SEQ ID NO: 3414
  Description of Artificial Sequence: Synthetic pistachio; 5' sequence + inner sequence + 3' sequence

SEQ ID NO: 27321 - DNA, 76 bp, Artificial Sequence; identical to SEQ ID NO: 3234
  Description of Artificial Sequence: Synthetic pistachio; 5' sequence + inner sequence + 3' sequence

SEQ ID NO: 27322 - DNA, 76 bp, Artificial Sequence; identical to SEQ ID NO: 3560
  Description of Artificial Sequence: Synthetic pistachio; 5' sequence + inner sequence + 3' sequence

SEQ ID NO: 27323 - DNA, 76 bp, Artificial Sequence; identical to SEQ ID NO: 3301
  Description of Artificial Sequence: Synthetic pistachio; 5' sequence + inner sequence + 3' sequence

SEQ ID NO: 27324 - DNA, 76 bp, Artificial Sequence; identical to SEQ ID NO: 3283
  Description of Artificial Sequence: Synthetic pistachio; 5' sequence + inner sequence + 3' sequence

SEQ ID NO: 27325 - DNA, 76 bp, Artificial Sequence; identical to SEQ ID NO: 3529
  Description of Artificial Sequence: Synthetic pistachio; 5' sequence + inner sequence + 3' sequence

SEQ ID NO: 27326 - DNA, 76 bp, Artificial Sequence; identical to SEQ ID NO: 3176
  Description of Artificial Sequence: Synthetic pistachio; 5' sequence + inner sequence + 3' sequence

SEQ ID NO: 27327 - DNA, 76 bp, Artificial Sequence; identical to SEQ ID NO: 3390
  Description of Artificial Sequence: Synthetic pistachio; 5' sequence + inner sequence + 3' sequence

SEQ ID NO: 27328 - DNA, 76 bp, Artificial Sequence; identical to SEQ ID NO: 3215
  Description of Artificial Sequence: Synthetic pistachio; 5' sequence + inner sequence + 3' sequence

SEQ ID NO: 27329 - DNA, 76 bp, Artificial Sequence; identical to SEQ ID NO: 3622
  Description of Artificial Sequence: Synthetic pistachio; 5' sequence + inner sequence + 3' sequence

SEQ ID NO: 27330 - DNA, 76 bp, Artificial Sequence; identical to SEQ ID NO: 3316
  Description of Artificial Sequence: Synthetic pistachio; 5' sequence + inner sequence + 3' sequence

SEQ ID NO: 27331 - DNA, 76 bp, Artificial Sequence; identical to SEQ ID NO: 3274
  Description of Artificial Sequence: Synthetic pistachio; 5' sequence + inner sequence + 3' sequence

SEQ ID NO: 27332 - DNA, 76 bp, Artificial Sequence; identical to SEQ ID NO: 3920
  Description of Artificial Sequence: Synthetic pistachio; 5' sequence + inner sequence + 3' sequence

SEQ ID NO: 27333 - DNA, 77 bp, Artificial Sequence; identical to SEQ ID NO: 7434
  Description of Artificial Sequence: Synthetic pistachio; 5' sequence + inner sequence + 3' sequence

SEQ ID NO: 27334 - DNA, 76 bp, Artificial Sequence; identical to SEQ ID NO: 3572
  Description of Artificial Sequence: Synthetic pistachio; 5' sequence + inner sequence + 3' sequence

SEQ ID NO: 27335 - DNA, 76 bp, Artificial Sequence; identical to SEQ ID NO: 3352
  Description of Artificial Sequence: Synthetic pistachio; 5' sequence + inner sequence + 3' sequence

SEQ ID NO: 27336 - DNA, 76 bp, Artificial Sequence; identical to SEQ ID NO: 3358
  Description of Artificial Sequence: Synthetic pistachio; 5' sequence + inner sequence + 3' sequence

SEQ ID NO: 27337 - DNA, 76 bp, Artificial Sequence; identical to SEQ ID NO: 3559
  Description of Artificial Sequence: Synthetic pistachio; 5' sequence + inner sequence + 3' sequence

SEQ ID NO: 27338 - DNA, 76 bp, Artificial Sequence; identical to SEQ ID NO: 3197
  Description of Artificial Sequence: Synthetic pistachio; 5' sequence + inner sequence + 3' sequence

SEQ ID NO: 27339 - DNA, 76 bp, Artificial Sequence; identical to SEQ ID NO: 3343
  Description of Artificial Sequence: Synthetic pistachio; 5' sequence + inner sequence + 3' sequence

SEQ ID NO: 27340 - DNA, 76 bp, Artificial Sequence; identical to SEQ ID NO: 3267
  Description of Artificial Sequence: Synthetic pistachio; 5' sequence + inner sequence + 3' sequence

SEQ ID NO: 27341 - DNA, 76 bp, Artificial Sequence; identical to SEQ ID NO: 3231
  Description of Artificial Sequence: Synthetic pistachio; 5' sequence + inner sequence + 3' sequence

SEQ ID NO: 27342 - DNA, 76 bp, Artificial Sequence; identical to SEQ ID NO: 3297
  Description of Artificial Sequence: Synthetic pistachio; 5' sequence + inner sequence + 3' sequence

SEQ ID NO: 27343 - DNA, 76 bp, Artificial Sequence; identical to SEQ ID NO: 3597
  Description of Artificial Sequence: Synthetic pistachio; 5' sequence + inner sequence + 3' sequence

SEQ ID NO: 27344 - DNA, 76 bp, Artificial Sequence; identical to SEQ ID NO: 3877
  Description of Artificial Sequence: Synthetic pistachio; 5' sequence + inner sequence + 3' sequence

SEQ ID NO: 27345 - DNA, 76 bp, Artificial Sequence; identical to SEQ ID NO: 3379
  Description of Artificial Sequence: Synthetic pistachio; 5' sequence + inner sequence + 3' sequence

SEQ ID NO: 27346 - DNA, 76 bp, Artificial Sequence; identical to SEQ ID NO: 3242
  Description of Artificial Sequence: Synthetic pistachio; 5' sequence + inner sequence + 3' sequence

SEQ ID NO: 27347 - DNA, 76 bp, Artificial Sequence; identical to SEQ ID NO: 3620
  Description of Artificial Sequence: Synthetic pistachio; 5' sequence + inner sequence + 3' sequence

SEQ ID NO: 27348 - DNA, 76 bp, Artificial Sequence; identical to SEQ ID NO: 3728
  Description of Artificial Sequence: Synthetic pistachio; 5' sequence + inner sequence + 3' sequence

SEQ ID NO: 27349 - DNA, 76 bp, Artificial Sequence; identical to SEQ ID NO: 3640
  Description of Artificial Sequence: Synthetic pistachio; 5' sequence + inner sequence + 3' sequence

SEQ ID NO: 27350 - DNA, 76 bp, Artificial Sequence; identical to SEQ ID NO: 3528
  Description of Artificial Sequence: Synthetic pistachio; 5' sequence + inner sequence + 3' sequence

SEQ ID NO: 27351 - DNA, 79 bp, Artificial Sequence; identical to SEQ ID NO: 3864
  Description of Artificial Sequence: Synthetic pistachio; 5' sequence + inner sequence + 3' sequence

SEQ ID NO: 27352 - DNA, 76 bp, Artificial Sequence; identical to SEQ ID NO: 3320
  Description of Artificial Sequence: Synthetic pistachio; 5' sequence + inner sequence + 3' sequence

SEQ ID NO: 27353 - DNA, 76 bp, Artificial Sequence; identical to SEQ ID NO: 3271
  Description of Artificial Sequence: Synthetic pistachio; 5' sequence + inner sequence + 3' sequence

SEQ ID NO: 27354 - DNA, 76 bp, Artificial Sequence; identical to SEQ ID NO: 3481
  Description of Artificial Sequence: Synthetic pistachio; 5' sequence + inner sequence + 3' sequence

SEQ ID NO: 27355 - DNA, 76 bp, Artificial Sequence; identical to SEQ ID NO: 3520
  Description of Artificial Sequence: Synthetic pistachio; 5' sequence + inner sequence + 3' sequence

SEQ ID NO: 27356 - DNA, 76 bp, Artificial Sequence; identical to SEQ ID NO: 3226
  Description of Artificial Sequence: Synthetic pistachio; 5' sequence + inner sequence + 3' sequence

SEQ ID NO: 27357 - DNA, 76 bp, Artificial Sequence; identical to SEQ ID NO: 3386
  Description of Artificial Sequence: Synthetic pistachio; 5' sequence + inner sequence + 3' sequence

SEQ ID NO: 27358 - DNA, 76 bp, Artificial Sequence; identical to SEQ ID NO: 3224
  Description of Artificial Sequence: Synthetic pistachio; 5' sequence + inner sequence + 3' sequence

SEQ ID NO: 27359 - DNA, 76 bp, Artificial Sequence; identical to SEQ ID NO: 15892
  Description of Artificial Sequence: Synthetic pistachio; 5' sequence + inner sequence + 3' sequence

SEQ ID NO: 27360 - DNA, 76 bp, Artificial Sequence; identical to SEQ ID NO: 3417
  Description of Artificial Sequence: Synthetic pistachio; 5' sequence + inner sequence + 3' sequence

SEQ ID NO: 27361 - DNA, 76 bp, Artificial Sequence; identical to SEQ ID NO: 3448
  Description of Artificial Sequence: Synthetic pistachio; 5' sequence + inner sequence + 3' sequence

SEQ ID NO: 27362 - DNA, 76 bp, Artificial Sequence; identical to SEQ ID NO: 3524
  Description of Artificial Sequence: Synthetic pistachio; 5' sequence + inner sequence + 3' sequence

SEQ ID NO: 27363 - DNA, 76 bp, Artificial Sequence; identical to SEQ ID NO: 3647
  Description of Artificial Sequence: Synthetic pistachio; 5' sequence + inner sequence + 3' sequence

SEQ ID NO: 27364 - DNA, 76 bp, Artificial Sequence; identical to SEQ ID NO: 3789
  Description of Artificial Sequence: Synthetic pistachio; 5' sequence + inner sequence + 3' sequence

SEQ ID NO: 27365 - DNA, 76 bp, Artificial Sequence; identical to SEQ ID NO: 3223
  Description of Artificial Sequence: Synthetic pistachio; 5' sequence + inner sequence + 3' sequence

SEQ ID NO: 27366 - DNA, 76 bp, Artificial Sequence; identical to SEQ ID NO: 3916
  Description of Artificial Sequence: Synthetic pistachio; 5' sequence + inner sequence + 3' sequence

SEQ ID NO: 27367 - DNA, 76 bp, Artificial Sequence; identical to SEQ ID NO: 3119
  Description of Artificial Sequence: Synthetic pistachio; 5' sequence + inner sequence + 3' sequence

SEQ ID NO: 27368 - DNA, 76 bp, Artificial Sequence; identical to SEQ ID NO: 3210
  Description of Artificial Sequence: Synthetic pistachio; 5' sequence + inner sequence + 3' sequence

SEQ ID NO: 27369 - DNA, 76 bp, Artificial Sequence; identical to SEQ ID NO: 3315
  Description of Artificial Sequence: Synthetic pistachio; 5' sequence + inner sequence + 3' sequence

SEQ ID NO: 27370 - DNA, 76 bp, Artificial Sequence; identical to SEQ ID NO: 3496
  Description of Artificial Sequence: Synthetic pistachio; 5' sequence + inner sequence + 3' sequence

SEQ ID NO: 27371 - DNA, 76 bp, Artificial Sequence; identical to SEQ ID NO: 3246
  Description of Artificial Sequence: Synthetic pistachio; 5' sequence + inner sequence + 3' sequence

SEQ ID NO: 27372 - DNA, 76 bp, Artificial Sequence; identical to SEQ ID NO: 3329
  Description of Artificial Sequence: Synthetic pistachio; 5' sequence + inner sequence + 3' sequence

SEQ ID NO: 27373 - DNA, 76 bp, Artificial Sequence; identical to SEQ ID NO: 3319
  Description of Artificial Sequence: Synthetic pistachio; 5' sequence + inner sequence + 3' sequence

SEQ ID NO: 27374 - DNA, 76 bp, Artificial Sequence; identical to SEQ ID NO: 3359
  Description of Artificial Sequence: Synthetic pistachio; 5' sequence + inner sequence + 3' sequence

SEQ ID NO: 27375 - DNA, 76 bp, Artificial Sequence; identical to SEQ ID NO: 3263
  Description of Artificial Sequence: Synthetic pistachio; 5' sequence + inner sequence + 3' sequence

SEQ ID NO: 27376 - DNA, 76 bp, Artificial Sequence; identical to SEQ ID NO: 3128
  Description of Artificial Sequence: Synthetic pistachio; 5' sequence + inner sequence + 3' sequence

SEQ ID NO: 27377 - DNA, 76 bp, Artificial Sequence; identical to SEQ ID NO: 3534
  Description of Artificial Sequence: Synthetic pistachio; 5' sequence + inner sequence + 3' sequence

SEQ ID NO: 27378 - DNA, 76 bp, Artificial Sequence; identical to SEQ ID NO: 3350
  Description of Artificial Sequence: Synthetic pistachio; 5' sequence + inner sequence + 3' sequence

SEQ ID NO: 27379 - DNA, 76 bp, Artificial Sequence; identical to SEQ ID NO: 3167
  Description of Artificial Sequence: Synthetic pistachio; 5' sequence + inner sequence + 3' sequence

SEQ ID NO: 27380 - DNA, 76 bp, Artificial Sequence; identical to SEQ ID NO: 3574
  Description of Artificial Sequence: Synthetic pistachio; 5' sequence + inner sequence + 3' sequence

SEQ ID NO: 27381 - DNA, 76 bp, Artificial Sequence; identical to SEQ ID NO: 3478
  Description of Artificial Sequence: Synthetic pistachio; 5' sequence + inner sequence + 3' sequence

SEQ ID NO: 27382 - DNA, 76 bp, Artificial Sequence; identical to SEQ ID NO: 3500
  Description of Artificial Sequence: Synthetic pistachio; 5' sequence + inner sequence + 3' sequence

SEQ ID NO: 27383 - DNA, 76 bp, Artificial Sequence; identical to SEQ ID NO: 3530
  Description of Artificial Sequence: Synthetic pistachio; 5' sequence + inner sequence + 3' sequence

SEQ ID NO: 27384 - DNA, 76 bp, Artificial Sequence; identical to SEQ ID NO: 3432
  Description of Artificial Sequence: Synthetic pistachio; 5' sequence + inner sequence + 3' sequence

SEQ ID NO: 27385 - DNA, 76 bp, Artificial Sequence; identical to SEQ ID NO: 3373
  Description of Artificial Sequence: Synthetic pistachio; 5' sequence + inner sequence + 3' sequence

SEQ ID NO: 27386 - DNA, 76 bp, Artificial Sequence; identical to SEQ ID NO: 3654
  Description of Artificial Sequence: Synthetic pistachio; 5' sequence + inner sequence + 3' sequence

SEQ ID NO: 27387 - DNA, 76 bp, Artificial Sequence; identical to SEQ ID NO: 3504
  Description of Artificial Sequence: Synthetic pistachio; 5' sequence + inner sequence + 3' sequence

SEQ ID NO: 27388 - DNA, 76 bp, Artificial Sequence; identical to SEQ ID NO: 3757
  Description of Artificial Sequence: Synthetic pistachio; 5' sequence + inner sequence + 3' sequence

SEQ ID NO: 27389 - DNA, 76 bp, Artificial Sequence; identical to SEQ ID NO: 3339
  Description of Artificial Sequence: Synthetic pistachio; 5' sequence + inner sequence + 3' sequence

SEQ ID NO: 27390 - DNA, 76 bp, Artificial Sequence; identical to SEQ ID NO: 3606
  Description of Artificial Sequence: Synthetic pistachio; 5' sequence + inner sequence + 3' sequence

SEQ ID NO: 27391 - DNA, 76 bp, Artificial Sequence; identical to SEQ ID NO: 3395
  Description of Artificial Sequence: Synthetic pistachio; 5' sequence + inner sequence + 3' sequence

SEQ ID NO: 27392 - DNA, 76 bp, Artificial Sequence; identical to SEQ ID NO: 7543
  Description of Artificial Sequence: Synthetic pistachio; 5' sequence + inner sequence + 3' sequence

SEQ ID NO: 27393 - DNA, 76 bp, Artificial Sequence; identical to SEQ ID NO: 3248
  Description of Artificial Sequence: Synthetic pistachio; 5' sequence + inner sequence + 3' sequence

SEQ ID NO: 27394 - DNA, 76 bp, Artificial Sequence; identical to SEQ ID NO: 3275
  Description of Artificial Sequence: Synthetic pistachio; 5' sequence + inner sequence + 3' sequence

SEQ ID NO: 27395 - DNA, 75 bp, Artificial Sequence; identical to SEQ ID NO: 3193
  Description of Artificial Sequence: Synthetic pistachio; 5' sequence + inner sequence + 3' sequence

SEQ ID NO: 27396 - DNA, 76 bp, Artificial Sequence; identical to SEQ ID NO: 3928
  Description of Artificial Sequence: Synthetic pistachio; 5' sequence + inner sequence + 3' sequence

SEQ ID NO: 27397 - DNA, 76 bp, Artificial Sequence; identical to SEQ ID NO: 3370
  Description of Artificial Sequence: Synthetic pistachio; 5' sequence + inner sequence + 3' sequence

SEQ ID NO: 27398 - DNA, 76 bp, Artificial Sequence; identical to SEQ ID NO: 3181
  Description of Artificial Sequence: Synthetic pistachio; 5' sequence + inner sequence + 3' sequence

SEQ ID NO: 27399 - DNA, 76 bp, Artificial Sequence; identical to SEQ ID NO: 3919
  Description of Artificial Sequence: Synthetic pistachio; 5' sequence + inner sequence + 3' sequence

SEQ ID NO: 27400 - DNA, 76 bp, Artificial Sequence; identical to SEQ ID NO: 3777
  Description of Artificial Sequence: Synthetic pistachio; 5' sequence + inner sequence + 3' sequence

SEQ ID NO: 27401 - DNA, 76 bp, Artificial Sequence; identical to SEQ ID NO: 3405
  Description of Artificial Sequence: Synthetic pistachio; 5' sequence + inner sequence + 3' sequence

SEQ ID NO: 27402 - DNA, 76 bp, Artificial Sequence; identical to SEQ ID NO: 3476
  Description of Artificial Sequence: Synthetic pistachio; 5' sequence + inner sequence + 3' sequence

SEQ ID NO: 27403 - DNA, 76 bp, Artificial Sequence; identical to SEQ ID NO: 3410
  Description of Artificial Sequence: Synthetic pistachio; 5' sequence + inner sequence + 3' sequence

SEQ ID NO: 27404 - DNA, 76 bp, Artificial Sequence; identical to SEQ ID NO: 3399
  Description of Artificial Sequence: Synthetic pistachio; 5' sequence + inner sequence + 3' sequence

SEQ ID NO: 27405 - DNA, 76 bp, Artificial Sequence; identical to SEQ ID NO: 3628
  Description of Artificial Sequence: Synthetic pistachio; 5' sequence + inner sequence + 3' sequence

SEQ ID NO: 27406 - DNA, 76 bp, Artificial Sequence; identical to SEQ ID NO: 11564
  Description of Artificial Sequence: Synthetic pistachio; 5' sequence + inner sequence + 3' sequence

SEQ ID NO: 27407 - DNA, 76 bp, Artificial Sequence; identical to SEQ ID NO: 3764
  Description of Artificial Sequence: Synthetic pistachio; 5' sequence + inner sequence + 3' sequence

SEQ ID NO: 27408 - DNA, 76 bp, Artificial Sequence; identical to SEQ ID NO: 3487
  Description of Artificial Sequence: Synthetic pistachio; 5' sequence + inner sequence + 3' sequence

SEQ ID NO: 27409 - DNA, 76 bp, Artificial Sequence; identical to SEQ ID NO: 3517
  Description of Artificial Sequence: Synthetic pistachio; 5' sequence + inner sequence + 3' sequence

SEQ ID NO: 27410 - DNA, 76 bp, Artificial Sequence; identical to SEQ ID NO: 3391
  Description of Artificial Sequence: Synthetic pistachio; 5' sequence + inner sequence + 3' sequence

SEQ ID NO: 27411 - DNA, 76 bp, Artificial Sequence; identical to SEQ ID NO: 23615
  Description of Artificial Sequence: Synthetic pistachio; 5' sequence + inner sequence + 3' sequence

SEQ ID NO: 27412 - DNA, 76 bp, Artificial Sequence; identical to SEQ ID NO: 3387
  Description of Artificial Sequence: Synthetic pistachio; 5' sequence + inner sequence + 3' sequence

SEQ ID NO: 27413 - DNA, 76 bp, Artificial Sequence; identical to SEQ ID NO: 3143
  Description of Artificial Sequence: Synthetic pistachio; 5' sequence + inner sequence + 3' sequence

SEQ ID NO: 27414 - DNA, 76 bp, Artificial Sequence; identical to SEQ ID NO: 3255
  Description of Artificial Sequence: Synthetic pistachio; 5' sequence + inner sequence + 3' sequence

SEQ ID NO: 27415 - DNA, 76 bp, Artificial Sequence; identical to SEQ ID NO: 3228
  Description of Artificial Sequence: Synthetic pistachio; 5' sequence + inner sequence + 3' sequence

SEQ ID NO: 27416 - DNA, 76 bp, Artificial Sequence; identical to SEQ ID NO: 3219
  Description of Artificial Sequence: Synthetic pistachio; 5' sequence + inner sequence + 3' sequence

SEQ ID NO: 27417 - DNA, 76 bp, Artificial Sequence; identical to SEQ ID NO: 7503
  Description of Artificial Sequence: Synthetic pistachio; 5' sequence + inner sequence + 3' sequence

SEQ ID NO: 27418 - DNA, 76 bp, Artificial Sequence; identical to SEQ ID NO: 3438
  Description of Artificial Sequence: Synthetic pistachio; 5' sequence + inner sequence + 3' sequence

SEQ ID NO: 27419 - DNA, 76 bp, Artificial Sequence; identical to SEQ ID NO: 3891
  Description of Artificial Sequence: Synthetic pistachio; 5' sequence + inner sequence + 3' sequence

SEQ ID NO: 27420 - DNA, 76 bp, Artificial Sequence; identical to SEQ ID NO: 3349
  Description of Artificial Sequence: Synthetic pistachio; 5' sequence + inner sequence + 3' sequence

SEQ ID NO: 27421 - DNA, 76 bp, Artificial Sequence; identical to SEQ ID NO: 3260
  Description of Artificial Sequence: Synthetic pistachio; 5' sequence + inner sequence + 3' sequence

SEQ ID NO: 27422 - DNA, 76 bp, Artificial Sequence; identical to SEQ ID NO: 3338
  Description of Artificial Sequence: Synthetic pistachio; 5' sequence + inner sequence + 3' sequence

SEQ ID NO: 27423 - DNA, 76 bp, Artificial Sequence; identical to SEQ ID NO: 3475
  Description of Artificial Sequence: Synthetic pistachio; 5' sequence + inner sequence + 3' sequence

SEQ ID NO: 27424 - DNA, 76 bp, Artificial Sequence; identical to SEQ ID NO: 3332
  Description of Artificial Sequence: Synthetic pistachio; 5' sequence + inner sequence + 3' sequence

SEQ ID NO: 27425 - DNA, 76 bp, Artificial Sequence; identical to SEQ ID NO: 3418
  Description of Artificial Sequence: Synthetic pistachio; 5' sequence + inner sequence + 3' sequence

SEQ ID NO: 27426 - DNA, 76 bp, Artificial Sequence; identical to SEQ ID NO: 3545
  Description of Artificial Sequence: Synthetic pistachio; 5' sequence + inner sequence + 3' sequence

SEQ ID NO: 27427 - DNA, 77 bp, Artificial Sequence; identical to SEQ ID NO: 7245
  Description of Artificial Sequence: Synthetic pistachio; 5' sequence + inner sequence + 3' sequence

SEQ ID NO: 27428 - DNA, 76 bp, Artificial Sequence; identical to SEQ ID NO: 3884
  Description of Artificial Sequence: Synthetic pistachio; 5' sequence + inner sequence + 3' sequence

SEQ ID NO: 27429 - DNA, 76 bp, Artificial Sequence; identical to SEQ ID NO: 3685
  Description of Artificial Sequence: Synthetic pistachio; 5' sequence + inner sequence + 3' sequence

SEQ ID NO: 27430 - DNA, 76 bp, Artificial Sequence; identical to SEQ ID NO: 3637
  Description of Artificial Sequence: Synthetic pistachio; 5' sequence + inner sequence + 3' sequence

SEQ ID NO: 27431 - DNA, 76 bp, Artificial Sequence; identical to SEQ ID NO: 11712
  Description of Artificial Sequence: Synthetic pistachio; 5' sequence + inner sequence + 3' sequence

SEQ ID NO: 27432 - DNA, 76 bp, Artificial Sequence; identical to SEQ ID NO: 3291
  Description of Artificial Sequence: Synthetic pistachio; 5' sequence + inner sequence + 3' sequence

SEQ ID NO: 27433 - DNA, 76 bp, Artificial Sequence; identical to SEQ ID NO: 3392
  Description of Artificial Sequence: Synthetic pistachio; 5' sequence + inner sequence + 3' sequence

SEQ ID NO: 27434 - DNA, 76 bp, Artificial Sequence; identical to SEQ ID NO: 3398
  Description of Artificial Sequence: Synthetic pistachio; 5' sequence + inner sequence + 3' sequence

SEQ ID NO: 27435 - DNA, 76 bp, Artificial Sequence; identical to SEQ ID NO: 7451
  Description of Artificial Sequence: Synthetic pistachio; 5' sequence + inner sequence + 3' sequence

SEQ ID NO: 27436 - DNA, 76 bp, Artificial Sequence; identical to SEQ ID NO: 3364
  Description of Artificial Sequence: Synthetic pistachio; 5' sequence + inner sequence + 3' sequence

SEQ ID NO: 27437 - DNA, 76 bp, Artificial Sequence; identical to SEQ ID NO: 3621
  Description of Artificial Sequence: Synthetic pistachio; 5' sequence + inner sequence + 3' sequence

SEQ ID NO: 27438 - DNA, 76 bp, Artificial Sequence; identical to SEQ ID NO: 3289
  Description of Artificial Sequence: Synthetic pistachio; 5' sequence + inner sequence + 3' sequence

SEQ ID NO: 27439 - DNA, 76 bp, Artificial Sequence; identical to SEQ ID NO: 3330
  Description of Artificial Sequence: Synthetic pistachio; 5' sequence + inner sequence + 3' sequence

SEQ ID NO: 27440 - DNA, 76 bp, Artificial Sequence; identical to SEQ ID NO: 3403
  Description of Artificial Sequence: Synthetic pistachio; 5' sequence + inner sequence + 3' sequence

SEQ ID NO: 27441 - DNA, 76 bp, Artificial Sequence; identical to SEQ ID NO: 3724
  Description of Artificial Sequence: Synthetic pistachio; 5' sequence + inner sequence + 3' sequence

SEQ ID NO: 27442 - DNA, 76 bp, Artificial Sequence; identical to SEQ ID NO: 7238
  Description of Artificial Sequence: Synthetic pistachio; 5' sequence + inner sequence + 3' sequence

SEQ ID NO: 27443 - DNA, 76 bp, Artificial Sequence; identical to SEQ ID NO: 3296
  Description of Artificial Sequence: Synthetic pistachio; 5' sequence + inner sequence + 3' sequence

SEQ ID NO: 27444 - DNA, 76 bp, Artificial Sequence; identical to SEQ ID NO: 3676
  Description of Artificial Sequence: Synthetic pistachio; 5' sequence + inner sequence + 3' sequence

SEQ ID NO: 27445 - DNA, 76 bp, Artificial Sequence; identical to SEQ ID NO: 3800
  Description of Artificial Sequence: Synthetic pistachio; 5' sequence + inner sequence + 3' sequence

SEQ ID NO: 27446 - DNA, 76 bp, Artificial Sequence; identical to SEQ ID NO: 3375
  Description of Artificial Sequence: Synthetic pistachio; 5' sequence + inner sequence + 3' sequence

SEQ ID NO: 27447 - DNA, 71 bp, Artificial Sequence; identical to SEQ ID NO: 23136
  Description of Artificial Sequence: Synthetic pistachio; 5' sequence + inner sequence + 3' sequence

SEQ ID NO: 27448 - DNA, 76 bp, Artificial Sequence; identical to SEQ ID NO: 3930
  Description of Artificial Sequence: Synthetic pistachio; 5' sequence + inner sequence + 3' sequence

SEQ ID NO: 27449 - DNA, 76 bp, Artificial Sequence; identical to SEQ ID NO: 3331
  Description of Artificial Sequence: Synthetic pistachio; 5' sequence + inner sequence + 3' sequence

SEQ ID NO: 27450 - DNA, 76 bp, Artificial Sequence; identical to SEQ ID NO: 3217
  Description of Artificial Sequence: Synthetic pistachio; 5' sequence + inner sequence + 3' sequence

SEQ ID NO: 27451 - DNA, 76 bp, Artificial Sequence; identical to SEQ ID NO: 3523
  Description of Artificial Sequence: Synthetic pistachio; 5' sequence + inner sequence + 3' sequence

SEQ ID NO: 27452 - DNA, 76 bp, Artificial Sequence; identical to SEQ ID NO: 3180
  Description of Artificial Sequence: Synthetic pistachio; 5' sequence + inner sequence + 3' sequence

SEQ ID NO: 27453 - DNA, 76 bp, Artificial Sequence; identical to SEQ ID NO: 3239
  Description of Artificial Sequence: Synthetic pistachio; 5' sequence + inner sequence + 3' sequence

SEQ ID NO: 27454 - DNA, 76 bp, Artificial Sequence; identical to SEQ ID NO: 7658
  Description of Artificial Sequence: Synthetic pistachio; 5' sequence + inner sequence + 3' sequence

SEQ ID NO: 27455 - DNA, 76 bp, Artificial Sequence; identical to SEQ ID NO: 23133
  Description of Artificial Sequence: Synthetic pistachio; 5' sequence + inner sequence + 3' sequence

SEQ ID NO: 27456 - DNA, 76 bp, Artificial Sequence; identical to SEQ ID NO: 3394
  Description of Artificial Sequence: Synthetic pistachio; 5' sequence + inner sequence + 3' sequence

SEQ ID NO: 27457 - DNA, 76 bp, Artificial Sequence; identical to SEQ ID NO: 7234
  Description of Artificial Sequence: Synthetic pistachio; 5' sequence + inner sequence + 3' sequence

SEQ ID NO: 27458 - DNA, 76 bp, Artificial Sequence; identical to SEQ ID NO: 3557
  Description of Artificial Sequence: Synthetic pistachio; 5' sequence + inner sequence + 3' sequence

SEQ ID NO: 27459 - DNA, 76 bp, Artificial Sequence; identical to SEQ ID NO: 3746
  Description of Artificial Sequence: Synthetic pistachio; 5' sequence + inner sequence + 3' sequence

SEQ ID NO: 27460 - DNA, 76 bp, Artificial Sequence; identical to SEQ ID NO: 3457
  Description of Artificial Sequence: Synthetic pistachio; 5' sequence + inner sequence + 3' sequence

SEQ ID NO: 27461 - DNA, 76 bp, Artificial Sequence; identical to SEQ ID NO: 3303
  Description of Artificial Sequence: Synthetic pistachio; 5' sequence + inner sequence + 3' sequence

SEQ ID NO: 27462 - DNA, 76 bp, Artificial Sequence; identical to SEQ ID NO: 3680
  Description of Artificial Sequence: Synthetic pistachio; 5' sequence + inner sequence + 3' sequence

SEQ ID NO: 27463 - DNA, 76 bp, Artificial Sequence; identical to SEQ ID NO: 3611
  Description of Artificial Sequence: Synthetic pistachio; 5' sequence + inner sequence + 3' sequence

SEQ ID NO: 27464 - DNA, 76 bp, Artificial Sequence; identical to SEQ ID NO: 3169
  Description of Artificial Sequence: Synthetic pistachio; 5' sequence + inner sequence + 3' sequence

SEQ ID NO: 27465 - DNA, 76 bp, Artificial Sequence; identical to SEQ ID NO: 7336
  Description of Artificial Sequence: Synthetic pistachio; 5' sequence + inner sequence + 3' sequence

SEQ ID NO: 27466 - DNA, 77 bp, Artificial Sequence; identical to SEQ ID NO: 3216
  Description of Artificial Sequence: Synthetic pistachio; 5' sequence + inner sequence + 3' sequence

SEQ ID NO: 27467 - DNA, 76 bp, Artificial Sequence; identical to SEQ ID NO: 3518
  Description of Artificial Sequence: Synthetic pistachio; 5' sequence + inner sequence + 3' sequence

SEQ ID NO: 27468 - DNA, 76 bp, Artificial Sequence; identical to SEQ ID NO: 3515
  Description of Artificial Sequence: Synthetic pistachio; 5' sequence + inner sequence + 3' sequence

SEQ ID NO: 27469 - DNA, 76 bp, Artificial Sequence; identical to SEQ ID NO: 11763
  Description of Artificial Sequence: Synthetic pistachio; 5' sequence + inner sequence + 3' sequence

SEQ ID NO: 27470 - DNA, 76 bp, Artificial Sequence; identical to SEQ ID NO: 3791
  Description of Artificial Sequence: Synthetic pistachio; 5' sequence + inner sequence + 3' sequence

SEQ ID NO: 27471 - DNA, 75 bp, Artificial Sequence; identical to SEQ ID NO: 3873
  Description of Artificial Sequence: Synthetic pistachio; 5' sequence + inner sequence + 3' sequence

SEQ ID NO: 27472 - DNA, 76 bp, Artificial Sequence; identical to SEQ ID NO: 3326
  Description of Artificial Sequence: Synthetic pistachio; 5' sequence + inner sequence + 3' sequence

SEQ ID NO: 27473 - DNA, 76 bp, Artificial Sequence; identical to SEQ ID NO: 7317
  Description of Artificial Sequence: Synthetic pistachio; 5' sequence + inner sequence + 3' sequence

SEQ ID NO: 27474 - DNA, 76 bp, Artificial Sequence; identical to SEQ ID NO: 3276
  Description of Artificial Sequence: Synthetic pistachio; 5' sequence + inner sequence + 3' sequence

SEQ ID NO: 27475 - DNA, 76 bp, Artificial Sequence; identical to SEQ ID NO: 3671
  Description of Artificial Sequence: Synthetic pistachio; 5' sequence + inner sequence + 3' sequence

SEQ ID NO: 27476 - DNA, 76 bp, Artificial Sequence; identical to SEQ ID NO: 3850
  Description of Artificial Sequence: Synthetic pistachio; 5' sequence + inner sequence + 3' sequence

SEQ ID NO: 27477 - DNA, 76 bp, Artificial Sequence; identical to SEQ ID NO: 3191
  Description of Artificial Sequence: Synthetic pistachio; 5' sequence + inner sequence + 3' sequence

SEQ ID NO: 27478 - DNA, 76 bp, Artificial Sequence; identical to SEQ ID NO: 7748
  Description of Artificial Sequence: Synthetic pistachio; 5' sequence + inner sequence + 3' sequence

SEQ ID NO: 27479 - DNA, 76 bp, Artificial Sequence; identical to SEQ ID NO: 7351
  Description of Artificial Sequence: Synthetic pistachio; 5' sequence + inner sequence + 3' sequence

SEQ ID NO: 27480 - DNA, 76 bp, Artificial Sequence; identical to SEQ ID NO: 3442
  Description of Artificial Sequence: Synthetic pistachio; 5' sequence + inner sequence + 3' sequence

SEQ ID NO: 27481 - DNA, 76 bp, Artificial Sequence; identical to SEQ ID NO: 7691
  Description of Artificial Sequence: Synthetic pistachio; 5' sequence + inner sequence + 3' sequence

SEQ ID NO: 27482 - DNA, 76 bp, Artificial Sequence; identical to SEQ ID NO: 3540
  Description of Artificial Sequence: Synthetic pistachio; 5' sequence + inner sequence + 3' sequence

SEQ ID NO: 27483 - DNA, 76 bp, Artificial Sequence; identical to SEQ ID NO: 3317
  Description of Artificial Sequence: Synthetic pistachio; 5' sequence + inner sequence + 3' sequence

SEQ ID NO: 27484 - DNA, 76 bp, Artificial Sequence; identical to SEQ ID NO: 3596
  Description of Artificial Sequence: Synthetic pistachio; 5' sequence + inner sequence + 3' sequence

SEQ ID NO: 27485 - DNA, 74 bp, Artificial Sequence; identical to SEQ ID NO: 3423
  Description of Artificial Sequence: Synthetic pistachio; 5' sequence + inner sequence + 3' sequence

SEQ ID NO: 27486 - DNA, 76 bp, Artificial Sequence; identical to SEQ ID NO: 7312
  Description of Artificial Sequence: Synthetic pistachio; 5' sequence + inner sequence + 3' sequence

SEQ ID NO: 27487 - DNA, 76 bp, Artificial Sequence; identical to SEQ ID NO: 3443
  Description of Artificial Sequence: Synthetic pistachio; 5' sequence + inner sequence + 3' sequence

SEQ ID NO: 27488 - DNA, 76 bp, Artificial Sequence; identical to SEQ ID NO: 3345
  Description of Artificial Sequence: Synthetic pistachio; 5' sequence + inner sequence + 3' sequence

SEQ ID NO: 27489 - DNA, 76 bp, Artificial Sequence; identical to SEQ ID NO: 3461
  Description of Artificial Sequence: Synthetic pistachio; 5' sequence + inner sequence + 3' sequence

SEQ ID NO: 27490 - DNA, 76 bp, Artificial Sequence; identical to SEQ ID NO: 3277
  Description of Artificial Sequence: Synthetic pistachio; 5' sequence + inner sequence + 3' sequence

SEQ ID NO: 27491 - DNA, 76 bp, Artificial Sequence; identical to SEQ ID NO: 3625
  Description of Artificial Sequence: Synthetic pistachio; 5' sequence + inner sequence + 3' sequence

SEQ ID NO: 27492 - DNA, 76 bp, Artificial Sequence; identical to SEQ ID NO: 3256
  Description of Artificial Sequence: Synthetic pistachio; 5' sequence + inner sequence + 3' sequence

SEQ ID NO: 27493 - DNA, 76 bp, Artificial Sequence; identical to SEQ ID NO: 3591
  Description of Artificial Sequence: Synthetic pistachio; 5' sequence + inner sequence + 3' sequence

SEQ ID NO: 27494 - DNA, 76 bp, Artificial Sequence; identical to SEQ ID NO: 3519
  Description of Artificial Sequence: Synthetic pistachio; 5' sequence + inner sequence + 3' sequence

SEQ ID NO: 27495 - DNA, 76 bp, Artificial Sequence; identical to SEQ ID NO: 3556
  Description of Artificial Sequence: Synthetic pistachio; 5' sequence + inner sequence + 3' sequence

SEQ ID NO: 27496 - DNA, 76 bp, Artificial Sequence; identical to SEQ ID NO: 3699
  Description of Artificial Sequence: Synthetic pistachio; 5' sequence + inner sequence + 3' sequence

SEQ ID NO: 27497 - DNA, 76 bp, Artificial Sequence; identical to SEQ ID NO: 3493
  Description of Artificial Sequence: Synthetic pistachio; 5' sequence + inner sequence + 3' sequence

SEQ ID NO: 27498 - DNA, 76 bp, Artificial Sequence; identical to SEQ ID NO: 3823
  Description of Artificial Sequence: Synthetic pistachio; 5' sequence + inner sequence + 3' sequence

SEQ ID NO: 27499 - DNA, 76 bp, Artificial Sequence; identical to SEQ ID NO: 11869
  Description of Artificial Sequence: Synthetic pistachio; 5' sequence + inner sequence + 3' sequence

SEQ ID NO: 27500 - DNA, 76 bp, Artificial Sequence; identical to SEQ ID NO: 3962
  Description of Artificial Sequence: Synthetic pistachio; 5' sequence + inner sequence + 3' sequence

SEQ ID NO: 27501 - DNA, 76 bp, Artificial Sequence; identical to SEQ ID NO: 7472
  Description of Artificial Sequence: Synthetic pistachio; 5' sequence + inner sequence + 3' sequence

SEQ ID NO: 27502 - DNA, 76 bp, Artificial Sequence; identical to SEQ ID NO: 3378
  Description of Artificial Sequence: Synthetic pistachio; 5' sequence + inner sequence + 3' sequence

SEQ ID NO: 27503 - DNA, 76 bp, Artificial Sequence; identical to SEQ ID NO: 3278
  Description of Artificial Sequence: Synthetic pistachio; 5' sequence + inner sequence + 3' sequence

SEQ ID NO: 27504 - DNA, 76 bp, Artificial Sequence; identical to SEQ ID NO: 3322
  Description of Artificial Sequence: Synthetic pistachio; 5' sequence + inner sequence + 3' sequence

SEQ ID NO: 27505 - DNA, 76 bp, Artificial Sequence; identical to SEQ ID NO: 7230
  Description of Artificial Sequence: Synthetic pistachio; 5' sequence + inner sequence + 3' sequence

SEQ ID NO: 27506 - DNA, 76 bp, Artificial Sequence; identical to SEQ ID NO: 3346
  Description of Artificial Sequence: Synthetic pistachio; 5' sequence + inner sequence + 3' sequence

SEQ ID NO: 27507 - DNA, 76 bp, Artificial Sequence; identical to SEQ ID NO: 11769
  Description of Artificial Sequence: Synthetic pistachio; 5' sequence + inner sequence + 3' sequence

SEQ ID NO: 27508 - DNA, 76 bp, Artificial Sequence; identical to SEQ ID NO: 3324
  Description of Artificial Sequence: Synthetic pistachio; 5' sequence + inner sequence + 3' sequence

SEQ ID NO: 27509 - DNA, 76 bp, Artificial Sequence; identical to SEQ ID NO: 3846
  Description of Artificial Sequence: Synthetic pistachio; 5' sequence + inner sequence + 3' sequence

SEQ ID NO: 27510 - DNA, 76 bp, Artificial Sequence; identical to SEQ ID NO: 11801
  Description of Artificial Sequence: Synthetic pistachio; 5' sequence + inner sequence + 3' sequence

SEQ ID NO: 27511 - DNA, 76 bp, Artificial Sequence; identical to SEQ ID NO: 3435
  Description of Artificial Sequence: Synthetic pistachio; 5' sequence + inner sequence + 3' sequence

SEQ ID NO: 27512 - DNA, 76 bp, Artificial Sequence; identical to SEQ ID NO: 3945
  Description of Artificial Sequence: Synthetic pistachio; 5' sequence + inner sequence + 3' sequence

SEQ ID NO: 27513 - DNA, 76 bp, Artificial Sequence; identical to SEQ ID NO: 3678
  Description of Artificial Sequence: Synthetic pistachio; 5' sequence + inner sequence + 3' sequence

SEQ ID NO: 27514 - DNA, 76 bp, Artificial Sequence; identical to SEQ ID NO: 3484
  Description of Artificial Sequence: Synthetic pistachio; 5' sequence + inner sequence + 3' sequence

SEQ ID NO: 27515 - DNA, 76 bp, Artificial Sequence; identical to SEQ ID NO: 3367
  Description of Artificial Sequence: Synthetic pistachio; 5' sequence + inner sequence + 3' sequence

SEQ ID NO: 27516 - DNA, 74 bp, Artificial Sequence; identical to SEQ ID NO: 3241
  Description of Artificial Sequence: Synthetic pistachio; 5' sequence + inner sequence + 3' sequence

SEQ ID NO: 27517 - DNA, 76 bp, Artificial Sequence; identical to SEQ ID NO: 3490
  Description of Artificial Sequence: Synthetic pistachio; 5' sequence + inner sequence + 3' sequence

SEQ ID NO: 27518 - DNA, 76 bp, Artificial Sequence; identical to SEQ ID NO: 3467
  Description of Artificial Sequence: Synthetic pistachio; 5' sequence + inner sequence + 3' sequence

SEQ ID NO: 27519 - DNA, 76 bp, Artificial Sequence; identical to SEQ ID NO: 3780
  Description of Artificial Sequence: Synthetic pistachio; 5' sequence + inner sequence + 3' sequence

SEQ ID NO: 27520 - DNA, 76 bp, Artificial Sequence; identical to SEQ ID NO: 3281
  Description of Artificial Sequence: Synthetic pistachio; 5' sequence + inner sequence + 3' sequence

SEQ ID NO: 27521 - DNA, 76 bp, Artificial Sequence; identical to SEQ ID NO: 7804
  Description of Artificial Sequence: Synthetic pistachio; 5' sequence + inner sequence + 3' sequence

SEQ ID NO: 27522 - DNA, 76 bp, Artificial Sequence; identical to SEQ ID NO: 3420
  Description of Artificial Sequence: Synthetic pistachio; 5' sequence + inner sequence + 3' sequence

SEQ ID NO: 27523 - DNA, 76 bp, Artificial Sequence; identical to SEQ ID NO: 15958
  Description of Artificial Sequence: Synthetic pistachio; 5' sequence + inner sequence + 3' sequence

SEQ ID NO: 27524 - DNA, 76 bp, Artificial Sequence; identical to SEQ ID NO: 3862
  Description of Artificial Sequence: Synthetic pistachio; 5' sequence + inner sequence + 3' sequence

SEQ ID NO: 27525 - DNA, 76 bp, Artificial Sequence; identical to SEQ ID NO: 7887
  Description of Artificial Sequence: Synthetic pistachio; 5' sequence + inner sequence + 3' sequence

SEQ ID NO: 27526 - DNA, 76 bp, Artificial Sequence; identical to SEQ ID NO: 3463
  Description of Artificial Sequence: Synthetic pistachio; 5' sequence + inner sequence + 3' sequence

SEQ ID NO: 27527 - DNA, 76 bp, Artificial Sequence
  Description of Artificial Sequence: Synthetic pistachio; 5' sequence + inner sequence + 3' sequence
tagggaagagaaggacatatgatcgtgcaacggcaggtcacttcccttggtcgttgactagtacatgaccacttga

SEQ ID NO: 27528 - DNA, 76 bp, Artificial Sequence; identical to SEQ ID NO: 3774
  Description of Artificial Sequence: Synthetic pistachio; 5' sequence + inner sequence + 3' sequence

SEQ ID NO: 27529 - DNA, 76 bp, Artificial Sequence; identical to SEQ ID NO: 3348
  Description of Artificial Sequence: Synthetic pistachio; 5' sequence + inner sequence + 3' sequence

SEQ ID NO: 27530 - DNA, 76 bp, Artificial Sequence; identical to SEQ ID NO: 3380
  Description of Artificial Sequence: Synthetic pistachio; 5' sequence + inner sequence + 3' sequence

SEQ ID NO: 27531 - DNA, 76 bp, Artificial Sequence; identical to SEQ ID NO: 3318
  Description of Artificial Sequence: Synthetic pistachio; 5' sequence + inner sequence + 3' sequence

SEQ ID NO: 27532 - DNA, 75 bp, Artificial Sequence; identical to SEQ ID NO: 7559
  Description of Artificial Sequence: Synthetic pistachio; 5' sequence + inner sequence + 3' sequence

SEQ ID NO: 27533 - DNA, 76 bp, Artificial Sequence; identical to SEQ ID NO: 3772
  Description of Artificial Sequence: Synthetic pistachio; 5' sequence + inner sequence + 3' sequence

SEQ ID NO: 27534 - DNA, 76 bp, Artificial Sequence; identical to SEQ ID NO: 7690
  Description of Artificial Sequence: Synthetic pistachio; 5' sequence + inner sequence + 3' sequence

SEQ ID NO: 27535 - DNA, 73 bp, Artificial Sequence; identical to SEQ ID NO: 3885
  Description of Artificial Sequence: Synthetic pistachio; 5' sequence + inner sequence + 3' sequence

SEQ ID NO: 27536 - DNA, 76 bp, Artificial Sequence; identical to SEQ ID NO: 3357
  Description of Artificial Sequence: Synthetic pistachio; 5' sequence + inner sequence + 3' sequence

SEQ ID NO: 27537 - DNA, 76 bp, Artificial Sequence; identical to SEQ ID NO: 7405
  Description of Artificial Sequence: Synthetic pistachio; 5' sequence + inner sequence + 3' sequence

SEQ ID NO: 27538 - DNA, 76 bp, Artificial Sequence; identical to SEQ ID NO: 3426
  Description of Artificial Sequence: Synthetic pistachio; 5' sequence + inner sequence + 3' sequence

SEQ ID NO: 27539 - DNA, 76 bp, Artificial Sequence; identical to SEQ ID NO: 3407
  Description of Artificial Sequence: Synthetic pistachio; 5' sequence + inner sequence + 3' sequence

SEQ ID NO: 27540 - DNA, 76 bp, Artificial Sequence; identical to SEQ ID NO: 7967
  Description of Artificial Sequence: Synthetic pistachio; 5' sequence + inner sequence + 3' sequence

SEQ ID NO: 27541 - DNA, 76 bp, Artificial Sequence; identical to SEQ ID NO: 3807
  Description of Artificial Sequence: Synthetic pistachio; 5' sequence + inner sequence + 3' sequence

SEQ ID NO: 27542 - DNA, 76 bp, Artificial Sequence; identical to SEQ ID NO: 7775
  Description of Artificial Sequence: Synthetic pistachio; 5' sequence + inner sequence + 3' sequence

SEQ ID NO: 27543 - DNA, 76 bp, Artificial Sequence; identical to SEQ ID NO: 3677
  Description of Artificial Sequence: Synthetic pistachio; 5' sequence + inner sequence + 3' sequence

SEQ ID NO: 27544 - DNA, 76 bp, Artificial Sequence; identical to SEQ ID NO: 23119
  Description of Artificial Sequence: Synthetic pistachio; 5' sequence + inner sequence + 3' sequence

SEQ ID NO: 27545 - DNA, 76 bp, Artificial Sequence; identical to SEQ ID NO: 3477
  Description of Artificial Sequence: Synthetic pistachio; 5' sequence + inner sequence + 3' sequence

SEQ ID NO: 27546 - DNA, 76 bp, Artificial Sequence; identical to SEQ ID NO: 7651
  Description of Artificial Sequence: Synthetic pistachio; 5' sequence + inner sequence + 3' sequence

SEQ ID NO: 27547 - DNA, 76 bp, Artificial Sequence; identical to SEQ ID NO: 3776
  Description of Artificial Sequence: Synthetic pistachio; 5' sequence + inner sequence + 3' sequence

SEQ ID NO: 27548 - DNA, 76 bp, Artificial Sequence; identical to SEQ ID NO: 3397
  Description of Artificial Sequence: Synthetic pistachio; 5' sequence + inner sequence + 3' sequence

SEQ ID NO: 27549 - DNA, 76 bp, Artificial Sequence; identical to SEQ ID NO: 3808
  Description of Artificial Sequence: Synthetic pistachio; 5' sequence + inner sequence + 3' sequence

SEQ ID NO: 27550 - DNA, 76 bp, Artificial Sequence; identical to SEQ ID NO: 3353
  Description of Artificial Sequence: Synthetic pistachio; 5' sequence + inner sequence + 3' sequence

SEQ ID NO: 27551 - DNA, 76 bp, Artificial Sequence; identical to SEQ ID NO: 3932
  Description of Artificial Sequence: Synthetic pistachio; 5' sequence + inner sequence + 3' sequence

SEQ ID NO: 27552 - DNA, 76 bp, Artificial Sequence; identical to SEQ ID NO: 15985
  Description of Artificial Sequence: Synthetic pistachio; 5' sequence + inner sequence + 3' sequence

SEQ ID NO: 27553 - DNA, 76 bp, Artificial Sequence; identical to SEQ ID NO: 3450
  Description of Artificial Sequence: Synthetic pistachio; 5' sequence + inner sequence + 3' sequence

SEQ ID NO: 27554 - DNA, 76 bp, Artificial Sequence; identical to SEQ ID NO: 3465
  Description of Artificial Sequence: Synthetic pistachio; 5' sequence + inner sequence + 3' sequence

SEQ ID NO: 27555 - DNA, 76 bp, Artificial Sequence; identical to SEQ ID NO: 3695
  Description of Artificial Sequence: Synthetic pistachio; 5' sequence + inner sequence + 3' sequence

SEQ ID NO: 27556 - DNA, 76 bp, Artificial Sequence; identical to SEQ ID NO: 11962
  Description of Artificial Sequence: Synthetic pistachio; 5' sequence + inner sequence + 3' sequence

SEQ ID NO: 27557 - DNA, 76 bp, Artificial Sequence; identical to SEQ ID NO: 3805
  Description of Artificial Sequence: Synthetic pistachio; 5' sequence + inner sequence + 3' sequence

SEQ ID NO: 27558 - DNA, 76 bp, Artificial Sequence; identical to SEQ ID NO: 3452
  Description of Artificial Sequence: Synthetic pistachio; 5' sequence + inner sequence + 3' sequence

SEQ ID NO: 27559 - DNA, 76 bp, Artificial Sequence; identical to SEQ ID NO: 3634
  Description of Artificial Sequence: Synthetic pistachio; 5' sequence + inner sequence + 3' sequence

SEQ ID NO: 27560 - DNA, 76 bp, Artificial Sequence; identical to SEQ ID NO: 3741
  Description of Artificial Sequence: Synthetic pistachio; 5' sequence + inner sequence + 3' sequence

SEQ ID NO: 27561 - DNA, 76 bp, Artificial Sequence; identical to SEQ ID NO: 3292
  Description of Artificial Sequence: Synthetic pistachio; 5' sequence + inner sequence + 3' sequence

SEQ ID NO: 27562 - DNA, 76 bp, Artificial Sequence; identical to SEQ ID NO: 3998
  Description of Artificial Sequence: Synthetic pistachio; 5' sequence + inner sequence + 3' sequence

SEQ ID NO: 27563 - DNA, 76 bp, Artificial Sequence; identical to SEQ ID NO: 3662
  Description of Artificial Sequence: Synthetic pistachio; 5' sequence + inner sequence + 3' sequence

SEQ ID NO: 27564 - DNA, 76 bp, Artificial Sequence; identical to SEQ ID NO: 7638
  Description of Artificial Sequence: Synthetic pistachio; 5' sequence + inner sequence + 3' sequence

SEQ ID NO: 27565 - DNA, 76 bp, Artificial Sequence; identical to SEQ ID NO: 3994
  Description of Artificial Sequence: Synthetic pistachio; 5' sequence + inner sequence + 3' sequence

SEQ ID NO: 27566 - DNA, 76 bp, Artificial Sequence; identical to SEQ ID NO: 3768
  Description of Artificial Sequence: Synthetic pistachio; 5' sequence + inner sequence + 3' sequence

SEQ ID NO: 27567 - DNA, 76 bp, Artificial Sequence; identical to SEQ ID NO: 3613
  Description of Artificial Sequence: Synthetic pistachio; 5' sequence + inner sequence + 3' sequence

SEQ ID NO: 27568 - DNA, 76 bp, Artificial Sequence; identical to SEQ ID NO: 3225
  Description of Artificial Sequence: Synthetic pistachio; 5' sequence + inner sequence + 3' sequence

SEQ ID NO: 27569 - DNA, 76 bp, Artificial Sequence; identical to SEQ ID NO: 3506
  Description of Artificial Sequence: Synthetic pistachio; 5' sequence + inner sequence + 3' sequence

SEQ ID NO: 27570 - DNA, 76 bp, Artificial Sequence; identical to SEQ ID NO: 11928
  Description of Artificial Sequence: Synthetic pistachio; 5' sequence + inner sequence + 3' sequence

SEQ ID NO: 27571 - DNA, 76 bp, Artificial Sequence; identical to SEQ ID NO: 3644
  Description of Artificial Sequence: Synthetic pistachio; 5' sequence + inner sequence + 3' sequence

SEQ ID NO: 27572 - DNA, 76 bp, Artificial Sequence; identical to SEQ ID NO: 3351
  Description of Artificial Sequence: Synthetic pistachio; 5' sequence + inner sequence + 3' sequence

SEQ ID NO: 27573 - DNA, 76 bp, Artificial Sequence; identical to SEQ ID NO: 7708
  Description of Artificial Sequence: Synthetic pistachio; 5' sequence + inner sequence + 3' sequence

SEQ ID NO: 27574 - DNA, 76 bp, Artificial Sequence; identical to SEQ ID NO: 23506
  Description of Artificial Sequence: Synthetic pistachio; 5' sequence + inner sequence + 3' sequence

SEQ ID NO: 27575 - DNA, 76 bp, Artificial Sequence; identical to SEQ ID NO: 3404
  Description of Artificial Sequence: Synthetic pistachio; 5' sequence + inner sequence + 3' sequence

SEQ ID NO: 27576 - DNA, 76 bp, Artificial Sequence; identical to SEQ ID NO: 3408
  Description of Artificial Sequence: Synthetic pistachio; 5' sequence + inner sequence + 3' sequence

SEQ ID NO: 27577 - DNA, 76 bp, Artificial Sequence; identical to SEQ ID NO: 3199
  Description of Artificial Sequence: Synthetic pistachio; 5' sequence + inner sequence + 3' sequence

SEQ ID NO: 27578 - DNA, 76 bp, Artificial Sequence; identical to SEQ ID NO: 3586
  Description of Artificial Sequence: Synthetic pistachio; 5' sequence + inner sequence + 3' sequence

SEQ ID NO: 27579 - DNA, 76 bp, Artificial Sequence; identical to SEQ ID NO: 3953
  Description of Artificial Sequence: Synthetic pistachio; 5' sequence + inner sequence + 3' sequence

SEQ ID NO: 27580 - DNA, 76 bp, Artificial Sequence; identical to SEQ ID NO: 3302
  Description of Artificial Sequence: Synthetic pistachio; 5' sequence + inner sequence + 3' sequence

SEQ ID NO: 27581 - DNA, 75 bp, Artificial Sequence; identical to SEQ ID NO: 3648
  Description of Artificial Sequence: Synthetic pistachio; 5' sequence + inner sequence + 3' sequence

SEQ ID NO: 27582 - DNA, 76 bp, Artificial Sequence; identical to SEQ ID NO: 23269
  Description of Artificial Sequence: Synthetic pistachio; 5' sequence + inner sequence + 3' sequence

SEQ ID NO: 27583 - DNA, 76 bp, Artificial Sequence; identical to SEQ ID NO: 11458
  Description of Artificial Sequence: Synthetic pistachio; 5' sequence + inner sequence + 3' sequence

SEQ ID NO: 27584 - DNA, 76 bp, Artificial Sequence; identical to SEQ ID NO: 3433
  Description of Artificial Sequence: Synthetic pistachio; 5' sequence + inner sequence + 3' sequence

SEQ ID NO: 27585 - DNA, 76 bp, Artificial Sequence; identical to SEQ ID NO: 3551
  Description of Artificial Sequence: Synthetic pistachio; 5' sequence + inner sequence + 3' sequence

SEQ ID NO: 27586 - DNA, 76 bp, Artificial Sequence; identical to SEQ ID NO: 3663
  Description of Artificial Sequence: Synthetic pistachio; 5' sequence + inner sequence + 3' sequence

SEQ ID NO: 27587 - DNA, 76 bp, Artificial Sequence; identical to SEQ ID NO: 3914
  Description of Artificial Sequence: Synthetic pistachio; 5' sequence + inner sequence + 3' sequence

SEQ ID NO: 27588 - DNA, 76 bp, Artificial Sequence; identical to SEQ ID NO: 3881
  Description of Artificial Sequence: Synthetic pistachio; 5' sequence + inner sequence + 3' sequence

SEQ ID NO: 27589 - DNA, 76 bp, Artificial Sequence; identical to SEQ ID NO: 23388
  Description of Artificial Sequence: Synthetic pistachio; 5' sequence + inner sequence + 3' sequence

SEQ ID NO: 27590 - DNA, 76 bp, Artificial Sequence; identical to SEQ ID NO: 4002
  Description of Artificial Sequence: Synthetic pistachio; 5' sequence + inner sequence + 3' sequence

SEQ ID NO: 27591 - DNA, 76 bp, Artificial Sequence; identical to SEQ ID NO: 11546
  Description of Artificial Sequence: Synthetic pistachio; 5' sequence + inner sequence + 3' sequence

SEQ ID NO: 27592 - DNA, 76 bp, Artificial Sequence; identical to SEQ ID NO: 3439
  Description of Artificial Sequence: Synthetic pistachio; 5' sequence + inner sequence + 3' sequence

SEQ ID NO: 27593 - DNA, 76 bp, Artificial Sequence; identical to SEQ ID NO: 3570
  Description of Artificial Sequence: Synthetic pistachio; 5' sequence + inner sequence + 3' sequence

SEQ ID NO: 27594 - DNA, 76 bp, Artificial Sequence; identical to SEQ ID NO: 3261
  Description of Artificial Sequence: Synthetic pistachio; 5' sequence + inner sequence + 3' sequence

SEQ ID NO: 27595 - DNA, 76 bp, Artificial Sequence; identical to SEQ ID NO: 7449
  Description of Artificial Sequence: Synthetic pistachio; 5' sequence + inner sequence + 3' sequence

SEQ ID NO: 27596 - DNA, 76 bp, Artificial Sequence; identical to SEQ ID NO: 7856
  Description of Artificial Sequence: Synthetic pistachio; 5' sequence + inner sequence + 3' sequence

SEQ ID NO: 27597 - DNA, 76 bp, Artificial Sequence; identical to SEQ ID NO: 15521
  Description of Artificial Sequence: Synthetic pistachio; 5' sequence + inner sequence + 3' sequence

SEQ ID NO: 27598 - DNA, 76 bp, Artificial Sequence; identical to SEQ ID NO: 3668
  Description of Artificial Sequence: Synthetic pistachio; 5' sequence + inner sequence + 3' sequence

SEQ ID NO: 27599 - DNA, 76 bp, Artificial Sequence; identical to SEQ ID NO: 3589
  Description of Artificial Sequence: Synthetic pistachio; 5' sequence + inner sequence + 3' sequence

SEQ ID NO: 27600 - DNA, 76 bp, Artificial Sequence; identical to SEQ ID NO: 3943
  Description of Artificial Sequence: Synthetic pistachio; 5' sequence + inner sequence + 3' sequence

SEQ ID NO: 27601 - DNA, 76 bp, Artificial Sequence; identical to SEQ ID NO: 7590
  Description of Artificial Sequence: Synthetic pistachio; 5' sequence + inner sequence + 3' sequence

SEQ ID NO: 27602 - DNA, 76 bp, Artificial Sequence; identical to SEQ ID NO: 3775
  Description of Artificial Sequence: Synthetic pistachio; 5' sequence + inner sequence + 3' sequence

SEQ ID NO: 27603 - DNA, 76 bp, Artificial Sequence; identical to SEQ ID NO: 3561
  Description of Artificial Sequence: Synthetic pistachio; 5' sequence + inner sequence + 3' sequence

SEQ ID NO: 27604 - DNA, 76 bp, Artificial Sequence; identical to SEQ ID NO: 3670
  Description of Artificial Sequence: Synthetic pistachio; 5' sequence + inner sequence + 3' sequence

SEQ ID NO: 27605 - DNA, 76 bp, Artificial Sequence; identical to SEQ ID NO: 3568
  Description of Artificial Sequence: Synthetic pistachio; 5' sequence + inner sequence + 3' sequence

SEQ ID NO: 27606 - DNA, 76 bp, Artificial Sequence; identical to SEQ ID NO: 3486
  Description of Artificial Sequence: Synthetic pistachio; 5' sequence + inner sequence + 3' sequence

SEQ ID NO: 27607 - DNA, 76 bp, Artificial Sequence; identical to SEQ ID NO: 3498
  Description of Artificial Sequence: Synthetic pistachio; 5' sequence + inner sequence + 3' sequence

SEQ ID NO: 27608 - DNA, 76 bp, Artificial Sequence; identical to SEQ ID NO: 3793
  Description of Artificial Sequence: Synthetic pistachio; 5' sequence + inner sequence + 3' sequence

SEQ ID NO: 27609 - DNA, 76 bp, Artificial Sequence; identical to SEQ ID NO: 3727
  Description of Artificial Sequence: Synthetic pistachio; 5' sequence + inner sequence + 3' sequence

SEQ ID NO: 27610 - DNA, 71 bp, Artificial Sequence; identical to SEQ ID NO: 3427
  Description of Artificial Sequence: Synthetic pistachio; 5' sequence + inner sequence + 3' sequence

SEQ ID NO: 27611 - DNA, 76 bp, Artificial Sequence; identical to SEQ ID NO: 3363
  Description of Artificial Sequence: Synthetic pistachio; 5' sequence + inner sequence + 3' sequence

SEQ ID NO: 27612 - DNA, 76 bp, Artificial Sequence; identical to SEQ ID NO: 23286
  Description of Artificial Sequence: Synthetic pistachio; 5' sequence + inner sequence + 3' sequence

SEQ ID NO: 27613 - DNA, 76 bp, Artificial Sequence; identical to SEQ ID NO: 3632
  Description of Artificial Sequence: Synthetic pistachio; 5' sequence + inner sequence + 3' sequence

SEQ ID NO: 27614 - DNA, 76 bp, Artificial Sequence; identical to SEQ ID NO: 23193
  Description of Artificial Sequence: Synthetic pistachio; 5' sequence + inner sequence + 3' sequence

SEQ ID NO: 27615 - DNA, 76 bp, Artificial Sequence; identical to SEQ ID NO: 3479
  Description of Artificial Sequence: Synthetic pistachio; 5' sequence + inner sequence + 3' sequence

SEQ ID NO: 27616 - DNA, 76 bp, Artificial Sequence; identical to SEQ ID NO: 3672
  Description of Artificial Sequence: Synthetic pistachio; 5' sequence + inner sequence + 3' sequence

SEQ ID NO: 27617 - DNA, 76 bp, Artificial Sequence; identical to SEQ ID NO: 23413
  Description of Artificial Sequence: Synthetic pistachio; 5' sequence + inner sequence + 3' sequence

SEQ ID NO: 27618 - DNA, 76 bp, Artificial Sequence; identical to SEQ ID NO: 11787
  Description of Artificial Sequence: Synthetic pistachio; 5' sequence + inner sequence + 3' sequence

SEQ ID NO: 27619 - DNA, 76 bp, Artificial Sequence; identical to SEQ ID NO: 3488
  Description of Artificial Sequence: Synthetic pistachio; 5' sequence + inner sequence + 3' sequence

SEQ ID NO: 27620 - DNA, 76 bp, Artificial Sequence; identical to SEQ ID NO: 3669
  Description of Artificial Sequence: Synthetic pistachio; 5' sequence + inner sequence + 3' sequence

SEQ ID NO: 27621 - DNA, 76 bp, Artificial Sequence; identical to SEQ ID NO: 7988
  Description of Artificial Sequence: Synthetic pistachio; 5' sequence + inner sequence + 3' sequence

SEQ ID NO: 27622 - DNA, 76 bp, Artificial Sequence; identical to SEQ ID NO: 3661
  Description of Artificial Sequence: Synthetic pistachio; 5' sequence + inner sequence + 3' sequence

SEQ ID NO: 27623 - DNA, 76 bp, Artificial Sequence; identical to SEQ ID NO: 3434
  Description of Artificial Sequence: Synthetic pistachio; 5' sequence + inner sequence + 3' sequence

SEQ ID NO: 27624 - DNA, 76 bp, Artificial Sequence; identical to SEQ ID NO: 3543
  Description of Artificial Sequence: Synthetic pistachio; 5' sequence + inner sequence + 3' sequence

SEQ ID NO: 27625 - DNA, 76 bp, Artificial Sequence; identical to SEQ ID NO: 3915
  Description of Artificial Sequence: Synthetic pistachio; 5' sequence + inner sequence + 3' sequence

SEQ ID NO: 27626 - DNA, 76 bp, Artificial Sequence; identical to SEQ ID NO: 3510
  Description of Artificial Sequence: Synthetic pistachio; 5' sequence + inner sequence + 3' sequence

SEQ ID NO: 27627 - DNA, 76 bp, Artificial Sequence; identical to SEQ ID NO: 3393
  Description of Artificial Sequence: Synthetic pistachio; 5' sequence + inner sequence + 3' sequence

SEQ ID NO: 27628 - DNA, 76 bp, Artificial Sequence; identical to SEQ ID NO: 3580
  Description of Artificial Sequence: Synthetic pistachio; 5' sequence + inner sequence + 3' sequence

SEQ ID NO: 27629 - DNA, 76 bp, Artificial Sequence; identical to SEQ ID NO: 3366
  Description of Artificial Sequence: Synthetic pistachio; 5' sequence + inner sequence + 3' sequence

SEQ ID NO: 27630 - DNA, 76 bp, Artificial Sequence
  Description of Artificial Sequence: Synthetic pistachio; 5' sequence + inner sequence + 3' sequence
tagggaagagaaggacatatgattggccgatcgaccctatcaagtgccgcatgttgactagtacatgaccacttga

SEQ ID NO: 27631 - DNA, 76 bp, Artificial Sequence; identical to SEQ ID NO: 7918
  Description of Artificial Sequence: Synthetic pistachio; 5' sequence + inner sequence + 3' sequence

SEQ ID NO: 27632 - DNA, 76 bp, Artificial Sequence; identical to SEQ ID NO: 3279
  Description of Artificial Sequence: Synthetic pistachio; 5' sequence + inner sequence + 3' sequence

SEQ ID NO: 27633 - DNA, 76 bp, Artificial Sequence; identical to SEQ ID NO: 3497
  Description of Artificial Sequence: Synthetic pistachio; 5' sequence + inner sequence + 3' sequence

SEQ ID NO: 27634 - DNA, 76 bp, Artificial Sequence; identical to SEQ ID NO: 3718
  Description of Artificial Sequence: Synthetic pistachio; 5' sequence + inner sequence + 3' sequence

SEQ ID NO: 27635 - DNA, 76 bp, Artificial Sequence; identical to SEQ ID NO: 7610
  Description of Artificial Sequence: Synthetic pistachio; 5' sequence + inner sequence + 3' sequence

SEQ ID NO: 27636 - DNA, 76 bp, Artificial Sequence; identical to SEQ ID NO: 3836
  Description of Artificial Sequence: Synthetic pistachio; 5' sequence + inner sequence + 3' sequence

SEQ ID NO: 27637 - DNA, 76 bp, Artificial Sequence; identical to SEQ ID NO: 3533
  Description of Artificial Sequence: Synthetic pistachio; 5' sequence + inner sequence + 3' sequence

SEQ ID NO: 27638 - DNA, 76 bp, Artificial Sequence; identical to SEQ ID NO: 3300
  Description of Artificial Sequence: Synthetic pistachio; 5' sequence + inner sequence + 3' sequence

SEQ ID NO: 27639 - DNA, 76 bp, Artificial Sequence; identical to SEQ ID NO: 11844
  Description of Artificial Sequence: Synthetic pistachio; 5' sequence + inner sequence + 3' sequence

SEQ ID NO: 27640 - DNA, 76 bp, Artificial Sequence; identical to SEQ ID NO: 3539
  Description of Artificial Sequence: Synthetic pistachio; 5' sequence + inner sequence + 3' sequence

SEQ ID NO: 27641 - DNA, 76 bp, Artificial Sequence; identical to SEQ ID NO: 3356
  Description of Artificial Sequence: Synthetic pistachio; 5' sequence + inner sequence + 3' sequence

SEQ ID NO: 27642 - DNA, 76 bp, Artificial Sequence; identical to SEQ ID NO: 3333
  Description of Artificial Sequence: Synthetic pistachio; 5' sequence + inner sequence + 3' sequence

SEQ ID NO: 27643 - DNA, 76 bp, Artificial Sequence; identical to SEQ ID NO: 3459
  Description of Artificial Sequence: Synthetic pistachio; 5' sequence + inner sequence + 3' sequence

SEQ ID NO: 27644 - DNA, 76 bp, Artificial Sequence; identical to SEQ ID NO: 3657
  Description of Artificial Sequence: Synthetic pistachio; 5' sequence + inner sequence + 3' sequence

SEQ ID NO: 27645 - DNA, 76 bp, Artificial Sequence; identical to SEQ ID NO: 3514
  Description of Artificial Sequence: Synthetic pistachio; 5' sequence + inner sequence + 3' sequence

SEQ ID NO: 27646 - DNA, 76 bp, Artificial Sequence; identical to SEQ ID NO: 7603
  Description of Artificial Sequence: Synthetic pistachio; 5' sequence + inner sequence + 3' sequence

SEQ ID NO: 27647 - DNA, 76 bp, Artificial Sequence; identical to SEQ ID NO: 23233
  Description of Artificial Sequence: Synthetic pistachio; 5' sequence + inner sequence + 3' sequence

SEQ ID NO: 27648 - DNA, 76 bp, Artificial Sequence; identical to SEQ ID NO: 3763
  Description of Artificial Sequence: Synthetic pistachio; 5' sequence + inner sequence + 3' sequence

SEQ ID NO: 27649 - DNA, 76 bp, Artificial Sequence; identical to SEQ ID NO: 3309
  Description of Artificial Sequence: Synthetic pistachio; 5' sequence + inner sequence + 3' sequence

SEQ ID NO: 27650 - DNA, 76 bp, Artificial Sequence; identical to SEQ ID NO: 11767
  Description of Artificial Sequence: Synthetic pistachio; 5' sequence + inner sequence + 3' sequence

SEQ ID NO: 27651 - DNA, 76 bp, Artificial Sequence; identical to SEQ ID NO: 3594
  Description of Artificial Sequence: Synthetic pistachio; 5' sequence + inner sequence + 3' sequence

SEQ ID NO: 27652 - DNA, 76 bp, Artificial Sequence; identical to SEQ ID NO: 11633
  Description of Artificial Sequence: Synthetic pistachio; 5' sequence + inner sequence + 3' sequence

SEQ ID NO: 27653 - DNA, 76 bp, Artificial Sequence; identical to SEQ ID NO: 3626
  Description of Artificial Sequence: Synthetic pistachio; 5' sequence + inner sequence + 3' sequence

SEQ ID NO: 27654 - DNA, 76 bp, Artificial Sequence; identical to SEQ ID NO: 3579
  Description of Artificial Sequence: Synthetic pistachio; 5' sequence + inner sequence + 3' sequence

SEQ ID NO: 27655 - DNA, 76 bp, Artificial Sequence; identical to SEQ ID NO: 23592
  Description of Artificial Sequence: Synthetic pistachio; 5' sequence + inner sequence + 3' sequence

SEQ ID NO: 27656 - DNA, 76 bp, Artificial Sequence; identical to SEQ ID NO: 7565
  Description of Artificial Sequence: Synthetic pistachio; 5' sequence + inner sequence + 3' sequence

SEQ ID NO: 27657 - DNA, 76 bp, Artificial Sequence; identical to SEQ ID NO: 7667
  Description of Artificial Sequence: Synthetic pistachio; 5' sequence + inner sequence + 3' sequence

SEQ ID NO: 27658 - DNA, 76 bp, Artificial Sequence; identical to SEQ ID NO: 3664
  Description of Artificial Sequence: Synthetic pistachio; 5' sequence + inner sequence + 3' sequence

SEQ ID NO: 27659 - DNA, 74 bp, Artificial Sequence; identical to SEQ ID NO: 15885
  Description of Artificial Sequence: Synthetic pistachio; 5' sequence + inner sequence + 3' sequence

SEQ ID NO: 27660 - DNA, 76 bp, Artificial Sequence; identical to SEQ ID NO: 3473
  Description of Artificial Sequence: Synthetic pistachio; 5' sequence + inner sequence + 3' sequence

SEQ ID NO: 27661 - DNA, 76 bp, Artificial Sequence; identical to SEQ ID NO: 3162
  Description of Artificial Sequence: Synthetic pistachio; 5' sequence + inner sequence + 3' sequence

SEQ ID NO: 27662 - DNA, 76 bp, Artificial Sequence; identical to SEQ ID NO: 15932
  Description of Artificial Sequence: Synthetic pistachio; 5' sequence + inner sequence + 3' sequence

SEQ ID NO: 27663 - DNA, 76 bp, Artificial Sequence; identical to SEQ ID NO: 3495
  Description of Artificial Sequence: Synthetic pistachio; 5' sequence + inner sequence + 3' sequence

SEQ ID NO: 27664 - DNA, 76 bp, Artificial Sequence; identical to SEQ ID NO: 7999
  Description of Artificial Sequence: Synthetic pistachio; 5' sequence + inner sequence + 3' sequence

SEQ ID NO: 27665 - DNA, 76 bp, Artificial Sequence; identical to SEQ ID NO: 3571
  Description of Artificial Sequence: Synthetic pistachio; 5' sequence + inner sequence + 3' sequence

SEQ ID NO: 27666 - DNA, 76 bp, Artificial Sequence; identical to SEQ ID NO: 3595
  Description of Artificial Sequence: Synthetic pistachio; 5' sequence + inner sequence + 3' sequence

SEQ ID NO: 27667 - DNA, 76 bp, Artificial Sequence; identical to SEQ ID NO: 7530
  Description of Artificial Sequence: Synthetic pistachio; 5' sequence + inner sequence + 3' sequence

SEQ ID NO: 27668 - DNA, 76 bp, Artificial Sequence; identical to SEQ ID NO: 3603
  Description of Artificial Sequence: Synthetic pistachio; 5' sequence + inner sequence + 3' sequence

SEQ ID NO: 27669 - DNA, 76 bp, Artificial Sequence; identical to SEQ ID NO: 23226
  Description of Artificial Sequence: Synthetic pistachio; 5' sequence + inner sequence + 3' sequence

SEQ ID NO: 27670 - DNA, 76 bp, Artificial Sequence; identical to SEQ ID NO: 3749
  Description of Artificial Sequence: Synthetic pistachio; 5' sequence + inner sequence + 3' sequence

SEQ ID NO: 27671 - DNA, 75 bp, Artificial Sequence; identical to SEQ ID NO: 7763
  Description of Artificial Sequence: Synthetic pistachio; 5' sequence + inner sequence + 3' sequence

SEQ ID NO: 27672 - DNA, 76 bp, Artificial Sequence; identical to SEQ ID NO: 3342
  Description of Artificial Sequence: Synthetic pistachio; 5' sequence + inner sequence + 3' sequence

SEQ ID NO: 27673 - DNA, 76 bp, Artificial Sequence; identical to SEQ ID NO: 3576
  Description of Artificial Sequence: Synthetic pistachio; 5' sequence + inner sequence + 3' sequence

SEQ ID NO: 27674 - DNA, 76 bp, Artificial Sequence; identical to SEQ ID NO: 3608
  Description of Artificial Sequence: Synthetic pistachio; 5' sequence + inner sequence + 3' sequence

SEQ ID NO: 27675 - DNA, 76 bp, Artificial Sequence; identical to SEQ ID NO: 3482
  Description of Artificial Sequence: Synthetic pistachio; 5' sequence + inner sequence + 3' sequence

SEQ ID NO: 27676 - DNA, 76 bp, Artificial Sequence; identical to SEQ ID NO: 3926
  Description of Artificial Sequence: Synthetic pistachio; 5' sequence + inner sequence + 3' sequence

SEQ ID NO: 27677 - DNA, 76 bp, Artificial Sequence; identical to SEQ ID NO: 11670
  Description of Artificial Sequence: Synthetic pistachio; 5' sequence + inner sequence + 3' sequence

SEQ ID NO: 27678 - DNA, 76 bp, Artificial Sequence; identical to SEQ ID NO: 3509
  Description of Artificial Sequence: Synthetic pistachio; 5' sequence + inner sequence + 3' sequence

SEQ ID NO: 27679 - DNA, 76 bp, Artificial Sequence; identical to SEQ ID NO: 7526
  Description of Artificial Sequence: Synthetic pistachio; 5' sequence + inner sequence + 3' sequence

SEQ ID NO: 27680 - DNA, 76 bp, Artificial Sequence; identical to SEQ ID NO: 3307
  Description of Artificial Sequence: Synthetic pistachio; 5' sequence + inner sequence + 3' sequence

SEQ ID NO: 27681 - DNA, 75 bp, Artificial Sequence; identical to SEQ ID NO: 3453
  Description of Artificial Sequence: Synthetic pistachio; 5' sequence + inner sequence + 3' sequence

SEQ ID NO: 27682 - DNA, 76 bp, Artificial Sequence; identical to SEQ ID NO: 15827
  Description of Artificial Sequence: Synthetic pistachio; 5' sequence + inner sequence + 3' sequence

SEQ ID NO: 27683 - DNA, 76 bp, Artificial Sequence; identical to SEQ ID NO: 3956
  Description of Artificial Sequence: Synthetic pistachio; 5' sequence + inner sequence + 3' sequence

SEQ ID NO: 27684 - DNA, 76 bp, Artificial Sequence; identical to SEQ ID NO: 7575
  Description of Artificial Sequence: Synthetic pistachio; 5' sequence + inner sequence + 3' sequence

SEQ ID NO: 27685 - DNA, 76 bp, Artificial Sequence; identical to SEQ ID NO: 23229
  Description of Artificial Sequence: Synthetic pistachio; 5' sequence + inner sequence + 3' sequence

SEQ ID NO: 27686 - DNA, 76 bp, Artificial Sequence; identical to SEQ ID NO: 3707
  Description of Artificial Sequence: Synthetic pistachio; 5' sequence + inner sequence + 3' sequence

SEQ ID NO: 27687 - DNA, 76 bp, Artificial Sequence; identical to SEQ ID NO: 3912
  Description of Artificial Sequence: Synthetic pistachio; 5' sequence + inner sequence + 3' sequence

SEQ ID NO: 27688 - DNA, 76 bp, Artificial Sequence; identical to SEQ ID NO: 23430
  Description of Artificial Sequence: Synthetic pistachio; 5' sequence + inner sequence + 3' sequence

SEQ ID NO: 27689 - DNA, 76 bp, Artificial Sequence; identical to SEQ ID NO: 7792
  Description of Artificial Sequence: Synthetic pistachio; 5' sequence + inner sequence + 3' sequence

SEQ ID NO: 27690 - DNA, 76 bp, Artificial Sequence; identical to SEQ ID NO: 3535
  Description of Artificial Sequence: Synthetic pistachio; 5' sequence + inner sequence + 3' sequence

SEQ ID NO: 27691 - DNA, 75 bp, Artificial Sequence; identical to SEQ ID NO: 23955
  Description of Artificial Sequence: Synthetic pistachio; 5' sequence + inner sequence + 3' sequence

SEQ ID NO: 27692 - DNA, 76 bp, Artificial Sequence; identical to SEQ ID NO: 3979
  Description of Artificial Sequence: Synthetic pistachio; 5' sequence + inner sequence + 3' sequence

SEQ ID NO: 27693 - DNA, 76 bp, Artificial Sequence; identical to SEQ ID NO: 3588
  Description of Artificial Sequence: Synthetic pistachio; 5' sequence + inner sequence + 3' sequence

SEQ ID NO: 27694 - DNA, 76 bp, Artificial Sequence; identical to SEQ ID NO: 7552
  Description of Artificial Sequence: Synthetic pistachio; 5' sequence + inner sequence + 3' sequence

SEQ ID NO: 27695 - DNA, 76 bp, Artificial Sequence; identical to SEQ ID NO: 7810
  Description of Artificial Sequence: Synthetic pistachio; 5' sequence + inner sequence + 3' sequence

SEQ ID NO: 27696 - DNA, 76 bp, Artificial Sequence; identical to SEQ ID NO: 3456
  Description of Artificial Sequence: Synthetic pistachio; 5' sequence + inner sequence + 3' sequence

SEQ ID NO: 27697 - DNA, 76 bp, Artificial Sequence; identical to SEQ ID NO: 7425
  Description of Artificial Sequence: Synthetic pistachio; 5' sequence + inner sequence + 3' sequence

SEQ ID NO: 27698 - DNA, 76 bp, Artificial Sequence; identical to SEQ ID NO: 3337
  Description of Artificial Sequence: Synthetic pistachio; 5' sequence + inner sequence + 3' sequence

SEQ ID NO: 27699 - DNA, 76 bp, Artificial Sequence; identical to SEQ ID NO: 3771
  Description of Artificial Sequence: Synthetic pistachio; 5' sequence + inner sequence + 3' sequence

SEQ ID NO: 27700 - DNA, 76 bp, Artificial Sequence; identical to SEQ ID NO: 3472
  Description of Artificial Sequence: Synthetic pistachio; 5' sequence + inner sequence + 3' sequence

SEQ ID NO: 27701 - DNA, 76 bp, Artificial Sequence; identical to SEQ ID NO: 3422
  Description of Artificial Sequence: Synthetic pistachio; 5' sequence + inner sequence + 3' sequence

SEQ ID NO: 27702 - DNA, 76 bp, Artificial Sequence; identical to SEQ ID NO: 3863
  Description of Artificial Sequence: Synthetic pistachio; 5' sequence + inner sequence + 3' sequence

SEQ ID NO: 27703 - DNA, 76 bp, Artificial Sequence; identical to SEQ ID NO: 7837
  Description of Artificial Sequence: Synthetic pistachio; 5' sequence + inner sequence + 3' sequence

SEQ ID NO: 27704 - DNA, 76 bp, Artificial Sequence; identical to SEQ ID NO: 11964
  Description of Artificial Sequence: Synthetic pistachio; 5' sequence + inner sequence + 3' sequence

SEQ ID NO: 27705 - DNA, 76 bp, Artificial Sequence; identical to SEQ ID NO: 7498
  Description of Artificial Sequence: Synthetic pistachio; 5' sequence + inner sequence + 3' sequence

SEQ ID NO: 27706 - DNA, 76 bp, Artificial Sequence; identical to SEQ ID NO: 7205
  Description of Artificial Sequence: Synthetic pistachio; 5' sequence + inner sequence + 3' sequence

SEQ ID NO: 27707 - DNA, 76 bp, Artificial Sequence; identical to SEQ ID NO: 3421
  Description of Artificial Sequence: Synthetic pistachio; 5' sequence + inner sequence + 3' sequence

SEQ ID NO: 27708 - DNA, 76 bp, Artificial Sequence
  Description of Artificial Sequence: Synthetic pistachio; 5' sequence + inner sequence + 3' sequence
tagggaagagaaggacatatgatcgttgcgcatgtgtcgtgactggcttgggcttgactagtacatgaccacttga

SEQ ID NO: 27709 - DNA, 76 bp, Artificial Sequence; identical to SEQ ID NO: 3265
  Description of Artificial Sequence: Synthetic pistachio; 5' sequence + inner sequence + 3' sequence

SEQ ID NO: 27710 - DNA, 76 bp, Artificial Sequence; identical to SEQ ID NO: 3507
  Description of Artificial Sequence: Synthetic pistachio; 5' sequence + inner sequence + 3' sequence

SEQ ID NO: 27711 - DNA, 76 bp, Artificial Sequence; identical to SEQ ID NO: 7380
  Description of Artificial Sequence: Synthetic pistachio; 5' sequence + inner sequence + 3' sequence

SEQ ID NO: 27712 - DNA, 76 bp, Artificial Sequence; identical to SEQ ID NO: 3441
  Description of Artificial Sequence: Synthetic pistachio; 5' sequence + inner sequence + 3' sequence

SEQ ID NO: 27713 - DNA, 76 bp, Artificial Sequence; identical to SEQ ID NO: 3624
  Description of Artificial Sequence: Synthetic pistachio; 5' sequence + inner sequence + 3' sequence

SEQ ID NO: 27714 - DNA, 76 bp, Artificial Sequence; identical to SEQ ID NO: 3460
  Description of Artificial Sequence: Synthetic pistachio; 5' sequence + inner sequence + 3' sequence

SEQ ID NO: 27715 - DNA, 76 bp, Artificial Sequence; identical to SEQ ID NO: 3656
  Description of Artificial Sequence: Synthetic pistachio; 5' sequence + inner sequence + 3' sequence

SEQ ID NO: 27716 - DNA, 76 bp, Artificial Sequence; identical to SEQ ID NO: 3599
  Description of Artificial Sequence: Synthetic pistachio; 5' sequence + inner sequence + 3' sequence

SEQ ID NO: 27717 - DNA, 76 bp, Artificial Sequence; identical to SEQ ID NO: 3636
  Description of Artificial Sequence: Synthetic pistachio; 5' sequence + inner sequence + 3' sequence

SEQ ID NO: 27718 - DNA, 76 bp, Artificial Sequence; identical to SEQ ID NO: 3931
  Description of Artificial Sequence: Synthetic pistachio; 5' sequence + inner sequence + 3' sequence

SEQ ID NO: 27719 - DNA, 76 bp, Artificial Sequence; identical to SEQ ID NO: 3555
  Description of Artificial Sequence: Synthetic pistachio; 5' sequence + inner sequence + 3' sequence

SEQ ID NO: 27720 - DNA, 76 bp, Artificial Sequence; identical to SEQ ID NO: 11618
  Description of Artificial Sequence: Synthetic pistachio; 5' sequence + inner sequence + 3' sequence

SEQ ID NO: 27721 - DNA, 76 bp, Artificial Sequence; identical to SEQ ID NO: 3451
  Description of Artificial Sequence: Synthetic pistachio; 5' sequence + inner sequence + 3' sequence

SEQ ID NO: 27722 - DNA, 76 bp, Artificial Sequence; identical to SEQ ID NO: 7956
  Description of Artificial Sequence: Synthetic pistachio; 5' sequence + inner sequence + 3' sequence

SEQ ID NO: 27723 - DNA, 76 bp, Artificial Sequence; identical to SEQ ID NO: 15931
  Description of Artificial Sequence: Synthetic pistachio; 5' sequence + inner sequence + 3' sequence

SEQ ID NO: 27724 - DNA, 76 bp, Artificial Sequence; identical to SEQ ID NO: 3466
  Description of Artificial Sequence: Synthetic pistachio; 5' sequence + inner sequence + 3' sequence

SEQ ID NO: 27725 - DNA, 76 bp, Artificial Sequence; identical to SEQ ID NO: 7700
  Description of Artificial Sequence: Synthetic pistachio; 5' sequence + inner sequence + 3' sequence

SEQ ID NO: 27726 - DNA, 76 bp, Artificial Sequence; identical to SEQ ID NO: 7787
  Description of Artificial Sequence: Synthetic pistachio; 5' sequence + inner sequence + 3' sequence

SEQ ID NO: 27727 - DNA, 76 bp, Artificial Sequence; identical to SEQ ID NO: 23989
  Description of Artificial Sequence: Synthetic pistachio; 5' sequence + inner sequence + 3' sequence

SEQ ID NO: 27728 - DNA, 76 bp, Artificial Sequence; identical to SEQ ID NO: 3512
  Description of Artificial Sequence: Synthetic pistachio; 5' sequence + inner sequence + 3' sequence

SEQ ID NO: 27729 - DNA, 77 bp, Artificial Sequence; identical to SEQ ID NO: 23870
  Description of Artificial Sequence: Synthetic pistachio; 5' sequence + inner sequence + 3' sequence

SEQ ID NO: 27730 - DNA, 76 bp, Artificial Sequence; identical to SEQ ID NO: 3713
  Description of Artificial Sequence: Synthetic pistachio; 5' sequence + inner sequence + 3' sequence

SEQ ID NO: 27731 - DNA, 76 bp, Artificial Sequence; identical to SEQ ID NO: 3396
  Description of Artificial Sequence: Synthetic pistachio; 5' sequence + inner sequence + 3' sequence

SEQ ID NO: 27732 - DNA, 76 bp, Artificial Sequence; identical to SEQ ID NO: 3601
  Description of Artificial Sequence: Synthetic pistachio; 5' sequence + inner sequence + 3' sequence

SEQ ID NO: 27733 - DNA, 76 bp, Artificial Sequence; identical to SEQ ID NO: 3592
  Description of Artificial Sequence: Synthetic pistachio; 5' sequence + inner sequence + 3' sequence

SEQ ID NO: 27734 - DNA, 76 bp, Artificial Sequence; identical to SEQ ID NO: 3717
  Description of Artificial Sequence: Synthetic pistachio; 5' sequence + inner sequence + 3' sequence

SEQ ID NO: 27735 - DNA, 76 bp, Artificial Sequence; identical to SEQ ID NO: 3445
  Description of Artificial Sequence: Synthetic pistachio; 5' sequence + inner sequence + 3' sequence

SEQ ID NO: 27736 - DNA, 76 bp, Artificial Sequence; identical to SEQ ID NO: 7890
  Description of Artificial Sequence: Synthetic pistachio; 5' sequence + inner sequence + 3' sequence

SEQ ID NO: 27737 - DNA, 76 bp, Artificial Sequence; identical to SEQ ID NO: 3505
  Description of Artificial Sequence: Synthetic pistachio; 5' sequence + inner sequence + 3' sequence

SEQ ID NO: 27738 - DNA, 76 bp, Artificial Sequence; identical to SEQ ID NO: 7254
  Description of Artificial Sequence: Synthetic pistachio; 5' sequence + inner sequence + 3' sequence

SEQ ID NO: 27739 - DNA, 76 bp, Artificial Sequence; identical to SEQ ID NO: 3760
  Description of Artificial Sequence: Synthetic pistachio; 5' sequence + inner sequence + 3' sequence

SEQ ID NO: 27740 - DNA, 75 bp, Artificial Sequence; identical to SEQ ID NO: 3549
  Description of Artificial Sequence: Synthetic pistachio; 5' sequence + inner sequence + 3' sequence

SEQ ID NO: 27741 - DNA, 76 bp, Artificial Sequence; identical to SEQ ID NO: 7364
  Description of Artificial Sequence: Synthetic pistachio; 5' sequence + inner sequence + 3' sequence

SEQ ID NO: 27742 - DNA, 76 bp, Artificial Sequence; identical to SEQ ID NO: 11627
  Description of Artificial Sequence: Synthetic pistachio; 5' sequence + inner sequence + 3' sequence

SEQ ID NO: 27743 - DNA, 76 bp, Artificial Sequence; identical to SEQ ID NO: 11985
  Description of Artificial Sequence: Synthetic pistachio; 5' sequence + inner sequence + 3' sequence

SEQ ID NO: 27744 - DNA, 76 bp, Artificial Sequence; identical to SEQ ID NO: 3869
  Description of Artificial Sequence: Synthetic pistachio; 5' sequence + inner sequence + 3' sequence

SEQ ID NO: 27745 - DNA, 76 bp, Artificial Sequence; identical to SEQ ID NO: 8001
  Description of Artificial Sequence: Synthetic pistachio; 5' sequence + inner sequence + 3' sequence

SEQ ID NO: 27746 - DNA, 76 bp, Artificial Sequence; identical to SEQ ID NO: 3273
  Description of Artificial Sequence: Synthetic pistachio; 5' sequence + inner sequence + 3' sequence

SEQ ID NO: 27747 - DNA, 76 bp, Artificial Sequence; identical to SEQ ID NO: 23415
  Description of Artificial Sequence: Synthetic pistachio; 5' sequence + inner sequence + 3' sequence

SEQ ID NO: 27748 - DNA, 76 bp, Artificial Sequence; identical to SEQ ID NO: 3381
  Description of Artificial Sequence: Synthetic pistachio; 5' sequence + inner sequence + 3' sequence

SEQ ID NO: 27749 - DNA, 76 bp, Artificial Sequence; identical to SEQ ID NO: 11659
  Description of Artificial Sequence: Synthetic pistachio; 5' sequence + inner sequence + 3' sequence

SEQ ID NO: 27750 - DNA, 76 bp, Artificial Sequence; identical to SEQ ID NO: 11837
  Description of Artificial Sequence: Synthetic pistachio; 5' sequence + inner sequence + 3' sequence

SEQ ID NO: 27751 - DNA, 76 bp, Artificial Sequence; identical to SEQ ID NO: 23426
  Description of Artificial Sequence: Synthetic pistachio; 5' sequence + inner sequence + 3' sequence

SEQ ID NO: 27752 - DNA, 76 bp, Artificial Sequence; identical to SEQ ID NO: 3471
  Description of Artificial Sequence: Synthetic pistachio; 5' sequence + inner sequence + 3' sequence

SEQ ID NO: 27753 - DNA, 76 bp, Artificial Sequence; identical to SEQ ID NO: 7377
  Description of Artificial Sequence: Synthetic pistachio; 5' sequence + inner sequence + 3' sequence

SEQ ID NO: 27754 - DNA, 76 bp, Artificial Sequence; identical to SEQ ID NO: 11993
  Description of Artificial Sequence: Synthetic pistachio; 5' sequence + inner sequence + 3' sequence

SEQ ID NO: 27755 - DNA, 76 bp, Artificial Sequence; identical to SEQ ID NO: 3235
  Description of Artificial Sequence: Synthetic pistachio; 5' sequence + inner sequence + 3' sequence

SEQ ID NO: 27756 - DNA, 76 bp, Artificial Sequence; identical to SEQ ID NO: 3327
  Description of Artificial Sequence: Synthetic pistachio; 5' sequence + inner sequence + 3' sequence

SEQ ID NO: 27757 - DNA, 76 bp, Artificial Sequence; identical to SEQ ID NO: 7802
  Description of Artificial Sequence: Synthetic pistachio; 5' sequence + inner sequence + 3' sequence

SEQ ID NO: 27758 - DNA, 76 bp, Artificial Sequence; identical to SEQ ID NO: 3501
  Description of Artificial Sequence: Synthetic pistachio; 5' sequence + inner sequence + 3' sequence

SEQ ID NO: 27759 - DNA, 76 bp, Artificial Sequence; identical to SEQ ID NO: 7620
  Description of Artificial Sequence: Synthetic pistachio; 5' sequence + inner sequence + 3' sequence

SEQ ID NO: 27760 - DNA, 75 bp, Artificial Sequence; identical to SEQ ID NO: 23705
  Description of Artificial Sequence: Synthetic pistachio; 5' sequence + inner sequence + 3' sequence

SEQ ID NO: 27761 - DNA, 76 bp, Artificial Sequence; identical to SEQ ID NO: 3449
  Description of Artificial Sequence: Synthetic pistachio; 5' sequence + inner sequence + 3' sequence

SEQ ID NO: 27762 - DNA, 76 bp, Artificial Sequence
  Description of Artificial Sequence: Synthetic pistachio; 5' sequence + inner sequence + 3' sequence
tagggaagagaaggacatatgatcgaacgaaccgaggacatgcgctaggcacattgactagtacatgaccacttga

SEQ ID NO: 27763 - DNA, 76 bp, Artificial Sequence; identical to SEQ ID NO: 3843
  Description of Artificial Sequence: Synthetic pistachio; 5' sequence + inner sequence + 3' sequence

SEQ ID NO: 27764 - DNA, 76 bp, Artificial Sequence; identical to SEQ ID NO: 3984
  Description of Artificial Sequence: Synthetic pistachio; 5' sequence + inner sequence + 3' sequence

SEQ ID NO: 27765 - DNA, 76 bp, Artificial Sequence; identical to SEQ ID NO: 3424
  Description of Artificial Sequence: Synthetic pistachio; 5' sequence + inner sequence + 3' sequence

SEQ ID NO: 27766 - DNA, 76 bp, Artificial Sequence; identical to SEQ ID NO: 3714
  Description of Artificial Sequence: Synthetic pistachio; 5' sequence + inner sequence + 3' sequence

SEQ ID NO: 27767 - DNA, 76 bp, Artificial Sequence; identical to SEQ ID NO: 7740
  Description of Artificial Sequence: Synthetic pistachio; 5' sequence + inner sequence + 3' sequence

SEQ ID NO: 27768 - DNA, 76 bp, Artificial Sequence; identical to SEQ ID NO: 3906
  Description of Artificial Sequence: Synthetic pistachio; 5' sequence + inner sequence + 3' sequence

SEQ ID NO: 27769 - DNA, 76 bp, Artificial Sequence; identical to SEQ ID NO: 3655
  Description of Artificial Sequence: Synthetic pistachio; 5' sequence + inner sequence + 3' sequence

SEQ ID NO: 27770 - DNA, 76 bp, Artificial Sequence; identical to SEQ ID NO: 11937
  Description of Artificial Sequence: Synthetic pistachio; 5' sequence + inner sequence + 3' sequence

SEQ ID NO: 27771 - DNA, 76 bp, Artificial Sequence; identical to SEQ ID NO: 3698
  Description of Artificial Sequence: Synthetic pistachio; 5' sequence + inner sequence + 3' sequence

SEQ ID NO: 27772 - DNA, 76 bp, Artificial Sequence; identical to SEQ ID NO: 7870
  Description of Artificial Sequence: Synthetic pistachio; 5' sequence + inner sequence + 3' sequence

SEQ ID NO: 27773 - DNA, 74 bp, Artificial Sequence; identical to SEQ ID NO: 7786
  Description of Artificial Sequence: Synthetic pistachio; 5' sequence + inner sequence + 3' sequence

SEQ ID NO: 27774 - DNA, 76 bp, Artificial Sequence; identical to SEQ ID NO: 7376
  Description of Artificial Sequence: Synthetic pistachio; 5' sequence + inner sequence + 3' sequence

SEQ ID NO: 27775 - DNA, 76 bp, Artificial Sequence; identical to SEQ ID NO: 3643
  Description of Artificial Sequence: Synthetic pistachio; 5' sequence + inner sequence + 3' sequence

SEQ ID NO: 27776 - DNA, 76 bp, Artificial Sequence; identical to SEQ ID NO: 7921
  Description of Artificial Sequence: Synthetic pistachio; 5' sequence + inner sequence + 3' sequence

SEQ ID NO: 27777 - DNA, 77 bp, Artificial Sequence; identical to SEQ ID NO: 3971
  Description of Artificial Sequence: Synthetic pistachio; 5' sequence + inner sequence + 3' sequence

SEQ ID NO: 27778 - DNA, 76 bp, Artificial Sequence; identical to SEQ ID NO: 3951
  Description of Artificial Sequence: Synthetic pistachio; 5' sequence + inner sequence + 3' sequence

SEQ ID NO: 27779 - DNA, 76 bp, Artificial Sequence; identical to SEQ ID NO: 3921
  Description of Artificial Sequence: Synthetic pistachio; 5' sequence + inner sequence + 3' sequence

SEQ ID NO: 27780 - DNA, 76 bp, Artificial Sequence; identical to SEQ ID NO: 3842
  Description of Artificial Sequence: Synthetic pistachio; 5' sequence + inner sequence + 3' sequence

SEQ ID NO: 27781 - DNA, 76 bp, Artificial Sequence; identical to SEQ ID NO: 3494
  Description of Artificial Sequence: Synthetic pistachio; 5' sequence + inner sequence + 3' sequence

SEQ ID NO: 27782 - DNA, 76 bp, Artificial Sequence; identical to SEQ ID NO: 3830
  Description of Artificial Sequence: Synthetic pistachio; 5' sequence + inner sequence + 3' sequence

SEQ ID NO: 27783 - DNA, 76 bp, Artificial Sequence; identical to SEQ ID NO: 3619
  Description of Artificial Sequence: Synthetic pistachio; 5' sequence + inner sequence + 3' sequence

SEQ ID NO: 27784 - DNA, 76 bp, Artificial Sequence; identical to SEQ ID NO: 3593
  Description of Artificial Sequence: Synthetic pistachio; 5' sequence + inner sequence + 3' sequence

SEQ ID NO: 27785 - DNA, 76 bp, Artificial Sequence; identical to SEQ ID NO: 3835
  Description of Artificial Sequence: Synthetic pistachio; 5' sequence + inner sequence + 3' sequence

SEQ ID NO: 27786 - DNA, 76 bp, Artificial Sequence; identical to SEQ ID NO: 3753
  Description of Artificial Sequence: Synthetic pistachio; 5' sequence + inner sequence + 3' sequence

SEQ ID NO: 27787 - DNA, 76 bp, Artificial Sequence; identical to SEQ ID NO: 11825
  Description of Artificial Sequence: Synthetic pistachio; 5' sequence + inner sequence + 3' sequence

SEQ ID NO: 27788 - DNA, 76 bp, Artificial Sequence; identical to SEQ ID NO: 23339
  Description of Artificial Sequence: Synthetic pistachio; 5' sequence + inner sequence + 3' sequence

SEQ ID NO: 27789 - DNA, 76 bp, Artificial Sequence; identical to SEQ ID NO: 7719
  Description of Artificial Sequence: Synthetic pistachio; 5' sequence + inner sequence + 3' sequence

SEQ ID NO: 27790 - DNA, 76 bp, Artificial Sequence; identical to SEQ ID NO: 3981
  Description of Artificial Sequence: Synthetic pistachio; 5' sequence + inner sequence + 3' sequence

SEQ ID NO: 27791 - DNA, 76 bp, Artificial Sequence; identical to SEQ ID NO: 7976
  Description of Artificial Sequence: Synthetic pistachio; 5' sequence + inner sequence + 3' sequence

SEQ ID NO: 27792 - DNA, 76 bp, Artificial Sequence; identical to SEQ ID NO: 11810
  Description of Artificial Sequence: Synthetic pistachio; 5' sequence + inner sequence + 3' sequence

SEQ ID NO: 27793 - DNA, 76 bp, Artificial Sequence; identical to SEQ ID NO: 3665
  Description of Artificial Sequence: Synthetic pistachio; 5' sequence + inner sequence + 3' sequence

SEQ ID NO: 27794 - DNA, 76 bp, Artificial Sequence; identical to SEQ ID NO: 23789
  Description of Artificial Sequence: Synthetic pistachio; 5' sequence + inner sequence + 3' sequence

SEQ ID NO: 27795 - DNA, 76 bp, Artificial Sequence; identical to SEQ ID NO: 3679
  Description of Artificial Sequence: Synthetic pistachio; 5' sequence + inner sequence + 3' sequence

SEQ ID NO: 27796 - DNA, 76 bp, Artificial Sequence; identical to SEQ ID NO: 7799
  Description of Artificial Sequence: Synthetic pistachio; 5' sequence + inner sequence + 3' sequence

SEQ ID NO: 27797 - DNA, 76 bp, Artificial Sequence; identical to SEQ ID NO: 3649
  Description of Artificial Sequence: Synthetic pistachio; 5' sequence + inner sequence + 3' sequence

SEQ ID NO: 27798 - DNA, 76 bp, Artificial Sequence; identical to SEQ ID NO: 3682
  Description of Artificial Sequence: Synthetic pistachio; 5' sequence + inner sequence + 3' sequence

SEQ ID NO: 27799 - DNA, 76 bp, Artificial Sequence; identical to SEQ ID NO: 23548
  Description of Artificial Sequence: Synthetic pistachio; 5' sequence + inner sequence + 3' sequence

SEQ ID NO: 27800 - DNA, 76 bp, Artificial Sequence; identical to SEQ ID NO: 3867
  Description of Artificial Sequence: Synthetic pistachio; 5' sequence + inner sequence + 3' sequence

SEQ ID NO: 27801 - DNA, 76 bp, Artificial Sequence
  Description of Artificial Sequence: Synthetic pistachio; 5' sequence + inner sequence + 3' sequence
tagggaagagaaggacatatgatggatgtaacgcaccgttcaattgcggcatgttgactagtacatgaccacttga

SEQ ID NO: 27802 - DNA, 76 bp, Artificial Sequence; identical to SEQ ID NO: 7816
  Description of Artificial Sequence: Synthetic pistachio; 5' sequence + inner sequence + 3' sequence

SEQ ID NO: 27803 - DNA, 76 bp, Artificial Sequence; identical to SEQ ID NO: 7745
  Description of Artificial Sequence: Synthetic pistachio; 5' sequence + inner sequence + 3' sequence

SEQ ID NO: 27804 - DNA, 76 bp, Artificial Sequence; identical to SEQ ID NO: 3700
  Description of Artificial Sequence: Synthetic pistachio; 5' sequence + inner sequence + 3' sequence

SEQ ID NO: 27805 - DNA, 76 bp, Artificial Sequence; identical to SEQ ID NO: 3388
  Description of Artificial Sequence: Synthetic pistachio; 5' sequence + inner sequence + 3' sequence

SEQ ID NO: 27806 - DNA, 76 bp, Artificial Sequence; identical to SEQ ID NO: 7755
  Description of Artificial Sequence: Synthetic pistachio; 5' sequence + inner sequence + 3' sequence

SEQ ID NO: 27807 - DNA, 76 bp, Artificial Sequence; identical to SEQ ID NO: 23410
  Description of Artificial Sequence: Synthetic pistachio; 5' sequence + inner sequence + 3' sequence

SEQ ID NO: 27808 - DNA, 76 bp, Artificial Sequence; identical to SEQ ID NO: 3860
  Description of Artificial Sequence: Synthetic pistachio; 5' sequence + inner sequence + 3' sequence

SEQ ID NO: 27809 - DNA, 76 bp, Artificial Sequence; identical to SEQ ID NO: 3252
  Description of Artificial Sequence: Synthetic pistachio; 5' sequence + inner sequence + 3' sequence

SEQ ID NO: 27810 - DNA, 76 bp, Artificial Sequence
  Description of Artificial Sequence: Synthetic pistachio; 5' sequence + inner sequence + 3' sequence
tagggaagagaaggacatatgatcgcgctcgtaccgtaggtcttgtcgtgggattgactagtacatgaccacttga

SEQ ID NO: 27811 - DNA, 76 bp, Artificial Sequence; identical to SEQ ID NO: 23519
  Description of Artificial Sequence: Synthetic pistachio; 5' sequence + inner sequence + 3' sequence

SEQ ID NO: 27812 - DNA, 76 bp, Artificial Sequence
  Description of Artificial Sequence: Synthetic pistachio; 5' sequence + inner sequence + 3' sequence
tagggaagagaaggacatatgatcgcactacaagggggaggtgacgttgcgccttgactagtacatgaccacttga

SEQ ID NO: 27813 - DNA, 76 bp, Artificial Sequence; identical to SEQ ID NO: 7873
  Description of Artificial Sequence: Synthetic pistachio; 5' sequence + inner sequence + 3' sequence

SEQ ID NO: 27814 - DNA, 76 bp, Artificial Sequence; identical to SEQ ID NO: 7592
  Description of Artificial Sequence: Synthetic pistachio; 5' sequence + inner sequence + 3' sequence

SEQ ID NO: 27815 - DNA, 76 bp, Artificial Sequence; identical to SEQ ID NO: 7348
  Description of Artificial Sequence: Synthetic pistachio; 5' sequence + inner sequence + 3' sequence

SEQ ID NO: 27816 - DNA, 76 bp, Artificial Sequence; identical to SEQ ID NO: 7955
  Description of Artificial Sequence: Synthetic pistachio; 5' sequence + inner sequence + 3' sequence

SEQ ID NO: 27817 - DNA, 76 bp, Artificial Sequence; identical to SEQ ID NO: 7817
  Description of Artificial Sequence: Synthetic pistachio; 5' sequence + inner sequence + 3' sequence

SEQ ID NO: 27818 - DNA, 76 bp, Artificial Sequence; identical to SEQ ID NO: 11798
  Description of Artificial Sequence: Synthetic pistachio; 5' sequence + inner sequence + 3' sequence

SEQ ID NO: 27819 - DNA, 76 bp, Artificial Sequence; identical to SEQ ID NO: 3950
  Description of Artificial Sequence: Synthetic pistachio; 5' sequence + inner sequence + 3' sequence

SEQ ID NO: 27820 - DNA, 76 bp, Artificial Sequence; identical to SEQ ID NO: 15791
  Description of Artificial Sequence: Synthetic pistachio; 5' sequence + inner sequence + 3' sequence

SEQ ID NO: 27821 - DNA, 76 bp, Artificial Sequence; identical to SEQ ID NO: 3725
  Description of Artificial Sequence: Synthetic pistachio; 5' sequence + inner sequence + 3' sequence

SEQ ID NO: 27822 - DNA, 76 bp, Artificial Sequence; identical to SEQ ID NO: 7963
  Description of Artificial Sequence: Synthetic pistachio; 5' sequence + inner sequence + 3' sequence

SEQ ID NO: 27823 - DNA, 76 bp, Artificial Sequence; identical to SEQ ID NO: 11949
  Description of Artificial Sequence: Synthetic pistachio; 5' sequence + inner sequence + 3' sequence

SEQ ID NO: 27824 - DNA, 76 bp, Artificial Sequence; identical to SEQ ID NO: 3686
  Description of Artificial Sequence: Synthetic pistachio; 5' sequence + inner sequence + 3' sequence

SEQ ID NO: 27825 - DNA, 76 bp, Artificial Sequence; identical to SEQ ID NO: 3720
  Description of Artificial Sequence: Synthetic pistachio; 5' sequence + inner sequence + 3' sequence

SEQ ID NO: 27826 - DNA, 76 bp, Artificial Sequence; identical to SEQ ID NO: 3440
  Description of Artificial Sequence: Synthetic pistachio; 5' sequence + inner sequence + 3' sequence

SEQ ID NO: 27827 - DNA, 76 bp, Artificial Sequence; identical to SEQ ID NO: 23165
  Description of Artificial Sequence: Synthetic pistachio; 5' sequence + inner sequence + 3' sequence

SEQ ID NO: 27828 - DNA, 76 bp, Artificial Sequence; identical to SEQ ID NO: 7509
  Description of Artificial Sequence: Synthetic pistachio; 5' sequence + inner sequence + 3' sequence

SEQ ID NO: 27829 - DNA, 76 bp, Artificial Sequence; identical to SEQ ID NO: 7776
  Description of Artificial Sequence: Synthetic pistachio; 5' sequence + inner sequence + 3' sequence

SEQ ID NO: 27830 - DNA, 76 bp, Artificial Sequence; identical to SEQ ID NO: 7504
  Description of Artificial Sequence: Synthetic pistachio; 5' sequence + inner sequence + 3' sequence

SEQ ID NO: 27831 - DNA, 76 bp, Artificial Sequence; identical to SEQ ID NO: 7394
  Description of Artificial Sequence: Synthetic pistachio; 5' sequence + inner sequence + 3' sequence

SEQ ID NO: 27832 - DNA, 76 bp, Artificial Sequence; identical to SEQ ID NO: 3761
  Description of Artificial Sequence: Synthetic pistachio; 5' sequence + inner sequence + 3' sequence

SEQ ID NO: 27833 - DNA, 76 bp, Artificial Sequence; identical to SEQ ID NO: 3778
  Description of Artificial Sequence: Synthetic pistachio; 5' sequence + inner sequence + 3' sequence

SEQ ID NO: 27834 - DNA, 76 bp, Artificial Sequence; identical to SEQ ID NO: 3590
  Description of Artificial Sequence: Synthetic pistachio; 5' sequence + inner sequence + 3' sequence

SEQ ID NO: 27835 - DNA, 76 bp, Artificial Sequence; identical to SEQ ID NO: 7616
  Description of Artificial Sequence: Synthetic pistachio; 5' sequence + inner sequence + 3' sequence

SEQ ID NO: 27836 - DNA, 76 bp, Artificial Sequence; identical to SEQ ID NO: 3691
  Description of Artificial Sequence: Synthetic pistachio; 5' sequence + inner sequence + 3' sequence

SEQ ID NO: 27837 - DNA, 76 bp, Artificial Sequence; identical to SEQ ID NO: 3940
  Description of Artificial Sequence: Synthetic pistachio; 5' sequence + inner sequence + 3' sequence

SEQ ID NO: 27838 - DNA, 76 bp, Artificial Sequence; identical to SEQ ID NO: 7717
  Description of Artificial Sequence: Synthetic pistachio; 5' sequence + inner sequence + 3' sequence

SEQ ID NO: 27839 - DNA, 76 bp, Artificial Sequence
  Description of Artificial Sequence: Synthetic pistachio; 5' sequence + inner sequence + 3' sequence
tagggaagagaaggacatatgatcgcaccggcatggcgtaggcagtcgtgacattgactagtacatgaccacttga

SEQ ID NO: 27840 - DNA, 76 bp, Artificial Sequence; identical to SEQ ID NO: 23335
  Description of Artificial Sequence: Synthetic pistachio; 5' sequence + inner sequence + 3' sequence

SEQ ID NO: 27841 - DNA, 76 bp, Artificial Sequence; identical to SEQ ID NO: 3415
  Description of Artificial Sequence: Synthetic pistachio; 5' sequence + inner sequence + 3' sequence

SEQ ID NO: 27842 - DNA, 76 bp, Artificial Sequence; identical to SEQ ID NO: 3598
  Description of Artificial Sequence: Synthetic pistachio; 5' sequence + inner sequence + 3' sequence

SEQ ID NO: 27843 - DNA, 76 bp, Artificial Sequence
  Description of Artificial Sequence: Synthetic pistachio; 5' sequence + inner sequence + 3' sequence
tagggaagagaaggacatatgatggacgcatcgccccttcatgttgtcgtgtattgactagtacatgaccacttga

SEQ ID NO: 27844 - DNA, 75 bp, Artificial Sequence; identical to SEQ ID NO: 7869
  Description of Artificial Sequence: Synthetic pistachio; 5' sequence + inner sequence + 3' sequence

SEQ ID NO: 27845 - DNA, 76 bp, Artificial Sequence; identical to SEQ ID NO: 3604
  Description of Artificial Sequence: Synthetic pistachio; 5' sequence + inner sequence + 3' sequence

SEQ ID NO: 27846 - DNA, 76 bp, Artificial Sequence; identical to SEQ ID NO: 3961
  Description of Artificial Sequence: Synthetic pistachio; 5' sequence + inner sequence + 3' sequence

SEQ ID NO: 27847 - DNA, 76 bp, Artificial Sequence; identical to SEQ ID NO: 3542
  Description of Artificial Sequence: Synthetic pistachio; 5' sequence + inner sequence + 3' sequence

SEQ ID NO: 27848 - DNA, 77 bp, Artificial Sequence; identical to SEQ ID NO: 3503
  Description of Artificial Sequence: Synthetic pistachio; 5' sequence + inner sequence + 3' sequence

SEQ ID NO: 27849 - DNA, 76 bp, Artificial Sequence; identical to SEQ ID NO: 3382
  Description of Artificial Sequence: Synthetic pistachio; 5' sequence + inner sequence + 3' sequence

SEQ ID NO: 27850 - DNA, 76 bp, Artificial Sequence; identical to SEQ ID NO: 11816
  Description of Artificial Sequence: Synthetic pistachio; 5' sequence + inner sequence + 3' sequence

SEQ ID NO: 27851 - DNA, 76 bp, Artificial Sequence; identical to SEQ ID NO: 7830
  Description of Artificial Sequence: Synthetic pistachio; 5' sequence + inner sequence + 3' sequence

SEQ ID NO: 27852 - DNA, 76 bp, Artificial Sequence
  Description of Artificial Sequence: Synthetic pistachio; 5' sequence + inner sequence + 3' sequence
tagggaagagaaggacatatgatgcatcgcgtcactatcatgtgtgtcacgtattgactagtacatgaccacttga

SEQ ID NO: 27853 - DNA, 76 bp, Artificial Sequence; identical to SEQ ID NO: 3286
  Description of Artificial Sequence: Synthetic pistachio; 5' sequence + inner sequence + 3' sequence

SEQ ID NO: 27854 - DNA, 76 bp, Artificial Sequence; identical to SEQ ID NO: 3384
  Description of Artificial Sequence: Synthetic pistachio; 5' sequence + inner sequence + 3' sequence

SEQ ID NO: 27855 - DNA, 76 bp, Artificial Sequence; identical to SEQ ID NO: 7894
  Description of Artificial Sequence: Synthetic pistachio; 5' sequence + inner sequence + 3' sequence

SEQ ID NO: 27856 - DNA, 76 bp, Artificial Sequence; identical to SEQ ID NO: 7280
  Description of Artificial Sequence: Synthetic pistachio; 5' sequence + inner sequence + 3' sequence

SEQ ID NO: 27857 - DNA, 76 bp, Artificial Sequence
  Description of Artificial Sequence: Synthetic pistachio; 5' sequence + inner sequence + 3' sequence
tagggaagagaaggacatatgatcgaccgtgagtggcgatgtgtctcggtgcattgactagtacatgaccacttga

SEQ ID NO: 27858 - DNA, 76 bp, Artificial Sequence; identical to SEQ ID NO: 3701
  Description of Artificial Sequence: Synthetic pistachio; 5' sequence + inner sequence + 3' sequence

SEQ ID NO: 27859 - DNA, 76 bp, Artificial Sequence; identical to SEQ ID NO: 7692
  Description of Artificial Sequence: Synthetic pistachio; 5' sequence + inner sequence + 3' sequence

SEQ ID NO: 27860 - DNA, 76 bp, Artificial Sequence; identical to SEQ ID NO: 3857
  Description of Artificial Sequence: Synthetic pistachio; 5' sequence + inner sequence + 3' sequence

SEQ ID NO: 27861 - DNA, 76 bp, Artificial Sequence; identical to SEQ ID NO: 23331
  Description of Artificial Sequence: Synthetic pistachio; 5' sequence + inner sequence + 3' sequence

SEQ ID NO: 27862 - DNA, 76 bp, Artificial Sequence; identical to SEQ ID NO: 7790
  Description of Artificial Sequence: Synthetic pistachio; 5' sequence + inner sequence + 3' sequence

SEQ ID NO: 27863 - DNA, 76 bp, Artificial Sequence; identical to SEQ ID NO: 3722
  Description of Artificial Sequence: Synthetic pistachio; 5' sequence + inner sequence + 3' sequence

SEQ ID NO: 27864 - DNA, 76 bp, Artificial Sequence; identical to SEQ ID NO: 7682
  Description of Artificial Sequence: Synthetic pistachio; 5' sequence + inner sequence + 3' sequence

SEQ ID NO: 27865 - DNA, 76 bp, Artificial Sequence; identical to SEQ ID NO: 23760
  Description of Artificial Sequence: Synthetic pistachio; 5' sequence + inner sequence + 3' sequence

SEQ ID NO: 27866 - DNA, 76 bp, Artificial Sequence; identical to SEQ ID NO: 7491
  Description of Artificial Sequence: Synthetic pistachio; 5' sequence + inner sequence + 3' sequence

SEQ ID NO: 27867 - DNA, 76 bp, Artificial Sequence; identical to SEQ ID NO: 3444
  Description of Artificial Sequence: Synthetic pistachio; 5' sequence + inner sequence + 3' sequence

SEQ ID NO: 27868 - DNA, 76 bp, Artificial Sequence; identical to SEQ ID NO: 3960
  Description of Artificial Sequence: Synthetic pistachio; 5' sequence + inner sequence + 3' sequence

SEQ ID NO: 27869 - DNA, 76 bp, Artificial Sequence; identical to SEQ ID NO: 3996
  Description of Artificial Sequence: Synthetic pistachio; 5' sequence + inner sequence + 3' sequence

SEQ ID NO: 27870 - DNA, 76 bp, Artificial Sequence
  Description of Artificial Sequence: Synthetic pistachio; 5' sequence + inner sequence + 3' sequence
tagggaagagaaggacatatgatcgcgccgagcatgcctagcgatgctgcacattgactagtacatgaccacttga

SEQ ID NO: 27871 - DNA, 76 bp, Artificial Sequence; identical to SEQ ID NO: 4001
  Description of Artificial Sequence: Synthetic pistachio; 5' sequence + inner sequence + 3' sequence

SEQ ID NO: 27872 - DNA, 76 bp, Artificial Sequence
  Description of Artificial Sequence: Synthetic pistachio; 5' sequence + inner sequence + 3' sequence
tagggaagagaaggacatatgattgacgcacgcagaccttcaagtcggccatgttgactagtacatgaccacttga

SEQ ID NO: 27873 - DNA, 76 bp, Artificial Sequence; identical to SEQ ID NO: 11850
  Description of Artificial Sequence: Synthetic pistachio; 5' sequence + inner sequence + 3' sequence

SEQ ID NO: 27874 - DNA, 76 bp, Artificial Sequence; identical to SEQ ID NO: 3731
  Description of Artificial Sequence: Synthetic pistachio; 5' sequence + inner sequence + 3' sequence

SEQ ID NO: 27875 - DNA, 76 bp, Artificial Sequence
  Description of Artificial Sequence: Synthetic pistachio; 5' sequence + inner sequence + 3' sequence
tagggaagagaaggacatatgatggatgcggctgacctgatcaatgtgcgccattgactagtacatgaccacttga

SEQ ID NO: 27876 - DNA, 76 bp, Artificial Sequence; identical to SEQ ID NO: 3871
  Description of Artificial Sequence: Synthetic pistachio; 5' sequence + inner sequence + 3' sequence

SEQ ID NO: 27877 - DNA, 76 bp, Artificial Sequence
  Description of Artificial Sequence: Synthetic pistachio; 5' sequence + inner sequence + 3' sequence
tagggaagagaaggacatatgatgtcatgcgcggacattcacgttggcgtggattgactagtacatgaccacttga

SEQ ID NO: 27878 - DNA, 76 bp, Artificial Sequence; identical to SEQ ID NO: 3526
  Description of Artificial Sequence: Synthetic pistachio; 5' sequence + inner sequence + 3' sequence

SEQ ID NO: 27879 - DNA, 76 bp, Artificial Sequence; identical to SEQ ID NO: 11868
  Description of Artificial Sequence: Synthetic pistachio; 5' sequence + inner sequence + 3' sequence

SEQ ID NO: 27880 - DNA, 76 bp, Artificial Sequence; identical to SEQ ID NO: 23544
  Description of Artificial Sequence: Synthetic pistachio; 5' sequence + inner sequence + 3' sequence

SEQ ID NO: 27881 - DNA, 76 bp, Artificial Sequence; identical to SEQ ID NO: 15933
  Description of Artificial Sequence: Synthetic pistachio; 5' sequence + inner sequence + 3' sequence

SEQ ID NO: 27882 - DNA, 76 bp, Artificial Sequence; identical to SEQ ID NO: 15986
  Description of Artificial Sequence: Synthetic pistachio; 5' sequence + inner sequence + 3' sequence

SEQ ID NO: 27883 - DNA, 76 bp, Artificial Sequence; identical to SEQ ID NO: 3674
  Description of Artificial Sequence: Synthetic pistachio; 5' sequence + inner sequence + 3' sequence

SEQ ID NO: 27884 - DNA, 77 bp, Artificial Sequence; identical to SEQ ID NO: 3489
  Description of Artificial Sequence: Synthetic pistachio; 5' sequence + inner sequence + 3' sequence

SEQ ID NO: 27885 - DNA, 74 bp, Artificial Sequence; identical to SEQ ID NO: 23321
  Description of Artificial Sequence: Synthetic pistachio; 5' sequence + inner sequence + 3' sequence

SEQ ID NO: 27886 - DNA, 76 bp, Artificial Sequence; identical to SEQ ID NO: 3547
  Description of Artificial Sequence: Synthetic pistachio; 5' sequence + inner sequence + 3' sequence

SEQ ID NO: 27887 - DNA, 76 bp, Artificial Sequence; identical to SEQ ID NO: 3554
  Description of Artificial Sequence: Synthetic pistachio; 5' sequence + inner sequence + 3' sequence

SEQ ID NO: 27888 - DNA, 76 bp, Artificial Sequence; identical to SEQ ID NO: 15853
  Description of Artificial Sequence: Synthetic pistachio; 5' sequence + inner sequence + 3' sequence

SEQ ID NO: 27889 - DNA, 76 bp, Artificial Sequence; identical to SEQ ID NO: 3683
  Description of Artificial Sequence: Synthetic pistachio; 5' sequence + inner sequence + 3' sequence

SEQ ID NO: 27890 - DNA, 76 bp, Artificial Sequence; identical to SEQ ID NO: 3610
  Description of Artificial Sequence: Synthetic pistachio; 5' sequence + inner sequence + 3' sequence

SEQ ID NO: 27891 - DNA, 76 bp, Artificial Sequence; identical to SEQ ID NO: 3709
  Description of Artificial Sequence: Synthetic pistachio; 5' sequence + inner sequence + 3' sequence

SEQ ID NO: 27892 - DNA, 76 bp, Artificial Sequence; identical to SEQ ID NO: 3948
  Description of Artificial Sequence: Synthetic pistachio; 5' sequence + inner sequence + 3' sequence

SEQ ID NO: 27893 - DNA, 76 bp, Artificial Sequence; identical to SEQ ID NO: 23902
  Description of Artificial Sequence: Synthetic pistachio; 5' sequence + inner sequence + 3' sequence

SEQ ID NO: 27894 - DNA, 76 bp, Artificial Sequence; identical to SEQ ID NO: 3295
  Description of Artificial Sequence: Synthetic pistachio; 5' sequence + inner sequence + 3' sequence

SEQ ID NO: 27895 - DNA, 76 bp, Artificial Sequence; identical to SEQ ID NO: 3739
  Description of Artificial Sequence: Synthetic pistachio; 5' sequence + inner sequence + 3' sequence

SEQ ID NO: 27896 - DNA, 76 bp, Artificial Sequence; identical to SEQ ID NO: 7807
  Description of Artificial Sequence: Synthetic pistachio; 5' sequence + inner sequence + 3' sequence

SEQ ID NO: 27897 - DNA, 76 bp, Artificial Sequence; identical to SEQ ID NO: 3726
  Description of Artificial Sequence: Synthetic pistachio; 5' sequence + inner sequence + 3' sequence

SEQ ID NO: 27898 - DNA, 76 bp, Artificial Sequence; identical to SEQ ID NO: 3831
  Description of Artificial Sequence: Synthetic pistachio; 5' sequence + inner sequence + 3' sequence

SEQ ID NO: 27899 - DNA, 76 bp, Artificial Sequence; identical to SEQ ID NO: 15799
  Description of Artificial Sequence: Synthetic pistachio; 5' sequence + inner sequence + 3' sequence

SEQ ID NO: 27900 - DNA, 76 bp, Artificial Sequence; identical to SEQ ID NO: 23590
  Description of Artificial Sequence: Synthetic pistachio; 5' sequence + inner sequence + 3' sequence

SEQ ID NO: 27901 - DNA, 76 bp, Artificial Sequence; identical to SEQ ID NO: 3688
  Description of Artificial Sequence: Synthetic pistachio; 5' sequence + inner sequence + 3' sequence

SEQ ID NO: 27902 - DNA, 73 bp, Artificial Sequence
  Description of Artificial Sequence: Synthetic pistachio; 5' sequence + inner sequence + 3' sequence
tagggaagagaaggacatatgatgcatgcgatgatccttcgagtgcgtcattgactagtacatgaccacttga

SEQ ID NO: 27903 - DNA, 76 bp, Artificial Sequence; identical to SEQ ID NO: 7591
  Description of Artificial Sequence: Synthetic pistachio; 5' sequence + inner sequence + 3' sequence

SEQ ID NO: 27904 - DNA, 76 bp, Artificial Sequence; identical to SEQ ID NO: 7857
  Description of Artificial Sequence: Synthetic pistachio; 5' sequence + inner sequence + 3' sequence

SEQ ID NO: 27905 - DNA, 76 bp, Artificial Sequence; identical to SEQ ID NO: 3917
  Description of Artificial Sequence: Synthetic pistachio; 5' sequence + inner sequence + 3' sequence

SEQ ID NO: 27906 - DNA, 76 bp, Artificial Sequence
  Description of Artificial Sequence: Synthetic pistachio; 5' sequence + inner sequence + 3' sequence
tagggaagagaaggacatatgatcggcacgtagccctatcagtggtgcatgcattgactagtacatgaccacttga

SEQ ID NO: 27907 - DNA, 76 bp, Artificial Sequence; identical to SEQ ID NO: 23642
  Description of Artificial Sequence: Synthetic pistachio; 5' sequence + inner sequence + 3' sequence

SEQ ID NO: 27908 - DNA, 76 bp, Artificial Sequence; identical to SEQ ID NO: 3474
  Description of Artificial Sequence: Synthetic pistachio; 5' sequence + inner sequence + 3' sequence

SEQ ID NO: 27909 - DNA, 76 bp, Artificial Sequence; identical to SEQ ID NO: 11892
  Description of Artificial Sequence: Synthetic pistachio; 5' sequence + inner sequence + 3' sequence

SEQ ID NO: 27910 - DNA, 76 bp, Artificial Sequence; identical to SEQ ID NO: 23424
  Description of Artificial Sequence: Synthetic pistachio; 5' sequence + inner sequence + 3' sequence

SEQ ID NO: 27911 - DNA, 76 bp, Artificial Sequence; identical to SEQ ID NO: 7580
  Description of Artificial Sequence: Synthetic pistachio; 5' sequence + inner sequence + 3' sequence

SEQ ID NO: 27912 - DNA, 76 bp, Artificial Sequence; identical to SEQ ID NO: 15971
  Description of Artificial Sequence: Synthetic pistachio; 5' sequence + inner sequence + 3' sequence

SEQ ID NO: 27913 - DNA, 76 bp, Artificial Sequence; identical to SEQ ID NO: 3458
  Description of Artificial Sequence: Synthetic pistachio; 5' sequence + inner sequence + 3' sequence

SEQ ID NO: 27914 - DNA, 76 bp, Artificial Sequence; identical to SEQ ID NO: 15866
  Description of Artificial Sequence: Synthetic pistachio; 5' sequence + inner sequence + 3' sequence

SEQ ID NO: 27915 - DNA, 76 bp, Artificial Sequence; identical to SEQ ID NO: 3758
  Description of Artificial Sequence: Synthetic pistachio; 5' sequence + inner sequence + 3' sequence

SEQ ID NO: 27916 - DNA, 76 bp, Artificial Sequence; identical to SEQ ID NO: 7393
  Description of Artificial Sequence: Synthetic pistachio; 5' sequence + inner sequence + 3' sequence

SEQ ID NO: 27917 - DNA, 76 bp, Artificial Sequence; identical to SEQ ID NO: 3600
  Description of Artificial Sequence: Synthetic pistachio; 5' sequence + inner sequence + 3' sequence

SEQ ID NO: 27918 - DNA, 76 bp, Artificial Sequence; identical to SEQ ID NO: 7641
  Description of Artificial Sequence: Synthetic pistachio; 5' sequence + inner sequence + 3' sequence

SEQ ID NO: 27919 - DNA, 76 bp, Artificial Sequence; identical to SEQ ID NO: 7907
  Description of Artificial Sequence: Synthetic pistachio; 5' sequence + inner sequence + 3' sequence

SEQ ID NO: 27920 - DNA, 76 bp, Artificial Sequence; identical to SEQ ID NO: 7419
  Description of Artificial Sequence: Synthetic pistachio; 5' sequence + inner sequence + 3' sequence

SEQ ID NO: 27921 - DNA, 76 bp, Artificial Sequence; identical to SEQ ID NO: 11682
  Description of Artificial Sequence: Synthetic pistachio; 5' sequence + inner sequence + 3' sequence

SEQ ID NO: 27922 - DNA, 76 bp, Artificial Sequence; identical to SEQ ID NO: 7997
  Description of Artificial Sequence: Synthetic pistachio; 5' sequence + inner sequence + 3' sequence

SEQ ID NO: 27923 - DNA, 76 bp, Artificial Sequence; identical to SEQ ID NO: 3383
  Description of Artificial Sequence: Synthetic pistachio; 5' sequence + inner sequence + 3' sequence

SEQ ID NO: 27924 - DNA, 76 bp, Artificial Sequence; identical to SEQ ID NO: 11960
  Description of Artificial Sequence: Synthetic pistachio; 5' sequence + inner sequence + 3' sequence

SEQ ID NO: 27925 - DNA, 76 bp, Artificial Sequence; identical to SEQ ID NO: 15996
  Description of Artificial Sequence: Synthetic pistachio; 5' sequence + inner sequence + 3' sequence

SEQ ID NO: 27926 - DNA, 76 bp, Artificial Sequence; identical to SEQ ID NO: 3721
  Description of Artificial Sequence: Synthetic pistachio; 5' sequence + inner sequence + 3' sequence

SEQ ID NO: 27927 - DNA, 76 bp, Artificial Sequence
  Description of Artificial Sequence: Synthetic pistachio; 5' sequence + inner sequence + 3' sequence
tagggaagagaaggacatatgattggccgatcgaccctaccaagtgcagcatgttgactagtacatgaccacttga

SEQ ID NO: 27928 - DNA, 76 bp, Artificial Sequence; identical to SEQ ID NO: 23576
  Description of Artificial Sequence: Synthetic pistachio; 5' sequence + inner sequence + 3' sequence

SEQ ID NO: 27929 - DNA, 76 bp, Artificial Sequence; identical to SEQ ID NO: 3819
  Description of Artificial Sequence: Synthetic pistachio; 5' sequence + inner sequence + 3' sequence

SEQ ID NO: 27930 - DNA, 76 bp, Artificial Sequence; identical to SEQ ID NO: 7739
  Description of Artificial Sequence: Synthetic pistachio; 5' sequence + inner sequence + 3' sequence

SEQ ID NO: 27931 - DNA, 76 bp, Artificial Sequence; identical to SEQ ID NO: 23327
  Description of Artificial Sequence: Synthetic pistachio; 5' sequence + inner sequence + 3' sequence

SEQ ID NO: 27932 - DNA, 76 bp, Artificial Sequence; identical to SEQ ID NO: 15773
  Description of Artificial Sequence: Synthetic pistachio; 5' sequence + inner sequence + 3' sequence

SEQ ID NO: 27933 - DNA, 77 bp, Artificial Sequence; identical to SEQ ID NO: 3845
  Description of Artificial Sequence: Synthetic pistachio; 5' sequence + inner sequence + 3' sequence

SEQ ID NO: 27934 - DNA, 76 bp, Artificial Sequence; identical to SEQ ID NO: 3826
  Description of Artificial Sequence: Synthetic pistachio; 5' sequence + inner sequence + 3' sequence

SEQ ID NO: 27935 - DNA, 76 bp, Artificial Sequence; identical to SEQ ID NO: 3849
  Description of Artificial Sequence: Synthetic pistachio; 5' sequence + inner sequence + 3' sequence

SEQ ID NO: 27936 - DNA, 76 bp, Artificial Sequence; identical to SEQ ID NO: 3629
  Description of Artificial Sequence: Synthetic pistachio; 5' sequence + inner sequence + 3' sequence

SEQ ID NO: 27937 - DNA, 76 bp, Artificial Sequence; identical to SEQ ID NO: 3565
  Description of Artificial Sequence: Synthetic pistachio; 5' sequence + inner sequence + 3' sequence

SEQ ID NO: 27938 - DNA, 76 bp, Artificial Sequence; identical to SEQ ID NO: 7711
  Description of Artificial Sequence: Synthetic pistachio; 5' sequence + inner sequence + 3' sequence

SEQ ID NO: 27939 - DNA, 76 bp, Artificial Sequence; identical to SEQ ID NO: 7499
  Description of Artificial Sequence: Synthetic pistachio; 5' sequence + inner sequence + 3' sequence

SEQ ID NO: 27940 - DNA, 76 bp, Artificial Sequence; identical to SEQ ID NO: 7881
  Description of Artificial Sequence: Synthetic pistachio; 5' sequence + inner sequence + 3' sequence

SEQ ID NO: 27941 - DNA, 76 bp, Artificial Sequence; identical to SEQ ID NO: 3705
  Description of Artificial Sequence: Synthetic pistachio; 5' sequence + inner sequence + 3' sequence

SEQ ID NO: 27942 - DNA, 76 bp, Artificial Sequence; identical to SEQ ID NO: 23441
  Description of Artificial Sequence: Synthetic pistachio; 5' sequence + inner sequence + 3' sequence

SEQ ID NO: 27943 - DNA, 76 bp, Artificial Sequence
  Description of Artificial Sequence: Synthetic pistachio; 5' sequence + inner sequence + 3' sequence
tagggaagagaaggacatatgatcgcaacgtcaagcgggaaggcactttggtgttgactagtacatgaccacttga

SEQ ID NO: 27944 - DNA, 76 bp, Artificial Sequence; identical to SEQ ID NO: 3781
  Description of Artificial Sequence: Synthetic pistachio; 5' sequence + inner sequence + 3' sequence

SEQ ID NO: 27945 - DNA, 76 bp, Artificial Sequence; identical to SEQ ID NO: 3558
  Description of Artificial Sequence: Synthetic pistachio; 5' sequence + inner sequence + 3' sequence

SEQ ID NO: 27946 - DNA, 76 bp, Artificial Sequence; identical to SEQ ID NO: 23385
  Description of Artificial Sequence: Synthetic pistachio; 5' sequence + inner sequence + 3' sequence

SEQ ID NO: 27947 - DNA, 76 bp, Artificial Sequence; identical to SEQ ID NO: 7653
  Description of Artificial Sequence: Synthetic pistachio; 5' sequence + inner sequence + 3' sequence

SEQ ID NO: 27948 - DNA, 76 bp, Artificial Sequence
  Description of Artificial Sequence: Synthetic pistachio; 5' sequence + inner sequence + 3' sequence
tagggaagagaaggacatatgattgcgtcagatgcatcgtgttcccctgggcattgactagtacatgaccacttga

SEQ ID NO: 27949 - DNA, 76 bp, Artificial Sequence; identical to SEQ ID NO: 3874
  Description of Artificial Sequence: Synthetic pistachio; 5' sequence + inner sequence + 3' sequence

SEQ ID NO: 27950 - DNA, 76 bp, Artificial Sequence; identical to SEQ ID NO: 23549
  Description of Artificial Sequence: Synthetic pistachio; 5' sequence + inner sequence + 3' sequence

SEQ ID NO: 27951 - DNA, 76 bp, Artificial Sequence; identical to SEQ ID NO: 24001
  Description of Artificial Sequence: Synthetic pistachio; 5' sequence + inner sequence + 3' sequence

SEQ ID NO: 27952 - DNA, 76 bp, Artificial Sequence; identical to SEQ ID NO: 3635
  Description of Artificial Sequence: Synthetic pistachio; 5' sequence + inner sequence + 3' sequence

SEQ ID NO: 27953 - DNA, 76 bp, Artificial Sequence; identical to SEQ ID NO: 7905
  Description of Artificial Sequence: Synthetic pistachio; 5' sequence + inner sequence + 3' sequence

SEQ ID NO: 27954 - DNA, 76 bp, Artificial Sequence; identical to SEQ ID NO: 7407
  Description of Artificial Sequence: Synthetic pistachio; 5' sequence + inner sequence + 3' sequence

SEQ ID NO: 27955 - DNA, 76 bp, Artificial Sequence; identical to SEQ ID NO: 11579
  Description of Artificial Sequence: Synthetic pistachio; 5' sequence + inner sequence + 3' sequence

SEQ ID NO: 27956 - DNA, 76 bp, Artificial Sequence; identical to SEQ ID NO: 7987
  Description of Artificial Sequence: Synthetic pistachio; 5' sequence + inner sequence + 3' sequence

SEQ ID NO: 27957 - DNA, 76 bp, Artificial Sequence; identical to SEQ ID NO: 19769
  Description of Artificial Sequence: Synthetic pistachio; 5' sequence + inner sequence + 3' sequence

SEQ ID NO: 27958 - DNA, 76 bp, Artificial Sequence; identical to SEQ ID NO: 3832
  Description of Artificial Sequence: Synthetic pistachio; 5' sequence + inner sequence + 3' sequence

SEQ ID NO: 27959 - DNA, 76 bp, Artificial Sequence; identical to SEQ ID NO: 3834
  Description of Artificial Sequence: Synthetic pistachio; 5' sequence + inner sequence + 3' sequence

SEQ ID NO: 27960 - DNA, 72 bp, Artificial Sequence; identical to SEQ ID NO: 3516
  Description of Artificial Sequence: Synthetic pistachio; 5' sequence + inner sequence + 3' sequence

SEQ ID NO: 27961 - DNA, 76 bp, Artificial Sequence; identical to SEQ ID NO: 23673
  Description of Artificial Sequence: Synthetic pistachio; 5' sequence + inner sequence + 3' sequence

SEQ ID NO: 27962 - DNA, 76 bp, Artificial Sequence; identical to SEQ ID NO: 3815
  Description of Artificial Sequence: Synthetic pistachio; 5' sequence + inner sequence + 3' sequence

SEQ ID NO: 27963 - DNA, 75 bp, Artificial Sequence; identical to SEQ ID NO: 3689
  Description of Artificial Sequence: Synthetic pistachio; 5' sequence + inner sequence + 3' sequence

SEQ ID NO: 27964 - DNA, 76 bp, Artificial Sequence; identical to SEQ ID NO: 3973
  Description of Artificial Sequence: Synthetic pistachio; 5' sequence + inner sequence + 3' sequence

SEQ ID NO: 27965 - DNA, 76 bp, Artificial Sequence; identical to SEQ ID NO: 23803
  Description of Artificial Sequence: Synthetic pistachio; 5' sequence + inner sequence + 3' sequence

SEQ ID NO: 27966 - DNA, 76 bp, Artificial Sequence; identical to SEQ ID NO: 7867
  Description of Artificial Sequence: Synthetic pistachio; 5' sequence + inner sequence + 3' sequence

SEQ ID NO: 27967 - DNA, 76 bp, Artificial Sequence
  Description of Artificial Sequence: Synthetic pistachio; 5' sequence + inner sequence + 3' sequence
tagggaagagaaggacatatgatcgaccatgggcaggtacgtcccaatgcgagttgactagtacatgaccacttga

SEQ ID NO: 27968 - DNA, 76 bp, Artificial Sequence; identical to SEQ ID NO: 7494
  Description of Artificial Sequence: Synthetic pistachio; 5' sequence + inner sequence + 3' sequence

SEQ ID NO: 27969 - DNA, 76 bp, Artificial Sequence
  Description of Artificial Sequence: Synthetic pistachio; 5' sequence + inner sequence + 3' sequence
tagggaagagaaggacatatgatcgaccaagccgtacgacaagtgctgccacgttgactagtacatgaccacttga

SEQ ID NO: 27970 - DNA, 76 bp, Artificial Sequence; identical to SEQ ID NO: 11946
  Description of Artificial Sequence: Synthetic pistachio; 5' sequence + inner sequence + 3' sequence

SEQ ID NO: 27971 - DNA, 76 bp, Artificial Sequence; identical to SEQ ID NO: 7555
  Description of Artificial Sequence: Synthetic pistachio; 5' sequence + inner sequence + 3' sequence

SEQ ID NO: 27972 - DNA, 76 bp, Artificial Sequence; identical to SEQ ID NO: 23295
  Description of Artificial Sequence: Synthetic pistachio; 5' sequence + inner sequence + 3' sequence

SEQ ID NO: 27973 - DNA, 76 bp, Artificial Sequence; identical to SEQ ID NO: 3957
  Description of Artificial Sequence: Synthetic pistachio; 5' sequence + inner sequence + 3' sequence

SEQ ID NO: 27974 - DNA, 76 bp, Artificial Sequence; identical to SEQ ID NO: 3431
  Description of Artificial Sequence: Synthetic pistachio; 5' sequence + inner sequence + 3' sequence

SEQ ID NO: 27975 - DNA, 76 bp, Artificial Sequence; identical to SEQ ID NO: 23312
  Description of Artificial Sequence: Synthetic pistachio; 5' sequence + inner sequence + 3' sequence

SEQ ID NO: 27976 - DNA, 76 bp, Artificial Sequence
  Description of Artificial Sequence: Synthetic pistachio; 5' sequence + inner sequence + 3' sequence
tagggaagagaaggacatatgatcgtgtggacgtcgcacctatcgagtcggcattgactagtacatgaccacttga

SEQ ID NO: 27977 - DNA, 76 bp, Artificial Sequence; identical to SEQ ID NO: 3809
  Description of Artificial Sequence: Synthetic pistachio; 5' sequence + inner sequence + 3' sequence

SEQ ID NO: 27978 - DNA, 76 bp, Artificial Sequence
  Description of Artificial Sequence: Synthetic pistachio; 5' sequence + inner sequence + 3' sequence
tagggaagagaaggacatatgatcgcaccgactacgcaaagtgcaagtgcgtattgactagtacatgaccacttga

SEQ ID NO: 27979 - DNA, 76 bp, Artificial Sequence; identical to SEQ ID NO: 3811
  Description of Artificial Sequence: Synthetic pistachio; 5' sequence + inner sequence + 3' sequence

SEQ ID NO: 27980 - DNA, 76 bp, Artificial Sequence; identical to SEQ ID NO: 11792
  Description of Artificial Sequence: Synthetic pistachio; 5' sequence + inner sequence + 3' sequence

SEQ ID NO: 27981 - DNA, 76 bp, Artificial Sequence; identical to SEQ ID NO: 3837
  Description of Artificial Sequence: Synthetic pistachio; 5' sequence + inner sequence + 3' sequence

SEQ ID NO: 27982 - DNA, 76 bp, Artificial Sequence; identical to SEQ ID NO: 11994
  Description of Artificial Sequence: Synthetic pistachio; 5' sequence + inner sequence + 3' sequence

SEQ ID NO: 27983 - DNA, 76 bp, Artificial Sequence
  Description of Artificial Sequence: Synthetic pistachio; 5' sequence + inner sequence + 3' sequence
tagggaagagaaggacatatgatcgcaacggtacgccgtccatgcctcgcggcttgactagtacatgaccacttga

SEQ ID NO: 27984 - DNA, 76 bp, Artificial Sequence
  Description of Artificial Sequence: Synthetic pistachio; 5' sequence + inner sequence + 3' sequence
tagggaagagaaggacatatgatgtcatgcacgaacactatcatgaggccatgttgactagtacatgaccacttga

SEQ ID NO: 27985 - DNA, 76 bp, Artificial Sequence; identical to SEQ ID NO: 3955
  Description of Artificial Sequence: Synthetic pistachio; 5' sequence + inner sequence + 3' sequence

SEQ ID NO: 27986 - DNA, 76 bp, Artificial Sequence; identical to SEQ ID NO: 3880
  Description of Artificial Sequence: Synthetic pistachio; 5' sequence + inner sequence + 3' sequence

SEQ ID NO: 27987 - DNA, 76 bp, Artificial Sequence; identical to SEQ ID NO: 7535
  Description of Artificial Sequence: Synthetic pistachio; 5' sequence + inner sequence + 3' sequence

SEQ ID NO: 27988 - DNA, 76 bp, Artificial Sequence; identical to SEQ ID NO: 23617
  Description of Artificial Sequence: Synthetic pistachio; 5' sequence + inner sequence + 3' sequence

SEQ ID NO: 27989 - DNA, 76 bp, Artificial Sequence; identical to SEQ ID NO: 3925
  Description of Artificial Sequence: Synthetic pistachio; 5' sequence + inner sequence + 3' sequence

SEQ ID NO: 27990 - DNA, 76 bp, Artificial Sequence; identical to SEQ ID NO: 3538
  Description of Artificial Sequence: Synthetic pistachio; 5' sequence + inner sequence + 3' sequence

SEQ ID NO: 27991 - DNA, 76 bp, Artificial Sequence
  Description of Artificial Sequence: Synthetic pistachio; 5' sequence + inner sequence + 3' sequence
tagggaagagaaggacatatgatcgaccagcagcggtaggctgacgaggcatgttgactagtacatgaccacttga

SEQ ID NO: 27992 - DNA, 76 bp, Artificial Sequence; identical to SEQ ID NO: 7743
  Description of Artificial Sequence: Synthetic pistachio; 5' sequence + inner sequence + 3' sequence

SEQ ID NO: 27993 - DNA, 73 bp, Artificial Sequence
  Description of Artificial Sequence: Synthetic pistachio; 5' sequence + inner sequence + 3' sequence
tagggaagagaaggacatatgatgtgcgaccgaccctatcaagtacgtcattgactagtacatgaccacttga

SEQ ID NO: 27994 - DNA, 76 bp, Artificial Sequence; identical to SEQ ID NO: 7971
  Description of Artificial Sequence: Synthetic pistachio; 5' sequence + inner sequence + 3' sequence

SEQ ID NO: 27995 - DNA, 76 bp, Artificial Sequence; identical to SEQ ID NO: 3782
  Description of Artificial Sequence: Synthetic pistachio; 5' sequence + inner sequence + 3' sequence

SEQ ID NO: 27996 - DNA, 76 bp, Artificial Sequence; identical to SEQ ID NO: 3816
  Description of Artificial Sequence: Synthetic pistachio; 5' sequence + inner sequence + 3' sequence

SEQ ID NO: 27997 - DNA, 76 bp, Artificial Sequence; identical to SEQ ID NO: 3711
  Description of Artificial Sequence: Synthetic pistachio; 5' sequence + inner sequence + 3' sequence

SEQ ID NO: 27998 - DNA, 76 bp, Artificial Sequence; identical to SEQ ID NO: 3633
  Description of Artificial Sequence: Synthetic pistachio; 5' sequence + inner sequence + 3' sequence

SEQ ID NO: 27999 - DNA, 76 bp, Artificial Sequence; identical to SEQ ID NO: 11782
  Description of Artificial Sequence: Synthetic pistachio; 5' sequence + inner sequence + 3' sequence

SEQ ID NO: 28000 - DNA, 76 bp, Artificial Sequence; identical to SEQ ID NO: 15914
  Description of Artificial Sequence: Synthetic pistachio; 5' sequence + inner sequence + 3' sequence

SEQ ID NO: 28001 - DNA, 76 bp, Artificial Sequence; identical to SEQ ID NO: 7833
  Description of Artificial Sequence: Synthetic pistachio; 5' sequence + inner sequence + 3' sequence

SEQ ID NO: 28002 - DNA, 76 bp, Artificial Sequence; identical to SEQ ID NO: 7960
  Description of Artificial Sequence: Synthetic pistachio; 5' sequence + inner sequence + 3' sequence

SEQ ID NO: 28003 - DNA, 30 bp, Artificial Sequence; identical to SEQ ID NO: 3
  Description of Artificial Sequence: Synthetic walnut; inner sequence

SEQ ID NO: 28004 - DNA, 30 bp, Artificial Sequence; identical to SEQ ID NO: 4
  Description of Artificial Sequence: Synthetic walnut; inner sequence

SEQ ID NO: 28005 - DNA, 30 bp, Artificial Sequence; identical to SEQ ID NO: 20
  Description of Artificial Sequence: Synthetic walnut; inner sequence

SEQ ID NO: 28006 - DNA, 30 bp, Artificial Sequence; identical to SEQ ID NO: 8
  Description of Artificial Sequence: Synthetic walnut; inner sequence

SEQ ID NO: 28007 - DNA, 30 bp, Artificial Sequence; identical to SEQ ID NO: 10
  Description of Artificial Sequence: Synthetic walnut; inner sequence

SEQ ID NO: 28008 - DNA, 30 bp, Artificial Sequence; identical to SEQ ID NO: 6
  Description of Artificial Sequence: Synthetic walnut; inner sequence

SEQ ID NO: 28009 - DNA, 30 bp, Artificial Sequence; identical to SEQ ID NO: 30
  Description of Artificial Sequence: Synthetic walnut; inner sequence

SEQ ID NO: 28010 - DNA, 30 bp, Artificial Sequence; identical to SEQ ID NO: 27
  Description of Artificial Sequence: Synthetic walnut; inner sequence

SEQ ID NO: 28011 - DNA, 30 bp, Artificial Sequence; identical to SEQ ID NO: 29
  Description of Artificial Sequence: Synthetic walnut; inner sequence

SEQ ID NO: 28012 - DNA, 30 bp, Artificial Sequence; identical to SEQ ID NO: 21
  Description of Artificial Sequence: Synthetic walnut; inner sequence

SEQ ID NO: 28013 - DNA, 30 bp, Artificial Sequence; identical to SEQ ID NO: 7
  Description of Artificial Sequence: Synthetic walnut; inner sequence

SEQ ID NO: 28014 - DNA, 30 bp, Artificial Sequence; identical to SEQ ID NO: 12
  Description of Artificial Sequence: Synthetic walnut; inner sequence

SEQ ID NO: 28015 - DNA, 30 bp, Artificial Sequence; identical to SEQ ID NO: 9
  Description of Artificial Sequence: Synthetic walnut; inner sequence

SEQ ID NO: 28016 - DNA, 30 bp, Artificial Sequence; identical to SEQ ID NO: 5
  Description of Artificial Sequence: Synthetic walnut; inner sequence

SEQ ID NO: 28017 - DNA, 30 bp, Artificial Sequence; identical to SEQ ID NO: 52
  Description of Artificial Sequence: Synthetic walnut; inner sequence

SEQ ID NO: 28018 - DNA, 30 bp, Artificial Sequence; identical to SEQ ID NO: 47
  Description of Artificial Sequence: Synthetic walnut; inner sequence

SEQ ID NO: 28019 - DNA, 30 bp, Artificial Sequence; identical to SEQ ID NO: 33
  Description of Artificial Sequence: Synthetic walnut; inner sequence

SEQ ID NO: 28020 - DNA, 30 bp, Artificial Sequence; identical to SEQ ID NO: 14
  Description of Artificial Sequence: Synthetic walnut; inner sequence

SEQ ID NO: 28021 - DNA, 30 bp, Artificial Sequence; identical to SEQ ID NO: 26
  Description of Artificial Sequence: Synthetic walnut; inner sequence

SEQ ID NO: 28022 - DNA, 30 bp, Artificial Sequence; identical to SEQ ID NO: 383
  Description of Artificial Sequence: Synthetic walnut; inner sequence

SEQ ID NO: 28023 - DNA, 30 bp, Artificial Sequence; identical to SEQ ID NO: 19
  Description of Artificial Sequence: Synthetic walnut; inner sequence

SEQ ID NO: 28024 - DNA, 30 bp, Artificial Sequence; identical to SEQ ID NO: 48
  Description of Artificial Sequence: Synthetic walnut; inner sequence

SEQ ID NO: 28025 - DNA, 30 bp, Artificial Sequence; identical to SEQ ID NO: 17
  Description of Artificial Sequence: Synthetic walnut; inner sequence

SEQ ID NO: 28026 - DNA, 30 bp, Artificial Sequence; identical to SEQ ID NO: 55
  Description of Artificial Sequence: Synthetic walnut; inner sequence

SEQ ID NO: 28027 - DNA, 30 bp, Artificial Sequence; identical to SEQ ID NO: 24
  Description of Artificial Sequence: Synthetic walnut; inner sequence

SEQ ID NO: 28028 - DNA, 30 bp, Artificial Sequence; identical to SEQ ID NO: 201
  Description of Artificial Sequence: Synthetic walnut; inner sequence

SEQ ID NO: 28029 - DNA, 30 bp, Artificial Sequence; identical to SEQ ID NO: 23
  Description of Artificial Sequence: Synthetic walnut; inner sequence

SEQ ID NO: 28030 - DNA, 30 bp, Artificial Sequence; identical to SEQ ID NO: 34
  Description of Artificial Sequence: Synthetic walnut; inner sequence

SEQ ID NO: 28031 - DNA, 30 bp, Artificial Sequence; identical to SEQ ID NO: 128
  Description of Artificial Sequence: Synthetic walnut; inner sequence

SEQ ID NO: 28032 - DNA, 30 bp, Artificial Sequence; identical to SEQ ID NO: 15
  Description of Artificial Sequence: Synthetic walnut; inner sequence

SEQ ID NO: 28033 - DNA, 30 bp, Artificial Sequence; identical to SEQ ID NO: 73
  Description of Artificial Sequence: Synthetic walnut; inner sequence

SEQ ID NO: 28034 - DNA, 30 bp, Artificial Sequence; identical to SEQ ID NO: 81
  Description of Artificial Sequence: Synthetic walnut; inner sequence

SEQ ID NO: 28035 - DNA, 30 bp, Artificial Sequence; identical to SEQ ID NO: 11
  Description of Artificial Sequence: Synthetic walnut; inner sequence

SEQ ID NO: 28036 - DNA, 30 bp, Artificial Sequence; identical to SEQ ID NO: 94
  Description of Artificial Sequence: Synthetic walnut; inner sequence

SEQ ID NO: 28037 - DNA, 30 bp, Artificial Sequence; identical to SEQ ID NO: 40
  Description of Artificial Sequence: Synthetic walnut; inner sequence

SEQ ID NO: 28038 - DNA, 30 bp, Artificial Sequence; identical to SEQ ID NO: 78
  Description of Artificial Sequence: Synthetic walnut; inner sequence

SEQ ID NO: 28039 - DNA, 30 bp, Artificial Sequence; identical to SEQ ID NO: 279
  Description of Artificial Sequence: Synthetic walnut; inner sequence

SEQ ID NO: 28040 - DNA, 30 bp, Artificial Sequence; identical to SEQ ID NO: 28
  Description of Artificial Sequence: Synthetic walnut; inner sequence

SEQ ID NO: 28041 - DNA, 30 bp, Artificial Sequence; identical to SEQ ID NO: 16266
  Description of Artificial Sequence: Synthetic walnut; inner sequence

SEQ ID NO: 28042 - DNA, 30 bp, Artificial Sequence; identical to SEQ ID NO: 74
  Description of Artificial Sequence: Synthetic walnut; inner sequence

SEQ ID NO: 28043 - DNA, 30 bp, Artificial Sequence; identical to SEQ ID NO: 13
  Description of Artificial Sequence: Synthetic walnut; inner sequence

SEQ ID NO: 28044 - DNA, 30 bp, Artificial Sequence; identical to SEQ ID NO: 220
  Description of Artificial Sequence: Synthetic walnut; inner sequence

SEQ ID NO: 28045 - DNA, 30 bp, Artificial Sequence; identical to SEQ ID NO: 122
  Description of Artificial Sequence: Synthetic walnut; inner sequence

SEQ ID NO: 28046 - DNA, 30 bp, Artificial Sequence; identical to SEQ ID NO: 139
  Description of Artificial Sequence: Synthetic walnut; inner sequence

SEQ ID NO: 28047 - DNA, 30 bp, Artificial Sequence; identical to SEQ ID NO: 526
  Description of Artificial Sequence: Synthetic walnut; inner sequence

SEQ ID NO: 28048 - DNA, 28 bp, Artificial Sequence
  Description of Artificial Sequence: Synthetic walnut; inner sequence
ggacgcaacgtaccgtatcgtggccatg

SEQ ID NO: 28049 - DNA, 30 bp, Artificial Sequence; identical to SEQ ID NO: 46
  Description of Artificial Sequence: Synthetic walnut; inner sequence

SEQ ID NO: 28050 - DNA, 30 bp, Artificial Sequence; identical to SEQ ID NO: 45
  Description of Artificial Sequence: Synthetic walnut; inner sequence

SEQ ID NO: 28051 - DNA, 30 bp, Artificial Sequence; identical to SEQ ID NO: 281
  Description of Artificial Sequence: Synthetic walnut; inner sequence

SEQ ID NO: 28052 - DNA, 30 bp, Artificial Sequence; identical to SEQ ID NO: 37
  Description of Artificial Sequence: Synthetic walnut; inner sequence

SEQ ID NO: 28053 - DNA, 30 bp, Artificial Sequence; identical to SEQ ID NO: 506
  Description of Artificial Sequence: Synthetic walnut; inner sequence

SEQ ID NO: 28054 - DNA, 30 bp, Artificial Sequence; identical to SEQ ID NO: 54
  Description of Artificial Sequence: Synthetic walnut; inner sequence

SEQ ID NO: 28055 - DNA, 30 bp, Artificial Sequence; identical to SEQ ID NO: 32
  Description of Artificial Sequence: Synthetic walnut; inner sequence

SEQ ID NO: 28056 - DNA, 30 bp, Artificial Sequence; identical to SEQ ID NO: 41
  Description of Artificial Sequence: Synthetic walnut; inner sequence

SEQ ID NO: 28057 - DNA, 30 bp, Artificial Sequence; identical to SEQ ID NO: 36
  Description of Artificial Sequence: Synthetic walnut; inner sequence

SEQ ID NO: 28058 - DNA, 30 bp, Artificial Sequence; identical to SEQ ID NO: 16640
  Description of Artificial Sequence: Synthetic walnut; inner sequence

SEQ ID NO: 28059 - DNA, 30 bp, Artificial Sequence; identical to SEQ ID NO: 273
  Description of Artificial Sequence: Synthetic walnut; inner sequence

SEQ ID NO: 28060 - DNA, 29 bp, Artificial Sequence
  Description of Artificial Sequence: Synthetic walnut; inner sequence
gcacgccgatgccctcatgtggccgtgga

SEQ ID NO: 28061 - DNA, 30 bp, Artificial Sequence; identical to SEQ ID NO: 138
  Description of Artificial Sequence: Synthetic walnut; inner sequence

SEQ ID NO: 28062 - DNA, 30 bp, Artificial Sequence; identical to SEQ ID NO: 323
  Description of Artificial Sequence: Synthetic walnut; inner sequence

SEQ ID NO: 28063 - DNA, 30 bp, Artificial Sequence; identical to SEQ ID NO: 18
  Description of Artificial Sequence: Synthetic walnut; inner sequence

SEQ ID NO: 28064 - DNA, 30 bp, Artificial Sequence; identical to SEQ ID NO: 632
  Description of Artificial Sequence: Synthetic walnut; inner sequence

SEQ ID NO: 28065 - DNA, 30 bp, Artificial Sequence; identical to SEQ ID NO: 106
  Description of Artificial Sequence: Synthetic walnut; inner sequence

SEQ ID NO: 28066 - DNA, 30 bp, Artificial Sequence; identical to SEQ ID NO: 93
  Description of Artificial Sequence: Synthetic walnut; inner sequence

SEQ ID NO: 28067 - DNA, 30 bp, Artificial Sequence; identical to SEQ ID NO: 82
  Description of Artificial Sequence: Synthetic walnut; inner sequence

SEQ ID NO: 28068 - DNA, 30 bp, Artificial Sequence; identical to SEQ ID NO: 270
  Description of Artificial Sequence: Synthetic walnut; inner sequence

SEQ ID NO: 28069 - DNA, 30 bp, Artificial Sequence; identical to SEQ ID NO: 16211
  Description of Artificial Sequence: Synthetic walnut; inner sequence

SEQ ID NO: 28070 - DNA, 30 bp, Artificial Sequence; identical to SEQ ID NO: 144
  Description of Artificial Sequence: Synthetic walnut; inner sequence

SEQ ID NO: 28071 - DNA, 30 bp, Artificial Sequence; identical to SEQ ID NO: 71
  Description of Artificial Sequence: Synthetic walnut; inner sequence

SEQ ID NO: 28072 - DNA, 25 bp, Artificial Sequence
  Description of Artificial Sequence: Synthetic walnut; inner sequence
cgcaccgtcaagcaggcacgtgtca

SEQ ID NO: 28073 - DNA, 30 bp, Artificial Sequence; identical to SEQ ID NO: 194
  Description of Artificial Sequence: Synthetic walnut; inner sequence

SEQ ID NO: 28074 - DNA, 30 bp, Artificial Sequence; identical to SEQ ID NO: 121
  Description of Artificial Sequence: Synthetic walnut; inner sequence

SEQ ID NO: 28075 - DNA, 30 bp, Artificial Sequence; identical to SEQ ID NO: 265
  Description of Artificial Sequence: Synthetic walnut; inner sequence

SEQ ID NO: 28076 - DNA, 30 bp, Artificial Sequence; identical to SEQ ID NO: 35
  Description of Artificial Sequence: Synthetic walnut; inner sequence

SEQ ID NO: 28077 - DNA, 30 bp, Artificial Sequence; identical to SEQ ID NO: 381
  Description of Artificial Sequence: Synthetic walnut; inner sequence

SEQ ID NO: 28078 - DNA, 30 bp, Artificial Sequence; identical to SEQ ID NO: 20495
  Description of Artificial Sequence: Synthetic walnut; inner sequence

SEQ ID NO: 28079 - DNA, 31 bp, Artificial Sequence; identical to SEQ ID NO: 250
  Description of Artificial Sequence: Synthetic walnut; inner sequence

SEQ ID NO: 28080 - DNA, 30 bp, Artificial Sequence; identical to SEQ ID NO: 22
  Description of Artificial Sequence: Synthetic walnut; inner sequence

SEQ ID NO: 28081 - DNA, 31 bp, Artificial Sequence; identical to SEQ ID NO: 150
  Description of Artificial Sequence: Synthetic walnut; inner sequence

SEQ ID NO: 28082 - DNA, 30 bp, Artificial Sequence; identical to SEQ ID NO: 147
  Description of Artificial Sequence: Synthetic walnut; inner sequence

SEQ ID NO: 28083 - DNA, 30 bp, Artificial Sequence; identical to SEQ ID NO: 177
  Description of Artificial Sequence: Synthetic walnut; inner sequence

SEQ ID NO: 28084 - DNA, 30 bp, Artificial Sequence; identical to SEQ ID NO: 190
  Description of Artificial Sequence: Synthetic walnut; inner sequence

SEQ ID NO: 28085 - DNA, 30 bp, Artificial Sequence; identical to SEQ ID NO: 166
  Description of Artificial Sequence: Synthetic walnut; inner sequence

SEQ ID NO: 28086 - DNA, 30 bp, Artificial Sequence; identical to SEQ ID NO: 310
  Description of Artificial Sequence: Synthetic walnut; inner sequence

SEQ ID NO: 28087 - DNA, 30 bp, Artificial Sequence; identical to SEQ ID NO: 42
  Description of Artificial Sequence: Synthetic walnut; inner sequence

SEQ ID NO: 28088 - DNA, 30 bp, Artificial Sequence; identical to SEQ ID NO: 461
  Description of Artificial Sequence: Synthetic walnut; inner sequence

SEQ ID NO: 28089 - DNA, 30 bp, Artificial Sequence; identical to SEQ ID NO: 80
  Description of Artificial Sequence: Synthetic walnut; inner sequence

SEQ ID NO: 28090 - DNA, 30 bp, Artificial Sequence; identical to SEQ ID NO: 257
  Description of Artificial Sequence: Synthetic walnut; inner sequence

SEQ ID NO: 28091 - DNA, 30 bp, Artificial Sequence; identical to SEQ ID NO: 151
  Description of Artificial Sequence: Synthetic walnut; inner sequence

SEQ ID NO: 28092 - DNA, 26 bp, Artificial Sequence
  Description of Artificial Sequence: Synthetic walnut; inner sequence
ggcatgcacgcacctacacgtggaca

SEQ ID NO: 28093 - DNA, 30 bp, Artificial Sequence; identical to SEQ ID NO: 85
  Description of Artificial Sequence: Synthetic walnut; inner sequence

SEQ ID NO: 28094 - DNA, 30 bp, Artificial Sequence; identical to SEQ ID NO: 96
  Description of Artificial Sequence: Synthetic walnut; inner sequence

SEQ ID NO: 28095 - DNA, 30 bp, Artificial Sequence; identical to SEQ ID NO: 263
  Description of Artificial Sequence: Synthetic walnut; inner sequence

SEQ ID NO: 28096 - DNA, 30 bp, Artificial Sequence; identical to SEQ ID NO: 517
  Description of Artificial Sequence: Synthetic walnut; inner sequence

SEQ ID NO: 28097 - DNA, 30 bp, Artificial Sequence; identical to SEQ ID NO: 4889
  Description of Artificial Sequence: Synthetic walnut; inner sequence

SEQ ID NO: 28098 - DNA, 30 bp, Artificial Sequence; identical to SEQ ID NO: 108
  Description of Artificial Sequence: Synthetic walnut; inner sequence

SEQ ID NO: 28099 - DNA, 30 bp, Artificial Sequence; identical to SEQ ID NO: 458
  Description of Artificial Sequence: Synthetic walnut; inner sequence

SEQ ID NO: 28100 - DNA, 31 bp, Artificial Sequence; identical to SEQ ID NO: 971
  Description of Artificial Sequence: Synthetic walnut; inner sequence

SEQ ID NO: 28101 - DNA, 30 bp, Artificial Sequence; identical to SEQ ID NO: 174
  Description of Artificial Sequence: Synthetic walnut; inner sequence

SEQ ID NO: 28102 - DNA, 30 bp, Artificial Sequence; identical to SEQ ID NO: 231
  Description of Artificial Sequence: Synthetic walnut; inner sequence

SEQ ID NO: 28103 - DNA, 30 bp, Artificial Sequence; identical to SEQ ID NO: 328
  Description of Artificial Sequence: Synthetic walnut; inner sequence

SEQ ID NO: 28104 - DNA, 30 bp, Artificial Sequence; identical to SEQ ID NO: 236
  Description of Artificial Sequence: Synthetic walnut; inner sequence

SEQ ID NO: 28105 - DNA, 30 bp, Artificial Sequence; identical to SEQ ID NO: 79
  Description of Artificial Sequence: Synthetic walnut; inner sequence

SEQ ID NO: 28106 - DNA, 30 bp, Artificial Sequence; identical to SEQ ID NO: 59
  Description of Artificial Sequence: Synthetic walnut; inner sequence

SEQ ID NO: 28107 - DNA, 30 bp, Artificial Sequence; identical to SEQ ID NO: 582
  Description of Artificial Sequence: Synthetic walnut; inner sequence

SEQ ID NO: 28108 - DNA, 30 bp, Artificial Sequence
  Description of Artificial Sequence: Synthetic walnut; inner sequence
gcgtgcagcacggtacacgatgccgtcacg

SEQ ID NO: 28109 - DNA, 30 bp, Artificial Sequence; identical to SEQ ID NO: 20151
  Description of Artificial Sequence: Synthetic walnut; inner sequence

SEQ ID NO: 28110 - DNA, 30 bp, Artificial Sequence; identical to SEQ ID NO: 53
  Description of Artificial Sequence: Synthetic walnut; inner sequence

SEQ ID NO: 28111 - DNA, 30 bp, Artificial Sequence; identical to SEQ ID NO: 232
  Description of Artificial Sequence: Synthetic walnut; inner sequence

SEQ ID NO: 28112 - DNA, 30 bp, Artificial Sequence; identical to SEQ ID NO: 441
  Description of Artificial Sequence: Synthetic walnut; inner sequence

SEQ ID NO: 28113 - DNA, 30 bp, Artificial Sequence; identical to SEQ ID NO: 16861
  Description of Artificial Sequence: Synthetic walnut; inner sequence

SEQ ID NO: 28114 - DNA, 30 bp, Artificial Sequence
  Description of Artificial Sequence: Synthetic walnut; inner sequence
cgtgacgcacgtggcaacgaggcatgcgca

SEQ ID NO: 28115 - DNA, 30 bp, Artificial Sequence; identical to SEQ ID NO: 256
  Description of Artificial Sequence: Synthetic walnut; inner sequence

SEQ ID NO: 28116 - DNA, 30 bp, Artificial Sequence; identical to SEQ ID NO: 109
  Description of Artificial Sequence: Synthetic walnut; inner sequence

SEQ ID NO: 28117 - DNA, 30 bp, Artificial Sequence; identical to SEQ ID NO: 191
  Description of Artificial Sequence: Synthetic walnut; inner sequence

SEQ ID NO: 28118 - DNA, 30 bp, Artificial Sequence; identical to SEQ ID NO: 274
  Description of Artificial Sequence: Synthetic walnut; inner sequence

SEQ ID NO: 28119 - DNA, 30 bp, Artificial Sequence; identical to SEQ ID NO: 114
  Description of Artificial Sequence: Synthetic walnut; inner sequence

SEQ ID NO: 28120 - DNA, 30 bp, Artificial Sequence; identical to SEQ ID NO: 603
  Description of Artificial Sequence: Synthetic walnut; inner sequence

SEQ ID NO: 28121 - DNA, 30 bp, Artificial Sequence; identical to SEQ ID NO: 599
  Description of Artificial Sequence: Synthetic walnut; inner sequence

SEQ ID NO: 28122 - DNA, 30 bp, Artificial Sequence; identical to SEQ ID NO: 230
  Description of Artificial Sequence: Synthetic walnut; inner sequence

SEQ ID NO: 28123 - DNA, 30 bp, Artificial Sequence; identical to SEQ ID NO: 145
  Description of Artificial Sequence: Synthetic walnut; inner sequence

SEQ ID NO: 28124 - DNA, 30 bp, Artificial Sequence; identical to SEQ ID NO: 20917
  Description of Artificial Sequence: Synthetic walnut; inner sequence

SEQ ID NO: 28125 - DNA, 30 bp, Artificial Sequence; identical to SEQ ID NO: 184
  Description of Artificial Sequence: Synthetic walnut; inner sequence

SEQ ID NO: 28126 - DNA, 30 bp, Artificial Sequence; identical to SEQ ID NO: 20302
  Description of Artificial Sequence: Synthetic walnut; inner sequence

SEQ ID NO: 28127 - DNA, 30 bp, Artificial Sequence; identical to SEQ ID NO: 137
  Description of Artificial Sequence: Synthetic walnut; inner sequence

SEQ ID NO: 28128 - DNA, 30 bp, Artificial Sequence; identical to SEQ ID NO: 20105
  Description of Artificial Sequence: Synthetic walnut; inner sequence

SEQ ID NO: 28129 - DNA, 30 bp, Artificial Sequence; identical to SEQ ID NO: 136
  Description of Artificial Sequence: Synthetic walnut; inner sequence

SEQ ID NO: 28130 - DNA, 30 bp, Artificial Sequence; identical to SEQ ID NO: 92
  Description of Artificial Sequence: Synthetic walnut; inner sequence

SEQ ID NO: 28131 - DNA, 30 bp, Artificial Sequence; identical to SEQ ID NO: 823
  Description of Artificial Sequence: Synthetic walnut; inner sequence

SEQ ID NO: 28132 - DNA, 30 bp, Artificial Sequence; identical to SEQ ID NO: 828
  Description of Artificial Sequence: Synthetic walnut; inner sequence

SEQ ID NO: 28133 - DNA, 30 bp, Artificial Sequence; identical to SEQ ID NO: 246
  Description of Artificial Sequence: Synthetic walnut; inner sequence

SEQ ID NO: 28134 - DNA, 30 bp, Artificial Sequence; identical to SEQ ID NO: 161
  Description of Artificial Sequence: Synthetic walnut; inner sequence

SEQ ID NO: 28135 - DNA, 30 bp, Artificial Sequence; identical to SEQ ID NO: 119
  Description of Artificial Sequence: Synthetic walnut; inner sequence

SEQ ID NO: 28136 - DNA, 31 bp, Artificial Sequence; identical to SEQ ID NO: 216
  Description of Artificial Sequence: Synthetic walnut; inner sequence

SEQ ID NO: 28137 - DNA, 30 bp, Artificial Sequence; identical to SEQ ID NO: 249
  Description of Artificial Sequence: Synthetic walnut; inner sequence

SEQ ID NO: 28138 - DNA, 30 bp, Artificial Sequence; identical to SEQ ID NO: 414
  Description of Artificial Sequence: Synthetic walnut; inner sequence

SEQ ID NO: 28139 - DNA, 30 bp, Artificial Sequence; identical to SEQ ID NO: 740
  Description of Artificial Sequence: Synthetic walnut; inner sequence

SEQ ID NO: 28140 - DNA, 30 bp, Artificial Sequence; identical to SEQ ID NO: 133
  Description of Artificial Sequence: Synthetic walnut; inner sequence

SEQ ID NO: 28141 - DNA, 30 bp, Artificial Sequence; identical to SEQ ID NO: 277
  Description of Artificial Sequence: Synthetic walnut; inner sequence

SEQ ID NO: 28142 - DNA, 30 bp, Artificial Sequence; identical to SEQ ID NO: 827
  Description of Artificial Sequence: Synthetic walnut; inner sequence

SEQ ID NO: 28143 - DNA, 30 bp, Artificial Sequence; identical to SEQ ID NO: 275
  Description of Artificial Sequence: Synthetic walnut; inner sequence

SEQ ID NO: 28144 - DNA, 30 bp, Artificial Sequence; identical to SEQ ID NO: 359
  Description of Artificial Sequence: Synthetic walnut; inner sequence

SEQ ID NO: 28145 - DNA, 30 bp, Artificial Sequence; identical to SEQ ID NO: 317
  Description of Artificial Sequence: Synthetic walnut; inner sequence

SEQ ID NO: 28146 - DNA, 30 bp, Artificial Sequence; identical to SEQ ID NO: 207
  Description of Artificial Sequence: Synthetic walnut; inner sequence

SEQ ID NO: 28147 - DNA, 30 bp, Artificial Sequence
  Description of Artificial Sequence: Synthetic walnut; inner sequence
gcgcaacggtacgcacaccttcacgtcacg

SEQ ID NO: 28148 - DNA, 30 bp, Artificial Sequence; identical to SEQ ID NO: 227
  Description of Artificial Sequence: Synthetic walnut; inner sequence

SEQ ID NO: 28149 - DNA, 30 bp, Artificial Sequence; identical to SEQ ID NO: 370
  Description of Artificial Sequence: Synthetic walnut; inner sequence

SEQ ID NO: 28150 - DNA, 30 bp, Artificial Sequence; identical to SEQ ID NO: 267
  Description of Artificial Sequence: Synthetic walnut; inner sequence

SEQ ID NO: 28151 - DNA, 30 bp, Artificial Sequence; identical to SEQ ID NO: 240
  Description of Artificial Sequence: Synthetic walnut; inner sequence

SEQ ID NO: 28152 - DNA, 30 bp, Artificial Sequence; identical to SEQ ID NO: 12997
  Description of Artificial Sequence: Synthetic walnut; inner sequence

SEQ ID NO: 28153 - DNA, 30 bp, Artificial Sequence; identical to SEQ ID NO: 20518
  Description of Artificial Sequence: Synthetic walnut; inner sequence

SEQ ID NO: 28154 - DNA, 30 bp, Artificial Sequence; identical to SEQ ID NO: 31
  Description of Artificial Sequence: Synthetic walnut; inner sequence

SEQ ID NO: 28155 - DNA, 30 bp, Artificial Sequence; identical to SEQ ID NO: 367
  Description of Artificial Sequence: Synthetic walnut; inner sequence

SEQ ID NO: 28156 - DNA, 30 bp, Artificial Sequence; identical to SEQ ID NO: 509
  Description of Artificial Sequence: Synthetic walnut; inner sequence

SEQ ID NO: 28157 - DNA, 30 bp, Artificial Sequence; identical to SEQ ID NO: 746
  Description of Artificial Sequence: Synthetic walnut; inner sequence

SEQ ID NO: 28158 - DNA, 30 bp, Artificial Sequence
  Description of Artificial Sequence: Synthetic walnut; inner sequence
gcatcgcacggtgacggtacgtgatgcgca

SEQ ID NO: 28159 - DNA, 30 bp, Artificial Sequence; identical to SEQ ID NO: 76
  Description of Artificial Sequence: Synthetic walnut; inner sequence

SEQ ID NO: 28160 - DNA, 30 bp, Artificial Sequence; identical to SEQ ID NO: 343
  Description of Artificial Sequence: Synthetic walnut; inner sequence

SEQ ID NO: 28161 - DNA, 30 bp, Artificial Sequence; identical to SEQ ID NO: 262
  Description of Artificial Sequence: Synthetic walnut; inner sequence

SEQ ID NO: 28162 - DNA, 30 bp, Artificial Sequence; identical to SEQ ID NO: 420
  Description of Artificial Sequence: Synthetic walnut; inner sequence

SEQ ID NO: 28163 - DNA, 30 bp, Artificial Sequence
  Description of Artificial Sequence: Synthetic walnut; inner sequence
cgcaccgtcacggcacaaggcacgtacgca

SEQ ID NO: 28164 - DNA, 30 bp, Artificial Sequence; identical to SEQ ID NO: 141
  Description of Artificial Sequence: Synthetic walnut; inner sequence

SEQ ID NO: 28165 - DNA, 30 bp, Artificial Sequence; identical to SEQ ID NO: 242
  Description of Artificial Sequence: Synthetic walnut; inner sequence

SEQ ID NO: 28166 - DNA, 30 bp, Artificial Sequence; identical to SEQ ID NO: 985
  Description of Artificial Sequence: Synthetic walnut; inner sequence

SEQ ID NO: 28167 - DNA, 30 bp, Artificial Sequence; identical to SEQ ID NO: 308
  Description of Artificial Sequence: Synthetic walnut; inner sequence

SEQ ID NO: 28168 - DNA, 30 bp, Artificial Sequence; identical to SEQ ID NO: 463
  Description of Artificial Sequence: Synthetic walnut; inner sequence

SEQ ID NO: 28169 - DNA, 25 bp, Artificial Sequence
  Description of Artificial Sequence: Synthetic walnut; inner sequence
ggcatgcacgcacctacacgtgggc

SEQ ID NO: 28170 - DNA, 30 bp, Artificial Sequence; identical to SEQ ID NO: 377
  Description of Artificial Sequence: Synthetic walnut; inner sequence

SEQ ID NO: 28171 - DNA, 30 bp, Artificial Sequence; identical to SEQ ID NO: 43
  Description of Artificial Sequence: Synthetic walnut; inner sequence

SEQ ID NO: 28172 - DNA, 30 bp, Artificial Sequence; identical to SEQ ID NO: 123
  Description of Artificial Sequence: Synthetic walnut; inner sequence

SEQ ID NO: 28173 - DNA, 30 bp, Artificial Sequence
  Description of Artificial Sequence: Synthetic walnut; inner sequence
cgcaccgacgcagtgacggcacgtgacgca

SEQ ID NO: 28174 - DNA, 30 bp, Artificial Sequence; identical to SEQ ID NO: 163
  Description of Artificial Sequence: Synthetic walnut; inner sequence

SEQ ID NO: 28175 - DNA, 30 bp, Artificial Sequence; identical to SEQ ID NO: 20473
  Description of Artificial Sequence: Synthetic walnut; inner sequence

SEQ ID NO: 28176 - DNA, 30 bp, Artificial Sequence; identical to SEQ ID NO: 4336
  Description of Artificial Sequence: Synthetic walnut; inner sequence

SEQ ID NO: 28177 - DNA, 30 bp, Artificial Sequence; identical to SEQ ID NO: 77
  Description of Artificial Sequence: Synthetic walnut; inner sequence

SEQ ID NO: 28178 - DNA, 30 bp, Artificial Sequence; identical to SEQ ID NO: 50
  Description of Artificial Sequence: Synthetic walnut; inner sequence

SEQ ID NO: 28179 - DNA, 30 bp, Artificial Sequence; identical to SEQ ID NO: 100
  Description of Artificial Sequence: Synthetic walnut; inner sequence

SEQ ID NO: 28180 - DNA, 30 bp, Artificial Sequence; identical to SEQ ID NO: 243
  Description of Artificial Sequence: Synthetic walnut; inner sequence

SEQ ID NO: 28181 - DNA, 30 bp, Artificial Sequence; identical to SEQ ID NO: 321
  Description of Artificial Sequence: Synthetic walnut; inner sequence

SEQ ID NO: 28182 - DNA, 30 bp, Artificial Sequence; identical to SEQ ID NO: 351
  Description of Artificial Sequence: Synthetic walnut; inner sequence

SEQ ID NO: 28183 - DNA, 29 bp, Artificial Sequence
  Description of Artificial Sequence: Synthetic walnut; inner sequence
gtcatgccatcccttcgagtggacaggta

SEQ ID NO: 28184 - DNA, 28 bp, Artificial Sequence
  Description of Artificial Sequence: Synthetic walnut; inner sequence
cgcaccgtcgatacgtcatgcacgcacc

SEQ ID NO: 28185 - DNA, 30 bp, Artificial Sequence; identical to SEQ ID NO: 217
  Description of Artificial Sequence: Synthetic walnut; inner sequence

SEQ ID NO: 28186 - DNA, 30 bp, Artificial Sequence; identical to SEQ ID NO: 4627
  Description of Artificial Sequence: Synthetic walnut; inner sequence

SEQ ID NO: 28187 - DNA, 30 bp, Artificial Sequence; identical to SEQ ID NO: 477
  Description of Artificial Sequence: Synthetic walnut; inner sequence

SEQ ID NO: 28188 - DNA, 30 bp, Artificial Sequence; identical to SEQ ID NO: 113
  Description of Artificial Sequence: Synthetic walnut; inner sequence

SEQ ID NO: 28189 - DNA, 30 bp, Artificial Sequence; identical to SEQ ID NO: 172
  Description of Artificial Sequence: Synthetic walnut; inner sequence

SEQ ID NO: 28190 - DNA, 30 bp, Artificial Sequence; identical to SEQ ID NO: 175
  Description of Artificial Sequence: Synthetic walnut; inner sequence

SEQ ID NO: 28191 - DNA, 30 bp, Artificial Sequence; identical to SEQ ID NO: 20372
  Description of Artificial Sequence: Synthetic walnut; inner sequence

SEQ ID NO: 28192 - DNA, 30 bp, Artificial Sequence; identical to SEQ ID NO: 286
  Description of Artificial Sequence: Synthetic walnut; inner sequence

SEQ ID NO: 28193 - DNA, 30 bp, Artificial Sequence; identical to SEQ ID NO: 110
  Description of Artificial Sequence: Synthetic walnut; inner sequence

SEQ ID NO: 28194 - DNA, 31 bp, Artificial Sequence; identical to SEQ ID NO: 489
  Description of Artificial Sequence: Synthetic walnut; inner sequence

SEQ ID NO: 28195 - DNA, 30 bp, Artificial Sequence
  Description of Artificial Sequence: Synthetic walnut; inner sequence
gcgtgcaacggtacgatgacgtgacgcaca

SEQ ID NO: 28196 - DNA, 30 bp, Artificial Sequence; identical to SEQ ID NO: 12803
  Description of Artificial Sequence: Synthetic walnut; inner sequence

SEQ ID NO: 28197 - DNA, 30 bp, Artificial Sequence; identical to SEQ ID NO: 51
  Description of Artificial Sequence: Synthetic walnut; inner sequence

SEQ ID NO: 28198 - DNA, 30 bp, Artificial Sequence; identical to SEQ ID NO: 750
  Description of Artificial Sequence: Synthetic walnut; inner sequence

SEQ ID NO: 28199 - DNA, 30 bp, Artificial Sequence
  Description of Artificial Sequence: Synthetic walnut; inner sequence
cgacgtgatgcggtacgtacttgcgacacg

SEQ ID NO: 28200 - DNA, 30 bp, Artificial Sequence; identical to SEQ ID NO: 16688
  Description of Artificial Sequence: Synthetic walnut; inner sequence

SEQ ID NO: 28201 - DNA, 30 bp, Artificial Sequence; identical to SEQ ID NO: 12939
  Description of Artificial Sequence: Synthetic walnut; inner sequence

SEQ ID NO: 28202 - DNA, 30 bp, Artificial Sequence; identical to SEQ ID NO: 548
  Description of Artificial Sequence: Synthetic walnut; inner sequence

SEQ ID NO: 28203 - DNA, 30 bp, Artificial Sequence; identical to SEQ ID NO: 16399
  Description of Artificial Sequence: Synthetic walnut; inner sequence

SEQ ID NO: 28204 - DNA, 30 bp, Artificial Sequence; identical to SEQ ID NO: 349
  Description of Artificial Sequence: Synthetic walnut; inner sequence

SEQ ID NO: 28205 - DNA, 28 bp, Artificial Sequence
  Description of Artificial Sequence: Synthetic walnut; inner sequence
ggcatgcacgcacctacacgtgatcatg

SEQ ID NO: 28206 - DNA, 30 bp, Artificial Sequence; identical to SEQ ID NO: 4659
  Description of Artificial Sequence: Synthetic walnut; inner sequence

SEQ ID NO: 28207 - DNA, 30 bp, Artificial Sequence; identical to SEQ ID NO: 247
  Description of Artificial Sequence: Synthetic walnut; inner sequence

SEQ ID NO: 28208 - DNA, 30 bp, Artificial Sequence
  Description of Artificial Sequence: Synthetic walnut; inner sequence
catgcatcgcgtaacacgtcctgcgtcacg

SEQ ID NO: 28209 - DNA, 30 bp, Artificial Sequence; identical to SEQ ID NO: 8950
  Description of Artificial Sequence: Synthetic walnut; inner sequence

SEQ ID NO: 28210 - DNA, 30 bp, Artificial Sequence; identical to SEQ ID NO: 149
  Description of Artificial Sequence: Synthetic walnut; inner sequence

SEQ ID NO: 28211 - DNA, 30 bp, Artificial Sequence; identical to SEQ ID NO: 291
  Description of Artificial Sequence: Synthetic walnut; inner sequence

SEQ ID NO: 28212 - DNA, 30 bp, Artificial Sequence; identical to SEQ ID NO: 20869
  Description of Artificial Sequence: Synthetic walnut; inner sequence

SEQ ID NO: 28213 - DNA, 30 bp, Artificial Sequence; identical to SEQ ID NO: 223
  Description of Artificial Sequence: Synthetic walnut; inner sequence

SEQ ID NO: 28214 - DNA, 30 bp, Artificial Sequence; identical to SEQ ID NO: 118
  Description of Artificial Sequence: Synthetic walnut; inner sequence

SEQ ID NO: 28215 - DNA, 30 bp, Artificial Sequence; identical to SEQ ID NO: 91
  Description of Artificial Sequence: Synthetic walnut; inner sequence

SEQ ID NO: 28216 - DNA, 30 bp, Artificial Sequence; identical to SEQ ID NO: 248
  Description of Artificial Sequence: Synthetic walnut; inner sequence

SEQ ID NO: 28217 - DNA, 30 bp, Artificial Sequence; identical to SEQ ID NO: 271
  Description of Artificial Sequence: Synthetic walnut; inner sequence

SEQ ID NO: 28218 - DNA, 30 bp, Artificial Sequence; identical to SEQ ID NO: 407
  Description of Artificial Sequence: Synthetic walnut; inner sequence

SEQ ID NO: 28219 - DNA, 30 bp, Artificial Sequence; identical to SEQ ID NO: 16906
  Description of Artificial Sequence: Synthetic walnut; inner sequence

SEQ ID NO: 28220 - DNA, 30 bp, Artificial Sequence; identical to SEQ ID NO: 498
  Description of Artificial Sequence: Synthetic walnut; inner sequence

SEQ ID NO: 28221 - DNA, 30 bp, Artificial Sequence
  Description of Artificial Sequence: Synthetic walnut; inner sequence
cgatacgcagcacgacgcgatgtgtacgca

SEQ ID NO: 28222 - DNA, 30 bp, Artificial Sequence; identical to SEQ ID NO: 340
  Description of Artificial Sequence: Synthetic walnut; inner sequence

SEQ ID NO: 28223 - DNA, 30 bp, Artificial Sequence; identical to SEQ ID NO: 313
  Description of Artificial Sequence: Synthetic walnut; inner sequence

SEQ ID NO: 28224 - DNA, 30 bp, Artificial Sequence; identical to SEQ ID NO: 576
  Description of Artificial Sequence: Synthetic walnut; inner sequence

SEQ ID NO: 28225 - DNA, 30 bp, Artificial Sequence; identical to SEQ ID NO: 406
  Description of Artificial Sequence: Synthetic walnut; inner sequence

SEQ ID NO: 28226 - DNA, 30 bp, Artificial Sequence; identical to SEQ ID NO: 454
  Description of Artificial Sequence: Synthetic walnut; inner sequence

SEQ ID NO: 28227 - DNA, 30 bp, Artificial Sequence; identical to SEQ ID NO: 491
  Description of Artificial Sequence: Synthetic walnut; inner sequence

SEQ ID NO: 28228 - DNA, 30 bp, Artificial Sequence; identical to SEQ ID NO: 457
  Description of Artificial Sequence: Synthetic walnut; inner sequence

SEQ ID NO: 28229 - DNA, 30 bp, Artificial Sequence; identical to SEQ ID NO: 104
  Description of Artificial Sequence: Synthetic walnut; inner sequence

SEQ ID NO: 28230 - DNA, 30 bp, Artificial Sequence; identical to SEQ ID NO: 12996
  Description of Artificial Sequence: Synthetic walnut; inner sequence

SEQ ID NO: 28231 - DNA, 30 bp, Artificial Sequence; identical to SEQ ID NO: 20533
  Description of Artificial Sequence: Synthetic walnut; inner sequence

SEQ ID NO: 28232 - DNA, 30 bp, Artificial Sequence; identical to SEQ ID NO: 314
  Description of Artificial Sequence: Synthetic walnut; inner sequence

SEQ ID NO: 28233 - DNA, 30 bp, Artificial Sequence
  Description of Artificial Sequence: Synthetic walnut; inner sequence
ccgtacgacacgagcacgatgcgttacgcg

SEQ ID NO: 28234 - DNA, 30 bp, Artificial Sequence; identical to SEQ ID NO: 219
  Description of Artificial Sequence: Synthetic walnut; inner sequence

SEQ ID NO: 28235 - DNA, 30 bp, Artificial Sequence; identical to SEQ ID NO: 283
  Description of Artificial Sequence: Synthetic walnut; inner sequence

SEQ ID NO: 28236 - DNA, 30 bp, Artificial Sequence; identical to SEQ ID NO: 611
  Description of Artificial Sequence: Synthetic walnut; inner sequence

SEQ ID NO: 28237 - DNA, 29 bp, Artificial Sequence
  Description of Artificial Sequence: Synthetic walnut; inner sequence
cacgtgcatggacgcgtcgtaccgtggca

SEQ ID NO: 28238 - DNA, 30 bp, Artificial Sequence; identical to SEQ ID NO: 16
  Description of Artificial Sequence: Synthetic walnut; inner sequence

SEQ ID NO: 28239 - DNA, 30 bp, Artificial Sequence; identical to SEQ ID NO: 352
  Description of Artificial Sequence: Synthetic walnut; inner sequence

SEQ ID NO: 28240 - DNA, 30 bp, Artificial Sequence; identical to SEQ ID NO: 379
  Description of Artificial Sequence: Synthetic walnut; inner sequence

SEQ ID NO: 28241 - DNA, 30 bp, Artificial Sequence; identical to SEQ ID NO: 20307
  Description of Artificial Sequence: Synthetic walnut; inner sequence

SEQ ID NO: 28242 - DNA, 30 bp, Artificial Sequence; identical to SEQ ID NO: 886
  Description of Artificial Sequence: Synthetic walnut; inner sequence

SEQ ID NO: 28243 - DNA, 30 bp, Artificial Sequence
  Description of Artificial Sequence: Synthetic walnut; inner sequence
catgcacaggcagcgtgacgttacgccgtg

SEQ ID NO: 28244 - DNA, 30 bp, Artificial Sequence
  Description of Artificial Sequence: Synthetic walnut; inner sequence
cgtgacgcaaggcaaggacctcactgcgcg

SEQ ID NO: 28245 - DNA, 30 bp, Artificial Sequence; identical to SEQ ID NO: 332
  Description of Artificial Sequence: Synthetic walnut; inner sequence

SEQ ID NO: 28246 - DNA, 30 bp, Artificial Sequence; identical to SEQ ID NO: 8807
  Description of Artificial Sequence: Synthetic walnut; inner sequence

SEQ ID NO: 28247 - DNA, 30 bp, Artificial Sequence; identical to SEQ ID NO: 49
  Description of Artificial Sequence: Synthetic walnut; inner sequence

SEQ ID NO: 28248 - DNA, 30 bp, Artificial Sequence; identical to SEQ ID NO: 488
  Description of Artificial Sequence: Synthetic walnut; inner sequence

SEQ ID NO: 28249 - DNA, 30 bp, Artificial Sequence; identical to SEQ ID NO: 167
  Description of Artificial Sequence: Synthetic walnut; inner sequence

SEQ ID NO: 28250 - DNA, 30 bp, Artificial Sequence; identical to SEQ ID NO: 156
  Description of Artificial Sequence: Synthetic walnut; inner sequence

SEQ ID NO: 28251 - DNA, 31 bp, Artificial Sequence; identical to SEQ ID NO: 845
  Description of Artificial Sequence: Synthetic walnut; inner sequence

SEQ ID NO: 28252 - DNA, 30 bp, Artificial Sequence
  Description of Artificial Sequence: Synthetic walnut; inner sequence
gcatgtgacacgcgtcgtcctgcctgcacg

SEQ ID NO: 28253 - DNA, 30 bp, Artificial Sequence; identical to SEQ ID NO: 466
  Description of Artificial Sequence: Synthetic walnut; inner sequence

SEQ ID NO: 28254 - DNA, 30 bp, Artificial Sequence; identical to SEQ ID NO: 12931
  Description of Artificial Sequence: Synthetic walnut; inner sequence

SEQ ID NO: 28255 - DNA, 30 bp, Artificial Sequence; identical to SEQ ID NO: 20733
  Description of Artificial Sequence: Synthetic walnut; inner sequence

SEQ ID NO: 28256 - DNA, 30 bp, Artificial Sequence; identical to SEQ ID NO: 389
  Description of Artificial Sequence: Synthetic walnut; inner sequence

SEQ ID NO: 28257 - DNA, 30 bp, Artificial Sequence
  Description of Artificial Sequence: Synthetic walnut; inner sequence
gtgcgaccgaccctatcaggtggacgtgta

SEQ ID NO: 28258 - DNA, 30 bp, Artificial Sequence; identical to SEQ ID NO: 449
  Description of Artificial Sequence: Synthetic walnut; inner sequence

SEQ ID NO: 28259 - DNA, 30 bp, Artificial Sequence; identical to SEQ ID NO: 303
  Description of Artificial Sequence: Synthetic walnut; inner sequence

SEQ ID NO: 28260 - DNA, 30 bp, Artificial Sequence; identical to SEQ ID NO: 125
  Description of Artificial Sequence: Synthetic walnut; inner sequence

SEQ ID NO: 28261 - DNA, 30 bp, Artificial Sequence; identical to SEQ ID NO: 289
  Description of Artificial Sequence: Synthetic walnut; inner sequence

SEQ ID NO: 28262 - DNA, 30 bp, Artificial Sequence; identical to SEQ ID NO: 4234
  Description of Artificial Sequence: Synthetic walnut; inner sequence

SEQ ID NO: 28263 - DNA, 30 bp, Artificial Sequence; identical to SEQ ID NO: 98
  Description of Artificial Sequence: Synthetic walnut; inner sequence

SEQ ID NO: 28264 - DNA, 29 bp, Artificial Sequence
  Description of Artificial Sequence: Synthetic walnut; inner sequence
ggcctgcgatggatgtggacgtacgtggc

SEQ ID NO: 28265 - DNA, 30 bp, Artificial Sequence; identical to SEQ ID NO: 561
  Description of Artificial Sequence: Synthetic walnut; inner sequence

SEQ ID NO: 28266 - DNA, 30 bp, Artificial Sequence; identical to SEQ ID NO: 115
  Description of Artificial Sequence: Synthetic walnut; inner sequence

SEQ ID NO: 28267 - DNA, 30 bp, Artificial Sequence; identical to SEQ ID NO: 443
  Description of Artificial Sequence: Synthetic walnut; inner sequence

SEQ ID NO: 28268 - DNA, 30 bp, Artificial Sequence
  Description of Artificial Sequence: Synthetic walnut; inner sequence
ggcctgtcgtccctatcaggtggttgtgga

SEQ ID NO: 28269 - DNA, 30 bp, Artificial Sequence; identical to SEQ ID NO: 4429
  Description of Artificial Sequence: Synthetic walnut; inner sequence

SEQ ID NO: 28270 - DNA, 31 bp, Artificial Sequence; identical to SEQ ID NO: 258
  Description of Artificial Sequence: Synthetic walnut; inner sequence

SEQ ID NO: 28271 - DNA, 30 bp, Artificial Sequence; identical to SEQ ID NO: 4802
  Description of Artificial Sequence: Synthetic walnut; inner sequence

SEQ ID NO: 28272 - DNA, 30 bp, Artificial Sequence
  Description of Artificial Sequence: Synthetic walnut; inner sequence
ggccgaactggatgggggcattactgcggc

SEQ ID NO: 28273 - DNA, 30 bp, Artificial Sequence; identical to SEQ ID NO: 142
  Description of Artificial Sequence: Synthetic walnut; inner sequence

SEQ ID NO: 28274 - DNA, 30 bp, Artificial Sequence; identical to SEQ ID NO: 452
  Description of Artificial Sequence: Synthetic walnut; inner sequence

SEQ ID NO: 28275 - DNA, 30 bp, Artificial Sequence; identical to SEQ ID NO: 238
  Description of Artificial Sequence: Synthetic walnut; inner sequence

SEQ ID NO: 28276 - DNA, 30 bp, Artificial Sequence; identical to SEQ ID NO: 595
  Description of Artificial Sequence: Synthetic walnut; inner sequence

SEQ ID NO: 28277 - DNA, 30 bp, Artificial Sequence; identical to SEQ ID NO: 187
  Description of Artificial Sequence: Synthetic walnut; inner sequence

SEQ ID NO: 28278 - DNA, 30 bp, Artificial Sequence
  Description of Artificial Sequence: Synthetic walnut; inner sequence
gcacgatgcaacgtgtgtcctcgcgtcacg

SEQ ID NO: 28279 - DNA, 30 bp, Artificial Sequence; identical to SEQ ID NO: 884
  Description of Artificial Sequence: Synthetic walnut; inner sequence

SEQ ID NO: 28280 - DNA, 30 bp, Artificial Sequence; identical to SEQ ID NO: 631
  Description of Artificial Sequence: Synthetic walnut; inner sequence

SEQ ID NO: 28281 - DNA, 30 bp, Artificial Sequence; identical to SEQ ID NO: 20324
  Description of Artificial Sequence: Synthetic walnut; inner sequence

SEQ ID NO: 28282 - DNA, 30 bp, Artificial Sequence; identical to SEQ ID NO: 715
  Description of Artificial Sequence: Synthetic walnut; inner sequence

SEQ ID NO: 28283 - DNA, 30 bp, Artificial Sequence; identical to SEQ ID NO: 853
  Description of Artificial Sequence: Synthetic walnut; inner sequence

SEQ ID NO: 28284 - DNA, 30 bp, Artificial Sequence; identical to SEQ ID NO: 129
  Description of Artificial Sequence: Synthetic walnut; inner sequence

SEQ ID NO: 28285 - DNA, 30 bp, Artificial Sequence; identical to SEQ ID NO: 86
  Description of Artificial Sequence: Synthetic walnut; inner sequence

SEQ ID NO: 28286 - DNA, 30 bp, Artificial Sequence; identical to SEQ ID NO: 20507
  Description of Artificial Sequence: Synthetic walnut; inner sequence

SEQ ID NO: 28287 - DNA, 30 bp, Artificial Sequence; identical to SEQ ID NO: 634
  Description of Artificial Sequence: Synthetic walnut; inner sequence

SEQ ID NO: 28288 - DNA, 30 bp, Artificial Sequence; identical to SEQ ID NO: 320
  Description of Artificial Sequence: Synthetic walnut; inner sequence

SEQ ID NO: 28289 - DNA, 30 bp, Artificial Sequence; identical to SEQ ID NO: 464
  Description of Artificial Sequence: Synthetic walnut; inner sequence

SEQ ID NO: 28290 - DNA, 29 bp, Artificial Sequence
  Description of Artificial Sequence: Synthetic walnut; inner sequence
gtgcgaccgaccctatcaagtgcagcatg

SEQ ID NO: 28291 - DNA, 30 bp, Artificial Sequence; identical to SEQ ID NO: 20133
  Description of Artificial Sequence: Synthetic walnut; inner sequence

SEQ ID NO: 28292 - DNA, 30 bp, Artificial Sequence; identical to SEQ ID NO: 326
  Description of Artificial Sequence: Synthetic walnut; inner sequence

SEQ ID NO: 28293 - DNA, 30 bp, Artificial Sequence; identical to SEQ ID NO: 57
  Description of Artificial Sequence: Synthetic walnut; inner sequence

SEQ ID NO: 28294 - DNA, 30 bp, Artificial Sequence; identical to SEQ ID NO: 12985
  Description of Artificial Sequence: Synthetic walnut; inner sequence

SEQ ID NO: 28295 - DNA, 30 bp, Artificial Sequence
  Description of Artificial Sequence: Synthetic walnut; inner sequence
gcccgaacgcgcctacaagtgttgcatgga

SEQ ID NO: 28296 - DNA, 30 bp, Artificial Sequence; identical to SEQ ID NO: 312
  Description of Artificial Sequence: Synthetic walnut; inner sequence

SEQ ID NO: 28297 - DNA, 30 bp, Artificial Sequence; identical to SEQ ID NO: 4940
  Description of Artificial Sequence: Synthetic walnut; inner sequence

SEQ ID NO: 28298 - DNA, 30 bp, Artificial Sequence
  Description of Artificial Sequence: Synthetic walnut; inner sequence
ggcatgcgatggatgtgggctagtatgggc

SEQ ID NO: 28299 - DNA, 31 bp, Artificial Sequence; identical to SEQ ID NO: 659
  Description of Artificial Sequence: Synthetic walnut; inner sequence

SEQ ID NO: 28300 - DNA, 30 bp, Artificial Sequence; identical to SEQ ID NO: 20540
  Description of Artificial Sequence: Synthetic walnut; inner sequence

SEQ ID NO: 28301 - DNA, 28 bp, Artificial Sequence
  Description of Artificial Sequence: Synthetic walnut; inner sequence
gtgcgaccgaccctatcatgaggccatg

SEQ ID NO: 28302 - DNA, 30 bp, Artificial Sequence; identical to SEQ ID NO: 687
  Description of Artificial Sequence: Synthetic walnut; inner sequence

SEQ ID NO: 28303 - DNA, 30 bp, Artificial Sequence; identical to SEQ ID NO: 891
  Description of Artificial Sequence: Synthetic walnut; inner sequence

SEQ ID NO: 28304 - DNA, 30 bp, Artificial Sequence; identical to SEQ ID NO: 260
  Description of Artificial Sequence: Synthetic walnut; inner sequence

SEQ ID NO: 28305 - DNA, 30 bp, Artificial Sequence; identical to SEQ ID NO: 200
  Description of Artificial Sequence: Synthetic walnut; inner sequence

SEQ ID NO: 28306 - DNA, 30 bp, Artificial Sequence
  Description of Artificial Sequence: Synthetic walnut; inner sequence
cgcacgcagtgacgttacgcatcgtgcaca

SEQ ID NO: 28307 - DNA, 30 bp, Artificial Sequence
  Description of Artificial Sequence: Synthetic walnut; inner sequence
gcacgacgcacgtacgtacctcacgccacg

SEQ ID NO: 28308 - DNA, 30 bp, Artificial Sequence; identical to SEQ ID NO: 507
  Description of Artificial Sequence: Synthetic walnut; inner sequence

SEQ ID NO: 28309 - DNA, 30 bp, Artificial Sequence; identical to SEQ ID NO: 102
  Description of Artificial Sequence: Synthetic walnut; inner sequence

SEQ ID NO: 28310 - DNA, 30 bp, Artificial Sequence
  Description of Artificial Sequence: Synthetic walnut; inner sequence
catgcgcatgcgtacggatcgtgctgcacg

SEQ ID NO: 28311 - DNA, 30 bp, Artificial Sequence; identical to SEQ ID NO: 806
  Description of Artificial Sequence: Synthetic walnut; inner sequence

SEQ ID NO: 28312 - DNA, 30 bp, Artificial Sequence
  Description of Artificial Sequence: Synthetic walnut; inner sequence
gcgacacagacggtacgccttgcctgcacg

SEQ ID NO: 28313 - DNA, 30 bp, Artificial Sequence; identical to SEQ ID NO: 311
  Description of Artificial Sequence: Synthetic walnut; inner sequence

SEQ ID NO: 28314 - DNA, 30 bp, Artificial Sequence; identical to SEQ ID NO: 164
  Description of Artificial Sequence: Synthetic walnut; inner sequence

SEQ ID NO: 28315 - DNA, 30 bp, Artificial Sequence
  Description of Artificial Sequence: Synthetic walnut; inner sequence
cgatgcgcaacatgcatccgacgcgacacg

SEQ ID NO: 28316 - DNA, 30 bp, Artificial Sequence
  Description of Artificial Sequence: Synthetic walnut; inner sequence
cgtcacgcaggacggtagcgcgtcggcacg

SEQ ID NO: 28317 - DNA, 30 bp, Artificial Sequence
  Description of Artificial Sequence: Synthetic walnut; inner sequence
gtcacgccgcatccctatcgaggggacatg

SEQ ID NO: 28318 - DNA, 30 bp, Artificial Sequence; identical to SEQ ID NO: 126
  Description of Artificial Sequence: Synthetic walnut; inner sequence

SEQ ID NO: 28319 - DNA, 30 bp, Artificial Sequence; identical to SEQ ID NO: 777
  Description of Artificial Sequence: Synthetic walnut; inner sequence

SEQ ID NO: 28320 - DNA, 30 bp, Artificial Sequence
  Description of Artificial Sequence: Synthetic walnut; inner sequence
cgcaccgtgatgacgctacgttacggcatg

SEQ ID NO: 28321 - DNA, 32 bp, Artificial Sequence
  Description of Artificial Sequence: Synthetic walnut; inner sequence
ggcctgcgatggatggggacgggtatgctggc

SEQ ID NO: 28322 - DNA, 30 bp, Artificial Sequence; identical to SEQ ID NO: 512
  Description of Artificial Sequence: Synthetic walnut; inner sequence

SEQ ID NO: 28323 - DNA, 30 bp, Artificial Sequence; identical to SEQ ID NO: 892
  Description of Artificial Sequence: Synthetic walnut; inner sequence

SEQ ID NO: 28324 - DNA, 30 bp, Artificial Sequence; identical to SEQ ID NO: 560
  Description of Artificial Sequence: Synthetic walnut; inner sequence

SEQ ID NO: 28325 - DNA, 29 bp, Artificial Sequence
  Description of Artificial Sequence: Synthetic walnut; inner sequence
cgcaacgacactcacgggcatgacgcgca

SEQ ID NO: 28326 - DNA, 30 bp, Artificial Sequence; identical to SEQ ID NO: 225
  Description of Artificial Sequence: Synthetic walnut; inner sequence

SEQ ID NO: 28327 - DNA, 30 bp, Artificial Sequence; identical to SEQ ID NO: 369
  Description of Artificial Sequence: Synthetic walnut; inner sequence

SEQ ID NO: 28328 - DNA, 30 bp, Artificial Sequence
  Description of Artificial Sequence: Synthetic walnut; inner sequence
ggacgcatcgccccttcgagtggccaggta

SEQ ID NO: 28329 - DNA, 30 bp, Artificial Sequence
  Description of Artificial Sequence: Synthetic walnut; inner sequence
cgacacgcacagtcagcacgtccgttcgcg

SEQ ID NO: 28330 - DNA, 30 bp, Artificial Sequence; identical to SEQ ID NO: 358
  Description of Artificial Sequence: Synthetic walnut; inner sequence

SEQ ID NO: 28331 - DNA, 30 bp, Artificial Sequence; identical to SEQ ID NO: 12869
  Description of Artificial Sequence: Synthetic walnut; inner sequence

SEQ ID NO: 28332 - DNA, 30 bp, Artificial Sequence; identical to SEQ ID NO: 4356
  Description of Artificial Sequence: Synthetic walnut; inner sequence

SEQ ID NO: 28333 - DNA, 30 bp, Artificial Sequence; identical to SEQ ID NO: 16970
  Description of Artificial Sequence: Synthetic walnut; inner sequence

SEQ ID NO: 28334 - DNA, 30 bp, Artificial Sequence; identical to SEQ ID NO: 20233
  Description of Artificial Sequence: Synthetic walnut; inner sequence

SEQ ID NO: 28335 - DNA, 30 bp, Artificial Sequence
  Description of Artificial Sequence: Synthetic walnut; inner sequence
cgcaccgtatgcgtcacgtaacacggcatg

SEQ ID NO: 28336 - DNA, 30 bp, Artificial Sequence; identical to SEQ ID NO: 661
  Description of Artificial Sequence: Synthetic walnut; inner sequence

SEQ ID NO: 28337 - DNA, 30 bp, Artificial Sequence; identical to SEQ ID NO: 20528
  Description of Artificial Sequence: Synthetic walnut; inner sequence

SEQ ID NO: 28338 - DNA, 26 bp, Artificial Sequence
  Description of Artificial Sequence: Synthetic walnut; inner sequence
ggcatgcacgcacctacacgtggcca

SEQ ID NO: 28339 - DNA, 30 bp, Artificial Sequence; identical to SEQ ID NO: 272
  Description of Artificial Sequence: Synthetic walnut; inner sequence

SEQ ID NO: 28340 - DNA, 30 bp, Artificial Sequence; identical to SEQ ID NO: 837
  Description of Artificial Sequence: Synthetic walnut; inner sequence

SEQ ID NO: 28341 - DNA, 30 bp, Artificial Sequence; identical to SEQ ID NO: 583
  Description of Artificial Sequence: Synthetic walnut; inner sequence

SEQ ID NO: 28342 - DNA, 30 bp, Artificial Sequence; identical to SEQ ID NO: 647
  Description of Artificial Sequence: Synthetic walnut; inner sequence

SEQ ID NO: 28343 - DNA, 29 bp, Artificial Sequence
  Description of Artificial Sequence: Synthetic walnut; inner sequence
ggcctgcgatggatgtggttgtgctcgtc

SEQ ID NO: 28344 - DNA, 30 bp, Artificial Sequence; identical to SEQ ID NO: 203
  Description of Artificial Sequence: Synthetic walnut; inner sequence

SEQ ID NO: 28345 - DNA, 30 bp, Artificial Sequence; identical to SEQ ID NO: 497
  Description of Artificial Sequence: Synthetic walnut; inner sequence

SEQ ID NO: 28346 - DNA, 30 bp, Artificial Sequence; identical to SEQ ID NO: 909
  Description of Artificial Sequence: Synthetic walnut; inner sequence

SEQ ID NO: 28347 - DNA, 30 bp, Artificial Sequence; identical to SEQ ID NO: 4489
  Description of Artificial Sequence: Synthetic walnut; inner sequence

SEQ ID NO: 28348 - DNA, 30 bp, Artificial Sequence; identical to SEQ ID NO: 499
  Description of Artificial Sequence: Synthetic walnut; inner sequence

SEQ ID NO: 28349 - DNA, 30 bp, Artificial Sequence; identical to SEQ ID NO: 89
  Description of Artificial Sequence: Synthetic walnut; inner sequence

SEQ ID NO: 28350 - DNA, 30 bp, Artificial Sequence
  Description of Artificial Sequence: Synthetic walnut; inner sequence
gtcattccgcatcctacacgtgggaatgga

SEQ ID NO: 28351 - DNA, 30 bp, Artificial Sequence; identical to SEQ ID NO: 754
  Description of Artificial Sequence: Synthetic walnut; inner sequence

SEQ ID NO: 28352 - DNA, 30 bp, Artificial Sequence; identical to SEQ ID NO: 4571
  Description of Artificial Sequence: Synthetic walnut; inner sequence

SEQ ID NO: 28353 - DNA, 30 bp, Artificial Sequence; identical to SEQ ID NO: 158
  Description of Artificial Sequence: Synthetic walnut; inner sequence

SEQ ID NO: 28354 - DNA, 30 bp, Artificial Sequence; identical to SEQ ID NO: 543
  Description of Artificial Sequence: Synthetic walnut; inner sequence

SEQ ID NO: 28355 - DNA, 30 bp, Artificial Sequence; identical to SEQ ID NO: 327
  Description of Artificial Sequence: Synthetic walnut; inner sequence

SEQ ID NO: 28356 - DNA, 30 bp, Artificial Sequence; identical to SEQ ID NO: 16837
  Description of Artificial Sequence: Synthetic walnut; inner sequence

SEQ ID NO: 28357 - DNA, 30 bp, Artificial Sequence; identical to SEQ ID NO: 362
  Description of Artificial Sequence: Synthetic walnut; inner sequence

SEQ ID NO: 28358 - DNA, 30 bp, Artificial Sequence; identical to SEQ ID NO: 16829
  Description of Artificial Sequence: Synthetic walnut; inner sequence

SEQ ID NO: 28359 - DNA, 30 bp, Artificial Sequence; identical to SEQ ID NO: 331
  Description of Artificial Sequence: Synthetic walnut; inner sequence

SEQ ID NO: 28360 - DNA, 30 bp, Artificial Sequence; identical to SEQ ID NO: 717
  Description of Artificial Sequence: Synthetic walnut; inner sequence

SEQ ID NO: 28361 - DNA, 30 bp, Artificial Sequence; identical to SEQ ID NO: 20522
  Description of Artificial Sequence: Synthetic walnut; inner sequence

SEQ ID NO: 28362 - DNA, 30 bp, Artificial Sequence; identical to SEQ ID NO: 16750
  Description of Artificial Sequence: Synthetic walnut; inner sequence

SEQ ID NO: 28363 - DNA, 30 bp, Artificial Sequence; identical to SEQ ID NO: 16675
  Description of Artificial Sequence: Synthetic walnut; inner sequence

SEQ ID NO: 28364 - DNA, 31 bp, Artificial Sequence; identical to SEQ ID NO: 503
  Description of Artificial Sequence: Synthetic walnut; inner sequence

SEQ ID NO: 28365 - DNA, 30 bp, Artificial Sequence; identical to SEQ ID NO: 212
  Description of Artificial Sequence: Synthetic walnut; inner sequence

SEQ ID NO: 28366 - DNA, 30 bp, Artificial Sequence; identical to SEQ ID NO: 20626
  Description of Artificial Sequence: Synthetic walnut; inner sequence

SEQ ID NO: 28367 - DNA, 30 bp, Artificial Sequence; identical to SEQ ID NO: 64
  Description of Artificial Sequence: Synthetic walnut; inner sequence

SEQ ID NO: 28368 - DNA, 30 bp, Artificial Sequence
  Description of Artificial Sequence: Synthetic walnut; inner sequence
ggcctgcgatggatgtgtgcgtgtcttagc

SEQ ID NO: 28369 - DNA, 30 bp, Artificial Sequence; identical to SEQ ID NO: 20524
  Description of Artificial Sequence: Synthetic walnut; inner sequence

SEQ ID NO: 28370 - DNA, 30 bp, Artificial Sequence; identical to SEQ ID NO: 20769
  Description of Artificial Sequence: Synthetic walnut; inner sequence

SEQ ID NO: 28371 - DNA, 30 bp, Artificial Sequence; identical to SEQ ID NO: 44
  Description of Artificial Sequence: Synthetic walnut; inner sequence

SEQ ID NO: 28372 - DNA, 29 bp, Artificial Sequence
  Description of Artificial Sequence: Synthetic walnut; inner sequence
ggccgatcgaccctatcaagtgcagcatg

SEQ ID NO: 28373 - DNA, 30 bp, Artificial Sequence; identical to SEQ ID NO: 293
  Description of Artificial Sequence: Synthetic walnut; inner sequence

SEQ ID NO: 28374 - DNA, 30 bp, Artificial Sequence; identical to SEQ ID NO: 16603
  Description of Artificial Sequence: Synthetic walnut; inner sequence

SEQ ID NO: 28375 - DNA, 30 bp, Artificial Sequence
  Description of Artificial Sequence: Synthetic walnut; inner sequence
cgacacggacggtaggcatgctgcgtcacg

SEQ ID NO: 28376 - DNA, 30 bp, Artificial Sequence; identical to SEQ ID NO: 38
  Description of Artificial Sequence: Synthetic walnut; inner sequence

SEQ ID NO: 28377 - DNA, 30 bp, Artificial Sequence; identical to SEQ ID NO: 4707
  Description of Artificial Sequence: Synthetic walnut; inner sequence

SEQ ID NO: 28378 - DNA, 30 bp, Artificial Sequence; identical to SEQ ID NO: 573
  Description of Artificial Sequence: Synthetic walnut; inner sequence

SEQ ID NO: 28379 - DNA, 30 bp, Artificial Sequence
  Description of Artificial Sequence: Synthetic walnut; inner sequence
acgtgagcacgacgtagcgcacactgcacg

SEQ ID NO: 28380 - DNA, 30 bp, Artificial Sequence; identical to SEQ ID NO: 447
  Description of Artificial Sequence: Synthetic walnut; inner sequence

SEQ ID NO: 28381 - DNA, 30 bp, Artificial Sequence
  Description of Artificial Sequence: Synthetic walnut; inner sequence
cgtaacgcagcgcgagtgacgtacgacacg

SEQ ID NO: 28382 - DNA, 30 bp, Artificial Sequence
  Description of Artificial Sequence: Synthetic walnut; inner sequence
gcgtgacgcaacgcaggctgtccgtacgca

SEQ ID NO: 28383 - DNA, 30 bp, Artificial Sequence; identical to SEQ ID NO: 16612
  Description of Artificial Sequence: Synthetic walnut; inner sequence

SEQ ID NO: 28384 - DNA, 30 bp, Artificial Sequence; identical to SEQ ID NO: 20923
  Description of Artificial Sequence: Synthetic walnut; inner sequence

SEQ ID NO: 28385 - DNA, 30 bp, Artificial Sequence; identical to SEQ ID NO: 615
  Description of Artificial Sequence: Synthetic walnut; inner sequence

SEQ ID NO: 28386 - DNA, 30 bp, Artificial Sequence; identical to SEQ ID NO: 4748
  Description of Artificial Sequence: Synthetic walnut; inner sequence

SEQ ID NO: 28387 - DNA, 30 bp, Artificial Sequence; identical to SEQ ID NO: 4521
  Description of Artificial Sequence: Synthetic walnut; inner sequence

SEQ ID NO: 28388 - DNA, 30 bp, Artificial Sequence; identical to SEQ ID NO: 16692
  Description of Artificial Sequence: Synthetic walnut; inner sequence

SEQ ID NO: 28389 - DNA, 30 bp, Artificial Sequence
  Description of Artificial Sequence: Synthetic walnut; inner sequence
cacgtgcagcgtgtcgtgccacatgacgca

SEQ ID NO: 28390 - DNA, 30 bp, Artificial Sequence
  Description of Artificial Sequence: Synthetic walnut; inner sequence
cgcaccgcaacgtgagggcatgcgcgtgtg

SEQ ID NO: 28391 - DNA, 29 bp, Artificial Sequence
  Description of Artificial Sequence: Synthetic walnut; inner sequence
cgcaacgacactcacgggcacgacgcgca

SEQ ID NO: 28392 - DNA, 30 bp, Artificial Sequence
  Description of Artificial Sequence: Synthetic walnut; inner sequence
ggccgacgatggatgtgggttgtgctcgtc

SEQ ID NO: 28393 - DNA, 30 bp, Artificial Sequence; identical to SEQ ID NO: 394
  Description of Artificial Sequence: Synthetic walnut; inner sequence

SEQ ID NO: 28394 - DNA, 30 bp, Artificial Sequence; identical to SEQ ID NO: 20690
  Description of Artificial Sequence: Synthetic walnut; inner sequence

SEQ ID NO: 28395 - DNA, 30 bp, Artificial Sequence; identical to SEQ ID NO: 20613
  Description of Artificial Sequence: Synthetic walnut; inner sequence

SEQ ID NO: 28396 - DNA, 30 bp, Artificial Sequence; identical to SEQ ID NO: 154
  Description of Artificial Sequence: Synthetic walnut; inner sequence

SEQ ID NO: 28397 - DNA, 30 bp, Artificial Sequence; identical to SEQ ID NO: 324
  Description of Artificial Sequence: Synthetic walnut; inner sequence

SEQ ID NO: 28398 - DNA, 30 bp, Artificial Sequence; identical to SEQ ID NO: 146
  Description of Artificial Sequence: Synthetic walnut; inner sequence

SEQ ID NO: 28399 - DNA, 28 bp, Artificial Sequence
  Description of Artificial Sequence: Synthetic walnut; inner sequence
ggacgcagctgacctagcatgtgtgtca

SEQ ID NO: 28400 - DNA, 30 bp, Artificial Sequence
  Description of Artificial Sequence: Synthetic walnut; inner sequence
cgtgacgtgacgcatccctcgctgttcgcg

SEQ ID NO: 28401 - DNA, 30 bp, Artificial Sequence; identical to SEQ ID NO: 4807
  Description of Artificial Sequence: Synthetic walnut; inner sequence

SEQ ID NO: 28402 - DNA, 30 bp, Artificial Sequence; identical to SEQ ID NO: 8953
  Description of Artificial Sequence: Synthetic walnut; inner sequence

SEQ ID NO: 28403 - DNA, 30 bp, Artificial Sequence; identical to SEQ ID NO: 788
  Description of Artificial Sequence: Synthetic walnut; inner sequence

SEQ ID NO: 28404 - DNA, 30 bp, Artificial Sequence; identical to SEQ ID NO: 728
  Description of Artificial Sequence: Synthetic walnut; inner sequence

SEQ ID NO: 28405 - DNA, 30 bp, Artificial Sequence; identical to SEQ ID NO: 245
  Description of Artificial Sequence: Synthetic walnut; inner sequence

SEQ ID NO: 28406 - DNA, 30 bp, Artificial Sequence
  Description of Artificial Sequence: Synthetic walnut; inner sequence
gtccgaccgcacccttcgaggggacatgga

SEQ ID NO: 28407 - DNA, 30 bp, Artificial Sequence; identical to SEQ ID NO: 176
  Description of Artificial Sequence: Synthetic walnut; inner sequence

SEQ ID NO: 28408 - DNA, 30 bp, Artificial Sequence; identical to SEQ ID NO: 233
  Description of Artificial Sequence: Synthetic walnut; inner sequence

SEQ ID NO: 28409 - DNA, 30 bp, Artificial Sequence; identical to SEQ ID NO: 58
  Description of Artificial Sequence: Synthetic walnut; inner sequence

SEQ ID NO: 28410 - DNA, 30 bp, Artificial Sequence; identical to SEQ ID NO: 20560
  Description of Artificial Sequence: Synthetic walnut; inner sequence

SEQ ID NO: 28411 - DNA, 30 bp, Artificial Sequence; identical to SEQ ID NO: 66
  Description of Artificial Sequence: Synthetic walnut; inner sequence

SEQ ID NO: 28412 - DNA, 30 bp, Artificial Sequence
  Description of Artificial Sequence: Synthetic walnut; inner sequence
ggacgcagggcaggacgacgtatcgccacg

SEQ ID NO: 28413 - DNA, 30 bp, Artificial Sequence
  Description of Artificial Sequence: Synthetic walnut; inner sequence
ggacgcatcgccccttcgcgtggacaggta

SEQ ID NO: 28414 - DNA, 30 bp, Artificial Sequence; identical to SEQ ID NO: 684
  Description of Artificial Sequence: Synthetic walnut; inner sequence

SEQ ID NO: 28415 - DNA, 30 bp, Artificial Sequence; identical to SEQ ID NO: 171
  Description of Artificial Sequence: Synthetic walnut; inner sequence

SEQ ID NO: 28416 - DNA, 30 bp, Artificial Sequence
  Description of Artificial Sequence: Synthetic walnut; inner sequence
cacgtcacgcaacgacatgtacgctgcacg

SEQ ID NO: 28417 - DNA, 30 bp, Artificial Sequence; identical to SEQ ID NO: 4419
  Description of Artificial Sequence: Synthetic walnut; inner sequence

SEQ ID NO: 28418 - DNA, 30 bp, Artificial Sequence; identical to SEQ ID NO: 20468
  Description of Artificial Sequence: Synthetic walnut; inner sequence

SEQ ID NO: 28419 - DNA, 30 bp, Artificial Sequence; identical to SEQ ID NO: 683
  Description of Artificial Sequence: Synthetic walnut; inner sequence

SEQ ID NO: 28420 - DNA, 30 bp, Artificial Sequence; identical to SEQ ID NO: 531
  Description of Artificial Sequence: Synthetic walnut; inner sequence

SEQ ID NO: 28421 - DNA, 30 bp, Artificial Sequence; identical to SEQ ID NO: 455
  Description of Artificial Sequence: Synthetic walnut; inner sequence

SEQ ID NO: 28422 - DNA, 27 bp, Artificial Sequence
  Description of Artificial Sequence: Synthetic walnut; inner sequence
gtgcgaccgaccctatcaagtacgtca

SEQ ID NO: 28423 - DNA, 30 bp, Artificial Sequence; identical to SEQ ID NO: 577
  Description of Artificial Sequence: Synthetic walnut; inner sequence

SEQ ID NO: 28424 - DNA, 30 bp, Artificial Sequence; identical to SEQ ID NO: 467
  Description of Artificial Sequence: Synthetic walnut; inner sequence

SEQ ID NO: 28425 - DNA, 30 bp, Artificial Sequence
  Description of Artificial Sequence: Synthetic walnut; inner sequence
gcgtgacgtgacggcagtgcgtgctacgtg

SEQ ID NO: 28426 - DNA, 30 bp, Artificial Sequence
  Description of Artificial Sequence: Synthetic walnut; inner sequence
cgatgcgcaaccacgccacacgcatgcaca

SEQ ID NO: 28427 - DNA, 30 bp, Artificial Sequence
  Description of Artificial Sequence: Synthetic walnut; inner sequence
ggccgagtcgtcacttcaattgggcgtgga

SEQ ID NO: 28428 - DNA, 30 bp, Artificial Sequence; identical to SEQ ID NO: 493
  Description of Artificial Sequence: Synthetic walnut; inner sequence

SEQ ID NO: 28429 - DNA, 30 bp, Artificial Sequence; identical to SEQ ID NO: 20607
  Description of Artificial Sequence: Synthetic walnut; inner sequence

SEQ ID NO: 28430 - DNA, 30 bp, Artificial Sequence; identical to SEQ ID NO: 462
  Description of Artificial Sequence: Synthetic walnut; inner sequence

SEQ ID NO: 28431 - DNA, 30 bp, Artificial Sequence; identical to SEQ ID NO: 905
  Description of Artificial Sequence: Synthetic walnut; inner sequence

SEQ ID NO: 28432 - DNA, 30 bp, Artificial Sequence
  Description of Artificial Sequence: Synthetic walnut; inner sequence
cgatgcgcagtacgtcgatgtcacggcgtg

SEQ ID NO: 28433 - DNA, 32 bp, Artificial Sequence
  Description of Artificial Sequence: Synthetic walnut; inner sequence
ggcctgcgatggatgggggcgttgtgctcgtc

SEQ ID NO: 28434 - DNA, 30 bp, Artificial Sequence; identical to SEQ ID NO: 437
  Description of Artificial Sequence: Synthetic walnut; inner sequence

SEQ ID NO: 28435 - DNA, 30 bp, Artificial Sequence; identical to SEQ ID NO: 889
  Description of Artificial Sequence: Synthetic walnut; inner sequence

SEQ ID NO: 28436 - DNA, 30 bp, Artificial Sequence
  Description of Artificial Sequence: Synthetic walnut; inner sequence
tgcgtcacgccaggcatacgtcacgtcacg

SEQ ID NO: 28437 - DNA, 30 bp, Artificial Sequence; identical to SEQ ID NO: 16799
  Description of Artificial Sequence: Synthetic walnut; inner sequence

SEQ ID NO: 28438 - DNA, 30 bp, Artificial Sequence; identical to SEQ ID NO: 800
  Description of Artificial Sequence: Synthetic walnut; inner sequence

SEQ ID NO: 28439 - DNA, 30 bp, Artificial Sequence; identical to SEQ ID NO: 598
  Description of Artificial Sequence: Synthetic walnut; inner sequence

SEQ ID NO: 28440 - DNA, 30 bp, Artificial Sequence; identical to SEQ ID NO: 20820
  Description of Artificial Sequence: Synthetic walnut; inner sequence

SEQ ID NO: 28441 - DNA, 30 bp, Artificial Sequence
  Description of Artificial Sequence: Synthetic walnut; inner sequence
gtcattcgatggatgtgggttgtgctcgtc

SEQ ID NO: 28442 - DNA, 30 bp, Artificial Sequence; identical to SEQ ID NO: 295
  Description of Artificial Sequence: Synthetic walnut; inner sequence

SEQ ID NO: 28443 - DNA, 30 bp, Artificial Sequence; identical to SEQ ID NO: 244
  Description of Artificial Sequence: Synthetic walnut; inner sequence

SEQ ID NO: 28444 - DNA, 30 bp, Artificial Sequence; identical to SEQ ID NO: 192
  Description of Artificial Sequence: Synthetic walnut; inner sequence

SEQ ID NO: 28445 - DNA, 30 bp, Artificial Sequence; identical to SEQ ID NO: 8910
  Description of Artificial Sequence: Synthetic walnut; inner sequence

SEQ ID NO: 28446 - DNA, 30 bp, Artificial Sequence
  Description of Artificial Sequence: Synthetic walnut; inner sequence
ggacggatcgccccttcgagtggacaggta

SEQ ID NO: 28447 - DNA, 30 bp, Artificial Sequence; identical to SEQ ID NO: 4469
  Description of Artificial Sequence: Synthetic walnut; inner sequence

SEQ ID NO: 28448 - DNA, 30 bp, Artificial Sequence; identical to SEQ ID NO: 4254
  Description of Artificial Sequence: Synthetic walnut; inner sequence

SEQ ID NO: 28449 - DNA, 30 bp, Artificial Sequence; identical to SEQ ID NO: 292
  Description of Artificial Sequence: Synthetic walnut; inner sequence

SEQ ID NO: 28450 - DNA, 30 bp, Artificial Sequence; identical to SEQ ID NO: 208
  Description of Artificial Sequence: Synthetic walnut; inner sequence

SEQ ID NO: 28451 - DNA, 30 bp, Artificial Sequence; identical to SEQ ID NO: 60
  Description of Artificial Sequence: Synthetic walnut; inner sequence

SEQ ID NO: 28452 - DNA, 30 bp, Artificial Sequence
  Description of Artificial Sequence: Synthetic walnut; inner sequence
ggccgagcttacctgtcaagtgcgagtgta

SEQ ID NO: 28453 - DNA, 30 bp, Artificial Sequence; identical to SEQ ID NO: 686
  Description of Artificial Sequence: Synthetic walnut; inner sequence

SEQ ID NO: 28454 - DNA, 30 bp, Artificial Sequence; identical to SEQ ID NO: 698
  Description of Artificial Sequence: Synthetic walnut; inner sequence

SEQ ID NO: 28455 - DNA, 30 bp, Artificial Sequence; identical to SEQ ID NO: 20551
  Description of Artificial Sequence: Synthetic walnut; inner sequence

SEQ ID NO: 28456 - DNA, 29 bp, Artificial Sequence
  Description of Artificial Sequence: Synthetic walnut; inner sequence
cgtacgacacgacagacatgcacgacgca

SEQ ID NO: 28457 - DNA, 30 bp, Artificial Sequence; identical to SEQ ID NO: 4775
  Description of Artificial Sequence: Synthetic walnut; inner sequence

SEQ ID NO: 28458 - DNA, 30 bp, Artificial Sequence
  Description of Artificial Sequence: Synthetic walnut; inner sequence
ggcctgcgctggatgtgtgcgtgtattagc

SEQ ID NO: 28459 - DNA, 30 bp, Artificial Sequence; identical to SEQ ID NO: 20847
  Description of Artificial Sequence: Synthetic walnut; inner sequence

SEQ ID NO: 28460 - DNA, 30 bp, Artificial Sequence; identical to SEQ ID NO: 20976
  Description of Artificial Sequence: Synthetic walnut; inner sequence

SEQ ID NO: 28461 - DNA, 30 bp, Artificial Sequence; identical to SEQ ID NO: 4420
  Description of Artificial Sequence: Synthetic walnut; inner sequence

SEQ ID NO: 28462 - DNA, 30 bp, Artificial Sequence; identical to SEQ ID NO: 20761
  Description of Artificial Sequence: Synthetic walnut; inner sequence

SEQ ID NO: 28463 - DNA, 30 bp, Artificial Sequence; identical to SEQ ID NO: 401
  Description of Artificial Sequence: Synthetic walnut; inner sequence

SEQ ID NO: 28464 - DNA, 30 bp, Artificial Sequence; identical to SEQ ID NO: 8782
  Description of Artificial Sequence: Synthetic walnut; inner sequence

SEQ ID NO: 28465 - DNA, 30 bp, Artificial Sequence; identical to SEQ ID NO: 4931
  Description of Artificial Sequence: Synthetic walnut; inner sequence

SEQ ID NO: 28466 - DNA, 30 bp, Artificial Sequence; identical to SEQ ID NO: 4981
  Description of Artificial Sequence: Synthetic walnut; inner sequence

SEQ ID NO: 28467 - DNA, 30 bp, Artificial Sequence; identical to SEQ ID NO: 20367
  Description of Artificial Sequence: Synthetic walnut; inner sequence

SEQ ID NO: 28468 - DNA, 30 bp, Artificial Sequence; identical to SEQ ID NO: 419
  Description of Artificial Sequence: Synthetic walnut; inner sequence

SEQ ID NO: 28469 - DNA, 30 bp, Artificial Sequence
  Description of Artificial Sequence: Synthetic walnut; inner sequence
gcacgacagcacgacgtccatcgcggcaca

SEQ ID NO: 28470 - DNA, 30 bp, Artificial Sequence
  Description of Artificial Sequence: Synthetic walnut; inner sequence
cacgcacacacgtacccgacacgtcacgcg

SEQ ID NO: 28471 - DNA, 30 bp, Artificial Sequence
  Description of Artificial Sequence: Synthetic walnut; inner sequence
gcgtgacgacgtgcatgacgtgccctgtgc

SEQ ID NO: 28472 - DNA, 30 bp, Artificial Sequence
  Description of Artificial Sequence: Synthetic walnut; inner sequence
gtgcgatcgacctacaagtgccatgctagt

SEQ ID NO: 28473 - DNA, 30 bp, Artificial Sequence
  Description of Artificial Sequence: Synthetic walnut; inner sequence
gacgcacaccgcatcacgtcacactgcgca

SEQ ID NO: 28474 - DNA, 30 bp, Artificial Sequence; identical to SEQ ID NO: 16677
  Description of Artificial Sequence: Synthetic walnut; inner sequence

SEQ ID NO: 28475 - DNA, 30 bp, Artificial Sequence; identical to SEQ ID NO: 968
  Description of Artificial Sequence: Synthetic walnut; inner sequence

SEQ ID NO: 28476 - DNA, 30 bp, Artificial Sequence; identical to SEQ ID NO: 12971
  Description of Artificial Sequence: Synthetic walnut; inner sequence

SEQ ID NO: 28477 - DNA, 30 bp, Artificial Sequence
  Description of Artificial Sequence: Synthetic walnut; inner sequence
cgtgacacacgtaacgcatggaccgtcgcg

SEQ ID NO: 28478 - DNA, 30 bp, Artificial Sequence; identical to SEQ ID NO: 67
  Description of Artificial Sequence: Synthetic walnut; inner sequence

SEQ ID NO: 28479 - DNA, 30 bp, Artificial Sequence; identical to SEQ ID NO: 4603
  Description of Artificial Sequence: Synthetic walnut; inner sequence

SEQ ID NO: 28480 - DNA, 30 bp, Artificial Sequence
  Description of Artificial Sequence: Synthetic walnut; inner sequence
cgcacggcacgacgacgctggtacgacacg

SEQ ID NO: 28481 - DNA, 30 bp, Artificial Sequence; identical to SEQ ID NO: 821
  Description of Artificial Sequence: Synthetic walnut; inner sequence

SEQ ID NO: 28482 - DNA, 30 bp, Artificial Sequence; identical to SEQ ID NO: 866
  Description of Artificial Sequence: Synthetic walnut; inner sequence

SEQ ID NO: 28483 - DNA, 30 bp, Artificial Sequence; identical to SEQ ID NO: 20692
  Description of Artificial Sequence: Synthetic walnut; inner sequence

SEQ ID NO: 28484 - DNA, 30 bp, Artificial Sequence; identical to SEQ ID NO: 397
  Description of Artificial Sequence: Synthetic walnut; inner sequence

SEQ ID NO: 28485 - DNA, 30 bp, Artificial Sequence
  Description of Artificial Sequence: Synthetic walnut; inner sequence
gtcattccgtatcctacacgtgggcacgta

SEQ ID NO: 28486 - DNA, 30 bp, Artificial Sequence; identical to SEQ ID NO: 127
  Description of Artificial Sequence: Synthetic walnut; inner sequence

SEQ ID NO: 28487 - DNA, 30 bp, Artificial Sequence; identical to SEQ ID NO: 4576
  Description of Artificial Sequence: Synthetic walnut; inner sequence

SEQ ID NO: 28488 - DNA, 30 bp, Artificial Sequence
  Description of Artificial Sequence: Synthetic walnut; inner sequence
ggccgtacgatggatgtgggatggtctagc

SEQ ID NO: 28489 - DNA, 30 bp, Artificial Sequence; identical to SEQ ID NO: 613
  Description of Artificial Sequence: Synthetic walnut; inner sequence

SEQ ID NO: 28490 - DNA, 30 bp, Artificial Sequence; identical to SEQ ID NO: 20929
  Description of Artificial Sequence: Synthetic walnut; inner sequence

SEQ ID NO: 28491 - DNA, 30 bp, Artificial Sequence; identical to SEQ ID NO: 25
  Description of Artificial Sequence: Synthetic walnut; inner sequence

SEQ ID NO: 28492 - DNA, 30 bp, Artificial Sequence
  Description of Artificial Sequence: Synthetic walnut; inner sequence
ggccgcgtctggatgtggttttgtcgcgtc

SEQ ID NO: 28493 - DNA, 30 bp, Artificial Sequence
  Description of Artificial Sequence: Synthetic walnut; inner sequence
cgacgcaccgtaacgacctagcgatgcgcg

SEQ ID NO: 28494 - DNA, 30 bp, Artificial Sequence; identical to SEQ ID NO: 185
  Description of Artificial Sequence: Synthetic walnut; inner sequence

SEQ ID NO: 28495 - DNA, 30 bp, Artificial Sequence
  Description of Artificial Sequence: Synthetic walnut; inner sequence
ggccgcatcgccccttcgagtggacaggta

SEQ ID NO: 28496 - DNA, 30 bp, Artificial Sequence; identical to SEQ ID NO: 134
  Description of Artificial Sequence: Synthetic walnut; inner sequence

SEQ ID NO: 28497 - DNA, 30 bp, Artificial Sequence
  Description of Artificial Sequence: Synthetic walnut; inner sequence
ggacgcaacgcaccgtatcgtggccatgtg

SEQ ID NO: 28498 - DNA, 30 bp, Artificial Sequence; identical to SEQ ID NO: 4988
  Description of Artificial Sequence: Synthetic walnut; inner sequence

SEQ ID NO: 28499 - DNA, 30 bp, Artificial Sequence; identical to SEQ ID NO: 20710
  Description of Artificial Sequence: Synthetic walnut; inner sequence

SEQ ID NO: 28500 - DNA, 30 bp, Artificial Sequence; identical to SEQ ID NO: 700
  Description of Artificial Sequence: Synthetic walnut; inner sequence

SEQ ID NO: 28501 - DNA, 30 bp, Artificial Sequence
  Description of Artificial Sequence: Synthetic walnut; inner sequence
ggcctgcgatggctgtgtgcgtgtattagc

SEQ ID NO: 28502 - DNA, 30 bp, Artificial Sequence; identical to SEQ ID NO: 619
  Description of Artificial Sequence: Synthetic walnut; inner sequence

SEQ ID NO: 28503 - DNA, 30 bp, Artificial Sequence
  Description of Artificial Sequence: Synthetic walnut; inner sequence
gcatcgcagcacacgtctcgtcacggcaca

SEQ ID NO: 28504 - DNA, 30 bp, Artificial Sequence; identical to SEQ ID NO: 276
  Description of Artificial Sequence: Synthetic walnut; inner sequence

SEQ ID NO: 28505 - DNA, 30 bp, Artificial Sequence; identical to SEQ ID NO: 294
  Description of Artificial Sequence: Synthetic walnut; inner sequence

SEQ ID NO: 28506 - DNA, 30 bp, Artificial Sequence; identical to SEQ ID NO: 702
  Description of Artificial Sequence: Synthetic walnut; inner sequence

SEQ ID NO: 28507 - DNA, 30 bp, Artificial Sequence; identical to SEQ ID NO: 20353
  Description of Artificial Sequence: Synthetic walnut; inner sequence

SEQ ID NO: 28508 - DNA, 30 bp, Artificial Sequence
  Description of Artificial Sequence: Synthetic walnut; inner sequence
ggcctgcgatggatgtgttcgtgtattagc

SEQ ID NO: 28509 - DNA, 30 bp, Artificial Sequence; identical to SEQ ID NO: 20478
  Description of Artificial Sequence: Synthetic walnut; inner sequence

SEQ ID NO: 28510 - DNA, 30 bp, Artificial Sequence; identical to SEQ ID NO: 20668
  Description of Artificial Sequence: Synthetic walnut; inner sequence

SEQ ID NO: 28511 - DNA, 30 bp, Artificial Sequence; identical to SEQ ID NO: 228
  Description of Artificial Sequence: Synthetic walnut; inner sequence

SEQ ID NO: 28512 - DNA, 30 bp, Artificial Sequence; identical to SEQ ID NO: 68
  Description of Artificial Sequence: Synthetic walnut; inner sequence

SEQ ID NO: 28513 - DNA, 30 bp, Artificial Sequence
  Description of Artificial Sequence: Synthetic walnut; inner sequence
gtgcttcgatggatgtgggttgtgctcgtc

SEQ ID NO: 28514 - DNA, 30 bp, Artificial Sequence; identical to SEQ ID NO: 991
  Description of Artificial Sequence: Synthetic walnut; inner sequence

SEQ ID NO: 28515 - DNA, 30 bp, Artificial Sequence
  Description of Artificial Sequence: Synthetic walnut; inner sequence
ggccgcggcatccctgagagtggtggtgta

SEQ ID NO: 28516 - DNA, 30 bp, Artificial Sequence
  Description of Artificial Sequence: Synthetic walnut; inner sequence
gcgctgtgacgtacgtgctgtgcctacgca

SEQ ID NO: 28517 - DNA, 30 bp, Artificial Sequence; identical to SEQ ID NO: 778
  Description of Artificial Sequence: Synthetic walnut; inner sequence

SEQ ID NO: 28518 - DNA, 30 bp, Artificial Sequence; identical to SEQ ID NO: 4513
  Description of Artificial Sequence: Synthetic walnut; inner sequence

SEQ ID NO: 28519 - DNA, 30 bp, Artificial Sequence; identical to SEQ ID NO: 979
  Description of Artificial Sequence: Synthetic walnut; inner sequence

SEQ ID NO: 28520 - DNA, 30 bp, Artificial Sequence; identical to SEQ ID NO: 20666
  Description of Artificial Sequence: Synthetic walnut; inner sequence

SEQ ID NO: 28521 - DNA, 30 bp, Artificial Sequence; identical to SEQ ID NO: 789
  Description of Artificial Sequence: Synthetic walnut; inner sequence

SEQ ID NO: 28522 - DNA, 30 bp, Artificial Sequence; identical to SEQ ID NO: 4837
  Description of Artificial Sequence: Synthetic walnut; inner sequence

SEQ ID NO: 28523 - DNA, 30 bp, Artificial Sequence
  Description of Artificial Sequence: Synthetic walnut; inner sequence
gtgcgccgatgggtgtgtgtcgtggctggt

SEQ ID NO: 28524 - DNA, 30 bp, Artificial Sequence; identical to SEQ ID NO: 315
  Description of Artificial Sequence: Synthetic walnut; inner sequence

SEQ ID NO: 28525 - DNA, 30 bp, Artificial Sequence; identical to SEQ ID NO: 20721
  Description of Artificial Sequence: Synthetic walnut; inner sequence

SEQ ID NO: 28526 - DNA, 30 bp, Artificial Sequence
  Description of Artificial Sequence: Synthetic walnut; inner sequence
gcgtgtgcgtgcacgttacgtccttgcgcc

SEQ ID NO: 28527 - DNA, 30 bp, Artificial Sequence
  Description of Artificial Sequence: Synthetic walnut; inner sequence
gcgacacacggccacgatgtacgatgcgca

SEQ ID NO: 28528 - DNA, 30 bp, Artificial Sequence; identical to SEQ ID NO: 485
  Description of Artificial Sequence: Synthetic walnut; inner sequence

SEQ ID NO: 28529 - DNA, 30 bp, Artificial Sequence; identical to SEQ ID NO: 4552
  Description of Artificial Sequence: Synthetic walnut; inner sequence

SEQ ID NO: 28530 - DNA, 30 bp, Artificial Sequence; identical to SEQ ID NO: 446
  Description of Artificial Sequence: Synthetic walnut; inner sequence

SEQ ID NO: 28531 - DNA, 30 bp, Artificial Sequence; identical to SEQ ID NO: 346
  Description of Artificial Sequence: Synthetic walnut; inner sequence

SEQ ID NO: 28532 - DNA, 30 bp, Artificial Sequence; identical to SEQ ID NO: 4948
  Description of Artificial Sequence: Synthetic walnut; inner sequence

SEQ ID NO: 28533 - DNA, 30 bp, Artificial Sequence
  Description of Artificial Sequence: Synthetic walnut; inner sequence
gtactgcactgccctacacgtgggcatgga

SEQ ID NO: 28534 - DNA, 30 bp, Artificial Sequence; identical to SEQ ID NO: 131
  Description of Artificial Sequence: Synthetic walnut; inner sequence

SEQ ID NO: 28535 - DNA, 30 bp, Artificial Sequence; identical to SEQ ID NO: 460
  Description of Artificial Sequence: Synthetic walnut; inner sequence

SEQ ID NO: 28536 - DNA, 30 bp, Artificial Sequence; identical to SEQ ID NO: 16859
  Description of Artificial Sequence: Synthetic walnut; inner sequence

SEQ ID NO: 28537 - DNA, 30 bp, Artificial Sequence; identical to SEQ ID NO: 20693
  Description of Artificial Sequence: Synthetic walnut; inner sequence

SEQ ID NO: 28538 - DNA, 30 bp, Artificial Sequence; identical to SEQ ID NO: 442
  Description of Artificial Sequence: Synthetic walnut; inner sequence

SEQ ID NO: 28539 - DNA, 30 bp, Artificial Sequence; identical to SEQ ID NO: 16926
  Description of Artificial Sequence: Synthetic walnut; inner sequence

SEQ ID NO: 28540 - DNA, 30 bp, Artificial Sequence; identical to SEQ ID NO: 678
  Description of Artificial Sequence: Synthetic walnut; inner sequence

SEQ ID NO: 28541 - DNA, 30 bp, Artificial Sequence
  Description of Artificial Sequence: Synthetic walnut; inner sequence
cgcgatacacgagcatgccgtcacgtcacg

SEQ ID NO: 28542 - DNA, 30 bp, Artificial Sequence; identical to SEQ ID NO: 173
  Description of Artificial Sequence: Synthetic walnut; inner sequence

SEQ ID NO: 28543 - DNA, 30 bp, Artificial Sequence; identical to SEQ ID NO: 132
  Description of Artificial Sequence: Synthetic walnut; inner sequence

SEQ ID NO: 28544 - DNA, 30 bp, Artificial Sequence
  Description of Artificial Sequence: Synthetic walnut; inner sequence
gcgacacaacgcagggcaacgtgatgcgtg

SEQ ID NO: 28545 - DNA, 30 bp, Artificial Sequence; identical to SEQ ID NO: 218
  Description of Artificial Sequence: Synthetic walnut; inner sequence

SEQ ID NO: 28546 - DNA, 30 bp, Artificial Sequence; identical to SEQ ID NO: 768
  Description of Artificial Sequence: Synthetic walnut; inner sequence

SEQ ID NO: 28547 - DNA, 30 bp, Artificial Sequence
  Description of Artificial Sequence: Synthetic walnut; inner sequence
ggcatgcacgcacctacaagtgggcacgta

SEQ ID NO: 28548 - DNA, 30 bp, Artificial Sequence; identical to SEQ ID NO: 72
  Description of Artificial Sequence: Synthetic walnut; inner sequence

SEQ ID NO: 28549 - DNA, 30 bp, Artificial Sequence; identical to SEQ ID NO: 20289
  Description of Artificial Sequence: Synthetic walnut; inner sequence

SEQ ID NO: 28550 - DNA, 30 bp, Artificial Sequence; identical to SEQ ID NO: 39
  Description of Artificial Sequence: Synthetic walnut; inner sequence

SEQ ID NO: 28551 - DNA, 30 bp, Artificial Sequence; identical to SEQ ID NO: 4924
  Description of Artificial Sequence: Synthetic walnut; inner sequence

SEQ ID NO: 28552 - DNA, 30 bp, Artificial Sequence; identical to SEQ ID NO: 4999
  Description of Artificial Sequence: Synthetic walnut; inner sequence

SEQ ID NO: 28553 - DNA, 30 bp, Artificial Sequence; identical to SEQ ID NO: 341
  Description of Artificial Sequence: Synthetic walnut; inner sequence

SEQ ID NO: 28554 - DNA, 30 bp, Artificial Sequence; identical to SEQ ID NO: 486
  Description of Artificial Sequence: Synthetic walnut; inner sequence

SEQ ID NO: 28555 - DNA, 30 bp, Artificial Sequence
  Description of Artificial Sequence: Synthetic walnut; inner sequence
gcacgcaatgatgcacgtcctgctcgcacg

SEQ ID NO: 28556 - DNA, 30 bp, Artificial Sequence; identical to SEQ ID NO: 903
  Description of Artificial Sequence: Synthetic walnut; inner sequence

SEQ ID NO: 28557 - DNA, 30 bp, Artificial Sequence
  Description of Artificial Sequence: Synthetic walnut; inner sequence
cgcaccgtgtacgccacgtcactgtacgca

SEQ ID NO: 28558 - DNA, 30 bp, Artificial Sequence; identical to SEQ ID NO: 153
  Description of Artificial Sequence: Synthetic walnut; inner sequence

SEQ ID NO: 28559 - DNA, 29 bp, Artificial Sequence
  Description of Artificial Sequence: Synthetic walnut; inner sequence
gcacgtcgaaacacgtagccatgcacggt

SEQ ID NO: 28560 - DNA, 30 bp, Artificial Sequence; identical to SEQ ID NO: 840
  Description of Artificial Sequence: Synthetic walnut; inner sequence

SEQ ID NO: 28561 - DNA, 30 bp, Artificial Sequence; identical to SEQ ID NO: 4638
  Description of Artificial Sequence: Synthetic walnut; inner sequence

SEQ ID NO: 28562 - DNA, 30 bp, Artificial Sequence; identical to SEQ ID NO: 20836
  Description of Artificial Sequence: Synthetic walnut; inner sequence

SEQ ID NO: 28563 - DNA, 30 bp, Artificial Sequence
  Description of Artificial Sequence: Synthetic walnut; inner sequence
cgacacggcatggcaaggcgatgtggtgcg

SEQ ID NO: 28564 - DNA, 30 bp, Artificial Sequence; identical to SEQ ID NO: 20486
  Description of Artificial Sequence: Synthetic walnut; inner sequence

SEQ ID NO: 28565 - DNA, 29 bp, Artificial Sequence
  Description of Artificial Sequence: Synthetic walnut; inner sequence
cgacgtgtcgcagtacgtaccgttgcgca

SEQ ID NO: 28566 - DNA, 30 bp, Artificial Sequence; identical to SEQ ID NO: 12936
  Description of Artificial Sequence: Synthetic walnut; inner sequence

SEQ ID NO: 28567 - DNA, 30 bp, Artificial Sequence; identical to SEQ ID NO: 347
  Description of Artificial Sequence: Synthetic walnut; inner sequence

SEQ ID NO: 28568 - DNA, 30 bp, Artificial Sequence; identical to SEQ ID NO: 8968
  Description of Artificial Sequence: Synthetic walnut; inner sequence

SEQ ID NO: 28569 - DNA, 30 bp, Artificial Sequence
  Description of Artificial Sequence: Synthetic walnut; inner sequence
ggcctgcgatggatgtggttttgtcgcgtc

SEQ ID NO: 28570 - DNA, 30 bp, Artificial Sequence
  Description of Artificial Sequence: Synthetic walnut; inner sequence
gcatgccaacgcaacgtgtacgcgtgcaca

SEQ ID NO: 28571 - DNA, 30 bp, Artificial Sequence; identical to SEQ ID NO: 24843
  Description of Artificial Sequence: Synthetic walnut; inner sequence

SEQ ID NO: 28572 - DNA, 30 bp, Artificial Sequence; identical to SEQ ID NO: 801
  Description of Artificial Sequence: Synthetic walnut; inner sequence

SEQ ID NO: 28573 - DNA, 30 bp, Artificial Sequence; identical to SEQ ID NO: 4688
  Description of Artificial Sequence: Synthetic walnut; inner sequence

SEQ ID NO: 28574 - DNA, 30 bp, Artificial Sequence
  Description of Artificial Sequence: Synthetic walnut; inner sequence
ggcatgcactcacctacacgtgggcacgta

SEQ ID NO: 28575 - DNA, 30 bp, Artificial Sequence; identical to SEQ ID NO: 395
  Description of Artificial Sequence: Synthetic walnut; inner sequence

SEQ ID NO: 28576 - DNA, 30 bp, Artificial Sequence; identical to SEQ ID NO: 4517
  Description of Artificial Sequence: Synthetic walnut; inner sequence

SEQ ID NO: 28577 - DNA, 30 bp, Artificial Sequence
  Description of Artificial Sequence: Synthetic walnut; inner sequence
ggcctcgataacctagcaagtgtgtgtgta

SEQ ID NO: 28578 - DNA, 30 bp, Artificial Sequence; identical to SEQ ID NO: 8922
  Description of Artificial Sequence: Synthetic walnut; inner sequence

SEQ ID NO: 28579 - DNA, 30 bp, Artificial Sequence; identical to SEQ ID NO: 56
  Description of Artificial Sequence: Synthetic walnut; inner sequence

SEQ ID NO: 28580 - DNA, 30 bp, Artificial Sequence
  Description of Artificial Sequence: Synthetic walnut; inner sequence
cgcaccgtcgtaccgtacgtgcctgacgca

SEQ ID NO: 28581 - DNA, 30 bp, Artificial Sequence
  Description of Artificial Sequence: Synthetic walnut; inner sequence
gtccgacgatgggtgggggaatgcgacggc

SEQ ID NO: 28582 - DNA, 30 bp, Artificial Sequence
  Description of Artificial Sequence: Synthetic walnut; inner sequence
cgtaccgcacatgcacgtccgtcgtacgcg

SEQ ID NO: 28583 - DNA, 30 bp, Artificial Sequence; identical to SEQ ID NO: 438
  Description of Artificial Sequence: Synthetic walnut; inner sequence

SEQ ID NO: 28584 - DNA, 30 bp, Artificial Sequence
  Description of Artificial Sequence: Synthetic walnut; inner sequence
gcgcacaacgatacgcacgatgccgtcacg

SEQ ID NO: 28585 - DNA, 30 bp, Artificial Sequence; identical to SEQ ID NO: 20363
  Description of Artificial Sequence: Synthetic walnut; inner sequence

SEQ ID NO: 28586 - DNA, 30 bp, Artificial Sequence
  Description of Artificial Sequence: Synthetic walnut; inner sequence
ggccgacgatggatgggaggcatgactggc

SEQ ID NO: 28587 - DNA, 30 bp, Artificial Sequence; identical to SEQ ID NO: 372
  Description of Artificial Sequence: Synthetic walnut; inner sequence

SEQ ID NO: 28588 - DNA, 30 bp, Artificial Sequence; identical to SEQ ID NO: 4860
  Description of Artificial Sequence: Synthetic walnut; inner sequence

SEQ ID NO: 28589 - DNA, 30 bp, Artificial Sequence
  Description of Artificial Sequence: Synthetic walnut; inner sequence
ggcctgcgcgtgacctatcaatggcatgta

SEQ ID NO: 28590 - DNA, 30 bp, Artificial Sequence; identical to SEQ ID NO: 4289
  Description of Artificial Sequence: Synthetic walnut; inner sequence

SEQ ID NO: 28591 - DNA, 30 bp, Artificial Sequence
  Description of Artificial Sequence: Synthetic walnut; inner sequence
cacgcacagtgacgttaccgtacctgcacg

SEQ ID NO: 28592 - DNA, 30 bp, Artificial Sequence; identical to SEQ ID NO: 16695
  Description of Artificial Sequence: Synthetic walnut; inner sequence

SEQ ID NO: 28593 - DNA, 31 bp, Artificial Sequence
  Description of Artificial Sequence: Synthetic walnut; inner sequence
ggcctgcgatggatgtgggctgcactatgtc

SEQ ID NO: 28594 - DNA, 30 bp, Artificial Sequence; identical to SEQ ID NO: 756
  Description of Artificial Sequence: Synthetic walnut; inner sequence

SEQ ID NO: 28595 - DNA, 30 bp, Artificial Sequence
  Description of Artificial Sequence: Synthetic walnut; inner sequence
ggccacagcgtacatcaacgtggacgtgca

SEQ ID NO: 28596 - DNA, 31 bp, Artificial Sequence; identical to SEQ ID NO: 16373
  Description of Artificial Sequence: Synthetic walnut; inner sequence

SEQ ID NO: 28597 - DNA, 30 bp, Artificial Sequence; identical to SEQ ID NO: 101
  Description of Artificial Sequence: Synthetic walnut; inner sequence

SEQ ID NO: 28598 - DNA, 30 bp, Artificial Sequence; identical to SEQ ID NO: 553
  Description of Artificial Sequence: Synthetic walnut; inner sequence

SEQ ID NO: 28599 - DNA, 30 bp, Artificial Sequence; identical to SEQ ID NO: 16978
  Description of Artificial Sequence: Synthetic walnut; inner sequence

SEQ ID NO: 28600 - DNA, 30 bp, Artificial Sequence
  Description of Artificial Sequence: Synthetic walnut; inner sequence
ggcctgcgatggatgtgggccagtacgcgc

SEQ ID NO: 28601 - DNA, 30 bp, Artificial Sequence; identical to SEQ ID NO: 4653
  Description of Artificial Sequence: Synthetic walnut; inner sequence

SEQ ID NO: 28602 - DNA, 30 bp, Artificial Sequence; identical to SEQ ID NO: 16482
  Description of Artificial Sequence: Synthetic walnut; inner sequence

SEQ ID NO: 28603 - DNA, 30 bp, Artificial Sequence
  Description of Artificial Sequence: Synthetic walnut; inner sequence
cgtgacgacgtgctgcagtgacgttgcgta

SEQ ID NO: 28604 - DNA, 30 bp, Artificial Sequence; identical to SEQ ID NO: 186
  Description of Artificial Sequence: Synthetic walnut; inner sequence

SEQ ID NO: 28605 - DNA, 30 bp, Artificial Sequence; identical to SEQ ID NO: 470
  Description of Artificial Sequence: Synthetic walnut; inner sequence

SEQ ID NO: 28606 - DNA, 30 bp, Artificial Sequence; identical to SEQ ID NO: 8798
  Description of Artificial Sequence: Synthetic walnut; inner sequence

SEQ ID NO: 28607 - DNA, 30 bp, Artificial Sequence; identical to SEQ ID NO: 299
  Description of Artificial Sequence: Synthetic walnut; inner sequence

SEQ ID NO: 28608 - DNA, 30 bp, Artificial Sequence; identical to SEQ ID NO: 20515
  Description of Artificial Sequence: Synthetic walnut; inner sequence

SEQ ID NO: 28609 - DNA, 30 bp, Artificial Sequence; identical to SEQ ID NO: 12945
  Description of Artificial Sequence: Synthetic walnut; inner sequence

SEQ ID NO: 28610 - DNA, 30 bp, Artificial Sequence; identical to SEQ ID NO: 20800
  Description of Artificial Sequence: Synthetic walnut; inner sequence

SEQ ID NO: 28611 - DNA, 30 bp, Artificial Sequence; identical to SEQ ID NO: 714
  Description of Artificial Sequence: Synthetic walnut; inner sequence

SEQ ID NO: 28612 - DNA, 31 bp, Artificial Sequence
  Description of Artificial Sequence: Synthetic walnut; inner sequence
ggcctgcgatggatgtggtgttgggatagtc

SEQ ID NO: 28613 - DNA, 30 bp, Artificial Sequence; identical to SEQ ID NO: 20954
  Description of Artificial Sequence: Synthetic walnut; inner sequence

SEQ ID NO: 28614 - DNA, 30 bp, Artificial Sequence; identical to SEQ ID NO: 16342
  Description of Artificial Sequence: Synthetic walnut; inner sequence

SEQ ID NO: 28615 - DNA, 30 bp, Artificial Sequence; identical to SEQ ID NO: 860
  Description of Artificial Sequence: Synthetic walnut; inner sequence

SEQ ID NO: 28616 - DNA, 30 bp, Artificial Sequence; identical to SEQ ID NO: 857
  Description of Artificial Sequence: Synthetic walnut; inner sequence

SEQ ID NO: 28617 - DNA, 25 bp, Artificial Sequence
  Description of Artificial Sequence: Synthetic walnut; inner sequence
gtcattccgcatcctacacgtgggc

SEQ ID NO: 28618 - DNA, 30 bp, Artificial Sequence; identical to SEQ ID NO: 8682
  Description of Artificial Sequence: Synthetic walnut; inner sequence

SEQ ID NO: 28619 - DNA, 30 bp, Artificial Sequence; identical to SEQ ID NO: 4565
  Description of Artificial Sequence: Synthetic walnut; inner sequence

SEQ ID NO: 28620 - DNA, 30 bp, Artificial Sequence
  Description of Artificial Sequence: Synthetic walnut; inner sequence
ggccacagcgtaactcaacgtggacgtgca

SEQ ID NO: 28621 - DNA, 30 bp, Artificial Sequence; identical to SEQ ID NO: 805
  Description of Artificial Sequence: Synthetic walnut; inner sequence

SEQ ID NO: 28622 - DNA, 30 bp, Artificial Sequence; identical to SEQ ID NO: 780
  Description of Artificial Sequence: Synthetic walnut; inner sequence

SEQ ID NO: 28623 - DNA, 30 bp, Artificial Sequence; identical to SEQ ID NO: 20784
  Description of Artificial Sequence: Synthetic walnut; inner sequence

SEQ ID NO: 28624 - DNA, 30 bp, Artificial Sequence; identical to SEQ ID NO: 61
  Description of Artificial Sequence: Synthetic walnut; inner sequence

SEQ ID NO: 28625 - DNA, 30 bp, Artificial Sequence; identical to SEQ ID NO: 813
  Description of Artificial Sequence: Synthetic walnut; inner sequence

SEQ ID NO: 28626 - DNA, 30 bp, Artificial Sequence
  Description of Artificial Sequence: Synthetic walnut; inner sequence
gtgctgcgatggatgtgtgcgtgtattagc

SEQ ID NO: 28627 - DNA, 30 bp, Artificial Sequence; identical to SEQ ID NO: 20773
  Description of Artificial Sequence: Synthetic walnut; inner sequence

SEQ ID NO: 28628 - DNA, 30 bp, Artificial Sequence; identical to SEQ ID NO: 204
  Description of Artificial Sequence: Synthetic walnut; inner sequence

SEQ ID NO: 28629 - DNA, 30 bp, Artificial Sequence; identical to SEQ ID NO: 505
  Description of Artificial Sequence: Synthetic walnut; inner sequence

SEQ ID NO: 28630 - DNA, 30 bp, Artificial Sequence; identical to SEQ ID NO: 4933
  Description of Artificial Sequence: Synthetic walnut; inner sequence

SEQ ID NO: 28631 - DNA, 30 bp, Artificial Sequence; identical to SEQ ID NO: 16531
  Description of Artificial Sequence: Synthetic walnut; inner sequence

SEQ ID NO: 28632 - DNA, 30 bp, Artificial Sequence; identical to SEQ ID NO: 20961
  Description of Artificial Sequence: Synthetic walnut; inner sequence

SEQ ID NO: 28633 - DNA, 30 bp, Artificial Sequence; identical to SEQ ID NO: 237
  Description of Artificial Sequence: Synthetic walnut; inner sequence

SEQ ID NO: 28634 - DNA, 30 bp, Artificial Sequence; identical to SEQ ID NO: 196
  Description of Artificial Sequence: Synthetic walnut; inner sequence

SEQ ID NO: 28635 - DNA, 30 bp, Artificial Sequence; identical to SEQ ID NO: 20530
  Description of Artificial Sequence: Synthetic walnut; inner sequence

SEQ ID NO: 28636 - DNA, 30 bp, Artificial Sequence
  Description of Artificial Sequence: Synthetic walnut; inner sequence
gcgccacgtgacgtactgtgcctcgacgcg

SEQ ID NO: 28637 - DNA, 30 bp, Artificial Sequence; identical to SEQ ID NO: 12743
  Description of Artificial Sequence: Synthetic walnut; inner sequence

SEQ ID NO: 28638 - DNA, 30 bp, Artificial Sequence; identical to SEQ ID NO: 703
  Description of Artificial Sequence: Synthetic walnut; inner sequence

SEQ ID NO: 28639 - DNA, 30 bp, Artificial Sequence; identical to SEQ ID NO: 850
  Description of Artificial Sequence: Synthetic walnut; inner sequence

SEQ ID NO: 28640 - DNA, 30 bp, Artificial Sequence; identical to SEQ ID NO: 90
  Description of Artificial Sequence: Synthetic walnut; inner sequence

SEQ ID NO: 28641 - DNA, 30 bp, Artificial Sequence; identical to SEQ ID NO: 12821
  Description of Artificial Sequence: Synthetic walnut; inner sequence

SEQ ID NO: 28642 - DNA, 30 bp, Artificial Sequence; identical to SEQ ID NO: 645
  Description of Artificial Sequence: Synthetic walnut; inner sequence

SEQ ID NO: 28643 - DNA, 30 bp, Artificial Sequence
  Description of Artificial Sequence: Synthetic walnut; inner sequence
cgcaccgtgtggcatgtgacactgcgcgca

SEQ ID NO: 28644 - DNA, 30 bp, Artificial Sequence
  Description of Artificial Sequence: Synthetic walnut; inner sequence
ggcctgcgatggatgtggtgtacccagtcc

SEQ ID NO: 28645 - DNA, 30 bp, Artificial Sequence
  Description of Artificial Sequence: Synthetic walnut; inner sequence
ggacgcatcgccccttcgtgtggacaggta

SEQ ID NO: 28646 - DNA, 30 bp, Artificial Sequence
  Description of Artificial Sequence: Synthetic walnut; inner sequence
ggcctgcgatggatgtggttgtgcttgttt

SEQ ID NO: 28647 - DNA, 30 bp, Artificial Sequence; identical to SEQ ID NO: 12700
  Description of Artificial Sequence: Synthetic walnut; inner sequence

SEQ ID NO: 28648 - DNA, 30 bp, Artificial Sequence; identical to SEQ ID NO: 152
  Description of Artificial Sequence: Synthetic walnut; inner sequence

SEQ ID NO: 28649 - DNA, 30 bp, Artificial Sequence; identical to SEQ ID NO: 182
  Description of Artificial Sequence: Synthetic walnut; inner sequence

SEQ ID NO: 28650 - DNA, 30 bp, Artificial Sequence; identical to SEQ ID NO: 16605
  Description of Artificial Sequence: Synthetic walnut; inner sequence

SEQ ID NO: 28651 - DNA, 30 bp, Artificial Sequence; identical to SEQ ID NO: 16352
  Description of Artificial Sequence: Synthetic walnut; inner sequence

SEQ ID NO: 28652 - DNA, 30 bp, Artificial Sequence
  Description of Artificial Sequence: Synthetic walnut; inner sequence
tgacgcatcgccccttcgagtggacaggta

SEQ ID NO: 28653 - DNA, 30 bp, Artificial Sequence
  Description of Artificial Sequence: Synthetic walnut; inner sequence
ggcctgcgatggatgcgtgcgtgtattagc

SEQ ID NO: 28654 - DNA, 30 bp, Artificial Sequence; identical to SEQ ID NO: 16999
  Description of Artificial Sequence: Synthetic walnut; inner sequence

SEQ ID NO: 28655 - DNA, 30 bp, Artificial Sequence; identical to SEQ ID NO: 867
  Description of Artificial Sequence: Synthetic walnut; inner sequence

SEQ ID NO: 28656 - DNA, 30 bp, Artificial Sequence; identical to SEQ ID NO: 673
  Description of Artificial Sequence: Synthetic walnut; inner sequence

SEQ ID NO: 28657 - DNA, 30 bp, Artificial Sequence
  Description of Artificial Sequence: Synthetic walnut; inner sequence
ggacgcatctccccttcgagtggacaggta

SEQ ID NO: 28658 - DNA, 30 bp, Artificial Sequence; identical to SEQ ID NO: 20722
  Description of Artificial Sequence: Synthetic walnut; inner sequence

SEQ ID NO: 28659 - DNA, 30 bp, Artificial Sequence
  Description of Artificial Sequence: Synthetic walnut; inner sequence
cgcaccgaacgcgtacgtggctacgtgacg

SEQ ID NO: 28660 - DNA, 29 bp, Artificial Sequence
  Description of Artificial Sequence: Synthetic walnut; inner sequence
ggacgcaacgtacgtacttgacgtgtgca

SEQ ID NO: 28661 - DNA, 30 bp, Artificial Sequence
  Description of Artificial Sequence: Synthetic walnut; inner sequence
ggccaatgcgccccttcgagtggacaggta

SEQ ID NO: 28662 - DNA, 30 bp, Artificial Sequence
  Description of Artificial Sequence: Synthetic walnut; inner sequence
ggcctgcgatggatgtggaaatgcgacgtc

SEQ ID NO: 28663 - DNA, 30 bp, Artificial Sequence; identical to SEQ ID NO: 97
  Description of Artificial Sequence: Synthetic walnut; inner sequence

SEQ ID NO: 28664 - DNA, 30 bp, Artificial Sequence; identical to SEQ ID NO: 4890
  Description of Artificial Sequence: Synthetic walnut; inner sequence

SEQ ID NO: 28665 - DNA, 30 bp, Artificial Sequence
  Description of Artificial Sequence: Synthetic walnut; inner sequence
cgtaacgcaacgtacgcacgacgcaccgtg

SEQ ID NO: 28666 - DNA, 30 bp, Artificial Sequence
  Description of Artificial Sequence: Synthetic walnut; inner sequence
ggacgcatcgccccttcgagttgacaggta

SEQ ID NO: 28667 - DNA, 30 bp, Artificial Sequence; identical to SEQ ID NO: 20583
  Description of Artificial Sequence: Synthetic walnut; inner sequence

SEQ ID NO: 28668 - DNA, 30 bp, Artificial Sequence
  Description of Artificial Sequence: Synthetic walnut; inner sequence
gcatcgcaacgtgacgtacctgctgccacc

SEQ ID NO: 28669 - DNA, 30 bp, Artificial Sequence; identical to SEQ ID NO: 107
  Description of Artificial Sequence: Synthetic walnut; inner sequence

SEQ ID NO: 28670 - DNA, 30 bp, Artificial Sequence
  Description of Artificial Sequence: Synthetic walnut; inner sequence
ggtcacagcgtacctcaacgtggacgtgca

SEQ ID NO: 28671 - DNA, 30 bp, Artificial Sequence; identical to SEQ ID NO: 418
  Description of Artificial Sequence: Synthetic walnut; inner sequence

SEQ ID NO: 28672 - DNA, 30 bp, Artificial Sequence
  Description of Artificial Sequence: Synthetic walnut; inner sequence
ggccccagcgtacctcaacgtggacgtgca

SEQ ID NO: 28673 - DNA, 30 bp, Artificial Sequence; identical to SEQ ID NO: 4621
  Description of Artificial Sequence: Synthetic walnut; inner sequence

SEQ ID NO: 28674 - DNA, 30 bp, Artificial Sequence
  Description of Artificial Sequence: Synthetic walnut; inner sequence
cgtgcgcaacgtagtcaccgtgcatgcaca

SEQ ID NO: 28675 - DNA, 30 bp, Artificial Sequence; identical to SEQ ID NO: 5000
  Description of Artificial Sequence: Synthetic walnut; inner sequence

SEQ ID NO: 28676 - DNA, 30 bp, Artificial Sequence; identical to SEQ ID NO: 4898
  Description of Artificial Sequence: Synthetic walnut; inner sequence

SEQ ID NO: 28677 - DNA, 30 bp, Artificial Sequence
  Description of Artificial Sequence: Synthetic walnut; inner sequence
tgacgcacagaccgtacgtaccatgccacg

SEQ ID NO: 28678 - DNA, 30 bp, Artificial Sequence
  Description of Artificial Sequence: Synthetic walnut; inner sequence
cgcatgcacgcacctacacgtgggcacgta

SEQ ID NO: 28679 - DNA, 30 bp, Artificial Sequence
  Description of Artificial Sequence: Synthetic walnut; inner sequence
cgatacgcaacgcacaccgcccacgtcacg

SEQ ID NO: 28680 - DNA, 30 bp, Artificial Sequence; identical to SEQ ID NO: 487
  Description of Artificial Sequence: Synthetic walnut; inner sequence

SEQ ID NO: 28681 - DNA, 30 bp, Artificial Sequence
  Description of Artificial Sequence: Synthetic walnut; inner sequence
cgcaccgtcgatacgtcatgcacgctaaca

SEQ ID NO: 28682 - DNA, 30 bp, Artificial Sequence
  Description of Artificial Sequence: Synthetic walnut; inner sequence
acgtcacgcgtcaaggcacagtgcgtcacg

SEQ ID NO: 28683 - DNA, 30 bp, Artificial Sequence
  Description of Artificial Sequence: Synthetic walnut; inner sequence
cgcaccaacggcatgcacacgtcgtacgcg

SEQ ID NO: 28684 - DNA, 30 bp, Artificial Sequence; identical to SEQ ID NO: 20594
  Description of Artificial Sequence: Synthetic walnut; inner sequence

SEQ ID NO: 28685 - DNA, 30 bp, Artificial Sequence; identical to SEQ ID NO: 20880
  Description of Artificial Sequence: Synthetic walnut; inner sequence

SEQ ID NO: 28686 - DNA, 31 bp, Artificial Sequence
  Description of Artificial Sequence: Synthetic walnut; inner sequence
ggcctgcgatggatggggacgtgacgccgtc

SEQ ID NO: 28687 - DNA, 30 bp, Artificial Sequence; identical to SEQ ID NO: 189
  Description of Artificial Sequence: Synthetic walnut; inner sequence

SEQ ID NO: 28688 - DNA, 30 bp, Artificial Sequence
  Description of Artificial Sequence: Synthetic walnut; inner sequence
gcgtcacggcagcatgcgtacgatcgcacg

SEQ ID NO: 28689 - DNA, 30 bp, Artificial Sequence; identical to SEQ ID NO: 955
  Description of Artificial Sequence: Synthetic walnut; inner sequence

SEQ ID NO: 28690 - DNA, 30 bp, Artificial Sequence; identical to SEQ ID NO: 111
  Description of Artificial Sequence: Synthetic walnut; inner sequence

SEQ ID NO: 28691 - DNA, 30 bp, Artificial Sequence; identical to SEQ ID NO: 16931
  Description of Artificial Sequence: Synthetic walnut; inner sequence

SEQ ID NO: 28692 - DNA, 30 bp, Artificial Sequence
  Description of Artificial Sequence: Synthetic walnut; inner sequence
ggcctgcgatggatgtgtgcgtgcattagc

SEQ ID NO: 28693 - DNA, 30 bp, Artificial Sequence
  Description of Artificial Sequence: Synthetic walnut; inner sequence
cacgcatcgtgacgtagtgttcgcgccacg

SEQ ID NO: 28694 - DNA, 30 bp, Artificial Sequence; identical to SEQ ID NO: 4694
  Description of Artificial Sequence: Synthetic walnut; inner sequence

SEQ ID NO: 28695 - DNA, 30 bp, Artificial Sequence; identical to SEQ ID NO: 4882
  Description of Artificial Sequence: Synthetic walnut; inner sequence

SEQ ID NO: 28696 - DNA, 30 bp, Artificial Sequence; identical to SEQ ID NO: 472
  Description of Artificial Sequence: Synthetic walnut; inner sequence

SEQ ID NO: 28697 - DNA, 30 bp, Artificial Sequence
  Description of Artificial Sequence: Synthetic walnut; inner sequence
ggcatgcacgcacctacacgggggcacgta

SEQ ID NO: 28698 - DNA, 30 bp, Artificial Sequence; identical to SEQ ID NO: 20570
  Description of Artificial Sequence: Synthetic walnut; inner sequence

SEQ ID NO: 28699 - DNA, 30 bp, Artificial Sequence
  Description of Artificial Sequence: Synthetic walnut; inner sequence
cgtacgatgaccgcatggcacgtcgtcacg

SEQ ID NO: 28700 - DNA, 30 bp, Artificial Sequence
  Description of Artificial Sequence: Synthetic walnut; inner sequence
cacgtaacgcaccgtaccacgacatgcgca

SEQ ID NO: 28701 - DNA, 30 bp, Artificial Sequence
  Description of Artificial Sequence: Synthetic walnut; inner sequence
acgacaacgcagcaccgtgaggcaggcacg

SEQ ID NO: 28702 - DNA, 30 bp, Artificial Sequence
  Description of Artificial Sequence: Synthetic walnut; inner sequence
ggccgaacgcgcctacaagtgttgcatgga

SEQ ID NO: 28703 - DNA, 30 bp, Artificial Sequence; identical to SEQ ID NO: 20913
  Description of Artificial Sequence: Synthetic walnut; inner sequence

SEQ ID NO: 28704 - DNA, 30 bp, Artificial Sequence
  Description of Artificial Sequence: Synthetic walnut; inner sequence
gcacgatacgtaccgtggcatgtgcgcaca

SEQ ID NO: 28705 - DNA, 30 bp, Artificial Sequence
  Description of Artificial Sequence: Synthetic walnut; inner sequence
cgcaacggacgtgacgcatcgatctgcacg

SEQ ID NO: 28706 - DNA, 30 bp, Artificial Sequence; identical to SEQ ID NO: 916
  Description of Artificial Sequence: Synthetic walnut; inner sequence

SEQ ID NO: 28707 - DNA, 30 bp, Artificial Sequence; identical to SEQ ID NO: 20341
  Description of Artificial Sequence: Synthetic walnut; inner sequence

SEQ ID NO: 28708 - DNA, 30 bp, Artificial Sequence; identical to SEQ ID NO: 20903
  Description of Artificial Sequence: Synthetic walnut; inner sequence

SEQ ID NO: 28709 - DNA, 30 bp, Artificial Sequence
  Description of Artificial Sequence: Synthetic walnut; inner sequence
gtcatgcgatggatgtgtgcgtgtattagc

SEQ ID NO: 28710 - DNA, 30 bp, Artificial Sequence; identical to SEQ ID NO: 16634
  Description of Artificial Sequence: Synthetic walnut; inner sequence

SEQ ID NO: 28711 - DNA, 30 bp, Artificial Sequence
  Description of Artificial Sequence: Synthetic walnut; inner sequence
ggacgcatcgccccttcgagtgtacaggta

SEQ ID NO: 28712 - DNA, 30 bp, Artificial Sequence
  Description of Artificial Sequence: Synthetic walnut; inner sequence
gctccgtacgatggctgtgctggtgatgta

SEQ ID NO: 28713 - DNA, 30 bp, Artificial Sequence
  Description of Artificial Sequence: Synthetic walnut; inner sequence
gacacgcaacgcatcctaggtatgtacgca

SEQ ID NO: 28714 - DNA, 30 bp, Artificial Sequence; identical to SEQ ID NO: 923
  Description of Artificial Sequence: Synthetic walnut; inner sequence

SEQ ID NO: 28715 - DNA, 30 bp, Artificial Sequence; identical to SEQ ID NO: 165
  Description of Artificial Sequence: Synthetic walnut; inner sequence

SEQ ID NO: 28716 - DNA, 30 bp, Artificial Sequence; identical to SEQ ID NO: 20972
  Description of Artificial Sequence: Synthetic walnut; inner sequence

SEQ ID NO: 28717 - DNA, 30 bp, Artificial Sequence; identical to SEQ ID NO: 20580
  Description of Artificial Sequence: Synthetic walnut; inner sequence

SEQ ID NO: 28718 - DNA, 30 bp, Artificial Sequence; identical to SEQ ID NO: 373
  Description of Artificial Sequence: Synthetic walnut; inner sequence

SEQ ID NO: 28719 - DNA, 30 bp, Artificial Sequence; identical to SEQ ID NO: 20519
  Description of Artificial Sequence: Synthetic walnut; inner sequence

SEQ ID NO: 28720 - DNA, 30 bp, Artificial Sequence
  Description of Artificial Sequence: Synthetic walnut; inner sequence
cgatgcacgtaacgaccgtgtctgtacgca

SEQ ID NO: 28721 - DNA, 30 bp, Artificial Sequence; identical to SEQ ID NO: 490
  Description of Artificial Sequence: Synthetic walnut; inner sequence

SEQ ID NO: 28722 - DNA, 30 bp, Artificial Sequence
  Description of Artificial Sequence: Synthetic walnut; inner sequence
cgcgccgtcgatacgtcatgcacgctgaca

SEQ ID NO: 28723 - DNA, 30 bp, Artificial Sequence; identical to SEQ ID NO: 511
  Description of Artificial Sequence: Synthetic walnut; inner sequence

SEQ ID NO: 28724 - DNA, 30 bp, Artificial Sequence; identical to SEQ ID NO: 20683
  Description of Artificial Sequence: Synthetic walnut; inner sequence

SEQ ID NO: 28725 - DNA, 30 bp, Artificial Sequence; identical to SEQ ID NO: 20653
  Description of Artificial Sequence: Synthetic walnut; inner sequence

SEQ ID NO: 28726 - DNA, 30 bp, Artificial Sequence; identical to SEQ ID NO: 16503
  Description of Artificial Sequence: Synthetic walnut; inner sequence

SEQ ID NO: 28727 - DNA, 25 bp, Artificial Sequence
  Description of Artificial Sequence: Synthetic walnut; inner sequence
ggcctgcgatggatgtgtgcgtgta

SEQ ID NO: 28728 - DNA, 30 bp, Artificial Sequence; identical to SEQ ID NO: 528
  Description of Artificial Sequence: Synthetic walnut; inner sequence

SEQ ID NO: 28729 - DNA, 30 bp, Artificial Sequence; identical to SEQ ID NO: 16412
  Description of Artificial Sequence: Synthetic walnut; inner sequence

SEQ ID NO: 28730 - DNA, 30 bp, Artificial Sequence; identical to SEQ ID NO: 741
  Description of Artificial Sequence: Synthetic walnut; inner sequence

SEQ ID NO: 28731 - DNA, 30 bp, Artificial Sequence; identical to SEQ ID NO: 20385
  Description of Artificial Sequence: Synthetic walnut; inner sequence

SEQ ID NO: 28732 - DNA, 30 bp, Artificial Sequence; identical to SEQ ID NO: 622
  Description of Artificial Sequence: Synthetic walnut; inner sequence

SEQ ID NO: 28733 - DNA, 30 bp, Artificial Sequence; identical to SEQ ID NO: 695
  Description of Artificial Sequence: Synthetic walnut; inner sequence

SEQ ID NO: 28734 - DNA, 30 bp, Artificial Sequence; identical to SEQ ID NO: 4617
  Description of Artificial Sequence: Synthetic walnut; inner sequence

SEQ ID NO: 28735 - DNA, 30 bp, Artificial Sequence
  Description of Artificial Sequence: Synthetic walnut; inner sequence
catgacggcatgacgtactgtgactgcgcg

SEQ ID NO: 28736 - DNA, 30 bp, Artificial Sequence; identical to SEQ ID NO: 16513
  Description of Artificial Sequence: Synthetic walnut; inner sequence

SEQ ID NO: 28737 - DNA, 30 bp, Artificial Sequence
  Description of Artificial Sequence: Synthetic walnut; inner sequence
cgtaacgcagcggacgacacgttaggcacg

SEQ ID NO: 28738 - DNA, 30 bp, Artificial Sequence; identical to SEQ ID NO: 20514
  Description of Artificial Sequence: Synthetic walnut; inner sequence

SEQ ID NO: 28739 - DNA, 30 bp, Artificial Sequence
  Description of Artificial Sequence: Synthetic walnut; inner sequence
gcatcacgtcacgcatgttcggcctgcacg

SEQ ID NO: 28740 - DNA, 30 bp, Artificial Sequence
  Description of Artificial Sequence: Synthetic walnut; inner sequence
ggctacagcgtacctcaacgtggacgtgca

SEQ ID NO: 28741 - DNA, 30 bp, Artificial Sequence
  Description of Artificial Sequence: Synthetic walnut; inner sequence
ggacgcagcgtgacgtaacgtgcatgcgta

SEQ ID NO: 28742 - DNA, 30 bp, Artificial Sequence; identical to SEQ ID NO: 20657
  Description of Artificial Sequence: Synthetic walnut; inner sequence

SEQ ID NO: 28743 - DNA, 30 bp, Artificial Sequence
  Description of Artificial Sequence: Synthetic walnut; inner sequence
acgcaacgcaagtacgtatcgtgcgacacg

SEQ ID NO: 28744 - DNA, 30 bp, Artificial Sequence
  Description of Artificial Sequence: Synthetic walnut; inner sequence
gacacgtcggaccgtacgacacgttgcgtg

SEQ ID NO: 28745 - DNA, 30 bp, Artificial Sequence
  Description of Artificial Sequence: Synthetic walnut; inner sequence
ggccggcgatggatgtgggttgtgctcgtc

SEQ ID NO: 28746 - DNA, 30 bp, Artificial Sequence
  Description of Artificial Sequence: Synthetic walnut; inner sequence
ggcatgcgatgaacgagggatgatgcgtca

SEQ ID NO: 28747 - DNA, 30 bp, Artificial Sequence
  Description of Artificial Sequence: Synthetic walnut; inner sequence
gtccacagcgtacctcaacgtggacgtgca

SEQ ID NO: 28748 - DNA, 30 bp, Artificial Sequence; identical to SEQ ID NO: 705
  Description of Artificial Sequence: Synthetic walnut; inner sequence

SEQ ID NO: 28749 - DNA, 30 bp, Artificial Sequence; identical to SEQ ID NO: 404
  Description of Artificial Sequence: Synthetic walnut; inner sequence

SEQ ID NO: 28750 - DNA, 30 bp, Artificial Sequence
  Description of Artificial Sequence: Synthetic walnut; inner sequence
cacgcgcagacacgatggcacggcgacacg

SEQ ID NO: 28751 - DNA, 30 bp, Artificial Sequence
  Description of Artificial Sequence: Synthetic walnut; inner sequence
gacgcgaacacggcgcatacgtacgtcacg

SEQ ID NO: 28752 - DNA, 30 bp, Artificial Sequence; identical to SEQ ID NO: 4854
  Description of Artificial Sequence: Synthetic walnut; inner sequence

SEQ ID NO: 28753 - DNA, 30 bp, Artificial Sequence
  Description of Artificial Sequence: Synthetic walnut; inner sequence
gcgtcacgtgcacgatccttccgtcatgcg

SEQ ID NO: 28754 - DNA, 30 bp, Artificial Sequence
  Description of Artificial Sequence: Synthetic walnut; inner sequence
gcgtgccgatgacgtgcgtgtgacgtgatg

SEQ ID NO: 28755 - DNA, 30 bp, Artificial Sequence
  Description of Artificial Sequence: Synthetic walnut; inner sequence
gcgacacggcatacggtgcgtacgtgcaca

SEQ ID NO: 28756 - DNA, 30 bp, Artificial Sequence
  Description of Artificial Sequence: Synthetic walnut; inner sequence
ggcatgcgatgaacgaggcgtgatgcgtca

SEQ ID NO: 28757 - DNA, 30 bp, Artificial Sequence
  Description of Artificial Sequence: Synthetic walnut; inner sequence
cgacgcagcgcaacgaccgtaccgcacacg

SEQ ID NO: 28758 - DNA, 30 bp, Artificial Sequence; identical to SEQ ID NO: 8810
  Description of Artificial Sequence: Synthetic walnut; inner sequence

SEQ ID NO: 28759 - DNA, 30 bp, Artificial Sequence; identical to SEQ ID NO: 226
  Description of Artificial Sequence: Synthetic walnut; inner sequence

SEQ ID NO: 28760 - DNA, 30 bp, Artificial Sequence
  Description of Artificial Sequence: Synthetic walnut; inner sequence
ggcatcacgtacacatggcctcgcgtcacg

SEQ ID NO: 28761 - DNA, 30 bp, Artificial Sequence
  Description of Artificial Sequence: Synthetic walnut; inner sequence
ggcctgcgatggatgggggcttgcactgtc

SEQ ID NO: 28762 - DNA, 30 bp, Artificial Sequence
  Description of Artificial Sequence: Synthetic walnut; inner sequence
cgcaccgtcgatacgtcatgcacgctgaaa

SEQ ID NO: 28763 - DNA, 30 bp, Artificial Sequence; identical to SEQ ID NO: 20672
  Description of Artificial Sequence: Synthetic walnut; inner sequence

SEQ ID NO: 28764 - DNA, 30 bp, Artificial Sequence; identical to SEQ ID NO: 375
  Description of Artificial Sequence: Synthetic walnut; inner sequence

SEQ ID NO: 28765 - DNA, 30 bp, Artificial Sequence
  Description of Artificial Sequence: Synthetic walnut; inner sequence
ggccgaacggagctacacggggttgtggac

SEQ ID NO: 28766 - DNA, 30 bp, Artificial Sequence; identical to SEQ ID NO: 20466
  Description of Artificial Sequence: Synthetic walnut; inner sequence

SEQ ID NO: 28767 - DNA, 30 bp, Artificial Sequence; identical to SEQ ID NO: 8949
  Description of Artificial Sequence: Synthetic walnut; inner sequence

SEQ ID NO: 28768 - DNA, 30 bp, Artificial Sequence; identical to SEQ ID NO: 284
  Description of Artificial Sequence: Synthetic walnut; inner sequence

SEQ ID NO: 28769 - DNA, 30 bp, Artificial Sequence; identical to SEQ ID NO: 20573
  Description of Artificial Sequence: Synthetic walnut; inner sequence

SEQ ID NO: 28770 - DNA, 30 bp, Artificial Sequence; identical to SEQ ID NO: 4691
  Description of Artificial Sequence: Synthetic walnut; inner sequence

SEQ ID NO: 28771 - DNA, 30 bp, Artificial Sequence
  Description of Artificial Sequence: Synthetic walnut; inner sequence
ccacgcagacgtcacgcatcgtaccgcacg

SEQ ID NO: 28772 - DNA, 30 bp, Artificial Sequence
  Description of Artificial Sequence: Synthetic walnut; inner sequence
ggccacagcgtatctcaacgtggacgtgca

SEQ ID NO: 28773 - DNA, 30 bp, Artificial Sequence
  Description of Artificial Sequence: Synthetic walnut; inner sequence
ggcctgcgatggatgggggctggggcagtc

SEQ ID NO: 28774 - DNA, 30 bp, Artificial Sequence; identical to SEQ ID NO: 16627
  Description of Artificial Sequence: Synthetic walnut; inner sequence

SEQ ID NO: 28775 - DNA, 30 bp, Artificial Sequence; identical to SEQ ID NO: 169
  Description of Artificial Sequence: Synthetic walnut; inner sequence

SEQ ID NO: 28776 - DNA, 30 bp, Artificial Sequence
  Description of Artificial Sequence: Synthetic walnut; inner sequence
cgtgccgcaacgtgaggacgtgcatgtgcg

SEQ ID NO: 28777 - DNA, 30 bp, Artificial Sequence
  Description of Artificial Sequence: Synthetic walnut; inner sequence
ggcatgcacgcccctacacgtgggcacgta

SEQ ID NO: 28778 - DNA, 30 bp, Artificial Sequence; identical to SEQ ID NO: 20964
  Description of Artificial Sequence: Synthetic walnut; inner sequence

SEQ ID NO: 28779 - DNA, 30 bp, Artificial Sequence
  Description of Artificial Sequence: Synthetic walnut; inner sequence
ggcctgcgatggatgtgtgcttgtattagc

SEQ ID NO: 28780 - DNA, 30 bp, Artificial Sequence
  Description of Artificial Sequence: Synthetic walnut; inner sequence
cgacacacaggcaacatgcgttccgtcacg

SEQ ID NO: 28781 - DNA, 30 bp, Artificial Sequence; identical to SEQ ID NO: 16819
  Description of Artificial Sequence: Synthetic walnut; inner sequence

SEQ ID NO: 28782 - DNA, 30 bp, Artificial Sequence
  Description of Artificial Sequence: Synthetic walnut; inner sequence
ggccgcaacgtaccgtatcgtggccatgtg

SEQ ID NO: 28783 - DNA, 30 bp, Artificial Sequence; identical to SEQ ID NO: 8926
  Description of Artificial Sequence: Synthetic walnut; inner sequence

SEQ ID NO: 28784 - DNA, 30 bp, Artificial Sequence; identical to SEQ ID NO: 20960
  Description of Artificial Sequence: Synthetic walnut; inner sequence

SEQ ID NO: 28785 - DNA, 30 bp, Artificial Sequence; identical to SEQ ID NO: 782
  Description of Artificial Sequence: Synthetic walnut; inner sequence

SEQ ID NO: 28786 - DNA, 30 bp, Artificial Sequence; identical to SEQ ID NO: 399
  Description of Artificial Sequence: Synthetic walnut; inner sequence

SEQ ID NO: 28787 - DNA, 30 bp, Artificial Sequence; identical to SEQ ID NO: 16544
  Description of Artificial Sequence: Synthetic walnut; inner sequence

SEQ ID NO: 28788 - DNA, 30 bp, Artificial Sequence; identical to SEQ ID NO: 16595
  Description of Artificial Sequence: Synthetic walnut; inner sequence

SEQ ID NO: 28789 - DNA, 30 bp, Artificial Sequence; identical to SEQ ID NO: 16457
  Description of Artificial Sequence: Synthetic walnut; inner sequence

SEQ ID NO: 28790 - DNA, 30 bp, Artificial Sequence; identical to SEQ ID NO: 16703
  Description of Artificial Sequence: Synthetic walnut; inner sequence

SEQ ID NO: 28791 - DNA, 30 bp, Artificial Sequence
  Description of Artificial Sequence: Synthetic walnut; inner sequence
gtcattcctcatcctacacgtgggcacgta

SEQ ID NO: 28792 - DNA, 30 bp, Artificial Sequence
  Description of Artificial Sequence: Synthetic walnut; inner sequence
cgcaccgtggatacgtcatgcacgctgaca

SEQ ID NO: 28793 - DNA, 30 bp, Artificial Sequence
  Description of Artificial Sequence: Synthetic walnut; inner sequence
cgtgacgaacggccaacacgtcacttcgcg

SEQ ID NO: 28794 - DNA, 30 bp, Artificial Sequence
  Description of Artificial Sequence: Synthetic walnut; inner sequence
ggcatgcacgcacctacacgtgggcatgta

SEQ ID NO: 28795 - DNA, 30 bp, Artificial Sequence; identical to SEQ ID NO: 742
  Description of Artificial Sequence: Synthetic walnut; inner sequence

SEQ ID NO: 28796 - DNA, 30 bp, Artificial Sequence; identical to SEQ ID NO: 524
  Description of Artificial Sequence: Synthetic walnut; inner sequence

SEQ ID NO: 28797 - DNA, 30 bp, Artificial Sequence; identical to SEQ ID NO: 4893
  Description of Artificial Sequence: Synthetic walnut; inner sequence

SEQ ID NO: 28798 - DNA, 30 bp, Artificial Sequence; identical to SEQ ID NO: 8825
  Description of Artificial Sequence: Synthetic walnut; inner sequence

SEQ ID NO: 28799 - DNA, 30 bp, Artificial Sequence; identical to SEQ ID NO: 816
  Description of Artificial Sequence: Synthetic walnut; inner sequence

SEQ ID NO: 28800 - DNA, 30 bp, Artificial Sequence
  Description of Artificial Sequence: Synthetic walnut; inner sequence
cgacaacgcaacgaacagcaggcatgcgtg

SEQ ID NO: 28801 - DNA, 30 bp, Artificial Sequence
  Description of Artificial Sequence: Synthetic walnut; inner sequence
ggccacagtgtacctcaacgtggacgtgca

SEQ ID NO: 28802 - DNA, 30 bp, Artificial Sequence; identical to SEQ ID NO: 4881
  Description of Artificial Sequence: Synthetic walnut; inner sequence

SEQ ID NO: 28803 - DNA, 30 bp, Artificial Sequence; identical to SEQ ID NO: 20914
  Description of Artificial Sequence: Synthetic walnut; inner sequence

SEQ ID NO: 28804 - DNA, 30 bp, Artificial Sequence; identical to SEQ ID NO: 4814
  Description of Artificial Sequence: Synthetic walnut; inner sequence

SEQ ID NO: 28805 - DNA, 30 bp, Artificial Sequence
  Description of Artificial Sequence: Synthetic walnut; inner sequence
cgccacgatgtacgtcacgctacatgcaca

SEQ ID NO: 28806 - DNA, 30 bp, Artificial Sequence
  Description of Artificial Sequence: Synthetic walnut; inner sequence
gtcattccgcatcctccacgtgggcacgta

SEQ ID NO: 28807 - DNA, 30 bp, Artificial Sequence; identical to SEQ ID NO: 4364
  Description of Artificial Sequence: Synthetic walnut; inner sequence

SEQ ID NO: 28808 - DNA, 30 bp, Artificial Sequence
  Description of Artificial Sequence: Synthetic walnut; inner sequence
cgtgcgcgatgaacacgtcctaccgtcacg

SEQ ID NO: 28809 - DNA, 30 bp, Artificial Sequence; identical to SEQ ID NO: 380
  Description of Artificial Sequence: Synthetic walnut; inner sequence

SEQ ID NO: 28810 - DNA, 30 bp, Artificial Sequence; identical to SEQ ID NO: 520
  Description of Artificial Sequence: Synthetic walnut; inner sequence

SEQ ID NO: 28811 - DNA, 30 bp, Artificial Sequence
  Description of Artificial Sequence: Synthetic walnut; inner sequence
ggacgcatcgccacttcgagtggacaggta

SEQ ID NO: 28812 - DNA, 30 bp, Artificial Sequence; identical to SEQ ID NO: 835
  Description of Artificial Sequence: Synthetic walnut; inner sequence

SEQ ID NO: 28813 - DNA, 30 bp, Artificial Sequence; identical to SEQ ID NO: 662
  Description of Artificial Sequence: Synthetic walnut; inner sequence

SEQ ID NO: 28814 - DNA, 30 bp, Artificial Sequence
  Description of Artificial Sequence: Synthetic walnut; inner sequence
cgaggcagcgtgtgcacgtacgtatgcgca

SEQ ID NO: 28815 - DNA, 30 bp, Artificial Sequence; identical to SEQ ID NO: 16720
  Description of Artificial Sequence: Synthetic walnut; inner sequence

SEQ ID NO: 28816 - DNA, 31 bp, Artificial Sequence
  Description of Artificial Sequence: Synthetic walnut; inner sequence
ggcatgcgatggatgtggacggtgtggtagt

SEQ ID NO: 28817 - DNA, 30 bp, Artificial Sequence; identical to SEQ ID NO: 301
  Description of Artificial Sequence: Synthetic walnut; inner sequence

SEQ ID NO: 28818 - DNA, 30 bp, Artificial Sequence
  Description of Artificial Sequence: Synthetic walnut; inner sequence
gcaacacgatgcatacgtgacgcacgcacg

SEQ ID NO: 28819 - DNA, 30 bp, Artificial Sequence
  Description of Artificial Sequence: Synthetic walnut; inner sequence
ggacgcatcgccccttcgattggacaggta

SEQ ID NO: 28820 - DNA, 30 bp, Artificial Sequence
  Description of Artificial Sequence: Synthetic walnut; inner sequence
gcaccacacgacagcacgccagcatgcacg

SEQ ID NO: 28821 - DNA, 30 bp, Artificial Sequence
  Description of Artificial Sequence: Synthetic walnut; inner sequence
ggccacagcgtccctcaacgtggacgtgca

SEQ ID NO: 28822 - DNA, 30 bp, Artificial Sequence
  Description of Artificial Sequence: Synthetic walnut; inner sequence
gtccgacgatggatgtgggttgtgctcgtc

SEQ ID NO: 28823 - DNA, 30 bp, Artificial Sequence
  Description of Artificial Sequence: Synthetic walnut; inner sequence
gtgcgccacgactccctactcatgggggca

SEQ ID NO: 28824 - DNA, 30 bp, Artificial Sequence
  Description of Artificial Sequence: Synthetic walnut; inner sequence
ggcatgcacgcacctacaggtgggcacgta

SEQ ID NO: 28825 - DNA, 30 bp, Artificial Sequence; identical to SEQ ID NO: 12799
  Description of Artificial Sequence: Synthetic walnut; inner sequence

SEQ ID NO: 28826 - DNA, 30 bp, Artificial Sequence
  Description of Artificial Sequence: Synthetic walnut; inner sequence
gcaccacaacgccgtaacgcacgtcacgca

SEQ ID NO: 28827 - DNA, 30 bp, Artificial Sequence; identical to SEQ ID NO: 4938
  Description of Artificial Sequence: Synthetic walnut; inner sequence

SEQ ID NO: 28828 - DNA, 30 bp, Artificial Sequence; identical to SEQ ID NO: 16696
  Description of Artificial Sequence: Synthetic walnut; inner sequence

SEQ ID NO: 28829 - DNA, 30 bp, Artificial Sequence; identical to SEQ ID NO: 635
  Description of Artificial Sequence: Synthetic walnut; inner sequence

SEQ ID NO: 28830 - DNA, 30 bp, Artificial Sequence
  Description of Artificial Sequence: Synthetic walnut; inner sequence
gcatgcacgcaacagcacgtgtcctgcgca

SEQ ID NO: 28831 - DNA, 30 bp, Artificial Sequence
  Description of Artificial Sequence: Synthetic walnut; inner sequence
cacgcgacgagacgacatcgacgtaacgcg

SEQ ID NO: 28832 - DNA, 30 bp, Artificial Sequence
  Description of Artificial Sequence: Synthetic walnut; inner sequence
ggcctgactgggtgtggttaggaacgcgtc

SEQ ID NO: 28833 - DNA, 30 bp, Artificial Sequence; identical to SEQ ID NO: 374
  Description of Artificial Sequence: Synthetic walnut; inner sequence

SEQ ID NO: 28834 - DNA, 30 bp, Artificial Sequence; identical to SEQ ID NO: 20541
  Description of Artificial Sequence: Synthetic walnut; inner sequence

SEQ ID NO: 28835 - DNA, 30 bp, Artificial Sequence; identical to SEQ ID NO: 387
  Description of Artificial Sequence: Synthetic walnut; inner sequence

SEQ ID NO: 28836 - DNA, 30 bp, Artificial Sequence
  Description of Artificial Sequence: Synthetic walnut; inner sequence
cgtcacgcacaggacgacacggtacgcaca

SEQ ID NO: 28837 - DNA, 30 bp, Artificial Sequence; identical to SEQ ID NO: 16264
  Description of Artificial Sequence: Synthetic walnut; inner sequence

SEQ ID NO: 28838 - DNA, 30 bp, Artificial Sequence; identical to SEQ ID NO: 16862
  Description of Artificial Sequence: Synthetic walnut; inner sequence

SEQ ID NO: 28839 - DNA, 30 bp, Artificial Sequence
  Description of Artificial Sequence: Synthetic walnut; inner sequence
ggacgcaacgtaccgtatcgtggccatgcg

SEQ ID NO: 28840 - DNA, 30 bp, Artificial Sequence; identical to SEQ ID NO: 637
  Description of Artificial Sequence: Synthetic walnut; inner sequence

SEQ ID NO: 28841 - DNA, 30 bp, Artificial Sequence; identical to SEQ ID NO: 20817
  Description of Artificial Sequence: Synthetic walnut; inner sequence

SEQ ID NO: 28842 - DNA, 30 bp, Artificial Sequence; identical to SEQ ID NO: 644
  Description of Artificial Sequence: Synthetic walnut; inner sequence

SEQ ID NO: 28843 - DNA, 30 bp, Artificial Sequence
  Description of Artificial Sequence: Synthetic walnut; inner sequence
ggccgcacgacccttcatgtggtcttcgta

SEQ ID NO: 28844 - DNA, 30 bp, Artificial Sequence
  Description of Artificial Sequence: Synthetic walnut; inner sequence
gtcattccgcatcctaaacgtgggcacgta

SEQ ID NO: 28845 - DNA, 30 bp, Artificial Sequence; identical to SEQ ID NO: 181
  Description of Artificial Sequence: Synthetic walnut; inner sequence

SEQ ID NO: 28846 - DNA, 30 bp, Artificial Sequence
  Description of Artificial Sequence: Synthetic walnut; inner sequence
cgatgcgcaacgtgcagaccatgtgtcgcg

SEQ ID NO: 28847 - DNA, 30 bp, Artificial Sequence; identical to SEQ ID NO: 20502
  Description of Artificial Sequence: Synthetic walnut; inner sequence

SEQ ID NO: 28848 - DNA, 30 bp, Artificial Sequence
  Description of Artificial Sequence: Synthetic walnut; inner sequence
gcgaacacgatgcagtacgtgacatgcgcg

SEQ ID NO: 28849 - DNA, 30 bp, Artificial Sequence
  Description of Artificial Sequence: Synthetic walnut; inner sequence
ccgacctcgacctcggtggacatacgtgac

SEQ ID NO: 28850 - DNA, 30 bp, Artificial Sequence; identical to SEQ ID NO: 288
  Description of Artificial Sequence: Synthetic walnut; inner sequence

SEQ ID NO: 28851 - DNA, 30 bp, Artificial Sequence; identical to SEQ ID NO: 20899
  Description of Artificial Sequence: Synthetic walnut; inner sequence

SEQ ID NO: 28852 - DNA, 30 bp, Artificial Sequence; identical to SEQ ID NO: 4888
  Description of Artificial Sequence: Synthetic walnut; inner sequence

SEQ ID NO: 28853 - DNA, 30 bp, Artificial Sequence; identical to SEQ ID NO: 211
  Description of Artificial Sequence: Synthetic walnut; inner sequence

SEQ ID NO: 28854 - DNA, 30 bp, Artificial Sequence; identical to SEQ ID NO: 8978
  Description of Artificial Sequence: Synthetic walnut; inner sequence

SEQ ID NO: 28855 - DNA, 30 bp, Artificial Sequence; identical to SEQ ID NO: 580
  Description of Artificial Sequence: Synthetic walnut; inner sequence

SEQ ID NO: 28856 - DNA, 30 bp, Artificial Sequence; identical to SEQ ID NO: 344
  Description of Artificial Sequence: Synthetic walnut; inner sequence

SEQ ID NO: 28857 - DNA, 30 bp, Artificial Sequence
  Description of Artificial Sequence: Synthetic walnut; inner sequence
ggacgcatcgccccttcgagcggacaggta

SEQ ID NO: 28858 - DNA, 30 bp, Artificial Sequence
  Description of Artificial Sequence: Synthetic walnut; inner sequence
cgcaccgtcgattcgtcatgcacgctgaca

SEQ ID NO: 28859 - DNA, 30 bp, Artificial Sequence; identical to SEQ ID NO: 365
  Description of Artificial Sequence: Synthetic walnut; inner sequence

SEQ ID NO: 28860 - DNA, 30 bp, Artificial Sequence
  Description of Artificial Sequence: Synthetic walnut; inner sequence
cgatgcagcgtgacgtgcgaggacatcgcg

SEQ ID NO: 28861 - DNA, 30 bp, Artificial Sequence
  Description of Artificial Sequence: Synthetic walnut; inner sequence
tgcatgcacgcacctacacgtgggcacgta

SEQ ID NO: 28862 - DNA, 30 bp, Artificial Sequence; identical to SEQ ID NO: 4579
  Description of Artificial Sequence: Synthetic walnut; inner sequence

SEQ ID NO: 28863 - DNA, 30 bp, Artificial Sequence; identical to SEQ ID NO: 431
  Description of Artificial Sequence: Synthetic walnut; inner sequence

SEQ ID NO: 28864 - DNA, 30 bp, Artificial Sequence
  Description of Artificial Sequence: Synthetic walnut; inner sequence
cgtgacgaacgcggactgtacgcatgcacg

SEQ ID NO: 28865 - DNA, 30 bp, Artificial Sequence; identical to SEQ ID NO: 12521
  Description of Artificial Sequence: Synthetic walnut; inner sequence

SEQ ID NO: 28866 - DNA, 30 bp, Artificial Sequence
  Description of Artificial Sequence: Synthetic walnut; inner sequence
gtcattccgcattctacacgtgggcacgta

SEQ ID NO: 28867 - DNA, 31 bp, Artificial Sequence; identical to SEQ ID NO: 20870
  Description of Artificial Sequence: Synthetic walnut; inner sequence

SEQ ID NO: 28868 - DNA, 30 bp, Artificial Sequence; identical to SEQ ID NO: 4943
  Description of Artificial Sequence: Synthetic walnut; inner sequence

SEQ ID NO: 28869 - DNA, 30 bp, Artificial Sequence
  Description of Artificial Sequence: Synthetic walnut; inner sequence
gcgtcacggatcacggtctgcatcgacacg

SEQ ID NO: 28870 - DNA, 30 bp, Artificial Sequence; identical to SEQ ID NO: 285
  Description of Artificial Sequence: Synthetic walnut; inner sequence

SEQ ID NO: 28871 - DNA, 30 bp, Artificial Sequence; identical to SEQ ID NO: 787
  Description of Artificial Sequence: Synthetic walnut; inner sequence

SEQ ID NO: 28872 - DNA, 30 bp, Artificial Sequence
  Description of Artificial Sequence: Synthetic walnut; inner sequence
cgacacacaccagcacgtcacgacatcgcg

SEQ ID NO: 28873 - DNA, 30 bp, Artificial Sequence; identical to SEQ ID NO: 16950
  Description of Artificial Sequence: Synthetic walnut; inner sequence

SEQ ID NO: 28874 - DNA, 30 bp, Artificial Sequence
  Description of Artificial Sequence: Synthetic walnut; inner sequence
cgtgccgtggtacgatgccgctacgtcacg

SEQ ID NO: 28875 - DNA, 30 bp, Artificial Sequence; identical to SEQ ID NO: 943
  Description of Artificial Sequence: Synthetic walnut; inner sequence

SEQ ID NO: 28876 - DNA, 30 bp, Artificial Sequence
  Description of Artificial Sequence: Synthetic walnut; inner sequence
cacgccacacgtcctgcctgcacgcgcacg

SEQ ID NO: 28877 - DNA, 30 bp, Artificial Sequence
  Description of Artificial Sequence: Synthetic walnut; inner sequence
cgacacgcagagcaacgccatgtcgacgca

SEQ ID NO: 28878 - DNA, 30 bp, Artificial Sequence
  Description of Artificial Sequence: Synthetic walnut; inner sequence
ggccacagcgtacctcaacgtggtcgtgca

SEQ ID NO: 28879 - DNA, 30 bp, Artificial Sequence
  Description of Artificial Sequence: Synthetic walnut; inner sequence
gtacgacgcggaccttcaagttggcgtgga

SEQ ID NO: 28880 - DNA, 30 bp, Artificial Sequence
  Description of Artificial Sequence: Synthetic walnut; inner sequence
ggcctgcgatgtatgtgtgcgtgtattagc

SEQ ID NO: 28881 - DNA, 30 bp, Artificial Sequence; identical to SEQ ID NO: 20982
  Description of Artificial Sequence: Synthetic walnut; inner sequence

SEQ ID NO: 28882 - DNA, 30 bp, Artificial Sequence; identical to SEQ ID NO: 16770
  Description of Artificial Sequence: Synthetic walnut; inner sequence

SEQ ID NO: 28883 - DNA, 30 bp, Artificial Sequence
  Description of Artificial Sequence: Synthetic walnut; inner sequence
gcactgcactgccctacacgtgggaatgga

SEQ ID NO: 28884 - DNA, 30 bp, Artificial Sequence
  Description of Artificial Sequence: Synthetic walnut; inner sequence
gtcactgtgtctgaccgtcaagttgcggca

SEQ ID NO: 28885 - DNA, 30 bp, Artificial Sequence
  Description of Artificial Sequence: Synthetic walnut; inner sequence
cacgccagccaagcacgaggcacacgcgca

SEQ ID NO: 28886 - DNA, 30 bp, Artificial Sequence
  Description of Artificial Sequence: Synthetic walnut; inner sequence
ggactgcactgccctacacgtgggaatgga

SEQ ID NO: 28887 - DNA, 29 bp, Artificial Sequence
  Description of Artificial Sequence: Synthetic walnut; inner sequence
ggcctgcgatggatgtgggatggtctagc

SEQ ID NO: 28888 - DNA, 30 bp, Artificial Sequence
  Description of Artificial Sequence: Synthetic walnut; inner sequence
ggacgcatcgccccttctagtggacaggta

SEQ ID NO: 28889 - DNA, 26 bp, Artificial Sequence
  Description of Artificial Sequence: Synthetic walnut; inner sequence
ggcacaaacggaccgacaagtgcgca

SEQ ID NO: 28890 - DNA, 30 bp, Artificial Sequence; identical to SEQ ID NO: 920
  Description of Artificial Sequence: Synthetic walnut; inner sequence

SEQ ID NO: 28891 - DNA, 30 bp, Artificial Sequence
  Description of Artificial Sequence: Synthetic walnut; inner sequence
cgacgcgcaacacggaggcacgatggcacg

SEQ ID NO: 28892 - DNA, 30 bp, Artificial Sequence; identical to SEQ ID NO: 325
  Description of Artificial Sequence: Synthetic walnut; inner sequence

SEQ ID NO: 28893 - DNA, 30 bp, Artificial Sequence; identical to SEQ ID NO: 305
  Description of Artificial Sequence: Synthetic walnut; inner sequence

SEQ ID NO: 28894 - DNA, 30 bp, Artificial Sequence
  Description of Artificial Sequence: Synthetic walnut; inner sequence
ggcatgcacgcacctccacgtgggcacgta

SEQ ID NO: 28895 - DNA, 30 bp, Artificial Sequence; identical to SEQ ID NO: 776
  Description of Artificial Sequence: Synthetic walnut; inner sequence

SEQ ID NO: 28896 - DNA, 30 bp, Artificial Sequence
  Description of Artificial Sequence: Synthetic walnut; inner sequence
ggcctgcgatggatgtgtgcgtgtattatc

SEQ ID NO: 28897 - DNA, 30 bp, Artificial Sequence; identical to SEQ ID NO: 500
  Description of Artificial Sequence: Synthetic walnut; inner sequence

SEQ ID NO: 28898 - DNA, 30 bp, Artificial Sequence; identical to SEQ ID NO: 20998
  Description of Artificial Sequence: Synthetic walnut; inner sequence

SEQ ID NO: 28899 - DNA, 30 bp, Artificial Sequence; identical to SEQ ID NO: 20807
  Description of Artificial Sequence: Synthetic walnut; inner sequence

SEQ ID NO: 28900 - DNA, 30 bp, Artificial Sequence; identical to SEQ ID NO: 391
  Description of Artificial Sequence: Synthetic walnut; inner sequence

SEQ ID NO: 28901 - DNA, 30 bp, Artificial Sequence; identical to SEQ ID NO: 4960
  Description of Artificial Sequence: Synthetic walnut; inner sequence

SEQ ID NO: 28902 - DNA, 30 bp, Artificial Sequence; identical to SEQ ID NO: 290
  Description of Artificial Sequence: Synthetic walnut; inner sequence

SEQ ID NO: 28903 - DNA, 30 bp, Artificial Sequence
  Description of Artificial Sequence: Synthetic walnut; inner sequence
cgcaccgtctatacttcatgcacgctgaca

SEQ ID NO: 28904 - DNA, 30 bp, Artificial Sequence; identical to SEQ ID NO: 224
  Description of Artificial Sequence: Synthetic walnut; inner sequence

SEQ ID NO: 28905 - DNA, 30 bp, Artificial Sequence; identical to SEQ ID NO: 937
  Description of Artificial Sequence: Synthetic walnut; inner sequence

SEQ ID NO: 28906 - DNA, 30 bp, Artificial Sequence; identical to SEQ ID NO: 16651
  Description of Artificial Sequence: Synthetic walnut; inner sequence

SEQ ID NO: 28907 - DNA, 30 bp, Artificial Sequence
  Description of Artificial Sequence: Synthetic walnut; inner sequence
gcacacggtgcgacggtacgacgatgcacg

SEQ ID NO: 28908 - DNA, 30 bp, Artificial Sequence
  Description of Artificial Sequence: Synthetic walnut; inner sequence
cgaacgcacacgcaggatgaggcatgcacg

SEQ ID NO: 28909 - DNA, 30 bp, Artificial Sequence
  Description of Artificial Sequence: Synthetic walnut; inner sequence
ggacgcaacgaaccgtatcgtggccatgtg

SEQ ID NO: 28910 - DNA, 30 bp, Artificial Sequence
  Description of Artificial Sequence: Synthetic walnut; inner sequence
cgatgcaacgacacatgcaggacgtgcgcg

SEQ ID NO: 28911 - DNA, 30 bp, Artificial Sequence; identical to SEQ ID NO: 727
  Description of Artificial Sequence: Synthetic walnut; inner sequence

SEQ ID NO: 28912 - DNA, 30 bp, Artificial Sequence
  Description of Artificial Sequence: Synthetic walnut; inner sequence
ggcatgcacgaacctacacgtgggcacgta

SEQ ID NO: 28913 - DNA, 30 bp, Artificial Sequence; identical to SEQ ID NO: 4987
  Description of Artificial Sequence: Synthetic walnut; inner sequence

SEQ ID NO: 28914 - DNA, 30 bp, Artificial Sequence
  Description of Artificial Sequence: Synthetic walnut; inner sequence
gtcattccgcatcctacacgtgggcacgtg

SEQ ID NO: 28915 - DNA, 30 bp, Artificial Sequence
  Description of Artificial Sequence: Synthetic walnut; inner sequence
cgtcacgcaacgtggacgacacgatctgcg

SEQ ID NO: 28916 - DNA, 30 bp, Artificial Sequence; identical to SEQ ID NO: 4472
  Description of Artificial Sequence: Synthetic walnut; inner sequence

SEQ ID NO: 28917 - DNA, 30 bp, Artificial Sequence
  Description of Artificial Sequence: Synthetic walnut; inner sequence
gttccgagctggatgtggcctgtgctatgc

SEQ ID NO: 28918 - DNA, 30 bp, Artificial Sequence
  Description of Artificial Sequence: Synthetic walnut; inner sequence
gcatgcaacgacgcaacctcacgtgacgcg

SEQ ID NO: 28919 - DNA, 30 bp, Artificial Sequence; identical to SEQ ID NO: 4918
  Description of Artificial Sequence: Synthetic walnut; inner sequence

SEQ ID NO: 28920 - DNA, 30 bp, Artificial Sequence
  Description of Artificial Sequence: Synthetic walnut; inner sequence
cgtgcacggtgaccgcaacgttacgccgcg

SEQ ID NO: 28921 - DNA, 30 bp, Artificial Sequence
  Description of Artificial Sequence: Synthetic walnut; inner sequence
cgtgccaacgtacgacatggttgcgacaca

SEQ ID NO: 28922 - DNA, 30 bp, Artificial Sequence
  Description of Artificial Sequence: Synthetic walnut; inner sequence
ccatgtgacctgaccgtcccttcaatgggc

SEQ ID NO: 28923 - DNA, 30 bp, Artificial Sequence; identical to SEQ ID NO: 8678
  Description of Artificial Sequence: Synthetic walnut; inner sequence

SEQ ID NO: 28924 - DNA, 30 bp, Artificial Sequence
  Description of Artificial Sequence: Synthetic walnut; inner sequence
tgcgcacagtacgtacgtcctgccgacacg

SEQ ID NO: 28925 - DNA, 30 bp, Artificial Sequence; identical to SEQ ID NO: 117
  Description of Artificial Sequence: Synthetic walnut; inner sequence

SEQ ID NO: 28926 - DNA, 30 bp, Artificial Sequence
  Description of Artificial Sequence: Synthetic walnut; inner sequence
ggcctgatcgaacctacaagttgtcgtgga

SEQ ID NO: 28927 - DNA, 30 bp, Artificial Sequence
  Description of Artificial Sequence: Synthetic walnut; inner sequence
cgcaacgcagcaacgtactgtcgtgccgca

SEQ ID NO: 28928 - DNA, 30 bp, Artificial Sequence
  Description of Artificial Sequence: Synthetic walnut; inner sequence
ggccacgcgaccgaaagtgagcatggcgtc

SEQ ID NO: 28929 - DNA, 30 bp, Artificial Sequence; identical to SEQ ID NO: 4857
  Description of Artificial Sequence: Synthetic walnut; inner sequence

SEQ ID NO: 28930 - DNA, 29 bp, Artificial Sequence
  Description of Artificial Sequence: Synthetic walnut; inner sequence
ggccggcgatggatgtggttgtgctcgtc

SEQ ID NO: 28931 - DNA, 29 bp, Artificial Sequence
  Description of Artificial Sequence: Synthetic walnut; inner sequence
gtcatgccatcccttcgagtgtgcaggta

SEQ ID NO: 28932 - DNA, 30 bp, Artificial Sequence
  Description of Artificial Sequence: Synthetic walnut; inner sequence
cgcaccgtgacatgcgcagtacgtaccacg

SEQ ID NO: 28933 - DNA, 30 bp, Artificial Sequence; identical to SEQ ID NO: 16265
  Description of Artificial Sequence: Synthetic walnut; inner sequence

SEQ ID NO: 28934 - DNA, 30 bp, Artificial Sequence
  Description of Artificial Sequence: Synthetic walnut; inner sequence
catgcgtacgacaggcagtgtgcatgcacg

SEQ ID NO: 28935 - DNA, 30 bp, Artificial Sequence; identical to SEQ ID NO: 12659
  Description of Artificial Sequence: Synthetic walnut; inner sequence

SEQ ID NO: 28936 - DNA, 30 bp, Artificial Sequence
  Description of Artificial Sequence: Synthetic walnut; inner sequence
ggccacagcgtacttcaacgtggacgtgca

SEQ ID NO: 28937 - DNA, 30 bp, Artificial Sequence; identical to SEQ ID NO: 16818
  Description of Artificial Sequence: Synthetic walnut; inner sequence

SEQ ID NO: 28938 - DNA, 25 bp, Artificial Sequence
  Description of Artificial Sequence: Synthetic walnut; inner sequence
ggcatgcacgcacctacacgtggac

SEQ ID NO: 28939 - DNA, 30 bp, Artificial Sequence
  Description of Artificial Sequence: Synthetic walnut; inner sequence
cacgtggcaacgtactgtcctgactgcacg

SEQ ID NO: 28940 - DNA, 30 bp, Artificial Sequence; identical to SEQ ID NO: 20793
  Description of Artificial Sequence: Synthetic walnut; inner sequence

SEQ ID NO: 28941 - DNA, 30 bp, Artificial Sequence
  Description of Artificial Sequence: Synthetic walnut; inner sequence
cgcaccgtcgatactccatgcacgctgaca

SEQ ID NO: 28942 - DNA, 30 bp, Artificial Sequence; identical to SEQ ID NO: 919
  Description of Artificial Sequence: Synthetic walnut; inner sequence

SEQ ID NO: 28943 - DNA, 30 bp, Artificial Sequence; identical to SEQ ID NO: 646
  Description of Artificial Sequence: Synthetic walnut; inner sequence

SEQ ID NO: 28944 - DNA, 30 bp, Artificial Sequence; identical to SEQ ID NO: 16709
  Description of Artificial Sequence: Synthetic walnut; inner sequence

SEQ ID NO: 28945 - DNA, 30 bp, Artificial Sequence; identical to SEQ ID NO: 99
  Description of Artificial Sequence: Synthetic walnut; inner sequence

SEQ ID NO: 28946 - DNA, 30 bp, Artificial Sequence; identical to SEQ ID NO: 8938
  Description of Artificial Sequence: Synthetic walnut; inner sequence

SEQ ID NO: 28947 - DNA, 30 bp, Artificial Sequence
  Description of Artificial Sequence: Synthetic walnut; inner sequence
ggcacgagctgcactatcaagttgggtatg

SEQ ID NO: 28948 - DNA, 30 bp, Artificial Sequence
  Description of Artificial Sequence: Synthetic walnut; inner sequence
cgacacgacatacggtgacgcacgtgcacg

SEQ ID NO: 28949 - DNA, 30 bp, Artificial Sequence
  Description of Artificial Sequence: Synthetic walnut; inner sequence
gcgatgcgcgtcacacgtactgcactcgcg

SEQ ID NO: 28950 - DNA, 30 bp, Artificial Sequence; identical to SEQ ID NO: 764
  Description of Artificial Sequence: Synthetic walnut; inner sequence

SEQ ID NO: 28951 - DNA, 30 bp, Artificial Sequence; identical to SEQ ID NO: 178
  Description of Artificial Sequence: Synthetic walnut; inner sequence

SEQ ID NO: 28952 - DNA, 30 bp, Artificial Sequence; identical to SEQ ID NO: 213
  Description of Artificial Sequence: Synthetic walnut; inner sequence

SEQ ID NO: 28953 - DNA, 30 bp, Artificial Sequence
  Description of Artificial Sequence: Synthetic walnut; inner sequence
ggcatgcgtacgtgctgaccttacgacgca

SEQ ID NO: 28954 - DNA, 30 bp, Artificial Sequence
  Description of Artificial Sequence: Synthetic walnut; inner sequence
ggcctgcgatggatgtggtgtggctcaggc

SEQ ID NO: 28955 - DNA, 30 bp, Artificial Sequence; identical to SEQ ID NO: 701
  Description of Artificial Sequence: Synthetic walnut; inner sequence

SEQ ID NO: 28956 - DNA, 30 bp, Artificial Sequence
  Description of Artificial Sequence: Synthetic walnut; inner sequence
gtgacgcagcgtgacgacctgccatgcatg

SEQ ID NO: 28957 - DNA, 30 bp, Artificial Sequence
  Description of Artificial Sequence: Synthetic walnut; inner sequence
gtaattccgcatcctacacgtgggcacgta

SEQ ID NO: 28958 - DNA, 30 bp, Artificial Sequence
  Description of Artificial Sequence: Synthetic walnut; inner sequence
cgacgcgatacgccacggtcacgctgcgca

SEQ ID NO: 28959 - DNA, 30 bp, Artificial Sequence
  Description of Artificial Sequence: Synthetic walnut; inner sequence
ggacgcaacgtaccgtatcgtgtccatgtg

SEQ ID NO: 28960 - DNA, 30 bp, Artificial Sequence
  Description of Artificial Sequence: Synthetic walnut; inner sequence
gcgctgaggacgcaacgccttcacgtcacg

SEQ ID NO: 28961 - DNA, 30 bp, Artificial Sequence
  Description of Artificial Sequence: Synthetic walnut; inner sequence
ggcatgcgatgaacggggcatgatgcgtca

SEQ ID NO: 28962 - DNA, 30 bp, Artificial Sequence; identical to SEQ ID NO: 20700
  Description of Artificial Sequence: Synthetic walnut; inner sequence

SEQ ID NO: 28963 - DNA, 30 bp, Artificial Sequence; identical to SEQ ID NO: 4591
  Description of Artificial Sequence: Synthetic walnut; inner sequence

SEQ ID NO: 28964 - DNA, 30 bp, Artificial Sequence
  Description of Artificial Sequence: Synthetic walnut; inner sequence
cgatgcgatgcgtcgtgcgtacggtacgca

SEQ ID NO: 28965 - DNA, 30 bp, Artificial Sequence; identical to SEQ ID NO: 16387
  Description of Artificial Sequence: Synthetic walnut; inner sequence

SEQ ID NO: 28966 - DNA, 30 bp, Artificial Sequence; identical to SEQ ID NO: 20879
  Description of Artificial Sequence: Synthetic walnut; inner sequence

SEQ ID NO: 28967 - DNA, 30 bp, Artificial Sequence; identical to SEQ ID NO: 8971
  Description of Artificial Sequence: Synthetic walnut; inner sequence

SEQ ID NO: 28968 - DNA, 30 bp, Artificial Sequence
  Description of Artificial Sequence: Synthetic walnut; inner sequence
ggcctgcgatggatgtgggttgtgctcggc

SEQ ID NO: 28969 - DNA, 30 bp, Artificial Sequence
  Description of Artificial Sequence: Synthetic walnut; inner sequence
gcacgactcgcagcctatcatgaggccatg

SEQ ID NO: 28970 - DNA, 30 bp, Artificial Sequence; identical to SEQ ID NO: 4377
  Description of Artificial Sequence: Synthetic walnut; inner sequence

SEQ ID NO: 28971 - DNA, 30 bp, Artificial Sequence
  Description of Artificial Sequence: Synthetic walnut; inner sequence
cgtgacagcgtaacgtcatggcactgcaca

SEQ ID NO: 28972 - DNA, 30 bp, Artificial Sequence
  Description of Artificial Sequence: Synthetic walnut; inner sequence
cgcgcaaggacgacgtacctgccgtgcacg

SEQ ID NO: 28973 - DNA, 31 bp, Artificial Sequence
  Description of Artificial Sequence: Synthetic walnut; inner sequence
ggcatgcacgcatcctacacgtgggcacgta

SEQ ID NO: 28974 - DNA, 30 bp, Artificial Sequence; identical to SEQ ID NO: 20504
  Description of Artificial Sequence: Synthetic walnut; inner sequence

SEQ ID NO: 28975 - DNA, 30 bp, Artificial Sequence; identical to SEQ ID NO: 439
  Description of Artificial Sequence: Synthetic walnut; inner sequence

SEQ ID NO: 28976 - DNA, 30 bp, Artificial Sequence
  Description of Artificial Sequence: Synthetic walnut; inner sequence
gcgacacggcacgacgacgacagcacgacg

SEQ ID NO: 28977 - DNA, 30 bp, Artificial Sequence; identical to SEQ ID NO: 868
  Description of Artificial Sequence: Synthetic walnut; inner sequence

SEQ ID NO: 28978 - DNA, 30 bp, Artificial Sequence
  Description of Artificial Sequence: Synthetic walnut; inner sequence
cgaaacgcaatgcagcacgtgcacgtcacg

SEQ ID NO: 28979 - DNA, 30 bp, Artificial Sequence
  Description of Artificial Sequence: Synthetic walnut; inner sequence
gtcattccccatcctacacgtgggcacgta

SEQ ID NO: 28980 - DNA, 30 bp, Artificial Sequence
  Description of Artificial Sequence: Synthetic walnut; inner sequence
gcgtgcgaacaacgtagcgtcacgtgcaca

SEQ ID NO: 28981 - DNA, 30 bp, Artificial Sequence; identical to SEQ ID NO: 329
  Description of Artificial Sequence: Synthetic walnut; inner sequence

SEQ ID NO: 28982 - DNA, 30 bp, Artificial Sequence
  Description of Artificial Sequence: Synthetic walnut; inner sequence
gcaacggcacgacagcatgacgtgtgcgtg

SEQ ID NO: 28983 - DNA, 30 bp, Artificial Sequence
  Description of Artificial Sequence: Synthetic walnut; inner sequence
ggacgcatcgccccttcgaggggacaggta

SEQ ID NO: 28984 - DNA, 30 bp, Artificial Sequence
  Description of Artificial Sequence: Synthetic walnut; inner sequence
ggacgcaacgtaccgtattgtggccatgtg

SEQ ID NO: 28985 - DNA, 30 bp, Artificial Sequence
  Description of Artificial Sequence: Synthetic walnut; inner sequence
ggacgcaacgtaccttatcgtggccatgtg

SEQ ID NO: 28986 - DNA, 30 bp, Artificial Sequence
  Description of Artificial Sequence: Synthetic walnut; inner sequence
ggactgcgatggatgtgggctagtatgggc

SEQ ID NO: 28987 - DNA, 30 bp, Artificial Sequence
  Description of Artificial Sequence: Synthetic walnut; inner sequence
cgcaccgacagcacacgtacgtcatgcggc

SEQ ID NO: 28988 - DNA, 30 bp, Artificial Sequence; identical to SEQ ID NO: 950
  Description of Artificial Sequence: Synthetic walnut; inner sequence

SEQ ID NO: 28989 - DNA, 30 bp, Artificial Sequence
  Description of Artificial Sequence: Synthetic walnut; inner sequence
ggccaaactgcactatcaagacgtcgtgga

SEQ ID NO: 28990 - DNA, 30 bp, Artificial Sequence; identical to SEQ ID NO: 565
  Description of Artificial Sequence: Synthetic walnut; inner sequence

SEQ ID NO: 28991 - DNA, 30 bp, Artificial Sequence; identical to SEQ ID NO: 20644
  Description of Artificial Sequence: Synthetic walnut; inner sequence

SEQ ID NO: 28992 - DNA, 30 bp, Artificial Sequence
  Description of Artificial Sequence: Synthetic walnut; inner sequence
cgcacacgcacgtcatgccagctgtgcatg

SEQ ID NO: 28993 - DNA, 30 bp, Artificial Sequence
  Description of Artificial Sequence: Synthetic walnut; inner sequence
cgtgacgcatgaaacgtaccttcacgcacg

SEQ ID NO: 28994 - DNA, 30 bp, Artificial Sequence
  Description of Artificial Sequence: Synthetic walnut; inner sequence
gcacgcactctgccatacgagtggttcagg

SEQ ID NO: 28995 - DNA, 30 bp, Artificial Sequence
  Description of Artificial Sequence: Synthetic walnut; inner sequence
cgtgcatcgtgcgatacgtcctgctgcaca

SEQ ID NO: 28996 - DNA, 30 bp, Artificial Sequence
  Description of Artificial Sequence: Synthetic walnut; inner sequence
cgacactacgtagcatgccgtacgtgcaca

SEQ ID NO: 28997 - DNA, 30 bp, Artificial Sequence
  Description of Artificial Sequence: Synthetic walnut; inner sequence
ggcctgcgatggatgtggtttggacgggcc

SEQ ID NO: 28998 - DNA, 31 bp, Artificial Sequence
  Description of Artificial Sequence: Synthetic walnut; inner sequence
gttccgccgatggatgtgggttgtgctcgtc

SEQ ID NO: 28999 - DNA, 30 bp, Artificial Sequence
  Description of Artificial Sequence: Synthetic walnut; inner sequence
ggcatgcacgcatctacacgtgggcacgta

SEQ ID NO: 29000 - DNA, 30 bp, Artificial Sequence
  Description of Artificial Sequence: Synthetic walnut; inner sequence
gcgtgacgggaaggacgttgccactacgca

SEQ ID NO: 29001 - DNA, 30 bp, Artificial Sequence; identical to SEQ ID NO: 12933
  Description of Artificial Sequence: Synthetic walnut; inner sequence

SEQ ID NO: 29002 - DNA, 30 bp, Artificial Sequence; identical to SEQ ID NO: 988
  Description of Artificial Sequence: Synthetic walnut; inner sequence

SEQ ID NO: 29003 - DNA, 53 bp, Artificial Sequence; identical to SEQ ID NO: 1003
  Description of Artificial Sequence: Synthetic walnut; 5' sequence and inner sequence

SEQ ID NO: 29004 - DNA, 53 bp, Artificial Sequence; identical to SEQ ID NO: 1004
  Description of Artificial Sequence: Synthetic walnut; 5' sequence and inner sequence

SEQ ID NO: 29005 - DNA, 53 bp, Artificial Sequence; identical to SEQ ID NO: 1020
  Description of Artificial Sequence: Synthetic walnut; 5' sequence and inner sequence

SEQ ID NO: 29006 - DNA, 53 bp, Artificial Sequence; identical to SEQ ID NO: 1008
  Description of Artificial Sequence: Synthetic walnut; 5' sequence and inner sequence

SEQ ID NO: 29007 - DNA, 53 bp, Artificial Sequence; identical to SEQ ID NO: 1010
  Description of Artificial Sequence: Synthetic walnut; 5' sequence and inner sequence

SEQ ID NO: 29008 - DNA, 53 bp, Artificial Sequence; identical to SEQ ID NO: 1006
  Description of Artificial Sequence: Synthetic walnut; 5' sequence and inner sequence

SEQ ID NO: 29009 - DNA, 53 bp, Artificial Sequence; identical to SEQ ID NO: 1030
  Description of Artificial Sequence: Synthetic walnut; 5' sequence and inner sequence

SEQ ID NO: 29010 - DNA, 53 bp, Artificial Sequence; identical to SEQ ID NO: 1027
  Description of Artificial Sequence: Synthetic walnut; 5' sequence and inner sequence

SEQ ID NO: 29011 - DNA, 53 bp, Artificial Sequence; identical to SEQ ID NO: 1029
  Description of Artificial Sequence: Synthetic walnut; 5' sequence and inner sequence

SEQ ID NO: 29012 - DNA, 53 bp, Artificial Sequence; identical to SEQ ID NO: 1021
  Description of Artificial Sequence: Synthetic walnut; 5' sequence and inner sequence

SEQ ID NO: 29013 - DNA, 53 bp, Artificial Sequence; identical to SEQ ID NO: 1007
  Description of Artificial Sequence: Synthetic walnut; 5' sequence and inner sequence

SEQ ID NO: 29014 - DNA, 53 bp, Artificial Sequence; identical to SEQ ID NO: 1012
  Description of Artificial Sequence: Synthetic walnut; 5' sequence and inner sequence

SEQ ID NO: 29015 - DNA, 53 bp, Artificial Sequence; identical to SEQ ID NO: 1009
  Description of Artificial Sequence: Synthetic walnut; 5' sequence and inner sequence

SEQ ID NO: 29016 - DNA, 53 bp, Artificial Sequence; identical to SEQ ID NO: 1005
  Description of Artificial Sequence: Synthetic walnut; 5' sequence and inner sequence

SEQ ID NO: 29017 - DNA, 53 bp, Artificial Sequence; identical to SEQ ID NO: 1052
  Description of Artificial Sequence: Synthetic walnut; 5' sequence and inner sequence

SEQ ID NO: 29018 - DNA, 53 bp, Artificial Sequence; identical to SEQ ID NO: 1047
  Description of Artificial Sequence: Synthetic walnut; 5' sequence and inner sequence

SEQ ID NO: 29019 - DNA, 53 bp, Artificial Sequence; identical to SEQ ID NO: 1033
  Description of Artificial Sequence: Synthetic walnut; 5' sequence and inner sequence

SEQ ID NO: 29020 - DNA, 53 bp, Artificial Sequence; identical to SEQ ID NO: 1014
  Description of Artificial Sequence: Synthetic walnut; 5' sequence and inner sequence

SEQ ID NO: 29021 - DNA, 53 bp, Artificial Sequence; identical to SEQ ID NO: 1026
  Description of Artificial Sequence: Synthetic walnut; 5' sequence and inner sequence

SEQ ID NO: 29022 - DNA, 53 bp, Artificial Sequence; identical to SEQ ID NO: 1383
  Description of Artificial Sequence: Synthetic walnut; 5' sequence and inner sequence

SEQ ID NO: 29023 - DNA, 53 bp, Artificial Sequence; identical to SEQ ID NO: 1019
  Description of Artificial Sequence: Synthetic walnut; 5' sequence and inner sequence

SEQ ID NO: 29024 - DNA, 53 bp, Artificial Sequence; identical to SEQ ID NO: 1048
  Description of Artificial Sequence: Synthetic walnut; 5' sequence and inner sequence

SEQ ID NO: 29025 - DNA, 53 bp, Artificial Sequence; identical to SEQ ID NO: 1017
  Description of Artificial Sequence: Synthetic walnut; 5' sequence and inner sequence

SEQ ID NO: 29026 - DNA, 53 bp, Artificial Sequence; identical to SEQ ID NO: 1055
  Description of Artificial Sequence: Synthetic walnut; 5' sequence and inner sequence

SEQ ID NO: 29027 - DNA, 53 bp, Artificial Sequence; identical to SEQ ID NO: 1024
  Description of Artificial Sequence: Synthetic walnut; 5' sequence and inner sequence

SEQ ID NO: 29028 - DNA, 53 bp, Artificial Sequence; identical to SEQ ID NO: 1201
  Description of Artificial Sequence: Synthetic walnut; 5' sequence and inner sequence

SEQ ID NO: 29029 - DNA, 53 bp, Artificial Sequence; identical to SEQ ID NO: 1023
  Description of Artificial Sequence: Synthetic walnut; 5' sequence and inner sequence

SEQ ID NO: 29030 - DNA, 53 bp, Artificial Sequence; identical to SEQ ID NO: 1034
  Description of Artificial Sequence: Synthetic walnut; 5' sequence and inner sequence

SEQ ID NO: 29031 - DNA, 53 bp, Artificial Sequence; identical to SEQ ID NO: 1128
  Description of Artificial Sequence: Synthetic walnut; 5' sequence and inner sequence

SEQ ID NO: 29032 - DNA, 53 bp, Artificial Sequence; identical to SEQ ID NO: 1015
  Description of Artificial Sequence: Synthetic walnut; 5' sequence and inner sequence

SEQ ID NO: 29033 - DNA, 53 bp, Artificial Sequence; identical to SEQ ID NO: 1073
  Description of Artificial Sequence: Synthetic walnut; 5' sequence and inner sequence

SEQ ID NO: 29034 - DNA, 53 bp, Artificial Sequence; identical to SEQ ID NO: 1081
  Description of Artificial Sequence: Synthetic walnut; 5' sequence and inner sequence

SEQ ID NO: 29035 - DNA, 53 bp, Artificial Sequence; identical to SEQ ID NO: 1011
  Description of Artificial Sequence: Synthetic walnut; 5' sequence and inner sequence

SEQ ID NO: 29036 - DNA, 53 bp, Artificial Sequence; identical to SEQ ID NO: 1094
  Description of Artificial Sequence: Synthetic walnut; 5' sequence and inner sequence

SEQ ID NO: 29037 - DNA, 53 bp, Artificial Sequence; identical to SEQ ID NO: 1040
  Description of Artificial Sequence: Synthetic walnut; 5' sequence and inner sequence

SEQ ID NO: 29038 - DNA, 53 bp, Artificial Sequence; identical to SEQ ID NO: 1078
  Description of Artificial Sequence: Synthetic walnut; 5' sequence and inner sequence

SEQ ID NO: 29039 - DNA, 53 bp, Artificial Sequence; identical to SEQ ID NO: 1279
  Description of Artificial Sequence: Synthetic walnut; 5' sequence and inner sequence

SEQ ID NO: 29040 - DNA, 53 bp, Artificial Sequence; identical to SEQ ID NO: 1028
  Description of Artificial Sequence: Synthetic walnut; 5' sequence and inner sequence

SEQ ID NO: 29041 - DNA, 53 bp, Artificial Sequence; identical to SEQ ID NO: 17266
  Description of Artificial Sequence: Synthetic walnut; 5' sequence and inner sequence

SEQ ID NO: 29042 - DNA, 53 bp, Artificial Sequence; identical to SEQ ID NO: 1074
  Description of Artificial Sequence: Synthetic walnut; 5' sequence and inner sequence

SEQ ID NO: 29043 - DNA, 53 bp, Artificial Sequence; identical to SEQ ID NO: 1013
  Description of Artificial Sequence: Synthetic walnut; 5' sequence and inner sequence

SEQ ID NO: 29044 - DNA, 53 bp, Artificial Sequence; identical to SEQ ID NO: 1220
  Description of Artificial Sequence: Synthetic walnut; 5' sequence and inner sequence

SEQ ID NO: 29045 - DNA, 53 bp, Artificial Sequence; identical to SEQ ID NO: 1122
  Description of Artificial Sequence: Synthetic walnut; 5' sequence and inner sequence

SEQ ID NO: 29046 - DNA, 53 bp, Artificial Sequence; identical to SEQ ID NO: 1139
  Description of Artificial Sequence: Synthetic walnut; 5' sequence and inner sequence

SEQ ID NO: 29047 - DNA, 53 bp, Artificial Sequence; identical to SEQ ID NO: 1526
  Description of Artificial Sequence: Synthetic walnut; 5' sequence and inner sequence

SEQ ID NO: 29048 - DNA, 51 bp, Artificial Sequence; identical to SEQ ID NO: 1241
  Description of Artificial Sequence: Synthetic walnut; 5' sequence and inner sequence

SEQ ID NO: 29049 - DNA, 53 bp, Artificial Sequence; identical to SEQ ID NO: 1046
  Description of Artificial Sequence: Synthetic walnut; 5' sequence and inner sequence

SEQ ID NO: 29050 - DNA, 53 bp, Artificial Sequence; identical to SEQ ID NO: 1045
  Description of Artificial Sequence: Synthetic walnut; 5' sequence and inner sequence

SEQ ID NO: 29051 - DNA, 53 bp, Artificial Sequence; identical to SEQ ID NO: 1281
  Description of Artificial Sequence: Synthetic walnut; 5' sequence and inner sequence

SEQ ID NO: 29052 - DNA, 53 bp, Artificial Sequence; identical to SEQ ID NO: 1037
  Description of Artificial Sequence: Synthetic walnut; 5' sequence and inner sequence

SEQ ID NO: 29053 - DNA, 53 bp, Artificial Sequence; identical to SEQ ID NO: 1506
  Description of Artificial Sequence: Synthetic walnut; 5' sequence and inner sequence

SEQ ID NO: 29054 - DNA, 53 bp, Artificial Sequence; identical to SEQ ID NO: 1054
  Description of Artificial Sequence: Synthetic walnut; 5' sequence and inner sequence

SEQ ID NO: 29055 - DNA, 53 bp, Artificial Sequence; identical to SEQ ID NO: 1032
  Description of Artificial Sequence: Synthetic walnut; 5' sequence and inner sequence

SEQ ID NO: 29056 - DNA, 53 bp, Artificial Sequence; identical to SEQ ID NO: 1041
  Description of Artificial Sequence: Synthetic walnut; 5' sequence and inner sequence

SEQ ID NO: 29057 - DNA, 53 bp, Artificial Sequence; identical to SEQ ID NO: 1036
  Description of Artificial Sequence: Synthetic walnut; 5' sequence and inner sequence

SEQ ID NO: 29058 - DNA, 53 bp, Artificial Sequence; identical to SEQ ID NO: 17640
  Description of Artificial Sequence: Synthetic walnut; 5' sequence and inner sequence

SEQ ID NO: 29059 - DNA, 53 bp, Artificial Sequence; identical to SEQ ID NO: 1273
  Description of Artificial Sequence: Synthetic walnut; 5' sequence and inner sequence

SEQ ID NO: 29060 - DNA, 52 bp, Artificial Sequence; identical to SEQ ID NO: 1070
  Description of Artificial Sequence: Synthetic walnut; 5' sequence and inner sequence

SEQ ID NO: 29061 - DNA, 53 bp, Artificial Sequence; identical to SEQ ID NO: 1138
  Description of Artificial Sequence: Synthetic walnut; 5' sequence and inner sequence

SEQ ID NO: 29062 - DNA, 53 bp, Artificial Sequence; identical to SEQ ID NO: 1323
  Description of Artificial Sequence: Synthetic walnut; 5' sequence and inner sequence

SEQ ID NO: 29063 - DNA, 53 bp, Artificial Sequence; identical to SEQ ID NO: 1018
  Description of Artificial Sequence: Synthetic walnut; 5' sequence and inner sequence

SEQ ID NO: 29064 - DNA, 53 bp, Artificial Sequence; identical to SEQ ID NO: 1632
  Description of Artificial Sequence: Synthetic walnut; 5' sequence and inner sequence

SEQ ID NO: 29065 - DNA, 53 bp, Artificial Sequence; identical to SEQ ID NO: 1106
  Description of Artificial Sequence: Synthetic walnut; 5' sequence and inner sequence

SEQ ID NO: 29066 - DNA, 53 bp, Artificial Sequence; identical to SEQ ID NO: 1093
  Description of Artificial Sequence: Synthetic walnut; 5' sequence and inner sequence

SEQ ID NO: 29067 - DNA, 53 bp, Artificial Sequence; identical to SEQ ID NO: 1082
  Description of Artificial Sequence: Synthetic walnut; 5' sequence and inner sequence

SEQ ID NO: 29068 - DNA, 53 bp, Artificial Sequence; identical to SEQ ID NO: 1270
  Description of Artificial Sequence: Synthetic walnut; 5' sequence and inner sequence

SEQ ID NO: 29069 - DNA, 53 bp, Artificial Sequence; identical to SEQ ID NO: 17211
  Description of Artificial Sequence: Synthetic walnut; 5' sequence and inner sequence

SEQ ID NO: 29070 - DNA, 53 bp, Artificial Sequence; identical to SEQ ID NO: 1144
  Description of Artificial Sequence: Synthetic walnut; 5' sequence and inner sequence

SEQ ID NO: 29071 - DNA, 53 bp, Artificial Sequence; identical to SEQ ID NO: 1071
  Description of Artificial Sequence: Synthetic walnut; 5' sequence and inner sequence

SEQ ID NO: 29072 - DNA, 48 bp, Artificial Sequence; identical to SEQ ID NO: 17927
  Description of Artificial Sequence: Synthetic walnut; 5' sequence and inner sequence

SEQ ID NO: 29073 - DNA, 53 bp, Artificial Sequence; identical to SEQ ID NO: 1194
  Description of Artificial Sequence: Synthetic walnut; 5' sequence and inner sequence

SEQ ID NO: 29074 - DNA, 53 bp, Artificial Sequence; identical to SEQ ID NO: 1121
  Description of Artificial Sequence: Synthetic walnut; 5' sequence and inner sequence

SEQ ID NO: 29075 - DNA, 53 bp, Artificial Sequence; identical to SEQ ID NO: 1265
  Description of Artificial Sequence: Synthetic walnut; 5' sequence and inner sequence

SEQ ID NO: 29076 - DNA, 53 bp, Artificial Sequence; identical to SEQ ID NO: 1035
  Description of Artificial Sequence: Synthetic walnut; 5' sequence and inner sequence

SEQ ID NO: 29077 - DNA, 53 bp, Artificial Sequence; identical to SEQ ID NO: 1381
  Description of Artificial Sequence: Synthetic walnut; 5' sequence and inner sequence

SEQ ID NO: 29078 - DNA, 53 bp, Artificial Sequence; identical to SEQ ID NO: 21495
  Description of Artificial Sequence: Synthetic walnut; 5' sequence and inner sequence

SEQ ID NO: 29079 - DNA, 54 bp, Artificial Sequence; identical to SEQ ID NO: 1250
  Description of Artificial Sequence: Synthetic walnut; 5' sequence and inner sequence

SEQ ID NO: 29080 - DNA, 53 bp, Artificial Sequence; identical to SEQ ID NO: 1022
  Description of Artificial Sequence: Synthetic walnut; 5' sequence and inner sequence

SEQ ID NO: 29081 - DNA, 54 bp, Artificial Sequence; identical to SEQ ID NO: 1150
  Description of Artificial Sequence: Synthetic walnut; 5' sequence and inner sequence

SEQ ID NO: 29082 - DNA, 53 bp, Artificial Sequence; identical to SEQ ID NO: 1147
  Description of Artificial Sequence: Synthetic walnut; 5' sequence and inner sequence

SEQ ID NO: 29083 - DNA, 53 bp, Artificial Sequence; identical to SEQ ID NO: 1177
  Description of Artificial Sequence: Synthetic walnut; 5' sequence and inner sequence

SEQ ID NO: 29084 - DNA, 53 bp, Artificial Sequence; identical to SEQ ID NO: 1190
  Description of Artificial Sequence: Synthetic walnut; 5' sequence and inner sequence

SEQ ID NO: 29085 - DNA, 53 bp, Artificial Sequence; identical to SEQ ID NO: 1166
  Description of Artificial Sequence: Synthetic walnut; 5' sequence and inner sequence

SEQ ID NO: 29086 - DNA, 53 bp, Artificial Sequence; identical to SEQ ID NO: 1310
  Description of Artificial Sequence: Synthetic walnut; 5' sequence and inner sequence

SEQ ID NO: 29087 - DNA, 53 bp, Artificial Sequence; identical to SEQ ID NO: 1042
  Description of Artificial Sequence: Synthetic walnut; 5' sequence and inner sequence

SEQ ID NO: 29088 - DNA, 53 bp, Artificial Sequence; identical to SEQ ID NO: 1461
  Description of Artificial Sequence: Synthetic walnut; 5' sequence and inner sequence

SEQ ID NO: 29089 - DNA, 53 bp, Artificial Sequence; identical to SEQ ID NO: 1080
  Description of Artificial Sequence: Synthetic walnut; 5' sequence and inner sequence

SEQ ID NO: 29090 - DNA, 53 bp, Artificial Sequence; identical to SEQ ID NO: 1257
  Description of Artificial Sequence: Synthetic walnut; 5' sequence and inner sequence

SEQ ID NO: 29091 - DNA, 53 bp, Artificial Sequence; identical to SEQ ID NO: 1151
  Description of Artificial Sequence: Synthetic walnut; 5' sequence and inner sequence

SEQ ID NO: 29092 - DNA, 49 bp, Artificial Sequence; identical to SEQ ID NO: 1893
  Description of Artificial Sequence: Synthetic walnut; 5' sequence and inner sequence

SEQ ID NO: 29093 - DNA, 53 bp, Artificial Sequence; identical to SEQ ID NO: 1085
  Description of Artificial Sequence: Synthetic walnut; 5' sequence and inner sequence

SEQ ID NO: 29094 - DNA, 53 bp, Artificial Sequence; identical to SEQ ID NO: 1096
  Description of Artificial Sequence: Synthetic walnut; 5' sequence and inner sequence

SEQ ID NO: 29095 - DNA, 53 bp, Artificial Sequence; identical to SEQ ID NO: 1263
  Description of Artificial Sequence: Synthetic walnut; 5' sequence and inner sequence

SEQ ID NO: 29096 - DNA, 53 bp, Artificial Sequence; identical to SEQ ID NO: 1517
  Description of Artificial Sequence: Synthetic walnut; 5' sequence and inner sequence

SEQ ID NO: 29097 - DNA, 53 bp, Artificial Sequence; identical to SEQ ID NO: 5889
  Description of Artificial Sequence: Synthetic walnut; 5' sequence and inner sequence

SEQ ID NO: 29098 - DNA, 53 bp, Artificial Sequence; identical to SEQ ID NO: 1108
  Description of Artificial Sequence: Synthetic walnut; 5' sequence and inner sequence

SEQ ID NO: 29099 - DNA, 53 bp, Artificial Sequence; identical to SEQ ID NO: 1458
  Description of Artificial Sequence: Synthetic walnut; 5' sequence and inner sequence

SEQ ID NO: 29100 - DNA, 54 bp, Artificial Sequence; identical to SEQ ID NO: 1971
  Description of Artificial Sequence: Synthetic walnut; 5' sequence and inner sequence

SEQ ID NO: 29101 - DNA, 53 bp, Artificial Sequence; identical to SEQ ID NO: 1174
  Description of Artificial Sequence: Synthetic walnut; 5' sequence and inner sequence

SEQ ID NO: 29102 - DNA, 53 bp, Artificial Sequence; identical to SEQ ID NO: 1231
  Description of Artificial Sequence: Synthetic walnut; 5' sequence and inner sequence

SEQ ID NO: 29103 - DNA, 53 bp, Artificial Sequence; identical to SEQ ID NO: 1328
  Description of Artificial Sequence: Synthetic walnut; 5' sequence and inner sequence

SEQ ID NO: 29104 - DNA, 53 bp, Artificial Sequence; identical to SEQ ID NO: 1236
  Description of Artificial Sequence: Synthetic walnut; 5' sequence and inner sequence

SEQ ID NO: 29105 - DNA, 53 bp, Artificial Sequence; identical to SEQ ID NO: 1079
  Description of Artificial Sequence: Synthetic walnut; 5' sequence and inner sequence

SEQ ID NO: 29106 - DNA, 53 bp, Artificial Sequence; identical to SEQ ID NO: 1059
  Description of Artificial Sequence: Synthetic walnut; 5' sequence and inner sequence

SEQ ID NO: 29107 - DNA, 53 bp, Artificial Sequence; identical to SEQ ID NO: 1582
  Description of Artificial Sequence: Synthetic walnut; 5' sequence and inner sequence

SEQ ID NO: 29108 - DNA, 53 bp, Artificial Sequence
  Description of Artificial Sequence: Synthetic walnut; 5' sequence and inner sequence
tagggaagagaaggacatatgatgcgtgcagcacggtacacgatgccgtcacg

SEQ ID NO: 29109 - DNA, 53 bp, Artificial Sequence; identical to SEQ ID NO: 21151
  Description of Artificial Sequence: Synthetic walnut; 5' sequence and inner sequence

SEQ ID NO: 29110 - DNA, 53 bp, Artificial Sequence; identical to SEQ ID NO: 1053
  Description of Artificial Sequence: Synthetic walnut; 5' sequence and inner sequence

SEQ ID NO: 29111 - DNA, 53 bp, Artificial Sequence; identical to SEQ ID NO: 1232
  Description of Artificial Sequence: Synthetic walnut; 5' sequence and inner sequence

SEQ ID NO: 29112 - DNA, 53 bp, Artificial Sequence; identical to SEQ ID NO: 1441
  Description of Artificial Sequence: Synthetic walnut; 5' sequence and inner sequence

SEQ ID NO: 29113 - DNA, 53 bp, Artificial Sequence; identical to SEQ ID NO: 17861
  Description of Artificial Sequence: Synthetic walnut; 5' sequence and inner sequence

SEQ ID NO: 29114 - DNA, 53 bp, Artificial Sequence
  Description of Artificial Sequence: Synthetic walnut; 5' sequence and inner sequence
tagggaagagaaggacatatgatcgtgacgcacgtggcaacgaggcatgcgca

SEQ ID NO: 29115 - DNA, 53 bp, Artificial Sequence; identical to SEQ ID NO: 1256
  Description of Artificial Sequence: Synthetic walnut; 5' sequence and inner sequence

SEQ ID NO: 29116 - DNA, 53 bp, Artificial Sequence; identical to SEQ ID NO: 1109
  Description of Artificial Sequence: Synthetic walnut; 5' sequence and inner sequence

SEQ ID NO: 29117 - DNA, 53 bp, Artificial Sequence; identical to SEQ ID NO: 1191
  Description of Artificial Sequence: Synthetic walnut; 5' sequence and inner sequence

SEQ ID NO: 29118 - DNA, 53 bp, Artificial Sequence; identical to SEQ ID NO: 1274
  Description of Artificial Sequence: Synthetic walnut; 5' sequence and inner sequence

SEQ ID NO: 29119 - DNA, 53 bp, Artificial Sequence; identical to SEQ ID NO: 1114
  Description of Artificial Sequence: Synthetic walnut; 5' sequence and inner sequence

SEQ ID NO: 29120 - DNA, 53 bp, Artificial Sequence; identical to SEQ ID NO: 1603
  Description of Artificial Sequence: Synthetic walnut; 5' sequence and inner sequence

SEQ ID NO: 29121 - DNA, 53 bp, Artificial Sequence; identical to SEQ ID NO: 1599
  Description of Artificial Sequence: Synthetic walnut; 5' sequence and inner sequence

SEQ ID NO: 29122 - DNA, 53 bp, Artificial Sequence; identical to SEQ ID NO: 1230
  Description of Artificial Sequence: Synthetic walnut; 5' sequence and inner sequence

SEQ ID NO: 29123 - DNA, 53 bp, Artificial Sequence; identical to SEQ ID NO: 1145
  Description of Artificial Sequence: Synthetic walnut; 5' sequence and inner sequence

SEQ ID NO: 29124 - DNA, 53 bp, Artificial Sequence; identical to SEQ ID NO: 21917
  Description of Artificial Sequence: Synthetic walnut; 5' sequence and inner sequence

SEQ ID NO: 29125 - DNA, 53 bp, Artificial Sequence; identical to SEQ ID NO: 1184
  Description of Artificial Sequence: Synthetic walnut; 5' sequence and inner sequence

SEQ ID NO: 29126 - DNA, 53 bp, Artificial Sequence; identical to SEQ ID NO: 21302
  Description of Artificial Sequence: Synthetic walnut; 5' sequence and inner sequence

SEQ ID NO: 29127 - DNA, 53 bp, Artificial Sequence; identical to SEQ ID NO: 1137
  Description of Artificial Sequence: Synthetic walnut; 5' sequence and inner sequence

SEQ ID NO: 29128 - DNA, 53 bp, Artificial Sequence; identical to SEQ ID NO: 21105
  Description of Artificial Sequence: Synthetic walnut; 5' sequence and inner sequence

SEQ ID NO: 29129 - DNA, 53 bp, Artificial Sequence; identical to SEQ ID NO: 1136
  Description of Artificial Sequence: Synthetic walnut; 5' sequence and inner sequence

SEQ ID NO: 29130 - DNA, 53 bp, Artificial Sequence; identical to SEQ ID NO: 1092
  Description of Artificial Sequence: Synthetic walnut; 5' sequence and inner sequence

SEQ ID NO: 29131 - DNA, 53 bp, Artificial Sequence; identical to SEQ ID NO: 1823
  Description of Artificial Sequence: Synthetic walnut; 5' sequence and inner sequence

SEQ ID NO: 29132 - DNA, 53 bp, Artificial Sequence; identical to SEQ ID NO: 1828
  Description of Artificial Sequence: Synthetic walnut; 5' sequence and inner sequence

SEQ ID NO: 29133 - DNA, 53 bp, Artificial Sequence; identical to SEQ ID NO: 1246
  Description of Artificial Sequence: Synthetic walnut; 5' sequence and inner sequence

SEQ ID NO: 29134 - DNA, 53 bp, Artificial Sequence; identical to SEQ ID NO: 1161
  Description of Artificial Sequence: Synthetic walnut; 5' sequence and inner sequence

SEQ ID NO: 29135 - DNA, 53 bp, Artificial Sequence; identical to SEQ ID NO: 1119
  Description of Artificial Sequence: Synthetic walnut; 5' sequence and inner sequence

SEQ ID NO: 29136 - DNA, 54 bp, Artificial Sequence; identical to SEQ ID NO: 1216
  Description of Artificial Sequence: Synthetic walnut; 5' sequence and inner sequence

SEQ ID NO: 29137 - DNA, 53 bp, Artificial Sequence; identical to SEQ ID NO: 1249
  Description of Artificial Sequence: Synthetic walnut; 5' sequence and inner sequence

SEQ ID NO: 29138 - DNA, 53 bp, Artificial Sequence; identical to SEQ ID NO: 1414
  Description of Artificial Sequence: Synthetic walnut; 5' sequence and inner sequence

SEQ ID NO: 29139 - DNA, 53 bp, Artificial Sequence; identical to SEQ ID NO: 1740
  Description of Artificial Sequence: Synthetic walnut; 5' sequence and inner sequence

SEQ ID NO: 29140 - DNA, 53 bp, Artificial Sequence; identical to SEQ ID NO: 1133
  Description of Artificial Sequence: Synthetic walnut; 5' sequence and inner sequence

SEQ ID NO: 29141 - DNA, 53 bp, Artificial Sequence; identical to SEQ ID NO: 1277
  Description of Artificial Sequence: Synthetic walnut; 5' sequence and inner sequence

SEQ ID NO: 29142 - DNA, 53 bp, Artificial Sequence; identical to SEQ ID NO: 1827
  Description of Artificial Sequence: Synthetic walnut; 5' sequence and inner sequence

SEQ ID NO: 29143 - DNA, 53 bp, Artificial Sequence; identical to SEQ ID NO: 1275
  Description of Artificial Sequence: Synthetic walnut; 5' sequence and inner sequence

SEQ ID NO: 29144 - DNA, 53 bp, Artificial Sequence; identical to SEQ ID NO: 1359
  Description of Artificial Sequence: Synthetic walnut; 5' sequence and inner sequence

SEQ ID NO: 29145 - DNA, 53 bp, Artificial Sequence; identical to SEQ ID NO: 1317
  Description of Artificial Sequence: Synthetic walnut; 5' sequence and inner sequence

SEQ ID NO: 29146 - DNA, 53 bp, Artificial Sequence; identical to SEQ ID NO: 1207
  Description of Artificial Sequence: Synthetic walnut; 5' sequence and inner sequence

SEQ ID NO: 29147 - DNA, 53 bp, Artificial Sequence
  Description of Artificial Sequence: Synthetic walnut; 5' sequence and inner sequence
tagggaagagaaggacatatgatgcgcaacggtacgcacaccttcacgtcacg

SEQ ID NO: 29148 - DNA, 53 bp, Artificial Sequence; identical to SEQ ID NO: 1227
  Description of Artificial Sequence: Synthetic walnut; 5' sequence and inner sequence

SEQ ID NO: 29149 - DNA, 53 bp, Artificial Sequence; identical to SEQ ID NO: 1370
  Description of Artificial Sequence: Synthetic walnut; 5' sequence and inner sequence

SEQ ID NO: 29150 - DNA, 53 bp, Artificial Sequence; identical to SEQ ID NO: 1267
  Description of Artificial Sequence: Synthetic walnut; 5' sequence and inner sequence

SEQ ID NO: 29151 - DNA, 53 bp, Artificial Sequence; identical to SEQ ID NO: 1240
  Description of Artificial Sequence: Synthetic walnut; 5' sequence and inner sequence

SEQ ID NO: 29152 - DNA, 53 bp, Artificial Sequence; identical to SEQ ID NO: 13997
  Description of Artificial Sequence: Synthetic walnut; 5' sequence and inner sequence

SEQ ID NO: 29153 - DNA, 53 bp, Artificial Sequence; identical to SEQ ID NO: 21518
  Description of Artificial Sequence: Synthetic walnut; 5' sequence and inner sequence

SEQ ID NO: 29154 - DNA, 53 bp, Artificial Sequence; identical to SEQ ID NO: 1031
  Description of Artificial Sequence: Synthetic walnut; 5' sequence and inner sequence

SEQ ID NO: 29155 - DNA, 53 bp, Artificial Sequence; identical to SEQ ID NO: 1367
  Description of Artificial Sequence: Synthetic walnut; 5' sequence and inner sequence

SEQ ID NO: 29156 - DNA, 53 bp, Artificial Sequence; identical to SEQ ID NO: 1509
  Description of Artificial Sequence: Synthetic walnut; 5' sequence and inner sequence

SEQ ID NO: 29157 - DNA, 53 bp, Artificial Sequence; identical to SEQ ID NO: 1746
  Description of Artificial Sequence: Synthetic walnut; 5' sequence and inner sequence

SEQ ID NO: 29158 - DNA, 53 bp, Artificial Sequence
  Description of Artificial Sequence: Synthetic walnut; 5' sequence and inner sequence
tagggaagagaaggacatatgatgcatcgcacggtgacggtacgtgatgcgca

SEQ ID NO: 29159 - DNA, 53 bp, Artificial Sequence; identical to SEQ ID NO: 1076
  Description of Artificial Sequence: Synthetic walnut; 5' sequence and inner sequence

SEQ ID NO: 29160 - DNA, 53 bp, Artificial Sequence; identical to SEQ ID NO: 1343
  Description of Artificial Sequence: Synthetic walnut; 5' sequence and inner sequence

SEQ ID NO: 29161 - DNA, 53 bp, Artificial Sequence; identical to SEQ ID NO: 1262
  Description of Artificial Sequence: Synthetic walnut; 5' sequence and inner sequence

SEQ ID NO: 29162 - DNA, 53 bp, Artificial Sequence; identical to SEQ ID NO: 1420
  Description of Artificial Sequence: Synthetic walnut; 5' sequence and inner sequence

SEQ ID NO: 29163 - DNA, 53 bp, Artificial Sequence
  Description of Artificial Sequence: Synthetic walnut; 5' sequence and inner sequence
tagggaagagaaggacatatgatcgcaccgtcacggcacaaggcacgtacgca

SEQ ID NO: 29164 - DNA, 53 bp, Artificial Sequence; identical to SEQ ID NO: 1141
  Description of Artificial Sequence: Synthetic walnut; 5' sequence and inner sequence

SEQ ID NO: 29165 - DNA, 53 bp, Artificial Sequence; identical to SEQ ID NO: 1242
  Description of Artificial Sequence: Synthetic walnut; 5' sequence and inner sequence

SEQ ID NO: 29166 - DNA, 53 bp, Artificial Sequence; identical to SEQ ID NO: 1985
  Description of Artificial Sequence: Synthetic walnut; 5' sequence and inner sequence

SEQ ID NO: 29167 - DNA, 53 bp, Artificial Sequence; identical to SEQ ID NO: 1308
  Description of Artificial Sequence: Synthetic walnut; 5' sequence and inner sequence

SEQ ID NO: 29168 - DNA, 53 bp, Artificial Sequence; identical to SEQ ID NO: 1463
  Description of Artificial Sequence: Synthetic walnut; 5' sequence and inner sequence

SEQ ID NO: 29169 - DNA, 48 bp, Artificial Sequence; identical to SEQ ID NO: 21136
  Description of Artificial Sequence: Synthetic walnut; 5' sequence and inner sequence

SEQ ID NO: 29170 - DNA, 53 bp, Artificial Sequence; identical to SEQ ID NO: 1377
  Description of Artificial Sequence: Synthetic walnut; 5' sequence and inner sequence

SEQ ID NO: 29171 - DNA, 53 bp, Artificial Sequence; identical to SEQ ID NO: 1043
  Description of Artificial Sequence: Synthetic walnut; 5' sequence and inner sequence

SEQ ID NO: 29172 - DNA, 53 bp, Artificial Sequence; identical to SEQ ID NO: 1123
  Description of Artificial Sequence: Synthetic walnut; 5' sequence and inner sequence

SEQ ID NO: 29173 - DNA, 53 bp, Artificial Sequence
  Description of Artificial Sequence: Synthetic walnut; 5' sequence and inner sequence
tagggaagagaaggacatatgatcgcaccgacgcagtgacggcacgtgacgca

SEQ ID NO: 29174 - DNA, 53 bp, Artificial Sequence; identical to SEQ ID NO: 1163
  Description of Artificial Sequence: Synthetic walnut; 5' sequence and inner sequence

SEQ ID NO: 29175 - DNA, 53 bp, Artificial Sequence; identical to SEQ ID NO: 21473
  Description of Artificial Sequence: Synthetic walnut; 5' sequence and inner sequence

SEQ ID NO: 29176 - DNA, 53 bp, Artificial Sequence; identical to SEQ ID NO: 5336
  Description of Artificial Sequence: Synthetic walnut; 5' sequence and inner sequence

SEQ ID NO: 29177 - DNA, 53 bp, Artificial Sequence; identical to SEQ ID NO: 1077
  Description of Artificial Sequence: Synthetic walnut; 5' sequence and inner sequence

SEQ ID NO: 29178 - DNA, 53 bp, Artificial Sequence; identical to SEQ ID NO: 1050
  Description of Artificial Sequence: Synthetic walnut; 5' sequence and inner sequence

SEQ ID NO: 29179 - DNA, 53 bp, Artificial Sequence; identical to SEQ ID NO: 1100
  Description of Artificial Sequence: Synthetic walnut; 5' sequence and inner sequence

SEQ ID NO: 29180 - DNA, 53 bp, Artificial Sequence; identical to SEQ ID NO: 1243
  Description of Artificial Sequence: Synthetic walnut; 5' sequence and inner sequence

SEQ ID NO: 29181 - DNA, 53 bp, Artificial Sequence; identical to SEQ ID NO: 1321
  Description of Artificial Sequence: Synthetic walnut; 5' sequence and inner sequence

SEQ ID NO: 29182 - DNA, 53 bp, Artificial Sequence; identical to SEQ ID NO: 1351
  Description of Artificial Sequence: Synthetic walnut; 5' sequence and inner sequence

SEQ ID NO: 29183 - DNA, 52 bp, Artificial Sequence; identical to SEQ ID NO: 1251
  Description of Artificial Sequence: Synthetic walnut; 5' sequence and inner sequence

SEQ ID NO: 29184 - DNA, 51 bp, Artificial Sequence; identical to SEQ ID NO: 1423
  Description of Artificial Sequence: Synthetic walnut; 5' sequence and inner sequence

SEQ ID NO: 29185 - DNA, 53 bp, Artificial Sequence; identical to SEQ ID NO: 1217
  Description of Artificial Sequence: Synthetic walnut; 5' sequence and inner sequence

SEQ ID NO: 29186 - DNA, 53 bp, Artificial Sequence; identical to SEQ ID NO: 5627
  Description of Artificial Sequence: Synthetic walnut; 5' sequence and inner sequence

SEQ ID NO: 29187 - DNA, 53 bp, Artificial Sequence; identical to SEQ ID NO: 1477
  Description of Artificial Sequence: Synthetic walnut; 5' sequence and inner sequence

SEQ ID NO: 29188 - DNA, 53 bp, Artificial Sequence; identical to SEQ ID NO: 1113
  Description of Artificial Sequence: Synthetic walnut; 5' sequence and inner sequence

SEQ ID NO: 29189 - DNA, 53 bp, Artificial Sequence; identical to SEQ ID NO: 1172
  Description of Artificial Sequence: Synthetic walnut; 5' sequence and inner sequence

SEQ ID NO: 29190 - DNA, 53 bp, Artificial Sequence; identical to SEQ ID NO: 1175
  Description of Artificial Sequence: Synthetic walnut; 5' sequence and inner sequence

SEQ ID NO: 29191 - DNA, 53 bp, Artificial Sequence; identical to SEQ ID NO: 21372
  Description of Artificial Sequence: Synthetic walnut; 5' sequence and inner sequence

SEQ ID NO: 29192 - DNA, 53 bp, Artificial Sequence; identical to SEQ ID NO: 1286
  Description of Artificial Sequence: Synthetic walnut; 5' sequence and inner sequence

SEQ ID NO: 29193 - DNA, 53 bp, Artificial Sequence; identical to SEQ ID NO: 1110
  Description of Artificial Sequence: Synthetic walnut; 5' sequence and inner sequence

SEQ ID NO: 29194 - DNA, 54 bp, Artificial Sequence; identical to SEQ ID NO: 1489
  Description of Artificial Sequence: Synthetic walnut; 5' sequence and inner sequence

SEQ ID NO: 29195 - DNA, 53 bp, Artificial Sequence
  Description of Artificial Sequence: Synthetic walnut; 5' sequence and inner sequence
tagggaagagaaggacatatgatgcgtgcaacggtacgatgacgtgacgcaca

SEQ ID NO: 29196 - DNA, 53 bp, Artificial Sequence; identical to SEQ ID NO: 13803
  Description of Artificial Sequence: Synthetic walnut; 5' sequence and inner sequence

SEQ ID NO: 29197 - DNA, 53 bp, Artificial Sequence; identical to SEQ ID NO: 1051
  Description of Artificial Sequence: Synthetic walnut; 5' sequence and inner sequence

SEQ ID NO: 29198 - DNA, 53 bp, Artificial Sequence; identical to SEQ ID NO: 1750
  Description of Artificial Sequence: Synthetic walnut; 5' sequence and inner sequence

SEQ ID NO: 29199 - DNA, 53 bp, Artificial Sequence
  Description of Artificial Sequence: Synthetic walnut; 5' sequence and inner sequence
tagggaagagaaggacatatgatcgacgtgatgcggtacgtacttgcgacacg

SEQ ID NO: 29200 - DNA, 53 bp, Artificial Sequence; identical to SEQ ID NO: 17688
  Description of Artificial Sequence: Synthetic walnut; 5' sequence and inner sequence

SEQ ID NO: 29201 - DNA, 53 bp, Artificial Sequence; identical to SEQ ID NO: 13939
  Description of Artificial Sequence: Synthetic walnut; 5' sequence and inner sequence

SEQ ID NO: 29202 - DNA, 53 bp, Artificial Sequence; identical to SEQ ID NO: 1548
  Description of Artificial Sequence: Synthetic walnut; 5' sequence and inner sequence

SEQ ID NO: 29203 - DNA, 53 bp, Artificial Sequence; identical to SEQ ID NO: 17399
  Description of Artificial Sequence: Synthetic walnut; 5' sequence and inner sequence

SEQ ID NO: 29204 - DNA, 53 bp, Artificial Sequence; identical to SEQ ID NO: 1349
  Description of Artificial Sequence: Synthetic walnut; 5' sequence and inner sequence

SEQ ID NO: 29205 - DNA, 51 bp, Artificial Sequence; identical to SEQ ID NO: 5786
  Description of Artificial Sequence: Synthetic walnut; 5' sequence and inner sequence

SEQ ID NO: 29206 - DNA, 53 bp, Artificial Sequence; identical to SEQ ID NO: 5659
  Description of Artificial Sequence: Synthetic walnut; 5' sequence and inner sequence

SEQ ID NO: 29207 - DNA, 53 bp, Artificial Sequence; identical to SEQ ID NO: 1247
  Description of Artificial Sequence: Synthetic walnut; 5' sequence and inner sequence

SEQ ID NO: 29208 - DNA, 53 bp, Artificial Sequence
  Description of Artificial Sequence: Synthetic walnut; 5' sequence and inner sequence
tagggaagagaaggacatatgatcatgcatcgcgtaacacgtcctgcgtcacg

SEQ ID NO: 29209 - DNA, 53 bp, Artificial Sequence; identical to SEQ ID NO: 9950
  Description of Artificial Sequence: Synthetic walnut; 5' sequence and inner sequence

SEQ ID NO: 29210 - DNA, 53 bp, Artificial Sequence; identical to SEQ ID NO: 1149
  Description of Artificial Sequence: Synthetic walnut; 5' sequence and inner sequence

SEQ ID NO: 29211 - DNA, 53 bp, Artificial Sequence; identical to SEQ ID NO: 1291
  Description of Artificial Sequence: Synthetic walnut; 5' sequence and inner sequence

SEQ ID NO: 29212 - DNA, 53 bp, Artificial Sequence; identical to SEQ ID NO: 21869
  Description of Artificial Sequence: Synthetic walnut; 5' sequence and inner sequence

SEQ ID NO: 29213 - DNA, 53 bp, Artificial Sequence; identical to SEQ ID NO: 1223
  Description of Artificial Sequence: Synthetic walnut; 5' sequence and inner sequence

SEQ ID NO: 29214 - DNA, 53 bp, Artificial Sequence; identical to SEQ ID NO: 1118
  Description of Artificial Sequence: Synthetic walnut; 5' sequence and inner sequence

SEQ ID NO: 29215 - DNA, 53 bp, Artificial Sequence; identical to SEQ ID NO: 1091
  Description of Artificial Sequence: Synthetic walnut; 5' sequence and inner sequence

SEQ ID NO: 29216 - DNA, 53 bp, Artificial Sequence; identical to SEQ ID NO: 1248
  Description of Artificial Sequence: Synthetic walnut; 5' sequence and inner sequence

SEQ ID NO: 29217 - DNA, 53 bp, Artificial Sequence; identical to SEQ ID NO: 1271
  Description of Artificial Sequence: Synthetic walnut; 5' sequence and inner sequence

SEQ ID NO: 29218 - DNA, 53 bp, Artificial Sequence; identical to SEQ ID NO: 1407
  Description of Artificial Sequence: Synthetic walnut; 5' sequence and inner sequence

SEQ ID NO: 29219 - DNA, 53 bp, Artificial Sequence; identical to SEQ ID NO: 17906
  Description of Artificial Sequence: Synthetic walnut; 5' sequence and inner sequence

SEQ ID NO: 29220 - DNA, 53 bp, Artificial Sequence; identical to SEQ ID NO: 1498
  Description of Artificial Sequence: Synthetic walnut; 5' sequence and inner sequence

SEQ ID NO: 29221 - DNA, 53 bp, Artificial Sequence
  Description of Artificial Sequence: Synthetic walnut; 5' sequence and inner sequence
tagggaagagaaggacatatgatcgatacgcagcacgacgcgatgtgtacgca

SEQ ID NO: 29222 - DNA, 53 bp, Artificial Sequence; identical to SEQ ID NO: 1340
  Description of Artificial Sequence: Synthetic walnut; 5' sequence and inner sequence

SEQ ID NO: 29223 - DNA, 53 bp, Artificial Sequence; identical to SEQ ID NO: 1313
  Description of Artificial Sequence: Synthetic walnut; 5' sequence and inner sequence

SEQ ID NO: 29224 - DNA, 53 bp, Artificial Sequence; identical to SEQ ID NO: 1576
  Description of Artificial Sequence: Synthetic walnut; 5' sequence and inner sequence

SEQ ID NO: 29225 - DNA, 53 bp, Artificial Sequence; identical to SEQ ID NO: 1406
  Description of Artificial Sequence: Synthetic walnut; 5' sequence and inner sequence

SEQ ID NO: 29226 - DNA, 53 bp, Artificial Sequence; identical to SEQ ID NO: 1454
  Description of Artificial Sequence: Synthetic walnut; 5' sequence and inner sequence

SEQ ID NO: 29227 - DNA, 53 bp, Artificial Sequence; identical to SEQ ID NO: 1491
  Description of Artificial Sequence: Synthetic walnut; 5' sequence and inner sequence

SEQ ID NO: 29228 - DNA, 53 bp, Artificial Sequence; identical to SEQ ID NO: 1457
  Description of Artificial Sequence: Synthetic walnut; 5' sequence and inner sequence

SEQ ID NO: 29229 - DNA, 53 bp, Artificial Sequence; identical to SEQ ID NO: 1104
  Description of Artificial Sequence: Synthetic walnut; 5' sequence and inner sequence

SEQ ID NO: 29230 - DNA, 53 bp, Artificial Sequence; identical to SEQ ID NO: 13996
  Description of Artificial Sequence: Synthetic walnut; 5' sequence and inner sequence

SEQ ID NO: 29231 - DNA, 53 bp, Artificial Sequence; identical to SEQ ID NO: 21533
  Description of Artificial Sequence: Synthetic walnut; 5' sequence and inner sequence

SEQ ID NO: 29232 - DNA, 53 bp, Artificial Sequence; identical to SEQ ID NO: 1314
  Description of Artificial Sequence: Synthetic walnut; 5' sequence and inner sequence

SEQ ID NO: 29233 - DNA, 53 bp, Artificial Sequence
  Description of Artificial Sequence: Synthetic walnut; 5' sequence and inner sequence
tagggaagagaaggacatatgatccgtacgacacgagcacgatgcgttacgcg

SEQ ID NO: 29234 - DNA, 53 bp, Artificial Sequence; identical to SEQ ID NO: 1219
  Description of Artificial Sequence: Synthetic walnut; 5' sequence and inner sequence

SEQ ID NO: 29235 - DNA, 53 bp, Artificial Sequence; identical to SEQ ID NO: 1283
  Description of Artificial Sequence: Synthetic walnut; 5' sequence and inner sequence

SEQ ID NO: 29236 - DNA, 53 bp, Artificial Sequence; identical to SEQ ID NO: 1611
  Description of Artificial Sequence: Synthetic walnut; 5' sequence and inner sequence

SEQ ID NO: 29237 - DNA, 52 bp, Artificial Sequence
  Description of Artificial Sequence: Synthetic walnut; 5' sequence and inner sequence
tagggaagagaaggacatatgatcacgtgcatggacgcgtcgtaccgtggca

SEQ ID NO: 29238 - DNA, 53 bp, Artificial Sequence; identical to SEQ ID NO: 1016
  Description of Artificial Sequence: Synthetic walnut; 5' sequence and inner sequence

SEQ ID NO: 29239 - DNA, 53 bp, Artificial Sequence; identical to SEQ ID NO: 1352
  Description of Artificial Sequence: Synthetic walnut; 5' sequence and inner sequence

SEQ ID NO: 29240 - DNA, 53 bp, Artificial Sequence; identical to SEQ ID NO: 1379
  Description of Artificial Sequence: Synthetic walnut; 5' sequence and inner sequence

SEQ ID NO: 29241 - DNA, 53 bp, Artificial Sequence; identical to SEQ ID NO: 21307
  Description of Artificial Sequence: Synthetic walnut; 5' sequence and inner sequence

SEQ ID NO: 29242 - DNA, 53 bp, Artificial Sequence; identical to SEQ ID NO: 1886
  Description of Artificial Sequence: Synthetic walnut; 5' sequence and inner sequence

SEQ ID NO: 29243 - DNA, 53 bp, Artificial Sequence
  Description of Artificial Sequence: Synthetic walnut; 5' sequence and inner sequence
tagggaagagaaggacatatgatcatgcacaggcagcgtgacgttacgccgtg

SEQ ID NO: 29244 - DNA, 53 bp, Artificial Sequence
  Description of Artificial Sequence: Synthetic walnut; 5' sequence and inner sequence
tagggaagagaaggacatatgatcgtgacgcaaggcaaggacctcactgcgcg

SEQ ID NO: 29245 - DNA, 53 bp, Artificial Sequence; identical to SEQ ID NO: 1332
  Description of Artificial Sequence: Synthetic walnut; 5' sequence and inner sequence

SEQ ID NO: 29246 - DNA, 53 bp, Artificial Sequence; identical to SEQ ID NO: 9807
  Description of Artificial Sequence: Synthetic walnut; 5' sequence and inner sequence

SEQ ID NO: 29247 - DNA, 53 bp, Artificial Sequence; identical to SEQ ID NO: 1049
  Description of Artificial Sequence: Synthetic walnut; 5' sequence and inner sequence

SEQ ID NO: 29248 - DNA, 53 bp, Artificial Sequence; identical to SEQ ID NO: 1488
  Description of Artificial Sequence: Synthetic walnut; 5' sequence and inner sequence

SEQ ID NO: 29249 - DNA, 53 bp, Artificial Sequence; identical to SEQ ID NO: 1167
  Description of Artificial Sequence: Synthetic walnut; 5' sequence and inner sequence

SEQ ID NO: 29250 - DNA, 53 bp, Artificial Sequence; identical to SEQ ID NO: 1156
  Description of Artificial Sequence: Synthetic walnut; 5' sequence and inner sequence

SEQ ID NO: 29251 - DNA, 54 bp, Artificial Sequence; identical to SEQ ID NO: 1845
  Description of Artificial Sequence: Synthetic walnut; 5' sequence and inner sequence

SEQ ID NO: 29252 - DNA, 53 bp, Artificial Sequence
  Description of Artificial Sequence: Synthetic walnut; 5' sequence and inner sequence
tagggaagagaaggacatatgatgcatgtgacacgcgtcgtcctgcctgcacg

SEQ ID NO: 29253 - DNA, 53 bp, Artificial Sequence; identical to SEQ ID NO: 1466
  Description of Artificial Sequence: Synthetic walnut; 5' sequence and inner sequence

SEQ ID NO: 29254 - DNA, 53 bp, Artificial Sequence; identical to SEQ ID NO: 13931
  Description of Artificial Sequence: Synthetic walnut; 5' sequence and inner sequence

SEQ ID NO: 29255 - DNA, 53 bp, Artificial Sequence; identical to SEQ ID NO: 21733
  Description of Artificial Sequence: Synthetic walnut; 5' sequence and inner sequence

SEQ ID NO: 29256 - DNA, 53 bp, Artificial Sequence; identical to SEQ ID NO: 1389
  Description of Artificial Sequence: Synthetic walnut; 5' sequence and inner sequence

SEQ ID NO: 29257 - DNA, 53 bp, Artificial Sequence
  Description of Artificial Sequence: Synthetic walnut; 5' sequence and inner sequence
tagggaagagaaggacatatgatgtgcgaccgaccctatcaggtggacgtgta

SEQ ID NO: 29258 - DNA, 53 bp, Artificial Sequence; identical to SEQ ID NO: 1449
  Description of Artificial Sequence: Synthetic walnut; 5' sequence and inner sequence

SEQ ID NO: 29259 - DNA, 53 bp, Artificial Sequence; identical to SEQ ID NO: 1303
  Description of Artificial Sequence: Synthetic walnut; 5' sequence and inner sequence

SEQ ID NO: 29260 - DNA, 53 bp, Artificial Sequence; identical to SEQ ID NO: 1125
  Description of Artificial Sequence: Synthetic walnut; 5' sequence and inner sequence

SEQ ID NO: 29261 - DNA, 53 bp, Artificial Sequence; identical to SEQ ID NO: 1289
  Description of Artificial Sequence: Synthetic walnut; 5' sequence and inner sequence

SEQ ID NO: 29262 - DNA, 53 bp, Artificial Sequence; identical to SEQ ID NO: 5234
  Description of Artificial Sequence: Synthetic walnut; 5' sequence and inner sequence

SEQ ID NO: 29263 - DNA, 53 bp, Artificial Sequence; identical to SEQ ID NO: 1098
  Description of Artificial Sequence: Synthetic walnut; 5' sequence and inner sequence

SEQ ID NO: 29264 - DNA, 52 bp, Artificial Sequence; identical to SEQ ID NO: 1453
  Description of Artificial Sequence: Synthetic walnut; 5' sequence and inner sequence

SEQ ID NO: 29265 - DNA, 53 bp, Artificial Sequence; identical to SEQ ID NO: 1561
  Description of Artificial Sequence: Synthetic walnut; 5' sequence and inner sequence

SEQ ID NO: 29266 - DNA, 53 bp, Artificial Sequence; identical to SEQ ID NO: 1115
  Description of Artificial Sequence: Synthetic walnut; 5' sequence and inner sequence

SEQ ID NO: 29267 - DNA, 53 bp, Artificial Sequence; identical to SEQ ID NO: 1443
  Description of Artificial Sequence: Synthetic walnut; 5' sequence and inner sequence

SEQ ID NO: 29268 - DNA, 53 bp, Artificial Sequence
  Description of Artificial Sequence: Synthetic walnut; 5' sequence and inner sequence
tagggaagagaaggacatatgatggcctgtcgtccctatcaggtggttgtgga

SEQ ID NO: 29269 - DNA, 53 bp, Artificial Sequence; identical to SEQ ID NO: 5429
  Description of Artificial Sequence: Synthetic walnut; 5' sequence and inner sequence

SEQ ID NO: 29270 - DNA, 54 bp, Artificial Sequence; identical to SEQ ID NO: 1258
  Description of Artificial Sequence: Synthetic walnut; 5' sequence and inner sequence

SEQ ID NO: 29271 - DNA, 53 bp, Artificial Sequence; identical to SEQ ID NO: 5802
  Description of Artificial Sequence: Synthetic walnut; 5' sequence and inner sequence

SEQ ID NO: 29272 - DNA, 53 bp, Artificial Sequence
  Description of Artificial Sequence: Synthetic walnut; 5' sequence and inner sequence
tagggaagagaaggacatatgatggccgaactggatgggggcattactgcggc

SEQ ID NO: 29273 - DNA, 53 bp, Artificial Sequence; identical to SEQ ID NO: 1142
  Description of Artificial Sequence: Synthetic walnut; 5' sequence and inner sequence

SEQ ID NO: 29274 - DNA, 53 bp, Artificial Sequence; identical to SEQ ID NO: 1452
  Description of Artificial Sequence: Synthetic walnut; 5' sequence and inner sequence

SEQ ID NO: 29275 - DNA, 53 bp, Artificial Sequence; identical to SEQ ID NO: 1238
  Description of Artificial Sequence: Synthetic walnut; 5' sequence and inner sequence

SEQ ID NO: 29276 - DNA, 53 bp, Artificial Sequence; identical to SEQ ID NO: 1595
  Description of Artificial Sequence: Synthetic walnut; 5' sequence and inner sequence

SEQ ID NO: 29277 - DNA, 53 bp, Artificial Sequence; identical to SEQ ID NO: 1187
  Description of Artificial Sequence: Synthetic walnut; 5' sequence and inner sequence

SEQ ID NO: 29278 - DNA, 53 bp, Artificial Sequence
  Description of Artificial Sequence: Synthetic walnut; 5' sequence and inner sequence
tagggaagagaaggacatatgatgcacgatgcaacgtgtgtcctcgcgtcacg

SEQ ID NO: 29279 - DNA, 53 bp, Artificial Sequence; identical to SEQ ID NO: 1884
  Description of Artificial Sequence: Synthetic walnut; 5' sequence and inner sequence

SEQ ID NO: 29280 - DNA, 53 bp, Artificial Sequence; identical to SEQ ID NO: 1631
  Description of Artificial Sequence: Synthetic walnut; 5' sequence and inner sequence

SEQ ID NO: 29281 - DNA, 53 bp, Artificial Sequence; identical to SEQ ID NO: 21324
  Description of Artificial Sequence: Synthetic walnut; 5' sequence and inner sequence

SEQ ID NO: 29282 - DNA, 53 bp, Artificial Sequence; identical to SEQ ID NO: 1715
  Description of Artificial Sequence: Synthetic walnut; 5' sequence and inner sequence

SEQ ID NO: 29283 - DNA, 53 bp, Artificial Sequence; identical to SEQ ID NO: 1853
  Description of Artificial Sequence: Synthetic walnut; 5' sequence and inner sequence

SEQ ID NO: 29284 - DNA, 53 bp, Artificial Sequence; identical to SEQ ID NO: 1129
  Description of Artificial Sequence: Synthetic walnut; 5' sequence and inner sequence

SEQ ID NO: 29285 - DNA, 53 bp, Artificial Sequence; identical to SEQ ID NO: 1086
  Description of Artificial Sequence: Synthetic walnut; 5' sequence and inner sequence

SEQ ID NO: 29286 - DNA, 53 bp, Artificial Sequence; identical to SEQ ID NO: 21507
  Description of Artificial Sequence: Synthetic walnut; 5' sequence and inner sequence

SEQ ID NO: 29287 - DNA, 53 bp, Artificial Sequence; identical to SEQ ID NO: 1634
  Description of Artificial Sequence: Synthetic walnut; 5' sequence and inner sequence

SEQ ID NO: 29288 - DNA, 53 bp, Artificial Sequence; identical to SEQ ID NO: 1320
  Description of Artificial Sequence: Synthetic walnut; 5' sequence and inner sequence

SEQ ID NO: 29289 - DNA, 53 bp, Artificial Sequence; identical to SEQ ID NO: 1464
  Description of Artificial Sequence: Synthetic walnut; 5' sequence and inner sequence

SEQ ID NO: 29290 - DNA, 52 bp, Artificial Sequence; identical to SEQ ID NO: 1648
  Description of Artificial Sequence: Synthetic walnut; 5' sequence and inner sequence

SEQ ID NO: 29291 - DNA, 53 bp, Artificial Sequence; identical to SEQ ID NO: 21133
  Description of Artificial Sequence: Synthetic walnut; 5' sequence and inner sequence

SEQ ID NO: 29292 - DNA, 53 bp, Artificial Sequence; identical to SEQ ID NO: 1326
  Description of Artificial Sequence: Synthetic walnut; 5' sequence and inner sequence

SEQ ID NO: 29293 - DNA, 53 bp, Artificial Sequence; identical to SEQ ID NO: 1057
  Description of Artificial Sequence: Synthetic walnut; 5' sequence and inner sequence

SEQ ID NO: 29294 - DNA, 53 bp, Artificial Sequence; identical to SEQ ID NO: 13985
  Description of Artificial Sequence: Synthetic walnut; 5' sequence and inner sequence

SEQ ID NO: 29295 - DNA, 53 bp, Artificial Sequence
  Description of Artificial Sequence: Synthetic walnut; 5' sequence and inner sequence
tagggaagagaaggacatatgatgcccgaacgcgcctacaagtgttgcatgga

SEQ ID NO: 29296 - DNA, 53 bp, Artificial Sequence; identical to SEQ ID NO: 1312
  Description of Artificial Sequence: Synthetic walnut; 5' sequence and inner sequence

SEQ ID NO: 29297 - DNA, 53 bp, Artificial Sequence; identical to SEQ ID NO: 5940
  Description of Artificial Sequence: Synthetic walnut; 5' sequence and inner sequence

SEQ ID NO: 29298 - DNA, 53 bp, Artificial Sequence
  Description of Artificial Sequence: Synthetic walnut; 5' sequence and inner sequence
tagggaagagaaggacatatgatggcatgcgatggatgtgggctagtatgggc

SEQ ID NO: 29299 - DNA, 54 bp, Artificial Sequence; identical to SEQ ID NO: 1659
  Description of Artificial Sequence: Synthetic walnut; 5' sequence and inner sequence

SEQ ID NO: 29300 - DNA, 53 bp, Artificial Sequence; identical to SEQ ID NO: 21540
  Description of Artificial Sequence: Synthetic walnut; 5' sequence and inner sequence

SEQ ID NO: 29301 - DNA, 51 bp, Artificial Sequence; identical to SEQ ID NO: 13885
  Description of Artificial Sequence: Synthetic walnut; 5' sequence and inner sequence

SEQ ID NO: 29302 - DNA, 53 bp, Artificial Sequence; identical to SEQ ID NO: 1687
  Description of Artificial Sequence: Synthetic walnut; 5' sequence and inner sequence

SEQ ID NO: 29303 - DNA, 53 bp, Artificial Sequence; identical to SEQ ID NO: 1891
  Description of Artificial Sequence: Synthetic walnut; 5' sequence and inner sequence

SEQ ID NO: 29304 - DNA, 53 bp, Artificial Sequence; identical to SEQ ID NO: 1260
  Description of Artificial Sequence: Synthetic walnut; 5' sequence and inner sequence

SEQ ID NO: 29305 - DNA, 53 bp, Artificial Sequence; identical to SEQ ID NO: 1200
  Description of Artificial Sequence: Synthetic walnut; 5' sequence and inner sequence

SEQ ID NO: 29306 - DNA, 53 bp, Artificial Sequence
  Description of Artificial Sequence: Synthetic walnut; 5' sequence and inner sequence
tagggaagagaaggacatatgatcgcacgcagtgacgttacgcatcgtgcaca

SEQ ID NO: 29307 - DNA, 53 bp, Artificial Sequence
  Description of Artificial Sequence: Synthetic walnut; 5' sequence and inner sequence
tagggaagagaaggacatatgatgcacgacgcacgtacgtacctcacgccacg

SEQ ID NO: 29308 - DNA, 53 bp, Artificial Sequence; identical to SEQ ID NO: 1507
  Description of Artificial Sequence: Synthetic walnut; 5' sequence and inner sequence

SEQ ID NO: 29309 - DNA, 53 bp, Artificial Sequence; identical to SEQ ID NO: 1102
  Description of Artificial Sequence: Synthetic walnut; 5' sequence and inner sequence

SEQ ID NO: 29310 - DNA, 53 bp, Artificial Sequence
  Description of Artificial Sequence: Synthetic walnut; 5' sequence and inner sequence
tagggaagagaaggacatatgatcatgcgcatgcgtacggatcgtgctgcacg

SEQ ID NO: 29311 - DNA, 53 bp, Artificial Sequence; identical to SEQ ID NO: 1806
  Description of Artificial Sequence: Synthetic walnut; 5' sequence and inner sequence

SEQ ID NO: 29312 - DNA, 53 bp, Artificial Sequence
  Description of Artificial Sequence: Synthetic walnut; 5' sequence and inner sequence
tagggaagagaaggacatatgatgcgacacagacggtacgccttgcctgcacg

SEQ ID NO: 29313 - DNA, 53 bp, Artificial Sequence; identical to SEQ ID NO: 1311
  Description of Artificial Sequence: Synthetic walnut; 5' sequence and inner sequence

SEQ ID NO: 29314 - DNA, 53 bp, Artificial Sequence; identical to SEQ ID NO: 1164
  Description of Artificial Sequence: Synthetic walnut; 5' sequence and inner sequence

SEQ ID NO: 29315 - DNA, 53 bp, Artificial Sequence
  Description of Artificial Sequence: Synthetic walnut; 5' sequence and inner sequence
tagggaagagaaggacatatgatcgatgcgcaacatgcatccgacgcgacacg

SEQ ID NO: 29316 - DNA, 53 bp, Artificial Sequence
  Description of Artificial Sequence: Synthetic walnut; 5' sequence and inner sequence
tagggaagagaaggacatatgatcgtcacgcaggacggtagcgcgtcggcacg

SEQ ID NO: 29317 - DNA, 53 bp, Artificial Sequence
  Description of Artificial Sequence: Synthetic walnut; 5' sequence and inner sequence
tagggaagagaaggacatatgatgtcacgccgcatccctatcgaggggacatg

SEQ ID NO: 29318 - DNA, 53 bp, Artificial Sequence; identical to SEQ ID NO: 1126
  Description of Artificial Sequence: Synthetic walnut; 5' sequence and inner sequence

SEQ ID NO: 29319 - DNA, 53 bp, Artificial Sequence; identical to SEQ ID NO: 1777
  Description of Artificial Sequence: Synthetic walnut; 5' sequence and inner sequence

SEQ ID NO: 29320 - DNA, 53 bp, Artificial Sequence
  Description of Artificial Sequence: Synthetic walnut; 5' sequence and inner sequence
tagggaagagaaggacatatgatcgcaccgtgatgacgctacgttacggcatg

SEQ ID NO: 29321 - DNA, 55 bp, Artificial Sequence
  Description of Artificial Sequence: Synthetic walnut; 5' sequence and inner sequence
tagggaagagaaggacatatgatggcctgcgatggatggggacgggtatgctggc

SEQ ID NO: 29322 - DNA, 53 bp, Artificial Sequence; identical to SEQ ID NO: 1512
  Description of Artificial Sequence: Synthetic walnut; 5' sequence and inner sequence

SEQ ID NO: 29323 - DNA, 53 bp, Artificial Sequence; identical to SEQ ID NO: 1892
  Description of Artificial Sequence: Synthetic walnut; 5' sequence and inner sequence

SEQ ID NO: 29324 - DNA, 53 bp, Artificial Sequence; identical to SEQ ID NO: 1560
  Description of Artificial Sequence: Synthetic walnut; 5' sequence and inner sequence

SEQ ID NO: 29325 - DNA, 52 bp, Artificial Sequence; identical to SEQ ID NO: 17665
  Description of Artificial Sequence: Synthetic walnut; 5' sequence and inner sequence

SEQ ID NO: 29326 - DNA, 53 bp, Artificial Sequence; identical to SEQ ID NO: 1225
  Description of Artificial Sequence: Synthetic walnut; 5' sequence and inner sequence

SEQ ID NO: 29327 - DNA, 53 bp, Artificial Sequence; identical to SEQ ID NO: 1369
  Description of Artificial Sequence: Synthetic walnut; 5' sequence and inner sequence

SEQ ID NO: 29328 - DNA, 53 bp, Artificial Sequence
  Description of Artificial Sequence: Synthetic walnut; 5' sequence and inner sequence
tagggaagagaaggacatatgatggacgcatcgccccttcgagtggccaggta

SEQ ID NO: 29329 - DNA, 53 bp, Artificial Sequence
  Description of Artificial Sequence: Synthetic walnut; 5' sequence and inner sequence
tagggaagagaaggacatatgatcgacacgcacagtcagcacgtccgttcgcg

SEQ ID NO: 29330 - DNA, 53 bp, Artificial Sequence; identical to SEQ ID NO: 1358
  Description of Artificial Sequence: Synthetic walnut; 5' sequence and inner sequence

SEQ ID NO: 29331 - DNA, 53 bp, Artificial Sequence; identical to SEQ ID NO: 13869
  Description of Artificial Sequence: Synthetic walnut; 5' sequence and inner sequence

SEQ ID NO: 29332 - DNA, 53 bp, Artificial Sequence; identical to SEQ ID NO: 5356
  Description of Artificial Sequence: Synthetic walnut; 5' sequence and inner sequence

SEQ ID NO: 29333 - DNA, 53 bp, Artificial Sequence; identical to SEQ ID NO: 17970
  Description of Artificial Sequence: Synthetic walnut; 5' sequence and inner sequence

SEQ ID NO: 29334 - DNA, 53 bp, Artificial Sequence; identical to SEQ ID NO: 21233
  Description of Artificial Sequence: Synthetic walnut; 5' sequence and inner sequence

SEQ ID NO: 29335 - DNA, 53 bp, Artificial Sequence
  Description of Artificial Sequence: Synthetic walnut; 5' sequence and inner sequence
tagggaagagaaggacatatgatcgcaccgtatgcgtcacgtaacacggcatg

SEQ ID NO: 29336 - DNA, 53 bp, Artificial Sequence; identical to SEQ ID NO: 1661
  Description of Artificial Sequence: Synthetic walnut; 5' sequence and inner sequence

SEQ ID NO: 29337 - DNA, 53 bp, Artificial Sequence; identical to SEQ ID NO: 21528
  Description of Artificial Sequence: Synthetic walnut; 5' sequence and inner sequence

SEQ ID NO: 29338 - DNA, 49 bp, Artificial Sequence; identical to SEQ ID NO: 21678
  Description of Artificial Sequence: Synthetic walnut; 5' sequence and inner sequence

SEQ ID NO: 29339 - DNA, 53 bp, Artificial Sequence; identical to SEQ ID NO: 1272
  Description of Artificial Sequence: Synthetic walnut; 5' sequence and inner sequence

SEQ ID NO: 29340 - DNA, 53 bp, Artificial Sequence; identical to SEQ ID NO: 1837
  Description of Artificial Sequence: Synthetic walnut; 5' sequence and inner sequence

SEQ ID NO: 29341 - DNA, 53 bp, Artificial Sequence; identical to SEQ ID NO: 1583
  Description of Artificial Sequence: Synthetic walnut; 5' sequence and inner sequence

SEQ ID NO: 29342 - DNA, 53 bp, Artificial Sequence; identical to SEQ ID NO: 1647
  Description of Artificial Sequence: Synthetic walnut; 5' sequence and inner sequence

SEQ ID NO: 29343 - DNA, 52 bp, Artificial Sequence; identical to SEQ ID NO: 1642
  Description of Artificial Sequence: Synthetic walnut; 5' sequence and inner sequence

SEQ ID NO: 29344 - DNA, 53 bp, Artificial Sequence; identical to SEQ ID NO: 1203
  Description of Artificial Sequence: Synthetic walnut; 5' sequence and inner sequence

SEQ ID NO: 29345 - DNA, 53 bp, Artificial Sequence; identical to SEQ ID NO: 1497
  Description of Artificial Sequence: Synthetic walnut; 5' sequence and inner sequence

SEQ ID NO: 29346 - DNA, 53 bp, Artificial Sequence; identical to SEQ ID NO: 1909
  Description of Artificial Sequence: Synthetic walnut; 5' sequence and inner sequence

SEQ ID NO: 29347 - DNA, 53 bp, Artificial Sequence; identical to SEQ ID NO: 5489
  Description of Artificial Sequence: Synthetic walnut; 5' sequence and inner sequence

SEQ ID NO: 29348 - DNA, 53 bp, Artificial Sequence; identical to SEQ ID NO: 1499
  Description of Artificial Sequence: Synthetic walnut; 5' sequence and inner sequence

SEQ ID NO: 29349 - DNA, 53 bp, Artificial Sequence; identical to SEQ ID NO: 1089
  Description of Artificial Sequence: Synthetic walnut; 5' sequence and inner sequence

SEQ ID NO: 29350 - DNA, 53 bp, Artificial Sequence
  Description of Artificial Sequence: Synthetic walnut; 5' sequence and inner sequence
tagggaagagaaggacatatgatgtcattccgcatcctacacgtgggaatgga

SEQ ID NO: 29351 - DNA, 53 bp, Artificial Sequence; identical to SEQ ID NO: 1754
  Description of Artificial Sequence: Synthetic walnut; 5' sequence and inner sequence

SEQ ID NO: 29352 - DNA, 53 bp, Artificial Sequence; identical to SEQ ID NO: 5571
  Description of Artificial Sequence: Synthetic walnut; 5' sequence and inner sequence

SEQ ID NO: 29353 - DNA, 53 bp, Artificial Sequence; identical to SEQ ID NO: 1158
  Description of Artificial Sequence: Synthetic walnut; 5' sequence and inner sequence

SEQ ID NO: 29354 - DNA, 53 bp, Artificial Sequence; identical to SEQ ID NO: 1543
  Description of Artificial Sequence: Synthetic walnut; 5' sequence and inner sequence

SEQ ID NO: 29355 - DNA, 53 bp, Artificial Sequence; identical to SEQ ID NO: 1327
  Description of Artificial Sequence: Synthetic walnut; 5' sequence and inner sequence

SEQ ID NO: 29356 - DNA, 53 bp, Artificial Sequence; identical to SEQ ID NO: 17837
  Description of Artificial Sequence: Synthetic walnut; 5' sequence and inner sequence

SEQ ID NO: 29357 - DNA, 53 bp, Artificial Sequence; identical to SEQ ID NO: 1362
  Description of Artificial Sequence: Synthetic walnut; 5' sequence and inner sequence

SEQ ID NO: 29358 - DNA, 53 bp, Artificial Sequence; identical to SEQ ID NO: 17829
  Description of Artificial Sequence: Synthetic walnut; 5' sequence and inner sequence

SEQ ID NO: 29359 - DNA, 53 bp, Artificial Sequence; identical to SEQ ID NO: 1331
  Description of Artificial Sequence: Synthetic walnut; 5' sequence and inner sequence

SEQ ID NO: 29360 - DNA, 53 bp, Artificial Sequence; identical to SEQ ID NO: 1717
  Description of Artificial Sequence: Synthetic walnut; 5' sequence and inner sequence

SEQ ID NO: 29361 - DNA, 53 bp, Artificial Sequence; identical to SEQ ID NO: 21522
  Description of Artificial Sequence: Synthetic walnut; 5' sequence and inner sequence

SEQ ID NO: 29362 - DNA, 53 bp, Artificial Sequence; identical to SEQ ID NO: 17750
  Description of Artificial Sequence: Synthetic walnut; 5' sequence and inner sequence

SEQ ID NO: 29363 - DNA, 53 bp, Artificial Sequence; identical to SEQ ID NO: 17675
  Description of Artificial Sequence: Synthetic walnut; 5' sequence and inner sequence

SEQ ID NO: 29364 - DNA, 54 bp, Artificial Sequence; identical to SEQ ID NO: 1503
  Description of Artificial Sequence: Synthetic walnut; 5' sequence and inner sequence

SEQ ID NO: 29365 - DNA, 53 bp, Artificial Sequence; identical to SEQ ID NO: 1212
  Description of Artificial Sequence: Synthetic walnut; 5' sequence and inner sequence

SEQ ID NO: 29366 - DNA, 53 bp, Artificial Sequence; identical to SEQ ID NO: 21626
  Description of Artificial Sequence: Synthetic walnut; 5' sequence and inner sequence

SEQ ID NO: 29367 - DNA, 53 bp, Artificial Sequence; identical to SEQ ID NO: 1064
  Description of Artificial Sequence: Synthetic walnut; 5' sequence and inner sequence

SEQ ID NO: 29368 - DNA, 53 bp, Artificial Sequence
  Description of Artificial Sequence: Synthetic walnut; 5' sequence and inner sequence
tagggaagagaaggacatatgatggcctgcgatggatgtgtgcgtgtcttagc

SEQ ID NO: 29369 - DNA, 53 bp, Artificial Sequence; identical to SEQ ID NO: 21524
  Description of Artificial Sequence: Synthetic walnut; 5' sequence and inner sequence

SEQ ID NO: 29370 - DNA, 53 bp, Artificial Sequence; identical to SEQ ID NO: 21769
  Description of Artificial Sequence: Synthetic walnut; 5' sequence and inner sequence

SEQ ID NO: 29371 - DNA, 53 bp, Artificial Sequence; identical to SEQ ID NO: 1044
  Description of Artificial Sequence: Synthetic walnut; 5' sequence and inner sequence

SEQ ID NO: 29372 - DNA, 52 bp, Artificial Sequence; identical to SEQ ID NO: 1334
  Description of Artificial Sequence: Synthetic walnut; 5' sequence and inner sequence

SEQ ID NO: 29373 - DNA, 53 bp, Artificial Sequence; identical to SEQ ID NO: 1293
  Description of Artificial Sequence: Synthetic walnut; 5' sequence and inner sequence

SEQ ID NO: 29374 - DNA, 53 bp, Artificial Sequence; identical to SEQ ID NO: 17603
  Description of Artificial Sequence: Synthetic walnut; 5' sequence and inner sequence

SEQ ID NO: 29375 - DNA, 53 bp, Artificial Sequence
  Description of Artificial Sequence: Synthetic walnut; 5' sequence and inner sequence
tagggaagagaaggacatatgatcgacacggacggtaggcatgctgcgtcacg

SEQ ID NO: 29376 - DNA, 53 bp, Artificial Sequence; identical to SEQ ID NO: 1038
  Description of Artificial Sequence: Synthetic walnut; 5' sequence and inner sequence

SEQ ID NO: 29377 - DNA, 53 bp, Artificial Sequence; identical to SEQ ID NO: 5707
  Description of Artificial Sequence: Synthetic walnut; 5' sequence and inner sequence

SEQ ID NO: 29378 - DNA, 53 bp, Artificial Sequence; identical to SEQ ID NO: 1573
  Description of Artificial Sequence: Synthetic walnut; 5' sequence and inner sequence

SEQ ID NO: 29379 - DNA, 53 bp, Artificial Sequence
  Description of Artificial Sequence: Synthetic walnut; 5' sequence and inner sequence
tagggaagagaaggacatatgatacgtgagcacgacgtagcgcacactgcacg

SEQ ID NO: 29380 - DNA, 53 bp, Artificial Sequence; identical to SEQ ID NO: 1447
  Description of Artificial Sequence: Synthetic walnut; 5' sequence and inner sequence

SEQ ID NO: 29381 - DNA, 53 bp, Artificial Sequence
  Description of Artificial Sequence: Synthetic walnut; 5' sequence and inner sequence
tagggaagagaaggacatatgatcgtaacgcagcgcgagtgacgtacgacacg

SEQ ID NO: 29382 - DNA, 53 bp, Artificial Sequence
  Description of Artificial Sequence: Synthetic walnut; 5' sequence and inner sequence
tagggaagagaaggacatatgatgcgtgacgcaacgcaggctgtccgtacgca

SEQ ID NO: 29383 - DNA, 53 bp, Artificial Sequence; identical to SEQ ID NO: 17612
  Description of Artificial Sequence: Synthetic walnut; 5' sequence and inner sequence

SEQ ID NO: 29384 - DNA, 53 bp, Artificial Sequence; identical to SEQ ID NO: 21923
  Description of Artificial Sequence: Synthetic walnut; 5' sequence and inner sequence

SEQ ID NO: 29385 - DNA, 53 bp, Artificial Sequence; identical to SEQ ID NO: 1615
  Description of Artificial Sequence: Synthetic walnut; 5' sequence and inner sequence

SEQ ID NO: 29386 - DNA, 53 bp, Artificial Sequence; identical to SEQ ID NO: 5748
  Description of Artificial Sequence: Synthetic walnut; 5' sequence and inner sequence

SEQ ID NO: 29387 - DNA, 53 bp, Artificial Sequence; identical to SEQ ID NO: 5521
  Description of Artificial Sequence: Synthetic walnut; 5' sequence and inner sequence

SEQ ID NO: 29388 - DNA, 53 bp, Artificial Sequence; identical to SEQ ID NO: 17692
  Description of Artificial Sequence: Synthetic walnut; 5' sequence and inner sequence

SEQ ID NO: 29389 - DNA, 53 bp, Artificial Sequence
  Description of Artificial Sequence: Synthetic walnut; 5' sequence and inner sequence
tagggaagagaaggacatatgatcacgtgcagcgtgtcgtgccacatgacgca

SEQ ID NO: 29390 - DNA, 53 bp, Artificial Sequence
  Description of Artificial Sequence: Synthetic walnut; 5' sequence and inner sequence
tagggaagagaaggacatatgatcgcaccgcaacgtgagggcatgcgcgtgtg

SEQ ID NO: 29391 - DNA, 52 bp, Artificial Sequence; identical to SEQ ID NO: 17540
  Description of Artificial Sequence: Synthetic walnut; 5' sequence and inner sequence

SEQ ID NO: 29392 - DNA, 53 bp, Artificial Sequence
  Description of Artificial Sequence: Synthetic walnut; 5' sequence and inner sequence
tagggaagagaaggacatatgatggccgacgatggatgtgggttgtgctcgtc

SEQ ID NO: 29393 - DNA, 53 bp, Artificial Sequence; identical to SEQ ID NO: 1394
  Description of Artificial Sequence: Synthetic walnut; 5' sequence and inner sequence

SEQ ID NO: 29394 - DNA, 53 bp, Artificial Sequence; identical to SEQ ID NO: 21690
  Description of Artificial Sequence: Synthetic walnut; 5' sequence and inner sequence

SEQ ID NO: 29395 - DNA, 53 bp, Artificial Sequence; identical to SEQ ID NO: 21613
  Description of Artificial Sequence: Synthetic walnut; 5' sequence and inner sequence

SEQ ID NO: 29396 - DNA, 53 bp, Artificial Sequence; identical to SEQ ID NO: 1154
  Description of Artificial Sequence: Synthetic walnut; 5' sequence and inner sequence

SEQ ID NO: 29397 - DNA, 53 bp, Artificial Sequence; identical to SEQ ID NO: 1324
  Description of Artificial Sequence: Synthetic walnut; 5' sequence and inner sequence

SEQ ID NO: 29398 - DNA, 53 bp, Artificial Sequence; identical to SEQ ID NO: 1146
  Description of Artificial Sequence: Synthetic walnut; 5' sequence and inner sequence

SEQ ID NO: 29399 - DNA, 51 bp, Artificial Sequence; identical to SEQ ID NO: 1148
  Description of Artificial Sequence: Synthetic walnut; 5' sequence and inner sequence

SEQ ID NO: 29400 - DNA, 53 bp, Artificial Sequence
  Description of Artificial Sequence: Synthetic walnut; 5' sequence and inner sequence
tagggaagagaaggacatatgatcgtgacgtgacgcatccctcgctgttcgcg

SEQ ID NO: 29401 - DNA, 53 bp, Artificial Sequence; identical to SEQ ID NO: 5807
  Description of Artificial Sequence: Synthetic walnut; 5' sequence and inner sequence

SEQ ID NO: 29402 - DNA, 53 bp, Artificial Sequence; identical to SEQ ID NO: 9953
  Description of Artificial Sequence: Synthetic walnut; 5' sequence and inner sequence

SEQ ID NO: 29403 - DNA, 53 bp, Artificial Sequence; identical to SEQ ID NO: 1788
  Description of Artificial Sequence: Synthetic walnut; 5' sequence and inner sequence

SEQ ID NO: 29404 - DNA, 53 bp, Artificial Sequence; identical to SEQ ID NO: 1728
  Description of Artificial Sequence: Synthetic walnut; 5' sequence and inner sequence

SEQ ID NO: 29405 - DNA, 53 bp, Artificial Sequence; identical to SEQ ID NO: 1245
  Description of Artificial Sequence: Synthetic walnut; 5' sequence and inner sequence

SEQ ID NO: 29406 - DNA, 53 bp, Artificial Sequence
  Description of Artificial Sequence: Synthetic walnut; 5' sequence and inner sequence
tagggaagagaaggacatatgatgtccgaccgcacccttcgaggggacatgga

SEQ ID NO: 29407 - DNA, 53 bp, Artificial Sequence; identical to SEQ ID NO: 1176
  Description of Artificial Sequence: Synthetic walnut; 5' sequence and inner sequence

SEQ ID NO: 29408 - DNA, 53 bp, Artificial Sequence; identical to SEQ ID NO: 1233
  Description of Artificial Sequence: Synthetic walnut; 5' sequence and inner sequence

SEQ ID NO: 29409 - DNA, 53 bp, Artificial Sequence; identical to SEQ ID NO: 1058
  Description of Artificial Sequence: Synthetic walnut; 5' sequence and inner sequence

SEQ ID NO: 29410 - DNA, 53 bp, Artificial Sequence; identical to SEQ ID NO: 21560
  Description of Artificial Sequence: Synthetic walnut; 5' sequence and inner sequence

SEQ ID NO: 29411 - DNA, 53 bp, Artificial Sequence; identical to SEQ ID NO: 1066
  Description of Artificial Sequence: Synthetic walnut; 5' sequence and inner sequence

SEQ ID NO: 29412 - DNA, 53 bp, Artificial Sequence
  Description of Artificial Sequence: Synthetic walnut; 5' sequence and inner sequence
tagggaagagaaggacatatgatggacgcagggcaggacgacgtatcgccacg

SEQ ID NO: 29413 - DNA, 53 bp, Artificial Sequence
  Description of Artificial Sequence: Synthetic walnut; 5' sequence and inner sequence
tagggaagagaaggacatatgatggacgcatcgccccttcgcgtggacaggta

SEQ ID NO: 29414 - DNA, 53 bp, Artificial Sequence; identical to SEQ ID NO: 1684
  Description of Artificial Sequence: Synthetic walnut; 5' sequence and inner sequence

SEQ ID NO: 29415 - DNA, 53 bp, Artificial Sequence; identical to SEQ ID NO: 1171
  Description of Artificial Sequence: Synthetic walnut; 5' sequence and inner sequence

SEQ ID NO: 29416 - DNA, 53 bp, Artificial Sequence
  Description of Artificial Sequence: Synthetic walnut; 5' sequence and inner sequence
tagggaagagaaggacatatgatcacgtcacgcaacgacatgtacgctgcacg

SEQ ID NO: 29417 - DNA, 53 bp, Artificial Sequence; identical to SEQ ID NO: 5419
  Description of Artificial Sequence: Synthetic walnut; 5' sequence and inner sequence

SEQ ID NO: 29418 - DNA, 53 bp, Artificial Sequence; identical to SEQ ID NO: 21468
  Description of Artificial Sequence: Synthetic walnut; 5' sequence and inner sequence

SEQ ID NO: 29419 - DNA, 53 bp, Artificial Sequence; identical to SEQ ID NO: 1683
  Description of Artificial Sequence: Synthetic walnut; 5' sequence and inner sequence

SEQ ID NO: 29420 - DNA, 53 bp, Artificial Sequence; identical to SEQ ID NO: 1531
  Description of Artificial Sequence: Synthetic walnut; 5' sequence and inner sequence

SEQ ID NO: 29421 - DNA, 53 bp, Artificial Sequence; identical to SEQ ID NO: 1455
  Description of Artificial Sequence: Synthetic walnut; 5' sequence and inner sequence

SEQ ID NO: 29422 - DNA, 50 bp, Artificial Sequence; identical to SEQ ID NO: 25993
  Description of Artificial Sequence: Synthetic walnut; 5' sequence and inner sequence

SEQ ID NO: 29423 - DNA, 53 bp, Artificial Sequence; identical to SEQ ID NO: 1577
  Description of Artificial Sequence: Synthetic walnut; 5' sequence and inner sequence

SEQ ID NO: 29424 - DNA, 53 bp, Artificial Sequence; identical to SEQ ID NO: 1467
  Description of Artificial Sequence: Synthetic walnut; 5' sequence and inner sequence

SEQ ID NO: 29425 - DNA, 53 bp, Artificial Sequence
  Description of Artificial Sequence: Synthetic walnut; 5' sequence and inner sequence
tagggaagagaaggacatatgatgcgtgacgtgacggcagtgcgtgctacgtg

SEQ ID NO: 29426 - DNA, 53 bp, Artificial Sequence
  Description of Artificial Sequence: Synthetic walnut; 5' sequence and inner sequence
tagggaagagaaggacatatgatcgatgcgcaaccacgccacacgcatgcaca

SEQ ID NO: 29427 - DNA, 53 bp, Artificial Sequence
  Description of Artificial Sequence: Synthetic walnut; 5' sequence and inner sequence
tagggaagagaaggacatatgatggccgagtcgtcacttcaattgggcgtgga

SEQ ID NO: 29428 - DNA, 53 bp, Artificial Sequence; identical to SEQ ID NO: 1493
  Description of Artificial Sequence: Synthetic walnut; 5' sequence and inner sequence

SEQ ID NO: 29429 - DNA, 53 bp, Artificial Sequence; identical to SEQ ID NO: 21607
  Description of Artificial Sequence: Synthetic walnut; 5' sequence and inner sequence

SEQ ID NO: 29430 - DNA, 53 bp, Artificial Sequence; identical to SEQ ID NO: 1462
  Description of Artificial Sequence: Synthetic walnut; 5' sequence and inner sequence

SEQ ID NO: 29431 - DNA, 53 bp, Artificial Sequence; identical to SEQ ID NO: 1905
  Description of Artificial Sequence: Synthetic walnut; 5' sequence and inner sequence

SEQ ID NO: 29432 - DNA, 53 bp, Artificial Sequence
  Description of Artificial Sequence: Synthetic walnut; 5' sequence and inner sequence
tagggaagagaaggacatatgatcgatgcgcagtacgtcgatgtcacggcgtg

SEQ ID NO: 29433 - DNA, 55 bp, Artificial Sequence
  Description of Artificial Sequence: Synthetic walnut; 5' sequence and inner sequence
tagggaagagaaggacatatgatggcctgcgatggatgggggcgttgtgctcgtc

SEQ ID NO: 29434 - DNA, 53 bp, Artificial Sequence; identical to SEQ ID NO: 1437
  Description of Artificial Sequence: Synthetic walnut; 5' sequence and inner sequence

SEQ ID NO: 29435 - DNA, 53 bp, Artificial Sequence; identical to SEQ ID NO: 1889
  Description of Artificial Sequence: Synthetic walnut; 5' sequence and inner sequence

SEQ ID NO: 29436 - DNA, 53 bp, Artificial Sequence
  Description of Artificial Sequence: Synthetic walnut; 5' sequence and inner sequence
tagggaagagaaggacatatgattgcgtcacgccaggcatacgtcacgtcacg

SEQ ID NO: 29437 - DNA, 53 bp, Artificial Sequence; identical to SEQ ID NO: 17799
  Description of Artificial Sequence: Synthetic walnut; 5' sequence and inner sequence

SEQ ID NO: 29438 - DNA, 53 bp, Artificial Sequence; identical to SEQ ID NO: 1800
  Description of Artificial Sequence: Synthetic walnut; 5' sequence and inner sequence

SEQ ID NO: 29439 - DNA, 53 bp, Artificial Sequence; identical to SEQ ID NO: 1598
  Description of Artificial Sequence: Synthetic walnut; 5' sequence and inner sequence

SEQ ID NO: 29440 - DNA, 53 bp, Artificial Sequence; identical to SEQ ID NO: 21820
  Description of Artificial Sequence: Synthetic walnut; 5' sequence and inner sequence

SEQ ID NO: 29441 - DNA, 53 bp, Artificial Sequence
  Description of Artificial Sequence: Synthetic walnut; 5' sequence and inner sequence
tagggaagagaaggacatatgatgtcattcgatggatgtgggttgtgctcgtc

SEQ ID NO: 29442 - DNA, 53 bp, Artificial Sequence; identical to SEQ ID NO: 1295
  Description of Artificial Sequence: Synthetic walnut; 5' sequence and inner sequence

SEQ ID NO: 29443 - DNA, 53 bp, Artificial Sequence; identical to SEQ ID NO: 1244
  Description of Artificial Sequence: Synthetic walnut; 5' sequence and inner sequence

SEQ ID NO: 29444 - DNA, 53 bp, Artificial Sequence; identical to SEQ ID NO: 1192
  Description of Artificial Sequence: Synthetic walnut; 5' sequence and inner sequence

SEQ ID NO: 29445 - DNA, 53 bp, Artificial Sequence; identical to SEQ ID NO: 9910
  Description of Artificial Sequence: Synthetic walnut; 5' sequence and inner sequence

SEQ ID NO: 29446 - DNA, 53 bp, Artificial Sequence
  Description of Artificial Sequence: Synthetic walnut; 5' sequence and inner sequence
tagggaagagaaggacatatgatggacggatcgccccttcgagtggacaggta

SEQ ID NO: 29447 - DNA, 53 bp, Artificial Sequence; identical to SEQ ID NO: 5469
  Description of Artificial Sequence: Synthetic walnut; 5' sequence and inner sequence

SEQ ID NO: 29448 - DNA, 53 bp, Artificial Sequence; identical to SEQ ID NO: 5254
  Description of Artificial Sequence: Synthetic walnut; 5' sequence and inner sequence

SEQ ID NO: 29449 - DNA, 53 bp, Artificial Sequence; identical to SEQ ID NO: 1292
  Description of Artificial Sequence: Synthetic walnut; 5' sequence and inner sequence

SEQ ID NO: 29450 - DNA, 53 bp, Artificial Sequence; identical to SEQ ID NO: 1208
  Description of Artificial Sequence: Synthetic walnut; 5' sequence and inner sequence

SEQ ID NO: 29451 - DNA, 53 bp, Artificial Sequence; identical to SEQ ID NO: 1060
  Description of Artificial Sequence: Synthetic walnut; 5' sequence and inner sequence

SEQ ID NO: 29452 - DNA, 53 bp, Artificial Sequence
  Description of Artificial Sequence: Synthetic walnut; 5' sequence and inner sequence
tagggaagagaaggacatatgatggccgagcttacctgtcaagtgcgagtgta

SEQ ID NO: 29453 - DNA, 53 bp, Artificial Sequence; identical to SEQ ID NO: 1686
  Description of Artificial Sequence: Synthetic walnut; 5' sequence and inner sequence

SEQ ID NO: 29454 - DNA, 53 bp, Artificial Sequence; identical to SEQ ID NO: 1698
  Description of Artificial Sequence: Synthetic walnut; 5' sequence and inner sequence

SEQ ID NO: 29455 - DNA, 53 bp, Artificial Sequence; identical to SEQ ID NO: 21551
  Description of Artificial Sequence: Synthetic walnut; 5' sequence and inner sequence

SEQ ID NO: 29456 - DNA, 52 bp, Artificial Sequence; identical to SEQ ID NO: 1549
  Description of Artificial Sequence: Synthetic walnut; 5' sequence and inner sequence

SEQ ID NO: 29457 - DNA, 53 bp, Artificial Sequence; identical to SEQ ID NO: 5775
  Description of Artificial Sequence: Synthetic walnut; 5' sequence and inner sequence

SEQ ID NO: 29458 - DNA, 53 bp, Artificial Sequence
  Description of Artificial Sequence: Synthetic walnut; 5' sequence and inner sequence
tagggaagagaaggacatatgatggcctgcgctggatgtgtgcgtgtattagc

SEQ ID NO: 29459 - DNA, 53 bp, Artificial Sequence; identical to SEQ ID NO: 21847
  Description of Artificial Sequence: Synthetic walnut; 5' sequence and inner sequence

SEQ ID NO: 29460 - DNA, 53 bp, Artificial Sequence; identical to SEQ ID NO: 21976
  Description of Artificial Sequence: Synthetic walnut; 5' sequence and inner sequence

SEQ ID NO: 29461 - DNA, 53 bp, Artificial Sequence; identical to SEQ ID NO: 5420
  Description of Artificial Sequence: Synthetic walnut; 5' sequence and inner sequence

SEQ ID NO: 29462 - DNA, 53 bp, Artificial Sequence; identical to SEQ ID NO: 21761
  Description of Artificial Sequence: Synthetic walnut; 5' sequence and inner sequence

SEQ ID NO: 29463 - DNA, 53 bp, Artificial Sequence; identical to SEQ ID NO: 1401
  Description of Artificial Sequence: Synthetic walnut; 5' sequence and inner sequence

SEQ ID NO: 29464 - DNA, 53 bp, Artificial Sequence; identical to SEQ ID NO: 9782
  Description of Artificial Sequence: Synthetic walnut; 5' sequence and inner sequence

SEQ ID NO: 29465 - DNA, 53 bp, Artificial Sequence; identical to SEQ ID NO: 5931
  Description of Artificial Sequence: Synthetic walnut; 5' sequence and inner sequence

SEQ ID NO: 29466 - DNA, 53 bp, Artificial Sequence; identical to SEQ ID NO: 5981
  Description of Artificial Sequence: Synthetic walnut; 5' sequence and inner sequence

SEQ ID NO: 29467 - DNA, 53 bp, Artificial Sequence; identical to SEQ ID NO: 21367
  Description of Artificial Sequence: Synthetic walnut; 5' sequence and inner sequence

SEQ ID NO: 29468 - DNA, 53 bp, Artificial Sequence; identical to SEQ ID NO: 1419
  Description of Artificial Sequence: Synthetic walnut; 5' sequence and inner sequence

SEQ ID NO: 29469 - DNA, 53 bp, Artificial Sequence
  Description of Artificial Sequence: Synthetic walnut; 5' sequence and inner sequence
tagggaagagaaggacatatgatgcacgacagcacgacgtccatcgcggcaca

SEQ ID NO: 29470 - DNA, 53 bp, Artificial Sequence
  Description of Artificial Sequence: Synthetic walnut; 5' sequence and inner sequence
tagggaagagaaggacatatgatcacgcacacacgtacccgacacgtcacgcg

SEQ ID NO: 29471 - DNA, 53 bp, Artificial Sequence
  Description of Artificial Sequence: Synthetic walnut; 5' sequence and inner sequence
tagggaagagaaggacatatgatgcgtgacgacgtgcatgacgtgccctgtgc

SEQ ID NO: 29472 - DNA, 53 bp, Artificial Sequence
  Description of Artificial Sequence: Synthetic walnut; 5' sequence and inner sequence
tagggaagagaaggacatatgatgtgcgatcgacctacaagtgccatgctagt

SEQ ID NO: 29473 - DNA, 53 bp, Artificial Sequence
  Description of Artificial Sequence: Synthetic walnut; 5' sequence and inner sequence
tagggaagagaaggacatatgatgacgcacaccgcatcacgtcacactgcgca

SEQ ID NO: 29474 - DNA, 53 bp, Artificial Sequence; identical to SEQ ID NO: 17677
  Description of Artificial Sequence: Synthetic walnut; 5' sequence and inner sequence

SEQ ID NO: 29475 - DNA, 53 bp, Artificial Sequence; identical to SEQ ID NO: 1968
  Description of Artificial Sequence: Synthetic walnut; 5' sequence and inner sequence

SEQ ID NO: 29476 - DNA, 53 bp, Artificial Sequence; identical to SEQ ID NO: 13971
  Description of Artificial Sequence: Synthetic walnut; 5' sequence and inner sequence

SEQ ID NO: 29477 - DNA, 53 bp, Artificial Sequence
  Description of Artificial Sequence: Synthetic walnut; 5' sequence and inner sequence
tagggaagagaaggacatatgatcgtgacacacgtaacgcatggaccgtcgcg

SEQ ID NO: 29478 - DNA, 53 bp, Artificial Sequence; identical to SEQ ID NO: 1067
  Description of Artificial Sequence: Synthetic walnut; 5' sequence and inner sequence

SEQ ID NO: 29479 - DNA, 53 bp, Artificial Sequence; identical to SEQ ID NO: 5603
  Description of Artificial Sequence: Synthetic walnut; 5' sequence and inner sequence

SEQ ID NO: 29480 - DNA, 53 bp, Artificial Sequence
  Description of Artificial Sequence: Synthetic walnut; 5' sequence and inner sequence
tagggaagagaaggacatatgatcgcacggcacgacgacgctggtacgacacg

SEQ ID NO: 29481 - DNA, 53 bp, Artificial Sequence; identical to SEQ ID NO: 1821
  Description of Artificial Sequence: Synthetic walnut; 5' sequence and inner sequence

SEQ ID NO: 29482 - DNA, 53 bp, Artificial Sequence; identical to SEQ ID NO: 1866
  Description of Artificial Sequence: Synthetic walnut; 5' sequence and inner sequence

SEQ ID NO: 29483 - DNA, 53 bp, Artificial Sequence; identical to SEQ ID NO: 21692
  Description of Artificial Sequence: Synthetic walnut; 5' sequence and inner sequence

SEQ ID NO: 29484 - DNA, 53 bp, Artificial Sequence; identical to SEQ ID NO: 1397
  Description of Artificial Sequence: Synthetic walnut; 5' sequence and inner sequence

SEQ ID NO: 29485 - DNA, 53 bp, Artificial Sequence
  Description of Artificial Sequence: Synthetic walnut; 5' sequence and inner sequence
tagggaagagaaggacatatgatgtcattccgtatcctacacgtgggcacgta

SEQ ID NO: 29486 - DNA, 53 bp, Artificial Sequence; identical to SEQ ID NO: 1127
  Description of Artificial Sequence: Synthetic walnut; 5' sequence and inner sequence

SEQ ID NO: 29487 - DNA, 53 bp, Artificial Sequence; identical to SEQ ID NO: 5576
  Description of Artificial Sequence: Synthetic walnut; 5' sequence and inner sequence

SEQ ID NO: 29488 - DNA, 53 bp, Artificial Sequence
  Description of Artificial Sequence: Synthetic walnut; 5' sequence and inner sequence
tagggaagagaaggacatatgatggccgtacgatggatgtgggatggtctagc

SEQ ID NO: 29489 - DNA, 53 bp, Artificial Sequence; identical to SEQ ID NO: 1613
  Description of Artificial Sequence: Synthetic walnut; 5' sequence and inner sequence

SEQ ID NO: 29490 - DNA, 53 bp, Artificial Sequence; identical to SEQ ID NO: 21929
  Description of Artificial Sequence: Synthetic walnut; 5' sequence and inner sequence

SEQ ID NO: 29491 - DNA, 53 bp, Artificial Sequence; identical to SEQ ID NO: 1025
  Description of Artificial Sequence: Synthetic walnut; 5' sequence and inner sequence

SEQ ID NO: 29492 - DNA, 53 bp, Artificial Sequence
  Description of Artificial Sequence: Synthetic walnut; 5' sequence and inner sequence
tagggaagagaaggacatatgatggccgcgtctggatgtggttttgtcgcgtc

SEQ ID NO: 29493 - DNA, 53 bp, Artificial Sequence
  Description of Artificial Sequence: Synthetic walnut; 5' sequence and inner sequence
tagggaagagaaggacatatgatcgacgcaccgtaacgacctagcgatgcgcg

SEQ ID NO: 29494 - DNA, 53 bp, Artificial Sequence; identical to SEQ ID NO: 1185
  Description of Artificial Sequence: Synthetic walnut; 5' sequence and inner sequence

SEQ ID NO: 29495 - DNA, 53 bp, Artificial Sequence
  Description of Artificial Sequence: Synthetic walnut; 5' sequence and inner sequence
tagggaagagaaggacatatgatggccgcatcgccccttcgagtggacaggta

SEQ ID NO: 29496 - DNA, 53 bp, Artificial Sequence; identical to SEQ ID NO: 1134
  Description of Artificial Sequence: Synthetic walnut; 5' sequence and inner sequence

SEQ ID NO: 29497 - DNA, 53 bp, Artificial Sequence
  Description of Artificial Sequence: Synthetic walnut; 5' sequence and inner sequence
tagggaagagaaggacatatgatggacgcaacgcaccgtatcgtggccatgtg

SEQ ID NO: 29498 - DNA, 53 bp, Artificial Sequence; identical to SEQ ID NO: 5988
  Description of Artificial Sequence: Synthetic walnut; 5' sequence and inner sequence

SEQ ID NO: 29499 - DNA, 53 bp, Artificial Sequence; identical to SEQ ID NO: 21710
  Description of Artificial Sequence: Synthetic walnut; 5' sequence and inner sequence

SEQ ID NO: 29500 - DNA, 53 bp, Artificial Sequence; identical to SEQ ID NO: 1700
  Description of Artificial Sequence: Synthetic walnut; 5' sequence and inner sequence

SEQ ID NO: 29501 - DNA, 53 bp, Artificial Sequence
  Description of Artificial Sequence: Synthetic walnut; 5' sequence and inner sequence
tagggaagagaaggacatatgatggcctgcgatggctgtgtgcgtgtattagc

SEQ ID NO: 29502 - DNA, 53 bp, Artificial Sequence; identical to SEQ ID NO: 1619
  Description of Artificial Sequence: Synthetic walnut; 5' sequence and inner sequence

SEQ ID NO: 29503 - DNA, 53 bp, Artificial Sequence
  Description of Artificial Sequence: Synthetic walnut; 5' sequence and inner sequence
tagggaagagaaggacatatgatgcatcgcagcacacgtctcgtcacggcaca

SEQ ID NO: 29504 - DNA, 53 bp, Artificial Sequence; identical to SEQ ID NO: 1276
  Description of Artificial Sequence: Synthetic walnut; 5' sequence and inner sequence

SEQ ID NO: 29505 - DNA, 53 bp, Artificial Sequence; identical to SEQ ID NO: 1294
  Description of Artificial Sequence: Synthetic walnut; 5' sequence and inner sequence

SEQ ID NO: 29506 - DNA, 53 bp, Artificial Sequence; identical to SEQ ID NO: 1702
  Description of Artificial Sequence: Synthetic walnut; 5' sequence and inner sequence

SEQ ID NO: 29507 - DNA, 53 bp, Artificial Sequence; identical to SEQ ID NO: 21353
  Description of Artificial Sequence: Synthetic walnut; 5' sequence and inner sequence

SEQ ID NO: 29508 - DNA, 53 bp, Artificial Sequence
  Description of Artificial Sequence: Synthetic walnut; 5' sequence and inner sequence
tagggaagagaaggacatatgatggcctgcgatggatgtgttcgtgtattagc

SEQ ID NO: 29509 - DNA, 53 bp, Artificial Sequence; identical to SEQ ID NO: 21478
  Description of Artificial Sequence: Synthetic walnut; 5' sequence and inner sequence

SEQ ID NO: 29510 - DNA, 53 bp, Artificial Sequence; identical to SEQ ID NO: 21668
  Description of Artificial Sequence: Synthetic walnut; 5' sequence and inner sequence

SEQ ID NO: 29511 - DNA, 53 bp, Artificial Sequence; identical to SEQ ID NO: 1228
  Description of Artificial Sequence: Synthetic walnut; 5' sequence and inner sequence

SEQ ID NO: 29512 - DNA, 53 bp, Artificial Sequence; identical to SEQ ID NO: 1068
  Description of Artificial Sequence: Synthetic walnut; 5' sequence and inner sequence

SEQ ID NO: 29513 - DNA, 53 bp, Artificial Sequence
  Description of Artificial Sequence: Synthetic walnut; 5' sequence and inner sequence
tagggaagagaaggacatatgatgtgcttcgatggatgtgggttgtgctcgtc

SEQ ID NO: 29514 - DNA, 53 bp, Artificial Sequence; identical to SEQ ID NO: 1991
  Description of Artificial Sequence: Synthetic walnut; 5' sequence and inner sequence

SEQ ID NO: 29515 - DNA, 53 bp, Artificial Sequence
  Description of Artificial Sequence: Synthetic walnut; 5' sequence and inner sequence
tagggaagagaaggacatatgatggccgcggcatccctgagagtggtggtgta

SEQ ID NO: 29516 - DNA, 53 bp, Artificial Sequence
  Description of Artificial Sequence: Synthetic walnut; 5' sequence and inner sequence
tagggaagagaaggacatatgatgcgctgtgacgtacgtgctgtgcctacgca

SEQ ID NO: 29517 - DNA, 53 bp, Artificial Sequence; identical to SEQ ID NO: 1778
  Description of Artificial Sequence: Synthetic walnut; 5' sequence and inner sequence

SEQ ID NO: 29518 - DNA, 53 bp, Artificial Sequence; identical to SEQ ID NO: 5513
  Description of Artificial Sequence: Synthetic walnut; 5' sequence and inner sequence

SEQ ID NO: 29519 - DNA, 53 bp, Artificial Sequence; identical to SEQ ID NO: 1979
  Description of Artificial Sequence: Synthetic walnut; 5' sequence and inner sequence

SEQ ID NO: 29520 - DNA, 53 bp, Artificial Sequence; identical to SEQ ID NO: 21666
  Description of Artificial Sequence: Synthetic walnut; 5' sequence and inner sequence

SEQ ID NO: 29521 - DNA, 53 bp, Artificial Sequence; identical to SEQ ID NO: 1789
  Description of Artificial Sequence: Synthetic walnut; 5' sequence and inner sequence

SEQ ID NO: 29522 - DNA, 53 bp, Artificial Sequence; identical to SEQ ID NO: 5837
  Description of Artificial Sequence: Synthetic walnut; 5' sequence and inner sequence

SEQ ID NO: 29523 - DNA, 53 bp, Artificial Sequence
  Description of Artificial Sequence: Synthetic walnut; 5' sequence and inner sequence
tagggaagagaaggacatatgatgtgcgccgatgggtgtgtgtcgtggctggt

SEQ ID NO: 29524 - DNA, 53 bp, Artificial Sequence; identical to SEQ ID NO: 1315
  Description of Artificial Sequence: Synthetic walnut; 5' sequence and inner sequence

SEQ ID NO: 29525 - DNA, 53 bp, Artificial Sequence; identical to SEQ ID NO: 21721
  Description of Artificial Sequence: Synthetic walnut; 5' sequence and inner sequence

SEQ ID NO: 29526 - DNA, 53 bp, Artificial Sequence
  Description of Artificial Sequence: Synthetic walnut; 5' sequence and inner sequence
tagggaagagaaggacatatgatgcgtgtgcgtgcacgttacgtccttgcgcc

SEQ ID NO: 29527 - DNA, 53 bp, Artificial Sequence
  Description of Artificial Sequence: Synthetic walnut; 5' sequence and inner sequence
tagggaagagaaggacatatgatgcgacacacggccacgatgtacgatgcgca

SEQ ID NO: 29528 - DNA, 53 bp, Artificial Sequence; identical to SEQ ID NO: 1485
  Description of Artificial Sequence: Synthetic walnut; 5' sequence and inner sequence

SEQ ID NO: 29529 - DNA, 53 bp, Artificial Sequence; identical to SEQ ID NO: 5552
  Description of Artificial Sequence: Synthetic walnut; 5' sequence and inner sequence

SEQ ID NO: 29530 - DNA, 53 bp, Artificial Sequence; identical to SEQ ID NO: 1446
  Description of Artificial Sequence: Synthetic walnut; 5' sequence and inner sequence

SEQ ID NO: 29531 - DNA, 53 bp, Artificial Sequence; identical to SEQ ID NO: 1346
  Description of Artificial Sequence: Synthetic walnut; 5' sequence and inner sequence

SEQ ID NO: 29532 - DNA, 53 bp, Artificial Sequence; identical to SEQ ID NO: 5948
  Description of Artificial Sequence: Synthetic walnut; 5' sequence and inner sequence

SEQ ID NO: 29533 - DNA, 53 bp, Artificial Sequence
  Description of Artificial Sequence: Synthetic walnut; 5' sequence and inner sequence
tagggaagagaaggacatatgatgtactgcactgccctacacgtgggcatgga

SEQ ID NO: 29534 - DNA, 53 bp, Artificial Sequence; identical to SEQ ID NO: 1131
  Description of Artificial Sequence: Synthetic walnut; 5' sequence and inner sequence

SEQ ID NO: 29535 - DNA, 53 bp, Artificial Sequence; identical to SEQ ID NO: 1460
  Description of Artificial Sequence: Synthetic walnut; 5' sequence and inner sequence

SEQ ID NO: 29536 - DNA, 53 bp, Artificial Sequence; identical to SEQ ID NO: 17859
  Description of Artificial Sequence: Synthetic walnut; 5' sequence and inner sequence

SEQ ID NO: 29537 - DNA, 53 bp, Artificial Sequence; identical to SEQ ID NO: 21693
  Description of Artificial Sequence: Synthetic walnut; 5' sequence and inner sequence

SEQ ID NO: 29538 - DNA, 53 bp, Artificial Sequence; identical to SEQ ID NO: 1442
  Description of Artificial Sequence: Synthetic walnut; 5' sequence and inner sequence

SEQ ID NO: 29539 - DNA, 53 bp, Artificial Sequence; identical to SEQ ID NO: 17926
  Description of Artificial Sequence: Synthetic walnut; 5' sequence and inner sequence

SEQ ID NO: 29540 - DNA, 53 bp, Artificial Sequence; identical to SEQ ID NO: 1678
  Description of Artificial Sequence: Synthetic walnut; 5' sequence and inner sequence

SEQ ID NO: 29541 - DNA, 53 bp, Artificial Sequence
  Description of Artificial Sequence: Synthetic walnut; 5' sequence and inner sequence
tagggaagagaaggacatatgatcgcgatacacgagcatgccgtcacgtcacg

SEQ ID NO: 29542 - DNA, 53 bp, Artificial Sequence; identical to SEQ ID NO: 1173
  Description of Artificial Sequence: Synthetic walnut; 5' sequence and inner sequence

SEQ ID NO: 29543 - DNA, 53 bp, Artificial Sequence; identical to SEQ ID NO: 1132
  Description of Artificial Sequence: Synthetic walnut; 5' sequence and inner sequence

SEQ ID NO: 29544 - DNA, 53 bp, Artificial Sequence
  Description of Artificial Sequence: Synthetic walnut; 5' sequence and inner sequence
tagggaagagaaggacatatgatgcgacacaacgcagggcaacgtgatgcgtg

SEQ ID NO: 29545 - DNA, 53 bp, Artificial Sequence; identical to SEQ ID NO: 1218
  Description of Artificial Sequence: Synthetic walnut; 5' sequence and inner sequence

SEQ ID NO: 29546 - DNA, 53 bp, Artificial Sequence; identical to SEQ ID NO: 1768
  Description of Artificial Sequence: Synthetic walnut; 5' sequence and inner sequence

SEQ ID NO: 29547 - DNA, 53 bp, Artificial Sequence
  Description of Artificial Sequence: Synthetic walnut; 5' sequence and inner sequence
tagggaagagaaggacatatgatggcatgcacgcacctacaagtgggcacgta

SEQ ID NO: 29548 - DNA, 53 bp, Artificial Sequence; identical to SEQ ID NO: 1072
  Description of Artificial Sequence: Synthetic walnut; 5' sequence and inner sequence

SEQ ID NO: 29549 - DNA, 53 bp, Artificial Sequence; identical to SEQ ID NO: 21289
  Description of Artificial Sequence: Synthetic walnut; 5' sequence and inner sequence

SEQ ID NO: 29550 - DNA, 53 bp, Artificial Sequence; identical to SEQ ID NO: 1039
  Description of Artificial Sequence: Synthetic walnut; 5' sequence and inner sequence

SEQ ID NO: 29551 - DNA, 53 bp, Artificial Sequence; identical to SEQ ID NO: 5924
  Description of Artificial Sequence: Synthetic walnut; 5' sequence and inner sequence

SEQ ID NO: 29552 - DNA, 53 bp, Artificial Sequence; identical to SEQ ID NO: 5999
  Description of Artificial Sequence: Synthetic walnut; 5' sequence and inner sequence

SEQ ID NO: 29553 - DNA, 53 bp, Artificial Sequence; identical to SEQ ID NO: 1341
  Description of Artificial Sequence: Synthetic walnut; 5' sequence and inner sequence

SEQ ID NO: 29554 - DNA, 53 bp, Artificial Sequence; identical to SEQ ID NO: 1486
  Description of Artificial Sequence: Synthetic walnut; 5' sequence and inner sequence

SEQ ID NO: 29555 - DNA, 53 bp, Artificial Sequence
  Description of Artificial Sequence: Synthetic walnut; 5' sequence and inner sequence
tagggaagagaaggacatatgatgcacgcaatgatgcacgtcctgctcgcacg

SEQ ID NO: 29556 - DNA, 53 bp, Artificial Sequence; identical to SEQ ID NO: 1903
  Description of Artificial Sequence: Synthetic walnut; 5' sequence and inner sequence

SEQ ID NO: 29557 - DNA, 53 bp, Artificial Sequence
  Description of Artificial Sequence: Synthetic walnut; 5' sequence and inner sequence
tagggaagagaaggacatatgatcgcaccgtgtacgccacgtcactgtacgca

SEQ ID NO: 29558 - DNA, 53 bp, Artificial Sequence; identical to SEQ ID NO: 1153
  Description of Artificial Sequence: Synthetic walnut; 5' sequence and inner sequence

SEQ ID NO: 29559 - DNA, 52 bp, Artificial Sequence; identical to SEQ ID NO: 1193
  Description of Artificial Sequence: Synthetic walnut; 5' sequence and inner sequence

SEQ ID NO: 29560 - DNA, 53 bp, Artificial Sequence; identical to SEQ ID NO: 1840
  Description of Artificial Sequence: Synthetic walnut; 5' sequence and inner sequence

SEQ ID NO: 29561 - DNA, 53 bp, Artificial Sequence; identical to SEQ ID NO: 5638
  Description of Artificial Sequence: Synthetic walnut; 5' sequence and inner sequence

SEQ ID NO: 29562 - DNA, 53 bp, Artificial Sequence; identical to SEQ ID NO: 21836
  Description of Artificial Sequence: Synthetic walnut; 5' sequence and inner sequence

SEQ ID NO: 29563 - DNA, 53 bp, Artificial Sequence
  Description of Artificial Sequence: Synthetic walnut; 5' sequence and inner sequence
tagggaagagaaggacatatgatcgacacggcatggcaaggcgatgtggtgcg

SEQ ID NO: 29564 - DNA, 53 bp, Artificial Sequence; identical to SEQ ID NO: 21486
  Description of Artificial Sequence: Synthetic walnut; 5' sequence and inner sequence

SEQ ID NO: 29565 - DNA, 52 bp, Artificial Sequence
  Description of Artificial Sequence: Synthetic walnut; 5' sequence and inner sequence
tagggaagagaaggacatatgatcgacgtgtcgcagtacgtaccgttgcgca

SEQ ID NO: 29566 - DNA, 53 bp, Artificial Sequence; identical to SEQ ID NO: 13936
  Description of Artificial Sequence: Synthetic walnut; 5' sequence and inner sequence

SEQ ID NO: 29567 - DNA, 53 bp, Artificial Sequence; identical to SEQ ID NO: 1347
  Description of Artificial Sequence: Synthetic walnut; 5' sequence and inner sequence

SEQ ID NO: 29568 - DNA, 53 bp, Artificial Sequence; identical to SEQ ID NO: 9968
  Description of Artificial Sequence: Synthetic walnut; 5' sequence and inner sequence

SEQ ID NO: 29569 - DNA, 53 bp, Artificial Sequence
  Description of Artificial Sequence: Synthetic walnut; 5' sequence and inner sequence
tagggaagagaaggacatatgatggcctgcgatggatgtggttttgtcgcgtc

SEQ ID NO: 29570 - DNA, 53 bp, Artificial Sequence
  Description of Artificial Sequence: Synthetic walnut; 5' sequence and inner sequence
tagggaagagaaggacatatgatgcatgccaacgcaacgtgtacgcgtgcaca

SEQ ID NO: 29571 - DNA, 53 bp, Artificial Sequence; identical to SEQ ID NO: 25843
  Description of Artificial Sequence: Synthetic walnut; 5' sequence and inner sequence

SEQ ID NO: 29572 - DNA, 53 bp, Artificial Sequence; identical to SEQ ID NO: 1801
  Description of Artificial Sequence: Synthetic walnut; 5' sequence and inner sequence

SEQ ID NO: 29573 - DNA, 53 bp, Artificial Sequence; identical to SEQ ID NO: 5688
  Description of Artificial Sequence: Synthetic walnut; 5' sequence and inner sequence

SEQ ID NO: 29574 - DNA, 53 bp, Artificial Sequence
  Description of Artificial Sequence: Synthetic walnut; 5' sequence and inner sequence
tagggaagagaaggacatatgatggcatgcactcacctacacgtgggcacgta

SEQ ID NO: 29575 - DNA, 53 bp, Artificial Sequence; identical to SEQ ID NO: 1395
  Description of Artificial Sequence: Synthetic walnut; 5' sequence and inner sequence

SEQ ID NO: 29576 - DNA, 53 bp, Artificial Sequence; identical to SEQ ID NO: 5517
  Description of Artificial Sequence: Synthetic walnut; 5' sequence and inner sequence

SEQ ID NO: 29577 - DNA, 53 bp, Artificial Sequence
  Description of Artificial Sequence: Synthetic walnut; 5' sequence and inner sequence
tagggaagagaaggacatatgatggcctcgataacctagcaagtgtgtgtgta

SEQ ID NO: 29578 - DNA, 53 bp, Artificial Sequence; identical to SEQ ID NO: 9922
  Description of Artificial Sequence: Synthetic walnut; 5' sequence and inner sequence

SEQ ID NO: 29579 - DNA, 53 bp, Artificial Sequence; identical to SEQ ID NO: 1056
  Description of Artificial Sequence: Synthetic walnut; 5' sequence and inner sequence

SEQ ID NO: 29580 - DNA, 53 bp, Artificial Sequence
  Description of Artificial Sequence: Synthetic walnut; 5' sequence and inner sequence
tagggaagagaaggacatatgatcgcaccgtcgtaccgtacgtgcctgacgca

SEQ ID NO: 29581 - DNA, 53 bp, Artificial Sequence
  Description of Artificial Sequence: Synthetic walnut; 5' sequence and inner sequence
tagggaagagaaggacatatgatgtccgacgatgggtgggggaatgcgacggc

SEQ ID NO: 29582 - DNA, 53 bp, Artificial Sequence
  Description of Artificial Sequence: Synthetic walnut; 5' sequence and inner sequence
tagggaagagaaggacatatgatcgtaccgcacatgcacgtccgtcgtacgcg

SEQ ID NO: 29583 - DNA, 53 bp, Artificial Sequence; identical to SEQ ID NO: 1438
  Description of Artificial Sequence: Synthetic walnut; 5' sequence and inner sequence

SEQ ID NO: 29584 - DNA, 53 bp, Artificial Sequence
  Description of Artificial Sequence: Synthetic walnut; 5' sequence and inner sequence
tagggaagagaaggacatatgatgcgcacaacgatacgcacgatgccgtcacg

SEQ ID NO: 29585 - DNA, 53 bp, Artificial Sequence; identical to SEQ ID NO: 21363
  Description of Artificial Sequence: Synthetic walnut; 5' sequence and inner sequence

SEQ ID NO: 29586 - DNA, 53 bp, Artificial Sequence
  Description of Artificial Sequence: Synthetic walnut; 5' sequence and inner sequence
tagggaagagaaggacatatgatggccgacgatggatgggaggcatgactggc

SEQ ID NO: 29587 - DNA, 53 bp, Artificial Sequence; identical to SEQ ID NO: 1372
  Description of Artificial Sequence: Synthetic walnut; 5' sequence and inner sequence

SEQ ID NO: 29588 - DNA, 53 bp, Artificial Sequence; identical to SEQ ID NO: 5860
  Description of Artificial Sequence: Synthetic walnut; 5' sequence and inner sequence

SEQ ID NO: 29589 - DNA, 53 bp, Artificial Sequence
  Description of Artificial Sequence: Synthetic walnut; 5' sequence and inner sequence
tagggaagagaaggacatatgatggcctgcgcgtgacctatcaatggcatgta

SEQ ID NO: 29590 - DNA, 53 bp, Artificial Sequence; identical to SEQ ID NO: 5289
  Description of Artificial Sequence: Synthetic walnut; 5' sequence and inner sequence

SEQ ID NO: 29591 - DNA, 53 bp, Artificial Sequence
  Description of Artificial Sequence: Synthetic walnut; 5' sequence and inner sequence
tagggaagagaaggacatatgatcacgcacagtgacgttaccgtacctgcacg

SEQ ID NO: 29592 - DNA, 53 bp, Artificial Sequence; identical to SEQ ID NO: 17695
  Description of Artificial Sequence: Synthetic walnut; 5' sequence and inner sequence

SEQ ID NO: 29593 - DNA, 54 bp, Artificial Sequence
  Description of Artificial Sequence: Synthetic walnut; 5' sequence and inner sequence
tagggaagagaaggacatatgatggcctgcgatggatgtgggctgcactatgtc

SEQ ID NO: 29594 - DNA, 53 bp, Artificial Sequence; identical to SEQ ID NO: 1756
  Description of Artificial Sequence: Synthetic walnut; 5' sequence and inner sequence

SEQ ID NO: 29595 - DNA, 53 bp, Artificial Sequence
  Description of Artificial Sequence: Synthetic walnut; 5' sequence and inner sequence
tagggaagagaaggacatatgatggccacagcgtacatcaacgtggacgtgca

SEQ ID NO: 29596 - DNA, 54 bp, Artificial Sequence; identical to SEQ ID NO: 17373
  Description of Artificial Sequence: Synthetic walnut; 5' sequence and inner sequence

SEQ ID NO: 29597 - DNA, 53 bp, Artificial Sequence; identical to SEQ ID NO: 1101
  Description of Artificial Sequence: Synthetic walnut; 5' sequence and inner sequence

SEQ ID NO: 29598 - DNA, 53 bp, Artificial Sequence; identical to SEQ ID NO: 1553
  Description of Artificial Sequence: Synthetic walnut; 5' sequence and inner sequence

SEQ ID NO: 29599 - DNA, 53 bp, Artificial Sequence; identical to SEQ ID NO: 17978
  Description of Artificial Sequence: Synthetic walnut; 5' sequence and inner sequence

SEQ ID NO: 29600 - DNA, 53 bp, Artificial Sequence
  Description of Artificial Sequence: Synthetic walnut; 5' sequence and inner sequence
tagggaagagaaggacatatgatggcctgcgatggatgtgggccagtacgcgc

SEQ ID NO: 29601 - DNA, 53 bp, Artificial Sequence; identical to SEQ ID NO: 5653
  Description of Artificial Sequence: Synthetic walnut; 5' sequence and inner sequence

SEQ ID NO: 29602 - DNA, 53 bp, Artificial Sequence; identical to SEQ ID NO: 17482
  Description of Artificial Sequence: Synthetic walnut; 5' sequence and inner sequence

SEQ ID NO: 29603 - DNA, 53 bp, Artificial Sequence
  Description of Artificial Sequence: Synthetic walnut; 5' sequence and inner sequence
tagggaagagaaggacatatgatcgtgacgacgtgctgcagtgacgttgcgta

SEQ ID NO: 29604 - DNA, 53 bp, Artificial Sequence; identical to SEQ ID NO: 1186
  Description of Artificial Sequence: Synthetic walnut; 5' sequence and inner sequence

SEQ ID NO: 29605 - DNA, 53 bp, Artificial Sequence; identical to SEQ ID NO: 1470
  Description of Artificial Sequence: Synthetic walnut; 5' sequence and inner sequence

SEQ ID NO: 29606 - DNA, 53 bp, Artificial Sequence; identical to SEQ ID NO: 9798
  Description of Artificial Sequence: Synthetic walnut; 5' sequence and inner sequence

SEQ ID NO: 29607 - DNA, 53 bp, Artificial Sequence; identical to SEQ ID NO: 1299
  Description of Artificial Sequence: Synthetic walnut; 5' sequence and inner sequence

SEQ ID NO: 29608 - DNA, 53 bp, Artificial Sequence; identical to SEQ ID NO: 21515
  Description of Artificial Sequence: Synthetic walnut; 5' sequence and inner sequence

SEQ ID NO: 29609 - DNA, 53 bp, Artificial Sequence; identical to SEQ ID NO: 13945
  Description of Artificial Sequence: Synthetic walnut; 5' sequence and inner sequence

SEQ ID NO: 29610 - DNA, 53 bp, Artificial Sequence; identical to SEQ ID NO: 21800
  Description of Artificial Sequence: Synthetic walnut; 5' sequence and inner sequence

SEQ ID NO: 29611 - DNA, 53 bp, Artificial Sequence; identical to SEQ ID NO: 1714
  Description of Artificial Sequence: Synthetic walnut; 5' sequence and inner sequence

SEQ ID NO: 29612 - DNA, 54 bp, Artificial Sequence
  Description of Artificial Sequence: Synthetic walnut; 5' sequence and inner sequence
tagggaagagaaggacatatgatggcctgcgatggatgtggtgttgggatagtc

SEQ ID NO: 29613 - DNA, 53 bp, Artificial Sequence; identical to SEQ ID NO: 21954
  Description of Artificial Sequence: Synthetic walnut; 5' sequence and inner sequence

SEQ ID NO: 29614 - DNA, 53 bp, Artificial Sequence; identical to SEQ ID NO: 17342
  Description of Artificial Sequence: Synthetic walnut; 5' sequence and inner sequence

SEQ ID NO: 29615 - DNA, 53 bp, Artificial Sequence; identical to SEQ ID NO: 1860
  Description of Artificial Sequence: Synthetic walnut; 5' sequence and inner sequence

SEQ ID NO: 29616 - DNA, 53 bp, Artificial Sequence; identical to SEQ ID NO: 1857
  Description of Artificial Sequence: Synthetic walnut; 5' sequence and inner sequence

SEQ ID NO: 29617 - DNA, 48 bp, Artificial Sequence; identical to SEQ ID NO: 21741
  Description of Artificial Sequence: Synthetic walnut; 5' sequence and inner sequence

SEQ ID NO: 29618 - DNA, 53 bp, Artificial Sequence; identical to SEQ ID NO: 9682
  Description of Artificial Sequence: Synthetic walnut; 5' sequence and inner sequence

SEQ ID NO: 29619 - DNA, 53 bp, Artificial Sequence; identical to SEQ ID NO: 5565
  Description of Artificial Sequence: Synthetic walnut; 5' sequence and inner sequence

SEQ ID NO: 29620 - DNA, 53 bp, Artificial Sequence
  Description of Artificial Sequence: Synthetic walnut; 5' sequence and inner sequence
tagggaagagaaggacatatgatggccacagcgtaactcaacgtggacgtgca

SEQ ID NO: 29621 - DNA, 53 bp, Artificial Sequence; identical to SEQ ID NO: 1805
  Description of Artificial Sequence: Synthetic walnut; 5' sequence and inner sequence

SEQ ID NO: 29622 - DNA, 53 bp, Artificial Sequence; identical to SEQ ID NO: 1780
  Description of Artificial Sequence: Synthetic walnut; 5' sequence and inner sequence

SEQ ID NO: 29623 - DNA, 53 bp, Artificial Sequence; identical to SEQ ID NO: 21784
  Description of Artificial Sequence: Synthetic walnut; 5' sequence and inner sequence

SEQ ID NO: 29624 - DNA, 53 bp, Artificial Sequence; identical to SEQ ID NO: 1061
  Description of Artificial Sequence: Synthetic walnut; 5' sequence and inner sequence

SEQ ID NO: 29625 - DNA, 53 bp, Artificial Sequence; identical to SEQ ID NO: 1813
  Description of Artificial Sequence: Synthetic walnut; 5' sequence and inner sequence

SEQ ID NO: 29626 - DNA, 53 bp, Artificial Sequence
  Description of Artificial Sequence: Synthetic walnut; 5' sequence and inner sequence
tagggaagagaaggacatatgatgtgctgcgatggatgtgtgcgtgtattagc

SEQ ID NO: 29627 - DNA, 53 bp, Artificial Sequence; identical to SEQ ID NO: 21773
  Description of Artificial Sequence: Synthetic walnut; 5' sequence and inner sequence

SEQ ID NO: 29628 - DNA, 53 bp, Artificial Sequence; identical to SEQ ID NO: 1204
  Description of Artificial Sequence: Synthetic walnut; 5' sequence and inner sequence

SEQ ID NO: 29629 - DNA, 53 bp, Artificial Sequence; identical to SEQ ID NO: 1505
  Description of Artificial Sequence: Synthetic walnut; 5' sequence and inner sequence

SEQ ID NO: 29630 - DNA, 53 bp, Artificial Sequence; identical to SEQ ID NO: 5933
  Description of Artificial Sequence: Synthetic walnut; 5' sequence and inner sequence

SEQ ID NO: 29631 - DNA, 53 bp, Artificial Sequence; identical to SEQ ID NO: 17531
  Description of Artificial Sequence: Synthetic walnut; 5' sequence and inner sequence

SEQ ID NO: 29632 - DNA, 53 bp, Artificial Sequence; identical to SEQ ID NO: 21961
  Description of Artificial Sequence: Synthetic walnut; 5' sequence and inner sequence

SEQ ID NO: 29633 - DNA, 53 bp, Artificial Sequence; identical to SEQ ID NO: 1237
  Description of Artificial Sequence: Synthetic walnut; 5' sequence and inner sequence

SEQ ID NO: 29634 - DNA, 53 bp, Artificial Sequence; identical to SEQ ID NO: 1196
  Description of Artificial Sequence: Synthetic walnut; 5' sequence and inner sequence

SEQ ID NO: 29635 - DNA, 53 bp, Artificial Sequence; identical to SEQ ID NO: 21530
  Description of Artificial Sequence: Synthetic walnut; 5' sequence and inner sequence

SEQ ID NO: 29636 - DNA, 53 bp, Artificial Sequence
  Description of Artificial Sequence: Synthetic walnut; 5' sequence and inner sequence
tagggaagagaaggacatatgatgcgccacgtgacgtactgtgcctcgacgcg

SEQ ID NO: 29637 - DNA, 53 bp, Artificial Sequence; identical to SEQ ID NO: 13743
  Description of Artificial Sequence: Synthetic walnut; 5' sequence and inner sequence

SEQ ID NO: 29638 - DNA, 53 bp, Artificial Sequence; identical to SEQ ID NO: 1703
  Description of Artificial Sequence: Synthetic walnut; 5' sequence and inner sequence

SEQ ID NO: 29639 - DNA, 53 bp, Artificial Sequence; identical to SEQ ID NO: 1850
  Description of Artificial Sequence: Synthetic walnut; 5' sequence and inner sequence

SEQ ID NO: 29640 - DNA, 53 bp, Artificial Sequence; identical to SEQ ID NO: 1090
  Description of Artificial Sequence: Synthetic walnut; 5' sequence and inner sequence

SEQ ID NO: 29641 - DNA, 53 bp, Artificial Sequence; identical to SEQ ID NO: 13821
  Description of Artificial Sequence: Synthetic walnut; 5' sequence and inner sequence

SEQ ID NO: 29642 - DNA, 53 bp, Artificial Sequence; identical to SEQ ID NO: 1645
  Description of Artificial Sequence: Synthetic walnut; 5' sequence and inner sequence

SEQ ID NO: 29643 - DNA, 53 bp, Artificial Sequence
  Description of Artificial Sequence: Synthetic walnut; 5' sequence and inner sequence
tagggaagagaaggacatatgatcgcaccgtgtggcatgtgacactgcgcgca

SEQ ID NO: 29644 - DNA, 53 bp, Artificial Sequence
  Description of Artificial Sequence: Synthetic walnut; 5' sequence and inner sequence
tagggaagagaaggacatatgatggcctgcgatggatgtggtgtacccagtcc

SEQ ID NO: 29645 - DNA, 53 bp, Artificial Sequence
  Description of Artificial Sequence: Synthetic walnut; 5' sequence and inner sequence
tagggaagagaaggacatatgatggacgcatcgccccttcgtgtggacaggta

SEQ ID NO: 29646 - DNA, 53 bp, Artificial Sequence
  Description of Artificial Sequence: Synthetic walnut; 5' sequence and inner sequence
tagggaagagaaggacatatgatggcctgcgatggatgtggttgtgcttgttt

SEQ ID NO: 29647 - DNA, 53 bp, Artificial Sequence; identical to SEQ ID NO: 13700
  Description of Artificial Sequence: Synthetic walnut; 5' sequence and inner sequence

SEQ ID NO: 29648 - DNA, 53 bp, Artificial Sequence; identical to SEQ ID NO: 1152
  Description of Artificial Sequence: Synthetic walnut; 5' sequence and inner sequence

SEQ ID NO: 29649 - DNA, 53 bp, Artificial Sequence; identical to SEQ ID NO: 1182
  Description of Artificial Sequence: Synthetic walnut; 5' sequence and inner sequence

SEQ ID NO: 29650 - DNA, 53 bp, Artificial Sequence; identical to SEQ ID NO: 17605
  Description of Artificial Sequence: Synthetic walnut; 5' sequence and inner sequence

SEQ ID NO: 29651 - DNA, 53 bp, Artificial Sequence; identical to SEQ ID NO: 17352
  Description of Artificial Sequence: Synthetic walnut; 5' sequence and inner sequence

SEQ ID NO: 29652 - DNA, 53 bp, Artificial Sequence
  Description of Artificial Sequence: Synthetic walnut; 5' sequence and inner sequence
tagggaagagaaggacatatgattgacgcatcgccccttcgagtggacaggta

SEQ ID NO: 29653 - DNA, 53 bp, Artificial Sequence
  Description of Artificial Sequence: Synthetic walnut; 5' sequence and inner sequence
tagggaagagaaggacatatgatggcctgcgatggatgcgtgcgtgtattagc

SEQ ID NO: 29654 - DNA, 53 bp, Artificial Sequence; identical to SEQ ID NO: 17999
  Description of Artificial Sequence: Synthetic walnut; 5' sequence and inner sequence

SEQ ID NO: 29655 - DNA, 53 bp, Artificial Sequence; identical to SEQ ID NO: 1867
  Description of Artificial Sequence: Synthetic walnut; 5' sequence and inner sequence

SEQ ID NO: 29656 - DNA, 53 bp, Artificial Sequence; identical to SEQ ID NO: 1673
  Description of Artificial Sequence: Synthetic walnut; 5' sequence and inner sequence

SEQ ID NO: 29657 - DNA, 53 bp, Artificial Sequence
  Description of Artificial Sequence: Synthetic walnut; 5' sequence and inner sequence
tagggaagagaaggacatatgatggacgcatctccccttcgagtggacaggta

SEQ ID NO: 29658 - DNA, 53 bp, Artificial Sequence; identical to SEQ ID NO: 21722
  Description of Artificial Sequence: Synthetic walnut; 5' sequence and inner sequence

SEQ ID NO: 29659 - DNA, 53 bp, Artificial Sequence
  Description of Artificial Sequence: Synthetic walnut; 5' sequence and inner sequence
tagggaagagaaggacatatgatcgcaccgaacgcgtacgtggctacgtgacg

SEQ ID NO: 29660 - DNA, 52 bp, Artificial Sequence
  Description of Artificial Sequence: Synthetic walnut; 5' sequence and inner sequence
tagggaagagaaggacatatgatggacgcaacgtacgtacttgacgtgtgca

SEQ ID NO: 29661 - DNA, 53 bp, Artificial Sequence
  Description of Artificial Sequence: Synthetic walnut; 5' sequence and inner sequence
tagggaagagaaggacatatgatggccaatgcgccccttcgagtggacaggta

SEQ ID NO: 29662 - DNA, 53 bp, Artificial Sequence
  Description of Artificial Sequence: Synthetic walnut; 5' sequence and inner sequence
tagggaagagaaggacatatgatggcctgcgatggatgtggaaatgcgacgtc

SEQ ID NO: 29663 - DNA, 53 bp, Artificial Sequence; identical to SEQ ID NO: 1097
  Description of Artificial Sequence: Synthetic walnut; 5' sequence and inner sequence

SEQ ID NO: 29664 - DNA, 53 bp, Artificial Sequence; identical to SEQ ID NO: 5890
  Description of Artificial Sequence: Synthetic walnut; 5' sequence and inner sequence

SEQ ID NO: 29665 - DNA, 53 bp, Artificial Sequence
  Description of Artificial Sequence: Synthetic walnut; 5' sequence and inner sequence
tagggaagagaaggacatatgatcgtaacgcaacgtacgcacgacgcaccgtg

SEQ ID NO: 29666 - DNA, 53 bp, Artificial Sequence
  Description of Artificial Sequence: Synthetic walnut; 5' sequence and inner sequence
tagggaagagaaggacatatgatggacgcatcgccccttcgagttgacaggta

SEQ ID NO: 29667 - DNA, 53 bp, Artificial Sequence; identical to SEQ ID NO: 21583
  Description of Artificial Sequence: Synthetic walnut; 5' sequence and inner sequence

SEQ ID NO: 29668 - DNA, 53 bp, Artificial Sequence
  Description of Artificial Sequence: Synthetic walnut; 5' sequence and inner sequence
tagggaagagaaggacatatgatgcatcgcaacgtgacgtacctgctgccacc

SEQ ID NO: 29669 - DNA, 53 bp, Artificial Sequence; identical to SEQ ID NO: 1107
  Description of Artificial Sequence: Synthetic walnut; 5' sequence and inner sequence

SEQ ID NO: 29670 - DNA, 53 bp, Artificial Sequence
  Description of Artificial Sequence: Synthetic walnut; 5' sequence and inner sequence
tagggaagagaaggacatatgatggtcacagcgtacctcaacgtggacgtgca

SEQ ID NO: 29671 - DNA, 53 bp, Artificial Sequence; identical to SEQ ID NO: 1418
  Description of Artificial Sequence: Synthetic walnut; 5' sequence and inner sequence

SEQ ID NO: 29672 - DNA, 53 bp, Artificial Sequence
  Description of Artificial Sequence: Synthetic walnut; 5' sequence and inner sequence
tagggaagagaaggacatatgatggccccagcgtacctcaacgtggacgtgca

SEQ ID NO: 29673 - DNA, 53 bp, Artificial Sequence; identical to SEQ ID NO: 5621
  Description of Artificial Sequence: Synthetic walnut; 5' sequence and inner sequence

SEQ ID NO: 29674 - DNA, 53 bp, Artificial Sequence
  Description of Artificial Sequence: Synthetic walnut; 5' sequence and inner sequence
tagggaagagaaggacatatgatcgtgcgcaacgtagtcaccgtgcatgcaca

SEQ ID NO: 29675 - DNA, 53 bp, Artificial Sequence; identical to SEQ ID NO: 6000
  Description of Artificial Sequence: Synthetic walnut; 5' sequence and inner sequence

SEQ ID NO: 29676 - DNA, 53 bp, Artificial Sequence; identical to SEQ ID NO: 5898
  Description of Artificial Sequence: Synthetic walnut; 5' sequence and inner sequence

SEQ ID NO: 29677 - DNA, 53 bp, Artificial Sequence
  Description of Artificial Sequence: Synthetic walnut; 5' sequence and inner sequence
tagggaagagaaggacatatgattgacgcacagaccgtacgtaccatgccacg

SEQ ID NO: 29678 - DNA, 53 bp, Artificial Sequence
  Description of Artificial Sequence: Synthetic walnut; 5' sequence and inner sequence
tagggaagagaaggacatatgatcgcatgcacgcacctacacgtgggcacgta

SEQ ID NO: 29679 - DNA, 53 bp, Artificial Sequence
  Description of Artificial Sequence: Synthetic walnut; 5' sequence and inner sequence
tagggaagagaaggacatatgatcgatacgcaacgcacaccgcccacgtcacg

SEQ ID NO: 29680 - DNA, 53 bp, Artificial Sequence; identical to SEQ ID NO: 1487
  Description of Artificial Sequence: Synthetic walnut; 5' sequence and inner sequence

SEQ ID NO: 29681 - DNA, 53 bp, Artificial Sequence
  Description of Artificial Sequence: Synthetic walnut; 5' sequence and inner sequence
tagggaagagaaggacatatgatcgcaccgtcgatacgtcatgcacgctaaca

SEQ ID NO: 29682 - DNA, 53 bp, Artificial Sequence
  Description of Artificial Sequence: Synthetic walnut; 5' sequence and inner sequence
tagggaagagaaggacatatgatacgtcacgcgtcaaggcacagtgcgtcacg

SEQ ID NO: 29683 - DNA, 53 bp, Artificial Sequence
  Description of Artificial Sequence: Synthetic walnut; 5' sequence and inner sequence
tagggaagagaaggacatatgatcgcaccaacggcatgcacacgtcgtacgcg

SEQ ID NO: 29684 - DNA, 53 bp, Artificial Sequence; identical to SEQ ID NO: 21594
  Description of Artificial Sequence: Synthetic walnut; 5' sequence and inner sequence

SEQ ID NO: 29685 - DNA, 53 bp, Artificial Sequence; identical to SEQ ID NO: 21880
  Description of Artificial Sequence: Synthetic walnut; 5' sequence and inner sequence

SEQ ID NO: 29686 - DNA, 54 bp, Artificial Sequence
  Description of Artificial Sequence: Synthetic walnut; 5' sequence and inner sequence
tagggaagagaaggacatatgatggcctgcgatggatggggacgtgacgccgtc

SEQ ID NO: 29687 - DNA, 53 bp, Artificial Sequence; identical to SEQ ID NO: 1189
  Description of Artificial Sequence: Synthetic walnut; 5' sequence and inner sequence

SEQ ID NO: 29688 - DNA, 53 bp, Artificial Sequence
  Description of Artificial Sequence: Synthetic walnut; 5' sequence and inner sequence
tagggaagagaaggacatatgatgcgtcacggcagcatgcgtacgatcgcacg

SEQ ID NO: 29689 - DNA, 53 bp, Artificial Sequence; identical to SEQ ID NO: 1955
  Description of Artificial Sequence: Synthetic walnut; 5' sequence and inner sequence

SEQ ID NO: 29690 - DNA, 53 bp, Artificial Sequence; identical to SEQ ID NO: 1111
  Description of Artificial Sequence: Synthetic walnut; 5' sequence and inner sequence

SEQ ID NO: 29691 - DNA, 53 bp, Artificial Sequence; identical to SEQ ID NO: 17931
  Description of Artificial Sequence: Synthetic walnut; 5' sequence and inner sequence

SEQ ID NO: 29692 - DNA, 53 bp, Artificial Sequence
  Description of Artificial Sequence: Synthetic walnut; 5' sequence and inner sequence
tagggaagagaaggacatatgatggcctgcgatggatgtgtgcgtgcattagc

SEQ ID NO: 29693 - DNA, 53 bp, Artificial Sequence
  Description of Artificial Sequence: Synthetic walnut; 5' sequence and inner sequence
tagggaagagaaggacatatgatcacgcatcgtgacgtagtgttcgcgccacg

SEQ ID NO: 29694 - DNA, 53 bp, Artificial Sequence; identical to SEQ ID NO: 5694
  Description of Artificial Sequence: Synthetic walnut; 5' sequence and inner sequence

SEQ ID NO: 29695 - DNA, 53 bp, Artificial Sequence; identical to SEQ ID NO: 5882
  Description of Artificial Sequence: Synthetic walnut; 5' sequence and inner sequence

SEQ ID NO: 29696 - DNA, 53 bp, Artificial Sequence; identical to SEQ ID NO: 1472
  Description of Artificial Sequence: Synthetic walnut; 5' sequence and inner sequence

SEQ ID NO: 29697 - DNA, 53 bp, Artificial Sequence
  Description of Artificial Sequence: Synthetic walnut; 5' sequence and inner sequence
tagggaagagaaggacatatgatggcatgcacgcacctacacgggggcacgta

SEQ ID NO: 29698 - DNA, 53 bp, Artificial Sequence; identical to SEQ ID NO: 21570
  Description of Artificial Sequence: Synthetic walnut; 5' sequence and inner sequence

SEQ ID NO: 29699 - DNA, 53 bp, Artificial Sequence
  Description of Artificial Sequence: Synthetic walnut; 5' sequence and inner sequence
tagggaagagaaggacatatgatcgtacgatgaccgcatggcacgtcgtcacg

SEQ ID NO: 29700 - DNA, 53 bp, Artificial Sequence
  Description of Artificial Sequence: Synthetic walnut; 5' sequence and inner sequence
tagggaagagaaggacatatgatcacgtaacgcaccgtaccacgacatgcgca

SEQ ID NO: 29701 - DNA, 53 bp, Artificial Sequence
  Description of Artificial Sequence: Synthetic walnut; 5' sequence and inner sequence
tagggaagagaaggacatatgatacgacaacgcagcaccgtgaggcaggcacg

SEQ ID NO: 29702 - DNA, 53 bp, Artificial Sequence
  Description of Artificial Sequence: Synthetic walnut; 5' sequence and inner sequence
tagggaagagaaggacatatgatggccgaacgcgcctacaagtgttgcatgga

SEQ ID NO: 29703 - DNA, 53 bp, Artificial Sequence; identical to SEQ ID NO: 21913
  Description of Artificial Sequence: Synthetic walnut; 5' sequence and inner sequence

SEQ ID NO: 29704 - DNA, 53 bp, Artificial Sequence
  Description of Artificial Sequence: Synthetic walnut; 5' sequence and inner sequence
tagggaagagaaggacatatgatgcacgatacgtaccgtggcatgtgcgcaca

SEQ ID NO: 29705 - DNA, 53 bp, Artificial Sequence
  Description of Artificial Sequence: Synthetic walnut; 5' sequence and inner sequence
tagggaagagaaggacatatgatcgcaacggacgtgacgcatcgatctgcacg

SEQ ID NO: 29706 - DNA, 53 bp, Artificial Sequence; identical to SEQ ID NO: 1916
  Description of Artificial Sequence: Synthetic walnut; 5' sequence and inner sequence

SEQ ID NO: 29707 - DNA, 53 bp, Artificial Sequence; identical to SEQ ID NO: 21341
  Description of Artificial Sequence: Synthetic walnut; 5' sequence and inner sequence

SEQ ID NO: 29708 - DNA, 53 bp, Artificial Sequence; identical to SEQ ID NO: 21903
  Description of Artificial Sequence: Synthetic walnut; 5' sequence and inner sequence

SEQ ID NO: 29709 - DNA, 53 bp, Artificial Sequence
  Description of Artificial Sequence: Synthetic walnut; 5' sequence and inner sequence
tagggaagagaaggacatatgatgtcatgcgatggatgtgtgcgtgtattagc

SEQ ID NO: 29710 - DNA, 53 bp, Artificial Sequence; identical to SEQ ID NO: 17634
  Description of Artificial Sequence: Synthetic walnut; 5' sequence and inner sequence

SEQ ID NO: 29711 - DNA, 53 bp, Artificial Sequence
  Description of Artificial Sequence: Synthetic walnut; 5' sequence and inner sequence
tagggaagagaaggacatatgatggacgcatcgccccttcgagtgtacaggta

SEQ ID NO: 29712 - DNA, 53 bp, Artificial Sequence
  Description of Artificial Sequence: Synthetic walnut; 5' sequence and inner sequence
tagggaagagaaggacatatgatgctccgtacgatggctgtgctggtgatgta

SEQ ID NO: 29713 - DNA, 53 bp, Artificial Sequence
  Description of Artificial Sequence: Synthetic walnut; 5' sequence and inner sequence
tagggaagagaaggacatatgatgacacgcaacgcatcctaggtatgtacgca

SEQ ID NO: 29714 - DNA, 53 bp, Artificial Sequence; identical to SEQ ID NO: 1923
  Description of Artificial Sequence: Synthetic walnut; 5' sequence and inner sequence

SEQ ID NO: 29715 - DNA, 53 bp, Artificial Sequence; identical to SEQ ID NO: 1165
  Description of Artificial Sequence: Synthetic walnut; 5' sequence and inner sequence

SEQ ID NO: 29716 - DNA, 53 bp, Artificial Sequence; identical to SEQ ID NO: 21972
  Description of Artificial Sequence: Synthetic walnut; 5' sequence and inner sequence

SEQ ID NO: 29717 - DNA, 53 bp, Artificial Sequence; identical to SEQ ID NO: 21580
  Description of Artificial Sequence: Synthetic walnut; 5' sequence and inner sequence

SEQ ID NO: 29718 - DNA, 53 bp, Artificial Sequence; identical to SEQ ID NO: 1373
  Description of Artificial Sequence: Synthetic walnut; 5' sequence and inner sequence

SEQ ID NO: 29719 - DNA, 53 bp, Artificial Sequence; identical to SEQ ID NO: 21519
  Description of Artificial Sequence: Synthetic walnut; 5' sequence and inner sequence

SEQ ID NO: 29720 - DNA, 53 bp, Artificial Sequence
  Description of Artificial Sequence: Synthetic walnut; 5' sequence and inner sequence
tagggaagagaaggacatatgatcgatgcacgtaacgaccgtgtctgtacgca

SEQ ID NO: 29721 - DNA, 53 bp, Artificial Sequence; identical to SEQ ID NO: 1490
  Description of Artificial Sequence: Synthetic walnut; 5' sequence and inner sequence

SEQ ID NO: 29722 - DNA, 53 bp, Artificial Sequence
  Description of Artificial Sequence: Synthetic walnut; 5' sequence and inner sequence
tagggaagagaaggacatatgatcgcgccgtcgatacgtcatgcacgctgaca

SEQ ID NO: 29723 - DNA, 53 bp, Artificial Sequence; identical to SEQ ID NO: 1511
  Description of Artificial Sequence: Synthetic walnut; 5' sequence and inner sequence

SEQ ID NO: 29724 - DNA, 53 bp, Artificial Sequence; identical to SEQ ID NO: 21683
  Description of Artificial Sequence: Synthetic walnut; 5' sequence and inner sequence

SEQ ID NO: 29725 - DNA, 53 bp, Artificial Sequence; identical to SEQ ID NO: 21653
  Description of Artificial Sequence: Synthetic walnut; 5' sequence and inner sequence

SEQ ID NO: 29726 - DNA, 53 bp, Artificial Sequence; identical to SEQ ID NO: 17503
  Description of Artificial Sequence: Synthetic walnut; 5' sequence and inner sequence

SEQ ID NO: 29727 - DNA, 48 bp, Artificial Sequence; identical to SEQ ID NO: 1427
  Description of Artificial Sequence: Synthetic walnut; 5' sequence and inner sequence

SEQ ID NO: 29728 - DNA, 53 bp, Artificial Sequence; identical to SEQ ID NO: 1528
  Description of Artificial Sequence: Synthetic walnut; 5' sequence and inner sequence

SEQ ID NO: 29729 - DNA, 53 bp, Artificial Sequence; identical to SEQ ID NO: 17412
  Description of Artificial Sequence: Synthetic walnut; 5' sequence and inner sequence

SEQ ID NO: 29730 - DNA, 53 bp, Artificial Sequence; identical to SEQ ID NO: 1741
  Description of Artificial Sequence: Synthetic walnut; 5' sequence and inner sequence

SEQ ID NO: 29731 - DNA, 53 bp, Artificial Sequence; identical to SEQ ID NO: 21385
  Description of Artificial Sequence: Synthetic walnut; 5' sequence and inner sequence

SEQ ID NO: 29732 - DNA, 53 bp, Artificial Sequence; identical to SEQ ID NO: 1622
  Description of Artificial Sequence: Synthetic walnut; 5' sequence and inner sequence

SEQ ID NO: 29733 - DNA, 53 bp, Artificial Sequence; identical to SEQ ID NO: 1695
  Description of Artificial Sequence: Synthetic walnut; 5' sequence and inner sequence

SEQ ID NO: 29734 - DNA, 53 bp, Artificial Sequence; identical to SEQ ID NO: 5617
  Description of Artificial Sequence: Synthetic walnut; 5' sequence and inner sequence

SEQ ID NO: 29735 - DNA, 53 bp, Artificial Sequence
  Description of Artificial Sequence: Synthetic walnut; 5' sequence and inner sequence
tagggaagagaaggacatatgatcatgacggcatgacgtactgtgactgcgcg

SEQ ID NO: 29736 - DNA, 53 bp, Artificial Sequence; identical to SEQ ID NO: 17513
  Description of Artificial Sequence: Synthetic walnut; 5' sequence and inner sequence

SEQ ID NO: 29737 - DNA, 53 bp, Artificial Sequence
  Description of Artificial Sequence: Synthetic walnut; 5' sequence and inner sequence
tagggaagagaaggacatatgatcgtaacgcagcggacgacacgttaggcacg

SEQ ID NO: 29738 - DNA, 53 bp, Artificial Sequence; identical to SEQ ID NO: 21514
  Description of Artificial Sequence: Synthetic walnut; 5' sequence and inner sequence

SEQ ID NO: 29739 - DNA, 53 bp, Artificial Sequence
  Description of Artificial Sequence: Synthetic walnut; 5' sequence and inner sequence
tagggaagagaaggacatatgatgcatcacgtcacgcatgttcggcctgcacg

SEQ ID NO: 29740 - DNA, 53 bp, Artificial Sequence
  Description of Artificial Sequence: Synthetic walnut; 5' sequence and inner sequence
tagggaagagaaggacatatgatggctacagcgtacctcaacgtggacgtgca

SEQ ID NO: 29741 - DNA, 53 bp, Artificial Sequence
  Description of Artificial Sequence: Synthetic walnut; 5' sequence and inner sequence
tagggaagagaaggacatatgatggacgcagcgtgacgtaacgtgcatgcgta

SEQ ID NO: 29742 - DNA, 53 bp, Artificial Sequence; identical to SEQ ID NO: 21657
  Description of Artificial Sequence: Synthetic walnut; 5' sequence and inner sequence

SEQ ID NO: 29743 - DNA, 53 bp, Artificial Sequence
  Description of Artificial Sequence: Synthetic walnut; 5' sequence and inner sequence
tagggaagagaaggacatatgatacgcaacgcaagtacgtatcgtgcgacacg

SEQ ID NO: 29744 - DNA, 53 bp, Artificial Sequence
  Description of Artificial Sequence: Synthetic walnut; 5' sequence and inner sequence
tagggaagagaaggacatatgatgacacgtcggaccgtacgacacgttgcgtg

SEQ ID NO: 29745 - DNA, 53 bp, Artificial Sequence
  Description of Artificial Sequence: Synthetic walnut; 5' sequence and inner sequence
tagggaagagaaggacatatgatggccggcgatggatgtgggttgtgctcgtc

SEQ ID NO: 29746 - DNA, 53 bp, Artificial Sequence
  Description of Artificial Sequence: Synthetic walnut; 5' sequence and inner sequence
tagggaagagaaggacatatgatggcatgcgatgaacgagggatgatgcgtca

SEQ ID NO: 29747 - DNA, 53 bp, Artificial Sequence
  Description of Artificial Sequence: Synthetic walnut; 5' sequence and inner sequence
tagggaagagaaggacatatgatgtccacagcgtacctcaacgtggacgtgca

SEQ ID NO: 29748 - DNA, 53 bp, Artificial Sequence; identical to SEQ ID NO: 1705
  Description of Artificial Sequence: Synthetic walnut; 5' sequence and inner sequence

SEQ ID NO: 29749 - DNA, 53 bp, Artificial Sequence; identical to SEQ ID NO: 1404
  Description of Artificial Sequence: Synthetic walnut; 5' sequence and inner sequence

SEQ ID NO: 29750 - DNA, 53 bp, Artificial Sequence
  Description of Artificial Sequence: Synthetic walnut; 5' sequence and inner sequence
tagggaagagaaggacatatgatcacgcgcagacacgatggcacggcgacacg

SEQ ID NO: 29751 - DNA, 53 bp, Artificial Sequence
  Description of Artificial Sequence: Synthetic walnut; 5' sequence and inner sequence
tagggaagagaaggacatatgatgacgcgaacacggcgcatacgtacgtcacg

SEQ ID NO: 29752 - DNA, 53 bp, Artificial Sequence; identical to SEQ ID NO: 5854
  Description of Artificial Sequence: Synthetic walnut; 5' sequence and inner sequence

SEQ ID NO: 29753 - DNA, 53 bp, Artificial Sequence
  Description of Artificial Sequence: Synthetic walnut; 5' sequence and inner sequence
tagggaagagaaggacatatgatgcgtcacgtgcacgatccttccgtcatgcg

SEQ ID NO: 29754 - DNA, 53 bp, Artificial Sequence
  Description of Artificial Sequence: Synthetic walnut; 5' sequence and inner sequence
tagggaagagaaggacatatgatgcgtgccgatgacgtgcgtgtgacgtgatg

SEQ ID NO: 29755 - DNA, 53 bp, Artificial Sequence
  Description of Artificial Sequence: Synthetic walnut; 5' sequence and inner sequence
tagggaagagaaggacatatgatgcgacacggcatacggtgcgtacgtgcaca

SEQ ID NO: 29756 - DNA, 53 bp, Artificial Sequence
  Description of Artificial Sequence: Synthetic walnut; 5' sequence and inner sequence
tagggaagagaaggacatatgatggcatgcgatgaacgaggcgtgatgcgtca

SEQ ID NO: 29757 - DNA, 53 bp, Artificial Sequence
  Description of Artificial Sequence: Synthetic walnut; 5' sequence and inner sequence
tagggaagagaaggacatatgatcgacgcagcgcaacgaccgtaccgcacacg

SEQ ID NO: 29758 - DNA, 53 bp, Artificial Sequence; identical to SEQ ID NO: 9810
  Description of Artificial Sequence: Synthetic walnut; 5' sequence and inner sequence

SEQ ID NO: 29759 - DNA, 53 bp, Artificial Sequence; identical to SEQ ID NO: 1226
  Description of Artificial Sequence: Synthetic walnut; 5' sequence and inner sequence

SEQ ID NO: 29760 - DNA, 53 bp, Artificial Sequence
  Description of Artificial Sequence: Synthetic walnut; 5' sequence and inner sequence
tagggaagagaaggacatatgatggcatcacgtacacatggcctcgcgtcacg

SEQ ID NO: 29761 - DNA, 53 bp, Artificial Sequence
  Description of Artificial Sequence: Synthetic walnut; 5' sequence and inner sequence
tagggaagagaaggacatatgatggcctgcgatggatgggggcttgcactgtc

SEQ ID NO: 29762 - DNA, 53 bp, Artificial Sequence
  Description of Artificial Sequence: Synthetic walnut; 5' sequence and inner sequence
tagggaagagaaggacatatgatcgcaccgtcgatacgtcatgcacgctgaaa

SEQ ID NO: 29763 - DNA, 53 bp, Artificial Sequence; identical to SEQ ID NO: 21672
  Description of Artificial Sequence: Synthetic walnut; 5' sequence and inner sequence

SEQ ID NO: 29764 - DNA, 53 bp, Artificial Sequence; identical to SEQ ID NO: 1375
  Description of Artificial Sequence: Synthetic walnut; 5' sequence and inner sequence

SEQ ID NO: 29765 - DNA, 53 bp, Artificial Sequence
  Description of Artificial Sequence: Synthetic walnut; 5' sequence and inner sequence
tagggaagagaaggacatatgatggccgaacggagctacacggggttgtggac

SEQ ID NO: 29766 - DNA, 53 bp, Artificial Sequence; identical to SEQ ID NO: 21466
  Description of Artificial Sequence: Synthetic walnut; 5' sequence and inner sequence

SEQ ID NO: 29767 - DNA, 53 bp, Artificial Sequence; identical to SEQ ID NO: 9949
  Description of Artificial Sequence: Synthetic walnut; 5' sequence and inner sequence

SEQ ID NO: 29768 - DNA, 53 bp, Artificial Sequence; identical to SEQ ID NO: 1284
  Description of Artificial Sequence: Synthetic walnut; 5' sequence and inner sequence

SEQ ID NO: 29769 - DNA, 53 bp, Artificial Sequence; identical to SEQ ID NO: 21573
  Description of Artificial Sequence: Synthetic walnut; 5' sequence and inner sequence

SEQ ID NO: 29770 - DNA, 53 bp, Artificial Sequence; identical to SEQ ID NO: 5691
  Description of Artificial Sequence: Synthetic walnut; 5' sequence and inner sequence

SEQ ID NO: 29771 - DNA, 53 bp, Artificial Sequence
  Description of Artificial Sequence: Synthetic walnut; 5' sequence and inner sequence
tagggaagagaaggacatatgatccacgcagacgtcacgcatcgtaccgcacg

SEQ ID NO: 29772 - DNA, 53 bp, Artificial Sequence
  Description of Artificial Sequence: Synthetic walnut; 5' sequence and inner sequence
tagggaagagaaggacatatgatggccacagcgtatctcaacgtggacgtgca

SEQ ID NO: 29773 - DNA, 53 bp, Artificial Sequence
  Description of Artificial Sequence: Synthetic walnut; 5' sequence and inner sequence
tagggaagagaaggacatatgatggcctgcgatggatgggggctggggcagtc

SEQ ID NO: 29774 - DNA, 53 bp, Artificial Sequence; identical to SEQ ID NO: 17627
  Description of Artificial Sequence: Synthetic walnut; 5' sequence and inner sequence

SEQ ID NO: 29775 - DNA, 53 bp, Artificial Sequence; identical to SEQ ID NO: 1169
  Description of Artificial Sequence: Synthetic walnut; 5' sequence and inner sequence

SEQ ID NO: 29776 - DNA, 53 bp, Artificial Sequence
  Description of Artificial Sequence: Synthetic walnut; 5' sequence and inner sequence
tagggaagagaaggacatatgatcgtgccgcaacgtgaggacgtgcatgtgcg

SEQ ID NO: 29777 - DNA, 53 bp, Artificial Sequence
  Description of Artificial Sequence: Synthetic walnut; 5' sequence and inner sequence
tagggaagagaaggacatatgatggcatgcacgcccctacacgtgggcacgta

SEQ ID NO: 29778 - DNA, 53 bp, Artificial Sequence; identical to SEQ ID NO: 21964
  Description of Artificial Sequence: Synthetic walnut; 5' sequence and inner sequence

SEQ ID NO: 29779 - DNA, 53 bp, Artificial Sequence
  Description of Artificial Sequence: Synthetic walnut; 5' sequence and inner sequence
tagggaagagaaggacatatgatggcctgcgatggatgtgtgcttgtattagc

SEQ ID NO: 29780 - DNA, 53 bp, Artificial Sequence
  Description of Artificial Sequence: Synthetic walnut; 5' sequence and inner sequence
tagggaagagaaggacatatgatcgacacacaggcaacatgcgttccgtcacg

SEQ ID NO: 29781 - DNA, 53 bp, Artificial Sequence; identical to SEQ ID NO: 17819
  Description of Artificial Sequence: Synthetic walnut; 5' sequence and inner sequence

SEQ ID NO: 29782 - DNA, 53 bp, Artificial Sequence
  Description of Artificial Sequence: Synthetic walnut; 5' sequence and inner sequence
tagggaagagaaggacatatgatggccgcaacgtaccgtatcgtggccatgtg

SEQ ID NO: 29783 - DNA, 53 bp, Artificial Sequence; identical to SEQ ID NO: 9926
  Description of Artificial Sequence: Synthetic walnut; 5' sequence and inner sequence

SEQ ID NO: 29784 - DNA, 53 bp, Artificial Sequence; identical to SEQ ID NO: 21960
  Description of Artificial Sequence: Synthetic walnut; 5' sequence and inner sequence

SEQ ID NO: 29785 - DNA, 53 bp, Artificial Sequence; identical to SEQ ID NO: 1782
  Description of Artificial Sequence: Synthetic walnut; 5' sequence and inner sequence

SEQ ID NO: 29786 - DNA, 53 bp, Artificial Sequence; identical to SEQ ID NO: 1399
  Description of Artificial Sequence: Synthetic walnut; 5' sequence and inner sequence

SEQ ID NO: 29787 - DNA, 53 bp, Artificial Sequence; identical to SEQ ID NO: 17544
  Description of Artificial Sequence: Synthetic walnut; 5' sequence and inner sequence

SEQ ID NO: 29788 - DNA, 53 bp, Artificial Sequence; identical to SEQ ID NO: 17595
  Description of Artificial Sequence: Synthetic walnut; 5' sequence and inner sequence

SEQ ID NO: 29789 - DNA, 53 bp, Artificial Sequence; identical to SEQ ID NO: 17457
  Description of Artificial Sequence: Synthetic walnut; 5' sequence and inner sequence

SEQ ID NO: 29790 - DNA, 53 bp, Artificial Sequence; identical to SEQ ID NO: 17703
  Description of Artificial Sequence: Synthetic walnut; 5' sequence and inner sequence

SEQ ID NO: 29791 - DNA, 53 bp, Artificial Sequence
  Description of Artificial Sequence: Synthetic walnut; 5' sequence and inner sequence
tagggaagagaaggacatatgatgtcattcctcatcctacacgtgggcacgta

SEQ ID NO: 29792 - DNA, 53 bp, Artificial Sequence
  Description of Artificial Sequence: Synthetic walnut; 5' sequence and inner sequence
tagggaagagaaggacatatgatcgcaccgtggatacgtcatgcacgctgaca

SEQ ID NO: 29793 - DNA, 53 bp, Artificial Sequence
  Description of Artificial Sequence: Synthetic walnut; 5' sequence and inner sequence
tagggaagagaaggacatatgatcgtgacgaacggccaacacgtcacttcgcg

SEQ ID NO: 29794 - DNA, 53 bp, Artificial Sequence
  Description of Artificial Sequence: Synthetic walnut; 5' sequence and inner sequence
tagggaagagaaggacatatgatggcatgcacgcacctacacgtgggcatgta

SEQ ID NO: 29795 - DNA, 53 bp, Artificial Sequence; identical to SEQ ID NO: 1742
  Description of Artificial Sequence: Synthetic walnut; 5' sequence and inner sequence

SEQ ID NO: 29796 - DNA, 53 bp, Artificial Sequence; identical to SEQ ID NO: 1524
  Description of Artificial Sequence: Synthetic walnut; 5' sequence and inner sequence

SEQ ID NO: 29797 - DNA, 53 bp, Artificial Sequence; identical to SEQ ID NO: 5893
  Description of Artificial Sequence: Synthetic walnut; 5' sequence and inner sequence

SEQ ID NO: 29798 - DNA, 53 bp, Artificial Sequence; identical to SEQ ID NO: 9825
  Description of Artificial Sequence: Synthetic walnut; 5' sequence and inner sequence

SEQ ID NO: 29799 - DNA, 53 bp, Artificial Sequence; identical to SEQ ID NO: 1816
  Description of Artificial Sequence: Synthetic walnut; 5' sequence and inner sequence

SEQ ID NO: 29800 - DNA, 53 bp, Artificial Sequence
  Description of Artificial Sequence: Synthetic walnut; 5' sequence and inner sequence
tagggaagagaaggacatatgatcgacaacgcaacgaacagcaggcatgcgtg

SEQ ID NO: 29801 - DNA, 53 bp, Artificial Sequence
  Description of Artificial Sequence: Synthetic walnut; 5' sequence and inner sequence
tagggaagagaaggacatatgatggccacagtgtacctcaacgtggacgtgca

SEQ ID NO: 29802 - DNA, 53 bp, Artificial Sequence; identical to SEQ ID NO: 5881
  Description of Artificial Sequence: Synthetic walnut; 5' sequence and inner sequence

SEQ ID NO: 29803 - DNA, 53 bp, Artificial Sequence; identical to SEQ ID NO: 21914
  Description of Artificial Sequence: Synthetic walnut; 5' sequence and inner sequence

SEQ ID NO: 29804 - DNA, 53 bp, Artificial Sequence; identical to SEQ ID NO: 5814
  Description of Artificial Sequence: Synthetic walnut; 5' sequence and inner sequence

SEQ ID NO: 29805 - DNA, 53 bp, Artificial Sequence
  Description of Artificial Sequence: Synthetic walnut; 5' sequence and inner sequence
tagggaagagaaggacatatgatcgccacgatgtacgtcacgctacatgcaca

SEQ ID NO: 29806 - DNA, 53 bp, Artificial Sequence
  Description of Artificial Sequence: Synthetic walnut; 5' sequence and inner sequence
tagggaagagaaggacatatgatgtcattccgcatcctccacgtgggcacgta

SEQ ID NO: 29807 - DNA, 53 bp, Artificial Sequence; identical to SEQ ID NO: 5364
  Description of Artificial Sequence: Synthetic walnut; 5' sequence and inner sequence

SEQ ID NO: 29808 - DNA, 53 bp, Artificial Sequence
  Description of Artificial Sequence: Synthetic walnut; 5' sequence and inner sequence
tagggaagagaaggacatatgatcgtgcgcgatgaacacgtcctaccgtcacg

SEQ ID NO: 29809 - DNA, 53 bp, Artificial Sequence; identical to SEQ ID NO: 1380
  Description of Artificial Sequence: Synthetic walnut; 5' sequence and inner sequence

SEQ ID NO: 29810 - DNA, 53 bp, Artificial Sequence; identical to SEQ ID NO: 1520
  Description of Artificial Sequence: Synthetic walnut; 5' sequence and inner sequence

SEQ ID NO: 29811 - DNA, 53 bp, Artificial Sequence
  Description of Artificial Sequence: Synthetic walnut; 5' sequence and inner sequence
tagggaagagaaggacatatgatggacgcatcgccacttcgagtggacaggta

SEQ ID NO: 29812 - DNA, 53 bp, Artificial Sequence; identical to SEQ ID NO: 1835
  Description of Artificial Sequence: Synthetic walnut; 5' sequence and inner sequence

SEQ ID NO: 29813 - DNA, 53 bp, Artificial Sequence; identical to SEQ ID NO: 1662
  Description of Artificial Sequence: Synthetic walnut; 5' sequence and inner sequence

SEQ ID NO: 29814 - DNA, 53 bp, Artificial Sequence
  Description of Artificial Sequence: Synthetic walnut; 5' sequence and inner sequence
tagggaagagaaggacatatgatcgaggcagcgtgtgcacgtacgtatgcgca

SEQ ID NO: 29815 - DNA, 53 bp, Artificial Sequence; identical to SEQ ID NO: 17720
  Description of Artificial Sequence: Synthetic walnut; 5' sequence and inner sequence

SEQ ID NO: 29816 - DNA, 54 bp, Artificial Sequence
  Description of Artificial Sequence: Synthetic walnut; 5' sequence and inner sequence
tagggaagagaaggacatatgatggcatgcgatggatgtggacggtgtggtagt

SEQ ID NO: 29817 - DNA, 53 bp, Artificial Sequence; identical to SEQ ID NO: 1301
  Description of Artificial Sequence: Synthetic walnut; 5' sequence and inner sequence

SEQ ID NO: 29818 - DNA, 53 bp, Artificial Sequence
  Description of Artificial Sequence: Synthetic walnut; 5' sequence and inner sequence
tagggaagagaaggacatatgatgcaacacgatgcatacgtgacgcacgcacg

SEQ ID NO: 29819 - DNA, 53 bp, Artificial Sequence
  Description of Artificial Sequence: Synthetic walnut; 5' sequence and inner sequence
tagggaagagaaggacatatgatggacgcatcgccccttcgattggacaggta

SEQ ID NO: 29820 - DNA, 53 bp, Artificial Sequence
  Description of Artificial Sequence: Synthetic walnut; 5' sequence and inner sequence
tagggaagagaaggacatatgatgcaccacacgacagcacgccagcatgcacg

SEQ ID NO: 29821 - DNA, 53 bp, Artificial Sequence
  Description of Artificial Sequence: Synthetic walnut; 5' sequence and inner sequence
tagggaagagaaggacatatgatggccacagcgtccctcaacgtggacgtgca

SEQ ID NO: 29822 - DNA, 53 bp, Artificial Sequence
  Description of Artificial Sequence: Synthetic walnut; 5' sequence and inner sequence
tagggaagagaaggacatatgatgtccgacgatggatgtgggttgtgctcgtc

SEQ ID NO: 29823 - DNA, 53 bp, Artificial Sequence
  Description of Artificial Sequence: Synthetic walnut; 5' sequence and inner sequence
tagggaagagaaggacatatgatgtgcgccacgactccctactcatgggggca

SEQ ID NO: 29824 - DNA, 53 bp, Artificial Sequence
  Description of Artificial Sequence: Synthetic walnut; 5' sequence and inner sequence
tagggaagagaaggacatatgatggcatgcacgcacctacaggtgggcacgta

SEQ ID NO: 29825 - DNA, 53 bp, Artificial Sequence; identical to SEQ ID NO: 13799
  Description of Artificial Sequence: Synthetic walnut; 5' sequence and inner sequence

SEQ ID NO: 29826 - DNA, 53 bp, Artificial Sequence
  Description of Artificial Sequence: Synthetic walnut; 5' sequence and inner sequence
tagggaagagaaggacatatgatgcaccacaacgccgtaacgcacgtcacgca

SEQ ID NO: 29827 - DNA, 53 bp, Artificial Sequence; identical to SEQ ID NO: 5938
  Description of Artificial Sequence: Synthetic walnut; 5' sequence and inner sequence

SEQ ID NO: 29828 - DNA, 53 bp, Artificial Sequence; identical to SEQ ID NO: 17696
  Description of Artificial Sequence: Synthetic walnut; 5' sequence and inner sequence

SEQ ID NO: 29829 - DNA, 53 bp, Artificial Sequence; identical to SEQ ID NO: 1635
  Description of Artificial Sequence: Synthetic walnut; 5' sequence and inner sequence

SEQ ID NO: 29830 - DNA, 53 bp, Artificial Sequence
  Description of Artificial Sequence: Synthetic walnut; 5' sequence and inner sequence
tagggaagagaaggacatatgatgcatgcacgcaacagcacgtgtcctgcgca

SEQ ID NO: 29831 - DNA, 53 bp, Artificial Sequence
  Description of Artificial Sequence: Synthetic walnut; 5' sequence and inner sequence
tagggaagagaaggacatatgatcacgcgacgagacgacatcgacgtaacgcg

SEQ ID NO: 29832 - DNA, 53 bp, Artificial Sequence
  Description of Artificial Sequence: Synthetic walnut; 5' sequence and inner sequence
tagggaagagaaggacatatgatggcctgactgggtgtggttaggaacgcgtc

SEQ ID NO: 29833 - DNA, 53 bp, Artificial Sequence; identical to SEQ ID NO: 1374
  Description of Artificial Sequence: Synthetic walnut; 5' sequence and inner sequence

SEQ ID NO: 29834 - DNA, 53 bp, Artificial Sequence; identical to SEQ ID NO: 21541
  Description of Artificial Sequence: Synthetic walnut; 5' sequence and inner sequence

SEQ ID NO: 29835 - DNA, 53 bp, Artificial Sequence; identical to SEQ ID NO: 1387
  Description of Artificial Sequence: Synthetic walnut; 5' sequence and inner sequence

SEQ ID NO: 29836 - DNA, 53 bp, Artificial Sequence
  Description of Artificial Sequence: Synthetic walnut; 5' sequence and inner sequence
tagggaagagaaggacatatgatcgtcacgcacaggacgacacggtacgcaca

SEQ ID NO: 29837 - DNA, 53 bp, Artificial Sequence; identical to SEQ ID NO: 17264
  Description of Artificial Sequence: Synthetic walnut; 5' sequence and inner sequence

SEQ ID NO: 29838 - DNA, 53 bp, Artificial Sequence; identical to SEQ ID NO: 17862
  Description of Artificial Sequence: Synthetic walnut; 5' sequence and inner sequence

SEQ ID NO: 29839 - DNA, 53 bp, Artificial Sequence
  Description of Artificial Sequence: Synthetic walnut; 5' sequence and inner sequence
tagggaagagaaggacatatgatggacgcaacgtaccgtatcgtggccatgcg

SEQ ID NO: 29840 - DNA, 53 bp, Artificial Sequence; identical to SEQ ID NO: 1637
  Description of Artificial Sequence: Synthetic walnut; 5' sequence and inner sequence

SEQ ID NO: 29841 - DNA, 53 bp, Artificial Sequence; identical to SEQ ID NO: 21817
  Description of Artificial Sequence: Synthetic walnut; 5' sequence and inner sequence

SEQ ID NO: 29842 - DNA, 53 bp, Artificial Sequence; identical to SEQ ID NO: 1644
  Description of Artificial Sequence: Synthetic walnut; 5' sequence and inner sequence

SEQ ID NO: 29843 - DNA, 53 bp, Artificial Sequence
  Description of Artificial Sequence: Synthetic walnut; 5' sequence and inner sequence
tagggaagagaaggacatatgatggccgcacgacccttcatgtggtcttcgta

SEQ ID NO: 29844 - DNA, 53 bp, Artificial Sequence
  Description of Artificial Sequence: Synthetic walnut; 5' sequence and inner sequence
tagggaagagaaggacatatgatgtcattccgcatcctaaacgtgggcacgta

SEQ ID NO: 29845 - DNA, 53 bp, Artificial Sequence; identical to SEQ ID NO: 1181
  Description of Artificial Sequence: Synthetic walnut; 5' sequence and inner sequence

SEQ ID NO: 29846 - DNA, 53 bp, Artificial Sequence
  Description of Artificial Sequence: Synthetic walnut; 5' sequence and inner sequence
tagggaagagaaggacatatgatcgatgcgcaacgtgcagaccatgtgtcgcg

SEQ ID NO: 29847 - DNA, 53 bp, Artificial Sequence; identical to SEQ ID NO: 21502
  Description of Artificial Sequence: Synthetic walnut; 5' sequence and inner sequence

SEQ ID NO: 29848 - DNA, 53 bp, Artificial Sequence
  Description of Artificial Sequence: Synthetic walnut; 5' sequence and inner sequence
tagggaagagaaggacatatgatgcgaacacgatgcagtacgtgacatgcgcg

SEQ ID NO: 29849 - DNA, 53 bp, Artificial Sequence
  Description of Artificial Sequence: Synthetic walnut; 5' sequence and inner sequence
tagggaagagaaggacatatgatccgacctcgacctcggtggacatacgtgac

SEQ ID NO: 29850 - DNA, 53 bp, Artificial Sequence; identical to SEQ ID NO: 1288
  Description of Artificial Sequence: Synthetic walnut; 5' sequence and inner sequence

SEQ ID NO: 29851 - DNA, 53 bp, Artificial Sequence; identical to SEQ ID NO: 21899
  Description of Artificial Sequence: Synthetic walnut; 5' sequence and inner sequence

SEQ ID NO: 29852 - DNA, 53 bp, Artificial Sequence; identical to SEQ ID NO: 5888
  Description of Artificial Sequence: Synthetic walnut; 5' sequence and inner sequence

SEQ ID NO: 29853 - DNA, 53 bp, Artificial Sequence; identical to SEQ ID NO: 1211
  Description of Artificial Sequence: Synthetic walnut; 5' sequence and inner sequence

SEQ ID NO: 29854 - DNA, 53 bp, Artificial Sequence; identical to SEQ ID NO: 9978
  Description of Artificial Sequence: Synthetic walnut; 5' sequence and inner sequence

SEQ ID NO: 29855 - DNA, 53 bp, Artificial Sequence; identical to SEQ ID NO: 1580
  Description of Artificial Sequence: Synthetic walnut; 5' sequence and inner sequence

SEQ ID NO: 29856 - DNA, 53 bp, Artificial Sequence; identical to SEQ ID NO: 1344
  Description of Artificial Sequence: Synthetic walnut; 5' sequence and inner sequence

SEQ ID NO: 29857 - DNA, 53 bp, Artificial Sequence
  Description of Artificial Sequence: Synthetic walnut; 5' sequence and inner sequence
tagggaagagaaggacatatgatggacgcatcgccccttcgagcggacaggta

SEQ ID NO: 29858 - DNA, 53 bp, Artificial Sequence
  Description of Artificial Sequence: Synthetic walnut; 5' sequence and inner sequence
tagggaagagaaggacatatgatcgcaccgtcgattcgtcatgcacgctgaca

SEQ ID NO: 29859 - DNA, 53 bp, Artificial Sequence; identical to SEQ ID NO: 1365
  Description of Artificial Sequence: Synthetic walnut; 5' sequence and inner sequence

SEQ ID NO: 29860 - DNA, 53 bp, Artificial Sequence
  Description of Artificial Sequence: Synthetic walnut; 5' sequence and inner sequence
tagggaagagaaggacatatgatcgatgcagcgtgacgtgcgaggacatcgcg

SEQ ID NO: 29861 - DNA, 53 bp, Artificial Sequence
  Description of Artificial Sequence: Synthetic walnut; 5' sequence and inner sequence
tagggaagagaaggacatatgattgcatgcacgcacctacacgtgggcacgta

SEQ ID NO: 29862 - DNA, 53 bp, Artificial Sequence; identical to SEQ ID NO: 5579
  Description of Artificial Sequence: Synthetic walnut; 5' sequence and inner sequence

SEQ ID NO: 29863 - DNA, 53 bp, Artificial Sequence; identical to SEQ ID NO: 1431
  Description of Artificial Sequence: Synthetic walnut; 5' sequence and inner sequence

SEQ ID NO: 29864 - DNA, 53 bp, Artificial Sequence
  Description of Artificial Sequence: Synthetic walnut; 5' sequence and inner sequence
tagggaagagaaggacatatgatcgtgacgaacgcggactgtacgcatgcacg

SEQ ID NO: 29865 - DNA, 53 bp, Artificial Sequence; identical to SEQ ID NO: 13521
  Description of Artificial Sequence: Synthetic walnut; 5' sequence and inner sequence

SEQ ID NO: 29866 - DNA, 53 bp, Artificial Sequence
  Description of Artificial Sequence: Synthetic walnut; 5' sequence and inner sequence
tagggaagagaaggacatatgatgtcattccgcattctacacgtgggcacgta

SEQ ID NO: 29867 - DNA, 54 bp, Artificial Sequence; identical to SEQ ID NO: 21870
  Description of Artificial Sequence: Synthetic walnut; 5' sequence and inner sequence

SEQ ID NO: 29868 - DNA, 53 bp, Artificial Sequence; identical to SEQ ID NO: 5943
  Description of Artificial Sequence: Synthetic walnut; 5' sequence and inner sequence

SEQ ID NO: 29869 - DNA, 53 bp, Artificial Sequence
  Description of Artificial Sequence: Synthetic walnut; 5' sequence and inner sequence
tagggaagagaaggacatatgatgcgtcacggatcacggtctgcatcgacacg

SEQ ID NO: 29870 - DNA, 53 bp, Artificial Sequence; identical to SEQ ID NO: 1285
  Description of Artificial Sequence: Synthetic walnut; 5' sequence and inner sequence

SEQ ID NO: 29871 - DNA, 53 bp, Artificial Sequence; identical to SEQ ID NO: 1787
  Description of Artificial Sequence: Synthetic walnut; 5' sequence and inner sequence

SEQ ID NO: 29872 - DNA, 53 bp, Artificial Sequence
  Description of Artificial Sequence: Synthetic walnut; 5' sequence and inner sequence
tagggaagagaaggacatatgatcgacacacaccagcacgtcacgacatcgcg

SEQ ID NO: 29873 - DNA, 53 bp, Artificial Sequence; identical to SEQ ID NO: 17950
  Description of Artificial Sequence: Synthetic walnut; 5' sequence and inner sequence

SEQ ID NO: 29874 - DNA, 53 bp, Artificial Sequence
  Description of Artificial Sequence: Synthetic walnut; 5' sequence and inner sequence
tagggaagagaaggacatatgatcgtgccgtggtacgatgccgctacgtcacg

SEQ ID NO: 29875 - DNA, 53 bp, Artificial Sequence; identical to SEQ ID NO: 1943
  Description of Artificial Sequence: Synthetic walnut; 5' sequence and inner sequence

SEQ ID NO: 29876 - DNA, 53 bp, Artificial Sequence
  Description of Artificial Sequence: Synthetic walnut; 5' sequence and inner sequence
tagggaagagaaggacatatgatcacgccacacgtcctgcctgcacgcgcacg

SEQ ID NO: 29877 - DNA, 53 bp, Artificial Sequence
  Description of Artificial Sequence: Synthetic walnut; 5' sequence and inner sequence
tagggaagagaaggacatatgatcgacacgcagagcaacgccatgtcgacgca

SEQ ID NO: 29878 - DNA, 53 bp, Artificial Sequence
  Description of Artificial Sequence: Synthetic walnut; 5' sequence and inner sequence
tagggaagagaaggacatatgatggccacagcgtacctcaacgtggtcgtgca

SEQ ID NO: 29879 - DNA, 53 bp, Artificial Sequence
  Description of Artificial Sequence: Synthetic walnut; 5' sequence and inner sequence
tagggaagagaaggacatatgatgtacgacgcggaccttcaagttggcgtgga

SEQ ID NO: 29880 - DNA, 53 bp, Artificial Sequence
  Description of Artificial Sequence: Synthetic walnut; 5' sequence and inner sequence
tagggaagagaaggacatatgatggcctgcgatgtatgtgtgcgtgtattagc

SEQ ID NO: 29881 - DNA, 53 bp, Artificial Sequence; identical to SEQ ID NO: 21982
  Description of Artificial Sequence: Synthetic walnut; 5' sequence and inner sequence

SEQ ID NO: 29882 - DNA, 53 bp, Artificial Sequence; identical to SEQ ID NO: 17770
  Description of Artificial Sequence: Synthetic walnut; 5' sequence and inner sequence

SEQ ID NO: 29883 - DNA, 53 bp, Artificial Sequence
  Description of Artificial Sequence: Synthetic walnut; 5' sequence and inner sequence
tagggaagagaaggacatatgatgcactgcactgccctacacgtgggaatgga

SEQ ID NO: 29884 - DNA, 53 bp, Artificial Sequence
  Description of Artificial Sequence: Synthetic walnut; 5' sequence and inner sequence
tagggaagagaaggacatatgatgtcactgtgtctgaccgtcaagttgcggca

SEQ ID NO: 29885 - DNA, 53 bp, Artificial Sequence
  Description of Artificial Sequence: Synthetic walnut; 5' sequence and inner sequence
tagggaagagaaggacatatgatcacgccagccaagcacgaggcacacgcgca

SEQ ID NO: 29886 - DNA, 53 bp, Artificial Sequence
  Description of Artificial Sequence: Synthetic walnut; 5' sequence and inner sequence
tagggaagagaaggacatatgatggactgcactgccctacacgtgggaatgga

SEQ ID NO: 29887 - DNA, 52 bp, Artificial Sequence
  Description of Artificial Sequence: Synthetic walnut; 5' sequence and inner sequence
tagggaagagaaggacatatgatggcctgcgatggatgtgggatggtctagc

SEQ ID NO: 29888 - DNA, 53 bp, Artificial Sequence
  Description of Artificial Sequence: Synthetic walnut; 5' sequence and inner sequence
tagggaagagaaggacatatgatggacgcatcgccccttctagtggacaggta

SEQ ID NO: 29889 - DNA, 49 bp, Artificial Sequence; identical to SEQ ID NO: 1822
  Description of Artificial Sequence: Synthetic walnut; 5' sequence and inner sequence

SEQ ID NO: 29890 - DNA, 53 bp, Artificial Sequence; identical to SEQ ID NO: 1920
  Description of Artificial Sequence: Synthetic walnut; 5' sequence and inner sequence

SEQ ID NO: 29891 - DNA, 53 bp, Artificial Sequence
  Description of Artificial Sequence: Synthetic walnut; 5' sequence and inner sequence
tagggaagagaaggacatatgatcgacgcgcaacacggaggcacgatggcacg

SEQ ID NO: 29892 - DNA, 53 bp, Artificial Sequence; identical to SEQ ID NO: 1325
  Description of Artificial Sequence: Synthetic walnut; 5' sequence and inner sequence

SEQ ID NO: 29893 - DNA, 53 bp, Artificial Sequence; identical to SEQ ID NO: 1305
  Description of Artificial Sequence: Synthetic walnut; 5' sequence and inner sequence

SEQ ID NO: 29894 - DNA, 53 bp, Artificial Sequence
  Description of Artificial Sequence: Synthetic walnut; 5' sequence and inner sequence
tagggaagagaaggacatatgatggcatgcacgcacctccacgtgggcacgta

SEQ ID NO: 29895 - DNA, 53 bp, Artificial Sequence; identical to SEQ ID NO: 1776
  Description of Artificial Sequence: Synthetic walnut; 5' sequence and inner sequence

SEQ ID NO: 29896 - DNA, 53 bp, Artificial Sequence
  Description of Artificial Sequence: Synthetic walnut; 5' sequence and inner sequence
tagggaagagaaggacatatgatggcctgcgatggatgtgtgcgtgtattatc

SEQ ID NO: 29897 - DNA, 53 bp, Artificial Sequence; identical to SEQ ID NO: 1500
  Description of Artificial Sequence: Synthetic walnut; 5' sequence and inner sequence

SEQ ID NO: 29898 - DNA, 53 bp, Artificial Sequence; identical to SEQ ID NO: 21998
  Description of Artificial Sequence: Synthetic walnut; 5' sequence and inner sequence

SEQ ID NO: 29899 - DNA, 53 bp, Artificial Sequence; identical to SEQ ID NO: 21807
  Description of Artificial Sequence: Synthetic walnut; 5' sequence and inner sequence

SEQ ID NO: 29900 - DNA, 53 bp, Artificial Sequence; identical to SEQ ID NO: 1391
  Description of Artificial Sequence: Synthetic walnut; 5' sequence and inner sequence

SEQ ID NO: 29901 - DNA, 53 bp, Artificial Sequence; identical to SEQ ID NO: 5960
  Description of Artificial Sequence: Synthetic walnut; 5' sequence and inner sequence

SEQ ID NO: 29902 - DNA, 53 bp, Artificial Sequence; identical to SEQ ID NO: 1290
  Description of Artificial Sequence: Synthetic walnut; 5' sequence and inner sequence

SEQ ID NO: 29903 - DNA, 53 bp, Artificial Sequence
  Description of Artificial Sequence: Synthetic walnut; 5' sequence and inner sequence
tagggaagagaaggacatatgatcgcaccgtctatacttcatgcacgctgaca

SEQ ID NO: 29904 - DNA, 53 bp, Artificial Sequence; identical to SEQ ID NO: 1224
  Description of Artificial Sequence: Synthetic walnut; 5' sequence and inner sequence

SEQ ID NO: 29905 - DNA, 53 bp, Artificial Sequence; identical to SEQ ID NO: 1937
  Description of Artificial Sequence: Synthetic walnut; 5' sequence and inner sequence

SEQ ID NO: 29906 - DNA, 53 bp, Artificial Sequence; identical to SEQ ID NO: 17651
  Description of Artificial Sequence: Synthetic walnut; 5' sequence and inner sequence

SEQ ID NO: 29907 - DNA, 53 bp, Artificial Sequence
  Description of Artificial Sequence: Synthetic walnut; 5' sequence and inner sequence
tagggaagagaaggacatatgatgcacacggtgcgacggtacgacgatgcacg

SEQ ID NO: 29908 - DNA, 53 bp, Artificial Sequence
  Description of Artificial Sequence: Synthetic walnut; 5' sequence and inner sequence
tagggaagagaaggacatatgatcgaacgcacacgcaggatgaggcatgcacg

SEQ ID NO: 29909 - DNA, 53 bp, Artificial Sequence
  Description of Artificial Sequence: Synthetic walnut; 5' sequence and inner sequence
tagggaagagaaggacatatgatggacgcaacgaaccgtatcgtggccatgtg

SEQ ID NO: 29910 - DNA, 53 bp, Artificial Sequence
  Description of Artificial Sequence: Synthetic walnut; 5' sequence and inner sequence
tagggaagagaaggacatatgatcgatgcaacgacacatgcaggacgtgcgcg

SEQ ID NO: 29911 - DNA, 53 bp, Artificial Sequence; identical to SEQ ID NO: 1727
  Description of Artificial Sequence: Synthetic walnut; 5' sequence and inner sequence

SEQ ID NO: 29912 - DNA, 53 bp, Artificial Sequence
  Description of Artificial Sequence: Synthetic walnut; 5' sequence and inner sequence
tagggaagagaaggacatatgatggcatgcacgaacctacacgtgggcacgta

SEQ ID NO: 29913 - DNA, 53 bp, Artificial Sequence; identical to SEQ ID NO: 5987
  Description of Artificial Sequence: Synthetic walnut; 5' sequence and inner sequence

SEQ ID NO: 29914 - DNA, 53 bp, Artificial Sequence
  Description of Artificial Sequence: Synthetic walnut; 5' sequence and inner sequence
tagggaagagaaggacatatgatgtcattccgcatcctacacgtgggcacgtg

SEQ ID NO: 29915 - DNA, 53 bp, Artificial Sequence
  Description of Artificial Sequence: Synthetic walnut; 5' sequence and inner sequence
tagggaagagaaggacatatgatcgtcacgcaacgtggacgacacgatctgcg

SEQ ID NO: 29916 - DNA, 53 bp, Artificial Sequence; identical to SEQ ID NO: 5472
  Description of Artificial Sequence: Synthetic walnut; 5' sequence and inner sequence

SEQ ID NO: 29917 - DNA, 53 bp, Artificial Sequence
  Description of Artificial Sequence: Synthetic walnut; 5' sequence and inner sequence
tagggaagagaaggacatatgatgttccgagctggatgtggcctgtgctatgc

SEQ ID NO: 29918 - DNA, 53 bp, Artificial Sequence
  Description of Artificial Sequence: Synthetic walnut; 5' sequence and inner sequence
tagggaagagaaggacatatgatgcatgcaacgacgcaacctcacgtgacgcg

SEQ ID NO: 29919 - DNA, 53 bp, Artificial Sequence; identical to SEQ ID NO: 5918
  Description of Artificial Sequence: Synthetic walnut; 5' sequence and inner sequence

SEQ ID NO: 29920 - DNA, 53 bp, Artificial Sequence
  Description of Artificial Sequence: Synthetic walnut; 5' sequence and inner sequence
tagggaagagaaggacatatgatcgtgcacggtgaccgcaacgttacgccgcg

SEQ ID NO: 29921 - DNA, 53 bp, Artificial Sequence
  Description of Artificial Sequence: Synthetic walnut; 5' sequence and inner sequence
tagggaagagaaggacatatgatcgtgccaacgtacgacatggttgcgacaca

SEQ ID NO: 29922 - DNA, 53 bp, Artificial Sequence
  Description of Artificial Sequence: Synthetic walnut; 5' sequence and inner sequence
tagggaagagaaggacatatgatccatgtgacctgaccgtcccttcaatgggc

SEQ ID NO: 29923 - DNA, 53 bp, Artificial Sequence; identical to SEQ ID NO: 9678
  Description of Artificial Sequence: Synthetic walnut; 5' sequence and inner sequence

SEQ ID NO: 29924 - DNA, 53 bp, Artificial Sequence
  Description of Artificial Sequence: Synthetic walnut; 5' sequence and inner sequence
tagggaagagaaggacatatgattgcgcacagtacgtacgtcctgccgacacg

SEQ ID NO: 29925 - DNA, 53 bp, Artificial Sequence; identical to SEQ ID NO: 1117
  Description of Artificial Sequence: Synthetic walnut; 5' sequence and inner sequence

SEQ ID NO: 29926 - DNA, 53 bp, Artificial Sequence
  Description of Artificial Sequence: Synthetic walnut; 5' sequence and inner sequence
tagggaagagaaggacatatgatggcctgatcgaacctacaagttgtcgtgga

SEQ ID NO: 29927 - DNA, 53 bp, Artificial Sequence
  Description of Artificial Sequence: Synthetic walnut; 5' sequence and inner sequence
tagggaagagaaggacatatgatcgcaacgcagcaacgtactgtcgtgccgca

SEQ ID NO: 29928 - DNA, 53 bp, Artificial Sequence
  Description of Artificial Sequence: Synthetic walnut; 5' sequence and inner sequence
tagggaagagaaggacatatgatggccacgcgaccgaaagtgagcatggcgtc

SEQ ID NO: 29929 - DNA, 53 bp, Artificial Sequence; identical to SEQ ID NO: 5857
  Description of Artificial Sequence: Synthetic walnut; 5' sequence and inner sequence

SEQ ID NO: 29930 - DNA, 52 bp, Artificial Sequence
  Description of Artificial Sequence: Synthetic walnut; 5' sequence and inner sequence
tagggaagagaaggacatatgatggccggcgatggatgtggttgtgctcgtc

SEQ ID NO: 29931 - DNA, 52 bp, Artificial Sequence; identical to SEQ ID NO: 1873
  Description of Artificial Sequence: Synthetic walnut; 5' sequence and inner sequence

SEQ ID NO: 29932 - DNA, 53 bp, Artificial Sequence
  Description of Artificial Sequence: Synthetic walnut; 5' sequence and inner sequence
tagggaagagaaggacatatgatcgcaccgtgacatgcgcagtacgtaccacg

SEQ ID NO: 29933 - DNA, 53 bp, Artificial Sequence; identical to SEQ ID NO: 17265
  Description of Artificial Sequence: Synthetic walnut; 5' sequence and inner sequence

SEQ ID NO: 29934 - DNA, 53 bp, Artificial Sequence
  Description of Artificial Sequence: Synthetic walnut; 5' sequence and inner sequence
tagggaagagaaggacatatgatcatgcgtacgacaggcagtgtgcatgcacg

SEQ ID NO: 29935 - DNA, 53 bp, Artificial Sequence; identical to SEQ ID NO: 13659
  Description of Artificial Sequence: Synthetic walnut; 5' sequence and inner sequence

SEQ ID NO: 29936 - DNA, 53 bp, Artificial Sequence
  Description of Artificial Sequence: Synthetic walnut; 5' sequence and inner sequence
tagggaagagaaggacatatgatggccacagcgtacttcaacgtggacgtgca

SEQ ID NO: 29937 - DNA, 53 bp, Artificial Sequence; identical to SEQ ID NO: 17818
  Description of Artificial Sequence: Synthetic walnut; 5' sequence and inner sequence

SEQ ID NO: 29938 - DNA, 48 bp, Artificial Sequence; identical to SEQ ID NO: 21907
  Description of Artificial Sequence: Synthetic walnut; 5' sequence and inner sequence

SEQ ID NO: 29939 - DNA, 53 bp, Artificial Sequence
  Description of Artificial Sequence: Synthetic walnut; 5' sequence and inner sequence
tagggaagagaaggacatatgatcacgtggcaacgtactgtcctgactgcacg

SEQ ID NO: 29940 - DNA, 53 bp, Artificial Sequence; identical to SEQ ID NO: 21793
  Description of Artificial Sequence: Synthetic walnut; 5' sequence and inner sequence

SEQ ID NO: 29941 - DNA, 53 bp, Artificial Sequence
  Description of Artificial Sequence: Synthetic walnut; 5' sequence and inner sequence
tagggaagagaaggacatatgatcgcaccgtcgatactccatgcacgctgaca

SEQ ID NO: 29942 - DNA, 53 bp, Artificial Sequence; identical to SEQ ID NO: 1919
  Description of Artificial Sequence: Synthetic walnut; 5' sequence and inner sequence

SEQ ID NO: 29943 - DNA, 53 bp, Artificial Sequence; identical to SEQ ID NO: 1646
  Description of Artificial Sequence: Synthetic walnut; 5' sequence and inner sequence

SEQ ID NO: 29944 - DNA, 53 bp, Artificial Sequence; identical to SEQ ID NO: 17709
  Description of Artificial Sequence: Synthetic walnut; 5' sequence and inner sequence

SEQ ID NO: 29945 - DNA, 53 bp, Artificial Sequence; identical to SEQ ID NO: 1099
  Description of Artificial Sequence: Synthetic walnut; 5' sequence and inner sequence

SEQ ID NO: 29946 - DNA, 53 bp, Artificial Sequence; identical to SEQ ID NO: 9938
  Description of Artificial Sequence: Synthetic walnut; 5' sequence and inner sequence

SEQ ID NO: 29947 - DNA, 53 bp, Artificial Sequence
  Description of Artificial Sequence: Synthetic walnut; 5' sequence and inner sequence
tagggaagagaaggacatatgatggcacgagctgcactatcaagttgggtatg

SEQ ID NO: 29948 - DNA, 53 bp, Artificial Sequence
  Description of Artificial Sequence: Synthetic walnut; 5' sequence and inner sequence
tagggaagagaaggacatatgatcgacacgacatacggtgacgcacgtgcacg

SEQ ID NO: 29949 - DNA, 53 bp, Artificial Sequence
  Description of Artificial Sequence: Synthetic walnut; 5' sequence and inner sequence
tagggaagagaaggacatatgatgcgatgcgcgtcacacgtactgcactcgcg

SEQ ID NO: 29950 - DNA, 53 bp, Artificial Sequence; identical to SEQ ID NO: 1764
  Description of Artificial Sequence: Synthetic walnut; 5' sequence and inner sequence

SEQ ID NO: 29951 - DNA, 53 bp, Artificial Sequence; identical to SEQ ID NO: 1178
  Description of Artificial Sequence: Synthetic walnut; 5' sequence and inner sequence

SEQ ID NO: 29952 - DNA, 53 bp, Artificial Sequence; identical to SEQ ID NO: 1213
  Description of Artificial Sequence: Synthetic walnut; 5' sequence and inner sequence

SEQ ID NO: 29953 - DNA, 53 bp, Artificial Sequence
  Description of Artificial Sequence: Synthetic walnut; 5' sequence and inner sequence
tagggaagagaaggacatatgatggcatgcgtacgtgctgaccttacgacgca

SEQ ID NO: 29954 - DNA, 53 bp, Artificial Sequence
  Description of Artificial Sequence: Synthetic walnut; 5' sequence and inner sequence
tagggaagagaaggacatatgatggcctgcgatggatgtggtgtggctcaggc

SEQ ID NO: 29955 - DNA, 53 bp, Artificial Sequence; identical to SEQ ID NO: 1701
  Description of Artificial Sequence: Synthetic walnut; 5' sequence and inner sequence

SEQ ID NO: 29956 - DNA, 53 bp, Artificial Sequence
  Description of Artificial Sequence: Synthetic walnut; 5' sequence and inner sequence
tagggaagagaaggacatatgatgtgacgcagcgtgacgacctgccatgcatg

SEQ ID NO: 29957 - DNA, 53 bp, Artificial Sequence
  Description of Artificial Sequence: Synthetic walnut; 5' sequence and inner sequence
tagggaagagaaggacatatgatgtaattccgcatcctacacgtgggcacgta

SEQ ID NO: 29958 - DNA, 53 bp, Artificial Sequence
  Description of Artificial Sequence: Synthetic walnut; 5' sequence and inner sequence
tagggaagagaaggacatatgatcgacgcgatacgccacggtcacgctgcgca

SEQ ID NO: 29959 - DNA, 53 bp, Artificial Sequence
  Description of Artificial Sequence: Synthetic walnut; 5' sequence and inner sequence
tagggaagagaaggacatatgatggacgcaacgtaccgtatcgtgtccatgtg

SEQ ID NO: 29960 - DNA, 53 bp, Artificial Sequence
  Description of Artificial Sequence: Synthetic walnut; 5' sequence and inner sequence
tagggaagagaaggacatatgatgcgctgaggacgcaacgccttcacgtcacg

SEQ ID NO: 29961 - DNA, 53 bp, Artificial Sequence
  Description of Artificial Sequence: Synthetic walnut; 5' sequence and inner sequence
tagggaagagaaggacatatgatggcatgcgatgaacggggcatgatgcgtca

SEQ ID NO: 29962 - DNA, 53 bp, Artificial Sequence; identical to SEQ ID NO: 21700
  Description of Artificial Sequence: Synthetic walnut; 5' sequence and inner sequence

SEQ ID NO: 29963 - DNA, 53 bp, Artificial Sequence; identical to SEQ ID NO: 5591
  Description of Artificial Sequence: Synthetic walnut; 5' sequence and inner sequence

SEQ ID NO: 29964 - DNA, 53 bp, Artificial Sequence
  Description of Artificial Sequence: Synthetic walnut; 5' sequence and inner sequence
tagggaagagaaggacatatgatcgatgcgatgcgtcgtgcgtacggtacgca

SEQ ID NO: 29965 - DNA, 53 bp, Artificial Sequence; identical to SEQ ID NO: 17387
  Description of Artificial Sequence: Synthetic walnut; 5' sequence and inner sequence

SEQ ID NO: 29966 - DNA, 53 bp, Artificial Sequence; identical to SEQ ID NO: 21879
  Description of Artificial Sequence: Synthetic walnut; 5' sequence and inner sequence

SEQ ID NO: 29967 - DNA, 53 bp, Artificial Sequence; identical to SEQ ID NO: 9971
  Description of Artificial Sequence: Synthetic walnut; 5' sequence and inner sequence

SEQ ID NO: 29968 - DNA, 53 bp, Artificial Sequence
  Description of Artificial Sequence: Synthetic walnut; 5' sequence and inner sequence
tagggaagagaaggacatatgatggcctgcgatggatgtgggttgtgctcggc

SEQ ID NO: 29969 - DNA, 53 bp, Artificial Sequence
  Description of Artificial Sequence: Synthetic walnut; 5' sequence and inner sequence
tagggaagagaaggacatatgatgcacgactcgcagcctatcatgaggccatg

SEQ ID NO: 29970 - DNA, 53 bp, Artificial Sequence; identical to SEQ ID NO: 5377
  Description of Artificial Sequence: Synthetic walnut; 5' sequence and inner sequence

SEQ ID NO: 29971 - DNA, 53 bp, Artificial Sequence
  Description of Artificial Sequence: Synthetic walnut; 5' sequence and inner sequence
tagggaagagaaggacatatgatcgtgacagcgtaacgtcatggcactgcaca

SEQ ID NO: 29972 - DNA, 53 bp, Artificial Sequence
  Description of Artificial Sequence: Synthetic walnut; 5' sequence and inner sequence
tagggaagagaaggacatatgatcgcgcaaggacgacgtacctgccgtgcacg

SEQ ID NO: 29973 - DNA, 54 bp, Artificial Sequence
  Description of Artificial Sequence: Synthetic walnut; 5' sequence and inner sequence
tagggaagagaaggacatatgatggcatgcacgcatcctacacgtgggcacgta

SEQ ID NO: 29974 - DNA, 53 bp, Artificial Sequence; identical to SEQ ID NO: 21504
  Description of Artificial Sequence: Synthetic walnut; 5' sequence and inner sequence

SEQ ID NO: 29975 - DNA, 53 bp, Artificial Sequence; identical to SEQ ID NO: 1439
  Description of Artificial Sequence: Synthetic walnut; 5' sequence and inner sequence

SEQ ID NO: 29976 - DNA, 53 bp, Artificial Sequence
  Description of Artificial Sequence: Synthetic walnut; 5' sequence and inner sequence
tagggaagagaaggacatatgatgcgacacggcacgacgacgacagcacgacg

SEQ ID NO: 29977 - DNA, 53 bp, Artificial Sequence; identical to SEQ ID NO: 1868
  Description of Artificial Sequence: Synthetic walnut; 5' sequence and inner sequence

SEQ ID NO: 29978 - DNA, 53 bp, Artificial Sequence
  Description of Artificial Sequence: Synthetic walnut; 5' sequence and inner sequence
tagggaagagaaggacatatgatcgaaacgcaatgcagcacgtgcacgtcacg

SEQ ID NO: 29979 - DNA, 53 bp, Artificial Sequence
  Description of Artificial Sequence: Synthetic walnut; 5' sequence and inner sequence
tagggaagagaaggacatatgatgtcattccccatcctacacgtgggcacgta

SEQ ID NO: 29980 - DNA, 53 bp, Artificial Sequence
  Description of Artificial Sequence: Synthetic walnut; 5' sequence and inner sequence
tagggaagagaaggacatatgatgcgtgcgaacaacgtagcgtcacgtgcaca

SEQ ID NO: 29981 - DNA, 53 bp, Artificial Sequence; identical to SEQ ID NO: 1329
  Description of Artificial Sequence: Synthetic walnut; 5' sequence and inner sequence

SEQ ID NO: 29982 - DNA, 53 bp, Artificial Sequence
  Description of Artificial Sequence: Synthetic walnut; 5' sequence and inner sequence
tagggaagagaaggacatatgatgcaacggcacgacagcatgacgtgtgcgtg

SEQ ID NO: 29983 - DNA, 53 bp, Artificial Sequence
  Description of Artificial Sequence: Synthetic walnut; 5' sequence and inner sequence
tagggaagagaaggacatatgatggacgcatcgccccttcgaggggacaggta

SEQ ID NO: 29984 - DNA, 53 bp, Artificial Sequence
  Description of Artificial Sequence: Synthetic walnut; 5' sequence and inner sequence
tagggaagagaaggacatatgatggacgcaacgtaccgtattgtggccatgtg

SEQ ID NO: 29985 - DNA, 53 bp, Artificial Sequence
  Description of Artificial Sequence: Synthetic walnut; 5' sequence and inner sequence
tagggaagagaaggacatatgatggacgcaacgtaccttatcgtggccatgtg

SEQ ID NO: 29986 - DNA, 53 bp, Artificial Sequence
  Description of Artificial Sequence: Synthetic walnut; 5' sequence and inner sequence
tagggaagagaaggacatatgatggactgcgatggatgtgggctagtatgggc

SEQ ID NO: 29987 - DNA, 53 bp, Artificial Sequence
  Description of Artificial Sequence: Synthetic walnut; 5' sequence and inner sequence
tagggaagagaaggacatatgatcgcaccgacagcacacgtacgtcatgcggc

SEQ ID NO: 29988 - DNA, 53 bp, Artificial Sequence; identical to SEQ ID NO: 1950
  Description of Artificial Sequence: Synthetic walnut; 5' sequence and inner sequence

SEQ ID NO: 29989 - DNA, 53 bp, Artificial Sequence
  Description of Artificial Sequence: Synthetic walnut; 5' sequence and inner sequence
tagggaagagaaggacatatgatggccaaactgcactatcaagacgtcgtgga

SEQ ID NO: 29990 - DNA, 53 bp, Artificial Sequence; identical to SEQ ID NO: 1565
  Description of Artificial Sequence: Synthetic walnut; 5' sequence and inner sequence

SEQ ID NO: 29991 - DNA, 53 bp, Artificial Sequence; identical to SEQ ID NO: 21644
  Description of Artificial Sequence: Synthetic walnut; 5' sequence and inner sequence

SEQ ID NO: 29992 - DNA, 53 bp, Artificial Sequence
  Description of Artificial Sequence: Synthetic walnut; 5' sequence and inner sequence
tagggaagagaaggacatatgatcgcacacgcacgtcatgccagctgtgcatg

SEQ ID NO: 29993 - DNA, 53 bp, Artificial Sequence
  Description of Artificial Sequence: Synthetic walnut; 5' sequence and inner sequence
tagggaagagaaggacatatgatcgtgacgcatgaaacgtaccttcacgcacg

SEQ ID NO: 29994 - DNA, 53 bp, Artificial Sequence
  Description of Artificial Sequence: Synthetic walnut; 5' sequence and inner sequence
tagggaagagaaggacatatgatgcacgcactctgccatacgagtggttcagg

SEQ ID NO: 29995 - DNA, 53 bp, Artificial Sequence
  Description of Artificial Sequence: Synthetic walnut; 5' sequence and inner sequence
tagggaagagaaggacatatgatcgtgcatcgtgcgatacgtcctgctgcaca

SEQ ID NO: 29996 - DNA, 53 bp, Artificial Sequence
  Description of Artificial Sequence: Synthetic walnut; 5' sequence and inner sequence
tagggaagagaaggacatatgatcgacactacgtagcatgccgtacgtgcaca

SEQ ID NO: 29997 - DNA, 53 bp, Artificial Sequence
  Description of Artificial Sequence: Synthetic walnut; 5' sequence and inner sequence
tagggaagagaaggacatatgatggcctgcgatggatgtggtttggacgggcc

SEQ ID NO: 29998 - DNA, 54 bp, Artificial Sequence
  Description of Artificial Sequence: Synthetic walnut; 5' sequence and inner sequence
tagggaagagaaggacatatgatgttccgccgatggatgtgggttgtgctcgtc

SEQ ID NO: 29999 - DNA, 53 bp, Artificial Sequence
  Description of Artificial Sequence: Synthetic walnut; 5' sequence and inner sequence
tagggaagagaaggacatatgatggcatgcacgcatctacacgtgggcacgta

SEQ ID NO: 30000 - DNA, 53 bp, Artificial Sequence
  Description of Artificial Sequence: Synthetic walnut; 5' sequence and inner sequence
tagggaagagaaggacatatgatgcgtgacgggaaggacgttgccactacgca

SEQ ID NO: 30001 - DNA, 53 bp, Artificial Sequence; identical to SEQ ID NO: 13933
  Description of Artificial Sequence: Synthetic walnut; 5' sequence and inner sequence

SEQ ID NO: 30002 - DNA, 53 bp, Artificial Sequence; identical to SEQ ID NO: 1988
  Description of Artificial Sequence: Synthetic walnut; 5' sequence and inner sequence

SEQ ID NO: 30003 - DNA, 53 bp, Artificial Sequence; identical to SEQ ID NO: 2003
  Description of Artificial Sequence: Synthetic walnut; inner sequence and 3' sequence

SEQ ID NO: 30004 - DNA, 53 bp, Artificial Sequence; identical to SEQ ID NO: 2004
  Description of Artificial Sequence: Synthetic walnut; inner sequence and 3' sequence

SEQ ID NO: 30005 - DNA, 53 bp, Artificial Sequence; identical to SEQ ID NO: 2020
  Description of Artificial Sequence: Synthetic walnut; inner sequence and 3' sequence

SEQ ID NO: 30006 - DNA, 53 bp, Artificial Sequence; identical to SEQ ID NO: 2008
  Description of Artificial Sequence: Synthetic walnut; inner sequence and 3' sequence

SEQ ID NO: 30007 - DNA, 53 bp, Artificial Sequence; identical to SEQ ID NO: 2010
  Description of Artificial Sequence: Synthetic walnut; inner sequence and 3' sequence

SEQ ID NO: 30008 - DNA, 53 bp, Artificial Sequence; identical to SEQ ID NO: 2006
  Description of Artificial Sequence: Synthetic walnut; inner sequence and 3' sequence

SEQ ID NO: 30009 - DNA, 53 bp, Artificial Sequence; identical to SEQ ID NO: 2030
  Description of Artificial Sequence: Synthetic walnut; inner sequence and 3' sequence

SEQ ID NO: 30010 - DNA, 53 bp, Artificial Sequence; identical to SEQ ID NO: 2027
  Description of Artificial Sequence: Synthetic walnut; inner sequence and 3' sequence

SEQ ID NO: 30011 - DNA, 53 bp, Artificial Sequence; identical to SEQ ID NO: 2029
  Description of Artificial Sequence: Synthetic walnut; inner sequence and 3' sequence

SEQ ID NO: 30012 - DNA, 53 bp, Artificial Sequence; identical to SEQ ID NO: 2021
  Description of Artificial Sequence: Synthetic walnut; inner sequence and 3' sequence

SEQ ID NO: 30013 - DNA, 53 bp, Artificial Sequence; identical to SEQ ID NO: 2007
  Description of Artificial Sequence: Synthetic walnut; inner sequence and 3' sequence

SEQ ID NO: 30014 - DNA, 53 bp, Artificial Sequence; identical to SEQ ID NO: 2012
  Description of Artificial Sequence: Synthetic walnut; inner sequence and 3' sequence

SEQ ID NO: 30015 - DNA, 53 bp, Artificial Sequence; identical to SEQ ID NO: 2009
  Description of Artificial Sequence: Synthetic walnut; inner sequence and 3' sequence

SEQ ID NO: 30016 - DNA, 53 bp, Artificial Sequence; identical to SEQ ID NO: 2005
  Description of Artificial Sequence: Synthetic walnut; inner sequence and 3' sequence

SEQ ID NO: 30017 - DNA, 53 bp, Artificial Sequence; identical to SEQ ID NO: 2052
  Description of Artificial Sequence: Synthetic walnut; inner sequence and 3' sequence

SEQ ID NO: 30018 - DNA, 53 bp, Artificial Sequence; identical to SEQ ID NO: 2047
  Description of Artificial Sequence: Synthetic walnut; inner sequence and 3' sequence

SEQ ID NO: 30019 - DNA, 53 bp, Artificial Sequence; identical to SEQ ID NO: 2033
  Description of Artificial Sequence: Synthetic walnut; inner sequence and 3' sequence

SEQ ID NO: 30020 - DNA, 53 bp, Artificial Sequence; identical to SEQ ID NO: 2014
  Description of Artificial Sequence: Synthetic walnut; inner sequence and 3' sequence

SEQ ID NO: 30021 - DNA, 53 bp, Artificial Sequence; identical to SEQ ID NO: 2026
  Description of Artificial Sequence: Synthetic walnut; inner sequence and 3' sequence

SEQ ID NO: 30022 - DNA, 53 bp, Artificial Sequence; identical to SEQ ID NO: 2383
  Description of Artificial Sequence: Synthetic walnut; inner sequence and 3' sequence

SEQ ID NO: 30023 - DNA, 53 bp, Artificial Sequence; identical to SEQ ID NO: 2019
  Description of Artificial Sequence: Synthetic walnut; inner sequence and 3' sequence

SEQ ID NO: 30024 - DNA, 53 bp, Artificial Sequence; identical to SEQ ID NO: 2048
  Description of Artificial Sequence: Synthetic walnut; inner sequence and 3' sequence

SEQ ID NO: 30025 - DNA, 53 bp, Artificial Sequence; identical to SEQ ID NO: 2017
  Description of Artificial Sequence: Synthetic walnut; inner sequence and 3' sequence

SEQ ID NO: 30026 - DNA, 53 bp, Artificial Sequence; identical to SEQ ID NO: 2055
  Description of Artificial Sequence: Synthetic walnut; inner sequence and 3' sequence

SEQ ID NO: 30027 - DNA, 53 bp, Artificial Sequence; identical to SEQ ID NO: 2024
  Description of Artificial Sequence: Synthetic walnut; inner sequence and 3' sequence

SEQ ID NO: 30028 - DNA, 53 bp, Artificial Sequence; identical to SEQ ID NO: 2201
  Description of Artificial Sequence: Synthetic walnut; inner sequence and 3' sequence

SEQ ID NO: 30029 - DNA, 53 bp, Artificial Sequence; identical to SEQ ID NO: 2023
  Description of Artificial Sequence: Synthetic walnut; inner sequence and 3' sequence

SEQ ID NO: 30030 - DNA, 53 bp, Artificial Sequence; identical to SEQ ID NO: 2034
  Description of Artificial Sequence: Synthetic walnut; inner sequence and 3' sequence

SEQ ID NO: 30031 - DNA, 53 bp, Artificial Sequence; identical to SEQ ID NO: 2128
  Description of Artificial Sequence: Synthetic walnut; inner sequence and 3' sequence

SEQ ID NO: 30032 - DNA, 53 bp, Artificial Sequence; identical to SEQ ID NO: 2015
  Description of Artificial Sequence: Synthetic walnut; inner sequence and 3' sequence

SEQ ID NO: 30033 - DNA, 53 bp, Artificial Sequence; identical to SEQ ID NO: 2073
  Description of Artificial Sequence: Synthetic walnut; inner sequence and 3' sequence

SEQ ID NO: 30034 - DNA, 53 bp, Artificial Sequence; identical to SEQ ID NO: 2081
  Description of Artificial Sequence: Synthetic walnut; inner sequence and 3' sequence

SEQ ID NO: 30035 - DNA, 53 bp, Artificial Sequence; identical to SEQ ID NO: 2011
  Description of Artificial Sequence: Synthetic walnut; inner sequence and 3' sequence

SEQ ID NO: 30036 - DNA, 53 bp, Artificial Sequence; identical to SEQ ID NO: 2094
  Description of Artificial Sequence: Synthetic walnut; inner sequence and 3' sequence

SEQ ID NO: 30037 - DNA, 53 bp, Artificial Sequence; identical to SEQ ID NO: 2040
  Description of Artificial Sequence: Synthetic walnut; inner sequence and 3' sequence

SEQ ID NO: 30038 - DNA, 53 bp, Artificial Sequence; identical to SEQ ID NO: 2078
  Description of Artificial Sequence: Synthetic walnut; inner sequence and 3' sequence

SEQ ID NO: 30039 - DNA, 53 bp, Artificial Sequence; identical to SEQ ID NO: 2279
  Description of Artificial Sequence: Synthetic walnut; inner sequence and 3' sequence

SEQ ID NO: 30040 - DNA, 53 bp, Artificial Sequence; identical to SEQ ID NO: 2028
  Description of Artificial Sequence: Synthetic walnut; inner sequence and 3' sequence

SEQ ID NO: 30041 - DNA, 53 bp, Artificial Sequence; identical to SEQ ID NO: 18266
  Description of Artificial Sequence: Synthetic walnut; inner sequence and 3' sequence

SEQ ID NO: 30042 - DNA, 53 bp, Artificial Sequence; identical to SEQ ID NO: 2074
  Description of Artificial Sequence: Synthetic walnut; inner sequence and 3' sequence

SEQ ID NO: 30043 - DNA, 53 bp, Artificial Sequence; identical to SEQ ID NO: 2013
  Description of Artificial Sequence: Synthetic walnut; inner sequence and 3' sequence

SEQ ID NO: 30044 - DNA, 53 bp, Artificial Sequence; identical to SEQ ID NO: 2220
  Description of Artificial Sequence: Synthetic walnut; inner sequence and 3' sequence

SEQ ID NO: 30045 - DNA, 53 bp, Artificial Sequence; identical to SEQ ID NO: 2122
  Description of Artificial Sequence: Synthetic walnut; inner sequence and 3' sequence

SEQ ID NO: 30046 - DNA, 53 bp, Artificial Sequence; identical to SEQ ID NO: 2139
  Description of Artificial Sequence: Synthetic walnut; inner sequence and 3' sequence

SEQ ID NO: 30047 - DNA, 53 bp, Artificial Sequence; identical to SEQ ID NO: 2526
  Description of Artificial Sequence: Synthetic walnut; inner sequence and 3' sequence

SEQ ID NO: 30048 - DNA, 51 bp, Artificial Sequence; identical to SEQ ID NO: 2241
  Description of Artificial Sequence: Synthetic walnut; inner sequence and 3' sequence

SEQ ID NO: 30049 - DNA, 53 bp, Artificial Sequence; identical to SEQ ID NO: 2046
  Description of Artificial Sequence: Synthetic walnut; inner sequence and 3' sequence

SEQ ID NO: 30050 - DNA, 53 bp, Artificial Sequence; identical to SEQ ID NO: 2045
  Description of Artificial Sequence: Synthetic walnut; inner sequence and 3' sequence

SEQ ID NO: 30051 - DNA, 53 bp, Artificial Sequence; identical to SEQ ID NO: 2281
  Description of Artificial Sequence: Synthetic walnut; inner sequence and 3' sequence

SEQ ID NO: 30052 - DNA, 53 bp, Artificial Sequence; identical to SEQ ID NO: 2037
  Description of Artificial Sequence: Synthetic walnut; inner sequence and 3' sequence

SEQ ID NO: 30053 - DNA, 53 bp, Artificial Sequence; identical to SEQ ID NO: 2506
  Description of Artificial Sequence: Synthetic walnut; inner sequence and 3' sequence

SEQ ID NO: 30054 - DNA, 53 bp, Artificial Sequence; identical to SEQ ID NO: 2054
  Description of Artificial Sequence: Synthetic walnut; inner sequence and 3' sequence

SEQ ID NO: 30055 - DNA, 53 bp, Artificial Sequence; identical to SEQ ID NO: 2032
  Description of Artificial Sequence: Synthetic walnut; inner sequence and 3' sequence

SEQ ID NO: 30056 - DNA, 53 bp, Artificial Sequence; identical to SEQ ID NO: 2041
  Description of Artificial Sequence: Synthetic walnut; inner sequence and 3' sequence

SEQ ID NO: 30057 - DNA, 53 bp, Artificial Sequence; identical to SEQ ID NO: 2036
  Description of Artificial Sequence: Synthetic walnut; inner sequence and 3' sequence

SEQ ID NO: 30058 - DNA, 53 bp, Artificial Sequence; identical to SEQ ID NO: 18640
  Description of Artificial Sequence: Synthetic walnut; inner sequence and 3' sequence

SEQ ID NO: 30059 - DNA, 53 bp, Artificial Sequence; identical to SEQ ID NO: 2273
  Description of Artificial Sequence: Synthetic walnut; inner sequence and 3' sequence

SEQ ID NO: 30060 - DNA, 52 bp, Artificial Sequence; identical to SEQ ID NO: 2070
  Description of Artificial Sequence: Synthetic walnut; inner sequence and 3' sequence

SEQ ID NO: 30061 - DNA, 53 bp, Artificial Sequence; identical to SEQ ID NO: 2138
  Description of Artificial Sequence: Synthetic walnut; inner sequence and 3' sequence

SEQ ID NO: 30062 - DNA, 53 bp, Artificial Sequence; identical to SEQ ID NO: 2323
  Description of Artificial Sequence: Synthetic walnut; inner sequence and 3' sequence

SEQ ID NO: 30063 - DNA, 53 bp, Artificial Sequence; identical to SEQ ID NO: 2018
  Description of Artificial Sequence: Synthetic walnut; inner sequence and 3' sequence

SEQ ID NO: 30064 - DNA, 53 bp, Artificial Sequence; identical to SEQ ID NO: 2632
  Description of Artificial Sequence: Synthetic walnut; inner sequence and 3' sequence

SEQ ID NO: 30065 - DNA, 53 bp, Artificial Sequence; identical to SEQ ID NO: 2106
  Description of Artificial Sequence: Synthetic walnut; inner sequence and 3' sequence

SEQ ID NO: 30066 - DNA, 53 bp, Artificial Sequence; identical to SEQ ID NO: 2093
  Description of Artificial Sequence: Synthetic walnut; inner sequence and 3' sequence

SEQ ID NO: 30067 - DNA, 53 bp, Artificial Sequence; identical to SEQ ID NO: 2082
  Description of Artificial Sequence: Synthetic walnut; inner sequence and 3' sequence

SEQ ID NO: 30068 - DNA, 53 bp, Artificial Sequence; identical to SEQ ID NO: 2270
  Description of Artificial Sequence: Synthetic walnut; inner sequence and 3' sequence

SEQ ID NO: 30069 - DNA, 53 bp, Artificial Sequence; identical to SEQ ID NO: 18211
  Description of Artificial Sequence: Synthetic walnut; inner sequence and 3' sequence

SEQ ID NO: 30070 - DNA, 53 bp, Artificial Sequence; identical to SEQ ID NO: 2144
  Description of Artificial Sequence: Synthetic walnut; inner sequence and 3' sequence

SEQ ID NO: 30071 - DNA, 53 bp, Artificial Sequence; identical to SEQ ID NO: 2071
  Description of Artificial Sequence: Synthetic walnut; inner sequence and 3' sequence

SEQ ID NO: 30072 - DNA, 48 bp, Artificial Sequence; identical to SEQ ID NO: 18927
  Description of Artificial Sequence: Synthetic walnut; inner sequence and 3' sequence

SEQ ID NO: 30073 - DNA, 53 bp, Artificial Sequence; identical to SEQ ID NO: 2194
  Description of Artificial Sequence: Synthetic walnut; inner sequence and 3' sequence

SEQ ID NO: 30074 - DNA, 53 bp, Artificial Sequence; identical to SEQ ID NO: 2121
  Description of Artificial Sequence: Synthetic walnut; inner sequence and 3' sequence

SEQ ID NO: 30075 - DNA, 53 bp, Artificial Sequence; identical to SEQ ID NO: 2265
  Description of Artificial Sequence: Synthetic walnut; inner sequence and 3' sequence

SEQ ID NO: 30076 - DNA, 53 bp, Artificial Sequence; identical to SEQ ID NO: 2035
  Description of Artificial Sequence: Synthetic walnut; inner sequence and 3' sequence

SEQ ID NO: 30077 - DNA, 53 bp, Artificial Sequence; identical to SEQ ID NO: 2381
  Description of Artificial Sequence: Synthetic walnut; inner sequence and 3' sequence

SEQ ID NO: 30078 - DNA, 53 bp, Artificial Sequence; identical to SEQ ID NO: 22495
  Description of Artificial Sequence: Synthetic walnut; inner sequence and 3' sequence

SEQ ID NO: 30079 - DNA, 54 bp, Artificial Sequence; identical to SEQ ID NO: 2250
  Description of Artificial Sequence: Synthetic walnut; inner sequence and 3' sequence

SEQ ID NO: 30080 - DNA, 53 bp, Artificial Sequence; identical to SEQ ID NO: 2022
  Description of Artificial Sequence: Synthetic walnut; inner sequence and 3' sequence

SEQ ID NO: 30081 - DNA, 54 bp, Artificial Sequence; identical to SEQ ID NO: 2150
  Description of Artificial Sequence: Synthetic walnut; inner sequence and 3' sequence

SEQ ID NO: 30082 - DNA, 53 bp, Artificial Sequence; identical to SEQ ID NO: 2147
  Description of Artificial Sequence: Synthetic walnut; inner sequence and 3' sequence

SEQ ID NO: 30083 - DNA, 53 bp, Artificial Sequence; identical to SEQ ID NO: 2177
  Description of Artificial Sequence: Synthetic walnut; inner sequence and 3' sequence

SEQ ID NO: 30084 - DNA, 53 bp, Artificial Sequence; identical to SEQ ID NO: 2190
  Description of Artificial Sequence: Synthetic walnut; inner sequence and 3' sequence

SEQ ID NO: 30085 - DNA, 53 bp, Artificial Sequence; identical to SEQ ID NO: 2166
  Description of Artificial Sequence: Synthetic walnut; inner sequence and 3' sequence

SEQ ID NO: 30086 - DNA, 53 bp, Artificial Sequence; identical to SEQ ID NO: 2310
  Description of Artificial Sequence: Synthetic walnut; inner sequence and 3' sequence

SEQ ID NO: 30087 - DNA, 53 bp, Artificial Sequence; identical to SEQ ID NO: 2042
  Description of Artificial Sequence: Synthetic walnut; inner sequence and 3' sequence

SEQ ID NO: 30088 - DNA, 53 bp, Artificial Sequence; identical to SEQ ID NO: 2461
  Description of Artificial Sequence: Synthetic walnut; inner sequence and 3' sequence

SEQ ID NO: 30089 - DNA, 53 bp, Artificial Sequence; identical to SEQ ID NO: 2080
  Description of Artificial Sequence: Synthetic walnut; inner sequence and 3' sequence

SEQ ID NO: 30090 - DNA, 53 bp, Artificial Sequence; identical to SEQ ID NO: 2257
  Description of Artificial Sequence: Synthetic walnut; inner sequence and 3' sequence

SEQ ID NO: 30091 - DNA, 53 bp, Artificial Sequence; identical to SEQ ID NO: 2151
  Description of Artificial Sequence: Synthetic walnut; inner sequence and 3' sequence

SEQ ID NO: 30092 - DNA, 49 bp, Artificial Sequence; identical to SEQ ID NO: 2893
  Description of Artificial Sequence: Synthetic walnut; inner sequence and 3' sequence

SEQ ID NO: 30093 - DNA, 53 bp, Artificial Sequence; identical to SEQ ID NO: 2085
  Description of Artificial Sequence: Synthetic walnut; inner sequence and 3' sequence

SEQ ID NO: 30094 - DNA, 53 bp, Artificial Sequence; identical to SEQ ID NO: 2096
  Description of Artificial Sequence: Synthetic walnut; inner sequence and 3' sequence

SEQ ID NO: 30095 - DNA, 53 bp, Artificial Sequence; identical to SEQ ID NO: 2263
  Description of Artificial Sequence: Synthetic walnut; inner sequence and 3' sequence

SEQ ID NO: 30096 - DNA, 53 bp, Artificial Sequence; identical to SEQ ID NO: 2517
  Description of Artificial Sequence: Synthetic walnut; inner sequence and 3' sequence

SEQ ID NO: 30097 - DNA, 53 bp, Artificial Sequence; identical to SEQ ID NO: 6889
  Description of Artificial Sequence: Synthetic walnut; inner sequence and 3' sequence

SEQ ID NO: 30098 - DNA, 53 bp, Artificial Sequence; identical to SEQ ID NO: 2108
  Description of Artificial Sequence: Synthetic walnut; inner sequence and 3' sequence

SEQ ID NO: 30099 - DNA, 53 bp, Artificial Sequence; identical to SEQ ID NO: 2458
  Description of Artificial Sequence: Synthetic walnut; inner sequence and 3' sequence

SEQ ID NO: 30100 - DNA, 54 bp, Artificial Sequence; identical to SEQ ID NO: 2971
  Description of Artificial Sequence: Synthetic walnut; inner sequence and 3' sequence

SEQ ID NO: 30101 - DNA, 53 bp, Artificial Sequence; identical to SEQ ID NO: 2174
  Description of Artificial Sequence: Synthetic walnut; inner sequence and 3' sequence

SEQ ID NO: 30102 - DNA, 53 bp, Artificial Sequence; identical to SEQ ID NO: 2231
  Description of Artificial Sequence: Synthetic walnut; inner sequence and 3' sequence

SEQ ID NO: 30103 - DNA, 53 bp, Artificial Sequence; identical to SEQ ID NO: 2328
  Description of Artificial Sequence: Synthetic walnut; inner sequence and 3' sequence

SEQ ID NO: 30104 - DNA, 53 bp, Artificial Sequence; identical to SEQ ID NO: 2236
  Description of Artificial Sequence: Synthetic walnut; inner sequence and 3' sequence

SEQ ID NO: 30105 - DNA, 53 bp, Artificial Sequence; identical to SEQ ID NO: 2079
  Description of Artificial Sequence: Synthetic walnut; inner sequence and 3' sequence

SEQ ID NO: 30106 - DNA, 53 bp, Artificial Sequence; identical to SEQ ID NO: 2059
  Description of Artificial Sequence: Synthetic walnut; inner sequence and 3' sequence

SEQ ID NO: 30107 - DNA, 53 bp, Artificial Sequence; identical to SEQ ID NO: 2582
  Description of Artificial Sequence: Synthetic walnut; inner sequence and 3' sequence

SEQ ID NO: 30108 - DNA, 53 bp, Artificial Sequence
  Description of Artificial Sequence: Synthetic walnut; inner sequence and 3' sequence
gcgtgcagcacggtacacgatgccgtcacgttgactagtacatgaccacttga

SEQ ID NO: 30109 - DNA, 53 bp, Artificial Sequence; identical to SEQ ID NO: 22151
  Description of Artificial Sequence: Synthetic walnut; inner sequence and 3' sequence

SEQ ID NO: 30110 - DNA, 53 bp, Artificial Sequence; identical to SEQ ID NO: 2053
  Description of Artificial Sequence: Synthetic walnut; inner sequence and 3' sequence

SEQ ID NO: 30111 - DNA, 53 bp, Artificial Sequence; identical to SEQ ID NO: 2232
  Description of Artificial Sequence: Synthetic walnut; inner sequence and 3' sequence

SEQ ID NO: 30112 - DNA, 53 bp, Artificial Sequence; identical to SEQ ID NO: 2441
  Description of Artificial Sequence: Synthetic walnut; inner sequence and 3' sequence

SEQ ID NO: 30113 - DNA, 53 bp, Artificial Sequence; identical to SEQ ID NO: 18861
  Description of Artificial Sequence: Synthetic walnut; inner sequence and 3' sequence

SEQ ID NO: 30114 - DNA, 53 bp, Artificial Sequence
  Description of Artificial Sequence: Synthetic walnut; inner sequence and 3' sequence
cgtgacgcacgtggcaacgaggcatgcgcattgactagtacatgaccacttga

SEQ ID NO: 30115 - DNA, 53 bp, Artificial Sequence; identical to SEQ ID NO: 2256
  Description of Artificial Sequence: Synthetic walnut; inner sequence and 3' sequence

SEQ ID NO: 30116 - DNA, 53 bp, Artificial Sequence; identical to SEQ ID NO: 2109
  Description of Artificial Sequence: Synthetic walnut; inner sequence and 3' sequence

SEQ ID NO: 30117 - DNA, 53 bp, Artificial Sequence; identical to SEQ ID NO: 2191
  Description of Artificial Sequence: Synthetic walnut; inner sequence and 3' sequence

SEQ ID NO: 30118 - DNA, 53 bp, Artificial Sequence; identical to SEQ ID NO: 2274
  Description of Artificial Sequence: Synthetic walnut; inner sequence and 3' sequence

SEQ ID NO: 30119 - DNA, 53 bp, Artificial Sequence; identical to SEQ ID NO: 2114
  Description of Artificial Sequence: Synthetic walnut; inner sequence and 3' sequence

SEQ ID NO: 30120 - DNA, 53 bp, Artificial Sequence; identical to SEQ ID NO: 2603
  Description of Artificial Sequence: Synthetic walnut; inner sequence and 3' sequence

SEQ ID NO: 30121 - DNA, 53 bp, Artificial Sequence; identical to SEQ ID NO: 2599
  Description of Artificial Sequence: Synthetic walnut; inner sequence and 3' sequence

SEQ ID NO: 30122 - DNA, 53 bp, Artificial Sequence; identical to SEQ ID NO: 2230
  Description of Artificial Sequence: Synthetic walnut; inner sequence and 3' sequence

SEQ ID NO: 30123 - DNA, 53 bp, Artificial Sequence; identical to SEQ ID NO: 2145
  Description of Artificial Sequence: Synthetic walnut; inner sequence and 3' sequence

SEQ ID NO: 30124 - DNA, 53 bp, Artificial Sequence; identical to SEQ ID NO: 22917
  Description of Artificial Sequence: Synthetic walnut; inner sequence and 3' sequence

SEQ ID NO: 30125 - DNA, 53 bp, Artificial Sequence; identical to SEQ ID NO: 2184
  Description of Artificial Sequence: Synthetic walnut; inner sequence and 3' sequence

SEQ ID NO: 30126 - DNA, 53 bp, Artificial Sequence; identical to SEQ ID NO: 22302
  Description of Artificial Sequence: Synthetic walnut; inner sequence and 3' sequence

SEQ ID NO: 30127 - DNA, 53 bp, Artificial Sequence; identical to SEQ ID NO: 2137
  Description of Artificial Sequence: Synthetic walnut; inner sequence and 3' sequence

SEQ ID NO: 30128 - DNA, 53 bp, Artificial Sequence; identical to SEQ ID NO: 22105
  Description of Artificial Sequence: Synthetic walnut; inner sequence and 3' sequence

SEQ ID NO: 30129 - DNA, 53 bp, Artificial Sequence; identical to SEQ ID NO: 2136
  Description of Artificial Sequence: Synthetic walnut; inner sequence and 3' sequence

SEQ ID NO: 30130 - DNA, 53 bp, Artificial Sequence; identical to SEQ ID NO: 2092
  Description of Artificial Sequence: Synthetic walnut; inner sequence and 3' sequence

SEQ ID NO: 30131 - DNA, 53 bp, Artificial Sequence; identical to SEQ ID NO: 2823
  Description of Artificial Sequence: Synthetic walnut; inner sequence and 3' sequence

SEQ ID NO: 30132 - DNA, 53 bp, Artificial Sequence; identical to SEQ ID NO: 2828
  Description of Artificial Sequence: Synthetic walnut; inner sequence and 3' sequence

SEQ ID NO: 30133 - DNA, 53 bp, Artificial Sequence; identical to SEQ ID NO: 2246
  Description of Artificial Sequence: Synthetic walnut; inner sequence and 3' sequence

SEQ ID NO: 30134 - DNA, 53 bp, Artificial Sequence; identical to SEQ ID NO: 2161
  Description of Artificial Sequence: Synthetic walnut; inner sequence and 3' sequence

SEQ ID NO: 30135 - DNA, 53 bp, Artificial Sequence; identical to SEQ ID NO: 2119
  Description of Artificial Sequence: Synthetic walnut; inner sequence and 3' sequence

SEQ ID NO: 30136 - DNA, 54 bp, Artificial Sequence; identical to SEQ ID NO: 2216
  Description of Artificial Sequence: Synthetic walnut; inner sequence and 3' sequence

SEQ ID NO: 30137 - DNA, 53 bp, Artificial Sequence; identical to SEQ ID NO: 2249
  Description of Artificial Sequence: Synthetic walnut; inner sequence and 3' sequence

SEQ ID NO: 30138 - DNA, 53 bp, Artificial Sequence; identical to SEQ ID NO: 2414
  Description of Artificial Sequence: Synthetic walnut; inner sequence and 3' sequence

SEQ ID NO: 30139 - DNA, 53 bp, Artificial Sequence; identical to SEQ ID NO: 2740
  Description of Artificial Sequence: Synthetic walnut; inner sequence and 3' sequence

SEQ ID NO: 30140 - DNA, 53 bp, Artificial Sequence; identical to SEQ ID NO: 2133
  Description of Artificial Sequence: Synthetic walnut; inner sequence and 3' sequence

SEQ ID NO: 30141 - DNA, 53 bp, Artificial Sequence; identical to SEQ ID NO: 2277
  Description of Artificial Sequence: Synthetic walnut; inner sequence and 3' sequence

SEQ ID NO: 30142 - DNA, 53 bp, Artificial Sequence; identical to SEQ ID NO: 2827
  Description of Artificial Sequence: Synthetic walnut; inner sequence and 3' sequence

SEQ ID NO: 30143 - DNA, 53 bp, Artificial Sequence; identical to SEQ ID NO: 2275
  Description of Artificial Sequence: Synthetic walnut; inner sequence and 3' sequence

SEQ ID NO: 30144 - DNA, 53 bp, Artificial Sequence; identical to SEQ ID NO: 2359
  Description of Artificial Sequence: Synthetic walnut; inner sequence and 3' sequence

SEQ ID NO: 30145 - DNA, 53 bp, Artificial Sequence; identical to SEQ ID NO: 2317
  Description of Artificial Sequence: Synthetic walnut; inner sequence and 3' sequence

SEQ ID NO: 30146 - DNA, 53 bp, Artificial Sequence; identical to SEQ ID NO: 2207
  Description of Artificial Sequence: Synthetic walnut; inner sequence and 3' sequence

SEQ ID NO: 30147 - DNA, 53 bp, Artificial Sequence
  Description of Artificial Sequence: Synthetic walnut; inner sequence and 3' sequence
gcgcaacggtacgcacaccttcacgtcacgttgactagtacatgaccacttga

SEQ ID NO: 30148 - DNA, 53 bp, Artificial Sequence; identical to SEQ ID NO: 2227
  Description of Artificial Sequence: Synthetic walnut; inner sequence and 3' sequence

SEQ ID NO: 30149 - DNA, 53 bp, Artificial Sequence; identical to SEQ ID NO: 2370
  Description of Artificial Sequence: Synthetic walnut; inner sequence and 3' sequence

SEQ ID NO: 30150 - DNA, 53 bp, Artificial Sequence; identical to SEQ ID NO: 2267
  Description of Artificial Sequence: Synthetic walnut; inner sequence and 3' sequence

SEQ ID NO: 30151 - DNA, 53 bp, Artificial Sequence; identical to SEQ ID NO: 2240
  Description of Artificial Sequence: Synthetic walnut; inner sequence and 3' sequence

SEQ ID NO: 30152 - DNA, 53 bp, Artificial Sequence; identical to SEQ ID NO: 14997
  Description of Artificial Sequence: Synthetic walnut; inner sequence and 3' sequence

SEQ ID NO: 30153 - DNA, 53 bp, Artificial Sequence; identical to SEQ ID NO: 22518
  Description of Artificial Sequence: Synthetic walnut; inner sequence and 3' sequence

SEQ ID NO: 30154 - DNA, 53 bp, Artificial Sequence; identical to SEQ ID NO: 2031
  Description of Artificial Sequence: Synthetic walnut; inner sequence and 3' sequence

SEQ ID NO: 30155 - DNA, 53 bp, Artificial Sequence; identical to SEQ ID NO: 2367
  Description of Artificial Sequence: Synthetic walnut; inner sequence and 3' sequence

SEQ ID NO: 30156 - DNA, 53 bp, Artificial Sequence; identical to SEQ ID NO: 2509
  Description of Artificial Sequence: Synthetic walnut; inner sequence and 3' sequence

SEQ ID NO: 30157 - DNA, 53 bp, Artificial Sequence; identical to SEQ ID NO: 2746
  Description of Artificial Sequence: Synthetic walnut; inner sequence and 3' sequence

SEQ ID NO: 30158 - DNA, 53 bp, Artificial Sequence
  Description of Artificial Sequence: Synthetic walnut; inner sequence and 3' sequence
gcatcgcacggtgacggtacgtgatgcgcattgactagtacatgaccacttga

SEQ ID NO: 30159 - DNA, 53 bp, Artificial Sequence; identical to SEQ ID NO: 2076
  Description of Artificial Sequence: Synthetic walnut; inner sequence and 3' sequence

SEQ ID NO: 30160 - DNA, 53 bp, Artificial Sequence; identical to SEQ ID NO: 2343
  Description of Artificial Sequence: Synthetic walnut; inner sequence and 3' sequence

SEQ ID NO: 30161 - DNA, 53 bp, Artificial Sequence; identical to SEQ ID NO: 2262
  Description of Artificial Sequence: Synthetic walnut; inner sequence and 3' sequence

SEQ ID NO: 30162 - DNA, 53 bp, Artificial Sequence; identical to SEQ ID NO: 2420
  Description of Artificial Sequence: Synthetic walnut; inner sequence and 3' sequence

SEQ ID NO: 30163 - DNA, 53 bp, Artificial Sequence
  Description of Artificial Sequence: Synthetic walnut; inner sequence and 3' sequence
cgcaccgtcacggcacaaggcacgtacgcattgactagtacatgaccacttga

SEQ ID NO: 30164 - DNA, 53 bp, Artificial Sequence; identical to SEQ ID NO: 2141
  Description of Artificial Sequence: Synthetic walnut; inner sequence and 3' sequence

SEQ ID NO: 30165 - DNA, 53 bp, Artificial Sequence; identical to SEQ ID NO: 2242
  Description of Artificial Sequence: Synthetic walnut; inner sequence and 3' sequence

SEQ ID NO: 30166 - DNA, 53 bp, Artificial Sequence; identical to SEQ ID NO: 2985
  Description of Artificial Sequence: Synthetic walnut; inner sequence and 3' sequence

SEQ ID NO: 30167 - DNA, 53 bp, Artificial Sequence; identical to SEQ ID NO: 2308
  Description of Artificial Sequence: Synthetic walnut; inner sequence and 3' sequence

SEQ ID NO: 30168 - DNA, 53 bp, Artificial Sequence; identical to SEQ ID NO: 2463
  Description of Artificial Sequence: Synthetic walnut; inner sequence and 3' sequence

SEQ ID NO: 30169 - DNA, 48 bp, Artificial Sequence; identical to SEQ ID NO: 22136
  Description of Artificial Sequence: Synthetic walnut; inner sequence and 3' sequence

SEQ ID NO: 30170 - DNA, 53 bp, Artificial Sequence; identical to SEQ ID NO: 2377
  Description of Artificial Sequence: Synthetic walnut; inner sequence and 3' sequence

SEQ ID NO: 30171 - DNA, 53 bp, Artificial Sequence; identical to SEQ ID NO: 2043
  Description of Artificial Sequence: Synthetic walnut; inner sequence and 3' sequence

SEQ ID NO: 30172 - DNA, 53 bp, Artificial Sequence; identical to SEQ ID NO: 2123
  Description of Artificial Sequence: Synthetic walnut; inner sequence and 3' sequence

SEQ ID NO: 30173 - DNA, 53 bp, Artificial Sequence
  Description of Artificial Sequence: Synthetic walnut; inner sequence and 3' sequence
cgcaccgacgcagtgacggcacgtgacgcattgactagtacatgaccacttga

SEQ ID NO: 30174 - DNA, 53 bp, Artificial Sequence; identical to SEQ ID NO: 2163
  Description of Artificial Sequence: Synthetic walnut; inner sequence and 3' sequence

SEQ ID NO: 30175 - DNA, 53 bp, Artificial Sequence; identical to SEQ ID NO: 22473
  Description of Artificial Sequence: Synthetic walnut; inner sequence and 3' sequence

SEQ ID NO: 30176 - DNA, 53 bp, Artificial Sequence; identical to SEQ ID NO: 6336
  Description of Artificial Sequence: Synthetic walnut; inner sequence and 3' sequence

SEQ ID NO: 30177 - DNA, 53 bp, Artificial Sequence; identical to SEQ ID NO: 2077
  Description of Artificial Sequence: Synthetic walnut; inner sequence and 3' sequence

SEQ ID NO: 30178 - DNA, 53 bp, Artificial Sequence; identical to SEQ ID NO: 2050
  Description of Artificial Sequence: Synthetic walnut; inner sequence and 3' sequence

SEQ ID NO: 30179 - DNA, 53 bp, Artificial Sequence; identical to SEQ ID NO: 2100
  Description of Artificial Sequence: Synthetic walnut; inner sequence and 3' sequence

SEQ ID NO: 30180 - DNA, 53 bp, Artificial Sequence; identical to SEQ ID NO: 2243
  Description of Artificial Sequence: Synthetic walnut; inner sequence and 3' sequence

SEQ ID NO: 30181 - DNA, 53 bp, Artificial Sequence; identical to SEQ ID NO: 2321
  Description of Artificial Sequence: Synthetic walnut; inner sequence and 3' sequence

SEQ ID NO: 30182 - DNA, 53 bp, Artificial Sequence; identical to SEQ ID NO: 2351
  Description of Artificial Sequence: Synthetic walnut; inner sequence and 3' sequence

SEQ ID NO: 30183 - DNA, 52 bp, Artificial Sequence; identical to SEQ ID NO: 2251
  Description of Artificial Sequence: Synthetic walnut; inner sequence and 3' sequence

SEQ ID NO: 30184 - DNA, 51 bp, Artificial Sequence; identical to SEQ ID NO: 2423
  Description of Artificial Sequence: Synthetic walnut; inner sequence and 3' sequence

SEQ ID NO: 30185 - DNA, 53 bp, Artificial Sequence; identical to SEQ ID NO: 2217
  Description of Artificial Sequence: Synthetic walnut; inner sequence and 3' sequence

SEQ ID NO: 30186 - DNA, 53 bp, Artificial Sequence; identical to SEQ ID NO: 6627
  Description of Artificial Sequence: Synthetic walnut; inner sequence and 3' sequence

SEQ ID NO: 30187 - DNA, 53 bp, Artificial Sequence; identical to SEQ ID NO: 2477
  Description of Artificial Sequence: Synthetic walnut; inner sequence and 3' sequence

SEQ ID NO: 30188 - DNA, 53 bp, Artificial Sequence; identical to SEQ ID NO: 2113
  Description of Artificial Sequence: Synthetic walnut; inner sequence and 3' sequence

SEQ ID NO: 30189 - DNA, 53 bp, Artificial Sequence; identical to SEQ ID NO: 2172
  Description of Artificial Sequence: Synthetic walnut; inner sequence and 3' sequence

SEQ ID NO: 30190 - DNA, 53 bp, Artificial Sequence; identical to SEQ ID NO: 2175
  Description of Artificial Sequence: Synthetic walnut; inner sequence and 3' sequence

SEQ ID NO: 30191 - DNA, 53 bp, Artificial Sequence; identical to SEQ ID NO: 22372
  Description of Artificial Sequence: Synthetic walnut; inner sequence and 3' sequence

SEQ ID NO: 30192 - DNA, 53 bp, Artificial Sequence; identical to SEQ ID NO: 2286
  Description of Artificial Sequence: Synthetic walnut; inner sequence and 3' sequence

SEQ ID NO: 30193 - DNA, 53 bp, Artificial Sequence; identical to SEQ ID NO: 2110
  Description of Artificial Sequence: Synthetic walnut; inner sequence and 3' sequence

SEQ ID NO: 30194 - DNA, 54 bp, Artificial Sequence; identical to SEQ ID NO: 2489
  Description of Artificial Sequence: Synthetic walnut; inner sequence and 3' sequence

SEQ ID NO: 30195 - DNA, 53 bp, Artificial Sequence
  Description of Artificial Sequence: Synthetic walnut; inner sequence and 3' sequence
gcgtgcaacggtacgatgacgtgacgcacattgactagtacatgaccacttga

SEQ ID NO: 30196 - DNA, 53 bp, Artificial Sequence; identical to SEQ ID NO: 14803
  Description of Artificial Sequence: Synthetic walnut; inner sequence and 3' sequence

SEQ ID NO: 30197 - DNA, 53 bp, Artificial Sequence; identical to SEQ ID NO: 2051
  Description of Artificial Sequence: Synthetic walnut; inner sequence and 3' sequence

SEQ ID NO: 30198 - DNA, 53 bp, Artificial Sequence; identical to SEQ ID NO: 2750
  Description of Artificial Sequence: Synthetic walnut; inner sequence and 3' sequence

SEQ ID NO: 30199 - DNA, 53 bp, Artificial Sequence
  Description of Artificial Sequence: Synthetic walnut; inner sequence and 3' sequence
cgacgtgatgcggtacgtacttgcgacacgttgactagtacatgaccacttga

SEQ ID NO: 30200 - DNA, 53 bp, Artificial Sequence; identical to SEQ ID NO: 18688
  Description of Artificial Sequence: Synthetic walnut; inner sequence and 3' sequence

SEQ ID NO: 30201 - DNA, 53 bp, Artificial Sequence; identical to SEQ ID NO: 14939
  Description of Artificial Sequence: Synthetic walnut; inner sequence and 3' sequence

SEQ ID NO: 30202 - DNA, 53 bp, Artificial Sequence; identical to SEQ ID NO: 2548
  Description of Artificial Sequence: Synthetic walnut; inner sequence and 3' sequence

SEQ ID NO: 30203 - DNA, 53 bp, Artificial Sequence; identical to SEQ ID NO: 18399
  Description of Artificial Sequence: Synthetic walnut; inner sequence and 3' sequence

SEQ ID NO: 30204 - DNA, 53 bp, Artificial Sequence; identical to SEQ ID NO: 2349
  Description of Artificial Sequence: Synthetic walnut; inner sequence and 3' sequence

SEQ ID NO: 30205 - DNA, 51 bp, Artificial Sequence; identical to SEQ ID NO: 6786
  Description of Artificial Sequence: Synthetic walnut; inner sequence and 3' sequence

SEQ ID NO: 30206 - DNA, 53 bp, Artificial Sequence; identical to SEQ ID NO: 6659
  Description of Artificial Sequence: Synthetic walnut; inner sequence and 3' sequence

SEQ ID NO: 30207 - DNA, 53 bp, Artificial Sequence; identical to SEQ ID NO: 2247
  Description of Artificial Sequence: Synthetic walnut; inner sequence and 3' sequence

SEQ ID NO: 30208 - DNA, 53 bp, Artificial Sequence
  Description of Artificial Sequence: Synthetic walnut; inner sequence and 3' sequence
catgcatcgcgtaacacgtcctgcgtcacgttgactagtacatgaccacttga

SEQ ID NO: 30209 - DNA, 53 bp, Artificial Sequence; identical to SEQ ID NO: 10950
  Description of Artificial Sequence: Synthetic walnut; inner sequence and 3' sequence

SEQ ID NO: 30210 - DNA, 53 bp, Artificial Sequence; identical to SEQ ID NO: 2149
  Description of Artificial Sequence: Synthetic walnut; inner sequence and 3' sequence

SEQ ID NO: 30211 - DNA, 53 bp, Artificial Sequence; identical to SEQ ID NO: 2291
  Description of Artificial Sequence: Synthetic walnut; inner sequence and 3' sequence

SEQ ID NO: 30212 - DNA, 53 bp, Artificial Sequence; identical to SEQ ID NO: 22869
  Description of Artificial Sequence: Synthetic walnut; inner sequence and 3' sequence

SEQ ID NO: 30213 - DNA, 53 bp, Artificial Sequence; identical to SEQ ID NO: 2223
  Description of Artificial Sequence: Synthetic walnut; inner sequence and 3' sequence

SEQ ID NO: 30214 - DNA, 53 bp, Artificial Sequence; identical to SEQ ID NO: 2118
  Description of Artificial Sequence: Synthetic walnut; inner sequence and 3' sequence

SEQ ID NO: 30215 - DNA, 53 bp, Artificial Sequence; identical to SEQ ID NO: 2091
  Description of Artificial Sequence: Synthetic walnut; inner sequence and 3' sequence

SEQ ID NO: 30216 - DNA, 53 bp, Artificial Sequence; identical to SEQ ID NO: 2248
  Description of Artificial Sequence: Synthetic walnut; inner sequence and 3' sequence

SEQ ID NO: 30217 - DNA, 53 bp, Artificial Sequence; identical to SEQ ID NO: 2271
  Description of Artificial Sequence: Synthetic walnut; inner sequence and 3' sequence

SEQ ID NO: 30218 - DNA, 53 bp, Artificial Sequence; identical to SEQ ID NO: 2407
  Description of Artificial Sequence: Synthetic walnut; inner sequence and 3' sequence

SEQ ID NO: 30219 - DNA, 53 bp, Artificial Sequence; identical to SEQ ID NO: 18906
  Description of Artificial Sequence: Synthetic walnut; inner sequence and 3' sequence

SEQ ID NO: 30220 - DNA, 53 bp, Artificial Sequence; identical to SEQ ID NO: 2498
  Description of Artificial Sequence: Synthetic walnut; inner sequence and 3' sequence

SEQ ID NO: 30221 - DNA, 53 bp, Artificial Sequence
  Description of Artificial Sequence: Synthetic walnut; inner sequence and 3' sequence
cgatacgcagcacgacgcgatgtgtacgcattgactagtacatgaccacttga

SEQ ID NO: 30222 - DNA, 53 bp, Artificial Sequence; identical to SEQ ID NO: 2340
  Description of Artificial Sequence: Synthetic walnut; inner sequence and 3' sequence

SEQ ID NO: 30223 - DNA, 53 bp, Artificial Sequence; identical to SEQ ID NO: 2313
  Description of Artificial Sequence: Synthetic walnut; inner sequence and 3' sequence

SEQ ID NO: 30224 - DNA, 53 bp, Artificial Sequence; identical to SEQ ID NO: 2576
  Description of Artificial Sequence: Synthetic walnut; inner sequence and 3' sequence

SEQ ID NO: 30225 - DNA, 53 bp, Artificial Sequence; identical to SEQ ID NO: 2406
  Description of Artificial Sequence: Synthetic walnut; inner sequence and 3' sequence

SEQ ID NO: 30226 - DNA, 53 bp, Artificial Sequence; identical to SEQ ID NO: 2454
  Description of Artificial Sequence: Synthetic walnut; inner sequence and 3' sequence

SEQ ID NO: 30227 - DNA, 53 bp, Artificial Sequence; identical to SEQ ID NO: 2491
  Description of Artificial Sequence: Synthetic walnut; inner sequence and 3' sequence

SEQ ID NO: 30228 - DNA, 53 bp, Artificial Sequence; identical to SEQ ID NO: 2457
  Description of Artificial Sequence: Synthetic walnut; inner sequence and 3' sequence

SEQ ID NO: 30229 - DNA, 53 bp, Artificial Sequence; identical to SEQ ID NO: 2104
  Description of Artificial Sequence: Synthetic walnut; inner sequence and 3' sequence

SEQ ID NO: 30230 - DNA, 53 bp, Artificial Sequence; identical to SEQ ID NO: 14996
  Description of Artificial Sequence: Synthetic walnut; inner sequence and 3' sequence

SEQ ID NO: 30231 - DNA, 53 bp, Artificial Sequence; identical to SEQ ID NO: 22533
  Description of Artificial Sequence: Synthetic walnut; inner sequence and 3' sequence

SEQ ID NO: 30232 - DNA, 53 bp, Artificial Sequence; identical to SEQ ID NO: 2314
  Description of Artificial Sequence: Synthetic walnut; inner sequence and 3' sequence

SEQ ID NO: 30233 - DNA, 53 bp, Artificial Sequence
  Description of Artificial Sequence: Synthetic walnut; inner sequence and 3' sequence
ccgtacgacacgagcacgatgcgttacgcgttgactagtacatgaccacttga

SEQ ID NO: 30234 - DNA, 53 bp, Artificial Sequence; identical to SEQ ID NO: 2219
  Description of Artificial Sequence: Synthetic walnut; inner sequence and 3' sequence

SEQ ID NO: 30235 - DNA, 53 bp, Artificial Sequence; identical to SEQ ID NO: 2283
  Description of Artificial Sequence: Synthetic walnut; inner sequence and 3' sequence

SEQ ID NO: 30236 - DNA, 53 bp, Artificial Sequence; identical to SEQ ID NO: 2611
  Description of Artificial Sequence: Synthetic walnut; inner sequence and 3' sequence

SEQ ID NO: 30237 - DNA, 52 bp, Artificial Sequence
  Description of Artificial Sequence: Synthetic walnut; inner sequence and 3' sequence
cacgtgcatggacgcgtcgtaccgtggcattgactagtacatgaccacttga

SEQ ID NO: 30238 - DNA, 53 bp, Artificial Sequence; identical to SEQ ID NO: 2016
  Description of Artificial Sequence: Synthetic walnut; inner sequence and 3' sequence

SEQ ID NO: 30239 - DNA, 53 bp, Artificial Sequence; identical to SEQ ID NO: 2352
  Description of Artificial Sequence: Synthetic walnut; inner sequence and 3' sequence

SEQ ID NO: 30240 - DNA, 53 bp, Artificial Sequence; identical to SEQ ID NO: 2379
  Description of Artificial Sequence: Synthetic walnut; inner sequence and 3' sequence

SEQ ID NO: 30241 - DNA, 53 bp, Artificial Sequence; identical to SEQ ID NO: 22307
  Description of Artificial Sequence: Synthetic walnut; inner sequence and 3' sequence

SEQ ID NO: 30242 - DNA, 53 bp, Artificial Sequence; identical to SEQ ID NO: 2886
  Description of Artificial Sequence: Synthetic walnut; inner sequence and 3' sequence

SEQ ID NO: 30243 - DNA, 53 bp, Artificial Sequence
  Description of Artificial Sequence: Synthetic walnut; inner sequence and 3' sequence
catgcacaggcagcgtgacgttacgccgtgttgactagtacatgaccacttga

SEQ ID NO: 30244 - DNA, 53 bp, Artificial Sequence
  Description of Artificial Sequence: Synthetic walnut; inner sequence and 3' sequence
cgtgacgcaaggcaaggacctcactgcgcgttgactagtacatgaccacttga

SEQ ID NO: 30245 - DNA, 53 bp, Artificial Sequence; identical to SEQ ID NO: 2332
  Description of Artificial Sequence: Synthetic walnut; inner sequence and 3' sequence

SEQ ID NO: 30246 - DNA, 53 bp, Artificial Sequence; identical to SEQ ID NO: 10807
  Description of Artificial Sequence: Synthetic walnut; inner sequence and 3' sequence

SEQ ID NO: 30247 - DNA, 53 bp, Artificial Sequence; identical to SEQ ID NO: 2049
  Description of Artificial Sequence: Synthetic walnut; inner sequence and 3' sequence

SEQ ID NO: 30248 - DNA, 53 bp, Artificial Sequence; identical to SEQ ID NO: 2488
  Description of Artificial Sequence: Synthetic walnut; inner sequence and 3' sequence

SEQ ID NO: 30249 - DNA, 53 bp, Artificial Sequence; identical to SEQ ID NO: 2167
  Description of Artificial Sequence: Synthetic walnut; inner sequence and 3' sequence

SEQ ID NO: 30250 - DNA, 53 bp, Artificial Sequence; identical to SEQ ID NO: 2156
  Description of Artificial Sequence: Synthetic walnut; inner sequence and 3' sequence

SEQ ID NO: 30251 - DNA, 54 bp, Artificial Sequence; identical to SEQ ID NO: 2845
  Description of Artificial Sequence: Synthetic walnut; inner sequence and 3' sequence

SEQ ID NO: 30252 - DNA, 53 bp, Artificial Sequence
  Description of Artificial Sequence: Synthetic walnut; inner sequence and 3' sequence
gcatgtgacacgcgtcgtcctgcctgcacgttgactagtacatgaccacttga

SEQ ID NO: 30253 - DNA, 53 bp, Artificial Sequence; identical to SEQ ID NO: 2466
  Description of Artificial Sequence: Synthetic walnut; inner sequence and 3' sequence

SEQ ID NO: 30254 - DNA, 53 bp, Artificial Sequence; identical to SEQ ID NO: 14931
  Description of Artificial Sequence: Synthetic walnut; inner sequence and 3' sequence

SEQ ID NO: 30255 - DNA, 53 bp, Artificial Sequence; identical to SEQ ID NO: 22733
  Description of Artificial Sequence: Synthetic walnut; inner sequence and 3' sequence

SEQ ID NO: 30256 - DNA, 53 bp, Artificial Sequence; identical to SEQ ID NO: 2389
  Description of Artificial Sequence: Synthetic walnut; inner sequence and 3' sequence

SEQ ID NO: 30257 - DNA, 53 bp, Artificial Sequence
  Description of Artificial Sequence: Synthetic walnut; inner sequence and 3' sequence
gtgcgaccgaccctatcaggtggacgtgtattgactagtacatgaccacttga

SEQ ID NO: 30258 - DNA, 53 bp, Artificial Sequence; identical to SEQ ID NO: 2449
  Description of Artificial Sequence: Synthetic walnut; inner sequence and 3' sequence

SEQ ID NO: 30259 - DNA, 53 bp, Artificial Sequence; identical to SEQ ID NO: 2303
  Description of Artificial Sequence: Synthetic walnut; inner sequence and 3' sequence

SEQ ID NO: 30260 - DNA, 53 bp, Artificial Sequence; identical to SEQ ID NO: 2125
  Description of Artificial Sequence: Synthetic walnut; inner sequence and 3' sequence

SEQ ID NO: 30261 - DNA, 53 bp, Artificial Sequence; identical to SEQ ID NO: 2289
  Description of Artificial Sequence: Synthetic walnut; inner sequence and 3' sequence

SEQ ID NO: 30262 - DNA, 53 bp, Artificial Sequence; identical to SEQ ID NO: 6234
  Description of Artificial Sequence: Synthetic walnut; inner sequence and 3' sequence

SEQ ID NO: 30263 - DNA, 53 bp, Artificial Sequence; identical to SEQ ID NO: 2098
  Description of Artificial Sequence: Synthetic walnut; inner sequence and 3' sequence

SEQ ID NO: 30264 - DNA, 52 bp, Artificial Sequence; identical to SEQ ID NO: 2453
  Description of Artificial Sequence: Synthetic walnut; inner sequence and 3' sequence

SEQ ID NO: 30265 - DNA, 53 bp, Artificial Sequence; identical to SEQ ID NO: 2561
  Description of Artificial Sequence: Synthetic walnut; inner sequence and 3' sequence

SEQ ID NO: 30266 - DNA, 53 bp, Artificial Sequence; identical to SEQ ID NO: 2115
  Description of Artificial Sequence: Synthetic walnut; inner sequence and 3' sequence

SEQ ID NO: 30267 - DNA, 53 bp, Artificial Sequence; identical to SEQ ID NO: 2443
  Description of Artificial Sequence: Synthetic walnut; inner sequence and 3' sequence

SEQ ID NO: 30268 - DNA, 53 bp, Artificial Sequence
  Description of Artificial Sequence: Synthetic walnut; inner sequence and 3' sequence
ggcctgtcgtccctatcaggtggttgtggattgactagtacatgaccacttga

SEQ ID NO: 30269 - DNA, 53 bp, Artificial Sequence; identical to SEQ ID NO: 6429
  Description of Artificial Sequence: Synthetic walnut; inner sequence and 3' sequence

SEQ ID NO: 30270 - DNA, 54 bp, Artificial Sequence; identical to SEQ ID NO: 2258
  Description of Artificial Sequence: Synthetic walnut; inner sequence and 3' sequence

SEQ ID NO: 30271 - DNA, 53 bp, Artificial Sequence; identical to SEQ ID NO: 6802
  Description of Artificial Sequence: Synthetic walnut; inner sequence and 3' sequence

SEQ ID NO: 30272 - DNA, 53 bp, Artificial Sequence
  Description of Artificial Sequence: Synthetic walnut; inner sequence and 3' sequence
ggccgaactggatgggggcattactgcggcttgactagtacatgaccacttga

SEQ ID NO: 30273 - DNA, 53 bp, Artificial Sequence; identical to SEQ ID NO: 2142
  Description of Artificial Sequence: Synthetic walnut; inner sequence and 3' sequence

SEQ ID NO: 30274 - DNA, 53 bp, Artificial Sequence; identical to SEQ ID NO: 2452
  Description of Artificial Sequence: Synthetic walnut; inner sequence and 3' sequence

SEQ ID NO: 30275 - DNA, 53 bp, Artificial Sequence; identical to SEQ ID NO: 2238
  Description of Artificial Sequence: Synthetic walnut; inner sequence and 3' sequence

SEQ ID NO: 30276 - DNA, 53 bp, Artificial Sequence; identical to SEQ ID NO: 2595
  Description of Artificial Sequence: Synthetic walnut; inner sequence and 3' sequence

SEQ ID NO: 30277 - DNA, 53 bp, Artificial Sequence; identical to SEQ ID NO: 2187
  Description of Artificial Sequence: Synthetic walnut; inner sequence and 3' sequence

SEQ ID NO: 30278 - DNA, 53 bp, Artificial Sequence
  Description of Artificial Sequence: Synthetic walnut; inner sequence and 3' sequence
gcacgatgcaacgtgtgtcctcgcgtcacgttgactagtacatgaccacttga

SEQ ID NO: 30279 - DNA, 53 bp, Artificial Sequence; identical to SEQ ID NO: 2884
  Description of Artificial Sequence: Synthetic walnut; inner sequence and 3' sequence

SEQ ID NO: 30280 - DNA, 53 bp, Artificial Sequence; identical to SEQ ID NO: 2631
  Description of Artificial Sequence: Synthetic walnut; inner sequence and 3' sequence

SEQ ID NO: 30281 - DNA, 53 bp, Artificial Sequence; identical to SEQ ID NO: 22324
  Description of Artificial Sequence: Synthetic walnut; inner sequence and 3' sequence

SEQ ID NO: 30282 - DNA, 53 bp, Artificial Sequence; identical to SEQ ID NO: 2715
  Description of Artificial Sequence: Synthetic walnut; inner sequence and 3' sequence

SEQ ID NO: 30283 - DNA, 53 bp, Artificial Sequence; identical to SEQ ID NO: 2853
  Description of Artificial Sequence: Synthetic walnut; inner sequence and 3' sequence

SEQ ID NO: 30284 - DNA, 53 bp, Artificial Sequence; identical to SEQ ID NO: 2129
  Description of Artificial Sequence: Synthetic walnut; inner sequence and 3' sequence

SEQ ID NO: 30285 - DNA, 53 bp, Artificial Sequence; identical to SEQ ID NO: 2086
  Description of Artificial Sequence: Synthetic walnut; inner sequence and 3' sequence

SEQ ID NO: 30286 - DNA, 53 bp, Artificial Sequence; identical to SEQ ID NO: 22507
  Description of Artificial Sequence: Synthetic walnut; inner sequence and 3' sequence

SEQ ID NO: 30287 - DNA, 53 bp, Artificial Sequence; identical to SEQ ID NO: 2634
  Description of Artificial Sequence: Synthetic walnut; inner sequence and 3' sequence

SEQ ID NO: 30288 - DNA, 53 bp, Artificial Sequence; identical to SEQ ID NO: 2320
  Description of Artificial Sequence: Synthetic walnut; inner sequence and 3' sequence

SEQ ID NO: 30289 - DNA, 53 bp, Artificial Sequence; identical to SEQ ID NO: 2464
  Description of Artificial Sequence: Synthetic walnut; inner sequence and 3' sequence

SEQ ID NO: 30290 - DNA, 52 bp, Artificial Sequence; identical to SEQ ID NO: 2648
  Description of Artificial Sequence: Synthetic walnut; inner sequence and 3' sequence

SEQ ID NO: 30291 - DNA, 53 bp, Artificial Sequence; identical to SEQ ID NO: 22133
  Description of Artificial Sequence: Synthetic walnut; inner sequence and 3' sequence

SEQ ID NO: 30292 - DNA, 53 bp, Artificial Sequence; identical to SEQ ID NO: 2326
  Description of Artificial Sequence: Synthetic walnut; inner sequence and 3' sequence

SEQ ID NO: 30293 - DNA, 53 bp, Artificial Sequence; identical to SEQ ID NO: 2057
  Description of Artificial Sequence: Synthetic walnut; inner sequence and 3' sequence

SEQ ID NO: 30294 - DNA, 53 bp, Artificial Sequence; identical to SEQ ID NO: 14985
  Description of Artificial Sequence: Synthetic walnut; inner sequence and 3' sequence

SEQ ID NO: 30295 - DNA, 53 bp, Artificial Sequence
  Description of Artificial Sequence: Synthetic walnut; inner sequence and 3' sequence
gcccgaacgcgcctacaagtgttgcatggattgactagtacatgaccacttga

SEQ ID NO: 30296 - DNA, 53 bp, Artificial Sequence; identical to SEQ ID NO: 2312
  Description of Artificial Sequence: Synthetic walnut; inner sequence and 3' sequence

SEQ ID NO: 30297 - DNA, 53 bp, Artificial Sequence; identical to SEQ ID NO: 6940
  Description of Artificial Sequence: Synthetic walnut; inner sequence and 3' sequence

SEQ ID NO: 30298 - DNA, 53 bp, Artificial Sequence
  Description of Artificial Sequence: Synthetic walnut; inner sequence and 3' sequence
ggcatgcgatggatgtgggctagtatgggcttgactagtacatgaccacttga

SEQ ID NO: 30299 - DNA, 54 bp, Artificial Sequence; identical to SEQ ID NO: 2659
  Description of Artificial Sequence: Synthetic walnut; inner sequence and 3' sequence

SEQ ID NO: 30300 - DNA, 53 bp, Artificial Sequence; identical to SEQ ID NO: 22540
  Description of Artificial Sequence: Synthetic walnut; inner sequence and 3' sequence

SEQ ID NO: 30301 - DNA, 51 bp, Artificial Sequence; identical to SEQ ID NO: 14885
  Description of Artificial Sequence: Synthetic walnut; inner sequence and 3' sequence

SEQ ID NO: 30302 - DNA, 53 bp, Artificial Sequence; identical to SEQ ID NO: 2687
  Description of Artificial Sequence: Synthetic walnut; inner sequence and 3' sequence

SEQ ID NO: 30303 - DNA, 53 bp, Artificial Sequence; identical to SEQ ID NO: 2891
  Description of Artificial Sequence: Synthetic walnut; inner sequence and 3' sequence

SEQ ID NO: 30304 - DNA, 53 bp, Artificial Sequence; identical to SEQ ID NO: 2260
  Description of Artificial Sequence: Synthetic walnut; inner sequence and 3' sequence

SEQ ID NO: 30305 - DNA, 53 bp, Artificial Sequence; identical to SEQ ID NO: 2200
  Description of Artificial Sequence: Synthetic walnut; inner sequence and 3' sequence

SEQ ID NO: 30306 - DNA, 53 bp, Artificial Sequence
  Description of Artificial Sequence: Synthetic walnut; inner sequence and 3' sequence
cgcacgcagtgacgttacgcatcgtgcacattgactagtacatgaccacttga

SEQ ID NO: 30307 - DNA, 53 bp, Artificial Sequence
  Description of Artificial Sequence: Synthetic walnut; inner sequence and 3' sequence
gcacgacgcacgtacgtacctcacgccacgttgactagtacatgaccacttga

SEQ ID NO: 30308 - DNA, 53 bp, Artificial Sequence; identical to SEQ ID NO: 2507
  Description of Artificial Sequence: Synthetic walnut; inner sequence and 3' sequence

SEQ ID NO: 30309 - DNA, 53 bp, Artificial Sequence; identical to SEQ ID NO: 2102
  Description of Artificial Sequence: Synthetic walnut; inner sequence and 3' sequence

SEQ ID NO: 30310 - DNA, 53 bp, Artificial Sequence
  Description of Artificial Sequence: Synthetic walnut; inner sequence and 3' sequence
catgcgcatgcgtacggatcgtgctgcacgttgactagtacatgaccacttga

SEQ ID NO: 30311 - DNA, 53 bp, Artificial Sequence; identical to SEQ ID NO: 2806
  Description of Artificial Sequence: Synthetic walnut; inner sequence and 3' sequence

SEQ ID NO: 30312 - DNA, 53 bp, Artificial Sequence
  Description of Artificial Sequence: Synthetic walnut; inner sequence and 3' sequence
gcgacacagacggtacgccttgcctgcacgttgactagtacatgaccacttga

SEQ ID NO: 30313 - DNA, 53 bp, Artificial Sequence; identical to SEQ ID NO: 2311
  Description of Artificial Sequence: Synthetic walnut; inner sequence and 3' sequence

SEQ ID NO: 30314 - DNA, 53 bp, Artificial Sequence; identical to SEQ ID NO: 2164
  Description of Artificial Sequence: Synthetic walnut; inner sequence and 3' sequence

SEQ ID NO: 30315 - DNA, 53 bp, Artificial Sequence
  Description of Artificial Sequence: Synthetic walnut; inner sequence and 3' sequence
cgatgcgcaacatgcatccgacgcgacacgttgactagtacatgaccacttga

SEQ ID NO: 30316 - DNA, 53 bp, Artificial Sequence
  Description of Artificial Sequence: Synthetic walnut; inner sequence and 3' sequence
cgtcacgcaggacggtagcgcgtcggcacgttgactagtacatgaccacttga

SEQ ID NO: 30317 - DNA, 53 bp, Artificial Sequence
  Description of Artificial Sequence: Synthetic walnut; inner sequence and 3' sequence
gtcacgccgcatccctatcgaggggacatgttgactagtacatgaccacttga

SEQ ID NO: 30318 - DNA, 53 bp, Artificial Sequence; identical to SEQ ID NO: 2126
  Description of Artificial Sequence: Synthetic walnut; inner sequence and 3' sequence

SEQ ID NO: 30319 - DNA, 53 bp, Artificial Sequence; identical to SEQ ID NO: 2777
  Description of Artificial Sequence: Synthetic walnut; inner sequence and 3' sequence

SEQ ID NO: 30320 - DNA, 53 bp, Artificial Sequence
  Description of Artificial Sequence: Synthetic walnut; inner sequence and 3' sequence
cgcaccgtgatgacgctacgttacggcatgttgactagtacatgaccacttga

SEQ ID NO: 30321 - DNA, 55 bp, Artificial Sequence
  Description of Artificial Sequence: Synthetic walnut; inner sequence and 3' sequence
ggcctgcgatggatggggacgggtatgctggcttgactagtacatgaccacttga

SEQ ID NO: 30322 - DNA, 53 bp, Artificial Sequence; identical to SEQ ID NO: 2512
  Description of Artificial Sequence: Synthetic walnut; inner sequence and 3' sequence

SEQ ID NO: 30323 - DNA, 53 bp, Artificial Sequence; identical to SEQ ID NO: 2892
  Description of Artificial Sequence: Synthetic walnut; inner sequence and 3' sequence

SEQ ID NO: 30324 - DNA, 53 bp, Artificial Sequence; identical to SEQ ID NO: 2560
  Description of Artificial Sequence: Synthetic walnut; inner sequence and 3' sequence

SEQ ID NO: 30325 - DNA, 52 bp, Artificial Sequence; identical to SEQ ID NO: 18665
  Description of Artificial Sequence: Synthetic walnut; inner sequence and 3' sequence

SEQ ID NO: 30326 - DNA, 53 bp, Artificial Sequence; identical to SEQ ID NO: 2225
  Description of Artificial Sequence: Synthetic walnut; inner sequence and 3' sequence

SEQ ID NO: 30327 - DNA, 53 bp, Artificial Sequence; identical to SEQ ID NO: 2369
  Description of Artificial Sequence: Synthetic walnut; inner sequence and 3' sequence

SEQ ID NO: 30328 - DNA, 53 bp, Artificial Sequence
  Description of Artificial Sequence: Synthetic walnut; inner sequence and 3' sequence
ggacgcatcgccccttcgagtggccaggtattgactagtacatgaccacttga

SEQ ID NO: 30329 - DNA, 53 bp, Artificial Sequence
  Description of Artificial Sequence: Synthetic walnut; inner sequence and 3' sequence
cgacacgcacagtcagcacgtccgttcgcgttgactagtacatgaccacttga

SEQ ID NO: 30330 - DNA, 53 bp, Artificial Sequence; identical to SEQ ID NO: 2358
  Description of Artificial Sequence: Synthetic walnut; inner sequence and 3' sequence

SEQ ID NO: 30331 - DNA, 53 bp, Artificial Sequence; identical to SEQ ID NO: 14869
  Description of Artificial Sequence: Synthetic walnut; inner sequence and 3' sequence

SEQ ID NO: 30332 - DNA, 53 bp, Artificial Sequence; identical to SEQ ID NO: 6356
  Description of Artificial Sequence: Synthetic walnut; inner sequence and 3' sequence

SEQ ID NO: 30333 - DNA, 53 bp, Artificial Sequence; identical to SEQ ID NO: 18970
  Description of Artificial Sequence: Synthetic walnut; inner sequence and 3' sequence

SEQ ID NO: 30334 - DNA, 53 bp, Artificial Sequence; identical to SEQ ID NO: 22233
  Description of Artificial Sequence: Synthetic walnut; inner sequence and 3' sequence

SEQ ID NO: 30335 - DNA, 53 bp, Artificial Sequence
  Description of Artificial Sequence: Synthetic walnut; inner sequence and 3' sequence
cgcaccgtatgcgtcacgtaacacggcatgttgactagtacatgaccacttga

SEQ ID NO: 30336 - DNA, 53 bp, Artificial Sequence; identical to SEQ ID NO: 2661
  Description of Artificial Sequence: Synthetic walnut; inner sequence and 3' sequence

SEQ ID NO: 30337 - DNA, 53 bp, Artificial Sequence; identical to SEQ ID NO: 22528
  Description of Artificial Sequence: Synthetic walnut; inner sequence and 3' sequence

SEQ ID NO: 30338 - DNA, 49 bp, Artificial Sequence; identical to SEQ ID NO: 22678
  Description of Artificial Sequence: Synthetic walnut; inner sequence and 3' sequence

SEQ ID NO: 30339 - DNA, 53 bp, Artificial Sequence; identical to SEQ ID NO: 2272
  Description of Artificial Sequence: Synthetic walnut; inner sequence and 3' sequence

SEQ ID NO: 30340 - DNA, 53 bp, Artificial Sequence; identical to SEQ ID NO: 2837
  Description of Artificial Sequence: Synthetic walnut; inner sequence and 3' sequence

SEQ ID NO: 30341 - DNA, 53 bp, Artificial Sequence; identical to SEQ ID NO: 2583
  Description of Artificial Sequence: Synthetic walnut; inner sequence and 3' sequence

SEQ ID NO: 30342 - DNA, 53 bp, Artificial Sequence; identical to SEQ ID NO: 2647
  Description of Artificial Sequence: Synthetic walnut; inner sequence and 3' sequence

SEQ ID NO: 30343 - DNA, 52 bp, Artificial Sequence; identical to SEQ ID NO: 2642
  Description of Artificial Sequence: Synthetic walnut; inner sequence and 3' sequence

SEQ ID NO: 30344 - DNA, 53 bp, Artificial Sequence; identical to SEQ ID NO: 2203
  Description of Artificial Sequence: Synthetic walnut; inner sequence and 3' sequence

SEQ ID NO: 30345 - DNA, 53 bp, Artificial Sequence; identical to SEQ ID NO: 2497
  Description of Artificial Sequence: Synthetic walnut; inner sequence and 3' sequence

SEQ ID NO: 30346 - DNA, 53 bp, Artificial Sequence; identical to SEQ ID NO: 2909
  Description of Artificial Sequence: Synthetic walnut; inner sequence and 3' sequence

SEQ ID NO: 30347 - DNA, 53 bp, Artificial Sequence; identical to SEQ ID NO: 6489
  Description of Artificial Sequence: Synthetic walnut; inner sequence and 3' sequence

SEQ ID NO: 30348 - DNA, 53 bp, Artificial Sequence; identical to SEQ ID NO: 2499
  Description of Artificial Sequence: Synthetic walnut; inner sequence and 3' sequence

SEQ ID NO: 30349 - DNA, 53 bp, Artificial Sequence; identical to SEQ ID NO: 2089
  Description of Artificial Sequence: Synthetic walnut; inner sequence and 3' sequence

SEQ ID NO: 30350 - DNA, 53 bp, Artificial Sequence
  Description of Artificial Sequence: Synthetic walnut; inner sequence and 3' sequence
gtcattccgcatcctacacgtgggaatggattgactagtacatgaccacttga

SEQ ID NO: 30351 - DNA, 53 bp, Artificial Sequence; identical to SEQ ID NO: 2754
  Description of Artificial Sequence: Synthetic walnut; inner sequence and 3' sequence

SEQ ID NO: 30352 - DNA, 53 bp, Artificial Sequence; identical to SEQ ID NO: 6571
  Description of Artificial Sequence: Synthetic walnut; inner sequence and 3' sequence

SEQ ID NO: 30353 - DNA, 53 bp, Artificial Sequence; identical to SEQ ID NO: 2158
  Description of Artificial Sequence: Synthetic walnut; inner sequence and 3' sequence

SEQ ID NO: 30354 - DNA, 53 bp, Artificial Sequence; identical to SEQ ID NO: 2543
  Description of Artificial Sequence: Synthetic walnut; inner sequence and 3' sequence

SEQ ID NO: 30355 - DNA, 53 bp, Artificial Sequence; identical to SEQ ID NO: 2327
  Description of Artificial Sequence: Synthetic walnut; inner sequence and 3' sequence

SEQ ID NO: 30356 - DNA, 53 bp, Artificial Sequence; identical to SEQ ID NO: 18837
  Description of Artificial Sequence: Synthetic walnut; inner sequence and 3' sequence

SEQ ID NO: 30357 - DNA, 53 bp, Artificial Sequence; identical to SEQ ID NO: 2362
  Description of Artificial Sequence: Synthetic walnut; inner sequence and 3' sequence

SEQ ID NO: 30358 - DNA, 53 bp, Artificial Sequence; identical to SEQ ID NO: 18829
  Description of Artificial Sequence: Synthetic walnut; inner sequence and 3' sequence

SEQ ID NO: 30359 - DNA, 53 bp, Artificial Sequence; identical to SEQ ID NO: 2331
  Description of Artificial Sequence: Synthetic walnut; inner sequence and 3' sequence

SEQ ID NO: 30360 - DNA, 53 bp, Artificial Sequence; identical to SEQ ID NO: 2717
  Description of Artificial Sequence: Synthetic walnut; inner sequence and 3' sequence

SEQ ID NO: 30361 - DNA, 53 bp, Artificial Sequence; identical to SEQ ID NO: 22522
  Description of Artificial Sequence: Synthetic walnut; inner sequence and 3' sequence

SEQ ID NO: 30362 - DNA, 53 bp, Artificial Sequence; identical to SEQ ID NO: 18750
  Description of Artificial Sequence: Synthetic walnut; inner sequence and 3' sequence

SEQ ID NO: 30363 - DNA, 53 bp, Artificial Sequence; identical to SEQ ID NO: 18675
  Description of Artificial Sequence: Synthetic walnut; inner sequence and 3' sequence

SEQ ID NO: 30364 - DNA, 54 bp, Artificial Sequence; identical to SEQ ID NO: 2503
  Description of Artificial Sequence: Synthetic walnut; inner sequence and 3' sequence

SEQ ID NO: 30365 - DNA, 53 bp, Artificial Sequence; identical to SEQ ID NO: 2212
  Description of Artificial Sequence: Synthetic walnut; inner sequence and 3' sequence

SEQ ID NO: 30366 - DNA, 53 bp, Artificial Sequence; identical to SEQ ID NO: 22626
  Description of Artificial Sequence: Synthetic walnut; inner sequence and 3' sequence

SEQ ID NO: 30367 - DNA, 53 bp, Artificial Sequence; identical to SEQ ID NO: 2064
  Description of Artificial Sequence: Synthetic walnut; inner sequence and 3' sequence

SEQ ID NO: 30368 - DNA, 53 bp, Artificial Sequence
  Description of Artificial Sequence: Synthetic walnut; inner sequence and 3' sequence
ggcctgcgatggatgtgtgcgtgtcttagcttgactagtacatgaccacttga

SEQ ID NO: 30369 - DNA, 53 bp, Artificial Sequence; identical to SEQ ID NO: 22524
  Description of Artificial Sequence: Synthetic walnut; inner sequence and 3' sequence

SEQ ID NO: 30370 - DNA, 53 bp, Artificial Sequence; identical to SEQ ID NO: 22769
  Description of Artificial Sequence: Synthetic walnut; inner sequence and 3' sequence

SEQ ID NO: 30371 - DNA, 53 bp, Artificial Sequence; identical to SEQ ID NO: 2044
  Description of Artificial Sequence: Synthetic walnut; inner sequence and 3' sequence

SEQ ID NO: 30372 - DNA, 52 bp, Artificial Sequence; identical to SEQ ID NO: 2334
  Description of Artificial Sequence: Synthetic walnut; inner sequence and 3' sequence

SEQ ID NO: 30373 - DNA, 53 bp, Artificial Sequence; identical to SEQ ID NO: 2293
  Description of Artificial Sequence: Synthetic walnut; inner sequence and 3' sequence

SEQ ID NO: 30374 - DNA, 53 bp, Artificial Sequence; identical to SEQ ID NO: 18603
  Description of Artificial Sequence: Synthetic walnut; inner sequence and 3' sequence

SEQ ID NO: 30375 - DNA, 53 bp, Artificial Sequence
  Description of Artificial Sequence: Synthetic walnut; inner sequence and 3' sequence
cgacacggacggtaggcatgctgcgtcacgttgactagtacatgaccacttga

SEQ ID NO: 30376 - DNA, 53 bp, Artificial Sequence; identical to SEQ ID NO: 2038
  Description of Artificial Sequence: Synthetic walnut; inner sequence and 3' sequence

SEQ ID NO: 30377 - DNA, 53 bp, Artificial Sequence; identical to SEQ ID NO: 6707
  Description of Artificial Sequence: Synthetic walnut; inner sequence and 3' sequence

SEQ ID NO: 30378 - DNA, 53 bp, Artificial Sequence; identical to SEQ ID NO: 2573
  Description of Artificial Sequence: Synthetic walnut; inner sequence and 3' sequence

SEQ ID NO: 30379 - DNA, 53 bp, Artificial Sequence
  Description of Artificial Sequence: Synthetic walnut; inner sequence and 3' sequence
acgtgagcacgacgtagcgcacactgcacgttgactagtacatgaccacttga

SEQ ID NO: 30380 - DNA, 53 bp, Artificial Sequence; identical to SEQ ID NO: 2447
  Description of Artificial Sequence: Synthetic walnut; inner sequence and 3' sequence

SEQ ID NO: 30381 - DNA, 53 bp, Artificial Sequence
  Description of Artificial Sequence: Synthetic walnut; inner sequence and 3' sequence
cgtaacgcagcgcgagtgacgtacgacacgttgactagtacatgaccacttga

SEQ ID NO: 30382 - DNA, 53 bp, Artificial Sequence
  Description of Artificial Sequence: Synthetic walnut; inner sequence and 3' sequence
gcgtgacgcaacgcaggctgtccgtacgcattgactagtacatgaccacttga

SEQ ID NO: 30383 - DNA, 53 bp, Artificial Sequence; identical to SEQ ID NO: 18612
  Description of Artificial Sequence: Synthetic walnut; inner sequence and 3' sequence

SEQ ID NO: 30384 - DNA, 53 bp, Artificial Sequence; identical to SEQ ID NO: 22923
  Description of Artificial Sequence: Synthetic walnut; inner sequence and 3' sequence

SEQ ID NO: 30385 - DNA, 53 bp, Artificial Sequence; identical to SEQ ID NO: 2615
  Description of Artificial Sequence: Synthetic walnut; inner sequence and 3' sequence

SEQ ID NO: 30386 - DNA, 53 bp, Artificial Sequence; identical to SEQ ID NO: 6748
  Description of Artificial Sequence: Synthetic walnut; inner sequence and 3' sequence

SEQ ID NO: 30387 - DNA, 53 bp, Artificial Sequence; identical to SEQ ID NO: 6521
  Description of Artificial Sequence: Synthetic walnut; inner sequence and 3' sequence

SEQ ID NO: 30388 - DNA, 53 bp, Artificial Sequence; identical to SEQ ID NO: 18692
  Description of Artificial Sequence: Synthetic walnut; inner sequence and 3' sequence

SEQ ID NO: 30389 - DNA, 53 bp, Artificial Sequence
  Description of Artificial Sequence: Synthetic walnut; inner sequence and 3' sequence
cacgtgcagcgtgtcgtgccacatgacgcattgactagtacatgaccacttga

SEQ ID NO: 30390 - DNA, 53 bp, Artificial Sequence
  Description of Artificial Sequence: Synthetic walnut; inner sequence and 3' sequence
cgcaccgcaacgtgagggcatgcgcgtgtgttgactagtacatgaccacttga

SEQ ID NO: 30391 - DNA, 52 bp, Artificial Sequence; identical to SEQ ID NO: 18540
  Description of Artificial Sequence: Synthetic walnut; inner sequence and 3' sequence

SEQ ID NO: 30392 - DNA, 53 bp, Artificial Sequence
  Description of Artificial Sequence: Synthetic walnut; inner sequence and 3' sequence
ggccgacgatggatgtgggttgtgctcgtcttgactagtacatgaccacttga

SEQ ID NO: 30393 - DNA, 53 bp, Artificial Sequence; identical to SEQ ID NO: 2394
  Description of Artificial Sequence: Synthetic walnut; inner sequence and 3' sequence

SEQ ID NO: 30394 - DNA, 53 bp, Artificial Sequence; identical to SEQ ID NO: 22690
  Description of Artificial Sequence: Synthetic walnut; inner sequence and 3' sequence

SEQ ID NO: 30395 - DNA, 53 bp, Artificial Sequence; identical to SEQ ID NO: 22613
  Description of Artificial Sequence: Synthetic walnut; inner sequence and 3' sequence

SEQ ID NO: 30396 - DNA, 53 bp, Artificial Sequence; identical to SEQ ID NO: 2154
  Description of Artificial Sequence: Synthetic walnut; inner sequence and 3' sequence

SEQ ID NO: 30397 - DNA, 53 bp, Artificial Sequence; identical to SEQ ID NO: 2324
  Description of Artificial Sequence: Synthetic walnut; inner sequence and 3' sequence

SEQ ID NO: 30398 - DNA, 53 bp, Artificial Sequence; identical to SEQ ID NO: 2146
  Description of Artificial Sequence: Synthetic walnut; inner sequence and 3' sequence

SEQ ID NO: 30399 - DNA, 51 bp, Artificial Sequence; identical to SEQ ID NO: 2148
  Description of Artificial Sequence: Synthetic walnut; inner sequence and 3' sequence

SEQ ID NO: 30400 - DNA, 53 bp, Artificial Sequence
  Description of Artificial Sequence: Synthetic walnut; inner sequence and 3' sequence
cgtgacgtgacgcatccctcgctgttcgcgttgactagtacatgaccacttga

SEQ ID NO: 30401 - DNA, 53 bp, Artificial Sequence; identical to SEQ ID NO: 6807
  Description of Artificial Sequence: Synthetic walnut; inner sequence and 3' sequence

SEQ ID NO: 30402 - DNA, 53 bp, Artificial Sequence; identical to SEQ ID NO: 10953
  Description of Artificial Sequence: Synthetic walnut; inner sequence and 3' sequence

SEQ ID NO: 30403 - DNA, 53 bp, Artificial Sequence; identical to SEQ ID NO: 2788
  Description of Artificial Sequence: Synthetic walnut; inner sequence and 3' sequence

SEQ ID NO: 30404 - DNA, 53 bp, Artificial Sequence; identical to SEQ ID NO: 2728
  Description of Artificial Sequence: Synthetic walnut; inner sequence and 3' sequence

SEQ ID NO: 30405 - DNA, 53 bp, Artificial Sequence; identical to SEQ ID NO: 2245
  Description of Artificial Sequence: Synthetic walnut; inner sequence and 3' sequence

SEQ ID NO: 30406 - DNA, 53 bp, Artificial Sequence
  Description of Artificial Sequence: Synthetic walnut; inner sequence and 3' sequence
gtccgaccgcacccttcgaggggacatggattgactagtacatgaccacttga

SEQ ID NO: 30407 - DNA, 53 bp, Artificial Sequence; identical to SEQ ID NO: 2176
  Description of Artificial Sequence: Synthetic walnut; inner sequence and 3' sequence

SEQ ID NO: 30408 - DNA, 53 bp, Artificial Sequence; identical to SEQ ID NO: 2233
  Description of Artificial Sequence: Synthetic walnut; inner sequence and 3' sequence

SEQ ID NO: 30409 - DNA, 53 bp, Artificial Sequence; identical to SEQ ID NO: 2058
  Description of Artificial Sequence: Synthetic walnut; inner sequence and 3' sequence

SEQ ID NO: 30410 - DNA, 53 bp, Artificial Sequence; identical to SEQ ID NO: 22560
  Description of Artificial Sequence: Synthetic walnut; inner sequence and 3' sequence

SEQ ID NO: 30411 - DNA, 53 bp, Artificial Sequence; identical to SEQ ID NO: 2066
  Description of Artificial Sequence: Synthetic walnut; inner sequence and 3' sequence

SEQ ID NO: 30412 - DNA, 53 bp, Artificial Sequence
  Description of Artificial Sequence: Synthetic walnut; inner sequence and 3' sequence
ggacgcagggcaggacgacgtatcgccacgttgactagtacatgaccacttga

SEQ ID NO: 30413 - DNA, 53 bp, Artificial Sequence
  Description of Artificial Sequence: Synthetic walnut; inner sequence and 3' sequence
ggacgcatcgccccttcgcgtggacaggtattgactagtacatgaccacttga

SEQ ID NO: 30414 - DNA, 53 bp, Artificial Sequence; identical to SEQ ID NO: 2684
  Description of Artificial Sequence: Synthetic walnut; inner sequence and 3' sequence

SEQ ID NO: 30415 - DNA, 53 bp, Artificial Sequence; identical to SEQ ID NO: 2171
  Description of Artificial Sequence: Synthetic walnut; inner sequence and 3' sequence

SEQ ID NO: 30416 - DNA, 53 bp, Artificial Sequence
  Description of Artificial Sequence: Synthetic walnut; inner sequence and 3' sequence
cacgtcacgcaacgacatgtacgctgcacgttgactagtacatgaccacttga

SEQ ID NO: 30417 - DNA, 53 bp, Artificial Sequence; identical to SEQ ID NO: 6419
  Description of Artificial Sequence: Synthetic walnut; inner sequence and 3' sequence

SEQ ID NO: 30418 - DNA, 53 bp, Artificial Sequence; identical to SEQ ID NO: 22468
  Description of Artificial Sequence: Synthetic walnut; inner sequence and 3' sequence

SEQ ID NO: 30419 - DNA, 53 bp, Artificial Sequence; identical to SEQ ID NO: 2683
  Description of Artificial Sequence: Synthetic walnut; inner sequence and 3' sequence

SEQ ID NO: 30420 - DNA, 53 bp, Artificial Sequence; identical to SEQ ID NO: 2531
  Description of Artificial Sequence: Synthetic walnut; inner sequence and 3' sequence

SEQ ID NO: 30421 - DNA, 53 bp, Artificial Sequence; identical to SEQ ID NO: 2455
  Description of Artificial Sequence: Synthetic walnut; inner sequence and 3' sequence

SEQ ID NO: 30422 - DNA, 50 bp, Artificial Sequence; identical to SEQ ID NO: 26993
  Description of Artificial Sequence: Synthetic walnut; inner sequence and 3' sequence

SEQ ID NO: 30423 - DNA, 53 bp, Artificial Sequence; identical to SEQ ID NO: 2577
  Description of Artificial Sequence: Synthetic walnut; inner sequence and 3' sequence

SEQ ID NO: 30424 - DNA, 53 bp, Artificial Sequence; identical to SEQ ID NO: 2467
  Description of Artificial Sequence: Synthetic walnut; inner sequence and 3' sequence

SEQ ID NO: 30425 - DNA, 53 bp, Artificial Sequence
  Description of Artificial Sequence: Synthetic walnut; inner sequence and 3' sequence
gcgtgacgtgacggcagtgcgtgctacgtgttgactagtacatgaccacttga

SEQ ID NO: 30426 - DNA, 53 bp, Artificial Sequence
  Description of Artificial Sequence: Synthetic walnut; inner sequence and 3' sequence
cgatgcgcaaccacgccacacgcatgcacattgactagtacatgaccacttga

SEQ ID NO: 30427 - DNA, 53 bp, Artificial Sequence
  Description of Artificial Sequence: Synthetic walnut; inner sequence and 3' sequence
ggccgagtcgtcacttcaattgggcgtggattgactagtacatgaccacttga

SEQ ID NO: 30428 - DNA, 53 bp, Artificial Sequence; identical to SEQ ID NO: 2493
  Description of Artificial Sequence: Synthetic walnut; inner sequence and 3' sequence

SEQ ID NO: 30429 - DNA, 53 bp, Artificial Sequence; identical to SEQ ID NO: 22607
  Description of Artificial Sequence: Synthetic walnut; inner sequence and 3' sequence

SEQ ID NO: 30430 - DNA, 53 bp, Artificial Sequence; identical to SEQ ID NO: 2462
  Description of Artificial Sequence: Synthetic walnut; inner sequence and 3' sequence

SEQ ID NO: 30431 - DNA, 53 bp, Artificial Sequence; identical to SEQ ID NO: 2905
  Description of Artificial Sequence: Synthetic walnut; inner sequence and 3' sequence

SEQ ID NO: 30432 - DNA, 53 bp, Artificial Sequence
  Description of Artificial Sequence: Synthetic walnut; inner sequence and 3' sequence
cgatgcgcagtacgtcgatgtcacggcgtgttgactagtacatgaccacttga

SEQ ID NO: 30433 - DNA, 55 bp, Artificial Sequence
  Description of Artificial Sequence: Synthetic walnut; inner sequence and 3' sequence
ggcctgcgatggatgggggcgttgtgctcgtcttgactagtacatgaccacttga

SEQ ID NO: 30434 - DNA, 53 bp, Artificial Sequence; identical to SEQ ID NO: 2437
  Description of Artificial Sequence: Synthetic walnut; inner sequence and 3' sequence

SEQ ID NO: 30435 - DNA, 53 bp, Artificial Sequence; identical to SEQ ID NO: 2889
  Description of Artificial Sequence: Synthetic walnut; inner sequence and 3' sequence

SEQ ID NO: 30436 - DNA, 53 bp, Artificial Sequence
  Description of Artificial Sequence: Synthetic walnut; inner sequence and 3' sequence
tgcgtcacgccaggcatacgtcacgtcacgttgactagtacatgaccacttga

SEQ ID NO: 30437 - DNA, 53 bp, Artificial Sequence; identical to SEQ ID NO: 18799
  Description of Artificial Sequence: Synthetic walnut; inner sequence and 3' sequence

SEQ ID NO: 30438 - DNA, 53 bp, Artificial Sequence; identical to SEQ ID NO: 2800
  Description of Artificial Sequence: Synthetic walnut; inner sequence and 3' sequence

SEQ ID NO: 30439 - DNA, 53 bp, Artificial Sequence; identical to SEQ ID NO: 2598
  Description of Artificial Sequence: Synthetic walnut; inner sequence and 3' sequence

SEQ ID NO: 30440 - DNA, 53 bp, Artificial Sequence; identical to SEQ ID NO: 22820
  Description of Artificial Sequence: Synthetic walnut; inner sequence and 3' sequence

SEQ ID NO: 30441 - DNA, 53 bp, Artificial Sequence
  Description of Artificial Sequence: Synthetic walnut; inner sequence and 3' sequence
gtcattcgatggatgtgggttgtgctcgtcttgactagtacatgaccacttga

SEQ ID NO: 30442 - DNA, 53 bp, Artificial Sequence; identical to SEQ ID NO: 2295
  Description of Artificial Sequence: Synthetic walnut; inner sequence and 3' sequence

SEQ ID NO: 30443 - DNA, 53 bp, Artificial Sequence; identical to SEQ ID NO: 2244
  Description of Artificial Sequence: Synthetic walnut; inner sequence and 3' sequence

SEQ ID NO: 30444 - DNA, 53 bp, Artificial Sequence; identical to SEQ ID NO: 2192
  Description of Artificial Sequence: Synthetic walnut; inner sequence and 3' sequence

SEQ ID NO: 30445 - DNA, 53 bp, Artificial Sequence; identical to SEQ ID NO: 10910
  Description of Artificial Sequence: Synthetic walnut; inner sequence and 3' sequence

SEQ ID NO: 30446 - DNA, 53 bp, Artificial Sequence
  Description of Artificial Sequence: Synthetic walnut; inner sequence and 3' sequence
ggacggatcgccccttcgagtggacaggtattgactagtacatgaccacttga

SEQ ID NO: 30447 - DNA, 53 bp, Artificial Sequence; identical to SEQ ID NO: 6469
  Description of Artificial Sequence: Synthetic walnut; inner sequence and 3' sequence

SEQ ID NO: 30448 - DNA, 53 bp, Artificial Sequence; identical to SEQ ID NO: 6254
  Description of Artificial Sequence: Synthetic walnut; inner sequence and 3' sequence

SEQ ID NO: 30449 - DNA, 53 bp, Artificial Sequence; identical to SEQ ID NO: 2292
  Description of Artificial Sequence: Synthetic walnut; inner sequence and 3' sequence

SEQ ID NO: 30450 - DNA, 53 bp, Artificial Sequence; identical to SEQ ID NO: 2208
  Description of Artificial Sequence: Synthetic walnut; inner sequence and 3' sequence

SEQ ID NO: 30451 - DNA, 53 bp, Artificial Sequence; identical to SEQ ID NO: 2060
  Description of Artificial Sequence: Synthetic walnut; inner sequence and 3' sequence

SEQ ID NO: 30452 - DNA, 53 bp, Artificial Sequence
  Description of Artificial Sequence: Synthetic walnut; inner sequence and 3' sequence
ggccgagcttacctgtcaagtgcgagtgtattgactagtacatgaccacttga

SEQ ID NO: 30453 - DNA, 53 bp, Artificial Sequence; identical to SEQ ID NO: 2686
  Description of Artificial Sequence: Synthetic walnut; inner sequence and 3' sequence

SEQ ID NO: 30454 - DNA, 53 bp, Artificial Sequence; identical to SEQ ID NO: 2698
  Description of Artificial Sequence: Synthetic walnut; inner sequence and 3' sequence

SEQ ID NO: 30455 - DNA, 53 bp, Artificial Sequence; identical to SEQ ID NO: 22551
  Description of Artificial Sequence: Synthetic walnut; inner sequence and 3' sequence

SEQ ID NO: 30456 - DNA, 52 bp, Artificial Sequence; identical to SEQ ID NO: 2549
  Description of Artificial Sequence: Synthetic walnut; inner sequence and 3' sequence

SEQ ID NO: 30457 - DNA, 53 bp, Artificial Sequence; identical to SEQ ID NO: 6775
  Description of Artificial Sequence: Synthetic walnut; inner sequence and 3' sequence

SEQ ID NO: 30458 - DNA, 53 bp, Artificial Sequence
  Description of Artificial Sequence: Synthetic walnut; inner sequence and 3' sequence
ggcctgcgctggatgtgtgcgtgtattagcttgactagtacatgaccacttga

SEQ ID NO: 30459 - DNA, 53 bp, Artificial Sequence; identical to SEQ ID NO: 22847
  Description of Artificial Sequence: Synthetic walnut; inner sequence and 3' sequence

SEQ ID NO: 30460 - DNA, 53 bp, Artificial Sequence; identical to SEQ ID NO: 22976
  Description of Artificial Sequence: Synthetic walnut; inner sequence and 3' sequence

SEQ ID NO: 30461 - DNA, 53 bp, Artificial Sequence; identical to SEQ ID NO: 6420
  Description of Artificial Sequence: Synthetic walnut; inner sequence and 3' sequence

SEQ ID NO: 30462 - DNA, 53 bp, Artificial Sequence; identical to SEQ ID NO: 22761
  Description of Artificial Sequence: Synthetic walnut; inner sequence and 3' sequence

SEQ ID NO: 30463 - DNA, 53 bp, Artificial Sequence; identical to SEQ ID NO: 2401
  Description of Artificial Sequence: Synthetic walnut; inner sequence and 3' sequence

SEQ ID NO: 30464 - DNA, 53 bp, Artificial Sequence; identical to SEQ ID NO: 10782
  Description of Artificial Sequence: Synthetic walnut; inner sequence and 3' sequence

SEQ ID NO: 30465 - DNA, 53 bp, Artificial Sequence; identical to SEQ ID NO: 6931
  Description of Artificial Sequence: Synthetic walnut; inner sequence and 3' sequence

SEQ ID NO: 30466 - DNA, 53 bp, Artificial Sequence; identical to SEQ ID NO: 6981
  Description of Artificial Sequence: Synthetic walnut; inner sequence and 3' sequence

SEQ ID NO: 30467 - DNA, 53 bp, Artificial Sequence; identical to SEQ ID NO: 22367
  Description of Artificial Sequence: Synthetic walnut; inner sequence and 3' sequence

SEQ ID NO: 30468 - DNA, 53 bp, Artificial Sequence; identical to SEQ ID NO: 2419
  Description of Artificial Sequence: Synthetic walnut; inner sequence and 3' sequence

SEQ ID NO: 30469 - DNA, 53 bp, Artificial Sequence
  Description of Artificial Sequence: Synthetic walnut; inner sequence and 3' sequence
gcacgacagcacgacgtccatcgcggcacattgactagtacatgaccacttga

SEQ ID NO: 30470 - DNA, 53 bp, Artificial Sequence
  Description of Artificial Sequence: Synthetic walnut; inner sequence and 3' sequence
cacgcacacacgtacccgacacgtcacgcgttgactagtacatgaccacttga

SEQ ID NO: 30471 - DNA, 53 bp, Artificial Sequence
  Description of Artificial Sequence: Synthetic walnut; inner sequence and 3' sequence
gcgtgacgacgtgcatgacgtgccctgtgcttgactagtacatgaccacttga

SEQ ID NO: 30472 - DNA, 53 bp, Artificial Sequence
  Description of Artificial Sequence: Synthetic walnut; inner sequence and 3' sequence
gtgcgatcgacctacaagtgccatgctagtttgactagtacatgaccacttga

SEQ ID NO: 30473 - DNA, 53 bp, Artificial Sequence
  Description of Artificial Sequence: Synthetic walnut; inner sequence and 3' sequence
gacgcacaccgcatcacgtcacactgcgcattgactagtacatgaccacttga

SEQ ID NO: 30474 - DNA, 53 bp, Artificial Sequence; identical to SEQ ID NO: 18677
  Description of Artificial Sequence: Synthetic walnut; inner sequence and 3' sequence

SEQ ID NO: 30475 - DNA, 53 bp, Artificial Sequence; identical to SEQ ID NO: 2968
  Description of Artificial Sequence: Synthetic walnut; inner sequence and 3' sequence

SEQ ID NO: 30476 - DNA, 53 bp, Artificial Sequence; identical to SEQ ID NO: 14971
  Description of Artificial Sequence: Synthetic walnut; inner sequence and 3' sequence

SEQ ID NO: 30477 - DNA, 53 bp, Artificial Sequence
  Description of Artificial Sequence: Synthetic walnut; inner sequence and 3' sequence
cgtgacacacgtaacgcatggaccgtcgcgttgactagtacatgaccacttga

SEQ ID NO: 30478 - DNA, 53 bp, Artificial Sequence; identical to SEQ ID NO: 2067
  Description of Artificial Sequence: Synthetic walnut; inner sequence and 3' sequence

SEQ ID NO: 30479 - DNA, 53 bp, Artificial Sequence; identical to SEQ ID NO: 6603
  Description of Artificial Sequence: Synthetic walnut; inner sequence and 3' sequence

SEQ ID NO: 30480 - DNA, 53 bp, Artificial Sequence
  Description of Artificial Sequence: Synthetic walnut; inner sequence and 3' sequence
cgcacggcacgacgacgctggtacgacacgttgactagtacatgaccacttga

SEQ ID NO: 30481 - DNA, 53 bp, Artificial Sequence; identical to SEQ ID NO: 2821
  Description of Artificial Sequence: Synthetic walnut; inner sequence and 3' sequence

SEQ ID NO: 30482 - DNA, 53 bp, Artificial Sequence; identical to SEQ ID NO: 2866
  Description of Artificial Sequence: Synthetic walnut; inner sequence and 3' sequence

SEQ ID NO: 30483 - DNA, 53 bp, Artificial Sequence; identical to SEQ ID NO: 22692
  Description of Artificial Sequence: Synthetic walnut; inner sequence and 3' sequence

SEQ ID NO: 30484 - DNA, 53 bp, Artificial Sequence; identical to SEQ ID NO: 2397
  Description of Artificial Sequence: Synthetic walnut; inner sequence and 3' sequence

SEQ ID NO: 30485 - DNA, 53 bp, Artificial Sequence
  Description of Artificial Sequence: Synthetic walnut; inner sequence and 3' sequence
gtcattccgtatcctacacgtgggcacgtattgactagtacatgaccacttga

SEQ ID NO: 30486 - DNA, 53 bp, Artificial Sequence; identical to SEQ ID NO: 2127
  Description of Artificial Sequence: Synthetic walnut; inner sequence and 3' sequence

SEQ ID NO: 30487 - DNA, 53 bp, Artificial Sequence; identical to SEQ ID NO: 6576
  Description of Artificial Sequence: Synthetic walnut; inner sequence and 3' sequence

SEQ ID NO: 30488 - DNA, 53 bp, Artificial Sequence
  Description of Artificial Sequence: Synthetic walnut; inner sequence and 3' sequence
ggccgtacgatggatgtgggatggtctagcttgactagtacatgaccacttga

SEQ ID NO: 30489 - DNA, 53 bp, Artificial Sequence; identical to SEQ ID NO: 2613
  Description of Artificial Sequence: Synthetic walnut; inner sequence and 3' sequence

SEQ ID NO: 30490 - DNA, 53 bp, Artificial Sequence; identical to SEQ ID NO: 22929
  Description of Artificial Sequence: Synthetic walnut; inner sequence and 3' sequence

SEQ ID NO: 30491 - DNA, 53 bp, Artificial Sequence; identical to SEQ ID NO: 2025
  Description of Artificial Sequence: Synthetic walnut; inner sequence and 3' sequence

SEQ ID NO: 30492 - DNA, 53 bp, Artificial Sequence
  Description of Artificial Sequence: Synthetic walnut; inner sequence and 3' sequence
ggccgcgtctggatgtggttttgtcgcgtcttgactagtacatgaccacttga

SEQ ID NO: 30493 - DNA, 53 bp, Artificial Sequence
  Description of Artificial Sequence: Synthetic walnut; inner sequence and 3' sequence
cgacgcaccgtaacgacctagcgatgcgcgttgactagtacatgaccacttga

SEQ ID NO: 30494 - DNA, 53 bp, Artificial Sequence; identical to SEQ ID NO: 2185
  Description of Artificial Sequence: Synthetic walnut; inner sequence and 3' sequence

SEQ ID NO: 30495 - DNA, 53 bp, Artificial Sequence
  Description of Artificial Sequence: Synthetic walnut; inner sequence and 3' sequence
ggccgcatcgccccttcgagtggacaggtattgactagtacatgaccacttga

SEQ ID NO: 30496 - DNA, 53 bp, Artificial Sequence; identical to SEQ ID NO: 2134
  Description of Artificial Sequence: Synthetic walnut; inner sequence and 3' sequence

SEQ ID NO: 30497 - DNA, 53 bp, Artificial Sequence
  Description of Artificial Sequence: Synthetic walnut; inner sequence and 3' sequence
ggacgcaacgcaccgtatcgtggccatgtgttgactagtacatgaccacttga

SEQ ID NO: 30498 - DNA, 53 bp, Artificial Sequence; identical to SEQ ID NO: 6988
  Description of Artificial Sequence: Synthetic walnut; inner sequence and 3' sequence

SEQ ID NO: 30499 - DNA, 53 bp, Artificial Sequence; identical to SEQ ID NO: 22710
  Description of Artificial Sequence: Synthetic walnut; inner sequence and 3' sequence

SEQ ID NO: 30500 - DNA, 53 bp, Artificial Sequence; identical to SEQ ID NO: 2700
  Description of Artificial Sequence: Synthetic walnut; inner sequence and 3' sequence

SEQ ID NO: 30501 - DNA, 53 bp, Artificial Sequence
  Description of Artificial Sequence: Synthetic walnut; inner sequence and 3' sequence
ggcctgcgatggctgtgtgcgtgtattagcttgactagtacatgaccacttga

SEQ ID NO: 30502 - DNA, 53 bp, Artificial Sequence; identical to SEQ ID NO: 2619
  Description of Artificial Sequence: Synthetic walnut; inner sequence and 3' sequence

SEQ ID NO: 30503 - DNA, 53 bp, Artificial Sequence
  Description of Artificial Sequence: Synthetic walnut; inner sequence and 3' sequence
gcatcgcagcacacgtctcgtcacggcacattgactagtacatgaccacttga

SEQ ID NO: 30504 - DNA, 53 bp, Artificial Sequence; identical to SEQ ID NO: 2276
  Description of Artificial Sequence: Synthetic walnut; inner sequence and 3' sequence

SEQ ID NO: 30505 - DNA, 53 bp, Artificial Sequence; identical to SEQ ID NO: 2294
  Description of Artificial Sequence: Synthetic walnut; inner sequence and 3' sequence

SEQ ID NO: 30506 - DNA, 53 bp, Artificial Sequence; identical to SEQ ID NO: 2702
  Description of Artificial Sequence: Synthetic walnut; inner sequence and 3' sequence

SEQ ID NO: 30507 - DNA, 53 bp, Artificial Sequence; identical to SEQ ID NO: 22353
  Description of Artificial Sequence: Synthetic walnut; inner sequence and 3' sequence

SEQ ID NO: 30508 - DNA, 53 bp, Artificial Sequence
  Description of Artificial Sequence: Synthetic walnut; inner sequence and 3' sequence
ggcctgcgatggatgtgttcgtgtattagcttgactagtacatgaccacttga

SEQ ID NO: 30509 - DNA, 53 bp, Artificial Sequence; identical to SEQ ID NO: 22478
  Description of Artificial Sequence: Synthetic walnut; inner sequence and 3' sequence

SEQ ID NO: 30510 - DNA, 53 bp, Artificial Sequence; identical to SEQ ID NO: 22668
  Description of Artificial Sequence: Synthetic walnut; inner sequence and 3' sequence

SEQ ID NO: 30511 - DNA, 53 bp, Artificial Sequence; identical to SEQ ID NO: 2228
  Description of Artificial Sequence: Synthetic walnut; inner sequence and 3' sequence

SEQ ID NO: 30512 - DNA, 53 bp, Artificial Sequence; identical to SEQ ID NO: 2068
  Description of Artificial Sequence: Synthetic walnut; inner sequence and 3' sequence

SEQ ID NO: 30513 - DNA, 53 bp, Artificial Sequence
  Description of Artificial Sequence: Synthetic walnut; inner sequence and 3' sequence
gtgcttcgatggatgtgggttgtgctcgtcttgactagtacatgaccacttga

SEQ ID NO: 30514 - DNA, 53 bp, Artificial Sequence; identical to SEQ ID NO: 2991
  Description of Artificial Sequence: Synthetic walnut; inner sequence and 3' sequence

SEQ ID NO: 30515 - DNA, 53 bp, Artificial Sequence
  Description of Artificial Sequence: Synthetic walnut; inner sequence and 3' sequence
ggccgcggcatccctgagagtggtggtgtattgactagtacatgaccacttga

SEQ ID NO: 30516 - DNA, 53 bp, Artificial Sequence
  Description of Artificial Sequence: Synthetic walnut; inner sequence and 3' sequence
gcgctgtgacgtacgtgctgtgcctacgcattgactagtacatgaccacttga

SEQ ID NO: 30517 - DNA, 53 bp, Artificial Sequence; identical to SEQ ID NO: 2778
  Description of Artificial Sequence: Synthetic walnut; inner sequence and 3' sequence

SEQ ID NO: 30518 - DNA, 53 bp, Artificial Sequence; identical to SEQ ID NO: 6513
  Description of Artificial Sequence: Synthetic walnut; inner sequence and 3' sequence

SEQ ID NO: 30519 - DNA, 53 bp, Artificial Sequence; identical to SEQ ID NO: 2979
  Description of Artificial Sequence: Synthetic walnut; inner sequence and 3' sequence

SEQ ID NO: 30520 - DNA, 53 bp, Artificial Sequence; identical to SEQ ID NO: 22666
  Description of Artificial Sequence: Synthetic walnut; inner sequence and 3' sequence

SEQ ID NO: 30521 - DNA, 53 bp, Artificial Sequence; identical to SEQ ID NO: 2789
  Description of Artificial Sequence: Synthetic walnut; inner sequence and 3' sequence

SEQ ID NO: 30522 - DNA, 53 bp, Artificial Sequence; identical to SEQ ID NO: 6837
  Description of Artificial Sequence: Synthetic walnut; inner sequence and 3' sequence

SEQ ID NO: 30523 - DNA, 53 bp, Artificial Sequence
  Description of Artificial Sequence: Synthetic walnut; inner sequence and 3' sequence
gtgcgccgatgggtgtgtgtcgtggctggtttgactagtacatgaccacttga

SEQ ID NO: 30524 - DNA, 53 bp, Artificial Sequence; identical to SEQ ID NO: 2315
  Description of Artificial Sequence: Synthetic walnut; inner sequence and 3' sequence

SEQ ID NO: 30525 - DNA, 53 bp, Artificial Sequence; identical to SEQ ID NO: 22721
  Description of Artificial Sequence: Synthetic walnut; inner sequence and 3' sequence

SEQ ID NO: 30526 - DNA, 53 bp, Artificial Sequence
  Description of Artificial Sequence: Synthetic walnut; inner sequence and 3' sequence
gcgtgtgcgtgcacgttacgtccttgcgccttgactagtacatgaccacttga

SEQ ID NO: 30527 - DNA, 53 bp, Artificial Sequence
  Description of Artificial Sequence: Synthetic walnut; inner sequence and 3' sequence
gcgacacacggccacgatgtacgatgcgcattgactagtacatgaccacttga

SEQ ID NO: 30528 - DNA, 53 bp, Artificial Sequence; identical to SEQ ID NO: 2485
  Description of Artificial Sequence: Synthetic walnut; inner sequence and 3' sequence

SEQ ID NO: 30529 - DNA, 53 bp, Artificial Sequence; identical to SEQ ID NO: 6552
  Description of Artificial Sequence: Synthetic walnut; inner sequence and 3' sequence

SEQ ID NO: 30530 - DNA, 53 bp, Artificial Sequence; identical to SEQ ID NO: 2446
  Description of Artificial Sequence: Synthetic walnut; inner sequence and 3' sequence

SEQ ID NO: 30531 - DNA, 53 bp, Artificial Sequence; identical to SEQ ID NO: 2346
  Description of Artificial Sequence: Synthetic walnut; inner sequence and 3' sequence

SEQ ID NO: 30532 - DNA, 53 bp, Artificial Sequence; identical to SEQ ID NO: 6948
  Description of Artificial Sequence: Synthetic walnut; inner sequence and 3' sequence

SEQ ID NO: 30533 - DNA, 53 bp, Artificial Sequence
  Description of Artificial Sequence: Synthetic walnut; inner sequence and 3' sequence
gtactgcactgccctacacgtgggcatggattgactagtacatgaccacttga

SEQ ID NO: 30534 - DNA, 53 bp, Artificial Sequence; identical to SEQ ID NO: 2131
  Description of Artificial Sequence: Synthetic walnut; inner sequence and 3' sequence

SEQ ID NO: 30535 - DNA, 53 bp, Artificial Sequence; identical to SEQ ID NO: 2460
  Description of Artificial Sequence: Synthetic walnut; inner sequence and 3' sequence

SEQ ID NO: 30536 - DNA, 53 bp, Artificial Sequence; identical to SEQ ID NO: 18859
  Description of Artificial Sequence: Synthetic walnut; inner sequence and 3' sequence

SEQ ID NO: 30537 - DNA, 53 bp, Artificial Sequence; identical to SEQ ID NO: 22693
  Description of Artificial Sequence: Synthetic walnut; inner sequence and 3' sequence

SEQ ID NO: 30538 - DNA, 53 bp, Artificial Sequence; identical to SEQ ID NO: 2442
  Description of Artificial Sequence: Synthetic walnut; inner sequence and 3' sequence

SEQ ID NO: 30539 - DNA, 53 bp, Artificial Sequence; identical to SEQ ID NO: 18926
  Description of Artificial Sequence: Synthetic walnut; inner sequence and 3' sequence

SEQ ID NO: 30540 - DNA, 53 bp, Artificial Sequence; identical to SEQ ID NO: 2678
  Description of Artificial Sequence: Synthetic walnut; inner sequence and 3' sequence

SEQ ID NO: 30541 - DNA, 53 bp, Artificial Sequence
  Description of Artificial Sequence: Synthetic walnut; inner sequence and 3' sequence
cgcgatacacgagcatgccgtcacgtcacgttgactagtacatgaccacttga

SEQ ID NO: 30542 - DNA, 53 bp, Artificial Sequence; identical to SEQ ID NO: 2173
  Description of Artificial Sequence: Synthetic walnut; inner sequence and 3' sequence

SEQ ID NO: 30543 - DNA, 53 bp, Artificial Sequence; identical to SEQ ID NO: 2132
  Description of Artificial Sequence: Synthetic walnut; inner sequence and 3' sequence

SEQ ID NO: 30544 - DNA, 53 bp, Artificial Sequence
  Description of Artificial Sequence: Synthetic walnut; inner sequence and 3' sequence
gcgacacaacgcagggcaacgtgatgcgtgttgactagtacatgaccacttga

SEQ ID NO: 30545 - DNA, 53 bp, Artificial Sequence; identical to SEQ ID NO: 2218
  Description of Artificial Sequence: Synthetic walnut; inner sequence and 3' sequence

SEQ ID NO: 30546 - DNA, 53 bp, Artificial Sequence; identical to SEQ ID NO: 2768
  Description of Artificial Sequence: Synthetic walnut; inner sequence and 3' sequence

SEQ ID NO: 30547 - DNA, 53 bp, Artificial Sequence
  Description of Artificial Sequence: Synthetic walnut; inner sequence and 3' sequence
ggcatgcacgcacctacaagtgggcacgtattgactagtacatgaccacttga

SEQ ID NO: 30548 - DNA, 53 bp, Artificial Sequence; identical to SEQ ID NO: 2072
  Description of Artificial Sequence: Synthetic walnut; inner sequence and 3' sequence

SEQ ID NO: 30549 - DNA, 53 bp, Artificial Sequence; identical to SEQ ID NO: 22289
  Description of Artificial Sequence: Synthetic walnut; inner sequence and 3' sequence

SEQ ID NO: 30550 - DNA, 53 bp, Artificial Sequence; identical to SEQ ID NO: 2039
  Description of Artificial Sequence: Synthetic walnut; inner sequence and 3' sequence

SEQ ID NO: 30551 - DNA, 53 bp, Artificial Sequence; identical to SEQ ID NO: 6924
  Description of Artificial Sequence: Synthetic walnut; inner sequence and 3' sequence

SEQ ID NO: 30552 - DNA, 53 bp, Artificial Sequence; identical to SEQ ID NO: 6999
  Description of Artificial Sequence: Synthetic walnut; inner sequence and 3' sequence

SEQ ID NO: 30553 - DNA, 53 bp, Artificial Sequence; identical to SEQ ID NO: 2341
  Description of Artificial Sequence: Synthetic walnut; inner sequence and 3' sequence

SEQ ID NO: 30554 - DNA, 53 bp, Artificial Sequence; identical to SEQ ID NO: 2486
  Description of Artificial Sequence: Synthetic walnut; inner sequence and 3' sequence

SEQ ID NO: 30555 - DNA, 53 bp, Artificial Sequence
  Description of Artificial Sequence: Synthetic walnut; inner sequence and 3' sequence
gcacgcaatgatgcacgtcctgctcgcacgttgactagtacatgaccacttga

SEQ ID NO: 30556 - DNA, 53 bp, Artificial Sequence; identical to SEQ ID NO: 2903
  Description of Artificial Sequence: Synthetic walnut; inner sequence and 3' sequence

SEQ ID NO: 30557 - DNA, 53 bp, Artificial Sequence
  Description of Artificial Sequence: Synthetic walnut; inner sequence and 3' sequence
cgcaccgtgtacgccacgtcactgtacgcattgactagtacatgaccacttga

SEQ ID NO: 30558 - DNA, 53 bp, Artificial Sequence; identical to SEQ ID NO: 2153
  Description of Artificial Sequence: Synthetic walnut; inner sequence and 3' sequence

SEQ ID NO: 30559 - DNA, 52 bp, Artificial Sequence; identical to SEQ ID NO: 2193
  Description of Artificial Sequence: Synthetic walnut; inner sequence and 3' sequence

SEQ ID NO: 30560 - DNA, 53 bp, Artificial Sequence; identical to SEQ ID NO: 2840
  Description of Artificial Sequence: Synthetic walnut; inner sequence and 3' sequence

SEQ ID NO: 30561 - DNA, 53 bp, Artificial Sequence; identical to SEQ ID NO: 6638
  Description of Artificial Sequence: Synthetic walnut; inner sequence and 3' sequence

SEQ ID NO: 30562 - DNA, 53 bp, Artificial Sequence; identical to SEQ ID NO: 22836
  Description of Artificial Sequence: Synthetic walnut; inner sequence and 3' sequence

SEQ ID NO: 30563 - DNA, 53 bp, Artificial Sequence
  Description of Artificial Sequence: Synthetic walnut; inner sequence and 3' sequence
cgacacggcatggcaaggcgatgtggtgcgttgactagtacatgaccacttga

SEQ ID NO: 30564 - DNA, 53 bp, Artificial Sequence; identical to SEQ ID NO: 22486
  Description of Artificial Sequence: Synthetic walnut; inner sequence and 3' sequence

SEQ ID NO: 30565 - DNA, 52 bp, Artificial Sequence
  Description of Artificial Sequence: Synthetic walnut; inner sequence and 3' sequence
cgacgtgtcgcagtacgtaccgttgcgcattgactagtacatgaccacttga

SEQ ID NO: 30566 - DNA, 53 bp, Artificial Sequence; identical to SEQ ID NO: 14936
  Description of Artificial Sequence: Synthetic walnut; inner sequence and 3' sequence

SEQ ID NO: 30567 - DNA, 53 bp, Artificial Sequence; identical to SEQ ID NO: 2347
  Description of Artificial Sequence: Synthetic walnut; inner sequence and 3' sequence

SEQ ID NO: 30568 - DNA, 53 bp, Artificial Sequence; identical to SEQ ID NO: 10968
  Description of Artificial Sequence: Synthetic walnut; inner sequence and 3' sequence

SEQ ID NO: 30569 - DNA, 53 bp, Artificial Sequence
  Description of Artificial Sequence: Synthetic walnut; inner sequence and 3' sequence
ggcctgcgatggatgtggttttgtcgcgtcttgactagtacatgaccacttga

SEQ ID NO: 30570 - DNA, 53 bp, Artificial Sequence
  Description of Artificial Sequence: Synthetic walnut; inner sequence and 3' sequence
gcatgccaacgcaacgtgtacgcgtgcacattgactagtacatgaccacttga

SEQ ID NO: 30571 - DNA, 53 bp, Artificial Sequence; identical to SEQ ID NO: 26843
  Description of Artificial Sequence: Synthetic walnut; inner sequence and 3' sequence

SEQ ID NO: 30572 - DNA, 53 bp, Artificial Sequence; identical to SEQ ID NO: 2801
  Description of Artificial Sequence: Synthetic walnut; inner sequence and 3' sequence

SEQ ID NO: 30573 - DNA, 53 bp, Artificial Sequence; identical to SEQ ID NO: 6688
  Description of Artificial Sequence: Synthetic walnut; inner sequence and 3' sequence

SEQ ID NO: 30574 - DNA, 53 bp, Artificial Sequence
  Description of Artificial Sequence: Synthetic walnut; inner sequence and 3' sequence
ggcatgcactcacctacacgtgggcacgtattgactagtacatgaccacttga

SEQ ID NO: 30575 - DNA, 53 bp, Artificial Sequence; identical to SEQ ID NO: 2395
  Description of Artificial Sequence: Synthetic walnut; inner sequence and 3' sequence

SEQ ID NO: 30576 - DNA, 53 bp, Artificial Sequence; identical to SEQ ID NO: 6517
  Description of Artificial Sequence: Synthetic walnut; inner sequence and 3' sequence

SEQ ID NO: 30577 - DNA, 53 bp, Artificial Sequence
  Description of Artificial Sequence: Synthetic walnut; inner sequence and 3' sequence
ggcctcgataacctagcaagtgtgtgtgtattgactagtacatgaccacttga

SEQ ID NO: 30578 - DNA, 53 bp, Artificial Sequence; identical to SEQ ID NO: 10922
  Description of Artificial Sequence: Synthetic walnut; inner sequence and 3' sequence

SEQ ID NO: 30579 - DNA, 53 bp, Artificial Sequence; identical to SEQ ID NO: 2056
  Description of Artificial Sequence: Synthetic walnut; inner sequence and 3' sequence

SEQ ID NO: 30580 - DNA, 53 bp, Artificial Sequence
  Description of Artificial Sequence: Synthetic walnut; inner sequence and 3' sequence
cgcaccgtcgtaccgtacgtgcctgacgcattgactagtacatgaccacttga

SEQ ID NO: 30581 - DNA, 53 bp, Artificial Sequence
  Description of Artificial Sequence: Synthetic walnut; inner sequence and 3' sequence
gtccgacgatgggtgggggaatgcgacggcttgactagtacatgaccacttga

SEQ ID NO: 30582 - DNA, 53 bp, Artificial Sequence
  Description of Artificial Sequence: Synthetic walnut; inner sequence and 3' sequence
cgtaccgcacatgcacgtccgtcgtacgcgttgactagtacatgaccacttga

SEQ ID NO: 30583 - DNA, 53 bp, Artificial Sequence; identical to SEQ ID NO: 2438
  Description of Artificial Sequence: Synthetic walnut; inner sequence and 3' sequence

SEQ ID NO: 30584 - DNA, 53 bp, Artificial Sequence
  Description of Artificial Sequence: Synthetic walnut; inner sequence and 3' sequence
gcgcacaacgatacgcacgatgccgtcacgttgactagtacatgaccacttga

SEQ ID NO: 30585 - DNA, 53 bp, Artificial Sequence; identical to SEQ ID NO: 22363
  Description of Artificial Sequence: Synthetic walnut; inner sequence and 3' sequence

SEQ ID NO: 30586 - DNA, 53 bp, Artificial Sequence
  Description of Artificial Sequence: Synthetic walnut; inner sequence and 3' sequence
ggccgacgatggatgggaggcatgactggcttgactagtacatgaccacttga

SEQ ID NO: 30587 - DNA, 53 bp, Artificial Sequence; identical to SEQ ID NO: 2372
  Description of Artificial Sequence: Synthetic walnut; inner sequence and 3' sequence

SEQ ID NO: 30588 - DNA, 53 bp, Artificial Sequence; identical to SEQ ID NO: 6860
  Description of Artificial Sequence: Synthetic walnut; inner sequence and 3' sequence

SEQ ID NO: 30589 - DNA, 53 bp, Artificial Sequence
  Description of Artificial Sequence: Synthetic walnut; inner sequence and 3' sequence
ggcctgcgcgtgacctatcaatggcatgtattgactagtacatgaccacttga

SEQ ID NO: 30590 - DNA, 53 bp, Artificial Sequence; identical to SEQ ID NO: 6289
  Description of Artificial Sequence: Synthetic walnut; inner sequence and 3' sequence

SEQ ID NO: 30591 - DNA, 53 bp, Artificial Sequence
  Description of Artificial Sequence: Synthetic walnut; inner sequence and 3' sequence
cacgcacagtgacgttaccgtacctgcacgttgactagtacatgaccacttga

SEQ ID NO: 30592 - DNA, 53 bp, Artificial Sequence; identical to SEQ ID NO: 18695
  Description of Artificial Sequence: Synthetic walnut; inner sequence and 3' sequence

SEQ ID NO: 30593 - DNA, 54 bp, Artificial Sequence
  Description of Artificial Sequence: Synthetic walnut; inner sequence and 3' sequence
ggcctgcgatggatgtgggctgcactatgtcttgactagtacatgaccacttga

SEQ ID NO: 30594 - DNA, 53 bp, Artificial Sequence; identical to SEQ ID NO: 2756
  Description of Artificial Sequence: Synthetic walnut; inner sequence and 3' sequence

SEQ ID NO: 30595 - DNA, 53 bp, Artificial Sequence
  Description of Artificial Sequence: Synthetic walnut; inner sequence and 3' sequence
ggccacagcgtacatcaacgtggacgtgcattgactagtacatgaccacttga

SEQ ID NO: 30596 - DNA, 54 bp, Artificial Sequence; identical to SEQ ID NO: 18373
  Description of Artificial Sequence: Synthetic walnut; inner sequence and 3' sequence

SEQ ID NO: 30597 - DNA, 53 bp, Artificial Sequence; identical to SEQ ID NO: 2101
  Description of Artificial Sequence: Synthetic walnut; inner sequence and 3' sequence

SEQ ID NO: 30598 - DNA, 53 bp, Artificial Sequence; identical to SEQ ID NO: 2553
  Description of Artificial Sequence: Synthetic walnut; inner sequence and 3' sequence

SEQ ID NO: 30599 - DNA, 53 bp, Artificial Sequence; identical to SEQ ID NO: 18978
  Description of Artificial Sequence: Synthetic walnut; inner sequence and 3' sequence

SEQ ID NO: 30600 - DNA, 53 bp, Artificial Sequence
  Description of Artificial Sequence: Synthetic walnut; inner sequence and 3' sequence
ggcctgcgatggatgtgggccagtacgcgcttgactagtacatgaccacttga

SEQ ID NO: 30601 - DNA, 53 bp, Artificial Sequence; identical to SEQ ID NO: 6653
  Description of Artificial Sequence: Synthetic walnut; inner sequence and 3' sequence

SEQ ID NO: 30602 - DNA, 53 bp, Artificial Sequence; identical to SEQ ID NO: 18482
  Description of Artificial Sequence: Synthetic walnut; inner sequence and 3' sequence

SEQ ID NO: 30603 - DNA, 53 bp, Artificial Sequence
  Description of Artificial Sequence: Synthetic walnut; inner sequence and 3' sequence
cgtgacgacgtgctgcagtgacgttgcgtattgactagtacatgaccacttga

SEQ ID NO: 30604 - DNA, 53 bp, Artificial Sequence; identical to SEQ ID NO: 2186
  Description of Artificial Sequence: Synthetic walnut; inner sequence and 3' sequence

SEQ ID NO: 30605 - DNA, 53 bp, Artificial Sequence; identical to SEQ ID NO: 2470
  Description of Artificial Sequence: Synthetic walnut; inner sequence and 3' sequence

SEQ ID NO: 30606 - DNA, 53 bp, Artificial Sequence; identical to SEQ ID NO: 10798
  Description of Artificial Sequence: Synthetic walnut; inner sequence and 3' sequence

SEQ ID NO: 30607 - DNA, 53 bp, Artificial Sequence; identical to SEQ ID NO: 2299
  Description of Artificial Sequence: Synthetic walnut; inner sequence and 3' sequence

SEQ ID NO: 30608 - DNA, 53 bp, Artificial Sequence; identical to SEQ ID NO: 22515
  Description of Artificial Sequence: Synthetic walnut; inner sequence and 3' sequence

SEQ ID NO: 30609 - DNA, 53 bp, Artificial Sequence; identical to SEQ ID NO: 14945
  Description of Artificial Sequence: Synthetic walnut; inner sequence and 3' sequence

SEQ ID NO: 30610 - DNA, 53 bp, Artificial Sequence; identical to SEQ ID NO: 22800
  Description of Artificial Sequence: Synthetic walnut; inner sequence and 3' sequence

SEQ ID NO: 30611 - DNA, 53 bp, Artificial Sequence; identical to SEQ ID NO: 2714
  Description of Artificial Sequence: Synthetic walnut; inner sequence and 3' sequence

SEQ ID NO: 30612 - DNA, 54 bp, Artificial Sequence
  Description of Artificial Sequence: Synthetic walnut; inner sequence and 3' sequence
ggcctgcgatggatgtggtgttgggatagtcttgactagtacatgaccacttga

SEQ ID NO: 30613 - DNA, 53 bp, Artificial Sequence; identical to SEQ ID NO: 22954
  Description of Artificial Sequence: Synthetic walnut; inner sequence and 3' sequence

SEQ ID NO: 30614 - DNA, 53 bp, Artificial Sequence; identical to SEQ ID NO: 18342
  Description of Artificial Sequence: Synthetic walnut; inner sequence and 3' sequence

SEQ ID NO: 30615 - DNA, 53 bp, Artificial Sequence; identical to SEQ ID NO: 2860
  Description of Artificial Sequence: Synthetic walnut; inner sequence and 3' sequence

SEQ ID NO: 30616 - DNA, 53 bp, Artificial Sequence; identical to SEQ ID NO: 2857
  Description of Artificial Sequence: Synthetic walnut; inner sequence and 3' sequence

SEQ ID NO: 30617 - DNA, 48 bp, Artificial Sequence; identical to SEQ ID NO: 22741
  Description of Artificial Sequence: Synthetic walnut; inner sequence and 3' sequence

SEQ ID NO: 30618 - DNA, 53 bp, Artificial Sequence; identical to SEQ ID NO: 10682
  Description of Artificial Sequence: Synthetic walnut; inner sequence and 3' sequence

SEQ ID NO: 30619 - DNA, 53 bp, Artificial Sequence; identical to SEQ ID NO: 6565
  Description of Artificial Sequence: Synthetic walnut; inner sequence and 3' sequence

SEQ ID NO: 30620 - DNA, 53 bp, Artificial Sequence
  Description of Artificial Sequence: Synthetic walnut; inner sequence and 3' sequence
ggccacagcgtaactcaacgtggacgtgcattgactagtacatgaccacttga

SEQ ID NO: 30621 - DNA, 53 bp, Artificial Sequence; identical to SEQ ID NO: 2805
  Description of Artificial Sequence: Synthetic walnut; inner sequence and 3' sequence

SEQ ID NO: 30622 - DNA, 53 bp, Artificial Sequence; identical to SEQ ID NO: 2780
  Description of Artificial Sequence: Synthetic walnut; inner sequence and 3' sequence

SEQ ID NO: 30623 - DNA, 53 bp, Artificial Sequence; identical to SEQ ID NO: 22784
  Description of Artificial Sequence: Synthetic walnut; inner sequence and 3' sequence

SEQ ID NO: 30624 - DNA, 53 bp, Artificial Sequence; identical to SEQ ID NO: 2061
  Description of Artificial Sequence: Synthetic walnut; inner sequence and 3' sequence

SEQ ID NO: 30625 - DNA, 53 bp, Artificial Sequence; identical to SEQ ID NO: 2813
  Description of Artificial Sequence: Synthetic walnut; inner sequence and 3' sequence

SEQ ID NO: 30626 - DNA, 53 bp, Artificial Sequence
  Description of Artificial Sequence: Synthetic walnut; inner sequence and 3' sequence
gtgctgcgatggatgtgtgcgtgtattagcttgactagtacatgaccacttga

SEQ ID NO: 30627 - DNA, 53 bp, Artificial Sequence; identical to SEQ ID NO: 22773
  Description of Artificial Sequence: Synthetic walnut; inner sequence and 3' sequence

SEQ ID NO: 30628 - DNA, 53 bp, Artificial Sequence; identical to SEQ ID NO: 2204
  Description of Artificial Sequence: Synthetic walnut; inner sequence and 3' sequence

SEQ ID NO: 30629 - DNA, 53 bp, Artificial Sequence; identical to SEQ ID NO: 2505
  Description of Artificial Sequence: Synthetic walnut; inner sequence and 3' sequence

SEQ ID NO: 30630 - DNA, 53 bp, Artificial Sequence; identical to SEQ ID NO: 6933
  Description of Artificial Sequence: Synthetic walnut; inner sequence and 3' sequence

SEQ ID NO: 30631 - DNA, 53 bp, Artificial Sequence; identical to SEQ ID NO: 18531
  Description of Artificial Sequence: Synthetic walnut; inner sequence and 3' sequence

SEQ ID NO: 30632 - DNA, 53 bp, Artificial Sequence; identical to SEQ ID NO: 22961
  Description of Artificial Sequence: Synthetic walnut; inner sequence and 3' sequence

SEQ ID NO: 30633 - DNA, 53 bp, Artificial Sequence; identical to SEQ ID NO: 2237
  Description of Artificial Sequence: Synthetic walnut; inner sequence and 3' sequence

SEQ ID NO: 30634 - DNA, 53 bp, Artificial Sequence; identical to SEQ ID NO: 2196
  Description of Artificial Sequence: Synthetic walnut; inner sequence and 3' sequence

SEQ ID NO: 30635 - DNA, 53 bp, Artificial Sequence; identical to SEQ ID NO: 22530
  Description of Artificial Sequence: Synthetic walnut; inner sequence and 3' sequence

SEQ ID NO: 30636 - DNA, 53 bp, Artificial Sequence
  Description of Artificial Sequence: Synthetic walnut; inner sequence and 3' sequence
gcgccacgtgacgtactgtgcctcgacgcgttgactagtacatgaccacttga

SEQ ID NO: 30637 - DNA, 53 bp, Artificial Sequence; identical to SEQ ID NO: 14743
  Description of Artificial Sequence: Synthetic walnut; inner sequence and 3' sequence

SEQ ID NO: 30638 - DNA, 53 bp, Artificial Sequence; identical to SEQ ID NO: 2703
  Description of Artificial Sequence: Synthetic walnut; inner sequence and 3' sequence

SEQ ID NO: 30639 - DNA, 53 bp, Artificial Sequence; identical to SEQ ID NO: 2850
  Description of Artificial Sequence: Synthetic walnut; inner sequence and 3' sequence

SEQ ID NO: 30640 - DNA, 53 bp, Artificial Sequence; identical to SEQ ID NO: 2090
  Description of Artificial Sequence: Synthetic walnut; inner sequence and 3' sequence

SEQ ID NO: 30641 - DNA, 53 bp, Artificial Sequence; identical to SEQ ID NO: 14821
  Description of Artificial Sequence: Synthetic walnut; inner sequence and 3' sequence

SEQ ID NO: 30642 - DNA, 53 bp, Artificial Sequence; identical to SEQ ID NO: 2645
  Description of Artificial Sequence: Synthetic walnut; inner sequence and 3' sequence

SEQ ID NO: 30643 - DNA, 53 bp, Artificial Sequence
  Description of Artificial Sequence: Synthetic walnut; inner sequence and 3' sequence
cgcaccgtgtggcatgtgacactgcgcgcattgactagtacatgaccacttga

SEQ ID NO: 30644 - DNA, 53 bp, Artificial Sequence
  Description of Artificial Sequence: Synthetic walnut; inner sequence and 3' sequence
ggcctgcgatggatgtggtgtacccagtccttgactagtacatgaccacttga

SEQ ID NO: 30645 - DNA, 53 bp, Artificial Sequence
  Description of Artificial Sequence: Synthetic walnut; inner sequence and 3' sequence
ggacgcatcgccccttcgtgtggacaggtattgactagtacatgaccacttga

SEQ ID NO: 30646 - DNA, 53 bp, Artificial Sequence
  Description of Artificial Sequence: Synthetic walnut; inner sequence and 3' sequence
ggcctgcgatggatgtggttgtgcttgtttttgactagtacatgaccacttga

SEQ ID NO: 30647 - DNA, 53 bp, Artificial Sequence; identical to SEQ ID NO: 14700
  Description of Artificial Sequence: Synthetic walnut; inner sequence and 3' sequence

SEQ ID NO: 30648 - DNA, 53 bp, Artificial Sequence; identical to SEQ ID NO: 2152
  Description of Artificial Sequence: Synthetic walnut; inner sequence and 3' sequence

SEQ ID NO: 30649 - DNA, 53 bp, Artificial Sequence; identical to SEQ ID NO: 2182
  Description of Artificial Sequence: Synthetic walnut; inner sequence and 3' sequence

SEQ ID NO: 30650 - DNA, 53 bp, Artificial Sequence; identical to SEQ ID NO: 18605
  Description of Artificial Sequence: Synthetic walnut; inner sequence and 3' sequence

SEQ ID NO: 30651 - DNA, 53 bp, Artificial Sequence; identical to SEQ ID NO: 18352
  Description of Artificial Sequence: Synthetic walnut; inner sequence and 3' sequence

SEQ ID NO: 30652 - DNA, 53 bp, Artificial Sequence
  Description of Artificial Sequence: Synthetic walnut; inner sequence and 3' sequence
tgacgcatcgccccttcgagtggacaggtattgactagtacatgaccacttga

SEQ ID NO: 30653 - DNA, 53 bp, Artificial Sequence
  Description of Artificial Sequence: Synthetic walnut; inner sequence and 3' sequence
ggcctgcgatggatgcgtgcgtgtattagcttgactagtacatgaccacttga

SEQ ID NO: 30654 - DNA, 53 bp, Artificial Sequence; identical to SEQ ID NO: 18999
  Description of Artificial Sequence: Synthetic walnut; inner sequence and 3' sequence

SEQ ID NO: 30655 - DNA, 53 bp, Artificial Sequence; identical to SEQ ID NO: 2867
  Description of Artificial Sequence: Synthetic walnut; inner sequence and 3' sequence

SEQ ID NO: 30656 - DNA, 53 bp, Artificial Sequence; identical to SEQ ID NO: 2673
  Description of Artificial Sequence: Synthetic walnut; inner sequence and 3' sequence

SEQ ID NO: 30657 - DNA, 53 bp, Artificial Sequence
  Description of Artificial Sequence: Synthetic walnut; inner sequence and 3' sequence
ggacgcatctccccttcgagtggacaggtattgactagtacatgaccacttga

SEQ ID NO: 30658 - DNA, 53 bp, Artificial Sequence; identical to SEQ ID NO: 22722
  Description of Artificial Sequence: Synthetic walnut; inner sequence and 3' sequence

SEQ ID NO: 30659 - DNA, 53 bp, Artificial Sequence
  Description of Artificial Sequence: Synthetic walnut; inner sequence and 3' sequence
cgcaccgaacgcgtacgtggctacgtgacgttgactagtacatgaccacttga

SEQ ID NO: 30660 - DNA, 52 bp, Artificial Sequence
  Description of Artificial Sequence: Synthetic walnut; inner sequence and 3' sequence
ggacgcaacgtacgtacttgacgtgtgcattgactagtacatgaccacttga

SEQ ID NO: 30661 - DNA, 53 bp, Artificial Sequence
  Description of Artificial Sequence: Synthetic walnut; inner sequence and 3' sequence
ggccaatgcgccccttcgagtggacaggtattgactagtacatgaccacttga

SEQ ID NO: 30662 - DNA, 53 bp, Artificial Sequence
  Description of Artificial Sequence: Synthetic walnut; inner sequence and 3' sequence
ggcctgcgatggatgtggaaatgcgacgtcttgactagtacatgaccacttga

SEQ ID NO: 30663 - DNA, 53 bp, Artificial Sequence; identical to SEQ ID NO: 2097
  Description of Artificial Sequence: Synthetic walnut; inner sequence and 3' sequence

SEQ ID NO: 30664 - DNA, 53 bp, Artificial Sequence; identical to SEQ ID NO: 6890
  Description of Artificial Sequence: Synthetic walnut; inner sequence and 3' sequence

SEQ ID NO: 30665 - DNA, 53 bp, Artificial Sequence
  Description of Artificial Sequence: Synthetic walnut; inner sequence and 3' sequence
cgtaacgcaacgtacgcacgacgcaccgtgttgactagtacatgaccacttga

SEQ ID NO: 30666 - DNA, 53 bp, Artificial Sequence
  Description of Artificial Sequence: Synthetic walnut; inner sequence and 3' sequence
ggacgcatcgccccttcgagttgacaggtattgactagtacatgaccacttga

SEQ ID NO: 30667 - DNA, 53 bp, Artificial Sequence; identical to SEQ ID NO: 22583
  Description of Artificial Sequence: Synthetic walnut; inner sequence and 3' sequence

SEQ ID NO: 30668 - DNA, 53 bp, Artificial Sequence
  Description of Artificial Sequence: Synthetic walnut; inner sequence and 3' sequence
gcatcgcaacgtgacgtacctgctgccaccttgactagtacatgaccacttga

SEQ ID NO: 30669 - DNA, 53 bp, Artificial Sequence; identical to SEQ ID NO: 2107
  Description of Artificial Sequence: Synthetic walnut; inner sequence and 3' sequence

SEQ ID NO: 30670 - DNA, 53 bp, Artificial Sequence
  Description of Artificial Sequence: Synthetic walnut; inner sequence and 3' sequence
ggtcacagcgtacctcaacgtggacgtgcattgactagtacatgaccacttga

SEQ ID NO: 30671 - DNA, 53 bp, Artificial Sequence; identical to SEQ ID NO: 2418
  Description of Artificial Sequence: Synthetic walnut; inner sequence and 3' sequence

SEQ ID NO: 30672 - DNA, 53 bp, Artificial Sequence
  Description of Artificial Sequence: Synthetic walnut; inner sequence and 3' sequence
ggccccagcgtacctcaacgtggacgtgcattgactagtacatgaccacttga

SEQ ID NO: 30673 - DNA, 53 bp, Artificial Sequence; identical to SEQ ID NO: 6621
  Description of Artificial Sequence: Synthetic walnut; inner sequence and 3' sequence

SEQ ID NO: 30674 - DNA, 53 bp, Artificial Sequence
  Description of Artificial Sequence: Synthetic walnut; inner sequence and 3' sequence
cgtgcgcaacgtagtcaccgtgcatgcacattgactagtacatgaccacttga

SEQ ID NO: 30675 - DNA, 53 bp, Artificial Sequence; identical to SEQ ID NO: 7000
  Description of Artificial Sequence: Synthetic walnut; inner sequence and 3' sequence

SEQ ID NO: 30676 - DNA, 53 bp, Artificial Sequence; identical to SEQ ID NO: 6898
  Description of Artificial Sequence: Synthetic walnut; inner sequence and 3' sequence

SEQ ID NO: 30677 - DNA, 53 bp, Artificial Sequence
  Description of Artificial Sequence: Synthetic walnut; inner sequence and 3' sequence
tgacgcacagaccgtacgtaccatgccacgttgactagtacatgaccacttga

SEQ ID NO: 30678 - DNA, 53 bp, Artificial Sequence
  Description of Artificial Sequence: Synthetic walnut; inner sequence and 3' sequence
cgcatgcacgcacctacacgtgggcacgtattgactagtacatgaccacttga

SEQ ID NO: 30679 - DNA, 53 bp, Artificial Sequence
  Description of Artificial Sequence: Synthetic walnut; inner sequence and 3' sequence
cgatacgcaacgcacaccgcccacgtcacgttgactagtacatgaccacttga

SEQ ID NO: 30680 - DNA, 53 bp, Artificial Sequence; identical to SEQ ID NO: 2487
  Description of Artificial Sequence: Synthetic walnut; inner sequence and 3' sequence

SEQ ID NO: 30681 - DNA, 53 bp, Artificial Sequence
  Description of Artificial Sequence: Synthetic walnut; inner sequence and 3' sequence
cgcaccgtcgatacgtcatgcacgctaacattgactagtacatgaccacttga

SEQ ID NO: 30682 - DNA, 53 bp, Artificial Sequence
  Description of Artificial Sequence: Synthetic walnut; inner sequence and 3' sequence
acgtcacgcgtcaaggcacagtgcgtcacgttgactagtacatgaccacttga

SEQ ID NO: 30683 - DNA, 53 bp, Artificial Sequence
  Description of Artificial Sequence: Synthetic walnut; inner sequence and 3' sequence
cgcaccaacggcatgcacacgtcgtacgcgttgactagtacatgaccacttga

SEQ ID NO: 30684 - DNA, 53 bp, Artificial Sequence; identical to SEQ ID NO: 22594
  Description of Artificial Sequence: Synthetic walnut; inner sequence and 3' sequence

SEQ ID NO: 30685 - DNA, 53 bp, Artificial Sequence; identical to SEQ ID NO: 22880
  Description of Artificial Sequence: Synthetic walnut; inner sequence and 3' sequence

SEQ ID NO: 30686 - DNA, 54 bp, Artificial Sequence
  Description of Artificial Sequence: Synthetic walnut; inner sequence and 3' sequence
ggcctgcgatggatggggacgtgacgccgtcttgactagtacatgaccacttga

SEQ ID NO: 30687 - DNA, 53 bp, Artificial Sequence; identical to SEQ ID NO: 2189
  Description of Artificial Sequence: Synthetic walnut; inner sequence and 3' sequence

SEQ ID NO: 30688 - DNA, 53 bp, Artificial Sequence
  Description of Artificial Sequence: Synthetic walnut; inner sequence and 3' sequence
gcgtcacggcagcatgcgtacgatcgcacgttgactagtacatgaccacttga

SEQ ID NO: 30689 - DNA, 53 bp, Artificial Sequence; identical to SEQ ID NO: 2955
  Description of Artificial Sequence: Synthetic walnut; inner sequence and 3' sequence

SEQ ID NO: 30690 - DNA, 53 bp, Artificial Sequence; identical to SEQ ID NO: 2111
  Description of Artificial Sequence: Synthetic walnut; inner sequence and 3' sequence

SEQ ID NO: 30691 - DNA, 53 bp, Artificial Sequence; identical to SEQ ID NO: 18931
  Description of Artificial Sequence: Synthetic walnut; inner sequence and 3' sequence

SEQ ID NO: 30692 - DNA, 53 bp, Artificial Sequence
  Description of Artificial Sequence: Synthetic walnut; inner sequence and 3' sequence
ggcctgcgatggatgtgtgcgtgcattagcttgactagtacatgaccacttga

SEQ ID NO: 30693 - DNA, 53 bp, Artificial Sequence
  Description of Artificial Sequence: Synthetic walnut; inner sequence and 3' sequence
cacgcatcgtgacgtagtgttcgcgccacgttgactagtacatgaccacttga

SEQ ID NO: 30694 - DNA, 53 bp, Artificial Sequence; identical to SEQ ID NO: 6694
  Description of Artificial Sequence: Synthetic walnut; inner sequence and 3' sequence

SEQ ID NO: 30695 - DNA, 53 bp, Artificial Sequence; identical to SEQ ID NO: 6882
  Description of Artificial Sequence: Synthetic walnut; inner sequence and 3' sequence

SEQ ID NO: 30696 - DNA, 53 bp, Artificial Sequence; identical to SEQ ID NO: 2472
  Description of Artificial Sequence: Synthetic walnut; inner sequence and 3' sequence

SEQ ID NO: 30697 - DNA, 53 bp, Artificial Sequence
  Description of Artificial Sequence: Synthetic walnut; inner sequence and 3' sequence
ggcatgcacgcacctacacgggggcacgtattgactagtacatgaccacttga

SEQ ID NO: 30698 - DNA, 53 bp, Artificial Sequence; identical to SEQ ID NO: 22570
  Description of Artificial Sequence: Synthetic walnut; inner sequence and 3' sequence

SEQ ID NO: 30699 - DNA, 53 bp, Artificial Sequence
  Description of Artificial Sequence: Synthetic walnut; inner sequence and 3' sequence
cgtacgatgaccgcatggcacgtcgtcacgttgactagtacatgaccacttga

SEQ ID NO: 30700 - DNA, 53 bp, Artificial Sequence
  Description of Artificial Sequence: Synthetic walnut; inner sequence and 3' sequence
cacgtaacgcaccgtaccacgacatgcgcattgactagtacatgaccacttga

SEQ ID NO: 30701 - DNA, 53 bp, Artificial Sequence
  Description of Artificial Sequence: Synthetic walnut; inner sequence and 3' sequence
acgacaacgcagcaccgtgaggcaggcacgttgactagtacatgaccacttga

SEQ ID NO: 30702 - DNA, 53 bp, Artificial Sequence
  Description of Artificial Sequence: Synthetic walnut; inner sequence and 3' sequence
ggccgaacgcgcctacaagtgttgcatggattgactagtacatgaccacttga

SEQ ID NO: 30703 - DNA, 53 bp, Artificial Sequence; identical to SEQ ID NO: 22913
  Description of Artificial Sequence: Synthetic walnut; inner sequence and 3' sequence

SEQ ID NO: 30704 - DNA, 53 bp, Artificial Sequence
  Description of Artificial Sequence: Synthetic walnut; inner sequence and 3' sequence
gcacgatacgtaccgtggcatgtgcgcacattgactagtacatgaccacttga

SEQ ID NO: 30705 - DNA, 53 bp, Artificial Sequence
  Description of Artificial Sequence: Synthetic walnut; inner sequence and 3' sequence
cgcaacggacgtgacgcatcgatctgcacgttgactagtacatgaccacttga

SEQ ID NO: 30706 - DNA, 53 bp, Artificial Sequence; identical to SEQ ID NO: 2916
  Description of Artificial Sequence: Synthetic walnut; inner sequence and 3' sequence

SEQ ID NO: 30707 - DNA, 53 bp, Artificial Sequence; identical to SEQ ID NO: 22341
  Description of Artificial Sequence: Synthetic walnut; inner sequence and 3' sequence

SEQ ID NO: 30708 - DNA, 53 bp, Artificial Sequence; identical to SEQ ID NO: 22903
  Description of Artificial Sequence: Synthetic walnut; inner sequence and 3' sequence

SEQ ID NO: 30709 - DNA, 53 bp, Artificial Sequence
  Description of Artificial Sequence: Synthetic walnut; inner sequence and 3' sequence
gtcatgcgatggatgtgtgcgtgtattagcttgactagtacatgaccacttga

SEQ ID NO: 30710 - DNA, 53 bp, Artificial Sequence; identical to SEQ ID NO: 18634
  Description of Artificial Sequence: Synthetic walnut; inner sequence and 3' sequence

SEQ ID NO: 30711 - DNA, 53 bp, Artificial Sequence
  Description of Artificial Sequence: Synthetic walnut; inner sequence and 3' sequence
ggacgcatcgccccttcgagtgtacaggtattgactagtacatgaccacttga

SEQ ID NO: 30712 - DNA, 53 bp, Artificial Sequence
  Description of Artificial Sequence: Synthetic walnut; inner sequence and 3' sequence
gctccgtacgatggctgtgctggtgatgtattgactagtacatgaccacttga

SEQ ID NO: 30713 - DNA, 53 bp, Artificial Sequence
  Description of Artificial Sequence: Synthetic walnut; inner sequence and 3' sequence
gacacgcaacgcatcctaggtatgtacgcattgactagtacatgaccacttga

SEQ ID NO: 30714 - DNA, 53 bp, Artificial Sequence; identical to SEQ ID NO: 2923
  Description of Artificial Sequence: Synthetic walnut; inner sequence and 3' sequence

SEQ ID NO: 30715 - DNA, 53 bp, Artificial Sequence; identical to SEQ ID NO: 2165
  Description of Artificial Sequence: Synthetic walnut; inner sequence and 3' sequence

SEQ ID NO: 30716 - DNA, 53 bp, Artificial Sequence; identical to SEQ ID NO: 22972
  Description of Artificial Sequence: Synthetic walnut; inner sequence and 3' sequence

SEQ ID NO: 30717 - DNA, 53 bp, Artificial Sequence; identical to SEQ ID NO: 22580
  Description of Artificial Sequence: Synthetic walnut; inner sequence and 3' sequence

SEQ ID NO: 30718 - DNA, 53 bp, Artificial Sequence; identical to SEQ ID NO: 2373
  Description of Artificial Sequence: Synthetic walnut; inner sequence and 3' sequence

SEQ ID NO: 30719 - DNA, 53 bp, Artificial Sequence; identical to SEQ ID NO: 22519
  Description of Artificial Sequence: Synthetic walnut; inner sequence and 3' sequence

SEQ ID NO: 30720 - DNA, 53 bp, Artificial Sequence
  Description of Artificial Sequence: Synthetic walnut; inner sequence and 3' sequence
cgatgcacgtaacgaccgtgtctgtacgcattgactagtacatgaccacttga

SEQ ID NO: 30721 - DNA, 53 bp, Artificial Sequence; identical to SEQ ID NO: 2490
  Description of Artificial Sequence: Synthetic walnut; inner sequence and 3' sequence

SEQ ID NO: 30722 - DNA, 53 bp, Artificial Sequence
  Description of Artificial Sequence: Synthetic walnut; inner sequence and 3' sequence
cgcgccgtcgatacgtcatgcacgctgacattgactagtacatgaccacttga

SEQ ID NO: 30723 - DNA, 53 bp, Artificial Sequence; identical to SEQ ID NO: 2511
  Description of Artificial Sequence: Synthetic walnut; inner sequence and 3' sequence

SEQ ID NO: 30724 - DNA, 53 bp, Artificial Sequence; identical to SEQ ID NO: 22683
  Description of Artificial Sequence: Synthetic walnut; inner sequence and 3' sequence

SEQ ID NO: 30725 - DNA, 53 bp, Artificial Sequence; identical to SEQ ID NO: 22653
  Description of Artificial Sequence: Synthetic walnut; inner sequence and 3' sequence

SEQ ID NO: 30726 - DNA, 53 bp, Artificial Sequence; identical to SEQ ID NO: 18503
  Description of Artificial Sequence: Synthetic walnut; inner sequence and 3' sequence

SEQ ID NO: 30727 - DNA, 48 bp, Artificial Sequence; identical to SEQ ID NO: 2427
  Description of Artificial Sequence: Synthetic walnut; inner sequence and 3' sequence

SEQ ID NO: 30728 - DNA, 53 bp, Artificial Sequence; identical to SEQ ID NO: 2528
  Description of Artificial Sequence: Synthetic walnut; inner sequence and 3' sequence

SEQ ID NO: 30729 - DNA, 53 bp, Artificial Sequence; identical to SEQ ID NO: 18412
  Description of Artificial Sequence: Synthetic walnut; inner sequence and 3' sequence

SEQ ID NO: 30730 - DNA, 53 bp, Artificial Sequence; identical to SEQ ID NO: 2741
  Description of Artificial Sequence: Synthetic walnut; inner sequence and 3' sequence

SEQ ID NO: 30731 - DNA, 53 bp, Artificial Sequence; identical to SEQ ID NO: 22385
  Description of Artificial Sequence: Synthetic walnut; inner sequence and 3' sequence

SEQ ID NO: 30732 - DNA, 53 bp, Artificial Sequence; identical to SEQ ID NO: 2622
  Description of Artificial Sequence: Synthetic walnut; inner sequence and 3' sequence

SEQ ID NO: 30733 - DNA, 53 bp, Artificial Sequence; identical to SEQ ID NO: 2695
  Description of Artificial Sequence: Synthetic walnut; inner sequence and 3' sequence

SEQ ID NO: 30734 - DNA, 53 bp, Artificial Sequence; identical to SEQ ID NO: 6617
  Description of Artificial Sequence: Synthetic walnut; inner sequence and 3' sequence

SEQ ID NO: 30735 - DNA, 53 bp, Artificial Sequence
  Description of Artificial Sequence: Synthetic walnut; inner sequence and 3' sequence
catgacggcatgacgtactgtgactgcgcgttgactagtacatgaccacttga

SEQ ID NO: 30736 - DNA, 53 bp, Artificial Sequence; identical to SEQ ID NO: 18513
  Description of Artificial Sequence: Synthetic walnut; inner sequence and 3' sequence

SEQ ID NO: 30737 - DNA, 53 bp, Artificial Sequence
  Description of Artificial Sequence: Synthetic walnut; inner sequence and 3' sequence
cgtaacgcagcggacgacacgttaggcacgttgactagtacatgaccacttga

SEQ ID NO: 30738 - DNA, 53 bp, Artificial Sequence; identical to SEQ ID NO: 22514
  Description of Artificial Sequence: Synthetic walnut; inner sequence and 3' sequence

SEQ ID NO: 30739 - DNA, 53 bp, Artificial Sequence
  Description of Artificial Sequence: Synthetic walnut; inner sequence and 3' sequence
gcatcacgtcacgcatgttcggcctgcacgttgactagtacatgaccacttga

SEQ ID NO: 30740 - DNA, 53 bp, Artificial Sequence
  Description of Artificial Sequence: Synthetic walnut; inner sequence and 3' sequence
ggctacagcgtacctcaacgtggacgtgcattgactagtacatgaccacttga

SEQ ID NO: 30741 - DNA, 53 bp, Artificial Sequence
  Description of Artificial Sequence: Synthetic walnut; inner sequence and 3' sequence
ggacgcagcgtgacgtaacgtgcatgcgtattgactagtacatgaccacttga

SEQ ID NO: 30742 - DNA, 53 bp, Artificial Sequence; identical to SEQ ID NO: 22657
  Description of Artificial Sequence: Synthetic walnut; inner sequence and 3' sequence

SEQ ID NO: 30743 - DNA, 53 bp, Artificial Sequence
  Description of Artificial Sequence: Synthetic walnut; inner sequence and 3' sequence
acgcaacgcaagtacgtatcgtgcgacacgttgactagtacatgaccacttga

SEQ ID NO: 30744 - DNA, 53 bp, Artificial Sequence
  Description of Artificial Sequence: Synthetic walnut; inner sequence and 3' sequence
gacacgtcggaccgtacgacacgttgcgtgttgactagtacatgaccacttga

SEQ ID NO: 30745 - DNA, 53 bp, Artificial Sequence
  Description of Artificial Sequence: Synthetic walnut; inner sequence and 3' sequence
ggccggcgatggatgtgggttgtgctcgtcttgactagtacatgaccacttga

SEQ ID NO: 30746 - DNA, 53 bp, Artificial Sequence
  Description of Artificial Sequence: Synthetic walnut; inner sequence and 3' sequence
ggcatgcgatgaacgagggatgatgcgtcattgactagtacatgaccacttga

SEQ ID NO: 30747 - DNA, 53 bp, Artificial Sequence
  Description of Artificial Sequence: Synthetic walnut; inner sequence and 3' sequence
gtccacagcgtacctcaacgtggacgtgcattgactagtacatgaccacttga

SEQ ID NO: 30748 - DNA, 53 bp, Artificial Sequence; identical to SEQ ID NO: 2705
  Description of Artificial Sequence: Synthetic walnut; inner sequence and 3' sequence

SEQ ID NO: 30749 - DNA, 53 bp, Artificial Sequence; identical to SEQ ID NO: 2404
  Description of Artificial Sequence: Synthetic walnut; inner sequence and 3' sequence

SEQ ID NO: 30750 - DNA, 53 bp, Artificial Sequence
  Description of Artificial Sequence: Synthetic walnut; inner sequence and 3' sequence
cacgcgcagacacgatggcacggcgacacgttgactagtacatgaccacttga

SEQ ID NO: 30751 - DNA, 53 bp, Artificial Sequence
  Description of Artificial Sequence: Synthetic walnut; inner sequence and 3' sequence
gacgcgaacacggcgcatacgtacgtcacgttgactagtacatgaccacttga

SEQ ID NO: 30752 - DNA, 53 bp, Artificial Sequence; identical to SEQ ID NO: 6854
  Description of Artificial Sequence: Synthetic walnut; inner sequence and 3' sequence

SEQ ID NO: 30753 - DNA, 53 bp, Artificial Sequence
  Description of Artificial Sequence: Synthetic walnut; inner sequence and 3' sequence
gcgtcacgtgcacgatccttccgtcatgcgttgactagtacatgaccacttga

SEQ ID NO: 30754 - DNA, 53 bp, Artificial Sequence
  Description of Artificial Sequence: Synthetic walnut; inner sequence and 3' sequence
gcgtgccgatgacgtgcgtgtgacgtgatgttgactagtacatgaccacttga

SEQ ID NO: 30755 - DNA, 53 bp, Artificial Sequence
  Description of Artificial Sequence: Synthetic walnut; inner sequence and 3' sequence
gcgacacggcatacggtgcgtacgtgcacattgactagtacatgaccacttga

SEQ ID NO: 30756 - DNA, 53 bp, Artificial Sequence
  Description of Artificial Sequence: Synthetic walnut; inner sequence and 3' sequence
ggcatgcgatgaacgaggcgtgatgcgtcattgactagtacatgaccacttga

SEQ ID NO: 30757 - DNA, 53 bp, Artificial Sequence
  Description of Artificial Sequence: Synthetic walnut; inner sequence and 3' sequence
cgacgcagcgcaacgaccgtaccgcacacgttgactagtacatgaccacttga

SEQ ID NO: 30758 - DNA, 53 bp, Artificial Sequence; identical to SEQ ID NO: 10810
  Description of Artificial Sequence: Synthetic walnut; inner sequence and 3' sequence

SEQ ID NO: 30759 - DNA, 53 bp, Artificial Sequence; identical to SEQ ID NO: 2226
  Description of Artificial Sequence: Synthetic walnut; inner sequence and 3' sequence

SEQ ID NO: 30760 - DNA, 53 bp, Artificial Sequence
  Description of Artificial Sequence: Synthetic walnut; inner sequence and 3' sequence
ggcatcacgtacacatggcctcgcgtcacgttgactagtacatgaccacttga

SEQ ID NO: 30761 - DNA, 53 bp, Artificial Sequence
  Description of Artificial Sequence: Synthetic walnut; inner sequence and 3' sequence
ggcctgcgatggatgggggcttgcactgtcttgactagtacatgaccacttga

SEQ ID NO: 30762 - DNA, 53 bp, Artificial Sequence
  Description of Artificial Sequence: Synthetic walnut; inner sequence and 3' sequence
cgcaccgtcgatacgtcatgcacgctgaaattgactagtacatgaccacttga

SEQ ID NO: 30763 - DNA, 53 bp, Artificial Sequence; identical to SEQ ID NO: 22672
  Description of Artificial Sequence: Synthetic walnut; inner sequence and 3' sequence

SEQ ID NO: 30764 - DNA, 53 bp, Artificial Sequence; identical to SEQ ID NO: 2375
  Description of Artificial Sequence: Synthetic walnut; inner sequence and 3' sequence

SEQ ID NO: 30765 - DNA, 53 bp, Artificial Sequence
  Description of Artificial Sequence: Synthetic walnut; inner sequence and 3' sequence
ggccgaacggagctacacggggttgtggacttgactagtacatgaccacttga

SEQ ID NO: 30766 - DNA, 53 bp, Artificial Sequence; identical to SEQ ID NO: 22466
  Description of Artificial Sequence: Synthetic walnut; inner sequence and 3' sequence

SEQ ID NO: 30767 - DNA, 53 bp, Artificial Sequence; identical to SEQ ID NO: 10949
  Description of Artificial Sequence: Synthetic walnut; inner sequence and 3' sequence

SEQ ID NO: 30768 - DNA, 53 bp, Artificial Sequence; identical to SEQ ID NO: 2284
  Description of Artificial Sequence: Synthetic walnut; inner sequence and 3' sequence

SEQ ID NO: 30769 - DNA, 53 bp, Artificial Sequence; identical to SEQ ID NO: 22573
  Description of Artificial Sequence: Synthetic walnut; inner sequence and 3' sequence

SEQ ID NO: 30770 - DNA, 53 bp, Artificial Sequence; identical to SEQ ID NO: 6691
  Description of Artificial Sequence: Synthetic walnut; inner sequence and 3' sequence

SEQ ID NO: 30771 - DNA, 53 bp, Artificial Sequence
  Description of Artificial Sequence: Synthetic walnut; inner sequence and 3' sequence
ccacgcagacgtcacgcatcgtaccgcacgttgactagtacatgaccacttga

SEQ ID NO: 30772 - DNA, 53 bp, Artificial Sequence
  Description of Artificial Sequence: Synthetic walnut; inner sequence and 3' sequence
ggccacagcgtatctcaacgtggacgtgcattgactagtacatgaccacttga

SEQ ID NO: 30773 - DNA, 53 bp, Artificial Sequence
  Description of Artificial Sequence: Synthetic walnut; inner sequence and 3' sequence
ggcctgcgatggatgggggctggggcagtcttgactagtacatgaccacttga

SEQ ID NO: 30774 - DNA, 53 bp, Artificial Sequence; identical to SEQ ID NO: 18627
  Description of Artificial Sequence: Synthetic walnut; inner sequence and 3' sequence

SEQ ID NO: 30775 - DNA, 53 bp, Artificial Sequence; identical to SEQ ID NO: 2169
  Description of Artificial Sequence: Synthetic walnut; inner sequence and 3' sequence

SEQ ID NO: 30776 - DNA, 53 bp, Artificial Sequence
  Description of Artificial Sequence: Synthetic walnut; inner sequence and 3' sequence
cgtgccgcaacgtgaggacgtgcatgtgcgttgactagtacatgaccacttga

SEQ ID NO: 30777 - DNA, 53 bp, Artificial Sequence
  Description of Artificial Sequence: Synthetic walnut; inner sequence and 3' sequence
ggcatgcacgcccctacacgtgggcacgtattgactagtacatgaccacttga

SEQ ID NO: 30778 - DNA, 53 bp, Artificial Sequence; identical to SEQ ID NO: 22964
  Description of Artificial Sequence: Synthetic walnut; inner sequence and 3' sequence

SEQ ID NO: 30779 - DNA, 53 bp, Artificial Sequence
  Description of Artificial Sequence: Synthetic walnut; inner sequence and 3' sequence
ggcctgcgatggatgtgtgcttgtattagcttgactagtacatgaccacttga

SEQ ID NO: 30780 - DNA, 53 bp, Artificial Sequence
  Description of Artificial Sequence: Synthetic walnut; inner sequence and 3' sequence
cgacacacaggcaacatgcgttccgtcacgttgactagtacatgaccacttga

SEQ ID NO: 30781 - DNA, 53 bp, Artificial Sequence; identical to SEQ ID NO: 18819
  Description of Artificial Sequence: Synthetic walnut; inner sequence and 3' sequence

SEQ ID NO: 30782 - DNA, 53 bp, Artificial Sequence
  Description of Artificial Sequence: Synthetic walnut; inner sequence and 3' sequence
ggccgcaacgtaccgtatcgtggccatgtgttgactagtacatgaccacttga

SEQ ID NO: 30783 - DNA, 53 bp, Artificial Sequence; identical to SEQ ID NO: 10926
  Description of Artificial Sequence: Synthetic walnut; inner sequence and 3' sequence

SEQ ID NO: 30784 - DNA, 53 bp, Artificial Sequence; identical to SEQ ID NO: 22960
  Description of Artificial Sequence: Synthetic walnut; inner sequence and 3' sequence

SEQ ID NO: 30785 - DNA, 53 bp, Artificial Sequence; identical to SEQ ID NO: 2782
  Description of Artificial Sequence: Synthetic walnut; inner sequence and 3' sequence

SEQ ID NO: 30786 - DNA, 53 bp, Artificial Sequence; identical to SEQ ID NO: 2399
  Description of Artificial Sequence: Synthetic walnut; inner sequence and 3' sequence

SEQ ID NO: 30787 - DNA, 53 bp, Artificial Sequence; identical to SEQ ID NO: 18544
  Description of Artificial Sequence: Synthetic walnut; inner sequence and 3' sequence

SEQ ID NO: 30788 - DNA, 53 bp, Artificial Sequence; identical to SEQ ID NO: 18595
  Description of Artificial Sequence: Synthetic walnut; inner sequence and 3' sequence

SEQ ID NO: 30789 - DNA, 53 bp, Artificial Sequence; identical to SEQ ID NO: 18457
  Description of Artificial Sequence: Synthetic walnut; inner sequence and 3' sequence

SEQ ID NO: 30790 - DNA, 53 bp, Artificial Sequence; identical to SEQ ID NO: 18703
  Description of Artificial Sequence: Synthetic walnut; inner sequence and 3' sequence

SEQ ID NO: 30791 - DNA, 53 bp, Artificial Sequence
  Description of Artificial Sequence: Synthetic walnut; inner sequence and 3' sequence
gtcattcctcatcctacacgtgggcacgtattgactagtacatgaccacttga

SEQ ID NO: 30792 - DNA, 53 bp, Artificial Sequence
  Description of Artificial Sequence: Synthetic walnut; inner sequence and 3' sequence
cgcaccgtggatacgtcatgcacgctgacattgactagtacatgaccacttga

SEQ ID NO: 30793 - DNA, 53 bp, Artificial Sequence
  Description of Artificial Sequence: Synthetic walnut; inner sequence and 3' sequence
cgtgacgaacggccaacacgtcacttcgcgttgactagtacatgaccacttga

SEQ ID NO: 30794 - DNA, 53 bp, Artificial Sequence
  Description of Artificial Sequence: Synthetic walnut; inner sequence and 3' sequence
ggcatgcacgcacctacacgtgggcatgtattgactagtacatgaccacttga

SEQ ID NO: 30795 - DNA, 53 bp, Artificial Sequence; identical to SEQ ID NO: 2742
  Description of Artificial Sequence: Synthetic walnut; inner sequence and 3' sequence

SEQ ID NO: 30796 - DNA, 53 bp, Artificial Sequence; identical to SEQ ID NO: 2524
  Description of Artificial Sequence: Synthetic walnut; inner sequence and 3' sequence

SEQ ID NO: 30797 - DNA, 53 bp, Artificial Sequence; identical to SEQ ID NO: 6893
  Description of Artificial Sequence: Synthetic walnut; inner sequence and 3' sequence

SEQ ID NO: 30798 - DNA, 53 bp, Artificial Sequence; identical to SEQ ID NO: 10825
  Description of Artificial Sequence: Synthetic walnut; inner sequence and 3' sequence

SEQ ID NO: 30799 - DNA, 53 bp, Artificial Sequence; identical to SEQ ID NO: 2816
  Description of Artificial Sequence: Synthetic walnut; inner sequence and 3' sequence

SEQ ID NO: 30800 - DNA, 53 bp, Artificial Sequence
  Description of Artificial Sequence: Synthetic walnut; inner sequence and 3' sequence
cgacaacgcaacgaacagcaggcatgcgtgttgactagtacatgaccacttga

SEQ ID NO: 30801 - DNA, 53 bp, Artificial Sequence
  Description of Artificial Sequence: Synthetic walnut; inner sequence and 3' sequence
ggccacagtgtacctcaacgtggacgtgcattgactagtacatgaccacttga

SEQ ID NO: 30802 - DNA, 53 bp, Artificial Sequence; identical to SEQ ID NO: 6881
  Description of Artificial Sequence: Synthetic walnut; inner sequence and 3' sequence

SEQ ID NO: 30803 - DNA, 53 bp, Artificial Sequence; identical to SEQ ID NO: 22914
  Description of Artificial Sequence: Synthetic walnut; inner sequence and 3' sequence

SEQ ID NO: 30804 - DNA, 53 bp, Artificial Sequence; identical to SEQ ID NO: 6814
  Description of Artificial Sequence: Synthetic walnut; inner sequence and 3' sequence

SEQ ID NO: 30805 - DNA, 53 bp, Artificial Sequence
  Description of Artificial Sequence: Synthetic walnut; inner sequence and 3' sequence
cgccacgatgtacgtcacgctacatgcacattgactagtacatgaccacttga

SEQ ID NO: 30806 - DNA, 53 bp, Artificial Sequence
  Description of Artificial Sequence: Synthetic walnut; inner sequence and 3' sequence
gtcattccgcatcctccacgtgggcacgtattgactagtacatgaccacttga

SEQ ID NO: 30807 - DNA, 53 bp, Artificial Sequence; identical to SEQ ID NO: 6364
  Description of Artificial Sequence: Synthetic walnut; inner sequence and 3' sequence

SEQ ID NO: 30808 - DNA, 53 bp, Artificial Sequence
  Description of Artificial Sequence: Synthetic walnut; inner sequence and 3' sequence
cgtgcgcgatgaacacgtcctaccgtcacgttgactagtacatgaccacttga

SEQ ID NO: 30809 - DNA, 53 bp, Artificial Sequence; identical to SEQ ID NO: 2380
  Description of Artificial Sequence: Synthetic walnut; inner sequence and 3' sequence

SEQ ID NO: 30810 - DNA, 53 bp, Artificial Sequence; identical to SEQ ID NO: 2520
  Description of Artificial Sequence: Synthetic walnut; inner sequence and 3' sequence

SEQ ID NO: 30811 - DNA, 53 bp, Artificial Sequence
  Description of Artificial Sequence: Synthetic walnut; inner sequence and 3' sequence
ggacgcatcgccacttcgagtggacaggtattgactagtacatgaccacttga

SEQ ID NO: 30812 - DNA, 53 bp, Artificial Sequence; identical to SEQ ID NO: 2835
  Description of Artificial Sequence: Synthetic walnut; inner sequence and 3' sequence

SEQ ID NO: 30813 - DNA, 53 bp, Artificial Sequence; identical to SEQ ID NO: 2662
  Description of Artificial Sequence: Synthetic walnut; inner sequence and 3' sequence

SEQ ID NO: 30814 - DNA, 53 bp, Artificial Sequence
  Description of Artificial Sequence: Synthetic walnut; inner sequence and 3' sequence
cgaggcagcgtgtgcacgtacgtatgcgcattgactagtacatgaccacttga

SEQ ID NO: 30815 - DNA, 53 bp, Artificial Sequence; identical to SEQ ID NO: 18720
  Description of Artificial Sequence: Synthetic walnut; inner sequence and 3' sequence

SEQ ID NO: 30816 - DNA, 54 bp, Artificial Sequence
  Description of Artificial Sequence: Synthetic walnut; inner sequence and 3' sequence
ggcatgcgatggatgtggacggtgtggtagtttgactagtacatgaccacttga

SEQ ID NO: 30817 - DNA, 53 bp, Artificial Sequence; identical to SEQ ID NO: 2301
  Description of Artificial Sequence: Synthetic walnut; inner sequence and 3' sequence

SEQ ID NO: 30818 - DNA, 53 bp, Artificial Sequence
  Description of Artificial Sequence: Synthetic walnut; inner sequence and 3' sequence
gcaacacgatgcatacgtgacgcacgcacgttgactagtacatgaccacttga

SEQ ID NO: 30819 - DNA, 53 bp, Artificial Sequence
  Description of Artificial Sequence: Synthetic walnut; inner sequence and 3' sequence
ggacgcatcgccccttcgattggacaggtattgactagtacatgaccacttga

SEQ ID NO: 30820 - DNA, 53 bp, Artificial Sequence
  Description of Artificial Sequence: Synthetic walnut; inner sequence and 3' sequence
gcaccacacgacagcacgccagcatgcacgttgactagtacatgaccacttga

SEQ ID NO: 30821 - DNA, 53 bp, Artificial Sequence
  Description of Artificial Sequence: Synthetic walnut; inner sequence and 3' sequence
ggccacagcgtccctcaacgtggacgtgcattgactagtacatgaccacttga

SEQ ID NO: 30822 - DNA, 53 bp, Artificial Sequence
  Description of Artificial Sequence: Synthetic walnut; inner sequence and 3' sequence
gtccgacgatggatgtgggttgtgctcgtcttgactagtacatgaccacttga

SEQ ID NO: 30823 - DNA, 53 bp, Artificial Sequence
  Description of Artificial Sequence: Synthetic walnut; inner sequence and 3' sequence
gtgcgccacgactccctactcatgggggcattgactagtacatgaccacttga

SEQ ID NO: 30824 - DNA, 53 bp, Artificial Sequence
  Description of Artificial Sequence: Synthetic walnut; inner sequence and 3' sequence
ggcatgcacgcacctacaggtgggcacgtattgactagtacatgaccacttga

SEQ ID NO: 30825 - DNA, 53 bp, Artificial Sequence; identical to SEQ ID NO: 14799
  Description of Artificial Sequence: Synthetic walnut; inner sequence and 3' sequence

SEQ ID NO: 30826 - DNA, 53 bp, Artificial Sequence
  Description of Artificial Sequence: Synthetic walnut; inner sequence and 3' sequence
gcaccacaacgccgtaacgcacgtcacgcattgactagtacatgaccacttga

SEQ ID NO: 30827 - DNA, 53 bp, Artificial Sequence; identical to SEQ ID NO: 6938
  Description of Artificial Sequence: Synthetic walnut; inner sequence and 3' sequence

SEQ ID NO: 30828 - DNA, 53 bp, Artificial Sequence; identical to SEQ ID NO: 18696
  Description of Artificial Sequence: Synthetic walnut; inner sequence and 3' sequence

SEQ ID NO: 30829 - DNA, 53 bp, Artificial Sequence; identical to SEQ ID NO: 2635
  Description of Artificial Sequence: Synthetic walnut; inner sequence and 3' sequence

SEQ ID NO: 30830 - DNA, 53 bp, Artificial Sequence
  Description of Artificial Sequence: Synthetic walnut; inner sequence and 3' sequence
gcatgcacgcaacagcacgtgtcctgcgcattgactagtacatgaccacttga

SEQ ID NO: 30831 - DNA, 53 bp, Artificial Sequence
  Description of Artificial Sequence: Synthetic walnut; inner sequence and 3' sequence
cacgcgacgagacgacatcgacgtaacgcgttgactagtacatgaccacttga

SEQ ID NO: 30832 - DNA, 53 bp, Artificial Sequence
  Description of Artificial Sequence: Synthetic walnut; inner sequence and 3' sequence
ggcctgactgggtgtggttaggaacgcgtcttgactagtacatgaccacttga

SEQ ID NO: 30833 - DNA, 53 bp, Artificial Sequence; identical to SEQ ID NO: 2374
  Description of Artificial Sequence: Synthetic walnut; inner sequence and 3' sequence

SEQ ID NO: 30834 - DNA, 53 bp, Artificial Sequence; identical to SEQ ID NO: 22541
  Description of Artificial Sequence: Synthetic walnut; inner sequence and 3' sequence

SEQ ID NO: 30835 - DNA, 53 bp, Artificial Sequence; identical to SEQ ID NO: 2387
  Description of Artificial Sequence: Synthetic walnut; inner sequence and 3' sequence

SEQ ID NO: 30836 - DNA, 53 bp, Artificial Sequence
  Description of Artificial Sequence: Synthetic walnut; inner sequence and 3' sequence
cgtcacgcacaggacgacacggtacgcacattgactagtacatgaccacttga

SEQ ID NO: 30837 - DNA, 53 bp, Artificial Sequence; identical to SEQ ID NO: 18264
  Description of Artificial Sequence: Synthetic walnut; inner sequence and 3' sequence

SEQ ID NO: 30838 - DNA, 53 bp, Artificial Sequence; identical to SEQ ID NO: 18862
  Description of Artificial Sequence: Synthetic walnut; inner sequence and 3' sequence

SEQ ID NO: 30839 - DNA, 53 bp, Artificial Sequence
  Description of Artificial Sequence: Synthetic walnut; inner sequence and 3' sequence
ggacgcaacgtaccgtatcgtggccatgcgttgactagtacatgaccacttga

SEQ ID NO: 30840 - DNA, 53 bp, Artificial Sequence; identical to SEQ ID NO: 2637
  Description of Artificial Sequence: Synthetic walnut; inner sequence and 3' sequence

SEQ ID NO: 30841 - DNA, 53 bp, Artificial Sequence; identical to SEQ ID NO: 22817
  Description of Artificial Sequence: Synthetic walnut; inner sequence and 3' sequence

SEQ ID NO: 30842 - DNA, 53 bp, Artificial Sequence; identical to SEQ ID NO: 2644
  Description of Artificial Sequence: Synthetic walnut; inner sequence and 3' sequence

SEQ ID NO: 30843 - DNA, 53 bp, Artificial Sequence
  Description of Artificial Sequence: Synthetic walnut; inner sequence and 3' sequence
ggccgcacgacccttcatgtggtcttcgtattgactagtacatgaccacttga

SEQ ID NO: 30844 - DNA, 53 bp, Artificial Sequence
  Description of Artificial Sequence: Synthetic walnut; inner sequence and 3' sequence
gtcattccgcatcctaaacgtgggcacgtattgactagtacatgaccacttga

SEQ ID NO: 30845 - DNA, 53 bp, Artificial Sequence; identical to SEQ ID NO: 2181
  Description of Artificial Sequence: Synthetic walnut; inner sequence and 3' sequence

SEQ ID NO: 30846 - DNA, 53 bp, Artificial Sequence
  Description of Artificial Sequence: Synthetic walnut; inner sequence and 3' sequence
cgatgcgcaacgtgcagaccatgtgtcgcgttgactagtacatgaccacttga

SEQ ID NO: 30847 - DNA, 53 bp, Artificial Sequence; identical to SEQ ID NO: 22502
  Description of Artificial Sequence: Synthetic walnut; inner sequence and 3' sequence

SEQ ID NO: 30848 - DNA, 53 bp, Artificial Sequence
  Description of Artificial Sequence: Synthetic walnut; inner sequence and 3' sequence
gcgaacacgatgcagtacgtgacatgcgcgttgactagtacatgaccacttga

SEQ ID NO: 30849 - DNA, 53 bp, Artificial Sequence
  Description of Artificial Sequence: Synthetic walnut; inner sequence and 3' sequence
ccgacctcgacctcggtggacatacgtgacttgactagtacatgaccacttga

SEQ ID NO: 30850 - DNA, 53 bp, Artificial Sequence; identical to SEQ ID NO: 2288
  Description of Artificial Sequence: Synthetic walnut; inner sequence and 3' sequence

SEQ ID NO: 30851 - DNA, 53 bp, Artificial Sequence; identical to SEQ ID NO: 22899
  Description of Artificial Sequence: Synthetic walnut; inner sequence and 3' sequence

SEQ ID NO: 30852 - DNA, 53 bp, Artificial Sequence; identical to SEQ ID NO: 6888
  Description of Artificial Sequence: Synthetic walnut; inner sequence and 3' sequence

SEQ ID NO: 30853 - DNA, 53 bp, Artificial Sequence; identical to SEQ ID NO: 2211
  Description of Artificial Sequence: Synthetic walnut; inner sequence and 3' sequence

SEQ ID NO: 30854 - DNA, 53 bp, Artificial Sequence; identical to SEQ ID NO: 10978
  Description of Artificial Sequence: Synthetic walnut; inner sequence and 3' sequence

SEQ ID NO: 30855 - DNA, 53 bp, Artificial Sequence; identical to SEQ ID NO: 2580
  Description of Artificial Sequence: Synthetic walnut; inner sequence and 3' sequence

SEQ ID NO: 30856 - DNA, 53 bp, Artificial Sequence; identical to SEQ ID NO: 2344
  Description of Artificial Sequence: Synthetic walnut; inner sequence and 3' sequence

SEQ ID NO: 30857 - DNA, 53 bp, Artificial Sequence
  Description of Artificial Sequence: Synthetic walnut; inner sequence and 3' sequence
ggacgcatcgccccttcgagcggacaggtattgactagtacatgaccacttga

SEQ ID NO: 30858 - DNA, 53 bp, Artificial Sequence
  Description of Artificial Sequence: Synthetic walnut; inner sequence and 3' sequence
cgcaccgtcgattcgtcatgcacgctgacattgactagtacatgaccacttga

SEQ ID NO: 30859 - DNA, 53 bp, Artificial Sequence; identical to SEQ ID NO: 2365
  Description of Artificial Sequence: Synthetic walnut; inner sequence and 3' sequence

SEQ ID NO: 30860 - DNA, 53 bp, Artificial Sequence
  Description of Artificial Sequence: Synthetic walnut; inner sequence and 3' sequence
cgatgcagcgtgacgtgcgaggacatcgcgttgactagtacatgaccacttga

SEQ ID NO: 30861 - DNA, 53 bp, Artificial Sequence
  Description of Artificial Sequence: Synthetic walnut; inner sequence and 3' sequence
tgcatgcacgcacctacacgtgggcacgtattgactagtacatgaccacttga

SEQ ID NO: 30862 - DNA, 53 bp, Artificial Sequence; identical to SEQ ID NO: 6579
  Description of Artificial Sequence: Synthetic walnut; inner sequence and 3' sequence

SEQ ID NO: 30863 - DNA, 53 bp, Artificial Sequence; identical to SEQ ID NO: 2431
  Description of Artificial Sequence: Synthetic walnut; inner sequence and 3' sequence

SEQ ID NO: 30864 - DNA, 53 bp, Artificial Sequence
  Description of Artificial Sequence: Synthetic walnut; inner sequence and 3' sequence
cgtgacgaacgcggactgtacgcatgcacgttgactagtacatgaccacttga

SEQ ID NO: 30865 - DNA, 53 bp, Artificial Sequence; identical to SEQ ID NO: 14521
  Description of Artificial Sequence: Synthetic walnut; inner sequence and 3' sequence

SEQ ID NO: 30866 - DNA, 53 bp, Artificial Sequence
  Description of Artificial Sequence: Synthetic walnut; inner sequence and 3' sequence
gtcattccgcattctacacgtgggcacgtattgactagtacatgaccacttga

SEQ ID NO: 30867 - DNA, 54 bp, Artificial Sequence; identical to SEQ ID NO: 22870
  Description of Artificial Sequence: Synthetic walnut; inner sequence and 3' sequence

SEQ ID NO: 30868 - DNA, 53 bp, Artificial Sequence; identical to SEQ ID NO: 6943
  Description of Artificial Sequence: Synthetic walnut; inner sequence and 3' sequence

SEQ ID NO: 30869 - DNA, 53 bp, Artificial Sequence
  Description of Artificial Sequence: Synthetic walnut; inner sequence and 3' sequence
gcgtcacggatcacggtctgcatcgacacgttgactagtacatgaccacttga

SEQ ID NO: 30870 - DNA, 53 bp, Artificial Sequence; identical to SEQ ID NO: 2285
  Description of Artificial Sequence: Synthetic walnut; inner sequence and 3' sequence

SEQ ID NO: 30871 - DNA, 53 bp, Artificial Sequence; identical to SEQ ID NO: 2787
  Description of Artificial Sequence: Synthetic walnut; inner sequence and 3' sequence

SEQ ID NO: 30872 - DNA, 53 bp, Artificial Sequence
  Description of Artificial Sequence: Synthetic walnut; inner sequence and 3' sequence
cgacacacaccagcacgtcacgacatcgcgttgactagtacatgaccacttga

SEQ ID NO: 30873 - DNA, 53 bp, Artificial Sequence; identical to SEQ ID NO: 18950
  Description of Artificial Sequence: Synthetic walnut; inner sequence and 3' sequence

SEQ ID NO: 30874 - DNA, 53 bp, Artificial Sequence
  Description of Artificial Sequence: Synthetic walnut; inner sequence and 3' sequence
cgtgccgtggtacgatgccgctacgtcacgttgactagtacatgaccacttga

SEQ ID NO: 30875 - DNA, 53 bp, Artificial Sequence; identical to SEQ ID NO: 2943
  Description of Artificial Sequence: Synthetic walnut; inner sequence and 3' sequence

SEQ ID NO: 30876 - DNA, 53 bp, Artificial Sequence
  Description of Artificial Sequence: Synthetic walnut; inner sequence and 3' sequence
cacgccacacgtcctgcctgcacgcgcacgttgactagtacatgaccacttga

SEQ ID NO: 30877 - DNA, 53 bp, Artificial Sequence
  Description of Artificial Sequence: Synthetic walnut; inner sequence and 3' sequence
cgacacgcagagcaacgccatgtcgacgcattgactagtacatgaccacttga

SEQ ID NO: 30878 - DNA, 53 bp, Artificial Sequence
  Description of Artificial Sequence: Synthetic walnut; inner sequence and 3' sequence
ggccacagcgtacctcaacgtggtcgtgcattgactagtacatgaccacttga

SEQ ID NO: 30879 - DNA, 53 bp, Artificial Sequence
  Description of Artificial Sequence: Synthetic walnut; inner sequence and 3' sequence
gtacgacgcggaccttcaagttggcgtggattgactagtacatgaccacttga

SEQ ID NO: 30880 - DNA, 53 bp, Artificial Sequence
  Description of Artificial Sequence: Synthetic walnut; inner sequence and 3' sequence
ggcctgcgatgtatgtgtgcgtgtattagcttgactagtacatgaccacttga

SEQ ID NO: 30881 - DNA, 53 bp, Artificial Sequence; identical to SEQ ID NO: 22982
  Description of Artificial Sequence: Synthetic walnut; inner sequence and 3' sequence

SEQ ID NO: 30882 - DNA, 53 bp, Artificial Sequence; identical to SEQ ID NO: 18770
  Description of Artificial Sequence: Synthetic walnut; inner sequence and 3' sequence

SEQ ID NO: 30883 - DNA, 53 bp, Artificial Sequence
  Description of Artificial Sequence: Synthetic walnut; inner sequence and 3' sequence
gcactgcactgccctacacgtgggaatggattgactagtacatgaccacttga

SEQ ID NO: 30884 - DNA, 53 bp, Artificial Sequence
  Description of Artificial Sequence: Synthetic walnut; inner sequence and 3' sequence
gtcactgtgtctgaccgtcaagttgcggcattgactagtacatgaccacttga

SEQ ID NO: 30885 - DNA, 53 bp, Artificial Sequence
  Description of Artificial Sequence: Synthetic walnut; inner sequence and 3' sequence
cacgccagccaagcacgaggcacacgcgcattgactagtacatgaccacttga

SEQ ID NO: 30886 - DNA, 53 bp, Artificial Sequence
  Description of Artificial Sequence: Synthetic walnut; inner sequence and 3' sequence
ggactgcactgccctacacgtgggaatggattgactagtacatgaccacttga

SEQ ID NO: 30887 - DNA, 52 bp, Artificial Sequence
  Description of Artificial Sequence: Synthetic walnut; inner sequence and 3' sequence
ggcctgcgatggatgtgggatggtctagcttgactagtacatgaccacttga

SEQ ID NO: 30888 - DNA, 53 bp, Artificial Sequence
  Description of Artificial Sequence: Synthetic walnut; inner sequence and 3' sequence
ggacgcatcgccccttctagtggacaggtattgactagtacatgaccacttga

SEQ ID NO: 30889 - DNA, 49 bp, Artificial Sequence; identical to SEQ ID NO: 2822
  Description of Artificial Sequence: Synthetic walnut; inner sequence and 3' sequence

SEQ ID NO: 30890 - DNA, 53 bp, Artificial Sequence; identical to SEQ ID NO: 2920
  Description of Artificial Sequence: Synthetic walnut; inner sequence and 3' sequence

SEQ ID NO: 30891 - DNA, 53 bp, Artificial Sequence
  Description of Artificial Sequence: Synthetic walnut; inner sequence and 3' sequence
cgacgcgcaacacggaggcacgatggcacgttgactagtacatgaccacttga

SEQ ID NO: 30892 - DNA, 53 bp, Artificial Sequence; identical to SEQ ID NO: 2325
  Description of Artificial Sequence: Synthetic walnut; inner sequence and 3' sequence

SEQ ID NO: 30893 - DNA, 53 bp, Artificial Sequence; identical to SEQ ID NO: 2305
  Description of Artificial Sequence: Synthetic walnut; inner sequence and 3' sequence

SEQ ID NO: 30894 - DNA, 53 bp, Artificial Sequence
  Description of Artificial Sequence: Synthetic walnut; inner sequence and 3' sequence
ggcatgcacgcacctccacgtgggcacgtattgactagtacatgaccacttga

SEQ ID NO: 30895 - DNA, 53 bp, Artificial Sequence; identical to SEQ ID NO: 2776
  Description of Artificial Sequence: Synthetic walnut; inner sequence and 3' sequence

SEQ ID NO: 30896 - DNA, 53 bp, Artificial Sequence
  Description of Artificial Sequence: Synthetic walnut; inner sequence and 3' sequence
ggcctgcgatggatgtgtgcgtgtattatcttgactagtacatgaccacttga

SEQ ID NO: 30897 - DNA, 53 bp, Artificial Sequence; identical to SEQ ID NO: 2500
  Description of Artificial Sequence: Synthetic walnut; inner sequence and 3' sequence

SEQ ID NO: 30898 - DNA, 53 bp, Artificial Sequence; identical to SEQ ID NO: 22998
  Description of Artificial Sequence: Synthetic walnut; inner sequence and 3' sequence

SEQ ID NO: 30899 - DNA, 53 bp, Artificial Sequence; identical to SEQ ID NO: 22807
  Description of Artificial Sequence: Synthetic walnut; inner sequence and 3' sequence

SEQ ID NO: 30900 - DNA, 53 bp, Artificial Sequence; identical to SEQ ID NO: 2391
  Description of Artificial Sequence: Synthetic walnut; inner sequence and 3' sequence

SEQ ID NO: 30901 - DNA, 53 bp, Artificial Sequence; identical to SEQ ID NO: 6960
  Description of Artificial Sequence: Synthetic walnut; inner sequence and 3' sequence

SEQ ID NO: 30902 - DNA, 53 bp, Artificial Sequence; identical to SEQ ID NO: 2290
  Description of Artificial Sequence: Synthetic walnut; inner sequence and 3' sequence

SEQ ID NO: 30903 - DNA, 53 bp, Artificial Sequence
  Description of Artificial Sequence: Synthetic walnut; inner sequence and 3' sequence
cgcaccgtctatacttcatgcacgctgacattgactagtacatgaccacttga

SEQ ID NO: 30904 - DNA, 53 bp, Artificial Sequence; identical to SEQ ID NO: 2224
  Description of Artificial Sequence: Synthetic walnut; inner sequence and 3' sequence

SEQ ID NO: 30905 - DNA, 53 bp, Artificial Sequence; identical to SEQ ID NO: 2937
  Description of Artificial Sequence: Synthetic walnut; inner sequence and 3' sequence

SEQ ID NO: 30906 - DNA, 53 bp, Artificial Sequence; identical to SEQ ID NO: 18651
  Description of Artificial Sequence: Synthetic walnut; inner sequence and 3' sequence

SEQ ID NO: 30907 - DNA, 53 bp, Artificial Sequence
  Description of Artificial Sequence: Synthetic walnut; inner sequence and 3' sequence
gcacacggtgcgacggtacgacgatgcacgttgactagtacatgaccacttga

SEQ ID NO: 30908 - DNA, 53 bp, Artificial Sequence
  Description of Artificial Sequence: Synthetic walnut; inner sequence and 3' sequence
cgaacgcacacgcaggatgaggcatgcacgttgactagtacatgaccacttga

SEQ ID NO: 30909 - DNA, 53 bp, Artificial Sequence
  Description of Artificial Sequence: Synthetic walnut; inner sequence and 3' sequence
ggacgcaacgaaccgtatcgtggccatgtgttgactagtacatgaccacttga

SEQ ID NO: 30910 - DNA, 53 bp, Artificial Sequence
  Description of Artificial Sequence: Synthetic walnut; inner sequence and 3' sequence
cgatgcaacgacacatgcaggacgtgcgcgttgactagtacatgaccacttga

SEQ ID NO: 30911 - DNA, 53 bp, Artificial Sequence; identical to SEQ ID NO: 2727
  Description of Artificial Sequence: Synthetic walnut; inner sequence and 3' sequence

SEQ ID NO: 30912 - DNA, 53 bp, Artificial Sequence
  Description of Artificial Sequence: Synthetic walnut; inner sequence and 3' sequence
ggcatgcacgaacctacacgtgggcacgtattgactagtacatgaccacttga

SEQ ID NO: 30913 - DNA, 53 bp, Artificial Sequence; identical to SEQ ID NO: 6987
  Description of Artificial Sequence: Synthetic walnut; inner sequence and 3' sequence

SEQ ID NO: 30914 - DNA, 53 bp, Artificial Sequence
  Description of Artificial Sequence: Synthetic walnut; inner sequence and 3' sequence
gtcattccgcatcctacacgtgggcacgtgttgactagtacatgaccacttga

SEQ ID NO: 30915 - DNA, 53 bp, Artificial Sequence
  Description of Artificial Sequence: Synthetic walnut; inner sequence and 3' sequence
cgtcacgcaacgtggacgacacgatctgcgttgactagtacatgaccacttga

SEQ ID NO: 30916 - DNA, 53 bp, Artificial Sequence; identical to SEQ ID NO: 6472
  Description of Artificial Sequence: Synthetic walnut; inner sequence and 3' sequence

SEQ ID NO: 30917 - DNA, 53 bp, Artificial Sequence
  Description of Artificial Sequence: Synthetic walnut; inner sequence and 3' sequence
gttccgagctggatgtggcctgtgctatgcttgactagtacatgaccacttga

SEQ ID NO: 30918 - DNA, 53 bp, Artificial Sequence
  Description of Artificial Sequence: Synthetic walnut; inner sequence and 3' sequence
gcatgcaacgacgcaacctcacgtgacgcgttgactagtacatgaccacttga

SEQ ID NO: 30919 - DNA, 53 bp, Artificial Sequence; identical to SEQ ID NO: 6918
  Description of Artificial Sequence: Synthetic walnut; inner sequence and 3' sequence

SEQ ID NO: 30920 - DNA, 53 bp, Artificial Sequence
  Description of Artificial Sequence: Synthetic walnut; inner sequence and 3' sequence
cgtgcacggtgaccgcaacgttacgccgcgttgactagtacatgaccacttga

SEQ ID NO: 30921 - DNA, 53 bp, Artificial Sequence
  Description of Artificial Sequence: Synthetic walnut; inner sequence and 3' sequence
cgtgccaacgtacgacatggttgcgacacattgactagtacatgaccacttga

SEQ ID NO: 30922 - DNA, 53 bp, Artificial Sequence
  Description of Artificial Sequence: Synthetic walnut; inner sequence and 3' sequence
ccatgtgacctgaccgtcccttcaatgggcttgactagtacatgaccacttga

SEQ ID NO: 30923 - DNA, 53 bp, Artificial Sequence; identical to SEQ ID NO: 10678
  Description of Artificial Sequence: Synthetic walnut; inner sequence and 3' sequence

SEQ ID NO: 30924 - DNA, 53 bp, Artificial Sequence
  Description of Artificial Sequence: Synthetic walnut; inner sequence and 3' sequence
tgcgcacagtacgtacgtcctgccgacacgttgactagtacatgaccacttga

SEQ ID NO: 30925 - DNA, 53 bp, Artificial Sequence; identical to SEQ ID NO: 2117
  Description of Artificial Sequence: Synthetic walnut; inner sequence and 3' sequence

SEQ ID NO: 30926 - DNA, 53 bp, Artificial Sequence
  Description of Artificial Sequence: Synthetic walnut; inner sequence and 3' sequence
ggcctgatcgaacctacaagttgtcgtggattgactagtacatgaccacttga

SEQ ID NO: 30927 - DNA, 53 bp, Artificial Sequence
  Description of Artificial Sequence: Synthetic walnut; inner sequence and 3' sequence
cgcaacgcagcaacgtactgtcgtgccgcattgactagtacatgaccacttga

SEQ ID NO: 30928 - DNA, 53 bp, Artificial Sequence
  Description of Artificial Sequence: Synthetic walnut; inner sequence and 3' sequence
ggccacgcgaccgaaagtgagcatggcgtcttgactagtacatgaccacttga

SEQ ID NO: 30929 - DNA, 53 bp, Artificial Sequence; identical to SEQ ID NO: 6857
  Description of Artificial Sequence: Synthetic walnut; inner sequence and 3' sequence

SEQ ID NO: 30930 - DNA, 52 bp, Artificial Sequence
  Description of Artificial Sequence: Synthetic walnut; inner sequence and 3' sequence
ggccggcgatggatgtggttgtgctcgtcttgactagtacatgaccacttga

SEQ ID NO: 30931 - DNA, 52 bp, Artificial Sequence; identical to SEQ ID NO: 2873
  Description of Artificial Sequence: Synthetic walnut; inner sequence and 3' sequence

SEQ ID NO: 30932 - DNA, 53 bp, Artificial Sequence
  Description of Artificial Sequence: Synthetic walnut; inner sequence and 3' sequence
cgcaccgtgacatgcgcagtacgtaccacgttgactagtacatgaccacttga

SEQ ID NO: 30933 - DNA, 53 bp, Artificial Sequence; identical to SEQ ID NO: 18265
  Description of Artificial Sequence: Synthetic walnut; inner sequence and 3' sequence

SEQ ID NO: 30934 - DNA, 53 bp, Artificial Sequence
  Description of Artificial Sequence: Synthetic walnut; inner sequence and 3' sequence
catgcgtacgacaggcagtgtgcatgcacgttgactagtacatgaccacttga

SEQ ID NO: 30935 - DNA, 53 bp, Artificial Sequence; identical to SEQ ID NO: 14659
  Description of Artificial Sequence: Synthetic walnut; inner sequence and 3' sequence

SEQ ID NO: 30936 - DNA, 53 bp, Artificial Sequence
  Description of Artificial Sequence: Synthetic walnut; inner sequence and 3' sequence
ggccacagcgtacttcaacgtggacgtgcattgactagtacatgaccacttga

SEQ ID NO: 30937 - DNA, 53 bp, Artificial Sequence; identical to SEQ ID NO: 18818
  Description of Artificial Sequence: Synthetic walnut; inner sequence and 3' sequence

SEQ ID NO: 30938 - DNA, 48 bp, Artificial Sequence; identical to SEQ ID NO: 22907
  Description of Artificial Sequence: Synthetic walnut; inner sequence and 3' sequence

SEQ ID NO: 30939 - DNA, 53 bp, Artificial Sequence
  Description of Artificial Sequence: Synthetic walnut; inner sequence and 3' sequence
cacgtggcaacgtactgtcctgactgcacgttgactagtacatgaccacttga

SEQ ID NO: 30940 - DNA, 53 bp, Artificial Sequence; identical to SEQ ID NO: 22793
  Description of Artificial Sequence: Synthetic walnut; inner sequence and 3' sequence

SEQ ID NO: 30941 - DNA, 53 bp, Artificial Sequence
  Description of Artificial Sequence: Synthetic walnut; inner sequence and 3' sequence
cgcaccgtcgatactccatgcacgctgacattgactagtacatgaccacttga

SEQ ID NO: 30942 - DNA, 53 bp, Artificial Sequence; identical to SEQ ID NO: 2919
  Description of Artificial Sequence: Synthetic walnut; inner sequence and 3' sequence

SEQ ID NO: 30943 - DNA, 53 bp, Artificial Sequence; identical to SEQ ID NO: 2646
  Description of Artificial Sequence: Synthetic walnut; inner sequence and 3' sequence

SEQ ID NO: 30944 - DNA, 53 bp, Artificial Sequence; identical to SEQ ID NO: 18709
  Description of Artificial Sequence: Synthetic walnut; inner sequence and 3' sequence

SEQ ID NO: 30945 - DNA, 53 bp, Artificial Sequence; identical to SEQ ID NO: 2099
  Description of Artificial Sequence: Synthetic walnut; inner sequence and 3' sequence

SEQ ID NO: 30946 - DNA, 53 bp, Artificial Sequence; identical to SEQ ID NO: 10938
  Description of Artificial Sequence: Synthetic walnut; inner sequence and 3' sequence

SEQ ID NO: 30947 - DNA, 53 bp, Artificial Sequence
  Description of Artificial Sequence: Synthetic walnut; inner sequence and 3' sequence
ggcacgagctgcactatcaagttgggtatgttgactagtacatgaccacttga

SEQ ID NO: 30948 - DNA, 53 bp, Artificial Sequence
  Description of Artificial Sequence: Synthetic walnut; inner sequence and 3' sequence
cgacacgacatacggtgacgcacgtgcacgttgactagtacatgaccacttga

SEQ ID NO: 30949 - DNA, 53 bp, Artificial Sequence
  Description of Artificial Sequence: Synthetic walnut; inner sequence and 3' sequence
gcgatgcgcgtcacacgtactgcactcgcgttgactagtacatgaccacttga

SEQ ID NO: 30950 - DNA, 53 bp, Artificial Sequence; identical to SEQ ID NO: 2764
  Description of Artificial Sequence: Synthetic walnut; inner sequence and 3' sequence

SEQ ID NO: 30951 - DNA, 53 bp, Artificial Sequence; identical to SEQ ID NO: 2178
  Description of Artificial Sequence: Synthetic walnut; inner sequence and 3' sequence

SEQ ID NO: 30952 - DNA, 53 bp, Artificial Sequence; identical to SEQ ID NO: 2213
  Description of Artificial Sequence: Synthetic walnut; inner sequence and 3' sequence

SEQ ID NO: 30953 - DNA, 53 bp, Artificial Sequence
  Description of Artificial Sequence: Synthetic walnut; inner sequence and 3' sequence
ggcatgcgtacgtgctgaccttacgacgcattgactagtacatgaccacttga

SEQ ID NO: 30954 - DNA, 53 bp, Artificial Sequence
  Description of Artificial Sequence: Synthetic walnut; inner sequence and 3' sequence
ggcctgcgatggatgtggtgtggctcaggcttgactagtacatgaccacttga

SEQ ID NO: 30955 - DNA, 53 bp, Artificial Sequence; identical to SEQ ID NO: 2701
  Description of Artificial Sequence: Synthetic walnut; inner sequence and 3' sequence

SEQ ID NO: 30956 - DNA, 53 bp, Artificial Sequence
  Description of Artificial Sequence: Synthetic walnut; inner sequence and 3' sequence
gtgacgcagcgtgacgacctgccatgcatgttgactagtacatgaccacttga

SEQ ID NO: 30957 - DNA, 53 bp, Artificial Sequence
  Description of Artificial Sequence: Synthetic walnut; inner sequence and 3' sequence
gtaattccgcatcctacacgtgggcacgtattgactagtacatgaccacttga

SEQ ID NO: 30958 - DNA, 53 bp, Artificial Sequence
  Description of Artificial Sequence: Synthetic walnut; inner sequence and 3' sequence
cgacgcgatacgccacggtcacgctgcgcattgactagtacatgaccacttga

SEQ ID NO: 30959 - DNA, 53 bp, Artificial Sequence
  Description of Artificial Sequence: Synthetic walnut; inner sequence and 3' sequence
ggacgcaacgtaccgtatcgtgtccatgtgttgactagtacatgaccacttga

SEQ ID NO: 30960 - DNA, 53 bp, Artificial Sequence
  Description of Artificial Sequence: Synthetic walnut; inner sequence and 3' sequence
gcgctgaggacgcaacgccttcacgtcacgttgactagtacatgaccacttga

SEQ ID NO: 30961 - DNA, 53 bp, Artificial Sequence
  Description of Artificial Sequence: Synthetic walnut; inner sequence and 3' sequence
ggcatgcgatgaacggggcatgatgcgtcattgactagtacatgaccacttga

SEQ ID NO: 30962 - DNA, 53 bp, Artificial Sequence; identical to SEQ ID NO: 22700
  Description of Artificial Sequence: Synthetic walnut; inner sequence and 3' sequence

SEQ ID NO: 30963 - DNA, 53 bp, Artificial Sequence; identical to SEQ ID NO: 6591
  Description of Artificial Sequence: Synthetic walnut; inner sequence and 3' sequence

SEQ ID NO: 30964 - DNA, 53 bp, Artificial Sequence
  Description of Artificial Sequence: Synthetic walnut; inner sequence and 3' sequence
cgatgcgatgcgtcgtgcgtacggtacgcattgactagtacatgaccacttga

SEQ ID NO: 30965 - DNA, 53 bp, Artificial Sequence; identical to SEQ ID NO: 18387
  Description of Artificial Sequence: Synthetic walnut; inner sequence and 3' sequence

SEQ ID NO: 30966 - DNA, 53 bp, Artificial Sequence; identical to SEQ ID NO: 22879
  Description of Artificial Sequence: Synthetic walnut; inner sequence and 3' sequence

SEQ ID NO: 30967 - DNA, 53 bp, Artificial Sequence; identical to SEQ ID NO: 10971
  Description of Artificial Sequence: Synthetic walnut; inner sequence and 3' sequence

SEQ ID NO: 30968 - DNA, 53 bp, Artificial Sequence
  Description of Artificial Sequence: Synthetic walnut; inner sequence and 3' sequence
ggcctgcgatggatgtgggttgtgctcggcttgactagtacatgaccacttga

SEQ ID NO: 30969 - DNA, 53 bp, Artificial Sequence
  Description of Artificial Sequence: Synthetic walnut; inner sequence and 3' sequence
gcacgactcgcagcctatcatgaggccatgttgactagtacatgaccacttga

SEQ ID NO: 30970 - DNA, 53 bp, Artificial Sequence; identical to SEQ ID NO: 6377
  Description of Artificial Sequence: Synthetic walnut; inner sequence and 3' sequence

SEQ ID NO: 30971 - DNA, 53 bp, Artificial Sequence
  Description of Artificial Sequence: Synthetic walnut; inner sequence and 3' sequence
cgtgacagcgtaacgtcatggcactgcacattgactagtacatgaccacttga

SEQ ID NO: 30972 - DNA, 53 bp, Artificial Sequence
  Description of Artificial Sequence: Synthetic walnut; inner sequence and 3' sequence
cgcgcaaggacgacgtacctgccgtgcacgttgactagtacatgaccacttga

SEQ ID NO: 30973 - DNA, 54 bp, Artificial Sequence
  Description of Artificial Sequence: Synthetic walnut; inner sequence and 3' sequence
ggcatgcacgcatcctacacgtgggcacgtattgactagtacatgaccacttga

SEQ ID NO: 30974 - DNA, 53 bp, Artificial Sequence; identical to SEQ ID NO: 22504
  Description of Artificial Sequence: Synthetic walnut; inner sequence and 3' sequence

SEQ ID NO: 30975 - DNA, 53 bp, Artificial Sequence; identical to SEQ ID NO: 2439
  Description of Artificial Sequence: Synthetic walnut; inner sequence and 3' sequence

SEQ ID NO: 30976 - DNA, 53 bp, Artificial Sequence
  Description of Artificial Sequence: Synthetic walnut; inner sequence and 3' sequence
gcgacacggcacgacgacgacagcacgacgttgactagtacatgaccacttga

SEQ ID NO: 30977 - DNA, 53 bp, Artificial Sequence; identical to SEQ ID NO: 2868
  Description of Artificial Sequence: Synthetic walnut; inner sequence and 3' sequence

SEQ ID NO: 30978 - DNA, 53 bp, Artificial Sequence
  Description of Artificial Sequence: Synthetic walnut; inner sequence and 3' sequence
cgaaacgcaatgcagcacgtgcacgtcacgttgactagtacatgaccacttga

SEQ ID NO: 30979 - DNA, 53 bp, Artificial Sequence
  Description of Artificial Sequence: Synthetic walnut; inner sequence and 3' sequence
gtcattccccatcctacacgtgggcacgtattgactagtacatgaccacttga

SEQ ID NO: 30980 - DNA, 53 bp, Artificial Sequence
  Description of Artificial Sequence: Synthetic walnut; inner sequence and 3' sequence
gcgtgcgaacaacgtagcgtcacgtgcacattgactagtacatgaccacttga

SEQ ID NO: 30981 - DNA, 53 bp, Artificial Sequence; identical to SEQ ID NO: 2329
  Description of Artificial Sequence: Synthetic walnut; inner sequence and 3' sequence

SEQ ID NO: 30982 - DNA, 53 bp, Artificial Sequence
  Description of Artificial Sequence: Synthetic walnut; inner sequence and 3' sequence
gcaacggcacgacagcatgacgtgtgcgtgttgactagtacatgaccacttga

SEQ ID NO: 30983 - DNA, 53 bp, Artificial Sequence
  Description of Artificial Sequence: Synthetic walnut; inner sequence and 3' sequence
ggacgcatcgccccttcgaggggacaggtattgactagtacatgaccacttga

SEQ ID NO: 30984 - DNA, 53 bp, Artificial Sequence
  Description of Artificial Sequence: Synthetic walnut; inner sequence and 3' sequence
ggacgcaacgtaccgtattgtggccatgtgttgactagtacatgaccacttga

SEQ ID NO: 30985 - DNA, 53 bp, Artificial Sequence
  Description of Artificial Sequence: Synthetic walnut; inner sequence and 3' sequence
ggacgcaacgtaccttatcgtggccatgtgttgactagtacatgaccacttga

SEQ ID NO: 30986 - DNA, 53 bp, Artificial Sequence
  Description of Artificial Sequence: Synthetic walnut; inner sequence and 3' sequence
ggactgcgatggatgtgggctagtatgggcttgactagtacatgaccacttga

SEQ ID NO: 30987 - DNA, 53 bp, Artificial Sequence
  Description of Artificial Sequence: Synthetic walnut; inner sequence and 3' sequence
cgcaccgacagcacacgtacgtcatgcggcttgactagtacatgaccacttga

SEQ ID NO: 30988 - DNA, 53 bp, Artificial Sequence; identical to SEQ ID NO: 2950
  Description of Artificial Sequence: Synthetic walnut; inner sequence and 3' sequence

SEQ ID NO: 30989 - DNA, 53 bp, Artificial Sequence
  Description of Artificial Sequence: Synthetic walnut; inner sequence and 3' sequence
ggccaaactgcactatcaagacgtcgtggattgactagtacatgaccacttga

SEQ ID NO: 30990 - DNA, 53 bp, Artificial Sequence; identical to SEQ ID NO: 2565
  Description of Artificial Sequence: Synthetic walnut; inner sequence and 3' sequence

SEQ ID NO: 30991 - DNA, 53 bp, Artificial Sequence; identical to SEQ ID NO: 22644
  Description of Artificial Sequence: Synthetic walnut; inner sequence and 3' sequence

SEQ ID NO: 30992 - DNA, 53 bp, Artificial Sequence
  Description of Artificial Sequence: Synthetic walnut; inner sequence and 3' sequence
cgcacacgcacgtcatgccagctgtgcatgttgactagtacatgaccacttga

SEQ ID NO: 30993 - DNA, 53 bp, Artificial Sequence
  Description of Artificial Sequence: Synthetic walnut; inner sequence and 3' sequence
cgtgacgcatgaaacgtaccttcacgcacgttgactagtacatgaccacttga

SEQ ID NO: 30994 - DNA, 53 bp, Artificial Sequence
  Description of Artificial Sequence: Synthetic walnut; inner sequence and 3' sequence
gcacgcactctgccatacgagtggttcaggttgactagtacatgaccacttga

SEQ ID NO: 30995 - DNA, 53 bp, Artificial Sequence
  Description of Artificial Sequence: Synthetic walnut; inner sequence and 3' sequence
cgtgcatcgtgcgatacgtcctgctgcacattgactagtacatgaccacttga

SEQ ID NO: 30996 - DNA, 53 bp, Artificial Sequence
  Description of Artificial Sequence: Synthetic walnut; inner sequence and 3' sequence
cgacactacgtagcatgccgtacgtgcacattgactagtacatgaccacttga

SEQ ID NO: 30997 - DNA, 53 bp, Artificial Sequence
  Description of Artificial Sequence: Synthetic walnut; inner sequence and 3' sequence
ggcctgcgatggatgtggtttggacgggccttgactagtacatgaccacttga

SEQ ID NO: 30998 - DNA, 54 bp, Artificial Sequence
  Description of Artificial Sequence: Synthetic walnut; inner sequence and 3' sequence
gttccgccgatggatgtgggttgtgctcgtcttgactagtacatgaccacttga

SEQ ID NO: 30999 - DNA, 53 bp, Artificial Sequence
  Description of Artificial Sequence: Synthetic walnut; inner sequence and 3' sequence
ggcatgcacgcatctacacgtgggcacgtattgactagtacatgaccacttga

SEQ ID NO: 31000 - DNA, 53 bp, Artificial Sequence
  Description of Artificial Sequence: Synthetic walnut; inner sequence and 3' sequence
gcgtgacgggaaggacgttgccactacgcattgactagtacatgaccacttga

SEQ ID NO: 31001 - DNA, 53 bp, Artificial Sequence; identical to SEQ ID NO: 14933
  Description of Artificial Sequence: Synthetic walnut; inner sequence and 3' sequence

SEQ ID NO: 31002 - DNA, 53 bp, Artificial Sequence; identical to SEQ ID NO: 2988
  Description of Artificial Sequence: Synthetic walnut; inner sequence and 3' sequence

SEQ ID NO: 31003 - DNA, 76 bp, Artificial Sequence; identical to SEQ ID NO: 3003
  Description of Artificial Sequence: Synthetic walnut; 5' sequence + inner sequence + 3' sequence

SEQ ID NO: 31004 - DNA, 76 bp, Artificial Sequence; identical to SEQ ID NO: 3004
  Description of Artificial Sequence: Synthetic walnut; 5' sequence + inner sequence + 3' sequence

SEQ ID NO: 31005 - DNA, 76 bp, Artificial Sequence; identical to SEQ ID NO: 3020
  Description of Artificial Sequence: Synthetic walnut; 5' sequence + inner sequence + 3' sequence

SEQ ID NO: 31006 - DNA, 76 bp, Artificial Sequence; identical to SEQ ID NO: 3008
  Description of Artificial Sequence: Synthetic walnut; 5' sequence + inner sequence + 3' sequence

SEQ ID NO: 31007 - DNA, 76 bp, Artificial Sequence; identical to SEQ ID NO: 3010
  Description of Artificial Sequence: Synthetic walnut; 5' sequence + inner sequence + 3' sequence

SEQ ID NO: 31008 - DNA, 76 bp, Artificial Sequence; identical to SEQ ID NO: 3006
  Description of Artificial Sequence: Synthetic walnut; 5' sequence + inner sequence + 3' sequence

SEQ ID NO: 31009 - DNA, 76 bp, Artificial Sequence; identical to SEQ ID NO: 3030
  Description of Artificial Sequence: Synthetic walnut; 5' sequence + inner sequence + 3' sequence

SEQ ID NO: 31010 - DNA, 76 bp, Artificial Sequence; identical to SEQ ID NO: 3027
  Description of Artificial Sequence: Synthetic walnut; 5' sequence + inner sequence + 3' sequence

SEQ ID NO: 31011 - DNA, 76 bp, Artificial Sequence; identical to SEQ ID NO: 3029
  Description of Artificial Sequence: Synthetic walnut; 5' sequence + inner sequence + 3' sequence

SEQ ID NO: 31012 - DNA, 76 bp, Artificial Sequence; identical to SEQ ID NO: 3021
  Description of Artificial Sequence: Synthetic walnut; 5' sequence + inner sequence + 3' sequence

SEQ ID NO: 31013 - DNA, 76 bp, Artificial Sequence; identical to SEQ ID NO: 3007
  Description of Artificial Sequence: Synthetic walnut; 5' sequence + inner sequence + 3' sequence

SEQ ID NO: 31014 - DNA, 76 bp, Artificial Sequence; identical to SEQ ID NO: 3012
  Description of Artificial Sequence: Synthetic walnut; 5' sequence + inner sequence + 3' sequence

SEQ ID NO: 31015 - DNA, 76 bp, Artificial Sequence; identical to SEQ ID NO: 3009
  Description of Artificial Sequence: Synthetic walnut; 5' sequence + inner sequence + 3' sequence

SEQ ID NO: 31016 - DNA, 76 bp, Artificial Sequence; identical to SEQ ID NO: 3005
  Description of Artificial Sequence: Synthetic walnut; 5' sequence + inner sequence + 3' sequence

SEQ ID NO: 31017 - DNA, 76 bp, Artificial Sequence; identical to SEQ ID NO: 3052
  Description of Artificial Sequence: Synthetic walnut; 5' sequence + inner sequence + 3' sequence

SEQ ID NO: 31018 - DNA, 76 bp, Artificial Sequence; identical to SEQ ID NO: 3047
  Description of Artificial Sequence: Synthetic walnut; 5' sequence + inner sequence + 3' sequence

SEQ ID NO: 31019 - DNA, 76 bp, Artificial Sequence; identical to SEQ ID NO: 3033
  Description of Artificial Sequence: Synthetic walnut; 5' sequence + inner sequence + 3' sequence

SEQ ID NO: 31020 - DNA, 76 bp, Artificial Sequence; identical to SEQ ID NO: 3014
  Description of Artificial Sequence: Synthetic walnut; 5' sequence + inner sequence + 3' sequence

SEQ ID NO: 31021 - DNA, 76 bp, Artificial Sequence; identical to SEQ ID NO: 3026
  Description of Artificial Sequence: Synthetic walnut; 5' sequence + inner sequence + 3' sequence

SEQ ID NO: 31022 - DNA, 76 bp, Artificial Sequence; identical to SEQ ID NO: 3383
  Description of Artificial Sequence: Synthetic walnut; 5' sequence + inner sequence + 3' sequence

SEQ ID NO: 31023 - DNA, 76 bp, Artificial Sequence; identical to SEQ ID NO: 3019
  Description of Artificial Sequence: Synthetic walnut; 5' sequence + inner sequence + 3' sequence

SEQ ID NO: 31024 - DNA, 76 bp, Artificial Sequence; identical to SEQ ID NO: 3048
  Description of Artificial Sequence: Synthetic walnut; 5' sequence + inner sequence + 3' sequence

SEQ ID NO: 31025 - DNA, 76 bp, Artificial Sequence; identical to SEQ ID NO: 3017
  Description of Artificial Sequence: Synthetic walnut; 5' sequence + inner sequence + 3' sequence

SEQ ID NO: 31026 - DNA, 76 bp, Artificial Sequence; identical to SEQ ID NO: 3055
  Description of Artificial Sequence: Synthetic walnut; 5' sequence + inner sequence + 3' sequence

SEQ ID NO: 31027 - DNA, 76 bp, Artificial Sequence; identical to SEQ ID NO: 3024
  Description of Artificial Sequence: Synthetic walnut; 5' sequence + inner sequence + 3' sequence

SEQ ID NO: 31028 - DNA, 76 bp, Artificial Sequence; identical to SEQ ID NO: 3201
  Description of Artificial Sequence: Synthetic walnut; 5' sequence + inner sequence + 3' sequence

SEQ ID NO: 31029 - DNA, 76 bp, Artificial Sequence; identical to SEQ ID NO: 3023
  Description of Artificial Sequence: Synthetic walnut; 5' sequence + inner sequence + 3' sequence

SEQ ID NO: 31030 - DNA, 76 bp, Artificial Sequence; identical to SEQ ID NO: 3034
  Description of Artificial Sequence: Synthetic walnut; 5' sequence + inner sequence + 3' sequence

SEQ ID NO: 31031 - DNA, 76 bp, Artificial Sequence; identical to SEQ ID NO: 3128
  Description of Artificial Sequence: Synthetic walnut; 5' sequence + inner sequence + 3' sequence

SEQ ID NO: 31032 - DNA, 76 bp, Artificial Sequence; identical to SEQ ID NO: 3015
  Description of Artificial Sequence: Synthetic walnut; 5' sequence + inner sequence + 3' sequence

SEQ ID NO: 31033 - DNA, 76 bp, Artificial Sequence; identical to SEQ ID NO: 3073
  Description of Artificial Sequence: Synthetic walnut; 5' sequence + inner sequence + 3' sequence

SEQ ID NO: 31034 - DNA, 76 bp, Artificial Sequence; identical to SEQ ID NO: 3081
  Description of Artificial Sequence: Synthetic walnut; 5' sequence + inner sequence + 3' sequence

SEQ ID NO: 31035 - DNA, 76 bp, Artificial Sequence; identical to SEQ ID NO: 3011
  Description of Artificial Sequence: Synthetic walnut; 5' sequence + inner sequence + 3' sequence

SEQ ID NO: 31036 - DNA, 76 bp, Artificial Sequence; identical to SEQ ID NO: 3094
  Description of Artificial Sequence: Synthetic walnut; 5' sequence + inner sequence + 3' sequence

SEQ ID NO: 31037 - DNA, 76 bp, Artificial Sequence; identical to SEQ ID NO: 3040
  Description of Artificial Sequence: Synthetic walnut; 5' sequence + inner sequence + 3' sequence

SEQ ID NO: 31038 - DNA, 76 bp, Artificial Sequence; identical to SEQ ID NO: 3078
  Description of Artificial Sequence: Synthetic walnut; 5' sequence + inner sequence + 3' sequence

SEQ ID NO: 31039 - DNA, 76 bp, Artificial Sequence; identical to SEQ ID NO: 3279
  Description of Artificial Sequence: Synthetic walnut; 5' sequence + inner sequence + 3' sequence

SEQ ID NO: 31040 - DNA, 76 bp, Artificial Sequence; identical to SEQ ID NO: 3028
  Description of Artificial Sequence: Synthetic walnut; 5' sequence + inner sequence + 3' sequence

SEQ ID NO: 31041 - DNA, 76 bp, Artificial Sequence; identical to SEQ ID NO: 19266
  Description of Artificial Sequence: Synthetic walnut; 5' sequence + inner sequence + 3' sequence

SEQ ID NO: 31042 - DNA, 76 bp, Artificial Sequence; identical to SEQ ID NO: 3074
  Description of Artificial Sequence: Synthetic walnut; 5' sequence + inner sequence + 3' sequence

SEQ ID NO: 31043 - DNA, 76 bp, Artificial Sequence; identical to SEQ ID NO: 3013
  Description of Artificial Sequence: Synthetic walnut; 5' sequence + inner sequence + 3' sequence

SEQ ID NO: 31044 - DNA, 76 bp, Artificial Sequence; identical to SEQ ID NO: 3220
  Description of Artificial Sequence: Synthetic walnut; 5' sequence + inner sequence + 3' sequence

SEQ ID NO: 31045 - DNA, 76 bp, Artificial Sequence; identical to SEQ ID NO: 3122
  Description of Artificial Sequence: Synthetic walnut; 5' sequence + inner sequence + 3' sequence

SEQ ID NO: 31046 - DNA, 76 bp, Artificial Sequence; identical to SEQ ID NO: 3139
  Description of Artificial Sequence: Synthetic walnut; 5' sequence + inner sequence + 3' sequence

SEQ ID NO: 31047 - DNA, 76 bp, Artificial Sequence; identical to SEQ ID NO: 3526
  Description of Artificial Sequence: Synthetic walnut; 5' sequence + inner sequence + 3' sequence

SEQ ID NO: 31048 - DNA, 74 bp, Artificial Sequence; identical to SEQ ID NO: 3241
  Description of Artificial Sequence: Synthetic walnut; 5' sequence + inner sequence + 3' sequence

SEQ ID NO: 31049 - DNA, 76 bp, Artificial Sequence; identical to SEQ ID NO: 3046
  Description of Artificial Sequence: Synthetic walnut; 5' sequence + inner sequence + 3' sequence

SEQ ID NO: 31050 - DNA, 76 bp, Artificial Sequence; identical to SEQ ID NO: 3045
  Description of Artificial Sequence: Synthetic walnut; 5' sequence + inner sequence + 3' sequence

SEQ ID NO: 31051 - DNA, 76 bp, Artificial Sequence; identical to SEQ ID NO: 3281
  Description of Artificial Sequence: Synthetic walnut; 5' sequence + inner sequence + 3' sequence

SEQ ID NO: 31052 - DNA, 76 bp, Artificial Sequence; identical to SEQ ID NO: 3037
  Description of Artificial Sequence: Synthetic walnut; 5' sequence + inner sequence + 3' sequence

SEQ ID NO: 31053 - DNA, 76 bp, Artificial Sequence; identical to SEQ ID NO: 3506
  Description of Artificial Sequence: Synthetic walnut; 5' sequence + inner sequence + 3' sequence

SEQ ID NO: 31054 - DNA, 76 bp, Artificial Sequence; identical to SEQ ID NO: 3054
  Description of Artificial Sequence: Synthetic walnut; 5' sequence + inner sequence + 3' sequence

SEQ ID NO: 31055 - DNA, 76 bp, Artificial Sequence; identical to SEQ ID NO: 3032
  Description of Artificial Sequence: Synthetic walnut; 5' sequence + inner sequence + 3' sequence

SEQ ID NO: 31056 - DNA, 76 bp, Artificial Sequence; identical to SEQ ID NO: 3041
  Description of Artificial Sequence: Synthetic walnut; 5' sequence + inner sequence + 3' sequence

SEQ ID NO: 31057 - DNA, 76 bp, Artificial Sequence; identical to SEQ ID NO: 3036
  Description of Artificial Sequence: Synthetic walnut; 5' sequence + inner sequence + 3' sequence

SEQ ID NO: 31058 - DNA, 76 bp, Artificial Sequence; identical to SEQ ID NO: 19640
  Description of Artificial Sequence: Synthetic walnut; 5' sequence + inner sequence + 3' sequence

SEQ ID NO: 31059 - DNA, 76 bp, Artificial Sequence; identical to SEQ ID NO: 3273
  Description of Artificial Sequence: Synthetic walnut; 5' sequence + inner sequence + 3' sequence

SEQ ID NO: 31060 - DNA, 75 bp, Artificial Sequence; identical to SEQ ID NO: 3070
  Description of Artificial Sequence: Synthetic walnut; 5' sequence + inner sequence + 3' sequence

SEQ ID NO: 31061 - DNA, 76 bp, Artificial Sequence; identical to SEQ ID NO: 3138
  Description of Artificial Sequence: Synthetic walnut; 5' sequence + inner sequence + 3' sequence

SEQ ID NO: 31062 - DNA, 76 bp, Artificial Sequence; identical to SEQ ID NO: 3323
  Description of Artificial Sequence: Synthetic walnut; 5' sequence + inner sequence + 3' sequence

SEQ ID NO: 31063 - DNA, 76 bp, Artificial Sequence; identical to SEQ ID NO: 3018
  Description of Artificial Sequence: Synthetic walnut; 5' sequence + inner sequence + 3' sequence

SEQ ID NO: 31064 - DNA, 76 bp, Artificial Sequence; identical to SEQ ID NO: 3632
  Description of Artificial Sequence: Synthetic walnut; 5' sequence + inner sequence + 3' sequence

SEQ ID NO: 31065 - DNA, 76 bp, Artificial Sequence; identical to SEQ ID NO: 3106
  Description of Artificial Sequence: Synthetic walnut; 5' sequence + inner sequence + 3' sequence

SEQ ID NO: 31066 - DNA, 76 bp, Artificial Sequence; identical to SEQ ID NO: 3093
  Description of Artificial Sequence: Synthetic walnut; 5' sequence + inner sequence + 3' sequence

SEQ ID NO: 31067 - DNA, 76 bp, Artificial Sequence; identical to SEQ ID NO: 3082
  Description of Artificial Sequence: Synthetic walnut; 5' sequence + inner sequence + 3' sequence

SEQ ID NO: 31068 - DNA, 76 bp, Artificial Sequence; identical to SEQ ID NO: 3270
  Description of Artificial Sequence: Synthetic walnut; 5' sequence + inner sequence + 3' sequence

SEQ ID NO: 31069 - DNA, 76 bp, Artificial Sequence; identical to SEQ ID NO: 19211
  Description of Artificial Sequence: Synthetic walnut; 5' sequence + inner sequence + 3' sequence

SEQ ID NO: 31070 - DNA, 76 bp, Artificial Sequence; identical to SEQ ID NO: 3144
  Description of Artificial Sequence: Synthetic walnut; 5' sequence + inner sequence + 3' sequence

SEQ ID NO: 31071 - DNA, 76 bp, Artificial Sequence; identical to SEQ ID NO: 3071
  Description of Artificial Sequence: Synthetic walnut; 5' sequence + inner sequence + 3' sequence

SEQ ID NO: 31072 - DNA, 71 bp, Artificial Sequence; identical to SEQ ID NO: 19927
  Description of Artificial Sequence: Synthetic walnut; 5' sequence + inner sequence + 3' sequence

SEQ ID NO: 31073 - DNA, 76 bp, Artificial Sequence; identical to SEQ ID NO: 3194
  Description of Artificial Sequence: Synthetic walnut; 5' sequence + inner sequence + 3' sequence

SEQ ID NO: 31074 - DNA, 76 bp, Artificial Sequence; identical to SEQ ID NO: 3121
  Description of Artificial Sequence: Synthetic walnut; 5' sequence + inner sequence + 3' sequence

SEQ ID NO: 31075 - DNA, 76 bp, Artificial Sequence; identical to SEQ ID NO: 3265
  Description of Artificial Sequence: Synthetic walnut; 5' sequence + inner sequence + 3' sequence

SEQ ID NO: 31076 - DNA, 76 bp, Artificial Sequence; identical to SEQ ID NO: 3035
  Description of Artificial Sequence: Synthetic walnut; 5' sequence + inner sequence + 3' sequence

SEQ ID NO: 31077 - DNA, 76 bp, Artificial Sequence; identical to SEQ ID NO: 3381
  Description of Artificial Sequence: Synthetic walnut; 5' sequence + inner sequence + 3' sequence

SEQ ID NO: 31078 - DNA, 76 bp, Artificial Sequence; identical to SEQ ID NO: 23495
  Description of Artificial Sequence: Synthetic walnut; 5' sequence + inner sequence + 3' sequence

SEQ ID NO: 31079 - DNA, 77 bp, Artificial Sequence; identical to SEQ ID NO: 3250
  Description of Artificial Sequence: Synthetic walnut; 5' sequence + inner sequence + 3' sequence

SEQ ID NO: 31080 - DNA, 76 bp, Artificial Sequence; identical to SEQ ID NO: 3022
  Description of Artificial Sequence: Synthetic walnut; 5' sequence + inner sequence + 3' sequence

SEQ ID NO: 31081 - DNA, 77 bp, Artificial Sequence; identical to SEQ ID NO: 3150
  Description of Artificial Sequence: Synthetic walnut; 5' sequence + inner sequence + 3' sequence

SEQ ID NO: 31082 - DNA, 76 bp, Artificial Sequence; identical to SEQ ID NO: 3147
  Description of Artificial Sequence: Synthetic walnut; 5' sequence + inner sequence + 3' sequence

SEQ ID NO: 31083 - DNA, 76 bp, Artificial Sequence; identical to SEQ ID NO: 3177
  Description of Artificial Sequence: Synthetic walnut; 5' sequence + inner sequence + 3' sequence

SEQ ID NO: 31084 - DNA, 76 bp, Artificial Sequence; identical to SEQ ID NO: 3190
  Description of Artificial Sequence: Synthetic walnut; 5' sequence + inner sequence + 3' sequence

SEQ ID NO: 31085 - DNA, 76 bp, Artificial Sequence; identical to SEQ ID NO: 3166
  Description of Artificial Sequence: Synthetic walnut; 5' sequence + inner sequence + 3' sequence

SEQ ID NO: 31086 - DNA, 76 bp, Artificial Sequence; identical to SEQ ID NO: 3310
  Description of Artificial Sequence: Synthetic walnut; 5' sequence + inner sequence + 3' sequence

SEQ ID NO: 31087 - DNA, 76 bp, Artificial Sequence; identical to SEQ ID NO: 3042
  Description of Artificial Sequence: Synthetic walnut; 5' sequence + inner sequence + 3' sequence

SEQ ID NO: 31088 - DNA, 76 bp, Artificial Sequence; identical to SEQ ID NO: 3461
  Description of Artificial Sequence: Synthetic walnut; 5' sequence + inner sequence + 3' sequence

SEQ ID NO: 31089 - DNA, 76 bp, Artificial Sequence; identical to SEQ ID NO: 3080
  Description of Artificial Sequence: Synthetic walnut; 5' sequence + inner sequence + 3' sequence

SEQ ID NO: 31090 - DNA, 76 bp, Artificial Sequence; identical to SEQ ID NO: 3257
  Description of Artificial Sequence: Synthetic walnut; 5' sequence + inner sequence + 3' sequence

SEQ ID NO: 31091 - DNA, 76 bp, Artificial Sequence; identical to SEQ ID NO: 3151
  Description of Artificial Sequence: Synthetic walnut; 5' sequence + inner sequence + 3' sequence

SEQ ID NO: 31092 - DNA, 72 bp, Artificial Sequence; identical to SEQ ID NO: 3893
  Description of Artificial Sequence: Synthetic walnut; 5' sequence + inner sequence + 3' sequence

SEQ ID NO: 31093 - DNA, 76 bp, Artificial Sequence; identical to SEQ ID NO: 3085
  Description of Artificial Sequence: Synthetic walnut; 5' sequence + inner sequence + 3' sequence

SEQ ID NO: 31094 - DNA, 76 bp, Artificial Sequence; identical to SEQ ID NO: 3096
  Description of Artificial Sequence: Synthetic walnut; 5' sequence + inner sequence + 3' sequence

SEQ ID NO: 31095 - DNA, 76 bp, Artificial Sequence; identical to SEQ ID NO: 3263
  Description of Artificial Sequence: Synthetic walnut; 5' sequence + inner sequence + 3' sequence

SEQ ID NO: 31096 - DNA, 76 bp, Artificial Sequence; identical to SEQ ID NO: 3517
  Description of Artificial Sequence: Synthetic walnut; 5' sequence + inner sequence + 3' sequence

SEQ ID NO: 31097 - DNA, 76 bp, Artificial Sequence; identical to SEQ ID NO: 7889
  Description of Artificial Sequence: Synthetic walnut; 5' sequence + inner sequence + 3' sequence

SEQ ID NO: 31098 - DNA, 76 bp, Artificial Sequence; identical to SEQ ID NO: 3108
  Description of Artificial Sequence: Synthetic walnut; 5' sequence + inner sequence + 3' sequence

SEQ ID NO: 31099 - DNA, 76 bp, Artificial Sequence; identical to SEQ ID NO: 3458
  Description of Artificial Sequence: Synthetic walnut; 5' sequence + inner sequence + 3' sequence

SEQ ID NO: 31100 - DNA, 77 bp, Artificial Sequence; identical to SEQ ID NO: 3971
  Description of Artificial Sequence: Synthetic walnut; 5' sequence + inner sequence + 3' sequence

SEQ ID NO: 31101 - DNA, 76 bp, Artificial Sequence; identical to SEQ ID NO: 3174
  Description of Artificial Sequence: Synthetic walnut; 5' sequence + inner sequence + 3' sequence

SEQ ID NO: 31102 - DNA, 76 bp, Artificial Sequence; identical to SEQ ID NO: 3231
  Description of Artificial Sequence: Synthetic walnut; 5' sequence + inner sequence + 3' sequence

SEQ ID NO: 31103 - DNA, 76 bp, Artificial Sequence; identical to SEQ ID NO: 3328
  Description of Artificial Sequence: Synthetic walnut; 5' sequence + inner sequence + 3' sequence

SEQ ID NO: 31104 - DNA, 76 bp, Artificial Sequence; identical to SEQ ID NO: 3236
  Description of Artificial Sequence: Synthetic walnut; 5' sequence + inner sequence + 3' sequence

SEQ ID NO: 31105 - DNA, 76 bp, Artificial Sequence; identical to SEQ ID NO: 3079
  Description of Artificial Sequence: Synthetic walnut; 5' sequence + inner sequence + 3' sequence

SEQ ID NO: 31106 - DNA, 76 bp, Artificial Sequence; identical to SEQ ID NO: 3059
  Description of Artificial Sequence: Synthetic walnut; 5' sequence + inner sequence + 3' sequence

SEQ ID NO: 31107 - DNA, 76 bp, Artificial Sequence; identical to SEQ ID NO: 3582
  Description of Artificial Sequence: Synthetic walnut; 5' sequence + inner sequence + 3' sequence

SEQ ID NO: 31108 - DNA, 76 bp, Artificial Sequence
  Description of Artificial Sequence: Synthetic walnut; 5' sequence + inner sequence + 3' sequence
tagggaagagaaggacatatgatgcgtgcagcacggtacacgatgccgtcacgttgactagtacatgaccacttga

SEQ ID NO: 31109 - DNA, 76 bp, Artificial Sequence; identical to SEQ ID NO: 23151
  Description of Artificial Sequence: Synthetic walnut; 5' sequence + inner sequence + 3' sequence

SEQ ID NO: 31110 - DNA, 76 bp, Artificial Sequence; identical to SEQ ID NO: 3053
  Description of Artificial Sequence: Synthetic walnut; 5' sequence + inner sequence + 3' sequence

SEQ ID NO: 31111 - DNA, 76 bp, Artificial Sequence; identical to SEQ ID NO: 3232
  Description of Artificial Sequence: Synthetic walnut; 5' sequence + inner sequence + 3' sequence

SEQ ID NO: 31112 - DNA, 76 bp, Artificial Sequence; identical to SEQ ID NO: 3441
  Description of Artificial Sequence: Synthetic walnut; 5' sequence + inner sequence + 3' sequence

SEQ ID NO: 31113 - DNA, 76 bp, Artificial Sequence; identical to SEQ ID NO: 19861
  Description of Artificial Sequence: Synthetic walnut; 5' sequence + inner sequence + 3' sequence

SEQ ID NO: 31114 - DNA, 76 bp, Artificial Sequence
  Description of Artificial Sequence: Synthetic walnut; 5' sequence + inner sequence + 3' sequence
tagggaagagaaggacatatgatcgtgacgcacgtggcaacgaggcatgcgcattgactagtacatgaccacttga

SEQ ID NO: 31115 - DNA, 76 bp, Artificial Sequence; identical to SEQ ID NO: 3256
  Description of Artificial Sequence: Synthetic walnut; 5' sequence + inner sequence + 3' sequence

SEQ ID NO: 31116 - DNA, 76 bp, Artificial Sequence; identical to SEQ ID NO: 3109
  Description of Artificial Sequence: Synthetic walnut; 5' sequence + inner sequence + 3' sequence

SEQ ID NO: 31117 - DNA, 76 bp, Artificial Sequence; identical to SEQ ID NO: 3191
  Description of Artificial Sequence: Synthetic walnut; 5' sequence + inner sequence + 3' sequence

SEQ ID NO: 31118 - DNA, 76 bp, Artificial Sequence; identical to SEQ ID NO: 3274
  Description of Artificial Sequence: Synthetic walnut; 5' sequence + inner sequence + 3' sequence

SEQ ID NO: 31119 - DNA, 76 bp, Artificial Sequence; identical to SEQ ID NO: 3114
  Description of Artificial Sequence: Synthetic walnut; 5' sequence + inner sequence + 3' sequence

SEQ ID NO: 31120 - DNA, 76 bp, Artificial Sequence; identical to SEQ ID NO: 3603
  Description of Artificial Sequence: Synthetic walnut; 5' sequence + inner sequence + 3' sequence

SEQ ID NO: 31121 - DNA, 76 bp, Artificial Sequence; identical to SEQ ID NO: 3599
  Description of Artificial Sequence: Synthetic walnut; 5' sequence + inner sequence + 3' sequence

SEQ ID NO: 31122 - DNA, 76 bp, Artificial Sequence; identical to SEQ ID NO: 3230
  Description of Artificial Sequence: Synthetic walnut; 5' sequence + inner sequence + 3' sequence

SEQ ID NO: 31123 - DNA, 76 bp, Artificial Sequence; identical to SEQ ID NO: 3145
  Description of Artificial Sequence: Synthetic walnut; 5' sequence + inner sequence + 3' sequence

SEQ ID NO: 31124 - DNA, 76 bp, Artificial Sequence; identical to SEQ ID NO: 23917
  Description of Artificial Sequence: Synthetic walnut; 5' sequence + inner sequence + 3' sequence

SEQ ID NO: 31125 - DNA, 76 bp, Artificial Sequence; identical to SEQ ID NO: 3184
  Description of Artificial Sequence: Synthetic walnut; 5' sequence + inner sequence + 3' sequence

SEQ ID NO: 31126 - DNA, 76 bp, Artificial Sequence; identical to SEQ ID NO: 23302
  Description of Artificial Sequence: Synthetic walnut; 5' sequence + inner sequence + 3' sequence

SEQ ID NO: 31127 - DNA, 76 bp, Artificial Sequence; identical to SEQ ID NO: 3137
  Description of Artificial Sequence: Synthetic walnut; 5' sequence + inner sequence + 3' sequence

SEQ ID NO: 31128 - DNA, 76 bp, Artificial Sequence; identical to SEQ ID NO: 23105
  Description of Artificial Sequence: Synthetic walnut; 5' sequence + inner sequence + 3' sequence

SEQ ID NO: 31129 - DNA, 76 bp, Artificial Sequence; identical to SEQ ID NO: 3136
  Description of Artificial Sequence: Synthetic walnut; 5' sequence + inner sequence + 3' sequence

SEQ ID NO: 31130 - DNA, 76 bp, Artificial Sequence; identical to SEQ ID NO: 3092
  Description of Artificial Sequence: Synthetic walnut; 5' sequence + inner sequence + 3' sequence

SEQ ID NO: 31131 - DNA, 76 bp, Artificial Sequence; identical to SEQ ID NO: 3823
  Description of Artificial Sequence: Synthetic walnut; 5' sequence + inner sequence + 3' sequence

SEQ ID NO: 31132 - DNA, 76 bp, Artificial Sequence; identical to SEQ ID NO: 3828
  Description of Artificial Sequence: Synthetic walnut; 5' sequence + inner sequence + 3' sequence

SEQ ID NO: 31133 - DNA, 76 bp, Artificial Sequence; identical to SEQ ID NO: 3246
  Description of Artificial Sequence: Synthetic walnut; 5' sequence + inner sequence + 3' sequence

SEQ ID NO: 31134 - DNA, 76 bp, Artificial Sequence; identical to SEQ ID NO: 3161
  Description of Artificial Sequence: Synthetic walnut; 5' sequence + inner sequence + 3' sequence

SEQ ID NO: 31135 - DNA, 76 bp, Artificial Sequence; identical to SEQ ID NO: 3119
  Description of Artificial Sequence: Synthetic walnut; 5' sequence + inner sequence + 3' sequence

SEQ ID NO: 31136 - DNA, 77 bp, Artificial Sequence; identical to SEQ ID NO: 3216
  Description of Artificial Sequence: Synthetic walnut; 5' sequence + inner sequence + 3' sequence

SEQ ID NO: 31137 - DNA, 76 bp, Artificial Sequence; identical to SEQ ID NO: 3249
  Description of Artificial Sequence: Synthetic walnut; 5' sequence + inner sequence + 3' sequence

SEQ ID NO: 31138 - DNA, 76 bp, Artificial Sequence; identical to SEQ ID NO: 3414
  Description of Artificial Sequence: Synthetic walnut; 5' sequence + inner sequence + 3' sequence

SEQ ID NO: 31139 - DNA, 76 bp, Artificial Sequence; identical to SEQ ID NO: 3740
  Description of Artificial Sequence: Synthetic walnut; 5' sequence + inner sequence + 3' sequence

SEQ ID NO: 31140 - DNA, 76 bp, Artificial Sequence; identical to SEQ ID NO: 3133
  Description of Artificial Sequence: Synthetic walnut; 5' sequence + inner sequence + 3' sequence

SEQ ID NO: 31141 - DNA, 76 bp, Artificial Sequence; identical to SEQ ID NO: 3277
  Description of Artificial Sequence: Synthetic walnut; 5' sequence + inner sequence + 3' sequence

SEQ ID NO: 31142 - DNA, 76 bp, Artificial Sequence; identical to SEQ ID NO: 3827
  Description of Artificial Sequence: Synthetic walnut; 5' sequence + inner sequence + 3' sequence

SEQ ID NO: 31143 - DNA, 76 bp, Artificial Sequence; identical to SEQ ID NO: 3275
  Description of Artificial Sequence: Synthetic walnut; 5' sequence + inner sequence + 3' sequence

SEQ ID NO: 31144 - DNA, 76 bp, Artificial Sequence; identical to SEQ ID NO: 3359
  Description of Artificial Sequence: Synthetic walnut; 5' sequence + inner sequence + 3' sequence

SEQ ID NO: 31145 - DNA, 76 bp, Artificial Sequence; identical to SEQ ID NO: 3317
  Description of Artificial Sequence: Synthetic walnut; 5' sequence + inner sequence + 3' sequence

SEQ ID NO: 31146 - DNA, 76 bp, Artificial Sequence; identical to SEQ ID NO: 3207
  Description of Artificial Sequence: Synthetic walnut; 5' sequence + inner sequence + 3' sequence

SEQ ID NO: 31147 - DNA, 76 bp, Artificial Sequence
  Description of Artificial Sequence: Synthetic walnut; 5' sequence + inner sequence + 3' sequence
tagggaagagaaggacatatgatgcgcaacggtacgcacaccttcacgtcacgttgactagtacatgaccacttga

SEQ ID NO: 31148 - DNA, 76 bp, Artificial Sequence; identical to SEQ ID NO: 3227
  Description of Artificial Sequence: Synthetic walnut; 5' sequence + inner sequence + 3' sequence

SEQ ID NO: 31149 - DNA, 76 bp, Artificial Sequence; identical to SEQ ID NO: 3370
  Description of Artificial Sequence: Synthetic walnut; 5' sequence + inner sequence + 3' sequence

SEQ ID NO: 31150 - DNA, 76 bp, Artificial Sequence; identical to SEQ ID NO: 3267
  Description of Artificial Sequence: Synthetic walnut; 5' sequence + inner sequence + 3' sequence

SEQ ID NO: 31151 - DNA, 76 bp, Artificial Sequence; identical to SEQ ID NO: 3240
  Description of Artificial Sequence: Synthetic walnut; 5' sequence + inner sequence + 3' sequence

SEQ ID NO: 31152 - DNA, 76 bp, Artificial Sequence; identical to SEQ ID NO: 15997
  Description of Artificial Sequence: Synthetic walnut; 5' sequence + inner sequence + 3' sequence

SEQ ID NO: 31153 - DNA, 76 bp, Artificial Sequence; identical to SEQ ID NO: 23518
  Description of Artificial Sequence: Synthetic walnut; 5' sequence + inner sequence + 3' sequence

SEQ ID NO: 31154 - DNA, 76 bp, Artificial Sequence; identical to SEQ ID NO: 3031
  Description of Artificial Sequence: Synthetic walnut; 5' sequence + inner sequence + 3' sequence

SEQ ID NO: 31155 - DNA, 76 bp, Artificial Sequence; identical to SEQ ID NO: 3367
  Description of Artificial Sequence: Synthetic walnut; 5' sequence + inner sequence + 3' sequence

SEQ ID NO: 31156 - DNA, 76 bp, Artificial Sequence; identical to SEQ ID NO: 3509
  Description of Artificial Sequence: Synthetic walnut; 5' sequence + inner sequence + 3' sequence

SEQ ID NO: 31157 - DNA, 76 bp, Artificial Sequence; identical to SEQ ID NO: 3746
  Description of Artificial Sequence: Synthetic walnut; 5' sequence + inner sequence + 3' sequence

SEQ ID NO: 31158 - DNA, 76 bp, Artificial Sequence
  Description of Artificial Sequence: Synthetic walnut; 5' sequence + inner sequence + 3' sequence
tagggaagagaaggacatatgatgcatcgcacggtgacggtacgtgatgcgcattgactagtacatgaccacttga

SEQ ID NO: 31159 - DNA, 76 bp, Artificial Sequence; identical to SEQ ID NO: 3076
  Description of Artificial Sequence: Synthetic walnut; 5' sequence + inner sequence + 3' sequence

SEQ ID NO: 31160 - DNA, 76 bp, Artificial Sequence; identical to SEQ ID NO: 3343
  Description of Artificial Sequence: Synthetic walnut; 5' sequence + inner sequence + 3' sequence

SEQ ID NO: 31161 - DNA, 76 bp, Artificial Sequence; identical to SEQ ID NO: 3262
  Description of Artificial Sequence: Synthetic walnut; 5' sequence + inner sequence + 3' sequence

SEQ ID NO: 31162 - DNA, 76 bp, Artificial Sequence; identical to SEQ ID NO: 3420
  Description of Artificial Sequence: Synthetic walnut; 5' sequence + inner sequence + 3' sequence

SEQ ID NO: 31163 - DNA, 76 bp, Artificial Sequence
  Description of Artificial Sequence: Synthetic walnut; 5' sequence + inner sequence + 3' sequence
tagggaagagaaggacatatgatcgcaccgtcacggcacaaggcacgtacgcattgactagtacatgaccacttga

SEQ ID NO: 31164 - DNA, 76 bp, Artificial Sequence; identical to SEQ ID NO: 3141
  Description of Artificial Sequence: Synthetic walnut; 5' sequence + inner sequence + 3' sequence

SEQ ID NO: 31165 - DNA, 76 bp, Artificial Sequence; identical to SEQ ID NO: 3242
  Description of Artificial Sequence: Synthetic walnut; 5' sequence + inner sequence + 3' sequence

SEQ ID NO: 31166 - DNA, 76 bp, Artificial Sequence; identical to SEQ ID NO: 3985
  Description of Artificial Sequence: Synthetic walnut; 5' sequence + inner sequence + 3' sequence

SEQ ID NO: 31167 - DNA, 76 bp, Artificial Sequence; identical to SEQ ID NO: 3308
  Description of Artificial Sequence: Synthetic walnut; 5' sequence + inner sequence + 3' sequence

SEQ ID NO: 31168 - DNA, 76 bp, Artificial Sequence; identical to SEQ ID NO: 3463
  Description of Artificial Sequence: Synthetic walnut; 5' sequence + inner sequence + 3' sequence

SEQ ID NO: 31169 - DNA, 71 bp, Artificial Sequence; identical to SEQ ID NO: 23136
  Description of Artificial Sequence: Synthetic walnut; 5' sequence + inner sequence + 3' sequence

SEQ ID NO: 31170 - DNA, 76 bp, Artificial Sequence; identical to SEQ ID NO: 3377
  Description of Artificial Sequence: Synthetic walnut; 5' sequence + inner sequence + 3' sequence

SEQ ID NO: 31171 - DNA, 76 bp, Artificial Sequence; identical to SEQ ID NO: 3043
  Description of Artificial Sequence: Synthetic walnut; 5' sequence + inner sequence + 3' sequence

SEQ ID NO: 31172 - DNA, 76 bp, Artificial Sequence; identical to SEQ ID NO: 3123
  Description of Artificial Sequence: Synthetic walnut; 5' sequence + inner sequence + 3' sequence

SEQ ID NO: 31173 - DNA, 76 bp, Artificial Sequence
  Description of Artificial Sequence: Synthetic walnut; 5' sequence + inner sequence + 3' sequence
tagggaagagaaggacatatgatcgcaccgacgcagtgacggcacgtgacgcattgactagtacatgaccacttga

SEQ ID NO: 31174 - DNA, 76 bp, Artificial Sequence; identical to SEQ ID NO: 3163
  Description of Artificial Sequence: Synthetic walnut; 5' sequence + inner sequence + 3' sequence

SEQ ID NO: 31175 - DNA, 76 bp, Artificial Sequence; identical to SEQ ID NO: 23473
  Description of Artificial Sequence: Synthetic walnut; 5' sequence + inner sequence + 3' sequence

SEQ ID NO: 31176 - DNA, 76 bp, Artificial Sequence; identical to SEQ ID NO: 7336
  Description of Artificial Sequence: Synthetic walnut; 5' sequence + inner sequence + 3' sequence

SEQ ID NO: 31177 - DNA, 76 bp, Artificial Sequence; identical to SEQ ID NO: 3077
  Description of Artificial Sequence: Synthetic walnut; 5' sequence + inner sequence + 3' sequence

SEQ ID NO: 31178 - DNA, 76 bp, Artificial Sequence; identical to SEQ ID NO: 3050
  Description of Artificial Sequence: Synthetic walnut; 5' sequence + inner sequence + 3' sequence

SEQ ID NO: 31179 - DNA, 76 bp, Artificial Sequence; identical to SEQ ID NO: 3100
  Description of Artificial Sequence: Synthetic walnut; 5' sequence + inner sequence + 3' sequence

SEQ ID NO: 31180 - DNA, 76 bp, Artificial Sequence; identical to SEQ ID NO: 3243
  Description of Artificial Sequence: Synthetic walnut; 5' sequence + inner sequence + 3' sequence

SEQ ID NO: 31181 - DNA, 76 bp, Artificial Sequence; identical to SEQ ID NO: 3321
  Description of Artificial Sequence: Synthetic walnut; 5' sequence + inner sequence + 3' sequence

SEQ ID NO: 31182 - DNA, 76 bp, Artificial Sequence; identical to SEQ ID NO: 3351
  Description of Artificial Sequence: Synthetic walnut; 5' sequence + inner sequence + 3' sequence

SEQ ID NO: 31183 - DNA, 75 bp, Artificial Sequence; identical to SEQ ID NO: 3251
  Description of Artificial Sequence: Synthetic walnut; 5' sequence + inner sequence + 3' sequence

SEQ ID NO: 31184 - DNA, 74 bp, Artificial Sequence; identical to SEQ ID NO: 3423
  Description of Artificial Sequence: Synthetic walnut; 5' sequence + inner sequence + 3' sequence

SEQ ID NO: 31185 - DNA, 76 bp, Artificial Sequence; identical to SEQ ID NO: 3217
  Description of Artificial Sequence: Synthetic walnut; 5' sequence + inner sequence + 3' sequence

SEQ ID NO: 31186 - DNA, 76 bp, Artificial Sequence; identical to SEQ ID NO: 7627
  Description of Artificial Sequence: Synthetic walnut; 5' sequence + inner sequence + 3' sequence

SEQ ID NO: 31187 - DNA, 76 bp, Artificial Sequence; identical to SEQ ID NO: 3477
  Description of Artificial Sequence: Synthetic walnut; 5' sequence + inner sequence + 3' sequence

SEQ ID NO: 31188 - DNA, 76 bp, Artificial Sequence; identical to SEQ ID NO: 3113
  Description of Artificial Sequence: Synthetic walnut; 5' sequence + inner sequence + 3' sequence

SEQ ID NO: 31189 - DNA, 76 bp, Artificial Sequence; identical to SEQ ID NO: 3172
  Description of Artificial Sequence: Synthetic walnut; 5' sequence + inner sequence + 3' sequence

SEQ ID NO: 31190 - DNA, 76 bp, Artificial Sequence; identical to SEQ ID NO: 3175
  Description of Artificial Sequence: Synthetic walnut; 5' sequence + inner sequence + 3' sequence

SEQ ID NO: 31191 - DNA, 76 bp, Artificial Sequence; identical to SEQ ID NO: 23372
  Description of Artificial Sequence: Synthetic walnut; 5' sequence + inner sequence + 3' sequence

SEQ ID NO: 31192 - DNA, 76 bp, Artificial Sequence; identical to SEQ ID NO: 3286
  Description of Artificial Sequence: Synthetic walnut; 5' sequence + inner sequence + 3' sequence

SEQ ID NO: 31193 - DNA, 76 bp, Artificial Sequence; identical to SEQ ID NO: 3110
  Description of Artificial Sequence: Synthetic walnut; 5' sequence + inner sequence + 3' sequence

SEQ ID NO: 31194 - DNA, 77 bp, Artificial Sequence; identical to SEQ ID NO: 3489
  Description of Artificial Sequence: Synthetic walnut; 5' sequence + inner sequence + 3' sequence

SEQ ID NO: 31195 - DNA, 76 bp, Artificial Sequence
  Description of Artificial Sequence: Synthetic walnut; 5' sequence + inner sequence + 3' sequence
tagggaagagaaggacatatgatgcgtgcaacggtacgatgacgtgacgcacattgactagtacatgaccacttga

SEQ ID NO: 31196 - DNA, 76 bp, Artificial Sequence; identical to SEQ ID NO: 15803
  Description of Artificial Sequence: Synthetic walnut; 5' sequence + inner sequence + 3' sequence

SEQ ID NO: 31197 - DNA, 76 bp, Artificial Sequence; identical to SEQ ID NO: 3051
  Description of Artificial Sequence: Synthetic walnut; 5' sequence + inner sequence + 3' sequence

SEQ ID NO: 31198 - DNA, 76 bp, Artificial Sequence; identical to SEQ ID NO: 3750
  Description of Artificial Sequence: Synthetic walnut; 5' sequence + inner sequence + 3' sequence

SEQ ID NO: 31199 - DNA, 76 bp, Artificial Sequence
  Description of Artificial Sequence: Synthetic walnut; 5' sequence + inner sequence + 3' sequence
tagggaagagaaggacatatgatcgacgtgatgcggtacgtacttgcgacacgttgactagtacatgaccacttga

SEQ ID NO: 31200 - DNA, 76 bp, Artificial Sequence; identical to SEQ ID NO: 19688
  Description of Artificial Sequence: Synthetic walnut; 5' sequence + inner sequence + 3' sequence

SEQ ID NO: 31201 - DNA, 76 bp, Artificial Sequence; identical to SEQ ID NO: 15939
  Description of Artificial Sequence: Synthetic walnut; 5' sequence + inner sequence + 3' sequence

SEQ ID NO: 31202 - DNA, 76 bp, Artificial Sequence; identical to SEQ ID NO: 3548
  Description of Artificial Sequence: Synthetic walnut; 5' sequence + inner sequence + 3' sequence

SEQ ID NO: 31203 - DNA, 76 bp, Artificial Sequence; identical to SEQ ID NO: 19399
  Description of Artificial Sequence: Synthetic walnut; 5' sequence + inner sequence + 3' sequence

SEQ ID NO: 31204 - DNA, 76 bp, Artificial Sequence; identical to SEQ ID NO: 3349
  Description of Artificial Sequence: Synthetic walnut; 5' sequence + inner sequence + 3' sequence

SEQ ID NO: 31205 - DNA, 74 bp, Artificial Sequence; identical to SEQ ID NO: 7786
  Description of Artificial Sequence: Synthetic walnut; 5' sequence + inner sequence + 3' sequence

SEQ ID NO: 31206 - DNA, 76 bp, Artificial Sequence; identical to SEQ ID NO: 7659
  Description of Artificial Sequence: Synthetic walnut; 5' sequence + inner sequence + 3' sequence

SEQ ID NO: 31207 - DNA, 76 bp, Artificial Sequence; identical to SEQ ID NO: 3247
  Description of Artificial Sequence: Synthetic walnut; 5' sequence + inner sequence + 3' sequence

SEQ ID NO: 31208 - DNA, 76 bp, Artificial Sequence
  Description of Artificial Sequence: Synthetic walnut; 5' sequence + inner sequence + 3' sequence
tagggaagagaaggacatatgatcatgcatcgcgtaacacgtcctgcgtcacgttgactagtacatgaccacttga

SEQ ID NO: 31209 - DNA, 76 bp, Artificial Sequence; identical to SEQ ID NO: 11950
  Description of Artificial Sequence: Synthetic walnut; 5' sequence + inner sequence + 3' sequence

SEQ ID NO: 31210 - DNA, 76 bp, Artificial Sequence; identical to SEQ ID NO: 3149
  Description of Artificial Sequence: Synthetic walnut; 5' sequence + inner sequence + 3' sequence

SEQ ID NO: 31211 - DNA, 76 bp, Artificial Sequence; identical to SEQ ID NO: 3291
  Description of Artificial Sequence: Synthetic walnut; 5' sequence + inner sequence + 3' sequence

SEQ ID NO: 31212 - DNA, 76 bp, Artificial Sequence; identical to SEQ ID NO: 23869
  Description of Artificial Sequence: Synthetic walnut; 5' sequence + inner sequence + 3' sequence

SEQ ID NO: 31213 - DNA, 76 bp, Artificial Sequence; identical to SEQ ID NO: 3223
  Description of Artificial Sequence: Synthetic walnut; 5' sequence + inner sequence + 3' sequence

SEQ ID NO: 31214 - DNA, 76 bp, Artificial Sequence; identical to SEQ ID NO: 3118
  Description of Artificial Sequence: Synthetic walnut; 5' sequence + inner sequence + 3' sequence

SEQ ID NO: 31215 - DNA, 76 bp, Artificial Sequence; identical to SEQ ID NO: 3091
  Description of Artificial Sequence: Synthetic walnut; 5' sequence + inner sequence + 3' sequence

SEQ ID NO: 31216 - DNA, 76 bp, Artificial Sequence; identical to SEQ ID NO: 3248
  Description of Artificial Sequence: Synthetic walnut; 5' sequence + inner sequence + 3' sequence

SEQ ID NO: 31217 - DNA, 76 bp, Artificial Sequence; identical to SEQ ID NO: 3271
  Description of Artificial Sequence: Synthetic walnut; 5' sequence + inner sequence + 3' sequence

SEQ ID NO: 31218 - DNA, 76 bp, Artificial Sequence; identical to SEQ ID NO: 3407
  Description of Artificial Sequence: Synthetic walnut; 5' sequence + inner sequence + 3' sequence

SEQ ID NO: 31219 - DNA, 76 bp, Artificial Sequence; identical to SEQ ID NO: 19906
  Description of Artificial Sequence: Synthetic walnut; 5' sequence + inner sequence + 3' sequence

SEQ ID NO: 31220 - DNA, 76 bp, Artificial Sequence; identical to SEQ ID NO: 3498
  Description of Artificial Sequence: Synthetic walnut; 5' sequence + inner sequence + 3' sequence

SEQ ID NO: 31221 - DNA, 76 bp, Artificial Sequence
  Description of Artificial Sequence: Synthetic walnut; 5' sequence + inner sequence + 3' sequence
tagggaagagaaggacatatgatcgatacgcagcacgacgcgatgtgtacgcattgactagtacatgaccacttga

SEQ ID NO: 31222 - DNA, 76 bp, Artificial Sequence; identical to SEQ ID NO: 3340
  Description of Artificial Sequence: Synthetic walnut; 5' sequence + inner sequence + 3' sequence

SEQ ID NO: 31223 - DNA, 76 bp, Artificial Sequence; identical to SEQ ID NO: 3313
  Description of Artificial Sequence: Synthetic walnut; 5' sequence + inner sequence + 3' sequence

SEQ ID NO: 31224 - DNA, 76 bp, Artificial Sequence; identical to SEQ ID NO: 3576
  Description of Artificial Sequence: Synthetic walnut; 5' sequence + inner sequence + 3' sequence

SEQ ID NO: 31225 - DNA, 76 bp, Artificial Sequence; identical to SEQ ID NO: 3406
  Description of Artificial Sequence: Synthetic walnut; 5' sequence + inner sequence + 3' sequence

SEQ ID NO: 31226 - DNA, 76 bp, Artificial Sequence; identical to SEQ ID NO: 3454
  Description of Artificial Sequence: Synthetic walnut; 5' sequence + inner sequence + 3' sequence

SEQ ID NO: 31227 - DNA, 76 bp, Artificial Sequence; identical to SEQ ID NO: 3491
  Description of Artificial Sequence: Synthetic walnut; 5' sequence + inner sequence + 3' sequence

SEQ ID NO: 31228 - DNA, 76 bp, Artificial Sequence; identical to SEQ ID NO: 3457
  Description of Artificial Sequence: Synthetic walnut; 5' sequence + inner sequence + 3' sequence

SEQ ID NO: 31229 - DNA, 76 bp, Artificial Sequence; identical to SEQ ID NO: 3104
  Description of Artificial Sequence: Synthetic walnut; 5' sequence + inner sequence + 3' sequence

SEQ ID NO: 31230 - DNA, 76 bp, Artificial Sequence; identical to SEQ ID NO: 15996
  Description of Artificial Sequence: Synthetic walnut; 5' sequence + inner sequence + 3' sequence

SEQ ID NO: 31231 - DNA, 76 bp, Artificial Sequence; identical to SEQ ID NO: 23533
  Description of Artificial Sequence: Synthetic walnut; 5' sequence + inner sequence + 3' sequence

SEQ ID NO: 31232 - DNA, 76 bp, Artificial Sequence; identical to SEQ ID NO: 3314
  Description of Artificial Sequence: Synthetic walnut; 5' sequence + inner sequence + 3' sequence

SEQ ID NO: 31233 - DNA, 76 bp, Artificial Sequence
  Description of Artificial Sequence: Synthetic walnut; 5' sequence + inner sequence + 3' sequence
tagggaagagaaggacatatgatccgtacgacacgagcacgatgcgttacgcgttgactagtacatgaccacttga

SEQ ID NO: 31234 - DNA, 76 bp, Artificial Sequence; identical to SEQ ID NO: 3219
  Description of Artificial Sequence: Synthetic walnut; 5' sequence + inner sequence + 3' sequence

SEQ ID NO: 31235 - DNA, 76 bp, Artificial Sequence; identical to SEQ ID NO: 3283
  Description of Artificial Sequence: Synthetic walnut; 5' sequence + inner sequence + 3' sequence

SEQ ID NO: 31236 - DNA, 76 bp, Artificial Sequence; identical to SEQ ID NO: 3611
  Description of Artificial Sequence: Synthetic walnut; 5' sequence + inner sequence + 3' sequence

SEQ ID NO: 31237 - DNA, 75 bp, Artificial Sequence
  Description of Artificial Sequence: Synthetic walnut; 5' sequence + inner sequence + 3' sequence
tagggaagagaaggacatatgatcacgtgcatggacgcgtcgtaccgtggcattgactagtacatgaccacttga

SEQ ID NO: 31238 - DNA, 76 bp, Artificial Sequence; identical to SEQ ID NO: 3016
  Description of Artificial Sequence: Synthetic walnut; 5' sequence + inner sequence + 3' sequence

SEQ ID NO: 31239 - DNA, 76 bp, Artificial Sequence; identical to SEQ ID NO: 3352
  Description of Artificial Sequence: Synthetic walnut; 5' sequence + inner sequence + 3' sequence

SEQ ID NO: 31240 - DNA, 76 bp, Artificial Sequence; identical to SEQ ID NO: 3379
  Description of Artificial Sequence: Synthetic walnut; 5' sequence + inner sequence + 3' sequence

SEQ ID NO: 31241 - DNA, 76 bp, Artificial Sequence; identical to SEQ ID NO: 23307
  Description of Artificial Sequence: Synthetic walnut; 5' sequence + inner sequence + 3' sequence

SEQ ID NO: 31242 - DNA, 76 bp, Artificial Sequence; identical to SEQ ID NO: 3886
  Description of Artificial Sequence: Synthetic walnut; 5' sequence + inner sequence + 3' sequence

SEQ ID NO: 31243 - DNA, 76 bp, Artificial Sequence
  Description of Artificial Sequence: Synthetic walnut; 5' sequence + inner sequence + 3' sequence
tagggaagagaaggacatatgatcatgcacaggcagcgtgacgttacgccgtgttgactagtacatgaccacttga

SEQ ID NO: 31244 - DNA, 76 bp, Artificial Sequence
  Description of Artificial Sequence: Synthetic walnut; 5' sequence + inner sequence + 3' sequence
tagggaagagaaggacatatgatcgtgacgcaaggcaaggacctcactgcgcgttgactagtacatgaccacttga

SEQ ID NO: 31245 - DNA, 76 bp, Artificial Sequence; identical to SEQ ID NO: 3332
  Description of Artificial Sequence: Synthetic walnut; 5' sequence + inner sequence + 3' sequence

SEQ ID NO: 31246 - DNA, 76 bp, Artificial Sequence; identical to SEQ ID NO: 11807
  Description of Artificial Sequence: Synthetic walnut; 5' sequence + inner sequence + 3' sequence

SEQ ID NO: 31247 - DNA, 76 bp, Artificial Sequence; identical to SEQ ID NO: 3049
  Description of Artificial Sequence: Synthetic walnut; 5' sequence + inner sequence + 3' sequence

SEQ ID NO: 31248 - DNA, 76 bp, Artificial Sequence; identical to SEQ ID NO: 3488
  Description of Artificial Sequence: Synthetic walnut; 5' sequence + inner sequence + 3' sequence

SEQ ID NO: 31249 - DNA, 76 bp, Artificial Sequence; identical to SEQ ID NO: 3167
  Description of Artificial Sequence: Synthetic walnut; 5' sequence + inner sequence + 3' sequence

SEQ ID NO: 31250 - DNA, 76 bp, Artificial Sequence; identical to SEQ ID NO: 3156
  Description of Artificial Sequence: Synthetic walnut; 5' sequence + inner sequence + 3' sequence

SEQ ID NO: 31251 - DNA, 77 bp, Artificial Sequence; identical to SEQ ID NO: 3845
  Description of Artificial Sequence: Synthetic walnut; 5' sequence + inner sequence + 3' sequence

SEQ ID NO: 31252 - DNA, 76 bp, Artificial Sequence
  Description of Artificial Sequence: Synthetic walnut; 5' sequence + inner sequence + 3' sequence
tagggaagagaaggacatatgatgcatgtgacacgcgtcgtcctgcctgcacgttgactagtacatgaccacttga

SEQ ID NO: 31253 - DNA, 76 bp, Artificial Sequence; identical to SEQ ID NO: 3466
  Description of Artificial Sequence: Synthetic walnut; 5' sequence + inner sequence + 3' sequence

SEQ ID NO: 31254 - DNA, 76 bp, Artificial Sequence; identical to SEQ ID NO: 15931
  Description of Artificial Sequence: Synthetic walnut; 5' sequence + inner sequence + 3' sequence

SEQ ID NO: 31255 - DNA, 76 bp, Artificial Sequence; identical to SEQ ID NO: 23733
  Description of Artificial Sequence: Synthetic walnut; 5' sequence + inner sequence + 3' sequence

SEQ ID NO: 31256 - DNA, 76 bp, Artificial Sequence; identical to SEQ ID NO: 3389
  Description of Artificial Sequence: Synthetic walnut; 5' sequence + inner sequence + 3' sequence

SEQ ID NO: 31257 - DNA, 76 bp, Artificial Sequence
  Description of Artificial Sequence: Synthetic walnut; 5' sequence + inner sequence + 3' sequence
tagggaagagaaggacatatgatgtgcgaccgaccctatcaggtggacgtgtattgactagtacatgaccacttga

SEQ ID NO: 31258 - DNA, 76 bp, Artificial Sequence; identical to SEQ ID NO: 3449
  Description of Artificial Sequence: Synthetic walnut; 5' sequence + inner sequence + 3' sequence

SEQ ID NO: 31259 - DNA, 76 bp, Artificial Sequence; identical to SEQ ID NO: 3303
  Description of Artificial Sequence: Synthetic walnut; 5' sequence + inner sequence + 3' sequence

SEQ ID NO: 31260 - DNA, 76 bp, Artificial Sequence; identical to SEQ ID NO: 3125
  Description of Artificial Sequence: Synthetic walnut; 5' sequence + inner sequence + 3' sequence

SEQ ID NO: 31261 - DNA, 76 bp, Artificial Sequence; identical to SEQ ID NO: 3289
  Description of Artificial Sequence: Synthetic walnut; 5' sequence + inner sequence + 3' sequence

SEQ ID NO: 31262 - DNA, 76 bp, Artificial Sequence; identical to SEQ ID NO: 7234
  Description of Artificial Sequence: Synthetic walnut; 5' sequence + inner sequence + 3' sequence

SEQ ID NO: 31263 - DNA, 76 bp, Artificial Sequence; identical to SEQ ID NO: 3098
  Description of Artificial Sequence: Synthetic walnut; 5' sequence + inner sequence + 3' sequence

SEQ ID NO: 31264 - DNA, 75 bp, Artificial Sequence; identical to SEQ ID NO: 3453
  Description of Artificial Sequence: Synthetic walnut; 5' sequence + inner sequence + 3' sequence

SEQ ID NO: 31265 - DNA, 76 bp, Artificial Sequence; identical to SEQ ID NO: 3561
  Description of Artificial Sequence: Synthetic walnut; 5' sequence + inner sequence + 3' sequence

SEQ ID NO: 31266 - DNA, 76 bp, Artificial Sequence; identical to SEQ ID NO: 3115
  Description of Artificial Sequence: Synthetic walnut; 5' sequence + inner sequence + 3' sequence

SEQ ID NO: 31267 - DNA, 76 bp, Artificial Sequence; identical to SEQ ID NO: 3443
  Description of Artificial Sequence: Synthetic walnut; 5' sequence + inner sequence + 3' sequence

SEQ ID NO: 31268 - DNA, 76 bp, Artificial Sequence
  Description of Artificial Sequence: Synthetic walnut; 5' sequence + inner sequence + 3' sequence
tagggaagagaaggacatatgatggcctgtcgtccctatcaggtggttgtggattgactagtacatgaccacttga

SEQ ID NO: 31269 - DNA, 76 bp, Artificial Sequence; identical to SEQ ID NO: 7429
  Description of Artificial Sequence: Synthetic walnut; 5' sequence + inner sequence + 3' sequence

SEQ ID NO: 31270 - DNA, 77 bp, Artificial Sequence; identical to SEQ ID NO: 3258
  Description of Artificial Sequence: Synthetic walnut; 5' sequence + inner sequence + 3' sequence

SEQ ID NO: 31271 - DNA, 76 bp, Artificial Sequence; identical to SEQ ID NO: 7802
  Description of Artificial Sequence: Synthetic walnut; 5' sequence + inner sequence + 3' sequence

SEQ ID NO: 31272 - DNA, 76 bp, Artificial Sequence
  Description of Artificial Sequence: Synthetic walnut; 5' sequence + inner sequence + 3' sequence
tagggaagagaaggacatatgatggccgaactggatgggggcattactgcggcttgactagtacatgaccacttga

SEQ ID NO: 31273 - DNA, 76 bp, Artificial Sequence; identical to SEQ ID NO: 3142
  Description of Artificial Sequence: Synthetic walnut; 5' sequence + inner sequence + 3' sequence

SEQ ID NO: 31274 - DNA, 76 bp, Artificial Sequence; identical to SEQ ID NO: 3452
  Description of Artificial Sequence: Synthetic walnut; 5' sequence + inner sequence + 3' sequence

SEQ ID NO: 31275 - DNA, 76 bp, Artificial Sequence; identical to SEQ ID NO: 3238
  Description of Artificial Sequence: Synthetic walnut; 5' sequence + inner sequence + 3' sequence

SEQ ID NO: 31276 - DNA, 76 bp, Artificial Sequence; identical to SEQ ID NO: 3595
  Description of Artificial Sequence: Synthetic walnut; 5' sequence + inner sequence + 3' sequence

SEQ ID NO: 31277 - DNA, 76 bp, Artificial Sequence; identical to SEQ ID NO: 3187
  Description of Artificial Sequence: Synthetic walnut; 5' sequence + inner sequence + 3' sequence

SEQ ID NO: 31278 - DNA, 76 bp, Artificial Sequence
  Description of Artificial Sequence: Synthetic walnut; 5' sequence + inner sequence + 3' sequence
tagggaagagaaggacatatgatgcacgatgcaacgtgtgtcctcgcgtcacgttgactagtacatgaccacttga

SEQ ID NO: 31279 - DNA, 76 bp, Artificial Sequence; identical to SEQ ID NO: 3884
  Description of Artificial Sequence: Synthetic walnut; 5' sequence + inner sequence + 3' sequence

SEQ ID NO: 31280 - DNA, 76 bp, Artificial Sequence; identical to SEQ ID NO: 3631
  Description of Artificial Sequence: Synthetic walnut; 5' sequence + inner sequence + 3' sequence

SEQ ID NO: 31281 - DNA, 76 bp, Artificial Sequence; identical to SEQ ID NO: 23324
  Description of Artificial Sequence: Synthetic walnut; 5' sequence + inner sequence + 3' sequence

SEQ ID NO: 31282 - DNA, 76 bp, Artificial Sequence; identical to SEQ ID NO: 3715
  Description of Artificial Sequence: Synthetic walnut; 5' sequence + inner sequence + 3' sequence

SEQ ID NO: 31283 - DNA, 76 bp, Artificial Sequence; identical to SEQ ID NO: 3853
  Description of Artificial Sequence: Synthetic walnut; 5' sequence + inner sequence + 3' sequence

SEQ ID NO: 31284 - DNA, 76 bp, Artificial Sequence; identical to SEQ ID NO: 3129
  Description of Artificial Sequence: Synthetic walnut; 5' sequence + inner sequence + 3' sequence

SEQ ID NO: 31285 - DNA, 76 bp, Artificial Sequence; identical to SEQ ID NO: 3086
  Description of Artificial Sequence: Synthetic walnut; 5' sequence + inner sequence + 3' sequence

SEQ ID NO: 31286 - DNA, 76 bp, Artificial Sequence; identical to SEQ ID NO: 23507
  Description of Artificial Sequence: Synthetic walnut; 5' sequence + inner sequence + 3' sequence

SEQ ID NO: 31287 - DNA, 76 bp, Artificial Sequence; identical to SEQ ID NO: 3634
  Description of Artificial Sequence: Synthetic walnut; 5' sequence + inner sequence + 3' sequence

SEQ ID NO: 31288 - DNA, 76 bp, Artificial Sequence; identical to SEQ ID NO: 3320
  Description of Artificial Sequence: Synthetic walnut; 5' sequence + inner sequence + 3' sequence

SEQ ID NO: 31289 - DNA, 76 bp, Artificial Sequence; identical to SEQ ID NO: 3464
  Description of Artificial Sequence: Synthetic walnut; 5' sequence + inner sequence + 3' sequence

SEQ ID NO: 31290 - DNA, 75 bp, Artificial Sequence; identical to SEQ ID NO: 3648
  Description of Artificial Sequence: Synthetic walnut; 5' sequence + inner sequence + 3' sequence

SEQ ID NO: 31291 - DNA, 76 bp, Artificial Sequence; identical to SEQ ID NO: 23133
  Description of Artificial Sequence: Synthetic walnut; 5' sequence + inner sequence + 3' sequence

SEQ ID NO: 31292 - DNA, 76 bp, Artificial Sequence; identical to SEQ ID NO: 3326
  Description of Artificial Sequence: Synthetic walnut; 5' sequence + inner sequence + 3' sequence

SEQ ID NO: 31293 - DNA, 76 bp, Artificial Sequence; identical to SEQ ID NO: 3057
  Description of Artificial Sequence: Synthetic walnut; 5' sequence + inner sequence + 3' sequence

SEQ ID NO: 31294 - DNA, 76 bp, Artificial Sequence; identical to SEQ ID NO: 15985
  Description of Artificial Sequence: Synthetic walnut; 5' sequence + inner sequence + 3' sequence

SEQ ID NO: 31295 - DNA, 76 bp, Artificial Sequence
  Description of Artificial Sequence: Synthetic walnut; 5' sequence + inner sequence + 3' sequence
tagggaagagaaggacatatgatgcccgaacgcgcctacaagtgttgcatggattgactagtacatgaccacttga

SEQ ID NO: 31296 - DNA, 76 bp, Artificial Sequence; identical to SEQ ID NO: 3312
  Description of Artificial Sequence: Synthetic walnut; 5' sequence + inner sequence + 3' sequence

SEQ ID NO: 31297 - DNA, 76 bp, Artificial Sequence; identical to SEQ ID NO: 7940
  Description of Artificial Sequence: Synthetic walnut; 5' sequence + inner sequence + 3' sequence

SEQ ID NO: 31298 - DNA, 76 bp, Artificial Sequence
  Description of Artificial Sequence: Synthetic walnut; 5' sequence + inner sequence + 3' sequence
tagggaagagaaggacatatgatggcatgcgatggatgtgggctagtatgggcttgactagtacatgaccacttga

SEQ ID NO: 31299 - DNA, 77 bp, Artificial Sequence; identical to SEQ ID NO: 3659
  Description of Artificial Sequence: Synthetic walnut; 5' sequence + inner sequence + 3' sequence

SEQ ID NO: 31300 - DNA, 76 bp, Artificial Sequence; identical to SEQ ID NO: 23540
  Description of Artificial Sequence: Synthetic walnut; 5' sequence + inner sequence + 3' sequence

SEQ ID NO: 31301 - DNA, 74 bp, Artificial Sequence; identical to SEQ ID NO: 15885
  Description of Artificial Sequence: Synthetic walnut; 5' sequence + inner sequence + 3' sequence

SEQ ID NO: 31302 - DNA, 76 bp, Artificial Sequence; identical to SEQ ID NO: 3687
  Description of Artificial Sequence: Synthetic walnut; 5' sequence + inner sequence + 3' sequence

SEQ ID NO: 31303 - DNA, 76 bp, Artificial Sequence; identical to SEQ ID NO: 3891
  Description of Artificial Sequence: Synthetic walnut; 5' sequence + inner sequence + 3' sequence

SEQ ID NO: 31304 - DNA, 76 bp, Artificial Sequence; identical to SEQ ID NO: 3260
  Description of Artificial Sequence: Synthetic walnut; 5' sequence + inner sequence + 3' sequence

SEQ ID NO: 31305 - DNA, 76 bp, Artificial Sequence; identical to SEQ ID NO: 3200
  Description of Artificial Sequence: Synthetic walnut; 5' sequence + inner sequence + 3' sequence

SEQ ID NO: 31306 - DNA, 76 bp, Artificial Sequence
  Description of Artificial Sequence: Synthetic walnut; 5' sequence + inner sequence + 3' sequence
tagggaagagaaggacatatgatcgcacgcagtgacgttacgcatcgtgcacattgactagtacatgaccacttga

SEQ ID NO: 31307 - DNA, 76 bp, Artificial Sequence
  Description of Artificial Sequence: Synthetic walnut; 5' sequence + inner sequence + 3' sequence
tagggaagagaaggacatatgatgcacgacgcacgtacgtacctcacgccacgttgactagtacatgaccacttga

SEQ ID NO: 31308 - DNA, 76 bp, Artificial Sequence; identical to SEQ ID NO: 3507
  Description of Artificial Sequence: Synthetic walnut; 5' sequence + inner sequence + 3' sequence

SEQ ID NO: 31309 - DNA, 76 bp, Artificial Sequence; identical to SEQ ID NO: 3102
  Description of Artificial Sequence: Synthetic walnut; 5' sequence + inner sequence + 3' sequence

SEQ ID NO: 31310 - DNA, 76 bp, Artificial Sequence
  Description of Artificial Sequence: Synthetic walnut; 5' sequence + inner sequence + 3' sequence
tagggaagagaaggacatatgatcatgcgcatgcgtacggatcgtgctgcacgttgactagtacatgaccacttga

SEQ ID NO: 31311 - DNA, 76 bp, Artificial Sequence; identical to SEQ ID NO: 3806
  Description of Artificial Sequence: Synthetic walnut; 5' sequence + inner sequence + 3' sequence

SEQ ID NO: 31312 - DNA, 76 bp, Artificial Sequence
  Description of Artificial Sequence: Synthetic walnut; 5' sequence + inner sequence + 3' sequence
tagggaagagaaggacatatgatgcgacacagacggtacgccttgcctgcacgttgactagtacatgaccacttga

SEQ ID NO: 31313 - DNA, 76 bp, Artificial Sequence; identical to SEQ ID NO: 3311
  Description of Artificial Sequence: Synthetic walnut; 5' sequence + inner sequence + 3' sequence

SEQ ID NO: 31314 - DNA, 76 bp, Artificial Sequence; identical to SEQ ID NO: 3164
  Description of Artificial Sequence: Synthetic walnut; 5' sequence + inner sequence + 3' sequence

SEQ ID NO: 31315 - DNA, 76 bp, Artificial Sequence
  Description of Artificial Sequence: Synthetic walnut; 5' sequence + inner sequence + 3' sequence
tagggaagagaaggacatatgatcgatgcgcaacatgcatccgacgcgacacgttgactagtacatgaccacttga

SEQ ID NO: 31316 - DNA, 76 bp, Artificial Sequence
  Description of Artificial Sequence: Synthetic walnut; 5' sequence + inner sequence + 3' sequence
tagggaagagaaggacatatgatcgtcacgcaggacggtagcgcgtcggcacgttgactagtacatgaccacttga

SEQ ID NO: 31317 - DNA, 76 bp, Artificial Sequence
  Description of Artificial Sequence: Synthetic walnut; 5' sequence + inner sequence + 3' sequence
tagggaagagaaggacatatgatgtcacgccgcatccctatcgaggggacatgttgactagtacatgaccacttga

SEQ ID NO: 31318 - DNA, 76 bp, Artificial Sequence; identical to SEQ ID NO: 3126
  Description of Artificial Sequence: Synthetic walnut; 5' sequence + inner sequence + 3' sequence

SEQ ID NO: 31319 - DNA, 76 bp, Artificial Sequence; identical to SEQ ID NO: 3777
  Description of Artificial Sequence: Synthetic walnut; 5' sequence + inner sequence + 3' sequence

SEQ ID NO: 31320 - DNA, 76 bp, Artificial Sequence
  Description of Artificial Sequence: Synthetic walnut; 5' sequence + inner sequence + 3' sequence
tagggaagagaaggacatatgatcgcaccgtgatgacgctacgttacggcatgttgactagtacatgaccacttga

SEQ ID NO: 31321 - DNA, 78 bp, Artificial Sequence
  Description of Artificial Sequence: Synthetic walnut; 5' sequence + inner sequence + 3' sequence
tagggaagagaaggacatatgatggcctgcgatggatggggacgggtatgctggcttgactagtacatgaccacttga

SEQ ID NO: 31322 - DNA, 76 bp, Artificial Sequence; identical to SEQ ID NO: 3512
  Description of Artificial Sequence: Synthetic walnut; 5' sequence + inner sequence + 3' sequence

SEQ ID NO: 31323 - DNA, 76 bp, Artificial Sequence; identical to SEQ ID NO: 3892
  Description of Artificial Sequence: Synthetic walnut; 5' sequence + inner sequence + 3' sequence

SEQ ID NO: 31324 - DNA, 76 bp, Artificial Sequence; identical to SEQ ID NO: 3560
  Description of Artificial Sequence: Synthetic walnut; 5' sequence + inner sequence + 3' sequence

SEQ ID NO: 31325 - DNA, 75 bp, Artificial Sequence; identical to SEQ ID NO: 19665
  Description of Artificial Sequence: Synthetic walnut; 5' sequence + inner sequence + 3' sequence

SEQ ID NO: 31326 - DNA, 76 bp, Artificial Sequence; identical to SEQ ID NO: 3225
  Description of Artificial Sequence: Synthetic walnut; 5' sequence + inner sequence + 3' sequence

SEQ ID NO: 31327 - DNA, 76 bp, Artificial Sequence; identical to SEQ ID NO: 3369
  Description of Artificial Sequence: Synthetic walnut; 5' sequence + inner sequence + 3' sequence

SEQ ID NO: 31328 - DNA, 76 bp, Artificial Sequence
  Description of Artificial Sequence: Synthetic walnut; 5' sequence + inner sequence + 3' sequence
tagggaagagaaggacatatgatggacgcatcgccccttcgagtggccaggtattgactagtacatgaccacttga

SEQ ID NO: 31329 - DNA, 76 bp, Artificial Sequence
  Description of Artificial Sequence: Synthetic walnut; 5' sequence + inner sequence + 3' sequence
tagggaagagaaggacatatgatcgacacgcacagtcagcacgtccgttcgcgttgactagtacatgaccacttga

SEQ ID NO: 31330 - DNA, 76 bp, Artificial Sequence; identical to SEQ ID NO: 3358
  Description of Artificial Sequence: Synthetic walnut; 5' sequence + inner sequence + 3' sequence

SEQ ID NO: 31331 - DNA, 76 bp, Artificial Sequence; identical to SEQ ID NO: 15869
  Description of Artificial Sequence: Synthetic walnut; 5' sequence + inner sequence + 3' sequence

SEQ ID NO: 31332 - DNA, 76 bp, Artificial Sequence; identical to SEQ ID NO: 7356
  Description of Artificial Sequence: Synthetic walnut; 5' sequence + inner sequence + 3' sequence

SEQ ID NO: 31333 - DNA, 76 bp, Artificial Sequence; identical to SEQ ID NO: 19970
  Description of Artificial Sequence: Synthetic walnut; 5' sequence + inner sequence + 3' sequence

SEQ ID NO: 31334 - DNA, 76 bp, Artificial Sequence; identical to SEQ ID NO: 23233
  Description of Artificial Sequence: Synthetic walnut; 5' sequence + inner sequence + 3' sequence

SEQ ID NO: 31335 - DNA, 76 bp, Artificial Sequence
  Description of Artificial Sequence: Synthetic walnut; 5' sequence + inner sequence + 3' sequence
tagggaagagaaggacatatgatcgcaccgtatgcgtcacgtaacacggcatgttgactagtacatgaccacttga

SEQ ID NO: 31336 - DNA, 76 bp, Artificial Sequence; identical to SEQ ID NO: 3661
  Description of Artificial Sequence: Synthetic walnut; 5' sequence + inner sequence + 3' sequence

SEQ ID NO: 31337 - DNA, 76 bp, Artificial Sequence; identical to SEQ ID NO: 23528
  Description of Artificial Sequence: Synthetic walnut; 5' sequence + inner sequence + 3' sequence

SEQ ID NO: 31338 - DNA, 72 bp, Artificial Sequence; identical to SEQ ID NO: 23678
  Description of Artificial Sequence: Synthetic walnut; 5' sequence + inner sequence + 3' sequence

SEQ ID NO: 31339 - DNA, 76 bp, Artificial Sequence; identical to SEQ ID NO: 3272
  Description of Artificial Sequence: Synthetic walnut; 5' sequence + inner sequence + 3' sequence

SEQ ID NO: 31340 - DNA, 76 bp, Artificial Sequence; identical to SEQ ID NO: 3837
  Description of Artificial Sequence: Synthetic walnut; 5' sequence + inner sequence + 3' sequence

SEQ ID NO: 31341 - DNA, 76 bp, Artificial Sequence; identical to SEQ ID NO: 3583
  Description of Artificial Sequence: Synthetic walnut; 5' sequence + inner sequence + 3' sequence

SEQ ID NO: 31342 - DNA, 76 bp, Artificial Sequence; identical to SEQ ID NO: 3647
  Description of Artificial Sequence: Synthetic walnut; 5' sequence + inner sequence + 3' sequence

SEQ ID NO: 31343 - DNA, 75 bp, Artificial Sequence; identical to SEQ ID NO: 3642
  Description of Artificial Sequence: Synthetic walnut; 5' sequence + inner sequence + 3' sequence

SEQ ID NO: 31344 - DNA, 76 bp, Artificial Sequence; identical to SEQ ID NO: 3203
  Description of Artificial Sequence: Synthetic walnut; 5' sequence + inner sequence + 3' sequence

SEQ ID NO: 31345 - DNA, 76 bp, Artificial Sequence; identical to SEQ ID NO: 3497
  Description of Artificial Sequence: Synthetic walnut; 5' sequence + inner sequence + 3' sequence

SEQ ID NO: 31346 - DNA, 76 bp, Artificial Sequence; identical to SEQ ID NO: 3909
  Description of Artificial Sequence: Synthetic walnut; 5' sequence + inner sequence + 3' sequence

SEQ ID NO: 31347 - DNA, 76 bp, Artificial Sequence; identical to SEQ ID NO: 7489
  Description of Artificial Sequence: Synthetic walnut; 5' sequence + inner sequence + 3' sequence

SEQ ID NO: 31348 - DNA, 76 bp, Artificial Sequence; identical to SEQ ID NO: 3499
  Description of Artificial Sequence: Synthetic walnut; 5' sequence + inner sequence + 3' sequence

SEQ ID NO: 31349 - DNA, 76 bp, Artificial Sequence; identical to SEQ ID NO: 3089
  Description of Artificial Sequence: Synthetic walnut; 5' sequence + inner sequence + 3' sequence

SEQ ID NO: 31350 - DNA, 76 bp, Artificial Sequence
  Description of Artificial Sequence: Synthetic walnut; 5' sequence + inner sequence + 3' sequence
tagggaagagaaggacatatgatgtcattccgcatcctacacgtgggaatggattgactagtacatgaccacttga

SEQ ID NO: 31351 - DNA, 76 bp, Artificial Sequence; identical to SEQ ID NO: 3754
  Description of Artificial Sequence: Synthetic walnut; 5' sequence + inner sequence + 3' sequence

SEQ ID NO: 31352 - DNA, 76 bp, Artificial Sequence; identical to SEQ ID NO: 7571
  Description of Artificial Sequence: Synthetic walnut; 5' sequence + inner sequence + 3' sequence

SEQ ID NO: 31353 - DNA, 76 bp, Artificial Sequence; identical to SEQ ID NO: 3158
  Description of Artificial Sequence: Synthetic walnut; 5' sequence + inner sequence + 3' sequence

SEQ ID NO: 31354 - DNA, 76 bp, Artificial Sequence; identical to SEQ ID NO: 3543
  Description of Artificial Sequence: Synthetic walnut; 5' sequence + inner sequence + 3' sequence

SEQ ID NO: 31355 - DNA, 76 bp, Artificial Sequence; identical to SEQ ID NO: 3327
  Description of Artificial Sequence: Synthetic walnut; 5' sequence + inner sequence + 3' sequence

SEQ ID NO: 31356 - DNA, 76 bp, Artificial Sequence; identical to SEQ ID NO: 19837
  Description of Artificial Sequence: Synthetic walnut; 5' sequence + inner sequence + 3' sequence

SEQ ID NO: 31357 - DNA, 76 bp, Artificial Sequence; identical to SEQ ID NO: 3362
  Description of Artificial Sequence: Synthetic walnut; 5' sequence + inner sequence + 3' sequence

SEQ ID NO: 31358 - DNA, 76 bp, Artificial Sequence; identical to SEQ ID NO: 19829
  Description of Artificial Sequence: Synthetic walnut; 5' sequence + inner sequence + 3' sequence

SEQ ID NO: 31359 - DNA, 76 bp, Artificial Sequence; identical to SEQ ID NO: 3331
  Description of Artificial Sequence: Synthetic walnut; 5' sequence + inner sequence + 3' sequence

SEQ ID NO: 31360 - DNA, 76 bp, Artificial Sequence; identical to SEQ ID NO: 3717
  Description of Artificial Sequence: Synthetic walnut; 5' sequence + inner sequence + 3' sequence

SEQ ID NO: 31361 - DNA, 76 bp, Artificial Sequence; identical to SEQ ID NO: 23522
  Description of Artificial Sequence: Synthetic walnut; 5' sequence + inner sequence + 3' sequence

SEQ ID NO: 31362 - DNA, 76 bp, Artificial Sequence; identical to SEQ ID NO: 19750
  Description of Artificial Sequence: Synthetic walnut; 5' sequence + inner sequence + 3' sequence

SEQ ID NO: 31363 - DNA, 76 bp, Artificial Sequence; identical to SEQ ID NO: 19675
  Description of Artificial Sequence: Synthetic walnut; 5' sequence + inner sequence + 3' sequence

SEQ ID NO: 31364 - DNA, 77 bp, Artificial Sequence; identical to SEQ ID NO: 3503
  Description of Artificial Sequence: Synthetic walnut; 5' sequence + inner sequence + 3' sequence

SEQ ID NO: 31365 - DNA, 76 bp, Artificial Sequence; identical to SEQ ID NO: 3212
  Description of Artificial Sequence: Synthetic walnut; 5' sequence + inner sequence + 3' sequence

SEQ ID NO: 31366 - DNA, 76 bp, Artificial Sequence; identical to SEQ ID NO: 23626
  Description of Artificial Sequence: Synthetic walnut; 5' sequence + inner sequence + 3' sequence

SEQ ID NO: 31367 - DNA, 76 bp, Artificial Sequence; identical to SEQ ID NO: 3064
  Description of Artificial Sequence: Synthetic walnut; 5' sequence + inner sequence + 3' sequence

SEQ ID NO: 31368 - DNA, 76 bp, Artificial Sequence
  Description of Artificial Sequence: Synthetic walnut; 5' sequence + inner sequence + 3' sequence
tagggaagagaaggacatatgatggcctgcgatggatgtgtgcgtgtcttagcttgactagtacatgaccacttga

SEQ ID NO: 31369 - DNA, 76 bp, Artificial Sequence; identical to SEQ ID NO: 23524
  Description of Artificial Sequence: Synthetic walnut; 5' sequence + inner sequence + 3' sequence

SEQ ID NO: 31370 - DNA, 76 bp, Artificial Sequence; identical to SEQ ID NO: 23769
  Description of Artificial Sequence: Synthetic walnut; 5' sequence + inner sequence + 3' sequence

SEQ ID NO: 31371 - DNA, 76 bp, Artificial Sequence; identical to SEQ ID NO: 3044
  Description of Artificial Sequence: Synthetic walnut; 5' sequence + inner sequence + 3' sequence

SEQ ID NO: 31372 - DNA, 75 bp, Artificial Sequence; identical to SEQ ID NO: 3334
  Description of Artificial Sequence: Synthetic walnut; 5' sequence + inner sequence + 3' sequence

SEQ ID NO: 31373 - DNA, 76 bp, Artificial Sequence; identical to SEQ ID NO: 3293
  Description of Artificial Sequence: Synthetic walnut; 5' sequence + inner sequence + 3' sequence

SEQ ID NO: 31374 - DNA, 76 bp, Artificial Sequence; identical to SEQ ID NO: 19603
  Description of Artificial Sequence: Synthetic walnut; 5' sequence + inner sequence + 3' sequence

SEQ ID NO: 31375 - DNA, 76 bp, Artificial Sequence
  Description of Artificial Sequence: Synthetic walnut; 5' sequence + inner sequence + 3' sequence
tagggaagagaaggacatatgatcgacacggacggtaggcatgctgcgtcacgttgactagtacatgaccacttga

SEQ ID NO: 31376 - DNA, 76 bp, Artificial Sequence; identical to SEQ ID NO: 3038
  Description of Artificial Sequence: Synthetic walnut; 5' sequence + inner sequence + 3' sequence

SEQ ID NO: 31377 - DNA, 76 bp, Artificial Sequence; identical to SEQ ID NO: 7707
  Description of Artificial Sequence: Synthetic walnut; 5' sequence + inner sequence + 3' sequence

SEQ ID NO: 31378 - DNA, 76 bp, Artificial Sequence; identical to SEQ ID NO: 3573
  Description of Artificial Sequence: Synthetic walnut; 5' sequence + inner sequence + 3' sequence

SEQ ID NO: 31379 - DNA, 76 bp, Artificial Sequence
  Description of Artificial Sequence: Synthetic walnut; 5' sequence + inner sequence + 3' sequence
tagggaagagaaggacatatgatacgtgagcacgacgtagcgcacactgcacgttgactagtacatgaccacttga

SEQ ID NO: 31380 - DNA, 76 bp, Artificial Sequence; identical to SEQ ID NO: 3447
  Description of Artificial Sequence: Synthetic walnut; 5' sequence + inner sequence + 3' sequence

SEQ ID NO: 31381 - DNA, 76 bp, Artificial Sequence
  Description of Artificial Sequence: Synthetic walnut; 5' sequence + inner sequence + 3' sequence
tagggaagagaaggacatatgatcgtaacgcagcgcgagtgacgtacgacacgttgactagtacatgaccacttga

SEQ ID NO: 31382 - DNA, 76 bp, Artificial Sequence
  Description of Artificial Sequence: Synthetic walnut; 5' sequence + inner sequence + 3' sequence
tagggaagagaaggacatatgatgcgtgacgcaacgcaggctgtccgtacgcattgactagtacatgaccacttga

SEQ ID NO: 31383 - DNA, 76 bp, Artificial Sequence; identical to SEQ ID NO: 19612
  Description of Artificial Sequence: Synthetic walnut; 5' sequence + inner sequence + 3' sequence

SEQ ID NO: 31384 - DNA, 76 bp, Artificial Sequence; identical to SEQ ID NO: 23923
  Description of Artificial Sequence: Synthetic walnut; 5' sequence + inner sequence + 3' sequence

SEQ ID NO: 31385 - DNA, 76 bp, Artificial Sequence; identical to SEQ ID NO: 3615
  Description of Artificial Sequence: Synthetic walnut; 5' sequence + inner sequence + 3' sequence

SEQ ID NO: 31386 - DNA, 76 bp, Artificial Sequence; identical to SEQ ID NO: 7748
  Description of Artificial Sequence: Synthetic walnut; 5' sequence + inner sequence + 3' sequence

SEQ ID NO: 31387 - DNA, 76 bp, Artificial Sequence; identical to SEQ ID NO: 7521
  Description of Artificial Sequence: Synthetic walnut; 5' sequence + inner sequence + 3' sequence

SEQ ID NO: 31388 - DNA, 76 bp, Artificial Sequence; identical to SEQ ID NO: 19692
  Description of Artificial Sequence: Synthetic walnut; 5' sequence + inner sequence + 3' sequence

SEQ ID NO: 31389 - DNA, 76 bp, Artificial Sequence
  Description of Artificial Sequence: Synthetic walnut; 5' sequence + inner sequence + 3' sequence
tagggaagagaaggacatatgatcacgtgcagcgtgtcgtgccacatgacgcattgactagtacatgaccacttga

SEQ ID NO: 31390 - DNA, 76 bp, Artificial Sequence
  Description of Artificial Sequence: Synthetic walnut; 5' sequence + inner sequence + 3' sequence
tagggaagagaaggacatatgatcgcaccgcaacgtgagggcatgcgcgtgtgttgactagtacatgaccacttga

SEQ ID NO: 31391 - DNA, 75 bp, Artificial Sequence; identical to SEQ ID NO: 19540
  Description of Artificial Sequence: Synthetic walnut; 5' sequence + inner sequence + 3' sequence

SEQ ID NO: 31392 - DNA, 76 bp, Artificial Sequence
  Description of Artificial Sequence: Synthetic walnut; 5' sequence + inner sequence + 3' sequence
tagggaagagaaggacatatgatggccgacgatggatgtgggttgtgctcgtcttgactagtacatgaccacttga

SEQ ID NO: 31393 - DNA, 76 bp, Artificial Sequence; identical to SEQ ID NO: 3394
  Description of Artificial Sequence: Synthetic walnut; 5' sequence + inner sequence + 3' sequence

SEQ ID NO: 31394 - DNA, 76 bp, Artificial Sequence; identical to SEQ ID NO: 23690
  Description of Artificial Sequence: Synthetic walnut; 5' sequence + inner sequence + 3' sequence

SEQ ID NO: 31395 - DNA, 76 bp, Artificial Sequence; identical to SEQ ID NO: 23613
  Description of Artificial Sequence: Synthetic walnut; 5' sequence + inner sequence + 3' sequence

SEQ ID NO: 31396 - DNA, 76 bp, Artificial Sequence; identical to SEQ ID NO: 3154
  Description of Artificial Sequence: Synthetic walnut; 5' sequence + inner sequence + 3' sequence

SEQ ID NO: 31397 - DNA, 76 bp, Artificial Sequence; identical to SEQ ID NO: 3324
  Description of Artificial Sequence: Synthetic walnut; 5' sequence + inner sequence + 3' sequence

SEQ ID NO: 31398 - DNA, 76 bp, Artificial Sequence; identical to SEQ ID NO: 3146
  Description of Artificial Sequence: Synthetic walnut; 5' sequence + inner sequence + 3' sequence

SEQ ID NO: 31399 - DNA, 74 bp, Artificial Sequence; identical to SEQ ID NO: 3148
  Description of Artificial Sequence: Synthetic walnut; 5' sequence + inner sequence + 3' sequence

SEQ ID NO: 31400 - DNA, 76 bp, Artificial Sequence
  Description of Artificial Sequence: Synthetic walnut; 5' sequence + inner sequence + 3' sequence
tagggaagagaaggacatatgatcgtgacgtgacgcatccctcgctgttcgcgttgactagtacatgaccacttga

SEQ ID NO: 31401 - DNA, 76 bp, Artificial Sequence; identical to SEQ ID NO: 7807
  Description of Artificial Sequence: Synthetic walnut; 5' sequence + inner sequence + 3' sequence

SEQ ID NO: 31402 - DNA, 76 bp, Artificial Sequence; identical to SEQ ID NO: 11953
  Description of Artificial Sequence: Synthetic walnut; 5' sequence + inner sequence + 3' sequence

SEQ ID NO: 31403 - DNA, 76 bp, Artificial Sequence; identical to SEQ ID NO: 3788
  Description of Artificial Sequence: Synthetic walnut; 5' sequence + inner sequence + 3' sequence

SEQ ID NO: 31404 - DNA, 76 bp, Artificial Sequence; identical to SEQ ID NO: 3728
  Description of Artificial Sequence: Synthetic walnut; 5' sequence + inner sequence + 3' sequence

SEQ ID NO: 31405 - DNA, 76 bp, Artificial Sequence; identical to SEQ ID NO: 3245
  Description of Artificial Sequence: Synthetic walnut; 5' sequence + inner sequence + 3' sequence

SEQ ID NO: 31406 - DNA, 76 bp, Artificial Sequence
  Description of Artificial Sequence: Synthetic walnut; 5' sequence + inner sequence + 3' sequence
tagggaagagaaggacatatgatgtccgaccgcacccttcgaggggacatggattgactagtacatgaccacttga

SEQ ID NO: 31407 - DNA, 76 bp, Artificial Sequence; identical to SEQ ID NO: 3176
  Description of Artificial Sequence: Synthetic walnut; 5' sequence + inner sequence + 3' sequence

SEQ ID NO: 31408 - DNA, 76 bp, Artificial Sequence; identical to SEQ ID NO: 3233
  Description of Artificial Sequence: Synthetic walnut; 5' sequence + inner sequence + 3' sequence

SEQ ID NO: 31409 - DNA, 76 bp, Artificial Sequence; identical to SEQ ID NO: 3058
  Description of Artificial Sequence: Synthetic walnut; 5' sequence + inner sequence + 3' sequence

SEQ ID NO: 31410 - DNA, 76 bp, Artificial Sequence; identical to SEQ ID NO: 23560
  Description of Artificial Sequence: Synthetic walnut; 5' sequence + inner sequence + 3' sequence

SEQ ID NO: 31411 - DNA, 76 bp, Artificial Sequence; identical to SEQ ID NO: 3066
  Description of Artificial Sequence: Synthetic walnut; 5' sequence + inner sequence + 3' sequence

SEQ ID NO: 31412 - DNA, 76 bp, Artificial Sequence
  Description of Artificial Sequence: Synthetic walnut; 5' sequence + inner sequence + 3' sequence
tagggaagagaaggacatatgatggacgcagggcaggacgacgtatcgccacgttgactagtacatgaccacttga

SEQ ID NO: 31413 - DNA, 76 bp, Artificial Sequence
  Description of Artificial Sequence: Synthetic walnut; 5' sequence + inner sequence + 3' sequence
tagggaagagaaggacatatgatggacgcatcgccccttcgcgtggacaggtattgactagtacatgaccacttga

SEQ ID NO: 31414 - DNA, 76 bp, Artificial Sequence; identical to SEQ ID NO: 3684
  Description of Artificial Sequence: Synthetic walnut; 5' sequence + inner sequence + 3' sequence

SEQ ID NO: 31415 - DNA, 76 bp, Artificial Sequence; identical to SEQ ID NO: 3171
  Description of Artificial Sequence: Synthetic walnut; 5' sequence + inner sequence + 3' sequence

SEQ ID NO: 31416 - DNA, 76 bp, Artificial Sequence
  Description of Artificial Sequence: Synthetic walnut; 5' sequence + inner sequence + 3' sequence
tagggaagagaaggacatatgatcacgtcacgcaacgacatgtacgctgcacgttgactagtacatgaccacttga

SEQ ID NO: 31417 - DNA, 76 bp, Artificial Sequence; identical to SEQ ID NO: 7419
  Description of Artificial Sequence: Synthetic walnut; 5' sequence + inner sequence + 3' sequence

SEQ ID NO: 31418 - DNA, 76 bp, Artificial Sequence; identical to SEQ ID NO: 23468
  Description of Artificial Sequence: Synthetic walnut; 5' sequence + inner sequence + 3' sequence

SEQ ID NO: 31419 - DNA, 76 bp, Artificial Sequence; identical to SEQ ID NO: 3683
  Description of Artificial Sequence: Synthetic walnut; 5' sequence + inner sequence + 3' sequence

SEQ ID NO: 31420 - DNA, 76 bp, Artificial Sequence; identical to SEQ ID NO: 3531
  Description of Artificial Sequence: Synthetic walnut; 5' sequence + inner sequence + 3' sequence

SEQ ID NO: 31421 - DNA, 76 bp, Artificial Sequence; identical to SEQ ID NO: 3455
  Description of Artificial Sequence: Synthetic walnut; 5' sequence + inner sequence + 3' sequence

SEQ ID NO: 31422 - DNA, 73 bp, Artificial Sequence; identical to SEQ ID NO: 27993
  Description of Artificial Sequence: Synthetic walnut; 5' sequence + inner sequence + 3' sequence

SEQ ID NO: 31423 - DNA, 76 bp, Artificial Sequence; identical to SEQ ID NO: 3577
  Description of Artificial Sequence: Synthetic walnut; 5' sequence + inner sequence + 3' sequence

SEQ ID NO: 31424 - DNA, 76 bp, Artificial Sequence; identical to SEQ ID NO: 3467
  Description of Artificial Sequence: Synthetic walnut; 5' sequence + inner sequence + 3' sequence

SEQ ID NO: 31425 - DNA, 76 bp, Artificial Sequence
  Description of Artificial Sequence: Synthetic walnut; 5' sequence + inner sequence + 3' sequence
tagggaagagaaggacatatgatgcgtgacgtgacggcagtgcgtgctacgtgttgactagtacatgaccacttga

SEQ ID NO: 31426 - DNA, 76 bp, Artificial Sequence
  Description of Artificial Sequence: Synthetic walnut; 5' sequence + inner sequence + 3' sequence
tagggaagagaaggacatatgatcgatgcgcaaccacgccacacgcatgcacattgactagtacatgaccacttga

SEQ ID NO: 31427 - DNA, 76 bp, Artificial Sequence
  Description of Artificial Sequence: Synthetic walnut; 5' sequence + inner sequence + 3' sequence
tagggaagagaaggacatatgatggccgagtcgtcacttcaattgggcgtggattgactagtacatgaccacttga

SEQ ID NO: 31428 - DNA, 76 bp, Artificial Sequence; identical to SEQ ID NO: 3493
  Description of Artificial Sequence: Synthetic walnut; 5' sequence + inner sequence + 3' sequence

SEQ ID NO: 31429 - DNA, 76 bp, Artificial Sequence; identical to SEQ ID NO: 23607
  Description of Artificial Sequence: Synthetic walnut; 5' sequence + inner sequence + 3' sequence

SEQ ID NO: 31430 - DNA, 76 bp, Artificial Sequence; identical to SEQ ID NO: 3462
  Description of Artificial Sequence: Synthetic walnut; 5' sequence + inner sequence + 3' sequence

SEQ ID NO: 31431 - DNA, 76 bp, Artificial Sequence; identical to SEQ ID NO: 3905
  Description of Artificial Sequence: Synthetic walnut; 5' sequence + inner sequence + 3' sequence

SEQ ID NO: 31432 - DNA, 76 bp, Artificial Sequence
  Description of Artificial Sequence: Synthetic walnut; 5' sequence + inner sequence + 3' sequence
tagggaagagaaggacatatgatcgatgcgcagtacgtcgatgtcacggcgtgttgactagtacatgaccacttga

SEQ ID NO: 31433 - DNA, 78 bp, Artificial Sequence
  Description of Artificial Sequence: Synthetic walnut; 5' sequence + inner sequence + 3' sequence
tagggaagagaaggacatatgatggcctgcgatggatgggggcgttgtgctcgtcttgactagtacatgaccacttga

SEQ ID NO: 31434 - DNA, 76 bp, Artificial Sequence; identical to SEQ ID NO: 3437
  Description of Artificial Sequence: Synthetic walnut; 5' sequence + inner sequence + 3' sequence

SEQ ID NO: 31435 - DNA, 76 bp, Artificial Sequence; identical to SEQ ID NO: 3889
  Description of Artificial Sequence: Synthetic walnut; 5' sequence + inner sequence + 3' sequence

SEQ ID NO: 31436 - DNA, 76 bp, Artificial Sequence
  Description of Artificial Sequence: Synthetic walnut; 5' sequence + inner sequence + 3' sequence
tagggaagagaaggacatatgattgcgtcacgccaggcatacgtcacgtcacgttgactagtacatgaccacttga

SEQ ID NO: 31437 - DNA, 76 bp, Artificial Sequence; identical to SEQ ID NO: 19799
  Description of Artificial Sequence: Synthetic walnut; 5' sequence + inner sequence + 3' sequence

SEQ ID NO: 31438 - DNA, 76 bp, Artificial Sequence; identical to SEQ ID NO: 3800
  Description of Artificial Sequence: Synthetic walnut; 5' sequence + inner sequence + 3' sequence

SEQ ID NO: 31439 - DNA, 76 bp, Artificial Sequence; identical to SEQ ID NO: 3598
  Description of Artificial Sequence: Synthetic walnut; 5' sequence + inner sequence + 3' sequence

SEQ ID NO: 31440 - DNA, 76 bp, Artificial Sequence; identical to SEQ ID NO: 23820
  Description of Artificial Sequence: Synthetic walnut; 5' sequence + inner sequence + 3' sequence

SEQ ID NO: 31441 - DNA, 76 bp, Artificial Sequence
  Description of Artificial Sequence: Synthetic walnut; 5' sequence + inner sequence + 3' sequence
tagggaagagaaggacatatgatgtcattcgatggatgtgggttgtgctcgtcttgactagtacatgaccacttga

SEQ ID NO: 31442 - DNA, 76 bp, Artificial Sequence; identical to SEQ ID NO: 3295
  Description of Artificial Sequence: Synthetic walnut; 5' sequence + inner sequence + 3' sequence

SEQ ID NO: 31443 - DNA, 76 bp, Artificial Sequence; identical to SEQ ID NO: 3244
  Description of Artificial Sequence: Synthetic walnut; 5' sequence + inner sequence + 3' sequence

SEQ ID NO: 31444 - DNA, 76 bp, Artificial Sequence; identical to SEQ ID NO: 3192
  Description of Artificial Sequence: Synthetic walnut; 5' sequence + inner sequence + 3' sequence

SEQ ID NO: 31445 - DNA, 76 bp, Artificial Sequence; identical to SEQ ID NO: 11910
  Description of Artificial Sequence: Synthetic walnut; 5' sequence + inner sequence + 3' sequence

SEQ ID NO: 31446 - DNA, 76 bp, Artificial Sequence
  Description of Artificial Sequence: Synthetic walnut; 5' sequence + inner sequence + 3' sequence
tagggaagagaaggacatatgatggacggatcgccccttcgagtggacaggtattgactagtacatgaccacttga

SEQ ID NO: 31447 - DNA, 76 bp, Artificial Sequence; identical to SEQ ID NO: 7469
  Description of Artificial Sequence: Synthetic walnut; 5' sequence + inner sequence + 3' sequence

SEQ ID NO: 31448 - DNA, 76 bp, Artificial Sequence; identical to SEQ ID NO: 7254
  Description of Artificial Sequence: Synthetic walnut; 5' sequence + inner sequence + 3' sequence

SEQ ID NO: 31449 - DNA, 76 bp, Artificial Sequence; identical to SEQ ID NO: 3292
  Description of Artificial Sequence: Synthetic walnut; 5' sequence + inner sequence + 3' sequence

SEQ ID NO: 31450 - DNA, 76 bp, Artificial Sequence; identical to SEQ ID NO: 3208
  Description of Artificial Sequence: Synthetic walnut; 5' sequence + inner sequence + 3' sequence

SEQ ID NO: 31451 - DNA, 76 bp, Artificial Sequence; identical to SEQ ID NO: 3060
  Description of Artificial Sequence: Synthetic walnut; 5' sequence + inner sequence + 3' sequence

SEQ ID NO: 31452 - DNA, 76 bp, Artificial Sequence
  Description of Artificial Sequence: Synthetic walnut; 5' sequence + inner sequence + 3' sequence
tagggaagagaaggacatatgatggccgagcttacctgtcaagtgcgagtgtattgactagtacatgaccacttga

SEQ ID NO: 31453 - DNA, 76 bp, Artificial Sequence; identical to SEQ ID NO: 3686
  Description of Artificial Sequence: Synthetic walnut; 5' sequence + inner sequence + 3' sequence

SEQ ID NO: 31454 - DNA, 76 bp, Artificial Sequence; identical to SEQ ID NO: 3698
  Description of Artificial Sequence: Synthetic walnut; 5' sequence + inner sequence + 3' sequence

SEQ ID NO: 31455 - DNA, 76 bp, Artificial Sequence; identical to SEQ ID NO: 23551
  Description of Artificial Sequence: Synthetic walnut; 5' sequence + inner sequence + 3' sequence

SEQ ID NO: 31456 - DNA, 75 bp, Artificial Sequence; identical to SEQ ID NO: 3549
  Description of Artificial Sequence: Synthetic walnut; 5' sequence + inner sequence + 3' sequence

SEQ ID NO: 31457 - DNA, 76 bp, Artificial Sequence; identical to SEQ ID NO: 7775
  Description of Artificial Sequence: Synthetic walnut; 5' sequence + inner sequence + 3' sequence

SEQ ID NO: 31458 - DNA, 76 bp, Artificial Sequence
  Description of Artificial Sequence: Synthetic walnut; 5' sequence + inner sequence + 3' sequence
tagggaagagaaggacatatgatggcctgcgctggatgtgtgcgtgtattagcttgactagtacatgaccacttga

SEQ ID NO: 31459 - DNA, 76 bp, Artificial Sequence; identical to SEQ ID NO: 23847
  Description of Artificial Sequence: Synthetic walnut; 5' sequence + inner sequence + 3' sequence

SEQ ID NO: 31460 - DNA, 76 bp, Artificial Sequence; identical to SEQ ID NO: 23976
  Description of Artificial Sequence: Synthetic walnut; 5' sequence + inner sequence + 3' sequence

SEQ ID NO: 31461 - DNA, 76 bp, Artificial Sequence; identical to SEQ ID NO: 7420
  Description of Artificial Sequence: Synthetic walnut; 5' sequence + inner sequence + 3' sequence

SEQ ID NO: 31462 - DNA, 76 bp, Artificial Sequence; identical to SEQ ID NO: 23761
  Description of Artificial Sequence: Synthetic walnut; 5' sequence + inner sequence + 3' sequence

SEQ ID NO: 31463 - DNA, 76 bp, Artificial Sequence; identical to SEQ ID NO: 3401
  Description of Artificial Sequence: Synthetic walnut; 5' sequence + inner sequence + 3' sequence

SEQ ID NO: 31464 - DNA, 76 bp, Artificial Sequence; identical to SEQ ID NO: 11782
  Description of Artificial Sequence: Synthetic walnut; 5' sequence + inner sequence + 3' sequence

SEQ ID NO: 31465 - DNA, 76 bp, Artificial Sequence; identical to SEQ ID NO: 7931
  Description of Artificial Sequence: Synthetic walnut; 5' sequence + inner sequence + 3' sequence

SEQ ID NO: 31466 - DNA, 76 bp, Artificial Sequence; identical to SEQ ID NO: 7981
  Description of Artificial Sequence: Synthetic walnut; 5' sequence + inner sequence + 3' sequence

SEQ ID NO: 31467 - DNA, 76 bp, Artificial Sequence; identical to SEQ ID NO: 23367
  Description of Artificial Sequence: Synthetic walnut; 5' sequence + inner sequence + 3' sequence

SEQ ID NO: 31468 - DNA, 76 bp, Artificial Sequence; identical to SEQ ID NO: 3419
  Description of Artificial Sequence: Synthetic walnut; 5' sequence + inner sequence + 3' sequence

SEQ ID NO: 31469 - DNA, 76 bp, Artificial Sequence
  Description of Artificial Sequence: Synthetic walnut; 5' sequence + inner sequence + 3' sequence
tagggaagagaaggacatatgatgcacgacagcacgacgtccatcgcggcacattgactagtacatgaccacttga

SEQ ID NO: 31470 - DNA, 76 bp, Artificial Sequence
  Description of Artificial Sequence: Synthetic walnut; 5' sequence + inner sequence + 3' sequence
tagggaagagaaggacatatgatcacgcacacacgtacccgacacgtcacgcgttgactagtacatgaccacttga

SEQ ID NO: 31471 - DNA, 76 bp, Artificial Sequence
  Description of Artificial Sequence: Synthetic walnut; 5' sequence + inner sequence + 3' sequence
tagggaagagaaggacatatgatgcgtgacgacgtgcatgacgtgccctgtgcttgactagtacatgaccacttga

SEQ ID NO: 31472 - DNA, 76 bp, Artificial Sequence
  Description of Artificial Sequence: Synthetic walnut; 5' sequence + inner sequence + 3' sequence
tagggaagagaaggacatatgatgtgcgatcgacctacaagtgccatgctagtttgactagtacatgaccacttga

SEQ ID NO: 31473 - DNA, 76 bp, Artificial Sequence
  Description of Artificial Sequence: Synthetic walnut; 5' sequence + inner sequence + 3' sequence
tagggaagagaaggacatatgatgacgcacaccgcatcacgtcacactgcgcattgactagtacatgaccacttga

SEQ ID NO: 31474 - DNA, 76 bp, Artificial Sequence; identical to SEQ ID NO: 19677
  Description of Artificial Sequence: Synthetic walnut; 5' sequence + inner sequence + 3' sequence

SEQ ID NO: 31475 - DNA, 76 bp, Artificial Sequence; identical to SEQ ID NO: 3968
  Description of Artificial Sequence: Synthetic walnut; 5' sequence + inner sequence + 3' sequence

SEQ ID NO: 31476 - DNA, 76 bp, Artificial Sequence; identical to SEQ ID NO: 15971
  Description of Artificial Sequence: Synthetic walnut; 5' sequence + inner sequence + 3' sequence

SEQ ID NO: 31477 - DNA, 76 bp, Artificial Sequence
  Description of Artificial Sequence: Synthetic walnut; 5' sequence + inner sequence + 3' sequence
tagggaagagaaggacatatgatcgtgacacacgtaacgcatggaccgtcgcgttgactagtacatgaccacttga

SEQ ID NO: 31478 - DNA, 76 bp, Artificial Sequence; identical to SEQ ID NO: 3067
  Description of Artificial Sequence: Synthetic walnut; 5' sequence + inner sequence + 3' sequence

SEQ ID NO: 31479 - DNA, 76 bp, Artificial Sequence; identical to SEQ ID NO: 7603
  Description of Artificial Sequence: Synthetic walnut; 5' sequence + inner sequence + 3' sequence

SEQ ID NO: 31480 - DNA, 76 bp, Artificial Sequence
  Description of Artificial Sequence: Synthetic walnut; 5' sequence + inner sequence + 3' sequence
tagggaagagaaggacatatgatcgcacggcacgacgacgctggtacgacacgttgactagtacatgaccacttga

SEQ ID NO: 31481 - DNA, 76 bp, Artificial Sequence; identical to SEQ ID NO: 3821
  Description of Artificial Sequence: Synthetic walnut; 5' sequence + inner sequence + 3' sequence

SEQ ID NO: 31482 - DNA, 76 bp, Artificial Sequence; identical to SEQ ID NO: 3866
  Description of Artificial Sequence: Synthetic walnut; 5' sequence + inner sequence + 3' sequence

SEQ ID NO: 31483 - DNA, 76 bp, Artificial Sequence; identical to SEQ ID NO: 23692
  Description of Artificial Sequence: Synthetic walnut; 5' sequence + inner sequence + 3' sequence

SEQ ID NO: 31484 - DNA, 76 bp, Artificial Sequence; identical to SEQ ID NO: 3397
  Description of Artificial Sequence: Synthetic walnut; 5' sequence + inner sequence + 3' sequence

SEQ ID NO: 31485 - DNA, 76 bp, Artificial Sequence
  Description of Artificial Sequence: Synthetic walnut; 5' sequence + inner sequence + 3' sequence
tagggaagagaaggacatatgatgtcattccgtatcctacacgtgggcacgtattgactagtacatgaccacttga

SEQ ID NO: 31486 - DNA, 76 bp, Artificial Sequence; identical to SEQ ID NO: 3127
  Description of Artificial Sequence: Synthetic walnut; 5' sequence + inner sequence + 3' sequence

SEQ ID NO: 31487 - DNA, 76 bp, Artificial Sequence; identical to SEQ ID NO: 7576
  Description of Artificial Sequence: Synthetic walnut; 5' sequence + inner sequence + 3' sequence

SEQ ID NO: 31488 - DNA, 76 bp, Artificial Sequence
  Description of Artificial Sequence: Synthetic walnut; 5' sequence + inner sequence + 3' sequence
tagggaagagaaggacatatgatggccgtacgatggatgtgggatggtctagcttgactagtacatgaccacttga

SEQ ID NO: 31489 - DNA, 76 bp, Artificial Sequence; identical to SEQ ID NO: 3613
  Description of Artificial Sequence: Synthetic walnut; 5' sequence + inner sequence + 3' sequence

SEQ ID NO: 31490 - DNA, 76 bp, Artificial Sequence; identical to SEQ ID NO: 23929
  Description of Artificial Sequence: Synthetic walnut; 5' sequence + inner sequence + 3' sequence

SEQ ID NO: 31491 - DNA, 76 bp, Artificial Sequence; identical to SEQ ID NO: 3025
  Description of Artificial Sequence: Synthetic walnut; 5' sequence + inner sequence + 3' sequence

SEQ ID NO: 31492 - DNA, 76 bp, Artificial Sequence
  Description of Artificial Sequence: Synthetic walnut; 5' sequence + inner sequence + 3' sequence
tagggaagagaaggacatatgatggccgcgtctggatgtggttttgtcgcgtcttgactagtacatgaccacttga

SEQ ID NO: 31493 - DNA, 76 bp, Artificial Sequence
  Description of Artificial Sequence: Synthetic walnut; 5' sequence + inner sequence + 3' sequence
tagggaagagaaggacatatgatcgacgcaccgtaacgacctagcgatgcgcgttgactagtacatgaccacttga

SEQ ID NO: 31494 - DNA, 76 bp, Artificial Sequence; identical to SEQ ID NO: 3185
  Description of Artificial Sequence: Synthetic walnut; 5' sequence + inner sequence + 3' sequence

SEQ ID NO: 31495 - DNA, 76 bp, Artificial Sequence
  Description of Artificial Sequence: Synthetic walnut; 5' sequence + inner sequence + 3' sequence
tagggaagagaaggacatatgatggccgcatcgccccttcgagtggacaggtattgactagtacatgaccacttga

SEQ ID NO: 31496 - DNA, 76 bp, Artificial Sequence; identical to SEQ ID NO: 3134
  Description of Artificial Sequence: Synthetic walnut; 5' sequence + inner sequence + 3' sequence

SEQ ID NO: 31497 - DNA, 76 bp, Artificial Sequence
  Description of Artificial Sequence: Synthetic walnut; 5' sequence + inner sequence + 3' sequence
tagggaagagaaggacatatgatggacgcaacgcaccgtatcgtggccatgtgttgactagtacatgaccacttga

SEQ ID NO: 31498 - DNA, 76 bp, Artificial Sequence; identical to SEQ ID NO: 7988
  Description of Artificial Sequence: Synthetic walnut; 5' sequence + inner sequence + 3' sequence

SEQ ID NO: 31499 - DNA, 76 bp, Artificial Sequence; identical to SEQ ID NO: 23710
  Description of Artificial Sequence: Synthetic walnut; 5' sequence + inner sequence + 3' sequence

SEQ ID NO: 31500 - DNA, 76 bp, Artificial Sequence; identical to SEQ ID NO: 3700
  Description of Artificial Sequence: Synthetic walnut; 5' sequence + inner sequence + 3' sequence

SEQ ID NO: 31501 - DNA, 76 bp, Artificial Sequence
  Description of Artificial Sequence: Synthetic walnut; 5' sequence + inner sequence + 3' sequence
tagggaagagaaggacatatgatggcctgcgatggctgtgtgcgtgtattagcttgactagtacatgaccacttga

SEQ ID NO: 31502 - DNA, 76 bp, Artificial Sequence; identical to SEQ ID NO: 3619
  Description of Artificial Sequence: Synthetic walnut; 5' sequence + inner sequence + 3' sequence

SEQ ID NO: 31503 - DNA, 76 bp, Artificial Sequence
  Description of Artificial Sequence: Synthetic walnut; 5' sequence + inner sequence + 3' sequence
tagggaagagaaggacatatgatgcatcgcagcacacgtctcgtcacggcacattgactagtacatgaccacttga

SEQ ID NO: 31504 - DNA, 76 bp, Artificial Sequence; identical to SEQ ID NO: 3276
  Description of Artificial Sequence: Synthetic walnut; 5' sequence + inner sequence + 3' sequence

SEQ ID NO: 31505 - DNA, 76 bp, Artificial Sequence; identical to SEQ ID NO: 3294
  Description of Artificial Sequence: Synthetic walnut; 5' sequence + inner sequence + 3' sequence

SEQ ID NO: 31506 - DNA, 76 bp, Artificial Sequence; identical to SEQ ID NO: 3702
  Description of Artificial Sequence: Synthetic walnut; 5' sequence + inner sequence + 3' sequence

SEQ ID NO: 31507 - DNA, 76 bp, Artificial Sequence; identical to SEQ ID NO: 23353
  Description of Artificial Sequence: Synthetic walnut; 5' sequence + inner sequence + 3' sequence

SEQ ID NO: 31508 - DNA, 76 bp, Artificial Sequence
  Description of Artificial Sequence: Synthetic walnut; 5' sequence + inner sequence + 3' sequence
tagggaagagaaggacatatgatggcctgcgatggatgtgttcgtgtattagcttgactagtacatgaccacttga

SEQ ID NO: 31509 - DNA, 76 bp, Artificial Sequence; identical to SEQ ID NO: 23478
  Description of Artificial Sequence: Synthetic walnut; 5' sequence + inner sequence + 3' sequence

SEQ ID NO: 31510 - DNA, 76 bp, Artificial Sequence; identical to SEQ ID NO: 23668
  Description of Artificial Sequence: Synthetic walnut; 5' sequence + inner sequence + 3' sequence

SEQ ID NO: 31511 - DNA, 76 bp, Artificial Sequence; identical to SEQ ID NO: 3228
  Description of Artificial Sequence: Synthetic walnut; 5' sequence + inner sequence + 3' sequence

SEQ ID NO: 31512 - DNA, 76 bp, Artificial Sequence; identical to SEQ ID NO: 3068
  Description of Artificial Sequence: Synthetic walnut; 5' sequence + inner sequence + 3' sequence

SEQ ID NO: 31513 - DNA, 76 bp, Artificial Sequence
  Description of Artificial Sequence: Synthetic walnut; 5' sequence + inner sequence + 3' sequence
tagggaagagaaggacatatgatgtgcttcgatggatgtgggttgtgctcgtcttgactagtacatgaccacttga

SEQ ID NO: 31514 - DNA, 76 bp, Artificial Sequence; identical to SEQ ID NO: 3991
  Description of Artificial Sequence: Synthetic walnut; 5' sequence + inner sequence + 3' sequence

SEQ ID NO: 31515 - DNA, 76 bp, Artificial Sequence
  Description of Artificial Sequence: Synthetic walnut; 5' sequence + inner sequence + 3' sequence
tagggaagagaaggacatatgatggccgcggcatccctgagagtggtggtgtattgactagtacatgaccacttga

SEQ ID NO: 31516 - DNA, 76 bp, Artificial Sequence
  Description of Artificial Sequence: Synthetic walnut; 5' sequence + inner sequence + 3' sequence
tagggaagagaaggacatatgatgcgctgtgacgtacgtgctgtgcctacgcattgactagtacatgaccacttga

SEQ ID NO: 31517 - DNA, 76 bp, Artificial Sequence; identical to SEQ ID NO: 3778
  Description of Artificial Sequence: Synthetic walnut; 5' sequence + inner sequence + 3' sequence

SEQ ID NO: 31518 - DNA, 76 bp, Artificial Sequence; identical to SEQ ID NO: 7513
  Description of Artificial Sequence: Synthetic walnut; 5' sequence + inner sequence + 3' sequence

SEQ ID NO: 31519 - DNA, 76 bp, Artificial Sequence; identical to SEQ ID NO: 3979
  Description of Artificial Sequence: Synthetic walnut; 5' sequence + inner sequence + 3' sequence

SEQ ID NO: 31520 - DNA, 76 bp, Artificial Sequence; identical to SEQ ID NO: 23666
  Description of Artificial Sequence: Synthetic walnut; 5' sequence + inner sequence + 3' sequence

SEQ ID NO: 31521 - DNA, 76 bp, Artificial Sequence; identical to SEQ ID NO: 3789
  Description of Artificial Sequence: Synthetic walnut; 5' sequence + inner sequence + 3' sequence

SEQ ID NO: 31522 - DNA, 76 bp, Artificial Sequence; identical to SEQ ID NO: 7837
  Description of Artificial Sequence: Synthetic walnut; 5' sequence + inner sequence + 3' sequence

SEQ ID NO: 31523 - DNA, 76 bp, Artificial Sequence
  Description of Artificial Sequence: Synthetic walnut; 5' sequence + inner sequence + 3' sequence
tagggaagagaaggacatatgatgtgcgccgatgggtgtgtgtcgtggctggtttgactagtacatgaccacttga

SEQ ID NO: 31524 - DNA, 76 bp, Artificial Sequence; identical to SEQ ID NO: 3315
  Description of Artificial Sequence: Synthetic walnut; 5' sequence + inner sequence + 3' sequence

SEQ ID NO: 31525 - DNA, 76 bp, Artificial Sequence; identical to SEQ ID NO: 23721
  Description of Artificial Sequence: Synthetic walnut; 5' sequence + inner sequence + 3' sequence

SEQ ID NO: 31526 - DNA, 76 bp, Artificial Sequence
  Description of Artificial Sequence: Synthetic walnut; 5' sequence + inner sequence + 3' sequence
tagggaagagaaggacatatgatgcgtgtgcgtgcacgttacgtccttgcgccttgactagtacatgaccacttga

SEQ ID NO: 31527 - DNA, 76 bp, Artificial Sequence
  Description of Artificial Sequence: Synthetic walnut; 5' sequence + inner sequence + 3' sequence
tagggaagagaaggacatatgatgcgacacacggccacgatgtacgatgcgcattgactagtacatgaccacttga

SEQ ID NO: 31528 - DNA, 76 bp, Artificial Sequence; identical to SEQ ID NO: 3485
  Description of Artificial Sequence: Synthetic walnut; 5' sequence + inner sequence + 3' sequence

SEQ ID NO: 31529 - DNA, 76 bp, Artificial Sequence; identical to SEQ ID NO: 7552
  Description of Artificial Sequence: Synthetic walnut; 5' sequence + inner sequence + 3' sequence

SEQ ID NO: 31530 - DNA, 76 bp, Artificial Sequence; identical to SEQ ID NO: 3446
  Description of Artificial Sequence: Synthetic walnut; 5' sequence + inner sequence + 3' sequence

SEQ ID NO: 31531 - DNA, 76 bp, Artificial Sequence; identical to SEQ ID NO: 3346
  Description of Artificial Sequence: Synthetic walnut; 5' sequence + inner sequence + 3' sequence

SEQ ID NO: 31532 - DNA, 76 bp, Artificial Sequence; identical to SEQ ID NO: 7948
  Description of Artificial Sequence: Synthetic walnut; 5' sequence + inner sequence + 3' sequence

SEQ ID NO: 31533 - DNA, 76 bp, Artificial Sequence
  Description of Artificial Sequence: Synthetic walnut; 5' sequence + inner sequence + 3' sequence
tagggaagagaaggacatatgatgtactgcactgccctacacgtgggcatggattgactagtacatgaccacttga

SEQ ID NO: 31534 - DNA, 76 bp, Artificial Sequence; identical to SEQ ID NO: 3131
  Description of Artificial Sequence: Synthetic walnut; 5' sequence + inner sequence + 3' sequence

SEQ ID NO: 31535 - DNA, 76 bp, Artificial Sequence; identical to SEQ ID NO: 3460
  Description of Artificial Sequence: Synthetic walnut; 5' sequence + inner sequence + 3' sequence

SEQ ID NO: 31536 - DNA, 76 bp, Artificial Sequence; identical to SEQ ID NO: 19859
  Description of Artificial Sequence: Synthetic walnut; 5' sequence + inner sequence + 3' sequence

SEQ ID NO: 31537 - DNA, 76 bp, Artificial Sequence; identical to SEQ ID NO: 23693
  Description of Artificial Sequence: Synthetic walnut; 5' sequence + inner sequence + 3' sequence

SEQ ID NO: 31538 - DNA, 76 bp, Artificial Sequence; identical to SEQ ID NO: 3442
  Description of Artificial Sequence: Synthetic walnut; 5' sequence + inner sequence + 3' sequence

SEQ ID NO: 31539 - DNA, 76 bp, Artificial Sequence; identical to SEQ ID NO: 19926
  Description of Artificial Sequence: Synthetic walnut; 5' sequence + inner sequence + 3' sequence

SEQ ID NO: 31540 - DNA, 76 bp, Artificial Sequence; identical to SEQ ID NO: 3678
  Description of Artificial Sequence: Synthetic walnut; 5' sequence + inner sequence + 3' sequence

SEQ ID NO: 31541 - DNA, 76 bp, Artificial Sequence
  Description of Artificial Sequence: Synthetic walnut; 5' sequence + inner sequence + 3' sequence
tagggaagagaaggacatatgatcgcgatacacgagcatgccgtcacgtcacgttgactagtacatgaccacttga

SEQ ID NO: 31542 - DNA, 76 bp, Artificial Sequence; identical to SEQ ID NO: 3173
  Description of Artificial Sequence: Synthetic walnut; 5' sequence + inner sequence + 3' sequence

SEQ ID NO: 31543 - DNA, 76 bp, Artificial Sequence; identical to SEQ ID NO: 3132
  Description of Artificial Sequence: Synthetic walnut; 5' sequence + inner sequence + 3' sequence

SEQ ID NO: 31544 - DNA, 76 bp, Artificial Sequence
  Description of Artificial Sequence: Synthetic walnut; 5' sequence + inner sequence + 3' sequence
tagggaagagaaggacatatgatgcgacacaacgcagggcaacgtgatgcgtgttgactagtacatgaccacttga

SEQ ID NO: 31545 - DNA, 76 bp, Artificial Sequence; identical to SEQ ID NO: 3218
  Description of Artificial Sequence: Synthetic walnut; 5' sequence + inner sequence + 3' sequence

SEQ ID NO: 31546 - DNA, 76 bp, Artificial Sequence; identical to SEQ ID NO: 3768
  Description of Artificial Sequence: Synthetic walnut; 5' sequence + inner sequence + 3' sequence

SEQ ID NO: 31547 - DNA, 76 bp, Artificial Sequence
  Description of Artificial Sequence: Synthetic walnut; 5' sequence + inner sequence + 3' sequence
tagggaagagaaggacatatgatggcatgcacgcacctacaagtgggcacgtattgactagtacatgaccacttga

SEQ ID NO: 31548 - DNA, 76 bp, Artificial Sequence; identical to SEQ ID NO: 3072
  Description of Artificial Sequence: Synthetic walnut; 5' sequence + inner sequence + 3' sequence

SEQ ID NO: 31549 - DNA, 76 bp, Artificial Sequence; identical to SEQ ID NO: 23289
  Description of Artificial Sequence: Synthetic walnut; 5' sequence + inner sequence + 3' sequence

SEQ ID NO: 31550 - DNA, 76 bp, Artificial Sequence; identical to SEQ ID NO: 3039
  Description of Artificial Sequence: Synthetic walnut; 5' sequence + inner sequence + 3' sequence

SEQ ID NO: 31551 - DNA, 76 bp, Artificial Sequence; identical to SEQ ID NO: 7924
  Description of Artificial Sequence: Synthetic walnut; 5' sequence + inner sequence + 3' sequence

SEQ ID NO: 31552 - DNA, 76 bp, Artificial Sequence; identical to SEQ ID NO: 7999
  Description of Artificial Sequence: Synthetic walnut; 5' sequence + inner sequence + 3' sequence

SEQ ID NO: 31553 - DNA, 76 bp, Artificial Sequence; identical to SEQ ID NO: 3341
  Description of Artificial Sequence: Synthetic walnut; 5' sequence + inner sequence + 3' sequence

SEQ ID NO: 31554 - DNA, 76 bp, Artificial Sequence; identical to SEQ ID NO: 3486
  Description of Artificial Sequence: Synthetic walnut; 5' sequence + inner sequence + 3' sequence

SEQ ID NO: 31555 - DNA, 76 bp, Artificial Sequence
  Description of Artificial Sequence: Synthetic walnut; 5' sequence + inner sequence + 3' sequence
tagggaagagaaggacatatgatgcacgcaatgatgcacgtcctgctcgcacgttgactagtacatgaccacttga

SEQ ID NO: 31556 - DNA, 76 bp, Artificial Sequence; identical to SEQ ID NO: 3903
  Description of Artificial Sequence: Synthetic walnut; 5' sequence + inner sequence + 3' sequence

SEQ ID NO: 31557 - DNA, 76 bp, Artificial Sequence
  Description of Artificial Sequence: Synthetic walnut; 5' sequence + inner sequence + 3' sequence
tagggaagagaaggacatatgatcgcaccgtgtacgccacgtcactgtacgcattgactagtacatgaccacttga

SEQ ID NO: 31558 - DNA, 76 bp, Artificial Sequence; identical to SEQ ID NO: 3153
  Description of Artificial Sequence: Synthetic walnut; 5' sequence + inner sequence + 3' sequence

SEQ ID NO: 31559 - DNA, 75 bp, Artificial Sequence; identical to SEQ ID NO: 3193
  Description of Artificial Sequence: Synthetic walnut; 5' sequence + inner sequence + 3' sequence

SEQ ID NO: 31560 - DNA, 76 bp, Artificial Sequence; identical to SEQ ID NO: 3840
  Description of Artificial Sequence: Synthetic walnut; 5' sequence + inner sequence + 3' sequence

SEQ ID NO: 31561 - DNA, 76 bp, Artificial Sequence; identical to SEQ ID NO: 7638
  Description of Artificial Sequence: Synthetic walnut; 5' sequence + inner sequence + 3' sequence

SEQ ID NO: 31562 - DNA, 76 bp, Artificial Sequence; identical to SEQ ID NO: 23836
  Description of Artificial Sequence: Synthetic walnut; 5' sequence + inner sequence + 3' sequence

SEQ ID NO: 31563 - DNA, 76 bp, Artificial Sequence
  Description of Artificial Sequence: Synthetic walnut; 5' sequence + inner sequence + 3' sequence
tagggaagagaaggacatatgatcgacacggcatggcaaggcgatgtggtgcgttgactagtacatgaccacttga

SEQ ID NO: 31564 - DNA, 76 bp, Artificial Sequence; identical to SEQ ID NO: 23486
  Description of Artificial Sequence: Synthetic walnut; 5' sequence + inner sequence + 3' sequence

SEQ ID NO: 31565 - DNA, 75 bp, Artificial Sequence
  Description of Artificial Sequence: Synthetic walnut; 5' sequence + inner sequence + 3' sequence
tagggaagagaaggacatatgatcgacgtgtcgcagtacgtaccgttgcgcattgactagtacatgaccacttga

SEQ ID NO: 31566 - DNA, 76 bp, Artificial Sequence; identical to SEQ ID NO: 15936
  Description of Artificial Sequence: Synthetic walnut; 5' sequence + inner sequence + 3' sequence

SEQ ID NO: 31567 - DNA, 76 bp, Artificial Sequence; identical to SEQ ID NO: 3347
  Description of Artificial Sequence: Synthetic walnut; 5' sequence + inner sequence + 3' sequence

SEQ ID NO: 31568 - DNA, 76 bp, Artificial Sequence; identical to SEQ ID NO: 11968
  Description of Artificial Sequence: Synthetic walnut; 5' sequence + inner sequence + 3' sequence

SEQ ID NO: 31569 - DNA, 76 bp, Artificial Sequence
  Description of Artificial Sequence: Synthetic walnut; 5' sequence + inner sequence + 3' sequence
tagggaagagaaggacatatgatggcctgcgatggatgtggttttgtcgcgtcttgactagtacatgaccacttga

SEQ ID NO: 31570 - DNA, 76 bp, Artificial Sequence
  Description of Artificial Sequence: Synthetic walnut; 5' sequence + inner sequence + 3' sequence
tagggaagagaaggacatatgatgcatgccaacgcaacgtgtacgcgtgcacattgactagtacatgaccacttga

SEQ ID NO: 31571 - DNA, 76 bp, Artificial Sequence; identical to SEQ ID NO: 27843
  Description of Artificial Sequence: Synthetic walnut; 5' sequence + inner sequence + 3' sequence

SEQ ID NO: 31572 - DNA, 76 bp, Artificial Sequence; identical to SEQ ID NO: 3801
  Description of Artificial Sequence: Synthetic walnut; 5' sequence + inner sequence + 3' sequence

SEQ ID NO: 31573 - DNA, 76 bp, Artificial Sequence; identical to SEQ ID NO: 7688
  Description of Artificial Sequence: Synthetic walnut; 5' sequence + inner sequence + 3' sequence

SEQ ID NO: 31574 - DNA, 76 bp, Artificial Sequence
  Description of Artificial Sequence: Synthetic walnut; 5' sequence + inner sequence + 3' sequence
tagggaagagaaggacatatgatggcatgcactcacctacacgtgggcacgtattgactagtacatgaccacttga

SEQ ID NO: 31575 - DNA, 76 bp, Artificial Sequence; identical to SEQ ID NO: 3395
  Description of Artificial Sequence: Synthetic walnut; 5' sequence + inner sequence + 3' sequence

SEQ ID NO: 31576 - DNA, 76 bp, Artificial Sequence; identical to SEQ ID NO: 7517
  Description of Artificial Sequence: Synthetic walnut; 5' sequence + inner sequence + 3' sequence

SEQ ID NO: 31577 - DNA, 76 bp, Artificial Sequence
  Description of Artificial Sequence: Synthetic walnut; 5' sequence + inner sequence + 3' sequence
tagggaagagaaggacatatgatggcctcgataacctagcaagtgtgtgtgtattgactagtacatgaccacttga

SEQ ID NO: 31578 - DNA, 76 bp, Artificial Sequence; identical to SEQ ID NO: 11922
  Description of Artificial Sequence: Synthetic walnut; 5' sequence + inner sequence + 3' sequence

SEQ ID NO: 31579 - DNA, 76 bp, Artificial Sequence; identical to SEQ ID NO: 3056
  Description of Artificial Sequence: Synthetic walnut; 5' sequence + inner sequence + 3' sequence

SEQ ID NO: 31580 - DNA, 76 bp, Artificial Sequence
  Description of Artificial Sequence: Synthetic walnut; 5' sequence + inner sequence + 3' sequence
tagggaagagaaggacatatgatcgcaccgtcgtaccgtacgtgcctgacgcattgactagtacatgaccacttga

SEQ ID NO: 31581 - DNA, 76 bp, Artificial Sequence
  Description of Artificial Sequence: Synthetic walnut; 5' sequence + inner sequence + 3' sequence
tagggaagagaaggacatatgatgtccgacgatgggtgggggaatgcgacggcttgactagtacatgaccacttga

SEQ ID NO: 31582 - DNA, 76 bp, Artificial Sequence
  Description of Artificial Sequence: Synthetic walnut; 5' sequence + inner sequence + 3' sequence
tagggaagagaaggacatatgatcgtaccgcacatgcacgtccgtcgtacgcgttgactagtacatgaccacttga

SEQ ID NO: 31583 - DNA, 76 bp, Artificial Sequence; identical to SEQ ID NO: 3438
  Description of Artificial Sequence: Synthetic walnut; 5' sequence + inner sequence + 3' sequence

SEQ ID NO: 31584 - DNA, 76 bp, Artificial Sequence
  Description of Artificial Sequence: Synthetic walnut; 5' sequence + inner sequence + 3' sequence
tagggaagagaaggacatatgatgcgcacaacgatacgcacgatgccgtcacgttgactagtacatgaccacttga

SEQ ID NO: 31585 - DNA, 76 bp, Artificial Sequence; identical to SEQ ID NO: 23363
  Description of Artificial Sequence: Synthetic walnut; 5' sequence + inner sequence + 3' sequence

SEQ ID NO: 31586 - DNA, 76 bp, Artificial Sequence
  Description of Artificial Sequence: Synthetic walnut; 5' sequence + inner sequence + 3' sequence
tagggaagagaaggacatatgatggccgacgatggatgggaggcatgactggcttgactagtacatgaccacttga

SEQ ID NO: 31587 - DNA, 76 bp, Artificial Sequence; identical to SEQ ID NO: 3372
  Description of Artificial Sequence: Synthetic walnut; 5' sequence + inner sequence + 3' sequence

SEQ ID NO: 31588 - DNA, 76 bp, Artificial Sequence; identical to SEQ ID NO: 7860
  Description of Artificial Sequence: Synthetic walnut; 5' sequence + inner sequence + 3' sequence

SEQ ID NO: 31589 - DNA, 76 bp, Artificial Sequence
  Description of Artificial Sequence: Synthetic walnut; 5' sequence + inner sequence + 3' sequence
tagggaagagaaggacatatgatggcctgcgcgtgacctatcaatggcatgtattgactagtacatgaccacttga

SEQ ID NO: 31590 - DNA, 76 bp, Artificial Sequence; identical to SEQ ID NO: 7289
  Description of Artificial Sequence: Synthetic walnut; 5' sequence + inner sequence + 3' sequence

SEQ ID NO: 31591 - DNA, 76 bp, Artificial Sequence
  Description of Artificial Sequence: Synthetic walnut; 5' sequence + inner sequence + 3' sequence
tagggaagagaaggacatatgatcacgcacagtgacgttaccgtacctgcacgttgactagtacatgaccacttga

SEQ ID NO: 31592 - DNA, 76 bp, Artificial Sequence; identical to SEQ ID NO: 19695
  Description of Artificial Sequence: Synthetic walnut; 5' sequence + inner sequence + 3' sequence

SEQ ID NO: 31593 - DNA, 77 bp, Artificial Sequence
  Description of Artificial Sequence: Synthetic walnut; 5' sequence + inner sequence + 3' sequence
tagggaagagaaggacatatgatggcctgcgatggatgtgggctgcactatgtcttgactagtacatgaccacttga

SEQ ID NO: 31594 - DNA, 76 bp, Artificial Sequence; identical to SEQ ID NO: 3756
  Description of Artificial Sequence: Synthetic walnut; 5' sequence + inner sequence + 3' sequence

SEQ ID NO: 31595 - DNA, 76 bp, Artificial Sequence
  Description of Artificial Sequence: Synthetic walnut; 5' sequence + inner sequence + 3' sequence
tagggaagagaaggacatatgatggccacagcgtacatcaacgtggacgtgcattgactagtacatgaccacttga

SEQ ID NO: 31596 - DNA, 77 bp, Artificial Sequence; identical to SEQ ID NO: 19373
  Description of Artificial Sequence: Synthetic walnut; 5' sequence + inner sequence + 3' sequence

SEQ ID NO: 31597 - DNA, 76 bp, Artificial Sequence; identical to SEQ ID NO: 3101
  Description of Artificial Sequence: Synthetic walnut; 5' sequence + inner sequence + 3' sequence

SEQ ID NO: 31598 - DNA, 76 bp, Artificial Sequence; identical to SEQ ID NO: 3553
  Description of Artificial Sequence: Synthetic walnut; 5' sequence + inner sequence + 3' sequence

SEQ ID NO: 31599 - DNA, 76 bp, Artificial Sequence; identical to SEQ ID NO: 19978
  Description of Artificial Sequence: Synthetic walnut; 5' sequence + inner sequence + 3' sequence

SEQ ID NO: 31600 - DNA, 76 bp, Artificial Sequence
  Description of Artificial Sequence: Synthetic walnut; 5' sequence + inner sequence + 3' sequence
tagggaagagaaggacatatgatggcctgcgatggatgtgggccagtacgcgcttgactagtacatgaccacttga

SEQ ID NO: 31601 - DNA, 76 bp, Artificial Sequence; identical to SEQ ID NO: 7653
  Description of Artificial Sequence: Synthetic walnut; 5' sequence + inner sequence + 3' sequence

SEQ ID NO: 31602 - DNA, 76 bp, Artificial Sequence; identical to SEQ ID NO: 19482
  Description of Artificial Sequence: Synthetic walnut; 5' sequence + inner sequence + 3' sequence

SEQ ID NO: 31603 - DNA, 76 bp, Artificial Sequence
  Description of Artificial Sequence: Synthetic walnut; 5' sequence + inner sequence + 3' sequence
tagggaagagaaggacatatgatcgtgacgacgtgctgcagtgacgttgcgtattgactagtacatgaccacttga

SEQ ID NO: 31604 - DNA, 76 bp, Artificial Sequence; identical to SEQ ID NO: 3186
  Description of Artificial Sequence: Synthetic walnut; 5' sequence + inner sequence + 3' sequence

SEQ ID NO: 31605 - DNA, 76 bp, Artificial Sequence; identical to SEQ ID NO: 3470
  Description of Artificial Sequence: Synthetic walnut; 5' sequence + inner sequence + 3' sequence

SEQ ID NO: 31606 - DNA, 76 bp, Artificial Sequence; identical to SEQ ID NO: 11798
  Description of Artificial Sequence: Synthetic walnut; 5' sequence + inner sequence + 3' sequence

SEQ ID NO: 31607 - DNA, 76 bp, Artificial Sequence; identical to SEQ ID NO: 3299
  Description of Artificial Sequence: Synthetic walnut; 5' sequence + inner sequence + 3' sequence

SEQ ID NO: 31608 - DNA, 76 bp, Artificial Sequence; identical to SEQ ID NO: 23515
  Description of Artificial Sequence: Synthetic walnut; 5' sequence + inner sequence + 3' sequence

SEQ ID NO: 31609 - DNA, 76 bp, Artificial Sequence; identical to SEQ ID NO: 15945
  Description of Artificial Sequence: Synthetic walnut; 5' sequence + inner sequence + 3' sequence

SEQ ID NO: 31610 - DNA, 76 bp, Artificial Sequence; identical to SEQ ID NO: 23800
  Description of Artificial Sequence: Synthetic walnut; 5' sequence + inner sequence + 3' sequence

SEQ ID NO: 31611 - DNA, 76 bp, Artificial Sequence; identical to SEQ ID NO: 3714
  Description of Artificial Sequence: Synthetic walnut; 5' sequence + inner sequence + 3' sequence

SEQ ID NO: 31612 - DNA, 77 bp, Artificial Sequence
  Description of Artificial Sequence: Synthetic walnut; 5' sequence + inner sequence + 3' sequence
tagggaagagaaggacatatgatggcctgcgatggatgtggtgttgggatagtcttgactagtacatgaccacttga

SEQ ID NO: 31613 - DNA, 76 bp, Artificial Sequence; identical to SEQ ID NO: 23954
  Description of Artificial Sequence: Synthetic walnut; 5' sequence + inner sequence + 3' sequence

SEQ ID NO: 31614 - DNA, 76 bp, Artificial Sequence; identical to SEQ ID NO: 19342
  Description of Artificial Sequence: Synthetic walnut; 5' sequence + inner sequence + 3' sequence

SEQ ID NO: 31615 - DNA, 76 bp, Artificial Sequence; identical to SEQ ID NO: 3860
  Description of Artificial Sequence: Synthetic walnut; 5' sequence + inner sequence + 3' sequence

SEQ ID NO: 31616 - DNA, 76 bp, Artificial Sequence; identical to SEQ ID NO: 3857
  Description of Artificial Sequence: Synthetic walnut; 5' sequence + inner sequence + 3' sequence

SEQ ID NO: 31617 - DNA, 71 bp, Artificial Sequence; identical to SEQ ID NO: 23741
  Description of Artificial Sequence: Synthetic walnut; 5' sequence + inner sequence + 3' sequence

SEQ ID NO: 31618 - DNA, 76 bp, Artificial Sequence; identical to SEQ ID NO: 11682
  Description of Artificial Sequence: Synthetic walnut; 5' sequence + inner sequence + 3' sequence

SEQ ID NO: 31619 - DNA, 76 bp, Artificial Sequence; identical to SEQ ID NO: 7565
  Description of Artificial Sequence: Synthetic walnut; 5' sequence + inner sequence + 3' sequence

SEQ ID NO: 31620 - DNA, 76 bp, Artificial Sequence
  Description of Artificial Sequence: Synthetic walnut; 5' sequence + inner sequence + 3' sequence
tagggaagagaaggacatatgatggccacagcgtaactcaacgtggacgtgcattgactagtacatgaccacttga

SEQ ID NO: 31621 - DNA, 76 bp, Artificial Sequence; identical to SEQ ID NO: 3805
  Description of Artificial Sequence: Synthetic walnut; 5' sequence + inner sequence + 3' sequence

SEQ ID NO: 31622 - DNA, 76 bp, Artificial Sequence; identical to SEQ ID NO: 3780
  Description of Artificial Sequence: Synthetic walnut; 5' sequence + inner sequence + 3' sequence

SEQ ID NO: 31623 - DNA, 76 bp, Artificial Sequence; identical to SEQ ID NO: 23784
  Description of Artificial Sequence: Synthetic walnut; 5' sequence + inner sequence + 3' sequence

SEQ ID NO: 31624 - DNA, 76 bp, Artificial Sequence; identical to SEQ ID NO: 3061
  Description of Artificial Sequence: Synthetic walnut; 5' sequence + inner sequence + 3' sequence

SEQ ID NO: 31625 - DNA, 76 bp, Artificial Sequence; identical to SEQ ID NO: 3813
  Description of Artificial Sequence: Synthetic walnut; 5' sequence + inner sequence + 3' sequence

SEQ ID NO: 31626 - DNA, 76 bp, Artificial Sequence
  Description of Artificial Sequence: Synthetic walnut; 5' sequence + inner sequence + 3' sequence
tagggaagagaaggacatatgatgtgctgcgatggatgtgtgcgtgtattagcttgactagtacatgaccacttga

SEQ ID NO: 31627 - DNA, 76 bp, Artificial Sequence; identical to SEQ ID NO: 23773
  Description of Artificial Sequence: Synthetic walnut; 5' sequence + inner sequence + 3' sequence

SEQ ID NO: 31628 - DNA, 76 bp, Artificial Sequence; identical to SEQ ID NO: 3204
  Description of Artificial Sequence: Synthetic walnut; 5' sequence + inner sequence + 3' sequence

SEQ ID NO: 31629 - DNA, 76 bp, Artificial Sequence; identical to SEQ ID NO: 3505
  Description of Artificial Sequence: Synthetic walnut; 5' sequence + inner sequence + 3' sequence

SEQ ID NO: 31630 - DNA, 76 bp, Artificial Sequence; identical to SEQ ID NO: 7933
  Description of Artificial Sequence: Synthetic walnut; 5' sequence + inner sequence + 3' sequence

SEQ ID NO: 31631 - DNA, 76 bp, Artificial Sequence; identical to SEQ ID NO: 19531
  Description of Artificial Sequence: Synthetic walnut; 5' sequence + inner sequence + 3' sequence

SEQ ID NO: 31632 - DNA, 76 bp, Artificial Sequence; identical to SEQ ID NO: 23961
  Description of Artificial Sequence: Synthetic walnut; 5' sequence + inner sequence + 3' sequence

SEQ ID NO: 31633 - DNA, 76 bp, Artificial Sequence; identical to SEQ ID NO: 3237
  Description of Artificial Sequence: Synthetic walnut; 5' sequence + inner sequence + 3' sequence

SEQ ID NO: 31634 - DNA, 76 bp, Artificial Sequence; identical to SEQ ID NO: 3196
  Description of Artificial Sequence: Synthetic walnut; 5' sequence + inner sequence + 3' sequence

SEQ ID NO: 31635 - DNA, 76 bp, Artificial Sequence; identical to SEQ ID NO: 23530
  Description of Artificial Sequence: Synthetic walnut; 5' sequence + inner sequence + 3' sequence

SEQ ID NO: 31636 - DNA, 76 bp, Artificial Sequence
  Description of Artificial Sequence: Synthetic walnut; 5' sequence + inner sequence + 3' sequence
tagggaagagaaggacatatgatgcgccacgtgacgtactgtgcctcgacgcgttgactagtacatgaccacttga

SEQ ID NO: 31637 - DNA, 76 bp, Artificial Sequence; identical to SEQ ID NO: 15743
  Description of Artificial Sequence: Synthetic walnut; 5' sequence + inner sequence + 3' sequence

SEQ ID NO: 31638 - DNA, 76 bp, Artificial Sequence; identical to SEQ ID NO: 3703
  Description of Artificial Sequence: Synthetic walnut; 5' sequence + inner sequence + 3' sequence

SEQ ID NO: 31639 - DNA, 76 bp, Artificial Sequence; identical to SEQ ID NO: 3850
  Description of Artificial Sequence: Synthetic walnut; 5' sequence + inner sequence + 3' sequence

SEQ ID NO: 31640 - DNA, 76 bp, Artificial Sequence; identical to SEQ ID NO: 3090
  Description of Artificial Sequence: Synthetic walnut; 5' sequence + inner sequence + 3' sequence

SEQ ID NO: 31641 - DNA, 76 bp, Artificial Sequence; identical to SEQ ID NO: 15821
  Description of Artificial Sequence: Synthetic walnut; 5' sequence + inner sequence + 3' sequence

SEQ ID NO: 31642 - DNA, 76 bp, Artificial Sequence; identical to SEQ ID NO: 3645
  Description of Artificial Sequence: Synthetic walnut; 5' sequence + inner sequence + 3' sequence

SEQ ID NO: 31643 - DNA, 76 bp, Artificial Sequence
  Description of Artificial Sequence: Synthetic walnut; 5' sequence + inner sequence + 3' sequence
tagggaagagaaggacatatgatcgcaccgtgtggcatgtgacactgcgcgcattgactagtacatgaccacttga

SEQ ID NO: 31644 - DNA, 76 bp, Artificial Sequence
  Description of Artificial Sequence: Synthetic walnut; 5' sequence + inner sequence + 3' sequence
tagggaagagaaggacatatgatggcctgcgatggatgtggtgtacccagtccttgactagtacatgaccacttga

SEQ ID NO: 31645 - DNA, 76 bp, Artificial Sequence
  Description of Artificial Sequence: Synthetic walnut; 5' sequence + inner sequence + 3' sequence
tagggaagagaaggacatatgatggacgcatcgccccttcgtgtggacaggtattgactagtacatgaccacttga

SEQ ID NO: 31646 - DNA, 76 bp, Artificial Sequence
  Description of Artificial Sequence: Synthetic walnut; 5' sequence + inner sequence + 3' sequence
tagggaagagaaggacatatgatggcctgcgatggatgtggttgtgcttgtttttgactagtacatgaccacttga

SEQ ID NO: 31647 - DNA, 76 bp, Artificial Sequence; identical to SEQ ID NO: 15700
  Description of Artificial Sequence: Synthetic walnut; 5' sequence + inner sequence + 3' sequence

SEQ ID NO: 31648 - DNA, 76 bp, Artificial Sequence; identical to SEQ ID NO: 3152
  Description of Artificial Sequence: Synthetic walnut; 5' sequence + inner sequence + 3' sequence

SEQ ID NO: 31649 - DNA, 76 bp, Artificial Sequence; identical to SEQ ID NO: 3182
  Description of Artificial Sequence: Synthetic walnut; 5' sequence + inner sequence + 3' sequence

SEQ ID NO: 31650 - DNA, 76 bp, Artificial Sequence; identical to SEQ ID NO: 19605
  Description of Artificial Sequence: Synthetic walnut; 5' sequence + inner sequence + 3' sequence

SEQ ID NO: 31651 - DNA, 76 bp, Artificial Sequence; identical to SEQ ID NO: 19352
  Description of Artificial Sequence: Synthetic walnut; 5' sequence + inner sequence + 3' sequence

SEQ ID NO: 31652 - DNA, 76 bp, Artificial Sequence
  Description of Artificial Sequence: Synthetic walnut; 5' sequence + inner sequence + 3' sequence
tagggaagagaaggacatatgattgacgcatcgccccttcgagtggacaggtattgactagtacatgaccacttga

SEQ ID NO: 31653 - DNA, 76 bp, Artificial Sequence
  Description of Artificial Sequence: Synthetic walnut; 5' sequence + inner sequence + 3' sequence
tagggaagagaaggacatatgatggcctgcgatggatgcgtgcgtgtattagcttgactagtacatgaccacttga

SEQ ID NO: 31654 - DNA, 76 bp, Artificial Sequence; identical to SEQ ID NO: 19999
  Description of Artificial Sequence: Synthetic walnut; 5' sequence + inner sequence + 3' sequence

SEQ ID NO: 31655 - DNA, 76 bp, Artificial Sequence; identical to SEQ ID NO: 3867
  Description of Artificial Sequence: Synthetic walnut; 5' sequence + inner sequence + 3' sequence

SEQ ID NO: 31656 - DNA, 76 bp, Artificial Sequence; identical to SEQ ID NO: 3673
  Description of Artificial Sequence: Synthetic walnut; 5' sequence + inner sequence + 3' sequence

SEQ ID NO: 31657 - DNA, 76 bp, Artificial Sequence
  Description of Artificial Sequence: Synthetic walnut; 5' sequence + inner sequence + 3' sequence
tagggaagagaaggacatatgatggacgcatctccccttcgagtggacaggtattgactagtacatgaccacttga

SEQ ID NO: 31658 - DNA, 76 bp, Artificial Sequence; identical to SEQ ID NO: 23722
  Description of Artificial Sequence: Synthetic walnut; 5' sequence + inner sequence + 3' sequence

SEQ ID NO: 31659 - DNA, 76 bp, Artificial Sequence
  Description of Artificial Sequence: Synthetic walnut; 5' sequence + inner sequence + 3' sequence
tagggaagagaaggacatatgatcgcaccgaacgcgtacgtggctacgtgacgttgactagtacatgaccacttga

SEQ ID NO: 31660 - DNA, 75 bp, Artificial Sequence
  Description of Artificial Sequence: Synthetic walnut; 5' sequence + inner sequence + 3' sequence
tagggaagagaaggacatatgatggacgcaacgtacgtacttgacgtgtgcattgactagtacatgaccacttga

SEQ ID NO: 31661 - DNA, 76 bp, Artificial Sequence
  Description of Artificial Sequence: Synthetic walnut; 5' sequence + inner sequence + 3' sequence
tagggaagagaaggacatatgatggccaatgcgccccttcgagtggacaggtattgactagtacatgaccacttga

SEQ ID NO: 31662 - DNA, 76 bp, Artificial Sequence
  Description of Artificial Sequence: Synthetic walnut; 5' sequence + inner sequence + 3' sequence
tagggaagagaaggacatatgatggcctgcgatggatgtggaaatgcgacgtcttgactagtacatgaccacttga

SEQ ID NO: 31663 - DNA, 76 bp, Artificial Sequence; identical to SEQ ID NO: 3097
  Description of Artificial Sequence: Synthetic walnut; 5' sequence + inner sequence + 3' sequence

SEQ ID NO: 31664 - DNA, 76 bp, Artificial Sequence; identical to SEQ ID NO: 7890
  Description of Artificial Sequence: Synthetic walnut; 5' sequence + inner sequence + 3' sequence

SEQ ID NO: 31665 - DNA, 76 bp, Artificial Sequence
  Description of Artificial Sequence: Synthetic walnut; 5' sequence + inner sequence + 3' sequence
tagggaagagaaggacatatgatcgtaacgcaacgtacgcacgacgcaccgtgttgactagtacatgaccacttga

SEQ ID NO: 31666 - DNA, 76 bp, Artificial Sequence
  Description of Artificial Sequence: Synthetic walnut; 5' sequence + inner sequence + 3' sequence
tagggaagagaaggacatatgatggacgcatcgccccttcgagttgacaggtattgactagtacatgaccacttga

SEQ ID NO: 31667 - DNA, 76 bp, Artificial Sequence; identical to SEQ ID NO: 23583
  Description of Artificial Sequence: Synthetic walnut; 5' sequence + inner sequence + 3' sequence

SEQ ID NO: 31668 - DNA, 76 bp, Artificial Sequence
  Description of Artificial Sequence: Synthetic walnut; 5' sequence + inner sequence + 3' sequence
tagggaagagaaggacatatgatgcatcgcaacgtgacgtacctgctgccaccttgactagtacatgaccacttga

SEQ ID NO: 31669 - DNA, 76 bp, Artificial Sequence; identical to SEQ ID NO: 3107
  Description of Artificial Sequence: Synthetic walnut; 5' sequence + inner sequence + 3' sequence

SEQ ID NO: 31670 - DNA, 76 bp, Artificial Sequence
  Description of Artificial Sequence: Synthetic walnut; 5' sequence + inner sequence + 3' sequence
tagggaagagaaggacatatgatggtcacagcgtacctcaacgtggacgtgcattgactagtacatgaccacttga

SEQ ID NO: 31671 - DNA, 76 bp, Artificial Sequence; identical to SEQ ID NO: 3418
  Description of Artificial Sequence: Synthetic walnut; 5' sequence + inner sequence + 3' sequence

SEQ ID NO: 31672 - DNA, 76 bp, Artificial Sequence
  Description of Artificial Sequence: Synthetic walnut; 5' sequence + inner sequence + 3' sequence
tagggaagagaaggacatatgatggccccagcgtacctcaacgtggacgtgcattgactagtacatgaccacttga

SEQ ID NO: 31673 - DNA, 76 bp, Artificial Sequence; identical to SEQ ID NO: 7621
  Description of Artificial Sequence: Synthetic walnut; 5' sequence + inner sequence + 3' sequence

SEQ ID NO: 31674 - DNA, 76 bp, Artificial Sequence
  Description of Artificial Sequence: Synthetic walnut; 5' sequence + inner sequence + 3' sequence
tagggaagagaaggacatatgatcgtgcgcaacgtagtcaccgtgcatgcacattgactagtacatgaccacttga

SEQ ID NO: 31675 - DNA, 76 bp, Artificial Sequence; identical to SEQ ID NO: 8000
  Description of Artificial Sequence: Synthetic walnut; 5' sequence + inner sequence + 3' sequence

SEQ ID NO: 31676 - DNA, 76 bp, Artificial Sequence; identical to SEQ ID NO: 7898
  Description of Artificial Sequence: Synthetic walnut; 5' sequence + inner sequence + 3' sequence

SEQ ID NO: 31677 - DNA, 76 bp, Artificial Sequence
  Description of Artificial Sequence: Synthetic walnut; 5' sequence + inner sequence + 3' sequence
tagggaagagaaggacatatgattgacgcacagaccgtacgtaccatgccacgttgactagtacatgaccacttga

SEQ ID NO: 31678 - DNA, 76 bp, Artificial Sequence
  Description of Artificial Sequence: Synthetic walnut; 5' sequence + inner sequence + 3' sequence
tagggaagagaaggacatatgatcgcatgcacgcacctacacgtgggcacgtattgactagtacatgaccacttga

SEQ ID NO: 31679 - DNA, 76 bp, Artificial Sequence
  Description of Artificial Sequence: Synthetic walnut; 5' sequence + inner sequence + 3' sequence
tagggaagagaaggacatatgatcgatacgcaacgcacaccgcccacgtcacgttgactagtacatgaccacttga

SEQ ID NO: 31680 - DNA, 76 bp, Artificial Sequence; identical to SEQ ID NO: 3487
  Description of Artificial Sequence: Synthetic walnut; 5' sequence + inner sequence + 3' sequence

SEQ ID NO: 31681 - DNA, 76 bp, Artificial Sequence
  Description of Artificial Sequence: Synthetic walnut; 5' sequence + inner sequence + 3' sequence
tagggaagagaaggacatatgatcgcaccgtcgatacgtcatgcacgctaacattgactagtacatgaccacttga

SEQ ID NO: 31682 - DNA, 76 bp, Artificial Sequence
  Description of Artificial Sequence: Synthetic walnut; 5' sequence + inner sequence + 3' sequence
tagggaagagaaggacatatgatacgtcacgcgtcaaggcacagtgcgtcacgttgactagtacatgaccacttga

SEQ ID NO: 31683 - DNA, 76 bp, Artificial Sequence
  Description of Artificial Sequence: Synthetic walnut; 5' sequence + inner sequence + 3' sequence
tagggaagagaaggacatatgatcgcaccaacggcatgcacacgtcgtacgcgttgactagtacatgaccacttga

SEQ ID NO: 31684 - DNA, 76 bp, Artificial Sequence; identical to SEQ ID NO: 23594
  Description of Artificial Sequence: Synthetic walnut; 5' sequence + inner sequence + 3' sequence

SEQ ID NO: 31685 - DNA, 76 bp, Artificial Sequence; identical to SEQ ID NO: 23880
  Description of Artificial Sequence: Synthetic walnut; 5' sequence + inner sequence + 3' sequence

SEQ ID NO: 31686 - DNA, 77 bp, Artificial Sequence
  Description of Artificial Sequence: Synthetic walnut; 5' sequence + inner sequence + 3' sequence
tagggaagagaaggacatatgatggcctgcgatggatggggacgtgacgccgtcttgactagtacatgaccacttga

SEQ ID NO: 31687 - DNA, 76 bp, Artificial Sequence; identical to SEQ ID NO: 3189
  Description of Artificial Sequence: Synthetic walnut; 5' sequence + inner sequence + 3' sequence

SEQ ID NO: 31688 - DNA, 76 bp, Artificial Sequence
  Description of Artificial Sequence: Synthetic walnut; 5' sequence + inner sequence + 3' sequence
tagggaagagaaggacatatgatgcgtcacggcagcatgcgtacgatcgcacgttgactagtacatgaccacttga

SEQ ID NO: 31689 - DNA, 76 bp, Artificial Sequence; identical to SEQ ID NO: 3955
  Description of Artificial Sequence: Synthetic walnut; 5' sequence + inner sequence + 3' sequence

SEQ ID NO: 31690 - DNA, 76 bp, Artificial Sequence; identical to SEQ ID NO: 3111
  Description of Artificial Sequence: Synthetic walnut; 5' sequence + inner sequence + 3' sequence

SEQ ID NO: 31691 - DNA, 76 bp, Artificial Sequence; identical to SEQ ID NO: 19931
  Description of Artificial Sequence: Synthetic walnut; 5' sequence + inner sequence + 3' sequence

SEQ ID NO: 31692 - DNA, 76 bp, Artificial Sequence
  Description of Artificial Sequence: Synthetic walnut; 5' sequence + inner sequence + 3' sequence
tagggaagagaaggacatatgatggcctgcgatggatgtgtgcgtgcattagcttgactagtacatgaccacttga

SEQ ID NO: 31693 - DNA, 76 bp, Artificial Sequence
  Description of Artificial Sequence: Synthetic walnut; 5' sequence + inner sequence + 3' sequence
tagggaagagaaggacatatgatcacgcatcgtgacgtagtgttcgcgccacgttgactagtacatgaccacttga

SEQ ID NO: 31694 - DNA, 76 bp, Artificial Sequence; identical to SEQ ID NO: 7694
  Description of Artificial Sequence: Synthetic walnut; 5' sequence + inner sequence + 3' sequence

SEQ ID NO: 31695 - DNA, 76 bp, Artificial Sequence; identical to SEQ ID NO: 7882
  Description of Artificial Sequence: Synthetic walnut; 5' sequence + inner sequence + 3' sequence

SEQ ID NO: 31696 - DNA, 76 bp, Artificial Sequence; identical to SEQ ID NO: 3472
  Description of Artificial Sequence: Synthetic walnut; 5' sequence + inner sequence + 3' sequence

SEQ ID NO: 31697 - DNA, 76 bp, Artificial Sequence
  Description of Artificial Sequence: Synthetic walnut; 5' sequence + inner sequence + 3' sequence
tagggaagagaaggacatatgatggcatgcacgcacctacacgggggcacgtattgactagtacatgaccacttga

SEQ ID NO: 31698 - DNA, 76 bp, Artificial Sequence; identical to SEQ ID NO: 23570
  Description of Artificial Sequence: Synthetic walnut; 5' sequence + inner sequence + 3' sequence

SEQ ID NO: 31699 - DNA, 76 bp, Artificial Sequence
  Description of Artificial Sequence: Synthetic walnut; 5' sequence + inner sequence + 3' sequence
tagggaagagaaggacatatgatcgtacgatgaccgcatggcacgtcgtcacgttgactagtacatgaccacttga

SEQ ID NO: 31700 - DNA, 76 bp, Artificial Sequence
  Description of Artificial Sequence: Synthetic walnut; 5' sequence + inner sequence + 3' sequence
tagggaagagaaggacatatgatcacgtaacgcaccgtaccacgacatgcgcattgactagtacatgaccacttga

SEQ ID NO: 31701 - DNA, 76 bp, Artificial Sequence
  Description of Artificial Sequence: Synthetic walnut; 5' sequence + inner sequence + 3' sequence
tagggaagagaaggacatatgatacgacaacgcagcaccgtgaggcaggcacgttgactagtacatgaccacttga

SEQ ID NO: 31702 - DNA, 76 bp, Artificial Sequence
  Description of Artificial Sequence: Synthetic walnut; 5' sequence + inner sequence + 3' sequence
tagggaagagaaggacatatgatggccgaacgcgcctacaagtgttgcatggattgactagtacatgaccacttga

SEQ ID NO: 31703 - DNA, 76 bp, Artificial Sequence; identical to SEQ ID NO: 23913
  Description of Artificial Sequence: Synthetic walnut; 5' sequence + inner sequence + 3' sequence

SEQ ID NO: 31704 - DNA, 76 bp, Artificial Sequence
  Description of Artificial Sequence: Synthetic walnut; 5' sequence + inner sequence + 3' sequence
tagggaagagaaggacatatgatgcacgatacgtaccgtggcatgtgcgcacattgactagtacatgaccacttga

SEQ ID NO: 31705 - DNA, 76 bp, Artificial Sequence
  Description of Artificial Sequence: Synthetic walnut; 5' sequence + inner sequence + 3' sequence
tagggaagagaaggacatatgatcgcaacggacgtgacgcatcgatctgcacgttgactagtacatgaccacttga

SEQ ID NO: 31706 - DNA, 76 bp, Artificial Sequence; identical to SEQ ID NO: 3916
  Description of Artificial Sequence: Synthetic walnut; 5' sequence + inner sequence + 3' sequence

SEQ ID NO: 31707 - DNA, 76 bp, Artificial Sequence; identical to SEQ ID NO: 23341
  Description of Artificial Sequence: Synthetic walnut; 5' sequence + inner sequence + 3' sequence

SEQ ID NO: 31708 - DNA, 76 bp, Artificial Sequence; identical to SEQ ID NO: 23903
  Description of Artificial Sequence: Synthetic walnut; 5' sequence + inner sequence + 3' sequence

SEQ ID NO: 31709 - DNA, 76 bp, Artificial Sequence
  Description of Artificial Sequence: Synthetic walnut; 5' sequence + inner sequence + 3' sequence
tagggaagagaaggacatatgatgtcatgcgatggatgtgtgcgtgtattagcttgactagtacatgaccacttga

SEQ ID NO: 31710 - DNA, 76 bp, Artificial Sequence; identical to SEQ ID NO: 19634
  Description of Artificial Sequence: Synthetic walnut; 5' sequence + inner sequence + 3' sequence

SEQ ID NO: 31711 - DNA, 76 bp, Artificial Sequence
  Description of Artificial Sequence: Synthetic walnut; 5' sequence + inner sequence + 3' sequence
tagggaagagaaggacatatgatggacgcatcgccccttcgagtgtacaggtattgactagtacatgaccacttga

SEQ ID NO: 31712 - DNA, 76 bp, Artificial Sequence
  Description of Artificial Sequence: Synthetic walnut; 5' sequence + inner sequence + 3' sequence
tagggaagagaaggacatatgatgctccgtacgatggctgtgctggtgatgtattgactagtacatgaccacttga

SEQ ID NO: 31713 - DNA, 76 bp, Artificial Sequence
  Description of Artificial Sequence: Synthetic walnut; 5' sequence + inner sequence + 3' sequence
tagggaagagaaggacatatgatgacacgcaacgcatcctaggtatgtacgcattgactagtacatgaccacttga

SEQ ID NO: 31714 - DNA, 76 bp, Artificial Sequence; identical to SEQ ID NO: 3923
  Description of Artificial Sequence: Synthetic walnut; 5' sequence + inner sequence + 3' sequence

SEQ ID NO: 31715 - DNA, 76 bp, Artificial Sequence; identical to SEQ ID NO: 3165
  Description of Artificial Sequence: Synthetic walnut; 5' sequence + inner sequence + 3' sequence

SEQ ID NO: 31716 - DNA, 76 bp, Artificial Sequence; identical to SEQ ID NO: 23972
  Description of Artificial Sequence: Synthetic walnut; 5' sequence + inner sequence + 3' sequence

SEQ ID NO: 31717 - DNA, 76 bp, Artificial Sequence; identical to SEQ ID NO: 23580
  Description of Artificial Sequence: Synthetic walnut; 5' sequence + inner sequence + 3' sequence

SEQ ID NO: 31718 - DNA, 76 bp, Artificial Sequence; identical to SEQ ID NO: 3373
  Description of Artificial Sequence: Synthetic walnut; 5' sequence + inner sequence + 3' sequence

SEQ ID NO: 31719 - DNA, 76 bp, Artificial Sequence; identical to SEQ ID NO: 23519
  Description of Artificial Sequence: Synthetic walnut; 5' sequence + inner sequence + 3' sequence

SEQ ID NO: 31720 - DNA, 76 bp, Artificial Sequence
  Description of Artificial Sequence: Synthetic walnut; 5' sequence + inner sequence + 3' sequence
tagggaagagaaggacatatgatcgatgcacgtaacgaccgtgtctgtacgcattgactagtacatgaccacttga

SEQ ID NO: 31721 - DNA, 76 bp, Artificial Sequence; identical to SEQ ID NO: 3490
  Description of Artificial Sequence: Synthetic walnut; 5' sequence + inner sequence + 3' sequence

SEQ ID NO: 31722 - DNA, 76 bp, Artificial Sequence
  Description of Artificial Sequence: Synthetic walnut; 5' sequence + inner sequence + 3' sequence
tagggaagagaaggacatatgatcgcgccgtcgatacgtcatgcacgctgacattgactagtacatgaccacttga

SEQ ID NO: 31723 - DNA, 76 bp, Artificial Sequence; identical to SEQ ID NO: 3511
  Description of Artificial Sequence: Synthetic walnut; 5' sequence + inner sequence + 3' sequence

SEQ ID NO: 31724 - DNA, 76 bp, Artificial Sequence; identical to SEQ ID NO: 23683
  Description of Artificial Sequence: Synthetic walnut; 5' sequence + inner sequence + 3' sequence

SEQ ID NO: 31725 - DNA, 76 bp, Artificial Sequence; identical to SEQ ID NO: 23653
  Description of Artificial Sequence: Synthetic walnut; 5' sequence + inner sequence + 3' sequence

SEQ ID NO: 31726 - DNA, 76 bp, Artificial Sequence; identical to SEQ ID NO: 19503
  Description of Artificial Sequence: Synthetic walnut; 5' sequence + inner sequence + 3' sequence

SEQ ID NO: 31727 - DNA, 71 bp, Artificial Sequence; identical to SEQ ID NO: 3427
  Description of Artificial Sequence: Synthetic walnut; 5' sequence + inner sequence + 3' sequence

SEQ ID NO: 31728 - DNA, 76 bp, Artificial Sequence; identical to SEQ ID NO: 3528
  Description of Artificial Sequence: Synthetic walnut; 5' sequence + inner sequence + 3' sequence

SEQ ID NO: 31729 - DNA, 76 bp, Artificial Sequence; identical to SEQ ID NO: 19412
  Description of Artificial Sequence: Synthetic walnut; 5' sequence + inner sequence + 3' sequence

SEQ ID NO: 31730 - DNA, 76 bp, Artificial Sequence; identical to SEQ ID NO: 3741
  Description of Artificial Sequence: Synthetic walnut; 5' sequence + inner sequence + 3' sequence

SEQ ID NO: 31731 - DNA, 76 bp, Artificial Sequence; identical to SEQ ID NO: 23385
  Description of Artificial Sequence: Synthetic walnut; 5' sequence + inner sequence + 3' sequence

SEQ ID NO: 31732 - DNA, 76 bp, Artificial Sequence; identical to SEQ ID NO: 3622
  Description of Artificial Sequence: Synthetic walnut; 5' sequence + inner sequence + 3' sequence

SEQ ID NO: 31733 - DNA, 76 bp, Artificial Sequence; identical to SEQ ID NO: 3695
  Description of Artificial Sequence: Synthetic walnut; 5' sequence + inner sequence + 3' sequence

SEQ ID NO: 31734 - DNA, 76 bp, Artificial Sequence; identical to SEQ ID NO: 7617
  Description of Artificial Sequence: Synthetic walnut; 5' sequence + inner sequence + 3' sequence

SEQ ID NO: 31735 - DNA, 76 bp, Artificial Sequence
  Description of Artificial Sequence: Synthetic walnut; 5' sequence + inner sequence + 3' sequence
tagggaagagaaggacatatgatcatgacggcatgacgtactgtgactgcgcgttgactagtacatgaccacttga

SEQ ID NO: 31736 - DNA, 76 bp, Artificial Sequence; identical to SEQ ID NO: 19513
  Description of Artificial Sequence: Synthetic walnut; 5' sequence + inner sequence + 3' sequence

SEQ ID NO: 31737 - DNA, 76 bp, Artificial Sequence
  Description of Artificial Sequence: Synthetic walnut; 5' sequence + inner sequence + 3' sequence
tagggaagagaaggacatatgatcgtaacgcagcggacgacacgttaggcacgttgactagtacatgaccacttga

SEQ ID NO: 31738 - DNA, 76 bp, Artificial Sequence; identical to SEQ ID NO: 23514
  Description of Artificial Sequence: Synthetic walnut; 5' sequence + inner sequence + 3' sequence

SEQ ID NO: 31739 - DNA, 76 bp, Artificial Sequence
  Description of Artificial Sequence: Synthetic walnut; 5' sequence + inner sequence + 3' sequence
tagggaagagaaggacatatgatgcatcacgtcacgcatgttcggcctgcacgttgactagtacatgaccacttga

SEQ ID NO: 31740 - DNA, 76 bp, Artificial Sequence
  Description of Artificial Sequence: Synthetic walnut; 5' sequence + inner sequence + 3' sequence
tagggaagagaaggacatatgatggctacagcgtacctcaacgtggacgtgcattgactagtacatgaccacttga

SEQ ID NO: 31741 - DNA, 76 bp, Artificial Sequence
  Description of Artificial Sequence: Synthetic walnut; 5' sequence + inner sequence + 3' sequence
tagggaagagaaggacatatgatggacgcagcgtgacgtaacgtgcatgcgtattgactagtacatgaccacttga

SEQ ID NO: 31742 - DNA, 76 bp, Artificial Sequence; identical to SEQ ID NO: 23657
  Description of Artificial Sequence: Synthetic walnut; 5' sequence + inner sequence + 3' sequence

SEQ ID NO: 31743 - DNA, 76 bp, Artificial Sequence
  Description of Artificial Sequence: Synthetic walnut; 5' sequence + inner sequence + 3' sequence
tagggaagagaaggacatatgatacgcaacgcaagtacgtatcgtgcgacacgttgactagtacatgaccacttga

SEQ ID NO: 31744 - DNA, 76 bp, Artificial Sequence
  Description of Artificial Sequence: Synthetic walnut; 5' sequence + inner sequence + 3' sequence
tagggaagagaaggacatatgatgacacgtcggaccgtacgacacgttgcgtgttgactagtacatgaccacttga

SEQ ID NO: 31745 - DNA, 76 bp, Artificial Sequence
  Description of Artificial Sequence: Synthetic walnut; 5' sequence + inner sequence + 3' sequence
tagggaagagaaggacatatgatggccggcgatggatgtgggttgtgctcgtcttgactagtacatgaccacttga

SEQ ID NO: 31746 - DNA, 76 bp, Artificial Sequence
  Description of Artificial Sequence: Synthetic walnut; 5' sequence + inner sequence + 3' sequence
tagggaagagaaggacatatgatggcatgcgatgaacgagggatgatgcgtcattgactagtacatgaccacttga

SEQ ID NO: 31747 - DNA, 76 bp, Artificial Sequence
  Description of Artificial Sequence: Synthetic walnut; 5' sequence + inner sequence + 3' sequence
tagggaagagaaggacatatgatgtccacagcgtacctcaacgtggacgtgcattgactagtacatgaccacttga

SEQ ID NO: 31748 - DNA, 76 bp, Artificial Sequence; identical to SEQ ID NO: 3705
  Description of Artificial Sequence: Synthetic walnut; 5' sequence + inner sequence + 3' sequence

SEQ ID NO: 31749 - DNA, 76 bp, Artificial Sequence; identical to SEQ ID NO: 3404
  Description of Artificial Sequence: Synthetic walnut; 5' sequence + inner sequence + 3' sequence

SEQ ID NO: 31750 - DNA, 76 bp, Artificial Sequence
  Description of Artificial Sequence: Synthetic walnut; 5' sequence + inner sequence + 3' sequence
tagggaagagaaggacatatgatcacgcgcagacacgatggcacggcgacacgttgactagtacatgaccacttga

SEQ ID NO: 31751 - DNA, 76 bp, Artificial Sequence
  Description of Artificial Sequence: Synthetic walnut; 5' sequence + inner sequence + 3' sequence
tagggaagagaaggacatatgatgacgcgaacacggcgcatacgtacgtcacgttgactagtacatgaccacttga

SEQ ID NO: 31752 - DNA, 76 bp, Artificial Sequence; identical to SEQ ID NO: 7854
  Description of Artificial Sequence: Synthetic walnut; 5' sequence + inner sequence + 3' sequence

SEQ ID NO: 31753 - DNA, 76 bp, Artificial Sequence
  Description of Artificial Sequence: Synthetic walnut; 5' sequence + inner sequence + 3' sequence
tagggaagagaaggacatatgatgcgtcacgtgcacgatccttccgtcatgcgttgactagtacatgaccacttga

SEQ ID NO: 31754 - DNA, 76 bp, Artificial Sequence
  Description of Artificial Sequence: Synthetic walnut; 5' sequence + inner sequence + 3' sequence
tagggaagagaaggacatatgatgcgtgccgatgacgtgcgtgtgacgtgatgttgactagtacatgaccacttga

SEQ ID NO: 31755 - DNA, 76 bp, Artificial Sequence
  Description of Artificial Sequence: Synthetic walnut; 5' sequence + inner sequence + 3' sequence
tagggaagagaaggacatatgatgcgacacggcatacggtgcgtacgtgcacattgactagtacatgaccacttga

SEQ ID NO: 31756 - DNA, 76 bp, Artificial Sequence
  Description of Artificial Sequence: Synthetic walnut; 5' sequence + inner sequence + 3' sequence
tagggaagagaaggacatatgatggcatgcgatgaacgaggcgtgatgcgtcattgactagtacatgaccacttga

SEQ ID NO: 31757 - DNA, 76 bp, Artificial Sequence
  Description of Artificial Sequence: Synthetic walnut; 5' sequence + inner sequence + 3' sequence
tagggaagagaaggacatatgatcgacgcagcgcaacgaccgtaccgcacacgttgactagtacatgaccacttga

SEQ ID NO: 31758 - DNA, 76 bp, Artificial Sequence; identical to SEQ ID NO: 11810
  Description of Artificial Sequence: Synthetic walnut; 5' sequence + inner sequence + 3' sequence

SEQ ID NO: 31759 - DNA, 76 bp, Artificial Sequence; identical to SEQ ID NO: 3226
  Description of Artificial Sequence: Synthetic walnut; 5' sequence + inner sequence + 3' sequence

SEQ ID NO: 31760 - DNA, 76 bp, Artificial Sequence
  Description of Artificial Sequence: Synthetic walnut; 5' sequence + inner sequence + 3' sequence
tagggaagagaaggacatatgatggcatcacgtacacatggcctcgcgtcacgttgactagtacatgaccacttga

SEQ ID NO: 31761 - DNA, 76 bp, Artificial Sequence
  Description of Artificial Sequence: Synthetic walnut; 5' sequence + inner sequence + 3' sequence
tagggaagagaaggacatatgatggcctgcgatggatgggggcttgcactgtcttgactagtacatgaccacttga

SEQ ID NO: 31762 - DNA, 76 bp, Artificial Sequence
  Description of Artificial Sequence: Synthetic walnut; 5' sequence + inner sequence + 3' sequence
tagggaagagaaggacatatgatcgcaccgtcgatacgtcatgcacgctgaaattgactagtacatgaccacttga

SEQ ID NO: 31763 - DNA, 76 bp, Artificial Sequence; identical to SEQ ID NO: 23672
  Description of Artificial Sequence: Synthetic walnut; 5' sequence + inner sequence + 3' sequence

SEQ ID NO: 31764 - DNA, 76 bp, Artificial Sequence; identical to SEQ ID NO: 3375
  Description of Artificial Sequence: Synthetic walnut; 5' sequence + inner sequence + 3' sequence

SEQ ID NO: 31765 - DNA, 76 bp, Artificial Sequence
  Description of Artificial Sequence: Synthetic walnut; 5' sequence + inner sequence + 3' sequence
tagggaagagaaggacatatgatggccgaacggagctacacggggttgtggacttgactagtacatgaccacttga

SEQ ID NO: 31766 - DNA, 76 bp, Artificial Sequence; identical to SEQ ID NO: 23466
  Description of Artificial Sequence: Synthetic walnut; 5' sequence + inner sequence + 3' sequence

SEQ ID NO: 31767 - DNA, 76 bp, Artificial Sequence; identical to SEQ ID NO: 11949
  Description of Artificial Sequence: Synthetic walnut; 5' sequence + inner sequence + 3' sequence

SEQ ID NO: 31768 - DNA, 76 bp, Artificial Sequence; identical to SEQ ID NO: 3284
  Description of Artificial Sequence: Synthetic walnut; 5' sequence + inner sequence + 3' sequence

SEQ ID NO: 31769 - DNA, 76 bp, Artificial Sequence; identical to SEQ ID NO: 23573
  Description of Artificial Sequence: Synthetic walnut; 5' sequence + inner sequence + 3' sequence

SEQ ID NO: 31770 - DNA, 76 bp, Artificial Sequence; identical to SEQ ID NO: 7691
  Description of Artificial Sequence: Synthetic walnut; 5' sequence + inner sequence + 3' sequence

SEQ ID NO: 31771 - DNA, 76 bp, Artificial Sequence
  Description of Artificial Sequence: Synthetic walnut; 5' sequence + inner sequence + 3' sequence
tagggaagagaaggacatatgatccacgcagacgtcacgcatcgtaccgcacgttgactagtacatgaccacttga

SEQ ID NO: 31772 - DNA, 76 bp, Artificial Sequence
  Description of Artificial Sequence: Synthetic walnut; 5' sequence + inner sequence + 3' sequence
tagggaagagaaggacatatgatggccacagcgtatctcaacgtggacgtgcattgactagtacatgaccacttga

SEQ ID NO: 31773 - DNA, 76 bp, Artificial Sequence
  Description of Artificial Sequence: Synthetic walnut; 5' sequence + inner sequence + 3' sequence
tagggaagagaaggacatatgatggcctgcgatggatgggggctggggcagtcttgactagtacatgaccacttga

SEQ ID NO: 31774 - DNA, 76 bp, Artificial Sequence; identical to SEQ ID NO: 19627
  Description of Artificial Sequence: Synthetic walnut; 5' sequence + inner sequence + 3' sequence

SEQ ID NO: 31775 - DNA, 76 bp, Artificial Sequence; identical to SEQ ID NO: 3169
  Description of Artificial Sequence: Synthetic walnut; 5' sequence + inner sequence + 3' sequence

SEQ ID NO: 31776 - DNA, 76 bp, Artificial Sequence
  Description of Artificial Sequence: Synthetic walnut; 5' sequence + inner sequence + 3' sequence
tagggaagagaaggacatatgatcgtgccgcaacgtgaggacgtgcatgtgcgttgactagtacatgaccacttga

SEQ ID NO: 31777 - DNA, 76 bp, Artificial Sequence
  Description of Artificial Sequence: Synthetic walnut; 5' sequence + inner sequence + 3' sequence
tagggaagagaaggacatatgatggcatgcacgcccctacacgtgggcacgtattgactagtacatgaccacttga

SEQ ID NO: 31778 - DNA, 76 bp, Artificial Sequence; identical to SEQ ID NO: 23964
  Description of Artificial Sequence: Synthetic walnut; 5' sequence + inner sequence + 3' sequence

SEQ ID NO: 31779 - DNA, 76 bp, Artificial Sequence
  Description of Artificial Sequence: Synthetic walnut; 5' sequence + inner sequence + 3' sequence
tagggaagagaaggacatatgatggcctgcgatggatgtgtgcttgtattagcttgactagtacatgaccacttga

SEQ ID NO: 31780 - DNA, 76 bp, Artificial Sequence
  Description of Artificial Sequence: Synthetic walnut; 5' sequence + inner sequence + 3' sequence
tagggaagagaaggacatatgatcgacacacaggcaacatgcgttccgtcacgttgactagtacatgaccacttga

SEQ ID NO: 31781 - DNA, 76 bp, Artificial Sequence; identical to SEQ ID NO: 19819
  Description of Artificial Sequence: Synthetic walnut; 5' sequence + inner sequence + 3' sequence

SEQ ID NO: 31782 - DNA, 76 bp, Artificial Sequence
  Description of Artificial Sequence: Synthetic walnut; 5' sequence + inner sequence + 3' sequence
tagggaagagaaggacatatgatggccgcaacgtaccgtatcgtggccatgtgttgactagtacatgaccacttga

SEQ ID NO: 31783 - DNA, 76 bp, Artificial Sequence; identical to SEQ ID NO: 11926
  Description of Artificial Sequence: Synthetic walnut; 5' sequence + inner sequence + 3' sequence

SEQ ID NO: 31784 - DNA, 76 bp, Artificial Sequence; identical to SEQ ID NO: 23960
  Description of Artificial Sequence: Synthetic walnut; 5' sequence + inner sequence + 3' sequence

SEQ ID NO: 31785 - DNA, 76 bp, Artificial Sequence; identical to SEQ ID NO: 3782
  Description of Artificial Sequence: Synthetic walnut; 5' sequence + inner sequence + 3' sequence

SEQ ID NO: 31786 - DNA, 76 bp, Artificial Sequence; identical to SEQ ID NO: 3399
  Description of Artificial Sequence: Synthetic walnut; 5' sequence + inner sequence + 3' sequence

SEQ ID NO: 31787 - DNA, 76 bp, Artificial Sequence; identical to SEQ ID NO: 19544
  Description of Artificial Sequence: Synthetic walnut; 5' sequence + inner sequence + 3' sequence

SEQ ID NO: 31788 - DNA, 76 bp, Artificial Sequence; identical to SEQ ID NO: 19595
  Description of Artificial Sequence: Synthetic walnut; 5' sequence + inner sequence + 3' sequence

SEQ ID NO: 31789 - DNA, 76 bp, Artificial Sequence; identical to SEQ ID NO: 19457
  Description of Artificial Sequence: Synthetic walnut; 5' sequence + inner sequence + 3' sequence

SEQ ID NO: 31790 - DNA, 76 bp, Artificial Sequence; identical to SEQ ID NO: 19703
  Description of Artificial Sequence: Synthetic walnut; 5' sequence + inner sequence + 3' sequence

SEQ ID NO: 31791 - DNA, 76 bp, Artificial Sequence
  Description of Artificial Sequence: Synthetic walnut; 5' sequence + inner sequence + 3' sequence
tagggaagagaaggacatatgatgtcattcctcatcctacacgtgggcacgtattgactagtacatgaccacttga

SEQ ID NO: 31792 - DNA, 76 bp, Artificial Sequence
  Description of Artificial Sequence: Synthetic walnut; 5' sequence + inner sequence + 3' sequence
tagggaagagaaggacatatgatcgcaccgtggatacgtcatgcacgctgacattgactagtacatgaccacttga

SEQ ID NO: 31793 - DNA, 76 bp, Artificial Sequence
  Description of Artificial Sequence: Synthetic walnut; 5' sequence + inner sequence + 3' sequence
tagggaagagaaggacatatgatcgtgacgaacggccaacacgtcacttcgcgttgactagtacatgaccacttga

SEQ ID NO: 31794 - DNA, 76 bp, Artificial Sequence
  Description of Artificial Sequence: Synthetic walnut; 5' sequence + inner sequence + 3' sequence
tagggaagagaaggacatatgatggcatgcacgcacctacacgtgggcatgtattgactagtacatgaccacttga

SEQ ID NO: 31795 - DNA, 76 bp, Artificial Sequence; identical to SEQ ID NO: 3742
  Description of Artificial Sequence: Synthetic walnut; 5' sequence + inner sequence + 3' sequence

SEQ ID NO: 31796 - DNA, 76 bp, Artificial Sequence; identical to SEQ ID NO: 3524
  Description of Artificial Sequence: Synthetic walnut; 5' sequence + inner sequence + 3' sequence

SEQ ID NO: 31797 - DNA, 76 bp, Artificial Sequence; identical to SEQ ID NO: 7893
  Description of Artificial Sequence: Synthetic walnut; 5' sequence + inner sequence + 3' sequence

SEQ ID NO: 31798 - DNA, 76 bp, Artificial Sequence; identical to SEQ ID NO: 11825
  Description of Artificial Sequence: Synthetic walnut; 5' sequence + inner sequence + 3' sequence

SEQ ID NO: 31799 - DNA, 76 bp, Artificial Sequence; identical to SEQ ID NO: 3816
  Description of Artificial Sequence: Synthetic walnut; 5' sequence + inner sequence + 3' sequence

SEQ ID NO: 31800 - DNA, 76 bp, Artificial Sequence
  Description of Artificial Sequence: Synthetic walnut; 5' sequence + inner sequence + 3' sequence
tagggaagagaaggacatatgatcgacaacgcaacgaacagcaggcatgcgtgttgactagtacatgaccacttga

SEQ ID NO: 31801 - DNA, 76 bp, Artificial Sequence
  Description of Artificial Sequence: Synthetic walnut; 5' sequence + inner sequence + 3' sequence
tagggaagagaaggacatatgatggccacagtgtacctcaacgtggacgtgcattgactagtacatgaccacttga

SEQ ID NO: 31802 - DNA, 76 bp, Artificial Sequence; identical to SEQ ID NO: 7881
  Description of Artificial Sequence: Synthetic walnut; 5' sequence + inner sequence + 3' sequence

SEQ ID NO: 31803 - DNA, 76 bp, Artificial Sequence; identical to SEQ ID NO: 23914
  Description of Artificial Sequence: Synthetic walnut; 5' sequence + inner sequence + 3' sequence

SEQ ID NO: 31804 - DNA, 76 bp, Artificial Sequence; identical to SEQ ID NO: 7814
  Description of Artificial Sequence: Synthetic walnut; 5' sequence + inner sequence + 3' sequence

SEQ ID NO: 31805 - DNA, 76 bp, Artificial Sequence
  Description of Artificial Sequence: Synthetic walnut; 5' sequence + inner sequence + 3' sequence
tagggaagagaaggacatatgatcgccacgatgtacgtcacgctacatgcacattgactagtacatgaccacttga

SEQ ID NO: 31806 - DNA, 76 bp, Artificial Sequence
  Description of Artificial Sequence: Synthetic walnut; 5' sequence + inner sequence + 3' sequence
tagggaagagaaggacatatgatgtcattccgcatcctccacgtgggcacgtattgactagtacatgaccacttga

SEQ ID NO: 31807 - DNA, 76 bp, Artificial Sequence; identical to SEQ ID NO: 7364
  Description of Artificial Sequence: Synthetic walnut; 5' sequence + inner sequence + 3' sequence

SEQ ID NO: 31808 - DNA, 76 bp, Artificial Sequence
  Description of Artificial Sequence: Synthetic walnut; 5' sequence + inner sequence + 3' sequence
tagggaagagaaggacatatgatcgtgcgcgatgaacacgtcctaccgtcacgttgactagtacatgaccacttga

SEQ ID NO: 31809 - DNA, 76 bp, Artificial Sequence; identical to SEQ ID NO: 3380
  Description of Artificial Sequence: Synthetic walnut; 5' sequence + inner sequence + 3' sequence

SEQ ID NO: 31810 - DNA, 76 bp, Artificial Sequence; identical to SEQ ID NO: 3520
  Description of Artificial Sequence: Synthetic walnut; 5' sequence + inner sequence + 3' sequence

SEQ ID NO: 31811 - DNA, 76 bp, Artificial Sequence
  Description of Artificial Sequence: Synthetic walnut; 5' sequence + inner sequence + 3' sequence
tagggaagagaaggacatatgatggacgcatcgccacttcgagtggacaggtattgactagtacatgaccacttga

SEQ ID NO: 31812 - DNA, 76 bp, Artificial Sequence; identical to SEQ ID NO: 3835
  Description of Artificial Sequence: Synthetic walnut; 5' sequence + inner sequence + 3' sequence

SEQ ID NO: 31813 - DNA, 76 bp, Artificial Sequence; identical to SEQ ID NO: 3662
  Description of Artificial Sequence: Synthetic walnut; 5' sequence + inner sequence + 3' sequence

SEQ ID NO: 31814 - DNA, 76 bp, Artificial Sequence
  Description of Artificial Sequence: Synthetic walnut; 5' sequence + inner sequence + 3' sequence
tagggaagagaaggacatatgatcgaggcagcgtgtgcacgtacgtatgcgcattgactagtacatgaccacttga

SEQ ID NO: 31815 - DNA, 76 bp, Artificial Sequence; identical to SEQ ID NO: 19720
  Description of Artificial Sequence: Synthetic walnut; 5' sequence + inner sequence + 3' sequence

SEQ ID NO: 31816 - DNA, 77 bp, Artificial Sequence
  Description of Artificial Sequence: Synthetic walnut; 5' sequence + inner sequence + 3' sequence
tagggaagagaaggacatatgatggcatgcgatggatgtggacggtgtggtagtttgactagtacatgaccacttga

SEQ ID NO: 31817 - DNA, 76 bp, Artificial Sequence; identical to SEQ ID NO: 3301
  Description of Artificial Sequence: Synthetic walnut; 5' sequence + inner sequence + 3' sequence

SEQ ID NO: 31818 - DNA, 76 bp, Artificial Sequence
  Description of Artificial Sequence: Synthetic walnut; 5' sequence + inner sequence + 3' sequence
tagggaagagaaggacatatgatgcaacacgatgcatacgtgacgcacgcacgttgactagtacatgaccacttga

SEQ ID NO: 31819 - DNA, 76 bp, Artificial Sequence
  Description of Artificial Sequence: Synthetic walnut; 5' sequence + inner sequence + 3' sequence
tagggaagagaaggacatatgatggacgcatcgccccttcgattggacaggtattgactagtacatgaccacttga

SEQ ID NO: 31820 - DNA, 76 bp, Artificial Sequence
  Description of Artificial Sequence: Synthetic walnut; 5' sequence + inner sequence + 3' sequence
tagggaagagaaggacatatgatgcaccacacgacagcacgccagcatgcacgttgactagtacatgaccacttga

SEQ ID NO: 31821 - DNA, 76 bp, Artificial Sequence
  Description of Artificial Sequence: Synthetic walnut; 5' sequence + inner sequence + 3' sequence
tagggaagagaaggacatatgatggccacagcgtccctcaacgtggacgtgcattgactagtacatgaccacttga

SEQ ID NO: 31822 - DNA, 76 bp, Artificial Sequence
  Description of Artificial Sequence: Synthetic walnut; 5' sequence + inner sequence + 3' sequence
tagggaagagaaggacatatgatgtccgacgatggatgtgggttgtgctcgtcttgactagtacatgaccacttga

SEQ ID NO: 31823 - DNA, 76 bp, Artificial Sequence
  Description of Artificial Sequence: Synthetic walnut; 5' sequence + inner sequence + 3' sequence
tagggaagagaaggacatatgatgtgcgccacgactccctactcatgggggcattgactagtacatgaccacttga

SEQ ID NO: 31824 - DNA, 76 bp, Artificial Sequence
  Description of Artificial Sequence: Synthetic walnut; 5' sequence + inner sequence + 3' sequence
tagggaagagaaggacatatgatggcatgcacgcacctacaggtgggcacgtattgactagtacatgaccacttga

SEQ ID NO: 31825 - DNA, 76 bp, Artificial Sequence; identical to SEQ ID NO: 15799
  Description of Artificial Sequence: Synthetic walnut; 5' sequence + inner sequence + 3' sequence

SEQ ID NO: 31826 - DNA, 76 bp, Artificial Sequence
  Description of Artificial Sequence: Synthetic walnut; 5' sequence + inner sequence + 3' sequence
tagggaagagaaggacatatgatgcaccacaacgccgtaacgcacgtcacgcattgactagtacatgaccacttga

SEQ ID NO: 31827 - DNA, 76 bp, Artificial Sequence; identical to SEQ ID NO: 7938
  Description of Artificial Sequence: Synthetic walnut; 5' sequence + inner sequence + 3' sequence

SEQ ID NO: 31828 - DNA, 76 bp, Artificial Sequence; identical to SEQ ID NO: 19696
  Description of Artificial Sequence: Synthetic walnut; 5' sequence + inner sequence + 3' sequence

SEQ ID NO: 31829 - DNA, 76 bp, Artificial Sequence; identical to SEQ ID NO: 3635
  Description of Artificial Sequence: Synthetic walnut; 5' sequence + inner sequence + 3' sequence

SEQ ID NO: 31830 - DNA, 76 bp, Artificial Sequence
  Description of Artificial Sequence: Synthetic walnut; 5' sequence + inner sequence + 3' sequence
tagggaagagaaggacatatgatgcatgcacgcaacagcacgtgtcctgcgcattgactagtacatgaccacttga

SEQ ID NO: 31831 - DNA, 76 bp, Artificial Sequence
  Description of Artificial Sequence: Synthetic walnut; 5' sequence + inner sequence + 3' sequence
tagggaagagaaggacatatgatcacgcgacgagacgacatcgacgtaacgcgttgactagtacatgaccacttga

SEQ ID NO: 31832 - DNA, 76 bp, Artificial Sequence
  Description of Artificial Sequence: Synthetic walnut; 5' sequence + inner sequence + 3' sequence
tagggaagagaaggacatatgatggcctgactgggtgtggttaggaacgcgtcttgactagtacatgaccacttga

SEQ ID NO: 31833 - DNA, 76 bp, Artificial Sequence; identical to SEQ ID NO: 3374
  Description of Artificial Sequence: Synthetic walnut; 5' sequence + inner sequence + 3' sequence

SEQ ID NO: 31834 - DNA, 76 bp, Artificial Sequence; identical to SEQ ID NO: 23541
  Description of Artificial Sequence: Synthetic walnut; 5' sequence + inner sequence + 3' sequence

SEQ ID NO: 31835 - DNA, 76 bp, Artificial Sequence; identical to SEQ ID NO: 3387
  Description of Artificial Sequence: Synthetic walnut; 5' sequence + inner sequence + 3' sequence

SEQ ID NO: 31836 - DNA, 76 bp, Artificial Sequence
  Description of Artificial Sequence: Synthetic walnut; 5' sequence + inner sequence + 3' sequence
tagggaagagaaggacatatgatcgtcacgcacaggacgacacggtacgcacattgactagtacatgaccacttga

SEQ ID NO: 31837 - DNA, 76 bp, Artificial Sequence; identical to SEQ ID NO: 19264
  Description of Artificial Sequence: Synthetic walnut; 5' sequence + inner sequence + 3' sequence

SEQ ID NO: 31838 - DNA, 76 bp, Artificial Sequence; identical to SEQ ID NO: 19862
  Description of Artificial Sequence: Synthetic walnut; 5' sequence + inner sequence + 3' sequence

SEQ ID NO: 31839 - DNA, 76 bp, Artificial Sequence
  Description of Artificial Sequence: Synthetic walnut; 5' sequence + inner sequence + 3' sequence
tagggaagagaaggacatatgatggacgcaacgtaccgtatcgtggccatgcgttgactagtacatgaccacttga

SEQ ID NO: 31840 - DNA, 76 bp, Artificial Sequence; identical to SEQ ID NO: 3637
  Description of Artificial Sequence: Synthetic walnut; 5' sequence + inner sequence + 3' sequence

SEQ ID NO: 31841 - DNA, 76 bp, Artificial Sequence; identical to SEQ ID NO: 23817
  Description of Artificial Sequence: Synthetic walnut; 5' sequence + inner sequence + 3' sequence

SEQ ID NO: 31842 - DNA, 76 bp, Artificial Sequence; identical to SEQ ID NO: 3644
  Description of Artificial Sequence: Synthetic walnut; 5' sequence + inner sequence + 3' sequence

SEQ ID NO: 31843 - DNA, 76 bp, Artificial Sequence
  Description of Artificial Sequence: Synthetic walnut; 5' sequence + inner sequence + 3' sequence
tagggaagagaaggacatatgatggccgcacgacccttcatgtggtcttcgtattgactagtacatgaccacttga

SEQ ID NO: 31844 - DNA, 76 bp, Artificial Sequence
  Description of Artificial Sequence: Synthetic walnut; 5' sequence + inner sequence + 3' sequence
tagggaagagaaggacatatgatgtcattccgcatcctaaacgtgggcacgtattgactagtacatgaccacttga

SEQ ID NO: 31845 - DNA, 76 bp, Artificial Sequence; identical to SEQ ID NO: 3181
  Description of Artificial Sequence: Synthetic walnut; 5' sequence + inner sequence + 3' sequence

SEQ ID NO: 31846 - DNA, 76 bp, Artificial Sequence
  Description of Artificial Sequence: Synthetic walnut; 5' sequence + inner sequence + 3' sequence
tagggaagagaaggacatatgatcgatgcgcaacgtgcagaccatgtgtcgcgttgactagtacatgaccacttga

SEQ ID NO: 31847 - DNA, 76 bp, Artificial Sequence; identical to SEQ ID NO: 23502
  Description of Artificial Sequence: Synthetic walnut; 5' sequence + inner sequence + 3' sequence

SEQ ID NO: 31848 - DNA, 76 bp, Artificial Sequence
  Description of Artificial Sequence: Synthetic walnut; 5' sequence + inner sequence + 3' sequence
tagggaagagaaggacatatgatgcgaacacgatgcagtacgtgacatgcgcgttgactagtacatgaccacttga

SEQ ID NO: 31849 - DNA, 76 bp, Artificial Sequence
  Description of Artificial Sequence: Synthetic walnut; 5' sequence + inner sequence + 3' sequence
tagggaagagaaggacatatgatccgacctcgacctcggtggacatacgtgacttgactagtacatgaccacttga

SEQ ID NO: 31850 - DNA, 76 bp, Artificial Sequence; identical to SEQ ID NO: 3288
  Description of Artificial Sequence: Synthetic walnut; 5' sequence + inner sequence + 3' sequence

SEQ ID NO: 31851 - DNA, 76 bp, Artificial Sequence; identical to SEQ ID NO: 23899
  Description of Artificial Sequence: Synthetic walnut; 5' sequence + inner sequence + 3' sequence

SEQ ID NO: 31852 - DNA, 76 bp, Artificial Sequence; identical to SEQ ID NO: 7888
  Description of Artificial Sequence: Synthetic walnut; 5' sequence + inner sequence + 3' sequence

SEQ ID NO: 31853 - DNA, 76 bp, Artificial Sequence; identical to SEQ ID NO: 3211
  Description of Artificial Sequence: Synthetic walnut; 5' sequence + inner sequence + 3' sequence

SEQ ID NO: 31854 - DNA, 76 bp, Artificial Sequence; identical to SEQ ID NO: 11978
  Description of Artificial Sequence: Synthetic walnut; 5' sequence + inner sequence + 3' sequence

SEQ ID NO: 31855 - DNA, 76 bp, Artificial Sequence; identical to SEQ ID NO: 3580
  Description of Artificial Sequence: Synthetic walnut; 5' sequence + inner sequence + 3' sequence

SEQ ID NO: 31856 - DNA, 76 bp, Artificial Sequence; identical to SEQ ID NO: 3344
  Description of Artificial Sequence: Synthetic walnut; 5' sequence + inner sequence + 3' sequence

SEQ ID NO: 31857 - DNA, 76 bp, Artificial Sequence
  Description of Artificial Sequence: Synthetic walnut; 5' sequence + inner sequence + 3' sequence
tagggaagagaaggacatatgatggacgcatcgccccttcgagcggacaggtattgactagtacatgaccacttga

SEQ ID NO: 31858 - DNA, 76 bp, Artificial Sequence
  Description of Artificial Sequence: Synthetic walnut; 5' sequence + inner sequence + 3' sequence
tagggaagagaaggacatatgatcgcaccgtcgattcgtcatgcacgctgacattgactagtacatgaccacttga

SEQ ID NO: 31859 - DNA, 76 bp, Artificial Sequence; identical to SEQ ID NO: 3365
  Description of Artificial Sequence: Synthetic walnut; 5' sequence + inner sequence + 3' sequence

SEQ ID NO: 31860 - DNA, 76 bp, Artificial Sequence
  Description of Artificial Sequence: Synthetic walnut; 5' sequence + inner sequence + 3' sequence
tagggaagagaaggacatatgatcgatgcagcgtgacgtgcgaggacatcgcgttgactagtacatgaccacttga

SEQ ID NO: 31861 - DNA, 76 bp, Artificial Sequence
  Description of Artificial Sequence: Synthetic walnut; 5' sequence + inner sequence + 3' sequence
tagggaagagaaggacatatgattgcatgcacgcacctacacgtgggcacgtattgactagtacatgaccacttga

SEQ ID NO: 31862 - DNA, 76 bp, Artificial Sequence; identical to SEQ ID NO: 7579
  Description of Artificial Sequence: Synthetic walnut; 5' sequence + inner sequence + 3' sequence

SEQ ID NO: 31863 - DNA, 76 bp, Artificial Sequence; identical to SEQ ID NO: 3431
  Description of Artificial Sequence: Synthetic walnut; 5' sequence + inner sequence + 3' sequence

SEQ ID NO: 31864 - DNA, 76 bp, Artificial Sequence
  Description of Artificial Sequence: Synthetic walnut; 5' sequence + inner sequence + 3' sequence
tagggaagagaaggacatatgatcgtgacgaacgcggactgtacgcatgcacgttgactagtacatgaccacttga

SEQ ID NO: 31865 - DNA, 76 bp, Artificial Sequence; identical to SEQ ID NO: 15521
  Description of Artificial Sequence: Synthetic walnut; 5' sequence + inner sequence + 3' sequence

SEQ ID NO: 31866 - DNA, 76 bp, Artificial Sequence
  Description of Artificial Sequence: Synthetic walnut; 5' sequence + inner sequence + 3' sequence
tagggaagagaaggacatatgatgtcattccgcattctacacgtgggcacgtattgactagtacatgaccacttga

SEQ ID NO: 31867 - DNA, 77 bp, Artificial Sequence; identical to SEQ ID NO: 23870
  Description of Artificial Sequence: Synthetic walnut; 5' sequence + inner sequence + 3' sequence

SEQ ID NO: 31868 - DNA, 76 bp, Artificial Sequence; identical to SEQ ID NO: 7943
  Description of Artificial Sequence: Synthetic walnut; 5' sequence + inner sequence + 3' sequence

SEQ ID NO: 31869 - DNA, 76 bp, Artificial Sequence
  Description of Artificial Sequence: Synthetic walnut; 5' sequence + inner sequence + 3' sequence
tagggaagagaaggacatatgatgcgtcacggatcacggtctgcatcgacacgttgactagtacatgaccacttga

SEQ ID NO: 31870 - DNA, 76 bp, Artificial Sequence; identical to SEQ ID NO: 3285
  Description of Artificial Sequence: Synthetic walnut; 5' sequence + inner sequence + 3' sequence

SEQ ID NO: 31871 - DNA, 76 bp, Artificial Sequence; identical to SEQ ID NO: 3787
  Description of Artificial Sequence: Synthetic walnut; 5' sequence + inner sequence + 3' sequence

SEQ ID NO: 31872 - DNA, 76 bp, Artificial Sequence
  Description of Artificial Sequence: Synthetic walnut; 5' sequence + inner sequence + 3' sequence
tagggaagagaaggacatatgatcgacacacaccagcacgtcacgacatcgcgttgactagtacatgaccacttga

SEQ ID NO: 31873 - DNA, 76 bp, Artificial Sequence; identical to SEQ ID NO: 19950
  Description of Artificial Sequence: Synthetic walnut; 5' sequence + inner sequence + 3' sequence

SEQ ID NO: 31874 - DNA, 76 bp, Artificial Sequence
  Description of Artificial Sequence: Synthetic walnut; 5' sequence + inner sequence + 3' sequence
tagggaagagaaggacatatgatcgtgccgtggtacgatgccgctacgtcacgttgactagtacatgaccacttga

SEQ ID NO: 31875 - DNA, 76 bp, Artificial Sequence; identical to SEQ ID NO: 3943
  Description of Artificial Sequence: Synthetic walnut; 5' sequence + inner sequence + 3' sequence

SEQ ID NO: 31876 - DNA, 76 bp, Artificial Sequence
  Description of Artificial Sequence: Synthetic walnut; 5' sequence + inner sequence + 3' sequence
tagggaagagaaggacatatgatcacgccacacgtcctgcctgcacgcgcacgttgactagtacatgaccacttga

SEQ ID NO: 31877 - DNA, 76 bp, Artificial Sequence
  Description of Artificial Sequence: Synthetic walnut; 5' sequence + inner sequence + 3' sequence
tagggaagagaaggacatatgatcgacacgcagagcaacgccatgtcgacgcattgactagtacatgaccacttga

SEQ ID NO: 31878 - DNA, 76 bp, Artificial Sequence
  Description of Artificial Sequence: Synthetic walnut; 5' sequence + inner sequence + 3' sequence
tagggaagagaaggacatatgatggccacagcgtacctcaacgtggtcgtgcattgactagtacatgaccacttga

SEQ ID NO: 31879 - DNA, 76 bp, Artificial Sequence
  Description of Artificial Sequence: Synthetic walnut; 5' sequence + inner sequence + 3' sequence
tagggaagagaaggacatatgatgtacgacgcggaccttcaagttggcgtggattgactagtacatgaccacttga

SEQ ID NO: 31880 - DNA, 76 bp, Artificial Sequence
  Description of Artificial Sequence: Synthetic walnut; 5' sequence + inner sequence + 3' sequence
tagggaagagaaggacatatgatggcctgcgatgtatgtgtgcgtgtattagcttgactagtacatgaccacttga

SEQ ID NO: 31881 - DNA, 76 bp, Artificial Sequence; identical to SEQ ID NO: 23982
  Description of Artificial Sequence: Synthetic walnut; 5' sequence + inner sequence + 3' sequence

SEQ ID NO: 31882 - DNA, 76 bp, Artificial Sequence; identical to SEQ ID NO: 19770
  Description of Artificial Sequence: Synthetic walnut; 5' sequence + inner sequence + 3' sequence

SEQ ID NO: 31883 - DNA, 76 bp, Artificial Sequence
  Description of Artificial Sequence: Synthetic walnut; 5' sequence + inner sequence + 3' sequence
tagggaagagaaggacatatgatgcactgcactgccctacacgtgggaatggattgactagtacatgaccacttga

SEQ ID NO: 31884 - DNA, 76 bp, Artificial Sequence
  Description of Artificial Sequence: Synthetic walnut; 5' sequence + inner sequence + 3' sequence
tagggaagagaaggacatatgatgtcactgtgtctgaccgtcaagttgcggcattgactagtacatgaccacttga

SEQ ID NO: 31885 - DNA, 76 bp, Artificial Sequence
  Description of Artificial Sequence: Synthetic walnut; 5' sequence + inner sequence + 3' sequence
tagggaagagaaggacatatgatcacgccagccaagcacgaggcacacgcgcattgactagtacatgaccacttga

SEQ ID NO: 31886 - DNA, 76 bp, Artificial Sequence
  Description of Artificial Sequence: Synthetic walnut; 5' sequence + inner sequence + 3' sequence
tagggaagagaaggacatatgatggactgcactgccctacacgtgggaatggattgactagtacatgaccacttga

SEQ ID NO: 31887 - DNA, 75 bp, Artificial Sequence
  Description of Artificial Sequence: Synthetic walnut; 5' sequence + inner sequence + 3' sequence
tagggaagagaaggacatatgatggcctgcgatggatgtgggatggtctagcttgactagtacatgaccacttga

SEQ ID NO: 31888 - DNA, 76 bp, Artificial Sequence
  Description of Artificial Sequence: Synthetic walnut; 5' sequence + inner sequence + 3' sequence
tagggaagagaaggacatatgatggacgcatcgccccttctagtggacaggtattgactagtacatgaccacttga

SEQ ID NO: 31889 - DNA, 72 bp, Artificial Sequence; identical to SEQ ID NO: 3822
  Description of Artificial Sequence: Synthetic walnut; 5' sequence + inner sequence + 3' sequence

SEQ ID NO: 31890 - DNA, 76 bp, Artificial Sequence; identical to SEQ ID NO: 3920
  Description of Artificial Sequence: Synthetic walnut; 5' sequence + inner sequence + 3' sequence

SEQ ID NO: 31891 - DNA, 76 bp, Artificial Sequence
  Description of Artificial Sequence: Synthetic walnut; 5' sequence + inner sequence + 3' sequence
tagggaagagaaggacatatgatcgacgcgcaacacggaggcacgatggcacgttgactagtacatgaccacttga

SEQ ID NO: 31892 - DNA, 76 bp, Artificial Sequence; identical to SEQ ID NO: 3325
  Description of Artificial Sequence: Synthetic walnut; 5' sequence + inner sequence + 3' sequence

SEQ ID NO: 31893 - DNA, 76 bp, Artificial Sequence; identical to SEQ ID NO: 3305
  Description of Artificial Sequence: Synthetic walnut; 5' sequence + inner sequence + 3' sequence

SEQ ID NO: 31894 - DNA, 76 bp, Artificial Sequence
  Description of Artificial Sequence: Synthetic walnut; 5' sequence + inner sequence + 3' sequence
tagggaagagaaggacatatgatggcatgcacgcacctccacgtgggcacgtattgactagtacatgaccacttga

SEQ ID NO: 31895 - DNA, 76 bp, Artificial Sequence; identical to SEQ ID NO: 3776
  Description of Artificial Sequence: Synthetic walnut; 5' sequence + inner sequence + 3' sequence

SEQ ID NO: 31896 - DNA, 76 bp, Artificial Sequence
  Description of Artificial Sequence: Synthetic walnut; 5' sequence + inner sequence + 3' sequence
tagggaagagaaggacatatgatggcctgcgatggatgtgtgcgtgtattatcttgactagtacatgaccacttga

SEQ ID NO: 31897 - DNA, 76 bp, Artificial Sequence; identical to SEQ ID NO: 3500
  Description of Artificial Sequence: Synthetic walnut; 5' sequence + inner sequence + 3' sequence

SEQ ID NO: 31898 - DNA, 76 bp, Artificial Sequence; identical to SEQ ID NO: 23998
  Description of Artificial Sequence: Synthetic walnut; 5' sequence + inner sequence + 3' sequence

SEQ ID NO: 31899 - DNA, 76 bp, Artificial Sequence; identical to SEQ ID NO: 23807
  Description of Artificial Sequence: Synthetic walnut; 5' sequence + inner sequence + 3' sequence

SEQ ID NO: 31900 - DNA, 76 bp, Artificial Sequence; identical to SEQ ID NO: 3391
  Description of Artificial Sequence: Synthetic walnut; 5' sequence + inner sequence + 3' sequence

SEQ ID NO: 31901 - DNA, 76 bp, Artificial Sequence; identical to SEQ ID NO: 7960
  Description of Artificial Sequence: Synthetic walnut; 5' sequence + inner sequence + 3' sequence

SEQ ID NO: 31902 - DNA, 76 bp, Artificial Sequence; identical to SEQ ID NO: 3290
  Description of Artificial Sequence: Synthetic walnut; 5' sequence + inner sequence + 3' sequence

SEQ ID NO: 31903 - DNA, 76 bp, Artificial Sequence
  Description of Artificial Sequence: Synthetic walnut; 5' sequence + inner sequence + 3' sequence
tagggaagagaaggacatatgatcgcaccgtctatacttcatgcacgctgacattgactagtacatgaccacttga

SEQ ID NO: 31904 - DNA, 76 bp, Artificial Sequence; identical to SEQ ID NO: 3224
  Description of Artificial Sequence: Synthetic walnut; 5' sequence + inner sequence + 3' sequence

SEQ ID NO: 31905 - DNA, 76 bp, Artificial Sequence; identical to SEQ ID NO: 3937
  Description of Artificial Sequence: Synthetic walnut; 5' sequence + inner sequence + 3' sequence

SEQ ID NO: 31906 - DNA, 76 bp, Artificial Sequence; identical to SEQ ID NO: 19651
  Description of Artificial Sequence: Synthetic walnut; 5' sequence + inner sequence + 3' sequence

SEQ ID NO: 31907 - DNA, 76 bp, Artificial Sequence
  Description of Artificial Sequence: Synthetic walnut; 5' sequence + inner sequence + 3' sequence
tagggaagagaaggacatatgatgcacacggtgcgacggtacgacgatgcacgttgactagtacatgaccacttga

SEQ ID NO: 31908 - DNA, 76 bp, Artificial Sequence
  Description of Artificial Sequence: Synthetic walnut; 5' sequence + inner sequence + 3' sequence
tagggaagagaaggacatatgatcgaacgcacacgcaggatgaggcatgcacgttgactagtacatgaccacttga

SEQ ID NO: 31909 - DNA, 76 bp, Artificial Sequence
  Description of Artificial Sequence: Synthetic walnut; 5' sequence + inner sequence + 3' sequence
tagggaagagaaggacatatgatggacgcaacgaaccgtatcgtggccatgtgttgactagtacatgaccacttga

SEQ ID NO: 31910 - DNA, 76 bp, Artificial Sequence
  Description of Artificial Sequence: Synthetic walnut; 5' sequence + inner sequence + 3' sequence
tagggaagagaaggacatatgatcgatgcaacgacacatgcaggacgtgcgcgttgactagtacatgaccacttga

SEQ ID NO: 31911 - DNA, 76 bp, Artificial Sequence; identical to SEQ ID NO: 3727
  Description of Artificial Sequence: Synthetic walnut; 5' sequence + inner sequence + 3' sequence

SEQ ID NO: 31912 - DNA, 76 bp, Artificial Sequence
  Description of Artificial Sequence: Synthetic walnut; 5' sequence + inner sequence + 3' sequence
tagggaagagaaggacatatgatggcatgcacgaacctacacgtgggcacgtattgactagtacatgaccacttga

SEQ ID NO: 31913 - DNA, 76 bp, Artificial Sequence; identical to SEQ ID NO: 7987
  Description of Artificial Sequence: Synthetic walnut; 5' sequence + inner sequence + 3' sequence

SEQ ID NO: 31914 - DNA, 76 bp, Artificial Sequence
  Description of Artificial Sequence: Synthetic walnut; 5' sequence + inner sequence + 3' sequence
tagggaagagaaggacatatgatgtcattccgcatcctacacgtgggcacgtgttgactagtacatgaccacttga

SEQ ID NO: 31915 - DNA, 76 bp, Artificial Sequence
  Description of Artificial Sequence: Synthetic walnut; 5' sequence + inner sequence + 3' sequence
tagggaagagaaggacatatgatcgtcacgcaacgtggacgacacgatctgcgttgactagtacatgaccacttga

SEQ ID NO: 31916 - DNA, 76 bp, Artificial Sequence; identical to SEQ ID NO: 7472
  Description of Artificial Sequence: Synthetic walnut; 5' sequence + inner sequence + 3' sequence

SEQ ID NO: 31917 - DNA, 76 bp, Artificial Sequence
  Description of Artificial Sequence: Synthetic walnut; 5' sequence + inner sequence + 3' sequence
tagggaagagaaggacatatgatgttccgagctggatgtggcctgtgctatgcttgactagtacatgaccacttga

SEQ ID NO: 31918 - DNA, 76 bp, Artificial Sequence
  Description of Artificial Sequence: Synthetic walnut; 5' sequence + inner sequence + 3' sequence
tagggaagagaaggacatatgatgcatgcaacgacgcaacctcacgtgacgcgttgactagtacatgaccacttga

SEQ ID NO: 31919 - DNA, 76 bp, Artificial Sequence; identical to SEQ ID NO: 7918
  Description of Artificial Sequence: Synthetic walnut; 5' sequence + inner sequence + 3' sequence

SEQ ID NO: 31920 - DNA, 76 bp, Artificial Sequence
  Description of Artificial Sequence: Synthetic walnut; 5' sequence + inner sequence + 3' sequence
tagggaagagaaggacatatgatcgtgcacggtgaccgcaacgttacgccgcgttgactagtacatgaccacttga

SEQ ID NO: 31921 - DNA, 76 bp, Artificial Sequence
  Description of Artificial Sequence: Synthetic walnut; 5' sequence + inner sequence + 3' sequence
tagggaagagaaggacatatgatcgtgccaacgtacgacatggttgcgacacattgactagtacatgaccacttga

SEQ ID NO: 31922 - DNA, 76 bp, Artificial Sequence
  Description of Artificial Sequence: Synthetic walnut; 5' sequence + inner sequence + 3' sequence
tagggaagagaaggacatatgatccatgtgacctgaccgtcccttcaatgggcttgactagtacatgaccacttga

SEQ ID NO: 31923 - DNA, 76 bp, Artificial Sequence; identical to SEQ ID NO: 11678
  Description of Artificial Sequence: Synthetic walnut; 5' sequence + inner sequence + 3' sequence

SEQ ID NO: 31924 - DNA, 76 bp, Artificial Sequence
  Description of Artificial Sequence: Synthetic walnut; 5' sequence + inner sequence + 3' sequence
tagggaagagaaggacatatgattgcgcacagtacgtacgtcctgccgacacgttgactagtacatgaccacttga

SEQ ID NO: 31925 - DNA, 76 bp, Artificial Sequence; identical to SEQ ID NO: 3117
  Description of Artificial Sequence: Synthetic walnut; 5' sequence + inner sequence + 3' sequence

SEQ ID NO: 31926 - DNA, 76 bp, Artificial Sequence
  Description of Artificial Sequence: Synthetic walnut; 5' sequence + inner sequence + 3' sequence
tagggaagagaaggacatatgatggcctgatcgaacctacaagttgtcgtggattgactagtacatgaccacttga

SEQ ID NO: 31927 - DNA, 76 bp, Artificial Sequence
  Description of Artificial Sequence: Synthetic walnut; 5' sequence + inner sequence + 3' sequence
tagggaagagaaggacatatgatcgcaacgcagcaacgtactgtcgtgccgcattgactagtacatgaccacttga

SEQ ID NO: 31928 - DNA, 76 bp, Artificial Sequence
  Description of Artificial Sequence: Synthetic walnut; 5' sequence + inner sequence + 3' sequence
tagggaagagaaggacatatgatggccacgcgaccgaaagtgagcatggcgtcttgactagtacatgaccacttga

SEQ ID NO: 31929 - DNA, 76 bp, Artificial Sequence; identical to SEQ ID NO: 7857
  Description of Artificial Sequence: Synthetic walnut; 5' sequence + inner sequence + 3' sequence

SEQ ID NO: 31930 - DNA, 75 bp, Artificial Sequence
  Description of Artificial Sequence: Synthetic walnut; 5' sequence + inner sequence + 3' sequence
tagggaagagaaggacatatgatggccggcgatggatgtggttgtgctcgtcttgactagtacatgaccacttga

SEQ ID NO: 31931 - DNA, 75 bp, Artificial Sequence; identical to SEQ ID NO: 3873
  Description of Artificial Sequence: Synthetic walnut; 5' sequence + inner sequence + 3' sequence

SEQ ID NO: 31932 - DNA, 76 bp, Artificial Sequence
  Description of Artificial Sequence: Synthetic walnut; 5' sequence + inner sequence + 3' sequence
tagggaagagaaggacatatgatcgcaccgtgacatgcgcagtacgtaccacgttgactagtacatgaccacttga

SEQ ID NO: 31933 - DNA, 76 bp, Artificial Sequence; identical to SEQ ID NO: 19265
  Description of Artificial Sequence: Synthetic walnut; 5' sequence + inner sequence + 3' sequence

SEQ ID NO: 31934 - DNA, 76 bp, Artificial Sequence
  Description of Artificial Sequence: Synthetic walnut; 5' sequence + inner sequence + 3' sequence
tagggaagagaaggacatatgatcatgcgtacgacaggcagtgtgcatgcacgttgactagtacatgaccacttga

SEQ ID NO: 31935 - DNA, 76 bp, Artificial Sequence; identical to SEQ ID NO: 15659
  Description of Artificial Sequence: Synthetic walnut; 5' sequence + inner sequence + 3' sequence

SEQ ID NO: 31936 - DNA, 76 bp, Artificial Sequence
  Description of Artificial Sequence: Synthetic walnut; 5' sequence + inner sequence + 3' sequence
tagggaagagaaggacatatgatggccacagcgtacttcaacgtggacgtgcattgactagtacatgaccacttga

SEQ ID NO: 31937 - DNA, 76 bp, Artificial Sequence; identical to SEQ ID NO: 19818
  Description of Artificial Sequence: Synthetic walnut; 5' sequence + inner sequence + 3' sequence

SEQ ID NO: 31938 - DNA, 71 bp, Artificial Sequence; identical to SEQ ID NO: 23907
  Description of Artificial Sequence: Synthetic walnut; 5' sequence + inner sequence + 3' sequence

SEQ ID NO: 31939 - DNA, 76 bp, Artificial Sequence
  Description of Artificial Sequence: Synthetic walnut; 5' sequence + inner sequence + 3' sequence
tagggaagagaaggacatatgatcacgtggcaacgtactgtcctgactgcacgttgactagtacatgaccacttga

SEQ ID NO: 31940 - DNA, 76 bp, Artificial Sequence; identical to SEQ ID NO: 23793
  Description of Artificial Sequence: Synthetic walnut; 5' sequence + inner sequence + 3' sequence

SEQ ID NO: 31941 - DNA, 76 bp, Artificial Sequence
  Description of Artificial Sequence: Synthetic walnut; 5' sequence + inner sequence + 3' sequence
tagggaagagaaggacatatgatcgcaccgtcgatactccatgcacgctgacattgactagtacatgaccacttga

SEQ ID NO: 31942 - DNA, 76 bp, Artificial Sequence; identical to SEQ ID NO: 3919
  Description of Artificial Sequence: Synthetic walnut; 5' sequence + inner sequence + 3' sequence

SEQ ID NO: 31943 - DNA, 76 bp, Artificial Sequence; identical to SEQ ID NO: 3646
  Description of Artificial Sequence: Synthetic walnut; 5' sequence + inner sequence + 3' sequence

SEQ ID NO: 31944 - DNA, 76 bp, Artificial Sequence; identical to SEQ ID NO: 19709
  Description of Artificial Sequence: Synthetic walnut; 5' sequence + inner sequence + 3' sequence

SEQ ID NO: 31945 - DNA, 76 bp, Artificial Sequence; identical to SEQ ID NO: 3099
  Description of Artificial Sequence: Synthetic walnut; 5' sequence + inner sequence + 3' sequence

SEQ ID NO: 31946 - DNA, 76 bp, Artificial Sequence; identical to SEQ ID NO: 11938
  Description of Artificial Sequence: Synthetic walnut; 5' sequence + inner sequence + 3' sequence

SEQ ID NO: 31947 - DNA, 76 bp, Artificial Sequence
  Description of Artificial Sequence: Synthetic walnut; 5' sequence + inner sequence + 3' sequence
tagggaagagaaggacatatgatggcacgagctgcactatcaagttgggtatgttgactagtacatgaccacttga

SEQ ID NO: 31948 - DNA, 76 bp, Artificial Sequence
  Description of Artificial Sequence: Synthetic walnut; 5' sequence + inner sequence + 3' sequence
tagggaagagaaggacatatgatcgacacgacatacggtgacgcacgtgcacgttgactagtacatgaccacttga

SEQ ID NO: 31949 - DNA, 76 bp, Artificial Sequence
  Description of Artificial Sequence: Synthetic walnut; 5' sequence + inner sequence + 3' sequence
tagggaagagaaggacatatgatgcgatgcgcgtcacacgtactgcactcgcgttgactagtacatgaccacttga

SEQ ID NO: 31950 - DNA, 76 bp, Artificial Sequence; identical to SEQ ID NO: 3764
  Description of Artificial Sequence: Synthetic walnut; 5' sequence + inner sequence + 3' sequence

SEQ ID NO: 31951 - DNA, 76 bp, Artificial Sequence; identical to SEQ ID NO: 3178
  Description of Artificial Sequence: Synthetic walnut; 5' sequence + inner sequence + 3' sequence

SEQ ID NO: 31952 - DNA, 76 bp, Artificial Sequence; identical to SEQ ID NO: 3213
  Description of Artificial Sequence: Synthetic walnut; 5' sequence + inner sequence + 3' sequence

SEQ ID NO: 31953 - DNA, 76 bp, Artificial Sequence
  Description of Artificial Sequence: Synthetic walnut; 5' sequence + inner sequence + 3' sequence
tagggaagagaaggacatatgatggcatgcgtacgtgctgaccttacgacgcattgactagtacatgaccacttga

SEQ ID NO: 31954 - DNA, 76 bp, Artificial Sequence
  Description of Artificial Sequence: Synthetic walnut; 5' sequence + inner sequence + 3' sequence
tagggaagagaaggacatatgatggcctgcgatggatgtggtgtggctcaggcttgactagtacatgaccacttga

SEQ ID NO: 31955 - DNA, 76 bp, Artificial Sequence; identical to SEQ ID NO: 3701
  Description of Artificial Sequence: Synthetic walnut; 5' sequence + inner sequence + 3' sequence

SEQ ID NO: 31956 - DNA, 76 bp, Artificial Sequence
  Description of Artificial Sequence: Synthetic walnut; 5' sequence + inner sequence + 3' sequence
tagggaagagaaggacatatgatgtgacgcagcgtgacgacctgccatgcatgttgactagtacatgaccacttga

SEQ ID NO: 31957 - DNA, 76 bp, Artificial Sequence
  Description of Artificial Sequence: Synthetic walnut; 5' sequence + inner sequence + 3' sequence
tagggaagagaaggacatatgatgtaattccgcatcctacacgtgggcacgtattgactagtacatgaccacttga

SEQ ID NO: 31958 - DNA, 76 bp, Artificial Sequence
  Description of Artificial Sequence: Synthetic walnut; 5' sequence + inner sequence + 3' sequence
tagggaagagaaggacatatgatcgacgcgatacgccacggtcacgctgcgcattgactagtacatgaccacttga

SEQ ID NO: 31959 - DNA, 76 bp, Artificial Sequence
  Description of Artificial Sequence: Synthetic walnut; 5' sequence + inner sequence + 3' sequence
tagggaagagaaggacatatgatggacgcaacgtaccgtatcgtgtccatgtgttgactagtacatgaccacttga

SEQ ID NO: 31960 - DNA, 76 bp, Artificial Sequence
  Description of Artificial Sequence: Synthetic walnut; 5' sequence + inner sequence + 3' sequence
tagggaagagaaggacatatgatgcgctgaggacgcaacgccttcacgtcacgttgactagtacatgaccacttga

SEQ ID NO: 31961 - DNA, 76 bp, Artificial Sequence
  Description of Artificial Sequence: Synthetic walnut; 5' sequence + inner sequence + 3' sequence
tagggaagagaaggacatatgatggcatgcgatgaacggggcatgatgcgtcattgactagtacatgaccacttga

SEQ ID NO: 31962 - DNA, 76 bp, Artificial Sequence; identical to SEQ ID NO: 23700
  Description of Artificial Sequence: Synthetic walnut; 5' sequence + inner sequence + 3' sequence

SEQ ID NO: 31963 - DNA, 76 bp, Artificial Sequence; identical to SEQ ID NO: 7591
  Description of Artificial Sequence: Synthetic walnut; 5' sequence + inner sequence + 3' sequence

SEQ ID NO: 31964 - DNA, 76 bp, Artificial Sequence
  Description of Artificial Sequence: Synthetic walnut; 5' sequence + inner sequence + 3' sequence
tagggaagagaaggacatatgatcgatgcgatgcgtcgtgcgtacggtacgcattgactagtacatgaccacttga

SEQ ID NO: 31965 - DNA, 76 bp, Artificial Sequence; identical to SEQ ID NO: 19387
  Description of Artificial Sequence: Synthetic walnut; 5' sequence + inner sequence + 3' sequence

SEQ ID NO: 31966 - DNA, 76 bp, Artificial Sequence; identical to SEQ ID NO: 23879
  Description of Artificial Sequence: Synthetic walnut; 5' sequence + inner sequence + 3' sequence

SEQ ID NO: 31967 - DNA, 76 bp, Artificial Sequence; identical to SEQ ID NO: 11971
  Description of Artificial Sequence: Synthetic walnut; 5' sequence + inner sequence + 3' sequence

SEQ ID NO: 31968 - DNA, 76 bp, Artificial Sequence
  Description of Artificial Sequence: Synthetic walnut; 5' sequence + inner sequence + 3' sequence
tagggaagagaaggacatatgatggcctgcgatggatgtgggttgtgctcggcttgactagtacatgaccacttga

SEQ ID NO: 31969 - DNA, 76 bp, Artificial Sequence
  Description of Artificial Sequence: Synthetic walnut; 5' sequence + inner sequence + 3' sequence
tagggaagagaaggacatatgatgcacgactcgcagcctatcatgaggccatgttgactagtacatgaccacttga

SEQ ID NO: 31970 - DNA, 76 bp, Artificial Sequence; identical to SEQ ID NO: 7377
  Description of Artificial Sequence: Synthetic walnut; 5' sequence + inner sequence + 3' sequence

SEQ ID NO: 31971 - DNA, 76 bp, Artificial Sequence
  Description of Artificial Sequence: Synthetic walnut; 5' sequence + inner sequence + 3' sequence
tagggaagagaaggacatatgatcgtgacagcgtaacgtcatggcactgcacattgactagtacatgaccacttga

SEQ ID NO: 31972 - DNA, 76 bp, Artificial Sequence
  Description of Artificial Sequence: Synthetic walnut; 5' sequence + inner sequence + 3' sequence
tagggaagagaaggacatatgatcgcgcaaggacgacgtacctgccgtgcacgttgactagtacatgaccacttga

SEQ ID NO: 31973 - DNA, 77 bp, Artificial Sequence
  Description of Artificial Sequence: Synthetic walnut; 5' sequence + inner sequence + 3' sequence
tagggaagagaaggacatatgatggcatgcacgcatcctacacgtgggcacgtattgactagtacatgaccacttga

SEQ ID NO: 31974 - DNA, 76 bp, Artificial Sequence; identical to SEQ ID NO: 23504
  Description of Artificial Sequence: Synthetic walnut; 5' sequence + inner sequence + 3' sequence

SEQ ID NO: 31975 - DNA, 76 bp, Artificial Sequence; identical to SEQ ID NO: 3439
  Description of Artificial Sequence: Synthetic walnut; 5' sequence + inner sequence + 3' sequence

SEQ ID NO: 31976 - DNA, 76 bp, Artificial Sequence
  Description of Artificial Sequence: Synthetic walnut; 5' sequence + inner sequence + 3' sequence
tagggaagagaaggacatatgatgcgacacggcacgacgacgacagcacgacgttgactagtacatgaccacttga

SEQ ID NO: 31977 - DNA, 76 bp, Artificial Sequence; identical to SEQ ID NO: 3868
  Description of Artificial Sequence: Synthetic walnut; 5' sequence + inner sequence + 3' sequence

SEQ ID NO: 31978 - DNA, 76 bp, Artificial Sequence
  Description of Artificial Sequence: Synthetic walnut; 5' sequence + inner sequence + 3' sequence
tagggaagagaaggacatatgatcgaaacgcaatgcagcacgtgcacgtcacgttgactagtacatgaccacttga

SEQ ID NO: 31979 - DNA, 76 bp, Artificial Sequence
  Description of Artificial Sequence: Synthetic walnut; 5' sequence + inner sequence + 3' sequence
tagggaagagaaggacatatgatgtcattccccatcctacacgtgggcacgtattgactagtacatgaccacttga

SEQ ID NO: 31980 - DNA, 76 bp, Artificial Sequence
  Description of Artificial Sequence: Synthetic walnut; 5' sequence + inner sequence + 3' sequence
tagggaagagaaggacatatgatgcgtgcgaacaacgtagcgtcacgtgcacattgactagtacatgaccacttga

SEQ ID NO: 31981 - DNA, 76 bp, Artificial Sequence; identical to SEQ ID NO: 3329
  Description of Artificial Sequence: Synthetic walnut; 5' sequence + inner sequence + 3' sequence

SEQ ID NO: 31982 - DNA, 76 bp, Artificial Sequence
  Description of Artificial Sequence: Synthetic walnut; 5' sequence + inner sequence + 3' sequence
tagggaagagaaggacatatgatgcaacggcacgacagcatgacgtgtgcgtgttgactagtacatgaccacttga

SEQ ID NO: 31983 - DNA, 76 bp, Artificial Sequence
  Description of Artificial Sequence: Synthetic walnut; 5' sequence + inner sequence + 3' sequence
tagggaagagaaggacatatgatggacgcatcgccccttcgaggggacaggtattgactagtacatgaccacttga

SEQ ID NO: 31984 - DNA, 76 bp, Artificial Sequence
  Description of Artificial Sequence: Synthetic walnut; 5' sequence + inner sequence + 3' sequence
tagggaagagaaggacatatgatggacgcaacgtaccgtattgtggccatgtgttgactagtacatgaccacttga

SEQ ID NO: 31985 - DNA, 76 bp, Artificial Sequence
  Description of Artificial Sequence: Synthetic walnut; 5' sequence + inner sequence + 3' sequence
tagggaagagaaggacatatgatggacgcaacgtaccttatcgtggccatgtgttgactagtacatgaccacttga

SEQ ID NO: 31986 - DNA, 76 bp, Artificial Sequence
  Description of Artificial Sequence: Synthetic walnut; 5' sequence + inner sequence + 3' sequence
tagggaagagaaggacatatgatggactgcgatggatgtgggctagtatgggcttgactagtacatgaccacttga

SEQ ID NO: 31987 - DNA, 76 bp, Artificial Sequence
  Description of Artificial Sequence: Synthetic walnut; 5' sequence + inner sequence + 3' sequence
tagggaagagaaggacatatgatcgcaccgacagcacacgtacgtcatgcggcttgactagtacatgaccacttga

SEQ ID NO: 31988 - DNA, 76 bp, Artificial Sequence; identical to SEQ ID NO: 3950
  Description of Artificial Sequence: Synthetic walnut; 5' sequence + inner sequence + 3' sequence

SEQ ID NO: 31989 - DNA, 76 bp, Artificial Sequence
  Description of Artificial Sequence: Synthetic walnut; 5' sequence + inner sequence + 3' sequence
tagggaagagaaggacatatgatggccaaactgcactatcaagacgtcgtggattgactagtacatgaccacttga

SEQ ID NO: 31990 - DNA, 76 bp, Artificial Sequence; identical to SEQ ID NO: 3565
  Description of Artificial Sequence: Synthetic walnut; 5' sequence + inner sequence + 3' sequence

SEQ ID NO: 31991 - DNA, 76 bp, Artificial Sequence; identical to SEQ ID NO: 23644
  Description of Artificial Sequence: Synthetic walnut; 5' sequence + inner sequence + 3' sequence

SEQ ID NO: 31992 - DNA, 76 bp, Artificial Sequence
  Description of Artificial Sequence: Synthetic walnut; 5' sequence + inner sequence + 3' sequence
tagggaagagaaggacatatgatcgcacacgcacgtcatgccagctgtgcatgttgactagtacatgaccacttga

SEQ ID NO: 31993 - DNA, 76 bp, Artificial Sequence
  Description of Artificial Sequence: Synthetic walnut; 5' sequence + inner sequence + 3' sequence
tagggaagagaaggacatatgatcgtgacgcatgaaacgtaccttcacgcacgttgactagtacatgaccacttga

SEQ ID NO: 31994 - DNA, 76 bp, Artificial Sequence
  Description of Artificial Sequence: Synthetic walnut; 5' sequence + inner sequence + 3' sequence
tagggaagagaaggacatatgatgcacgcactctgccatacgagtggttcaggttgactagtacatgaccacttga

SEQ ID NO: 31995 - DNA, 76 bp, Artificial Sequence
  Description of Artificial Sequence: Synthetic walnut; 5' sequence + inner sequence + 3' sequence
tagggaagagaaggacatatgatcgtgcatcgtgcgatacgtcctgctgcacattgactagtacatgaccacttga

SEQ ID NO: 31996 - DNA, 76 bp, Artificial Sequence
  Description of Artificial Sequence: Synthetic walnut; 5' sequence + inner sequence + 3' sequence
tagggaagagaaggacatatgatcgacactacgtagcatgccgtacgtgcacattgactagtacatgaccacttga

SEQ ID NO: 31997 - DNA, 76 bp, Artificial Sequence
  Description of Artificial Sequence: Synthetic walnut; 5' sequence + inner sequence + 3' sequence
tagggaagagaaggacatatgatggcctgcgatggatgtggtttggacgggccttgactagtacatgaccacttga

SEQ ID NO: 31998 - DNA, 77 bp, Artificial Sequence
  Description of Artificial Sequence: Synthetic walnut; 5' sequence + inner sequence + 3' sequence
tagggaagagaaggacatatgatgttccgccgatggatgtgggttgtgctcgtcttgactagtacatgaccacttga

SEQ ID NO: 31999 - DNA, 76 bp, Artificial Sequence
  Description of Artificial Sequence: Synthetic walnut; 5' sequence + inner sequence + 3' sequence
tagggaagagaaggacatatgatggcatgcacgcatctacacgtgggcacgtattgactagtacatgaccacttga

SEQ ID NO: 32000 - DNA, 76 bp, Artificial Sequence
  Description of Artificial Sequence: Synthetic walnut; 5' sequence + inner sequence + 3' sequence
tagggaagagaaggacatatgatgcgtgacgggaaggacgttgccactacgcattgactagtacatgaccacttga

SEQ ID NO: 32001 - DNA, 76 bp, Artificial Sequence; identical to SEQ ID NO: 15933
  Description of Artificial Sequence: Synthetic walnut; 5' sequence + inner sequence + 3' sequence

SEQ ID NO: 32002 - DNA, 76 bp, Artificial Sequence; identical to SEQ ID NO: 3988
  Description of Artificial Sequence: Synthetic walnut; 5' sequence + inner sequence + 3' sequence

SEQ ID NO: 32003 - DNA, 30 bp, Artificial Sequence; identical to SEQ ID NO: 20914
  Description of Artificial Sequence: Synthetic all nuts; inner sequence

SEQ ID NO: 32004 - DNA, 30 bp, Artificial Sequence; identical to SEQ ID NO: 439
  Description of Artificial Sequence: Synthetic all nuts; inner sequence

SEQ ID NO: 32005 - DNA, 30 bp, Artificial Sequence; identical to SEQ ID NO: 332
  Description of Artificial Sequence: Synthetic all nuts; inner sequence

SEQ ID NO: 32006 - DNA, 30 bp, Artificial Sequence
  Description of Artificial Sequence: Synthetic all nuts; inner sequence
gccgttcgacccctccataacgtgtgcatg

SEQ ID NO: 32007 - DNA, 30 bp, Artificial Sequence; identical to SEQ ID NO: 486
  Description of Artificial Sequence: Synthetic all nuts; inner sequence

SEQ ID NO: 32008 - DNA, 30 bp, Artificial Sequence; identical to SEQ ID NO: 372
  Description of Artificial Sequence: Synthetic all nuts; inner sequence

SEQ ID NO: 32009 - DNA, 30 bp, Artificial Sequence
  Description of Artificial Sequence: Synthetic all nuts; inner sequence
ccgatcggaccaaacgtggcattgtgctcg

SEQ ID NO: 32010 - DNA, 30 bp, Artificial Sequence
  Description of Artificial Sequence: Synthetic all nuts; inner sequence
ccatacgtacgaacgacctcaatgtgcgtc

SEQ ID NO: 32011 - DNA, 30 bp, Artificial Sequence; identical to SEQ ID NO: 11
  Description of Artificial Sequence: Synthetic all nuts; inner sequence

SEQ ID NO: 32012 - DNA, 30 bp, Artificial Sequence; identical to SEQ ID NO: 410
  Description of Artificial Sequence: Synthetic all nuts; inner sequence

SEQ ID NO: 32013 - DNA, 30 bp, Artificial Sequence; identical to SEQ ID NO: 528
  Description of Artificial Sequence: Synthetic all nuts; inner sequence

SEQ ID NO: 32014 - DNA, 30 bp, Artificial Sequence; identical to SEQ ID NO: 4872
  Description of Artificial Sequence: Synthetic all nuts; inner sequence

SEQ ID NO: 32015 - DNA, 30 bp, Artificial Sequence; identical to SEQ ID NO: 377
  Description of Artificial Sequence: Synthetic all nuts; inner sequence

SEQ ID NO: 32016 - DNA, 30 bp, Artificial Sequence; identical to SEQ ID NO: 790
  Description of Artificial Sequence: Synthetic all nuts; inner sequence

SEQ ID NO: 32017 - DNA, 30 bp, Artificial Sequence; identical to SEQ ID NO: 133
  Description of Artificial Sequence: Synthetic all nuts; inner sequence

SEQ ID NO: 32018 - DNA, 30 bp, Artificial Sequence; identical to SEQ ID NO: 8884
  Description of Artificial Sequence: Synthetic all nuts; inner sequence

SEQ ID NO: 32019 - DNA, 30 bp, Artificial Sequence; identical to SEQ ID NO: 306
  Description of Artificial Sequence: Synthetic all nuts; inner sequence

SEQ ID NO: 32020 - DNA, 30 bp, Artificial Sequence; identical to SEQ ID NO: 8850
  Description of Artificial Sequence: Synthetic all nuts; inner sequence

SEQ ID NO: 32021 - DNA, 30 bp, Artificial Sequence; identical to SEQ ID NO: 256
  Description of Artificial Sequence: Synthetic all nuts; inner sequence

SEQ ID NO: 32022 - DNA, 30 bp, Artificial Sequence; identical to SEQ ID NO: 4739
  Description of Artificial Sequence: Synthetic all nuts; inner sequence

SEQ ID NO: 32023 - DNA, 30 bp, Artificial Sequence
  Description of Artificial Sequence: Synthetic all nuts; inner sequence
gaccgaacggacctcaatgtgtggcatgca

SEQ ID NO: 32024 - DNA, 30 bp, Artificial Sequence; identical to SEQ ID NO: 320
  Description of Artificial Sequence: Synthetic all nuts; inner sequence

SEQ ID NO: 32025 - DNA, 30 bp, Artificial Sequence; identical to SEQ ID NO: 204
  Description of Artificial Sequence: Synthetic all nuts; inner sequence

SEQ ID NO: 32026 - DNA, 30 bp, Artificial Sequence; identical to SEQ ID NO: 16824
  Description of Artificial Sequence: Synthetic all nuts; inner sequence

SEQ ID NO: 32027 - DNA, 30 bp, Artificial Sequence; identical to SEQ ID NO: 63
  Description of Artificial Sequence: Synthetic all nuts; inner sequence

SEQ ID NO: 32028 - DNA, 30 bp, Artificial Sequence; identical to SEQ ID NO: 637
  Description of Artificial Sequence: Synthetic all nuts; inner sequence

SEQ ID NO: 32029 - DNA, 30 bp, Artificial Sequence; identical to SEQ ID NO: 107
  Description of Artificial Sequence: Synthetic all nuts; inner sequence

SEQ ID NO: 32030 - DNA, 30 bp, Artificial Sequence; identical to SEQ ID NO: 4807
  Description of Artificial Sequence: Synthetic all nuts; inner sequence

SEQ ID NO: 32031 - DNA, 30 bp, Artificial Sequence
  Description of Artificial Sequence: Synthetic all nuts; inner sequence
cgcaccaaccatgaggcagtgtacgtgtgt

SEQ ID NO: 32032 - DNA, 30 bp, Artificial Sequence; identical to SEQ ID NO: 16799
  Description of Artificial Sequence: Synthetic all nuts; inner sequence

SEQ ID NO: 32033 - DNA, 30 bp, Artificial Sequence
  Description of Artificial Sequence: Synthetic all nuts; inner sequence
ccgtagccacatcaagcggtggtgtgcgtg

SEQ ID NO: 32034 - DNA, 30 bp, Artificial Sequence; identical to SEQ ID NO: 4503
  Description of Artificial Sequence: Synthetic all nuts; inner sequence

SEQ ID NO: 32035 - DNA, 30 bp, Artificial Sequence; identical to SEQ ID NO: 665
  Description of Artificial Sequence: Synthetic all nuts; inner sequence

SEQ ID NO: 32036 - DNA, 30 bp, Artificial Sequence; identical to SEQ ID NO: 4837
  Description of Artificial Sequence: Synthetic all nuts; inner sequence

SEQ ID NO: 32037 - DNA, 30 bp, Artificial Sequence; identical to SEQ ID NO: 869
  Description of Artificial Sequence: Synthetic all nuts; inner sequence

SEQ ID NO: 32038 - DNA, 30 bp, Artificial Sequence
  Description of Artificial Sequence: Synthetic all nuts; inner sequence
cgcacgatcgtcctgccctaacgtggcgca

SEQ ID NO: 32039 - DNA, 30 bp, Artificial Sequence; identical to SEQ ID NO: 20991
  Description of Artificial Sequence: Synthetic all nuts; inner sequence

SEQ ID NO: 32040 - DNA, 30 bp, Artificial Sequence; identical to SEQ ID NO: 126
  Description of Artificial Sequence: Synthetic all nuts; inner sequence

SEQ ID NO: 32041 - DNA, 30 bp, Artificial Sequence; identical to SEQ ID NO: 945
  Description of Artificial Sequence: Synthetic all nuts; inner sequence

SEQ ID NO: 32042 - DNA, 30 bp, Artificial Sequence; identical to SEQ ID NO: 151
  Description of Artificial Sequence: Synthetic all nuts; inner sequence

SEQ ID NO: 32043 - DNA, 30 bp, Artificial Sequence; identical to SEQ ID NO: 300
  Description of Artificial Sequence: Synthetic all nuts; inner sequence

SEQ ID NO: 32044 - DNA, 30 bp, Artificial Sequence; identical to SEQ ID NO: 20504
  Description of Artificial Sequence: Synthetic all nuts; inner sequence

SEQ ID NO: 32045 - DNA, 30 bp, Artificial Sequence; identical to SEQ ID NO: 556
  Description of Artificial Sequence: Synthetic all nuts; inner sequence

SEQ ID NO: 32046 - DNA, 30 bp, Artificial Sequence
  Description of Artificial Sequence: Synthetic all nuts; inner sequence
gtcattccgcatcctacacgtgggcacgtc

SEQ ID NO: 32047 - DNA, 30 bp, Artificial Sequence; identical to SEQ ID NO: 4939
  Description of Artificial Sequence: Synthetic all nuts; inner sequence

SEQ ID NO: 32048 - DNA, 30 bp, Artificial Sequence; identical to SEQ ID NO: 429
  Description of Artificial Sequence: Synthetic all nuts; inner sequence

SEQ ID NO: 32049 - DNA, 30 bp, Artificial Sequence; identical to SEQ ID NO: 255
  Description of Artificial Sequence: Synthetic all nuts; inner sequence

SEQ ID NO: 32050 - DNA, 30 bp, Artificial Sequence; identical to SEQ ID NO: 81
  Description of Artificial Sequence: Synthetic all nuts; inner sequence

SEQ ID NO: 32051 - DNA, 30 bp, Artificial Sequence; identical to SEQ ID NO: 298
  Description of Artificial Sequence: Synthetic all nuts; inner sequence

SEQ ID NO: 32052 - DNA, 30 bp, Artificial Sequence; identical to SEQ ID NO: 194
  Description of Artificial Sequence: Synthetic all nuts; inner sequence

SEQ ID NO: 32053 - DNA, 30 bp, Artificial Sequence; identical to SEQ ID NO: 35
  Description of Artificial Sequence: Synthetic all nuts; inner sequence

SEQ ID NO: 32054 - DNA, 30 bp, Artificial Sequence; identical to SEQ ID NO: 20530
  Description of Artificial Sequence: Synthetic all nuts; inner sequence

SEQ ID NO: 32055 - DNA, 30 bp, Artificial Sequence; identical to SEQ ID NO: 20653
  Description of Artificial Sequence: Synthetic all nuts; inner sequence

SEQ ID NO: 32056 - DNA, 30 bp, Artificial Sequence; identical to SEQ ID NO: 12933
  Description of Artificial Sequence: Synthetic all nuts; inner sequence

SEQ ID NO: 32057 - DNA, 30 bp, Artificial Sequence; identical to SEQ ID NO: 12869
  Description of Artificial Sequence: Synthetic all nuts; inner sequence

SEQ ID NO: 32058 - DNA, 30 bp, Artificial Sequence; identical to SEQ ID NO: 4617
  Description of Artificial Sequence: Synthetic all nuts; inner sequence

SEQ ID NO: 32059 - DNA, 30 bp, Artificial Sequence; identical to SEQ ID NO: 20853
  Description of Artificial Sequence: Synthetic all nuts; inner sequence

SEQ ID NO: 32060 - DNA, 30 bp, Artificial Sequence; identical to SEQ ID NO: 16651
  Description of Artificial Sequence: Synthetic all nuts; inner sequence

SEQ ID NO: 32061 - DNA, 30 bp, Artificial Sequence; identical to SEQ ID NO: 226
  Description of Artificial Sequence: Synthetic all nuts; inner sequence

SEQ ID NO: 32062 - DNA, 30 bp, Artificial Sequence; identical to SEQ ID NO: 28792
  Description of Artificial Sequence: Synthetic all nuts; inner sequence

SEQ ID NO: 32063 - DNA, 30 bp, Artificial Sequence; identical to SEQ ID NO: 20626
  Description of Artificial Sequence: Synthetic all nuts; inner sequence

SEQ ID NO: 32064 - DNA, 30 bp, Artificial Sequence; identical to SEQ ID NO: 4708
  Description of Artificial Sequence: Synthetic all nuts; inner sequence

SEQ ID NO: 32065 - DNA, 30 bp, Artificial Sequence; identical to SEQ ID NO: 791
  Description of Artificial Sequence: Synthetic all nuts; inner sequence

SEQ ID NO: 32066 - DNA, 30 bp, Artificial Sequence; identical to SEQ ID NO: 20514
  Description of Artificial Sequence: Synthetic all nuts; inner sequence

SEQ ID NO: 32067 - DNA, 30 bp, Artificial Sequence; identical to SEQ ID NO: 20944
  Description of Artificial Sequence: Synthetic all nuts; inner sequence

SEQ ID NO: 32068 - DNA, 30 bp, Artificial Sequence; identical to SEQ ID NO: 4301
  Description of Artificial Sequence: Synthetic all nuts; inner sequence

SEQ ID NO: 32069 - DNA, 30 bp, Artificial Sequence; identical to SEQ ID NO: 887
  Description of Artificial Sequence: Synthetic all nuts; inner sequence

SEQ ID NO: 32070 - DNA, 30 bp, Artificial Sequence; identical to SEQ ID NO: 208
  Description of Artificial Sequence: Synthetic all nuts; inner sequence

SEQ ID NO: 32071 - DNA, 30 bp, Artificial Sequence; identical to SEQ ID NO: 399
  Description of Artificial Sequence: Synthetic all nuts; inner sequence

SEQ ID NO: 32072 - DNA, 30 bp, Artificial Sequence; identical to SEQ ID NO: 161
  Description of Artificial Sequence: Synthetic all nuts; inner sequence

SEQ ID NO: 32073 - DNA, 30 bp, Artificial Sequence; identical to SEQ ID NO: 20698
  Description of Artificial Sequence: Synthetic all nuts; inner sequence

SEQ ID NO: 32074 - DNA, 30 bp, Artificial Sequence
  Description of Artificial Sequence: Synthetic all nuts; inner sequence
ggcatgctatgaacgaggcatgatgcgtca

SEQ ID NO: 32075 - DNA, 30 bp, Artificial Sequence; identical to SEQ ID NO: 20668
  Description of Artificial Sequence: Synthetic all nuts; inner sequence

SEQ ID NO: 32076 - DNA, 30 bp, Artificial Sequence; identical to SEQ ID NO: 267
  Description of Artificial Sequence: Synthetic all nuts; inner sequence

SEQ ID NO: 32077 - DNA, 30 bp, Artificial Sequence; identical to SEQ ID NO: 811
  Description of Artificial Sequence: Synthetic all nuts; inner sequence

SEQ ID NO: 32078 - DNA, 30 bp, Artificial Sequence; identical to SEQ ID NO: 179
  Description of Artificial Sequence: Synthetic all nuts; inner sequence

SEQ ID NO: 32079 - DNA, 30 bp, Artificial Sequence
  Description of Artificial Sequence: Synthetic all nuts; inner sequence
ccgtagcgacatcaagcggtgatgtgcgtg

SEQ ID NO: 32080 - DNA, 30 bp, Artificial Sequence; identical to SEQ ID NO: 20897
  Description of Artificial Sequence: Synthetic all nuts; inner sequence

SEQ ID NO: 32081 - DNA, 30 bp, Artificial Sequence; identical to SEQ ID NO: 269
  Description of Artificial Sequence: Synthetic all nuts; inner sequence

SEQ ID NO: 32082 - DNA, 30 bp, Artificial Sequence; identical to SEQ ID NO: 496
  Description of Artificial Sequence: Synthetic all nuts; inner sequence

SEQ ID NO: 32083 - DNA, 30 bp, Artificial Sequence; identical to SEQ ID NO: 4755
  Description of Artificial Sequence: Synthetic all nuts; inner sequence

SEQ ID NO: 32084 - DNA, 30 bp, Artificial Sequence
  Description of Artificial Sequence: Synthetic all nuts; inner sequence
gtcatgcccgaacactatcatggcggcatg

SEQ ID NO: 32085 - DNA, 30 bp, Artificial Sequence; identical to SEQ ID NO: 530
  Description of Artificial Sequence: Synthetic all nuts; inner sequence

SEQ ID NO: 32086 - DNA, 30 bp, Artificial Sequence; identical to SEQ ID NO: 424
  Description of Artificial Sequence: Synthetic all nuts; inner sequence

SEQ ID NO: 32087 - DNA, 30 bp, Artificial Sequence
  Description of Artificial Sequence: Synthetic all nuts; inner sequence
ccgtagcgacatcaagcggtggtgtccgtg

SEQ ID NO: 32088 - DNA, 30 bp, Artificial Sequence; identical to SEQ ID NO: 506
  Description of Artificial Sequence: Synthetic all nuts; inner sequence

SEQ ID NO: 32089 - DNA, 30 bp, Artificial Sequence; identical to SEQ ID NO: 344
  Description of Artificial Sequence: Synthetic all nuts; inner sequence

SEQ ID NO: 32090 - DNA, 30 bp, Artificial Sequence
  Description of Artificial Sequence: Synthetic all nuts; inner sequence
cgcaccgcatgtcacgtcagtccgccagtg

SEQ ID NO: 32091 - DNA, 29 bp, Artificial Sequence
  Description of Artificial Sequence: Synthetic all nuts; inner sequence
cgtacgacacgacagacatgcacgacgca

SEQ ID NO: 32092 - DNA, 30 bp, Artificial Sequence; identical to SEQ ID NO: 343
  Description of Artificial Sequence: Synthetic all nuts; inner sequence

SEQ ID NO: 32093 - DNA, 30 bp, Artificial Sequence; identical to SEQ ID NO: 114
  Description of Artificial Sequence: Synthetic all nuts; inner sequence

SEQ ID NO: 32094 - DNA, 30 bp, Artificial Sequence
  Description of Artificial Sequence: Synthetic all nuts; inner sequence
ccgtagcgacatcaagcggtggtgtgcgca

SEQ ID NO: 32095 - DNA, 30 bp, Artificial Sequence; identical to SEQ ID NO: 20730
  Description of Artificial Sequence: Synthetic all nuts; inner sequence

SEQ ID NO: 32096 - DNA, 30 bp, Artificial Sequence
  Description of Artificial Sequence: Synthetic all nuts; inner sequence
cgcatgggacgtactgaccgtatcgtgtca

SEQ ID NO: 32097 - DNA, 25 bp, Artificial Sequence
  Description of Artificial Sequence: Synthetic all nuts; inner sequence
ggcatgcacgcacctacacgtgggc

SEQ ID NO: 32098 - DNA, 30 bp, Artificial Sequence; identical to SEQ ID NO: 597
  Description of Artificial Sequence: Synthetic all nuts; inner sequence

SEQ ID NO: 32099 - DNA, 30 bp, Artificial Sequence; identical to SEQ ID NO: 491
  Description of Artificial Sequence: Synthetic all nuts; inner sequence

SEQ ID NO: 32100 - DNA, 30 bp, Artificial Sequence; identical to SEQ ID NO: 780
  Description of Artificial Sequence: Synthetic all nuts; inner sequence

SEQ ID NO: 32101 - DNA, 30 bp, Artificial Sequence; identical to SEQ ID NO: 4776
  Description of Artificial Sequence: Synthetic all nuts; inner sequence

SEQ ID NO: 32102 - DNA, 26 bp, Artificial Sequence
  Description of Artificial Sequence: Synthetic all nuts; inner sequence
ggcatgcacgcacctacacgtggcca

SEQ ID NO: 32103 - DNA, 30 bp, Artificial Sequence; identical to SEQ ID NO: 20882
  Description of Artificial Sequence: Synthetic all nuts; inner sequence

SEQ ID NO: 32104 - DNA, 30 bp, Artificial Sequence; identical to SEQ ID NO: 146
  Description of Artificial Sequence: Synthetic all nuts; inner sequence

SEQ ID NO: 32105 - DNA, 30 bp, Artificial Sequence; identical to SEQ ID NO: 443
  Description of Artificial Sequence: Synthetic all nuts; inner sequence

SEQ ID NO: 32106 - DNA, 30 bp, Artificial Sequence; identical to SEQ ID NO: 746
  Description of Artificial Sequence: Synthetic all nuts; inner sequence

SEQ ID NO: 32107 - DNA, 30 bp, Artificial Sequence; identical to SEQ ID NO: 20720
  Description of Artificial Sequence: Synthetic all nuts; inner sequence

SEQ ID NO: 32108 - DNA, 30 bp, Artificial Sequence
  Description of Artificial Sequence: Synthetic all nuts; inner sequence
ccgtcgaggcacgtgacagtgggcttagcg

SEQ ID NO: 32109 - DNA, 30 bp, Artificial Sequence; identical to SEQ ID NO: 4792
  Description of Artificial Sequence: Synthetic all nuts; inner sequence

SEQ ID NO: 32110 - DNA, 30 bp, Artificial Sequence; identical to SEQ ID NO: 359
  Description of Artificial Sequence: Synthetic all nuts; inner sequence

SEQ ID NO: 32111 - DNA, 30 bp, Artificial Sequence; identical to SEQ ID NO: 20363
  Description of Artificial Sequence: Synthetic all nuts; inner sequence

SEQ ID NO: 32112 - DNA, 30 bp, Artificial Sequence; identical to SEQ ID NO: 340
  Description of Artificial Sequence: Synthetic all nuts; inner sequence

SEQ ID NO: 32113 - DNA, 30 bp, Artificial Sequence; identical to SEQ ID NO: 4713
  Description of Artificial Sequence: Synthetic all nuts; inner sequence

SEQ ID NO: 32114 - DNA, 30 bp, Artificial Sequence; identical to SEQ ID NO: 93
  Description of Artificial Sequence: Synthetic all nuts; inner sequence

SEQ ID NO: 32115 - DNA, 30 bp, Artificial Sequence; identical to SEQ ID NO: 788
  Description of Artificial Sequence: Synthetic all nuts; inner sequence

SEQ ID NO: 32116 - DNA, 30 bp, Artificial Sequence; identical to SEQ ID NO: 31
  Description of Artificial Sequence: Synthetic all nuts; inner sequence

SEQ ID NO: 32117 - DNA, 30 bp, Artificial Sequence; identical to SEQ ID NO: 4642
  Description of Artificial Sequence: Synthetic all nuts; inner sequence

SEQ ID NO: 32118 - DNA, 30 bp, Artificial Sequence; identical to SEQ ID NO: 73
  Description of Artificial Sequence: Synthetic all nuts; inner sequence

SEQ ID NO: 32119 - DNA, 30 bp, Artificial Sequence; identical to SEQ ID NO: 485
  Description of Artificial Sequence: Synthetic all nuts; inner sequence

SEQ ID NO: 32120 - DNA, 30 bp, Artificial Sequence; identical to SEQ ID NO: 26
  Description of Artificial Sequence: Synthetic all nuts; inner sequence

SEQ ID NO: 32121 - DNA, 30 bp, Artificial Sequence; identical to SEQ ID NO: 630
  Description of Artificial Sequence: Synthetic all nuts; inner sequence

SEQ ID NO: 32122 - DNA, 30 bp, Artificial Sequence; identical to SEQ ID NO: 5002
  Description of Artificial Sequence: Synthetic all nuts; inner sequence

SEQ ID NO: 32123 - DNA, 30 bp, Artificial Sequence; identical to SEQ ID NO: 28574
  Description of Artificial Sequence: Synthetic all nuts; inner sequence

SEQ ID NO: 32124 - DNA, 30 bp, Artificial Sequence; identical to SEQ ID NO: 294
  Description of Artificial Sequence: Synthetic all nuts; inner sequence

SEQ ID NO: 32125 - DNA, 30 bp, Artificial Sequence; identical to SEQ ID NO: 490
  Description of Artificial Sequence: Synthetic all nuts; inner sequence

SEQ ID NO: 32126 - DNA, 30 bp, Artificial Sequence; identical to SEQ ID NO: 771
  Description of Artificial Sequence: Synthetic all nuts; inner sequence

SEQ ID NO: 32127 - DNA, 30 bp, Artificial Sequence; identical to SEQ ID NO: 28791
  Description of Artificial Sequence: Synthetic all nuts; inner sequence

SEQ ID NO: 32128 - DNA, 30 bp, Artificial Sequence; identical to SEQ ID NO: 117
  Description of Artificial Sequence: Synthetic all nuts; inner sequence

SEQ ID NO: 32129 - DNA, 30 bp, Artificial Sequence
  Description of Artificial Sequence: Synthetic all nuts; inner sequence
cgaccgagtcagggacgatgcgacgtcacg

SEQ ID NO: 32130 - DNA, 30 bp, Artificial Sequence; identical to SEQ ID NO: 487
  Description of Artificial Sequence: Synthetic all nuts; inner sequence

SEQ ID NO: 32131 - DNA, 30 bp, Artificial Sequence; identical to SEQ ID NO: 71
  Description of Artificial Sequence: Synthetic all nuts; inner sequence

SEQ ID NO: 32132 - DNA, 30 bp, Artificial Sequence; identical to SEQ ID NO: 463
  Description of Artificial Sequence: Synthetic all nuts; inner sequence

SEQ ID NO: 32133 - DNA, 30 bp, Artificial Sequence; identical to SEQ ID NO: 12936
  Description of Artificial Sequence: Synthetic all nuts; inner sequence

SEQ ID NO: 32134 - DNA, 30 bp, Artificial Sequence; identical to SEQ ID NO: 16342
  Description of Artificial Sequence: Synthetic all nuts; inner sequence

SEQ ID NO: 32135 - DNA, 30 bp, Artificial Sequence; identical to SEQ ID NO: 840
  Description of Artificial Sequence: Synthetic all nuts; inner sequence

SEQ ID NO: 32136 - DNA, 30 bp, Artificial Sequence
  Description of Artificial Sequence: Synthetic all nuts; inner sequence
gtcatgcaagaacactatcatggcggcatg

SEQ ID NO: 32137 - DNA, 30 bp, Artificial Sequence; identical to SEQ ID NO: 176
  Description of Artificial Sequence: Synthetic all nuts; inner sequence

SEQ ID NO: 32138 - DNA, 30 bp, Artificial Sequence; identical to SEQ ID NO: 5
  Description of Artificial Sequence: Synthetic all nuts; inner sequence

SEQ ID NO: 32139 - DNA, 30 bp, Artificial Sequence; identical to SEQ ID NO: 860
  Description of Artificial Sequence: Synthetic all nuts; inner sequence

SEQ ID NO: 32140 - DNA, 30 bp, Artificial Sequence; identical to SEQ ID NO: 379
  Description of Artificial Sequence: Synthetic all nuts; inner sequence

SEQ ID NO: 32141 - DNA, 30 bp, Artificial Sequence; identical to SEQ ID NO: 919
  Description of Artificial Sequence: Synthetic all nuts; inner sequence

SEQ ID NO: 32142 - DNA, 30 bp, Artificial Sequence; identical to SEQ ID NO: 12985
  Description of Artificial Sequence: Synthetic all nuts; inner sequence

SEQ ID NO: 32143 - DNA, 25 bp, Artificial Sequence
  Description of Artificial Sequence: Synthetic all nuts; inner sequence
ggcctgcgatggatgtgtgcgtgta

SEQ ID NO: 32144 - DNA, 30 bp, Artificial Sequence; identical to SEQ ID NO: 764
  Description of Artificial Sequence: Synthetic all nuts; inner sequence

SEQ ID NO: 32145 - DNA, 30 bp, Artificial Sequence; identical to SEQ ID NO: 16768
  Description of Artificial Sequence: Synthetic all nuts; inner sequence

SEQ ID NO: 32146 - DNA, 30 bp, Artificial Sequence; identical to SEQ ID NO: 381
  Description of Artificial Sequence: Synthetic all nuts; inner sequence

SEQ ID NO: 32147 - DNA, 30 bp, Artificial Sequence; identical to SEQ ID NO: 270
  Description of Artificial Sequence: Synthetic all nuts; inner sequence

SEQ ID NO: 32148 - DNA, 30 bp, Artificial Sequence; identical to SEQ ID NO: 355
  Description of Artificial Sequence: Synthetic all nuts; inner sequence

SEQ ID NO: 32149 - DNA, 30 bp, Artificial Sequence; identical to SEQ ID NO: 155
  Description of Artificial Sequence: Synthetic all nuts; inner sequence

SEQ ID NO: 32150 - DNA, 30 bp, Artificial Sequence; identical to SEQ ID NO: 628
  Description of Artificial Sequence: Synthetic all nuts; inner sequence

SEQ ID NO: 32151 - DNA, 30 bp, Artificial Sequence; identical to SEQ ID NO: 646
  Description of Artificial Sequence: Synthetic all nuts; inner sequence

SEQ ID NO: 32152 - DNA, 30 bp, Artificial Sequence; identical to SEQ ID NO: 632
  Description of Artificial Sequence: Synthetic all nuts; inner sequence

SEQ ID NO: 32153 - DNA, 30 bp, Artificial Sequence; identical to SEQ ID NO: 389
  Description of Artificial Sequence: Synthetic all nuts; inner sequence

SEQ ID NO: 32154 - DNA, 30 bp, Artificial Sequence; identical to SEQ ID NO: 955
  Description of Artificial Sequence: Synthetic all nuts; inner sequence

SEQ ID NO: 32155 - DNA, 30 bp, Artificial Sequence; identical to SEQ ID NO: 4590
  Description of Artificial Sequence: Synthetic all nuts; inner sequence

SEQ ID NO: 32156 - DNA, 30 bp, Artificial Sequence; identical to SEQ ID NO: 8926
  Description of Artificial Sequence: Synthetic all nuts; inner sequence

SEQ ID NO: 32157 - DNA, 30 bp, Artificial Sequence; identical to SEQ ID NO: 45
  Description of Artificial Sequence: Synthetic all nuts; inner sequence

SEQ ID NO: 32158 - DNA, 30 bp, Artificial Sequence; identical to SEQ ID NO: 400
  Description of Artificial Sequence: Synthetic all nuts; inner sequence

SEQ ID NO: 32159 - DNA, 30 bp, Artificial Sequence; identical to SEQ ID NO: 20693
  Description of Artificial Sequence: Synthetic all nuts; inner sequence

SEQ ID NO: 32160 - DNA, 30 bp, Artificial Sequence; identical to SEQ ID NO: 141
  Description of Artificial Sequence: Synthetic all nuts; inner sequence

SEQ ID NO: 32161 - DNA, 29 bp, Artificial Sequence
  Description of Artificial Sequence: Synthetic all nuts; inner sequence
ggccgaacggaccgacaagtgcgcatgga

SEQ ID NO: 32162 - DNA, 30 bp, Artificial Sequence
  Description of Artificial Sequence: Synthetic all nuts; inner sequence
tgcgtaccgagctgacctatcagtgtgtcg

SEQ ID NO: 32163 - DNA, 30 bp, Artificial Sequence; identical to SEQ ID NO: 98
  Description of Artificial Sequence: Synthetic all nuts; inner sequence

SEQ ID NO: 32164 - DNA, 30 bp, Artificial Sequence; identical to SEQ ID NO: 16692
  Description of Artificial Sequence: Synthetic all nuts; inner sequence

SEQ ID NO: 32165 - DNA, 30 bp, Artificial Sequence; identical to SEQ ID NO: 376
  Description of Artificial Sequence: Synthetic all nuts; inner sequence

SEQ ID NO: 32166 - DNA, 30 bp, Artificial Sequence
  Description of Artificial Sequence: Synthetic all nuts; inner sequence
gtacgcaacgaacctacgagtgatcgtgta

SEQ ID NO: 32167 - DNA, 30 bp, Artificial Sequence
  Description of Artificial Sequence: Synthetic all nuts; inner sequence
gacgcgaacttgcctcaagtgtgccgtgga

SEQ ID NO: 32168 - DNA, 30 bp, Artificial Sequence; identical to SEQ ID NO: 75
  Description of Artificial Sequence: Synthetic all nuts; inner sequence

SEQ ID NO: 32169 - DNA, 30 bp, Artificial Sequence; identical to SEQ ID NO: 157
  Description of Artificial Sequence: Synthetic all nuts; inner sequence

SEQ ID NO: 32170 - DNA, 30 bp, Artificial Sequence; identical to SEQ ID NO: 567
  Description of Artificial Sequence: Synthetic all nuts; inner sequence

SEQ ID NO: 32171 - DNA, 30 bp, Artificial Sequence; identical to SEQ ID NO: 4610
  Description of Artificial Sequence: Synthetic all nuts; inner sequence

SEQ ID NO: 32172 - DNA, 30 bp, Artificial Sequence; identical to SEQ ID NO: 4845
  Description of Artificial Sequence: Synthetic all nuts; inner sequence

SEQ ID NO: 32173 - DNA, 30 bp, Artificial Sequence; identical to SEQ ID NO: 4742
  Description of Artificial Sequence: Synthetic all nuts; inner sequence

SEQ ID NO: 32174 - DNA, 30 bp, Artificial Sequence; identical to SEQ ID NO: 69
  Description of Artificial Sequence: Synthetic all nuts; inner sequence

SEQ ID NO: 32175 - DNA, 30 bp, Artificial Sequence
  Description of Artificial Sequence: Synthetic all nuts; inner sequence
gtacgcgcgacacctatcaatgtggacgtg

SEQ ID NO: 32176 - DNA, 30 bp, Artificial Sequence; identical to SEQ ID NO: 8953
  Description of Artificial Sequence: Synthetic all nuts; inner sequence

SEQ ID NO: 32177 - DNA, 31 bp, Artificial Sequence; identical to SEQ ID NO: 20717
  Description of Artificial Sequence: Synthetic all nuts; inner sequence

SEQ ID NO: 32178 - DNA, 31 bp, Artificial Sequence; identical to SEQ ID NO: 4245
  Description of Artificial Sequence: Synthetic all nuts; inner sequence

SEQ ID NO: 32179 - DNA, 30 bp, Artificial Sequence; identical to SEQ ID NO: 8860
  Description of Artificial Sequence: Synthetic all nuts; inner sequence

SEQ ID NO: 32180 - DNA, 30 bp, Artificial Sequence; identical to SEQ ID NO: 103
  Description of Artificial Sequence: Synthetic all nuts; inner sequence

SEQ ID NO: 32181 - DNA, 30 bp, Artificial Sequence; identical to SEQ ID NO: 655
  Description of Artificial Sequence: Synthetic all nuts; inner sequence

SEQ ID NO: 32182 - DNA, 30 bp, Artificial Sequence; identical to SEQ ID NO: 143
  Description of Artificial Sequence: Synthetic all nuts; inner sequence

SEQ ID NO: 32183 - DNA, 30 bp, Artificial Sequence; identical to SEQ ID NO: 8971
  Description of Artificial Sequence: Synthetic all nuts; inner sequence

SEQ ID NO: 32184 - DNA, 30 bp, Artificial Sequence; identical to SEQ ID NO: 8770
  Description of Artificial Sequence: Synthetic all nuts; inner sequence

SEQ ID NO: 32185 - DNA, 30 bp, Artificial Sequence; identical to SEQ ID NO: 109
  Description of Artificial Sequence: Synthetic all nuts; inner sequence

SEQ ID NO: 32186 - DNA, 30 bp, Artificial Sequence; identical to SEQ ID NO: 460
  Description of Artificial Sequence: Synthetic all nuts; inner sequence

SEQ ID NO: 32187 - DNA, 30 bp, Artificial Sequence; identical to SEQ ID NO: 20736
  Description of Artificial Sequence: Synthetic all nuts; inner sequence

SEQ ID NO: 32188 - DNA, 30 bp, Artificial Sequence; identical to SEQ ID NO: 108
  Description of Artificial Sequence: Synthetic all nuts; inner sequence

SEQ ID NO: 32189 - DNA, 30 bp, Artificial Sequence; identical to SEQ ID NO: 16810
  Description of Artificial Sequence: Synthetic all nuts; inner sequence

SEQ ID NO: 32190 - DNA, 30 bp, Artificial Sequence
  Description of Artificial Sequence: Synthetic all nuts; inner sequence
gtcattccacatcctacacgtgggcacgta

SEQ ID NO: 32191 - DNA, 30 bp, Artificial Sequence
  Description of Artificial Sequence: Synthetic all nuts; inner sequence
gcgagacaacgcgaaccgttccgatgcacg

SEQ ID NO: 32192 - DNA, 30 bp, Artificial Sequence
  Description of Artificial Sequence: Synthetic all nuts; inner sequence
acgtcacgcgcataccaccttggctgcgtg

SEQ ID NO: 32193 - DNA, 30 bp, Artificial Sequence
  Description of Artificial Sequence: Synthetic all nuts; inner sequence
gtcattccgcatcctacacgtgggcccgta

SEQ ID NO: 32194 - DNA, 30 bp, Artificial Sequence; identical to SEQ ID NO: 867
  Description of Artificial Sequence: Synthetic all nuts; inner sequence

SEQ ID NO: 32195 - DNA, 30 bp, Artificial Sequence; identical to SEQ ID NO: 8722
  Description of Artificial Sequence: Synthetic all nuts; inner sequence

SEQ ID NO: 32196 - DNA, 30 bp, Artificial Sequence; identical to SEQ ID NO: 41
  Description of Artificial Sequence: Synthetic all nuts; inner sequence

SEQ ID NO: 32197 - DNA, 30 bp, Artificial Sequence; identical to SEQ ID NO: 8798
  Description of Artificial Sequence: Synthetic all nuts; inner sequence

SEQ ID NO: 32198 - DNA, 30 bp, Artificial Sequence; identical to SEQ ID NO: 608
  Description of Artificial Sequence: Synthetic all nuts; inner sequence

SEQ ID NO: 32199 - DNA, 30 bp, Artificial Sequence; identical to SEQ ID NO: 8826
  Description of Artificial Sequence: Synthetic all nuts; inner sequence

SEQ ID NO: 32200 - DNA, 30 bp, Artificial Sequence; identical to SEQ ID NO: 287
  Description of Artificial Sequence: Synthetic all nuts; inner sequence

SEQ ID NO: 32201 - DNA, 30 bp, Artificial Sequence; identical to SEQ ID NO: 299
  Description of Artificial Sequence: Synthetic all nuts; inner sequence

SEQ ID NO: 32202 - DNA, 30 bp, Artificial Sequence; identical to SEQ ID NO: 20721
  Description of Artificial Sequence: Synthetic all nuts; inner sequence

SEQ ID NO: 32203 - DNA, 30 bp, Artificial Sequence; identical to SEQ ID NO: 191
  Description of Artificial Sequence: Synthetic all nuts; inner sequence

SEQ ID NO: 32204 - DNA, 30 bp, Artificial Sequence; identical to SEQ ID NO: 28722
  Description of Artificial Sequence: Synthetic all nuts; inner sequence

SEQ ID NO: 32205 - DNA, 30 bp, Artificial Sequence; identical to SEQ ID NO: 12700
  Description of Artificial Sequence: Synthetic all nuts; inner sequence

SEQ ID NO: 32206 - DNA, 30 bp, Artificial Sequence; identical to SEQ ID NO: 20570
  Description of Artificial Sequence: Synthetic all nuts; inner sequence

SEQ ID NO: 32207 - DNA, 30 bp, Artificial Sequence; identical to SEQ ID NO: 16457
  Description of Artificial Sequence: Synthetic all nuts; inner sequence

SEQ ID NO: 32208 - DNA, 29 bp, Artificial Sequence
  Description of Artificial Sequence: Synthetic all nuts; inner sequence
ggcctgcgatggatgtggacgtacgtggc

SEQ ID NO: 32209 - DNA, 30 bp, Artificial Sequence
  Description of Artificial Sequence: Synthetic all nuts; inner sequence
ggatgacgctaccctacacgtgggcacgta

SEQ ID NO: 32210 - DNA, 30 bp, Artificial Sequence; identical to SEQ ID NO: 479
  Description of Artificial Sequence: Synthetic all nuts; inner sequence

SEQ ID NO: 32211 - DNA, 30 bp, Artificial Sequence; identical to SEQ ID NO: 20949
  Description of Artificial Sequence: Synthetic all nuts; inner sequence

SEQ ID NO: 32212 - DNA, 30 bp, Artificial Sequence; identical to SEQ ID NO: 177
  Description of Artificial Sequence: Synthetic all nuts; inner sequence

SEQ ID NO: 32213 - DNA, 30 bp, Artificial Sequence; identical to SEQ ID NO: 673
  Description of Artificial Sequence: Synthetic all nuts; inner sequence

SEQ ID NO: 32214 - DNA, 30 bp, Artificial Sequence; identical to SEQ ID NO: 950
  Description of Artificial Sequence: Synthetic all nuts; inner sequence

SEQ ID NO: 32215 - DNA, 30 bp, Artificial Sequence; identical to SEQ ID NO: 775
  Description of Artificial Sequence: Synthetic all nuts; inner sequence

SEQ ID NO: 32216 - DNA, 30 bp, Artificial Sequence
  Description of Artificial Sequence: Synthetic all nuts; inner sequence
cgtaccgacagggacatgcaccgtgtcgca

SEQ ID NO: 32217 - DNA, 30 bp, Artificial Sequence; identical to SEQ ID NO: 279
  Description of Artificial Sequence: Synthetic all nuts; inner sequence

SEQ ID NO: 32218 - DNA, 30 bp, Artificial Sequence; identical to SEQ ID NO: 4774
  Description of Artificial Sequence: Synthetic all nuts; inner sequence

SEQ ID NO: 32219 - DNA, 30 bp, Artificial Sequence; identical to SEQ ID NO: 807
  Description of Artificial Sequence: Synthetic all nuts; inner sequence

SEQ ID NO: 32220 - DNA, 30 bp, Artificial Sequence; identical to SEQ ID NO: 20528
  Description of Artificial Sequence: Synthetic all nuts; inner sequence

SEQ ID NO: 32221 - DNA, 30 bp, Artificial Sequence; identical to SEQ ID NO: 20817
  Description of Artificial Sequence: Synthetic all nuts; inner sequence

SEQ ID NO: 32222 - DNA, 30 bp, Artificial Sequence; identical to SEQ ID NO: 800
  Description of Artificial Sequence: Synthetic all nuts; inner sequence

SEQ ID NO: 32223 - DNA, 30 bp, Artificial Sequence; identical to SEQ ID NO: 132
  Description of Artificial Sequence: Synthetic all nuts; inner sequence

SEQ ID NO: 32224 - DNA, 30 bp, Artificial Sequence; identical to SEQ ID NO: 159
  Description of Artificial Sequence: Synthetic all nuts; inner sequence

SEQ ID NO: 32225 - DNA, 29 bp, Artificial Sequence
  Description of Artificial Sequence: Synthetic all nuts; inner sequence
gtcatgccatcccttcgagtgtgcaggta

SEQ ID NO: 32226 - DNA, 30 bp, Artificial Sequence; identical to SEQ ID NO: 568
  Description of Artificial Sequence: Synthetic all nuts; inner sequence

SEQ ID NO: 32227 - DNA, 30 bp, Artificial Sequence; identical to SEQ ID NO: 984
  Description of Artificial Sequence: Synthetic all nuts; inner sequence

SEQ ID NO: 32228 - DNA, 30 bp, Artificial Sequence; identical to SEQ ID NO: 4653
  Description of Artificial Sequence: Synthetic all nuts; inner sequence

SEQ ID NO: 32229 - DNA, 30 bp, Artificial Sequence; identical to SEQ ID NO: 20753
  Description of Artificial Sequence: Synthetic all nuts; inner sequence

SEQ ID NO: 32230 - DNA, 30 bp, Artificial Sequence; identical to SEQ ID NO: 129
  Description of Artificial Sequence: Synthetic all nuts; inner sequence

SEQ ID NO: 32231 - DNA, 30 bp, Artificial Sequence; identical to SEQ ID NO: 841
  Description of Artificial Sequence: Synthetic all nuts; inner sequence

SEQ ID NO: 32232 - DNA, 30 bp, Artificial Sequence; identical to SEQ ID NO: 55
  Description of Artificial Sequence: Synthetic all nuts; inner sequence

SEQ ID NO: 32233 - DNA, 30 bp, Artificial Sequence; identical to SEQ ID NO: 4576
  Description of Artificial Sequence: Synthetic all nuts; inner sequence

SEQ ID NO: 32234 - DNA, 30 bp, Artificial Sequence; identical to SEQ ID NO: 175
  Description of Artificial Sequence: Synthetic all nuts; inner sequence

SEQ ID NO: 32235 - DNA, 30 bp, Artificial Sequence
  Description of Artificial Sequence: Synthetic all nuts; inner sequence
ggcatggcgcgcaccctatcaacgtggaca

SEQ ID NO: 32236 - DNA, 30 bp, Artificial Sequence; identical to SEQ ID NO: 82
  Description of Artificial Sequence: Synthetic all nuts; inner sequence

SEQ ID NO: 32237 - DNA, 30 bp, Artificial Sequence; identical to SEQ ID NO: 20458
  Description of Artificial Sequence: Synthetic all nuts; inner sequence

SEQ ID NO: 32238 - DNA, 30 bp, Artificial Sequence; identical to SEQ ID NO: 88
  Description of Artificial Sequence: Synthetic all nuts; inner sequence

SEQ ID NO: 32239 - DNA, 30 bp, Artificial Sequence; identical to SEQ ID NO: 240
  Description of Artificial Sequence: Synthetic all nuts; inner sequence

SEQ ID NO: 32240 - DNA, 30 bp, Artificial Sequence; identical to SEQ ID NO: 43
  Description of Artificial Sequence: Synthetic all nuts; inner sequence

SEQ ID NO: 32241 - DNA, 30 bp, Artificial Sequence; identical to SEQ ID NO: 20573
  Description of Artificial Sequence: Synthetic all nuts; inner sequence

SEQ ID NO: 32242 - DNA, 30 bp, Artificial Sequence; identical to SEQ ID NO: 48
  Description of Artificial Sequence: Synthetic all nuts; inner sequence

SEQ ID NO: 32243 - DNA, 30 bp, Artificial Sequence; identical to SEQ ID NO: 29
  Description of Artificial Sequence: Synthetic all nuts; inner sequence

SEQ ID NO: 32244 - DNA, 30 bp, Artificial Sequence; identical to SEQ ID NO: 426
  Description of Artificial Sequence: Synthetic all nuts; inner sequence

SEQ ID NO: 32245 - DNA, 30 bp, Artificial Sequence; identical to SEQ ID NO: 20737
  Description of Artificial Sequence: Synthetic all nuts; inner sequence

SEQ ID NO: 32246 - DNA, 30 bp, Artificial Sequence; identical to SEQ ID NO: 33
  Description of Artificial Sequence: Synthetic all nuts; inner sequence

SEQ ID NO: 32247 - DNA, 30 bp, Artificial Sequence; identical to SEQ ID NO: 4743
  Description of Artificial Sequence: Synthetic all nuts; inner sequence

SEQ ID NO: 32248 - DNA, 30 bp, Artificial Sequence; identical to SEQ ID NO: 4864
  Description of Artificial Sequence: Synthetic all nuts; inner sequence

SEQ ID NO: 32249 - DNA, 30 bp, Artificial Sequence; identical to SEQ ID NO: 20527
  Description of Artificial Sequence: Synthetic all nuts; inner sequence

SEQ ID NO: 32250 - DNA, 30 bp, Artificial Sequence; identical to SEQ ID NO: 4814
  Description of Artificial Sequence: Synthetic all nuts; inner sequence

SEQ ID NO: 32251 - DNA, 30 bp, Artificial Sequence; identical to SEQ ID NO: 8868
  Description of Artificial Sequence: Synthetic all nuts; inner sequence

SEQ ID NO: 32252 - DNA, 30 bp, Artificial Sequence; identical to SEQ ID NO: 20733
  Description of Artificial Sequence: Synthetic all nuts; inner sequence

SEQ ID NO: 32253 - DNA, 30 bp, Artificial Sequence; identical to SEQ ID NO: 4931
  Description of Artificial Sequence: Synthetic all nuts; inner sequence

SEQ ID NO: 32254 - DNA, 30 bp, Artificial Sequence; identical to SEQ ID NO: 594
  Description of Artificial Sequence: Synthetic all nuts; inner sequence

SEQ ID NO: 32255 - DNA, 30 bp, Artificial Sequence; identical to SEQ ID NO: 752
  Description of Artificial Sequence: Synthetic all nuts; inner sequence

SEQ ID NO: 32256 - DNA, 28 bp, Artificial Sequence
  Description of Artificial Sequence: Synthetic all nuts; inner sequence
gcacgactcgcaccctatcatgcggtca

SEQ ID NO: 32257 - DNA, 30 bp, Artificial Sequence
  Description of Artificial Sequence: Synthetic all nuts; inner sequence
ccgtggcgacatcaagcggtggtgtgcgtg

SEQ ID NO: 32258 - DNA, 30 bp, Artificial Sequence; identical to SEQ ID NO: 28681
  Description of Artificial Sequence: Synthetic all nuts; inner sequence

SEQ ID NO: 32259 - DNA, 30 bp, Artificial Sequence; identical to SEQ ID NO: 615
  Description of Artificial Sequence: Synthetic all nuts; inner sequence

SEQ ID NO: 32260 - DNA, 30 bp, Artificial Sequence; identical to SEQ ID NO: 185
  Description of Artificial Sequence: Synthetic all nuts; inner sequence

SEQ ID NO: 32261 - DNA, 30 bp, Artificial Sequence
  Description of Artificial Sequence: Synthetic all nuts; inner sequence
gtactgcgatggatgtgcgttgtgctcggc

SEQ ID NO: 32262 - DNA, 30 bp, Artificial Sequence; identical to SEQ ID NO: 932
  Description of Artificial Sequence: Synthetic all nuts; inner sequence

SEQ ID NO: 32263 - DNA, 30 bp, Artificial Sequence; identical to SEQ ID NO: 12992
  Description of Artificial Sequence: Synthetic all nuts; inner sequence

SEQ ID NO: 32264 - DNA, 30 bp, Artificial Sequence; identical to SEQ ID NO: 20544
  Description of Artificial Sequence: Synthetic all nuts; inner sequence

SEQ ID NO: 32265 - DNA, 30 bp, Artificial Sequence; identical to SEQ ID NO: 136
  Description of Artificial Sequence: Synthetic all nuts; inner sequence

SEQ ID NO: 32266 - DNA, 30 bp, Artificial Sequence
  Description of Artificial Sequence: Synthetic all nuts; inner sequence
cacgcactggacgaccctgagtgacgcatg

SEQ ID NO: 32267 - DNA, 30 bp, Artificial Sequence; identical to SEQ ID NO: 331
  Description of Artificial Sequence: Synthetic all nuts; inner sequence

SEQ ID NO: 32268 - DNA, 30 bp, Artificial Sequence
  Description of Artificial Sequence: Synthetic all nuts; inner sequence
gtcgtggcgcgaaccgtcgagtggtatgga

SEQ ID NO: 32269 - DNA, 30 bp, Artificial Sequence; identical to SEQ ID NO: 714
  Description of Artificial Sequence: Synthetic all nuts; inner sequence

SEQ ID NO: 32270 - DNA, 30 bp, Artificial Sequence; identical to SEQ ID NO: 20466
  Description of Artificial Sequence: Synthetic all nuts; inner sequence

SEQ ID NO: 32271 - DNA, 30 bp, Artificial Sequence; identical to SEQ ID NO: 8756
  Description of Artificial Sequence: Synthetic all nuts; inner sequence

SEQ ID NO: 32272 - DNA, 30 bp, Artificial Sequence; identical to SEQ ID NO: 406
  Description of Artificial Sequence: Synthetic all nuts; inner sequence

SEQ ID NO: 32273 - DNA, 30 bp, Artificial Sequence; identical to SEQ ID NO: 20669
  Description of Artificial Sequence: Synthetic all nuts; inner sequence

SEQ ID NO: 32274 - DNA, 30 bp, Artificial Sequence; identical to SEQ ID NO: 190
  Description of Artificial Sequence: Synthetic all nuts; inner sequence

SEQ ID NO: 32275 - DNA, 30 bp, Artificial Sequence; identical to SEQ ID NO: 874
  Description of Artificial Sequence: Synthetic all nuts; inner sequence

SEQ ID NO: 32276 - DNA, 30 bp, Artificial Sequence; identical to SEQ ID NO: 4535
  Description of Artificial Sequence: Synthetic all nuts; inner sequence

SEQ ID NO: 32277 - DNA, 30 bp, Artificial Sequence; identical to SEQ ID NO: 476
  Description of Artificial Sequence: Synthetic all nuts; inner sequence

SEQ ID NO: 32278 - DNA, 30 bp, Artificial Sequence; identical to SEQ ID NO: 20912
  Description of Artificial Sequence: Synthetic all nuts; inner sequence

SEQ ID NO: 32279 - DNA, 29 bp, Artificial Sequence
  Description of Artificial Sequence: Synthetic all nuts; inner sequence
gtacgccgatgccctcatgtggccgtgga

SEQ ID NO: 32280 - DNA, 30 bp, Artificial Sequence; identical to SEQ ID NO: 685
  Description of Artificial Sequence: Synthetic all nuts; inner sequence

SEQ ID NO: 32281 - DNA, 30 bp, Artificial Sequence; identical to SEQ ID NO: 127
  Description of Artificial Sequence: Synthetic all nuts; inner sequence

SEQ ID NO: 32282 - DNA, 30 bp, Artificial Sequence; identical to SEQ ID NO: 171
  Description of Artificial Sequence: Synthetic all nuts; inner sequence

SEQ ID NO: 32283 - DNA, 30 bp, Artificial Sequence; identical to SEQ ID NO: 636
  Description of Artificial Sequence: Synthetic all nuts; inner sequence

SEQ ID NO: 32284 - DNA, 30 bp, Artificial Sequence; identical to SEQ ID NO: 3
  Description of Artificial Sequence: Synthetic all nuts; inner sequence

SEQ ID NO: 32285 - DNA, 30 bp, Artificial Sequence; identical to SEQ ID NO: 110
  Description of Artificial Sequence: Synthetic all nuts; inner sequence

SEQ ID NO: 32286 - DNA, 30 bp, Artificial Sequence; identical to SEQ ID NO: 228
  Description of Artificial Sequence: Synthetic all nuts; inner sequence

SEQ ID NO: 32287 - DNA, 30 bp, Artificial Sequence
  Description of Artificial Sequence: Synthetic all nuts; inner sequence
ccgttgcgacatcaagcggtggtgtgcgtg

SEQ ID NO: 32288 - DNA, 30 bp, Artificial Sequence; identical to SEQ ID NO: 8682
  Description of Artificial Sequence: Synthetic all nuts; inner sequence

SEQ ID NO: 32289 - DNA, 30 bp, Artificial Sequence; identical to SEQ ID NO: 4700
  Description of Artificial Sequence: Synthetic all nuts; inner sequence

SEQ ID NO: 32290 - DNA, 30 bp, Artificial Sequence; identical to SEQ ID NO: 877
  Description of Artificial Sequence: Synthetic all nuts; inner sequence

SEQ ID NO: 32291 - DNA, 31 bp, Artificial Sequence
  Description of Artificial Sequence: Synthetic all nuts; inner sequence
gtactgcactgccctacacgtggacgatgtg

SEQ ID NO: 32292 - DNA, 30 bp, Artificial Sequence; identical to SEQ ID NO: 67
  Description of Artificial Sequence: Synthetic all nuts; inner sequence

SEQ ID NO: 32293 - DNA, 30 bp, Artificial Sequence; identical to SEQ ID NO: 92
  Description of Artificial Sequence: Synthetic all nuts; inner sequence

SEQ ID NO: 32294 - DNA, 30 bp, Artificial Sequence; identical to SEQ ID NO: 492
  Description of Artificial Sequence: Synthetic all nuts; inner sequence

SEQ ID NO: 32295 - DNA, 30 bp, Artificial Sequence
  Description of Artificial Sequence: Synthetic all nuts; inner sequence
gcacgtaacgcacaagcaggccatgtggca

SEQ ID NO: 32296 - DNA, 30 bp, Artificial Sequence; identical to SEQ ID NO: 8782
  Description of Artificial Sequence: Synthetic all nuts; inner sequence

SEQ ID NO: 32297 - DNA, 30 bp, Artificial Sequence; identical to SEQ ID NO: 4573
  Description of Artificial Sequence: Synthetic all nuts; inner sequence

SEQ ID NO: 32298 - DNA, 30 bp, Artificial Sequence; identical to SEQ ID NO: 20617
  Description of Artificial Sequence: Synthetic all nuts; inner sequence

SEQ ID NO: 32299 - DNA, 30 bp, Artificial Sequence; identical to SEQ ID NO: 154
  Description of Artificial Sequence: Synthetic all nuts; inner sequence

SEQ ID NO: 32300 - DNA, 30 bp, Artificial Sequence; identical to SEQ ID NO: 768
  Description of Artificial Sequence: Synthetic all nuts; inner sequence

SEQ ID NO: 32301 - DNA, 30 bp, Artificial Sequence; identical to SEQ ID NO: 4407
  Description of Artificial Sequence: Synthetic all nuts; inner sequence

SEQ ID NO: 32302 - DNA, 30 bp, Artificial Sequence
  Description of Artificial Sequence: Synthetic all nuts; inner sequence
gaacgactcgcaccctatcatgaggccatg

SEQ ID NO: 32303 - DNA, 30 bp, Artificial Sequence; identical to SEQ ID NO: 262
  Description of Artificial Sequence: Synthetic all nuts; inner sequence

SEQ ID NO: 32304 - DNA, 30 bp, Artificial Sequence
  Description of Artificial Sequence: Synthetic all nuts; inner sequence
gtcattccgcatcctacacgtgggcactta

SEQ ID NO: 32305 - DNA, 30 bp, Artificial Sequence; identical to SEQ ID NO: 102
  Description of Artificial Sequence: Synthetic all nuts; inner sequence

SEQ ID NO: 32306 - DNA, 30 bp, Artificial Sequence; identical to SEQ ID NO: 4571
  Description of Artificial Sequence: Synthetic all nuts; inner sequence

SEQ ID NO: 32307 - DNA, 30 bp, Artificial Sequence; identical to SEQ ID NO: 20105
  Description of Artificial Sequence: Synthetic all nuts; inner sequence

SEQ ID NO: 32308 - DNA, 30 bp, Artificial Sequence; identical to SEQ ID NO: 4918
  Description of Artificial Sequence: Synthetic all nuts; inner sequence

SEQ ID NO: 32309 - DNA, 30 bp, Artificial Sequence; identical to SEQ ID NO: 65
  Description of Artificial Sequence: Synthetic all nuts; inner sequence

SEQ ID NO: 32310 - DNA, 30 bp, Artificial Sequence; identical to SEQ ID NO: 99
  Description of Artificial Sequence: Synthetic all nuts; inner sequence

SEQ ID NO: 32311 - DNA, 30 bp, Artificial Sequence; identical to SEQ ID NO: 913
  Description of Artificial Sequence: Synthetic all nuts; inner sequence

SEQ ID NO: 32312 - DNA, 30 bp, Artificial Sequence; identical to SEQ ID NO: 323
  Description of Artificial Sequence: Synthetic all nuts; inner sequence

SEQ ID NO: 32313 - DNA, 30 bp, Artificial Sequence; identical to SEQ ID NO: 254
  Description of Artificial Sequence: Synthetic all nuts; inner sequence

SEQ ID NO: 32314 - DNA, 30 bp, Artificial Sequence; identical to SEQ ID NO: 28861
  Description of Artificial Sequence: Synthetic all nuts; inner sequence

SEQ ID NO: 32315 - DNA, 30 bp, Artificial Sequence; identical to SEQ ID NO: 236
  Description of Artificial Sequence: Synthetic all nuts; inner sequence

SEQ ID NO: 32316 - DNA, 30 bp, Artificial Sequence; identical to SEQ ID NO: 4962
  Description of Artificial Sequence: Synthetic all nuts; inner sequence

SEQ ID NO: 32317 - DNA, 30 bp, Artificial Sequence; identical to SEQ ID NO: 12744
  Description of Artificial Sequence: Synthetic all nuts; inner sequence

SEQ ID NO: 32318 - DNA, 30 bp, Artificial Sequence; identical to SEQ ID NO: 20518
  Description of Artificial Sequence: Synthetic all nuts; inner sequence

SEQ ID NO: 32319 - DNA, 30 bp, Artificial Sequence; identical to SEQ ID NO: 316
  Description of Artificial Sequence: Synthetic all nuts; inner sequence

SEQ ID NO: 32320 - DNA, 30 bp, Artificial Sequence; identical to SEQ ID NO: 195
  Description of Artificial Sequence: Synthetic all nuts; inner sequence

SEQ ID NO: 32321 - DNA, 30 bp, Artificial Sequence
  Description of Artificial Sequence: Synthetic all nuts; inner sequence
cgatcccacgaacggtcacgaccaggcaca

SEQ ID NO: 32322 - DNA, 30 bp, Artificial Sequence; identical to SEQ ID NO: 123
  Description of Artificial Sequence: Synthetic all nuts; inner sequence

SEQ ID NO: 32323 - DNA, 30 bp, Artificial Sequence; identical to SEQ ID NO: 247
  Description of Artificial Sequence: Synthetic all nuts; inner sequence

SEQ ID NO: 32324 - DNA, 30 bp, Artificial Sequence; identical to SEQ ID NO: 83
  Description of Artificial Sequence: Synthetic all nuts; inner sequence

SEQ ID NO: 32325 - DNA, 30 bp, Artificial Sequence; identical to SEQ ID NO: 586
  Description of Artificial Sequence: Synthetic all nuts; inner sequence

SEQ ID NO: 32326 - DNA, 30 bp, Artificial Sequence; identical to SEQ ID NO: 625
  Description of Artificial Sequence: Synthetic all nuts; inner sequence

SEQ ID NO: 32327 - DNA, 30 bp, Artificial Sequence; identical to SEQ ID NO: 13
  Description of Artificial Sequence: Synthetic all nuts; inner sequence

SEQ ID NO: 32328 - DNA, 30 bp, Artificial Sequence; identical to SEQ ID NO: 901
  Description of Artificial Sequence: Synthetic all nuts; inner sequence

SEQ ID NO: 32329 - DNA, 30 bp, Artificial Sequence; identical to SEQ ID NO: 16989
  Description of Artificial Sequence: Synthetic all nuts; inner sequence

SEQ ID NO: 32330 - DNA, 30 bp, Artificial Sequence; identical to SEQ ID NO: 8748
  Description of Artificial Sequence: Synthetic all nuts; inner sequence

SEQ ID NO: 32331 - DNA, 30 bp, Artificial Sequence; identical to SEQ ID NO: 4998
  Description of Artificial Sequence: Synthetic all nuts; inner sequence

SEQ ID NO: 32332 - DNA, 30 bp, Artificial Sequence
  Description of Artificial Sequence: Synthetic all nuts; inner sequence
cgaccctacacgtggcatggtgatgacggc

SEQ ID NO: 32333 - DNA, 25 bp, Artificial Sequence
  Description of Artificial Sequence: Synthetic all nuts; inner sequence
cgcaccgtcaagcaggcacgtgtca

SEQ ID NO: 32334 - DNA, 30 bp, Artificial Sequence; identical to SEQ ID NO: 8922
  Description of Artificial Sequence: Synthetic all nuts; inner sequence

SEQ ID NO: 32335 - DNA, 30 bp, Artificial Sequence; identical to SEQ ID NO: 20372
  Description of Artificial Sequence: Synthetic all nuts; inner sequence

SEQ ID NO: 32336 - DNA, 30 bp, Artificial Sequence; identical to SEQ ID NO: 20788
  Description of Artificial Sequence: Synthetic all nuts; inner sequence

SEQ ID NO: 32337 - DNA, 30 bp, Artificial Sequence; identical to SEQ ID NO: 881
  Description of Artificial Sequence: Synthetic all nuts; inner sequence

SEQ ID NO: 32338 - DNA, 30 bp, Artificial Sequence; identical to SEQ ID NO: 436
  Description of Artificial Sequence: Synthetic all nuts; inner sequence

SEQ ID NO: 32339 - DNA, 30 bp, Artificial Sequence; identical to SEQ ID NO: 683
  Description of Artificial Sequence: Synthetic all nuts; inner sequence

SEQ ID NO: 32340 - DNA, 30 bp, Artificial Sequence; identical to SEQ ID NO: 317
  Description of Artificial Sequence: Synthetic all nuts; inner sequence

SEQ ID NO: 32341 - DNA, 30 bp, Artificial Sequence
  Description of Artificial Sequence: Synthetic all nuts; inner sequence
ccctagcgacatcaagcggtggtgtgcgtg

SEQ ID NO: 32342 - DNA, 30 bp, Artificial Sequence; identical to SEQ ID NO: 260
  Description of Artificial Sequence: Synthetic all nuts; inner sequence

SEQ ID NO: 32343 - DNA, 30 bp, Artificial Sequence; identical to SEQ ID NO: 12743
  Description of Artificial Sequence: Synthetic all nuts; inner sequence

SEQ ID NO: 32344 - DNA, 30 bp, Artificial Sequence; identical to SEQ ID NO: 291
  Description of Artificial Sequence: Synthetic all nuts; inner sequence

SEQ ID NO: 32345 - DNA, 30 bp, Artificial Sequence; identical to SEQ ID NO: 39
  Description of Artificial Sequence: Synthetic all nuts; inner sequence

SEQ ID NO: 32346 - DNA, 30 bp, Artificial Sequence; identical to SEQ ID NO: 575
  Description of Artificial Sequence: Synthetic all nuts; inner sequence

SEQ ID NO: 32347 - DNA, 30 bp, Artificial Sequence; identical to SEQ ID NO: 34
  Description of Artificial Sequence: Synthetic all nuts; inner sequence

SEQ ID NO: 32348 - DNA, 30 bp, Artificial Sequence; identical to SEQ ID NO: 866
  Description of Artificial Sequence: Synthetic all nuts; inner sequence

SEQ ID NO: 32349 - DNA, 30 bp, Artificial Sequence; identical to SEQ ID NO: 4419
  Description of Artificial Sequence: Synthetic all nuts; inner sequence

SEQ ID NO: 32350 - DNA, 32 bp, Artificial Sequence
  Description of Artificial Sequence: Synthetic all nuts; inner sequence
ggacgacgcgtgccctatcatgtgtgcgtgga

SEQ ID NO: 32351 - DNA, 30 bp, Artificial Sequence; identical to SEQ ID NO: 20483
  Description of Artificial Sequence: Synthetic all nuts; inner sequence

SEQ ID NO: 32352 - DNA, 30 bp, Artificial Sequence
  Description of Artificial Sequence: Synthetic all nuts; inner sequence
cgtaggtacggcacgacactcaatggcatg

SEQ ID NO: 32353 - DNA, 30 bp, Artificial Sequence; identical to SEQ ID NO: 4745
  Description of Artificial Sequence: Synthetic all nuts; inner sequence

SEQ ID NO: 32354 - DNA, 30 bp, Artificial Sequence; identical to SEQ ID NO: 551
  Description of Artificial Sequence: Synthetic all nuts; inner sequence

SEQ ID NO: 32355 - DNA, 30 bp, Artificial Sequence; identical to SEQ ID NO: 523
  Description of Artificial Sequence: Synthetic all nuts; inner sequence

SEQ ID NO: 32356 - DNA, 30 bp, Artificial Sequence; identical to SEQ ID NO: 4787
  Description of Artificial Sequence: Synthetic all nuts; inner sequence

SEQ ID NO: 32357 - DNA, 30 bp, Artificial Sequence; identical to SEQ ID NO: 395
  Description of Artificial Sequence: Synthetic all nuts; inner sequence

SEQ ID NO: 32358 - DNA, 30 bp, Artificial Sequence; identical to SEQ ID NO: 131
  Description of Artificial Sequence: Synthetic all nuts; inner sequence

SEQ ID NO: 32359 - DNA, 30 bp, Artificial Sequence; identical to SEQ ID NO: 211
  Description of Artificial Sequence: Synthetic all nuts; inner sequence

SEQ ID NO: 32360 - DNA, 30 bp, Artificial Sequence; identical to SEQ ID NO: 230
  Description of Artificial Sequence: Synthetic all nuts; inner sequence

SEQ ID NO: 32361 - DNA, 30 bp, Artificial Sequence; identical to SEQ ID NO: 315
  Description of Artificial Sequence: Synthetic all nuts; inner sequence

SEQ ID NO: 32362 - DNA, 30 bp, Artificial Sequence; identical to SEQ ID NO: 478
  Description of Artificial Sequence: Synthetic all nuts; inner sequence

SEQ ID NO: 32363 - DNA, 30 bp, Artificial Sequence; identical to SEQ ID NO: 606
  Description of Artificial Sequence: Synthetic all nuts; inner sequence

SEQ ID NO: 32364 - DNA, 30 bp, Artificial Sequence; identical to SEQ ID NO: 233
  Description of Artificial Sequence: Synthetic all nuts; inner sequence

SEQ ID NO: 32365 - DNA, 30 bp, Artificial Sequence; identical to SEQ ID NO: 365
  Description of Artificial Sequence: Synthetic all nuts; inner sequence

SEQ ID NO: 32366 - DNA, 30 bp, Artificial Sequence; identical to SEQ ID NO: 314
  Description of Artificial Sequence: Synthetic all nuts; inner sequence

SEQ ID NO: 32367 - DNA, 30 bp, Artificial Sequence; identical to SEQ ID NO: 756
  Description of Artificial Sequence: Synthetic all nuts; inner sequence

SEQ ID NO: 32368 - DNA, 30 bp, Artificial Sequence; identical to SEQ ID NO: 116
  Description of Artificial Sequence: Synthetic all nuts; inner sequence

SEQ ID NO: 32369 - DNA, 30 bp, Artificial Sequence; identical to SEQ ID NO: 20551
  Description of Artificial Sequence: Synthetic all nuts; inner sequence

SEQ ID NO: 32370 - DNA, 30 bp, Artificial Sequence; identical to SEQ ID NO: 912
  Description of Artificial Sequence: Synthetic all nuts; inner sequence

SEQ ID NO: 32371 - DNA, 30 bp, Artificial Sequence; identical to SEQ ID NO: 526
  Description of Artificial Sequence: Synthetic all nuts; inner sequence

SEQ ID NO: 32372 - DNA, 29 bp, Artificial Sequence
  Description of Artificial Sequence: Synthetic all nuts; inner sequence
gcacgccgatgccctcatgtggccgtggc

SEQ ID NO: 32373 - DNA, 30 bp, Artificial Sequence; identical to SEQ ID NO: 438
  Description of Artificial Sequence: Synthetic all nuts; inner sequence

SEQ ID NO: 32374 - DNA, 30 bp, Artificial Sequence; identical to SEQ ID NO: 447
  Description of Artificial Sequence: Synthetic all nuts; inner sequence

SEQ ID NO: 32375 - DNA, 30 bp, Artificial Sequence; identical to SEQ ID NO: 4702
  Description of Artificial Sequence: Synthetic all nuts; inner sequence

SEQ ID NO: 32376 - DNA, 30 bp, Artificial Sequence; identical to SEQ ID NO: 903
  Description of Artificial Sequence: Synthetic all nuts; inner sequence

SEQ ID NO: 32377 - DNA, 30 bp, Artificial Sequence; identical to SEQ ID NO: 4238
  Description of Artificial Sequence: Synthetic all nuts; inner sequence

SEQ ID NO: 32378 - DNA, 30 bp, Artificial Sequence; identical to SEQ ID NO: 16770
  Description of Artificial Sequence: Synthetic all nuts; inner sequence

SEQ ID NO: 32379 - DNA, 30 bp, Artificial Sequence
  Description of Artificial Sequence: Synthetic all nuts; inner sequence
ccatagcgacatcaagcggtggtgtgcgtg

SEQ ID NO: 32380 - DNA, 30 bp, Artificial Sequence; identical to SEQ ID NO: 624
  Description of Artificial Sequence: Synthetic all nuts; inner sequence

SEQ ID NO: 32381 - DNA, 30 bp, Artificial Sequence; identical to SEQ ID NO: 493
  Description of Artificial Sequence: Synthetic all nuts; inner sequence

SEQ ID NO: 32382 - DNA, 30 bp, Artificial Sequence; identical to SEQ ID NO: 21
  Description of Artificial Sequence: Synthetic all nuts; inner sequence

SEQ ID NO: 32383 - DNA, 30 bp, Artificial Sequence; identical to SEQ ID NO: 263
  Description of Artificial Sequence: Synthetic all nuts; inner sequence

SEQ ID NO: 32384 - DNA, 30 bp, Artificial Sequence
  Description of Artificial Sequence: Synthetic all nuts; inner sequence
gtcattcagcatcctacacgtgggcacgta

SEQ ID NO: 32385 - DNA, 30 bp, Artificial Sequence; identical to SEQ ID NO: 4376
  Description of Artificial Sequence: Synthetic all nuts; inner sequence

SEQ ID NO: 32386 - DNA, 30 bp, Artificial Sequence; identical to SEQ ID NO: 20486
  Description of Artificial Sequence: Synthetic all nuts; inner sequence

SEQ ID NO: 32387 - DNA, 30 bp, Artificial Sequence; identical to SEQ ID NO: 4644
  Description of Artificial Sequence: Synthetic all nuts; inner sequence

SEQ ID NO: 32388 - DNA, 30 bp, Artificial Sequence; identical to SEQ ID NO: 891
  Description of Artificial Sequence: Synthetic all nuts; inner sequence

SEQ ID NO: 32389 - DNA, 27 bp, Artificial Sequence
  Description of Artificial Sequence: Synthetic all nuts; inner sequence
ggccaagctgacctagcatgtgtgtca

SEQ ID NO: 32390 - DNA, 31 bp, Artificial Sequence; identical to SEQ ID NO: 503
  Description of Artificial Sequence: Synthetic all nuts; inner sequence

SEQ ID NO: 32391 - DNA, 30 bp, Artificial Sequence; identical to SEQ ID NO: 16748
  Description of Artificial Sequence: Synthetic all nuts; inner sequence

SEQ ID NO: 32392 - DNA, 30 bp, Artificial Sequence; identical to SEQ ID NO: 312
  Description of Artificial Sequence: Synthetic all nuts; inner sequence

SEQ ID NO: 32393 - DNA, 30 bp, Artificial Sequence; identical to SEQ ID NO: 16612
  Description of Artificial Sequence: Synthetic all nuts; inner sequence

SEQ ID NO: 32394 - DNA, 30 bp, Artificial Sequence; identical to SEQ ID NO: 20874
  Description of Artificial Sequence: Synthetic all nuts; inner sequence

SEQ ID NO: 32395 - DNA, 30 bp, Artificial Sequence; identical to SEQ ID NO: 56
  Description of Artificial Sequence: Synthetic all nuts; inner sequence

SEQ ID NO: 32396 - DNA, 30 bp, Artificial Sequence; identical to SEQ ID NO: 308
  Description of Artificial Sequence: Synthetic all nuts; inner sequence

SEQ ID NO: 32397 - DNA, 30 bp, Artificial Sequence; identical to SEQ ID NO: 20954
  Description of Artificial Sequence: Synthetic all nuts; inner sequence

SEQ ID NO: 32398 - DNA, 30 bp, Artificial Sequence; identical to SEQ ID NO: 4492
  Description of Artificial Sequence: Synthetic all nuts; inner sequence

SEQ ID NO: 32399 - DNA, 30 bp, Artificial Sequence; identical to SEQ ID NO: 8670
  Description of Artificial Sequence: Synthetic all nuts; inner sequence

SEQ ID NO: 32400 - DNA, 30 bp, Artificial Sequence; identical to SEQ ID NO: 163
  Description of Artificial Sequence: Synthetic all nuts; inner sequence

SEQ ID NO: 32401 - DNA, 30 bp, Artificial Sequence; identical to SEQ ID NO: 16399
  Description of Artificial Sequence: Synthetic all nuts; inner sequence

SEQ ID NO: 32402 - DNA, 30 bp, Artificial Sequence; identical to SEQ ID NO: 352
  Description of Artificial Sequence: Synthetic all nuts; inner sequence

SEQ ID NO: 32403 - DNA, 28 bp, Artificial Sequence
  Description of Artificial Sequence: Synthetic all nuts; inner sequence
cgcaccgtcgatacgtcatgcacgcacc

SEQ ID NO: 32404 - DNA, 30 bp, Artificial Sequence
  Description of Artificial Sequence: Synthetic all nuts; inner sequence
gcactgctctgacgcgatgtggtcggtgga

SEQ ID NO: 32405 - DNA, 30 bp, Artificial Sequence; identical to SEQ ID NO: 347
  Description of Artificial Sequence: Synthetic all nuts; inner sequence

SEQ ID NO: 32406 - DNA, 30 bp, Artificial Sequence; identical to SEQ ID NO: 4988
  Description of Artificial Sequence: Synthetic all nuts; inner sequence

SEQ ID NO: 32407 - DNA, 30 bp, Artificial Sequence; identical to SEQ ID NO: 217
  Description of Artificial Sequence: Synthetic all nuts; inner sequence

SEQ ID NO: 32408 - DNA, 30 bp, Artificial Sequence; identical to SEQ ID NO: 212
  Description of Artificial Sequence: Synthetic all nuts; inner sequence

SEQ ID NO: 32409 - DNA, 30 bp, Artificial Sequence; identical to SEQ ID NO: 326
  Description of Artificial Sequence: Synthetic all nuts; inner sequence

SEQ ID NO: 32410 - DNA, 30 bp, Artificial Sequence; identical to SEQ ID NO: 20629
  Description of Artificial Sequence: Synthetic all nuts; inner sequence

SEQ ID NO: 32411 - DNA, 30 bp, Artificial Sequence; identical to SEQ ID NO: 60
  Description of Artificial Sequence: Synthetic all nuts; inner sequence

SEQ ID NO: 32412 - DNA, 30 bp, Artificial Sequence; identical to SEQ ID NO: 613
  Description of Artificial Sequence: Synthetic all nuts; inner sequence

SEQ ID NO: 32413 - DNA, 30 bp, Artificial Sequence; identical to SEQ ID NO: 4694
  Description of Artificial Sequence: Synthetic all nuts; inner sequence

SEQ ID NO: 32414 - DNA, 30 bp, Artificial Sequence; identical to SEQ ID NO: 583
  Description of Artificial Sequence: Synthetic all nuts; inner sequence

SEQ ID NO: 32415 - DNA, 30 bp, Artificial Sequence; identical to SEQ ID NO: 231
  Description of Artificial Sequence: Synthetic all nuts; inner sequence

SEQ ID NO: 32416 - DNA, 30 bp, Artificial Sequence
  Description of Artificial Sequence: Synthetic all nuts; inner sequence
gacgcactcgtcctacacgttggcatgtgt

SEQ ID NO: 32417 - DNA, 30 bp, Artificial Sequence; identical to SEQ ID NO: 543
  Description of Artificial Sequence: Synthetic all nuts; inner sequence

SEQ ID NO: 32418 - DNA, 30 bp, Artificial Sequence; identical to SEQ ID NO: 165
  Description of Artificial Sequence: Synthetic all nuts; inner sequence

SEQ ID NO: 32419 - DNA, 30 bp, Artificial Sequence; identical to SEQ ID NO: 433
  Description of Artificial Sequence: Synthetic all nuts; inner sequence

SEQ ID NO: 32420 - DNA, 30 bp, Artificial Sequence; identical to SEQ ID NO: 329
  Description of Artificial Sequence: Synthetic all nuts; inner sequence

SEQ ID NO: 32421 - DNA, 30 bp, Artificial Sequence; identical to SEQ ID NO: 20428
  Description of Artificial Sequence: Synthetic all nuts; inner sequence

SEQ ID NO: 32422 - DNA, 27 bp, Artificial Sequence
  Description of Artificial Sequence: Synthetic all nuts; inner sequence
ccgatcgcacgtcaaggcaggcttgga

SEQ ID NO: 32423 - DNA, 30 bp, Artificial Sequence; identical to SEQ ID NO: 388
  Description of Artificial Sequence: Synthetic all nuts; inner sequence

SEQ ID NO: 32424 - DNA, 30 bp, Artificial Sequence; identical to SEQ ID NO: 394
  Description of Artificial Sequence: Synthetic all nuts; inner sequence

SEQ ID NO: 32425 - DNA, 30 bp, Artificial Sequence; identical to SEQ ID NO: 4525
  Description of Artificial Sequence: Synthetic all nuts; inner sequence

SEQ ID NO: 32426 - DNA, 30 bp, Artificial Sequence; identical to SEQ ID NO: 8678
  Description of Artificial Sequence: Synthetic all nuts; inner sequence

SEQ ID NO: 32427 - DNA, 30 bp, Artificial Sequence; identical to SEQ ID NO: 442
  Description of Artificial Sequence: Synthetic all nuts; inner sequence

SEQ ID NO: 32428 - DNA, 30 bp, Artificial Sequence; identical to SEQ ID NO: 16750
  Description of Artificial Sequence: Synthetic all nuts; inner sequence

SEQ ID NO: 32429 - DNA, 30 bp, Artificial Sequence; identical to SEQ ID NO: 224
  Description of Artificial Sequence: Synthetic all nuts; inner sequence

SEQ ID NO: 32430 - DNA, 30 bp, Artificial Sequence; identical to SEQ ID NO: 24
  Description of Artificial Sequence: Synthetic all nuts; inner sequence

SEQ ID NO: 32431 - DNA, 30 bp, Artificial Sequence; identical to SEQ ID NO: 20502
  Description of Artificial Sequence: Synthetic all nuts; inner sequence

SEQ ID NO: 32432 - DNA, 30 bp, Artificial Sequence; identical to SEQ ID NO: 4816
  Description of Artificial Sequence: Synthetic all nuts; inner sequence

SEQ ID NO: 32433 - DNA, 30 bp, Artificial Sequence
  Description of Artificial Sequence: Synthetic all nuts; inner sequence
cctgatcgcacgtaaggtgggcgtgtgatg

SEQ ID NO: 32434 - DNA, 30 bp, Artificial Sequence; identical to SEQ ID NO: 576
  Description of Artificial Sequence: Synthetic all nuts; inner sequence

SEQ ID NO: 32435 - DNA, 30 bp, Artificial Sequence; identical to SEQ ID NO: 281
  Description of Artificial Sequence: Synthetic all nuts; inner sequence

SEQ ID NO: 32436 - DNA, 30 bp, Artificial Sequence; identical to SEQ ID NO: 595
  Description of Artificial Sequence: Synthetic all nuts; inner sequence

SEQ ID NO: 32437 - DNA, 30 bp, Artificial Sequence
  Description of Artificial Sequence: Synthetic all nuts; inner sequence
gtcattccgcatcctacacgtgggcacgga

SEQ ID NO: 32438 - DNA, 30 bp, Artificial Sequence; identical to SEQ ID NO: 4289
  Description of Artificial Sequence: Synthetic all nuts; inner sequence

SEQ ID NO: 32439 - DNA, 30 bp, Artificial Sequence; identical to SEQ ID NO: 20787
  Description of Artificial Sequence: Synthetic all nuts; inner sequence

SEQ ID NO: 32440 - DNA, 30 bp, Artificial Sequence; identical to SEQ ID NO: 20797
  Description of Artificial Sequence: Synthetic all nuts; inner sequence

SEQ ID NO: 32441 - DNA, 30 bp, Artificial Sequence; identical to SEQ ID NO: 338
  Description of Artificial Sequence: Synthetic all nuts; inner sequence

SEQ ID NO: 32442 - DNA, 30 bp, Artificial Sequence; identical to SEQ ID NO: 16731
  Description of Artificial Sequence: Synthetic all nuts; inner sequence

SEQ ID NO: 32443 - DNA, 31 bp, Artificial Sequence; identical to SEQ ID NO: 250
  Description of Artificial Sequence: Synthetic all nuts; inner sequence

SEQ ID NO: 32444 - DNA, 30 bp, Artificial Sequence; identical to SEQ ID NO: 4867
  Description of Artificial Sequence: Synthetic all nuts; inner sequence

SEQ ID NO: 32445 - DNA, 30 bp, Artificial Sequence; identical to SEQ ID NO: 619
  Description of Artificial Sequence: Synthetic all nuts; inner sequence

SEQ ID NO: 32446 - DNA, 30 bp, Artificial Sequence
  Description of Artificial Sequence: Synthetic all nuts; inner sequence
ggacgcacaggaccggccaagtgacatgga

SEQ ID NO: 32447 - DNA, 30 bp, Artificial Sequence; identical to SEQ ID NO: 20803
  Description of Artificial Sequence: Synthetic all nuts; inner sequence

SEQ ID NO: 32448 - DNA, 30 bp, Artificial Sequence; identical to SEQ ID NO: 20519
  Description of Artificial Sequence: Synthetic all nuts; inner sequence

SEQ ID NO: 32449 - DNA, 30 bp, Artificial Sequence; identical to SEQ ID NO: 321
  Description of Artificial Sequence: Synthetic all nuts; inner sequence

SEQ ID NO: 32450 - DNA, 30 bp, Artificial Sequence; identical to SEQ ID NO: 570
  Description of Artificial Sequence: Synthetic all nuts; inner sequence

SEQ ID NO: 32451 - DNA, 30 bp, Artificial Sequence; identical to SEQ ID NO: 4856
  Description of Artificial Sequence: Synthetic all nuts; inner sequence

SEQ ID NO: 32452 - DNA, 30 bp, Artificial Sequence; identical to SEQ ID NO: 353
  Description of Artificial Sequence: Synthetic all nuts; inner sequence

SEQ ID NO: 32453 - DNA, 30 bp, Artificial Sequence; identical to SEQ ID NO: 386
  Description of Artificial Sequence: Synthetic all nuts; inner sequence

SEQ ID NO: 32454 - DNA, 30 bp, Artificial Sequence; identical to SEQ ID NO: 184
  Description of Artificial Sequence: Synthetic all nuts; inner sequence

SEQ ID NO: 32455 - DNA, 30 bp, Artificial Sequence; identical to SEQ ID NO: 246
  Description of Artificial Sequence: Synthetic all nuts; inner sequence

SEQ ID NO: 32456 - DNA, 30 bp, Artificial Sequence; identical to SEQ ID NO: 12922
  Description of Artificial Sequence: Synthetic all nuts; inner sequence

SEQ ID NO: 32457 - DNA, 30 bp, Artificial Sequence; identical to SEQ ID NO: 4603
  Description of Artificial Sequence: Synthetic all nuts; inner sequence

SEQ ID NO: 32458 - DNA, 30 bp, Artificial Sequence; identical to SEQ ID NO: 20324
  Description of Artificial Sequence: Synthetic all nuts; inner sequence

SEQ ID NO: 32459 - DNA, 30 bp, Artificial Sequence
  Description of Artificial Sequence: Synthetic all nuts; inner sequence
ccgtagcgacatcaagcggtggtgtgcgag

SEQ ID NO: 32460 - DNA, 30 bp, Artificial Sequence; identical to SEQ ID NO: 909
  Description of Artificial Sequence: Synthetic all nuts; inner sequence

SEQ ID NO: 32461 - DNA, 30 bp, Artificial Sequence; identical to SEQ ID NO: 14
  Description of Artificial Sequence: Synthetic all nuts; inner sequence

SEQ ID NO: 32462 - DNA, 30 bp, Artificial Sequence; identical to SEQ ID NO: 8
  Description of Artificial Sequence: Synthetic all nuts; inner sequence

SEQ ID NO: 32463 - DNA, 30 bp, Artificial Sequence; identical to SEQ ID NO: 20672
  Description of Artificial Sequence: Synthetic all nuts; inner sequence

SEQ ID NO: 32464 - DNA, 30 bp, Artificial Sequence
  Description of Artificial Sequence: Synthetic all nuts; inner sequence
ccgtagcgaaatcaagcggtggtgtgcgtg

SEQ ID NO: 32465 - DNA, 30 bp, Artificial Sequence; identical to SEQ ID NO: 390
  Description of Artificial Sequence: Synthetic all nuts; inner sequence

SEQ ID NO: 32466 - DNA, 30 bp, Artificial Sequence; identical to SEQ ID NO: 188
  Description of Artificial Sequence: Synthetic all nuts; inner sequence

SEQ ID NO: 32467 - DNA, 30 bp, Artificial Sequence; identical to SEQ ID NO: 4905
  Description of Artificial Sequence: Synthetic all nuts; inner sequence

SEQ ID NO: 32468 - DNA, 30 bp, Artificial Sequence; identical to SEQ ID NO: 854
  Description of Artificial Sequence: Synthetic all nuts; inner sequence

SEQ ID NO: 32469 - DNA, 30 bp, Artificial Sequence; identical to SEQ ID NO: 515
  Description of Artificial Sequence: Synthetic all nuts; inner sequence

SEQ ID NO: 32470 - DNA, 30 bp, Artificial Sequence; identical to SEQ ID NO: 47
  Description of Artificial Sequence: Synthetic all nuts; inner sequence

SEQ ID NO: 32471 - DNA, 30 bp, Artificial Sequence; identical to SEQ ID NO: 68
  Description of Artificial Sequence: Synthetic all nuts; inner sequence

SEQ ID NO: 32472 - DNA, 30 bp, Artificial Sequence; identical to SEQ ID NO: 380
  Description of Artificial Sequence: Synthetic all nuts; inner sequence

SEQ ID NO: 32473 - DNA, 30 bp, Artificial Sequence; identical to SEQ ID NO: 24843
  Description of Artificial Sequence: Synthetic all nuts; inner sequence

SEQ ID NO: 32474 - DNA, 30 bp, Artificial Sequence; identical to SEQ ID NO: 225
  Description of Artificial Sequence: Synthetic all nuts; inner sequence

SEQ ID NO: 32475 - DNA, 30 bp, Artificial Sequence; identical to SEQ ID NO: 20724
  Description of Artificial Sequence: Synthetic all nuts; inner sequence

SEQ ID NO: 32476 - DNA, 31 bp, Artificial Sequence; identical to SEQ ID NO: 150
  Description of Artificial Sequence: Synthetic all nuts; inner sequence

SEQ ID NO: 32477 - DNA, 30 bp, Artificial Sequence
  Description of Artificial Sequence: Synthetic all nuts; inner sequence
gccatcgctgaccgacgtgagcatgtcgtc

SEQ ID NO: 32478 - DNA, 30 bp, Artificial Sequence; identical to SEQ ID NO: 61
  Description of Artificial Sequence: Synthetic all nuts; inner sequence

SEQ ID NO: 32479 - DNA, 30 bp, Artificial Sequence; identical to SEQ ID NO: 20398
  Description of Artificial Sequence: Synthetic all nuts; inner sequence

SEQ ID NO: 32480 - DNA, 30 bp, Artificial Sequence; identical to SEQ ID NO: 8889
  Description of Artificial Sequence: Synthetic all nuts; inner sequence

SEQ ID NO: 32481 - DNA, 30 bp, Artificial Sequence; identical to SEQ ID NO: 783
  Description of Artificial Sequence: Synthetic all nuts; inner sequence

SEQ ID NO: 32482 - DNA, 30 bp, Artificial Sequence; identical to SEQ ID NO: 44
  Description of Artificial Sequence: Synthetic all nuts; inner sequence

SEQ ID NO: 32483 - DNA, 30 bp, Artificial Sequence; identical to SEQ ID NO: 183
  Description of Artificial Sequence: Synthetic all nuts; inner sequence

SEQ ID NO: 32484 - DNA, 30 bp, Artificial Sequence
  Description of Artificial Sequence: Synthetic all nuts; inner sequence
gtcattccgcatcctacacgagggcacgta

SEQ ID NO: 32485 - DNA, 30 bp, Artificial Sequence; identical to SEQ ID NO: 158
  Description of Artificial Sequence: Synthetic all nuts; inner sequence

SEQ ID NO: 32486 - DNA, 30 bp, Artificial Sequence; identical to SEQ ID NO: 303
  Description of Artificial Sequence: Synthetic all nuts; inner sequence

SEQ ID NO: 32487 - DNA, 30 bp, Artificial Sequence; identical to SEQ ID NO: 717
  Description of Artificial Sequence: Synthetic all nuts; inner sequence

SEQ ID NO: 32488 - DNA, 30 bp, Artificial Sequence; identical to SEQ ID NO: 4575
  Description of Artificial Sequence: Synthetic all nuts; inner sequence

SEQ ID NO: 32489 - DNA, 30 bp, Artificial Sequence; identical to SEQ ID NO: 295
  Description of Artificial Sequence: Synthetic all nuts; inner sequence

SEQ ID NO: 32490 - DNA, 30 bp, Artificial Sequence; identical to SEQ ID NO: 828
  Description of Artificial Sequence: Synthetic all nuts; inner sequence

SEQ ID NO: 32491 - DNA, 28 bp, Artificial Sequence
  Description of Artificial Sequence: Synthetic all nuts; inner sequence
ggacgcaacgtaccgtatcgtggccatg

SEQ ID NO: 32492 - DNA, 30 bp, Artificial Sequence; identical to SEQ ID NO: 277
  Description of Artificial Sequence: Synthetic all nuts; inner sequence

SEQ ID NO: 32493 - DNA, 30 bp, Artificial Sequence; identical to SEQ ID NO: 8769
  Description of Artificial Sequence: Synthetic all nuts; inner sequence

SEQ ID NO: 32494 - DNA, 30 bp, Artificial Sequence; identical to SEQ ID NO: 4935
  Description of Artificial Sequence: Synthetic all nuts; inner sequence

SEQ ID NO: 32495 - DNA, 30 bp, Artificial Sequence; identical to SEQ ID NO: 373
  Description of Artificial Sequence: Synthetic all nuts; inner sequence

SEQ ID NO: 32496 - DNA, 30 bp, Artificial Sequence; identical to SEQ ID NO: 4955
  Description of Artificial Sequence: Synthetic all nuts; inner sequence

SEQ ID NO: 32497 - DNA, 30 bp, Artificial Sequence; identical to SEQ ID NO: 617
  Description of Artificial Sequence: Synthetic all nuts; inner sequence

SEQ ID NO: 32498 - DNA, 30 bp, Artificial Sequence; identical to SEQ ID NO: 59
  Description of Artificial Sequence: Synthetic all nuts; inner sequence

SEQ ID NO: 32499 - DNA, 30 bp, Artificial Sequence; identical to SEQ ID NO: 4579
  Description of Artificial Sequence: Synthetic all nuts; inner sequence

SEQ ID NO: 32500 - DNA, 30 bp, Artificial Sequence; identical to SEQ ID NO: 153
  Description of Artificial Sequence: Synthetic all nuts; inner sequence

SEQ ID NO: 32501 - DNA, 30 bp, Artificial Sequence; identical to SEQ ID NO: 661
  Description of Artificial Sequence: Synthetic all nuts; inner sequence

SEQ ID NO: 32502 - DNA, 30 bp, Artificial Sequence; identical to SEQ ID NO: 20353
  Description of Artificial Sequence: Synthetic all nuts; inner sequence

SEQ ID NO: 32503 - DNA, 30 bp, Artificial Sequence
  Description of Artificial Sequence: Synthetic all nuts; inner sequence
ccgcacgcaaccgtacgcaatgggctgtga

SEQ ID NO: 32504 - DNA, 30 bp, Artificial Sequence; identical to SEQ ID NO: 346
  Description of Artificial Sequence: Synthetic all nuts; inner sequence

SEQ ID NO: 32505 - DNA, 30 bp, Artificial Sequence
  Description of Artificial Sequence: Synthetic all nuts; inner sequence
ggcattccgcatcctacacgtgggcacgta

SEQ ID NO: 32506 - DNA, 30 bp, Artificial Sequence; identical to SEQ ID NO: 358
  Description of Artificial Sequence: Synthetic all nuts; inner sequence

SEQ ID NO: 32507 - DNA, 30 bp, Artificial Sequence; identical to SEQ ID NO: 620
  Description of Artificial Sequence: Synthetic all nuts; inner sequence

SEQ ID NO: 32508 - DNA, 30 bp, Artificial Sequence; identical to SEQ ID NO: 758
  Description of Artificial Sequence: Synthetic all nuts; inner sequence

SEQ ID NO: 32509 - DNA, 30 bp, Artificial Sequence; identical to SEQ ID NO: 4356
  Description of Artificial Sequence: Synthetic all nuts; inner sequence

SEQ ID NO: 32510 - DNA, 30 bp, Artificial Sequence; identical to SEQ ID NO: 8960
  Description of Artificial Sequence: Synthetic all nuts; inner sequence

SEQ ID NO: 32511 - DNA, 30 bp, Artificial Sequence; identical to SEQ ID NO: 644
  Description of Artificial Sequence: Synthetic all nuts; inner sequence

SEQ ID NO: 32512 - DNA, 30 bp, Artificial Sequence; identical to SEQ ID NO: 468
  Description of Artificial Sequence: Synthetic all nuts; inner sequence

SEQ ID NO: 32513 - DNA, 30 bp, Artificial Sequence; identical to SEQ ID NO: 16696
  Description of Artificial Sequence: Synthetic all nuts; inner sequence

SEQ ID NO: 32514 - DNA, 30 bp, Artificial Sequence; identical to SEQ ID NO: 409
  Description of Artificial Sequence: Synthetic all nuts; inner sequence

SEQ ID NO: 32515 - DNA, 30 bp, Artificial Sequence; identical to SEQ ID NO: 905
  Description of Artificial Sequence: Synthetic all nuts; inner sequence

SEQ ID NO: 32516 - DNA, 30 bp, Artificial Sequence
  Description of Artificial Sequence: Synthetic all nuts; inner sequence
cgcagcgtcgatacgtcatgcacgctgaca

SEQ ID NO: 32517 - DNA, 29 bp, Artificial Sequence
  Description of Artificial Sequence: Synthetic all nuts; inner sequence
gtgcaaacggaccgacaagtgcgcatgga

SEQ ID NO: 32518 - DNA, 30 bp, Artificial Sequence; identical to SEQ ID NO: 218
  Description of Artificial Sequence: Synthetic all nuts; inner sequence

SEQ ID NO: 32519 - DNA, 30 bp, Artificial Sequence; identical to SEQ ID NO: 4631
  Description of Artificial Sequence: Synthetic all nuts; inner sequence

SEQ ID NO: 32520 - DNA, 30 bp, Artificial Sequence; identical to SEQ ID NO: 276
  Description of Artificial Sequence: Synthetic all nuts; inner sequence

SEQ ID NO: 32521 - DNA, 30 bp, Artificial Sequence; identical to SEQ ID NO: 371
  Description of Artificial Sequence: Synthetic all nuts; inner sequence

SEQ ID NO: 32522 - DNA, 30 bp, Artificial Sequence; identical to SEQ ID NO: 432
  Description of Artificial Sequence: Synthetic all nuts; inner sequence

SEQ ID NO: 32523 - DNA, 30 bp, Artificial Sequence; identical to SEQ ID NO: 4888
  Description of Artificial Sequence: Synthetic all nuts; inner sequence

SEQ ID NO: 32524 - DNA, 30 bp, Artificial Sequence; identical to SEQ ID NO: 72
  Description of Artificial Sequence: Synthetic all nuts; inner sequence

SEQ ID NO: 32525 - DNA, 30 bp, Artificial Sequence; identical to SEQ ID NO: 20929
  Description of Artificial Sequence: Synthetic all nuts; inner sequence

SEQ ID NO: 32526 - DNA, 30 bp, Artificial Sequence; identical to SEQ ID NO: 678
  Description of Artificial Sequence: Synthetic all nuts; inner sequence

SEQ ID NO: 32527 - DNA, 30 bp, Artificial Sequence; identical to SEQ ID NO: 484
  Description of Artificial Sequence: Synthetic all nuts; inner sequence

SEQ ID NO: 32528 - DNA, 30 bp, Artificial Sequence; identical to SEQ ID NO: 524
  Description of Artificial Sequence: Synthetic all nuts; inner sequence

SEQ ID NO: 32529 - DNA, 30 bp, Artificial Sequence; identical to SEQ ID NO: 477
  Description of Artificial Sequence: Synthetic all nuts; inner sequence

SEQ ID NO: 32530 - DNA, 30 bp, Artificial Sequence; identical to SEQ ID NO: 579
  Description of Artificial Sequence: Synthetic all nuts; inner sequence

SEQ ID NO: 32531 - DNA, 30 bp, Artificial Sequence; identical to SEQ ID NO: 46
  Description of Artificial Sequence: Synthetic all nuts; inner sequence

SEQ ID NO: 32532 - DNA, 30 bp, Artificial Sequence; identical to SEQ ID NO: 351
  Description of Artificial Sequence: Synthetic all nuts; inner sequence

SEQ ID NO: 32533 - DNA, 30 bp, Artificial Sequence; identical to SEQ ID NO: 8579
  Description of Artificial Sequence: Synthetic all nuts; inner sequence

SEQ ID NO: 32534 - DNA, 30 bp, Artificial Sequence; identical to SEQ ID NO: 16695
  Description of Artificial Sequence: Synthetic all nuts; inner sequence

SEQ ID NO: 32535 - DNA, 30 bp, Artificial Sequence; identical to SEQ ID NO: 274
  Description of Artificial Sequence: Synthetic all nuts; inner sequence

SEQ ID NO: 32536 - DNA, 30 bp, Artificial Sequence
  Description of Artificial Sequence: Synthetic all nuts; inner sequence
gtacgcacgatgagctatcaatgtgccatg

SEQ ID NO: 32537 - DNA, 30 bp, Artificial Sequence; identical to SEQ ID NO: 20382
  Description of Artificial Sequence: Synthetic all nuts; inner sequence

SEQ ID NO: 32538 - DNA, 29 bp, Artificial Sequence
  Description of Artificial Sequence: Synthetic all nuts; inner sequence
gcacgccgatgccctcatgtggccgtgga

SEQ ID NO: 32539 - DNA, 26 bp, Artificial Sequence
  Description of Artificial Sequence: Synthetic all nuts; inner sequence
ggcacaaacggaccgacaagtgcgca

SEQ ID NO: 32540 - DNA, 30 bp, Artificial Sequence; identical to SEQ ID NO: 401
  Description of Artificial Sequence: Synthetic all nuts; inner sequence

SEQ ID NO: 32541 - DNA, 30 bp, Artificial Sequence; identical to SEQ ID NO: 821
  Description of Artificial Sequence: Synthetic all nuts; inner sequence

SEQ ID NO: 32542 - DNA, 30 bp, Artificial Sequence
  Description of Artificial Sequence: Synthetic all nuts; inner sequence
gtacgcatcgtcccgtcatgttgttccgta

SEQ ID NO: 32543 - DNA, 30 bp, Artificial Sequence; identical to SEQ ID NO: 12821
  Description of Artificial Sequence: Synthetic all nuts; inner sequence

SEQ ID NO: 32544 - DNA, 30 bp, Artificial Sequence; identical to SEQ ID NO: 695
  Description of Artificial Sequence: Synthetic all nuts; inner sequence

SEQ ID NO: 32545 - DNA, 30 bp, Artificial Sequence; identical to SEQ ID NO: 20
  Description of Artificial Sequence: Synthetic all nuts; inner sequence

SEQ ID NO: 32546 - DNA, 30 bp, Artificial Sequence; identical to SEQ ID NO: 4641
  Description of Artificial Sequence: Synthetic all nuts; inner sequence

SEQ ID NO: 32547 - DNA, 30 bp, Artificial Sequence; identical to SEQ ID NO: 16677
  Description of Artificial Sequence: Synthetic all nuts; inner sequence

SEQ ID NO: 32548 - DNA, 30 bp, Artificial Sequence; identical to SEQ ID NO: 362
  Description of Artificial Sequence: Synthetic all nuts; inner sequence

SEQ ID NO: 32549 - DNA, 30 bp, Artificial Sequence; identical to SEQ ID NO: 4280
  Description of Artificial Sequence: Synthetic all nuts; inner sequence

SEQ ID NO: 32550 - DNA, 30 bp, Artificial Sequence; identical to SEQ ID NO: 20604
  Description of Artificial Sequence: Synthetic all nuts; inner sequence

SEQ ID NO: 32551 - DNA, 30 bp, Artificial Sequence; identical to SEQ ID NO: 121
  Description of Artificial Sequence: Synthetic all nuts; inner sequence

SEQ ID NO: 32552 - DNA, 30 bp, Artificial Sequence
  Description of Artificial Sequence: Synthetic all nuts; inner sequence
ggccaaacgaagcgtggatcagtgcttgtc

SEQ ID NO: 32553 - DNA, 30 bp, Artificial Sequence; identical to SEQ ID NO: 4987
  Description of Artificial Sequence: Synthetic all nuts; inner sequence

SEQ ID NO: 32554 - DNA, 30 bp, Artificial Sequence; identical to SEQ ID NO: 38
  Description of Artificial Sequence: Synthetic all nuts; inner sequence

SEQ ID NO: 32555 - DNA, 30 bp, Artificial Sequence; identical to SEQ ID NO: 8824
  Description of Artificial Sequence: Synthetic all nuts; inner sequence

SEQ ID NO: 32556 - DNA, 30 bp, Artificial Sequence; identical to SEQ ID NO: 532
  Description of Artificial Sequence: Synthetic all nuts; inner sequence

SEQ ID NO: 32557 - DNA, 30 bp, Artificial Sequence; identical to SEQ ID NO: 5000
  Description of Artificial Sequence: Synthetic all nuts; inner sequence

SEQ ID NO: 32558 - DNA, 30 bp, Artificial Sequence; identical to SEQ ID NO: 596
  Description of Artificial Sequence: Synthetic all nuts; inner sequence

SEQ ID NO: 32559 - DNA, 30 bp, Artificial Sequence; identical to SEQ ID NO: 434
  Description of Artificial Sequence: Synthetic all nuts; inner sequence

SEQ ID NO: 32560 - DNA, 30 bp, Artificial Sequence; identical to SEQ ID NO: 20974
  Description of Artificial Sequence: Synthetic all nuts; inner sequence

SEQ ID NO: 32561 - DNA, 30 bp, Artificial Sequence; identical to SEQ ID NO: 4761
  Description of Artificial Sequence: Synthetic all nuts; inner sequence

SEQ ID NO: 32562 - DNA, 30 bp, Artificial Sequence; identical to SEQ ID NO: 418
  Description of Artificial Sequence: Synthetic all nuts; inner sequence

SEQ ID NO: 32563 - DNA, 29 bp, Artificial Sequence
  Description of Artificial Sequence: Synthetic all nuts; inner sequence
cgcaacgacactcacgggcatgacgcgca

SEQ ID NO: 32564 - DNA, 30 bp, Artificial Sequence; identical to SEQ ID NO: 20884
  Description of Artificial Sequence: Synthetic all nuts; inner sequence

SEQ ID NO: 32565 - DNA, 30 bp, Artificial Sequence
  Description of Artificial Sequence: Synthetic all nuts; inner sequence
ggaacgacgcgcaccgtatcaagttgggca

SEQ ID NO: 32566 - DNA, 30 bp, Artificial Sequence; identical to SEQ ID NO: 20463
  Description of Artificial Sequence: Synthetic all nuts; inner sequence

SEQ ID NO: 32567 - DNA, 30 bp, Artificial Sequence; identical to SEQ ID NO: 419
  Description of Artificial Sequence: Synthetic all nuts; inner sequence

SEQ ID NO: 32568 - DNA, 30 bp, Artificial Sequence; identical to SEQ ID NO: 8892
  Description of Artificial Sequence: Synthetic all nuts; inner sequence

SEQ ID NO: 32569 - DNA, 30 bp, Artificial Sequence; identical to SEQ ID NO: 915
  Description of Artificial Sequence: Synthetic all nuts; inner sequence

SEQ ID NO: 32570 - DNA, 30 bp, Artificial Sequence; identical to SEQ ID NO: 507
  Description of Artificial Sequence: Synthetic all nuts; inner sequence

SEQ ID NO: 32571 - DNA, 30 bp, Artificial Sequence; identical to SEQ ID NO: 24839
  Description of Artificial Sequence: Synthetic all nuts; inner sequence

SEQ ID NO: 32572 - DNA, 30 bp, Artificial Sequence; identical to SEQ ID NO: 223
  Description of Artificial Sequence: Synthetic all nuts; inner sequence

SEQ ID NO: 32573 - DNA, 30 bp, Artificial Sequence; identical to SEQ ID NO: 403
  Description of Artificial Sequence: Synthetic all nuts; inner sequence

SEQ ID NO: 32574 - DNA, 30 bp, Artificial Sequence
  Description of Artificial Sequence: Synthetic all nuts; inner sequence
ggcatgcgatggatgtgcgttgtgtctgtc

SEQ ID NO: 32575 - DNA, 30 bp, Artificial Sequence; identical to SEQ ID NO: 16585
  Description of Artificial Sequence: Synthetic all nuts; inner sequence

SEQ ID NO: 32576 - DNA, 30 bp, Artificial Sequence; identical to SEQ ID NO: 28885
  Description of Artificial Sequence: Synthetic all nuts; inner sequence

SEQ ID NO: 32577 - DNA, 30 bp, Artificial Sequence; identical to SEQ ID NO: 20990
  Description of Artificial Sequence: Synthetic all nuts; inner sequence

SEQ ID NO: 32578 - DNA, 30 bp, Artificial Sequence; identical to SEQ ID NO: 20580
  Description of Artificial Sequence: Synthetic all nuts; inner sequence

SEQ ID NO: 32579 - DNA, 30 bp, Artificial Sequence; identical to SEQ ID NO: 156
  Description of Artificial Sequence: Synthetic all nuts; inner sequence

SEQ ID NO: 32580 - DNA, 30 bp, Artificial Sequence; identical to SEQ ID NO: 816
  Description of Artificial Sequence: Synthetic all nuts; inner sequence

SEQ ID NO: 32581 - DNA, 30 bp, Artificial Sequence; identical to SEQ ID NO: 697
  Description of Artificial Sequence: Synthetic all nuts; inner sequence

SEQ ID NO: 32582 - DNA, 30 bp, Artificial Sequence; identical to SEQ ID NO: 325
  Description of Artificial Sequence: Synthetic all nuts; inner sequence

SEQ ID NO: 32583 - DNA, 30 bp, Artificial Sequence; identical to SEQ ID NO: 806
  Description of Artificial Sequence: Synthetic all nuts; inner sequence

SEQ ID NO: 32584 - DNA, 30 bp, Artificial Sequence
  Description of Artificial Sequence: Synthetic all nuts; inner sequence
gcacgcaacgaacctacgagtgatcgtgga

SEQ ID NO: 32585 - DNA, 30 bp, Artificial Sequence
  Description of Artificial Sequence: Synthetic all nuts; inner sequence
gtcatgcacgaacactatcatggcggcatt

SEQ ID NO: 32586 - DNA, 30 bp, Artificial Sequence; identical to SEQ ID NO: 20708
  Description of Artificial Sequence: Synthetic all nuts; inner sequence

SEQ ID NO: 32587 - DNA, 30 bp, Artificial Sequence; identical to SEQ ID NO: 375
  Description of Artificial Sequence: Synthetic all nuts; inner sequence

SEQ ID NO: 32588 - DNA, 30 bp, Artificial Sequence; identical to SEQ ID NO: 611
  Description of Artificial Sequence: Synthetic all nuts; inner sequence

SEQ ID NO: 32589 - DNA, 30 bp, Artificial Sequence; identical to SEQ ID NO: 450
  Description of Artificial Sequence: Synthetic all nuts; inner sequence

SEQ ID NO: 32590 - DNA, 30 bp, Artificial Sequence; identical to SEQ ID NO: 152
  Description of Artificial Sequence: Synthetic all nuts; inner sequence

SEQ ID NO: 32591 - DNA, 30 bp, Artificial Sequence; identical to SEQ ID NO: 385
  Description of Artificial Sequence: Synthetic all nuts; inner sequence

SEQ ID NO: 32592 - DNA, 30 bp, Artificial Sequence; identical to SEQ ID NO: 440
  Description of Artificial Sequence: Synthetic all nuts; inner sequence

SEQ ID NO: 32593 - DNA, 30 bp, Artificial Sequence; identical to SEQ ID NO: 4659
  Description of Artificial Sequence: Synthetic all nuts; inner sequence

SEQ ID NO: 32594 - DNA, 30 bp, Artificial Sequence; identical to SEQ ID NO: 4802
  Description of Artificial Sequence: Synthetic all nuts; inner sequence

SEQ ID NO: 32595 - DNA, 30 bp, Artificial Sequence; identical to SEQ ID NO: 10
  Description of Artificial Sequence: Synthetic all nuts; inner sequence

SEQ ID NO: 32596 - DNA, 31 bp, Artificial Sequence; identical to SEQ ID NO: 258
  Description of Artificial Sequence: Synthetic all nuts; inner sequence

SEQ ID NO: 32597 - DNA, 30 bp, Artificial Sequence; identical to SEQ ID NO: 754
  Description of Artificial Sequence: Synthetic all nuts; inner sequence

SEQ ID NO: 32598 - DNA, 30 bp, Artificial Sequence; identical to SEQ ID NO: 94
  Description of Artificial Sequence: Synthetic all nuts; inner sequence

SEQ ID NO: 32599 - DNA, 30 bp, Artificial Sequence; identical to SEQ ID NO: 12944
  Description of Artificial Sequence: Synthetic all nuts; inner sequence

SEQ ID NO: 32600 - DNA, 30 bp, Artificial Sequence; identical to SEQ ID NO: 728
  Description of Artificial Sequence: Synthetic all nuts; inner sequence

SEQ ID NO: 32601 - DNA, 30 bp, Artificial Sequence; identical to SEQ ID NO: 20302
  Description of Artificial Sequence: Synthetic all nuts; inner sequence

SEQ ID NO: 32602 - DNA, 30 bp, Artificial Sequence; identical to SEQ ID NO: 12945
  Description of Artificial Sequence: Synthetic all nuts; inner sequence

SEQ ID NO: 32603 - DNA, 30 bp, Artificial Sequence; identical to SEQ ID NO: 356
  Description of Artificial Sequence: Synthetic all nuts; inner sequence

SEQ ID NO: 32604 - DNA, 30 bp, Artificial Sequence; identical to SEQ ID NO: 666
  Description of Artificial Sequence: Synthetic all nuts; inner sequence

SEQ ID NO: 32605 - DNA, 30 bp, Artificial Sequence; identical to SEQ ID NO: 916
  Description of Artificial Sequence: Synthetic all nuts; inner sequence

SEQ ID NO: 32606 - DNA, 30 bp, Artificial Sequence
  Description of Artificial Sequence: Synthetic all nuts; inner sequence
cgcaccgtcgagacgtcatgcacgctgaca

SEQ ID NO: 32607 - DNA, 30 bp, Artificial Sequence; identical to SEQ ID NO: 20385
  Description of Artificial Sequence: Synthetic all nuts; inner sequence

SEQ ID NO: 32608 - DNA, 30 bp, Artificial Sequence; identical to SEQ ID NO: 90
  Description of Artificial Sequence: Synthetic all nuts; inner sequence

SEQ ID NO: 32609 - DNA, 30 bp, Artificial Sequence; identical to SEQ ID NO: 105
  Description of Artificial Sequence: Synthetic all nuts; inner sequence

SEQ ID NO: 32610 - DNA, 30 bp, Artificial Sequence; identical to SEQ ID NO: 50
  Description of Artificial Sequence: Synthetic all nuts; inner sequence

SEQ ID NO: 32611 - DNA, 30 bp, Artificial Sequence; identical to SEQ ID NO: 20691
  Description of Artificial Sequence: Synthetic all nuts; inner sequence

SEQ ID NO: 32612 - DNA, 30 bp, Artificial Sequence; identical to SEQ ID NO: 20560
  Description of Artificial Sequence: Synthetic all nuts; inner sequence

SEQ ID NO: 32613 - DNA, 30 bp, Artificial Sequence; identical to SEQ ID NO: 580
  Description of Artificial Sequence: Synthetic all nuts; inner sequence

SEQ ID NO: 32614 - DNA, 30 bp, Artificial Sequence; identical to SEQ ID NO: 994
  Description of Artificial Sequence: Synthetic all nuts; inner sequence

SEQ ID NO: 32615 - DNA, 30 bp, Artificial Sequence; identical to SEQ ID NO: 324
  Description of Artificial Sequence: Synthetic all nuts; inner sequence

SEQ ID NO: 32616 - DNA, 30 bp, Artificial Sequence; identical to SEQ ID NO: 349
  Description of Artificial Sequence: Synthetic all nuts; inner sequence

SEQ ID NO: 32617 - DNA, 30 bp, Artificial Sequence; identical to SEQ ID NO: 414
  Description of Artificial Sequence: Synthetic all nuts; inner sequence

SEQ ID NO: 32618 - DNA, 30 bp, Artificial Sequence
  Description of Artificial Sequence: Synthetic all nuts; inner sequence
ccgtagcgacatcaagcggtgctgtgcgtg

SEQ ID NO: 32619 - DNA, 30 bp, Artificial Sequence
  Description of Artificial Sequence: Synthetic all nuts; inner sequence
ccatcgcgtcactatcatgtgggtcacgta

SEQ ID NO: 32620 - DNA, 30 bp, Artificial Sequence; identical to SEQ ID NO: 360
  Description of Artificial Sequence: Synthetic all nuts; inner sequence

SEQ ID NO: 32621 - DNA, 26 bp, Artificial Sequence
  Description of Artificial Sequence: Synthetic all nuts; inner sequence
ggcatgcacgcacctacacgtggaca

SEQ ID NO: 32622 - DNA, 30 bp, Artificial Sequence
  Description of Artificial Sequence: Synthetic all nuts; inner sequence
gtcatgcacgaacactatcatggcggcata

SEQ ID NO: 32623 - DNA, 30 bp, Artificial Sequence; identical to SEQ ID NO: 58
  Description of Artificial Sequence: Synthetic all nuts; inner sequence

SEQ ID NO: 32624 - DNA, 30 bp, Artificial Sequence
  Description of Artificial Sequence: Synthetic all nuts; inner sequence
gcactctgctgaccgatcgagtatgcgtca

SEQ ID NO: 32625 - DNA, 30 bp, Artificial Sequence; identical to SEQ ID NO: 12673
  Description of Artificial Sequence: Synthetic all nuts; inner sequence

SEQ ID NO: 32626 - DNA, 30 bp, Artificial Sequence; identical to SEQ ID NO: 119
  Description of Artificial Sequence: Synthetic all nuts; inner sequence

SEQ ID NO: 32627 - DNA, 30 bp, Artificial Sequence; identical to SEQ ID NO: 104
  Description of Artificial Sequence: Synthetic all nuts; inner sequence

SEQ ID NO: 32628 - DNA, 30 bp, Artificial Sequence; identical to SEQ ID NO: 210
  Description of Artificial Sequence: Synthetic all nuts; inner sequence

SEQ ID NO: 32629 - DNA, 30 bp, Artificial Sequence; identical to SEQ ID NO: 85
  Description of Artificial Sequence: Synthetic all nuts; inner sequence

SEQ ID NO: 32630 - DNA, 30 bp, Artificial Sequence; identical to SEQ ID NO: 178
  Description of Artificial Sequence: Synthetic all nuts; inner sequence

SEQ ID NO: 32631 - DNA, 30 bp, Artificial Sequence; identical to SEQ ID NO: 458
  Description of Artificial Sequence: Synthetic all nuts; inner sequence

SEQ ID NO: 32632 - DNA, 30 bp, Artificial Sequence; identical to SEQ ID NO: 12
  Description of Artificial Sequence: Synthetic all nuts; inner sequence

SEQ ID NO: 32633 - DNA, 30 bp, Artificial Sequence; identical to SEQ ID NO: 520
  Description of Artificial Sequence: Synthetic all nuts; inner sequence

SEQ ID NO: 32634 - DNA, 30 bp, Artificial Sequence; identical to SEQ ID NO: 8810
  Description of Artificial Sequence: Synthetic all nuts; inner sequence

SEQ ID NO: 32635 - DNA, 30 bp, Artificial Sequence; identical to SEQ ID NO: 448
  Description of Artificial Sequence: Synthetic all nuts; inner sequence

SEQ ID NO: 32636 - DNA, 30 bp, Artificial Sequence; identical to SEQ ID NO: 688
  Description of Artificial Sequence: Synthetic all nuts; inner sequence

SEQ ID NO: 32637 - DNA, 30 bp, Artificial Sequence; identical to SEQ ID NO: 4960
  Description of Artificial Sequence: Synthetic all nuts; inner sequence

SEQ ID NO: 32638 - DNA, 30 bp, Artificial Sequence; identical to SEQ ID NO: 95
  Description of Artificial Sequence: Synthetic all nuts; inner sequence

SEQ ID NO: 32639 - DNA, 30 bp, Artificial Sequence; identical to SEQ ID NO: 112
  Description of Artificial Sequence: Synthetic all nuts; inner sequence

SEQ ID NO: 32640 - DNA, 30 bp, Artificial Sequence; identical to SEQ ID NO: 405
  Description of Artificial Sequence: Synthetic all nuts; inner sequence

SEQ ID NO: 32641 - DNA, 30 bp, Artificial Sequence; identical to SEQ ID NO: 268
  Description of Artificial Sequence: Synthetic all nuts; inner sequence

SEQ ID NO: 32642 - DNA, 30 bp, Artificial Sequence; identical to SEQ ID NO: 20895
  Description of Artificial Sequence: Synthetic all nuts; inner sequence

SEQ ID NO: 32643 - DNA, 30 bp, Artificial Sequence; identical to SEQ ID NO: 8872
  Description of Artificial Sequence: Synthetic all nuts; inner sequence

SEQ ID NO: 32644 - DNA, 30 bp, Artificial Sequence; identical to SEQ ID NO: 8949
  Description of Artificial Sequence: Synthetic all nuts; inner sequence

SEQ ID NO: 32645 - DNA, 30 bp, Artificial Sequence; identical to SEQ ID NO: 413
  Description of Artificial Sequence: Synthetic all nuts; inner sequence

SEQ ID NO: 32646 - DNA, 30 bp, Artificial Sequence; identical to SEQ ID NO: 4317
  Description of Artificial Sequence: Synthetic all nuts; inner sequence

SEQ ID NO: 32647 - DNA, 30 bp, Artificial Sequence; identical to SEQ ID NO: 4870
  Description of Artificial Sequence: Synthetic all nuts; inner sequence

SEQ ID NO: 32648 - DNA, 30 bp, Artificial Sequence; identical to SEQ ID NO: 512
  Description of Artificial Sequence: Synthetic all nuts; inner sequence

SEQ ID NO: 32649 - DNA, 30 bp, Artificial Sequence; identical to SEQ ID NO: 100
  Description of Artificial Sequence: Synthetic all nuts; inner sequence

SEQ ID NO: 32650 - DNA, 30 bp, Artificial Sequence; identical to SEQ ID NO: 392
  Description of Artificial Sequence: Synthetic all nuts; inner sequence

SEQ ID NO: 32651 - DNA, 30 bp, Artificial Sequence; identical to SEQ ID NO: 20515
  Description of Artificial Sequence: Synthetic all nuts; inner sequence

SEQ ID NO: 32652 - DNA, 30 bp, Artificial Sequence; identical to SEQ ID NO: 22
  Description of Artificial Sequence: Synthetic all nuts; inner sequence

SEQ ID NO: 32653 - DNA, 29 bp, Artificial Sequence
  Description of Artificial Sequence: Synthetic all nuts; inner sequence
gtcatgccatcccttcgagtggacaggta

SEQ ID NO: 32654 - DNA, 30 bp, Artificial Sequence; identical to SEQ ID NO: 20407
  Description of Artificial Sequence: Synthetic all nuts; inner sequence

SEQ ID NO: 32655 - DNA, 30 bp, Artificial Sequence; identical to SEQ ID NO: 12953
  Description of Artificial Sequence: Synthetic all nuts; inner sequence

SEQ ID NO: 32656 - DNA, 30 bp, Artificial Sequence; identical to SEQ ID NO: 4977
  Description of Artificial Sequence: Synthetic all nuts; inner sequence

SEQ ID NO: 32657 - DNA, 30 bp, Artificial Sequence; identical to SEQ ID NO: 4230
  Description of Artificial Sequence: Synthetic all nuts; inner sequence

SEQ ID NO: 32658 - DNA, 30 bp, Artificial Sequence; identical to SEQ ID NO: 37
  Description of Artificial Sequence: Synthetic all nuts; inner sequence

SEQ ID NO: 32659 - DNA, 30 bp, Artificial Sequence
  Description of Artificial Sequence: Synthetic all nuts; inner sequence
gggatgcacgcacctacacgtgggtatgga

SEQ ID NO: 32660 - DNA, 30 bp, Artificial Sequence
  Description of Artificial Sequence: Synthetic all nuts; inner sequence
gcacgacgcgcaccctatcatgaggccatg

SEQ ID NO: 32661 - DNA, 30 bp, Artificial Sequence; identical to SEQ ID NO: 348
  Description of Artificial Sequence: Synthetic all nuts; inner sequence

SEQ ID NO: 32662 - DNA, 30 bp, Artificial Sequence; identical to SEQ ID NO: 5001
  Description of Artificial Sequence: Synthetic all nuts; inner sequence

SEQ ID NO: 32663 - DNA, 30 bp, Artificial Sequence; identical to SEQ ID NO: 20596
  Description of Artificial Sequence: Synthetic all nuts; inner sequence

SEQ ID NO: 32664 - DNA, 30 bp, Artificial Sequence; identical to SEQ ID NO: 80
  Description of Artificial Sequence: Synthetic all nuts; inner sequence

SEQ ID NO: 32665 - DNA, 30 bp, Artificial Sequence
  Description of Artificial Sequence: Synthetic all nuts; inner sequence
cgcacacccgtcatagcggtcacgtgcatg

SEQ ID NO: 32666 - DNA, 30 bp, Artificial Sequence
  Description of Artificial Sequence: Synthetic all nuts; inner sequence
cgcaccgtcgatacgtcatgcacgcggaca

SEQ ID NO: 32667 - DNA, 30 bp, Artificial Sequence; identical to SEQ ID NO: 118
  Description of Artificial Sequence: Synthetic all nuts; inner sequence

SEQ ID NO: 32668 - DNA, 30 bp, Artificial Sequence; identical to SEQ ID NO: 466
  Description of Artificial Sequence: Synthetic all nuts; inner sequence

SEQ ID NO: 32669 - DNA, 30 bp, Artificial Sequence; identical to SEQ ID NO: 91
  Description of Artificial Sequence: Synthetic all nuts; inner sequence

SEQ ID NO: 32670 - DNA, 30 bp, Artificial Sequence; identical to SEQ ID NO: 272
  Description of Artificial Sequence: Synthetic all nuts; inner sequence

SEQ ID NO: 32671 - DNA, 30 bp, Artificial Sequence; identical to SEQ ID NO: 115
  Description of Artificial Sequence: Synthetic all nuts; inner sequence

SEQ ID NO: 32672 - DNA, 30 bp, Artificial Sequence; identical to SEQ ID NO: 962
  Description of Artificial Sequence: Synthetic all nuts; inner sequence

SEQ ID NO: 32673 - DNA, 30 bp, Artificial Sequence; identical to SEQ ID NO: 28979
  Description of Artificial Sequence: Synthetic all nuts; inner sequence

SEQ ID NO: 32674 - DNA, 30 bp, Artificial Sequence; identical to SEQ ID NO: 724
  Description of Artificial Sequence: Synthetic all nuts; inner sequence

SEQ ID NO: 32675 - DNA, 30 bp, Artificial Sequence; identical to SEQ ID NO: 16709
  Description of Artificial Sequence: Synthetic all nuts; inner sequence

SEQ ID NO: 32676 - DNA, 30 bp, Artificial Sequence; identical to SEQ ID NO: 16627
  Description of Artificial Sequence: Synthetic all nuts; inner sequence

SEQ ID NO: 32677 - DNA, 30 bp, Artificial Sequence; identical to SEQ ID NO: 446
  Description of Artificial Sequence: Synthetic all nuts; inner sequence

SEQ ID NO: 32678 - DNA, 30 bp, Artificial Sequence; identical to SEQ ID NO: 214
  Description of Artificial Sequence: Synthetic all nuts; inner sequence

SEQ ID NO: 32679 - DNA, 30 bp, Artificial Sequence; identical to SEQ ID NO: 920
  Description of Artificial Sequence: Synthetic all nuts; inner sequence

SEQ ID NO: 32680 - DNA, 30 bp, Artificial Sequence; identical to SEQ ID NO: 20829
  Description of Artificial Sequence: Synthetic all nuts; inner sequence

SEQ ID NO: 32681 - DNA, 30 bp, Artificial Sequence; identical to SEQ ID NO: 8938
  Description of Artificial Sequence: Synthetic all nuts; inner sequence

SEQ ID NO: 32682 - DNA, 30 bp, Artificial Sequence; identical to SEQ ID NO: 28806
  Description of Artificial Sequence: Synthetic all nuts; inner sequence

SEQ ID NO: 32683 - DNA, 31 bp, Artificial Sequence; identical to SEQ ID NO: 28686
  Description of Artificial Sequence: Synthetic all nuts; inner sequence

SEQ ID NO: 32684 - DNA, 30 bp, Artificial Sequence; identical to SEQ ID NO: 18
  Description of Artificial Sequence: Synthetic all nuts; inner sequence

SEQ ID NO: 32685 - DNA, 30 bp, Artificial Sequence; identical to SEQ ID NO: 4823
  Description of Artificial Sequence: Synthetic all nuts; inner sequence

SEQ ID NO: 32686 - DNA, 30 bp, Artificial Sequence; identical to SEQ ID NO: 196
  Description of Artificial Sequence: Synthetic all nuts; inner sequence

SEQ ID NO: 32687 - DNA, 30 bp, Artificial Sequence; identical to SEQ ID NO: 278
  Description of Artificial Sequence: Synthetic all nuts; inner sequence

SEQ ID NO: 32688 - DNA, 30 bp, Artificial Sequence; identical to SEQ ID NO: 16832
  Description of Artificial Sequence: Synthetic all nuts; inner sequence

SEQ ID NO: 32689 - DNA, 30 bp, Artificial Sequence
  Description of Artificial Sequence: Synthetic all nuts; inner sequence
cgacgcgacatgaaggcatgggtaggcacg

SEQ ID NO: 32690 - DNA, 30 bp, Artificial Sequence; identical to SEQ ID NO: 32
  Description of Artificial Sequence: Synthetic all nuts; inner sequence

SEQ ID NO: 32691 - DNA, 30 bp, Artificial Sequence; identical to SEQ ID NO: 917
  Description of Artificial Sequence: Synthetic all nuts; inner sequence

SEQ ID NO: 32692 - DNA, 30 bp, Artificial Sequence; identical to SEQ ID NO: 603
  Description of Artificial Sequence: Synthetic all nuts; inner sequence

SEQ ID NO: 32693 - DNA, 30 bp, Artificial Sequence; identical to SEQ ID NO: 12997
  Description of Artificial Sequence: Synthetic all nuts; inner sequence

SEQ ID NO: 32694 - DNA, 30 bp, Artificial Sequence; identical to SEQ ID NO: 850
  Description of Artificial Sequence: Synthetic all nuts; inner sequence

SEQ ID NO: 32695 - DNA, 30 bp, Artificial Sequence; identical to SEQ ID NO: 12996
  Description of Artificial Sequence: Synthetic all nuts; inner sequence

SEQ ID NO: 32696 - DNA, 30 bp, Artificial Sequence; identical to SEQ ID NO: 232
  Description of Artificial Sequence: Synthetic all nuts; inner sequence

SEQ ID NO: 32697 - DNA, 30 bp, Artificial Sequence; identical to SEQ ID NO: 540
  Description of Artificial Sequence: Synthetic all nuts; inner sequence

SEQ ID NO: 32698 - DNA, 30 bp, Artificial Sequence; identical to SEQ ID NO: 396
  Description of Artificial Sequence: Synthetic all nuts; inner sequence

SEQ ID NO: 32699 - DNA, 30 bp, Artificial Sequence; identical to SEQ ID NO: 12986
  Description of Artificial Sequence: Synthetic all nuts; inner sequence

SEQ ID NO: 32700 - DNA, 30 bp, Artificial Sequence; identical to SEQ ID NO: 757
  Description of Artificial Sequence: Synthetic all nuts; inner sequence

SEQ ID NO: 32701 - DNA, 30 bp, Artificial Sequence; identical to SEQ ID NO: 84
  Description of Artificial Sequence: Synthetic all nuts; inner sequence

SEQ ID NO: 32702 - DNA, 30 bp, Artificial Sequence; identical to SEQ ID NO: 20533
  Description of Artificial Sequence: Synthetic all nuts; inner sequence

SEQ ID NO: 32703 - DNA, 30 bp, Artificial Sequence; identical to SEQ ID NO: 900
  Description of Artificial Sequence: Synthetic all nuts; inner sequence

SEQ ID NO: 32704 - DNA, 30 bp, Artificial Sequence; identical to SEQ ID NO: 654
  Description of Artificial Sequence: Synthetic all nuts; inner sequence

SEQ ID NO: 32705 - DNA, 30 bp, Artificial Sequence; identical to SEQ ID NO: 4377
  Description of Artificial Sequence: Synthetic all nuts; inner sequence

SEQ ID NO: 32706 - DNA, 30 bp, Artificial Sequence; identical to SEQ ID NO: 846
  Description of Artificial Sequence: Synthetic all nuts; inner sequence

SEQ ID NO: 32707 - DNA, 30 bp, Artificial Sequence; identical to SEQ ID NO: 420
  Description of Artificial Sequence: Synthetic all nuts; inner sequence

SEQ ID NO: 32708 - DNA, 30 bp, Artificial Sequence; identical to SEQ ID NO: 527
  Description of Artificial Sequence: Synthetic all nuts; inner sequence

SEQ ID NO: 32709 - DNA, 30 bp, Artificial Sequence; identical to SEQ ID NO: 753
  Description of Artificial Sequence: Synthetic all nuts; inner sequence

SEQ ID NO: 32710 - DNA, 30 bp, Artificial Sequence; identical to SEQ ID NO: 86
  Description of Artificial Sequence: Synthetic all nuts; inner sequence

SEQ ID NO: 32711 - DNA, 30 bp, Artificial Sequence; identical to SEQ ID NO: 481
  Description of Artificial Sequence: Synthetic all nuts; inner sequence

SEQ ID NO: 32712 - DNA, 30 bp, Artificial Sequence; identical to SEQ ID NO: 122
  Description of Artificial Sequence: Synthetic all nuts; inner sequence

SEQ ID NO: 32713 - DNA, 30 bp, Artificial Sequence; identical to SEQ ID NO: 8978
  Description of Artificial Sequence: Synthetic all nuts; inner sequence

SEQ ID NO: 32714 - DNA, 30 bp, Artificial Sequence; identical to SEQ ID NO: 4985
  Description of Artificial Sequence: Synthetic all nuts; inner sequence

SEQ ID NO: 32715 - DNA, 30 bp, Artificial Sequence; identical to SEQ ID NO: 142
  Description of Artificial Sequence: Synthetic all nuts; inner sequence

SEQ ID NO: 32716 - DNA, 30 bp, Artificial Sequence; identical to SEQ ID NO: 24852
  Description of Artificial Sequence: Synthetic all nuts; inner sequence

SEQ ID NO: 32717 - DNA, 30 bp, Artificial Sequence; identical to SEQ ID NO: 4405
  Description of Artificial Sequence: Synthetic all nuts; inner sequence

SEQ ID NO: 32718 - DNA, 30 bp, Artificial Sequence; identical to SEQ ID NO: 370
  Description of Artificial Sequence: Synthetic all nuts; inner sequence

SEQ ID NO: 32719 - DNA, 30 bp, Artificial Sequence
  Description of Artificial Sequence: Synthetic all nuts; inner sequence
ggacatcgcgtcactaagtgcgtcttgtgc

SEQ ID NO: 32720 - DNA, 30 bp, Artificial Sequence; identical to SEQ ID NO: 640
  Description of Artificial Sequence: Synthetic all nuts; inner sequence

SEQ ID NO: 32721 - DNA, 30 bp, Artificial Sequence; identical to SEQ ID NO: 853
  Description of Artificial Sequence: Synthetic all nuts; inner sequence

SEQ ID NO: 32722 - DNA, 30 bp, Artificial Sequence; identical to SEQ ID NO: 4254
  Description of Artificial Sequence: Synthetic all nuts; inner sequence

SEQ ID NO: 32723 - DNA, 30 bp, Artificial Sequence; identical to SEQ ID NO: 4948
  Description of Artificial Sequence: Synthetic all nuts; inner sequence

SEQ ID NO: 32724 - DNA, 30 bp, Artificial Sequence; identical to SEQ ID NO: 4336
  Description of Artificial Sequence: Synthetic all nuts; inner sequence

SEQ ID NO: 32725 - DNA, 30 bp, Artificial Sequence; identical to SEQ ID NO: 197
  Description of Artificial Sequence: Synthetic all nuts; inner sequence

SEQ ID NO: 32726 - DNA, 30 bp, Artificial Sequence; identical to SEQ ID NO: 28
  Description of Artificial Sequence: Synthetic all nuts; inner sequence

SEQ ID NO: 32727 - DNA, 30 bp, Artificial Sequence
  Description of Artificial Sequence: Synthetic all nuts; inner sequence
ccgtagcgacaccaagcggtggtgtgcgtg

SEQ ID NO: 32728 - DNA, 30 bp, Artificial Sequence; identical to SEQ ID NO: 633
  Description of Artificial Sequence: Synthetic all nuts; inner sequence

SEQ ID NO: 32729 - DNA, 30 bp, Artificial Sequence; identical to SEQ ID NO: 4913
  Description of Artificial Sequence: Synthetic all nuts; inner sequence

SEQ ID NO: 32730 - DNA, 30 bp, Artificial Sequence; identical to SEQ ID NO: 172
  Description of Artificial Sequence: Synthetic all nuts; inner sequence

SEQ ID NO: 32731 - DNA, 30 bp, Artificial Sequence; identical to SEQ ID NO: 4627
  Description of Artificial Sequence: Synthetic all nuts; inner sequence

SEQ ID NO: 32732 - DNA, 30 bp, Artificial Sequence; identical to SEQ ID NO: 4469
  Description of Artificial Sequence: Synthetic all nuts; inner sequence

SEQ ID NO: 32733 - DNA, 30 bp, Artificial Sequence; identical to SEQ ID NO: 336
  Description of Artificial Sequence: Synthetic all nuts; inner sequence

SEQ ID NO: 32734 - DNA, 30 bp, Artificial Sequence; identical to SEQ ID NO: 449
  Description of Artificial Sequence: Synthetic all nuts; inner sequence

SEQ ID NO: 32735 - DNA, 30 bp, Artificial Sequence; identical to SEQ ID NO: 164
  Description of Artificial Sequence: Synthetic all nuts; inner sequence

SEQ ID NO: 32736 - DNA, 30 bp, Artificial Sequence; identical to SEQ ID NO: 776
  Description of Artificial Sequence: Synthetic all nuts; inner sequence

SEQ ID NO: 32737 - DNA, 30 bp, Artificial Sequence; identical to SEQ ID NO: 12895
  Description of Artificial Sequence: Synthetic all nuts; inner sequence

SEQ ID NO: 32738 - DNA, 30 bp, Artificial Sequence; identical to SEQ ID NO: 4498
  Description of Artificial Sequence: Synthetic all nuts; inner sequence

SEQ ID NO: 32739 - DNA, 30 bp, Artificial Sequence; identical to SEQ ID NO: 762
  Description of Artificial Sequence: Synthetic all nuts; inner sequence

SEQ ID NO: 32740 - DNA, 30 bp, Artificial Sequence; identical to SEQ ID NO: 16931
  Description of Artificial Sequence: Synthetic all nuts; inner sequence

SEQ ID NO: 32741 - DNA, 30 bp, Artificial Sequence; identical to SEQ ID NO: 20327
  Description of Artificial Sequence: Synthetic all nuts; inner sequence

SEQ ID NO: 32742 - DNA, 30 bp, Artificial Sequence; identical to SEQ ID NO: 149
  Description of Artificial Sequence: Synthetic all nuts; inner sequence

SEQ ID NO: 32743 - DNA, 30 bp, Artificial Sequence
  Description of Artificial Sequence: Synthetic all nuts; inner sequence
gtacgcatcgtaccgtcatgtggttccgta

SEQ ID NO: 32744 - DNA, 30 bp, Artificial Sequence; identical to SEQ ID NO: 310
  Description of Artificial Sequence: Synthetic all nuts; inner sequence

SEQ ID NO: 32745 - DNA, 30 bp, Artificial Sequence; identical to SEQ ID NO: 8962
  Description of Artificial Sequence: Synthetic all nuts; inner sequence

SEQ ID NO: 32746 - DNA, 30 bp, Artificial Sequence; identical to SEQ ID NO: 341
  Description of Artificial Sequence: Synthetic all nuts; inner sequence

SEQ ID NO: 32747 - DNA, 30 bp, Artificial Sequence; identical to SEQ ID NO: 20700
  Description of Artificial Sequence: Synthetic all nuts; inner sequence

SEQ ID NO: 32748 - DNA, 30 bp, Artificial Sequence; identical to SEQ ID NO: 244
  Description of Artificial Sequence: Synthetic all nuts; inner sequence

SEQ ID NO: 32749 - DNA, 30 bp, Artificial Sequence; identical to SEQ ID NO: 457
  Description of Artificial Sequence: Synthetic all nuts; inner sequence

SEQ ID NO: 32750 - DNA, 30 bp, Artificial Sequence; identical to SEQ ID NO: 76
  Description of Artificial Sequence: Synthetic all nuts; inner sequence

SEQ ID NO: 32751 - DNA, 30 bp, Artificial Sequence; identical to SEQ ID NO: 529
  Description of Artificial Sequence: Synthetic all nuts; inner sequence

SEQ ID NO: 32752 - DNA, 30 bp, Artificial Sequence; identical to SEQ ID NO: 20119
  Description of Artificial Sequence: Synthetic all nuts; inner sequence

SEQ ID NO: 32753 - DNA, 30 bp, Artificial Sequence; identical to SEQ ID NO: 500
  Description of Artificial Sequence: Synthetic all nuts; inner sequence

SEQ ID NO: 32754 - DNA, 30 bp, Artificial Sequence; identical to SEQ ID NO: 27
  Description of Artificial Sequence: Synthetic all nuts; inner sequence

SEQ ID NO: 32755 - DNA, 30 bp, Artificial Sequence; identical to SEQ ID NO: 921
  Description of Artificial Sequence: Synthetic all nuts; inner sequence

SEQ ID NO: 32756 - DNA, 30 bp, Artificial Sequence; identical to SEQ ID NO: 20777
  Description of Artificial Sequence: Synthetic all nuts; inner sequence

SEQ ID NO: 32757 - DNA, 30 bp, Artificial Sequence; identical to SEQ ID NO: 553
  Description of Artificial Sequence: Synthetic all nuts; inner sequence

SEQ ID NO: 32758 - DNA, 30 bp, Artificial Sequence; identical to SEQ ID NO: 20165
  Description of Artificial Sequence: Synthetic all nuts; inner sequence

SEQ ID NO: 32759 - DNA, 30 bp, Artificial Sequence; identical to SEQ ID NO: 4707
  Description of Artificial Sequence: Synthetic all nuts; inner sequence

SEQ ID NO: 32760 - DNA, 30 bp, Artificial Sequence; identical to SEQ ID NO: 64
  Description of Artificial Sequence: Synthetic all nuts; inner sequence

SEQ ID NO: 32761 - DNA, 30 bp, Artificial Sequence; identical to SEQ ID NO: 720
  Description of Artificial Sequence: Synthetic all nuts; inner sequence

SEQ ID NO: 32762 - DNA, 30 bp, Artificial Sequence; identical to SEQ ID NO: 4890
  Description of Artificial Sequence: Synthetic all nuts; inner sequence

SEQ ID NO: 32763 - DNA, 30 bp, Artificial Sequence; identical to SEQ ID NO: 301
  Description of Artificial Sequence: Synthetic all nuts; inner sequence

SEQ ID NO: 32764 - DNA, 30 bp, Artificial Sequence; identical to SEQ ID NO: 20947
  Description of Artificial Sequence: Synthetic all nuts; inner sequence

SEQ ID NO: 32765 - DNA, 30 bp, Artificial Sequence; identical to SEQ ID NO: 8618
  Description of Artificial Sequence: Synthetic all nuts; inner sequence

SEQ ID NO: 32766 - DNA, 30 bp, Artificial Sequence; identical to SEQ ID NO: 111
  Description of Artificial Sequence: Synthetic all nuts; inner sequence

SEQ ID NO: 32767 - DNA, 30 bp, Artificial Sequence; identical to SEQ ID NO: 738
  Description of Artificial Sequence: Synthetic all nuts; inner sequence

SEQ ID NO: 32768 - DNA, 30 bp, Artificial Sequence; identical to SEQ ID NO: 408
  Description of Artificial Sequence: Synthetic all nuts; inner sequence

SEQ ID NO: 32769 - DNA, 30 bp, Artificial Sequence; identical to SEQ ID NO: 705
  Description of Artificial Sequence: Synthetic all nuts; inner sequence

SEQ ID NO: 32770 - DNA, 30 bp, Artificial Sequence; identical to SEQ ID NO: 4621
  Description of Artificial Sequence: Synthetic all nuts; inner sequence

SEQ ID NO: 32771 - DNA, 30 bp, Artificial Sequence; identical to SEQ ID NO: 621
  Description of Artificial Sequence: Synthetic all nuts; inner sequence

SEQ ID NO: 32772 - DNA, 30 bp, Artificial Sequence; identical to SEQ ID NO: 17
  Description of Artificial Sequence: Synthetic all nuts; inner sequence

SEQ ID NO: 32773 - DNA, 30 bp, Artificial Sequence; identical to SEQ ID NO: 289
  Description of Artificial Sequence: Synthetic all nuts; inner sequence

SEQ ID NO: 32774 - DNA, 30 bp, Artificial Sequence; identical to SEQ ID NO: 20711
  Description of Artificial Sequence: Synthetic all nuts; inner sequence

SEQ ID NO: 32775 - DNA, 30 bp, Artificial Sequence; identical to SEQ ID NO: 8994
  Description of Artificial Sequence: Synthetic all nuts; inner sequence

SEQ ID NO: 32776 - DNA, 30 bp, Artificial Sequence; identical to SEQ ID NO: 805
  Description of Artificial Sequence: Synthetic all nuts; inner sequence

SEQ ID NO: 32777 - DNA, 30 bp, Artificial Sequence; identical to SEQ ID NO: 622
  Description of Artificial Sequence: Synthetic all nuts; inner sequence

SEQ ID NO: 32778 - DNA, 30 bp, Artificial Sequence; identical to SEQ ID NO: 16862
  Description of Artificial Sequence: Synthetic all nuts; inner sequence

SEQ ID NO: 32779 - DNA, 30 bp, Artificial Sequence; identical to SEQ ID NO: 531
  Description of Artificial Sequence: Synthetic all nuts; inner sequence

SEQ ID NO: 32780 - DNA, 30 bp, Artificial Sequence; identical to SEQ ID NO: 16544
  Description of Artificial Sequence: Synthetic all nuts; inner sequence

SEQ ID NO: 32781 - DNA, 30 bp, Artificial Sequence; identical to SEQ ID NO: 662
  Description of Artificial Sequence: Synthetic all nuts; inner sequence

SEQ ID NO: 32782 - DNA, 30 bp, Artificial Sequence; identical to SEQ ID NO: 20783
  Description of Artificial Sequence: Synthetic all nuts; inner sequence

SEQ ID NO: 32783 - DNA, 30 bp, Artificial Sequence
  Description of Artificial Sequence: Synthetic all nuts; inner sequence
gtgcgacacgtaacctagcaagggagcatg

SEQ ID NO: 32784 - DNA, 30 bp, Artificial Sequence; identical to SEQ ID NO: 545
  Description of Artificial Sequence: Synthetic all nuts; inner sequence

SEQ ID NO: 32785 - DNA, 30 bp, Artificial Sequence; identical to SEQ ID NO: 884
  Description of Artificial Sequence: Synthetic all nuts; inner sequence

SEQ ID NO: 32786 - DNA, 30 bp, Artificial Sequence; identical to SEQ ID NO: 20576
  Description of Artificial Sequence: Synthetic all nuts; inner sequence

SEQ ID NO: 32787 - DNA, 30 bp, Artificial Sequence; identical to SEQ ID NO: 25
  Description of Artificial Sequence: Synthetic all nuts; inner sequence

SEQ ID NO: 32788 - DNA, 30 bp, Artificial Sequence; identical to SEQ ID NO: 4517
  Description of Artificial Sequence: Synthetic all nuts; inner sequence

SEQ ID NO: 32789 - DNA, 30 bp, Artificial Sequence; identical to SEQ ID NO: 16352
  Description of Artificial Sequence: Synthetic all nuts; inner sequence

SEQ ID NO: 32790 - DNA, 30 bp, Artificial Sequence; identical to SEQ ID NO: 30
  Description of Artificial Sequence: Synthetic all nuts; inner sequence

SEQ ID NO: 32791 - DNA, 30 bp, Artificial Sequence
  Description of Artificial Sequence: Synthetic all nuts; inner sequence
cgacgcacggaagacacgatacgtggtgcg

SEQ ID NO: 32792 - DNA, 29 bp, Artificial Sequence
  Description of Artificial Sequence: Synthetic all nuts; inner sequence
cgaccagcgcaagtaagtggcgtgatgca

SEQ ID NO: 32793 - DNA, 29 bp, Artificial Sequence
  Description of Artificial Sequence: Synthetic all nuts; inner sequence
gtcatgccatcccttcgagtgtgacggta

SEQ ID NO: 32794 - DNA, 30 bp, Artificial Sequence; identical to SEQ ID NO: 8909
  Description of Artificial Sequence: Synthetic all nuts; inner sequence

SEQ ID NO: 32795 - DNA, 30 bp, Artificial Sequence; identical to SEQ ID NO: 700
  Description of Artificial Sequence: Synthetic all nuts; inner sequence

SEQ ID NO: 32796 - DNA, 30 bp, Artificial Sequence; identical to SEQ ID NO: 384
  Description of Artificial Sequence: Synthetic all nuts; inner sequence

SEQ ID NO: 32797 - DNA, 30 bp, Artificial Sequence; identical to SEQ ID NO: 534
  Description of Artificial Sequence: Synthetic all nuts; inner sequence

SEQ ID NO: 32798 - DNA, 30 bp, Artificial Sequence; identical to SEQ ID NO: 20462
  Description of Artificial Sequence: Synthetic all nuts; inner sequence

SEQ ID NO: 32799 - DNA, 30 bp, Artificial Sequence; identical to SEQ ID NO: 598
  Description of Artificial Sequence: Synthetic all nuts; inner sequence

SEQ ID NO: 32800 - DNA, 30 bp, Artificial Sequence; identical to SEQ ID NO: 979
  Description of Artificial Sequence: Synthetic all nuts; inner sequence

SEQ ID NO: 32801 - DNA, 30 bp, Artificial Sequence; identical to SEQ ID NO: 951
  Description of Artificial Sequence: Synthetic all nuts; inner sequence

SEQ ID NO: 32802 - DNA, 30 bp, Artificial Sequence
  Description of Artificial Sequence: Synthetic all nuts; inner sequence
gtgatgcacgaacactatcatggcggcatg

SEQ ID NO: 32803 - DNA, 30 bp, Artificial Sequence; identical to SEQ ID NO: 649
  Description of Artificial Sequence: Synthetic all nuts; inner sequence

SEQ ID NO: 32804 - DNA, 30 bp, Artificial Sequence; identical to SEQ ID NO: 207
  Description of Artificial Sequence: Synthetic all nuts; inner sequence

SEQ ID NO: 32805 - DNA, 30 bp, Artificial Sequence; identical to SEQ ID NO: 7
  Description of Artificial Sequence: Synthetic all nuts; inner sequence

SEQ ID NO: 32806 - DNA, 30 bp, Artificial Sequence; identical to SEQ ID NO: 189
  Description of Artificial Sequence: Synthetic all nuts; inner sequence

SEQ ID NO: 32807 - DNA, 30 bp, Artificial Sequence; identical to SEQ ID NO: 238
  Description of Artificial Sequence: Synthetic all nuts; inner sequence

SEQ ID NO: 32808 - DNA, 30 bp, Artificial Sequence; identical to SEQ ID NO: 288
  Description of Artificial Sequence: Synthetic all nuts; inner sequence

SEQ ID NO: 32809 - DNA, 30 bp, Artificial Sequence; identical to SEQ ID NO: 20367
  Description of Artificial Sequence: Synthetic all nuts; inner sequence

SEQ ID NO: 32810 - DNA, 30 bp, Artificial Sequence
  Description of Artificial Sequence: Synthetic all nuts; inner sequence
ccgtagcgccatcaagcggtggcgtgcgtg

SEQ ID NO: 32811 - DNA, 30 bp, Artificial Sequence; identical to SEQ ID NO: 227
  Description of Artificial Sequence: Synthetic all nuts; inner sequence

SEQ ID NO: 32812 - DNA, 30 bp, Artificial Sequence; identical to SEQ ID NO: 684
  Description of Artificial Sequence: Synthetic all nuts; inner sequence

SEQ ID NO: 32813 - DNA, 30 bp, Artificial Sequence; identical to SEQ ID NO: 253
  Description of Artificial Sequence: Synthetic all nuts; inner sequence

SEQ ID NO: 32814 - DNA, 30 bp, Artificial Sequence; identical to SEQ ID NO: 4565
  Description of Artificial Sequence: Synthetic all nuts; inner sequence

SEQ ID NO: 32815 - DNA, 30 bp, Artificial Sequence; identical to SEQ ID NO: 124
  Description of Artificial Sequence: Synthetic all nuts; inner sequence

SEQ ID NO: 32816 - DNA, 30 bp, Artificial Sequence; identical to SEQ ID NO: 249
  Description of Artificial Sequence: Synthetic all nuts; inner sequence

SEQ ID NO: 32817 - DNA, 30 bp, Artificial Sequence; identical to SEQ ID NO: 4364
  Description of Artificial Sequence: Synthetic all nuts; inner sequence

SEQ ID NO: 32818 - DNA, 30 bp, Artificial Sequence; identical to SEQ ID NO: 991
  Description of Artificial Sequence: Synthetic all nuts; inner sequence

SEQ ID NO: 32819 - DNA, 30 bp, Artificial Sequence; identical to SEQ ID NO: 200
  Description of Artificial Sequence: Synthetic all nuts; inner sequence

SEQ ID NO: 32820 - DNA, 30 bp, Artificial Sequence; identical to SEQ ID NO: 139
  Description of Artificial Sequence: Synthetic all nuts; inner sequence

SEQ ID NO: 32821 - DNA, 30 bp, Artificial Sequence; identical to SEQ ID NO: 914
  Description of Artificial Sequence: Synthetic all nuts; inner sequence

SEQ ID NO: 32822 - DNA, 30 bp, Artificial Sequence; identical to SEQ ID NO: 4489
  Description of Artificial Sequence: Synthetic all nuts; inner sequence

SEQ ID NO: 32823 - DNA, 30 bp, Artificial Sequence; identical to SEQ ID NO: 20343
  Description of Artificial Sequence: Synthetic all nuts; inner sequence

SEQ ID NO: 32824 - DNA, 30 bp, Artificial Sequence; identical to SEQ ID NO: 393
  Description of Artificial Sequence: Synthetic all nuts; inner sequence

SEQ ID NO: 32825 - DNA, 30 bp, Artificial Sequence; identical to SEQ ID NO: 89
  Description of Artificial Sequence: Synthetic all nuts; inner sequence

SEQ ID NO: 32826 - DNA, 30 bp, Artificial Sequence; identical to SEQ ID NO: 181
  Description of Artificial Sequence: Synthetic all nuts; inner sequence

SEQ ID NO: 32827 - DNA, 30 bp, Artificial Sequence; identical to SEQ ID NO: 266
  Description of Artificial Sequence: Synthetic all nuts; inner sequence

SEQ ID NO: 32828 - DNA, 30 bp, Artificial Sequence; identical to SEQ ID NO: 634
  Description of Artificial Sequence: Synthetic all nuts; inner sequence

SEQ ID NO: 32829 - DNA, 30 bp, Artificial Sequence; identical to SEQ ID NO: 96
  Description of Artificial Sequence: Synthetic all nuts; inner sequence

SEQ ID NO: 32830 - DNA, 30 bp, Artificial Sequence; identical to SEQ ID NO: 4521
  Description of Artificial Sequence: Synthetic all nuts; inner sequence

SEQ ID NO: 32831 - DNA, 30 bp, Artificial Sequence; identical to SEQ ID NO: 23
  Description of Artificial Sequence: Synthetic all nuts; inner sequence

SEQ ID NO: 32832 - DNA, 30 bp, Artificial Sequence; identical to SEQ ID NO: 28914
  Description of Artificial Sequence: Synthetic all nuts; inner sequence

SEQ ID NO: 32833 - DNA, 30 bp, Artificial Sequence; identical to SEQ ID NO: 16
  Description of Artificial Sequence: Synthetic all nuts; inner sequence

SEQ ID NO: 32834 - DNA, 30 bp, Artificial Sequence; identical to SEQ ID NO: 16733
  Description of Artificial Sequence: Synthetic all nuts; inner sequence

SEQ ID NO: 32835 - DNA, 30 bp, Artificial Sequence; identical to SEQ ID NO: 283
  Description of Artificial Sequence: Synthetic all nuts; inner sequence

SEQ ID NO: 32836 - DNA, 30 bp, Artificial Sequence; identical to SEQ ID NO: 77
  Description of Artificial Sequence: Synthetic all nuts; inner sequence

SEQ ID NO: 32837 - DNA, 30 bp, Artificial Sequence; identical to SEQ ID NO: 560
  Description of Artificial Sequence: Synthetic all nuts; inner sequence

SEQ ID NO: 32838 - DNA, 30 bp, Artificial Sequence; identical to SEQ ID NO: 511
  Description of Artificial Sequence: Synthetic all nuts; inner sequence

SEQ ID NO: 32839 - DNA, 30 bp, Artificial Sequence; identical to SEQ ID NO: 201
  Description of Artificial Sequence: Synthetic all nuts; inner sequence

SEQ ID NO: 32840 - DNA, 30 bp, Artificial Sequence
  Description of Artificial Sequence: Synthetic all nuts; inner sequence
ggactgcacgcaccctatcatgtaggcatg

SEQ ID NO: 32841 - DNA, 30 bp, Artificial Sequence; identical to SEQ ID NO: 657
  Description of Artificial Sequence: Synthetic all nuts; inner sequence

SEQ ID NO: 32842 - DNA, 30 bp, Artificial Sequence; identical to SEQ ID NO: 243
  Description of Artificial Sequence: Synthetic all nuts; inner sequence

SEQ ID NO: 32843 - DNA, 33 bp, Artificial Sequence; identical to SEQ ID NO: 864
  Description of Artificial Sequence: Synthetic all nuts; inner sequence

SEQ ID NO: 32844 - DNA, 30 bp, Artificial Sequence; identical to SEQ ID NO: 8876
  Description of Artificial Sequence: Synthetic all nuts; inner sequence

SEQ ID NO: 32845 - DNA, 30 bp, Artificial Sequence; identical to SEQ ID NO: 778
  Description of Artificial Sequence: Synthetic all nuts; inner sequence

SEQ ID NO: 32846 - DNA, 30 bp, Artificial Sequence; identical to SEQ ID NO: 145
  Description of Artificial Sequence: Synthetic all nuts; inner sequence

SEQ ID NO: 32847 - DNA, 30 bp, Artificial Sequence; identical to SEQ ID NO: 192
  Description of Artificial Sequence: Synthetic all nuts; inner sequence

SEQ ID NO: 32848 - DNA, 30 bp, Artificial Sequence
  Description of Artificial Sequence: Synthetic all nuts; inner sequence
ccgcagcgacatcaagcggcggtgtgcgtg

SEQ ID NO: 32849 - DNA, 30 bp, Artificial Sequence; identical to SEQ ID NO: 4801
  Description of Artificial Sequence: Synthetic all nuts; inner sequence

SEQ ID NO: 32850 - DNA, 30 bp, Artificial Sequence; identical to SEQ ID NO: 923
  Description of Artificial Sequence: Synthetic all nuts; inner sequence

SEQ ID NO: 32851 - DNA, 30 bp, Artificial Sequence; identical to SEQ ID NO: 51
  Description of Artificial Sequence: Synthetic all nuts; inner sequence

SEQ ID NO: 32852 - DNA, 30 bp, Artificial Sequence; identical to SEQ ID NO: 8946
  Description of Artificial Sequence: Synthetic all nuts; inner sequence

SEQ ID NO: 32853 - DNA, 30 bp, Artificial Sequence; identical to SEQ ID NO: 539
  Description of Artificial Sequence: Synthetic all nuts; inner sequence

SEQ ID NO: 32854 - DNA, 30 bp, Artificial Sequence; identical to SEQ ID NO: 4979
  Description of Artificial Sequence: Synthetic all nuts; inner sequence

SEQ ID NO: 32855 - DNA, 30 bp, Artificial Sequence; identical to SEQ ID NO: 4748
  Description of Artificial Sequence: Synthetic all nuts; inner sequence

SEQ ID NO: 32856 - DNA, 30 bp, Artificial Sequence; identical to SEQ ID NO: 928
  Description of Artificial Sequence: Synthetic all nuts; inner sequence

SEQ ID NO: 32857 - DNA, 30 bp, Artificial Sequence; identical to SEQ ID NO: 960
  Description of Artificial Sequence: Synthetic all nuts; inner sequence

SEQ ID NO: 32858 - DNA, 30 bp, Artificial Sequence; identical to SEQ ID NO: 74
  Description of Artificial Sequence: Synthetic all nuts; inner sequence

SEQ ID NO: 32859 - DNA, 30 bp, Artificial Sequence; identical to SEQ ID NO: 387
  Description of Artificial Sequence: Synthetic all nuts; inner sequence

SEQ ID NO: 32860 - DNA, 30 bp, Artificial Sequence; identical to SEQ ID NO: 4861
  Description of Artificial Sequence: Synthetic all nuts; inner sequence

SEQ ID NO: 32861 - DNA, 30 bp, Artificial Sequence; identical to SEQ ID NO: 280
  Description of Artificial Sequence: Synthetic all nuts; inner sequence

SEQ ID NO: 32862 - DNA, 30 bp, Artificial Sequence; identical to SEQ ID NO: 16866
  Description of Artificial Sequence: Synthetic all nuts; inner sequence

SEQ ID NO: 32863 - DNA, 30 bp, Artificial Sequence; identical to SEQ ID NO: 180
  Description of Artificial Sequence: Synthetic all nuts; inner sequence

SEQ ID NO: 32864 - DNA, 30 bp, Artificial Sequence; identical to SEQ ID NO: 4667
  Description of Artificial Sequence: Synthetic all nuts; inner sequence

SEQ ID NO: 32865 - DNA, 30 bp, Artificial Sequence; identical to SEQ ID NO: 20565
  Description of Artificial Sequence: Synthetic all nuts; inner sequence

SEQ ID NO: 32866 - DNA, 30 bp, Artificial Sequence
  Description of Artificial Sequence: Synthetic all nuts; inner sequence
gtcattccgcatcctacccgtgggcacgta

SEQ ID NO: 32867 - DNA, 30 bp, Artificial Sequence; identical to SEQ ID NO: 467
  Description of Artificial Sequence: Synthetic all nuts; inner sequence

SEQ ID NO: 32868 - DNA, 29 bp, Artificial Sequence
  Description of Artificial Sequence: Synthetic all nuts; inner sequence
gcaccgtcgatacgtcatgcacgctgaca

SEQ ID NO: 32869 - DNA, 30 bp, Artificial Sequence; identical to SEQ ID NO: 167
  Description of Artificial Sequence: Synthetic all nuts; inner sequence

SEQ ID NO: 32870 - DNA, 30 bp, Artificial Sequence; identical to SEQ ID NO: 589
  Description of Artificial Sequence: Synthetic all nuts; inner sequence

SEQ ID NO: 32871 - DNA, 30 bp, Artificial Sequence; identical to SEQ ID NO: 113
  Description of Artificial Sequence: Synthetic all nuts; inner sequence

SEQ ID NO: 32872 - DNA, 30 bp, Artificial Sequence
  Description of Artificial Sequence: Synthetic all nuts; inner sequence
gtcatgcacgaacactatcatggcgccatg

SEQ ID NO: 32873 - DNA, 30 bp, Artificial Sequence
  Description of Artificial Sequence: Synthetic all nuts; inner sequence
ccgtagcgacatcaagcggcggggtgcgtg

SEQ ID NO: 32874 - DNA, 30 bp, Artificial Sequence; identical to SEQ ID NO: 137
  Description of Artificial Sequence: Synthetic all nuts; inner sequence

SEQ ID NO: 32875 - DNA, 30 bp, Artificial Sequence; identical to SEQ ID NO: 497
  Description of Artificial Sequence: Synthetic all nuts; inner sequence

SEQ ID NO: 32876 - DNA, 30 bp, Artificial Sequence; identical to SEQ ID NO: 203
  Description of Artificial Sequence: Synthetic all nuts; inner sequence

SEQ ID NO: 32877 - DNA, 30 bp, Artificial Sequence; identical to SEQ ID NO: 834
  Description of Artificial Sequence: Synthetic all nuts; inner sequence

SEQ ID NO: 32878 - DNA, 30 bp, Artificial Sequence; identical to SEQ ID NO: 245
  Description of Artificial Sequence: Synthetic all nuts; inner sequence

SEQ ID NO: 32879 - DNA, 30 bp, Artificial Sequence; identical to SEQ ID NO: 9
  Description of Artificial Sequence: Synthetic all nuts; inner sequence

SEQ ID NO: 32880 - DNA, 30 bp, Artificial Sequence; identical to SEQ ID NO: 8816
  Description of Artificial Sequence: Synthetic all nuts; inner sequence

SEQ ID NO: 32881 - DNA, 30 bp, Artificial Sequence; identical to SEQ ID NO: 407
  Description of Artificial Sequence: Synthetic all nuts; inner sequence

SEQ ID NO: 32882 - DNA, 30 bp, Artificial Sequence; identical to SEQ ID NO: 248
  Description of Artificial Sequence: Synthetic all nuts; inner sequence

SEQ ID NO: 32883 - DNA, 30 bp, Artificial Sequence; identical to SEQ ID NO: 20151
  Description of Artificial Sequence: Synthetic all nuts; inner sequence

SEQ ID NO: 32884 - DNA, 30 bp, Artificial Sequence; identical to SEQ ID NO: 926
  Description of Artificial Sequence: Synthetic all nuts; inner sequence

SEQ ID NO: 32885 - DNA, 30 bp, Artificial Sequence; identical to SEQ ID NO: 4943
  Description of Artificial Sequence: Synthetic all nuts; inner sequence

SEQ ID NO: 32886 - DNA, 30 bp, Artificial Sequence; identical to SEQ ID NO: 4597
  Description of Artificial Sequence: Synthetic all nuts; inner sequence

SEQ ID NO: 32887 - DNA, 30 bp, Artificial Sequence; identical to SEQ ID NO: 4612
  Description of Artificial Sequence: Synthetic all nuts; inner sequence

SEQ ID NO: 32888 - DNA, 30 bp, Artificial Sequence; identical to SEQ ID NO: 138
  Description of Artificial Sequence: Synthetic all nuts; inner sequence

SEQ ID NO: 32889 - DNA, 30 bp, Artificial Sequence; identical to SEQ ID NO: 16662
  Description of Artificial Sequence: Synthetic all nuts; inner sequence

SEQ ID NO: 32890 - DNA, 30 bp, Artificial Sequence; identical to SEQ ID NO: 4775
  Description of Artificial Sequence: Synthetic all nuts; inner sequence

SEQ ID NO: 32891 - DNA, 30 bp, Artificial Sequence; identical to SEQ ID NO: 305
  Description of Artificial Sequence: Synthetic all nuts; inner sequence

SEQ ID NO: 32892 - DNA, 30 bp, Artificial Sequence; identical to SEQ ID NO: 12767
  Description of Artificial Sequence: Synthetic all nuts; inner sequence

SEQ ID NO: 32893 - DNA, 30 bp, Artificial Sequence; identical to SEQ ID NO: 24870
  Description of Artificial Sequence: Synthetic all nuts; inner sequence

SEQ ID NO: 32894 - DNA, 30 bp, Artificial Sequence; identical to SEQ ID NO: 541
  Description of Artificial Sequence: Synthetic all nuts; inner sequence

SEQ ID NO: 32895 - DNA, 30 bp, Artificial Sequence; identical to SEQ ID NO: 186
  Description of Artificial Sequence: Synthetic all nuts; inner sequence

SEQ ID NO: 32896 - DNA, 30 bp, Artificial Sequence; identical to SEQ ID NO: 285
  Description of Artificial Sequence: Synthetic all nuts; inner sequence

SEQ ID NO: 32897 - DNA, 30 bp, Artificial Sequence; identical to SEQ ID NO: 4638
  Description of Artificial Sequence: Synthetic all nuts; inner sequence

SEQ ID NO: 32898 - DNA, 30 bp, Artificial Sequence; identical to SEQ ID NO: 20773
  Description of Artificial Sequence: Synthetic all nuts; inner sequence

SEQ ID NO: 32899 - DNA, 30 bp, Artificial Sequence
  Description of Artificial Sequence: Synthetic all nuts; inner sequence
gcacgtctcgcaccctatcatgaggccatg

SEQ ID NO: 32900 - DNA, 30 bp, Artificial Sequence; identical to SEQ ID NO: 871
  Description of Artificial Sequence: Synthetic all nuts; inner sequence

SEQ ID NO: 32901 - DNA, 30 bp, Artificial Sequence; identical to SEQ ID NO: 727
  Description of Artificial Sequence: Synthetic all nuts; inner sequence

SEQ ID NO: 32902 - DNA, 30 bp, Artificial Sequence; identical to SEQ ID NO: 49
  Description of Artificial Sequence: Synthetic all nuts; inner sequence

SEQ ID NO: 32903 - DNA, 30 bp, Artificial Sequence; identical to SEQ ID NO: 101
  Description of Artificial Sequence: Synthetic all nuts; inner sequence

SEQ ID NO: 32904 - DNA, 31 bp, Artificial Sequence; identical to SEQ ID NO: 845
  Description of Artificial Sequence: Synthetic all nuts; inner sequence

SEQ ID NO: 32905 - DNA, 30 bp, Artificial Sequence; identical to SEQ ID NO: 8935
  Description of Artificial Sequence: Synthetic all nuts; inner sequence

SEQ ID NO: 32906 - DNA, 30 bp, Artificial Sequence; identical to SEQ ID NO: 980
  Description of Artificial Sequence: Synthetic all nuts; inner sequence

SEQ ID NO: 32907 - DNA, 30 bp, Artificial Sequence; identical to SEQ ID NO: 220
  Description of Artificial Sequence: Synthetic all nuts; inner sequence

SEQ ID NO: 32908 - DNA, 30 bp, Artificial Sequence; identical to SEQ ID NO: 4997
  Description of Artificial Sequence: Synthetic all nuts; inner sequence

SEQ ID NO: 32909 - DNA, 30 bp, Artificial Sequence; identical to SEQ ID NO: 823
  Description of Artificial Sequence: Synthetic all nuts; inner sequence

SEQ ID NO: 32910 - DNA, 30 bp, Artificial Sequence; identical to SEQ ID NO: 561
  Description of Artificial Sequence: Synthetic all nuts; inner sequence

SEQ ID NO: 32911 - DNA, 30 bp, Artificial Sequence; identical to SEQ ID NO: 16427
  Description of Artificial Sequence: Synthetic all nuts; inner sequence

SEQ ID NO: 32912 - DNA, 30 bp, Artificial Sequence; identical to SEQ ID NO: 4882
  Description of Artificial Sequence: Synthetic all nuts; inner sequence

SEQ ID NO: 32913 - DNA, 30 bp, Artificial Sequence
  Description of Artificial Sequence: Synthetic all nuts; inner sequence
cggtagcgacatcaagcggtggtgtgcgtg

SEQ ID NO: 32914 - DNA, 30 bp, Artificial Sequence; identical to SEQ ID NO: 4735
  Description of Artificial Sequence: Synthetic all nuts; inner sequence

SEQ ID NO: 32915 - DNA, 30 bp, Artificial Sequence; identical to SEQ ID NO: 20541
  Description of Artificial Sequence: Synthetic all nuts; inner sequence

SEQ ID NO: 32916 - DNA, 30 bp, Artificial Sequence; identical to SEQ ID NO: 79
  Description of Artificial Sequence: Synthetic all nuts; inner sequence

SEQ ID NO: 32917 - DNA, 30 bp, Artificial Sequence; identical to SEQ ID NO: 290
  Description of Artificial Sequence: Synthetic all nuts; inner sequence

SEQ ID NO: 32918 - DNA, 30 bp, Artificial Sequence
  Description of Artificial Sequence: Synthetic all nuts; inner sequence
gtcattccgcatcctacacgtgagcacgta

SEQ ID NO: 32919 - DNA, 30 bp, Artificial Sequence; identical to SEQ ID NO: 369
  Description of Artificial Sequence: Synthetic all nuts; inner sequence

SEQ ID NO: 32920 - DNA, 30 bp, Artificial Sequence; identical to SEQ ID NO: 514
  Description of Artificial Sequence: Synthetic all nuts; inner sequence

SEQ ID NO: 32921 - DNA, 30 bp, Artificial Sequence; identical to SEQ ID NO: 793
  Description of Artificial Sequence: Synthetic all nuts; inner sequence

SEQ ID NO: 32922 - DNA, 30 bp, Artificial Sequence; identical to SEQ ID NO: 20426
  Description of Artificial Sequence: Synthetic all nuts; inner sequence

SEQ ID NO: 32923 - DNA, 30 bp, Artificial Sequence; identical to SEQ ID NO: 16767
  Description of Artificial Sequence: Synthetic all nuts; inner sequence

SEQ ID NO: 32924 - DNA, 30 bp, Artificial Sequence
  Description of Artificial Sequence: Synthetic all nuts; inner sequence
gccgcatcgatcacgtatcatgtgctcatg

SEQ ID NO: 32925 - DNA, 30 bp, Artificial Sequence; identical to SEQ ID NO: 4911
  Description of Artificial Sequence: Synthetic all nuts; inner sequence

SEQ ID NO: 32926 - DNA, 30 bp, Artificial Sequence; identical to SEQ ID NO: 835
  Description of Artificial Sequence: Synthetic all nuts; inner sequence

SEQ ID NO: 32927 - DNA, 30 bp, Artificial Sequence; identical to SEQ ID NO: 20899
  Description of Artificial Sequence: Synthetic all nuts; inner sequence

SEQ ID NO: 32928 - DNA, 30 bp, Artificial Sequence; identical to SEQ ID NO: 699
  Description of Artificial Sequence: Synthetic all nuts; inner sequence

SEQ ID NO: 32929 - DNA, 30 bp, Artificial Sequence; identical to SEQ ID NO: 20915
  Description of Artificial Sequence: Synthetic all nuts; inner sequence

SEQ ID NO: 32930 - DNA, 30 bp, Artificial Sequence
  Description of Artificial Sequence: Synthetic all nuts; inner sequence
gcgcgactcgcaccctatcatgaggccatg

SEQ ID NO: 32931 - DNA, 30 bp, Artificial Sequence; identical to SEQ ID NO: 4898
  Description of Artificial Sequence: Synthetic all nuts; inner sequence

SEQ ID NO: 32932 - DNA, 30 bp, Artificial Sequence; identical to SEQ ID NO: 4451
  Description of Artificial Sequence: Synthetic all nuts; inner sequence

SEQ ID NO: 32933 - DNA, 30 bp, Artificial Sequence; identical to SEQ ID NO: 36
  Description of Artificial Sequence: Synthetic all nuts; inner sequence

SEQ ID NO: 32934 - DNA, 30 bp, Artificial Sequence; identical to SEQ ID NO: 8871
  Description of Artificial Sequence: Synthetic all nuts; inner sequence

SEQ ID NO: 32935 - DNA, 30 bp, Artificial Sequence; identical to SEQ ID NO: 4445
  Description of Artificial Sequence: Synthetic all nuts; inner sequence

SEQ ID NO: 32936 - DNA, 30 bp, Artificial Sequence; identical to SEQ ID NO: 40
  Description of Artificial Sequence: Synthetic all nuts; inner sequence

SEQ ID NO: 32937 - DNA, 29 bp, Artificial Sequence
  Description of Artificial Sequence: Synthetic all nuts; inner sequence
gtgcgcaacgaccttcacgttgtcgtgta

SEQ ID NO: 32938 - DNA, 30 bp, Artificial Sequence; identical to SEQ ID NO: 318
  Description of Artificial Sequence: Synthetic all nuts; inner sequence

SEQ ID NO: 32939 - DNA, 30 bp, Artificial Sequence; identical to SEQ ID NO: 62
  Description of Artificial Sequence: Synthetic all nuts; inner sequence

SEQ ID NO: 32940 - DNA, 30 bp, Artificial Sequence; identical to SEQ ID NO: 20594
  Description of Artificial Sequence: Synthetic all nuts; inner sequence

SEQ ID NO: 32941 - DNA, 30 bp, Artificial Sequence
  Description of Artificial Sequence: Synthetic all nuts; inner sequence
gtcattccgcatcctacacgtgcgcacgta

SEQ ID NO: 32942 - DNA, 30 bp, Artificial Sequence; identical to SEQ ID NO: 4620
  Description of Artificial Sequence: Synthetic all nuts; inner sequence

SEQ ID NO: 32943 - DNA, 30 bp, Artificial Sequence; identical to SEQ ID NO: 4650
  Description of Artificial Sequence: Synthetic all nuts; inner sequence

SEQ ID NO: 32944 - DNA, 30 bp, Artificial Sequence; identical to SEQ ID NO: 53
  Description of Artificial Sequence: Synthetic all nuts; inner sequence

SEQ ID NO: 32945 - DNA, 30 bp, Artificial Sequence; identical to SEQ ID NO: 831
  Description of Artificial Sequence: Synthetic all nuts; inner sequence

SEQ ID NO: 32946 - DNA, 30 bp, Artificial Sequence; identical to SEQ ID NO: 498
  Description of Artificial Sequence: Synthetic all nuts; inner sequence

SEQ ID NO: 32947 - DNA, 30 bp, Artificial Sequence; identical to SEQ ID NO: 282
  Description of Artificial Sequence: Synthetic all nuts; inner sequence

SEQ ID NO: 32948 - DNA, 30 bp, Artificial Sequence; identical to SEQ ID NO: 16744
  Description of Artificial Sequence: Synthetic all nuts; inner sequence

SEQ ID NO: 32949 - DNA, 30 bp, Artificial Sequence; identical to SEQ ID NO: 134
  Description of Artificial Sequence: Synthetic all nuts; inner sequence

SEQ ID NO: 32950 - DNA, 30 bp, Artificial Sequence; identical to SEQ ID NO: 57
  Description of Artificial Sequence: Synthetic all nuts; inner sequence

SEQ ID NO: 32951 - DNA, 29 bp, Artificial Sequence
  Description of Artificial Sequence: Synthetic all nuts; inner sequence
ggcatgcgatggatgtggtggtgctgtca

SEQ ID NO: 32952 - DNA, 30 bp, Artificial Sequence; identical to SEQ ID NO: 397
  Description of Artificial Sequence: Synthetic all nuts; inner sequence

SEQ ID NO: 32953 - DNA, 30 bp, Artificial Sequence; identical to SEQ ID NO: 20807
  Description of Artificial Sequence: Synthetic all nuts; inner sequence

SEQ ID NO: 32954 - DNA, 30 bp, Artificial Sequence; identical to SEQ ID NO: 437
  Description of Artificial Sequence: Synthetic all nuts; inner sequence

SEQ ID NO: 32955 - DNA, 30 bp, Artificial Sequence
  Description of Artificial Sequence: Synthetic all nuts; inner sequence
cgacacgacgagtggtgcaacgtgcaggca

SEQ ID NO: 32956 - DNA, 30 bp, Artificial Sequence; identical to SEQ ID NO: 130
  Description of Artificial Sequence: Synthetic all nuts; inner sequence

SEQ ID NO: 32957 - DNA, 30 bp, Artificial Sequence; identical to SEQ ID NO: 4940
  Description of Artificial Sequence: Synthetic all nuts; inner sequence

SEQ ID NO: 32958 - DNA, 30 bp, Artificial Sequence; identical to SEQ ID NO: 173
  Description of Artificial Sequence: Synthetic all nuts; inner sequence

SEQ ID NO: 32959 - DNA, 30 bp, Artificial Sequence; identical to SEQ ID NO: 120
  Description of Artificial Sequence: Synthetic all nuts; inner sequence

SEQ ID NO: 32960 - DNA, 30 bp, Artificial Sequence; identical to SEQ ID NO: 4611
  Description of Artificial Sequence: Synthetic all nuts; inner sequence

SEQ ID NO: 32961 - DNA, 30 bp, Artificial Sequence; identical to SEQ ID NO: 20496
  Description of Artificial Sequence: Synthetic all nuts; inner sequence

SEQ ID NO: 32962 - DNA, 30 bp, Artificial Sequence; identical to SEQ ID NO: 20801
  Description of Artificial Sequence: Synthetic all nuts; inner sequence

SEQ ID NO: 32963 - DNA, 30 bp, Artificial Sequence; identical to SEQ ID NO: 470
  Description of Artificial Sequence: Synthetic all nuts; inner sequence

SEQ ID NO: 32964 - DNA, 30 bp, Artificial Sequence; identical to SEQ ID NO: 692
  Description of Artificial Sequence: Synthetic all nuts; inner sequence

SEQ ID NO: 32965 - DNA, 30 bp, Artificial Sequence; identical to SEQ ID NO: 169
  Description of Artificial Sequence: Synthetic all nuts; inner sequence

SEQ ID NO: 32966 - DNA, 30 bp, Artificial Sequence; identical to SEQ ID NO: 28844
  Description of Artificial Sequence: Synthetic all nuts; inner sequence

SEQ ID NO: 32967 - DNA, 30 bp, Artificial Sequence; identical to SEQ ID NO: 422
  Description of Artificial Sequence: Synthetic all nuts; inner sequence

SEQ ID NO: 32968 - DNA, 30 bp, Artificial Sequence; identical to SEQ ID NO: 4401
  Description of Artificial Sequence: Synthetic all nuts; inner sequence

SEQ ID NO: 32969 - DNA, 30 bp, Artificial Sequence; identical to SEQ ID NO: 292
  Description of Artificial Sequence: Synthetic all nuts; inner sequence

SEQ ID NO: 32970 - DNA, 30 bp, Artificial Sequence; identical to SEQ ID NO: 471
  Description of Artificial Sequence: Synthetic all nuts; inner sequence

SEQ ID NO: 32971 - DNA, 30 bp, Artificial Sequence; identical to SEQ ID NO: 782
  Description of Artificial Sequence: Synthetic all nuts; inner sequence

SEQ ID NO: 32972 - DNA, 29 bp, Artificial Sequence
  Description of Artificial Sequence: Synthetic all nuts; inner sequence
ggccaagcaaccgtcaaggtggacgtgga

SEQ ID NO: 32973 - DNA, 30 bp, Artificial Sequence; identical to SEQ ID NO: 187
  Description of Artificial Sequence: Synthetic all nuts; inner sequence

SEQ ID NO: 32974 - DNA, 30 bp, Artificial Sequence; identical to SEQ ID NO: 20761
  Description of Artificial Sequence: Synthetic all nuts; inner sequence

SEQ ID NO: 32975 - DNA, 30 bp, Artificial Sequence; identical to SEQ ID NO: 601
  Description of Artificial Sequence: Synthetic all nuts; inner sequence

SEQ ID NO: 32976 - DNA, 30 bp, Artificial Sequence; identical to SEQ ID NO: 309
  Description of Artificial Sequence: Synthetic all nuts; inner sequence

SEQ ID NO: 32977 - DNA, 30 bp, Artificial Sequence; identical to SEQ ID NO: 4513
  Description of Artificial Sequence: Synthetic all nuts; inner sequence

SEQ ID NO: 32978 - DNA, 30 bp, Artificial Sequence; identical to SEQ ID NO: 20133
  Description of Artificial Sequence: Synthetic all nuts; inner sequence

SEQ ID NO: 32979 - DNA, 30 bp, Artificial Sequence; identical to SEQ ID NO: 741
  Description of Artificial Sequence: Synthetic all nuts; inner sequence

SEQ ID NO: 32980 - DNA, 30 bp, Artificial Sequence; identical to SEQ ID NO: 16531
  Description of Artificial Sequence: Synthetic all nuts; inner sequence

SEQ ID NO: 32981 - DNA, 30 bp, Artificial Sequence; identical to SEQ ID NO: 892
  Description of Artificial Sequence: Synthetic all nuts; inner sequence

SEQ ID NO: 32982 - DNA, 30 bp, Artificial Sequence; identical to SEQ ID NO: 264
  Description of Artificial Sequence: Synthetic all nuts; inner sequence

SEQ ID NO: 32983 - DNA, 30 bp, Artificial Sequence; identical to SEQ ID NO: 20478
  Description of Artificial Sequence: Synthetic all nuts; inner sequence

SEQ ID NO: 32984 - DNA, 30 bp, Artificial Sequence; identical to SEQ ID NO: 66
  Description of Artificial Sequence: Synthetic all nuts; inner sequence

SEQ ID NO: 32985 - DNA, 30 bp, Artificial Sequence; identical to SEQ ID NO: 398
  Description of Artificial Sequence: Synthetic all nuts; inner sequence

SEQ ID NO: 32986 - DNA, 30 bp, Artificial Sequence; identical to SEQ ID NO: 4651
  Description of Artificial Sequence: Synthetic all nuts; inner sequence

SEQ ID NO: 32987 - DNA, 30 bp, Artificial Sequence; identical to SEQ ID NO: 20676
  Description of Artificial Sequence: Synthetic all nuts; inner sequence

SEQ ID NO: 32988 - DNA, 30 bp, Artificial Sequence; identical to SEQ ID NO: 15
  Description of Artificial Sequence: Synthetic all nuts; inner sequence

SEQ ID NO: 32989 - DNA, 30 bp, Artificial Sequence; identical to SEQ ID NO: 16688
  Description of Artificial Sequence: Synthetic all nuts; inner sequence

SEQ ID NO: 32990 - DNA, 30 bp, Artificial Sequence; identical to SEQ ID NO: 20709
  Description of Artificial Sequence: Synthetic all nuts; inner sequence

SEQ ID NO: 32991 - DNA, 30 bp, Artificial Sequence; identical to SEQ ID NO: 459
  Description of Artificial Sequence: Synthetic all nuts; inner sequence

SEQ ID NO: 32992 - DNA, 30 bp, Artificial Sequence; identical to SEQ ID NO: 213
  Description of Artificial Sequence: Synthetic all nuts; inner sequence

SEQ ID NO: 32993 - DNA, 30 bp, Artificial Sequence; identical to SEQ ID NO: 4854
  Description of Artificial Sequence: Synthetic all nuts; inner sequence

SEQ ID NO: 32994 - DNA, 30 bp, Artificial Sequence
  Description of Artificial Sequence: Synthetic all nuts; inner sequence
ggcatggtcgtaccatcaagtaggcgtgga

SEQ ID NO: 32995 - DNA, 30 bp, Artificial Sequence; identical to SEQ ID NO: 6
  Description of Artificial Sequence: Synthetic all nuts; inner sequence

SEQ ID NO: 32996 - DNA, 30 bp, Artificial Sequence; identical to SEQ ID NO: 8910
  Description of Artificial Sequence: Synthetic all nuts; inner sequence

SEQ ID NO: 32997 - DNA, 30 bp, Artificial Sequence; identical to SEQ ID NO: 205
  Description of Artificial Sequence: Synthetic all nuts; inner sequence

SEQ ID NO: 32998 - DNA, 30 bp, Artificial Sequence; identical to SEQ ID NO: 229
  Description of Artificial Sequence: Synthetic all nuts; inner sequence

SEQ ID NO: 32999 - DNA, 30 bp, Artificial Sequence; identical to SEQ ID NO: 12889
  Description of Artificial Sequence: Synthetic all nuts; inner sequence

SEQ ID NO: 33000 - DNA, 30 bp, Artificial Sequence; identical to SEQ ID NO: 668
  Description of Artificial Sequence: Synthetic all nuts; inner sequence

SEQ ID NO: 33001 - DNA, 30 bp, Artificial Sequence; identical to SEQ ID NO: 52
  Description of Artificial Sequence: Synthetic all nuts; inner sequence

SEQ ID NO: 33002 - DNA, 30 bp, Artificial Sequence; identical to SEQ ID NO: 125
  Description of Artificial Sequence: Synthetic all nuts; inner sequence

SEQ ID NO: 33003 - DNA, 53 bp, Artificial Sequence; identical to SEQ ID NO: 21914
  Description of Artificial Sequence: Synthetic all nuts; 5' sequence and inner sequence

SEQ ID NO: 33004 - DNA, 53 bp, Artificial Sequence; identical to SEQ ID NO: 1439
  Description of Artificial Sequence: Synthetic all nuts; 5' sequence and inner sequence

SEQ ID NO: 33005 - DNA, 53 bp, Artificial Sequence; identical to SEQ ID NO: 1332
  Description of Artificial Sequence: Synthetic all nuts; 5' sequence and inner sequence

SEQ ID NO: 33006 - DNA, 53 bp, Artificial Sequence
  Description of Artificial Sequence: Synthetic all nuts; 5' sequence and inner sequence
tagggaagagaaggacatatgatgccgttcgacccctccataacgtgtgcatg

SEQ ID NO: 33007 - DNA, 53 bp, Artificial Sequence; identical to SEQ ID NO: 1486
  Description of Artificial Sequence: Synthetic all nuts; 5' sequence and inner sequence

SEQ ID NO: 33008 - DNA, 53 bp, Artificial Sequence; identical to SEQ ID NO: 1372
  Description of Artificial Sequence: Synthetic all nuts; 5' sequence and inner sequence

SEQ ID NO: 33009 - DNA, 53 bp, Artificial Sequence
  Description of Artificial Sequence: Synthetic all nuts; 5' sequence and inner sequence
tagggaagagaaggacatatgatccgatcggaccaaacgtggcattgtgctcg

SEQ ID NO: 33010 - DNA, 53 bp, Artificial Sequence
  Description of Artificial Sequence: Synthetic all nuts; 5' sequence and inner sequence
tagggaagagaaggacatatgatccatacgtacgaacgacctcaatgtgcgtc

SEQ ID NO: 33011 - DNA, 53 bp, Artificial Sequence; identical to SEQ ID NO: 1011
  Description of Artificial Sequence: Synthetic all nuts; 5' sequence and inner sequence

SEQ ID NO: 33012 - DNA, 53 bp, Artificial Sequence; identical to SEQ ID NO: 1410
  Description of Artificial Sequence: Synthetic all nuts; 5' sequence and inner sequence

SEQ ID NO: 33013 - DNA, 53 bp, Artificial Sequence; identical to SEQ ID NO: 1528
  Description of Artificial Sequence: Synthetic all nuts; 5' sequence and inner sequence

SEQ ID NO: 33014 - DNA, 53 bp, Artificial Sequence; identical to SEQ ID NO: 5872
  Description of Artificial Sequence: Synthetic all nuts; 5' sequence and inner sequence

SEQ ID NO: 33015 - DNA, 53 bp, Artificial Sequence; identical to SEQ ID NO: 1377
  Description of Artificial Sequence: Synthetic all nuts; 5' sequence and inner sequence

SEQ ID NO: 33016 - DNA, 53 bp, Artificial Sequence; identical to SEQ ID NO: 1790
  Description of Artificial Sequence: Synthetic all nuts; 5' sequence and inner sequence

SEQ ID NO: 33017 - DNA, 53 bp, Artificial Sequence; identical to SEQ ID NO: 1133
  Description of Artificial Sequence: Synthetic all nuts; 5' sequence and inner sequence

SEQ ID NO: 33018 - DNA, 53 bp, Artificial Sequence; identical to SEQ ID NO: 9884
  Description of Artificial Sequence: Synthetic all nuts; 5' sequence and inner sequence

SEQ ID NO: 33019 - DNA, 53 bp, Artificial Sequence; identical to SEQ ID NO: 1306
  Description of Artificial Sequence: Synthetic all nuts; 5' sequence and inner sequence

SEQ ID NO: 33020 - DNA, 53 bp, Artificial Sequence; identical to SEQ ID NO: 9850
  Description of Artificial Sequence: Synthetic all nuts; 5' sequence and inner sequence

SEQ ID NO: 33021 - DNA, 53 bp, Artificial Sequence; identical to SEQ ID NO: 1256
  Description of Artificial Sequence: Synthetic all nuts; 5' sequence and inner sequence

SEQ ID NO: 33022 - DNA, 53 bp, Artificial Sequence; identical to SEQ ID NO: 5739
  Description of Artificial Sequence: Synthetic all nuts; 5' sequence and inner sequence

SEQ ID NO: 33023 - DNA, 53 bp, Artificial Sequence
  Description of Artificial Sequence: Synthetic all nuts; 5' sequence and inner sequence
tagggaagagaaggacatatgatgaccgaacggacctcaatgtgtggcatgca

SEQ ID NO: 33024 - DNA, 53 bp, Artificial Sequence; identical to SEQ ID NO: 1320
  Description of Artificial Sequence: Synthetic all nuts; 5' sequence and inner sequence

SEQ ID NO: 33025 - DNA, 53 bp, Artificial Sequence; identical to SEQ ID NO: 1204
  Description of Artificial Sequence: Synthetic all nuts; 5' sequence and inner sequence

SEQ ID NO: 33026 - DNA, 53 bp, Artificial Sequence; identical to SEQ ID NO: 17824
  Description of Artificial Sequence: Synthetic all nuts; 5' sequence and inner sequence

SEQ ID NO: 33027 - DNA, 53 bp, Artificial Sequence; identical to SEQ ID NO: 1063
  Description of Artificial Sequence: Synthetic all nuts; 5' sequence and inner sequence

SEQ ID NO: 33028 - DNA, 53 bp, Artificial Sequence; identical to SEQ ID NO: 1637
  Description of Artificial Sequence: Synthetic all nuts; 5' sequence and inner sequence

SEQ ID NO: 33029 - DNA, 53 bp, Artificial Sequence; identical to SEQ ID NO: 1107
  Description of Artificial Sequence: Synthetic all nuts; 5' sequence and inner sequence

SEQ ID NO: 33030 - DNA, 53 bp, Artificial Sequence; identical to SEQ ID NO: 5807
  Description of Artificial Sequence: Synthetic all nuts; 5' sequence and inner sequence

SEQ ID NO: 33031 - DNA, 53 bp, Artificial Sequence
  Description of Artificial Sequence: Synthetic all nuts; 5' sequence and inner sequence
tagggaagagaaggacatatgatcgcaccaaccatgaggcagtgtacgtgtgt

SEQ ID NO: 33032 - DNA, 53 bp, Artificial Sequence; identical to SEQ ID NO: 17799
  Description of Artificial Sequence: Synthetic all nuts; 5' sequence and inner sequence

SEQ ID NO: 33033 - DNA, 53 bp, Artificial Sequence
  Description of Artificial Sequence: Synthetic all nuts; 5' sequence and inner sequence
tagggaagagaaggacatatgatccgtagccacatcaagcggtggtgtgcgtg

SEQ ID NO: 33034 - DNA, 53 bp, Artificial Sequence; identical to SEQ ID NO: 5503
  Description of Artificial Sequence: Synthetic all nuts; 5' sequence and inner sequence

SEQ ID NO: 33035 - DNA, 53 bp, Artificial Sequence; identical to SEQ ID NO: 1665
  Description of Artificial Sequence: Synthetic all nuts; 5' sequence and inner sequence

SEQ ID NO: 33036 - DNA, 53 bp, Artificial Sequence; identical to SEQ ID NO: 5837
  Description of Artificial Sequence: Synthetic all nuts; 5' sequence and inner sequence

SEQ ID NO: 33037 - DNA, 53 bp, Artificial Sequence; identical to SEQ ID NO: 1869
  Description of Artificial Sequence: Synthetic all nuts; 5' sequence and inner sequence

SEQ ID NO: 33038 - DNA, 53 bp, Artificial Sequence
  Description of Artificial Sequence: Synthetic all nuts; 5' sequence and inner sequence
tagggaagagaaggacatatgatcgcacgatcgtcctgccctaacgtggcgca

SEQ ID NO: 33039 - DNA, 53 bp, Artificial Sequence; identical to SEQ ID NO: 21991
  Description of Artificial Sequence: Synthetic all nuts; 5' sequence and inner sequence

SEQ ID NO: 33040 - DNA, 53 bp, Artificial Sequence; identical to SEQ ID NO: 1126
  Description of Artificial Sequence: Synthetic all nuts; 5' sequence and inner sequence

SEQ ID NO: 33041 - DNA, 53 bp, Artificial Sequence; identical to SEQ ID NO: 1945
  Description of Artificial Sequence: Synthetic all nuts; 5' sequence and inner sequence

SEQ ID NO: 33042 - DNA, 53 bp, Artificial Sequence; identical to SEQ ID NO: 1151
  Description of Artificial Sequence: Synthetic all nuts; 5' sequence and inner sequence

SEQ ID NO: 33043 - DNA, 53 bp, Artificial Sequence; identical to SEQ ID NO: 1300
  Description of Artificial Sequence: Synthetic all nuts; 5' sequence and inner sequence

SEQ ID NO: 33044 - DNA, 53 bp, Artificial Sequence; identical to SEQ ID NO: 21504
  Description of Artificial Sequence: Synthetic all nuts; 5' sequence and inner sequence

SEQ ID NO: 33045 - DNA, 53 bp, Artificial Sequence; identical to SEQ ID NO: 1556
  Description of Artificial Sequence: Synthetic all nuts; 5' sequence and inner sequence

SEQ ID NO: 33046 - DNA, 53 bp, Artificial Sequence
  Description of Artificial Sequence: Synthetic all nuts; 5' sequence and inner sequence
tagggaagagaaggacatatgatgtcattccgcatcctacacgtgggcacgtc

SEQ ID NO: 33047 - DNA, 53 bp, Artificial Sequence; identical to SEQ ID NO: 5939
  Description of Artificial Sequence: Synthetic all nuts; 5' sequence and inner sequence

SEQ ID NO: 33048 - DNA, 53 bp, Artificial Sequence; identical to SEQ ID NO: 1429
  Description of Artificial Sequence: Synthetic all nuts; 5' sequence and inner sequence

SEQ ID NO: 33049 - DNA, 53 bp, Artificial Sequence; identical to SEQ ID NO: 1255
  Description of Artificial Sequence: Synthetic all nuts; 5' sequence and inner sequence

SEQ ID NO: 33050 - DNA, 53 bp, Artificial Sequence; identical to SEQ ID NO: 1081
  Description of Artificial Sequence: Synthetic all nuts; 5' sequence and inner sequence

SEQ ID NO: 33051 - DNA, 53 bp, Artificial Sequence; identical to SEQ ID NO: 1298
  Description of Artificial Sequence: Synthetic all nuts; 5' sequence and inner sequence

SEQ ID NO: 33052 - DNA, 53 bp, Artificial Sequence; identical to SEQ ID NO: 1194
  Description of Artificial Sequence: Synthetic all nuts; 5' sequence and inner sequence

SEQ ID NO: 33053 - DNA, 53 bp, Artificial Sequence; identical to SEQ ID NO: 1035
  Description of Artificial Sequence: Synthetic all nuts; 5' sequence and inner sequence

SEQ ID NO: 33054 - DNA, 53 bp, Artificial Sequence; identical to SEQ ID NO: 21530
  Description of Artificial Sequence: Synthetic all nuts; 5' sequence and inner sequence

SEQ ID NO: 33055 - DNA, 53 bp, Artificial Sequence; identical to SEQ ID NO: 21653
  Description of Artificial Sequence: Synthetic all nuts; 5' sequence and inner sequence

SEQ ID NO: 33056 - DNA, 53 bp, Artificial Sequence; identical to SEQ ID NO: 13933
  Description of Artificial Sequence: Synthetic all nuts; 5' sequence and inner sequence

SEQ ID NO: 33057 - DNA, 53 bp, Artificial Sequence; identical to SEQ ID NO: 13869
  Description of Artificial Sequence: Synthetic all nuts; 5' sequence and inner sequence

SEQ ID NO: 33058 - DNA, 53 bp, Artificial Sequence; identical to SEQ ID NO: 5617
  Description of Artificial Sequence: Synthetic all nuts; 5' sequence and inner sequence

SEQ ID NO: 33059 - DNA, 53 bp, Artificial Sequence; identical to SEQ ID NO: 21853
  Description of Artificial Sequence: Synthetic all nuts; 5' sequence and inner sequence

SEQ ID NO: 33060 - DNA, 53 bp, Artificial Sequence; identical to SEQ ID NO: 17651
  Description of Artificial Sequence: Synthetic all nuts; 5' sequence and inner sequence

SEQ ID NO: 33061 - DNA, 53 bp, Artificial Sequence; identical to SEQ ID NO: 1226
  Description of Artificial Sequence: Synthetic all nuts; 5' sequence and inner sequence

SEQ ID NO: 33062 - DNA, 53 bp, Artificial Sequence; identical to SEQ ID NO: 29792
  Description of Artificial Sequence: Synthetic all nuts; 5' sequence and inner sequence

SEQ ID NO: 33063 - DNA, 53 bp, Artificial Sequence; identical to SEQ ID NO: 21626
  Description of Artificial Sequence: Synthetic all nuts; 5' sequence and inner sequence

SEQ ID NO: 33064 - DNA, 53 bp, Artificial Sequence; identical to SEQ ID NO: 5708
  Description of Artificial Sequence: Synthetic all nuts; 5' sequence and inner sequence

SEQ ID NO: 33065 - DNA, 53 bp, Artificial Sequence; identical to SEQ ID NO: 1791
  Description of Artificial Sequence: Synthetic all nuts; 5' sequence and inner sequence

SEQ ID NO: 33066 - DNA, 53 bp, Artificial Sequence; identical to SEQ ID NO: 21514
  Description of Artificial Sequence: Synthetic all nuts; 5' sequence and inner sequence

SEQ ID NO: 33067 - DNA, 53 bp, Artificial Sequence; identical to SEQ ID NO: 21944
  Description of Artificial Sequence: Synthetic all nuts; 5' sequence and inner sequence

SEQ ID NO: 33068 - DNA, 53 bp, Artificial Sequence; identical to SEQ ID NO: 5301
  Description of Artificial Sequence: Synthetic all nuts; 5' sequence and inner sequence

SEQ ID NO: 33069 - DNA, 53 bp, Artificial Sequence; identical to SEQ ID NO: 1887
  Description of Artificial Sequence: Synthetic all nuts; 5' sequence and inner sequence

SEQ ID NO: 33070 - DNA, 53 bp, Artificial Sequence; identical to SEQ ID NO: 1208
  Description of Artificial Sequence: Synthetic all nuts; 5' sequence and inner sequence

SEQ ID NO: 33071 - DNA, 53 bp, Artificial Sequence; identical to SEQ ID NO: 1399
  Description of Artificial Sequence: Synthetic all nuts; 5' sequence and inner sequence

SEQ ID NO: 33072 - DNA, 53 bp, Artificial Sequence; identical to SEQ ID NO: 1161
  Description of Artificial Sequence: Synthetic all nuts; 5' sequence and inner sequence

SEQ ID NO: 33073 - DNA, 53 bp, Artificial Sequence; identical to SEQ ID NO: 21698
  Description of Artificial Sequence: Synthetic all nuts; 5' sequence and inner sequence

SEQ ID NO: 33074 - DNA, 53 bp, Artificial Sequence
  Description of Artificial Sequence: Synthetic all nuts; 5' sequence and inner sequence
tagggaagagaaggacatatgatggcatgctatgaacgaggcatgatgcgtca

SEQ ID NO: 33075 - DNA, 53 bp, Artificial Sequence; identical to SEQ ID NO: 21668
  Description of Artificial Sequence: Synthetic all nuts; 5' sequence and inner sequence

SEQ ID NO: 33076 - DNA, 53 bp, Artificial Sequence; identical to SEQ ID NO: 1267
  Description of Artificial Sequence: Synthetic all nuts; 5' sequence and inner sequence

SEQ ID NO: 33077 - DNA, 53 bp, Artificial Sequence; identical to SEQ ID NO: 1811
  Description of Artificial Sequence: Synthetic all nuts; 5' sequence and inner sequence

SEQ ID NO: 33078 - DNA, 53 bp, Artificial Sequence; identical to SEQ ID NO: 1179
  Description of Artificial Sequence: Synthetic all nuts; 5' sequence and inner sequence

SEQ ID NO: 33079 - DNA, 53 bp, Artificial Sequence
  Description of Artificial Sequence: Synthetic all nuts; 5' sequence and inner sequence
tagggaagagaaggacatatgatccgtagcgacatcaagcggtgatgtgcgtg

SEQ ID NO: 33080 - DNA, 53 bp, Artificial Sequence; identical to SEQ ID NO: 21897
  Description of Artificial Sequence: Synthetic all nuts; 5' sequence and inner sequence

SEQ ID NO: 33081 - DNA, 53 bp, Artificial Sequence; identical to SEQ ID NO: 1269
  Description of Artificial Sequence: Synthetic all nuts; 5' sequence and inner sequence

SEQ ID NO: 33082 - DNA, 53 bp, Artificial Sequence; identical to SEQ ID NO: 1496
  Description of Artificial Sequence: Synthetic all nuts; 5' sequence and inner sequence

SEQ ID NO: 33083 - DNA, 53 bp, Artificial Sequence; identical to SEQ ID NO: 5755
  Description of Artificial Sequence: Synthetic all nuts; 5' sequence and inner sequence

SEQ ID NO: 33084 - DNA, 53 bp, Artificial Sequence
  Description of Artificial Sequence: Synthetic all nuts; 5' sequence and inner sequence
tagggaagagaaggacatatgatgtcatgcccgaacactatcatggcggcatg

SEQ ID NO: 33085 - DNA, 53 bp, Artificial Sequence; identical to SEQ ID NO: 1530
  Description of Artificial Sequence: Synthetic all nuts; 5' sequence and inner sequence

SEQ ID NO: 33086 - DNA, 53 bp, Artificial Sequence; identical to SEQ ID NO: 1424
  Description of Artificial Sequence: Synthetic all nuts; 5' sequence and inner sequence

SEQ ID NO: 33087 - DNA, 53 bp, Artificial Sequence
  Description of Artificial Sequence: Synthetic all nuts; 5' sequence and inner sequence
tagggaagagaaggacatatgatccgtagcgacatcaagcggtggtgtccgtg

SEQ ID NO: 33088 - DNA, 53 bp, Artificial Sequence; identical to SEQ ID NO: 1506
  Description of Artificial Sequence: Synthetic all nuts; 5' sequence and inner sequence

SEQ ID NO: 33089 - DNA, 53 bp, Artificial Sequence; identical to SEQ ID NO: 1344
  Description of Artificial Sequence: Synthetic all nuts; 5' sequence and inner sequence

SEQ ID NO: 33090 - DNA, 53 bp, Artificial Sequence
  Description of Artificial Sequence: Synthetic all nuts; 5' sequence and inner sequence
tagggaagagaaggacatatgatcgcaccgcatgtcacgtcagtccgccagtg

SEQ ID NO: 33091 - DNA, 52 bp, Artificial Sequence; identical to SEQ ID NO: 1549
  Description of Artificial Sequence: Synthetic all nuts; 5' sequence and inner sequence

SEQ ID NO: 33092 - DNA, 53 bp, Artificial Sequence; identical to SEQ ID NO: 1343
  Description of Artificial Sequence: Synthetic all nuts; 5' sequence and inner sequence

SEQ ID NO: 33093 - DNA, 53 bp, Artificial Sequence; identical to SEQ ID NO: 1114
  Description of Artificial Sequence: Synthetic all nuts; 5' sequence and inner sequence

SEQ ID NO: 33094 - DNA, 53 bp, Artificial Sequence
  Description of Artificial Sequence: Synthetic all nuts; 5' sequence and inner sequence
tagggaagagaaggacatatgatccgtagcgacatcaagcggtggtgtgcgca

SEQ ID NO: 33095 - DNA, 53 bp, Artificial Sequence; identical to SEQ ID NO: 21730
  Description of Artificial Sequence: Synthetic all nuts; 5' sequence and inner sequence

SEQ ID NO: 33096 - DNA, 53 bp, Artificial Sequence
  Description of Artificial Sequence: Synthetic all nuts; 5' sequence and inner sequence
tagggaagagaaggacatatgatcgcatgggacgtactgaccgtatcgtgtca

SEQ ID NO: 33097 - DNA, 48 bp, Artificial Sequence; identical to SEQ ID NO: 21136
  Description of Artificial Sequence: Synthetic all nuts; 5' sequence and inner sequence

SEQ ID NO: 33098 - DNA, 53 bp, Artificial Sequence; identical to SEQ ID NO: 1597
  Description of Artificial Sequence: Synthetic all nuts; 5' sequence and inner sequence

SEQ ID NO: 33099 - DNA, 53 bp, Artificial Sequence; identical to SEQ ID NO: 1491
  Description of Artificial Sequence: Synthetic all nuts; 5' sequence and inner sequence

SEQ ID NO: 33100 - DNA, 53 bp, Artificial Sequence; identical to SEQ ID NO: 1780
  Description of Artificial Sequence: Synthetic all nuts; 5' sequence and inner sequence

SEQ ID NO: 33101 - DNA, 53 bp, Artificial Sequence; identical to SEQ ID NO: 5776
  Description of Artificial Sequence: Synthetic all nuts; 5' sequence and inner sequence

SEQ ID NO: 33102 - DNA, 49 bp, Artificial Sequence; identical to SEQ ID NO: 21678
  Description of Artificial Sequence: Synthetic all nuts; 5' sequence and inner sequence

SEQ ID NO: 33103 - DNA, 53 bp, Artificial Sequence; identical to SEQ ID NO: 21882
  Description of Artificial Sequence: Synthetic all nuts; 5' sequence and inner sequence

SEQ ID NO: 33104 - DNA, 53 bp, Artificial Sequence; identical to SEQ ID NO: 1146
  Description of Artificial Sequence: Synthetic all nuts; 5' sequence and inner sequence

SEQ ID NO: 33105 - DNA, 53 bp, Artificial Sequence; identical to SEQ ID NO: 1443
  Description of Artificial Sequence: Synthetic all nuts; 5' sequence and inner sequence

SEQ ID NO: 33106 - DNA, 53 bp, Artificial Sequence; identical to SEQ ID NO: 1746
  Description of Artificial Sequence: Synthetic all nuts; 5' sequence and inner sequence

SEQ ID NO: 33107 - DNA, 53 bp, Artificial Sequence; identical to SEQ ID NO: 21720
  Description of Artificial Sequence: Synthetic all nuts; 5' sequence and inner sequence

SEQ ID NO: 33108 - DNA, 53 bp, Artificial Sequence
  Description of Artificial Sequence: Synthetic all nuts; 5' sequence and inner sequence
tagggaagagaaggacatatgatccgtcgaggcacgtgacagtgggcttagcg

SEQ ID NO: 33109 - DNA, 53 bp, Artificial Sequence; identical to SEQ ID NO: 5792
  Description of Artificial Sequence: Synthetic all nuts; 5' sequence and inner sequence

SEQ ID NO: 33110 - DNA, 53 bp, Artificial Sequence; identical to SEQ ID NO: 1359
  Description of Artificial Sequence: Synthetic all nuts; 5' sequence and inner sequence

SEQ ID NO: 33111 - DNA, 53 bp, Artificial Sequence; identical to SEQ ID NO: 21363
  Description of Artificial Sequence: Synthetic all nuts; 5' sequence and inner sequence

SEQ ID NO: 33112 - DNA, 53 bp, Artificial Sequence; identical to SEQ ID NO: 1340
  Description of Artificial Sequence: Synthetic all nuts; 5' sequence and inner sequence

SEQ ID NO: 33113 - DNA, 53 bp, Artificial Sequence; identical to SEQ ID NO: 5713
  Description of Artificial Sequence: Synthetic all nuts; 5' sequence and inner sequence

SEQ ID NO: 33114 - DNA, 53 bp, Artificial Sequence; identical to SEQ ID NO: 1093
  Description of Artificial Sequence: Synthetic all nuts; 5' sequence and inner sequence

SEQ ID NO: 33115 - DNA, 53 bp, Artificial Sequence; identical to SEQ ID NO: 1788
  Description of Artificial Sequence: Synthetic all nuts; 5' sequence and inner sequence

SEQ ID NO: 33116 - DNA, 53 bp, Artificial Sequence; identical to SEQ ID NO: 1031
  Description of Artificial Sequence: Synthetic all nuts; 5' sequence and inner sequence

SEQ ID NO: 33117 - DNA, 53 bp, Artificial Sequence; identical to SEQ ID NO: 5642
  Description of Artificial Sequence: Synthetic all nuts; 5' sequence and inner sequence

SEQ ID NO: 33118 - DNA, 53 bp, Artificial Sequence; identical to SEQ ID NO: 1073
  Description of Artificial Sequence: Synthetic all nuts; 5' sequence and inner sequence

SEQ ID NO: 33119 - DNA, 53 bp, Artificial Sequence; identical to SEQ ID NO: 1485
  Description of Artificial Sequence: Synthetic all nuts; 5' sequence and inner sequence

SEQ ID NO: 33120 - DNA, 53 bp, Artificial Sequence; identical to SEQ ID NO: 1026
  Description of Artificial Sequence: Synthetic all nuts; 5' sequence and inner sequence

SEQ ID NO: 33121 - DNA, 53 bp, Artificial Sequence; identical to SEQ ID NO: 1630
  Description of Artificial Sequence: Synthetic all nuts; 5' sequence and inner sequence

SEQ ID NO: 33122 - DNA, 53 bp, Artificial Sequence; identical to SEQ ID NO: 6002
  Description of Artificial Sequence: Synthetic all nuts; 5' sequence and inner sequence

SEQ ID NO: 33123 - DNA, 53 bp, Artificial Sequence; identical to SEQ ID NO: 29574
  Description of Artificial Sequence: Synthetic all nuts; 5' sequence and inner sequence

SEQ ID NO: 33124 - DNA, 53 bp, Artificial Sequence; identical to SEQ ID NO: 1294
  Description of Artificial Sequence: Synthetic all nuts; 5' sequence and inner sequence

SEQ ID NO: 33125 - DNA, 53 bp, Artificial Sequence; identical to SEQ ID NO: 1490
  Description of Artificial Sequence: Synthetic all nuts; 5' sequence and inner sequence

SEQ ID NO: 33126 - DNA, 53 bp, Artificial Sequence; identical to SEQ ID NO: 1771
  Description of Artificial Sequence: Synthetic all nuts; 5' sequence and inner sequence

SEQ ID NO: 33127 - DNA, 53 bp, Artificial Sequence; identical to SEQ ID NO: 29791
  Description of Artificial Sequence: Synthetic all nuts; 5' sequence and inner sequence

SEQ ID NO: 33128 - DNA, 53 bp, Artificial Sequence; identical to SEQ ID NO: 1117
  Description of Artificial Sequence: Synthetic all nuts; 5' sequence and inner sequence

SEQ ID NO: 33129 - DNA, 53 bp, Artificial Sequence
  Description of Artificial Sequence: Synthetic all nuts; 5' sequence and inner sequence
tagggaagagaaggacatatgatcgaccgagtcagggacgatgcgacgtcacg

SEQ ID NO: 33130 - DNA, 53 bp, Artificial Sequence; identical to SEQ ID NO: 1487
  Description of Artificial Sequence: Synthetic all nuts; 5' sequence and inner sequence

SEQ ID NO: 33131 - DNA, 53 bp, Artificial Sequence; identical to SEQ ID NO: 1071
  Description of Artificial Sequence: Synthetic all nuts; 5' sequence and inner sequence

SEQ ID NO: 33132 - DNA, 53 bp, Artificial Sequence; identical to SEQ ID NO: 1463
  Description of Artificial Sequence: Synthetic all nuts; 5' sequence and inner sequence

SEQ ID NO: 33133 - DNA, 53 bp, Artificial Sequence; identical to SEQ ID NO: 13936
  Description of Artificial Sequence: Synthetic all nuts; 5' sequence and inner sequence

SEQ ID NO: 33134 - DNA, 53 bp, Artificial Sequence; identical to SEQ ID NO: 17342
  Description of Artificial Sequence: Synthetic all nuts; 5' sequence and inner sequence

SEQ ID NO: 33135 - DNA, 53 bp, Artificial Sequence; identical to SEQ ID NO: 1840
  Description of Artificial Sequence: Synthetic all nuts; 5' sequence and inner sequence

SEQ ID NO: 33136 - DNA, 53 bp, Artificial Sequence
  Description of Artificial Sequence: Synthetic all nuts; 5' sequence and inner sequence
tagggaagagaaggacatatgatgtcatgcaagaacactatcatggcggcatg

SEQ ID NO: 33137 - DNA, 53 bp, Artificial Sequence; identical to SEQ ID NO: 1176
  Description of Artificial Sequence: Synthetic all nuts; 5' sequence and inner sequence

SEQ ID NO: 33138 - DNA, 53 bp, Artificial Sequence; identical to SEQ ID NO: 1005
  Description of Artificial Sequence: Synthetic all nuts; 5' sequence and inner sequence

SEQ ID NO: 33139 - DNA, 53 bp, Artificial Sequence; identical to SEQ ID NO: 1860
  Description of Artificial Sequence: Synthetic all nuts; 5' sequence and inner sequence

SEQ ID NO: 33140 - DNA, 53 bp, Artificial Sequence; identical to SEQ ID NO: 1379
  Description of Artificial Sequence: Synthetic all nuts; 5' sequence and inner sequence

SEQ ID NO: 33141 - DNA, 53 bp, Artificial Sequence; identical to SEQ ID NO: 1919
  Description of Artificial Sequence: Synthetic all nuts; 5' sequence and inner sequence

SEQ ID NO: 33142 - DNA, 53 bp, Artificial Sequence; identical to SEQ ID NO: 13985
  Description of Artificial Sequence: Synthetic all nuts; 5' sequence and inner sequence

SEQ ID NO: 33143 - DNA, 48 bp, Artificial Sequence; identical to SEQ ID NO: 1427
  Description of Artificial Sequence: Synthetic all nuts; 5' sequence and inner sequence

SEQ ID NO: 33144 - DNA, 53 bp, Artificial Sequence; identical to SEQ ID NO: 1764
  Description of Artificial Sequence: Synthetic all nuts; 5' sequence and inner sequence

SEQ ID NO: 33145 - DNA, 53 bp, Artificial Sequence; identical to SEQ ID NO: 17768
  Description of Artificial Sequence: Synthetic all nuts; 5' sequence and inner sequence

SEQ ID NO: 33146 - DNA, 53 bp, Artificial Sequence; identical to SEQ ID NO: 1381
  Description of Artificial Sequence: Synthetic all nuts; 5' sequence and inner sequence

SEQ ID NO: 33147 - DNA, 53 bp, Artificial Sequence; identical to SEQ ID NO: 1270
  Description of Artificial Sequence: Synthetic all nuts; 5' sequence and inner sequence

SEQ ID NO: 33148 - DNA, 53 bp, Artificial Sequence; identical to SEQ ID NO: 1355
  Description of Artificial Sequence: Synthetic all nuts; 5' sequence and inner sequence

SEQ ID NO: 33149 - DNA, 53 bp, Artificial Sequence; identical to SEQ ID NO: 1155
  Description of Artificial Sequence: Synthetic all nuts; 5' sequence and inner sequence

SEQ ID NO: 33150 - DNA, 53 bp, Artificial Sequence; identical to SEQ ID NO: 1628
  Description of Artificial Sequence: Synthetic all nuts; 5' sequence and inner sequence

SEQ ID NO: 33151 - DNA, 53 bp, Artificial Sequence; identical to SEQ ID NO: 1646
  Description of Artificial Sequence: Synthetic all nuts; 5' sequence and inner sequence

SEQ ID NO: 33152 - DNA, 53 bp, Artificial Sequence; identical to SEQ ID NO: 1632
  Description of Artificial Sequence: Synthetic all nuts; 5' sequence and inner sequence

SEQ ID NO: 33153 - DNA, 53 bp, Artificial Sequence; identical to SEQ ID NO: 1389
  Description of Artificial Sequence: Synthetic all nuts; 5' sequence and inner sequence

SEQ ID NO: 33154 - DNA, 53 bp, Artificial Sequence; identical to SEQ ID NO: 1955
  Description of Artificial Sequence: Synthetic all nuts; 5' sequence and inner sequence

SEQ ID NO: 33155 - DNA, 53 bp, Artificial Sequence; identical to SEQ ID NO: 5590
  Description of Artificial Sequence: Synthetic all nuts; 5' sequence and inner sequence

SEQ ID NO: 33156 - DNA, 53 bp, Artificial Sequence; identical to SEQ ID NO: 9926
  Description of Artificial Sequence: Synthetic all nuts; 5' sequence and inner sequence

SEQ ID NO: 33157 - DNA, 53 bp, Artificial Sequence; identical to SEQ ID NO: 1045
  Description of Artificial Sequence: Synthetic all nuts; 5' sequence and inner sequence

SEQ ID NO: 33158 - DNA, 53 bp, Artificial Sequence; identical to SEQ ID NO: 1400
  Description of Artificial Sequence: Synthetic all nuts; 5' sequence and inner sequence

SEQ ID NO: 33159 - DNA, 53 bp, Artificial Sequence; identical to SEQ ID NO: 21693
  Description of Artificial Sequence: Synthetic all nuts; 5' sequence and inner sequence

SEQ ID NO: 33160 - DNA, 53 bp, Artificial Sequence; identical to SEQ ID NO: 1141
  Description of Artificial Sequence: Synthetic all nuts; 5' sequence and inner sequence

SEQ ID NO: 33161 - DNA, 52 bp, Artificial Sequence; identical to SEQ ID NO: 5559
  Description of Artificial Sequence: Synthetic all nuts; 5' sequence and inner sequence

SEQ ID NO: 33162 - DNA, 53 bp, Artificial Sequence
  Description of Artificial Sequence: Synthetic all nuts; 5' sequence and inner sequence
tagggaagagaaggacatatgattgcgtaccgagctgacctatcagtgtgtcg

SEQ ID NO: 33163 - DNA, 53 bp, Artificial Sequence; identical to SEQ ID NO: 1098
  Description of Artificial Sequence: Synthetic all nuts; 5' sequence and inner sequence

SEQ ID NO: 33164 - DNA, 53 bp, Artificial Sequence; identical to SEQ ID NO: 17692
  Description of Artificial Sequence: Synthetic all nuts; 5' sequence and inner sequence

SEQ ID NO: 33165 - DNA, 53 bp, Artificial Sequence; identical to SEQ ID NO: 1376
  Description of Artificial Sequence: Synthetic all nuts; 5' sequence and inner sequence

SEQ ID NO: 33166 - DNA, 53 bp, Artificial Sequence
  Description of Artificial Sequence: Synthetic all nuts; 5' sequence and inner sequence
tagggaagagaaggacatatgatgtacgcaacgaacctacgagtgatcgtgta

SEQ ID NO: 33167 - DNA, 53 bp, Artificial Sequence
  Description of Artificial Sequence: Synthetic all nuts; 5' sequence and inner sequence
tagggaagagaaggacatatgatgacgcgaacttgcctcaagtgtgccgtgga

SEQ ID NO: 33168 - DNA, 53 bp, Artificial Sequence; identical to SEQ ID NO: 1075
  Description of Artificial Sequence: Synthetic all nuts; 5' sequence and inner sequence

SEQ ID NO: 33169 - DNA, 53 bp, Artificial Sequence; identical to SEQ ID NO: 1157
  Description of Artificial Sequence: Synthetic all nuts; 5' sequence and inner sequence

SEQ ID NO: 33170 - DNA, 53 bp, Artificial Sequence; identical to SEQ ID NO: 1567
  Description of Artificial Sequence: Synthetic all nuts; 5' sequence and inner sequence

SEQ ID NO: 33171 - DNA, 53 bp, Artificial Sequence; identical to SEQ ID NO: 5610
  Description of Artificial Sequence: Synthetic all nuts; 5' sequence and inner sequence

SEQ ID NO: 33172 - DNA, 53 bp, Artificial Sequence; identical to SEQ ID NO: 5845
  Description of Artificial Sequence: Synthetic all nuts; 5' sequence and inner sequence

SEQ ID NO: 33173 - DNA, 53 bp, Artificial Sequence; identical to SEQ ID NO: 5742
  Description of Artificial Sequence: Synthetic all nuts; 5' sequence and inner sequence

SEQ ID NO: 33174 - DNA, 53 bp, Artificial Sequence; identical to SEQ ID NO: 1069
  Description of Artificial Sequence: Synthetic all nuts; 5' sequence and inner sequence

SEQ ID NO: 33175 - DNA, 53 bp, Artificial Sequence
  Description of Artificial Sequence: Synthetic all nuts; 5' sequence and inner sequence
tagggaagagaaggacatatgatgtacgcgcgacacctatcaatgtggacgtg

SEQ ID NO: 33176 - DNA, 53 bp, Artificial Sequence; identical to SEQ ID NO: 9953
  Description of Artificial Sequence: Synthetic all nuts; 5' sequence and inner sequence

SEQ ID NO: 33177 - DNA, 54 bp, Artificial Sequence; identical to SEQ ID NO: 21717
  Description of Artificial Sequence: Synthetic all nuts; 5' sequence and inner sequence

SEQ ID NO: 33178 - DNA, 54 bp, Artificial Sequence; identical to SEQ ID NO: 5245
  Description of Artificial Sequence: Synthetic all nuts; 5' sequence and inner sequence

SEQ ID NO: 33179 - DNA, 53 bp, Artificial Sequence; identical to SEQ ID NO: 9860
  Description of Artificial Sequence: Synthetic all nuts; 5' sequence and inner sequence

SEQ ID NO: 33180 - DNA, 53 bp, Artificial Sequence; identical to SEQ ID NO: 1103
  Description of Artificial Sequence: Synthetic all nuts; 5' sequence and inner sequence

SEQ ID NO: 33181 - DNA, 53 bp, Artificial Sequence; identical to SEQ ID NO: 1655
  Description of Artificial Sequence: Synthetic all nuts; 5' sequence and inner sequence

SEQ ID NO: 33182 - DNA, 53 bp, Artificial Sequence; identical to SEQ ID NO: 1143
  Description of Artificial Sequence: Synthetic all nuts; 5' sequence and inner sequence

SEQ ID NO: 33183 - DNA, 53 bp, Artificial Sequence; identical to SEQ ID NO: 9971
  Description of Artificial Sequence: Synthetic all nuts; 5' sequence and inner sequence

SEQ ID NO: 33184 - DNA, 53 bp, Artificial Sequence; identical to SEQ ID NO: 9770
  Description of Artificial Sequence: Synthetic all nuts; 5' sequence and inner sequence

SEQ ID NO: 33185 - DNA, 53 bp, Artificial Sequence; identical to SEQ ID NO: 1109
  Description of Artificial Sequence: Synthetic all nuts; 5' sequence and inner sequence

SEQ ID NO: 33186 - DNA, 53 bp, Artificial Sequence; identical to SEQ ID NO: 1460
  Description of Artificial Sequence: Synthetic all nuts; 5' sequence and inner sequence

SEQ ID NO: 33187 - DNA, 53 bp, Artificial Sequence; identical to SEQ ID NO: 21736
  Description of Artificial Sequence: Synthetic all nuts; 5' sequence and inner sequence

SEQ ID NO: 33188 - DNA, 53 bp, Artificial Sequence; identical to SEQ ID NO: 1108
  Description of Artificial Sequence: Synthetic all nuts; 5' sequence and inner sequence

SEQ ID NO: 33189 - DNA, 53 bp, Artificial Sequence; identical to SEQ ID NO: 17810
  Description of Artificial Sequence: Synthetic all nuts; 5' sequence and inner sequence

SEQ ID NO: 33190 - DNA, 53 bp, Artificial Sequence
  Description of Artificial Sequence: Synthetic all nuts; 5' sequence and inner sequence
tagggaagagaaggacatatgatgtcattccacatcctacacgtgggcacgta

SEQ ID NO: 33191 - DNA, 53 bp, Artificial Sequence
  Description of Artificial Sequence: Synthetic all nuts; 5' sequence and inner sequence
tagggaagagaaggacatatgatgcgagacaacgcgaaccgttccgatgcacg

SEQ ID NO: 33192 - DNA, 53 bp, Artificial Sequence
  Description of Artificial Sequence: Synthetic all nuts; 5' sequence and inner sequence
tagggaagagaaggacatatgatacgtcacgcgcataccaccttggctgcgtg

SEQ ID NO: 33193 - DNA, 53 bp, Artificial Sequence
  Description of Artificial Sequence: Synthetic all nuts; 5' sequence and inner sequence
tagggaagagaaggacatatgatgtcattccgcatcctacacgtgggcccgta

SEQ ID NO: 33194 - DNA, 53 bp, Artificial Sequence; identical to SEQ ID NO: 1867
  Description of Artificial Sequence: Synthetic all nuts; 5' sequence and inner sequence

SEQ ID NO: 33195 - DNA, 53 bp, Artificial Sequence; identical to SEQ ID NO: 9722
  Description of Artificial Sequence: Synthetic all nuts; 5' sequence and inner sequence

SEQ ID NO: 33196 - DNA, 53 bp, Artificial Sequence; identical to SEQ ID NO: 1041
  Description of Artificial Sequence: Synthetic all nuts; 5' sequence and inner sequence

SEQ ID NO: 33197 - DNA, 53 bp, Artificial Sequence; identical to SEQ ID NO: 9798
  Description of Artificial Sequence: Synthetic all nuts; 5' sequence and inner sequence

SEQ ID NO: 33198 - DNA, 53 bp, Artificial Sequence; identical to SEQ ID NO: 1608
  Description of Artificial Sequence: Synthetic all nuts; 5' sequence and inner sequence

SEQ ID NO: 33199 - DNA, 53 bp, Artificial Sequence; identical to SEQ ID NO: 9826
  Description of Artificial Sequence: Synthetic all nuts; 5' sequence and inner sequence

SEQ ID NO: 33200 - DNA, 53 bp, Artificial Sequence; identical to SEQ ID NO: 1287
  Description of Artificial Sequence: Synthetic all nuts; 5' sequence and inner sequence

SEQ ID NO: 33201 - DNA, 53 bp, Artificial Sequence; identical to SEQ ID NO: 1299
  Description of Artificial Sequence: Synthetic all nuts; 5' sequence and inner sequence

SEQ ID NO: 33202 - DNA, 53 bp, Artificial Sequence; identical to SEQ ID NO: 21721
  Description of Artificial Sequence: Synthetic all nuts; 5' sequence and inner sequence

SEQ ID NO: 33203 - DNA, 53 bp, Artificial Sequence; identical to SEQ ID NO: 1191
  Description of Artificial Sequence: Synthetic all nuts; 5' sequence and inner sequence

SEQ ID NO: 33204 - DNA, 53 bp, Artificial Sequence; identical to SEQ ID NO: 29722
  Description of Artificial Sequence: Synthetic all nuts; 5' sequence and inner sequence

SEQ ID NO: 33205 - DNA, 53 bp, Artificial Sequence; identical to SEQ ID NO: 13700
  Description of Artificial Sequence: Synthetic all nuts; 5' sequence and inner sequence

SEQ ID NO: 33206 - DNA, 53 bp, Artificial Sequence; identical to SEQ ID NO: 21570
  Description of Artificial Sequence: Synthetic all nuts; 5' sequence and inner sequence

SEQ ID NO: 33207 - DNA, 53 bp, Artificial Sequence; identical to SEQ ID NO: 17457
  Description of Artificial Sequence: Synthetic all nuts; 5' sequence and inner sequence

SEQ ID NO: 33208 - DNA, 52 bp, Artificial Sequence; identical to SEQ ID NO: 1453
  Description of Artificial Sequence: Synthetic all nuts; 5' sequence and inner sequence

SEQ ID NO: 33209 - DNA, 53 bp, Artificial Sequence
  Description of Artificial Sequence: Synthetic all nuts; 5' sequence and inner sequence
tagggaagagaaggacatatgatggatgacgctaccctacacgtgggcacgta

SEQ ID NO: 33210 - DNA, 53 bp, Artificial Sequence; identical to SEQ ID NO: 1479
  Description of Artificial Sequence: Synthetic all nuts; 5' sequence and inner sequence

SEQ ID NO: 33211 - DNA, 53 bp, Artificial Sequence; identical to SEQ ID NO: 21949
  Description of Artificial Sequence: Synthetic all nuts; 5' sequence and inner sequence

SEQ ID NO: 33212 - DNA, 53 bp, Artificial Sequence; identical to SEQ ID NO: 1177
  Description of Artificial Sequence: Synthetic all nuts; 5' sequence and inner sequence

SEQ ID NO: 33213 - DNA, 53 bp, Artificial Sequence; identical to SEQ ID NO: 1673
  Description of Artificial Sequence: Synthetic all nuts; 5' sequence and inner sequence

SEQ ID NO: 33214 - DNA, 53 bp, Artificial Sequence; identical to SEQ ID NO: 1950
  Description of Artificial Sequence: Synthetic all nuts; 5' sequence and inner sequence

SEQ ID NO: 33215 - DNA, 53 bp, Artificial Sequence; identical to SEQ ID NO: 1775
  Description of Artificial Sequence: Synthetic all nuts; 5' sequence and inner sequence

SEQ ID NO: 33216 - DNA, 53 bp, Artificial Sequence
  Description of Artificial Sequence: Synthetic all nuts; 5' sequence and inner sequence
tagggaagagaaggacatatgatcgtaccgacagggacatgcaccgtgtcgca

SEQ ID NO: 33217 - DNA, 53 bp, Artificial Sequence; identical to SEQ ID NO: 1279
  Description of Artificial Sequence: Synthetic all nuts; 5' sequence and inner sequence

SEQ ID NO: 33218 - DNA, 53 bp, Artificial Sequence; identical to SEQ ID NO: 5774
  Description of Artificial Sequence: Synthetic all nuts; 5' sequence and inner sequence

SEQ ID NO: 33219 - DNA, 53 bp, Artificial Sequence; identical to SEQ ID NO: 1807
  Description of Artificial Sequence: Synthetic all nuts; 5' sequence and inner sequence

SEQ ID NO: 33220 - DNA, 53 bp, Artificial Sequence; identical to SEQ ID NO: 21528
  Description of Artificial Sequence: Synthetic all nuts; 5' sequence and inner sequence

SEQ ID NO: 33221 - DNA, 53 bp, Artificial Sequence; identical to SEQ ID NO: 21817
  Description of Artificial Sequence: Synthetic all nuts; 5' sequence and inner sequence

SEQ ID NO: 33222 - DNA, 53 bp, Artificial Sequence; identical to SEQ ID NO: 1800
  Description of Artificial Sequence: Synthetic all nuts; 5' sequence and inner sequence

SEQ ID NO: 33223 - DNA, 53 bp, Artificial Sequence; identical to SEQ ID NO: 1132
  Description of Artificial Sequence: Synthetic all nuts; 5' sequence and inner sequence

SEQ ID NO: 33224 - DNA, 53 bp, Artificial Sequence; identical to SEQ ID NO: 1159
  Description of Artificial Sequence: Synthetic all nuts; 5' sequence and inner sequence

SEQ ID NO: 33225 - DNA, 52 bp, Artificial Sequence; identical to SEQ ID NO: 1873
  Description of Artificial Sequence: Synthetic all nuts; 5' sequence and inner sequence

SEQ ID NO: 33226 - DNA, 53 bp, Artificial Sequence; identical to SEQ ID NO: 1568
  Description of Artificial Sequence: Synthetic all nuts; 5' sequence and inner sequence

SEQ ID NO: 33227 - DNA, 53 bp, Artificial Sequence; identical to SEQ ID NO: 1984
  Description of Artificial Sequence: Synthetic all nuts; 5' sequence and inner sequence

SEQ ID NO: 33228 - DNA, 53 bp, Artificial Sequence; identical to SEQ ID NO: 5653
  Description of Artificial Sequence: Synthetic all nuts; 5' sequence and inner sequence

SEQ ID NO: 33229 - DNA, 53 bp, Artificial Sequence; identical to SEQ ID NO: 21753
  Description of Artificial Sequence: Synthetic all nuts; 5' sequence and inner sequence

SEQ ID NO: 33230 - DNA, 53 bp, Artificial Sequence; identical to SEQ ID NO: 1129
  Description of Artificial Sequence: Synthetic all nuts; 5' sequence and inner sequence

SEQ ID NO: 33231 - DNA, 53 bp, Artificial Sequence; identical to SEQ ID NO: 1841
  Description of Artificial Sequence: Synthetic all nuts; 5' sequence and inner sequence

SEQ ID NO: 33232 - DNA, 53 bp, Artificial Sequence; identical to SEQ ID NO: 1055
  Description of Artificial Sequence: Synthetic all nuts; 5' sequence and inner sequence

SEQ ID NO: 33233 - DNA, 53 bp, Artificial Sequence; identical to SEQ ID NO: 5576
  Description of Artificial Sequence: Synthetic all nuts; 5' sequence and inner sequence

SEQ ID NO: 33234 - DNA, 53 bp, Artificial Sequence; identical to SEQ ID NO: 1175
  Description of Artificial Sequence: Synthetic all nuts; 5' sequence and inner sequence

SEQ ID NO: 33235 - DNA, 53 bp, Artificial Sequence
  Description of Artificial Sequence: Synthetic all nuts; 5' sequence and inner sequence
tagggaagagaaggacatatgatggcatggcgcgcaccctatcaacgtggaca

SEQ ID NO: 33236 - DNA, 53 bp, Artificial Sequence; identical to SEQ ID NO: 1082
  Description of Artificial Sequence: Synthetic all nuts; 5' sequence and inner sequence

SEQ ID NO: 33237 - DNA, 53 bp, Artificial Sequence; identical to SEQ ID NO: 21458
  Description of Artificial Sequence: Synthetic all nuts; 5' sequence and inner sequence

SEQ ID NO: 33238 - DNA, 53 bp, Artificial Sequence; identical to SEQ ID NO: 1088
  Description of Artificial Sequence: Synthetic all nuts; 5' sequence and inner sequence

SEQ ID NO: 33239 - DNA, 53 bp, Artificial Sequence; identical to SEQ ID NO: 1240
  Description of Artificial Sequence: Synthetic all nuts; 5' sequence and inner sequence

SEQ ID NO: 33240 - DNA, 53 bp, Artificial Sequence; identical to SEQ ID NO: 1043
  Description of Artificial Sequence: Synthetic all nuts; 5' sequence and inner sequence

SEQ ID NO: 33241 - DNA, 53 bp, Artificial Sequence; identical to SEQ ID NO: 21573
  Description of Artificial Sequence: Synthetic all nuts; 5' sequence and inner sequence

SEQ ID NO: 33242 - DNA, 53 bp, Artificial Sequence; identical to SEQ ID NO: 1048
  Description of Artificial Sequence: Synthetic all nuts; 5' sequence and inner sequence

SEQ ID NO: 33243 - DNA, 53 bp, Artificial Sequence; identical to SEQ ID NO: 1029
  Description of Artificial Sequence: Synthetic all nuts; 5' sequence and inner sequence

SEQ ID NO: 33244 - DNA, 53 bp, Artificial Sequence; identical to SEQ ID NO: 1426
  Description of Artificial Sequence: Synthetic all nuts; 5' sequence and inner sequence

SEQ ID NO: 33245 - DNA, 53 bp, Artificial Sequence; identical to SEQ ID NO: 21737
  Description of Artificial Sequence: Synthetic all nuts; 5' sequence and inner sequence

SEQ ID NO: 33246 - DNA, 53 bp, Artificial Sequence; identical to SEQ ID NO: 1033
  Description of Artificial Sequence: Synthetic all nuts; 5' sequence and inner sequence

SEQ ID NO: 33247 - DNA, 53 bp, Artificial Sequence; identical to SEQ ID NO: 5743
  Description of Artificial Sequence: Synthetic all nuts; 5' sequence and inner sequence

SEQ ID NO: 33248 - DNA, 53 bp, Artificial Sequence; identical to SEQ ID NO: 5864
  Description of Artificial Sequence: Synthetic all nuts; 5' sequence and inner sequence

SEQ ID NO: 33249 - DNA, 53 bp, Artificial Sequence; identical to SEQ ID NO: 21527
  Description of Artificial Sequence: Synthetic all nuts; 5' sequence and inner sequence

SEQ ID NO: 33250 - DNA, 53 bp, Artificial Sequence; identical to SEQ ID NO: 5814
  Description of Artificial Sequence: Synthetic all nuts; 5' sequence and inner sequence

SEQ ID NO: 33251 - DNA, 53 bp, Artificial Sequence; identical to SEQ ID NO: 9868
  Description of Artificial Sequence: Synthetic all nuts; 5' sequence and inner sequence

SEQ ID NO: 33252 - DNA, 53 bp, Artificial Sequence; identical to SEQ ID NO: 21733
  Description of Artificial Sequence: Synthetic all nuts; 5' sequence and inner sequence

SEQ ID NO: 33253 - DNA, 53 bp, Artificial Sequence; identical to SEQ ID NO: 5931
  Description of Artificial Sequence: Synthetic all nuts; 5' sequence and inner sequence

SEQ ID NO: 33254 - DNA, 53 bp, Artificial Sequence; identical to SEQ ID NO: 1594
  Description of Artificial Sequence: Synthetic all nuts; 5' sequence and inner sequence

SEQ ID NO: 33255 - DNA, 53 bp, Artificial Sequence; identical to SEQ ID NO: 1752
  Description of Artificial Sequence: Synthetic all nuts; 5' sequence and inner sequence

SEQ ID NO: 33256 - DNA, 51 bp, Artificial Sequence; identical to SEQ ID NO: 21321
  Description of Artificial Sequence: Synthetic all nuts; 5' sequence and inner sequence

SEQ ID NO: 33257 - DNA, 53 bp, Artificial Sequence
  Description of Artificial Sequence: Synthetic all nuts; 5' sequence and inner sequence
tagggaagagaaggacatatgatccgtggcgacatcaagcggtggtgtgcgtg

SEQ ID NO: 33258 - DNA, 53 bp, Artificial Sequence; identical to SEQ ID NO: 29681
  Description of Artificial Sequence: Synthetic all nuts; 5' sequence and inner sequence

SEQ ID NO: 33259 - DNA, 53 bp, Artificial Sequence; identical to SEQ ID NO: 1615
  Description of Artificial Sequence: Synthetic all nuts; 5' sequence and inner sequence

SEQ ID NO: 33260 - DNA, 53 bp, Artificial Sequence; identical to SEQ ID NO: 1185
  Description of Artificial Sequence: Synthetic all nuts; 5' sequence and inner sequence

SEQ ID NO: 33261 - DNA, 53 bp, Artificial Sequence
  Description of Artificial Sequence: Synthetic all nuts; 5' sequence and inner sequence
tagggaagagaaggacatatgatgtactgcgatggatgtgcgttgtgctcggc

SEQ ID NO: 33262 - DNA, 53 bp, Artificial Sequence; identical to SEQ ID NO: 1932
  Description of Artificial Sequence: Synthetic all nuts; 5' sequence and inner sequence

SEQ ID NO: 33263 - DNA, 53 bp, Artificial Sequence; identical to SEQ ID NO: 13992
  Description of Artificial Sequence: Synthetic all nuts; 5' sequence and inner sequence

SEQ ID NO: 33264 - DNA, 53 bp, Artificial Sequence; identical to SEQ ID NO: 21544
  Description of Artificial Sequence: Synthetic all nuts; 5' sequence and inner sequence

SEQ ID NO: 33265 - DNA, 53 bp, Artificial Sequence; identical to SEQ ID NO: 1136
  Description of Artificial Sequence: Synthetic all nuts; 5' sequence and inner sequence

SEQ ID NO: 33266 - DNA, 53 bp, Artificial Sequence
  Description of Artificial Sequence: Synthetic all nuts; 5' sequence and inner sequence
tagggaagagaaggacatatgatcacgcactggacgaccctgagtgacgcatg

SEQ ID NO: 33267 - DNA, 53 bp, Artificial Sequence; identical to SEQ ID NO: 1331
  Description of Artificial Sequence: Synthetic all nuts; 5' sequence and inner sequence

SEQ ID NO: 33268 - DNA, 53 bp, Artificial Sequence
  Description of Artificial Sequence: Synthetic all nuts; 5' sequence and inner sequence
tagggaagagaaggacatatgatgtcgtggcgcgaaccgtcgagtggtatgga

SEQ ID NO: 33269 - DNA, 53 bp, Artificial Sequence; identical to SEQ ID NO: 1714
  Description of Artificial Sequence: Synthetic all nuts; 5' sequence and inner sequence

SEQ ID NO: 33270 - DNA, 53 bp, Artificial Sequence; identical to SEQ ID NO: 21466
  Description of Artificial Sequence: Synthetic all nuts; 5' sequence and inner sequence

SEQ ID NO: 33271 - DNA, 53 bp, Artificial Sequence; identical to SEQ ID NO: 9756
  Description of Artificial Sequence: Synthetic all nuts; 5' sequence and inner sequence

SEQ ID NO: 33272 - DNA, 53 bp, Artificial Sequence; identical to SEQ ID NO: 1406
  Description of Artificial Sequence: Synthetic all nuts; 5' sequence and inner sequence

SEQ ID NO: 33273 - DNA, 53 bp, Artificial Sequence; identical to SEQ ID NO: 21669
  Description of Artificial Sequence: Synthetic all nuts; 5' sequence and inner sequence

SEQ ID NO: 33274 - DNA, 53 bp, Artificial Sequence; identical to SEQ ID NO: 1190
  Description of Artificial Sequence: Synthetic all nuts; 5' sequence and inner sequence

SEQ ID NO: 33275 - DNA, 53 bp, Artificial Sequence; identical to SEQ ID NO: 1874
  Description of Artificial Sequence: Synthetic all nuts; 5' sequence and inner sequence

SEQ ID NO: 33276 - DNA, 53 bp, Artificial Sequence; identical to SEQ ID NO: 5535
  Description of Artificial Sequence: Synthetic all nuts; 5' sequence and inner sequence

SEQ ID NO: 33277 - DNA, 53 bp, Artificial Sequence; identical to SEQ ID NO: 1476
  Description of Artificial Sequence: Synthetic all nuts; 5' sequence and inner sequence

SEQ ID NO: 33278 - DNA, 53 bp, Artificial Sequence; identical to SEQ ID NO: 21912
  Description of Artificial Sequence: Synthetic all nuts; 5' sequence and inner sequence

SEQ ID NO: 33279 - DNA, 52 bp, Artificial Sequence; identical to SEQ ID NO: 5968
  Description of Artificial Sequence: Synthetic all nuts; 5' sequence and inner sequence

SEQ ID NO: 33280 - DNA, 53 bp, Artificial Sequence; identical to SEQ ID NO: 1685
  Description of Artificial Sequence: Synthetic all nuts; 5' sequence and inner sequence

SEQ ID NO: 33281 - DNA, 53 bp, Artificial Sequence; identical to SEQ ID NO: 1127
  Description of Artificial Sequence: Synthetic all nuts; 5' sequence and inner sequence

SEQ ID NO: 33282 - DNA, 53 bp, Artificial Sequence; identical to SEQ ID NO: 1171
  Description of Artificial Sequence: Synthetic all nuts; 5' sequence and inner sequence

SEQ ID NO: 33283 - DNA, 53 bp, Artificial Sequence; identical to SEQ ID NO: 1636
  Description of Artificial Sequence: Synthetic all nuts; 5' sequence and inner sequence

SEQ ID NO: 33284 - DNA, 53 bp, Artificial Sequence; identical to SEQ ID NO: 1003
  Description of Artificial Sequence: Synthetic all nuts; 5' sequence and inner sequence

SEQ ID NO: 33285 - DNA, 53 bp, Artificial Sequence; identical to SEQ ID NO: 1110
  Description of Artificial Sequence: Synthetic all nuts; 5' sequence and inner sequence

SEQ ID NO: 33286 - DNA, 53 bp, Artificial Sequence; identical to SEQ ID NO: 1228
  Description of Artificial Sequence: Synthetic all nuts; 5' sequence and inner sequence

SEQ ID NO: 33287 - DNA, 53 bp, Artificial Sequence
  Description of Artificial Sequence: Synthetic all nuts; 5' sequence and inner sequence
tagggaagagaaggacatatgatccgttgcgacatcaagcggtggtgtgcgtg

SEQ ID NO: 33288 - DNA, 53 bp, Artificial Sequence; identical to SEQ ID NO: 9682
  Description of Artificial Sequence: Synthetic all nuts; 5' sequence and inner sequence

SEQ ID NO: 33289 - DNA, 53 bp, Artificial Sequence; identical to SEQ ID NO: 5700
  Description of Artificial Sequence: Synthetic all nuts; 5' sequence and inner sequence

SEQ ID NO: 33290 - DNA, 53 bp, Artificial Sequence; identical to SEQ ID NO: 1877
  Description of Artificial Sequence: Synthetic all nuts; 5' sequence and inner sequence

SEQ ID NO: 33291 - DNA, 54 bp, Artificial Sequence
  Description of Artificial Sequence: Synthetic all nuts; 5' sequence and inner sequence
tagggaagagaaggacatatgatgtactgcactgccctacacgtggacgatgtg

SEQ ID NO: 33292 - DNA, 53 bp, Artificial Sequence; identical to SEQ ID NO: 1067
  Description of Artificial Sequence: Synthetic all nuts; 5' sequence and inner sequence

SEQ ID NO: 33293 - DNA, 53 bp, Artificial Sequence; identical to SEQ ID NO: 1092
  Description of Artificial Sequence: Synthetic all nuts; 5' sequence and inner sequence

SEQ ID NO: 33294 - DNA, 53 bp, Artificial Sequence; identical to SEQ ID NO: 1492
  Description of Artificial Sequence: Synthetic all nuts; 5' sequence and inner sequence

SEQ ID NO: 33295 - DNA, 53 bp, Artificial Sequence
  Description of Artificial Sequence: Synthetic all nuts; 5' sequence and inner sequence
tagggaagagaaggacatatgatgcacgtaacgcacaagcaggccatgtggca

SEQ ID NO: 33296 - DNA, 53 bp, Artificial Sequence; identical to SEQ ID NO: 9782
  Description of Artificial Sequence: Synthetic all nuts; 5' sequence and inner sequence

SEQ ID NO: 33297 - DNA, 53 bp, Artificial Sequence; identical to SEQ ID NO: 5573
  Description of Artificial Sequence: Synthetic all nuts; 5' sequence and inner sequence

SEQ ID NO: 33298 - DNA, 53 bp, Artificial Sequence; identical to SEQ ID NO: 21617
  Description of Artificial Sequence: Synthetic all nuts; 5' sequence and inner sequence

SEQ ID NO: 33299 - DNA, 53 bp, Artificial Sequence; identical to SEQ ID NO: 1154
  Description of Artificial Sequence: Synthetic all nuts; 5' sequence and inner sequence

SEQ ID NO: 33300 - DNA, 53 bp, Artificial Sequence; identical to SEQ ID NO: 1768
  Description of Artificial Sequence: Synthetic all nuts; 5' sequence and inner sequence

SEQ ID NO: 33301 - DNA, 53 bp, Artificial Sequence; identical to SEQ ID NO: 5407
  Description of Artificial Sequence: Synthetic all nuts; 5' sequence and inner sequence

SEQ ID NO: 33302 - DNA, 53 bp, Artificial Sequence
  Description of Artificial Sequence: Synthetic all nuts; 5' sequence and inner sequence
tagggaagagaaggacatatgatgaacgactcgcaccctatcatgaggccatg

SEQ ID NO: 33303 - DNA, 53 bp, Artificial Sequence; identical to SEQ ID NO: 1262
  Description of Artificial Sequence: Synthetic all nuts; 5' sequence and inner sequence

SEQ ID NO: 33304 - DNA, 53 bp, Artificial Sequence
  Description of Artificial Sequence: Synthetic all nuts; 5' sequence and inner sequence
tagggaagagaaggacatatgatgtcattccgcatcctacacgtgggcactta

SEQ ID NO: 33305 - DNA, 53 bp, Artificial Sequence; identical to SEQ ID NO: 1102
  Description of Artificial Sequence: Synthetic all nuts; 5' sequence and inner sequence

SEQ ID NO: 33306 - DNA, 53 bp, Artificial Sequence; identical to SEQ ID NO: 5571
  Description of Artificial Sequence: Synthetic all nuts; 5' sequence and inner sequence

SEQ ID NO: 33307 - DNA, 53 bp, Artificial Sequence; identical to SEQ ID NO: 21105
  Description of Artificial Sequence: Synthetic all nuts; 5' sequence and inner sequence

SEQ ID NO: 33308 - DNA, 53 bp, Artificial Sequence; identical to SEQ ID NO: 5918
  Description of Artificial Sequence: Synthetic all nuts; 5' sequence and inner sequence

SEQ ID NO: 33309 - DNA, 53 bp, Artificial Sequence; identical to SEQ ID NO: 1065
  Description of Artificial Sequence: Synthetic all nuts; 5' sequence and inner sequence

SEQ ID NO: 33310 - DNA, 53 bp, Artificial Sequence; identical to SEQ ID NO: 1099
  Description of Artificial Sequence: Synthetic all nuts; 5' sequence and inner sequence

SEQ ID NO: 33311 - DNA, 53 bp, Artificial Sequence; identical to SEQ ID NO: 1913
  Description of Artificial Sequence: Synthetic all nuts; 5' sequence and inner sequence

SEQ ID NO: 33312 - DNA, 53 bp, Artificial Sequence; identical to SEQ ID NO: 1323
  Description of Artificial Sequence: Synthetic all nuts; 5' sequence and inner sequence

SEQ ID NO: 33313 - DNA, 53 bp, Artificial Sequence; identical to SEQ ID NO: 1254
  Description of Artificial Sequence: Synthetic all nuts; 5' sequence and inner sequence

SEQ ID NO: 33314 - DNA, 53 bp, Artificial Sequence; identical to SEQ ID NO: 29861
  Description of Artificial Sequence: Synthetic all nuts; 5' sequence and inner sequence

SEQ ID NO: 33315 - DNA, 53 bp, Artificial Sequence; identical to SEQ ID NO: 1236
  Description of Artificial Sequence: Synthetic all nuts; 5' sequence and inner sequence

SEQ ID NO: 33316 - DNA, 53 bp, Artificial Sequence; identical to SEQ ID NO: 5962
  Description of Artificial Sequence: Synthetic all nuts; 5' sequence and inner sequence

SEQ ID NO: 33317 - DNA, 53 bp, Artificial Sequence; identical to SEQ ID NO: 13744
  Description of Artificial Sequence: Synthetic all nuts; 5' sequence and inner sequence

SEQ ID NO: 33318 - DNA, 53 bp, Artificial Sequence; identical to SEQ ID NO: 21518
  Description of Artificial Sequence: Synthetic all nuts; 5' sequence and inner sequence

SEQ ID NO: 33319 - DNA, 53 bp, Artificial Sequence; identical to SEQ ID NO: 1316
  Description of Artificial Sequence: Synthetic all nuts; 5' sequence and inner sequence

SEQ ID NO: 33320 - DNA, 53 bp, Artificial Sequence; identical to SEQ ID NO: 1195
  Description of Artificial Sequence: Synthetic all nuts; 5' sequence and inner sequence

SEQ ID NO: 33321 - DNA, 53 bp, Artificial Sequence
  Description of Artificial Sequence: Synthetic all nuts; 5' sequence and inner sequence
tagggaagagaaggacatatgatcgatcccacgaacggtcacgaccaggcaca

SEQ ID NO: 33322 - DNA, 53 bp, Artificial Sequence; identical to SEQ ID NO: 1123
  Description of Artificial Sequence: Synthetic all nuts; 5' sequence and inner sequence

SEQ ID NO: 33323 - DNA, 53 bp, Artificial Sequence; identical to SEQ ID NO: 1247
  Description of Artificial Sequence: Synthetic all nuts; 5' sequence and inner sequence

SEQ ID NO: 33324 - DNA, 53 bp, Artificial Sequence; identical to SEQ ID NO: 1083
  Description of Artificial Sequence: Synthetic all nuts; 5' sequence and inner sequence

SEQ ID NO: 33325 - DNA, 53 bp, Artificial Sequence; identical to SEQ ID NO: 1586
  Description of Artificial Sequence: Synthetic all nuts; 5' sequence and inner sequence

SEQ ID NO: 33326 - DNA, 53 bp, Artificial Sequence; identical to SEQ ID NO: 1625
  Description of Artificial Sequence: Synthetic all nuts; 5' sequence and inner sequence

SEQ ID NO: 33327 - DNA, 53 bp, Artificial Sequence; identical to SEQ ID NO: 1013
  Description of Artificial Sequence: Synthetic all nuts; 5' sequence and inner sequence

SEQ ID NO: 33328 - DNA, 53 bp, Artificial Sequence; identical to SEQ ID NO: 1901
  Description of Artificial Sequence: Synthetic all nuts; 5' sequence and inner sequence

SEQ ID NO: 33329 - DNA, 53 bp, Artificial Sequence; identical to SEQ ID NO: 17989
  Description of Artificial Sequence: Synthetic all nuts; 5' sequence and inner sequence

SEQ ID NO: 33330 - DNA, 53 bp, Artificial Sequence; identical to SEQ ID NO: 9748
  Description of Artificial Sequence: Synthetic all nuts; 5' sequence and inner sequence

SEQ ID NO: 33331 - DNA, 53 bp, Artificial Sequence; identical to SEQ ID NO: 5998
  Description of Artificial Sequence: Synthetic all nuts; 5' sequence and inner sequence

SEQ ID NO: 33332 - DNA, 53 bp, Artificial Sequence
  Description of Artificial Sequence: Synthetic all nuts; 5' sequence and inner sequence
tagggaagagaaggacatatgatcgaccctacacgtggcatggtgatgacggc

SEQ ID NO: 33333 - DNA, 48 bp, Artificial Sequence; identical to SEQ ID NO: 17927
  Description of Artificial Sequence: Synthetic all nuts; 5' sequence and inner sequence

SEQ ID NO: 33334 - DNA, 53 bp, Artificial Sequence; identical to SEQ ID NO: 9922
  Description of Artificial Sequence: Synthetic all nuts; 5' sequence and inner sequence

SEQ ID NO: 33335 - DNA, 53 bp, Artificial Sequence; identical to SEQ ID NO: 21372
  Description of Artificial Sequence: Synthetic all nuts; 5' sequence and inner sequence

SEQ ID NO: 33336 - DNA, 53 bp, Artificial Sequence; identical to SEQ ID NO: 21788
  Description of Artificial Sequence: Synthetic all nuts; 5' sequence and inner sequence

SEQ ID NO: 33337 - DNA, 53 bp, Artificial Sequence; identical to SEQ ID NO: 1881
  Description of Artificial Sequence: Synthetic all nuts; 5' sequence and inner sequence

SEQ ID NO: 33338 - DNA, 53 bp, Artificial Sequence; identical to SEQ ID NO: 1436
  Description of Artificial Sequence: Synthetic all nuts; 5' sequence and inner sequence

SEQ ID NO: 33339 - DNA, 53 bp, Artificial Sequence; identical to SEQ ID NO: 1683
  Description of Artificial Sequence: Synthetic all nuts; 5' sequence and inner sequence

SEQ ID NO: 33340 - DNA, 53 bp, Artificial Sequence; identical to SEQ ID NO: 1317
  Description of Artificial Sequence: Synthetic all nuts; 5' sequence and inner sequence

SEQ ID NO: 33341 - DNA, 53 bp, Artificial Sequence
  Description of Artificial Sequence: Synthetic all nuts; 5' sequence and inner sequence
tagggaagagaaggacatatgatccctagcgacatcaagcggtggtgtgcgtg

SEQ ID NO: 33342 - DNA, 53 bp, Artificial Sequence; identical to SEQ ID NO: 1260
  Description of Artificial Sequence: Synthetic all nuts; 5' sequence and inner sequence

SEQ ID NO: 33343 - DNA, 53 bp, Artificial Sequence; identical to SEQ ID NO: 13743
  Description of Artificial Sequence: Synthetic all nuts; 5' sequence and inner sequence

SEQ ID NO: 33344 - DNA, 53 bp, Artificial Sequence; identical to SEQ ID NO: 1291
  Description of Artificial Sequence: Synthetic all nuts; 5' sequence and inner sequence

SEQ ID NO: 33345 - DNA, 53 bp, Artificial Sequence; identical to SEQ ID NO: 1039
  Description of Artificial Sequence: Synthetic all nuts; 5' sequence and inner sequence

SEQ ID NO: 33346 - DNA, 53 bp, Artificial Sequence; identical to SEQ ID NO: 1575
  Description of Artificial Sequence: Synthetic all nuts; 5' sequence and inner sequence

SEQ ID NO: 33347 - DNA, 53 bp, Artificial Sequence; identical to SEQ ID NO: 1034
  Description of Artificial Sequence: Synthetic all nuts; 5' sequence and inner sequence

SEQ ID NO: 33348 - DNA, 53 bp, Artificial Sequence; identical to SEQ ID NO: 1866
  Description of Artificial Sequence: Synthetic all nuts; 5' sequence and inner sequence

SEQ ID NO: 33349 - DNA, 53 bp, Artificial Sequence; identical to SEQ ID NO: 5419
  Description of Artificial Sequence: Synthetic all nuts; 5' sequence and inner sequence

SEQ ID NO: 33350 - DNA, 55 bp, Artificial Sequence
  Description of Artificial Sequence: Synthetic all nuts; 5' sequence and inner sequence
tagggaagagaaggacatatgatggacgacgcgtgccctatcatgtgtgcgtgga

SEQ ID NO: 33351 - DNA, 53 bp, Artificial Sequence; identical to SEQ ID NO: 21483
  Description of Artificial Sequence: Synthetic all nuts; 5' sequence and inner sequence

SEQ ID NO: 33352 - DNA, 53 bp, Artificial Sequence
  Description of Artificial Sequence: Synthetic all nuts; 5' sequence and inner sequence
tagggaagagaaggacatatgatcgtaggtacggcacgacactcaatggcatg

SEQ ID NO: 33353 - DNA, 53 bp, Artificial Sequence; identical to SEQ ID NO: 5745
  Description of Artificial Sequence: Synthetic all nuts; 5' sequence and inner sequence

SEQ ID NO: 33354 - DNA, 53 bp, Artificial Sequence; identical to SEQ ID NO: 1551
  Description of Artificial Sequence: Synthetic all nuts; 5' sequence and inner sequence

SEQ ID NO: 33355 - DNA, 53 bp, Artificial Sequence; identical to SEQ ID NO: 1523
  Description of Artificial Sequence: Synthetic all nuts; 5' sequence and inner sequence

SEQ ID NO: 33356 - DNA, 53 bp, Artificial Sequence; identical to SEQ ID NO: 5787
  Description of Artificial Sequence: Synthetic all nuts; 5' sequence and inner sequence

SEQ ID NO: 33357 - DNA, 53 bp, Artificial Sequence; identical to SEQ ID NO: 1395
  Description of Artificial Sequence: Synthetic all nuts; 5' sequence and inner sequence

SEQ ID NO: 33358 - DNA, 53 bp, Artificial Sequence; identical to SEQ ID NO: 1131
  Description of Artificial Sequence: Synthetic all nuts; 5' sequence and inner sequence

SEQ ID NO: 33359 - DNA, 53 bp, Artificial Sequence; identical to SEQ ID NO: 1211
  Description of Artificial Sequence: Synthetic all nuts; 5' sequence and inner sequence

SEQ ID NO: 33360 - DNA, 53 bp, Artificial Sequence; identical to SEQ ID NO: 1230
  Description of Artificial Sequence: Synthetic all nuts; 5' sequence and inner sequence

SEQ ID NO: 33361 - DNA, 53 bp, Artificial Sequence; identical to SEQ ID NO: 1315
  Description of Artificial Sequence: Synthetic all nuts; 5' sequence and inner sequence

SEQ ID NO: 33362 - DNA, 53 bp, Artificial Sequence; identical to SEQ ID NO: 1478
  Description of Artificial Sequence: Synthetic all nuts; 5' sequence and inner sequence

SEQ ID NO: 33363 - DNA, 53 bp, Artificial Sequence; identical to SEQ ID NO: 1606
  Description of Artificial Sequence: Synthetic all nuts; 5' sequence and inner sequence

SEQ ID NO: 33364 - DNA, 53 bp, Artificial Sequence; identical to SEQ ID NO: 1233
  Description of Artificial Sequence: Synthetic all nuts; 5' sequence and inner sequence

SEQ ID NO: 33365 - DNA, 53 bp, Artificial Sequence; identical to SEQ ID NO: 1365
  Description of Artificial Sequence: Synthetic all nuts; 5' sequence and inner sequence

SEQ ID NO: 33366 - DNA, 53 bp, Artificial Sequence; identical to SEQ ID NO: 1314
  Description of Artificial Sequence: Synthetic all nuts; 5' sequence and inner sequence

SEQ ID NO: 33367 - DNA, 53 bp, Artificial Sequence; identical to SEQ ID NO: 1756
  Description of Artificial Sequence: Synthetic all nuts; 5' sequence and inner sequence

SEQ ID NO: 33368 - DNA, 53 bp, Artificial Sequence; identical to SEQ ID NO: 1116
  Description of Artificial Sequence: Synthetic all nuts; 5' sequence and inner sequence

SEQ ID NO: 33369 - DNA, 53 bp, Artificial Sequence; identical to SEQ ID NO: 21551
  Description of Artificial Sequence: Synthetic all nuts; 5' sequence and inner sequence

SEQ ID NO: 33370 - DNA, 53 bp, Artificial Sequence; identical to SEQ ID NO: 1912
  Description of Artificial Sequence: Synthetic all nuts; 5' sequence and inner sequence

SEQ ID NO: 33371 - DNA, 53 bp, Artificial Sequence; identical to SEQ ID NO: 1526
  Description of Artificial Sequence: Synthetic all nuts; 5' sequence and inner sequence

SEQ ID NO: 33372 - DNA, 52 bp, Artificial Sequence; identical to SEQ ID NO: 21287
  Description of Artificial Sequence: Synthetic all nuts; 5' sequence and inner sequence

SEQ ID NO: 33373 - DNA, 53 bp, Artificial Sequence; identical to SEQ ID NO: 1438
  Description of Artificial Sequence: Synthetic all nuts; 5' sequence and inner sequence

SEQ ID NO: 33374 - DNA, 53 bp, Artificial Sequence; identical to SEQ ID NO: 1447
  Description of Artificial Sequence: Synthetic all nuts; 5' sequence and inner sequence

SEQ ID NO: 33375 - DNA, 53 bp, Artificial Sequence; identical to SEQ ID NO: 5702
  Description of Artificial Sequence: Synthetic all nuts; 5' sequence and inner sequence

SEQ ID NO: 33376 - DNA, 53 bp, Artificial Sequence; identical to SEQ ID NO: 1903
  Description of Artificial Sequence: Synthetic all nuts; 5' sequence and inner sequence

SEQ ID NO: 33377 - DNA, 53 bp, Artificial Sequence; identical to SEQ ID NO: 5238
  Description of Artificial Sequence: Synthetic all nuts; 5' sequence and inner sequence

SEQ ID NO: 33378 - DNA, 53 bp, Artificial Sequence; identical to SEQ ID NO: 17770
  Description of Artificial Sequence: Synthetic all nuts; 5' sequence and inner sequence

SEQ ID NO: 33379 - DNA, 53 bp, Artificial Sequence
  Description of Artificial Sequence: Synthetic all nuts; 5' sequence and inner sequence
tagggaagagaaggacatatgatccatagcgacatcaagcggtggtgtgcgtg

SEQ ID NO: 33380 - DNA, 53 bp, Artificial Sequence; identical to SEQ ID NO: 1624
  Description of Artificial Sequence: Synthetic all nuts; 5' sequence and inner sequence

SEQ ID NO: 33381 - DNA, 53 bp, Artificial Sequence; identical to SEQ ID NO: 1493
  Description of Artificial Sequence: Synthetic all nuts; 5' sequence and inner sequence

SEQ ID NO: 33382 - DNA, 53 bp, Artificial Sequence; identical to SEQ ID NO: 1021
  Description of Artificial Sequence: Synthetic all nuts; 5' sequence and inner sequence

SEQ ID NO: 33383 - DNA, 53 bp, Artificial Sequence; identical to SEQ ID NO: 1263
  Description of Artificial Sequence: Synthetic all nuts; 5' sequence and inner sequence

SEQ ID NO: 33384 - DNA, 53 bp, Artificial Sequence
  Description of Artificial Sequence: Synthetic all nuts; 5' sequence and inner sequence
tagggaagagaaggacatatgatgtcattcagcatcctacacgtgggcacgta

SEQ ID NO: 33385 - DNA, 53 bp, Artificial Sequence; identical to SEQ ID NO: 5376
  Description of Artificial Sequence: Synthetic all nuts; 5' sequence and inner sequence

SEQ ID NO: 33386 - DNA, 53 bp, Artificial Sequence; identical to SEQ ID NO: 21486
  Description of Artificial Sequence: Synthetic all nuts; 5' sequence and inner sequence

SEQ ID NO: 33387 - DNA, 53 bp, Artificial Sequence; identical to SEQ ID NO: 5644
  Description of Artificial Sequence: Synthetic all nuts; 5' sequence and inner sequence

SEQ ID NO: 33388 - DNA, 53 bp, Artificial Sequence; identical to SEQ ID NO: 1891
  Description of Artificial Sequence: Synthetic all nuts; 5' sequence and inner sequence

SEQ ID NO: 33389 - DNA, 50 bp, Artificial Sequence; identical to SEQ ID NO: 1885
  Description of Artificial Sequence: Synthetic all nuts; 5' sequence and inner sequence

SEQ ID NO: 33390 - DNA, 54 bp, Artificial Sequence; identical to SEQ ID NO: 1503
  Description of Artificial Sequence: Synthetic all nuts; 5' sequence and inner sequence

SEQ ID NO: 33391 - DNA, 53 bp, Artificial Sequence; identical to SEQ ID NO: 17748
  Description of Artificial Sequence: Synthetic all nuts; 5' sequence and inner sequence

SEQ ID NO: 33392 - DNA, 53 bp, Artificial Sequence; identical to SEQ ID NO: 1312
  Description of Artificial Sequence: Synthetic all nuts; 5' sequence and inner sequence

SEQ ID NO: 33393 - DNA, 53 bp, Artificial Sequence; identical to SEQ ID NO: 17612
  Description of Artificial Sequence: Synthetic all nuts; 5' sequence and inner sequence

SEQ ID NO: 33394 - DNA, 53 bp, Artificial Sequence; identical to SEQ ID NO: 21874
  Description of Artificial Sequence: Synthetic all nuts; 5' sequence and inner sequence

SEQ ID NO: 33395 - DNA, 53 bp, Artificial Sequence; identical to SEQ ID NO: 1056
  Description of Artificial Sequence: Synthetic all nuts; 5' sequence and inner sequence

SEQ ID NO: 33396 - DNA, 53 bp, Artificial Sequence; identical to SEQ ID NO: 1308
  Description of Artificial Sequence: Synthetic all nuts; 5' sequence and inner sequence

SEQ ID NO: 33397 - DNA, 53 bp, Artificial Sequence; identical to SEQ ID NO: 21954
  Description of Artificial Sequence: Synthetic all nuts; 5' sequence and inner sequence

SEQ ID NO: 33398 - DNA, 53 bp, Artificial Sequence; identical to SEQ ID NO: 5492
  Description of Artificial Sequence: Synthetic all nuts; 5' sequence and inner sequence

SEQ ID NO: 33399 - DNA, 53 bp, Artificial Sequence; identical to SEQ ID NO: 9670
  Description of Artificial Sequence: Synthetic all nuts; 5' sequence and inner sequence

SEQ ID NO: 33400 - DNA, 53 bp, Artificial Sequence; identical to SEQ ID NO: 1163
  Description of Artificial Sequence: Synthetic all nuts; 5' sequence and inner sequence

SEQ ID NO: 33401 - DNA, 53 bp, Artificial Sequence; identical to SEQ ID NO: 17399
  Description of Artificial Sequence: Synthetic all nuts; 5' sequence and inner sequence

SEQ ID NO: 33402 - DNA, 53 bp, Artificial Sequence; identical to SEQ ID NO: 1352
  Description of Artificial Sequence: Synthetic all nuts; 5' sequence and inner sequence

SEQ ID NO: 33403 - DNA, 51 bp, Artificial Sequence; identical to SEQ ID NO: 1423
  Description of Artificial Sequence: Synthetic all nuts; 5' sequence and inner sequence

SEQ ID NO: 33404 - DNA, 53 bp, Artificial Sequence
  Description of Artificial Sequence: Synthetic all nuts; 5' sequence and inner sequence
tagggaagagaaggacatatgatgcactgctctgacgcgatgtggtcggtgga

SEQ ID NO: 33405 - DNA, 53 bp, Artificial Sequence; identical to SEQ ID NO: 1347
  Description of Artificial Sequence: Synthetic all nuts; 5' sequence and inner sequence

SEQ ID NO: 33406 - DNA, 53 bp, Artificial Sequence; identical to SEQ ID NO: 5988
  Description of Artificial Sequence: Synthetic all nuts; 5' sequence and inner sequence

SEQ ID NO: 33407 - DNA, 53 bp, Artificial Sequence; identical to SEQ ID NO: 1217
  Description of Artificial Sequence: Synthetic all nuts; 5' sequence and inner sequence

SEQ ID NO: 33408 - DNA, 53 bp, Artificial Sequence; identical to SEQ ID NO: 1212
  Description of Artificial Sequence: Synthetic all nuts; 5' sequence and inner sequence

SEQ ID NO: 33409 - DNA, 53 bp, Artificial Sequence; identical to SEQ ID NO: 1326
  Description of Artificial Sequence: Synthetic all nuts; 5' sequence and inner sequence

SEQ ID NO: 33410 - DNA, 53 bp, Artificial Sequence; identical to SEQ ID NO: 21629
  Description of Artificial Sequence: Synthetic all nuts; 5' sequence and inner sequence

SEQ ID NO: 33411 - DNA, 53 bp, Artificial Sequence; identical to SEQ ID NO: 1060
  Description of Artificial Sequence: Synthetic all nuts; 5' sequence and inner sequence

SEQ ID NO: 33412 - DNA, 53 bp, Artificial Sequence; identical to SEQ ID NO: 1613
  Description of Artificial Sequence: Synthetic all nuts; 5' sequence and inner sequence

SEQ ID NO: 33413 - DNA, 53 bp, Artificial Sequence; identical to SEQ ID NO: 5694
  Description of Artificial Sequence: Synthetic all nuts; 5' sequence and inner sequence

SEQ ID NO: 33414 - DNA, 53 bp, Artificial Sequence; identical to SEQ ID NO: 1583
  Description of Artificial Sequence: Synthetic all nuts; 5' sequence and inner sequence

SEQ ID NO: 33415 - DNA, 53 bp, Artificial Sequence; identical to SEQ ID NO: 1231
  Description of Artificial Sequence: Synthetic all nuts; 5' sequence and inner sequence

SEQ ID NO: 33416 - DNA, 53 bp, Artificial Sequence
  Description of Artificial Sequence: Synthetic all nuts; 5' sequence and inner sequence
tagggaagagaaggacatatgatgacgcactcgtcctacacgttggcatgtgt

SEQ ID NO: 33417 - DNA, 53 bp, Artificial Sequence; identical to SEQ ID NO: 1543
  Description of Artificial Sequence: Synthetic all nuts; 5' sequence and inner sequence

SEQ ID NO: 33418 - DNA, 53 bp, Artificial Sequence; identical to SEQ ID NO: 1165
  Description of Artificial Sequence: Synthetic all nuts; 5' sequence and inner sequence

SEQ ID NO: 33419 - DNA, 53 bp, Artificial Sequence; identical to SEQ ID NO: 1433
  Description of Artificial Sequence: Synthetic all nuts; 5' sequence and inner sequence

SEQ ID NO: 33420 - DNA, 53 bp, Artificial Sequence; identical to SEQ ID NO: 1329
  Description of Artificial Sequence: Synthetic all nuts; 5' sequence and inner sequence

SEQ ID NO: 33421 - DNA, 53 bp, Artificial Sequence; identical to SEQ ID NO: 21428
  Description of Artificial Sequence: Synthetic all nuts; 5' sequence and inner sequence

SEQ ID NO: 33422 - DNA, 50 bp, Artificial Sequence
  Description of Artificial Sequence: Synthetic all nuts; 5' sequence and inner sequence
tagggaagagaaggacatatgatccgatcgcacgtcaaggcaggcttgga

SEQ ID NO: 33423 - DNA, 53 bp, Artificial Sequence; identical to SEQ ID NO: 1388
  Description of Artificial Sequence: Synthetic all nuts; 5' sequence and inner sequence

SEQ ID NO: 33424 - DNA, 53 bp, Artificial Sequence; identical to SEQ ID NO: 1394
  Description of Artificial Sequence: Synthetic all nuts; 5' sequence and inner sequence

SEQ ID NO: 33425 - DNA, 53 bp, Artificial Sequence; identical to SEQ ID NO: 5525
  Description of Artificial Sequence: Synthetic all nuts; 5' sequence and inner sequence

SEQ ID NO: 33426 - DNA, 53 bp, Artificial Sequence; identical to SEQ ID NO: 9678
  Description of Artificial Sequence: Synthetic all nuts; 5' sequence and inner sequence

SEQ ID NO: 33427 - DNA, 53 bp, Artificial Sequence; identical to SEQ ID NO: 1442
  Description of Artificial Sequence: Synthetic all nuts; 5' sequence and inner sequence

SEQ ID NO: 33428 - DNA, 53 bp, Artificial Sequence; identical to SEQ ID NO: 17750
  Description of Artificial Sequence: Synthetic all nuts; 5' sequence and inner sequence

SEQ ID NO: 33429 - DNA, 53 bp, Artificial Sequence; identical to SEQ ID NO: 1224
  Description of Artificial Sequence: Synthetic all nuts; 5' sequence and inner sequence

SEQ ID NO: 33430 - DNA, 53 bp, Artificial Sequence; identical to SEQ ID NO: 1024
  Description of Artificial Sequence: Synthetic all nuts; 5' sequence and inner sequence

SEQ ID NO: 33431 - DNA, 53 bp, Artificial Sequence; identical to SEQ ID NO: 21502
  Description of Artificial Sequence: Synthetic all nuts; 5' sequence and inner sequence

SEQ ID NO: 33432 - DNA, 53 bp, Artificial Sequence; identical to SEQ ID NO: 5816
  Description of Artificial Sequence: Synthetic all nuts; 5' sequence and inner sequence

SEQ ID NO: 33433 - DNA, 53 bp, Artificial Sequence
  Description of Artificial Sequence: Synthetic all nuts; 5' sequence and inner sequence
tagggaagagaaggacatatgatcctgatcgcacgtaaggtgggcgtgtgatg

SEQ ID NO: 33434 - DNA, 53 bp, Artificial Sequence; identical to SEQ ID NO: 1576
  Description of Artificial Sequence: Synthetic all nuts; 5' sequence and inner sequence

SEQ ID NO: 33435 - DNA, 53 bp, Artificial Sequence; identical to SEQ ID NO: 1281
  Description of Artificial Sequence: Synthetic all nuts; 5' sequence and inner sequence

SEQ ID NO: 33436 - DNA, 53 bp, Artificial Sequence; identical to SEQ ID NO: 1595
  Description of Artificial Sequence: Synthetic all nuts; 5' sequence and inner sequence

SEQ ID NO: 33437 - DNA, 53 bp, Artificial Sequence
  Description of Artificial Sequence: Synthetic all nuts; 5' sequence and inner sequence
tagggaagagaaggacatatgatgtcattccgcatcctacacgtgggcacgga

SEQ ID NO: 33438 - DNA, 53 bp, Artificial Sequence; identical to SEQ ID NO: 5289
  Description of Artificial Sequence: Synthetic all nuts; 5' sequence and inner sequence

SEQ ID NO: 33439 - DNA, 53 bp, Artificial Sequence; identical to SEQ ID NO: 21787
  Description of Artificial Sequence: Synthetic all nuts; 5' sequence and inner sequence

SEQ ID NO: 33440 - DNA, 53 bp, Artificial Sequence; identical to SEQ ID NO: 21797
  Description of Artificial Sequence: Synthetic all nuts; 5' sequence and inner sequence

SEQ ID NO: 33441 - DNA, 53 bp, Artificial Sequence; identical to SEQ ID NO: 1338
  Description of Artificial Sequence: Synthetic all nuts; 5' sequence and inner sequence

SEQ ID NO: 33442 - DNA, 53 bp, Artificial Sequence; identical to SEQ ID NO: 17731
  Description of Artificial Sequence: Synthetic all nuts; 5' sequence and inner sequence

SEQ ID NO: 33443 - DNA, 54 bp, Artificial Sequence; identical to SEQ ID NO: 1250
  Description of Artificial Sequence: Synthetic all nuts; 5' sequence and inner sequence

SEQ ID NO: 33444 - DNA, 53 bp, Artificial Sequence; identical to SEQ ID NO: 5867
  Description of Artificial Sequence: Synthetic all nuts; 5' sequence and inner sequence

SEQ ID NO: 33445 - DNA, 53 bp, Artificial Sequence; identical to SEQ ID NO: 1619
  Description of Artificial Sequence: Synthetic all nuts; 5' sequence and inner sequence

SEQ ID NO: 33446 - DNA, 53 bp, Artificial Sequence
  Description of Artificial Sequence: Synthetic all nuts; 5' sequence and inner sequence
tagggaagagaaggacatatgatggacgcacaggaccggccaagtgacatgga

SEQ ID NO: 33447 - DNA, 53 bp, Artificial Sequence; identical to SEQ ID NO: 21803
  Description of Artificial Sequence: Synthetic all nuts; 5' sequence and inner sequence

SEQ ID NO: 33448 - DNA, 53 bp, Artificial Sequence; identical to SEQ ID NO: 21519
  Description of Artificial Sequence: Synthetic all nuts; 5' sequence and inner sequence

SEQ ID NO: 33449 - DNA, 53 bp, Artificial Sequence; identical to SEQ ID NO: 1321
  Description of Artificial Sequence: Synthetic all nuts; 5' sequence and inner sequence

SEQ ID NO: 33450 - DNA, 53 bp, Artificial Sequence; identical to SEQ ID NO: 1570
  Description of Artificial Sequence: Synthetic all nuts; 5' sequence and inner sequence

SEQ ID NO: 33451 - DNA, 53 bp, Artificial Sequence; identical to SEQ ID NO: 5856
  Description of Artificial Sequence: Synthetic all nuts; 5' sequence and inner sequence

SEQ ID NO: 33452 - DNA, 53 bp, Artificial Sequence; identical to SEQ ID NO: 1353
  Description of Artificial Sequence: Synthetic all nuts; 5' sequence and inner sequence

SEQ ID NO: 33453 - DNA, 53 bp, Artificial Sequence; identical to SEQ ID NO: 1386
  Description of Artificial Sequence: Synthetic all nuts; 5' sequence and inner sequence

SEQ ID NO: 33454 - DNA, 53 bp, Artificial Sequence; identical to SEQ ID NO: 1184
  Description of Artificial Sequence: Synthetic all nuts; 5' sequence and inner sequence

SEQ ID NO: 33455 - DNA, 53 bp, Artificial Sequence; identical to SEQ ID NO: 1246
  Description of Artificial Sequence: Synthetic all nuts; 5' sequence and inner sequence

SEQ ID NO: 33456 - DNA, 53 bp, Artificial Sequence; identical to SEQ ID NO: 13922
  Description of Artificial Sequence: Synthetic all nuts; 5' sequence and inner sequence

SEQ ID NO: 33457 - DNA, 53 bp, Artificial Sequence; identical to SEQ ID NO: 5603
  Description of Artificial Sequence: Synthetic all nuts; 5' sequence and inner sequence

SEQ ID NO: 33458 - DNA, 53 bp, Artificial Sequence; identical to SEQ ID NO: 21324
  Description of Artificial Sequence: Synthetic all nuts; 5' sequence and inner sequence

SEQ ID NO: 33459 - DNA, 53 bp, Artificial Sequence
  Description of Artificial Sequence: Synthetic all nuts; 5' sequence and inner sequence
tagggaagagaaggacatatgatccgtagcgacatcaagcggtggtgtgcgag

SEQ ID NO: 33460 - DNA, 53 bp, Artificial Sequence; identical to SEQ ID NO: 1909
  Description of Artificial Sequence: Synthetic all nuts; 5' sequence and inner sequence

SEQ ID NO: 33461 - DNA, 53 bp, Artificial Sequence; identical to SEQ ID NO: 1014
  Description of Artificial Sequence: Synthetic all nuts; 5' sequence and inner sequence

SEQ ID NO: 33462 - DNA, 53 bp, Artificial Sequence; identical to SEQ ID NO: 1008
  Description of Artificial Sequence: Synthetic all nuts; 5' sequence and inner sequence

SEQ ID NO: 33463 - DNA, 53 bp, Artificial Sequence; identical to SEQ ID NO: 21672
  Description of Artificial Sequence: Synthetic all nuts; 5' sequence and inner sequence

SEQ ID NO: 33464 - DNA, 53 bp, Artificial Sequence
  Description of Artificial Sequence: Synthetic all nuts; 5' sequence and inner sequence
tagggaagagaaggacatatgatccgtagcgaaatcaagcggtggtgtgcgtg

SEQ ID NO: 33465 - DNA, 53 bp, Artificial Sequence; identical to SEQ ID NO: 1390
  Description of Artificial Sequence: Synthetic all nuts; 5' sequence and inner sequence

SEQ ID NO: 33466 - DNA, 53 bp, Artificial Sequence; identical to SEQ ID NO: 1188
  Description of Artificial Sequence: Synthetic all nuts; 5' sequence and inner sequence

SEQ ID NO: 33467 - DNA, 53 bp, Artificial Sequence; identical to SEQ ID NO: 5905
  Description of Artificial Sequence: Synthetic all nuts; 5' sequence and inner sequence

SEQ ID NO: 33468 - DNA, 53 bp, Artificial Sequence; identical to SEQ ID NO: 1854
  Description of Artificial Sequence: Synthetic all nuts; 5' sequence and inner sequence

SEQ ID NO: 33469 - DNA, 53 bp, Artificial Sequence; identical to SEQ ID NO: 1515
  Description of Artificial Sequence: Synthetic all nuts; 5' sequence and inner sequence

SEQ ID NO: 33470 - DNA, 53 bp, Artificial Sequence; identical to SEQ ID NO: 1047
  Description of Artificial Sequence: Synthetic all nuts; 5' sequence and inner sequence

SEQ ID NO: 33471 - DNA, 53 bp, Artificial Sequence; identical to SEQ ID NO: 1068
  Description of Artificial Sequence: Synthetic all nuts; 5' sequence and inner sequence

SEQ ID NO: 33472 - DNA, 53 bp, Artificial Sequence; identical to SEQ ID NO: 1380
  Description of Artificial Sequence: Synthetic all nuts; 5' sequence and inner sequence

SEQ ID NO: 33473 - DNA, 53 bp, Artificial Sequence; identical to SEQ ID NO: 25843
  Description of Artificial Sequence: Synthetic all nuts; 5' sequence and inner sequence

SEQ ID NO: 33474 - DNA, 53 bp, Artificial Sequence; identical to SEQ ID NO: 1225
  Description of Artificial Sequence: Synthetic all nuts; 5' sequence and inner sequence

SEQ ID NO: 33475 - DNA, 53 bp, Artificial Sequence; identical to SEQ ID NO: 21724
  Description of Artificial Sequence: Synthetic all nuts; 5' sequence and inner sequence

SEQ ID NO: 33476 - DNA, 54 bp, Artificial Sequence; identical to SEQ ID NO: 1150
  Description of Artificial Sequence: Synthetic all nuts; 5' sequence and inner sequence

SEQ ID NO: 33477 - DNA, 53 bp, Artificial Sequence
  Description of Artificial Sequence: Synthetic all nuts; 5' sequence and inner sequence
tagggaagagaaggacatatgatgccatcgctgaccgacgtgagcatgtcgtc

SEQ ID NO: 33478 - DNA, 53 bp, Artificial Sequence; identical to SEQ ID NO: 1061
  Description of Artificial Sequence: Synthetic all nuts; 5' sequence and inner sequence

SEQ ID NO: 33479 - DNA, 53 bp, Artificial Sequence; identical to SEQ ID NO: 21398
  Description of Artificial Sequence: Synthetic all nuts; 5' sequence and inner sequence

SEQ ID NO: 33480 - DNA, 53 bp, Artificial Sequence; identical to SEQ ID NO: 9889
  Description of Artificial Sequence: Synthetic all nuts; 5' sequence and inner sequence

SEQ ID NO: 33481 - DNA, 53 bp, Artificial Sequence; identical to SEQ ID NO: 1783
  Description of Artificial Sequence: Synthetic all nuts; 5' sequence and inner sequence

SEQ ID NO: 33482 - DNA, 53 bp, Artificial Sequence; identical to SEQ ID NO: 1044
  Description of Artificial Sequence: Synthetic all nuts; 5' sequence and inner sequence

SEQ ID NO: 33483 - DNA, 53 bp, Artificial Sequence; identical to SEQ ID NO: 1183
  Description of Artificial Sequence: Synthetic all nuts; 5' sequence and inner sequence

SEQ ID NO: 33484 - DNA, 53 bp, Artificial Sequence
  Description of Artificial Sequence: Synthetic all nuts; 5' sequence and inner sequence
tagggaagagaaggacatatgatgtcattccgcatcctacacgagggcacgta

SEQ ID NO: 33485 - DNA, 53 bp, Artificial Sequence; identical to SEQ ID NO: 1158
  Description of Artificial Sequence: Synthetic all nuts; 5' sequence and inner sequence

SEQ ID NO: 33486 - DNA, 53 bp, Artificial Sequence; identical to SEQ ID NO: 1303
  Description of Artificial Sequence: Synthetic all nuts; 5' sequence and inner sequence

SEQ ID NO: 33487 - DNA, 53 bp, Artificial Sequence; identical to SEQ ID NO: 1717
  Description of Artificial Sequence: Synthetic all nuts; 5' sequence and inner sequence

SEQ ID NO: 33488 - DNA, 53 bp, Artificial Sequence; identical to SEQ ID NO: 5575
  Description of Artificial Sequence: Synthetic all nuts; 5' sequence and inner sequence

SEQ ID NO: 33489 - DNA, 53 bp, Artificial Sequence; identical to SEQ ID NO: 1295
  Description of Artificial Sequence: Synthetic all nuts; 5' sequence and inner sequence

SEQ ID NO: 33490 - DNA, 53 bp, Artificial Sequence; identical to SEQ ID NO: 1828
  Description of Artificial Sequence: Synthetic all nuts; 5' sequence and inner sequence

SEQ ID NO: 33491 - DNA, 51 bp, Artificial Sequence; identical to SEQ ID NO: 1241
  Description of Artificial Sequence: Synthetic all nuts; 5' sequence and inner sequence

SEQ ID NO: 33492 - DNA, 53 bp, Artificial Sequence; identical to SEQ ID NO: 1277
  Description of Artificial Sequence: Synthetic all nuts; 5' sequence and inner sequence

SEQ ID NO: 33493 - DNA, 53 bp, Artificial Sequence; identical to SEQ ID NO: 9769
  Description of Artificial Sequence: Synthetic all nuts; 5' sequence and inner sequence

SEQ ID NO: 33494 - DNA, 53 bp, Artificial Sequence; identical to SEQ ID NO: 5935
  Description of Artificial Sequence: Synthetic all nuts; 5' sequence and inner sequence

SEQ ID NO: 33495 - DNA, 53 bp, Artificial Sequence; identical to SEQ ID NO: 1373
  Description of Artificial Sequence: Synthetic all nuts; 5' sequence and inner sequence

SEQ ID NO: 33496 - DNA, 53 bp, Artificial Sequence; identical to SEQ ID NO: 5955
  Description of Artificial Sequence: Synthetic all nuts; 5' sequence and inner sequence

SEQ ID NO: 33497 - DNA, 53 bp, Artificial Sequence; identical to SEQ ID NO: 1617
  Description of Artificial Sequence: Synthetic all nuts; 5' sequence and inner sequence

SEQ ID NO: 33498 - DNA, 53 bp, Artificial Sequence; identical to SEQ ID NO: 1059
  Description of Artificial Sequence: Synthetic all nuts; 5' sequence and inner sequence

SEQ ID NO: 33499 - DNA, 53 bp, Artificial Sequence; identical to SEQ ID NO: 5579
  Description of Artificial Sequence: Synthetic all nuts; 5' sequence and inner sequence

SEQ ID NO: 33500 - DNA, 53 bp, Artificial Sequence; identical to SEQ ID NO: 1153
  Description of Artificial Sequence: Synthetic all nuts; 5' sequence and inner sequence

SEQ ID NO: 33501 - DNA, 53 bp, Artificial Sequence; identical to SEQ ID NO: 1661
  Description of Artificial Sequence: Synthetic all nuts; 5' sequence and inner sequence

SEQ ID NO: 33502 - DNA, 53 bp, Artificial Sequence; identical to SEQ ID NO: 21353
  Description of Artificial Sequence: Synthetic all nuts; 5' sequence and inner sequence

SEQ ID NO: 33503 - DNA, 53 bp, Artificial Sequence
  Description of Artificial Sequence: Synthetic all nuts; 5' sequence and inner sequence
tagggaagagaaggacatatgatccgcacgcaaccgtacgcaatgggctgtga

SEQ ID NO: 33504 - DNA, 53 bp, Artificial Sequence; identical to SEQ ID NO: 1346
  Description of Artificial Sequence: Synthetic all nuts; 5' sequence and inner sequence

SEQ ID NO: 33505 - DNA, 53 bp, Artificial Sequence
  Description of Artificial Sequence: Synthetic all nuts; 5' sequence and inner sequence
tagggaagagaaggacatatgatggcattccgcatcctacacgtgggcacgta

SEQ ID NO: 33506 - DNA, 53 bp, Artificial Sequence; identical to SEQ ID NO: 1358
  Description of Artificial Sequence: Synthetic all nuts; 5' sequence and inner sequence

SEQ ID NO: 33507 - DNA, 53 bp, Artificial Sequence; identical to SEQ ID NO: 1620
  Description of Artificial Sequence: Synthetic all nuts; 5' sequence and inner sequence

SEQ ID NO: 33508 - DNA, 53 bp, Artificial Sequence; identical to SEQ ID NO: 1758
  Description of Artificial Sequence: Synthetic all nuts; 5' sequence and inner sequence

SEQ ID NO: 33509 - DNA, 53 bp, Artificial Sequence; identical to SEQ ID NO: 5356
  Description of Artificial Sequence: Synthetic all nuts; 5' sequence and inner sequence

SEQ ID NO: 33510 - DNA, 53 bp, Artificial Sequence; identical to SEQ ID NO: 9960
  Description of Artificial Sequence: Synthetic all nuts; 5' sequence and inner sequence

SEQ ID NO: 33511 - DNA, 53 bp, Artificial Sequence; identical to SEQ ID NO: 1644
  Description of Artificial Sequence: Synthetic all nuts; 5' sequence and inner sequence

SEQ ID NO: 33512 - DNA, 53 bp, Artificial Sequence; identical to SEQ ID NO: 1468
  Description of Artificial Sequence: Synthetic all nuts; 5' sequence and inner sequence

SEQ ID NO: 33513 - DNA, 53 bp, Artificial Sequence; identical to SEQ ID NO: 17696
  Description of Artificial Sequence: Synthetic all nuts; 5' sequence and inner sequence

SEQ ID NO: 33514 - DNA, 53 bp, Artificial Sequence; identical to SEQ ID NO: 1409
  Description of Artificial Sequence: Synthetic all nuts; 5' sequence and inner sequence

SEQ ID NO: 33515 - DNA, 53 bp, Artificial Sequence; identical to SEQ ID NO: 1905
  Description of Artificial Sequence: Synthetic all nuts; 5' sequence and inner sequence

SEQ ID NO: 33516 - DNA, 53 bp, Artificial Sequence
  Description of Artificial Sequence: Synthetic all nuts; 5' sequence and inner sequence
tagggaagagaaggacatatgatcgcagcgtcgatacgtcatgcacgctgaca

SEQ ID NO: 33517 - DNA, 52 bp, Artificial Sequence; identical to SEQ ID NO: 5869
  Description of Artificial Sequence: Synthetic all nuts; 5' sequence and inner sequence

SEQ ID NO: 33518 - DNA, 53 bp, Artificial Sequence; identical to SEQ ID NO: 1218
  Description of Artificial Sequence: Synthetic all nuts; 5' sequence and inner sequence

SEQ ID NO: 33519 - DNA, 53 bp, Artificial Sequence; identical to SEQ ID NO: 5631
  Description of Artificial Sequence: Synthetic all nuts; 5' sequence and inner sequence

SEQ ID NO: 33520 - DNA, 53 bp, Artificial Sequence; identical to SEQ ID NO: 1276
  Description of Artificial Sequence: Synthetic all nuts; 5' sequence and inner sequence

SEQ ID NO: 33521 - DNA, 53 bp, Artificial Sequence; identical to SEQ ID NO: 1371
  Description of Artificial Sequence: Synthetic all nuts; 5' sequence and inner sequence

SEQ ID NO: 33522 - DNA, 53 bp, Artificial Sequence; identical to SEQ ID NO: 1432
  Description of Artificial Sequence: Synthetic all nuts; 5' sequence and inner sequence

SEQ ID NO: 33523 - DNA, 53 bp, Artificial Sequence; identical to SEQ ID NO: 5888
  Description of Artificial Sequence: Synthetic all nuts; 5' sequence and inner sequence

SEQ ID NO: 33524 - DNA, 53 bp, Artificial Sequence; identical to SEQ ID NO: 1072
  Description of Artificial Sequence: Synthetic all nuts; 5' sequence and inner sequence

SEQ ID NO: 33525 - DNA, 53 bp, Artificial Sequence; identical to SEQ ID NO: 21929
  Description of Artificial Sequence: Synthetic all nuts; 5' sequence and inner sequence

SEQ ID NO: 33526 - DNA, 53 bp, Artificial Sequence; identical to SEQ ID NO: 1678
  Description of Artificial Sequence: Synthetic all nuts; 5' sequence and inner sequence

SEQ ID NO: 33527 - DNA, 53 bp, Artificial Sequence; identical to SEQ ID NO: 1484
  Description of Artificial Sequence: Synthetic all nuts; 5' sequence and inner sequence

SEQ ID NO: 33528 - DNA, 53 bp, Artificial Sequence; identical to SEQ ID NO: 1524
  Description of Artificial Sequence: Synthetic all nuts; 5' sequence and inner sequence

SEQ ID NO: 33529 - DNA, 53 bp, Artificial Sequence; identical to SEQ ID NO: 1477
  Description of Artificial Sequence: Synthetic all nuts; 5' sequence and inner sequence

SEQ ID NO: 33530 - DNA, 53 bp, Artificial Sequence; identical to SEQ ID NO: 1579
  Description of Artificial Sequence: Synthetic all nuts; 5' sequence and inner sequence

SEQ ID NO: 33531 - DNA, 53 bp, Artificial Sequence; identical to SEQ ID NO: 1046
  Description of Artificial Sequence: Synthetic all nuts; 5' sequence and inner sequence

SEQ ID NO: 33532 - DNA, 53 bp, Artificial Sequence; identical to SEQ ID NO: 1351
  Description of Artificial Sequence: Synthetic all nuts; 5' sequence and inner sequence

SEQ ID NO: 33533 - DNA, 53 bp, Artificial Sequence; identical to SEQ ID NO: 9579
  Description of Artificial Sequence: Synthetic all nuts; 5' sequence and inner sequence

SEQ ID NO: 33534 - DNA, 53 bp, Artificial Sequence; identical to SEQ ID NO: 17695
  Description of Artificial Sequence: Synthetic all nuts; 5' sequence and inner sequence

SEQ ID NO: 33535 - DNA, 53 bp, Artificial Sequence; identical to SEQ ID NO: 1274
  Description of Artificial Sequence: Synthetic all nuts; 5' sequence and inner sequence

SEQ ID NO: 33536 - DNA, 53 bp, Artificial Sequence
  Description of Artificial Sequence: Synthetic all nuts; 5' sequence and inner sequence
tagggaagagaaggacatatgatgtacgcacgatgagctatcaatgtgccatg

SEQ ID NO: 33537 - DNA, 53 bp, Artificial Sequence; identical to SEQ ID NO: 21382
  Description of Artificial Sequence: Synthetic all nuts; 5' sequence and inner sequence

SEQ ID NO: 33538 - DNA, 52 bp, Artificial Sequence; identical to SEQ ID NO: 1070
  Description of Artificial Sequence: Synthetic all nuts; 5' sequence and inner sequence

SEQ ID NO: 33539 - DNA, 49 bp, Artificial Sequence; identical to SEQ ID NO: 1822
  Description of Artificial Sequence: Synthetic all nuts; 5' sequence and inner sequence

SEQ ID NO: 33540 - DNA, 53 bp, Artificial Sequence; identical to SEQ ID NO: 1401
  Description of Artificial Sequence: Synthetic all nuts; 5' sequence and inner sequence

SEQ ID NO: 33541 - DNA, 53 bp, Artificial Sequence; identical to SEQ ID NO: 1821
  Description of Artificial Sequence: Synthetic all nuts; 5' sequence and inner sequence

SEQ ID NO: 33542 - DNA, 53 bp, Artificial Sequence
  Description of Artificial Sequence: Synthetic all nuts; 5' sequence and inner sequence
tagggaagagaaggacatatgatgtacgcatcgtcccgtcatgttgttccgta

SEQ ID NO: 33543 - DNA, 53 bp, Artificial Sequence; identical to SEQ ID NO: 13821
  Description of Artificial Sequence: Synthetic all nuts; 5' sequence and inner sequence

SEQ ID NO: 33544 - DNA, 53 bp, Artificial Sequence; identical to SEQ ID NO: 1695
  Description of Artificial Sequence: Synthetic all nuts; 5' sequence and inner sequence

SEQ ID NO: 33545 - DNA, 53 bp, Artificial Sequence; identical to SEQ ID NO: 1020
  Description of Artificial Sequence: Synthetic all nuts; 5' sequence and inner sequence

SEQ ID NO: 33546 - DNA, 53 bp, Artificial Sequence; identical to SEQ ID NO: 5641
  Description of Artificial Sequence: Synthetic all nuts; 5' sequence and inner sequence

SEQ ID NO: 33547 - DNA, 53 bp, Artificial Sequence; identical to SEQ ID NO: 17677
  Description of Artificial Sequence: Synthetic all nuts; 5' sequence and inner sequence

SEQ ID NO: 33548 - DNA, 53 bp, Artificial Sequence; identical to SEQ ID NO: 1362
  Description of Artificial Sequence: Synthetic all nuts; 5' sequence and inner sequence

SEQ ID NO: 33549 - DNA, 53 bp, Artificial Sequence; identical to SEQ ID NO: 5280
  Description of Artificial Sequence: Synthetic all nuts; 5' sequence and inner sequence

SEQ ID NO: 33550 - DNA, 53 bp, Artificial Sequence; identical to SEQ ID NO: 21604
  Description of Artificial Sequence: Synthetic all nuts; 5' sequence and inner sequence

SEQ ID NO: 33551 - DNA, 53 bp, Artificial Sequence; identical to SEQ ID NO: 1121
  Description of Artificial Sequence: Synthetic all nuts; 5' sequence and inner sequence

SEQ ID NO: 33552 - DNA, 53 bp, Artificial Sequence
  Description of Artificial Sequence: Synthetic all nuts; 5' sequence and inner sequence
tagggaagagaaggacatatgatggccaaacgaagcgtggatcagtgcttgtc

SEQ ID NO: 33553 - DNA, 53 bp, Artificial Sequence; identical to SEQ ID NO: 5987
  Description of Artificial Sequence: Synthetic all nuts; 5' sequence and inner sequence

SEQ ID NO: 33554 - DNA, 53 bp, Artificial Sequence; identical to SEQ ID NO: 1038
  Description of Artificial Sequence: Synthetic all nuts; 5' sequence and inner sequence

SEQ ID NO: 33555 - DNA, 53 bp, Artificial Sequence; identical to SEQ ID NO: 9824
  Description of Artificial Sequence: Synthetic all nuts; 5' sequence and inner sequence

SEQ ID NO: 33556 - DNA, 53 bp, Artificial Sequence; identical to SEQ ID NO: 1532
  Description of Artificial Sequence: Synthetic all nuts; 5' sequence and inner sequence

SEQ ID NO: 33557 - DNA, 53 bp, Artificial Sequence; identical to SEQ ID NO: 6000
  Description of Artificial Sequence: Synthetic all nuts; 5' sequence and inner sequence

SEQ ID NO: 33558 - DNA, 53 bp, Artificial Sequence; identical to SEQ ID NO: 1596
  Description of Artificial Sequence: Synthetic all nuts; 5' sequence and inner sequence

SEQ ID NO: 33559 - DNA, 53 bp, Artificial Sequence; identical to SEQ ID NO: 1434
  Description of Artificial Sequence: Synthetic all nuts; 5' sequence and inner sequence

SEQ ID NO: 33560 - DNA, 53 bp, Artificial Sequence; identical to SEQ ID NO: 21974
  Description of Artificial Sequence: Synthetic all nuts; 5' sequence and inner sequence

SEQ ID NO: 33561 - DNA, 53 bp, Artificial Sequence; identical to SEQ ID NO: 5761
  Description of Artificial Sequence: Synthetic all nuts; 5' sequence and inner sequence

SEQ ID NO: 33562 - DNA, 53 bp, Artificial Sequence; identical to SEQ ID NO: 1418
  Description of Artificial Sequence: Synthetic all nuts; 5' sequence and inner sequence

SEQ ID NO: 33563 - DNA, 52 bp, Artificial Sequence; identical to SEQ ID NO: 17665
  Description of Artificial Sequence: Synthetic all nuts; 5' sequence and inner sequence

SEQ ID NO: 33564 - DNA, 53 bp, Artificial Sequence; identical to SEQ ID NO: 21884
  Description of Artificial Sequence: Synthetic all nuts; 5' sequence and inner sequence

SEQ ID NO: 33565 - DNA, 53 bp, Artificial Sequence
  Description of Artificial Sequence: Synthetic all nuts; 5' sequence and inner sequence
tagggaagagaaggacatatgatggaacgacgcgcaccgtatcaagttgggca

SEQ ID NO: 33566 - DNA, 53 bp, Artificial Sequence; identical to SEQ ID NO: 21463
  Description of Artificial Sequence: Synthetic all nuts; 5' sequence and inner sequence

SEQ ID NO: 33567 - DNA, 53 bp, Artificial Sequence; identical to SEQ ID NO: 1419
  Description of Artificial Sequence: Synthetic all nuts; 5' sequence and inner sequence

SEQ ID NO: 33568 - DNA, 53 bp, Artificial Sequence; identical to SEQ ID NO: 9892
  Description of Artificial Sequence: Synthetic all nuts; 5' sequence and inner sequence

SEQ ID NO: 33569 - DNA, 53 bp, Artificial Sequence; identical to SEQ ID NO: 1915
  Description of Artificial Sequence: Synthetic all nuts; 5' sequence and inner sequence

SEQ ID NO: 33570 - DNA, 53 bp, Artificial Sequence; identical to SEQ ID NO: 1507
  Description of Artificial Sequence: Synthetic all nuts; 5' sequence and inner sequence

SEQ ID NO: 33571 - DNA, 53 bp, Artificial Sequence; identical to SEQ ID NO: 25839
  Description of Artificial Sequence: Synthetic all nuts; 5' sequence and inner sequence

SEQ ID NO: 33572 - DNA, 53 bp, Artificial Sequence; identical to SEQ ID NO: 1223
  Description of Artificial Sequence: Synthetic all nuts; 5' sequence and inner sequence

SEQ ID NO: 33573 - DNA, 53 bp, Artificial Sequence; identical to SEQ ID NO: 1403
  Description of Artificial Sequence: Synthetic all nuts; 5' sequence and inner sequence

SEQ ID NO: 33574 - DNA, 53 bp, Artificial Sequence
  Description of Artificial Sequence: Synthetic all nuts; 5' sequence and inner sequence
tagggaagagaaggacatatgatggcatgcgatggatgtgcgttgtgtctgtc

SEQ ID NO: 33575 - DNA, 53 bp, Artificial Sequence; identical to SEQ ID NO: 17585
  Description of Artificial Sequence: Synthetic all nuts; 5' sequence and inner sequence

SEQ ID NO: 33576 - DNA, 53 bp, Artificial Sequence; identical to SEQ ID NO: 29885
  Description of Artificial Sequence: Synthetic all nuts; 5' sequence and inner sequence

SEQ ID NO: 33577 - DNA, 53 bp, Artificial Sequence; identical to SEQ ID NO: 21990
  Description of Artificial Sequence: Synthetic all nuts; 5' sequence and inner sequence

SEQ ID NO: 33578 - DNA, 53 bp, Artificial Sequence; identical to SEQ ID NO: 21580
  Description of Artificial Sequence: Synthetic all nuts; 5' sequence and inner sequence

SEQ ID NO: 33579 - DNA, 53 bp, Artificial Sequence; identical to SEQ ID NO: 1156
  Description of Artificial Sequence: Synthetic all nuts; 5' sequence and inner sequence

SEQ ID NO: 33580 - DNA, 53 bp, Artificial Sequence; identical to SEQ ID NO: 1816
  Description of Artificial Sequence: Synthetic all nuts; 5' sequence and inner sequence

SEQ ID NO: 33581 - DNA, 53 bp, Artificial Sequence; identical to SEQ ID NO: 1697
  Description of Artificial Sequence: Synthetic all nuts; 5' sequence and inner sequence

SEQ ID NO: 33582 - DNA, 53 bp, Artificial Sequence; identical to SEQ ID NO: 1325
  Description of Artificial Sequence: Synthetic all nuts; 5' sequence and inner sequence

SEQ ID NO: 33583 - DNA, 53 bp, Artificial Sequence; identical to SEQ ID NO: 1806
  Description of Artificial Sequence: Synthetic all nuts; 5' sequence and inner sequence

SEQ ID NO: 33584 - DNA, 53 bp, Artificial Sequence
  Description of Artificial Sequence: Synthetic all nuts; 5' sequence and inner sequence
tagggaagagaaggacatatgatgcacgcaacgaacctacgagtgatcgtgga

SEQ ID NO: 33585 - DNA, 53 bp, Artificial Sequence
  Description of Artificial Sequence: Synthetic all nuts; 5' sequence and inner sequence
tagggaagagaaggacatatgatgtcatgcacgaacactatcatggcggcatt

SEQ ID NO: 33586 - DNA, 53 bp, Artificial Sequence; identical to SEQ ID NO: 21708
  Description of Artificial Sequence: Synthetic all nuts; 5' sequence and inner sequence

SEQ ID NO: 33587 - DNA, 53 bp, Artificial Sequence; identical to SEQ ID NO: 1375
  Description of Artificial Sequence: Synthetic all nuts; 5' sequence and inner sequence

SEQ ID NO: 33588 - DNA, 53 bp, Artificial Sequence; identical to SEQ ID NO: 1611
  Description of Artificial Sequence: Synthetic all nuts; 5' sequence and inner sequence

SEQ ID NO: 33589 - DNA, 53 bp, Artificial Sequence; identical to SEQ ID NO: 1450
  Description of Artificial Sequence: Synthetic all nuts; 5' sequence and inner sequence

SEQ ID NO: 33590 - DNA, 53 bp, Artificial Sequence; identical to SEQ ID NO: 1152
  Description of Artificial Sequence: Synthetic all nuts; 5' sequence and inner sequence

SEQ ID NO: 33591 - DNA, 53 bp, Artificial Sequence; identical to SEQ ID NO: 1385
  Description of Artificial Sequence: Synthetic all nuts; 5' sequence and inner sequence

SEQ ID NO: 33592 - DNA, 53 bp, Artificial Sequence; identical to SEQ ID NO: 1440
  Description of Artificial Sequence: Synthetic all nuts; 5' sequence and inner sequence

SEQ ID NO: 33593 - DNA, 53 bp, Artificial Sequence; identical to SEQ ID NO: 5659
  Description of Artificial Sequence: Synthetic all nuts; 5' sequence and inner sequence

SEQ ID NO: 33594 - DNA, 53 bp, Artificial Sequence; identical to SEQ ID NO: 5802
  Description of Artificial Sequence: Synthetic all nuts; 5' sequence and inner sequence

SEQ ID NO: 33595 - DNA, 53 bp, Artificial Sequence; identical to SEQ ID NO: 1010
  Description of Artificial Sequence: Synthetic all nuts; 5' sequence and inner sequence

SEQ ID NO: 33596 - DNA, 54 bp, Artificial Sequence; identical to SEQ ID NO: 1258
  Description of Artificial Sequence: Synthetic all nuts; 5' sequence and inner sequence

SEQ ID NO: 33597 - DNA, 53 bp, Artificial Sequence; identical to SEQ ID NO: 1754
  Description of Artificial Sequence: Synthetic all nuts; 5' sequence and inner sequence

SEQ ID NO: 33598 - DNA, 53 bp, Artificial Sequence; identical to SEQ ID NO: 1094
  Description of Artificial Sequence: Synthetic all nuts; 5' sequence and inner sequence

SEQ ID NO: 33599 - DNA, 53 bp, Artificial Sequence; identical to SEQ ID NO: 13944
  Description of Artificial Sequence: Synthetic all nuts; 5' sequence and inner sequence

SEQ ID NO: 33600 - DNA, 53 bp, Artificial Sequence; identical to SEQ ID NO: 1728
  Description of Artificial Sequence: Synthetic all nuts; 5' sequence and inner sequence

SEQ ID NO: 33601 - DNA, 53 bp, Artificial Sequence; identical to SEQ ID NO: 21302
  Description of Artificial Sequence: Synthetic all nuts; 5' sequence and inner sequence

SEQ ID NO: 33602 - DNA, 53 bp, Artificial Sequence; identical to SEQ ID NO: 13945
  Description of Artificial Sequence: Synthetic all nuts; 5' sequence and inner sequence

SEQ ID NO: 33603 - DNA, 53 bp, Artificial Sequence; identical to SEQ ID NO: 1356
  Description of Artificial Sequence: Synthetic all nuts; 5' sequence and inner sequence

SEQ ID NO: 33604 - DNA, 53 bp, Artificial Sequence; identical to SEQ ID NO: 1666
  Description of Artificial Sequence: Synthetic all nuts; 5' sequence and inner sequence

SEQ ID NO: 33605 - DNA, 53 bp, Artificial Sequence; identical to SEQ ID NO: 1916
  Description of Artificial Sequence: Synthetic all nuts; 5' sequence and inner sequence

SEQ ID NO: 33606 - DNA, 53 bp, Artificial Sequence
  Description of Artificial Sequence: Synthetic all nuts; 5' sequence and inner sequence
tagggaagagaaggacatatgatcgcaccgtcgagacgtcatgcacgctgaca

SEQ ID NO: 33607 - DNA, 53 bp, Artificial Sequence; identical to SEQ ID NO: 21385
  Description of Artificial Sequence: Synthetic all nuts; 5' sequence and inner sequence

SEQ ID NO: 33608 - DNA, 53 bp, Artificial Sequence; identical to SEQ ID NO: 1090
  Description of Artificial Sequence: Synthetic all nuts; 5' sequence and inner sequence

SEQ ID NO: 33609 - DNA, 53 bp, Artificial Sequence; identical to SEQ ID NO: 1105
  Description of Artificial Sequence: Synthetic all nuts; 5' sequence and inner sequence

SEQ ID NO: 33610 - DNA, 53 bp, Artificial Sequence; identical to SEQ ID NO: 1050
  Description of Artificial Sequence: Synthetic all nuts; 5' sequence and inner sequence

SEQ ID NO: 33611 - DNA, 53 bp, Artificial Sequence; identical to SEQ ID NO: 21691
  Description of Artificial Sequence: Synthetic all nuts; 5' sequence and inner sequence

SEQ ID NO: 33612 - DNA, 53 bp, Artificial Sequence; identical to SEQ ID NO: 21560
  Description of Artificial Sequence: Synthetic all nuts; 5' sequence and inner sequence

SEQ ID NO: 33613 - DNA, 53 bp, Artificial Sequence; identical to SEQ ID NO: 1580
  Description of Artificial Sequence: Synthetic all nuts; 5' sequence and inner sequence

SEQ ID NO: 33614 - DNA, 53 bp, Artificial Sequence; identical to SEQ ID NO: 1994
  Description of Artificial Sequence: Synthetic all nuts; 5' sequence and inner sequence

SEQ ID NO: 33615 - DNA, 53 bp, Artificial Sequence; identical to SEQ ID NO: 1324
  Description of Artificial Sequence: Synthetic all nuts; 5' sequence and inner sequence

SEQ ID NO: 33616 - DNA, 53 bp, Artificial Sequence; identical to SEQ ID NO: 1349
  Description of Artificial Sequence: Synthetic all nuts; 5' sequence and inner sequence

SEQ ID NO: 33617 - DNA, 53 bp, Artificial Sequence; identical to SEQ ID NO: 1414
  Description of Artificial Sequence: Synthetic all nuts; 5' sequence and inner sequence

SEQ ID NO: 33618 - DNA, 53 bp, Artificial Sequence
  Description of Artificial Sequence: Synthetic all nuts; 5' sequence and inner sequence
tagggaagagaaggacatatgatccgtagcgacatcaagcggtgctgtgcgtg

SEQ ID NO: 33619 - DNA, 53 bp, Artificial Sequence
  Description of Artificial Sequence: Synthetic all nuts; 5' sequence and inner sequence
tagggaagagaaggacatatgatccatcgcgtcactatcatgtgggtcacgta

SEQ ID NO: 33620 - DNA, 53 bp, Artificial Sequence; identical to SEQ ID NO: 1360
  Description of Artificial Sequence: Synthetic all nuts; 5' sequence and inner sequence

SEQ ID NO: 33621 - DNA, 49 bp, Artificial Sequence; identical to SEQ ID NO: 1893
  Description of Artificial Sequence: Synthetic all nuts; 5' sequence and inner sequence

SEQ ID NO: 33622 - DNA, 53 bp, Artificial Sequence
  Description of Artificial Sequence: Synthetic all nuts; 5' sequence and inner sequence
tagggaagagaaggacatatgatgtcatgcacgaacactatcatggcggcata

SEQ ID NO: 33623 - DNA, 53 bp, Artificial Sequence; identical to SEQ ID NO: 1058
  Description of Artificial Sequence: Synthetic all nuts; 5' sequence and inner sequence

SEQ ID NO: 33624 - DNA, 53 bp, Artificial Sequence
  Description of Artificial Sequence: Synthetic all nuts; 5' sequence and inner sequence
tagggaagagaaggacatatgatgcactctgctgaccgatcgagtatgcgtca

SEQ ID NO: 33625 - DNA, 53 bp, Artificial Sequence; identical to SEQ ID NO: 13673
  Description of Artificial Sequence: Synthetic all nuts; 5' sequence and inner sequence

SEQ ID NO: 33626 - DNA, 53 bp, Artificial Sequence; identical to SEQ ID NO: 1119
  Description of Artificial Sequence: Synthetic all nuts; 5' sequence and inner sequence

SEQ ID NO: 33627 - DNA, 53 bp, Artificial Sequence; identical to SEQ ID NO: 1104
  Description of Artificial Sequence: Synthetic all nuts; 5' sequence and inner sequence

SEQ ID NO: 33628 - DNA, 53 bp, Artificial Sequence; identical to SEQ ID NO: 1210
  Description of Artificial Sequence: Synthetic all nuts; 5' sequence and inner sequence

SEQ ID NO: 33629 - DNA, 53 bp, Artificial Sequence; identical to SEQ ID NO: 1085
  Description of Artificial Sequence: Synthetic all nuts; 5' sequence and inner sequence

SEQ ID NO: 33630 - DNA, 53 bp, Artificial Sequence; identical to SEQ ID NO: 1178
  Description of Artificial Sequence: Synthetic all nuts; 5' sequence and inner sequence

SEQ ID NO: 33631 - DNA, 53 bp, Artificial Sequence; identical to SEQ ID NO: 1458
  Description of Artificial Sequence: Synthetic all nuts; 5' sequence and inner sequence

SEQ ID NO: 33632 - DNA, 53 bp, Artificial Sequence; identical to SEQ ID NO: 1012
  Description of Artificial Sequence: Synthetic all nuts; 5' sequence and inner sequence

SEQ ID NO: 33633 - DNA, 53 bp, Artificial Sequence; identical to SEQ ID NO: 1520
  Description of Artificial Sequence: Synthetic all nuts; 5' sequence and inner sequence

SEQ ID NO: 33634 - DNA, 53 bp, Artificial Sequence; identical to SEQ ID NO: 9810
  Description of Artificial Sequence: Synthetic all nuts; 5' sequence and inner sequence

SEQ ID NO: 33635 - DNA, 53 bp, Artificial Sequence; identical to SEQ ID NO: 1448
  Description of Artificial Sequence: Synthetic all nuts; 5' sequence and inner sequence

SEQ ID NO: 33636 - DNA, 53 bp, Artificial Sequence; identical to SEQ ID NO: 1688
  Description of Artificial Sequence: Synthetic all nuts; 5' sequence and inner sequence

SEQ ID NO: 33637 - DNA, 53 bp, Artificial Sequence; identical to SEQ ID NO: 5960
  Description of Artificial Sequence: Synthetic all nuts; 5' sequence and inner sequence

SEQ ID NO: 33638 - DNA, 53 bp, Artificial Sequence; identical to SEQ ID NO: 1095
  Description of Artificial Sequence: Synthetic all nuts; 5' sequence and inner sequence

SEQ ID NO: 33639 - DNA, 53 bp, Artificial Sequence; identical to SEQ ID NO: 1112
  Description of Artificial Sequence: Synthetic all nuts; 5' sequence and inner sequence

SEQ ID NO: 33640 - DNA, 53 bp, Artificial Sequence; identical to SEQ ID NO: 1405
  Description of Artificial Sequence: Synthetic all nuts; 5' sequence and inner sequence

SEQ ID NO: 33641 - DNA, 53 bp, Artificial Sequence; identical to SEQ ID NO: 1268
  Description of Artificial Sequence: Synthetic all nuts; 5' sequence and inner sequence

SEQ ID NO: 33642 - DNA, 53 bp, Artificial Sequence; identical to SEQ ID NO: 21895
  Description of Artificial Sequence: Synthetic all nuts; 5' sequence and inner sequence

SEQ ID NO: 33643 - DNA, 53 bp, Artificial Sequence; identical to SEQ ID NO: 9872
  Description of Artificial Sequence: Synthetic all nuts; 5' sequence and inner sequence

SEQ ID NO: 33644 - DNA, 53 bp, Artificial Sequence; identical to SEQ ID NO: 9949
  Description of Artificial Sequence: Synthetic all nuts; 5' sequence and inner sequence

SEQ ID NO: 33645 - DNA, 53 bp, Artificial Sequence; identical to SEQ ID NO: 1413
  Description of Artificial Sequence: Synthetic all nuts; 5' sequence and inner sequence

SEQ ID NO: 33646 - DNA, 53 bp, Artificial Sequence; identical to SEQ ID NO: 5317
  Description of Artificial Sequence: Synthetic all nuts; 5' sequence and inner sequence

SEQ ID NO: 33647 - DNA, 53 bp, Artificial Sequence; identical to SEQ ID NO: 5870
  Description of Artificial Sequence: Synthetic all nuts; 5' sequence and inner sequence

SEQ ID NO: 33648 - DNA, 53 bp, Artificial Sequence; identical to SEQ ID NO: 1512
  Description of Artificial Sequence: Synthetic all nuts; 5' sequence and inner sequence

SEQ ID NO: 33649 - DNA, 53 bp, Artificial Sequence; identical to SEQ ID NO: 1100
  Description of Artificial Sequence: Synthetic all nuts; 5' sequence and inner sequence

SEQ ID NO: 33650 - DNA, 53 bp, Artificial Sequence; identical to SEQ ID NO: 1392
  Description of Artificial Sequence: Synthetic all nuts; 5' sequence and inner sequence

SEQ ID NO: 33651 - DNA, 53 bp, Artificial Sequence; identical to SEQ ID NO: 21515
  Description of Artificial Sequence: Synthetic all nuts; 5' sequence and inner sequence

SEQ ID NO: 33652 - DNA, 53 bp, Artificial Sequence; identical to SEQ ID NO: 1022
  Description of Artificial Sequence: Synthetic all nuts; 5' sequence and inner sequence

SEQ ID NO: 33653 - DNA, 52 bp, Artificial Sequence; identical to SEQ ID NO: 1251
  Description of Artificial Sequence: Synthetic all nuts; 5' sequence and inner sequence

SEQ ID NO: 33654 - DNA, 53 bp, Artificial Sequence; identical to SEQ ID NO: 21407
  Description of Artificial Sequence: Synthetic all nuts; 5' sequence and inner sequence

SEQ ID NO: 33655 - DNA, 53 bp, Artificial Sequence; identical to SEQ ID NO: 13953
  Description of Artificial Sequence: Synthetic all nuts; 5' sequence and inner sequence

SEQ ID NO: 33656 - DNA, 53 bp, Artificial Sequence; identical to SEQ ID NO: 5977
  Description of Artificial Sequence: Synthetic all nuts; 5' sequence and inner sequence

SEQ ID NO: 33657 - DNA, 53 bp, Artificial Sequence; identical to SEQ ID NO: 5230
  Description of Artificial Sequence: Synthetic all nuts; 5' sequence and inner sequence

SEQ ID NO: 33658 - DNA, 53 bp, Artificial Sequence; identical to SEQ ID NO: 1037
  Description of Artificial Sequence: Synthetic all nuts; 5' sequence and inner sequence

SEQ ID NO: 33659 - DNA, 53 bp, Artificial Sequence
  Description of Artificial Sequence: Synthetic all nuts; 5' sequence and inner sequence
tagggaagagaaggacatatgatgggatgcacgcacctacacgtgggtatgga

SEQ ID NO: 33660 - DNA, 53 bp, Artificial Sequence
  Description of Artificial Sequence: Synthetic all nuts; 5' sequence and inner sequence
tagggaagagaaggacatatgatgcacgacgcgcaccctatcatgaggccatg

SEQ ID NO: 33661 - DNA, 53 bp, Artificial Sequence; identical to SEQ ID NO: 1348
  Description of Artificial Sequence: Synthetic all nuts; 5' sequence and inner sequence

SEQ ID NO: 33662 - DNA, 53 bp, Artificial Sequence; identical to SEQ ID NO: 6001
  Description of Artificial Sequence: Synthetic all nuts; 5' sequence and inner sequence

SEQ ID NO: 33663 - DNA, 53 bp, Artificial Sequence; identical to SEQ ID NO: 21596
  Description of Artificial Sequence: Synthetic all nuts; 5' sequence and inner sequence

SEQ ID NO: 33664 - DNA, 53 bp, Artificial Sequence; identical to SEQ ID NO: 1080
  Description of Artificial Sequence: Synthetic all nuts; 5' sequence and inner sequence

SEQ ID NO: 33665 - DNA, 53 bp, Artificial Sequence
  Description of Artificial Sequence: Synthetic all nuts; 5' sequence and inner sequence
tagggaagagaaggacatatgatcgcacacccgtcatagcggtcacgtgcatg

SEQ ID NO: 33666 - DNA, 53 bp, Artificial Sequence
  Description of Artificial Sequence: Synthetic all nuts; 5' sequence and inner sequence
tagggaagagaaggacatatgatcgcaccgtcgatacgtcatgcacgcggaca

SEQ ID NO: 33667 - DNA, 53 bp, Artificial Sequence; identical to SEQ ID NO: 1118
  Description of Artificial Sequence: Synthetic all nuts; 5' sequence and inner sequence

SEQ ID NO: 33668 - DNA, 53 bp, Artificial Sequence; identical to SEQ ID NO: 1466
  Description of Artificial Sequence: Synthetic all nuts; 5' sequence and inner sequence

SEQ ID NO: 33669 - DNA, 53 bp, Artificial Sequence; identical to SEQ ID NO: 1091
  Description of Artificial Sequence: Synthetic all nuts; 5' sequence and inner sequence

SEQ ID NO: 33670 - DNA, 53 bp, Artificial Sequence; identical to SEQ ID NO: 1272
  Description of Artificial Sequence: Synthetic all nuts; 5' sequence and inner sequence

SEQ ID NO: 33671 - DNA, 53 bp, Artificial Sequence; identical to SEQ ID NO: 1115
  Description of Artificial Sequence: Synthetic all nuts; 5' sequence and inner sequence

SEQ ID NO: 33672 - DNA, 53 bp, Artificial Sequence; identical to SEQ ID NO: 1962
  Description of Artificial Sequence: Synthetic all nuts; 5' sequence and inner sequence

SEQ ID NO: 33673 - DNA, 53 bp, Artificial Sequence; identical to SEQ ID NO: 29979
  Description of Artificial Sequence: Synthetic all nuts; 5' sequence and inner sequence

SEQ ID NO: 33674 - DNA, 53 bp, Artificial Sequence; identical to SEQ ID NO: 1724
  Description of Artificial Sequence: Synthetic all nuts; 5' sequence and inner sequence

SEQ ID NO: 33675 - DNA, 53 bp, Artificial Sequence; identical to SEQ ID NO: 17709
  Description of Artificial Sequence: Synthetic all nuts; 5' sequence and inner sequence

SEQ ID NO: 33676 - DNA, 53 bp, Artificial Sequence; identical to SEQ ID NO: 17627
  Description of Artificial Sequence: Synthetic all nuts; 5' sequence and inner sequence

SEQ ID NO: 33677 - DNA, 53 bp, Artificial Sequence; identical to SEQ ID NO: 1446
  Description of Artificial Sequence: Synthetic all nuts; 5' sequence and inner sequence

SEQ ID NO: 33678 - DNA, 53 bp, Artificial Sequence; identical to SEQ ID NO: 1214
  Description of Artificial Sequence: Synthetic all nuts; 5' sequence and inner sequence

SEQ ID NO: 33679 - DNA, 53 bp, Artificial Sequence; identical to SEQ ID NO: 1920
  Description of Artificial Sequence: Synthetic all nuts; 5' sequence and inner sequence

SEQ ID NO: 33680 - DNA, 53 bp, Artificial Sequence; identical to SEQ ID NO: 21829
  Description of Artificial Sequence: Synthetic all nuts; 5' sequence and inner sequence

SEQ ID NO: 33681 - DNA, 53 bp, Artificial Sequence; identical to SEQ ID NO: 9938
  Description of Artificial Sequence: Synthetic all nuts; 5' sequence and inner sequence

SEQ ID NO: 33682 - DNA, 53 bp, Artificial Sequence; identical to SEQ ID NO: 29806
  Description of Artificial Sequence: Synthetic all nuts; 5' sequence and inner sequence

SEQ ID NO: 33683 - DNA, 54 bp, Artificial Sequence; identical to SEQ ID NO: 29686
  Description of Artificial Sequence: Synthetic all nuts; 5' sequence and inner sequence

SEQ ID NO: 33684 - DNA, 53 bp, Artificial Sequence; identical to SEQ ID NO: 1018
  Description of Artificial Sequence: Synthetic all nuts; 5' sequence and inner sequence

SEQ ID NO: 33685 - DNA, 53 bp, Artificial Sequence; identical to SEQ ID NO: 5823
  Description of Artificial Sequence: Synthetic all nuts; 5' sequence and inner sequence

SEQ ID NO: 33686 - DNA, 53 bp, Artificial Sequence; identical to SEQ ID NO: 1196
  Description of Artificial Sequence: Synthetic all nuts; 5' sequence and inner sequence

SEQ ID NO: 33687 - DNA, 53 bp, Artificial Sequence; identical to SEQ ID NO: 1278
  Description of Artificial Sequence: Synthetic all nuts; 5' sequence and inner sequence

SEQ ID NO: 33688 - DNA, 53 bp, Artificial Sequence; identical to SEQ ID NO: 17832
  Description of Artificial Sequence: Synthetic all nuts; 5' sequence and inner sequence

SEQ ID NO: 33689 - DNA, 53 bp, Artificial Sequence
  Description of Artificial Sequence: Synthetic all nuts; 5' sequence and inner sequence
tagggaagagaaggacatatgatcgacgcgacatgaaggcatgggtaggcacg

SEQ ID NO: 33690 - DNA, 53 bp, Artificial Sequence; identical to SEQ ID NO: 1032
  Description of Artificial Sequence: Synthetic all nuts; 5' sequence and inner sequence

SEQ ID NO: 33691 - DNA, 53 bp, Artificial Sequence; identical to SEQ ID NO: 1917
  Description of Artificial Sequence: Synthetic all nuts; 5' sequence and inner sequence

SEQ ID NO: 33692 - DNA, 53 bp, Artificial Sequence; identical to SEQ ID NO: 1603
  Description of Artificial Sequence: Synthetic all nuts; 5' sequence and inner sequence

SEQ ID NO: 33693 - DNA, 53 bp, Artificial Sequence; identical to SEQ ID NO: 13997
  Description of Artificial Sequence: Synthetic all nuts; 5' sequence and inner sequence

SEQ ID NO: 33694 - DNA, 53 bp, Artificial Sequence; identical to SEQ ID NO: 1850
  Description of Artificial Sequence: Synthetic all nuts; 5' sequence and inner sequence

SEQ ID NO: 33695 - DNA, 53 bp, Artificial Sequence; identical to SEQ ID NO: 13996
  Description of Artificial Sequence: Synthetic all nuts; 5' sequence and inner sequence

SEQ ID NO: 33696 - DNA, 53 bp, Artificial Sequence; identical to SEQ ID NO: 1232
  Description of Artificial Sequence: Synthetic all nuts; 5' sequence and inner sequence

SEQ ID NO: 33697 - DNA, 53 bp, Artificial Sequence; identical to SEQ ID NO: 1540
  Description of Artificial Sequence: Synthetic all nuts; 5' sequence and inner sequence

SEQ ID NO: 33698 - DNA, 53 bp, Artificial Sequence; identical to SEQ ID NO: 1396
  Description of Artificial Sequence: Synthetic all nuts; 5' sequence and inner sequence

SEQ ID NO: 33699 - DNA, 53 bp, Artificial Sequence; identical to SEQ ID NO: 13986
  Description of Artificial Sequence: Synthetic all nuts; 5' sequence and inner sequence

SEQ ID NO: 33700 - DNA, 53 bp, Artificial Sequence; identical to SEQ ID NO: 1757
  Description of Artificial Sequence: Synthetic all nuts; 5' sequence and inner sequence

SEQ ID NO: 33701 - DNA, 53 bp, Artificial Sequence; identical to SEQ ID NO: 1084
  Description of Artificial Sequence: Synthetic all nuts; 5' sequence and inner sequence

SEQ ID NO: 33702 - DNA, 53 bp, Artificial Sequence; identical to SEQ ID NO: 21533
  Description of Artificial Sequence: Synthetic all nuts; 5' sequence and inner sequence

SEQ ID NO: 33703 - DNA, 53 bp, Artificial Sequence; identical to SEQ ID NO: 1900
  Description of Artificial Sequence: Synthetic all nuts; 5' sequence and inner sequence

SEQ ID NO: 33704 - DNA, 53 bp, Artificial Sequence; identical to SEQ ID NO: 1654
  Description of Artificial Sequence: Synthetic all nuts; 5' sequence and inner sequence

SEQ ID NO: 33705 - DNA, 53 bp, Artificial Sequence; identical to SEQ ID NO: 5377
  Description of Artificial Sequence: Synthetic all nuts; 5' sequence and inner sequence

SEQ ID NO: 33706 - DNA, 53 bp, Artificial Sequence; identical to SEQ ID NO: 1846
  Description of Artificial Sequence: Synthetic all nuts; 5' sequence and inner sequence

SEQ ID NO: 33707 - DNA, 53 bp, Artificial Sequence; identical to SEQ ID NO: 1420
  Description of Artificial Sequence: Synthetic all nuts; 5' sequence and inner sequence

SEQ ID NO: 33708 - DNA, 53 bp, Artificial Sequence; identical to SEQ ID NO: 1527
  Description of Artificial Sequence: Synthetic all nuts; 5' sequence and inner sequence

SEQ ID NO: 33709 - DNA, 53 bp, Artificial Sequence; identical to SEQ ID NO: 1753
  Description of Artificial Sequence: Synthetic all nuts; 5' sequence and inner sequence

SEQ ID NO: 33710 - DNA, 53 bp, Artificial Sequence; identical to SEQ ID NO: 1086
  Description of Artificial Sequence: Synthetic all nuts; 5' sequence and inner sequence

SEQ ID NO: 33711 - DNA, 53 bp, Artificial Sequence; identical to SEQ ID NO: 1481
  Description of Artificial Sequence: Synthetic all nuts; 5' sequence and inner sequence

SEQ ID NO: 33712 - DNA, 53 bp, Artificial Sequence; identical to SEQ ID NO: 1122
  Description of Artificial Sequence: Synthetic all nuts; 5' sequence and inner sequence

SEQ ID NO: 33713 - DNA, 53 bp, Artificial Sequence; identical to SEQ ID NO: 9978
  Description of Artificial Sequence: Synthetic all nuts; 5' sequence and inner sequence

SEQ ID NO: 33714 - DNA, 53 bp, Artificial Sequence; identical to SEQ ID NO: 5985
  Description of Artificial Sequence: Synthetic all nuts; 5' sequence and inner sequence

SEQ ID NO: 33715 - DNA, 53 bp, Artificial Sequence; identical to SEQ ID NO: 1142
  Description of Artificial Sequence: Synthetic all nuts; 5' sequence and inner sequence

SEQ ID NO: 33716 - DNA, 53 bp, Artificial Sequence; identical to SEQ ID NO: 25852
  Description of Artificial Sequence: Synthetic all nuts; 5' sequence and inner sequence

SEQ ID NO: 33717 - DNA, 53 bp, Artificial Sequence; identical to SEQ ID NO: 5405
  Description of Artificial Sequence: Synthetic all nuts; 5' sequence and inner sequence

SEQ ID NO: 33718 - DNA, 53 bp, Artificial Sequence; identical to SEQ ID NO: 1370
  Description of Artificial Sequence: Synthetic all nuts; 5' sequence and inner sequence

SEQ ID NO: 33719 - DNA, 53 bp, Artificial Sequence
  Description of Artificial Sequence: Synthetic all nuts; 5' sequence and inner sequence
tagggaagagaaggacatatgatggacatcgcgtcactaagtgcgtcttgtgc

SEQ ID NO: 33720 - DNA, 53 bp, Artificial Sequence; identical to SEQ ID NO: 1640
  Description of Artificial Sequence: Synthetic all nuts; 5' sequence and inner sequence

SEQ ID NO: 33721 - DNA, 53 bp, Artificial Sequence; identical to SEQ ID NO: 1853
  Description of Artificial Sequence: Synthetic all nuts; 5' sequence and inner sequence

SEQ ID NO: 33722 - DNA, 53 bp, Artificial Sequence; identical to SEQ ID NO: 5254
  Description of Artificial Sequence: Synthetic all nuts; 5' sequence and inner sequence

SEQ ID NO: 33723 - DNA, 53 bp, Artificial Sequence; identical to SEQ ID NO: 5948
  Description of Artificial Sequence: Synthetic all nuts; 5' sequence and inner sequence

SEQ ID NO: 33724 - DNA, 53 bp, Artificial Sequence; identical to SEQ ID NO: 5336
  Description of Artificial Sequence: Synthetic all nuts; 5' sequence and inner sequence

SEQ ID NO: 33725 - DNA, 53 bp, Artificial Sequence; identical to SEQ ID NO: 1197
  Description of Artificial Sequence: Synthetic all nuts; 5' sequence and inner sequence

SEQ ID NO: 33726 - DNA, 53 bp, Artificial Sequence; identical to SEQ ID NO: 1028
  Description of Artificial Sequence: Synthetic all nuts; 5' sequence and inner sequence

SEQ ID NO: 33727 - DNA, 53 bp, Artificial Sequence
  Description of Artificial Sequence: Synthetic all nuts; 5' sequence and inner sequence
tagggaagagaaggacatatgatccgtagcgacaccaagcggtggtgtgcgtg

SEQ ID NO: 33728 - DNA, 53 bp, Artificial Sequence; identical to SEQ ID NO: 1633
  Description of Artificial Sequence: Synthetic all nuts; 5' sequence and inner sequence

SEQ ID NO: 33729 - DNA, 53 bp, Artificial Sequence; identical to SEQ ID NO: 5913
  Description of Artificial Sequence: Synthetic all nuts; 5' sequence and inner sequence

SEQ ID NO: 33730 - DNA, 53 bp, Artificial Sequence; identical to SEQ ID NO: 1172
  Description of Artificial Sequence: Synthetic all nuts; 5' sequence and inner sequence

SEQ ID NO: 33731 - DNA, 53 bp, Artificial Sequence; identical to SEQ ID NO: 5627
  Description of Artificial Sequence: Synthetic all nuts; 5' sequence and inner sequence

SEQ ID NO: 33732 - DNA, 53 bp, Artificial Sequence; identical to SEQ ID NO: 5469
  Description of Artificial Sequence: Synthetic all nuts; 5' sequence and inner sequence

SEQ ID NO: 33733 - DNA, 53 bp, Artificial Sequence; identical to SEQ ID NO: 1336
  Description of Artificial Sequence: Synthetic all nuts; 5' sequence and inner sequence

SEQ ID NO: 33734 - DNA, 53 bp, Artificial Sequence; identical to SEQ ID NO: 1449
  Description of Artificial Sequence: Synthetic all nuts; 5' sequence and inner sequence

SEQ ID NO: 33735 - DNA, 53 bp, Artificial Sequence; identical to SEQ ID NO: 1164
  Description of Artificial Sequence: Synthetic all nuts; 5' sequence and inner sequence

SEQ ID NO: 33736 - DNA, 53 bp, Artificial Sequence; identical to SEQ ID NO: 1776
  Description of Artificial Sequence: Synthetic all nuts; 5' sequence and inner sequence

SEQ ID NO: 33737 - DNA, 53 bp, Artificial Sequence; identical to SEQ ID NO: 13895
  Description of Artificial Sequence: Synthetic all nuts; 5' sequence and inner sequence

SEQ ID NO: 33738 - DNA, 53 bp, Artificial Sequence; identical to SEQ ID NO: 5498
  Description of Artificial Sequence: Synthetic all nuts; 5' sequence and inner sequence

SEQ ID NO: 33739 - DNA, 53 bp, Artificial Sequence; identical to SEQ ID NO: 1762
  Description of Artificial Sequence: Synthetic all nuts; 5' sequence and inner sequence

SEQ ID NO: 33740 - DNA, 53 bp, Artificial Sequence; identical to SEQ ID NO: 17931
  Description of Artificial Sequence: Synthetic all nuts; 5' sequence and inner sequence

SEQ ID NO: 33741 - DNA, 53 bp, Artificial Sequence; identical to SEQ ID NO: 21327
  Description of Artificial Sequence: Synthetic all nuts; 5' sequence and inner sequence

SEQ ID NO: 33742 - DNA, 53 bp, Artificial Sequence; identical to SEQ ID NO: 1149
  Description of Artificial Sequence: Synthetic all nuts; 5' sequence and inner sequence

SEQ ID NO: 33743 - DNA, 53 bp, Artificial Sequence
  Description of Artificial Sequence: Synthetic all nuts; 5' sequence and inner sequence
tagggaagagaaggacatatgatgtacgcatcgtaccgtcatgtggttccgta

SEQ ID NO: 33744 - DNA, 53 bp, Artificial Sequence; identical to SEQ ID NO: 1310
  Description of Artificial Sequence: Synthetic all nuts; 5' sequence and inner sequence

SEQ ID NO: 33745 - DNA, 53 bp, Artificial Sequence; identical to SEQ ID NO: 9962
  Description of Artificial Sequence: Synthetic all nuts; 5' sequence and inner sequence

SEQ ID NO: 33746 - DNA, 53 bp, Artificial Sequence; identical to SEQ ID NO: 1341
  Description of Artificial Sequence: Synthetic all nuts; 5' sequence and inner sequence

SEQ ID NO: 33747 - DNA, 53 bp, Artificial Sequence; identical to SEQ ID NO: 21700
  Description of Artificial Sequence: Synthetic all nuts; 5' sequence and inner sequence

SEQ ID NO: 33748 - DNA, 53 bp, Artificial Sequence; identical to SEQ ID NO: 1244
  Description of Artificial Sequence: Synthetic all nuts; 5' sequence and inner sequence

SEQ ID NO: 33749 - DNA, 53 bp, Artificial Sequence; identical to SEQ ID NO: 1457
  Description of Artificial Sequence: Synthetic all nuts; 5' sequence and inner sequence

SEQ ID NO: 33750 - DNA, 53 bp, Artificial Sequence; identical to SEQ ID NO: 1076
  Description of Artificial Sequence: Synthetic all nuts; 5' sequence and inner sequence

SEQ ID NO: 33751 - DNA, 53 bp, Artificial Sequence; identical to SEQ ID NO: 1529
  Description of Artificial Sequence: Synthetic all nuts; 5' sequence and inner sequence

SEQ ID NO: 33752 - DNA, 53 bp, Artificial Sequence; identical to SEQ ID NO: 21119
  Description of Artificial Sequence: Synthetic all nuts; 5' sequence and inner sequence

SEQ ID NO: 33753 - DNA, 53 bp, Artificial Sequence; identical to SEQ ID NO: 1500
  Description of Artificial Sequence: Synthetic all nuts; 5' sequence and inner sequence

SEQ ID NO: 33754 - DNA, 53 bp, Artificial Sequence; identical to SEQ ID NO: 1027
  Description of Artificial Sequence: Synthetic all nuts; 5' sequence and inner sequence

SEQ ID NO: 33755 - DNA, 53 bp, Artificial Sequence; identical to SEQ ID NO: 1921
  Description of Artificial Sequence: Synthetic all nuts; 5' sequence and inner sequence

SEQ ID NO: 33756 - DNA, 53 bp, Artificial Sequence; identical to SEQ ID NO: 21777
  Description of Artificial Sequence: Synthetic all nuts; 5' sequence and inner sequence

SEQ ID NO: 33757 - DNA, 53 bp, Artificial Sequence; identical to SEQ ID NO: 1553
  Description of Artificial Sequence: Synthetic all nuts; 5' sequence and inner sequence

SEQ ID NO: 33758 - DNA, 53 bp, Artificial Sequence; identical to SEQ ID NO: 21165
  Description of Artificial Sequence: Synthetic all nuts; 5' sequence and inner sequence

SEQ ID NO: 33759 - DNA, 53 bp, Artificial Sequence; identical to SEQ ID NO: 5707
  Description of Artificial Sequence: Synthetic all nuts; 5' sequence and inner sequence

SEQ ID NO: 33760 - DNA, 53 bp, Artificial Sequence; identical to SEQ ID NO: 1064
  Description of Artificial Sequence: Synthetic all nuts; 5' sequence and inner sequence

SEQ ID NO: 33761 - DNA, 53 bp, Artificial Sequence; identical to SEQ ID NO: 1720
  Description of Artificial Sequence: Synthetic all nuts; 5' sequence and inner sequence

SEQ ID NO: 33762 - DNA, 53 bp, Artificial Sequence; identical to SEQ ID NO: 5890
  Description of Artificial Sequence: Synthetic all nuts; 5' sequence and inner sequence

SEQ ID NO: 33763 - DNA, 53 bp, Artificial Sequence; identical to SEQ ID NO: 1301
  Description of Artificial Sequence: Synthetic all nuts; 5' sequence and inner sequence

SEQ ID NO: 33764 - DNA, 53 bp, Artificial Sequence; identical to SEQ ID NO: 21947
  Description of Artificial Sequence: Synthetic all nuts; 5' sequence and inner sequence

SEQ ID NO: 33765 - DNA, 53 bp, Artificial Sequence; identical to SEQ ID NO: 9618
  Description of Artificial Sequence: Synthetic all nuts; 5' sequence and inner sequence

SEQ ID NO: 33766 - DNA, 53 bp, Artificial Sequence; identical to SEQ ID NO: 1111
  Description of Artificial Sequence: Synthetic all nuts; 5' sequence and inner sequence

SEQ ID NO: 33767 - DNA, 53 bp, Artificial Sequence; identical to SEQ ID NO: 1738
  Description of Artificial Sequence: Synthetic all nuts; 5' sequence and inner sequence

SEQ ID NO: 33768 - DNA, 53 bp, Artificial Sequence; identical to SEQ ID NO: 1408
  Description of Artificial Sequence: Synthetic all nuts; 5' sequence and inner sequence

SEQ ID NO: 33769 - DNA, 53 bp, Artificial Sequence; identical to SEQ ID NO: 1705
  Description of Artificial Sequence: Synthetic all nuts; 5' sequence and inner sequence

SEQ ID NO: 33770 - DNA, 53 bp, Artificial Sequence; identical to SEQ ID NO: 5621
  Description of Artificial Sequence: Synthetic all nuts; 5' sequence and inner sequence

SEQ ID NO: 33771 - DNA, 53 bp, Artificial Sequence; identical to SEQ ID NO: 1621
  Description of Artificial Sequence: Synthetic all nuts; 5' sequence and inner sequence

SEQ ID NO: 33772 - DNA, 53 bp, Artificial Sequence; identical to SEQ ID NO: 1017
  Description of Artificial Sequence: Synthetic all nuts; 5' sequence and inner sequence

SEQ ID NO: 33773 - DNA, 53 bp, Artificial Sequence; identical to SEQ ID NO: 1289
  Description of Artificial Sequence: Synthetic all nuts; 5' sequence and inner sequence

SEQ ID NO: 33774 - DNA, 53 bp, Artificial Sequence; identical to SEQ ID NO: 21711
  Description of Artificial Sequence: Synthetic all nuts; 5' sequence and inner sequence

SEQ ID NO: 33775 - DNA, 53 bp, Artificial Sequence; identical to SEQ ID NO: 9994
  Description of Artificial Sequence: Synthetic all nuts; 5' sequence and inner sequence

SEQ ID NO: 33776 - DNA, 53 bp, Artificial Sequence; identical to SEQ ID NO: 1805
  Description of Artificial Sequence: Synthetic all nuts; 5' sequence and inner sequence

SEQ ID NO: 33777 - DNA, 53 bp, Artificial Sequence; identical to SEQ ID NO: 1622
  Description of Artificial Sequence: Synthetic all nuts; 5' sequence and inner sequence

SEQ ID NO: 33778 - DNA, 53 bp, Artificial Sequence; identical to SEQ ID NO: 17862
  Description of Artificial Sequence: Synthetic all nuts; 5' sequence and inner sequence

SEQ ID NO: 33779 - DNA, 53 bp, Artificial Sequence; identical to SEQ ID NO: 1531
  Description of Artificial Sequence: Synthetic all nuts; 5' sequence and inner sequence

SEQ ID NO: 33780 - DNA, 53 bp, Artificial Sequence; identical to SEQ ID NO: 17544
  Description of Artificial Sequence: Synthetic all nuts; 5' sequence and inner sequence

SEQ ID NO: 33781 - DNA, 53 bp, Artificial Sequence; identical to SEQ ID NO: 1662
  Description of Artificial Sequence: Synthetic all nuts; 5' sequence and inner sequence

SEQ ID NO: 33782 - DNA, 53 bp, Artificial Sequence; identical to SEQ ID NO: 21783
  Description of Artificial Sequence: Synthetic all nuts; 5' sequence and inner sequence

SEQ ID NO: 33783 - DNA, 53 bp, Artificial Sequence
  Description of Artificial Sequence: Synthetic all nuts; 5' sequence and inner sequence
tagggaagagaaggacatatgatgtgcgacacgtaacctagcaagggagcatg

SEQ ID NO: 33784 - DNA, 53 bp, Artificial Sequence; identical to SEQ ID NO: 1545
  Description of Artificial Sequence: Synthetic all nuts; 5' sequence and inner sequence

SEQ ID NO: 33785 - DNA, 53 bp, Artificial Sequence; identical to SEQ ID NO: 1884
  Description of Artificial Sequence: Synthetic all nuts; 5' sequence and inner sequence

SEQ ID NO: 33786 - DNA, 53 bp, Artificial Sequence; identical to SEQ ID NO: 21576
  Description of Artificial Sequence: Synthetic all nuts; 5' sequence and inner sequence

SEQ ID NO: 33787 - DNA, 53 bp, Artificial Sequence; identical to SEQ ID NO: 1025
  Description of Artificial Sequence: Synthetic all nuts; 5' sequence and inner sequence

SEQ ID NO: 33788 - DNA, 53 bp, Artificial Sequence; identical to SEQ ID NO: 5517
  Description of Artificial Sequence: Synthetic all nuts; 5' sequence and inner sequence

SEQ ID NO: 33789 - DNA, 53 bp, Artificial Sequence; identical to SEQ ID NO: 17352
  Description of Artificial Sequence: Synthetic all nuts; 5' sequence and inner sequence

SEQ ID NO: 33790 - DNA, 53 bp, Artificial Sequence; identical to SEQ ID NO: 1030
  Description of Artificial Sequence: Synthetic all nuts; 5' sequence and inner sequence

SEQ ID NO: 33791 - DNA, 53 bp, Artificial Sequence
  Description of Artificial Sequence: Synthetic all nuts; 5' sequence and inner sequence
tagggaagagaaggacatatgatcgacgcacggaagacacgatacgtggtgcg

SEQ ID NO: 33792 - DNA, 52 bp, Artificial Sequence; identical to SEQ ID NO: 1259
  Description of Artificial Sequence: Synthetic all nuts; 5' sequence and inner sequence

SEQ ID NO: 33793 - DNA, 52 bp, Artificial Sequence; identical to SEQ ID NO: 1975
  Description of Artificial Sequence: Synthetic all nuts; 5' sequence and inner sequence

SEQ ID NO: 33794 - DNA, 53 bp, Artificial Sequence; identical to SEQ ID NO: 9909
  Description of Artificial Sequence: Synthetic all nuts; 5' sequence and inner sequence

SEQ ID NO: 33795 - DNA, 53 bp, Artificial Sequence; identical to SEQ ID NO: 1700
  Description of Artificial Sequence: Synthetic all nuts; 5' sequence and inner sequence

SEQ ID NO: 33796 - DNA, 53 bp, Artificial Sequence; identical to SEQ ID NO: 1384
  Description of Artificial Sequence: Synthetic all nuts; 5' sequence and inner sequence

SEQ ID NO: 33797 - DNA, 53 bp, Artificial Sequence; identical to SEQ ID NO: 1534
  Description of Artificial Sequence: Synthetic all nuts; 5' sequence and inner sequence

SEQ ID NO: 33798 - DNA, 53 bp, Artificial Sequence; identical to SEQ ID NO: 21462
  Description of Artificial Sequence: Synthetic all nuts; 5' sequence and inner sequence

SEQ ID NO: 33799 - DNA, 53 bp, Artificial Sequence; identical to SEQ ID NO: 1598
  Description of Artificial Sequence: Synthetic all nuts; 5' sequence and inner sequence

SEQ ID NO: 33800 - DNA, 53 bp, Artificial Sequence; identical to SEQ ID NO: 1979
  Description of Artificial Sequence: Synthetic all nuts; 5' sequence and inner sequence

SEQ ID NO: 33801 - DNA, 53 bp, Artificial Sequence; identical to SEQ ID NO: 1951
  Description of Artificial Sequence: Synthetic all nuts; 5' sequence and inner sequence

SEQ ID NO: 33802 - DNA, 53 bp, Artificial Sequence
  Description of Artificial Sequence: Synthetic all nuts; 5' sequence and inner sequence
tagggaagagaaggacatatgatgtgatgcacgaacactatcatggcggcatg

SEQ ID NO: 33803 - DNA, 53 bp, Artificial Sequence; identical to SEQ ID NO: 1649
  Description of Artificial Sequence: Synthetic all nuts; 5' sequence and inner sequence

SEQ ID NO: 33804 - DNA, 53 bp, Artificial Sequence; identical to SEQ ID NO: 1207
  Description of Artificial Sequence: Synthetic all nuts; 5' sequence and inner sequence

SEQ ID NO: 33805 - DNA, 53 bp, Artificial Sequence; identical to SEQ ID NO: 1007
  Description of Artificial Sequence: Synthetic all nuts; 5' sequence and inner sequence

SEQ ID NO: 33806 - DNA, 53 bp, Artificial Sequence; identical to SEQ ID NO: 1189
  Description of Artificial Sequence: Synthetic all nuts; 5' sequence and inner sequence

SEQ ID NO: 33807 - DNA, 53 bp, Artificial Sequence; identical to SEQ ID NO: 1238
  Description of Artificial Sequence: Synthetic all nuts; 5' sequence and inner sequence

SEQ ID NO: 33808 - DNA, 53 bp, Artificial Sequence; identical to SEQ ID NO: 1288
  Description of Artificial Sequence: Synthetic all nuts; 5' sequence and inner sequence

SEQ ID NO: 33809 - DNA, 53 bp, Artificial Sequence; identical to SEQ ID NO: 21367
  Description of Artificial Sequence: Synthetic all nuts; 5' sequence and inner sequence

SEQ ID NO: 33810 - DNA, 53 bp, Artificial Sequence
  Description of Artificial Sequence: Synthetic all nuts; 5' sequence and inner sequence
tagggaagagaaggacatatgatccgtagcgccatcaagcggtggcgtgcgtg

SEQ ID NO: 33811 - DNA, 53 bp, Artificial Sequence; identical to SEQ ID NO: 1227
  Description of Artificial Sequence: Synthetic all nuts; 5' sequence and inner sequence

SEQ ID NO: 33812 - DNA, 53 bp, Artificial Sequence; identical to SEQ ID NO: 1684
  Description of Artificial Sequence: Synthetic all nuts; 5' sequence and inner sequence

SEQ ID NO: 33813 - DNA, 53 bp, Artificial Sequence; identical to SEQ ID NO: 1253
  Description of Artificial Sequence: Synthetic all nuts; 5' sequence and inner sequence

SEQ ID NO: 33814 - DNA, 53 bp, Artificial Sequence; identical to SEQ ID NO: 5565
  Description of Artificial Sequence: Synthetic all nuts; 5' sequence and inner sequence

SEQ ID NO: 33815 - DNA, 53 bp, Artificial Sequence; identical to SEQ ID NO: 1124
  Description of Artificial Sequence: Synthetic all nuts; 5' sequence and inner sequence

SEQ ID NO: 33816 - DNA, 53 bp, Artificial Sequence; identical to SEQ ID NO: 1249
  Description of Artificial Sequence: Synthetic all nuts; 5' sequence and inner sequence

SEQ ID NO: 33817 - DNA, 53 bp, Artificial Sequence; identical to SEQ ID NO: 5364
  Description of Artificial Sequence: Synthetic all nuts; 5' sequence and inner sequence

SEQ ID NO: 33818 - DNA, 53 bp, Artificial Sequence; identical to SEQ ID NO: 1991
  Description of Artificial Sequence: Synthetic all nuts; 5' sequence and inner sequence

SEQ ID NO: 33819 - DNA, 53 bp, Artificial Sequence; identical to SEQ ID NO: 1200
  Description of Artificial Sequence: Synthetic all nuts; 5' sequence and inner sequence

SEQ ID NO: 33820 - DNA, 53 bp, Artificial Sequence; identical to SEQ ID NO: 1139
  Description of Artificial Sequence: Synthetic all nuts; 5' sequence and inner sequence

SEQ ID NO: 33821 - DNA, 53 bp, Artificial Sequence; identical to SEQ ID NO: 1914
  Description of Artificial Sequence: Synthetic all nuts; 5' sequence and inner sequence

SEQ ID NO: 33822 - DNA, 53 bp, Artificial Sequence; identical to SEQ ID NO: 5489
  Description of Artificial Sequence: Synthetic all nuts; 5' sequence and inner sequence

SEQ ID NO: 33823 - DNA, 53 bp, Artificial Sequence; identical to SEQ ID NO: 21343
  Description of Artificial Sequence: Synthetic all nuts; 5' sequence and inner sequence

SEQ ID NO: 33824 - DNA, 53 bp, Artificial Sequence; identical to SEQ ID NO: 1393
  Description of Artificial Sequence: Synthetic all nuts; 5' sequence and inner sequence

SEQ ID NO: 33825 - DNA, 53 bp, Artificial Sequence; identical to SEQ ID NO: 1089
  Description of Artificial Sequence: Synthetic all nuts; 5' sequence and inner sequence

SEQ ID NO: 33826 - DNA, 53 bp, Artificial Sequence; identical to SEQ ID NO: 1181
  Description of Artificial Sequence: Synthetic all nuts; 5' sequence and inner sequence

SEQ ID NO: 33827 - DNA, 53 bp, Artificial Sequence; identical to SEQ ID NO: 1266
  Description of Artificial Sequence: Synthetic all nuts; 5' sequence and inner sequence

SEQ ID NO: 33828 - DNA, 53 bp, Artificial Sequence; identical to SEQ ID NO: 1634
  Description of Artificial Sequence: Synthetic all nuts; 5' sequence and inner sequence

SEQ ID NO: 33829 - DNA, 53 bp, Artificial Sequence; identical to SEQ ID NO: 1096
  Description of Artificial Sequence: Synthetic all nuts; 5' sequence and inner sequence

SEQ ID NO: 33830 - DNA, 53 bp, Artificial Sequence; identical to SEQ ID NO: 5521
  Description of Artificial Sequence: Synthetic all nuts; 5' sequence and inner sequence

SEQ ID NO: 33831 - DNA, 53 bp, Artificial Sequence; identical to SEQ ID NO: 1023
  Description of Artificial Sequence: Synthetic all nuts; 5' sequence and inner sequence

SEQ ID NO: 33832 - DNA, 53 bp, Artificial Sequence; identical to SEQ ID NO: 29914
  Description of Artificial Sequence: Synthetic all nuts; 5' sequence and inner sequence

SEQ ID NO: 33833 - DNA, 53 bp, Artificial Sequence; identical to SEQ ID NO: 1016
  Description of Artificial Sequence: Synthetic all nuts; 5' sequence and inner sequence

SEQ ID NO: 33834 - DNA, 53 bp, Artificial Sequence; identical to SEQ ID NO: 17733
  Description of Artificial Sequence: Synthetic all nuts; 5' sequence and inner sequence

SEQ ID NO: 33835 - DNA, 53 bp, Artificial Sequence; identical to SEQ ID NO: 1283
  Description of Artificial Sequence: Synthetic all nuts; 5' sequence and inner sequence

SEQ ID NO: 33836 - DNA, 53 bp, Artificial Sequence; identical to SEQ ID NO: 1077
  Description of Artificial Sequence: Synthetic all nuts; 5' sequence and inner sequence

SEQ ID NO: 33837 - DNA, 53 bp, Artificial Sequence; identical to SEQ ID NO: 1560
  Description of Artificial Sequence: Synthetic all nuts; 5' sequence and inner sequence

SEQ ID NO: 33838 - DNA, 53 bp, Artificial Sequence; identical to SEQ ID NO: 1511
  Description of Artificial Sequence: Synthetic all nuts; 5' sequence and inner sequence

SEQ ID NO: 33839 - DNA, 53 bp, Artificial Sequence; identical to SEQ ID NO: 1201
  Description of Artificial Sequence: Synthetic all nuts; 5' sequence and inner sequence

SEQ ID NO: 33840 - DNA, 53 bp, Artificial Sequence
  Description of Artificial Sequence: Synthetic all nuts; 5' sequence and inner sequence
tagggaagagaaggacatatgatggactgcacgcaccctatcatgtaggcatg

SEQ ID NO: 33841 - DNA, 53 bp, Artificial Sequence; identical to SEQ ID NO: 1657
  Description of Artificial Sequence: Synthetic all nuts; 5' sequence and inner sequence

SEQ ID NO: 33842 - DNA, 53 bp, Artificial Sequence; identical to SEQ ID NO: 1243
  Description of Artificial Sequence: Synthetic all nuts; 5' sequence and inner sequence

SEQ ID NO: 33843 - DNA, 56 bp, Artificial Sequence; identical to SEQ ID NO: 1864
  Description of Artificial Sequence: Synthetic all nuts; 5' sequence and inner sequence

SEQ ID NO: 33844 - DNA, 53 bp, Artificial Sequence; identical to SEQ ID NO: 9876
  Description of Artificial Sequence: Synthetic all nuts; 5' sequence and inner sequence

SEQ ID NO: 33845 - DNA, 53 bp, Artificial Sequence; identical to SEQ ID NO: 1778
  Description of Artificial Sequence: Synthetic all nuts; 5' sequence and inner sequence

SEQ ID NO: 33846 - DNA, 53 bp, Artificial Sequence; identical to SEQ ID NO: 1145
  Description of Artificial Sequence: Synthetic all nuts; 5' sequence and inner sequence

SEQ ID NO: 33847 - DNA, 53 bp, Artificial Sequence; identical to SEQ ID NO: 1192
  Description of Artificial Sequence: Synthetic all nuts; 5' sequence and inner sequence

SEQ ID NO: 33848 - DNA, 53 bp, Artificial Sequence
  Description of Artificial Sequence: Synthetic all nuts; 5' sequence and inner sequence
tagggaagagaaggacatatgatccgcagcgacatcaagcggcggtgtgcgtg

SEQ ID NO: 33849 - DNA, 53 bp, Artificial Sequence; identical to SEQ ID NO: 5801
  Description of Artificial Sequence: Synthetic all nuts; 5' sequence and inner sequence

SEQ ID NO: 33850 - DNA, 53 bp, Artificial Sequence; identical to SEQ ID NO: 1923
  Description of Artificial Sequence: Synthetic all nuts; 5' sequence and inner sequence

SEQ ID NO: 33851 - DNA, 53 bp, Artificial Sequence; identical to SEQ ID NO: 1051
  Description of Artificial Sequence: Synthetic all nuts; 5' sequence and inner sequence

SEQ ID NO: 33852 - DNA, 53 bp, Artificial Sequence; identical to SEQ ID NO: 9946
  Description of Artificial Sequence: Synthetic all nuts; 5' sequence and inner sequence

SEQ ID NO: 33853 - DNA, 53 bp, Artificial Sequence; identical to SEQ ID NO: 1539
  Description of Artificial Sequence: Synthetic all nuts; 5' sequence and inner sequence

SEQ ID NO: 33854 - DNA, 53 bp, Artificial Sequence; identical to SEQ ID NO: 5979
  Description of Artificial Sequence: Synthetic all nuts; 5' sequence and inner sequence

SEQ ID NO: 33855 - DNA, 53 bp, Artificial Sequence; identical to SEQ ID NO: 5748
  Description of Artificial Sequence: Synthetic all nuts; 5' sequence and inner sequence

SEQ ID NO: 33856 - DNA, 53 bp, Artificial Sequence; identical to SEQ ID NO: 1928
  Description of Artificial Sequence: Synthetic all nuts; 5' sequence and inner sequence

SEQ ID NO: 33857 - DNA, 53 bp, Artificial Sequence; identical to SEQ ID NO: 1960
  Description of Artificial Sequence: Synthetic all nuts; 5' sequence and inner sequence

SEQ ID NO: 33858 - DNA, 53 bp, Artificial Sequence; identical to SEQ ID NO: 1074
  Description of Artificial Sequence: Synthetic all nuts; 5' sequence and inner sequence

SEQ ID NO: 33859 - DNA, 53 bp, Artificial Sequence; identical to SEQ ID NO: 1387
  Description of Artificial Sequence: Synthetic all nuts; 5' sequence and inner sequence

SEQ ID NO: 33860 - DNA, 53 bp, Artificial Sequence; identical to SEQ ID NO: 5861
  Description of Artificial Sequence: Synthetic all nuts; 5' sequence and inner sequence

SEQ ID NO: 33861 - DNA, 53 bp, Artificial Sequence; identical to SEQ ID NO: 1280
  Description of Artificial Sequence: Synthetic all nuts; 5' sequence and inner sequence

SEQ ID NO: 33862 - DNA, 53 bp, Artificial Sequence; identical to SEQ ID NO: 17866
  Description of Artificial Sequence: Synthetic all nuts; 5' sequence and inner sequence

SEQ ID NO: 33863 - DNA, 53 bp, Artificial Sequence; identical to SEQ ID NO: 1180
  Description of Artificial Sequence: Synthetic all nuts; 5' sequence and inner sequence

SEQ ID NO: 33864 - DNA, 53 bp, Artificial Sequence; identical to SEQ ID NO: 5667
  Description of Artificial Sequence: Synthetic all nuts; 5' sequence and inner sequence

SEQ ID NO: 33865 - DNA, 53 bp, Artificial Sequence; identical to SEQ ID NO: 21565
  Description of Artificial Sequence: Synthetic all nuts; 5' sequence and inner sequence

SEQ ID NO: 33866 - DNA, 53 bp, Artificial Sequence
  Description of Artificial Sequence: Synthetic all nuts; 5' sequence and inner sequence
tagggaagagaaggacatatgatgtcattccgcatcctacccgtgggcacgta

SEQ ID NO: 33867 - DNA, 53 bp, Artificial Sequence; identical to SEQ ID NO: 1467
  Description of Artificial Sequence: Synthetic all nuts; 5' sequence and inner sequence

SEQ ID NO: 33868 - DNA, 52 bp, Artificial Sequence; identical to SEQ ID NO: 1810
  Description of Artificial Sequence: Synthetic all nuts; 5' sequence and inner sequence

SEQ ID NO: 33869 - DNA, 53 bp, Artificial Sequence; identical to SEQ ID NO: 1167
  Description of Artificial Sequence: Synthetic all nuts; 5' sequence and inner sequence

SEQ ID NO: 33870 - DNA, 53 bp, Artificial Sequence; identical to SEQ ID NO: 1589
  Description of Artificial Sequence: Synthetic all nuts; 5' sequence and inner sequence

SEQ ID NO: 33871 - DNA, 53 bp, Artificial Sequence; identical to SEQ ID NO: 1113
  Description of Artificial Sequence: Synthetic all nuts; 5' sequence and inner sequence

SEQ ID NO: 33872 - DNA, 53 bp, Artificial Sequence
  Description of Artificial Sequence: Synthetic all nuts; 5' sequence and inner sequence
tagggaagagaaggacatatgatgtcatgcacgaacactatcatggcgccatg

SEQ ID NO: 33873 - DNA, 53 bp, Artificial Sequence
  Description of Artificial Sequence: Synthetic all nuts; 5' sequence and inner sequence
tagggaagagaaggacatatgatccgtagcgacatcaagcggcggggtgcgtg

SEQ ID NO: 33874 - DNA, 53 bp, Artificial Sequence; identical to SEQ ID NO: 1137
  Description of Artificial Sequence: Synthetic all nuts; 5' sequence and inner sequence

SEQ ID NO: 33875 - DNA, 53 bp, Artificial Sequence; identical to SEQ ID NO: 1497
  Description of Artificial Sequence: Synthetic all nuts; 5' sequence and inner sequence

SEQ ID NO: 33876 - DNA, 53 bp, Artificial Sequence; identical to SEQ ID NO: 1203
  Description of Artificial Sequence: Synthetic all nuts; 5' sequence and inner sequence

SEQ ID NO: 33877 - DNA, 53 bp, Artificial Sequence; identical to SEQ ID NO: 1834
  Description of Artificial Sequence: Synthetic all nuts; 5' sequence and inner sequence

SEQ ID NO: 33878 - DNA, 53 bp, Artificial Sequence; identical to SEQ ID NO: 1245
  Description of Artificial Sequence: Synthetic all nuts; 5' sequence and inner sequence

SEQ ID NO: 33879 - DNA, 53 bp, Artificial Sequence; identical to SEQ ID NO: 1009
  Description of Artificial Sequence: Synthetic all nuts; 5' sequence and inner sequence

SEQ ID NO: 33880 - DNA, 53 bp, Artificial Sequence; identical to SEQ ID NO: 9816
  Description of Artificial Sequence: Synthetic all nuts; 5' sequence and inner sequence

SEQ ID NO: 33881 - DNA, 53 bp, Artificial Sequence; identical to SEQ ID NO: 1407
  Description of Artificial Sequence: Synthetic all nuts; 5' sequence and inner sequence

SEQ ID NO: 33882 - DNA, 53 bp, Artificial Sequence; identical to SEQ ID NO: 1248
  Description of Artificial Sequence: Synthetic all nuts; 5' sequence and inner sequence

SEQ ID NO: 33883 - DNA, 53 bp, Artificial Sequence; identical to SEQ ID NO: 21151
  Description of Artificial Sequence: Synthetic all nuts; 5' sequence and inner sequence

SEQ ID NO: 33884 - DNA, 53 bp, Artificial Sequence; identical to SEQ ID NO: 1926
  Description of Artificial Sequence: Synthetic all nuts; 5' sequence and inner sequence

SEQ ID NO: 33885 - DNA, 53 bp, Artificial Sequence; identical to SEQ ID NO: 5943
  Description of Artificial Sequence: Synthetic all nuts; 5' sequence and inner sequence

SEQ ID NO: 33886 - DNA, 53 bp, Artificial Sequence; identical to SEQ ID NO: 5597
  Description of Artificial Sequence: Synthetic all nuts; 5' sequence and inner sequence

SEQ ID NO: 33887 - DNA, 53 bp, Artificial Sequence; identical to SEQ ID NO: 5612
  Description of Artificial Sequence: Synthetic all nuts; 5' sequence and inner sequence

SEQ ID NO: 33888 - DNA, 53 bp, Artificial Sequence; identical to SEQ ID NO: 1138
  Description of Artificial Sequence: Synthetic all nuts; 5' sequence and inner sequence

SEQ ID NO: 33889 - DNA, 53 bp, Artificial Sequence; identical to SEQ ID NO: 17662
  Description of Artificial Sequence: Synthetic all nuts; 5' sequence and inner sequence

SEQ ID NO: 33890 - DNA, 53 bp, Artificial Sequence; identical to SEQ ID NO: 5775
  Description of Artificial Sequence: Synthetic all nuts; 5' sequence and inner sequence

SEQ ID NO: 33891 - DNA, 53 bp, Artificial Sequence; identical to SEQ ID NO: 1305
  Description of Artificial Sequence: Synthetic all nuts; 5' sequence and inner sequence

SEQ ID NO: 33892 - DNA, 53 bp, Artificial Sequence; identical to SEQ ID NO: 13767
  Description of Artificial Sequence: Synthetic all nuts; 5' sequence and inner sequence

SEQ ID NO: 33893 - DNA, 53 bp, Artificial Sequence; identical to SEQ ID NO: 25870
  Description of Artificial Sequence: Synthetic all nuts; 5' sequence and inner sequence

SEQ ID NO: 33894 - DNA, 53 bp, Artificial Sequence; identical to SEQ ID NO: 1541
  Description of Artificial Sequence: Synthetic all nuts; 5' sequence and inner sequence

SEQ ID NO: 33895 - DNA, 53 bp, Artificial Sequence; identical to SEQ ID NO: 1186
  Description of Artificial Sequence: Synthetic all nuts; 5' sequence and inner sequence

SEQ ID NO: 33896 - DNA, 53 bp, Artificial Sequence; identical to SEQ ID NO: 1285
  Description of Artificial Sequence: Synthetic all nuts; 5' sequence and inner sequence

SEQ ID NO: 33897 - DNA, 53 bp, Artificial Sequence; identical to SEQ ID NO: 5638
  Description of Artificial Sequence: Synthetic all nuts; 5' sequence and inner sequence

SEQ ID NO: 33898 - DNA, 53 bp, Artificial Sequence; identical to SEQ ID NO: 21773
  Description of Artificial Sequence: Synthetic all nuts; 5' sequence and inner sequence

SEQ ID NO: 33899 - DNA, 53 bp, Artificial Sequence
  Description of Artificial Sequence: Synthetic all nuts; 5' sequence and inner sequence
tagggaagagaaggacatatgatgcacgtctcgcaccctatcatgaggccatg

SEQ ID NO: 33900 - DNA, 53 bp, Artificial Sequence; identical to SEQ ID NO: 1871
  Description of Artificial Sequence: Synthetic all nuts; 5' sequence and inner sequence

SEQ ID NO: 33901 - DNA, 53 bp, Artificial Sequence; identical to SEQ ID NO: 1727
  Description of Artificial Sequence: Synthetic all nuts; 5' sequence and inner sequence

SEQ ID NO: 33902 - DNA, 53 bp, Artificial Sequence; identical to SEQ ID NO: 1049
  Description of Artificial Sequence: Synthetic all nuts; 5' sequence and inner sequence

SEQ ID NO: 33903 - DNA, 53 bp, Artificial Sequence; identical to SEQ ID NO: 1101
  Description of Artificial Sequence: Synthetic all nuts; 5' sequence and inner sequence

SEQ ID NO: 33904 - DNA, 54 bp, Artificial Sequence; identical to SEQ ID NO: 1845
  Description of Artificial Sequence: Synthetic all nuts; 5' sequence and inner sequence

SEQ ID NO: 33905 - DNA, 53 bp, Artificial Sequence; identical to SEQ ID NO: 9935
  Description of Artificial Sequence: Synthetic all nuts; 5' sequence and inner sequence

SEQ ID NO: 33906 - DNA, 53 bp, Artificial Sequence; identical to SEQ ID NO: 1980
  Description of Artificial Sequence: Synthetic all nuts; 5' sequence and inner sequence

SEQ ID NO: 33907 - DNA, 53 bp, Artificial Sequence; identical to SEQ ID NO: 1220
  Description of Artificial Sequence: Synthetic all nuts; 5' sequence and inner sequence

SEQ ID NO: 33908 - DNA, 53 bp, Artificial Sequence; identical to SEQ ID NO: 5997
  Description of Artificial Sequence: Synthetic all nuts; 5' sequence and inner sequence

SEQ ID NO: 33909 - DNA, 53 bp, Artificial Sequence; identical to SEQ ID NO: 1823
  Description of Artificial Sequence: Synthetic all nuts; 5' sequence and inner sequence

SEQ ID NO: 33910 - DNA, 53 bp, Artificial Sequence; identical to SEQ ID NO: 1561
  Description of Artificial Sequence: Synthetic all nuts; 5' sequence and inner sequence

SEQ ID NO: 33911 - DNA, 53 bp, Artificial Sequence; identical to SEQ ID NO: 17427
  Description of Artificial Sequence: Synthetic all nuts; 5' sequence and inner sequence

SEQ ID NO: 33912 - DNA, 53 bp, Artificial Sequence; identical to SEQ ID NO: 5882
  Description of Artificial Sequence: Synthetic all nuts; 5' sequence and inner sequence

SEQ ID NO: 33913 - DNA, 53 bp, Artificial Sequence
  Description of Artificial Sequence: Synthetic all nuts; 5' sequence and inner sequence
tagggaagagaaggacatatgatcggtagcgacatcaagcggtggtgtgcgtg

SEQ ID NO: 33914 - DNA, 53 bp, Artificial Sequence; identical to SEQ ID NO: 5735
  Description of Artificial Sequence: Synthetic all nuts; 5' sequence and inner sequence

SEQ ID NO: 33915 - DNA, 53 bp, Artificial Sequence; identical to SEQ ID NO: 21541
  Description of Artificial Sequence: Synthetic all nuts; 5' sequence and inner sequence

SEQ ID NO: 33916 - DNA, 53 bp, Artificial Sequence; identical to SEQ ID NO: 1079
  Description of Artificial Sequence: Synthetic all nuts; 5' sequence and inner sequence

SEQ ID NO: 33917 - DNA, 53 bp, Artificial Sequence; identical to SEQ ID NO: 1290
  Description of Artificial Sequence: Synthetic all nuts; 5' sequence and inner sequence

SEQ ID NO: 33918 - DNA, 53 bp, Artificial Sequence
  Description of Artificial Sequence: Synthetic all nuts; 5' sequence and inner sequence
tagggaagagaaggacatatgatgtcattccgcatcctacacgtgagcacgta

SEQ ID NO: 33919 - DNA, 53 bp, Artificial Sequence; identical to SEQ ID NO: 1369
  Description of Artificial Sequence: Synthetic all nuts; 5' sequence and inner sequence

SEQ ID NO: 33920 - DNA, 53 bp, Artificial Sequence; identical to SEQ ID NO: 1514
  Description of Artificial Sequence: Synthetic all nuts; 5' sequence and inner sequence

SEQ ID NO: 33921 - DNA, 53 bp, Artificial Sequence; identical to SEQ ID NO: 1793
  Description of Artificial Sequence: Synthetic all nuts; 5' sequence and inner sequence

SEQ ID NO: 33922 - DNA, 53 bp, Artificial Sequence; identical to SEQ ID NO: 21426
  Description of Artificial Sequence: Synthetic all nuts; 5' sequence and inner sequence

SEQ ID NO: 33923 - DNA, 53 bp, Artificial Sequence; identical to SEQ ID NO: 17767
  Description of Artificial Sequence: Synthetic all nuts; 5' sequence and inner sequence

SEQ ID NO: 33924 - DNA, 53 bp, Artificial Sequence
  Description of Artificial Sequence: Synthetic all nuts; 5' sequence and inner sequence
tagggaagagaaggacatatgatgccgcatcgatcacgtatcatgtgctcatg

SEQ ID NO: 33925 - DNA, 53 bp, Artificial Sequence; identical to SEQ ID NO: 5911
  Description of Artificial Sequence: Synthetic all nuts; 5' sequence and inner sequence

SEQ ID NO: 33926 - DNA, 53 bp, Artificial Sequence; identical to SEQ ID NO: 1835
  Description of Artificial Sequence: Synthetic all nuts; 5' sequence and inner sequence

SEQ ID NO: 33927 - DNA, 53 bp, Artificial Sequence; identical to SEQ ID NO: 21899
  Description of Artificial Sequence: Synthetic all nuts; 5' sequence and inner sequence

SEQ ID NO: 33928 - DNA, 53 bp, Artificial Sequence; identical to SEQ ID NO: 1699
  Description of Artificial Sequence: Synthetic all nuts; 5' sequence and inner sequence

SEQ ID NO: 33929 - DNA, 53 bp, Artificial Sequence; identical to SEQ ID NO: 21915
  Description of Artificial Sequence: Synthetic all nuts; 5' sequence and inner sequence

SEQ ID NO: 33930 - DNA, 53 bp, Artificial Sequence
  Description of Artificial Sequence: Synthetic all nuts; 5' sequence and inner sequence
tagggaagagaaggacatatgatgcgcgactcgcaccctatcatgaggccatg

SEQ ID NO: 33931 - DNA, 53 bp, Artificial Sequence; identical to SEQ ID NO: 5898
  Description of Artificial Sequence: Synthetic all nuts; 5' sequence and inner sequence

SEQ ID NO: 33932 - DNA, 53 bp, Artificial Sequence; identical to SEQ ID NO: 5451
  Description of Artificial Sequence: Synthetic all nuts; 5' sequence and inner sequence

SEQ ID NO: 33933 - DNA, 53 bp, Artificial Sequence; identical to SEQ ID NO: 1036
  Description of Artificial Sequence: Synthetic all nuts; 5' sequence and inner sequence

SEQ ID NO: 33934 - DNA, 53 bp, Artificial Sequence; identical to SEQ ID NO: 9871
  Description of Artificial Sequence: Synthetic all nuts; 5' sequence and inner sequence

SEQ ID NO: 33935 - DNA, 53 bp, Artificial Sequence; identical to SEQ ID NO: 5445
  Description of Artificial Sequence: Synthetic all nuts; 5' sequence and inner sequence

SEQ ID NO: 33936 - DNA, 53 bp, Artificial Sequence; identical to SEQ ID NO: 1040
  Description of Artificial Sequence: Synthetic all nuts; 5' sequence and inner sequence

SEQ ID NO: 33937 - DNA, 52 bp, Artificial Sequence
  Description of Artificial Sequence: Synthetic all nuts; 5' sequence and inner sequence
tagggaagagaaggacatatgatgtgcgcaacgaccttcacgttgtcgtgta

SEQ ID NO: 33938 - DNA, 53 bp, Artificial Sequence; identical to SEQ ID NO: 1318
  Description of Artificial Sequence: Synthetic all nuts; 5' sequence and inner sequence

SEQ ID NO: 33939 - DNA, 53 bp, Artificial Sequence; identical to SEQ ID NO: 1062
  Description of Artificial Sequence: Synthetic all nuts; 5' sequence and inner sequence

SEQ ID NO: 33940 - DNA, 53 bp, Artificial Sequence; identical to SEQ ID NO: 21594
  Description of Artificial Sequence: Synthetic all nuts; 5' sequence and inner sequence

SEQ ID NO: 33941 - DNA, 53 bp, Artificial Sequence
  Description of Artificial Sequence: Synthetic all nuts; 5' sequence and inner sequence
tagggaagagaaggacatatgatgtcattccgcatcctacacgtgcgcacgta

SEQ ID NO: 33942 - DNA, 53 bp, Artificial Sequence; identical to SEQ ID NO: 5620
  Description of Artificial Sequence: Synthetic all nuts; 5' sequence and inner sequence

SEQ ID NO: 33943 - DNA, 53 bp, Artificial Sequence; identical to SEQ ID NO: 5650
  Description of Artificial Sequence: Synthetic all nuts; 5' sequence and inner sequence

SEQ ID NO: 33944 - DNA, 53 bp, Artificial Sequence; identical to SEQ ID NO: 1053
  Description of Artificial Sequence: Synthetic all nuts; 5' sequence and inner sequence

SEQ ID NO: 33945 - DNA, 53 bp, Artificial Sequence; identical to SEQ ID NO: 1831
  Description of Artificial Sequence: Synthetic all nuts; 5' sequence and inner sequence

SEQ ID NO: 33946 - DNA, 53 bp, Artificial Sequence; identical to SEQ ID NO: 1498
  Description of Artificial Sequence: Synthetic all nuts; 5' sequence and inner sequence

SEQ ID NO: 33947 - DNA, 53 bp, Artificial Sequence; identical to SEQ ID NO: 1282
  Description of Artificial Sequence: Synthetic all nuts; 5' sequence and inner sequence

SEQ ID NO: 33948 - DNA, 53 bp, Artificial Sequence; identical to SEQ ID NO: 17744
  Description of Artificial Sequence: Synthetic all nuts; 5' sequence and inner sequence

SEQ ID NO: 33949 - DNA, 53 bp, Artificial Sequence; identical to SEQ ID NO: 1134
  Description of Artificial Sequence: Synthetic all nuts; 5' sequence and inner sequence

SEQ ID NO: 33950 - DNA, 53 bp, Artificial Sequence; identical to SEQ ID NO: 1057
  Description of Artificial Sequence: Synthetic all nuts; 5' sequence and inner sequence

SEQ ID NO: 33951 - DNA, 52 bp, Artificial Sequence; identical to SEQ ID NO: 1879
  Description of Artificial Sequence: Synthetic all nuts; 5' sequence and inner sequence

SEQ ID NO: 33952 - DNA, 53 bp, Artificial Sequence; identical to SEQ ID NO: 1397
  Description of Artificial Sequence: Synthetic all nuts; 5' sequence and inner sequence

SEQ ID NO: 33953 - DNA, 53 bp, Artificial Sequence; identical to SEQ ID NO: 21807
  Description of Artificial Sequence: Synthetic all nuts; 5' sequence and inner sequence

SEQ ID NO: 33954 - DNA, 53 bp, Artificial Sequence; identical to SEQ ID NO: 1437
  Description of Artificial Sequence: Synthetic all nuts; 5' sequence and inner sequence

SEQ ID NO: 33955 - DNA, 53 bp, Artificial Sequence
  Description of Artificial Sequence: Synthetic all nuts; 5' sequence and inner sequence
tagggaagagaaggacatatgatcgacacgacgagtggtgcaacgtgcaggca

SEQ ID NO: 33956 - DNA, 53 bp, Artificial Sequence; identical to SEQ ID NO: 1130
  Description of Artificial Sequence: Synthetic all nuts; 5' sequence and inner sequence

SEQ ID NO: 33957 - DNA, 53 bp, Artificial Sequence; identical to SEQ ID NO: 5940
  Description of Artificial Sequence: Synthetic all nuts; 5' sequence and inner sequence

SEQ ID NO: 33958 - DNA, 53 bp, Artificial Sequence; identical to SEQ ID NO: 1173
  Description of Artificial Sequence: Synthetic all nuts; 5' sequence and inner sequence

SEQ ID NO: 33959 - DNA, 53 bp, Artificial Sequence; identical to SEQ ID NO: 1120
  Description of Artificial Sequence: Synthetic all nuts; 5' sequence and inner sequence

SEQ ID NO: 33960 - DNA, 53 bp, Artificial Sequence; identical to SEQ ID NO: 5611
  Description of Artificial Sequence: Synthetic all nuts; 5' sequence and inner sequence

SEQ ID NO: 33961 - DNA, 53 bp, Artificial Sequence; identical to SEQ ID NO: 21496
  Description of Artificial Sequence: Synthetic all nuts; 5' sequence and inner sequence

SEQ ID NO: 33962 - DNA, 53 bp, Artificial Sequence; identical to SEQ ID NO: 21801
  Description of Artificial Sequence: Synthetic all nuts; 5' sequence and inner sequence

SEQ ID NO: 33963 - DNA, 53 bp, Artificial Sequence; identical to SEQ ID NO: 1470
  Description of Artificial Sequence: Synthetic all nuts; 5' sequence and inner sequence

SEQ ID NO: 33964 - DNA, 53 bp, Artificial Sequence; identical to SEQ ID NO: 1692
  Description of Artificial Sequence: Synthetic all nuts; 5' sequence and inner sequence

SEQ ID NO: 33965 - DNA, 53 bp, Artificial Sequence; identical to SEQ ID NO: 1169
  Description of Artificial Sequence: Synthetic all nuts; 5' sequence and inner sequence

SEQ ID NO: 33966 - DNA, 53 bp, Artificial Sequence; identical to SEQ ID NO: 29844
  Description of Artificial Sequence: Synthetic all nuts; 5' sequence and inner sequence

SEQ ID NO: 33967 - DNA, 53 bp, Artificial Sequence; identical to SEQ ID NO: 1422
  Description of Artificial Sequence: Synthetic all nuts; 5' sequence and inner sequence

SEQ ID NO: 33968 - DNA, 53 bp, Artificial Sequence; identical to SEQ ID NO: 5401
  Description of Artificial Sequence: Synthetic all nuts; 5' sequence and inner sequence

SEQ ID NO: 33969 - DNA, 53 bp, Artificial Sequence; identical to SEQ ID NO: 1292
  Description of Artificial Sequence: Synthetic all nuts; 5' sequence and inner sequence

SEQ ID NO: 33970 - DNA, 53 bp, Artificial Sequence; identical to SEQ ID NO: 1471
  Description of Artificial Sequence: Synthetic all nuts; 5' sequence and inner sequence

SEQ ID NO: 33971 - DNA, 53 bp, Artificial Sequence; identical to SEQ ID NO: 1782
  Description of Artificial Sequence: Synthetic all nuts; 5' sequence and inner sequence

SEQ ID NO: 33972 - DNA, 52 bp, Artificial Sequence
  Description of Artificial Sequence: Synthetic all nuts; 5' sequence and inner sequence
tagggaagagaaggacatatgatggccaagcaaccgtcaaggtggacgtgga

SEQ ID NO: 33973 - DNA, 53 bp, Artificial Sequence; identical to SEQ ID NO: 1187
  Description of Artificial Sequence: Synthetic all nuts; 5' sequence and inner sequence

SEQ ID NO: 33974 - DNA, 53 bp, Artificial Sequence; identical to SEQ ID NO: 21761
  Description of Artificial Sequence: Synthetic all nuts; 5' sequence and inner sequence

SEQ ID NO: 33975 - DNA, 53 bp, Artificial Sequence; identical to SEQ ID NO: 1601
  Description of Artificial Sequence: Synthetic all nuts; 5' sequence and inner sequence

SEQ ID NO: 33976 - DNA, 53 bp, Artificial Sequence; identical to SEQ ID NO: 1309
  Description of Artificial Sequence: Synthetic all nuts; 5' sequence and inner sequence

SEQ ID NO: 33977 - DNA, 53 bp, Artificial Sequence; identical to SEQ ID NO: 5513
  Description of Artificial Sequence: Synthetic all nuts; 5' sequence and inner sequence

SEQ ID NO: 33978 - DNA, 53 bp, Artificial Sequence; identical to SEQ ID NO: 21133
  Description of Artificial Sequence: Synthetic all nuts; 5' sequence and inner sequence

SEQ ID NO: 33979 - DNA, 53 bp, Artificial Sequence; identical to SEQ ID NO: 1741
  Description of Artificial Sequence: Synthetic all nuts; 5' sequence and inner sequence

SEQ ID NO: 33980 - DNA, 53 bp, Artificial Sequence; identical to SEQ ID NO: 17531
  Description of Artificial Sequence: Synthetic all nuts; 5' sequence and inner sequence

SEQ ID NO: 33981 - DNA, 53 bp, Artificial Sequence; identical to SEQ ID NO: 1892
  Description of Artificial Sequence: Synthetic all nuts; 5' sequence and inner sequence

SEQ ID NO: 33982 - DNA, 53 bp, Artificial Sequence; identical to SEQ ID NO: 1264
  Description of Artificial Sequence: Synthetic all nuts; 5' sequence and inner sequence

SEQ ID NO: 33983 - DNA, 53 bp, Artificial Sequence; identical to SEQ ID NO: 21478
  Description of Artificial Sequence: Synthetic all nuts; 5' sequence and inner sequence

SEQ ID NO: 33984 - DNA, 53 bp, Artificial Sequence; identical to SEQ ID NO: 1066
  Description of Artificial Sequence: Synthetic all nuts; 5' sequence and inner sequence

SEQ ID NO: 33985 - DNA, 53 bp, Artificial Sequence; identical to SEQ ID NO: 1398
  Description of Artificial Sequence: Synthetic all nuts; 5' sequence and inner sequence

SEQ ID NO: 33986 - DNA, 53 bp, Artificial Sequence; identical to SEQ ID NO: 5651
  Description of Artificial Sequence: Synthetic all nuts; 5' sequence and inner sequence

SEQ ID NO: 33987 - DNA, 53 bp, Artificial Sequence; identical to SEQ ID NO: 21676
  Description of Artificial Sequence: Synthetic all nuts; 5' sequence and inner sequence

SEQ ID NO: 33988 - DNA, 53 bp, Artificial Sequence; identical to SEQ ID NO: 1015
  Description of Artificial Sequence: Synthetic all nuts; 5' sequence and inner sequence

SEQ ID NO: 33989 - DNA, 53 bp, Artificial Sequence; identical to SEQ ID NO: 17688
  Description of Artificial Sequence: Synthetic all nuts; 5' sequence and inner sequence

SEQ ID NO: 33990 - DNA, 53 bp, Artificial Sequence; identical to SEQ ID NO: 21709
  Description of Artificial Sequence: Synthetic all nuts; 5' sequence and inner sequence

SEQ ID NO: 33991 - DNA, 53 bp, Artificial Sequence; identical to SEQ ID NO: 1459
  Description of Artificial Sequence: Synthetic all nuts; 5' sequence and inner sequence

SEQ ID NO: 33992 - DNA, 53 bp, Artificial Sequence; identical to SEQ ID NO: 1213
  Description of Artificial Sequence: Synthetic all nuts; 5' sequence and inner sequence

SEQ ID NO: 33993 - DNA, 53 bp, Artificial Sequence; identical to SEQ ID NO: 5854
  Description of Artificial Sequence: Synthetic all nuts; 5' sequence and inner sequence

SEQ ID NO: 33994 - DNA, 53 bp, Artificial Sequence
  Description of Artificial Sequence: Synthetic all nuts; 5' sequence and inner sequence
tagggaagagaaggacatatgatggcatggtcgtaccatcaagtaggcgtgga

SEQ ID NO: 33995 - DNA, 53 bp, Artificial Sequence; identical to SEQ ID NO: 1006
  Description of Artificial Sequence: Synthetic all nuts; 5' sequence and inner sequence

SEQ ID NO: 33996 - DNA, 53 bp, Artificial Sequence; identical to SEQ ID NO: 9910
  Description of Artificial Sequence: Synthetic all nuts; 5' sequence and inner sequence

SEQ ID NO: 33997 - DNA, 53 bp, Artificial Sequence; identical to SEQ ID NO: 1205
  Description of Artificial Sequence: Synthetic all nuts; 5' sequence and inner sequence

SEQ ID NO: 33998 - DNA, 53 bp, Artificial Sequence; identical to SEQ ID NO: 1229
  Description of Artificial Sequence: Synthetic all nuts; 5' sequence and inner sequence

SEQ ID NO: 33999 - DNA, 53 bp, Artificial Sequence; identical to SEQ ID NO: 13889
  Description of Artificial Sequence: Synthetic all nuts; 5' sequence and inner sequence

SEQ ID NO: 34000 - DNA, 53 bp, Artificial Sequence; identical to SEQ ID NO: 1668
  Description of Artificial Sequence: Synthetic all nuts; 5' sequence and inner sequence

SEQ ID NO: 34001 - DNA, 53 bp, Artificial Sequence; identical to SEQ ID NO: 1052
  Description of Artificial Sequence: Synthetic all nuts; 5' sequence and inner sequence

SEQ ID NO: 34002 - DNA, 53 bp, Artificial Sequence; identical to SEQ ID NO: 1125
  Description of Artificial Sequence: Synthetic all nuts; 5' sequence and inner sequence

SEQ ID NO: 34003 - DNA, 53 bp, Artificial Sequence; identical to SEQ ID NO: 22914
  Description of Artificial Sequence: Synthetic all nuts; inner sequence and 3' sequence

SEQ ID NO: 34004 - DNA, 53 bp, Artificial Sequence; identical to SEQ ID NO: 2439
  Description of Artificial Sequence: Synthetic all nuts; inner sequence and 3' sequence

SEQ ID NO: 34005 - DNA, 53 bp, Artificial Sequence; identical to SEQ ID NO: 2332
  Description of Artificial Sequence: Synthetic all nuts; inner sequence and 3' sequence

SEQ ID NO: 34006 - DNA, 53 bp, Artificial Sequence
  Description of Artificial Sequence: Synthetic all nuts; inner sequence and 3' sequence
gccgttcgacccctccataacgtgtgcatgttgactagtacatgaccacttga

SEQ ID NO: 34007 - DNA, 53 bp, Artificial Sequence; identical to SEQ ID NO: 2486
  Description of Artificial Sequence: Synthetic all nuts; inner sequence and 3' sequence

SEQ ID NO: 34008 - DNA, 53 bp, Artificial Sequence; identical to SEQ ID NO: 2372
  Description of Artificial Sequence: Synthetic all nuts; inner sequence and 3' sequence

SEQ ID NO: 34009 - DNA, 53 bp, Artificial Sequence
  Description of Artificial Sequence: Synthetic all nuts; inner sequence and 3' sequence
ccgatcggaccaaacgtggcattgtgctcgttgactagtacatgaccacttga

SEQ ID NO: 34010 - DNA, 53 bp, Artificial Sequence
  Description of Artificial Sequence: Synthetic all nuts; inner sequence and 3' sequence
ccatacgtacgaacgacctcaatgtgcgtcttgactagtacatgaccacttga

SEQ ID NO: 34011 - DNA, 53 bp, Artificial Sequence; identical to SEQ ID NO: 2011
  Description of Artificial Sequence: Synthetic all nuts; inner sequence and 3' sequence

SEQ ID NO: 34012 - DNA, 53 bp, Artificial Sequence; identical to SEQ ID NO: 2410
  Description of Artificial Sequence: Synthetic all nuts; inner sequence and 3' sequence

SEQ ID NO: 34013 - DNA, 53 bp, Artificial Sequence; identical to SEQ ID NO: 2528
  Description of Artificial Sequence: Synthetic all nuts; inner sequence and 3' sequence

SEQ ID NO: 34014 - DNA, 53 bp, Artificial Sequence; identical to SEQ ID NO: 6872
  Description of Artificial Sequence: Synthetic all nuts; inner sequence and 3' sequence

SEQ ID NO: 34015 - DNA, 53 bp, Artificial Sequence; identical to SEQ ID NO: 2377
  Description of Artificial Sequence: Synthetic all nuts; inner sequence and 3' sequence

SEQ ID NO: 34016 - DNA, 53 bp, Artificial Sequence; identical to SEQ ID NO: 2790
  Description of Artificial Sequence: Synthetic all nuts; inner sequence and 3' sequence

SEQ ID NO: 34017 - DNA, 53 bp, Artificial Sequence; identical to SEQ ID NO: 2133
  Description of Artificial Sequence: Synthetic all nuts; inner sequence and 3' sequence

SEQ ID NO: 34018 - DNA, 53 bp, Artificial Sequence; identical to SEQ ID NO: 10884
  Description of Artificial Sequence: Synthetic all nuts; inner sequence and 3' sequence

SEQ ID NO: 34019 - DNA, 53 bp, Artificial Sequence; identical to SEQ ID NO: 2306
  Description of Artificial Sequence: Synthetic all nuts; inner sequence and 3' sequence

SEQ ID NO: 34020 - DNA, 53 bp, Artificial Sequence; identical to SEQ ID NO: 10850
  Description of Artificial Sequence: Synthetic all nuts; inner sequence and 3' sequence

SEQ ID NO: 34021 - DNA, 53 bp, Artificial Sequence; identical to SEQ ID NO: 2256
  Description of Artificial Sequence: Synthetic all nuts; inner sequence and 3' sequence

SEQ ID NO: 34022 - DNA, 53 bp, Artificial Sequence; identical to SEQ ID NO: 6739
  Description of Artificial Sequence: Synthetic all nuts; inner sequence and 3' sequence

SEQ ID NO: 34023 - DNA, 53 bp, Artificial Sequence
  Description of Artificial Sequence: Synthetic all nuts; inner sequence and 3' sequence
gaccgaacggacctcaatgtgtggcatgcattgactagtacatgaccacttga

SEQ ID NO: 34024 - DNA, 53 bp, Artificial Sequence; identical to SEQ ID NO: 2320
  Description of Artificial Sequence: Synthetic all nuts; inner sequence and 3' sequence

SEQ ID NO: 34025 - DNA, 53 bp, Artificial Sequence; identical to SEQ ID NO: 2204
  Description of Artificial Sequence: Synthetic all nuts; inner sequence and 3' sequence

SEQ ID NO: 34026 - DNA, 53 bp, Artificial Sequence; identical to SEQ ID NO: 18824
  Description of Artificial Sequence: Synthetic all nuts; inner sequence and 3' sequence

SEQ ID NO: 34027 - DNA, 53 bp, Artificial Sequence; identical to SEQ ID NO: 2063
  Description of Artificial Sequence: Synthetic all nuts; inner sequence and 3' sequence

SEQ ID NO: 34028 - DNA, 53 bp, Artificial Sequence; identical to SEQ ID NO: 2637
  Description of Artificial Sequence: Synthetic all nuts; inner sequence and 3' sequence

SEQ ID NO: 34029 - DNA, 53 bp, Artificial Sequence; identical to SEQ ID NO: 2107
  Description of Artificial Sequence: Synthetic all nuts; inner sequence and 3' sequence

SEQ ID NO: 34030 - DNA, 53 bp, Artificial Sequence; identical to SEQ ID NO: 6807
  Description of Artificial Sequence: Synthetic all nuts; inner sequence and 3' sequence

SEQ ID NO: 34031 - DNA, 53 bp, Artificial Sequence
  Description of Artificial Sequence: Synthetic all nuts; inner sequence and 3' sequence
cgcaccaaccatgaggcagtgtacgtgtgtttgactagtacatgaccacttga

SEQ ID NO: 34032 - DNA, 53 bp, Artificial Sequence; identical to SEQ ID NO: 18799
  Description of Artificial Sequence: Synthetic all nuts; inner sequence and 3' sequence

SEQ ID NO: 34033 - DNA, 53 bp, Artificial Sequence
  Description of Artificial Sequence: Synthetic all nuts; inner sequence and 3' sequence
ccgtagccacatcaagcggtggtgtgcgtgttgactagtacatgaccacttga

SEQ ID NO: 34034 - DNA, 53 bp, Artificial Sequence; identical to SEQ ID NO: 6503
  Description of Artificial Sequence: Synthetic all nuts; inner sequence and 3' sequence

SEQ ID NO: 34035 - DNA, 53 bp, Artificial Sequence; identical to SEQ ID NO: 2665
  Description of Artificial Sequence: Synthetic all nuts; inner sequence and 3' sequence

SEQ ID NO: 34036 - DNA, 53 bp, Artificial Sequence; identical to SEQ ID NO: 6837
  Description of Artificial Sequence: Synthetic all nuts; inner sequence and 3' sequence

SEQ ID NO: 34037 - DNA, 53 bp, Artificial Sequence; identical to SEQ ID NO: 2869
  Description of Artificial Sequence: Synthetic all nuts; inner sequence and 3' sequence

SEQ ID NO: 34038 - DNA, 53 bp, Artificial Sequence
  Description of Artificial Sequence: Synthetic all nuts; inner sequence and 3' sequence
cgcacgatcgtcctgccctaacgtggcgcattgactagtacatgaccacttga

SEQ ID NO: 34039 - DNA, 53 bp, Artificial Sequence; identical to SEQ ID NO: 22991
  Description of Artificial Sequence: Synthetic all nuts; inner sequence and 3' sequence

SEQ ID NO: 34040 - DNA, 53 bp, Artificial Sequence; identical to SEQ ID NO: 2126
  Description of Artificial Sequence: Synthetic all nuts; inner sequence and 3' sequence

SEQ ID NO: 34041 - DNA, 53 bp, Artificial Sequence; identical to SEQ ID NO: 2945
  Description of Artificial Sequence: Synthetic all nuts; inner sequence and 3' sequence

SEQ ID NO: 34042 - DNA, 53 bp, Artificial Sequence; identical to SEQ ID NO: 2151
  Description of Artificial Sequence: Synthetic all nuts; inner sequence and 3' sequence

SEQ ID NO: 34043 - DNA, 53 bp, Artificial Sequence; identical to SEQ ID NO: 2300
  Description of Artificial Sequence: Synthetic all nuts; inner sequence and 3' sequence

SEQ ID NO: 34044 - DNA, 53 bp, Artificial Sequence; identical to SEQ ID NO: 22504
  Description of Artificial Sequence: Synthetic all nuts; inner sequence and 3' sequence

SEQ ID NO: 34045 - DNA, 53 bp, Artificial Sequence; identical to SEQ ID NO: 2556
  Description of Artificial Sequence: Synthetic all nuts; inner sequence and 3' sequence

SEQ ID NO: 34046 - DNA, 53 bp, Artificial Sequence
  Description of Artificial Sequence: Synthetic all nuts; inner sequence and 3' sequence
gtcattccgcatcctacacgtgggcacgtcttgactagtacatgaccacttga

SEQ ID NO: 34047 - DNA, 53 bp, Artificial Sequence; identical to SEQ ID NO: 6939
  Description of Artificial Sequence: Synthetic all nuts; inner sequence and 3' sequence

SEQ ID NO: 34048 - DNA, 53 bp, Artificial Sequence; identical to SEQ ID NO: 2429
  Description of Artificial Sequence: Synthetic all nuts; inner sequence and 3' sequence

SEQ ID NO: 34049 - DNA, 53 bp, Artificial Sequence; identical to SEQ ID NO: 2255
  Description of Artificial Sequence: Synthetic all nuts; inner sequence and 3' sequence

SEQ ID NO: 34050 - DNA, 53 bp, Artificial Sequence; identical to SEQ ID NO: 2081
  Description of Artificial Sequence: Synthetic all nuts; inner sequence and 3' sequence

SEQ ID NO: 34051 - DNA, 53 bp, Artificial Sequence; identical to SEQ ID NO: 2298
  Description of Artificial Sequence: Synthetic all nuts; inner sequence and 3' sequence

SEQ ID NO: 34052 - DNA, 53 bp, Artificial Sequence; identical to SEQ ID NO: 2194
  Description of Artificial Sequence: Synthetic all nuts; inner sequence and 3' sequence

SEQ ID NO: 34053 - DNA, 53 bp, Artificial Sequence; identical to SEQ ID NO: 2035
  Description of Artificial Sequence: Synthetic all nuts; inner sequence and 3' sequence

SEQ ID NO: 34054 - DNA, 53 bp, Artificial Sequence; identical to SEQ ID NO: 22530
  Description of Artificial Sequence: Synthetic all nuts; inner sequence and 3' sequence

SEQ ID NO: 34055 - DNA, 53 bp, Artificial Sequence; identical to SEQ ID NO: 22653
  Description of Artificial Sequence: Synthetic all nuts; inner sequence and 3' sequence

SEQ ID NO: 34056 - DNA, 53 bp, Artificial Sequence; identical to SEQ ID NO: 14933
  Description of Artificial Sequence: Synthetic all nuts; inner sequence and 3' sequence

SEQ ID NO: 34057 - DNA, 53 bp, Artificial Sequence; identical to SEQ ID NO: 14869
  Description of Artificial Sequence: Synthetic all nuts; inner sequence and 3' sequence

SEQ ID NO: 34058 - DNA, 53 bp, Artificial Sequence; identical to SEQ ID NO: 6617
  Description of Artificial Sequence: Synthetic all nuts; inner sequence and 3' sequence

SEQ ID NO: 34059 - DNA, 53 bp, Artificial Sequence; identical to SEQ ID NO: 22853
  Description of Artificial Sequence: Synthetic all nuts; inner sequence and 3' sequence

SEQ ID NO: 34060 - DNA, 53 bp, Artificial Sequence; identical to SEQ ID NO: 18651
  Description of Artificial Sequence: Synthetic all nuts; inner sequence and 3' sequence

SEQ ID NO: 34061 - DNA, 53 bp, Artificial Sequence; identical to SEQ ID NO: 2226
  Description of Artificial Sequence: Synthetic all nuts; inner sequence and 3' sequence

SEQ ID NO: 34062 - DNA, 53 bp, Artificial Sequence; identical to SEQ ID NO: 30792
  Description of Artificial Sequence: Synthetic all nuts; inner sequence and 3' sequence

SEQ ID NO: 34063 - DNA, 53 bp, Artificial Sequence; identical to SEQ ID NO: 22626
  Description of Artificial Sequence: Synthetic all nuts; inner sequence and 3' sequence

SEQ ID NO: 34064 - DNA, 53 bp, Artificial Sequence; identical to SEQ ID NO: 6708
  Description of Artificial Sequence: Synthetic all nuts; inner sequence and 3' sequence

SEQ ID NO: 34065 - DNA, 53 bp, Artificial Sequence; identical to SEQ ID NO: 2791
  Description of Artificial Sequence: Synthetic all nuts; inner sequence and 3' sequence

SEQ ID NO: 34066 - DNA, 53 bp, Artificial Sequence; identical to SEQ ID NO: 22514
  Description of Artificial Sequence: Synthetic all nuts; inner sequence and 3' sequence

SEQ ID NO: 34067 - DNA, 53 bp, Artificial Sequence; identical to SEQ ID NO: 22944
  Description of Artificial Sequence: Synthetic all nuts; inner sequence and 3' sequence

SEQ ID NO: 34068 - DNA, 53 bp, Artificial Sequence; identical to SEQ ID NO: 6301
  Description of Artificial Sequence: Synthetic all nuts; inner sequence and 3' sequence

SEQ ID NO: 34069 - DNA, 53 bp, Artificial Sequence; identical to SEQ ID NO: 2887
  Description of Artificial Sequence: Synthetic all nuts; inner sequence and 3' sequence

SEQ ID NO: 34070 - DNA, 53 bp, Artificial Sequence; identical to SEQ ID NO: 2208
  Description of Artificial Sequence: Synthetic all nuts; inner sequence and 3' sequence

SEQ ID NO: 34071 - DNA, 53 bp, Artificial Sequence; identical to SEQ ID NO: 2399
  Description of Artificial Sequence: Synthetic all nuts; inner sequence and 3' sequence

SEQ ID NO: 34072 - DNA, 53 bp, Artificial Sequence; identical to SEQ ID NO: 2161
  Description of Artificial Sequence: Synthetic all nuts; inner sequence and 3' sequence

SEQ ID NO: 34073 - DNA, 53 bp, Artificial Sequence; identical to SEQ ID NO: 22698
  Description of Artificial Sequence: Synthetic all nuts; inner sequence and 3' sequence

SEQ ID NO: 34074 - DNA, 53 bp, Artificial Sequence
  Description of Artificial Sequence: Synthetic all nuts; inner sequence and 3' sequence
ggcatgctatgaacgaggcatgatgcgtcattgactagtacatgaccacttga

SEQ ID NO: 34075 - DNA, 53 bp, Artificial Sequence; identical to SEQ ID NO: 22668
  Description of Artificial Sequence: Synthetic all nuts; inner sequence and 3' sequence

SEQ ID NO: 34076 - DNA, 53 bp, Artificial Sequence; identical to SEQ ID NO: 2267
  Description of Artificial Sequence: Synthetic all nuts; inner sequence and 3' sequence

SEQ ID NO: 34077 - DNA, 53 bp, Artificial Sequence; identical to SEQ ID NO: 2811
  Description of Artificial Sequence: Synthetic all nuts; inner sequence and 3' sequence

SEQ ID NO: 34078 - DNA, 53 bp, Artificial Sequence; identical to SEQ ID NO: 2179
  Description of Artificial Sequence: Synthetic all nuts; inner sequence and 3' sequence

SEQ ID NO: 34079 - DNA, 53 bp, Artificial Sequence
  Description of Artificial Sequence: Synthetic all nuts; inner sequence and 3' sequence
ccgtagcgacatcaagcggtgatgtgcgtgttgactagtacatgaccacttga

SEQ ID NO: 34080 - DNA, 53 bp, Artificial Sequence; identical to SEQ ID NO: 22897
  Description of Artificial Sequence: Synthetic all nuts; inner sequence and 3' sequence

SEQ ID NO: 34081 - DNA, 53 bp, Artificial Sequence; identical to SEQ ID NO: 2269
  Description of Artificial Sequence: Synthetic all nuts; inner sequence and 3' sequence

SEQ ID NO: 34082 - DNA, 53 bp, Artificial Sequence; identical to SEQ ID NO: 2496
  Description of Artificial Sequence: Synthetic all nuts; inner sequence and 3' sequence

SEQ ID NO: 34083 - DNA, 53 bp, Artificial Sequence; identical to SEQ ID NO: 6755
  Description of Artificial Sequence: Synthetic all nuts; inner sequence and 3' sequence

SEQ ID NO: 34084 - DNA, 53 bp, Artificial Sequence
  Description of Artificial Sequence: Synthetic all nuts; inner sequence and 3' sequence
gtcatgcccgaacactatcatggcggcatgttgactagtacatgaccacttga

SEQ ID NO: 34085 - DNA, 53 bp, Artificial Sequence; identical to SEQ ID NO: 2530
  Description of Artificial Sequence: Synthetic all nuts; inner sequence and 3' sequence

SEQ ID NO: 34086 - DNA, 53 bp, Artificial Sequence; identical to SEQ ID NO: 2424
  Description of Artificial Sequence: Synthetic all nuts; inner sequence and 3' sequence

SEQ ID NO: 34087 - DNA, 53 bp, Artificial Sequence
  Description of Artificial Sequence: Synthetic all nuts; inner sequence and 3' sequence
ccgtagcgacatcaagcggtggtgtccgtgttgactagtacatgaccacttga

SEQ ID NO: 34088 - DNA, 53 bp, Artificial Sequence; identical to SEQ ID NO: 2506
  Description of Artificial Sequence: Synthetic all nuts; inner sequence and 3' sequence

SEQ ID NO: 34089 - DNA, 53 bp, Artificial Sequence; identical to SEQ ID NO: 2344
  Description of Artificial Sequence: Synthetic all nuts; inner sequence and 3' sequence

SEQ ID NO: 34090 - DNA, 53 bp, Artificial Sequence
  Description of Artificial Sequence: Synthetic all nuts; inner sequence and 3' sequence
cgcaccgcatgtcacgtcagtccgccagtgttgactagtacatgaccacttga

SEQ ID NO: 34091 - DNA, 52 bp, Artificial Sequence; identical to SEQ ID NO: 2549
  Description of Artificial Sequence: Synthetic all nuts; inner sequence and 3' sequence

SEQ ID NO: 34092 - DNA, 53 bp, Artificial Sequence; identical to SEQ ID NO: 2343
  Description of Artificial Sequence: Synthetic all nuts; inner sequence and 3' sequence

SEQ ID NO: 34093 - DNA, 53 bp, Artificial Sequence; identical to SEQ ID NO: 2114
  Description of Artificial Sequence: Synthetic all nuts; inner sequence and 3' sequence

SEQ ID NO: 34094 - DNA, 53 bp, Artificial Sequence
  Description of Artificial Sequence: Synthetic all nuts; inner sequence and 3' sequence
ccgtagcgacatcaagcggtggtgtgcgcattgactagtacatgaccacttga

SEQ ID NO: 34095 - DNA, 53 bp, Artificial Sequence; identical to SEQ ID NO: 22730
  Description of Artificial Sequence: Synthetic all nuts; inner sequence and 3' sequence

SEQ ID NO: 34096 - DNA, 53 bp, Artificial Sequence
  Description of Artificial Sequence: Synthetic all nuts; inner sequence and 3' sequence
cgcatgggacgtactgaccgtatcgtgtcattgactagtacatgaccacttga

SEQ ID NO: 34097 - DNA, 48 bp, Artificial Sequence; identical to SEQ ID NO: 22136
  Description of Artificial Sequence: Synthetic all nuts; inner sequence and 3' sequence

SEQ ID NO: 34098 - DNA, 53 bp, Artificial Sequence; identical to SEQ ID NO: 2597
  Description of Artificial Sequence: Synthetic all nuts; inner sequence and 3' sequence

SEQ ID NO: 34099 - DNA, 53 bp, Artificial Sequence; identical to SEQ ID NO: 2491
  Description of Artificial Sequence: Synthetic all nuts; inner sequence and 3' sequence

SEQ ID NO: 34100 - DNA, 53 bp, Artificial Sequence; identical to SEQ ID NO: 2780
  Description of Artificial Sequence: Synthetic all nuts; inner sequence and 3' sequence

SEQ ID NO: 34101 - DNA, 53 bp, Artificial Sequence; identical to SEQ ID NO: 6776
  Description of Artificial Sequence: Synthetic all nuts; inner sequence and 3' sequence

SEQ ID NO: 34102 - DNA, 49 bp, Artificial Sequence; identical to SEQ ID NO: 22678
  Description of Artificial Sequence: Synthetic all nuts; inner sequence and 3' sequence

SEQ ID NO: 34103 - DNA, 53 bp, Artificial Sequence; identical to SEQ ID NO: 22882
  Description of Artificial Sequence: Synthetic all nuts; inner sequence and 3' sequence

SEQ ID NO: 34104 - DNA, 53 bp, Artificial Sequence; identical to SEQ ID NO: 2146
  Description of Artificial Sequence: Synthetic all nuts; inner sequence and 3' sequence

SEQ ID NO: 34105 - DNA, 53 bp, Artificial Sequence; identical to SEQ ID NO: 2443
  Description of Artificial Sequence: Synthetic all nuts; inner sequence and 3' sequence

SEQ ID NO: 34106 - DNA, 53 bp, Artificial Sequence; identical to SEQ ID NO: 2746
  Description of Artificial Sequence: Synthetic all nuts; inner sequence and 3' sequence

SEQ ID NO: 34107 - DNA, 53 bp, Artificial Sequence; identical to SEQ ID NO: 22720
  Description of Artificial Sequence: Synthetic all nuts; inner sequence and 3' sequence

SEQ ID NO: 34108 - DNA, 53 bp, Artificial Sequence
  Description of Artificial Sequence: Synthetic all nuts; inner sequence and 3' sequence
ccgtcgaggcacgtgacagtgggcttagcgttgactagtacatgaccacttga

SEQ ID NO: 34109 - DNA, 53 bp, Artificial Sequence; identical to SEQ ID NO: 6792
  Description of Artificial Sequence: Synthetic all nuts; inner sequence and 3' sequence

SEQ ID NO: 34110 - DNA, 53 bp, Artificial Sequence; identical to SEQ ID NO: 2359
  Description of Artificial Sequence: Synthetic all nuts; inner sequence and 3' sequence

SEQ ID NO: 34111 - DNA, 53 bp, Artificial Sequence; identical to SEQ ID NO: 22363
  Description of Artificial Sequence: Synthetic all nuts; inner sequence and 3' sequence

SEQ ID NO: 34112 - DNA, 53 bp, Artificial Sequence; identical to SEQ ID NO: 2340
  Description of Artificial Sequence: Synthetic all nuts; inner sequence and 3' sequence

SEQ ID NO: 34113 - DNA, 53 bp, Artificial Sequence; identical to SEQ ID NO: 6713
  Description of Artificial Sequence: Synthetic all nuts; inner sequence and 3' sequence

SEQ ID NO: 34114 - DNA, 53 bp, Artificial Sequence; identical to SEQ ID NO: 2093
  Description of Artificial Sequence: Synthetic all nuts; inner sequence and 3' sequence

SEQ ID NO: 34115 - DNA, 53 bp, Artificial Sequence; identical to SEQ ID NO: 2788
  Description of Artificial Sequence: Synthetic all nuts; inner sequence and 3' sequence

SEQ ID NO: 34116 - DNA, 53 bp, Artificial Sequence; identical to SEQ ID NO: 2031
  Description of Artificial Sequence: Synthetic all nuts; inner sequence and 3' sequence

SEQ ID NO: 34117 - DNA, 53 bp, Artificial Sequence; identical to SEQ ID NO: 6642
  Description of Artificial Sequence: Synthetic all nuts; inner sequence and 3' sequence

SEQ ID NO: 34118 - DNA, 53 bp, Artificial Sequence; identical to SEQ ID NO: 2073
  Description of Artificial Sequence: Synthetic all nuts; inner sequence and 3' sequence

SEQ ID NO: 34119 - DNA, 53 bp, Artificial Sequence; identical to SEQ ID NO: 2485
  Description of Artificial Sequence: Synthetic all nuts; inner sequence and 3' sequence

SEQ ID NO: 34120 - DNA, 53 bp, Artificial Sequence; identical to SEQ ID NO: 2026
  Description of Artificial Sequence: Synthetic all nuts; inner sequence and 3' sequence

SEQ ID NO: 34121 - DNA, 53 bp, Artificial Sequence; identical to SEQ ID NO: 2630
  Description of Artificial Sequence: Synthetic all nuts; inner sequence and 3' sequence

SEQ ID NO: 34122 - DNA, 53 bp, Artificial Sequence; identical to SEQ ID NO: 7002
  Description of Artificial Sequence: Synthetic all nuts; inner sequence and 3' sequence

SEQ ID NO: 34123 - DNA, 53 bp, Artificial Sequence; identical to SEQ ID NO: 30574
  Description of Artificial Sequence: Synthetic all nuts; inner sequence and 3' sequence

SEQ ID NO: 34124 - DNA, 53 bp, Artificial Sequence; identical to SEQ ID NO: 2294
  Description of Artificial Sequence: Synthetic all nuts; inner sequence and 3' sequence

SEQ ID NO: 34125 - DNA, 53 bp, Artificial Sequence; identical to SEQ ID NO: 2490
  Description of Artificial Sequence: Synthetic all nuts; inner sequence and 3' sequence

SEQ ID NO: 34126 - DNA, 53 bp, Artificial Sequence; identical to SEQ ID NO: 2771
  Description of Artificial Sequence: Synthetic all nuts; inner sequence and 3' sequence

SEQ ID NO: 34127 - DNA, 53 bp, Artificial Sequence; identical to SEQ ID NO: 30791
  Description of Artificial Sequence: Synthetic all nuts; inner sequence and 3' sequence

SEQ ID NO: 34128 - DNA, 53 bp, Artificial Sequence; identical to SEQ ID NO: 2117
  Description of Artificial Sequence: Synthetic all nuts; inner sequence and 3' sequence

SEQ ID NO: 34129 - DNA, 53 bp, Artificial Sequence
  Description of Artificial Sequence: Synthetic all nuts; inner sequence and 3' sequence
cgaccgagtcagggacgatgcgacgtcacgttgactagtacatgaccacttga

SEQ ID NO: 34130 - DNA, 53 bp, Artificial Sequence; identical to SEQ ID NO: 2487
  Description of Artificial Sequence: Synthetic all nuts; inner sequence and 3' sequence

SEQ ID NO: 34131 - DNA, 53 bp, Artificial Sequence; identical to SEQ ID NO: 2071
  Description of Artificial Sequence: Synthetic all nuts; inner sequence and 3' sequence

SEQ ID NO: 34132 - DNA, 53 bp, Artificial Sequence; identical to SEQ ID NO: 2463
  Description of Artificial Sequence: Synthetic all nuts; inner sequence and 3' sequence

SEQ ID NO: 34133 - DNA, 53 bp, Artificial Sequence; identical to SEQ ID NO: 14936
  Description of Artificial Sequence: Synthetic all nuts; inner sequence and 3' sequence

SEQ ID NO: 34134 - DNA, 53 bp, Artificial Sequence; identical to SEQ ID NO: 18342
  Description of Artificial Sequence: Synthetic all nuts; inner sequence and 3' sequence

SEQ ID NO: 34135 - DNA, 53 bp, Artificial Sequence; identical to SEQ ID NO: 2840
  Description of Artificial Sequence: Synthetic all nuts; inner sequence and 3' sequence

SEQ ID NO: 34136 - DNA, 53 bp, Artificial Sequence
  Description of Artificial Sequence: Synthetic all nuts; inner sequence and 3' sequence
gtcatgcaagaacactatcatggcggcatgttgactagtacatgaccacttga

SEQ ID NO: 34137 - DNA, 53 bp, Artificial Sequence; identical to SEQ ID NO: 2176
  Description of Artificial Sequence: Synthetic all nuts; inner sequence and 3' sequence

SEQ ID NO: 34138 - DNA, 53 bp, Artificial Sequence; identical to SEQ ID NO: 2005
  Description of Artificial Sequence: Synthetic all nuts; inner sequence and 3' sequence

SEQ ID NO: 34139 - DNA, 53 bp, Artificial Sequence; identical to SEQ ID NO: 2860
  Description of Artificial Sequence: Synthetic all nuts; inner sequence and 3' sequence

SEQ ID NO: 34140 - DNA, 53 bp, Artificial Sequence; identical to SEQ ID NO: 2379
  Description of Artificial Sequence: Synthetic all nuts; inner sequence and 3' sequence

SEQ ID NO: 34141 - DNA, 53 bp, Artificial Sequence; identical to SEQ ID NO: 2919
  Description of Artificial Sequence: Synthetic all nuts; inner sequence and 3' sequence

SEQ ID NO: 34142 - DNA, 53 bp, Artificial Sequence; identical to SEQ ID NO: 14985
  Description of Artificial Sequence: Synthetic all nuts; inner sequence and 3' sequence

SEQ ID NO: 34143 - DNA, 48 bp, Artificial Sequence; identical to SEQ ID NO: 2427
  Description of Artificial Sequence: Synthetic all nuts; inner sequence and 3' sequence

SEQ ID NO: 34144 - DNA, 53 bp, Artificial Sequence; identical to SEQ ID NO: 2764
  Description of Artificial Sequence: Synthetic all nuts; inner sequence and 3' sequence

SEQ ID NO: 34145 - DNA, 53 bp, Artificial Sequence; identical to SEQ ID NO: 18768
  Description of Artificial Sequence: Synthetic all nuts; inner sequence and 3' sequence

SEQ ID NO: 34146 - DNA, 53 bp, Artificial Sequence; identical to SEQ ID NO: 2381
  Description of Artificial Sequence: Synthetic all nuts; inner sequence and 3' sequence

SEQ ID NO: 34147 - DNA, 53 bp, Artificial Sequence; identical to SEQ ID NO: 2270
  Description of Artificial Sequence: Synthetic all nuts; inner sequence and 3' sequence

SEQ ID NO: 34148 - DNA, 53 bp, Artificial Sequence; identical to SEQ ID NO: 2355
  Description of Artificial Sequence: Synthetic all nuts; inner sequence and 3' sequence

SEQ ID NO: 34149 - DNA, 53 bp, Artificial Sequence; identical to SEQ ID NO: 2155
  Description of Artificial Sequence: Synthetic all nuts; inner sequence and 3' sequence

SEQ ID NO: 34150 - DNA, 53 bp, Artificial Sequence; identical to SEQ ID NO: 2628
  Description of Artificial Sequence: Synthetic all nuts; inner sequence and 3' sequence

SEQ ID NO: 34151 - DNA, 53 bp, Artificial Sequence; identical to SEQ ID NO: 2646
  Description of Artificial Sequence: Synthetic all nuts; inner sequence and 3' sequence

SEQ ID NO: 34152 - DNA, 53 bp, Artificial Sequence; identical to SEQ ID NO: 2632
  Description of Artificial Sequence: Synthetic all nuts; inner sequence and 3' sequence

SEQ ID NO: 34153 - DNA, 53 bp, Artificial Sequence; identical to SEQ ID NO: 2389
  Description of Artificial Sequence: Synthetic all nuts; inner sequence and 3' sequence

SEQ ID NO: 34154 - DNA, 53 bp, Artificial Sequence; identical to SEQ ID NO: 2955
  Description of Artificial Sequence: Synthetic all nuts; inner sequence and 3' sequence

SEQ ID NO: 34155 - DNA, 53 bp, Artificial Sequence; identical to SEQ ID NO: 6590
  Description of Artificial Sequence: Synthetic all nuts; inner sequence and 3' sequence

SEQ ID NO: 34156 - DNA, 53 bp, Artificial Sequence; identical to SEQ ID NO: 10926
  Description of Artificial Sequence: Synthetic all nuts; inner sequence and 3' sequence

SEQ ID NO: 34157 - DNA, 53 bp, Artificial Sequence; identical to SEQ ID NO: 2045
  Description of Artificial Sequence: Synthetic all nuts; inner sequence and 3' sequence

SEQ ID NO: 34158 - DNA, 53 bp, Artificial Sequence; identical to SEQ ID NO: 2400
  Description of Artificial Sequence: Synthetic all nuts; inner sequence and 3' sequence

SEQ ID NO: 34159 - DNA, 53 bp, Artificial Sequence; identical to SEQ ID NO: 22693
  Description of Artificial Sequence: Synthetic all nuts; inner sequence and 3' sequence

SEQ ID NO: 34160 - DNA, 53 bp, Artificial Sequence; identical to SEQ ID NO: 2141
  Description of Artificial Sequence: Synthetic all nuts; inner sequence and 3' sequence

SEQ ID NO: 34161 - DNA, 52 bp, Artificial Sequence; identical to SEQ ID NO: 6559
  Description of Artificial Sequence: Synthetic all nuts; inner sequence and 3' sequence

SEQ ID NO: 34162 - DNA, 53 bp, Artificial Sequence
  Description of Artificial Sequence: Synthetic all nuts; inner sequence and 3' sequence
tgcgtaccgagctgacctatcagtgtgtcgttgactagtacatgaccacttga

SEQ ID NO: 34163 - DNA, 53 bp, Artificial Sequence; identical to SEQ ID NO: 2098
  Description of Artificial Sequence: Synthetic all nuts; inner sequence and 3' sequence

SEQ ID NO: 34164 - DNA, 53 bp, Artificial Sequence; identical to SEQ ID NO: 18692
  Description of Artificial Sequence: Synthetic all nuts; inner sequence and 3' sequence

SEQ ID NO: 34165 - DNA, 53 bp, Artificial Sequence; identical to SEQ ID NO: 2376
  Description of Artificial Sequence: Synthetic all nuts; inner sequence and 3' sequence

SEQ ID NO: 34166 - DNA, 53 bp, Artificial Sequence
  Description of Artificial Sequence: Synthetic all nuts; inner sequence and 3' sequence
gtacgcaacgaacctacgagtgatcgtgtattgactagtacatgaccacttga

SEQ ID NO: 34167 - DNA, 53 bp, Artificial Sequence
  Description of Artificial Sequence: Synthetic all nuts; inner sequence and 3' sequence
gacgcgaacttgcctcaagtgtgccgtggattgactagtacatgaccacttga

SEQ ID NO: 34168 - DNA, 53 bp, Artificial Sequence; identical to SEQ ID NO: 2075
  Description of Artificial Sequence: Synthetic all nuts; inner sequence and 3' sequence

SEQ ID NO: 34169 - DNA, 53 bp, Artificial Sequence; identical to SEQ ID NO: 2157
  Description of Artificial Sequence: Synthetic all nuts; inner sequence and 3' sequence

SEQ ID NO: 34170 - DNA, 53 bp, Artificial Sequence; identical to SEQ ID NO: 2567
  Description of Artificial Sequence: Synthetic all nuts; inner sequence and 3' sequence

SEQ ID NO: 34171 - DNA, 53 bp, Artificial Sequence; identical to SEQ ID NO: 6610
  Description of Artificial Sequence: Synthetic all nuts; inner sequence and 3' sequence

SEQ ID NO: 34172 - DNA, 53 bp, Artificial Sequence; identical to SEQ ID NO: 6845
  Description of Artificial Sequence: Synthetic all nuts; inner sequence and 3' sequence

SEQ ID NO: 34173 - DNA, 53 bp, Artificial Sequence; identical to SEQ ID NO: 6742
  Description of Artificial Sequence: Synthetic all nuts; inner sequence and 3' sequence

SEQ ID NO: 34174 - DNA, 53 bp, Artificial Sequence; identical to SEQ ID NO: 2069
  Description of Artificial Sequence: Synthetic all nuts; inner sequence and 3' sequence

SEQ ID NO: 34175 - DNA, 53 bp, Artificial Sequence
  Description of Artificial Sequence: Synthetic all nuts; inner sequence and 3' sequence
gtacgcgcgacacctatcaatgtggacgtgttgactagtacatgaccacttga

SEQ ID NO: 34176 - DNA, 53 bp, Artificial Sequence; identical to SEQ ID NO: 10953
  Description of Artificial Sequence: Synthetic all nuts; inner sequence and 3' sequence

SEQ ID NO: 34177 - DNA, 54 bp, Artificial Sequence; identical to SEQ ID NO: 22717
  Description of Artificial Sequence: Synthetic all nuts; inner sequence and 3' sequence

SEQ ID NO: 34178 - DNA, 54 bp, Artificial Sequence; identical to SEQ ID NO: 6245
  Description of Artificial Sequence: Synthetic all nuts; inner sequence and 3' sequence

SEQ ID NO: 34179 - DNA, 53 bp, Artificial Sequence; identical to SEQ ID NO: 10860
  Description of Artificial Sequence: Synthetic all nuts; inner sequence and 3' sequence

SEQ ID NO: 34180 - DNA, 53 bp, Artificial Sequence; identical to SEQ ID NO: 2103
  Description of Artificial Sequence: Synthetic all nuts; inner sequence and 3' sequence

SEQ ID NO: 34181 - DNA, 53 bp, Artificial Sequence; identical to SEQ ID NO: 2655
  Description of Artificial Sequence: Synthetic all nuts; inner sequence and 3' sequence

SEQ ID NO: 34182 - DNA, 53 bp, Artificial Sequence; identical to SEQ ID NO: 2143
  Description of Artificial Sequence: Synthetic all nuts; inner sequence and 3' sequence

SEQ ID NO: 34183 - DNA, 53 bp, Artificial Sequence; identical to SEQ ID NO: 10971
  Description of Artificial Sequence: Synthetic all nuts; inner sequence and 3' sequence

SEQ ID NO: 34184 - DNA, 53 bp, Artificial Sequence; identical to SEQ ID NO: 10770
  Description of Artificial Sequence: Synthetic all nuts; inner sequence and 3' sequence

SEQ ID NO: 34185 - DNA, 53 bp, Artificial Sequence; identical to SEQ ID NO: 2109
  Description of Artificial Sequence: Synthetic all nuts; inner sequence and 3' sequence

SEQ ID NO: 34186 - DNA, 53 bp, Artificial Sequence; identical to SEQ ID NO: 2460
  Description of Artificial Sequence: Synthetic all nuts; inner sequence and 3' sequence

SEQ ID NO: 34187 - DNA, 53 bp, Artificial Sequence; identical to SEQ ID NO: 22736
  Description of Artificial Sequence: Synthetic all nuts; inner sequence and 3' sequence

SEQ ID NO: 34188 - DNA, 53 bp, Artificial Sequence; identical to SEQ ID NO: 2108
  Description of Artificial Sequence: Synthetic all nuts; inner sequence and 3' sequence

SEQ ID NO: 34189 - DNA, 53 bp, Artificial Sequence; identical to SEQ ID NO: 18810
  Description of Artificial Sequence: Synthetic all nuts; inner sequence and 3' sequence

SEQ ID NO: 34190 - DNA, 53 bp, Artificial Sequence
  Description of Artificial Sequence: Synthetic all nuts; inner sequence and 3' sequence
gtcattccacatcctacacgtgggcacgtattgactagtacatgaccacttga

SEQ ID NO: 34191 - DNA, 53 bp, Artificial Sequence
  Description of Artificial Sequence: Synthetic all nuts; inner sequence and 3' sequence
gcgagacaacgcgaaccgttccgatgcacgttgactagtacatgaccacttga

SEQ ID NO: 34192 - DNA, 53 bp, Artificial Sequence
  Description of Artificial Sequence: Synthetic all nuts; inner sequence and 3' sequence
acgtcacgcgcataccaccttggctgcgtgttgactagtacatgaccacttga

SEQ ID NO: 34193 - DNA, 53 bp, Artificial Sequence
  Description of Artificial Sequence: Synthetic all nuts; inner sequence and 3' sequence
gtcattccgcatcctacacgtgggcccgtattgactagtacatgaccacttga

SEQ ID NO: 34194 - DNA, 53 bp, Artificial Sequence; identical to SEQ ID NO: 2867
  Description of Artificial Sequence: Synthetic all nuts; inner sequence and 3' sequence

SEQ ID NO: 34195 - DNA, 53 bp, Artificial Sequence; identical to SEQ ID NO: 10722
  Description of Artificial Sequence: Synthetic all nuts; inner sequence and 3' sequence

SEQ ID NO: 34196 - DNA, 53 bp, Artificial Sequence; identical to SEQ ID NO: 2041
  Description of Artificial Sequence: Synthetic all nuts; inner sequence and 3' sequence

SEQ ID NO: 34197 - DNA, 53 bp, Artificial Sequence; identical to SEQ ID NO: 10798
  Description of Artificial Sequence: Synthetic all nuts; inner sequence and 3' sequence

SEQ ID NO: 34198 - DNA, 53 bp, Artificial Sequence; identical to SEQ ID NO: 2608
  Description of Artificial Sequence: Synthetic all nuts; inner sequence and 3' sequence

SEQ ID NO: 34199 - DNA, 53 bp, Artificial Sequence; identical to SEQ ID NO: 10826
  Description of Artificial Sequence: Synthetic all nuts; inner sequence and 3' sequence

SEQ ID NO: 34200 - DNA, 53 bp, Artificial Sequence; identical to SEQ ID NO: 2287
  Description of Artificial Sequence: Synthetic all nuts; inner sequence and 3' sequence

SEQ ID NO: 34201 - DNA, 53 bp, Artificial Sequence; identical to SEQ ID NO: 2299
  Description of Artificial Sequence: Synthetic all nuts; inner sequence and 3' sequence

SEQ ID NO: 34202 - DNA, 53 bp, Artificial Sequence; identical to SEQ ID NO: 22721
  Description of Artificial Sequence: Synthetic all nuts; inner sequence and 3' sequence

SEQ ID NO: 34203 - DNA, 53 bp, Artificial Sequence; identical to SEQ ID NO: 2191
  Description of Artificial Sequence: Synthetic all nuts; inner sequence and 3' sequence

SEQ ID NO: 34204 - DNA, 53 bp, Artificial Sequence; identical to SEQ ID NO: 30722
  Description of Artificial Sequence: Synthetic all nuts; inner sequence and 3' sequence

SEQ ID NO: 34205 - DNA, 53 bp, Artificial Sequence; identical to SEQ ID NO: 14700
  Description of Artificial Sequence: Synthetic all nuts; inner sequence and 3' sequence

SEQ ID NO: 34206 - DNA, 53 bp, Artificial Sequence; identical to SEQ ID NO: 22570
  Description of Artificial Sequence: Synthetic all nuts; inner sequence and 3' sequence

SEQ ID NO: 34207 - DNA, 53 bp, Artificial Sequence; identical to SEQ ID NO: 18457
  Description of Artificial Sequence: Synthetic all nuts; inner sequence and 3' sequence

SEQ ID NO: 34208 - DNA, 52 bp, Artificial Sequence; identical to SEQ ID NO: 2453
  Description of Artificial Sequence: Synthetic all nuts; inner sequence and 3' sequence

SEQ ID NO: 34209 - DNA, 53 bp, Artificial Sequence
  Description of Artificial Sequence: Synthetic all nuts; inner sequence and 3' sequence
ggatgacgctaccctacacgtgggcacgtattgactagtacatgaccacttga

SEQ ID NO: 34210 - DNA, 53 bp, Artificial Sequence; identical to SEQ ID NO: 2479
  Description of Artificial Sequence: Synthetic all nuts; inner sequence and 3' sequence

SEQ ID NO: 34211 - DNA, 53 bp, Artificial Sequence; identical to SEQ ID NO: 22949
  Description of Artificial Sequence: Synthetic all nuts; inner sequence and 3' sequence

SEQ ID NO: 34212 - DNA, 53 bp, Artificial Sequence; identical to SEQ ID NO: 2177
  Description of Artificial Sequence: Synthetic all nuts; inner sequence and 3' sequence

SEQ ID NO: 34213 - DNA, 53 bp, Artificial Sequence; identical to SEQ ID NO: 2673
  Description of Artificial Sequence: Synthetic all nuts; inner sequence and 3' sequence

SEQ ID NO: 34214 - DNA, 53 bp, Artificial Sequence; identical to SEQ ID NO: 2950
  Description of Artificial Sequence: Synthetic all nuts; inner sequence and 3' sequence

SEQ ID NO: 34215 - DNA, 53 bp, Artificial Sequence; identical to SEQ ID NO: 2775
  Description of Artificial Sequence: Synthetic all nuts; inner sequence and 3' sequence

SEQ ID NO: 34216 - DNA, 53 bp, Artificial Sequence
  Description of Artificial Sequence: Synthetic all nuts; inner sequence and 3' sequence
cgtaccgacagggacatgcaccgtgtcgcattgactagtacatgaccacttga

SEQ ID NO: 34217 - DNA, 53 bp, Artificial Sequence; identical to SEQ ID NO: 2279
  Description of Artificial Sequence: Synthetic all nuts; inner sequence and 3' sequence

SEQ ID NO: 34218 - DNA, 53 bp, Artificial Sequence; identical to SEQ ID NO: 6774
  Description of Artificial Sequence: Synthetic all nuts; inner sequence and 3' sequence

SEQ ID NO: 34219 - DNA, 53 bp, Artificial Sequence; identical to SEQ ID NO: 2807
  Description of Artificial Sequence: Synthetic all nuts; inner sequence and 3' sequence

SEQ ID NO: 34220 - DNA, 53 bp, Artificial Sequence; identical to SEQ ID NO: 22528
  Description of Artificial Sequence: Synthetic all nuts; inner sequence and 3' sequence

SEQ ID NO: 34221 - DNA, 53 bp, Artificial Sequence; identical to SEQ ID NO: 22817
  Description of Artificial Sequence: Synthetic all nuts; inner sequence and 3' sequence

SEQ ID NO: 34222 - DNA, 53 bp, Artificial Sequence; identical to SEQ ID NO: 2800
  Description of Artificial Sequence: Synthetic all nuts; inner sequence and 3' sequence

SEQ ID NO: 34223 - DNA, 53 bp, Artificial Sequence; identical to SEQ ID NO: 2132
  Description of Artificial Sequence: Synthetic all nuts; inner sequence and 3' sequence

SEQ ID NO: 34224 - DNA, 53 bp, Artificial Sequence; identical to SEQ ID NO: 2159
  Description of Artificial Sequence: Synthetic all nuts; inner sequence and 3' sequence

SEQ ID NO: 34225 - DNA, 52 bp, Artificial Sequence; identical to SEQ ID NO: 2873
  Description of Artificial Sequence: Synthetic all nuts; inner sequence and 3' sequence

SEQ ID NO: 34226 - DNA, 53 bp, Artificial Sequence; identical to SEQ ID NO: 2568
  Description of Artificial Sequence: Synthetic all nuts; inner sequence and 3' sequence

SEQ ID NO: 34227 - DNA, 53 bp, Artificial Sequence; identical to SEQ ID NO: 2984
  Description of Artificial Sequence: Synthetic all nuts; inner sequence and 3' sequence

SEQ ID NO: 34228 - DNA, 53 bp, Artificial Sequence; identical to SEQ ID NO: 6653
  Description of Artificial Sequence: Synthetic all nuts; inner sequence and 3' sequence

SEQ ID NO: 34229 - DNA, 53 bp, Artificial Sequence; identical to SEQ ID NO: 22753
  Description of Artificial Sequence: Synthetic all nuts; inner sequence and 3' sequence

SEQ ID NO: 34230 - DNA, 53 bp, Artificial Sequence; identical to SEQ ID NO: 2129
  Description of Artificial Sequence: Synthetic all nuts; inner sequence and 3' sequence

SEQ ID NO: 34231 - DNA, 53 bp, Artificial Sequence; identical to SEQ ID NO: 2841
  Description of Artificial Sequence: Synthetic all nuts; inner sequence and 3' sequence

SEQ ID NO: 34232 - DNA, 53 bp, Artificial Sequence; identical to SEQ ID NO: 2055
  Description of Artificial Sequence: Synthetic all nuts; inner sequence and 3' sequence

SEQ ID NO: 34233 - DNA, 53 bp, Artificial Sequence; identical to SEQ ID NO: 6576
  Description of Artificial Sequence: Synthetic all nuts; inner sequence and 3' sequence

SEQ ID NO: 34234 - DNA, 53 bp, Artificial Sequence; identical to SEQ ID NO: 2175
  Description of Artificial Sequence: Synthetic all nuts; inner sequence and 3' sequence

SEQ ID NO: 34235 - DNA, 53 bp, Artificial Sequence
  Description of Artificial Sequence: Synthetic all nuts; inner sequence and 3' sequence
ggcatggcgcgcaccctatcaacgtggacattgactagtacatgaccacttga

SEQ ID NO: 34236 - DNA, 53 bp, Artificial Sequence; identical to SEQ ID NO: 2082
  Description of Artificial Sequence: Synthetic all nuts; inner sequence and 3' sequence

SEQ ID NO: 34237 - DNA, 53 bp, Artificial Sequence; identical to SEQ ID NO: 22458
  Description of Artificial Sequence: Synthetic all nuts; inner sequence and 3' sequence

SEQ ID NO: 34238 - DNA, 53 bp, Artificial Sequence; identical to SEQ ID NO: 2088
  Description of Artificial Sequence: Synthetic all nuts; inner sequence and 3' sequence

SEQ ID NO: 34239 - DNA, 53 bp, Artificial Sequence; identical to SEQ ID NO: 2240
  Description of Artificial Sequence: Synthetic all nuts; inner sequence and 3' sequence

SEQ ID NO: 34240 - DNA, 53 bp, Artificial Sequence; identical to SEQ ID NO: 2043
  Description of Artificial Sequence: Synthetic all nuts; inner sequence and 3' sequence

SEQ ID NO: 34241 - DNA, 53 bp, Artificial Sequence; identical to SEQ ID NO: 22573
  Description of Artificial Sequence: Synthetic all nuts; inner sequence and 3' sequence

SEQ ID NO: 34242 - DNA, 53 bp, Artificial Sequence; identical to SEQ ID NO: 2048
  Description of Artificial Sequence: Synthetic all nuts; inner sequence and 3' sequence

SEQ ID NO: 34243 - DNA, 53 bp, Artificial Sequence; identical to SEQ ID NO: 2029
  Description of Artificial Sequence: Synthetic all nuts; inner sequence and 3' sequence

SEQ ID NO: 34244 - DNA, 53 bp, Artificial Sequence; identical to SEQ ID NO: 2426
  Description of Artificial Sequence: Synthetic all nuts; inner sequence and 3' sequence

SEQ ID NO: 34245 - DNA, 53 bp, Artificial Sequence; identical to SEQ ID NO: 22737
  Description of Artificial Sequence: Synthetic all nuts; inner sequence and 3' sequence

SEQ ID NO: 34246 - DNA, 53 bp, Artificial Sequence; identical to SEQ ID NO: 2033
  Description of Artificial Sequence: Synthetic all nuts; inner sequence and 3' sequence

SEQ ID NO: 34247 - DNA, 53 bp, Artificial Sequence; identical to SEQ ID NO: 6743
  Description of Artificial Sequence: Synthetic all nuts; inner sequence and 3' sequence

SEQ ID NO: 34248 - DNA, 53 bp, Artificial Sequence; identical to SEQ ID NO: 6864
  Description of Artificial Sequence: Synthetic all nuts; inner sequence and 3' sequence

SEQ ID NO: 34249 - DNA, 53 bp, Artificial Sequence; identical to SEQ ID NO: 22527
  Description of Artificial Sequence: Synthetic all nuts; inner sequence and 3' sequence

SEQ ID NO: 34250 - DNA, 53 bp, Artificial Sequence; identical to SEQ ID NO: 6814
  Description of Artificial Sequence: Synthetic all nuts; inner sequence and 3' sequence

SEQ ID NO: 34251 - DNA, 53 bp, Artificial Sequence; identical to SEQ ID NO: 10868
  Description of Artificial Sequence: Synthetic all nuts; inner sequence and 3' sequence

SEQ ID NO: 34252 - DNA, 53 bp, Artificial Sequence; identical to SEQ ID NO: 22733
  Description of Artificial Sequence: Synthetic all nuts; inner sequence and 3' sequence

SEQ ID NO: 34253 - DNA, 53 bp, Artificial Sequence; identical to SEQ ID NO: 6931
  Description of Artificial Sequence: Synthetic all nuts; inner sequence and 3' sequence

SEQ ID NO: 34254 - DNA, 53 bp, Artificial Sequence; identical to SEQ ID NO: 2594
  Description of Artificial Sequence: Synthetic all nuts; inner sequence and 3' sequence

SEQ ID NO: 34255 - DNA, 53 bp, Artificial Sequence; identical to SEQ ID NO: 2752
  Description of Artificial Sequence: Synthetic all nuts; inner sequence and 3' sequence

SEQ ID NO: 34256 - DNA, 51 bp, Artificial Sequence; identical to SEQ ID NO: 22321
  Description of Artificial Sequence: Synthetic all nuts; inner sequence and 3' sequence

SEQ ID NO: 34257 - DNA, 53 bp, Artificial Sequence
  Description of Artificial Sequence: Synthetic all nuts; inner sequence and 3' sequence
ccgtggcgacatcaagcggtggtgtgcgtgttgactagtacatgaccacttga

SEQ ID NO: 34258 - DNA, 53 bp, Artificial Sequence; identical to SEQ ID NO: 30681
  Description of Artificial Sequence: Synthetic all nuts; inner sequence and 3' sequence

SEQ ID NO: 34259 - DNA, 53 bp, Artificial Sequence; identical to SEQ ID NO: 2615
  Description of Artificial Sequence: Synthetic all nuts; inner sequence and 3' sequence

SEQ ID NO: 34260 - DNA, 53 bp, Artificial Sequence; identical to SEQ ID NO: 2185
  Description of Artificial Sequence: Synthetic all nuts; inner sequence and 3' sequence

SEQ ID NO: 34261 - DNA, 53 bp, Artificial Sequence
  Description of Artificial Sequence: Synthetic all nuts; inner sequence and 3' sequence
gtactgcgatggatgtgcgttgtgctcggcttgactagtacatgaccacttga

SEQ ID NO: 34262 - DNA, 53 bp, Artificial Sequence; identical to SEQ ID NO: 2932
  Description of Artificial Sequence: Synthetic all nuts; inner sequence and 3' sequence

SEQ ID NO: 34263 - DNA, 53 bp, Artificial Sequence; identical to SEQ ID NO: 14992
  Description of Artificial Sequence: Synthetic all nuts; inner sequence and 3' sequence

SEQ ID NO: 34264 - DNA, 53 bp, Artificial Sequence; identical to SEQ ID NO: 22544
  Description of Artificial Sequence: Synthetic all nuts; inner sequence and 3' sequence

SEQ ID NO: 34265 - DNA, 53 bp, Artificial Sequence; identical to SEQ ID NO: 2136
  Description of Artificial Sequence: Synthetic all nuts; inner sequence and 3' sequence

SEQ ID NO: 34266 - DNA, 53 bp, Artificial Sequence
  Description of Artificial Sequence: Synthetic all nuts; inner sequence and 3' sequence
cacgcactggacgaccctgagtgacgcatgttgactagtacatgaccacttga

SEQ ID NO: 34267 - DNA, 53 bp, Artificial Sequence; identical to SEQ ID NO: 2331
  Description of Artificial Sequence: Synthetic all nuts; inner sequence and 3' sequence

SEQ ID NO: 34268 - DNA, 53 bp, Artificial Sequence
  Description of Artificial Sequence: Synthetic all nuts; inner sequence and 3' sequence
gtcgtggcgcgaaccgtcgagtggtatggattgactagtacatgaccacttga

SEQ ID NO: 34269 - DNA, 53 bp, Artificial Sequence; identical to SEQ ID NO: 2714
  Description of Artificial Sequence: Synthetic all nuts; inner sequence and 3' sequence

SEQ ID NO: 34270 - DNA, 53 bp, Artificial Sequence; identical to SEQ ID NO: 22466
  Description of Artificial Sequence: Synthetic all nuts; inner sequence and 3' sequence

SEQ ID NO: 34271 - DNA, 53 bp, Artificial Sequence; identical to SEQ ID NO: 10756
  Description of Artificial Sequence: Synthetic all nuts; inner sequence and 3' sequence

SEQ ID NO: 34272 - DNA, 53 bp, Artificial Sequence; identical to SEQ ID NO: 2406
  Description of Artificial Sequence: Synthetic all nuts; inner sequence and 3' sequence

SEQ ID NO: 34273 - DNA, 53 bp, Artificial Sequence; identical to SEQ ID NO: 22669
  Description of Artificial Sequence: Synthetic all nuts; inner sequence and 3' sequence

SEQ ID NO: 34274 - DNA, 53 bp, Artificial Sequence; identical to SEQ ID NO: 2190
  Description of Artificial Sequence: Synthetic all nuts; inner sequence and 3' sequence

SEQ ID NO: 34275 - DNA, 53 bp, Artificial Sequence; identical to SEQ ID NO: 2874
  Description of Artificial Sequence: Synthetic all nuts; inner sequence and 3' sequence

SEQ ID NO: 34276 - DNA, 53 bp, Artificial Sequence; identical to SEQ ID NO: 6535
  Description of Artificial Sequence: Synthetic all nuts; inner sequence and 3' sequence

SEQ ID NO: 34277 - DNA, 53 bp, Artificial Sequence; identical to SEQ ID NO: 2476
  Description of Artificial Sequence: Synthetic all nuts; inner sequence and 3' sequence

SEQ ID NO: 34278 - DNA, 53 bp, Artificial Sequence; identical to SEQ ID NO: 22912
  Description of Artificial Sequence: Synthetic all nuts; inner sequence and 3' sequence

SEQ ID NO: 34279 - DNA, 52 bp, Artificial Sequence; identical to SEQ ID NO: 6968
  Description of Artificial Sequence: Synthetic all nuts; inner sequence and 3' sequence

SEQ ID NO: 34280 - DNA, 53 bp, Artificial Sequence; identical to SEQ ID NO: 2685
  Description of Artificial Sequence: Synthetic all nuts; inner sequence and 3' sequence

SEQ ID NO: 34281 - DNA, 53 bp, Artificial Sequence; identical to SEQ ID NO: 2127
  Description of Artificial Sequence: Synthetic all nuts; inner sequence and 3' sequence

SEQ ID NO: 34282 - DNA, 53 bp, Artificial Sequence; identical to SEQ ID NO: 2171
  Description of Artificial Sequence: Synthetic all nuts; inner sequence and 3' sequence

SEQ ID NO: 34283 - DNA, 53 bp, Artificial Sequence; identical to SEQ ID NO: 2636
  Description of Artificial Sequence: Synthetic all nuts; inner sequence and 3' sequence

SEQ ID NO: 34284 - DNA, 53 bp, Artificial Sequence; identical to SEQ ID NO: 2003
  Description of Artificial Sequence: Synthetic all nuts; inner sequence and 3' sequence

SEQ ID NO: 34285 - DNA, 53 bp, Artificial Sequence; identical to SEQ ID NO: 2110
  Description of Artificial Sequence: Synthetic all nuts; inner sequence and 3' sequence

SEQ ID NO: 34286 - DNA, 53 bp, Artificial Sequence; identical to SEQ ID NO: 2228
  Description of Artificial Sequence: Synthetic all nuts; inner sequence and 3' sequence

SEQ ID NO: 34287 - DNA, 53 bp, Artificial Sequence
  Description of Artificial Sequence: Synthetic all nuts; inner sequence and 3' sequence
ccgttgcgacatcaagcggtggtgtgcgtgttgactagtacatgaccacttga

SEQ ID NO: 34288 - DNA, 53 bp, Artificial Sequence; identical to SEQ ID NO: 10682
  Description of Artificial Sequence: Synthetic all nuts; inner sequence and 3' sequence

SEQ ID NO: 34289 - DNA, 53 bp, Artificial Sequence; identical to SEQ ID NO: 6700
  Description of Artificial Sequence: Synthetic all nuts; inner sequence and 3' sequence

SEQ ID NO: 34290 - DNA, 53 bp, Artificial Sequence; identical to SEQ ID NO: 2877
  Description of Artificial Sequence: Synthetic all nuts; inner sequence and 3' sequence

SEQ ID NO: 34291 - DNA, 54 bp, Artificial Sequence
  Description of Artificial Sequence: Synthetic all nuts; inner sequence and 3' sequence
gtactgcactgccctacacgtggacgatgtgttgactagtacatgaccacttga

SEQ ID NO: 34292 - DNA, 53 bp, Artificial Sequence; identical to SEQ ID NO: 2067
  Description of Artificial Sequence: Synthetic all nuts; inner sequence and 3' sequence

SEQ ID NO: 34293 - DNA, 53 bp, Artificial Sequence; identical to SEQ ID NO: 2092
  Description of Artificial Sequence: Synthetic all nuts; inner sequence and 3' sequence

SEQ ID NO: 34294 - DNA, 53 bp, Artificial Sequence; identical to SEQ ID NO: 2492
  Description of Artificial Sequence: Synthetic all nuts; inner sequence and 3' sequence

SEQ ID NO: 34295 - DNA, 53 bp, Artificial Sequence
  Description of Artificial Sequence: Synthetic all nuts; inner sequence and 3' sequence
gcacgtaacgcacaagcaggccatgtggcattgactagtacatgaccacttga

SEQ ID NO: 34296 - DNA, 53 bp, Artificial Sequence; identical to SEQ ID NO: 10782
  Description of Artificial Sequence: Synthetic all nuts; inner sequence and 3' sequence

SEQ ID NO: 34297 - DNA, 53 bp, Artificial Sequence; identical to SEQ ID NO: 6573
  Description of Artificial Sequence: Synthetic all nuts; inner sequence and 3' sequence

SEQ ID NO: 34298 - DNA, 53 bp, Artificial Sequence; identical to SEQ ID NO: 22617
  Description of Artificial Sequence: Synthetic all nuts; inner sequence and 3' sequence

SEQ ID NO: 34299 - DNA, 53 bp, Artificial Sequence; identical to SEQ ID NO: 2154
  Description of Artificial Sequence: Synthetic all nuts; inner sequence and 3' sequence

SEQ ID NO: 34300 - DNA, 53 bp, Artificial Sequence; identical to SEQ ID NO: 2768
  Description of Artificial Sequence: Synthetic all nuts; inner sequence and 3' sequence

SEQ ID NO: 34301 - DNA, 53 bp, Artificial Sequence; identical to SEQ ID NO: 6407
  Description of Artificial Sequence: Synthetic all nuts; inner sequence and 3' sequence

SEQ ID NO: 34302 - DNA, 53 bp, Artificial Sequence
  Description of Artificial Sequence: Synthetic all nuts; inner sequence and 3' sequence
gaacgactcgcaccctatcatgaggccatgttgactagtacatgaccacttga

SEQ ID NO: 34303 - DNA, 53 bp, Artificial Sequence; identical to SEQ ID NO: 2262
  Description of Artificial Sequence: Synthetic all nuts; inner sequence and 3' sequence

SEQ ID NO: 34304 - DNA, 53 bp, Artificial Sequence
  Description of Artificial Sequence: Synthetic all nuts; inner sequence and 3' sequence
gtcattccgcatcctacacgtgggcacttattgactagtacatgaccacttga

SEQ ID NO: 34305 - DNA, 53 bp, Artificial Sequence; identical to SEQ ID NO: 2102
  Description of Artificial Sequence: Synthetic all nuts; inner sequence and 3' sequence

SEQ ID NO: 34306 - DNA, 53 bp, Artificial Sequence; identical to SEQ ID NO: 6571
  Description of Artificial Sequence: Synthetic all nuts; inner sequence and 3' sequence

SEQ ID NO: 34307 - DNA, 53 bp, Artificial Sequence; identical to SEQ ID NO: 22105
  Description of Artificial Sequence: Synthetic all nuts; inner sequence and 3' sequence

SEQ ID NO: 34308 - DNA, 53 bp, Artificial Sequence; identical to SEQ ID NO: 6918
  Description of Artificial Sequence: Synthetic all nuts; inner sequence and 3' sequence

SEQ ID NO: 34309 - DNA, 53 bp, Artificial Sequence; identical to SEQ ID NO: 2065
  Description of Artificial Sequence: Synthetic all nuts; inner sequence and 3' sequence

SEQ ID NO: 34310 - DNA, 53 bp, Artificial Sequence; identical to SEQ ID NO: 2099
  Description of Artificial Sequence: Synthetic all nuts; inner sequence and 3' sequence

SEQ ID NO: 34311 - DNA, 53 bp, Artificial Sequence; identical to SEQ ID NO: 2913
  Description of Artificial Sequence: Synthetic all nuts; inner sequence and 3' sequence

SEQ ID NO: 34312 - DNA, 53 bp, Artificial Sequence; identical to SEQ ID NO: 2323
  Description of Artificial Sequence: Synthetic all nuts; inner sequence and 3' sequence

SEQ ID NO: 34313 - DNA, 53 bp, Artificial Sequence; identical to SEQ ID NO: 2254
  Description of Artificial Sequence: Synthetic all nuts; inner sequence and 3' sequence

SEQ ID NO: 34314 - DNA, 53 bp, Artificial Sequence; identical to SEQ ID NO: 30861
  Description of Artificial Sequence: Synthetic all nuts; inner sequence and 3' sequence

SEQ ID NO: 34315 - DNA, 53 bp, Artificial Sequence; identical to SEQ ID NO: 2236
  Description of Artificial Sequence: Synthetic all nuts; inner sequence and 3' sequence

SEQ ID NO: 34316 - DNA, 53 bp, Artificial Sequence; identical to SEQ ID NO: 6962
  Description of Artificial Sequence: Synthetic all nuts; inner sequence and 3' sequence

SEQ ID NO: 34317 - DNA, 53 bp, Artificial Sequence; identical to SEQ ID NO: 14744
  Description of Artificial Sequence: Synthetic all nuts; inner sequence and 3' sequence

SEQ ID NO: 34318 - DNA, 53 bp, Artificial Sequence; identical to SEQ ID NO: 22518
  Description of Artificial Sequence: Synthetic all nuts; inner sequence and 3' sequence

SEQ ID NO: 34319 - DNA, 53 bp, Artificial Sequence; identical to SEQ ID NO: 2316
  Description of Artificial Sequence: Synthetic all nuts; inner sequence and 3' sequence

SEQ ID NO: 34320 - DNA, 53 bp, Artificial Sequence; identical to SEQ ID NO: 2195
  Description of Artificial Sequence: Synthetic all nuts; inner sequence and 3' sequence

SEQ ID NO: 34321 - DNA, 53 bp, Artificial Sequence
  Description of Artificial Sequence: Synthetic all nuts; inner sequence and 3' sequence
cgatcccacgaacggtcacgaccaggcacattgactagtacatgaccacttga

SEQ ID NO: 34322 - DNA, 53 bp, Artificial Sequence; identical to SEQ ID NO: 2123
  Description of Artificial Sequence: Synthetic all nuts; inner sequence and 3' sequence

SEQ ID NO: 34323 - DNA, 53 bp, Artificial Sequence; identical to SEQ ID NO: 2247
  Description of Artificial Sequence: Synthetic all nuts; inner sequence and 3' sequence

SEQ ID NO: 34324 - DNA, 53 bp, Artificial Sequence; identical to SEQ ID NO: 2083
  Description of Artificial Sequence: Synthetic all nuts; inner sequence and 3' sequence

SEQ ID NO: 34325 - DNA, 53 bp, Artificial Sequence; identical to SEQ ID NO: 2586
  Description of Artificial Sequence: Synthetic all nuts; inner sequence and 3' sequence

SEQ ID NO: 34326 - DNA, 53 bp, Artificial Sequence; identical to SEQ ID NO: 2625
  Description of Artificial Sequence: Synthetic all nuts; inner sequence and 3' sequence

SEQ ID NO: 34327 - DNA, 53 bp, Artificial Sequence; identical to SEQ ID NO: 2013
  Description of Artificial Sequence: Synthetic all nuts; inner sequence and 3' sequence

SEQ ID NO: 34328 - DNA, 53 bp, Artificial Sequence; identical to SEQ ID NO: 2901
  Description of Artificial Sequence: Synthetic all nuts; inner sequence and 3' sequence

SEQ ID NO: 34329 - DNA, 53 bp, Artificial Sequence; identical to SEQ ID NO: 18989
  Description of Artificial Sequence: Synthetic all nuts; inner sequence and 3' sequence

SEQ ID NO: 34330 - DNA, 53 bp, Artificial Sequence; identical to SEQ ID NO: 10748
  Description of Artificial Sequence: Synthetic all nuts; inner sequence and 3' sequence

SEQ ID NO: 34331 - DNA, 53 bp, Artificial Sequence; identical to SEQ ID NO: 6998
  Description of Artificial Sequence: Synthetic all nuts; inner sequence and 3' sequence

SEQ ID NO: 34332 - DNA, 53 bp, Artificial Sequence
  Description of Artificial Sequence: Synthetic all nuts; inner sequence and 3' sequence
cgaccctacacgtggcatggtgatgacggcttgactagtacatgaccacttga

SEQ ID NO: 34333 - DNA, 48 bp, Artificial Sequence; identical to SEQ ID NO: 18927
  Description of Artificial Sequence: Synthetic all nuts; inner sequence and 3' sequence

SEQ ID NO: 34334 - DNA, 53 bp, Artificial Sequence; identical to SEQ ID NO: 10922
  Description of Artificial Sequence: Synthetic all nuts; inner sequence and 3' sequence

SEQ ID NO: 34335 - DNA, 53 bp, Artificial Sequence; identical to SEQ ID NO: 22372
  Description of Artificial Sequence: Synthetic all nuts; inner sequence and 3' sequence

SEQ ID NO: 34336 - DNA, 53 bp, Artificial Sequence; identical to SEQ ID NO: 22788
  Description of Artificial Sequence: Synthetic all nuts; inner sequence and 3' sequence

SEQ ID NO: 34337 - DNA, 53 bp, Artificial Sequence; identical to SEQ ID NO: 2881
  Description of Artificial Sequence: Synthetic all nuts; inner sequence and 3' sequence

SEQ ID NO: 34338 - DNA, 53 bp, Artificial Sequence; identical to SEQ ID NO: 2436
  Description of Artificial Sequence: Synthetic all nuts; inner sequence and 3' sequence

SEQ ID NO: 34339 - DNA, 53 bp, Artificial Sequence; identical to SEQ ID NO: 2683
  Description of Artificial Sequence: Synthetic all nuts; inner sequence and 3' sequence

SEQ ID NO: 34340 - DNA, 53 bp, Artificial Sequence; identical to SEQ ID NO: 2317
  Description of Artificial Sequence: Synthetic all nuts; inner sequence and 3' sequence

SEQ ID NO: 34341 - DNA, 53 bp, Artificial Sequence
  Description of Artificial Sequence: Synthetic all nuts; inner sequence and 3' sequence
ccctagcgacatcaagcggtggtgtgcgtgttgactagtacatgaccacttga

SEQ ID NO: 34342 - DNA, 53 bp, Artificial Sequence; identical to SEQ ID NO: 2260
  Description of Artificial Sequence: Synthetic all nuts; inner sequence and 3' sequence

SEQ ID NO: 34343 - DNA, 53 bp, Artificial Sequence; identical to SEQ ID NO: 14743
  Description of Artificial Sequence: Synthetic all nuts; inner sequence and 3' sequence

SEQ ID NO: 34344 - DNA, 53 bp, Artificial Sequence; identical to SEQ ID NO: 2291
  Description of Artificial Sequence: Synthetic all nuts; inner sequence and 3' sequence

SEQ ID NO: 34345 - DNA, 53 bp, Artificial Sequence; identical to SEQ ID NO: 2039
  Description of Artificial Sequence: Synthetic all nuts; inner sequence and 3' sequence

SEQ ID NO: 34346 - DNA, 53 bp, Artificial Sequence; identical to SEQ ID NO: 2575
  Description of Artificial Sequence: Synthetic all nuts; inner sequence and 3' sequence

SEQ ID NO: 34347 - DNA, 53 bp, Artificial Sequence; identical to SEQ ID NO: 2034
  Description of Artificial Sequence: Synthetic all nuts; inner sequence and 3' sequence

SEQ ID NO: 34348 - DNA, 53 bp, Artificial Sequence; identical to SEQ ID NO: 2866
  Description of Artificial Sequence: Synthetic all nuts; inner sequence and 3' sequence

SEQ ID NO: 34349 - DNA, 53 bp, Artificial Sequence; identical to SEQ ID NO: 6419
  Description of Artificial Sequence: Synthetic all nuts; inner sequence and 3' sequence

SEQ ID NO: 34350 - DNA, 55 bp, Artificial Sequence
  Description of Artificial Sequence: Synthetic all nuts; inner sequence and 3' sequence
ggacgacgcgtgccctatcatgtgtgcgtggattgactagtacatgaccacttga

SEQ ID NO: 34351 - DNA, 53 bp, Artificial Sequence; identical to SEQ ID NO: 22483
  Description of Artificial Sequence: Synthetic all nuts; inner sequence and 3' sequence

SEQ ID NO: 34352 - DNA, 53 bp, Artificial Sequence
  Description of Artificial Sequence: Synthetic all nuts; inner sequence and 3' sequence
cgtaggtacggcacgacactcaatggcatgttgactagtacatgaccacttga

SEQ ID NO: 34353 - DNA, 53 bp, Artificial Sequence; identical to SEQ ID NO: 6745
  Description of Artificial Sequence: Synthetic all nuts; inner sequence and 3' sequence

SEQ ID NO: 34354 - DNA, 53 bp, Artificial Sequence; identical to SEQ ID NO: 2551
  Description of Artificial Sequence: Synthetic all nuts; inner sequence and 3' sequence

SEQ ID NO: 34355 - DNA, 53 bp, Artificial Sequence; identical to SEQ ID NO: 2523
  Description of Artificial Sequence: Synthetic all nuts; inner sequence and 3' sequence

SEQ ID NO: 34356 - DNA, 53 bp, Artificial Sequence; identical to SEQ ID NO: 6787
  Description of Artificial Sequence: Synthetic all nuts; inner sequence and 3' sequence

SEQ ID NO: 34357 - DNA, 53 bp, Artificial Sequence; identical to SEQ ID NO: 2395
  Description of Artificial Sequence: Synthetic all nuts; inner sequence and 3' sequence

SEQ ID NO: 34358 - DNA, 53 bp, Artificial Sequence; identical to SEQ ID NO: 2131
  Description of Artificial Sequence: Synthetic all nuts; inner sequence and 3' sequence

SEQ ID NO: 34359 - DNA, 53 bp, Artificial Sequence; identical to SEQ ID NO: 2211
  Description of Artificial Sequence: Synthetic all nuts; inner sequence and 3' sequence

SEQ ID NO: 34360 - DNA, 53 bp, Artificial Sequence; identical to SEQ ID NO: 2230
  Description of Artificial Sequence: Synthetic all nuts; inner sequence and 3' sequence

SEQ ID NO: 34361 - DNA, 53 bp, Artificial Sequence; identical to SEQ ID NO: 2315
  Description of Artificial Sequence: Synthetic all nuts; inner sequence and 3' sequence

SEQ ID NO: 34362 - DNA, 53 bp, Artificial Sequence; identical to SEQ ID NO: 2478
  Description of Artificial Sequence: Synthetic all nuts; inner sequence and 3' sequence

SEQ ID NO: 34363 - DNA, 53 bp, Artificial Sequence; identical to SEQ ID NO: 2606
  Description of Artificial Sequence: Synthetic all nuts; inner sequence and 3' sequence

SEQ ID NO: 34364 - DNA, 53 bp, Artificial Sequence; identical to SEQ ID NO: 2233
  Description of Artificial Sequence: Synthetic all nuts; inner sequence and 3' sequence

SEQ ID NO: 34365 - DNA, 53 bp, Artificial Sequence; identical to SEQ ID NO: 2365
  Description of Artificial Sequence: Synthetic all nuts; inner sequence and 3' sequence

SEQ ID NO: 34366 - DNA, 53 bp, Artificial Sequence; identical to SEQ ID NO: 2314
  Description of Artificial Sequence: Synthetic all nuts; inner sequence and 3' sequence

SEQ ID NO: 34367 - DNA, 53 bp, Artificial Sequence; identical to SEQ ID NO: 2756
  Description of Artificial Sequence: Synthetic all nuts; inner sequence and 3' sequence

SEQ ID NO: 34368 - DNA, 53 bp, Artificial Sequence; identical to SEQ ID NO: 2116
  Description of Artificial Sequence: Synthetic all nuts; inner sequence and 3' sequence

SEQ ID NO: 34369 - DNA, 53 bp, Artificial Sequence; identical to SEQ ID NO: 22551
  Description of Artificial Sequence: Synthetic all nuts; inner sequence and 3' sequence

SEQ ID NO: 34370 - DNA, 53 bp, Artificial Sequence; identical to SEQ ID NO: 2912
  Description of Artificial Sequence: Synthetic all nuts; inner sequence and 3' sequence

SEQ ID NO: 34371 - DNA, 53 bp, Artificial Sequence; identical to SEQ ID NO: 2526
  Description of Artificial Sequence: Synthetic all nuts; inner sequence and 3' sequence

SEQ ID NO: 34372 - DNA, 52 bp, Artificial Sequence; identical to SEQ ID NO: 22287
  Description of Artificial Sequence: Synthetic all nuts; inner sequence and 3' sequence

SEQ ID NO: 34373 - DNA, 53 bp, Artificial Sequence; identical to SEQ ID NO: 2438
  Description of Artificial Sequence: Synthetic all nuts; inner sequence and 3' sequence

SEQ ID NO: 34374 - DNA, 53 bp, Artificial Sequence; identical to SEQ ID NO: 2447
  Description of Artificial Sequence: Synthetic all nuts; inner sequence and 3' sequence

SEQ ID NO: 34375 - DNA, 53 bp, Artificial Sequence; identical to SEQ ID NO: 6702
  Description of Artificial Sequence: Synthetic all nuts; inner sequence and 3' sequence

SEQ ID NO: 34376 - DNA, 53 bp, Artificial Sequence; identical to SEQ ID NO: 2903
  Description of Artificial Sequence: Synthetic all nuts; inner sequence and 3' sequence

SEQ ID NO: 34377 - DNA, 53 bp, Artificial Sequence; identical to SEQ ID NO: 6238
  Description of Artificial Sequence: Synthetic all nuts; inner sequence and 3' sequence

SEQ ID NO: 34378 - DNA, 53 bp, Artificial Sequence; identical to SEQ ID NO: 18770
  Description of Artificial Sequence: Synthetic all nuts; inner sequence and 3' sequence

SEQ ID NO: 34379 - DNA, 53 bp, Artificial Sequence
  Description of Artificial Sequence: Synthetic all nuts; inner sequence and 3' sequence
ccatagcgacatcaagcggtggtgtgcgtgttgactagtacatgaccacttga

SEQ ID NO: 34380 - DNA, 53 bp, Artificial Sequence; identical to SEQ ID NO: 2624
  Description of Artificial Sequence: Synthetic all nuts; inner sequence and 3' sequence

SEQ ID NO: 34381 - DNA, 53 bp, Artificial Sequence; identical to SEQ ID NO: 2493
  Description of Artificial Sequence: Synthetic all nuts; inner sequence and 3' sequence

SEQ ID NO: 34382 - DNA, 53 bp, Artificial Sequence; identical to SEQ ID NO: 2021
  Description of Artificial Sequence: Synthetic all nuts; inner sequence and 3' sequence

SEQ ID NO: 34383 - DNA, 53 bp, Artificial Sequence; identical to SEQ ID NO: 2263
  Description of Artificial Sequence: Synthetic all nuts; inner sequence and 3' sequence

SEQ ID NO: 34384 - DNA, 53 bp, Artificial Sequence
  Description of Artificial Sequence: Synthetic all nuts; inner sequence and 3' sequence
gtcattcagcatcctacacgtgggcacgtattgactagtacatgaccacttga

SEQ ID NO: 34385 - DNA, 53 bp, Artificial Sequence; identical to SEQ ID NO: 6376
  Description of Artificial Sequence: Synthetic all nuts; inner sequence and 3' sequence

SEQ ID NO: 34386 - DNA, 53 bp, Artificial Sequence; identical to SEQ ID NO: 22486
  Description of Artificial Sequence: Synthetic all nuts; inner sequence and 3' sequence

SEQ ID NO: 34387 - DNA, 53 bp, Artificial Sequence; identical to SEQ ID NO: 6644
  Description of Artificial Sequence: Synthetic all nuts; inner sequence and 3' sequence

SEQ ID NO: 34388 - DNA, 53 bp, Artificial Sequence; identical to SEQ ID NO: 2891
  Description of Artificial Sequence: Synthetic all nuts; inner sequence and 3' sequence

SEQ ID NO: 34389 - DNA, 50 bp, Artificial Sequence; identical to SEQ ID NO: 2885
  Description of Artificial Sequence: Synthetic all nuts; inner sequence and 3' sequence

SEQ ID NO: 34390 - DNA, 54 bp, Artificial Sequence; identical to SEQ ID NO: 2503
  Description of Artificial Sequence: Synthetic all nuts; inner sequence and 3' sequence

SEQ ID NO: 34391 - DNA, 53 bp, Artificial Sequence; identical to SEQ ID NO: 18748
  Description of Artificial Sequence: Synthetic all nuts; inner sequence and 3' sequence

SEQ ID NO: 34392 - DNA, 53 bp, Artificial Sequence; identical to SEQ ID NO: 2312
  Description of Artificial Sequence: Synthetic all nuts; inner sequence and 3' sequence

SEQ ID NO: 34393 - DNA, 53 bp, Artificial Sequence; identical to SEQ ID NO: 18612
  Description of Artificial Sequence: Synthetic all nuts; inner sequence and 3' sequence

SEQ ID NO: 34394 - DNA, 53 bp, Artificial Sequence; identical to SEQ ID NO: 22874
  Description of Artificial Sequence: Synthetic all nuts; inner sequence and 3' sequence

SEQ ID NO: 34395 - DNA, 53 bp, Artificial Sequence; identical to SEQ ID NO: 2056
  Description of Artificial Sequence: Synthetic all nuts; inner sequence and 3' sequence

SEQ ID NO: 34396 - DNA, 53 bp, Artificial Sequence; identical to SEQ ID NO: 2308
  Description of Artificial Sequence: Synthetic all nuts; inner sequence and 3' sequence

SEQ ID NO: 34397 - DNA, 53 bp, Artificial Sequence; identical to SEQ ID NO: 22954
  Description of Artificial Sequence: Synthetic all nuts; inner sequence and 3' sequence

SEQ ID NO: 34398 - DNA, 53 bp, Artificial Sequence; identical to SEQ ID NO: 6492
  Description of Artificial Sequence: Synthetic all nuts; inner sequence and 3' sequence

SEQ ID NO: 34399 - DNA, 53 bp, Artificial Sequence; identical to SEQ ID NO: 10670
  Description of Artificial Sequence: Synthetic all nuts; inner sequence and 3' sequence

SEQ ID NO: 34400 - DNA, 53 bp, Artificial Sequence; identical to SEQ ID NO: 2163
  Description of Artificial Sequence: Synthetic all nuts; inner sequence and 3' sequence

SEQ ID NO: 34401 - DNA, 53 bp, Artificial Sequence; identical to SEQ ID NO: 18399
  Description of Artificial Sequence: Synthetic all nuts; inner sequence and 3' sequence

SEQ ID NO: 34402 - DNA, 53 bp, Artificial Sequence; identical to SEQ ID NO: 2352
  Description of Artificial Sequence: Synthetic all nuts; inner sequence and 3' sequence

SEQ ID NO: 34403 - DNA, 51 bp, Artificial Sequence; identical to SEQ ID NO: 2423
  Description of Artificial Sequence: Synthetic all nuts; inner sequence and 3' sequence

SEQ ID NO: 34404 - DNA, 53 bp, Artificial Sequence
  Description of Artificial Sequence: Synthetic all nuts; inner sequence and 3' sequence
gcactgctctgacgcgatgtggtcggtggattgactagtacatgaccacttga

SEQ ID NO: 34405 - DNA, 53 bp, Artificial Sequence; identical to SEQ ID NO: 2347
  Description of Artificial Sequence: Synthetic all nuts; inner sequence and 3' sequence

SEQ ID NO: 34406 - DNA, 53 bp, Artificial Sequence; identical to SEQ ID NO: 6988
  Description of Artificial Sequence: Synthetic all nuts; inner sequence and 3' sequence

SEQ ID NO: 34407 - DNA, 53 bp, Artificial Sequence; identical to SEQ ID NO: 2217
  Description of Artificial Sequence: Synthetic all nuts; inner sequence and 3' sequence

SEQ ID NO: 34408 - DNA, 53 bp, Artificial Sequence; identical to SEQ ID NO: 2212
  Description of Artificial Sequence: Synthetic all nuts; inner sequence and 3' sequence

SEQ ID NO: 34409 - DNA, 53 bp, Artificial Sequence; identical to SEQ ID NO: 2326
  Description of Artificial Sequence: Synthetic all nuts; inner sequence and 3' sequence

SEQ ID NO: 34410 - DNA, 53 bp, Artificial Sequence; identical to SEQ ID NO: 22629
  Description of Artificial Sequence: Synthetic all nuts; inner sequence and 3' sequence

SEQ ID NO: 34411 - DNA, 53 bp, Artificial Sequence; identical to SEQ ID NO: 2060
  Description of Artificial Sequence: Synthetic all nuts; inner sequence and 3' sequence

SEQ ID NO: 34412 - DNA, 53 bp, Artificial Sequence; identical to SEQ ID NO: 2613
  Description of Artificial Sequence: Synthetic all nuts; inner sequence and 3' sequence

SEQ ID NO: 34413 - DNA, 53 bp, Artificial Sequence; identical to SEQ ID NO: 6694
  Description of Artificial Sequence: Synthetic all nuts; inner sequence and 3' sequence

SEQ ID NO: 34414 - DNA, 53 bp, Artificial Sequence; identical to SEQ ID NO: 2583
  Description of Artificial Sequence: Synthetic all nuts; inner sequence and 3' sequence

SEQ ID NO: 34415 - DNA, 53 bp, Artificial Sequence; identical to SEQ ID NO: 2231
  Description of Artificial Sequence: Synthetic all nuts; inner sequence and 3' sequence

SEQ ID NO: 34416 - DNA, 53 bp, Artificial Sequence
  Description of Artificial Sequence: Synthetic all nuts; inner sequence and 3' sequence
gacgcactcgtcctacacgttggcatgtgtttgactagtacatgaccacttga

SEQ ID NO: 34417 - DNA, 53 bp, Artificial Sequence; identical to SEQ ID NO: 2543
  Description of Artificial Sequence: Synthetic all nuts; inner sequence and 3' sequence

SEQ ID NO: 34418 - DNA, 53 bp, Artificial Sequence; identical to SEQ ID NO: 2165
  Description of Artificial Sequence: Synthetic all nuts; inner sequence and 3' sequence

SEQ ID NO: 34419 - DNA, 53 bp, Artificial Sequence; identical to SEQ ID NO: 2433
  Description of Artificial Sequence: Synthetic all nuts; inner sequence and 3' sequence

SEQ ID NO: 34420 - DNA, 53 bp, Artificial Sequence; identical to SEQ ID NO: 2329
  Description of Artificial Sequence: Synthetic all nuts; inner sequence and 3' sequence

SEQ ID NO: 34421 - DNA, 53 bp, Artificial Sequence; identical to SEQ ID NO: 22428
  Description of Artificial Sequence: Synthetic all nuts; inner sequence and 3' sequence

SEQ ID NO: 34422 - DNA, 50 bp, Artificial Sequence
  Description of Artificial Sequence: Synthetic all nuts; inner sequence and 3' sequence
ccgatcgcacgtcaaggcaggcttggattgactagtacatgaccacttga

SEQ ID NO: 34423 - DNA, 53 bp, Artificial Sequence; identical to SEQ ID NO: 2388
  Description of Artificial Sequence: Synthetic all nuts; inner sequence and 3' sequence

SEQ ID NO: 34424 - DNA, 53 bp, Artificial Sequence; identical to SEQ ID NO: 2394
  Description of Artificial Sequence: Synthetic all nuts; inner sequence and 3' sequence

SEQ ID NO: 34425 - DNA, 53 bp, Artificial Sequence; identical to SEQ ID NO: 6525
  Description of Artificial Sequence: Synthetic all nuts; inner sequence and 3' sequence

SEQ ID NO: 34426 - DNA, 53 bp, Artificial Sequence; identical to SEQ ID NO: 10678
  Description of Artificial Sequence: Synthetic all nuts; inner sequence and 3' sequence

SEQ ID NO: 34427 - DNA, 53 bp, Artificial Sequence; identical to SEQ ID NO: 2442
  Description of Artificial Sequence: Synthetic all nuts; inner sequence and 3' sequence

SEQ ID NO: 34428 - DNA, 53 bp, Artificial Sequence; identical to SEQ ID NO: 18750
  Description of Artificial Sequence: Synthetic all nuts; inner sequence and 3' sequence

SEQ ID NO: 34429 - DNA, 53 bp, Artificial Sequence; identical to SEQ ID NO: 2224
  Description of Artificial Sequence: Synthetic all nuts; inner sequence and 3' sequence

SEQ ID NO: 34430 - DNA, 53 bp, Artificial Sequence; identical to SEQ ID NO: 2024
  Description of Artificial Sequence: Synthetic all nuts; inner sequence and 3' sequence

SEQ ID NO: 34431 - DNA, 53 bp, Artificial Sequence; identical to SEQ ID NO: 22502
  Description of Artificial Sequence: Synthetic all nuts; inner sequence and 3' sequence

SEQ ID NO: 34432 - DNA, 53 bp, Artificial Sequence; identical to SEQ ID NO: 6816
  Description of Artificial Sequence: Synthetic all nuts; inner sequence and 3' sequence

SEQ ID NO: 34433 - DNA, 53 bp, Artificial Sequence
  Description of Artificial Sequence: Synthetic all nuts; inner sequence and 3' sequence
cctgatcgcacgtaaggtgggcgtgtgatgttgactagtacatgaccacttga

SEQ ID NO: 34434 - DNA, 53 bp, Artificial Sequence; identical to SEQ ID NO: 2576
  Description of Artificial Sequence: Synthetic all nuts; inner sequence and 3' sequence

SEQ ID NO: 34435 - DNA, 53 bp, Artificial Sequence; identical to SEQ ID NO: 2281
  Description of Artificial Sequence: Synthetic all nuts; inner sequence and 3' sequence

SEQ ID NO: 34436 - DNA, 53 bp, Artificial Sequence; identical to SEQ ID NO: 2595
  Description of Artificial Sequence: Synthetic all nuts; inner sequence and 3' sequence

SEQ ID NO: 34437 - DNA, 53 bp, Artificial Sequence
  Description of Artificial Sequence: Synthetic all nuts; inner sequence and 3' sequence
gtcattccgcatcctacacgtgggcacggattgactagtacatgaccacttga

SEQ ID NO: 34438 - DNA, 53 bp, Artificial Sequence; identical to SEQ ID NO: 6289
  Description of Artificial Sequence: Synthetic all nuts; inner sequence and 3' sequence

SEQ ID NO: 34439 - DNA, 53 bp, Artificial Sequence; identical to SEQ ID NO: 22787
  Description of Artificial Sequence: Synthetic all nuts; inner sequence and 3' sequence

SEQ ID NO: 34440 - DNA, 53 bp, Artificial Sequence; identical to SEQ ID NO: 22797
  Description of Artificial Sequence: Synthetic all nuts; inner sequence and 3' sequence

SEQ ID NO: 34441 - DNA, 53 bp, Artificial Sequence; identical to SEQ ID NO: 2338
  Description of Artificial Sequence: Synthetic all nuts; inner sequence and 3' sequence

SEQ ID NO: 34442 - DNA, 53 bp, Artificial Sequence; identical to SEQ ID NO: 18731
  Description of Artificial Sequence: Synthetic all nuts; inner sequence and 3' sequence

SEQ ID NO: 34443 - DNA, 54 bp, Artificial Sequence; identical to SEQ ID NO: 2250
  Description of Artificial Sequence: Synthetic all nuts; inner sequence and 3' sequence

SEQ ID NO: 34444 - DNA, 53 bp, Artificial Sequence; identical to SEQ ID NO: 6867
  Description of Artificial Sequence: Synthetic all nuts; inner sequence and 3' sequence

SEQ ID NO: 34445 - DNA, 53 bp, Artificial Sequence; identical to SEQ ID NO: 2619
  Description of Artificial Sequence: Synthetic all nuts; inner sequence and 3' sequence

SEQ ID NO: 34446 - DNA, 53 bp, Artificial Sequence
  Description of Artificial Sequence: Synthetic all nuts; inner sequence and 3' sequence
ggacgcacaggaccggccaagtgacatggattgactagtacatgaccacttga

SEQ ID NO: 34447 - DNA, 53 bp, Artificial Sequence; identical to SEQ ID NO: 22803
  Description of Artificial Sequence: Synthetic all nuts; inner sequence and 3' sequence

SEQ ID NO: 34448 - DNA, 53 bp, Artificial Sequence; identical to SEQ ID NO: 22519
  Description of Artificial Sequence: Synthetic all nuts; inner sequence and 3' sequence

SEQ ID NO: 34449 - DNA, 53 bp, Artificial Sequence; identical to SEQ ID NO: 2321
  Description of Artificial Sequence: Synthetic all nuts; inner sequence and 3' sequence

SEQ ID NO: 34450 - DNA, 53 bp, Artificial Sequence; identical to SEQ ID NO: 2570
  Description of Artificial Sequence: Synthetic all nuts; inner sequence and 3' sequence

SEQ ID NO: 34451 - DNA, 53 bp, Artificial Sequence; identical to SEQ ID NO: 6856
  Description of Artificial Sequence: Synthetic all nuts; inner sequence and 3' sequence

SEQ ID NO: 34452 - DNA, 53 bp, Artificial Sequence; identical to SEQ ID NO: 2353
  Description of Artificial Sequence: Synthetic all nuts; inner sequence and 3' sequence

SEQ ID NO: 34453 - DNA, 53 bp, Artificial Sequence; identical to SEQ ID NO: 2386
  Description of Artificial Sequence: Synthetic all nuts; inner sequence and 3' sequence

SEQ ID NO: 34454 - DNA, 53 bp, Artificial Sequence; identical to SEQ ID NO: 2184
  Description of Artificial Sequence: Synthetic all nuts; inner sequence and 3' sequence

SEQ ID NO: 34455 - DNA, 53 bp, Artificial Sequence; identical to SEQ ID NO: 2246
  Description of Artificial Sequence: Synthetic all nuts; inner sequence and 3' sequence

SEQ ID NO: 34456 - DNA, 53 bp, Artificial Sequence; identical to SEQ ID NO: 14922
  Description of Artificial Sequence: Synthetic all nuts; inner sequence and 3' sequence

SEQ ID NO: 34457 - DNA, 53 bp, Artificial Sequence; identical to SEQ ID NO: 6603
  Description of Artificial Sequence: Synthetic all nuts; inner sequence and 3' sequence

SEQ ID NO: 34458 - DNA, 53 bp, Artificial Sequence; identical to SEQ ID NO: 22324
  Description of Artificial Sequence: Synthetic all nuts; inner sequence and 3' sequence

SEQ ID NO: 34459 - DNA, 53 bp, Artificial Sequence
  Description of Artificial Sequence: Synthetic all nuts; inner sequence and 3' sequence
ccgtagcgacatcaagcggtggtgtgcgagttgactagtacatgaccacttga

SEQ ID NO: 34460 - DNA, 53 bp, Artificial Sequence; identical to SEQ ID NO: 2909
  Description of Artificial Sequence: Synthetic all nuts; inner sequence and 3' sequence

SEQ ID NO: 34461 - DNA, 53 bp, Artificial Sequence; identical to SEQ ID NO: 2014
  Description of Artificial Sequence: Synthetic all nuts; inner sequence and 3' sequence

SEQ ID NO: 34462 - DNA, 53 bp, Artificial Sequence; identical to SEQ ID NO: 2008
  Description of Artificial Sequence: Synthetic all nuts; inner sequence and 3' sequence

SEQ ID NO: 34463 - DNA, 53 bp, Artificial Sequence; identical to SEQ ID NO: 22672
  Description of Artificial Sequence: Synthetic all nuts; inner sequence and 3' sequence

SEQ ID NO: 34464 - DNA, 53 bp, Artificial Sequence
  Description of Artificial Sequence: Synthetic all nuts; inner sequence and 3' sequence
ccgtagcgaaatcaagcggtggtgtgcgtgttgactagtacatgaccacttga

SEQ ID NO: 34465 - DNA, 53 bp, Artificial Sequence; identical to SEQ ID NO: 2390
  Description of Artificial Sequence: Synthetic all nuts; inner sequence and 3' sequence

SEQ ID NO: 34466 - DNA, 53 bp, Artificial Sequence; identical to SEQ ID NO: 2188
  Description of Artificial Sequence: Synthetic all nuts; inner sequence and 3' sequence

SEQ ID NO: 34467 - DNA, 53 bp, Artificial Sequence; identical to SEQ ID NO: 6905
  Description of Artificial Sequence: Synthetic all nuts; inner sequence and 3' sequence

SEQ ID NO: 34468 - DNA, 53 bp, Artificial Sequence; identical to SEQ ID NO: 2854
  Description of Artificial Sequence: Synthetic all nuts; inner sequence and 3' sequence

SEQ ID NO: 34469 - DNA, 53 bp, Artificial Sequence; identical to SEQ ID NO: 2515
  Description of Artificial Sequence: Synthetic all nuts; inner sequence and 3' sequence

SEQ ID NO: 34470 - DNA, 53 bp, Artificial Sequence; identical to SEQ ID NO: 2047
  Description of Artificial Sequence: Synthetic all nuts; inner sequence and 3' sequence

SEQ ID NO: 34471 - DNA, 53 bp, Artificial Sequence; identical to SEQ ID NO: 2068
  Description of Artificial Sequence: Synthetic all nuts; inner sequence and 3' sequence

SEQ ID NO: 34472 - DNA, 53 bp, Artificial Sequence; identical to SEQ ID NO: 2380
  Description of Artificial Sequence: Synthetic all nuts; inner sequence and 3' sequence

SEQ ID NO: 34473 - DNA, 53 bp, Artificial Sequence; identical to SEQ ID NO: 26843
  Description of Artificial Sequence: Synthetic all nuts; inner sequence and 3' sequence

SEQ ID NO: 34474 - DNA, 53 bp, Artificial Sequence; identical to SEQ ID NO: 2225
  Description of Artificial Sequence: Synthetic all nuts; inner sequence and 3' sequence

SEQ ID NO: 34475 - DNA, 53 bp, Artificial Sequence; identical to SEQ ID NO: 22724
  Description of Artificial Sequence: Synthetic all nuts; inner sequence and 3' sequence

SEQ ID NO: 34476 - DNA, 54 bp, Artificial Sequence; identical to SEQ ID NO: 2150
  Description of Artificial Sequence: Synthetic all nuts; inner sequence and 3' sequence

SEQ ID NO: 34477 - DNA, 53 bp, Artificial Sequence
  Description of Artificial Sequence: Synthetic all nuts; inner sequence and 3' sequence
gccatcgctgaccgacgtgagcatgtcgtcttgactagtacatgaccacttga

SEQ ID NO: 34478 - DNA, 53 bp, Artificial Sequence; identical to SEQ ID NO: 2061
  Description of Artificial Sequence: Synthetic all nuts; inner sequence and 3' sequence

SEQ ID NO: 34479 - DNA, 53 bp, Artificial Sequence; identical to SEQ ID NO: 22398
  Description of Artificial Sequence: Synthetic all nuts; inner sequence and 3' sequence

SEQ ID NO: 34480 - DNA, 53 bp, Artificial Sequence; identical to SEQ ID NO: 10889
  Description of Artificial Sequence: Synthetic all nuts; inner sequence and 3' sequence

SEQ ID NO: 34481 - DNA, 53 bp, Artificial Sequence; identical to SEQ ID NO: 2783
  Description of Artificial Sequence: Synthetic all nuts; inner sequence and 3' sequence

SEQ ID NO: 34482 - DNA, 53 bp, Artificial Sequence; identical to SEQ ID NO: 2044
  Description of Artificial Sequence: Synthetic all nuts; inner sequence and 3' sequence

SEQ ID NO: 34483 - DNA, 53 bp, Artificial Sequence; identical to SEQ ID NO: 2183
  Description of Artificial Sequence: Synthetic all nuts; inner sequence and 3' sequence

SEQ ID NO: 34484 - DNA, 53 bp, Artificial Sequence
  Description of Artificial Sequence: Synthetic all nuts; inner sequence and 3' sequence
gtcattccgcatcctacacgagggcacgtattgactagtacatgaccacttga

SEQ ID NO: 34485 - DNA, 53 bp, Artificial Sequence; identical to SEQ ID NO: 2158
  Description of Artificial Sequence: Synthetic all nuts; inner sequence and 3' sequence

SEQ ID NO: 34486 - DNA, 53 bp, Artificial Sequence; identical to SEQ ID NO: 2303
  Description of Artificial Sequence: Synthetic all nuts; inner sequence and 3' sequence

SEQ ID NO: 34487 - DNA, 53 bp, Artificial Sequence; identical to SEQ ID NO: 2717
  Description of Artificial Sequence: Synthetic all nuts; inner sequence and 3' sequence

SEQ ID NO: 34488 - DNA, 53 bp, Artificial Sequence; identical to SEQ ID NO: 6575
  Description of Artificial Sequence: Synthetic all nuts; inner sequence and 3' sequence

SEQ ID NO: 34489 - DNA, 53 bp, Artificial Sequence; identical to SEQ ID NO: 2295
  Description of Artificial Sequence: Synthetic all nuts; inner sequence and 3' sequence

SEQ ID NO: 34490 - DNA, 53 bp, Artificial Sequence; identical to SEQ ID NO: 2828
  Description of Artificial Sequence: Synthetic all nuts; inner sequence and 3' sequence

SEQ ID NO: 34491 - DNA, 51 bp, Artificial Sequence; identical to SEQ ID NO: 2241
  Description of Artificial Sequence: Synthetic all nuts; inner sequence and 3' sequence

SEQ ID NO: 34492 - DNA, 53 bp, Artificial Sequence; identical to SEQ ID NO: 2277
  Description of Artificial Sequence: Synthetic all nuts; inner sequence and 3' sequence

SEQ ID NO: 34493 - DNA, 53 bp, Artificial Sequence; identical to SEQ ID NO: 10769
  Description of Artificial Sequence: Synthetic all nuts; inner sequence and 3' sequence

SEQ ID NO: 34494 - DNA, 53 bp, Artificial Sequence; identical to SEQ ID NO: 6935
  Description of Artificial Sequence: Synthetic all nuts; inner sequence and 3' sequence

SEQ ID NO: 34495 - DNA, 53 bp, Artificial Sequence; identical to SEQ ID NO: 2373
  Description of Artificial Sequence: Synthetic all nuts; inner sequence and 3' sequence

SEQ ID NO: 34496 - DNA, 53 bp, Artificial Sequence; identical to SEQ ID NO: 6955
  Description of Artificial Sequence: Synthetic all nuts; inner sequence and 3' sequence

SEQ ID NO: 34497 - DNA, 53 bp, Artificial Sequence; identical to SEQ ID NO: 2617
  Description of Artificial Sequence: Synthetic all nuts; inner sequence and 3' sequence

SEQ ID NO: 34498 - DNA, 53 bp, Artificial Sequence; identical to SEQ ID NO: 2059
  Description of Artificial Sequence: Synthetic all nuts; inner sequence and 3' sequence

SEQ ID NO: 34499 - DNA, 53 bp, Artificial Sequence; identical to SEQ ID NO: 6579
  Description of Artificial Sequence: Synthetic all nuts; inner sequence and 3' sequence

SEQ ID NO: 34500 - DNA, 53 bp, Artificial Sequence; identical to SEQ ID NO: 2153
  Description of Artificial Sequence: Synthetic all nuts; inner sequence and 3' sequence

SEQ ID NO: 34501 - DNA, 53 bp, Artificial Sequence; identical to SEQ ID NO: 2661
  Description of Artificial Sequence: Synthetic all nuts; inner sequence and 3' sequence

SEQ ID NO: 34502 - DNA, 53 bp, Artificial Sequence; identical to SEQ ID NO: 22353
  Description of Artificial Sequence: Synthetic all nuts; inner sequence and 3' sequence

SEQ ID NO: 34503 - DNA, 53 bp, Artificial Sequence
  Description of Artificial Sequence: Synthetic all nuts; inner sequence and 3' sequence
ccgcacgcaaccgtacgcaatgggctgtgattgactagtacatgaccacttga

SEQ ID NO: 34504 - DNA, 53 bp, Artificial Sequence; identical to SEQ ID NO: 2346
  Description of Artificial Sequence: Synthetic all nuts; inner sequence and 3' sequence

SEQ ID NO: 34505 - DNA, 53 bp, Artificial Sequence
  Description of Artificial Sequence: Synthetic all nuts; inner sequence and 3' sequence
ggcattccgcatcctacacgtgggcacgtattgactagtacatgaccacttga

SEQ ID NO: 34506 - DNA, 53 bp, Artificial Sequence; identical to SEQ ID NO: 2358
  Description of Artificial Sequence: Synthetic all nuts; inner sequence and 3' sequence

SEQ ID NO: 34507 - DNA, 53 bp, Artificial Sequence; identical to SEQ ID NO: 2620
  Description of Artificial Sequence: Synthetic all nuts; inner sequence and 3' sequence

SEQ ID NO: 34508 - DNA, 53 bp, Artificial Sequence; identical to SEQ ID NO: 2758
  Description of Artificial Sequence: Synthetic all nuts; inner sequence and 3' sequence

SEQ ID NO: 34509 - DNA, 53 bp, Artificial Sequence; identical to SEQ ID NO: 6356
  Description of Artificial Sequence: Synthetic all nuts; inner sequence and 3' sequence

SEQ ID NO: 34510 - DNA, 53 bp, Artificial Sequence; identical to SEQ ID NO: 10960
  Description of Artificial Sequence: Synthetic all nuts; inner sequence and 3' sequence

SEQ ID NO: 34511 - DNA, 53 bp, Artificial Sequence; identical to SEQ ID NO: 2644
  Description of Artificial Sequence: Synthetic all nuts; inner sequence and 3' sequence

SEQ ID NO: 34512 - DNA, 53 bp, Artificial Sequence; identical to SEQ ID NO: 2468
  Description of Artificial Sequence: Synthetic all nuts; inner sequence and 3' sequence

SEQ ID NO: 34513 - DNA, 53 bp, Artificial Sequence; identical to SEQ ID NO: 18696
  Description of Artificial Sequence: Synthetic all nuts; inner sequence and 3' sequence

SEQ ID NO: 34514 - DNA, 53 bp, Artificial Sequence; identical to SEQ ID NO: 2409
  Description of Artificial Sequence: Synthetic all nuts; inner sequence and 3' sequence

SEQ ID NO: 34515 - DNA, 53 bp, Artificial Sequence; identical to SEQ ID NO: 2905
  Description of Artificial Sequence: Synthetic all nuts; inner sequence and 3' sequence

SEQ ID NO: 34516 - DNA, 53 bp, Artificial Sequence
  Description of Artificial Sequence: Synthetic all nuts; inner sequence and 3' sequence
cgcagcgtcgatacgtcatgcacgctgacattgactagtacatgaccacttga

SEQ ID NO: 34517 - DNA, 52 bp, Artificial Sequence; identical to SEQ ID NO: 6869
  Description of Artificial Sequence: Synthetic all nuts; inner sequence and 3' sequence

SEQ ID NO: 34518 - DNA, 53 bp, Artificial Sequence; identical to SEQ ID NO: 2218
  Description of Artificial Sequence: Synthetic all nuts; inner sequence and 3' sequence

SEQ ID NO: 34519 - DNA, 53 bp, Artificial Sequence; identical to SEQ ID NO: 6631
  Description of Artificial Sequence: Synthetic all nuts; inner sequence and 3' sequence

SEQ ID NO: 34520 - DNA, 53 bp, Artificial Sequence; identical to SEQ ID NO: 2276
  Description of Artificial Sequence: Synthetic all nuts; inner sequence and 3' sequence

SEQ ID NO: 34521 - DNA, 53 bp, Artificial Sequence; identical to SEQ ID NO: 2371
  Description of Artificial Sequence: Synthetic all nuts; inner sequence and 3' sequence

SEQ ID NO: 34522 - DNA, 53 bp, Artificial Sequence; identical to SEQ ID NO: 2432
  Description of Artificial Sequence: Synthetic all nuts; inner sequence and 3' sequence

SEQ ID NO: 34523 - DNA, 53 bp, Artificial Sequence; identical to SEQ ID NO: 6888
  Description of Artificial Sequence: Synthetic all nuts; inner sequence and 3' sequence

SEQ ID NO: 34524 - DNA, 53 bp, Artificial Sequence; identical to SEQ ID NO: 2072
  Description of Artificial Sequence: Synthetic all nuts; inner sequence and 3' sequence

SEQ ID NO: 34525 - DNA, 53 bp, Artificial Sequence; identical to SEQ ID NO: 22929
  Description of Artificial Sequence: Synthetic all nuts; inner sequence and 3' sequence

SEQ ID NO: 34526 - DNA, 53 bp, Artificial Sequence; identical to SEQ ID NO: 2678
  Description of Artificial Sequence: Synthetic all nuts; inner sequence and 3' sequence

SEQ ID NO: 34527 - DNA, 53 bp, Artificial Sequence; identical to SEQ ID NO: 2484
  Description of Artificial Sequence: Synthetic all nuts; inner sequence and 3' sequence

SEQ ID NO: 34528 - DNA, 53 bp, Artificial Sequence; identical to SEQ ID NO: 2524
  Description of Artificial Sequence: Synthetic all nuts; inner sequence and 3' sequence

SEQ ID NO: 34529 - DNA, 53 bp, Artificial Sequence; identical to SEQ ID NO: 2477
  Description of Artificial Sequence: Synthetic all nuts; inner sequence and 3' sequence

SEQ ID NO: 34530 - DNA, 53 bp, Artificial Sequence; identical to SEQ ID NO: 2579
  Description of Artificial Sequence: Synthetic all nuts; inner sequence and 3' sequence

SEQ ID NO: 34531 - DNA, 53 bp, Artificial Sequence; identical to SEQ ID NO: 2046
  Description of Artificial Sequence: Synthetic all nuts; inner sequence and 3' sequence

SEQ ID NO: 34532 - DNA, 53 bp, Artificial Sequence; identical to SEQ ID NO: 2351
  Description of Artificial Sequence: Synthetic all nuts; inner sequence and 3' sequence

SEQ ID NO: 34533 - DNA, 53 bp, Artificial Sequence; identical to SEQ ID NO: 10579
  Description of Artificial Sequence: Synthetic all nuts; inner sequence and 3' sequence

SEQ ID NO: 34534 - DNA, 53 bp, Artificial Sequence; identical to SEQ ID NO: 18695
  Description of Artificial Sequence: Synthetic all nuts; inner sequence and 3' sequence

SEQ ID NO: 34535 - DNA, 53 bp, Artificial Sequence; identical to SEQ ID NO: 2274
  Description of Artificial Sequence: Synthetic all nuts; inner sequence and 3' sequence

SEQ ID NO: 34536 - DNA, 53 bp, Artificial Sequence
  Description of Artificial Sequence: Synthetic all nuts; inner sequence and 3' sequence
gtacgcacgatgagctatcaatgtgccatgttgactagtacatgaccacttga

SEQ ID NO: 34537 - DNA, 53 bp, Artificial Sequence; identical to SEQ ID NO: 22382
  Description of Artificial Sequence: Synthetic all nuts; inner sequence and 3' sequence

SEQ ID NO: 34538 - DNA, 52 bp, Artificial Sequence; identical to SEQ ID NO: 2070
  Description of Artificial Sequence: Synthetic all nuts; inner sequence and 3' sequence

SEQ ID NO: 34539 - DNA, 49 bp, Artificial Sequence; identical to SEQ ID NO: 2822
  Description of Artificial Sequence: Synthetic all nuts; inner sequence and 3' sequence

SEQ ID NO: 34540 - DNA, 53 bp, Artificial Sequence; identical to SEQ ID NO: 2401
  Description of Artificial Sequence: Synthetic all nuts; inner sequence and 3' sequence

SEQ ID NO: 34541 - DNA, 53 bp, Artificial Sequence; identical to SEQ ID NO: 2821
  Description of Artificial Sequence: Synthetic all nuts; inner sequence and 3' sequence

SEQ ID NO: 34542 - DNA, 53 bp, Artificial Sequence
  Description of Artificial Sequence: Synthetic all nuts; inner sequence and 3' sequence
gtacgcatcgtcccgtcatgttgttccgtattgactagtacatgaccacttga

SEQ ID NO: 34543 - DNA, 53 bp, Artificial Sequence; identical to SEQ ID NO: 14821
  Description of Artificial Sequence: Synthetic all nuts; inner sequence and 3' sequence

SEQ ID NO: 34544 - DNA, 53 bp, Artificial Sequence; identical to SEQ ID NO: 2695
  Description of Artificial Sequence: Synthetic all nuts; inner sequence and 3' sequence

SEQ ID NO: 34545 - DNA, 53 bp, Artificial Sequence; identical to SEQ ID NO: 2020
  Description of Artificial Sequence: Synthetic all nuts; inner sequence and 3' sequence

SEQ ID NO: 34546 - DNA, 53 bp, Artificial Sequence; identical to SEQ ID NO: 6641
  Description of Artificial Sequence: Synthetic all nuts; inner sequence and 3' sequence

SEQ ID NO: 34547 - DNA, 53 bp, Artificial Sequence; identical to SEQ ID NO: 18677
  Description of Artificial Sequence: Synthetic all nuts; inner sequence and 3' sequence

SEQ ID NO: 34548 - DNA, 53 bp, Artificial Sequence; identical to SEQ ID NO: 2362
  Description of Artificial Sequence: Synthetic all nuts; inner sequence and 3' sequence

SEQ ID NO: 34549 - DNA, 53 bp, Artificial Sequence; identical to SEQ ID NO: 6280
  Description of Artificial Sequence: Synthetic all nuts; inner sequence and 3' sequence

SEQ ID NO: 34550 - DNA, 53 bp, Artificial Sequence; identical to SEQ ID NO: 22604
  Description of Artificial Sequence: Synthetic all nuts; inner sequence and 3' sequence

SEQ ID NO: 34551 - DNA, 53 bp, Artificial Sequence; identical to SEQ ID NO: 2121
  Description of Artificial Sequence: Synthetic all nuts; inner sequence and 3' sequence

SEQ ID NO: 34552 - DNA, 53 bp, Artificial Sequence
  Description of Artificial Sequence: Synthetic all nuts; inner sequence and 3' sequence
ggccaaacgaagcgtggatcagtgcttgtcttgactagtacatgaccacttga

SEQ ID NO: 34553 - DNA, 53 bp, Artificial Sequence; identical to SEQ ID NO: 6987
  Description of Artificial Sequence: Synthetic all nuts; inner sequence and 3' sequence

SEQ ID NO: 34554 - DNA, 53 bp, Artificial Sequence; identical to SEQ ID NO: 2038
  Description of Artificial Sequence: Synthetic all nuts; inner sequence and 3' sequence

SEQ ID NO: 34555 - DNA, 53 bp, Artificial Sequence; identical to SEQ ID NO: 10824
  Description of Artificial Sequence: Synthetic all nuts; inner sequence and 3' sequence

SEQ ID NO: 34556 - DNA, 53 bp, Artificial Sequence; identical to SEQ ID NO: 2532
  Description of Artificial Sequence: Synthetic all nuts; inner sequence and 3' sequence

SEQ ID NO: 34557 - DNA, 53 bp, Artificial Sequence; identical to SEQ ID NO: 7000
  Description of Artificial Sequence: Synthetic all nuts; inner sequence and 3' sequence

SEQ ID NO: 34558 - DNA, 53 bp, Artificial Sequence; identical to SEQ ID NO: 2596
  Description of Artificial Sequence: Synthetic all nuts; inner sequence and 3' sequence

SEQ ID NO: 34559 - DNA, 53 bp, Artificial Sequence; identical to SEQ ID NO: 2434
  Description of Artificial Sequence: Synthetic all nuts; inner sequence and 3' sequence

SEQ ID NO: 34560 - DNA, 53 bp, Artificial Sequence; identical to SEQ ID NO: 22974
  Description of Artificial Sequence: Synthetic all nuts; inner sequence and 3' sequence

SEQ ID NO: 34561 - DNA, 53 bp, Artificial Sequence; identical to SEQ ID NO: 6761
  Description of Artificial Sequence: Synthetic all nuts; inner sequence and 3' sequence

SEQ ID NO: 34562 - DNA, 53 bp, Artificial Sequence; identical to SEQ ID NO: 2418
  Description of Artificial Sequence: Synthetic all nuts; inner sequence and 3' sequence

SEQ ID NO: 34563 - DNA, 52 bp, Artificial Sequence; identical to SEQ ID NO: 18665
  Description of Artificial Sequence: Synthetic all nuts; inner sequence and 3' sequence

SEQ ID NO: 34564 - DNA, 53 bp, Artificial Sequence; identical to SEQ ID NO: 22884
  Description of Artificial Sequence: Synthetic all nuts; inner sequence and 3' sequence

SEQ ID NO: 34565 - DNA, 53 bp, Artificial Sequence
  Description of Artificial Sequence: Synthetic all nuts; inner sequence and 3' sequence
ggaacgacgcgcaccgtatcaagttgggcattgactagtacatgaccacttga

SEQ ID NO: 34566 - DNA, 53 bp, Artificial Sequence; identical to SEQ ID NO: 22463
  Description of Artificial Sequence: Synthetic all nuts; inner sequence and 3' sequence

SEQ ID NO: 34567 - DNA, 53 bp, Artificial Sequence; identical to SEQ ID NO: 2419
  Description of Artificial Sequence: Synthetic all nuts; inner sequence and 3' sequence

SEQ ID NO: 34568 - DNA, 53 bp, Artificial Sequence; identical to SEQ ID NO: 10892
  Description of Artificial Sequence: Synthetic all nuts; inner sequence and 3' sequence

SEQ ID NO: 34569 - DNA, 53 bp, Artificial Sequence; identical to SEQ ID NO: 2915
  Description of Artificial Sequence: Synthetic all nuts; inner sequence and 3' sequence

SEQ ID NO: 34570 - DNA, 53 bp, Artificial Sequence; identical to SEQ ID NO: 2507
  Description of Artificial Sequence: Synthetic all nuts; inner sequence and 3' sequence

SEQ ID NO: 34571 - DNA, 53 bp, Artificial Sequence; identical to SEQ ID NO: 26839
  Description of Artificial Sequence: Synthetic all nuts; inner sequence and 3' sequence

SEQ ID NO: 34572 - DNA, 53 bp, Artificial Sequence; identical to SEQ ID NO: 2223
  Description of Artificial Sequence: Synthetic all nuts; inner sequence and 3' sequence

SEQ ID NO: 34573 - DNA, 53 bp, Artificial Sequence; identical to SEQ ID NO: 2403
  Description of Artificial Sequence: Synthetic all nuts; inner sequence and 3' sequence

SEQ ID NO: 34574 - DNA, 53 bp, Artificial Sequence
  Description of Artificial Sequence: Synthetic all nuts; inner sequence and 3' sequence
ggcatgcgatggatgtgcgttgtgtctgtcttgactagtacatgaccacttga

SEQ ID NO: 34575 - DNA, 53 bp, Artificial Sequence; identical to SEQ ID NO: 18585
  Description of Artificial Sequence: Synthetic all nuts; inner sequence and 3' sequence

SEQ ID NO: 34576 - DNA, 53 bp, Artificial Sequence; identical to SEQ ID NO: 30885
  Description of Artificial Sequence: Synthetic all nuts; inner sequence and 3' sequence

SEQ ID NO: 34577 - DNA, 53 bp, Artificial Sequence; identical to SEQ ID NO: 22990
  Description of Artificial Sequence: Synthetic all nuts; inner sequence and 3' sequence

SEQ ID NO: 34578 - DNA, 53 bp, Artificial Sequence; identical to SEQ ID NO: 22580
  Description of Artificial Sequence: Synthetic all nuts; inner sequence and 3' sequence

SEQ ID NO: 34579 - DNA, 53 bp, Artificial Sequence; identical to SEQ ID NO: 2156
  Description of Artificial Sequence: Synthetic all nuts; inner sequence and 3' sequence

SEQ ID NO: 34580 - DNA, 53 bp, Artificial Sequence; identical to SEQ ID NO: 2816
  Description of Artificial Sequence: Synthetic all nuts; inner sequence and 3' sequence

SEQ ID NO: 34581 - DNA, 53 bp, Artificial Sequence; identical to SEQ ID NO: 2697
  Description of Artificial Sequence: Synthetic all nuts; inner sequence and 3' sequence

SEQ ID NO: 34582 - DNA, 53 bp, Artificial Sequence; identical to SEQ ID NO: 2325
  Description of Artificial Sequence: Synthetic all nuts; inner sequence and 3' sequence

SEQ ID NO: 34583 - DNA, 53 bp, Artificial Sequence; identical to SEQ ID NO: 2806
  Description of Artificial Sequence: Synthetic all nuts; inner sequence and 3' sequence

SEQ ID NO: 34584 - DNA, 53 bp, Artificial Sequence
  Description of Artificial Sequence: Synthetic all nuts; inner sequence and 3' sequence
gcacgcaacgaacctacgagtgatcgtggattgactagtacatgaccacttga

SEQ ID NO: 34585 - DNA, 53 bp, Artificial Sequence
  Description of Artificial Sequence: Synthetic all nuts; inner sequence and 3' sequence
gtcatgcacgaacactatcatggcggcattttgactagtacatgaccacttga

SEQ ID NO: 34586 - DNA, 53 bp, Artificial Sequence; identical to SEQ ID NO: 22708
  Description of Artificial Sequence: Synthetic all nuts; inner sequence and 3' sequence

SEQ ID NO: 34587 - DNA, 53 bp, Artificial Sequence; identical to SEQ ID NO: 2375
  Description of Artificial Sequence: Synthetic all nuts; inner sequence and 3' sequence

SEQ ID NO: 34588 - DNA, 53 bp, Artificial Sequence; identical to SEQ ID NO: 2611
  Description of Artificial Sequence: Synthetic all nuts; inner sequence and 3' sequence

SEQ ID NO: 34589 - DNA, 53 bp, Artificial Sequence; identical to SEQ ID NO: 2450
  Description of Artificial Sequence: Synthetic all nuts; inner sequence and 3' sequence

SEQ ID NO: 34590 - DNA, 53 bp, Artificial Sequence; identical to SEQ ID NO: 2152
  Description of Artificial Sequence: Synthetic all nuts; inner sequence and 3' sequence

SEQ ID NO: 34591 - DNA, 53 bp, Artificial Sequence; identical to SEQ ID NO: 2385
  Description of Artificial Sequence: Synthetic all nuts; inner sequence and 3' sequence

SEQ ID NO: 34592 - DNA, 53 bp, Artificial Sequence; identical to SEQ ID NO: 2440
  Description of Artificial Sequence: Synthetic all nuts; inner sequence and 3' sequence

SEQ ID NO: 34593 - DNA, 53 bp, Artificial Sequence; identical to SEQ ID NO: 6659
  Description of Artificial Sequence: Synthetic all nuts; inner sequence and 3' sequence

SEQ ID NO: 34594 - DNA, 53 bp, Artificial Sequence; identical to SEQ ID NO: 6802
  Description of Artificial Sequence: Synthetic all nuts; inner sequence and 3' sequence

SEQ ID NO: 34595 - DNA, 53 bp, Artificial Sequence; identical to SEQ ID NO: 2010
  Description of Artificial Sequence: Synthetic all nuts; inner sequence and 3' sequence

SEQ ID NO: 34596 - DNA, 54 bp, Artificial Sequence; identical to SEQ ID NO: 2258
  Description of Artificial Sequence: Synthetic all nuts; inner sequence and 3' sequence

SEQ ID NO: 34597 - DNA, 53 bp, Artificial Sequence; identical to SEQ ID NO: 2754
  Description of Artificial Sequence: Synthetic all nuts; inner sequence and 3' sequence

SEQ ID NO: 34598 - DNA, 53 bp, Artificial Sequence; identical to SEQ ID NO: 2094
  Description of Artificial Sequence: Synthetic all nuts; inner sequence and 3' sequence

SEQ ID NO: 34599 - DNA, 53 bp, Artificial Sequence; identical to SEQ ID NO: 14944
  Description of Artificial Sequence: Synthetic all nuts; inner sequence and 3' sequence

SEQ ID NO: 34600 - DNA, 53 bp, Artificial Sequence; identical to SEQ ID NO: 2728
  Description of Artificial Sequence: Synthetic all nuts; inner sequence and 3' sequence

SEQ ID NO: 34601 - DNA, 53 bp, Artificial Sequence; identical to SEQ ID NO: 22302
  Description of Artificial Sequence: Synthetic all nuts; inner sequence and 3' sequence

SEQ ID NO: 34602 - DNA, 53 bp, Artificial Sequence; identical to SEQ ID NO: 14945
  Description of Artificial Sequence: Synthetic all nuts; inner sequence and 3' sequence

SEQ ID NO: 34603 - DNA, 53 bp, Artificial Sequence; identical to SEQ ID NO: 2356
  Description of Artificial Sequence: Synthetic all nuts; inner sequence and 3' sequence

SEQ ID NO: 34604 - DNA, 53 bp, Artificial Sequence; identical to SEQ ID NO: 2666
  Description of Artificial Sequence: Synthetic all nuts; inner sequence and 3' sequence

SEQ ID NO: 34605 - DNA, 53 bp, Artificial Sequence; identical to SEQ ID NO: 2916
  Description of Artificial Sequence: Synthetic all nuts; inner sequence and 3' sequence

SEQ ID NO: 34606 - DNA, 53 bp, Artificial Sequence
  Description of Artificial Sequence: Synthetic all nuts; inner sequence and 3' sequence
cgcaccgtcgagacgtcatgcacgctgacattgactagtacatgaccacttga

SEQ ID NO: 34607 - DNA, 53 bp, Artificial Sequence; identical to SEQ ID NO: 22385
  Description of Artificial Sequence: Synthetic all nuts; inner sequence and 3' sequence

SEQ ID NO: 34608 - DNA, 53 bp, Artificial Sequence; identical to SEQ ID NO: 2090
  Description of Artificial Sequence: Synthetic all nuts; inner sequence and 3' sequence

SEQ ID NO: 34609 - DNA, 53 bp, Artificial Sequence; identical to SEQ ID NO: 2105
  Description of Artificial Sequence: Synthetic all nuts; inner sequence and 3' sequence

SEQ ID NO: 34610 - DNA, 53 bp, Artificial Sequence; identical to SEQ ID NO: 2050
  Description of Artificial Sequence: Synthetic all nuts; inner sequence and 3' sequence

SEQ ID NO: 34611 - DNA, 53 bp, Artificial Sequence; identical to SEQ ID NO: 22691
  Description of Artificial Sequence: Synthetic all nuts; inner sequence and 3' sequence

SEQ ID NO: 34612 - DNA, 53 bp, Artificial Sequence; identical to SEQ ID NO: 22560
  Description of Artificial Sequence: Synthetic all nuts; inner sequence and 3' sequence

SEQ ID NO: 34613 - DNA, 53 bp, Artificial Sequence; identical to SEQ ID NO: 2580
  Description of Artificial Sequence: Synthetic all nuts; inner sequence and 3' sequence

SEQ ID NO: 34614 - DNA, 53 bp, Artificial Sequence; identical to SEQ ID NO: 2994
  Description of Artificial Sequence: Synthetic all nuts; inner sequence and 3' sequence

SEQ ID NO: 34615 - DNA, 53 bp, Artificial Sequence; identical to SEQ ID NO: 2324
  Description of Artificial Sequence: Synthetic all nuts; inner sequence and 3' sequence

SEQ ID NO: 34616 - DNA, 53 bp, Artificial Sequence; identical to SEQ ID NO: 2349
  Description of Artificial Sequence: Synthetic all nuts; inner sequence and 3' sequence

SEQ ID NO: 34617 - DNA, 53 bp, Artificial Sequence; identical to SEQ ID NO: 2414
  Description of Artificial Sequence: Synthetic all nuts; inner sequence and 3' sequence

SEQ ID NO: 34618 - DNA, 53 bp, Artificial Sequence
  Description of Artificial Sequence: Synthetic all nuts; inner sequence and 3' sequence
ccgtagcgacatcaagcggtgctgtgcgtgttgactagtacatgaccacttga

SEQ ID NO: 34619 - DNA, 53 bp, Artificial Sequence
  Description of Artificial Sequence: Synthetic all nuts; inner sequence and 3' sequence
ccatcgcgtcactatcatgtgggtcacgtattgactagtacatgaccacttga

SEQ ID NO: 34620 - DNA, 53 bp, Artificial Sequence; identical to SEQ ID NO: 2360
  Description of Artificial Sequence: Synthetic all nuts; inner sequence and 3' sequence

SEQ ID NO: 34621 - DNA, 49 bp, Artificial Sequence; identical to SEQ ID NO: 2893
  Description of Artificial Sequence: Synthetic all nuts; inner sequence and 3' sequence

SEQ ID NO: 34622 - DNA, 53 bp, Artificial Sequence
  Description of Artificial Sequence: Synthetic all nuts; inner sequence and 3' sequence
gtcatgcacgaacactatcatggcggcatattgactagtacatgaccacttga

SEQ ID NO: 34623 - DNA, 53 bp, Artificial Sequence; identical to SEQ ID NO: 2058
  Description of Artificial Sequence: Synthetic all nuts; inner sequence and 3' sequence

SEQ ID NO: 34624 - DNA, 53 bp, Artificial Sequence
  Description of Artificial Sequence: Synthetic all nuts; inner sequence and 3' sequence
gcactctgctgaccgatcgagtatgcgtcattgactagtacatgaccacttga

SEQ ID NO: 34625 - DNA, 53 bp, Artificial Sequence; identical to SEQ ID NO: 14673
  Description of Artificial Sequence: Synthetic all nuts; inner sequence and 3' sequence

SEQ ID NO: 34626 - DNA, 53 bp, Artificial Sequence; identical to SEQ ID NO: 2119
  Description of Artificial Sequence: Synthetic all nuts; inner sequence and 3' sequence

SEQ ID NO: 34627 - DNA, 53 bp, Artificial Sequence; identical to SEQ ID NO: 2104
  Description of Artificial Sequence: Synthetic all nuts; inner sequence and 3' sequence

SEQ ID NO: 34628 - DNA, 53 bp, Artificial Sequence; identical to SEQ ID NO: 2210
  Description of Artificial Sequence: Synthetic all nuts; inner sequence and 3' sequence

SEQ ID NO: 34629 - DNA, 53 bp, Artificial Sequence; identical to SEQ ID NO: 2085
  Description of Artificial Sequence: Synthetic all nuts; inner sequence and 3' sequence

SEQ ID NO: 34630 - DNA, 53 bp, Artificial Sequence; identical to SEQ ID NO: 2178
  Description of Artificial Sequence: Synthetic all nuts; inner sequence and 3' sequence

SEQ ID NO: 34631 - DNA, 53 bp, Artificial Sequence; identical to SEQ ID NO: 2458
  Description of Artificial Sequence: Synthetic all nuts; inner sequence and 3' sequence

SEQ ID NO: 34632 - DNA, 53 bp, Artificial Sequence; identical to SEQ ID NO: 2012
  Description of Artificial Sequence: Synthetic all nuts; inner sequence and 3' sequence

SEQ ID NO: 34633 - DNA, 53 bp, Artificial Sequence; identical to SEQ ID NO: 2520
  Description of Artificial Sequence: Synthetic all nuts; inner sequence and 3' sequence

SEQ ID NO: 34634 - DNA, 53 bp, Artificial Sequence; identical to SEQ ID NO: 10810
  Description of Artificial Sequence: Synthetic all nuts; inner sequence and 3' sequence

SEQ ID NO: 34635 - DNA, 53 bp, Artificial Sequence; identical to SEQ ID NO: 2448
  Description of Artificial Sequence: Synthetic all nuts; inner sequence and 3' sequence

SEQ ID NO: 34636 - DNA, 53 bp, Artificial Sequence; identical to SEQ ID NO: 2688
  Description of Artificial Sequence: Synthetic all nuts; inner sequence and 3' sequence

SEQ ID NO: 34637 - DNA, 53 bp, Artificial Sequence; identical to SEQ ID NO: 6960
  Description of Artificial Sequence: Synthetic all nuts; inner sequence and 3' sequence

SEQ ID NO: 34638 - DNA, 53 bp, Artificial Sequence; identical to SEQ ID NO: 2095
  Description of Artificial Sequence: Synthetic all nuts; inner sequence and 3' sequence

SEQ ID NO: 34639 - DNA, 53 bp, Artificial Sequence; identical to SEQ ID NO: 2112
  Description of Artificial Sequence: Synthetic all nuts; inner sequence and 3' sequence

SEQ ID NO: 34640 - DNA, 53 bp, Artificial Sequence; identical to SEQ ID NO: 2405
  Description of Artificial Sequence: Synthetic all nuts; inner sequence and 3' sequence

SEQ ID NO: 34641 - DNA, 53 bp, Artificial Sequence; identical to SEQ ID NO: 2268
  Description of Artificial Sequence: Synthetic all nuts; inner sequence and 3' sequence

SEQ ID NO: 34642 - DNA, 53 bp, Artificial Sequence; identical to SEQ ID NO: 22895
  Description of Artificial Sequence: Synthetic all nuts; inner sequence and 3' sequence

SEQ ID NO: 34643 - DNA, 53 bp, Artificial Sequence; identical to SEQ ID NO: 10872
  Description of Artificial Sequence: Synthetic all nuts; inner sequence and 3' sequence

SEQ ID NO: 34644 - DNA, 53 bp, Artificial Sequence; identical to SEQ ID NO: 10949
  Description of Artificial Sequence: Synthetic all nuts; inner sequence and 3' sequence

SEQ ID NO: 34645 - DNA, 53 bp, Artificial Sequence; identical to SEQ ID NO: 2413
  Description of Artificial Sequence: Synthetic all nuts; inner sequence and 3' sequence

SEQ ID NO: 34646 - DNA, 53 bp, Artificial Sequence; identical to SEQ ID NO: 6317
  Description of Artificial Sequence: Synthetic all nuts; inner sequence and 3' sequence

SEQ ID NO: 34647 - DNA, 53 bp, Artificial Sequence; identical to SEQ ID NO: 6870
  Description of Artificial Sequence: Synthetic all nuts; inner sequence and 3' sequence

SEQ ID NO: 34648 - DNA, 53 bp, Artificial Sequence; identical to SEQ ID NO: 2512
  Description of Artificial Sequence: Synthetic all nuts; inner sequence and 3' sequence

SEQ ID NO: 34649 - DNA, 53 bp, Artificial Sequence; identical to SEQ ID NO: 2100
  Description of Artificial Sequence: Synthetic all nuts; inner sequence and 3' sequence

SEQ ID NO: 34650 - DNA, 53 bp, Artificial Sequence; identical to SEQ ID NO: 2392
  Description of Artificial Sequence: Synthetic all nuts; inner sequence and 3' sequence

SEQ ID NO: 34651 - DNA, 53 bp, Artificial Sequence; identical to SEQ ID NO: 22515
  Description of Artificial Sequence: Synthetic all nuts; inner sequence and 3' sequence

SEQ ID NO: 34652 - DNA, 53 bp, Artificial Sequence; identical to SEQ ID NO: 2022
  Description of Artificial Sequence: Synthetic all nuts; inner sequence and 3' sequence

SEQ ID NO: 34653 - DNA, 52 bp, Artificial Sequence; identical to SEQ ID NO: 2251
  Description of Artificial Sequence: Synthetic all nuts; inner sequence and 3' sequence

SEQ ID NO: 34654 - DNA, 53 bp, Artificial Sequence; identical to SEQ ID NO: 22407
  Description of Artificial Sequence: Synthetic all nuts; inner sequence and 3' sequence

SEQ ID NO: 34655 - DNA, 53 bp, Artificial Sequence; identical to SEQ ID NO: 14953
  Description of Artificial Sequence: Synthetic all nuts; inner sequence and 3' sequence

SEQ ID NO: 34656 - DNA, 53 bp, Artificial Sequence; identical to SEQ ID NO: 6977
  Description of Artificial Sequence: Synthetic all nuts; inner sequence and 3' sequence

SEQ ID NO: 34657 - DNA, 53 bp, Artificial Sequence; identical to SEQ ID NO: 6230
  Description of Artificial Sequence: Synthetic all nuts; inner sequence and 3' sequence

SEQ ID NO: 34658 - DNA, 53 bp, Artificial Sequence; identical to SEQ ID NO: 2037
  Description of Artificial Sequence: Synthetic all nuts; inner sequence and 3' sequence

SEQ ID NO: 34659 - DNA, 53 bp, Artificial Sequence
  Description of Artificial Sequence: Synthetic all nuts; inner sequence and 3' sequence
gggatgcacgcacctacacgtgggtatggattgactagtacatgaccacttga

SEQ ID NO: 34660 - DNA, 53 bp, Artificial Sequence
  Description of Artificial Sequence: Synthetic all nuts; inner sequence and 3' sequence
gcacgacgcgcaccctatcatgaggccatgttgactagtacatgaccacttga

SEQ ID NO: 34661 - DNA, 53 bp, Artificial Sequence; identical to SEQ ID NO: 2348
  Description of Artificial Sequence: Synthetic all nuts; inner sequence and 3' sequence

SEQ ID NO: 34662 - DNA, 53 bp, Artificial Sequence; identical to SEQ ID NO: 7001
  Description of Artificial Sequence: Synthetic all nuts; inner sequence and 3' sequence

SEQ ID NO: 34663 - DNA, 53 bp, Artificial Sequence; identical to SEQ ID NO: 22596
  Description of Artificial Sequence: Synthetic all nuts; inner sequence and 3' sequence

SEQ ID NO: 34664 - DNA, 53 bp, Artificial Sequence; identical to SEQ ID NO: 2080
  Description of Artificial Sequence: Synthetic all nuts; inner sequence and 3' sequence

SEQ ID NO: 34665 - DNA, 53 bp, Artificial Sequence
  Description of Artificial Sequence: Synthetic all nuts; inner sequence and 3' sequence
cgcacacccgtcatagcggtcacgtgcatgttgactagtacatgaccacttga

SEQ ID NO: 34666 - DNA, 53 bp, Artificial Sequence
  Description of Artificial Sequence: Synthetic all nuts; inner sequence and 3' sequence
cgcaccgtcgatacgtcatgcacgcggacattgactagtacatgaccacttga

SEQ ID NO: 34667 - DNA, 53 bp, Artificial Sequence; identical to SEQ ID NO: 2118
  Description of Artificial Sequence: Synthetic all nuts; inner sequence and 3' sequence

SEQ ID NO: 34668 - DNA, 53 bp, Artificial Sequence; identical to SEQ ID NO: 2466
  Description of Artificial Sequence: Synthetic all nuts; inner sequence and 3' sequence

SEQ ID NO: 34669 - DNA, 53 bp, Artificial Sequence; identical to SEQ ID NO: 2091
  Description of Artificial Sequence: Synthetic all nuts; inner sequence and 3' sequence

SEQ ID NO: 34670 - DNA, 53 bp, Artificial Sequence; identical to SEQ ID NO: 2272
  Description of Artificial Sequence: Synthetic all nuts; inner sequence and 3' sequence

SEQ ID NO: 34671 - DNA, 53 bp, Artificial Sequence; identical to SEQ ID NO: 2115
  Description of Artificial Sequence: Synthetic all nuts; inner sequence and 3' sequence

SEQ ID NO: 34672 - DNA, 53 bp, Artificial Sequence; identical to SEQ ID NO: 2962
  Description of Artificial Sequence: Synthetic all nuts; inner sequence and 3' sequence

SEQ ID NO: 34673 - DNA, 53 bp, Artificial Sequence; identical to SEQ ID NO: 30979
  Description of Artificial Sequence: Synthetic all nuts; inner sequence and 3' sequence

SEQ ID NO: 34674 - DNA, 53 bp, Artificial Sequence; identical to SEQ ID NO: 2724
  Description of Artificial Sequence: Synthetic all nuts; inner sequence and 3' sequence

SEQ ID NO: 34675 - DNA, 53 bp, Artificial Sequence; identical to SEQ ID NO: 18709
  Description of Artificial Sequence: Synthetic all nuts; inner sequence and 3' sequence

SEQ ID NO: 34676 - DNA, 53 bp, Artificial Sequence; identical to SEQ ID NO: 18627
  Description of Artificial Sequence: Synthetic all nuts; inner sequence and 3' sequence

SEQ ID NO: 34677 - DNA, 53 bp, Artificial Sequence; identical to SEQ ID NO: 2446
  Description of Artificial Sequence: Synthetic all nuts; inner sequence and 3' sequence

SEQ ID NO: 34678 - DNA, 53 bp, Artificial Sequence; identical to SEQ ID NO: 2214
  Description of Artificial Sequence: Synthetic all nuts; inner sequence and 3' sequence

SEQ ID NO: 34679 - DNA, 53 bp, Artificial Sequence; identical to SEQ ID NO: 2920
  Description of Artificial Sequence: Synthetic all nuts; inner sequence and 3' sequence

SEQ ID NO: 34680 - DNA, 53 bp, Artificial Sequence; identical to SEQ ID NO: 22829
  Description of Artificial Sequence: Synthetic all nuts; inner sequence and 3' sequence

SEQ ID NO: 34681 - DNA, 53 bp, Artificial Sequence; identical to SEQ ID NO: 10938
  Description of Artificial Sequence: Synthetic all nuts; inner sequence and 3' sequence

SEQ ID NO: 34682 - DNA, 53 bp, Artificial Sequence; identical to SEQ ID NO: 30806
  Description of Artificial Sequence: Synthetic all nuts; inner sequence and 3' sequence

SEQ ID NO: 34683 - DNA, 54 bp, Artificial Sequence; identical to SEQ ID NO: 30686
  Description of Artificial Sequence: Synthetic all nuts; inner sequence and 3' sequence

SEQ ID NO: 34684 - DNA, 53 bp, Artificial Sequence; identical to SEQ ID NO: 2018
  Description of Artificial Sequence: Synthetic all nuts; inner sequence and 3' sequence

SEQ ID NO: 34685 - DNA, 53 bp, Artificial Sequence; identical to SEQ ID NO: 6823
  Description of Artificial Sequence: Synthetic all nuts; inner sequence and 3' sequence

SEQ ID NO: 34686 - DNA, 53 bp, Artificial Sequence; identical to SEQ ID NO: 2196
  Description of Artificial Sequence: Synthetic all nuts; inner sequence and 3' sequence

SEQ ID NO: 34687 - DNA, 53 bp, Artificial Sequence; identical to SEQ ID NO: 2278
  Description of Artificial Sequence: Synthetic all nuts; inner sequence and 3' sequence

SEQ ID NO: 34688 - DNA, 53 bp, Artificial Sequence; identical to SEQ ID NO: 18832
  Description of Artificial Sequence: Synthetic all nuts; inner sequence and 3' sequence

SEQ ID NO: 34689 - DNA, 53 bp, Artificial Sequence
  Description of Artificial Sequence: Synthetic all nuts; inner sequence and 3' sequence
cgacgcgacatgaaggcatgggtaggcacgttgactagtacatgaccacttga

SEQ ID NO: 34690 - DNA, 53 bp, Artificial Sequence; identical to SEQ ID NO: 2032
  Description of Artificial Sequence: Synthetic all nuts; inner sequence and 3' sequence

SEQ ID NO: 34691 - DNA, 53 bp, Artificial Sequence; identical to SEQ ID NO: 2917
  Description of Artificial Sequence: Synthetic all nuts; inner sequence and 3' sequence

SEQ ID NO: 34692 - DNA, 53 bp, Artificial Sequence; identical to SEQ ID NO: 2603
  Description of Artificial Sequence: Synthetic all nuts; inner sequence and 3' sequence

SEQ ID NO: 34693 - DNA, 53 bp, Artificial Sequence; identical to SEQ ID NO: 14997
  Description of Artificial Sequence: Synthetic all nuts; inner sequence and 3' sequence

SEQ ID NO: 34694 - DNA, 53 bp, Artificial Sequence; identical to SEQ ID NO: 2850
  Description of Artificial Sequence: Synthetic all nuts; inner sequence and 3' sequence

SEQ ID NO: 34695 - DNA, 53 bp, Artificial Sequence; identical to SEQ ID NO: 14996
  Description of Artificial Sequence: Synthetic all nuts; inner sequence and 3' sequence

SEQ ID NO: 34696 - DNA, 53 bp, Artificial Sequence; identical to SEQ ID NO: 2232
  Description of Artificial Sequence: Synthetic all nuts; inner sequence and 3' sequence

SEQ ID NO: 34697 - DNA, 53 bp, Artificial Sequence; identical to SEQ ID NO: 2540
  Description of Artificial Sequence: Synthetic all nuts; inner sequence and 3' sequence

SEQ ID NO: 34698 - DNA, 53 bp, Artificial Sequence; identical to SEQ ID NO: 2396
  Description of Artificial Sequence: Synthetic all nuts; inner sequence and 3' sequence

SEQ ID NO: 34699 - DNA, 53 bp, Artificial Sequence; identical to SEQ ID NO: 14986
  Description of Artificial Sequence: Synthetic all nuts; inner sequence and 3' sequence

SEQ ID NO: 34700 - DNA, 53 bp, Artificial Sequence; identical to SEQ ID NO: 2757
  Description of Artificial Sequence: Synthetic all nuts; inner sequence and 3' sequence

SEQ ID NO: 34701 - DNA, 53 bp, Artificial Sequence; identical to SEQ ID NO: 2084
  Description of Artificial Sequence: Synthetic all nuts; inner sequence and 3' sequence

SEQ ID NO: 34702 - DNA, 53 bp, Artificial Sequence; identical to SEQ ID NO: 22533
  Description of Artificial Sequence: Synthetic all nuts; inner sequence and 3' sequence

SEQ ID NO: 34703 - DNA, 53 bp, Artificial Sequence; identical to SEQ ID NO: 2900
  Description of Artificial Sequence: Synthetic all nuts; inner sequence and 3' sequence

SEQ ID NO: 34704 - DNA, 53 bp, Artificial Sequence; identical to SEQ ID NO: 2654
  Description of Artificial Sequence: Synthetic all nuts; inner sequence and 3' sequence

SEQ ID NO: 34705 - DNA, 53 bp, Artificial Sequence; identical to SEQ ID NO: 6377
  Description of Artificial Sequence: Synthetic all nuts; inner sequence and 3' sequence

SEQ ID NO: 34706 - DNA, 53 bp, Artificial Sequence; identical to SEQ ID NO: 2846
  Description of Artificial Sequence: Synthetic all nuts; inner sequence and 3' sequence

SEQ ID NO: 34707 - DNA, 53 bp, Artificial Sequence; identical to SEQ ID NO: 2420
  Description of Artificial Sequence: Synthetic all nuts; inner sequence and 3' sequence

SEQ ID NO: 34708 - DNA, 53 bp, Artificial Sequence; identical to SEQ ID NO: 2527
  Description of Artificial Sequence: Synthetic all nuts; inner sequence and 3' sequence

SEQ ID NO: 34709 - DNA, 53 bp, Artificial Sequence; identical to SEQ ID NO: 2753
  Description of Artificial Sequence: Synthetic all nuts; inner sequence and 3' sequence

SEQ ID NO: 34710 - DNA, 53 bp, Artificial Sequence; identical to SEQ ID NO: 2086
  Description of Artificial Sequence: Synthetic all nuts; inner sequence and 3' sequence

SEQ ID NO: 34711 - DNA, 53 bp, Artificial Sequence; identical to SEQ ID NO: 2481
  Description of Artificial Sequence: Synthetic all nuts; inner sequence and 3' sequence

SEQ ID NO: 34712 - DNA, 53 bp, Artificial Sequence; identical to SEQ ID NO: 2122
  Description of Artificial Sequence: Synthetic all nuts; inner sequence and 3' sequence

SEQ ID NO: 34713 - DNA, 53 bp, Artificial Sequence; identical to SEQ ID NO: 10978
  Description of Artificial Sequence: Synthetic all nuts; inner sequence and 3' sequence

SEQ ID NO: 34714 - DNA, 53 bp, Artificial Sequence; identical to SEQ ID NO: 6985
  Description of Artificial Sequence: Synthetic all nuts; inner sequence and 3' sequence

SEQ ID NO: 34715 - DNA, 53 bp, Artificial Sequence; identical to SEQ ID NO: 2142
  Description of Artificial Sequence: Synthetic all nuts; inner sequence and 3' sequence

SEQ ID NO: 34716 - DNA, 53 bp, Artificial Sequence; identical to SEQ ID NO: 26852
  Description of Artificial Sequence: Synthetic all nuts; inner sequence and 3' sequence

SEQ ID NO: 34717 - DNA, 53 bp, Artificial Sequence; identical to SEQ ID NO: 6405
  Description of Artificial Sequence: Synthetic all nuts; inner sequence and 3' sequence

SEQ ID NO: 34718 - DNA, 53 bp, Artificial Sequence; identical to SEQ ID NO: 2370
  Description of Artificial Sequence: Synthetic all nuts; inner sequence and 3' sequence

SEQ ID NO: 34719 - DNA, 53 bp, Artificial Sequence
  Description of Artificial Sequence: Synthetic all nuts; inner sequence and 3' sequence
ggacatcgcgtcactaagtgcgtcttgtgcttgactagtacatgaccacttga

SEQ ID NO: 34720 - DNA, 53 bp, Artificial Sequence; identical to SEQ ID NO: 2640
  Description of Artificial Sequence: Synthetic all nuts; inner sequence and 3' sequence

SEQ ID NO: 34721 - DNA, 53 bp, Artificial Sequence; identical to SEQ ID NO: 2853
  Description of Artificial Sequence: Synthetic all nuts; inner sequence and 3' sequence

SEQ ID NO: 34722 - DNA, 53 bp, Artificial Sequence; identical to SEQ ID NO: 6254
  Description of Artificial Sequence: Synthetic all nuts; inner sequence and 3' sequence

SEQ ID NO: 34723 - DNA, 53 bp, Artificial Sequence; identical to SEQ ID NO: 6948
  Description of Artificial Sequence: Synthetic all nuts; inner sequence and 3' sequence

SEQ ID NO: 34724 - DNA, 53 bp, Artificial Sequence; identical to SEQ ID NO: 6336
  Description of Artificial Sequence: Synthetic all nuts; inner sequence and 3' sequence

SEQ ID NO: 34725 - DNA, 53 bp, Artificial Sequence; identical to SEQ ID NO: 2197
  Description of Artificial Sequence: Synthetic all nuts; inner sequence and 3' sequence

SEQ ID NO: 34726 - DNA, 53 bp, Artificial Sequence; identical to SEQ ID NO: 2028
  Description of Artificial Sequence: Synthetic all nuts; inner sequence and 3' sequence

SEQ ID NO: 34727 - DNA, 53 bp, Artificial Sequence
  Description of Artificial Sequence: Synthetic all nuts; inner sequence and 3' sequence
ccgtagcgacaccaagcggtggtgtgcgtgttgactagtacatgaccacttga

SEQ ID NO: 34728 - DNA, 53 bp, Artificial Sequence; identical to SEQ ID NO: 2633
  Description of Artificial Sequence: Synthetic all nuts; inner sequence and 3' sequence

SEQ ID NO: 34729 - DNA, 53 bp, Artificial Sequence; identical to SEQ ID NO: 6913
  Description of Artificial Sequence: Synthetic all nuts; inner sequence and 3' sequence

SEQ ID NO: 34730 - DNA, 53 bp, Artificial Sequence; identical to SEQ ID NO: 2172
  Description of Artificial Sequence: Synthetic all nuts; inner sequence and 3' sequence

SEQ ID NO: 34731 - DNA, 53 bp, Artificial Sequence; identical to SEQ ID NO: 6627
  Description of Artificial Sequence: Synthetic all nuts; inner sequence and 3' sequence

SEQ ID NO: 34732 - DNA, 53 bp, Artificial Sequence; identical to SEQ ID NO: 6469
  Description of Artificial Sequence: Synthetic all nuts; inner sequence and 3' sequence

SEQ ID NO: 34733 - DNA, 53 bp, Artificial Sequence; identical to SEQ ID NO: 2336
  Description of Artificial Sequence: Synthetic all nuts; inner sequence and 3' sequence

SEQ ID NO: 34734 - DNA, 53 bp, Artificial Sequence; identical to SEQ ID NO: 2449
  Description of Artificial Sequence: Synthetic all nuts; inner sequence and 3' sequence

SEQ ID NO: 34735 - DNA, 53 bp, Artificial Sequence; identical to SEQ ID NO: 2164
  Description of Artificial Sequence: Synthetic all nuts; inner sequence and 3' sequence

SEQ ID NO: 34736 - DNA, 53 bp, Artificial Sequence; identical to SEQ ID NO: 2776
  Description of Artificial Sequence: Synthetic all nuts; inner sequence and 3' sequence

SEQ ID NO: 34737 - DNA, 53 bp, Artificial Sequence; identical to SEQ ID NO: 14895
  Description of Artificial Sequence: Synthetic all nuts; inner sequence and 3' sequence

SEQ ID NO: 34738 - DNA, 53 bp, Artificial Sequence; identical to SEQ ID NO: 6498
  Description of Artificial Sequence: Synthetic all nuts; inner sequence and 3' sequence

SEQ ID NO: 34739 - DNA, 53 bp, Artificial Sequence; identical to SEQ ID NO: 2762
  Description of Artificial Sequence: Synthetic all nuts; inner sequence and 3' sequence

SEQ ID NO: 34740 - DNA, 53 bp, Artificial Sequence; identical to SEQ ID NO: 18931
  Description of Artificial Sequence: Synthetic all nuts; inner sequence and 3' sequence

SEQ ID NO: 34741 - DNA, 53 bp, Artificial Sequence; identical to SEQ ID NO: 22327
  Description of Artificial Sequence: Synthetic all nuts; inner sequence and 3' sequence

SEQ ID NO: 34742 - DNA, 53 bp, Artificial Sequence; identical to SEQ ID NO: 2149
  Description of Artificial Sequence: Synthetic all nuts; inner sequence and 3' sequence

SEQ ID NO: 34743 - DNA, 53 bp, Artificial Sequence
  Description of Artificial Sequence: Synthetic all nuts; inner sequence and 3' sequence
gtacgcatcgtaccgtcatgtggttccgtattgactagtacatgaccacttga

SEQ ID NO: 34744 - DNA, 53 bp, Artificial Sequence; identical to SEQ ID NO: 2310
  Description of Artificial Sequence: Synthetic all nuts; inner sequence and 3' sequence

SEQ ID NO: 34745 - DNA, 53 bp, Artificial Sequence; identical to SEQ ID NO: 10962
  Description of Artificial Sequence: Synthetic all nuts; inner sequence and 3' sequence

SEQ ID NO: 34746 - DNA, 53 bp, Artificial Sequence; identical to SEQ ID NO: 2341
  Description of Artificial Sequence: Synthetic all nuts; inner sequence and 3' sequence

SEQ ID NO: 34747 - DNA, 53 bp, Artificial Sequence; identical to SEQ ID NO: 22700
  Description of Artificial Sequence: Synthetic all nuts; inner sequence and 3' sequence

SEQ ID NO: 34748 - DNA, 53 bp, Artificial Sequence; identical to SEQ ID NO: 2244
  Description of Artificial Sequence: Synthetic all nuts; inner sequence and 3' sequence

SEQ ID NO: 34749 - DNA, 53 bp, Artificial Sequence; identical to SEQ ID NO: 2457
  Description of Artificial Sequence: Synthetic all nuts; inner sequence and 3' sequence

SEQ ID NO: 34750 - DNA, 53 bp, Artificial Sequence; identical to SEQ ID NO: 2076
  Description of Artificial Sequence: Synthetic all nuts; inner sequence and 3' sequence

SEQ ID NO: 34751 - DNA, 53 bp, Artificial Sequence; identical to SEQ ID NO: 2529
  Description of Artificial Sequence: Synthetic all nuts; inner sequence and 3' sequence

SEQ ID NO: 34752 - DNA, 53 bp, Artificial Sequence; identical to SEQ ID NO: 22119
  Description of Artificial Sequence: Synthetic all nuts; inner sequence and 3' sequence

SEQ ID NO: 34753 - DNA, 53 bp, Artificial Sequence; identical to SEQ ID NO: 2500
  Description of Artificial Sequence: Synthetic all nuts; inner sequence and 3' sequence

SEQ ID NO: 34754 - DNA, 53 bp, Artificial Sequence; identical to SEQ ID NO: 2027
  Description of Artificial Sequence: Synthetic all nuts; inner sequence and 3' sequence

SEQ ID NO: 34755 - DNA, 53 bp, Artificial Sequence; identical to SEQ ID NO: 2921
  Description of Artificial Sequence: Synthetic all nuts; inner sequence and 3' sequence

SEQ ID NO: 34756 - DNA, 53 bp, Artificial Sequence; identical to SEQ ID NO: 22777
  Description of Artificial Sequence: Synthetic all nuts; inner sequence and 3' sequence

SEQ ID NO: 34757 - DNA, 53 bp, Artificial Sequence; identical to SEQ ID NO: 2553
  Description of Artificial Sequence: Synthetic all nuts; inner sequence and 3' sequence

SEQ ID NO: 34758 - DNA, 53 bp, Artificial Sequence; identical to SEQ ID NO: 22165
  Description of Artificial Sequence: Synthetic all nuts; inner sequence and 3' sequence

SEQ ID NO: 34759 - DNA, 53 bp, Artificial Sequence; identical to SEQ ID NO: 6707
  Description of Artificial Sequence: Synthetic all nuts; inner sequence and 3' sequence

SEQ ID NO: 34760 - DNA, 53 bp, Artificial Sequence; identical to SEQ ID NO: 2064
  Description of Artificial Sequence: Synthetic all nuts; inner sequence and 3' sequence

SEQ ID NO: 34761 - DNA, 53 bp, Artificial Sequence; identical to SEQ ID NO: 2720
  Description of Artificial Sequence: Synthetic all nuts; inner sequence and 3' sequence

SEQ ID NO: 34762 - DNA, 53 bp, Artificial Sequence; identical to SEQ ID NO: 6890
  Description of Artificial Sequence: Synthetic all nuts; inner sequence and 3' sequence

SEQ ID NO: 34763 - DNA, 53 bp, Artificial Sequence; identical to SEQ ID NO: 2301
  Description of Artificial Sequence: Synthetic all nuts; inner sequence and 3' sequence

SEQ ID NO: 34764 - DNA, 53 bp, Artificial Sequence; identical to SEQ ID NO: 22947
  Description of Artificial Sequence: Synthetic all nuts; inner sequence and 3' sequence

SEQ ID NO: 34765 - DNA, 53 bp, Artificial Sequence; identical to SEQ ID NO: 10618
  Description of Artificial Sequence: Synthetic all nuts; inner sequence and 3' sequence

SEQ ID NO: 34766 - DNA, 53 bp, Artificial Sequence; identical to SEQ ID NO: 2111
  Description of Artificial Sequence: Synthetic all nuts; inner sequence and 3' sequence

SEQ ID NO: 34767 - DNA, 53 bp, Artificial Sequence; identical to SEQ ID NO: 2738
  Description of Artificial Sequence: Synthetic all nuts; inner sequence and 3' sequence

SEQ ID NO: 34768 - DNA, 53 bp, Artificial Sequence; identical to SEQ ID NO: 2408
  Description of Artificial Sequence: Synthetic all nuts; inner sequence and 3' sequence

SEQ ID NO: 34769 - DNA, 53 bp, Artificial Sequence; identical to SEQ ID NO: 2705
  Description of Artificial Sequence: Synthetic all nuts; inner sequence and 3' sequence

SEQ ID NO: 34770 - DNA, 53 bp, Artificial Sequence; identical to SEQ ID NO: 6621
  Description of Artificial Sequence: Synthetic all nuts; inner sequence and 3' sequence

SEQ ID NO: 34771 - DNA, 53 bp, Artificial Sequence; identical to SEQ ID NO: 2621
  Description of Artificial Sequence: Synthetic all nuts; inner sequence and 3' sequence

SEQ ID NO: 34772 - DNA, 53 bp, Artificial Sequence; identical to SEQ ID NO: 2017
  Description of Artificial Sequence: Synthetic all nuts; inner sequence and 3' sequence

SEQ ID NO: 34773 - DNA, 53 bp, Artificial Sequence; identical to SEQ ID NO: 2289
  Description of Artificial Sequence: Synthetic all nuts; inner sequence and 3' sequence

SEQ ID NO: 34774 - DNA, 53 bp, Artificial Sequence; identical to SEQ ID NO: 22711
  Description of Artificial Sequence: Synthetic all nuts; inner sequence and 3' sequence

SEQ ID NO: 34775 - DNA, 53 bp, Artificial Sequence; identical to SEQ ID NO: 10994
  Description of Artificial Sequence: Synthetic all nuts; inner sequence and 3' sequence

SEQ ID NO: 34776 - DNA, 53 bp, Artificial Sequence; identical to SEQ ID NO: 2805
  Description of Artificial Sequence: Synthetic all nuts; inner sequence and 3' sequence

SEQ ID NO: 34777 - DNA, 53 bp, Artificial Sequence; identical to SEQ ID NO: 2622
  Description of Artificial Sequence: Synthetic all nuts; inner sequence and 3' sequence

SEQ ID NO: 34778 - DNA, 53 bp, Artificial Sequence; identical to SEQ ID NO: 18862
  Description of Artificial Sequence: Synthetic all nuts; inner sequence and 3' sequence

SEQ ID NO: 34779 - DNA, 53 bp, Artificial Sequence; identical to SEQ ID NO: 2531
  Description of Artificial Sequence: Synthetic all nuts; inner sequence and 3' sequence

SEQ ID NO: 34780 - DNA, 53 bp, Artificial Sequence; identical to SEQ ID NO: 18544
  Description of Artificial Sequence: Synthetic all nuts; inner sequence and 3' sequence

SEQ ID NO: 34781 - DNA, 53 bp, Artificial Sequence; identical to SEQ ID NO: 2662
  Description of Artificial Sequence: Synthetic all nuts; inner sequence and 3' sequence

SEQ ID NO: 34782 - DNA, 53 bp, Artificial Sequence; identical to SEQ ID NO: 22783
  Description of Artificial Sequence: Synthetic all nuts; inner sequence and 3' sequence

SEQ ID NO: 34783 - DNA, 53 bp, Artificial Sequence
  Description of Artificial Sequence: Synthetic all nuts; inner sequence and 3' sequence
gtgcgacacgtaacctagcaagggagcatgttgactagtacatgaccacttga

SEQ ID NO: 34784 - DNA, 53 bp, Artificial Sequence; identical to SEQ ID NO: 2545
  Description of Artificial Sequence: Synthetic all nuts; inner sequence and 3' sequence

SEQ ID NO: 34785 - DNA, 53 bp, Artificial Sequence; identical to SEQ ID NO: 2884
  Description of Artificial Sequence: Synthetic all nuts; inner sequence and 3' sequence

SEQ ID NO: 34786 - DNA, 53 bp, Artificial Sequence; identical to SEQ ID NO: 22576
  Description of Artificial Sequence: Synthetic all nuts; inner sequence and 3' sequence

SEQ ID NO: 34787 - DNA, 53 bp, Artificial Sequence; identical to SEQ ID NO: 2025
  Description of Artificial Sequence: Synthetic all nuts; inner sequence and 3' sequence

SEQ ID NO: 34788 - DNA, 53 bp, Artificial Sequence; identical to SEQ ID NO: 6517
  Description of Artificial Sequence: Synthetic all nuts; inner sequence and 3' sequence

SEQ ID NO: 34789 - DNA, 53 bp, Artificial Sequence; identical to SEQ ID NO: 18352
  Description of Artificial Sequence: Synthetic all nuts; inner sequence and 3' sequence

SEQ ID NO: 34790 - DNA, 53 bp, Artificial Sequence; identical to SEQ ID NO: 2030
  Description of Artificial Sequence: Synthetic all nuts; inner sequence and 3' sequence

SEQ ID NO: 34791 - DNA, 53 bp, Artificial Sequence
  Description of Artificial Sequence: Synthetic all nuts; inner sequence and 3' sequence
cgacgcacggaagacacgatacgtggtgcgttgactagtacatgaccacttga

SEQ ID NO: 34792 - DNA, 52 bp, Artificial Sequence; identical to SEQ ID NO: 2259
  Description of Artificial Sequence: Synthetic all nuts; inner sequence and 3' sequence

SEQ ID NO: 34793 - DNA, 52 bp, Artificial Sequence; identical to SEQ ID NO: 2975
  Description of Artificial Sequence: Synthetic all nuts; inner sequence and 3' sequence

SEQ ID NO: 34794 - DNA, 53 bp, Artificial Sequence; identical to SEQ ID NO: 10909
  Description of Artificial Sequence: Synthetic all nuts; inner sequence and 3' sequence

SEQ ID NO: 34795 - DNA, 53 bp, Artificial Sequence; identical to SEQ ID NO: 2700
  Description of Artificial Sequence: Synthetic all nuts; inner sequence and 3' sequence

SEQ ID NO: 34796 - DNA, 53 bp, Artificial Sequence; identical to SEQ ID NO: 2384
  Description of Artificial Sequence: Synthetic all nuts; inner sequence and 3' sequence

SEQ ID NO: 34797 - DNA, 53 bp, Artificial Sequence; identical to SEQ ID NO: 2534
  Description of Artificial Sequence: Synthetic all nuts; inner sequence and 3' sequence

SEQ ID NO: 34798 - DNA, 53 bp, Artificial Sequence; identical to SEQ ID NO: 22462
  Description of Artificial Sequence: Synthetic all nuts; inner sequence and 3' sequence

SEQ ID NO: 34799 - DNA, 53 bp, Artificial Sequence; identical to SEQ ID NO: 2598
  Description of Artificial Sequence: Synthetic all nuts; inner sequence and 3' sequence

SEQ ID NO: 34800 - DNA, 53 bp, Artificial Sequence; identical to SEQ ID NO: 2979
  Description of Artificial Sequence: Synthetic all nuts; inner sequence and 3' sequence

SEQ ID NO: 34801 - DNA, 53 bp, Artificial Sequence; identical to SEQ ID NO: 2951
  Description of Artificial Sequence: Synthetic all nuts; inner sequence and 3' sequence

SEQ ID NO: 34802 - DNA, 53 bp, Artificial Sequence
  Description of Artificial Sequence: Synthetic all nuts; inner sequence and 3' sequence
gtgatgcacgaacactatcatggcggcatgttgactagtacatgaccacttga

SEQ ID NO: 34803 - DNA, 53 bp, Artificial Sequence; identical to SEQ ID NO: 2649
  Description of Artificial Sequence: Synthetic all nuts; inner sequence and 3' sequence

SEQ ID NO: 34804 - DNA, 53 bp, Artificial Sequence; identical to SEQ ID NO: 2207
  Description of Artificial Sequence: Synthetic all nuts; inner sequence and 3' sequence

SEQ ID NO: 34805 - DNA, 53 bp, Artificial Sequence; identical to SEQ ID NO: 2007
  Description of Artificial Sequence: Synthetic all nuts; inner sequence and 3' sequence

SEQ ID NO: 34806 - DNA, 53 bp, Artificial Sequence; identical to SEQ ID NO: 2189
  Description of Artificial Sequence: Synthetic all nuts; inner sequence and 3' sequence

SEQ ID NO: 34807 - DNA, 53 bp, Artificial Sequence; identical to SEQ ID NO: 2238
  Description of Artificial Sequence: Synthetic all nuts; inner sequence and 3' sequence

SEQ ID NO: 34808 - DNA, 53 bp, Artificial Sequence; identical to SEQ ID NO: 2288
  Description of Artificial Sequence: Synthetic all nuts; inner sequence and 3' sequence

SEQ ID NO: 34809 - DNA, 53 bp, Artificial Sequence; identical to SEQ ID NO: 22367
  Description of Artificial Sequence: Synthetic all nuts; inner sequence and 3' sequence

SEQ ID NO: 34810 - DNA, 53 bp, Artificial Sequence
  Description of Artificial Sequence: Synthetic all nuts; inner sequence and 3' sequence
ccgtagcgccatcaagcggtggcgtgcgtgttgactagtacatgaccacttga

SEQ ID NO: 34811 - DNA, 53 bp, Artificial Sequence; identical to SEQ ID NO: 2227
  Description of Artificial Sequence: Synthetic all nuts; inner sequence and 3' sequence

SEQ ID NO: 34812 - DNA, 53 bp, Artificial Sequence; identical to SEQ ID NO: 2684
  Description of Artificial Sequence: Synthetic all nuts; inner sequence and 3' sequence

SEQ ID NO: 34813 - DNA, 53 bp, Artificial Sequence; identical to SEQ ID NO: 2253
  Description of Artificial Sequence: Synthetic all nuts; inner sequence and 3' sequence

SEQ ID NO: 34814 - DNA, 53 bp, Artificial Sequence; identical to SEQ ID NO: 6565
  Description of Artificial Sequence: Synthetic all nuts; inner sequence and 3' sequence

SEQ ID NO: 34815 - DNA, 53 bp, Artificial Sequence; identical to SEQ ID NO: 2124
  Description of Artificial Sequence: Synthetic all nuts; inner sequence and 3' sequence

SEQ ID NO: 34816 - DNA, 53 bp, Artificial Sequence; identical to SEQ ID NO: 2249
  Description of Artificial Sequence: Synthetic all nuts; inner sequence and 3' sequence

SEQ ID NO: 34817 - DNA, 53 bp, Artificial Sequence; identical to SEQ ID NO: 6364
  Description of Artificial Sequence: Synthetic all nuts; inner sequence and 3' sequence

SEQ ID NO: 34818 - DNA, 53 bp, Artificial Sequence; identical to SEQ ID NO: 2991
  Description of Artificial Sequence: Synthetic all nuts; inner sequence and 3' sequence

SEQ ID NO: 34819 - DNA, 53 bp, Artificial Sequence; identical to SEQ ID NO: 2200
  Description of Artificial Sequence: Synthetic all nuts; inner sequence and 3' sequence

SEQ ID NO: 34820 - DNA, 53 bp, Artificial Sequence; identical to SEQ ID NO: 2139
  Description of Artificial Sequence: Synthetic all nuts; inner sequence and 3' sequence

SEQ ID NO: 34821 - DNA, 53 bp, Artificial Sequence; identical to SEQ ID NO: 2914
  Description of Artificial Sequence: Synthetic all nuts; inner sequence and 3' sequence

SEQ ID NO: 34822 - DNA, 53 bp, Artificial Sequence; identical to SEQ ID NO: 6489
  Description of Artificial Sequence: Synthetic all nuts; inner sequence and 3' sequence

SEQ ID NO: 34823 - DNA, 53 bp, Artificial Sequence; identical to SEQ ID NO: 22343
  Description of Artificial Sequence: Synthetic all nuts; inner sequence and 3' sequence

SEQ ID NO: 34824 - DNA, 53 bp, Artificial Sequence; identical to SEQ ID NO: 2393
  Description of Artificial Sequence: Synthetic all nuts; inner sequence and 3' sequence

SEQ ID NO: 34825 - DNA, 53 bp, Artificial Sequence; identical to SEQ ID NO: 2089
  Description of Artificial Sequence: Synthetic all nuts; inner sequence and 3' sequence

SEQ ID NO: 34826 - DNA, 53 bp, Artificial Sequence; identical to SEQ ID NO: 2181
  Description of Artificial Sequence: Synthetic all nuts; inner sequence and 3' sequence

SEQ ID NO: 34827 - DNA, 53 bp, Artificial Sequence; identical to SEQ ID NO: 2266
  Description of Artificial Sequence: Synthetic all nuts; inner sequence and 3' sequence

SEQ ID NO: 34828 - DNA, 53 bp, Artificial Sequence; identical to SEQ ID NO: 2634
  Description of Artificial Sequence: Synthetic all nuts; inner sequence and 3' sequence

SEQ ID NO: 34829 - DNA, 53 bp, Artificial Sequence; identical to SEQ ID NO: 2096
  Description of Artificial Sequence: Synthetic all nuts; inner sequence and 3' sequence

SEQ ID NO: 34830 - DNA, 53 bp, Artificial Sequence; identical to SEQ ID NO: 6521
  Description of Artificial Sequence: Synthetic all nuts; inner sequence and 3' sequence

SEQ ID NO: 34831 - DNA, 53 bp, Artificial Sequence; identical to SEQ ID NO: 2023
  Description of Artificial Sequence: Synthetic all nuts; inner sequence and 3' sequence

SEQ ID NO: 34832 - DNA, 53 bp, Artificial Sequence; identical to SEQ ID NO: 30914
  Description of Artificial Sequence: Synthetic all nuts; inner sequence and 3' sequence

SEQ ID NO: 34833 - DNA, 53 bp, Artificial Sequence; identical to SEQ ID NO: 2016
  Description of Artificial Sequence: Synthetic all nuts; inner sequence and 3' sequence

SEQ ID NO: 34834 - DNA, 53 bp, Artificial Sequence; identical to SEQ ID NO: 18733
  Description of Artificial Sequence: Synthetic all nuts; inner sequence and 3' sequence

SEQ ID NO: 34835 - DNA, 53 bp, Artificial Sequence; identical to SEQ ID NO: 2283
  Description of Artificial Sequence: Synthetic all nuts; inner sequence and 3' sequence

SEQ ID NO: 34836 - DNA, 53 bp, Artificial Sequence; identical to SEQ ID NO: 2077
  Description of Artificial Sequence: Synthetic all nuts; inner sequence and 3' sequence

SEQ ID NO: 34837 - DNA, 53 bp, Artificial Sequence; identical to SEQ ID NO: 2560
  Description of Artificial Sequence: Synthetic all nuts; inner sequence and 3' sequence

SEQ ID NO: 34838 - DNA, 53 bp, Artificial Sequence; identical to SEQ ID NO: 2511
  Description of Artificial Sequence: Synthetic all nuts; inner sequence and 3' sequence

SEQ ID NO: 34839 - DNA, 53 bp, Artificial Sequence; identical to SEQ ID NO: 2201
  Description of Artificial Sequence: Synthetic all nuts; inner sequence and 3' sequence

SEQ ID NO: 34840 - DNA, 53 bp, Artificial Sequence
  Description of Artificial Sequence: Synthetic all nuts; inner sequence and 3' sequence
ggactgcacgcaccctatcatgtaggcatgttgactagtacatgaccacttga

SEQ ID NO: 34841 - DNA, 53 bp, Artificial Sequence; identical to SEQ ID NO: 2657
  Description of Artificial Sequence: Synthetic all nuts; inner sequence and 3' sequence

SEQ ID NO: 34842 - DNA, 53 bp, Artificial Sequence; identical to SEQ ID NO: 2243
  Description of Artificial Sequence: Synthetic all nuts; inner sequence and 3' sequence

SEQ ID NO: 34843 - DNA, 56 bp, Artificial Sequence; identical to SEQ ID NO: 2864
  Description of Artificial Sequence: Synthetic all nuts; inner sequence and 3' sequence

SEQ ID NO: 34844 - DNA, 53 bp, Artificial Sequence; identical to SEQ ID NO: 10876
  Description of Artificial Sequence: Synthetic all nuts; inner sequence and 3' sequence

SEQ ID NO: 34845 - DNA, 53 bp, Artificial Sequence; identical to SEQ ID NO: 2778
  Description of Artificial Sequence: Synthetic all nuts; inner sequence and 3' sequence

SEQ ID NO: 34846 - DNA, 53 bp, Artificial Sequence; identical to SEQ ID NO: 2145
  Description of Artificial Sequence: Synthetic all nuts; inner sequence and 3' sequence

SEQ ID NO: 34847 - DNA, 53 bp, Artificial Sequence; identical to SEQ ID NO: 2192
  Description of Artificial Sequence: Synthetic all nuts; inner sequence and 3' sequence

SEQ ID NO: 34848 - DNA, 53 bp, Artificial Sequence
  Description of Artificial Sequence: Synthetic all nuts; inner sequence and 3' sequence
ccgcagcgacatcaagcggcggtgtgcgtgttgactagtacatgaccacttga

SEQ ID NO: 34849 - DNA, 53 bp, Artificial Sequence; identical to SEQ ID NO: 6801
  Description of Artificial Sequence: Synthetic all nuts; inner sequence and 3' sequence

SEQ ID NO: 34850 - DNA, 53 bp, Artificial Sequence; identical to SEQ ID NO: 2923
  Description of Artificial Sequence: Synthetic all nuts; inner sequence and 3' sequence

SEQ ID NO: 34851 - DNA, 53 bp, Artificial Sequence; identical to SEQ ID NO: 2051
  Description of Artificial Sequence: Synthetic all nuts; inner sequence and 3' sequence

SEQ ID NO: 34852 - DNA, 53 bp, Artificial Sequence; identical to SEQ ID NO: 10946
  Description of Artificial Sequence: Synthetic all nuts; inner sequence and 3' sequence

SEQ ID NO: 34853 - DNA, 53 bp, Artificial Sequence; identical to SEQ ID NO: 2539
  Description of Artificial Sequence: Synthetic all nuts; inner sequence and 3' sequence

SEQ ID NO: 34854 - DNA, 53 bp, Artificial Sequence; identical to SEQ ID NO: 6979
  Description of Artificial Sequence: Synthetic all nuts; inner sequence and 3' sequence

SEQ ID NO: 34855 - DNA, 53 bp, Artificial Sequence; identical to SEQ ID NO: 6748
  Description of Artificial Sequence: Synthetic all nuts; inner sequence and 3' sequence

SEQ ID NO: 34856 - DNA, 53 bp, Artificial Sequence; identical to SEQ ID NO: 2928
  Description of Artificial Sequence: Synthetic all nuts; inner sequence and 3' sequence

SEQ ID NO: 34857 - DNA, 53 bp, Artificial Sequence; identical to SEQ ID NO: 2960
  Description of Artificial Sequence: Synthetic all nuts; inner sequence and 3' sequence

SEQ ID NO: 34858 - DNA, 53 bp, Artificial Sequence; identical to SEQ ID NO: 2074
  Description of Artificial Sequence: Synthetic all nuts; inner sequence and 3' sequence

SEQ ID NO: 34859 - DNA, 53 bp, Artificial Sequence; identical to SEQ ID NO: 2387
  Description of Artificial Sequence: Synthetic all nuts; inner sequence and 3' sequence

SEQ ID NO: 34860 - DNA, 53 bp, Artificial Sequence; identical to SEQ ID NO: 6861
  Description of Artificial Sequence: Synthetic all nuts; inner sequence and 3' sequence

SEQ ID NO: 34861 - DNA, 53 bp, Artificial Sequence; identical to SEQ ID NO: 2280
  Description of Artificial Sequence: Synthetic all nuts; inner sequence and 3' sequence

SEQ ID NO: 34862 - DNA, 53 bp, Artificial Sequence; identical to SEQ ID NO: 18866
  Description of Artificial Sequence: Synthetic all nuts; inner sequence and 3' sequence

SEQ ID NO: 34863 - DNA, 53 bp, Artificial Sequence; identical to SEQ ID NO: 2180
  Description of Artificial Sequence: Synthetic all nuts; inner sequence and 3' sequence

SEQ ID NO: 34864 - DNA, 53 bp, Artificial Sequence; identical to SEQ ID NO: 6667
  Description of Artificial Sequence: Synthetic all nuts; inner sequence and 3' sequence

SEQ ID NO: 34865 - DNA, 53 bp, Artificial Sequence; identical to SEQ ID NO: 22565
  Description of Artificial Sequence: Synthetic all nuts; inner sequence and 3' sequence

SEQ ID NO: 34866 - DNA, 53 bp, Artificial Sequence
  Description of Artificial Sequence: Synthetic all nuts; inner sequence and 3' sequence
gtcattccgcatcctacccgtgggcacgtattgactagtacatgaccacttga

SEQ ID NO: 34867 - DNA, 53 bp, Artificial Sequence; identical to SEQ ID NO: 2467
  Description of Artificial Sequence: Synthetic all nuts; inner sequence and 3' sequence

SEQ ID NO: 34868 - DNA, 52 bp, Artificial Sequence; identical to SEQ ID NO: 2810
  Description of Artificial Sequence: Synthetic all nuts; inner sequence and 3' sequence

SEQ ID NO: 34869 - DNA, 53 bp, Artificial Sequence; identical to SEQ ID NO: 2167
  Description of Artificial Sequence: Synthetic all nuts; inner sequence and 3' sequence

SEQ ID NO: 34870 - DNA, 53 bp, Artificial Sequence; identical to SEQ ID NO: 2589
  Description of Artificial Sequence: Synthetic all nuts; inner sequence and 3' sequence

SEQ ID NO: 34871 - DNA, 53 bp, Artificial Sequence; identical to SEQ ID NO: 2113
  Description of Artificial Sequence: Synthetic all nuts; inner sequence and 3' sequence

SEQ ID NO: 34872 - DNA, 53 bp, Artificial Sequence
  Description of Artificial Sequence: Synthetic all nuts; inner sequence and 3' sequence
gtcatgcacgaacactatcatggcgccatgttgactagtacatgaccacttga

SEQ ID NO: 34873 - DNA, 53 bp, Artificial Sequence
  Description of Artificial Sequence: Synthetic all nuts; inner sequence and 3' sequence
ccgtagcgacatcaagcggcggggtgcgtgttgactagtacatgaccacttga

SEQ ID NO: 34874 - DNA, 53 bp, Artificial Sequence; identical to SEQ ID NO: 2137
  Description of Artificial Sequence: Synthetic all nuts; inner sequence and 3' sequence

SEQ ID NO: 34875 - DNA, 53 bp, Artificial Sequence; identical to SEQ ID NO: 2497
  Description of Artificial Sequence: Synthetic all nuts; inner sequence and 3' sequence

SEQ ID NO: 34876 - DNA, 53 bp, Artificial Sequence; identical to SEQ ID NO: 2203
  Description of Artificial Sequence: Synthetic all nuts; inner sequence and 3' sequence

SEQ ID NO: 34877 - DNA, 53 bp, Artificial Sequence; identical to SEQ ID NO: 2834
  Description of Artificial Sequence: Synthetic all nuts; inner sequence and 3' sequence

SEQ ID NO: 34878 - DNA, 53 bp, Artificial Sequence; identical to SEQ ID NO: 2245
  Description of Artificial Sequence: Synthetic all nuts; inner sequence and 3' sequence

SEQ ID NO: 34879 - DNA, 53 bp, Artificial Sequence; identical to SEQ ID NO: 2009
  Description of Artificial Sequence: Synthetic all nuts; inner sequence and 3' sequence

SEQ ID NO: 34880 - DNA, 53 bp, Artificial Sequence; identical to SEQ ID NO: 10816
  Description of Artificial Sequence: Synthetic all nuts; inner sequence and 3' sequence

SEQ ID NO: 34881 - DNA, 53 bp, Artificial Sequence; identical to SEQ ID NO: 2407
  Description of Artificial Sequence: Synthetic all nuts; inner sequence and 3' sequence

SEQ ID NO: 34882 - DNA, 53 bp, Artificial Sequence; identical to SEQ ID NO: 2248
  Description of Artificial Sequence: Synthetic all nuts; inner sequence and 3' sequence

SEQ ID NO: 34883 - DNA, 53 bp, Artificial Sequence; identical to SEQ ID NO: 22151
  Description of Artificial Sequence: Synthetic all nuts; inner sequence and 3' sequence

SEQ ID NO: 34884 - DNA, 53 bp, Artificial Sequence; identical to SEQ ID NO: 2926
  Description of Artificial Sequence: Synthetic all nuts; inner sequence and 3' sequence

SEQ ID NO: 34885 - DNA, 53 bp, Artificial Sequence; identical to SEQ ID NO: 6943
  Description of Artificial Sequence: Synthetic all nuts; inner sequence and 3' sequence

SEQ ID NO: 34886 - DNA, 53 bp, Artificial Sequence; identical to SEQ ID NO: 6597
  Description of Artificial Sequence: Synthetic all nuts; inner sequence and 3' sequence

SEQ ID NO: 34887 - DNA, 53 bp, Artificial Sequence; identical to SEQ ID NO: 6612
  Description of Artificial Sequence: Synthetic all nuts; inner sequence and 3' sequence

SEQ ID NO: 34888 - DNA, 53 bp, Artificial Sequence; identical to SEQ ID NO: 2138
  Description of Artificial Sequence: Synthetic all nuts; inner sequence and 3' sequence

SEQ ID NO: 34889 - DNA, 53 bp, Artificial Sequence; identical to SEQ ID NO: 18662
  Description of Artificial Sequence: Synthetic all nuts; inner sequence and 3' sequence

SEQ ID NO: 34890 - DNA, 53 bp, Artificial Sequence; identical to SEQ ID NO: 6775
  Description of Artificial Sequence: Synthetic all nuts; inner sequence and 3' sequence

SEQ ID NO: 34891 - DNA, 53 bp, Artificial Sequence; identical to SEQ ID NO: 2305
  Description of Artificial Sequence: Synthetic all nuts; inner sequence and 3' sequence

SEQ ID NO: 34892 - DNA, 53 bp, Artificial Sequence; identical to SEQ ID NO: 14767
  Description of Artificial Sequence: Synthetic all nuts; inner sequence and 3' sequence

SEQ ID NO: 34893 - DNA, 53 bp, Artificial Sequence; identical to SEQ ID NO: 26870
  Description of Artificial Sequence: Synthetic all nuts; inner sequence and 3' sequence

SEQ ID NO: 34894 - DNA, 53 bp, Artificial Sequence; identical to SEQ ID NO: 2541
  Description of Artificial Sequence: Synthetic all nuts; inner sequence and 3' sequence

SEQ ID NO: 34895 - DNA, 53 bp, Artificial Sequence; identical to SEQ ID NO: 2186
  Description of Artificial Sequence: Synthetic all nuts; inner sequence and 3' sequence

SEQ ID NO: 34896 - DNA, 53 bp, Artificial Sequence; identical to SEQ ID NO: 2285
  Description of Artificial Sequence: Synthetic all nuts; inner sequence and 3' sequence

SEQ ID NO: 34897 - DNA, 53 bp, Artificial Sequence; identical to SEQ ID NO: 6638
  Description of Artificial Sequence: Synthetic all nuts; inner sequence and 3' sequence

SEQ ID NO: 34898 - DNA, 53 bp, Artificial Sequence; identical to SEQ ID NO: 22773
  Description of Artificial Sequence: Synthetic all nuts; inner sequence and 3' sequence

SEQ ID NO: 34899 - DNA, 53 bp, Artificial Sequence
  Description of Artificial Sequence: Synthetic all nuts; inner sequence and 3' sequence
gcacgtctcgcaccctatcatgaggccatgttgactagtacatgaccacttga

SEQ ID NO: 34900 - DNA, 53 bp, Artificial Sequence; identical to SEQ ID NO: 2871
  Description of Artificial Sequence: Synthetic all nuts; inner sequence and 3' sequence

SEQ ID NO: 34901 - DNA, 53 bp, Artificial Sequence; identical to SEQ ID NO: 2727
  Description of Artificial Sequence: Synthetic all nuts; inner sequence and 3' sequence

SEQ ID NO: 34902 - DNA, 53 bp, Artificial Sequence; identical to SEQ ID NO: 2049
  Description of Artificial Sequence: Synthetic all nuts; inner sequence and 3' sequence

SEQ ID NO: 34903 - DNA, 53 bp, Artificial Sequence; identical to SEQ ID NO: 2101
  Description of Artificial Sequence: Synthetic all nuts; inner sequence and 3' sequence

SEQ ID NO: 34904 - DNA, 54 bp, Artificial Sequence; identical to SEQ ID NO: 2845
  Description of Artificial Sequence: Synthetic all nuts; inner sequence and 3' sequence

SEQ ID NO: 34905 - DNA, 53 bp, Artificial Sequence; identical to SEQ ID NO: 10935
  Description of Artificial Sequence: Synthetic all nuts; inner sequence and 3' sequence

SEQ ID NO: 34906 - DNA, 53 bp, Artificial Sequence; identical to SEQ ID NO: 2980
  Description of Artificial Sequence: Synthetic all nuts; inner sequence and 3' sequence

SEQ ID NO: 34907 - DNA, 53 bp, Artificial Sequence; identical to SEQ ID NO: 2220
  Description of Artificial Sequence: Synthetic all nuts; inner sequence and 3' sequence

SEQ ID NO: 34908 - DNA, 53 bp, Artificial Sequence; identical to SEQ ID NO: 6997
  Description of Artificial Sequence: Synthetic all nuts; inner sequence and 3' sequence

SEQ ID NO: 34909 - DNA, 53 bp, Artificial Sequence; identical to SEQ ID NO: 2823
  Description of Artificial Sequence: Synthetic all nuts; inner sequence and 3' sequence

SEQ ID NO: 34910 - DNA, 53 bp, Artificial Sequence; identical to SEQ ID NO: 2561
  Description of Artificial Sequence: Synthetic all nuts; inner sequence and 3' sequence

SEQ ID NO: 34911 - DNA, 53 bp, Artificial Sequence; identical to SEQ ID NO: 18427
  Description of Artificial Sequence: Synthetic all nuts; inner sequence and 3' sequence

SEQ ID NO: 34912 - DNA, 53 bp, Artificial Sequence; identical to SEQ ID NO: 6882
  Description of Artificial Sequence: Synthetic all nuts; inner sequence and 3' sequence

SEQ ID NO: 34913 - DNA, 53 bp, Artificial Sequence
  Description of Artificial Sequence: Synthetic all nuts; inner sequence and 3' sequence
cggtagcgacatcaagcggtggtgtgcgtgttgactagtacatgaccacttga

SEQ ID NO: 34914 - DNA, 53 bp, Artificial Sequence; identical to SEQ ID NO: 6735
  Description of Artificial Sequence: Synthetic all nuts; inner sequence and 3' sequence

SEQ ID NO: 34915 - DNA, 53 bp, Artificial Sequence; identical to SEQ ID NO: 22541
  Description of Artificial Sequence: Synthetic all nuts; inner sequence and 3' sequence

SEQ ID NO: 34916 - DNA, 53 bp, Artificial Sequence; identical to SEQ ID NO: 2079
  Description of Artificial Sequence: Synthetic all nuts; inner sequence and 3' sequence

SEQ ID NO: 34917 - DNA, 53 bp, Artificial Sequence; identical to SEQ ID NO: 2290
  Description of Artificial Sequence: Synthetic all nuts; inner sequence and 3' sequence

SEQ ID NO: 34918 - DNA, 53 bp, Artificial Sequence
  Description of Artificial Sequence: Synthetic all nuts; inner sequence and 3' sequence
gtcattccgcatcctacacgtgagcacgtattgactagtacatgaccacttga

SEQ ID NO: 34919 - DNA, 53 bp, Artificial Sequence; identical to SEQ ID NO: 2369
  Description of Artificial Sequence: Synthetic all nuts; inner sequence and 3' sequence

SEQ ID NO: 34920 - DNA, 53 bp, Artificial Sequence; identical to SEQ ID NO: 2514
  Description of Artificial Sequence: Synthetic all nuts; inner sequence and 3' sequence

SEQ ID NO: 34921 - DNA, 53 bp, Artificial Sequence; identical to SEQ ID NO: 2793
  Description of Artificial Sequence: Synthetic all nuts; inner sequence and 3' sequence

SEQ ID NO: 34922 - DNA, 53 bp, Artificial Sequence; identical to SEQ ID NO: 22426
  Description of Artificial Sequence: Synthetic all nuts; inner sequence and 3' sequence

SEQ ID NO: 34923 - DNA, 53 bp, Artificial Sequence; identical to SEQ ID NO: 18767
  Description of Artificial Sequence: Synthetic all nuts; inner sequence and 3' sequence

SEQ ID NO: 34924 - DNA, 53 bp, Artificial Sequence
  Description of Artificial Sequence: Synthetic all nuts; inner sequence and 3' sequence
gccgcatcgatcacgtatcatgtgctcatgttgactagtacatgaccacttga

SEQ ID NO: 34925 - DNA, 53 bp, Artificial Sequence; identical to SEQ ID NO: 6911
  Description of Artificial Sequence: Synthetic all nuts; inner sequence and 3' sequence

SEQ ID NO: 34926 - DNA, 53 bp, Artificial Sequence; identical to SEQ ID NO: 2835
  Description of Artificial Sequence: Synthetic all nuts; inner sequence and 3' sequence

SEQ ID NO: 34927 - DNA, 53 bp, Artificial Sequence; identical to SEQ ID NO: 22899
  Description of Artificial Sequence: Synthetic all nuts; inner sequence and 3' sequence

SEQ ID NO: 34928 - DNA, 53 bp, Artificial Sequence; identical to SEQ ID NO: 2699
  Description of Artificial Sequence: Synthetic all nuts; inner sequence and 3' sequence

SEQ ID NO: 34929 - DNA, 53 bp, Artificial Sequence; identical to SEQ ID NO: 22915
  Description of Artificial Sequence: Synthetic all nuts; inner sequence and 3' sequence

SEQ ID NO: 34930 - DNA, 53 bp, Artificial Sequence
  Description of Artificial Sequence: Synthetic all nuts; inner sequence and 3' sequence
gcgcgactcgcaccctatcatgaggccatgttgactagtacatgaccacttga

SEQ ID NO: 34931 - DNA, 53 bp, Artificial Sequence; identical to SEQ ID NO: 6898
  Description of Artificial Sequence: Synthetic all nuts; inner sequence and 3' sequence

SEQ ID NO: 34932 - DNA, 53 bp, Artificial Sequence; identical to SEQ ID NO: 6451
  Description of Artificial Sequence: Synthetic all nuts; inner sequence and 3' sequence

SEQ ID NO: 34933 - DNA, 53 bp, Artificial Sequence; identical to SEQ ID NO: 2036
  Description of Artificial Sequence: Synthetic all nuts; inner sequence and 3' sequence

SEQ ID NO: 34934 - DNA, 53 bp, Artificial Sequence; identical to SEQ ID NO: 10871
  Description of Artificial Sequence: Synthetic all nuts; inner sequence and 3' sequence

SEQ ID NO: 34935 - DNA, 53 bp, Artificial Sequence; identical to SEQ ID NO: 6445
  Description of Artificial Sequence: Synthetic all nuts; inner sequence and 3' sequence

SEQ ID NO: 34936 - DNA, 53 bp, Artificial Sequence; identical to SEQ ID NO: 2040
  Description of Artificial Sequence: Synthetic all nuts; inner sequence and 3' sequence

SEQ ID NO: 34937 - DNA, 52 bp, Artificial Sequence
  Description of Artificial Sequence: Synthetic all nuts; inner sequence and 3' sequence
gtgcgcaacgaccttcacgttgtcgtgtattgactagtacatgaccacttga

SEQ ID NO: 34938 - DNA, 53 bp, Artificial Sequence; identical to SEQ ID NO: 2318
  Description of Artificial Sequence: Synthetic all nuts; inner sequence and 3' sequence

SEQ ID NO: 34939 - DNA, 53 bp, Artificial Sequence; identical to SEQ ID NO: 2062
  Description of Artificial Sequence: Synthetic all nuts; inner sequence and 3' sequence

SEQ ID NO: 34940 - DNA, 53 bp, Artificial Sequence; identical to SEQ ID NO: 22594
  Description of Artificial Sequence: Synthetic all nuts; inner sequence and 3' sequence

SEQ ID NO: 34941 - DNA, 53 bp, Artificial Sequence
  Description of Artificial Sequence: Synthetic all nuts; inner sequence and 3' sequence
gtcattccgcatcctacacgtgcgcacgtattgactagtacatgaccacttga

SEQ ID NO: 34942 - DNA, 53 bp, Artificial Sequence; identical to SEQ ID NO: 6620
  Description of Artificial Sequence: Synthetic all nuts; inner sequence and 3' sequence

SEQ ID NO: 34943 - DNA, 53 bp, Artificial Sequence; identical to SEQ ID NO: 6650
  Description of Artificial Sequence: Synthetic all nuts; inner sequence and 3' sequence

SEQ ID NO: 34944 - DNA, 53 bp, Artificial Sequence; identical to SEQ ID NO: 2053
  Description of Artificial Sequence: Synthetic all nuts; inner sequence and 3' sequence

SEQ ID NO: 34945 - DNA, 53 bp, Artificial Sequence; identical to SEQ ID NO: 2831
  Description of Artificial Sequence: Synthetic all nuts; inner sequence and 3' sequence

SEQ ID NO: 34946 - DNA, 53 bp, Artificial Sequence; identical to SEQ ID NO: 2498
  Description of Artificial Sequence: Synthetic all nuts; inner sequence and 3' sequence

SEQ ID NO: 34947 - DNA, 53 bp, Artificial Sequence; identical to SEQ ID NO: 2282
  Description of Artificial Sequence: Synthetic all nuts; inner sequence and 3' sequence

SEQ ID NO: 34948 - DNA, 53 bp, Artificial Sequence; identical to SEQ ID NO: 18744
  Description of Artificial Sequence: Synthetic all nuts; inner sequence and 3' sequence

SEQ ID NO: 34949 - DNA, 53 bp, Artificial Sequence; identical to SEQ ID NO: 2134
  Description of Artificial Sequence: Synthetic all nuts; inner sequence and 3' sequence

SEQ ID NO: 34950 - DNA, 53 bp, Artificial Sequence; identical to SEQ ID NO: 2057
  Description of Artificial Sequence: Synthetic all nuts; inner sequence and 3' sequence

SEQ ID NO: 34951 - DNA, 52 bp, Artificial Sequence; identical to SEQ ID NO: 2879
  Description of Artificial Sequence: Synthetic all nuts; inner sequence and 3' sequence

SEQ ID NO: 34952 - DNA, 53 bp, Artificial Sequence; identical to SEQ ID NO: 2397
  Description of Artificial Sequence: Synthetic all nuts; inner sequence and 3' sequence

SEQ ID NO: 34953 - DNA, 53 bp, Artificial Sequence; identical to SEQ ID NO: 22807
  Description of Artificial Sequence: Synthetic all nuts; inner sequence and 3' sequence

SEQ ID NO: 34954 - DNA, 53 bp, Artificial Sequence; identical to SEQ ID NO: 2437
  Description of Artificial Sequence: Synthetic all nuts; inner sequence and 3' sequence

SEQ ID NO: 34955 - DNA, 53 bp, Artificial Sequence
  Description of Artificial Sequence: Synthetic all nuts; inner sequence and 3' sequence
cgacacgacgagtggtgcaacgtgcaggcattgactagtacatgaccacttga

SEQ ID NO: 34956 - DNA, 53 bp, Artificial Sequence; identical to SEQ ID NO: 2130
  Description of Artificial Sequence: Synthetic all nuts; inner sequence and 3' sequence

SEQ ID NO: 34957 - DNA, 53 bp, Artificial Sequence; identical to SEQ ID NO: 6940
  Description of Artificial Sequence: Synthetic all nuts; inner sequence and 3' sequence

SEQ ID NO: 34958 - DNA, 53 bp, Artificial Sequence; identical to SEQ ID NO: 2173
  Description of Artificial Sequence: Synthetic all nuts; inner sequence and 3' sequence

SEQ ID NO: 34959 - DNA, 53 bp, Artificial Sequence; identical to SEQ ID NO: 2120
  Description of Artificial Sequence: Synthetic all nuts; inner sequence and 3' sequence

SEQ ID NO: 34960 - DNA, 53 bp, Artificial Sequence; identical to SEQ ID NO: 6611
  Description of Artificial Sequence: Synthetic all nuts; inner sequence and 3' sequence

SEQ ID NO: 34961 - DNA, 53 bp, Artificial Sequence; identical to SEQ ID NO: 22496
  Description of Artificial Sequence: Synthetic all nuts; inner sequence and 3' sequence

SEQ ID NO: 34962 - DNA, 53 bp, Artificial Sequence; identical to SEQ ID NO: 22801
  Description of Artificial Sequence: Synthetic all nuts; inner sequence and 3' sequence

SEQ ID NO: 34963 - DNA, 53 bp, Artificial Sequence; identical to SEQ ID NO: 2470
  Description of Artificial Sequence: Synthetic all nuts; inner sequence and 3' sequence

SEQ ID NO: 34964 - DNA, 53 bp, Artificial Sequence; identical to SEQ ID NO: 2692
  Description of Artificial Sequence: Synthetic all nuts; inner sequence and 3' sequence

SEQ ID NO: 34965 - DNA, 53 bp, Artificial Sequence; identical to SEQ ID NO: 2169
  Description of Artificial Sequence: Synthetic all nuts; inner sequence and 3' sequence

SEQ ID NO: 34966 - DNA, 53 bp, Artificial Sequence; identical to SEQ ID NO: 30844
  Description of Artificial Sequence: Synthetic all nuts; inner sequence and 3' sequence

SEQ ID NO: 34967 - DNA, 53 bp, Artificial Sequence; identical to SEQ ID NO: 2422
  Description of Artificial Sequence: Synthetic all nuts; inner sequence and 3' sequence

SEQ ID NO: 34968 - DNA, 53 bp, Artificial Sequence; identical to SEQ ID NO: 6401
  Description of Artificial Sequence: Synthetic all nuts; inner sequence and 3' sequence

SEQ ID NO: 34969 - DNA, 53 bp, Artificial Sequence; identical to SEQ ID NO: 2292
  Description of Artificial Sequence: Synthetic all nuts; inner sequence and 3' sequence

SEQ ID NO: 34970 - DNA, 53 bp, Artificial Sequence; identical to SEQ ID NO: 2471
  Description of Artificial Sequence: Synthetic all nuts; inner sequence and 3' sequence

SEQ ID NO: 34971 - DNA, 53 bp, Artificial Sequence; identical to SEQ ID NO: 2782
  Description of Artificial Sequence: Synthetic all nuts; inner sequence and 3' sequence

SEQ ID NO: 34972 - DNA, 52 bp, Artificial Sequence
  Description of Artificial Sequence: Synthetic all nuts; inner sequence and 3' sequence
ggccaagcaaccgtcaaggtggacgtggattgactagtacatgaccacttga

SEQ ID NO: 34973 - DNA, 53 bp, Artificial Sequence; identical to SEQ ID NO: 2187
  Description of Artificial Sequence: Synthetic all nuts; inner sequence and 3' sequence

SEQ ID NO: 34974 - DNA, 53 bp, Artificial Sequence; identical to SEQ ID NO: 22761
  Description of Artificial Sequence: Synthetic all nuts; inner sequence and 3' sequence

SEQ ID NO: 34975 - DNA, 53 bp, Artificial Sequence; identical to SEQ ID NO: 2601
  Description of Artificial Sequence: Synthetic all nuts; inner sequence and 3' sequence

SEQ ID NO: 34976 - DNA, 53 bp, Artificial Sequence; identical to SEQ ID NO: 2309
  Description of Artificial Sequence: Synthetic all nuts; inner sequence and 3' sequence

SEQ ID NO: 34977 - DNA, 53 bp, Artificial Sequence; identical to SEQ ID NO: 6513
  Description of Artificial Sequence: Synthetic all nuts; inner sequence and 3' sequence

SEQ ID NO: 34978 - DNA, 53 bp, Artificial Sequence; identical to SEQ ID NO: 22133
  Description of Artificial Sequence: Synthetic all nuts; inner sequence and 3' sequence

SEQ ID NO: 34979 - DNA, 53 bp, Artificial Sequence; identical to SEQ ID NO: 2741
  Description of Artificial Sequence: Synthetic all nuts; inner sequence and 3' sequence

SEQ ID NO: 34980 - DNA, 53 bp, Artificial Sequence; identical to SEQ ID NO: 18531
  Description of Artificial Sequence: Synthetic all nuts; inner sequence and 3' sequence

SEQ ID NO: 34981 - DNA, 53 bp, Artificial Sequence; identical to SEQ ID NO: 2892
  Description of Artificial Sequence: Synthetic all nuts; inner sequence and 3' sequence

SEQ ID NO: 34982 - DNA, 53 bp, Artificial Sequence; identical to SEQ ID NO: 2264
  Description of Artificial Sequence: Synthetic all nuts; inner sequence and 3' sequence

SEQ ID NO: 34983 - DNA, 53 bp, Artificial Sequence; identical to SEQ ID NO: 22478
  Description of Artificial Sequence: Synthetic all nuts; inner sequence and 3' sequence

SEQ ID NO: 34984 - DNA, 53 bp, Artificial Sequence; identical to SEQ ID NO: 2066
  Description of Artificial Sequence: Synthetic all nuts; inner sequence and 3' sequence

SEQ ID NO: 34985 - DNA, 53 bp, Artificial Sequence; identical to SEQ ID NO: 2398
  Description of Artificial Sequence: Synthetic all nuts; inner sequence and 3' sequence

SEQ ID NO: 34986 - DNA, 53 bp, Artificial Sequence; identical to SEQ ID NO: 6651
  Description of Artificial Sequence: Synthetic all nuts; inner sequence and 3' sequence

SEQ ID NO: 34987 - DNA, 53 bp, Artificial Sequence; identical to SEQ ID NO: 22676
  Description of Artificial Sequence: Synthetic all nuts; inner sequence and 3' sequence

SEQ ID NO: 34988 - DNA, 53 bp, Artificial Sequence; identical to SEQ ID NO: 2015
  Description of Artificial Sequence: Synthetic all nuts; inner sequence and 3' sequence

SEQ ID NO: 34989 - DNA, 53 bp, Artificial Sequence; identical to SEQ ID NO: 18688
  Description of Artificial Sequence: Synthetic all nuts; inner sequence and 3' sequence

SEQ ID NO: 34990 - DNA, 53 bp, Artificial Sequence; identical to SEQ ID NO: 22709
  Description of Artificial Sequence: Synthetic all nuts; inner sequence and 3' sequence

SEQ ID NO: 34991 - DNA, 53 bp, Artificial Sequence; identical to SEQ ID NO: 2459
  Description of Artificial Sequence: Synthetic all nuts; inner sequence and 3' sequence

SEQ ID NO: 34992 - DNA, 53 bp, Artificial Sequence; identical to SEQ ID NO: 2213
  Description of Artificial Sequence: Synthetic all nuts; inner sequence and 3' sequence

SEQ ID NO: 34993 - DNA, 53 bp, Artificial Sequence; identical to SEQ ID NO: 6854
  Description of Artificial Sequence: Synthetic all nuts; inner sequence and 3' sequence

SEQ ID NO: 34994 - DNA, 53 bp, Artificial Sequence
  Description of Artificial Sequence: Synthetic all nuts; inner sequence and 3' sequence
ggcatggtcgtaccatcaagtaggcgtggattgactagtacatgaccacttga

SEQ ID NO: 34995 - DNA, 53 bp, Artificial Sequence; identical to SEQ ID NO: 2006
  Description of Artificial Sequence: Synthetic all nuts; inner sequence and 3' sequence

SEQ ID NO: 34996 - DNA, 53 bp, Artificial Sequence; identical to SEQ ID NO: 10910
  Description of Artificial Sequence: Synthetic all nuts; inner sequence and 3' sequence

SEQ ID NO: 34997 - DNA, 53 bp, Artificial Sequence; identical to SEQ ID NO: 2205
  Description of Artificial Sequence: Synthetic all nuts; inner sequence and 3' sequence

SEQ ID NO: 34998 - DNA, 53 bp, Artificial Sequence; identical to SEQ ID NO: 2229
  Description of Artificial Sequence: Synthetic all nuts; inner sequence and 3' sequence

SEQ ID NO: 34999 - DNA, 53 bp, Artificial Sequence; identical to SEQ ID NO: 14889
  Description of Artificial Sequence: Synthetic all nuts; inner sequence and 3' sequence

SEQ ID NO: 35000 - DNA, 53 bp, Artificial Sequence; identical to SEQ ID NO: 2668
  Description of Artificial Sequence: Synthetic all nuts; inner sequence and 3' sequence

SEQ ID NO: 35001 - DNA, 53 bp, Artificial Sequence; identical to SEQ ID NO: 2052
  Description of Artificial Sequence: Synthetic all nuts; inner sequence and 3' sequence

SEQ ID NO: 35002 - DNA, 53 bp, Artificial Sequence; identical to SEQ ID NO: 2125
  Description of Artificial Sequence: Synthetic all nuts; inner sequence and 3' sequence

SEQ ID NO: 35003 - DNA, 76 bp, Artificial Sequence; identical to SEQ ID NO: 23914
  Description of Artificial Sequence: Synthetic all nuts; 5' sequence + inner sequence + 3' sequence

SEQ ID NO: 35004 - DNA, 76 bp, Artificial Sequence; identical to SEQ ID NO: 3439
  Description of Artificial Sequence: Synthetic all nuts; 5' sequence + inner sequence + 3' sequence

SEQ ID NO: 35005 - DNA, 76 bp, Artificial Sequence; identical to SEQ ID NO: 3332
  Description of Artificial Sequence: Synthetic all nuts; 5' sequence + inner sequence + 3' sequence

SEQ ID NO: 35006 - DNA, 76 bp, Artificial Sequence
  Description of Artificial Sequence: Synthetic all nuts; 5' sequence + inner sequence + 3' sequence
tagggaagagaaggacatatgatgccgttcgacccctccataacgtgtgcatgttgactagtacatgaccacttga

SEQ ID NO: 35007 - DNA, 76 bp, Artificial Sequence; identical to SEQ ID NO: 3486
  Description of Artificial Sequence: Synthetic all nuts; 5' sequence + inner sequence + 3' sequence

SEQ ID NO: 35008 - DNA, 76 bp, Artificial Sequence; identical to SEQ ID NO: 3372
  Description of Artificial Sequence: Synthetic all nuts; 5' sequence + inner sequence + 3' sequence

SEQ ID NO: 35009 - DNA, 76 bp, Artificial Sequence
  Description of Artificial Sequence: Synthetic all nuts; 5' sequence + inner sequence + 3' sequence
tagggaagagaaggacatatgatccgatcggaccaaacgtggcattgtgctcgttgactagtacatgaccacttga

SEQ ID NO: 35010 - DNA, 76 bp, Artificial Sequence
  Description of Artificial Sequence: Synthetic all nuts; 5' sequence + inner sequence + 3' sequence
tagggaagagaaggacatatgatccatacgtacgaacgacctcaatgtgcgtcttgactagtacatgaccacttga

SEQ ID NO: 35011 - DNA, 76 bp, Artificial Sequence; identical to SEQ ID NO: 3011
  Description of Artificial Sequence: Synthetic all nuts; 5' sequence + inner sequence + 3' sequence

SEQ ID NO: 35012 - DNA, 76 bp, Artificial Sequence; identical to SEQ ID NO: 3410
  Description of Artificial Sequence: Synthetic all nuts; 5' sequence + inner sequence + 3' sequence

SEQ ID NO: 35013 - DNA, 76 bp, Artificial Sequence; identical to SEQ ID NO: 3528
  Description of Artificial Sequence: Synthetic all nuts; 5' sequence + inner sequence + 3' sequence

SEQ ID NO: 35014 - DNA, 76 bp, Artificial Sequence; identical to SEQ ID NO: 7872
  Description of Artificial Sequence: Synthetic all nuts; 5' sequence + inner sequence + 3' sequence

SEQ ID NO: 35015 - DNA, 76 bp, Artificial Sequence; identical to SEQ ID NO: 3377
  Description of Artificial Sequence: Synthetic all nuts; 5' sequence + inner sequence + 3' sequence

SEQ ID NO: 35016 - DNA, 76 bp, Artificial Sequence; identical to SEQ ID NO: 3790
  Description of Artificial Sequence: Synthetic all nuts; 5' sequence + inner sequence + 3' sequence

SEQ ID NO: 35017 - DNA, 76 bp, Artificial Sequence; identical to SEQ ID NO: 3133
  Description of Artificial Sequence: Synthetic all nuts; 5' sequence + inner sequence + 3' sequence

SEQ ID NO: 35018 - DNA, 76 bp, Artificial Sequence; identical to SEQ ID NO: 11884
  Description of Artificial Sequence: Synthetic all nuts; 5' sequence + inner sequence + 3' sequence

SEQ ID NO: 35019 - DNA, 76 bp, Artificial Sequence; identical to SEQ ID NO: 3306
  Description of Artificial Sequence: Synthetic all nuts; 5' sequence + inner sequence + 3' sequence

SEQ ID NO: 35020 - DNA, 76 bp, Artificial Sequence; identical to SEQ ID NO: 11850
  Description of Artificial Sequence: Synthetic all nuts; 5' sequence + inner sequence + 3' sequence

SEQ ID NO: 35021 - DNA, 76 bp, Artificial Sequence; identical to SEQ ID NO: 3256
  Description of Artificial Sequence: Synthetic all nuts; 5' sequence + inner sequence + 3' sequence

SEQ ID NO: 35022 - DNA, 76 bp, Artificial Sequence; identical to SEQ ID NO: 7739
  Description of Artificial Sequence: Synthetic all nuts; 5' sequence + inner sequence + 3' sequence

SEQ ID NO: 35023 - DNA, 76 bp, Artificial Sequence
  Description of Artificial Sequence: Synthetic all nuts; 5' sequence + inner sequence + 3' sequence
tagggaagagaaggacatatgatgaccgaacggacctcaatgtgtggcatgcattgactagtacatgaccacttga

SEQ ID NO: 35024 - DNA, 76 bp, Artificial Sequence; identical to SEQ ID NO: 3320
  Description of Artificial Sequence: Synthetic all nuts; 5' sequence + inner sequence + 3' sequence

SEQ ID NO: 35025 - DNA, 76 bp, Artificial Sequence; identical to SEQ ID NO: 3204
  Description of Artificial Sequence: Synthetic all nuts; 5' sequence + inner sequence + 3' sequence

SEQ ID NO: 35026 - DNA, 76 bp, Artificial Sequence; identical to SEQ ID NO: 19824
  Description of Artificial Sequence: Synthetic all nuts; 5' sequence + inner sequence + 3' sequence

SEQ ID NO: 35027 - DNA, 76 bp, Artificial Sequence; identical to SEQ ID NO: 3063
  Description of Artificial Sequence: Synthetic all nuts; 5' sequence + inner sequence + 3' sequence

SEQ ID NO: 35028 - DNA, 76 bp, Artificial Sequence; identical to SEQ ID NO: 3637
  Description of Artificial Sequence: Synthetic all nuts; 5' sequence + inner sequence + 3' sequence

SEQ ID NO: 35029 - DNA, 76 bp, Artificial Sequence; identical to SEQ ID NO: 3107
  Description of Artificial Sequence: Synthetic all nuts; 5' sequence + inner sequence + 3' sequence

SEQ ID NO: 35030 - DNA, 76 bp, Artificial Sequence; identical to SEQ ID NO: 7807
  Description of Artificial Sequence: Synthetic all nuts; 5' sequence + inner sequence + 3' sequence

SEQ ID NO: 35031 - DNA, 76 bp, Artificial Sequence
  Description of Artificial Sequence: Synthetic all nuts; 5' sequence + inner sequence + 3' sequence
tagggaagagaaggacatatgatcgcaccaaccatgaggcagtgtacgtgtgtttgactagtacatgaccacttga

SEQ ID NO: 35032 - DNA, 76 bp, Artificial Sequence; identical to SEQ ID NO: 19799
  Description of Artificial Sequence: Synthetic all nuts; 5' sequence + inner sequence + 3' sequence

SEQ ID NO: 35033 - DNA, 76 bp, Artificial Sequence
  Description of Artificial Sequence: Synthetic all nuts; 5' sequence + inner sequence + 3' sequence
tagggaagagaaggacatatgatccgtagccacatcaagcggtggtgtgcgtgttgactagtacatgaccacttga

SEQ ID NO: 35034 - DNA, 76 bp, Artificial Sequence; identical to SEQ ID NO: 7503
  Description of Artificial Sequence: Synthetic all nuts; 5' sequence + inner sequence + 3' sequence

SEQ ID NO: 35035 - DNA, 76 bp, Artificial Sequence; identical to SEQ ID NO: 3665
  Description of Artificial Sequence: Synthetic all nuts; 5' sequence + inner sequence + 3' sequence

SEQ ID NO: 35036 - DNA, 76 bp, Artificial Sequence; identical to SEQ ID NO: 7837
  Description of Artificial Sequence: Synthetic all nuts; 5' sequence + inner sequence + 3' sequence

SEQ ID NO: 35037 - DNA, 76 bp, Artificial Sequence; identical to SEQ ID NO: 3869
  Description of Artificial Sequence: Synthetic all nuts; 5' sequence + inner sequence + 3' sequence

SEQ ID NO: 35038 - DNA, 76 bp, Artificial Sequence
  Description of Artificial Sequence: Synthetic all nuts; 5' sequence + inner sequence + 3' sequence
tagggaagagaaggacatatgatcgcacgatcgtcctgccctaacgtggcgcattgactagtacatgaccacttga

SEQ ID NO: 35039 - DNA, 76 bp, Artificial Sequence; identical to SEQ ID NO: 23991
  Description of Artificial Sequence: Synthetic all nuts; 5' sequence + inner sequence + 3' sequence

SEQ ID NO: 35040 - DNA, 76 bp, Artificial Sequence; identical to SEQ ID NO: 3126
  Description of Artificial Sequence: Synthetic all nuts; 5' sequence + inner sequence + 3' sequence

SEQ ID NO: 35041 - DNA, 76 bp, Artificial Sequence; identical to SEQ ID NO: 3945
  Description of Artificial Sequence: Synthetic all nuts; 5' sequence + inner sequence + 3' sequence

SEQ ID NO: 35042 - DNA, 76 bp, Artificial Sequence; identical to SEQ ID NO: 3151
  Description of Artificial Sequence: Synthetic all nuts; 5' sequence + inner sequence + 3' sequence

SEQ ID NO: 35043 - DNA, 76 bp, Artificial Sequence; identical to SEQ ID NO: 3300
  Description of Artificial Sequence: Synthetic all nuts; 5' sequence + inner sequence + 3' sequence

SEQ ID NO: 35044 - DNA, 76 bp, Artificial Sequence; identical to SEQ ID NO: 23504
  Description of Artificial Sequence: Synthetic all nuts; 5' sequence + inner sequence + 3' sequence

SEQ ID NO: 35045 - DNA, 76 bp, Artificial Sequence; identical to SEQ ID NO: 3556
  Description of Artificial Sequence: Synthetic all nuts; 5' sequence + inner sequence + 3' sequence

SEQ ID NO: 35046 - DNA, 76 bp, Artificial Sequence
  Description of Artificial Sequence: Synthetic all nuts; 5' sequence + inner sequence + 3' sequence
tagggaagagaaggacatatgatgtcattccgcatcctacacgtgggcacgtcttgactagtacatgaccacttga

SEQ ID NO: 35047 - DNA, 76 bp, Artificial Sequence; identical to SEQ ID NO: 7939
  Description of Artificial Sequence: Synthetic all nuts; 5' sequence + inner sequence + 3' sequence

SEQ ID NO: 35048 - DNA, 76 bp, Artificial Sequence; identical to SEQ ID NO: 3429
  Description of Artificial Sequence: Synthetic all nuts; 5' sequence + inner sequence + 3' sequence

SEQ ID NO: 35049 - DNA, 76 bp, Artificial Sequence; identical to SEQ ID NO: 3255
  Description of Artificial Sequence: Synthetic all nuts; 5' sequence + inner sequence + 3' sequence

SEQ ID NO: 35050 - DNA, 76 bp, Artificial Sequence; identical to SEQ ID NO: 3081
  Description of Artificial Sequence: Synthetic all nuts; 5' sequence + inner sequence + 3' sequence

SEQ ID NO: 35051 - DNA, 76 bp, Artificial Sequence; identical to SEQ ID NO: 3298
  Description of Artificial Sequence: Synthetic all nuts; 5' sequence + inner sequence + 3' sequence

SEQ ID NO: 35052 - DNA, 76 bp, Artificial Sequence; identical to SEQ ID NO: 3194
  Description of Artificial Sequence: Synthetic all nuts; 5' sequence + inner sequence + 3' sequence

SEQ ID NO: 35053 - DNA, 76 bp, Artificial Sequence; identical to SEQ ID NO: 3035
  Description of Artificial Sequence: Synthetic all nuts; 5' sequence + inner sequence + 3' sequence

SEQ ID NO: 35054 - DNA, 76 bp, Artificial Sequence; identical to SEQ ID NO: 23530
  Description of Artificial Sequence: Synthetic all nuts; 5' sequence + inner sequence + 3' sequence

SEQ ID NO: 35055 - DNA, 76 bp, Artificial Sequence; identical to SEQ ID NO: 23653
  Description of Artificial Sequence: Synthetic all nuts; 5' sequence + inner sequence + 3' sequence

SEQ ID NO: 35056 - DNA, 76 bp, Artificial Sequence; identical to SEQ ID NO: 15933
  Description of Artificial Sequence: Synthetic all nuts; 5' sequence + inner sequence + 3' sequence

SEQ ID NO: 35057 - DNA, 76 bp, Artificial Sequence; identical to SEQ ID NO: 15869
  Description of Artificial Sequence: Synthetic all nuts; 5' sequence + inner sequence + 3' sequence

SEQ ID NO: 35058 - DNA, 76 bp, Artificial Sequence; identical to SEQ ID NO: 7617
  Description of Artificial Sequence: Synthetic all nuts; 5' sequence + inner sequence + 3' sequence

SEQ ID NO: 35059 - DNA, 76 bp, Artificial Sequence; identical to SEQ ID NO: 23853
  Description of Artificial Sequence: Synthetic all nuts; 5' sequence + inner sequence + 3' sequence

SEQ ID NO: 35060 - DNA, 76 bp, Artificial Sequence; identical to SEQ ID NO: 19651
  Description of Artificial Sequence: Synthetic all nuts; 5' sequence + inner sequence + 3' sequence

SEQ ID NO: 35061 - DNA, 76 bp, Artificial Sequence; identical to SEQ ID NO: 3226
  Description of Artificial Sequence: Synthetic all nuts; 5' sequence + inner sequence + 3' sequence

SEQ ID NO: 35062 - DNA, 76 bp, Artificial Sequence; identical to SEQ ID NO: 31792
  Description of Artificial Sequence: Synthetic all nuts; 5' sequence + inner sequence + 3' sequence

SEQ ID NO: 35063 - DNA, 76 bp, Artificial Sequence; identical to SEQ ID NO: 23626
  Description of Artificial Sequence: Synthetic all nuts; 5' sequence + inner sequence + 3' sequence

SEQ ID NO: 35064 - DNA, 76 bp, Artificial Sequence; identical to SEQ ID NO: 7708
  Description of Artificial Sequence: Synthetic all nuts; 5' sequence + inner sequence + 3' sequence

SEQ ID NO: 35065 - DNA, 76 bp, Artificial Sequence; identical to SEQ ID NO: 3791
  Description of Artificial Sequence: Synthetic all nuts; 5' sequence + inner sequence + 3' sequence

SEQ ID NO: 35066 - DNA, 76 bp, Artificial Sequence; identical to SEQ ID NO: 23514
  Description of Artificial Sequence: Synthetic all nuts; 5' sequence + inner sequence + 3' sequence

SEQ ID NO: 35067 - DNA, 76 bp, Artificial Sequence; identical to SEQ ID NO: 23944
  Description of Artificial Sequence: Synthetic all nuts; 5' sequence + inner sequence + 3' sequence

SEQ ID NO: 35068 - DNA, 76 bp, Artificial Sequence; identical to SEQ ID NO: 7301
  Description of Artificial Sequence: Synthetic all nuts; 5' sequence + inner sequence + 3' sequence

SEQ ID NO: 35069 - DNA, 76 bp, Artificial Sequence; identical to SEQ ID NO: 3887
  Description of Artificial Sequence: Synthetic all nuts; 5' sequence + inner sequence + 3' sequence

SEQ ID NO: 35070 - DNA, 76 bp, Artificial Sequence; identical to SEQ ID NO: 3208
  Description of Artificial Sequence: Synthetic all nuts; 5' sequence + inner sequence + 3' sequence

SEQ ID NO: 35071 - DNA, 76 bp, Artificial Sequence; identical to SEQ ID NO: 3399
  Description of Artificial Sequence: Synthetic all nuts; 5' sequence + inner sequence + 3' sequence

SEQ ID NO: 35072 - DNA, 76 bp, Artificial Sequence; identical to SEQ ID NO: 3161
  Description of Artificial Sequence: Synthetic all nuts; 5' sequence + inner sequence + 3' sequence

SEQ ID NO: 35073 - DNA, 76 bp, Artificial Sequence; identical to SEQ ID NO: 23698
  Description of Artificial Sequence: Synthetic all nuts; 5' sequence + inner sequence + 3' sequence

SEQ ID NO: 35074 - DNA, 76 bp, Artificial Sequence
  Description of Artificial Sequence: Synthetic all nuts; 5' sequence + inner sequence + 3' sequence
tagggaagagaaggacatatgatggcatgctatgaacgaggcatgatgcgtcattgactagtacatgaccacttga

SEQ ID NO: 35075 - DNA, 76 bp, Artificial Sequence; identical to SEQ ID NO: 23668
  Description of Artificial Sequence: Synthetic all nuts; 5' sequence + inner sequence + 3' sequence

SEQ ID NO: 35076 - DNA, 76 bp, Artificial Sequence; identical to SEQ ID NO: 3267
  Description of Artificial Sequence: Synthetic all nuts; 5' sequence + inner sequence + 3' sequence

SEQ ID NO: 35077 - DNA, 76 bp, Artificial Sequence; identical to SEQ ID NO: 3811
  Description of Artificial Sequence: Synthetic all nuts; 5' sequence + inner sequence + 3' sequence

SEQ ID NO: 35078 - DNA, 76 bp, Artificial Sequence; identical to SEQ ID NO: 3179
  Description of Artificial Sequence: Synthetic all nuts; 5' sequence + inner sequence + 3' sequence

SEQ ID NO: 35079 - DNA, 76 bp, Artificial Sequence
  Description of Artificial Sequence: Synthetic all nuts; 5' sequence + inner sequence + 3' sequence
tagggaagagaaggacatatgatccgtagcgacatcaagcggtgatgtgcgtgttgactagtacatgaccacttga

SEQ ID NO: 35080 - DNA, 76 bp, Artificial Sequence; identical to SEQ ID NO: 23897
  Description of Artificial Sequence: Synthetic all nuts; 5' sequence + inner sequence + 3' sequence

SEQ ID NO: 35081 - DNA, 76 bp, Artificial Sequence; identical to SEQ ID NO: 3269
  Description of Artificial Sequence: Synthetic all nuts; 5' sequence + inner sequence + 3' sequence

SEQ ID NO: 35082 - DNA, 76 bp, Artificial Sequence; identical to SEQ ID NO: 3496
  Description of Artificial Sequence: Synthetic all nuts; 5' sequence + inner sequence + 3' sequence

SEQ ID NO: 35083 - DNA, 76 bp, Artificial Sequence; identical to SEQ ID NO: 7755
  Description of Artificial Sequence: Synthetic all nuts; 5' sequence + inner sequence + 3' sequence

SEQ ID NO: 35084 - DNA, 76 bp, Artificial Sequence
  Description of Artificial Sequence: Synthetic all nuts; 5' sequence + inner sequence + 3' sequence
tagggaagagaaggacatatgatgtcatgcccgaacactatcatggcggcatgttgactagtacatgaccacttga

SEQ ID NO: 35085 - DNA, 76 bp, Artificial Sequence; identical to SEQ ID NO: 3530
  Description of Artificial Sequence: Synthetic all nuts; 5' sequence + inner sequence + 3' sequence

SEQ ID NO: 35086 - DNA, 76 bp, Artificial Sequence; identical to SEQ ID NO: 3424
  Description of Artificial Sequence: Synthetic all nuts; 5' sequence + inner sequence + 3' sequence

SEQ ID NO: 35087 - DNA, 76 bp, Artificial Sequence
  Description of Artificial Sequence: Synthetic all nuts; 5' sequence + inner sequence + 3' sequence
tagggaagagaaggacatatgatccgtagcgacatcaagcggtggtgtccgtgttgactagtacatgaccacttga

SEQ ID NO: 35088 - DNA, 76 bp, Artificial Sequence; identical to SEQ ID NO: 3506
  Description of Artificial Sequence: Synthetic all nuts; 5' sequence + inner sequence + 3' sequence

SEQ ID NO: 35089 - DNA, 76 bp, Artificial Sequence; identical to SEQ ID NO: 3344
  Description of Artificial Sequence: Synthetic all nuts; 5' sequence + inner sequence + 3' sequence

SEQ ID NO: 35090 - DNA, 76 bp, Artificial Sequence
  Description of Artificial Sequence: Synthetic all nuts; 5' sequence + inner sequence + 3' sequence
tagggaagagaaggacatatgatcgcaccgcatgtcacgtcagtccgccagtgttgactagtacatgaccacttga

SEQ ID NO: 35091 - DNA, 75 bp, Artificial Sequence; identical to SEQ ID NO: 3549
  Description of Artificial Sequence: Synthetic all nuts; 5' sequence + inner sequence + 3' sequence

SEQ ID NO: 35092 - DNA, 76 bp, Artificial Sequence; identical to SEQ ID NO: 3343
  Description of Artificial Sequence: Synthetic all nuts; 5' sequence + inner sequence + 3' sequence

SEQ ID NO: 35093 - DNA, 76 bp, Artificial Sequence; identical to SEQ ID NO: 3114
  Description of Artificial Sequence: Synthetic all nuts; 5' sequence + inner sequence + 3' sequence

SEQ ID NO: 35094 - DNA, 76 bp, Artificial Sequence
  Description of Artificial Sequence: Synthetic all nuts; 5' sequence + inner sequence + 3' sequence
tagggaagagaaggacatatgatccgtagcgacatcaagcggtggtgtgcgcattgactagtacatgaccacttga

SEQ ID NO: 35095 - DNA, 76 bp, Artificial Sequence; identical to SEQ ID NO: 23730
  Description of Artificial Sequence: Synthetic all nuts; 5' sequence + inner sequence + 3' sequence

SEQ ID NO: 35096 - DNA, 76 bp, Artificial Sequence
  Description of Artificial Sequence: Synthetic all nuts; 5' sequence + inner sequence + 3' sequence
tagggaagagaaggacatatgatcgcatgggacgtactgaccgtatcgtgtcattgactagtacatgaccacttga

SEQ ID NO: 35097 - DNA, 71 bp, Artificial Sequence; identical to SEQ ID NO: 23136
  Description of Artificial Sequence: Synthetic all nuts; 5' sequence + inner sequence + 3' sequence

SEQ ID NO: 35098 - DNA, 76 bp, Artificial Sequence; identical to SEQ ID NO: 3597
  Description of Artificial Sequence: Synthetic all nuts; 5' sequence + inner sequence + 3' sequence

SEQ ID NO: 35099 - DNA, 76 bp, Artificial Sequence; identical to SEQ ID NO: 3491
  Description of Artificial Sequence: Synthetic all nuts; 5' sequence + inner sequence + 3' sequence

SEQ ID NO: 35100 - DNA, 76 bp, Artificial Sequence; identical to SEQ ID NO: 3780
  Description of Artificial Sequence: Synthetic all nuts; 5' sequence + inner sequence + 3' sequence

SEQ ID NO: 35101 - DNA, 76 bp, Artificial Sequence; identical to SEQ ID NO: 7776
  Description of Artificial Sequence: Synthetic all nuts; 5' sequence + inner sequence + 3' sequence

SEQ ID NO: 35102 - DNA, 72 bp, Artificial Sequence; identical to SEQ ID NO: 23678
  Description of Artificial Sequence: Synthetic all nuts; 5' sequence + inner sequence + 3' sequence

SEQ ID NO: 35103 - DNA, 76 bp, Artificial Sequence; identical to SEQ ID NO: 23882
  Description of Artificial Sequence: Synthetic all nuts; 5' sequence + inner sequence + 3' sequence

SEQ ID NO: 35104 - DNA, 76 bp, Artificial Sequence; identical to SEQ ID NO: 3146
  Description of Artificial Sequence: Synthetic all nuts; 5' sequence + inner sequence + 3' sequence

SEQ ID NO: 35105 - DNA, 76 bp, Artificial Sequence; identical to SEQ ID NO: 3443
  Description of Artificial Sequence: Synthetic all nuts; 5' sequence + inner sequence + 3' sequence

SEQ ID NO: 35106 - DNA, 76 bp, Artificial Sequence; identical to SEQ ID NO: 3746
  Description of Artificial Sequence: Synthetic all nuts; 5' sequence + inner sequence + 3' sequence

SEQ ID NO: 35107 - DNA, 76 bp, Artificial Sequence; identical to SEQ ID NO: 23720
  Description of Artificial Sequence: Synthetic all nuts; 5' sequence + inner sequence + 3' sequence

SEQ ID NO: 35108 - DNA, 76 bp, Artificial Sequence
  Description of Artificial Sequence: Synthetic all nuts; 5' sequence + inner sequence + 3' sequence
tagggaagagaaggacatatgatccgtcgaggcacgtgacagtgggcttagcgttgactagtacatgaccacttga

SEQ ID NO: 35109 - DNA, 76 bp, Artificial Sequence; identical to SEQ ID NO: 7792
  Description of Artificial Sequence: Synthetic all nuts; 5' sequence + inner sequence + 3' sequence

SEQ ID NO: 35110 - DNA, 76 bp, Artificial Sequence; identical to SEQ ID NO: 3359
  Description of Artificial Sequence: Synthetic all nuts; 5' sequence + inner sequence + 3' sequence

SEQ ID NO: 35111 - DNA, 76 bp, Artificial Sequence; identical to SEQ ID NO: 23363
  Description of Artificial Sequence: Synthetic all nuts; 5' sequence + inner sequence + 3' sequence

SEQ ID NO: 35112 - DNA, 76 bp, Artificial Sequence; identical to SEQ ID NO: 3340
  Description of Artificial Sequence: Synthetic all nuts; 5' sequence + inner sequence + 3' sequence

SEQ ID NO: 35113 - DNA, 76 bp, Artificial Sequence; identical to SEQ ID NO: 7713
  Description of Artificial Sequence: Synthetic all nuts; 5' sequence + inner sequence + 3' sequence

SEQ ID NO: 35114 - DNA, 76 bp, Artificial Sequence; identical to SEQ ID NO: 3093
  Description of Artificial Sequence: Synthetic all nuts; 5' sequence + inner sequence + 3' sequence

SEQ ID NO: 35115 - DNA, 76 bp, Artificial Sequence; identical to SEQ ID NO: 3788
  Description of Artificial Sequence: Synthetic all nuts; 5' sequence + inner sequence + 3' sequence

SEQ ID NO: 35116 - DNA, 76 bp, Artificial Sequence; identical to SEQ ID NO: 3031
  Description of Artificial Sequence: Synthetic all nuts; 5' sequence + inner sequence + 3' sequence

SEQ ID NO: 35117 - DNA, 76 bp, Artificial Sequence; identical to SEQ ID NO: 7642
  Description of Artificial Sequence: Synthetic all nuts; 5' sequence + inner sequence + 3' sequence

SEQ ID NO: 35118 - DNA, 76 bp, Artificial Sequence; identical to SEQ ID NO: 3073
  Description of Artificial Sequence: Synthetic all nuts; 5' sequence + inner sequence + 3' sequence

SEQ ID NO: 35119 - DNA, 76 bp, Artificial Sequence; identical to SEQ ID NO: 3485
  Description of Artificial Sequence: Synthetic all nuts; 5' sequence + inner sequence + 3' sequence

SEQ ID NO: 35120 - DNA, 76 bp, Artificial Sequence; identical to SEQ ID NO: 3026
  Description of Artificial Sequence: Synthetic all nuts; 5' sequence + inner sequence + 3' sequence

SEQ ID NO: 35121 - DNA, 76 bp, Artificial Sequence; identical to SEQ ID NO: 3630
  Description of Artificial Sequence: Synthetic all nuts; 5' sequence + inner sequence + 3' sequence

SEQ ID NO: 35122 - DNA, 76 bp, Artificial Sequence; identical to SEQ ID NO: 8002
  Description of Artificial Sequence: Synthetic all nuts; 5' sequence + inner sequence + 3' sequence

SEQ ID NO: 35123 - DNA, 76 bp, Artificial Sequence; identical to SEQ ID NO: 31574
  Description of Artificial Sequence: Synthetic all nuts; 5' sequence + inner sequence + 3' sequence

SEQ ID NO: 35124 - DNA, 76 bp, Artificial Sequence; identical to SEQ ID NO: 3294
  Description of Artificial Sequence: Synthetic all nuts; 5' sequence + inner sequence + 3' sequence

SEQ ID NO: 35125 - DNA, 76 bp, Artificial Sequence; identical to SEQ ID NO: 3490
  Description of Artificial Sequence: Synthetic all nuts; 5' sequence + inner sequence + 3' sequence

SEQ ID NO: 35126 - DNA, 76 bp, Artificial Sequence; identical to SEQ ID NO: 3771
  Description of Artificial Sequence: Synthetic all nuts; 5' sequence + inner sequence + 3' sequence

SEQ ID NO: 35127 - DNA, 76 bp, Artificial Sequence; identical to SEQ ID NO: 31791
  Description of Artificial Sequence: Synthetic all nuts; 5' sequence + inner sequence + 3' sequence

SEQ ID NO: 35128 - DNA, 76 bp, Artificial Sequence; identical to SEQ ID NO: 3117
  Description of Artificial Sequence: Synthetic all nuts; 5' sequence + inner sequence + 3' sequence

SEQ ID NO: 35129 - DNA, 76 bp, Artificial Sequence
  Description of Artificial Sequence: Synthetic all nuts; 5' sequence + inner sequence + 3' sequence
tagggaagagaaggacatatgatcgaccgagtcagggacgatgcgacgtcacgttgactagtacatgaccacttga

SEQ ID NO: 35130 - DNA, 76 bp, Artificial Sequence; identical to SEQ ID NO: 3487
  Description of Artificial Sequence: Synthetic all nuts; 5' sequence + inner sequence + 3' sequence

SEQ ID NO: 35131 - DNA, 76 bp, Artificial Sequence; identical to SEQ ID NO: 3071
  Description of Artificial Sequence: Synthetic all nuts; 5' sequence + inner sequence + 3' sequence

SEQ ID NO: 35132 - DNA, 76 bp, Artificial Sequence; identical to SEQ ID NO: 3463
  Description of Artificial Sequence: Synthetic all nuts; 5' sequence + inner sequence + 3' sequence

SEQ ID NO: 35133 - DNA, 76 bp, Artificial Sequence; identical to SEQ ID NO: 15936
  Description of Artificial Sequence: Synthetic all nuts; 5' sequence + inner sequence + 3' sequence

SEQ ID NO: 35134 - DNA, 76 bp, Artificial Sequence; identical to SEQ ID NO: 19342
  Description of Artificial Sequence: Synthetic all nuts; 5' sequence + inner sequence + 3' sequence

SEQ ID NO: 35135 - DNA, 76 bp, Artificial Sequence; identical to SEQ ID NO: 3840
  Description of Artificial Sequence: Synthetic all nuts; 5' sequence + inner sequence + 3' sequence

SEQ ID NO: 35136 - DNA, 76 bp, Artificial Sequence
  Description of Artificial Sequence: Synthetic all nuts; 5' sequence + inner sequence + 3' sequence
tagggaagagaaggacatatgatgtcatgcaagaacactatcatggcggcatgttgactagtacatgaccacttga

SEQ ID NO: 35137 - DNA, 76 bp, Artificial Sequence; identical to SEQ ID NO: 3176
  Description of Artificial Sequence: Synthetic all nuts; 5' sequence + inner sequence + 3' sequence

SEQ ID NO: 35138 - DNA, 76 bp, Artificial Sequence; identical to SEQ ID NO: 3005
  Description of Artificial Sequence: Synthetic all nuts; 5' sequence + inner sequence + 3' sequence

SEQ ID NO: 35139 - DNA, 76 bp, Artificial Sequence; identical to SEQ ID NO: 3860
  Description of Artificial Sequence: Synthetic all nuts; 5' sequence + inner sequence + 3' sequence

SEQ ID NO: 35140 - DNA, 76 bp, Artificial Sequence; identical to SEQ ID NO: 3379
  Description of Artificial Sequence: Synthetic all nuts; 5' sequence + inner sequence + 3' sequence

SEQ ID NO: 35141 - DNA, 76 bp, Artificial Sequence; identical to SEQ ID NO: 3919
  Description of Artificial Sequence: Synthetic all nuts; 5' sequence + inner sequence + 3' sequence

SEQ ID NO: 35142 - DNA, 76 bp, Artificial Sequence; identical to SEQ ID NO: 15985
  Description of Artificial Sequence: Synthetic all nuts; 5' sequence + inner sequence + 3' sequence

SEQ ID NO: 35143 - DNA, 71 bp, Artificial Sequence; identical to SEQ ID NO: 3427
  Description of Artificial Sequence: Synthetic all nuts; 5' sequence + inner sequence + 3' sequence

SEQ ID NO: 35144 - DNA, 76 bp, Artificial Sequence; identical to SEQ ID NO: 3764
  Description of Artificial Sequence: Synthetic all nuts; 5' sequence + inner sequence + 3' sequence

SEQ ID NO: 35145 - DNA, 76 bp, Artificial Sequence; identical to SEQ ID NO: 19768
  Description of Artificial Sequence: Synthetic all nuts; 5' sequence + inner sequence + 3' sequence

SEQ ID NO: 35146 - DNA, 76 bp, Artificial Sequence; identical to SEQ ID NO: 3381
  Description of Artificial Sequence: Synthetic all nuts; 5' sequence + inner sequence + 3' sequence

SEQ ID NO: 35147 - DNA, 76 bp, Artificial Sequence; identical to SEQ ID NO: 3270
  Description of Artificial Sequence: Synthetic all nuts; 5' sequence + inner sequence + 3' sequence

SEQ ID NO: 35148 - DNA, 76 bp, Artificial Sequence; identical to SEQ ID NO: 3355
  Description of Artificial Sequence: Synthetic all nuts; 5' sequence + inner sequence + 3' sequence

SEQ ID NO: 35149 - DNA, 76 bp, Artificial Sequence; identical to SEQ ID NO: 3155
  Description of Artificial Sequence: Synthetic all nuts; 5' sequence + inner sequence + 3' sequence

SEQ ID NO: 35150 - DNA, 76 bp, Artificial Sequence; identical to SEQ ID NO: 3628
  Description of Artificial Sequence: Synthetic all nuts; 5' sequence + inner sequence + 3' sequence

SEQ ID NO: 35151 - DNA, 76 bp, Artificial Sequence; identical to SEQ ID NO: 3646
  Description of Artificial Sequence: Synthetic all nuts; 5' sequence + inner sequence + 3' sequence

SEQ ID NO: 35152 - DNA, 76 bp, Artificial Sequence; identical to SEQ ID NO: 3632
  Description of Artificial Sequence: Synthetic all nuts; 5' sequence + inner sequence + 3' sequence

SEQ ID NO: 35153 - DNA, 76 bp, Artificial Sequence; identical to SEQ ID NO: 3389
  Description of Artificial Sequence: Synthetic all nuts; 5' sequence + inner sequence + 3' sequence

SEQ ID NO: 35154 - DNA, 76 bp, Artificial Sequence; identical to SEQ ID NO: 3955
  Description of Artificial Sequence: Synthetic all nuts; 5' sequence + inner sequence + 3' sequence

SEQ ID NO: 35155 - DNA, 76 bp, Artificial Sequence; identical to SEQ ID NO: 7590
  Description of Artificial Sequence: Synthetic all nuts; 5' sequence + inner sequence + 3' sequence

SEQ ID NO: 35156 - DNA, 76 bp, Artificial Sequence; identical to SEQ ID NO: 11926
  Description of Artificial Sequence: Synthetic all nuts; 5' sequence + inner sequence + 3' sequence

SEQ ID NO: 35157 - DNA, 76 bp, Artificial Sequence; identical to SEQ ID NO: 3045
  Description of Artificial Sequence: Synthetic all nuts; 5' sequence + inner sequence + 3' sequence

SEQ ID NO: 35158 - DNA, 76 bp, Artificial Sequence; identical to SEQ ID NO: 3400
  Description of Artificial Sequence: Synthetic all nuts; 5' sequence + inner sequence + 3' sequence

SEQ ID NO: 35159 - DNA, 76 bp, Artificial Sequence; identical to SEQ ID NO: 23693
  Description of Artificial Sequence: Synthetic all nuts; 5' sequence + inner sequence + 3' sequence

SEQ ID NO: 35160 - DNA, 76 bp, Artificial Sequence; identical to SEQ ID NO: 3141
  Description of Artificial Sequence: Synthetic all nuts; 5' sequence + inner sequence + 3' sequence

SEQ ID NO: 35161 - DNA, 75 bp, Artificial Sequence; identical to SEQ ID NO: 7559
  Description of Artificial Sequence: Synthetic all nuts; 5' sequence + inner sequence + 3' sequence

SEQ ID NO: 35162 - DNA, 76 bp, Artificial Sequence
  Description of Artificial Sequence: Synthetic all nuts; 5' sequence + inner sequence + 3' sequence
tagggaagagaaggacatatgattgcgtaccgagctgacctatcagtgtgtcgttgactagtacatgaccacttga

SEQ ID NO: 35163 - DNA, 76 bp, Artificial Sequence; identical to SEQ ID NO: 3098
  Description of Artificial Sequence: Synthetic all nuts; 5' sequence + inner sequence + 3' sequence

SEQ ID NO: 35164 - DNA, 76 bp, Artificial Sequence; identical to SEQ ID NO: 19692
  Description of Artificial Sequence: Synthetic all nuts; 5' sequence + inner sequence + 3' sequence

SEQ ID NO: 35165 - DNA, 76 bp, Artificial Sequence; identical to SEQ ID NO: 3376
  Description of Artificial Sequence: Synthetic all nuts; 5' sequence + inner sequence + 3' sequence

SEQ ID NO: 35166 - DNA, 76 bp, Artificial Sequence
  Description of Artificial Sequence: Synthetic all nuts; 5' sequence + inner sequence + 3' sequence
tagggaagagaaggacatatgatgtacgcaacgaacctacgagtgatcgtgtattgactagtacatgaccacttga

SEQ ID NO: 35167 - DNA, 76 bp, Artificial Sequence
  Description of Artificial Sequence: Synthetic all nuts; 5' sequence + inner sequence + 3' sequence
tagggaagagaaggacatatgatgacgcgaacttgcctcaagtgtgccgtggattgactagtacatgaccacttga

SEQ ID NO: 35168 - DNA, 76 bp, Artificial Sequence; identical to SEQ ID NO: 3075
  Description of Artificial Sequence: Synthetic all nuts; 5' sequence + inner sequence + 3' sequence

SEQ ID NO: 35169 - DNA, 76 bp, Artificial Sequence; identical to SEQ ID NO: 3157
  Description of Artificial Sequence: Synthetic all nuts; 5' sequence + inner sequence + 3' sequence

SEQ ID NO: 35170 - DNA, 76 bp, Artificial Sequence; identical to SEQ ID NO: 3567
  Description of Artificial Sequence: Synthetic all nuts; 5' sequence + inner sequence + 3' sequence

SEQ ID NO: 35171 - DNA, 76 bp, Artificial Sequence; identical to SEQ ID NO: 7610
  Description of Artificial Sequence: Synthetic all nuts; 5' sequence + inner sequence + 3' sequence

SEQ ID NO: 35172 - DNA, 76 bp, Artificial Sequence; identical to SEQ ID NO: 7845
  Description of Artificial Sequence: Synthetic all nuts; 5' sequence + inner sequence + 3' sequence

SEQ ID NO: 35173 - DNA, 76 bp, Artificial Sequence; identical to SEQ ID NO: 7742
  Description of Artificial Sequence: Synthetic all nuts; 5' sequence + inner sequence + 3' sequence

SEQ ID NO: 35174 - DNA, 76 bp, Artificial Sequence; identical to SEQ ID NO: 3069
  Description of Artificial Sequence: Synthetic all nuts; 5' sequence + inner sequence + 3' sequence

SEQ ID NO: 35175 - DNA, 76 bp, Artificial Sequence
  Description of Artificial Sequence: Synthetic all nuts; 5' sequence + inner sequence + 3' sequence
tagggaagagaaggacatatgatgtacgcgcgacacctatcaatgtggacgtgttgactagtacatgaccacttga

SEQ ID NO: 35176 - DNA, 76 bp, Artificial Sequence; identical to SEQ ID NO: 11953
  Description of Artificial Sequence: Synthetic all nuts; 5' sequence + inner sequence + 3' sequence

SEQ ID NO: 35177 - DNA, 77 bp, Artificial Sequence; identical to SEQ ID NO: 23717
  Description of Artificial Sequence: Synthetic all nuts; 5' sequence + inner sequence + 3' sequence

SEQ ID NO: 35178 - DNA, 77 bp, Artificial Sequence; identical to SEQ ID NO: 7245
  Description of Artificial Sequence: Synthetic all nuts; 5' sequence + inner sequence + 3' sequence

SEQ ID NO: 35179 - DNA, 76 bp, Artificial Sequence; identical to SEQ ID NO: 11860
  Description of Artificial Sequence: Synthetic all nuts; 5' sequence + inner sequence + 3' sequence

SEQ ID NO: 35180 - DNA, 76 bp, Artificial Sequence; identical to SEQ ID NO: 3103
  Description of Artificial Sequence: Synthetic all nuts; 5' sequence + inner sequence + 3' sequence

SEQ ID NO: 35181 - DNA, 76 bp, Artificial Sequence; identical to SEQ ID NO: 3655
  Description of Artificial Sequence: Synthetic all nuts; 5' sequence + inner sequence + 3' sequence

SEQ ID NO: 35182 - DNA, 76 bp, Artificial Sequence; identical to SEQ ID NO: 3143
  Description of Artificial Sequence: Synthetic all nuts; 5' sequence + inner sequence + 3' sequence

SEQ ID NO: 35183 - DNA, 76 bp, Artificial Sequence; identical to SEQ ID NO: 11971
  Description of Artificial Sequence: Synthetic all nuts; 5' sequence + inner sequence + 3' sequence

SEQ ID NO: 35184 - DNA, 76 bp, Artificial Sequence; identical to SEQ ID NO: 11770
  Description of Artificial Sequence: Synthetic all nuts; 5' sequence + inner sequence + 3' sequence

SEQ ID NO: 35185 - DNA, 76 bp, Artificial Sequence; identical to SEQ ID NO: 3109
  Description of Artificial Sequence: Synthetic all nuts; 5' sequence + inner sequence + 3' sequence

SEQ ID NO: 35186 - DNA, 76 bp, Artificial Sequence; identical to SEQ ID NO: 3460
  Description of Artificial Sequence: Synthetic all nuts; 5' sequence + inner sequence + 3' sequence

SEQ ID NO: 35187 - DNA, 76 bp, Artificial Sequence; identical to SEQ ID NO: 23736
  Description of Artificial Sequence: Synthetic all nuts; 5' sequence + inner sequence + 3' sequence

SEQ ID NO: 35188 - DNA, 76 bp, Artificial Sequence; identical to SEQ ID NO: 3108
  Description of Artificial Sequence: Synthetic all nuts; 5' sequence + inner sequence + 3' sequence

SEQ ID NO: 35189 - DNA, 76 bp, Artificial Sequence; identical to SEQ ID NO: 19810
  Description of Artificial Sequence: Synthetic all nuts; 5' sequence + inner sequence + 3' sequence

SEQ ID NO: 35190 - DNA, 76 bp, Artificial Sequence
  Description of Artificial Sequence: Synthetic all nuts; 5' sequence + inner sequence + 3' sequence
tagggaagagaaggacatatgatgtcattccacatcctacacgtgggcacgtattgactagtacatgaccacttga

SEQ ID NO: 35191 - DNA, 76 bp, Artificial Sequence
  Description of Artificial Sequence: Synthetic all nuts; 5' sequence + inner sequence + 3' sequence
tagggaagagaaggacatatgatgcgagacaacgcgaaccgttccgatgcacgttgactagtacatgaccacttga

SEQ ID NO: 35192 - DNA, 76 bp, Artificial Sequence
  Description of Artificial Sequence: Synthetic all nuts; 5' sequence + inner sequence + 3' sequence
tagggaagagaaggacatatgatacgtcacgcgcataccaccttggctgcgtgttgactagtacatgaccacttga

SEQ ID NO: 35193 - DNA, 76 bp, Artificial Sequence
  Description of Artificial Sequence: Synthetic all nuts; 5' sequence + inner sequence + 3' sequence
tagggaagagaaggacatatgatgtcattccgcatcctacacgtgggcccgtattgactagtacatgaccacttga

SEQ ID NO: 35194 - DNA, 76 bp, Artificial Sequence; identical to SEQ ID NO: 3867
  Description of Artificial Sequence: Synthetic all nuts; 5' sequence + inner sequence + 3' sequence

SEQ ID NO: 35195 - DNA, 76 bp, Artificial Sequence; identical to SEQ ID NO: 11722
  Description of Artificial Sequence: Synthetic all nuts; 5' sequence + inner sequence + 3' sequence

SEQ ID NO: 35196 - DNA, 76 bp, Artificial Sequence; identical to SEQ ID NO: 3041
  Description of Artificial Sequence: Synthetic all nuts; 5' sequence + inner sequence + 3' sequence

SEQ ID NO: 35197 - DNA, 76 bp, Artificial Sequence; identical to SEQ ID NO: 11798
  Description of Artificial Sequence: Synthetic all nuts; 5' sequence + inner sequence + 3' sequence

SEQ ID NO: 35198 - DNA, 76 bp, Artificial Sequence; identical to SEQ ID NO: 3608
  Description of Artificial Sequence: Synthetic all nuts; 5' sequence + inner sequence + 3' sequence

SEQ ID NO: 35199 - DNA, 76 bp, Artificial Sequence; identical to SEQ ID NO: 11826
  Description of Artificial Sequence: Synthetic all nuts; 5' sequence + inner sequence + 3' sequence

SEQ ID NO: 35200 - DNA, 76 bp, Artificial Sequence; identical to SEQ ID NO: 3287
  Description of Artificial Sequence: Synthetic all nuts; 5' sequence + inner sequence + 3' sequence

SEQ ID NO: 35201 - DNA, 76 bp, Artificial Sequence; identical to SEQ ID NO: 3299
  Description of Artificial Sequence: Synthetic all nuts; 5' sequence + inner sequence + 3' sequence

SEQ ID NO: 35202 - DNA, 76 bp, Artificial Sequence; identical to SEQ ID NO: 23721
  Description of Artificial Sequence: Synthetic all nuts; 5' sequence + inner sequence + 3' sequence

SEQ ID NO: 35203 - DNA, 76 bp, Artificial Sequence; identical to SEQ ID NO: 3191
  Description of Artificial Sequence: Synthetic all nuts; 5' sequence + inner sequence + 3' sequence

SEQ ID NO: 35204 - DNA, 76 bp, Artificial Sequence; identical to SEQ ID NO: 31722
  Description of Artificial Sequence: Synthetic all nuts; 5' sequence + inner sequence + 3' sequence

SEQ ID NO: 35205 - DNA, 76 bp, Artificial Sequence; identical to SEQ ID NO: 15700
  Description of Artificial Sequence: Synthetic all nuts; 5' sequence + inner sequence + 3' sequence

SEQ ID NO: 35206 - DNA, 76 bp, Artificial Sequence; identical to SEQ ID NO: 23570
  Description of Artificial Sequence: Synthetic all nuts; 5' sequence + inner sequence + 3' sequence

SEQ ID NO: 35207 - DNA, 76 bp, Artificial Sequence; identical to SEQ ID NO: 19457
  Description of Artificial Sequence: Synthetic all nuts; 5' sequence + inner sequence + 3' sequence

SEQ ID NO: 35208 - DNA, 75 bp, Artificial Sequence; identical to SEQ ID NO: 3453
  Description of Artificial Sequence: Synthetic all nuts; 5' sequence + inner sequence + 3' sequence

SEQ ID NO: 35209 - DNA, 76 bp, Artificial Sequence
  Description of Artificial Sequence: Synthetic all nuts; 5' sequence + inner sequence + 3' sequence
tagggaagagaaggacatatgatggatgacgctaccctacacgtgggcacgtattgactagtacatgaccacttga

SEQ ID NO: 35210 - DNA, 76 bp, Artificial Sequence; identical to SEQ ID NO: 3479
  Description of Artificial Sequence: Synthetic all nuts; 5' sequence + inner sequence + 3' sequence

SEQ ID NO: 35211 - DNA, 76 bp, Artificial Sequence; identical to SEQ ID NO: 23949
  Description of Artificial Sequence: Synthetic all nuts; 5' sequence + inner sequence + 3' sequence

SEQ ID NO: 35212 - DNA, 76 bp, Artificial Sequence; identical to SEQ ID NO: 3177
  Description of Artificial Sequence: Synthetic all nuts; 5' sequence + inner sequence + 3' sequence

SEQ ID NO: 35213 - DNA, 76 bp, Artificial Sequence; identical to SEQ ID NO: 3673
  Description of Artificial Sequence: Synthetic all nuts; 5' sequence + inner sequence + 3' sequence

SEQ ID NO: 35214 - DNA, 76 bp, Artificial Sequence; identical to SEQ ID NO: 3950
  Description of Artificial Sequence: Synthetic all nuts; 5' sequence + inner sequence + 3' sequence

SEQ ID NO: 35215 - DNA, 76 bp, Artificial Sequence; identical to SEQ ID NO: 3775
  Description of Artificial Sequence: Synthetic all nuts; 5' sequence + inner sequence + 3' sequence

SEQ ID NO: 35216 - DNA, 76 bp, Artificial Sequence
  Description of Artificial Sequence: Synthetic all nuts; 5' sequence + inner sequence + 3' sequence
tagggaagagaaggacatatgatcgtaccgacagggacatgcaccgtgtcgcattgactagtacatgaccacttga

SEQ ID NO: 35217 - DNA, 76 bp, Artificial Sequence; identical to SEQ ID NO: 3279
  Description of Artificial Sequence: Synthetic all nuts; 5' sequence + inner sequence + 3' sequence

SEQ ID NO: 35218 - DNA, 76 bp, Artificial Sequence; identical to SEQ ID NO: 7774
  Description of Artificial Sequence: Synthetic all nuts; 5' sequence + inner sequence + 3' sequence

SEQ ID NO: 35219 - DNA, 76 bp, Artificial Sequence; identical to SEQ ID NO: 3807
  Description of Artificial Sequence: Synthetic all nuts; 5' sequence + inner sequence + 3' sequence

SEQ ID NO: 35220 - DNA, 76 bp, Artificial Sequence; identical to SEQ ID NO: 23528
  Description of Artificial Sequence: Synthetic all nuts; 5' sequence + inner sequence + 3' sequence

SEQ ID NO: 35221 - DNA, 76 bp, Artificial Sequence; identical to SEQ ID NO: 23817
  Description of Artificial Sequence: Synthetic all nuts; 5' sequence + inner sequence + 3' sequence

SEQ ID NO: 35222 - DNA, 76 bp, Artificial Sequence; identical to SEQ ID NO: 3800
  Description of Artificial Sequence: Synthetic all nuts; 5' sequence + inner sequence + 3' sequence

SEQ ID NO: 35223 - DNA, 76 bp, Artificial Sequence; identical to SEQ ID NO: 3132
  Description of Artificial Sequence: Synthetic all nuts; 5' sequence + inner sequence + 3' sequence

SEQ ID NO: 35224 - DNA, 76 bp, Artificial Sequence; identical to SEQ ID NO: 3159
  Description of Artificial Sequence: Synthetic all nuts; 5' sequence + inner sequence + 3' sequence

SEQ ID NO: 35225 - DNA, 75 bp, Artificial Sequence; identical to SEQ ID NO: 3873
  Description of Artificial Sequence: Synthetic all nuts; 5' sequence + inner sequence + 3' sequence

SEQ ID NO: 35226 - DNA, 76 bp, Artificial Sequence; identical to SEQ ID NO: 3568
  Description of Artificial Sequence: Synthetic all nuts; 5' sequence + inner sequence + 3' sequence

SEQ ID NO: 35227 - DNA, 76 bp, Artificial Sequence; identical to SEQ ID NO: 3984
  Description of Artificial Sequence: Synthetic all nuts; 5' sequence + inner sequence + 3' sequence

SEQ ID NO: 35228 - DNA, 76 bp, Artificial Sequence; identical to SEQ ID NO: 7653
  Description of Artificial Sequence: Synthetic all nuts; 5' sequence + inner sequence + 3' sequence

SEQ ID NO: 35229 - DNA, 76 bp, Artificial Sequence; identical to SEQ ID NO: 23753
  Description of Artificial Sequence: Synthetic all nuts; 5' sequence + inner sequence + 3' sequence

SEQ ID NO: 35230 - DNA, 76 bp, Artificial Sequence; identical to SEQ ID NO: 3129
  Description of Artificial Sequence: Synthetic all nuts; 5' sequence + inner sequence + 3' sequence

SEQ ID NO: 35231 - DNA, 76 bp, Artificial Sequence; identical to SEQ ID NO: 3841
  Description of Artificial Sequence: Synthetic all nuts; 5' sequence + inner sequence + 3' sequence

SEQ ID NO: 35232 - DNA, 76 bp, Artificial Sequence; identical to SEQ ID NO: 3055
  Description of Artificial Sequence: Synthetic all nuts; 5' sequence + inner sequence + 3' sequence

SEQ ID NO: 35233 - DNA, 76 bp, Artificial Sequence; identical to SEQ ID NO: 7576
  Description of Artificial Sequence: Synthetic all nuts; 5' sequence + inner sequence + 3' sequence

SEQ ID NO: 35234 - DNA, 76 bp, Artificial Sequence; identical to SEQ ID NO: 3175
  Description of Artificial Sequence: Synthetic all nuts; 5' sequence + inner sequence + 3' sequence

SEQ ID NO: 35235 - DNA, 76 bp, Artificial Sequence
  Description of Artificial Sequence: Synthetic all nuts; 5' sequence + inner sequence + 3' sequence
tagggaagagaaggacatatgatggcatggcgcgcaccctatcaacgtggacattgactagtacatgaccacttga

SEQ ID NO: 35236 - DNA, 76 bp, Artificial Sequence; identical to SEQ ID NO: 3082
  Description of Artificial Sequence: Synthetic all nuts; 5' sequence + inner sequence + 3' sequence

SEQ ID NO: 35237 - DNA, 76 bp, Artificial Sequence; identical to SEQ ID NO: 23458
  Description of Artificial Sequence: Synthetic all nuts; 5' sequence + inner sequence + 3' sequence

SEQ ID NO: 35238 - DNA, 76 bp, Artificial Sequence; identical to SEQ ID NO: 3088
  Description of Artificial Sequence: Synthetic all nuts; 5' sequence + inner sequence + 3' sequence

SEQ ID NO: 35239 - DNA, 76 bp, Artificial Sequence; identical to SEQ ID NO: 3240
  Description of Artificial Sequence: Synthetic all nuts; 5' sequence + inner sequence + 3' sequence

SEQ ID NO: 35240 - DNA, 76 bp, Artificial Sequence; identical to SEQ ID NO: 3043
  Description of Artificial Sequence: Synthetic all nuts; 5' sequence + inner sequence + 3' sequence

SEQ ID NO: 35241 - DNA, 76 bp, Artificial Sequence; identical to SEQ ID NO: 23573
  Description of Artificial Sequence: Synthetic all nuts; 5' sequence + inner sequence + 3' sequence

SEQ ID NO: 35242 - DNA, 76 bp, Artificial Sequence; identical to SEQ ID NO: 3048
  Description of Artificial Sequence: Synthetic all nuts; 5' sequence + inner sequence + 3' sequence

SEQ ID NO: 35243 - DNA, 76 bp, Artificial Sequence; identical to SEQ ID NO: 3029
  Description of Artificial Sequence: Synthetic all nuts; 5' sequence + inner sequence + 3' sequence

SEQ ID NO: 35244 - DNA, 76 bp, Artificial Sequence; identical to SEQ ID NO: 3426
  Description of Artificial Sequence: Synthetic all nuts; 5' sequence + inner sequence + 3' sequence

SEQ ID NO: 35245 - DNA, 76 bp, Artificial Sequence; identical to SEQ ID NO: 23737
  Description of Artificial Sequence: Synthetic all nuts; 5' sequence + inner sequence + 3' sequence

SEQ ID NO: 35246 - DNA, 76 bp, Artificial Sequence; identical to SEQ ID NO: 3033
  Description of Artificial Sequence: Synthetic all nuts; 5' sequence + inner sequence + 3' sequence

SEQ ID NO: 35247 - DNA, 76 bp, Artificial Sequence; identical to SEQ ID NO: 7743
  Description of Artificial Sequence: Synthetic all nuts; 5' sequence + inner sequence + 3' sequence

SEQ ID NO: 35248 - DNA, 76 bp, Artificial Sequence; identical to SEQ ID NO: 7864
  Description of Artificial Sequence: Synthetic all nuts; 5' sequence + inner sequence + 3' sequence

SEQ ID NO: 35249 - DNA, 76 bp, Artificial Sequence; identical to SEQ ID NO: 23527
  Description of Artificial Sequence: Synthetic all nuts; 5' sequence + inner sequence + 3' sequence

SEQ ID NO: 35250 - DNA, 76 bp, Artificial Sequence; identical to SEQ ID NO: 7814
  Description of Artificial Sequence: Synthetic all nuts; 5' sequence + inner sequence + 3' sequence

SEQ ID NO: 35251 - DNA, 76 bp, Artificial Sequence; identical to SEQ ID NO: 11868
  Description of Artificial Sequence: Synthetic all nuts; 5' sequence + inner sequence + 3' sequence

SEQ ID NO: 35252 - DNA, 76 bp, Artificial Sequence; identical to SEQ ID NO: 23733
  Description of Artificial Sequence: Synthetic all nuts; 5' sequence + inner sequence + 3' sequence

SEQ ID NO: 35253 - DNA, 76 bp, Artificial Sequence; identical to SEQ ID NO: 7931
  Description of Artificial Sequence: Synthetic all nuts; 5' sequence + inner sequence + 3' sequence

SEQ ID NO: 35254 - DNA, 76 bp, Artificial Sequence; identical to SEQ ID NO: 3594
  Description of Artificial Sequence: Synthetic all nuts; 5' sequence + inner sequence + 3' sequence

SEQ ID NO: 35255 - DNA, 76 bp, Artificial Sequence; identical to SEQ ID NO: 3752
  Description of Artificial Sequence: Synthetic all nuts; 5' sequence + inner sequence + 3' sequence

SEQ ID NO: 35256 - DNA, 74 bp, Artificial Sequence; identical to SEQ ID NO: 23321
  Description of Artificial Sequence: Synthetic all nuts; 5' sequence + inner sequence + 3' sequence

SEQ ID NO: 35257 - DNA, 76 bp, Artificial Sequence
  Description of Artificial Sequence: Synthetic all nuts; 5' sequence + inner sequence + 3' sequence
tagggaagagaaggacatatgatccgtggcgacatcaagcggtggtgtgcgtgttgactagtacatgaccacttga

SEQ ID NO: 35258 - DNA, 76 bp, Artificial Sequence; identical to SEQ ID NO: 31681
  Description of Artificial Sequence: Synthetic all nuts; 5' sequence + inner sequence + 3' sequence

SEQ ID NO: 35259 - DNA, 76 bp, Artificial Sequence; identical to SEQ ID NO: 3615
  Description of Artificial Sequence: Synthetic all nuts; 5' sequence + inner sequence + 3' sequence

SEQ ID NO: 35260 - DNA, 76 bp, Artificial Sequence; identical to SEQ ID NO: 3185
  Description of Artificial Sequence: Synthetic all nuts; 5' sequence + inner sequence + 3' sequence

SEQ ID NO: 35261 - DNA, 76 bp, Artificial Sequence
  Description of Artificial Sequence: Synthetic all nuts; 5' sequence + inner sequence + 3' sequence
tagggaagagaaggacatatgatgtactgcgatggatgtgcgttgtgctcggcttgactagtacatgaccacttga

SEQ ID NO: 35262 - DNA, 76 bp, Artificial Sequence; identical to SEQ ID NO: 3932
  Description of Artificial Sequence: Synthetic all nuts; 5' sequence + inner sequence + 3' sequence

SEQ ID NO: 35263 - DNA, 76 bp, Artificial Sequence; identical to SEQ ID NO: 15992
  Description of Artificial Sequence: Synthetic all nuts; 5' sequence + inner sequence + 3' sequence

SEQ ID NO: 35264 - DNA, 76 bp, Artificial Sequence; identical to SEQ ID NO: 23544
  Description of Artificial Sequence: Synthetic all nuts; 5' sequence + inner sequence + 3' sequence

SEQ ID NO: 35265 - DNA, 76 bp, Artificial Sequence; identical to SEQ ID NO: 3136
  Description of Artificial Sequence: Synthetic all nuts; 5' sequence + inner sequence + 3' sequence

SEQ ID NO: 35266 - DNA, 76 bp, Artificial Sequence
  Description of Artificial Sequence: Synthetic all nuts; 5' sequence + inner sequence + 3' sequence
tagggaagagaaggacatatgatcacgcactggacgaccctgagtgacgcatgttgactagtacatgaccacttga

SEQ ID NO: 35267 - DNA, 76 bp, Artificial Sequence; identical to SEQ ID NO: 3331
  Description of Artificial Sequence: Synthetic all nuts; 5' sequence + inner sequence + 3' sequence

SEQ ID NO: 35268 - DNA, 76 bp, Artificial Sequence
  Description of Artificial Sequence: Synthetic all nuts; 5' sequence + inner sequence + 3' sequence
tagggaagagaaggacatatgatgtcgtggcgcgaaccgtcgagtggtatggattgactagtacatgaccacttga

SEQ ID NO: 35269 - DNA, 76 bp, Artificial Sequence; identical to SEQ ID NO: 3714
  Description of Artificial Sequence: Synthetic all nuts; 5' sequence + inner sequence + 3' sequence

SEQ ID NO: 35270 - DNA, 76 bp, Artificial Sequence; identical to SEQ ID NO: 23466
  Description of Artificial Sequence: Synthetic all nuts; 5' sequence + inner sequence + 3' sequence

SEQ ID NO: 35271 - DNA, 76 bp, Artificial Sequence; identical to SEQ ID NO: 11756
  Description of Artificial Sequence: Synthetic all nuts; 5' sequence + inner sequence + 3' sequence

SEQ ID NO: 35272 - DNA, 76 bp, Artificial Sequence; identical to SEQ ID NO: 3406
  Description of Artificial Sequence: Synthetic all nuts; 5' sequence + inner sequence + 3' sequence

SEQ ID NO: 35273 - DNA, 76 bp, Artificial Sequence; identical to SEQ ID NO: 23669
  Description of Artificial Sequence: Synthetic all nuts; 5' sequence + inner sequence + 3' sequence

SEQ ID NO: 35274 - DNA, 76 bp, Artificial Sequence; identical to SEQ ID NO: 3190
  Description of Artificial Sequence: Synthetic all nuts; 5' sequence + inner sequence + 3' sequence

SEQ ID NO: 35275 - DNA, 76 bp, Artificial Sequence; identical to SEQ ID NO: 3874
  Description of Artificial Sequence: Synthetic all nuts; 5' sequence + inner sequence + 3' sequence

SEQ ID NO: 35276 - DNA, 76 bp, Artificial Sequence; identical to SEQ ID NO: 7535
  Description of Artificial Sequence: Synthetic all nuts; 5' sequence + inner sequence + 3' sequence

SEQ ID NO: 35277 - DNA, 76 bp, Artificial Sequence; identical to SEQ ID NO: 3476
  Description of Artificial Sequence: Synthetic all nuts; 5' sequence + inner sequence + 3' sequence

SEQ ID NO: 35278 - DNA, 76 bp, Artificial Sequence; identical to SEQ ID NO: 23912
  Description of Artificial Sequence: Synthetic all nuts; 5' sequence + inner sequence + 3' sequence

SEQ ID NO: 35279 - DNA, 75 bp, Artificial Sequence; identical to SEQ ID NO: 7968
  Description of Artificial Sequence: Synthetic all nuts; 5' sequence + inner sequence + 3' sequence

SEQ ID NO: 35280 - DNA, 76 bp, Artificial Sequence; identical to SEQ ID NO: 3685
  Description of Artificial Sequence: Synthetic all nuts; 5' sequence + inner sequence + 3' sequence

SEQ ID NO: 35281 - DNA, 76 bp, Artificial Sequence; identical to SEQ ID NO: 3127
  Description of Artificial Sequence: Synthetic all nuts; 5' sequence + inner sequence + 3' sequence

SEQ ID NO: 35282 - DNA, 76 bp, Artificial Sequence; identical to SEQ ID NO: 3171
  Description of Artificial Sequence: Synthetic all nuts; 5' sequence + inner sequence + 3' sequence

SEQ ID NO: 35283 - DNA, 76 bp, Artificial Sequence; identical to SEQ ID NO: 3636
  Description of Artificial Sequence: Synthetic all nuts; 5' sequence + inner sequence + 3' sequence

SEQ ID NO: 35284 - DNA, 76 bp, Artificial Sequence; identical to SEQ ID NO: 3003
  Description of Artificial Sequence: Synthetic all nuts; 5' sequence + inner sequence + 3' sequence

SEQ ID NO: 35285 - DNA, 76 bp, Artificial Sequence; identical to SEQ ID NO: 3110
  Description of Artificial Sequence: Synthetic all nuts; 5' sequence + inner sequence + 3' sequence

SEQ ID NO: 35286 - DNA, 76 bp, Artificial Sequence; identical to SEQ ID NO: 3228
  Description of Artificial Sequence: Synthetic all nuts; 5' sequence + inner sequence + 3' sequence

SEQ ID NO: 35287 - DNA, 76 bp, Artificial Sequence
  Description of Artificial Sequence: Synthetic all nuts; 5' sequence + inner sequence + 3' sequence
tagggaagagaaggacatatgatccgttgcgacatcaagcggtggtgtgcgtgttgactagtacatgaccacttga

SEQ ID NO: 35288 - DNA, 76 bp, Artificial Sequence; identical to SEQ ID NO: 11682
  Description of Artificial Sequence: Synthetic all nuts; 5' sequence + inner sequence + 3' sequence

SEQ ID NO: 35289 - DNA, 76 bp, Artificial Sequence; identical to SEQ ID NO: 7700
  Description of Artificial Sequence: Synthetic all nuts; 5' sequence + inner sequence + 3' sequence

SEQ ID NO: 35290 - DNA, 76 bp, Artificial Sequence; identical to SEQ ID NO: 3877
  Description of Artificial Sequence: Synthetic all nuts; 5' sequence + inner sequence + 3' sequence

SEQ ID NO: 35291 - DNA, 77 bp, Artificial Sequence
  Description of Artificial Sequence: Synthetic all nuts; 5' sequence + inner sequence + 3' sequence
tagggaagagaaggacatatgatgtactgcactgccctacacgtggacgatgtgttgactagtacatgaccacttga

SEQ ID NO: 35292 - DNA, 76 bp, Artificial Sequence; identical to SEQ ID NO: 3067
  Description of Artificial Sequence: Synthetic all nuts; 5' sequence + inner sequence + 3' sequence

SEQ ID NO: 35293 - DNA, 76 bp, Artificial Sequence; identical to SEQ ID NO: 3092
  Description of Artificial Sequence: Synthetic all nuts; 5' sequence + inner sequence + 3' sequence

SEQ ID NO: 35294 - DNA, 76 bp, Artificial Sequence; identical to SEQ ID NO: 3492
  Description of Artificial Sequence: Synthetic all nuts; 5' sequence + inner sequence + 3' sequence

SEQ ID NO: 35295 - DNA, 76 bp, Artificial Sequence
  Description of Artificial Sequence: Synthetic all nuts; 5' sequence + inner sequence + 3' sequence
tagggaagagaaggacatatgatgcacgtaacgcacaagcaggccatgtggcattgactagtacatgaccacttga

SEQ ID NO: 35296 - DNA, 76 bp, Artificial Sequence; identical to SEQ ID NO: 11782
  Description of Artificial Sequence: Synthetic all nuts; 5' sequence + inner sequence + 3' sequence

SEQ ID NO: 35297 - DNA, 76 bp, Artificial Sequence; identical to SEQ ID NO: 7573
  Description of Artificial Sequence: Synthetic all nuts; 5' sequence + inner sequence + 3' sequence

SEQ ID NO: 35298 - DNA, 76 bp, Artificial Sequence; identical to SEQ ID NO: 23617
  Description of Artificial Sequence: Synthetic all nuts; 5' sequence + inner sequence + 3' sequence

SEQ ID NO: 35299 - DNA, 76 bp, Artificial Sequence; identical to SEQ ID NO: 3154
  Description of Artificial Sequence: Synthetic all nuts; 5' sequence + inner sequence + 3' sequence

SEQ ID NO: 35300 - DNA, 76 bp, Artificial Sequence; identical to SEQ ID NO: 3768
  Description of Artificial Sequence: Synthetic all nuts; 5' sequence + inner sequence + 3' sequence

SEQ ID NO: 35301 - DNA, 76 bp, Artificial Sequence; identical to SEQ ID NO: 7407
  Description of Artificial Sequence: Synthetic all nuts; 5' sequence + inner sequence + 3' sequence

SEQ ID NO: 35302 - DNA, 76 bp, Artificial Sequence
  Description of Artificial Sequence: Synthetic all nuts; 5' sequence + inner sequence + 3' sequence
tagggaagagaaggacatatgatgaacgactcgcaccctatcatgaggccatgttgactagtacatgaccacttga

SEQ ID NO: 35303 - DNA, 76 bp, Artificial Sequence; identical to SEQ ID NO: 3262
  Description of Artificial Sequence: Synthetic all nuts; 5' sequence + inner sequence + 3' sequence

SEQ ID NO: 35304 - DNA, 76 bp, Artificial Sequence
  Description of Artificial Sequence: Synthetic all nuts; 5' sequence + inner sequence + 3' sequence
tagggaagagaaggacatatgatgtcattccgcatcctacacgtgggcacttattgactagtacatgaccacttga

SEQ ID NO: 35305 - DNA, 76 bp, Artificial Sequence; identical to SEQ ID NO: 3102
  Description of Artificial Sequence: Synthetic all nuts; 5' sequence + inner sequence + 3' sequence

SEQ ID NO: 35306 - DNA, 76 bp, Artificial Sequence; identical to SEQ ID NO: 7571
  Description of Artificial Sequence: Synthetic all nuts; 5' sequence + inner sequence + 3' sequence

SEQ ID NO: 35307 - DNA, 76 bp, Artificial Sequence; identical to SEQ ID NO: 23105
  Description of Artificial Sequence: Synthetic all nuts; 5' sequence + inner sequence + 3' sequence

SEQ ID NO: 35308 - DNA, 76 bp, Artificial Sequence; identical to SEQ ID NO: 7918
  Description of Artificial Sequence: Synthetic all nuts; 5' sequence + inner sequence + 3' sequence

SEQ ID NO: 35309 - DNA, 76 bp, Artificial Sequence; identical to SEQ ID NO: 3065
  Description of Artificial Sequence: Synthetic all nuts; 5' sequence + inner sequence + 3' sequence

SEQ ID NO: 35310 - DNA, 76 bp, Artificial Sequence; identical to SEQ ID NO: 3099
  Description of Artificial Sequence: Synthetic all nuts; 5' sequence + inner sequence + 3' sequence

SEQ ID NO: 35311 - DNA, 76 bp, Artificial Sequence; identical to SEQ ID NO: 3913
  Description of Artificial Sequence: Synthetic all nuts; 5' sequence + inner sequence + 3' sequence

SEQ ID NO: 35312 - DNA, 76 bp, Artificial Sequence; identical to SEQ ID NO: 3323
  Description of Artificial Sequence: Synthetic all nuts; 5' sequence + inner sequence + 3' sequence

SEQ ID NO: 35313 - DNA, 76 bp, Artificial Sequence; identical to SEQ ID NO: 3254
  Description of Artificial Sequence: Synthetic all nuts; 5' sequence + inner sequence + 3' sequence

SEQ ID NO: 35314 - DNA, 76 bp, Artificial Sequence; identical to SEQ ID NO: 31861
  Description of Artificial Sequence: Synthetic all nuts; 5' sequence + inner sequence + 3' sequence

SEQ ID NO: 35315 - DNA, 76 bp, Artificial Sequence; identical to SEQ ID NO: 3236
  Description of Artificial Sequence: Synthetic all nuts; 5' sequence + inner sequence + 3' sequence

SEQ ID NO: 35316 - DNA, 76 bp, Artificial Sequence; identical to SEQ ID NO: 7962
  Description of Artificial Sequence: Synthetic all nuts; 5' sequence + inner sequence + 3' sequence

SEQ ID NO: 35317 - DNA, 76 bp, Artificial Sequence; identical to SEQ ID NO: 15744
  Description of Artificial Sequence: Synthetic all nuts; 5' sequence + inner sequence + 3' sequence

SEQ ID NO: 35318 - DNA, 76 bp, Artificial Sequence; identical to SEQ ID NO: 23518
  Description of Artificial Sequence: Synthetic all nuts; 5' sequence + inner sequence + 3' sequence

SEQ ID NO: 35319 - DNA, 76 bp, Artificial Sequence; identical to SEQ ID NO: 3316
  Description of Artificial Sequence: Synthetic all nuts; 5' sequence + inner sequence + 3' sequence

SEQ ID NO: 35320 - DNA, 76 bp, Artificial Sequence; identical to SEQ ID NO: 3195
  Description of Artificial Sequence: Synthetic all nuts; 5' sequence + inner sequence + 3' sequence

SEQ ID NO: 35321 - DNA, 76 bp, Artificial Sequence
  Description of Artificial Sequence: Synthetic all nuts; 5' sequence + inner sequence + 3' sequence
tagggaagagaaggacatatgatcgatcccacgaacggtcacgaccaggcacattgactagtacatgaccacttga

SEQ ID NO: 35322 - DNA, 76 bp, Artificial Sequence; identical to SEQ ID NO: 3123
  Description of Artificial Sequence: Synthetic all nuts; 5' sequence + inner sequence + 3' sequence

SEQ ID NO: 35323 - DNA, 76 bp, Artificial Sequence; identical to SEQ ID NO: 3247
  Description of Artificial Sequence: Synthetic all nuts; 5' sequence + inner sequence + 3' sequence

SEQ ID NO: 35324 - DNA, 76 bp, Artificial Sequence; identical to SEQ ID NO: 3083
  Description of Artificial Sequence: Synthetic all nuts; 5' sequence + inner sequence + 3' sequence

SEQ ID NO: 35325 - DNA, 76 bp, Artificial Sequence; identical to SEQ ID NO: 3586
  Description of Artificial Sequence: Synthetic all nuts; 5' sequence + inner sequence + 3' sequence

SEQ ID NO: 35326 - DNA, 76 bp, Artificial Sequence; identical to SEQ ID NO: 3625
  Description of Artificial Sequence: Synthetic all nuts; 5' sequence + inner sequence + 3' sequence

SEQ ID NO: 35327 - DNA, 76 bp, Artificial Sequence; identical to SEQ ID NO: 3013
  Description of Artificial Sequence: Synthetic all nuts; 5' sequence + inner sequence + 3' sequence

SEQ ID NO: 35328 - DNA, 76 bp, Artificial Sequence; identical to SEQ ID NO: 3901
  Description of Artificial Sequence: Synthetic all nuts; 5' sequence + inner sequence + 3' sequence

SEQ ID NO: 35329 - DNA, 76 bp, Artificial Sequence; identical to SEQ ID NO: 19989
  Description of Artificial Sequence: Synthetic all nuts; 5' sequence + inner sequence + 3' sequence

SEQ ID NO: 35330 - DNA, 76 bp, Artificial Sequence; identical to SEQ ID NO: 11748
  Description of Artificial Sequence: Synthetic all nuts; 5' sequence + inner sequence + 3' sequence

SEQ ID NO: 35331 - DNA, 76 bp, Artificial Sequence; identical to SEQ ID NO: 7998
  Description of Artificial Sequence: Synthetic all nuts; 5' sequence + inner sequence + 3' sequence

SEQ ID NO: 35332 - DNA, 76 bp, Artificial Sequence
  Description of Artificial Sequence: Synthetic all nuts; 5' sequence + inner sequence + 3' sequence
tagggaagagaaggacatatgatcgaccctacacgtggcatggtgatgacggcttgactagtacatgaccacttga

SEQ ID NO: 35333 - DNA, 71 bp, Artificial Sequence; identical to SEQ ID NO: 19927
  Description of Artificial Sequence: Synthetic all nuts; 5' sequence + inner sequence + 3' sequence

SEQ ID NO: 35334 - DNA, 76 bp, Artificial Sequence; identical to SEQ ID NO: 11922
  Description of Artificial Sequence: Synthetic all nuts; 5' sequence + inner sequence + 3' sequence

SEQ ID NO: 35335 - DNA, 76 bp, Artificial Sequence; identical to SEQ ID NO: 23372
  Description of Artificial Sequence: Synthetic all nuts; 5' sequence + inner sequence + 3' sequence

SEQ ID NO: 35336 - DNA, 76 bp, Artificial Sequence; identical to SEQ ID NO: 23788
  Description of Artificial Sequence: Synthetic all nuts; 5' sequence + inner sequence + 3' sequence

SEQ ID NO: 35337 - DNA, 76 bp, Artificial Sequence; identical to SEQ ID NO: 3881
  Description of Artificial Sequence: Synthetic all nuts; 5' sequence + inner sequence + 3' sequence

SEQ ID NO: 35338 - DNA, 76 bp, Artificial Sequence; identical to SEQ ID NO: 3436
  Description of Artificial Sequence: Synthetic all nuts; 5' sequence + inner sequence + 3' sequence

SEQ ID NO: 35339 - DNA, 76 bp, Artificial Sequence; identical to SEQ ID NO: 3683
  Description of Artificial Sequence: Synthetic all nuts; 5' sequence + inner sequence + 3' sequence

SEQ ID NO: 35340 - DNA, 76 bp, Artificial Sequence; identical to SEQ ID NO: 3317
  Description of Artificial Sequence: Synthetic all nuts; 5' sequence + inner sequence + 3' sequence

SEQ ID NO: 35341 - DNA, 76 bp, Artificial Sequence
  Description of Artificial Sequence: Synthetic all nuts; 5' sequence + inner sequence + 3' sequence
tagggaagagaaggacatatgatccctagcgacatcaagcggtggtgtgcgtgttgactagtacatgaccacttga

SEQ ID NO: 35342 - DNA, 76 bp, Artificial Sequence; identical to SEQ ID NO: 3260
  Description of Artificial Sequence: Synthetic all nuts; 5' sequence + inner sequence + 3' sequence

SEQ ID NO: 35343 - DNA, 76 bp, Artificial Sequence; identical to SEQ ID NO: 15743
  Description of Artificial Sequence: Synthetic all nuts; 5' sequence + inner sequence + 3' sequence

SEQ ID NO: 35344 - DNA, 76 bp, Artificial Sequence; identical to SEQ ID NO: 3291
  Description of Artificial Sequence: Synthetic all nuts; 5' sequence + inner sequence + 3' sequence

SEQ ID NO: 35345 - DNA, 76 bp, Artificial Sequence; identical to SEQ ID NO: 3039
  Description of Artificial Sequence: Synthetic all nuts; 5' sequence + inner sequence + 3' sequence

SEQ ID NO: 35346 - DNA, 76 bp, Artificial Sequence; identical to SEQ ID NO: 3575
  Description of Artificial Sequence: Synthetic all nuts; 5' sequence + inner sequence + 3' sequence

SEQ ID NO: 35347 - DNA, 76 bp, Artificial Sequence; identical to SEQ ID NO: 3034
  Description of Artificial Sequence: Synthetic all nuts; 5' sequence + inner sequence + 3' sequence

SEQ ID NO: 35348 - DNA, 76 bp, Artificial Sequence; identical to SEQ ID NO: 3866
  Description of Artificial Sequence: Synthetic all nuts; 5' sequence + inner sequence + 3' sequence

SEQ ID NO: 35349 - DNA, 76 bp, Artificial Sequence; identical to SEQ ID NO: 7419
  Description of Artificial Sequence: Synthetic all nuts; 5' sequence + inner sequence + 3' sequence

SEQ ID NO: 35350 - DNA, 78 bp, Artificial Sequence
  Description of Artificial Sequence: Synthetic all nuts; 5' sequence + inner sequence + 3' sequence
tagggaagagaaggacatatgatggacgacgcgtgccctatcatgtgtgcgtggattgactagtacatgaccacttga

SEQ ID NO: 35351 - DNA, 76 bp, Artificial Sequence; identical to SEQ ID NO: 23483
  Description of Artificial Sequence: Synthetic all nuts; 5' sequence + inner sequence + 3' sequence

SEQ ID NO: 35352 - DNA, 76 bp, Artificial Sequence
  Description of Artificial Sequence: Synthetic all nuts; 5' sequence + inner sequence + 3' sequence
tagggaagagaaggacatatgatcgtaggtacggcacgacactcaatggcatgttgactagtacatgaccacttga

SEQ ID NO: 35353 - DNA, 76 bp, Artificial Sequence; identical to SEQ ID NO: 7745
  Description of Artificial Sequence: Synthetic all nuts; 5' sequence + inner sequence + 3' sequence

SEQ ID NO: 35354 - DNA, 76 bp, Artificial Sequence; identical to SEQ ID NO: 3551
  Description of Artificial Sequence: Synthetic all nuts; 5' sequence + inner sequence + 3' sequence

SEQ ID NO: 35355 - DNA, 76 bp, Artificial Sequence; identical to SEQ ID NO: 3523
  Description of Artificial Sequence: Synthetic all nuts; 5' sequence + inner sequence + 3' sequence

SEQ ID NO: 35356 - DNA, 76 bp, Artificial Sequence; identical to SEQ ID NO: 7787
  Description of Artificial Sequence: Synthetic all nuts; 5' sequence + inner sequence + 3' sequence

SEQ ID NO: 35357 - DNA, 76 bp, Artificial Sequence; identical to SEQ ID NO: 3395
  Description of Artificial Sequence: Synthetic all nuts; 5' sequence + inner sequence + 3' sequence

SEQ ID NO: 35358 - DNA, 76 bp, Artificial Sequence; identical to SEQ ID NO: 3131
  Description of Artificial Sequence: Synthetic all nuts; 5' sequence + inner sequence + 3' sequence

SEQ ID NO: 35359 - DNA, 76 bp, Artificial Sequence; identical to SEQ ID NO: 3211
  Description of Artificial Sequence: Synthetic all nuts; 5' sequence + inner sequence + 3' sequence

SEQ ID NO: 35360 - DNA, 76 bp, Artificial Sequence; identical to SEQ ID NO: 3230
  Description of Artificial Sequence: Synthetic all nuts; 5' sequence + inner sequence + 3' sequence

SEQ ID NO: 35361 - DNA, 76 bp, Artificial Sequence; identical to SEQ ID NO: 3315
  Description of Artificial Sequence: Synthetic all nuts; 5' sequence + inner sequence + 3' sequence

SEQ ID NO: 35362 - DNA, 76 bp, Artificial Sequence; identical to SEQ ID NO: 3478
  Description of Artificial Sequence: Synthetic all nuts; 5' sequence + inner sequence + 3' sequence

SEQ ID NO: 35363 - DNA, 76 bp, Artificial Sequence; identical to SEQ ID NO: 3606
  Description of Artificial Sequence: Synthetic all nuts; 5' sequence + inner sequence + 3' sequence

SEQ ID NO: 35364 - DNA, 76 bp, Artificial Sequence; identical to SEQ ID NO: 3233
  Description of Artificial Sequence: Synthetic all nuts; 5' sequence + inner sequence + 3' sequence

SEQ ID NO: 35365 - DNA, 76 bp, Artificial Sequence; identical to SEQ ID NO: 3365
  Description of Artificial Sequence: Synthetic all nuts; 5' sequence + inner sequence + 3' sequence

SEQ ID NO: 35366 - DNA, 76 bp, Artificial Sequence; identical to SEQ ID NO: 3314
  Description of Artificial Sequence: Synthetic all nuts; 5' sequence + inner sequence + 3' sequence

SEQ ID NO: 35367 - DNA, 76 bp, Artificial Sequence; identical to SEQ ID NO: 3756
  Description of Artificial Sequence: Synthetic all nuts; 5' sequence + inner sequence + 3' sequence

SEQ ID NO: 35368 - DNA, 76 bp, Artificial Sequence; identical to SEQ ID NO: 3116
  Description of Artificial Sequence: Synthetic all nuts; 5' sequence + inner sequence + 3' sequence

SEQ ID NO: 35369 - DNA, 76 bp, Artificial Sequence; identical to SEQ ID NO: 23551
  Description of Artificial Sequence: Synthetic all nuts; 5' sequence + inner sequence + 3' sequence

SEQ ID NO: 35370 - DNA, 76 bp, Artificial Sequence; identical to SEQ ID NO: 3912
  Description of Artificial Sequence: Synthetic all nuts; 5' sequence + inner sequence + 3' sequence

SEQ ID NO: 35371 - DNA, 76 bp, Artificial Sequence; identical to SEQ ID NO: 3526
  Description of Artificial Sequence: Synthetic all nuts; 5' sequence + inner sequence + 3' sequence

SEQ ID NO: 35372 - DNA, 75 bp, Artificial Sequence; identical to SEQ ID NO: 23287
  Description of Artificial Sequence: Synthetic all nuts; 5' sequence + inner sequence + 3' sequence

SEQ ID NO: 35373 - DNA, 76 bp, Artificial Sequence; identical to SEQ ID NO: 3438
  Description of Artificial Sequence: Synthetic all nuts; 5' sequence + inner sequence + 3' sequence

SEQ ID NO: 35374 - DNA, 76 bp, Artificial Sequence; identical to SEQ ID NO: 3447
  Description of Artificial Sequence: Synthetic all nuts; 5' sequence + inner sequence + 3' sequence

SEQ ID NO: 35375 - DNA, 76 bp, Artificial Sequence; identical to SEQ ID NO: 7702
  Description of Artificial Sequence: Synthetic all nuts; 5' sequence + inner sequence + 3' sequence

SEQ ID NO: 35376 - DNA, 76 bp, Artificial Sequence; identical to SEQ ID NO: 3903
  Description of Artificial Sequence: Synthetic all nuts; 5' sequence + inner sequence + 3' sequence

SEQ ID NO: 35377 - DNA, 76 bp, Artificial Sequence; identical to SEQ ID NO: 7238
  Description of Artificial Sequence: Synthetic all nuts; 5' sequence + inner sequence + 3' sequence

SEQ ID NO: 35378 - DNA, 76 bp, Artificial Sequence; identical to SEQ ID NO: 19770
  Description of Artificial Sequence: Synthetic all nuts; 5' sequence + inner sequence + 3' sequence

SEQ ID NO: 35379 - DNA, 76 bp, Artificial Sequence
  Description of Artificial Sequence: Synthetic all nuts; 5' sequence + inner sequence + 3' sequence
tagggaagagaaggacatatgatccatagcgacatcaagcggtggtgtgcgtgttgactagtacatgaccacttga

SEQ ID NO: 35380 - DNA, 76 bp, Artificial Sequence; identical to SEQ ID NO: 3624
  Description of Artificial Sequence: Synthetic all nuts; 5' sequence + inner sequence + 3' sequence

SEQ ID NO: 35381 - DNA, 76 bp, Artificial Sequence; identical to SEQ ID NO: 3493
  Description of Artificial Sequence: Synthetic all nuts; 5' sequence + inner sequence + 3' sequence

SEQ ID NO: 35382 - DNA, 76 bp, Artificial Sequence; identical to SEQ ID NO: 3021
  Description of Artificial Sequence: Synthetic all nuts; 5' sequence + inner sequence + 3' sequence

SEQ ID NO: 35383 - DNA, 76 bp, Artificial Sequence; identical to SEQ ID NO: 3263
  Description of Artificial Sequence: Synthetic all nuts; 5' sequence + inner sequence + 3' sequence

SEQ ID NO: 35384 - DNA, 76 bp, Artificial Sequence
  Description of Artificial Sequence: Synthetic all nuts; 5' sequence + inner sequence + 3' sequence
tagggaagagaaggacatatgatgtcattcagcatcctacacgtgggcacgtattgactagtacatgaccacttga

SEQ ID NO: 35385 - DNA, 76 bp, Artificial Sequence; identical to SEQ ID NO: 7376
  Description of Artificial Sequence: Synthetic all nuts; 5' sequence + inner sequence + 3' sequence

SEQ ID NO: 35386 - DNA, 76 bp, Artificial Sequence; identical to SEQ ID NO: 23486
  Description of Artificial Sequence: Synthetic all nuts; 5' sequence + inner sequence + 3' sequence

SEQ ID NO: 35387 - DNA, 76 bp, Artificial Sequence; identical to SEQ ID NO: 7644
  Description of Artificial Sequence: Synthetic all nuts; 5' sequence + inner sequence + 3' sequence

SEQ ID NO: 35388 - DNA, 76 bp, Artificial Sequence; identical to SEQ ID NO: 3891
  Description of Artificial Sequence: Synthetic all nuts; 5' sequence + inner sequence + 3' sequence

SEQ ID NO: 35389 - DNA, 73 bp, Artificial Sequence; identical to SEQ ID NO: 3885
  Description of Artificial Sequence: Synthetic all nuts; 5' sequence + inner sequence + 3' sequence

SEQ ID NO: 35390 - DNA, 77 bp, Artificial Sequence; identical to SEQ ID NO: 3503
  Description of Artificial Sequence: Synthetic all nuts; 5' sequence + inner sequence + 3' sequence

SEQ ID NO: 35391 - DNA, 76 bp, Artificial Sequence; identical to SEQ ID NO: 19748
  Description of Artificial Sequence: Synthetic all nuts; 5' sequence + inner sequence + 3' sequence

SEQ ID NO: 35392 - DNA, 76 bp, Artificial Sequence; identical to SEQ ID NO: 3312
  Description of Artificial Sequence: Synthetic all nuts; 5' sequence + inner sequence + 3' sequence

SEQ ID NO: 35393 - DNA, 76 bp, Artificial Sequence; identical to SEQ ID NO: 19612
  Description of Artificial Sequence: Synthetic all nuts; 5' sequence + inner sequence + 3' sequence

SEQ ID NO: 35394 - DNA, 76 bp, Artificial Sequence; identical to SEQ ID NO: 23874
  Description of Artificial Sequence: Synthetic all nuts; 5' sequence + inner sequence + 3' sequence

SEQ ID NO: 35395 - DNA, 76 bp, Artificial Sequence; identical to SEQ ID NO: 3056
  Description of Artificial Sequence: Synthetic all nuts; 5' sequence + inner sequence + 3' sequence

SEQ ID NO: 35396 - DNA, 76 bp, Artificial Sequence; identical to SEQ ID NO: 3308
  Description of Artificial Sequence: Synthetic all nuts; 5' sequence + inner sequence + 3' sequence

SEQ ID NO: 35397 - DNA, 76 bp, Artificial Sequence; identical to SEQ ID NO: 23954
  Description of Artificial Sequence: Synthetic all nuts; 5' sequence + inner sequence + 3' sequence

SEQ ID NO: 35398 - DNA, 76 bp, Artificial Sequence; identical to SEQ ID NO: 7492
  Description of Artificial Sequence: Synthetic all nuts; 5' sequence + inner sequence + 3' sequence

SEQ ID NO: 35399 - DNA, 76 bp, Artificial Sequence; identical to SEQ ID NO: 11670
  Description of Artificial Sequence: Synthetic all nuts; 5' sequence + inner sequence + 3' sequence

SEQ ID NO: 35400 - DNA, 76 bp, Artificial Sequence; identical to SEQ ID NO: 3163
  Description of Artificial Sequence: Synthetic all nuts; 5' sequence + inner sequence + 3' sequence

SEQ ID NO: 35401 - DNA, 76 bp, Artificial Sequence; identical to SEQ ID NO: 19399
  Description of Artificial Sequence: Synthetic all nuts; 5' sequence + inner sequence + 3' sequence

SEQ ID NO: 35402 - DNA, 76 bp, Artificial Sequence; identical to SEQ ID NO: 3352
  Description of Artificial Sequence: Synthetic all nuts; 5' sequence + inner sequence + 3' sequence

SEQ ID NO: 35403 - DNA, 74 bp, Artificial Sequence; identical to SEQ ID NO: 3423
  Description of Artificial Sequence: Synthetic all nuts; 5' sequence + inner sequence + 3' sequence

SEQ ID NO: 35404 - DNA, 76 bp, Artificial Sequence
  Description of Artificial Sequence: Synthetic all nuts; 5' sequence + inner sequence + 3' sequence
tagggaagagaaggacatatgatgcactgctctgacgcgatgtggtcggtggattgactagtacatgaccacttga

SEQ ID NO: 35405 - DNA, 76 bp, Artificial Sequence; identical to SEQ ID NO: 3347
  Description of Artificial Sequence: Synthetic all nuts; 5' sequence + inner sequence + 3' sequence

SEQ ID NO: 35406 - DNA, 76 bp, Artificial Sequence; identical to SEQ ID NO: 7988
  Description of Artificial Sequence: Synthetic all nuts; 5' sequence + inner sequence + 3' sequence

SEQ ID NO: 35407 - DNA, 76 bp, Artificial Sequence; identical to SEQ ID NO: 3217
  Description of Artificial Sequence: Synthetic all nuts; 5' sequence + inner sequence + 3' sequence

SEQ ID NO: 35408 - DNA, 76 bp, Artificial Sequence; identical to SEQ ID NO: 3212
  Description of Artificial Sequence: Synthetic all nuts; 5' sequence + inner sequence + 3' sequence

SEQ ID NO: 35409 - DNA, 76 bp, Artificial Sequence; identical to SEQ ID NO: 3326
  Description of Artificial Sequence: Synthetic all nuts; 5' sequence + inner sequence + 3' sequence

SEQ ID NO: 35410 - DNA, 76 bp, Artificial Sequence; identical to SEQ ID NO: 23629
  Description of Artificial Sequence: Synthetic all nuts; 5' sequence + inner sequence + 3' sequence

SEQ ID NO: 35411 - DNA, 76 bp, Artificial Sequence; identical to SEQ ID NO: 3060
  Description of Artificial Sequence: Synthetic all nuts; 5' sequence + inner sequence + 3' sequence

SEQ ID NO: 35412 - DNA, 76 bp, Artificial Sequence; identical to SEQ ID NO: 3613
  Description of Artificial Sequence: Synthetic all nuts; 5' sequence + inner sequence + 3' sequence

SEQ ID NO: 35413 - DNA, 76 bp, Artificial Sequence; identical to SEQ ID NO: 7694
  Description of Artificial Sequence: Synthetic all nuts; 5' sequence + inner sequence + 3' sequence

SEQ ID NO: 35414 - DNA, 76 bp, Artificial Sequence; identical to SEQ ID NO: 3583
  Description of Artificial Sequence: Synthetic all nuts; 5' sequence + inner sequence + 3' sequence

SEQ ID NO: 35415 - DNA, 76 bp, Artificial Sequence; identical to SEQ ID NO: 3231
  Description of Artificial Sequence: Synthetic all nuts; 5' sequence + inner sequence + 3' sequence

SEQ ID NO: 35416 - DNA, 76 bp, Artificial Sequence
  Description of Artificial Sequence: Synthetic all nuts; 5' sequence + inner sequence + 3' sequence
tagggaagagaaggacatatgatgacgcactcgtcctacacgttggcatgtgtttgactagtacatgaccacttga

SEQ ID NO: 35417 - DNA, 76 bp, Artificial Sequence; identical to SEQ ID NO: 3543
  Description of Artificial Sequence: Synthetic all nuts; 5' sequence + inner sequence + 3' sequence

SEQ ID NO: 35418 - DNA, 76 bp, Artificial Sequence; identical to SEQ ID NO: 3165
  Description of Artificial Sequence: Synthetic all nuts; 5' sequence + inner sequence + 3' sequence

SEQ ID NO: 35419 - DNA, 76 bp, Artificial Sequence; identical to SEQ ID NO: 3433
  Description of Artificial Sequence: Synthetic all nuts; 5' sequence + inner sequence + 3' sequence

SEQ ID NO: 35420 - DNA, 76 bp, Artificial Sequence; identical to SEQ ID NO: 3329
  Description of Artificial Sequence: Synthetic all nuts; 5' sequence + inner sequence + 3' sequence

SEQ ID NO: 35421 - DNA, 76 bp, Artificial Sequence; identical to SEQ ID NO: 23428
  Description of Artificial Sequence: Synthetic all nuts; 5' sequence + inner sequence + 3' sequence

SEQ ID NO: 35422 - DNA, 73 bp, Artificial Sequence
  Description of Artificial Sequence: Synthetic all nuts; 5' sequence + inner sequence + 3' sequence
tagggaagagaaggacatatgatccgatcgcacgtcaaggcaggcttggattgactagtacatgaccacttga

SEQ ID NO: 35423 - DNA, 76 bp, Artificial Sequence; identical to SEQ ID NO: 3388
  Description of Artificial Sequence: Synthetic all nuts; 5' sequence + inner sequence + 3' sequence

SEQ ID NO: 35424 - DNA, 76 bp, Artificial Sequence; identical to SEQ ID NO: 3394
  Description of Artificial Sequence: Synthetic all nuts; 5' sequence + inner sequence + 3' sequence

SEQ ID NO: 35425 - DNA, 76 bp, Artificial Sequence; identical to SEQ ID NO: 7525
  Description of Artificial Sequence: Synthetic all nuts; 5' sequence + inner sequence + 3' sequence

SEQ ID NO: 35426 - DNA, 76 bp, Artificial Sequence; identical to SEQ ID NO: 11678
  Description of Artificial Sequence: Synthetic all nuts; 5' sequence + inner sequence + 3' sequence

SEQ ID NO: 35427 - DNA, 76 bp, Artificial Sequence; identical to SEQ ID NO: 3442
  Description of Artificial Sequence: Synthetic all nuts; 5' sequence + inner sequence + 3' sequence

SEQ ID NO: 35428 - DNA, 76 bp, Artificial Sequence; identical to SEQ ID NO: 19750
  Description of Artificial Sequence: Synthetic all nuts; 5' sequence + inner sequence + 3' sequence

SEQ ID NO: 35429 - DNA, 76 bp, Artificial Sequence; identical to SEQ ID NO: 3224
  Description of Artificial Sequence: Synthetic all nuts; 5' sequence + inner sequence + 3' sequence

SEQ ID NO: 35430 - DNA, 76 bp, Artificial Sequence; identical to SEQ ID NO: 3024
  Description of Artificial Sequence: Synthetic all nuts; 5' sequence + inner sequence + 3' sequence

SEQ ID NO: 35431 - DNA, 76 bp, Artificial Sequence; identical to SEQ ID NO: 23502
  Description of Artificial Sequence: Synthetic all nuts; 5' sequence + inner sequence + 3' sequence

SEQ ID NO: 35432 - DNA, 76 bp, Artificial Sequence; identical to SEQ ID NO: 7816
  Description of Artificial Sequence: Synthetic all nuts; 5' sequence + inner sequence + 3' sequence

SEQ ID NO: 35433 - DNA, 76 bp, Artificial Sequence
  Description of Artificial Sequence: Synthetic all nuts; 5' sequence + inner sequence + 3' sequence
tagggaagagaaggacatatgatcctgatcgcacgtaaggtgggcgtgtgatgttgactagtacatgaccacttga

SEQ ID NO: 35434 - DNA, 76 bp, Artificial Sequence; identical to SEQ ID NO: 3576
  Description of Artificial Sequence: Synthetic all nuts; 5' sequence + inner sequence + 3' sequence

SEQ ID NO: 35435 - DNA, 76 bp, Artificial Sequence; identical to SEQ ID NO: 3281
  Description of Artificial Sequence: Synthetic all nuts; 5' sequence + inner sequence + 3' sequence

SEQ ID NO: 35436 - DNA, 76 bp, Artificial Sequence; identical to SEQ ID NO: 3595
  Description of Artificial Sequence: Synthetic all nuts; 5' sequence + inner sequence + 3' sequence

SEQ ID NO: 35437 - DNA, 76 bp, Artificial Sequence
  Description of Artificial Sequence: Synthetic all nuts; 5' sequence + inner sequence + 3' sequence
tagggaagagaaggacatatgatgtcattccgcatcctacacgtgggcacggattgactagtacatgaccacttga

SEQ ID NO: 35438 - DNA, 76 bp, Artificial Sequence; identical to SEQ ID NO: 7289
  Description of Artificial Sequence: Synthetic all nuts; 5' sequence + inner sequence + 3' sequence

SEQ ID NO: 35439 - DNA, 76 bp, Artificial Sequence; identical to SEQ ID NO: 23787
  Description of Artificial Sequence: Synthetic all nuts; 5' sequence + inner sequence + 3' sequence

SEQ ID NO: 35440 - DNA, 76 bp, Artificial Sequence; identical to SEQ ID NO: 23797
  Description of Artificial Sequence: Synthetic all nuts; 5' sequence + inner sequence + 3' sequence

SEQ ID NO: 35441 - DNA, 76 bp, Artificial Sequence; identical to SEQ ID NO: 3338
  Description of Artificial Sequence: Synthetic all nuts; 5' sequence + inner sequence + 3' sequence

SEQ ID NO: 35442 - DNA, 76 bp, Artificial Sequence; identical to SEQ ID NO: 19731
  Description of Artificial Sequence: Synthetic all nuts; 5' sequence + inner sequence + 3' sequence

SEQ ID NO: 35443 - DNA, 77 bp, Artificial Sequence; identical to SEQ ID NO: 3250
  Description of Artificial Sequence: Synthetic all nuts; 5' sequence + inner sequence + 3' sequence

SEQ ID NO: 35444 - DNA, 76 bp, Artificial Sequence; identical to SEQ ID NO: 7867
  Description of Artificial Sequence: Synthetic all nuts; 5' sequence + inner sequence + 3' sequence

SEQ ID NO: 35445 - DNA, 76 bp, Artificial Sequence; identical to SEQ ID NO: 3619
  Description of Artificial Sequence: Synthetic all nuts; 5' sequence + inner sequence + 3' sequence

SEQ ID NO: 35446 - DNA, 76 bp, Artificial Sequence
  Description of Artificial Sequence: Synthetic all nuts; 5' sequence + inner sequence + 3' sequence
tagggaagagaaggacatatgatggacgcacaggaccggccaagtgacatggattgactagtacatgaccacttga

SEQ ID NO: 35447 - DNA, 76 bp, Artificial Sequence; identical to SEQ ID NO: 23803
  Description of Artificial Sequence: Synthetic all nuts; 5' sequence + inner sequence + 3' sequence

SEQ ID NO: 35448 - DNA, 76 bp, Artificial Sequence; identical to SEQ ID NO: 23519
  Description of Artificial Sequence: Synthetic all nuts; 5' sequence + inner sequence + 3' sequence

SEQ ID NO: 35449 - DNA, 76 bp, Artificial Sequence; identical to SEQ ID NO: 3321
  Description of Artificial Sequence: Synthetic all nuts; 5' sequence + inner sequence + 3' sequence

SEQ ID NO: 35450 - DNA, 76 bp, Artificial Sequence; identical to SEQ ID NO: 3570
  Description of Artificial Sequence: Synthetic all nuts; 5' sequence + inner sequence + 3' sequence

SEQ ID NO: 35451 - DNA, 76 bp, Artificial Sequence; identical to SEQ ID NO: 7856
  Description of Artificial Sequence: Synthetic all nuts; 5' sequence + inner sequence + 3' sequence

SEQ ID NO: 35452 - DNA, 76 bp, Artificial Sequence; identical to SEQ ID NO: 3353
  Description of Artificial Sequence: Synthetic all nuts; 5' sequence + inner sequence + 3' sequence

SEQ ID NO: 35453 - DNA, 76 bp, Artificial Sequence; identical to SEQ ID NO: 3386
  Description of Artificial Sequence: Synthetic all nuts; 5' sequence + inner sequence + 3' sequence

SEQ ID NO: 35454 - DNA, 76 bp, Artificial Sequence; identical to SEQ ID NO: 3184
  Description of Artificial Sequence: Synthetic all nuts; 5' sequence + inner sequence + 3' sequence

SEQ ID NO: 35455 - DNA, 76 bp, Artificial Sequence; identical to SEQ ID NO: 3246
  Description of Artificial Sequence: Synthetic all nuts; 5' sequence + inner sequence + 3' sequence

SEQ ID NO: 35456 - DNA, 76 bp, Artificial Sequence; identical to SEQ ID NO: 15922
  Description of Artificial Sequence: Synthetic all nuts; 5' sequence + inner sequence + 3' sequence

SEQ ID NO: 35457 - DNA, 76 bp, Artificial Sequence; identical to SEQ ID NO: 7603
  Description of Artificial Sequence: Synthetic all nuts; 5' sequence + inner sequence + 3' sequence

SEQ ID NO: 35458 - DNA, 76 bp, Artificial Sequence; identical to SEQ ID NO: 23324
  Description of Artificial Sequence: Synthetic all nuts; 5' sequence + inner sequence + 3' sequence

SEQ ID NO: 35459 - DNA, 76 bp, Artificial Sequence
  Description of Artificial Sequence: Synthetic all nuts; 5' sequence + inner sequence + 3' sequence
tagggaagagaaggacatatgatccgtagcgacatcaagcggtggtgtgcgagttgactagtacatgaccacttga

SEQ ID NO: 35460 - DNA, 76 bp, Artificial Sequence; identical to SEQ ID NO: 3909
  Description of Artificial Sequence: Synthetic all nuts; 5' sequence + inner sequence + 3' sequence

SEQ ID NO: 35461 - DNA, 76 bp, Artificial Sequence; identical to SEQ ID NO: 3014
  Description of Artificial Sequence: Synthetic all nuts; 5' sequence + inner sequence + 3' sequence

SEQ ID NO: 35462 - DNA, 76 bp, Artificial Sequence; identical to SEQ ID NO: 3008
  Description of Artificial Sequence: Synthetic all nuts; 5' sequence + inner sequence + 3' sequence

SEQ ID NO: 35463 - DNA, 76 bp, Artificial Sequence; identical to SEQ ID NO: 23672
  Description of Artificial Sequence: Synthetic all nuts; 5' sequence + inner sequence + 3' sequence

SEQ ID NO: 35464 - DNA, 76 bp, Artificial Sequence
  Description of Artificial Sequence: Synthetic all nuts; 5' sequence + inner sequence + 3' sequence
tagggaagagaaggacatatgatccgtagcgaaatcaagcggtggtgtgcgtgttgactagtacatgaccacttga

SEQ ID NO: 35465 - DNA, 76 bp, Artificial Sequence; identical to SEQ ID NO: 3390
  Description of Artificial Sequence: Synthetic all nuts; 5' sequence + inner sequence + 3' sequence

SEQ ID NO: 35466 - DNA, 76 bp, Artificial Sequence; identical to SEQ ID NO: 3188
  Description of Artificial Sequence: Synthetic all nuts; 5' sequence + inner sequence + 3' sequence

SEQ ID NO: 35467 - DNA, 76 bp, Artificial Sequence; identical to SEQ ID NO: 7905
  Description of Artificial Sequence: Synthetic all nuts; 5' sequence + inner sequence + 3' sequence

SEQ ID NO: 35468 - DNA, 76 bp, Artificial Sequence; identical to SEQ ID NO: 3854
  Description of Artificial Sequence: Synthetic all nuts; 5' sequence + inner sequence + 3' sequence

SEQ ID NO: 35469 - DNA, 76 bp, Artificial Sequence; identical to SEQ ID NO: 3515
  Description of Artificial Sequence: Synthetic all nuts; 5' sequence + inner sequence + 3' sequence

SEQ ID NO: 35470 - DNA, 76 bp, Artificial Sequence; identical to SEQ ID NO: 3047
  Description of Artificial Sequence: Synthetic all nuts; 5' sequence + inner sequence + 3' sequence

SEQ ID NO: 35471 - DNA, 76 bp, Artificial Sequence; identical to SEQ ID NO: 3068
  Description of Artificial Sequence: Synthetic all nuts; 5' sequence + inner sequence + 3' sequence

SEQ ID NO: 35472 - DNA, 76 bp, Artificial Sequence; identical to SEQ ID NO: 3380
  Description of Artificial Sequence: Synthetic all nuts; 5' sequence + inner sequence + 3' sequence

SEQ ID NO: 35473 - DNA, 76 bp, Artificial Sequence; identical to SEQ ID NO: 27843
  Description of Artificial Sequence: Synthetic all nuts; 5' sequence + inner sequence + 3' sequence

SEQ ID NO: 35474 - DNA, 76 bp, Artificial Sequence; identical to SEQ ID NO: 3225
  Description of Artificial Sequence: Synthetic all nuts; 5' sequence + inner sequence + 3' sequence

SEQ ID NO: 35475 - DNA, 76 bp, Artificial Sequence; identical to SEQ ID NO: 23724
  Description of Artificial Sequence: Synthetic all nuts; 5' sequence + inner sequence + 3' sequence

SEQ ID NO: 35476 - DNA, 77 bp, Artificial Sequence; identical to SEQ ID NO: 3150
  Description of Artificial Sequence: Synthetic all nuts; 5' sequence + inner sequence + 3' sequence

SEQ ID NO: 35477 - DNA, 76 bp, Artificial Sequence
  Description of Artificial Sequence: Synthetic all nuts; 5' sequence + inner sequence + 3' sequence
tagggaagagaaggacatatgatgccatcgctgaccgacgtgagcatgtcgtcttgactagtacatgaccacttga

SEQ ID NO: 35478 - DNA, 76 bp, Artificial Sequence; identical to SEQ ID NO: 3061
  Description of Artificial Sequence: Synthetic all nuts; 5' sequence + inner sequence + 3' sequence

SEQ ID NO: 35479 - DNA, 76 bp, Artificial Sequence; identical to SEQ ID NO: 23398
  Description of Artificial Sequence: Synthetic all nuts; 5' sequence + inner sequence + 3' sequence

SEQ ID NO: 35480 - DNA, 76 bp, Artificial Sequence; identical to SEQ ID NO: 11889
  Description of Artificial Sequence: Synthetic all nuts; 5' sequence + inner sequence + 3' sequence

SEQ ID NO: 35481 - DNA, 76 bp, Artificial Sequence; identical to SEQ ID NO: 3783
  Description of Artificial Sequence: Synthetic all nuts; 5' sequence + inner sequence + 3' sequence

SEQ ID NO: 35482 - DNA, 76 bp, Artificial Sequence; identical to SEQ ID NO: 3044
  Description of Artificial Sequence: Synthetic all nuts; 5' sequence + inner sequence + 3' sequence

SEQ ID NO: 35483 - DNA, 76 bp, Artificial Sequence; identical to SEQ ID NO: 3183
  Description of Artificial Sequence: Synthetic all nuts; 5' sequence + inner sequence + 3' sequence

SEQ ID NO: 35484 - DNA, 76 bp, Artificial Sequence
  Description of Artificial Sequence: Synthetic all nuts; 5' sequence + inner sequence + 3' sequence
tagggaagagaaggacatatgatgtcattccgcatcctacacgagggcacgtattgactagtacatgaccacttga

SEQ ID NO: 35485 - DNA, 76 bp, Artificial Sequence; identical to SEQ ID NO: 3158
  Description of Artificial Sequence: Synthetic all nuts; 5' sequence + inner sequence + 3' sequence

SEQ ID NO: 35486 - DNA, 76 bp, Artificial Sequence; identical to SEQ ID NO: 3303
  Description of Artificial Sequence: Synthetic all nuts; 5' sequence + inner sequence + 3' sequence

SEQ ID NO: 35487 - DNA, 76 bp, Artificial Sequence; identical to SEQ ID NO: 3717
  Description of Artificial Sequence: Synthetic all nuts; 5' sequence + inner sequence + 3' sequence

SEQ ID NO: 35488 - DNA, 76 bp, Artificial Sequence; identical to SEQ ID NO: 7575
  Description of Artificial Sequence: Synthetic all nuts; 5' sequence + inner sequence + 3' sequence

SEQ ID NO: 35489 - DNA, 76 bp, Artificial Sequence; identical to SEQ ID NO: 3295
  Description of Artificial Sequence: Synthetic all nuts; 5' sequence + inner sequence + 3' sequence

SEQ ID NO: 35490 - DNA, 76 bp, Artificial Sequence; identical to SEQ ID NO: 3828
  Description of Artificial Sequence: Synthetic all nuts; 5' sequence + inner sequence + 3' sequence

SEQ ID NO: 35491 - DNA, 74 bp, Artificial Sequence; identical to SEQ ID NO: 3241
  Description of Artificial Sequence: Synthetic all nuts; 5' sequence + inner sequence + 3' sequence

SEQ ID NO: 35492 - DNA, 76 bp, Artificial Sequence; identical to SEQ ID NO: 3277
  Description of Artificial Sequence: Synthetic all nuts; 5' sequence + inner sequence + 3' sequence

SEQ ID NO: 35493 - DNA, 76 bp, Artificial Sequence; identical to SEQ ID NO: 11769
  Description of Artificial Sequence: Synthetic all nuts; 5' sequence + inner sequence + 3' sequence

SEQ ID NO: 35494 - DNA, 76 bp, Artificial Sequence; identical to SEQ ID NO: 7935
  Description of Artificial Sequence: Synthetic all nuts; 5' sequence + inner sequence + 3' sequence

SEQ ID NO: 35495 - DNA, 76 bp, Artificial Sequence; identical to SEQ ID NO: 3373
  Description of Artificial Sequence: Synthetic all nuts; 5' sequence + inner sequence + 3' sequence

SEQ ID NO: 35496 - DNA, 76 bp, Artificial Sequence; identical to SEQ ID NO: 7955
  Description of Artificial Sequence: Synthetic all nuts; 5' sequence + inner sequence + 3' sequence

SEQ ID NO: 35497 - DNA, 76 bp, Artificial Sequence; identical to SEQ ID NO: 3617
  Description of Artificial Sequence: Synthetic all nuts; 5' sequence + inner sequence + 3' sequence

SEQ ID NO: 35498 - DNA, 76 bp, Artificial Sequence; identical to SEQ ID NO: 3059
  Description of Artificial Sequence: Synthetic all nuts; 5' sequence + inner sequence + 3' sequence

SEQ ID NO: 35499 - DNA, 76 bp, Artificial Sequence; identical to SEQ ID NO: 7579
  Description of Artificial Sequence: Synthetic all nuts; 5' sequence + inner sequence + 3' sequence

SEQ ID NO: 35500 - DNA, 76 bp, Artificial Sequence; identical to SEQ ID NO: 3153
  Description of Artificial Sequence: Synthetic all nuts; 5' sequence + inner sequence + 3' sequence

SEQ ID NO: 35501 - DNA, 76 bp, Artificial Sequence; identical to SEQ ID NO: 3661
  Description of Artificial Sequence: Synthetic all nuts; 5' sequence + inner sequence + 3' sequence

SEQ ID NO: 35502 - DNA, 76 bp, Artificial Sequence; identical to SEQ ID NO: 23353
  Description of Artificial Sequence: Synthetic all nuts; 5' sequence + inner sequence + 3' sequence

SEQ ID NO: 35503 - DNA, 76 bp, Artificial Sequence
  Description of Artificial Sequence: Synthetic all nuts; 5' sequence + inner sequence + 3' sequence
tagggaagagaaggacatatgatccgcacgcaaccgtacgcaatgggctgtgattgactagtacatgaccacttga

SEQ ID NO: 35504 - DNA, 76 bp, Artificial Sequence; identical to SEQ ID NO: 3346
  Description of Artificial Sequence: Synthetic all nuts; 5' sequence + inner sequence + 3' sequence

SEQ ID NO: 35505 - DNA, 76 bp, Artificial Sequence
  Description of Artificial Sequence: Synthetic all nuts; 5' sequence + inner sequence + 3' sequence
tagggaagagaaggacatatgatggcattccgcatcctacacgtgggcacgtattgactagtacatgaccacttga

SEQ ID NO: 35506 - DNA, 76 bp, Artificial Sequence; identical to SEQ ID NO: 3358
  Description of Artificial Sequence: Synthetic all nuts; 5' sequence + inner sequence + 3' sequence

SEQ ID NO: 35507 - DNA, 76 bp, Artificial Sequence; identical to SEQ ID NO: 3620
  Description of Artificial Sequence: Synthetic all nuts; 5' sequence + inner sequence + 3' sequence

SEQ ID NO: 35508 - DNA, 76 bp, Artificial Sequence; identical to SEQ ID NO: 3758
  Description of Artificial Sequence: Synthetic all nuts; 5' sequence + inner sequence + 3' sequence

SEQ ID NO: 35509 - DNA, 76 bp, Artificial Sequence; identical to SEQ ID NO: 7356
  Description of Artificial Sequence: Synthetic all nuts; 5' sequence + inner sequence + 3' sequence

SEQ ID NO: 35510 - DNA, 76 bp, Artificial Sequence; identical to SEQ ID NO: 11960
  Description of Artificial Sequence: Synthetic all nuts; 5' sequence + inner sequence + 3' sequence

SEQ ID NO: 35511 - DNA, 76 bp, Artificial Sequence; identical to SEQ ID NO: 3644
  Description of Artificial Sequence: Synthetic all nuts; 5' sequence + inner sequence + 3' sequence

SEQ ID NO: 35512 - DNA, 76 bp, Artificial Sequence; identical to SEQ ID NO: 3468
  Description of Artificial Sequence: Synthetic all nuts; 5' sequence + inner sequence + 3' sequence

SEQ ID NO: 35513 - DNA, 76 bp, Artificial Sequence; identical to SEQ ID NO: 19696
  Description of Artificial Sequence: Synthetic all nuts; 5' sequence + inner sequence + 3' sequence

SEQ ID NO: 35514 - DNA, 76 bp, Artificial Sequence; identical to SEQ ID NO: 3409
  Description of Artificial Sequence: Synthetic all nuts; 5' sequence + inner sequence + 3' sequence

SEQ ID NO: 35515 - DNA, 76 bp, Artificial Sequence; identical to SEQ ID NO: 3905
  Description of Artificial Sequence: Synthetic all nuts; 5' sequence + inner sequence + 3' sequence

SEQ ID NO: 35516 - DNA, 76 bp, Artificial Sequence
  Description of Artificial Sequence: Synthetic all nuts; 5' sequence + inner sequence + 3' sequence
tagggaagagaaggacatatgatcgcagcgtcgatacgtcatgcacgctgacattgactagtacatgaccacttga

SEQ ID NO: 35517 - DNA, 75 bp, Artificial Sequence; identical to SEQ ID NO: 7869
  Description of Artificial Sequence: Synthetic all nuts; 5' sequence + inner sequence + 3' sequence

SEQ ID NO: 35518 - DNA, 76 bp, Artificial Sequence; identical to SEQ ID NO: 3218
  Description of Artificial Sequence: Synthetic all nuts; 5' sequence + inner sequence + 3' sequence

SEQ ID NO: 35519 - DNA, 76 bp, Artificial Sequence; identical to SEQ ID NO: 7631
  Description of Artificial Sequence: Synthetic all nuts; 5' sequence + inner sequence + 3' sequence

SEQ ID NO: 35520 - DNA, 76 bp, Artificial Sequence; identical to SEQ ID NO: 3276
  Description of Artificial Sequence: Synthetic all nuts; 5' sequence + inner sequence + 3' sequence

SEQ ID NO: 35521 - DNA, 76 bp, Artificial Sequence; identical to SEQ ID NO: 3371
  Description of Artificial Sequence: Synthetic all nuts; 5' sequence + inner sequence + 3' sequence

SEQ ID NO: 35522 - DNA, 76 bp, Artificial Sequence; identical to SEQ ID NO: 3432
  Description of Artificial Sequence: Synthetic all nuts; 5' sequence + inner sequence + 3' sequence

SEQ ID NO: 35523 - DNA, 76 bp, Artificial Sequence; identical to SEQ ID NO: 7888
  Description of Artificial Sequence: Synthetic all nuts; 5' sequence + inner sequence + 3' sequence

SEQ ID NO: 35524 - DNA, 76 bp, Artificial Sequence; identical to SEQ ID NO: 3072
  Description of Artificial Sequence: Synthetic all nuts; 5' sequence + inner sequence + 3' sequence

SEQ ID NO: 35525 - DNA, 76 bp, Artificial Sequence; identical to SEQ ID NO: 23929
  Description of Artificial Sequence: Synthetic all nuts; 5' sequence + inner sequence + 3' sequence

SEQ ID NO: 35526 - DNA, 76 bp, Artificial Sequence; identical to SEQ ID NO: 3678
  Description of Artificial Sequence: Synthetic all nuts; 5' sequence + inner sequence + 3' sequence

SEQ ID NO: 35527 - DNA, 76 bp, Artificial Sequence; identical to SEQ ID NO: 3484
  Description of Artificial Sequence: Synthetic all nuts; 5' sequence + inner sequence + 3' sequence

SEQ ID NO: 35528 - DNA, 76 bp, Artificial Sequence; identical to SEQ ID NO: 3524
  Description of Artificial Sequence: Synthetic all nuts; 5' sequence + inner sequence + 3' sequence

SEQ ID NO: 35529 - DNA, 76 bp, Artificial Sequence; identical to SEQ ID NO: 3477
  Description of Artificial Sequence: Synthetic all nuts; 5' sequence + inner sequence + 3' sequence

SEQ ID NO: 35530 - DNA, 76 bp, Artificial Sequence; identical to SEQ ID NO: 3579
  Description of Artificial Sequence: Synthetic all nuts; 5' sequence + inner sequence + 3' sequence

SEQ ID NO: 35531 - DNA, 76 bp, Artificial Sequence; identical to SEQ ID NO: 3046
  Description of Artificial Sequence: Synthetic all nuts; 5' sequence + inner sequence + 3' sequence

SEQ ID NO: 35532 - DNA, 76 bp, Artificial Sequence; identical to SEQ ID NO: 3351
  Description of Artificial Sequence: Synthetic all nuts; 5' sequence + inner sequence + 3' sequence

SEQ ID NO: 35533 - DNA, 76 bp, Artificial Sequence; identical to SEQ ID NO: 11579
  Description of Artificial Sequence: Synthetic all nuts; 5' sequence + inner sequence + 3' sequence

SEQ ID NO: 35534 - DNA, 76 bp, Artificial Sequence; identical to SEQ ID NO: 19695
  Description of Artificial Sequence: Synthetic all nuts; 5' sequence + inner sequence + 3' sequence

SEQ ID NO: 35535 - DNA, 76 bp, Artificial Sequence; identical to SEQ ID NO: 3274
  Description of Artificial Sequence: Synthetic all nuts; 5' sequence + inner sequence + 3' sequence

SEQ ID NO: 35536 - DNA, 76 bp, Artificial Sequence
  Description of Artificial Sequence: Synthetic all nuts; 5' sequence + inner sequence + 3' sequence
tagggaagagaaggacatatgatgtacgcacgatgagctatcaatgtgccatgttgactagtacatgaccacttga

SEQ ID NO: 35537 - DNA, 76 bp, Artificial Sequence; identical to SEQ ID NO: 23382
  Description of Artificial Sequence: Synthetic all nuts; 5' sequence + inner sequence + 3' sequence

SEQ ID NO: 35538 - DNA, 75 bp, Artificial Sequence; identical to SEQ ID NO: 3070
  Description of Artificial Sequence: Synthetic all nuts; 5' sequence + inner sequence + 3' sequence

SEQ ID NO: 35539 - DNA, 72 bp, Artificial Sequence; identical to SEQ ID NO: 3822
  Description of Artificial Sequence: Synthetic all nuts; 5' sequence + inner sequence + 3' sequence

SEQ ID NO: 35540 - DNA, 76 bp, Artificial Sequence; identical to SEQ ID NO: 3401
  Description of Artificial Sequence: Synthetic all nuts; 5' sequence + inner sequence + 3' sequence

SEQ ID NO: 35541 - DNA, 76 bp, Artificial Sequence; identical to SEQ ID NO: 3821
  Description of Artificial Sequence: Synthetic all nuts; 5' sequence + inner sequence + 3' sequence

SEQ ID NO: 35542 - DNA, 76 bp, Artificial Sequence
  Description of Artificial Sequence: Synthetic all nuts; 5' sequence + inner sequence + 3' sequence
tagggaagagaaggacatatgatgtacgcatcgtcccgtcatgttgttccgtattgactagtacatgaccacttga

SEQ ID NO: 35543 - DNA, 76 bp, Artificial Sequence; identical to SEQ ID NO: 15821
  Description of Artificial Sequence: Synthetic all nuts; 5' sequence + inner sequence + 3' sequence

SEQ ID NO: 35544 - DNA, 76 bp, Artificial Sequence; identical to SEQ ID NO: 3695
  Description of Artificial Sequence: Synthetic all nuts; 5' sequence + inner sequence + 3' sequence

SEQ ID NO: 35545 - DNA, 76 bp, Artificial Sequence; identical to SEQ ID NO: 3020
  Description of Artificial Sequence: Synthetic all nuts; 5' sequence + inner sequence + 3' sequence

SEQ ID NO: 35546 - DNA, 76 bp, Artificial Sequence; identical to SEQ ID NO: 7641
  Description of Artificial Sequence: Synthetic all nuts; 5' sequence + inner sequence + 3' sequence

SEQ ID NO: 35547 - DNA, 76 bp, Artificial Sequence; identical to SEQ ID NO: 19677
  Description of Artificial Sequence: Synthetic all nuts; 5' sequence + inner sequence + 3' sequence

SEQ ID NO: 35548 - DNA, 76 bp, Artificial Sequence; identical to SEQ ID NO: 3362
  Description of Artificial Sequence: Synthetic all nuts; 5' sequence + inner sequence + 3' sequence

SEQ ID NO: 35549 - DNA, 76 bp, Artificial Sequence; identical to SEQ ID NO: 7280
  Description of Artificial Sequence: Synthetic all nuts; 5' sequence + inner sequence + 3' sequence

SEQ ID NO: 35550 - DNA, 76 bp, Artificial Sequence; identical to SEQ ID NO: 23604
  Description of Artificial Sequence: Synthetic all nuts; 5' sequence + inner sequence + 3' sequence

SEQ ID NO: 35551 - DNA, 76 bp, Artificial Sequence; identical to SEQ ID NO: 3121
  Description of Artificial Sequence: Synthetic all nuts; 5' sequence + inner sequence + 3' sequence

SEQ ID NO: 35552 - DNA, 76 bp, Artificial Sequence
  Description of Artificial Sequence: Synthetic all nuts; 5' sequence + inner sequence + 3' sequence
tagggaagagaaggacatatgatggccaaacgaagcgtggatcagtgcttgtcttgactagtacatgaccacttga

SEQ ID NO: 35553 - DNA, 76 bp, Artificial Sequence; identical to SEQ ID NO: 7987
  Description of Artificial Sequence: Synthetic all nuts; 5' sequence + inner sequence + 3' sequence

SEQ ID NO: 35554 - DNA, 76 bp, Artificial Sequence; identical to SEQ ID NO: 3038
  Description of Artificial Sequence: Synthetic all nuts; 5' sequence + inner sequence + 3' sequence

SEQ ID NO: 35555 - DNA, 76 bp, Artificial Sequence; identical to SEQ ID NO: 11824
  Description of Artificial Sequence: Synthetic all nuts; 5' sequence + inner sequence + 3' sequence

SEQ ID NO: 35556 - DNA, 76 bp, Artificial Sequence; identical to SEQ ID NO: 3532
  Description of Artificial Sequence: Synthetic all nuts; 5' sequence + inner sequence + 3' sequence

SEQ ID NO: 35557 - DNA, 76 bp, Artificial Sequence; identical to SEQ ID NO: 8000
  Description of Artificial Sequence: Synthetic all nuts; 5' sequence + inner sequence + 3' sequence

SEQ ID NO: 35558 - DNA, 76 bp, Artificial Sequence; identical to SEQ ID NO: 3596
  Description of Artificial Sequence: Synthetic all nuts; 5' sequence + inner sequence + 3' sequence

SEQ ID NO: 35559 - DNA, 76 bp, Artificial Sequence; identical to SEQ ID NO: 3434
  Description of Artificial Sequence: Synthetic all nuts; 5' sequence + inner sequence + 3' sequence

SEQ ID NO: 35560 - DNA, 76 bp, Artificial Sequence; identical to SEQ ID NO: 23974
  Description of Artificial Sequence: Synthetic all nuts; 5' sequence + inner sequence + 3' sequence

SEQ ID NO: 35561 - DNA, 76 bp, Artificial Sequence; identical to SEQ ID NO: 7761
  Description of Artificial Sequence: Synthetic all nuts; 5' sequence + inner sequence + 3' sequence

SEQ ID NO: 35562 - DNA, 76 bp, Artificial Sequence; identical to SEQ ID NO: 3418
  Description of Artificial Sequence: Synthetic all nuts; 5' sequence + inner sequence + 3' sequence

SEQ ID NO: 35563 - DNA, 75 bp, Artificial Sequence; identical to SEQ ID NO: 19665
  Description of Artificial Sequence: Synthetic all nuts; 5' sequence + inner sequence + 3' sequence

SEQ ID NO: 35564 - DNA, 76 bp, Artificial Sequence; identical to SEQ ID NO: 23884
  Description of Artificial Sequence: Synthetic all nuts; 5' sequence + inner sequence + 3' sequence

SEQ ID NO: 35565 - DNA, 76 bp, Artificial Sequence
  Description of Artificial Sequence: Synthetic all nuts; 5' sequence + inner sequence + 3' sequence
tagggaagagaaggacatatgatggaacgacgcgcaccgtatcaagttgggcattgactagtacatgaccacttga

SEQ ID NO: 35566 - DNA, 76 bp, Artificial Sequence; identical to SEQ ID NO: 23463
  Description of Artificial Sequence: Synthetic all nuts; 5' sequence + inner sequence + 3' sequence

SEQ ID NO: 35567 - DNA, 76 bp, Artificial Sequence; identical to SEQ ID NO: 3419
  Description of Artificial Sequence: Synthetic all nuts; 5' sequence + inner sequence + 3' sequence

SEQ ID NO: 35568 - DNA, 76 bp, Artificial Sequence; identical to SEQ ID NO: 11892
  Description of Artificial Sequence: Synthetic all nuts; 5' sequence + inner sequence + 3' sequence

SEQ ID NO: 35569 - DNA, 76 bp, Artificial Sequence; identical to SEQ ID NO: 3915
  Description of Artificial Sequence: Synthetic all nuts; 5' sequence + inner sequence + 3' sequence

SEQ ID NO: 35570 - DNA, 76 bp, Artificial Sequence; identical to SEQ ID NO: 3507
  Description of Artificial Sequence: Synthetic all nuts; 5' sequence + inner sequence + 3' sequence

SEQ ID NO: 35571 - DNA, 76 bp, Artificial Sequence; identical to SEQ ID NO: 27839
  Description of Artificial Sequence: Synthetic all nuts; 5' sequence + inner sequence + 3' sequence

SEQ ID NO: 35572 - DNA, 76 bp, Artificial Sequence; identical to SEQ ID NO: 3223
  Description of Artificial Sequence: Synthetic all nuts; 5' sequence + inner sequence + 3' sequence

SEQ ID NO: 35573 - DNA, 76 bp, Artificial Sequence; identical to SEQ ID NO: 3403
  Description of Artificial Sequence: Synthetic all nuts; 5' sequence + inner sequence + 3' sequence

SEQ ID NO: 35574 - DNA, 76 bp, Artificial Sequence
  Description of Artificial Sequence: Synthetic all nuts; 5' sequence + inner sequence + 3' sequence
tagggaagagaaggacatatgatggcatgcgatggatgtgcgttgtgtctgtcttgactagtacatgaccacttga

SEQ ID NO: 35575 - DNA, 76 bp, Artificial Sequence; identical to SEQ ID NO: 19585
  Description of Artificial Sequence: Synthetic all nuts; 5' sequence + inner sequence + 3' sequence

SEQ ID NO: 35576 - DNA, 76 bp, Artificial Sequence; identical to SEQ ID NO: 31885
  Description of Artificial Sequence: Synthetic all nuts; 5' sequence + inner sequence + 3' sequence

SEQ ID NO: 35577 - DNA, 76 bp, Artificial Sequence; identical to SEQ ID NO: 23990
  Description of Artificial Sequence: Synthetic all nuts; 5' sequence + inner sequence + 3' sequence

SEQ ID NO: 35578 - DNA, 76 bp, Artificial Sequence; identical to SEQ ID NO: 23580
  Description of Artificial Sequence: Synthetic all nuts; 5' sequence + inner sequence + 3' sequence

SEQ ID NO: 35579 - DNA, 76 bp, Artificial Sequence; identical to SEQ ID NO: 3156
  Description of Artificial Sequence: Synthetic all nuts; 5' sequence + inner sequence + 3' sequence

SEQ ID NO: 35580 - DNA, 76 bp, Artificial Sequence; identical to SEQ ID NO: 3816
  Description of Artificial Sequence: Synthetic all nuts; 5' sequence + inner sequence + 3' sequence

SEQ ID NO: 35581 - DNA, 76 bp, Artificial Sequence; identical to SEQ ID NO: 3697
  Description of Artificial Sequence: Synthetic all nuts; 5' sequence + inner sequence + 3' sequence

SEQ ID NO: 35582 - DNA, 76 bp, Artificial Sequence; identical to SEQ ID NO: 3325
  Description of Artificial Sequence: Synthetic all nuts; 5' sequence + inner sequence + 3' sequence

SEQ ID NO: 35583 - DNA, 76 bp, Artificial Sequence; identical to SEQ ID NO: 3806
  Description of Artificial Sequence: Synthetic all nuts; 5' sequence + inner sequence + 3' sequence

SEQ ID NO: 35584 - DNA, 76 bp, Artificial Sequence
  Description of Artificial Sequence: Synthetic all nuts; 5' sequence + inner sequence + 3' sequence
tagggaagagaaggacatatgatgcacgcaacgaacctacgagtgatcgtggattgactagtacatgaccacttga

SEQ ID NO: 35585 - DNA, 76 bp, Artificial Sequence
  Description of Artificial Sequence: Synthetic all nuts; 5' sequence + inner sequence + 3' sequence
tagggaagagaaggacatatgatgtcatgcacgaacactatcatggcggcattttgactagtacatgaccacttga

SEQ ID NO: 35586 - DNA, 76 bp, Artificial Sequence; identical to SEQ ID NO: 23708
  Description of Artificial Sequence: Synthetic all nuts; 5' sequence + inner sequence + 3' sequence

SEQ ID NO: 35587 - DNA, 76 bp, Artificial Sequence; identical to SEQ ID NO: 3375
  Description of Artificial Sequence: Synthetic all nuts; 5' sequence + inner sequence + 3' sequence

SEQ ID NO: 35588 - DNA, 76 bp, Artificial Sequence; identical to SEQ ID NO: 3611
  Description of Artificial Sequence: Synthetic all nuts; 5' sequence + inner sequence + 3' sequence

SEQ ID NO: 35589 - DNA, 76 bp, Artificial Sequence; identical to SEQ ID NO: 3450
  Description of Artificial Sequence: Synthetic all nuts; 5' sequence + inner sequence + 3' sequence

SEQ ID NO: 35590 - DNA, 76 bp, Artificial Sequence; identical to SEQ ID NO: 3152
  Description of Artificial Sequence: Synthetic all nuts; 5' sequence + inner sequence + 3' sequence

SEQ ID NO: 35591 - DNA, 76 bp, Artificial Sequence; identical to SEQ ID NO: 3385
  Description of Artificial Sequence: Synthetic all nuts; 5' sequence + inner sequence + 3' sequence

SEQ ID NO: 35592 - DNA, 76 bp, Artificial Sequence; identical to SEQ ID NO: 3440
  Description of Artificial Sequence: Synthetic all nuts; 5' sequence + inner sequence + 3' sequence

SEQ ID NO: 35593 - DNA, 76 bp, Artificial Sequence; identical to SEQ ID NO: 7659
  Description of Artificial Sequence: Synthetic all nuts; 5' sequence + inner sequence + 3' sequence

SEQ ID NO: 35594 - DNA, 76 bp, Artificial Sequence; identical to SEQ ID NO: 7802
  Description of Artificial Sequence: Synthetic all nuts; 5' sequence + inner sequence + 3' sequence

SEQ ID NO: 35595 - DNA, 76 bp, Artificial Sequence; identical to SEQ ID NO: 3010
  Description of Artificial Sequence: Synthetic all nuts; 5' sequence + inner sequence + 3' sequence

SEQ ID NO: 35596 - DNA, 77 bp, Artificial Sequence; identical to SEQ ID NO: 3258
  Description of Artificial Sequence: Synthetic all nuts; 5' sequence + inner sequence + 3' sequence

SEQ ID NO: 35597 - DNA, 76 bp, Artificial Sequence; identical to SEQ ID NO: 3754
  Description of Artificial Sequence: Synthetic all nuts; 5' sequence + inner sequence + 3' sequence

SEQ ID NO: 35598 - DNA, 76 bp, Artificial Sequence; identical to SEQ ID NO: 3094
  Description of Artificial Sequence: Synthetic all nuts; 5' sequence + inner sequence + 3' sequence

SEQ ID NO: 35599 - DNA, 76 bp, Artificial Sequence; identical to SEQ ID NO: 15944
  Description of Artificial Sequence: Synthetic all nuts; 5' sequence + inner sequence + 3' sequence

SEQ ID NO: 35600 - DNA, 76 bp, Artificial Sequence; identical to SEQ ID NO: 3728
  Description of Artificial Sequence: Synthetic all nuts; 5' sequence + inner sequence + 3' sequence

SEQ ID NO: 35601 - DNA, 76 bp, Artificial Sequence; identical to SEQ ID NO: 23302
  Description of Artificial Sequence: Synthetic all nuts; 5' sequence + inner sequence + 3' sequence

SEQ ID NO: 35602 - DNA, 76 bp, Artificial Sequence; identical to SEQ ID NO: 15945
  Description of Artificial Sequence: Synthetic all nuts; 5' sequence + inner sequence + 3' sequence

SEQ ID NO: 35603 - DNA, 76 bp, Artificial Sequence; identical to SEQ ID NO: 3356
  Description of Artificial Sequence: Synthetic all nuts; 5' sequence + inner sequence + 3' sequence

SEQ ID NO: 35604 - DNA, 76 bp, Artificial Sequence; identical to SEQ ID NO: 3666
  Description of Artificial Sequence: Synthetic all nuts; 5' sequence + inner sequence + 3' sequence

SEQ ID NO: 35605 - DNA, 76 bp, Artificial Sequence; identical to SEQ ID NO: 3916
  Description of Artificial Sequence: Synthetic all nuts; 5' sequence + inner sequence + 3' sequence

SEQ ID NO: 35606 - DNA, 76 bp, Artificial Sequence
  Description of Artificial Sequence: Synthetic all nuts; 5' sequence + inner sequence + 3' sequence
tagggaagagaaggacatatgatcgcaccgtcgagacgtcatgcacgctgacattgactagtacatgaccacttga

SEQ ID NO: 35607 - DNA, 76 bp, Artificial Sequence; identical to SEQ ID NO: 23385
  Description of Artificial Sequence: Synthetic all nuts; 5' sequence + inner sequence + 3' sequence

SEQ ID NO: 35608 - DNA, 76 bp, Artificial Sequence; identical to SEQ ID NO: 3090
  Description of Artificial Sequence: Synthetic all nuts; 5' sequence + inner sequence + 3' sequence

SEQ ID NO: 35609 - DNA, 76 bp, Artificial Sequence; identical to SEQ ID NO: 3105
  Description of Artificial Sequence: Synthetic all nuts; 5' sequence + inner sequence + 3' sequence

SEQ ID NO: 35610 - DNA, 76 bp, Artificial Sequence; identical to SEQ ID NO: 3050
  Description of Artificial Sequence: Synthetic all nuts; 5' sequence + inner sequence + 3' sequence

SEQ ID NO: 35611 - DNA, 76 bp, Artificial Sequence; identical to SEQ ID NO: 23691
  Description of Artificial Sequence: Synthetic all nuts; 5' sequence + inner sequence + 3' sequence

SEQ ID NO: 35612 - DNA, 76 bp, Artificial Sequence; identical to SEQ ID NO: 23560
  Description of Artificial Sequence: Synthetic all nuts; 5' sequence + inner sequence + 3' sequence

SEQ ID NO: 35613 - DNA, 76 bp, Artificial Sequence; identical to SEQ ID NO: 3580
  Description of Artificial Sequence: Synthetic all nuts; 5' sequence + inner sequence + 3' sequence

SEQ ID NO: 35614 - DNA, 76 bp, Artificial Sequence; identical to SEQ ID NO: 3994
  Description of Artificial Sequence: Synthetic all nuts; 5' sequence + inner sequence + 3' sequence

SEQ ID NO: 35615 - DNA, 76 bp, Artificial Sequence; identical to SEQ ID NO: 3324
  Description of Artificial Sequence: Synthetic all nuts; 5' sequence + inner sequence + 3' sequence

SEQ ID NO: 35616 - DNA, 76 bp, Artificial Sequence; identical to SEQ ID NO: 3349
  Description of Artificial Sequence: Synthetic all nuts; 5' sequence + inner sequence + 3' sequence

SEQ ID NO: 35617 - DNA, 76 bp, Artificial Sequence; identical to SEQ ID NO: 3414
  Description of Artificial Sequence: Synthetic all nuts; 5' sequence + inner sequence + 3' sequence

SEQ ID NO: 35618 - DNA, 76 bp, Artificial Sequence
  Description of Artificial Sequence: Synthetic all nuts; 5' sequence + inner sequence + 3' sequence
tagggaagagaaggacatatgatccgtagcgacatcaagcggtgctgtgcgtgttgactagtacatgaccacttga

SEQ ID NO: 35619 - DNA, 76 bp, Artificial Sequence
  Description of Artificial Sequence: Synthetic all nuts; 5' sequence + inner sequence + 3' sequence
tagggaagagaaggacatatgatccatcgcgtcactatcatgtgggtcacgtattgactagtacatgaccacttga

SEQ ID NO: 35620 - DNA, 76 bp, Artificial Sequence; identical to SEQ ID NO: 3360
  Description of Artificial Sequence: Synthetic all nuts; 5' sequence + inner sequence + 3' sequence

SEQ ID NO: 35621 - DNA, 72 bp, Artificial Sequence; identical to SEQ ID NO: 3893
  Description of Artificial Sequence: Synthetic all nuts; 5' sequence + inner sequence + 3' sequence

SEQ ID NO: 35622 - DNA, 76 bp, Artificial Sequence
  Description of Artificial Sequence: Synthetic all nuts; 5' sequence + inner sequence + 3' sequence
tagggaagagaaggacatatgatgtcatgcacgaacactatcatggcggcatattgactagtacatgaccacttga

SEQ ID NO: 35623 - DNA, 76 bp, Artificial Sequence; identical to SEQ ID NO: 3058
  Description of Artificial Sequence: Synthetic all nuts; 5' sequence + inner sequence + 3' sequence

SEQ ID NO: 35624 - DNA, 76 bp, Artificial Sequence
  Description of Artificial Sequence: Synthetic all nuts; 5' sequence + inner sequence + 3' sequence
tagggaagagaaggacatatgatgcactctgctgaccgatcgagtatgcgtcattgactagtacatgaccacttga

SEQ ID NO: 35625 - DNA, 76 bp, Artificial Sequence; identical to SEQ ID NO: 15673
  Description of Artificial Sequence: Synthetic all nuts; 5' sequence + inner sequence + 3' sequence

SEQ ID NO: 35626 - DNA, 76 bp, Artificial Sequence; identical to SEQ ID NO: 3119
  Description of Artificial Sequence: Synthetic all nuts; 5' sequence + inner sequence + 3' sequence

SEQ ID NO: 35627 - DNA, 76 bp, Artificial Sequence; identical to SEQ ID NO: 3104
  Description of Artificial Sequence: Synthetic all nuts; 5' sequence + inner sequence + 3' sequence

SEQ ID NO: 35628 - DNA, 76 bp, Artificial Sequence; identical to SEQ ID NO: 3210
  Description of Artificial Sequence: Synthetic all nuts; 5' sequence + inner sequence + 3' sequence

SEQ ID NO: 35629 - DNA, 76 bp, Artificial Sequence; identical to SEQ ID NO: 3085
  Description of Artificial Sequence: Synthetic all nuts; 5' sequence + inner sequence + 3' sequence

SEQ ID NO: 35630 - DNA, 76 bp, Artificial Sequence; identical to SEQ ID NO: 3178
  Description of Artificial Sequence: Synthetic all nuts; 5' sequence + inner sequence + 3' sequence

SEQ ID NO: 35631 - DNA, 76 bp, Artificial Sequence; identical to SEQ ID NO: 3458
  Description of Artificial Sequence: Synthetic all nuts; 5' sequence + inner sequence + 3' sequence

SEQ ID NO: 35632 - DNA, 76 bp, Artificial Sequence; identical to SEQ ID NO: 3012
  Description of Artificial Sequence: Synthetic all nuts; 5' sequence + inner sequence + 3' sequence

SEQ ID NO: 35633 - DNA, 76 bp, Artificial Sequence; identical to SEQ ID NO: 3520
  Description of Artificial Sequence: Synthetic all nuts; 5' sequence + inner sequence + 3' sequence

SEQ ID NO: 35634 - DNA, 76 bp, Artificial Sequence; identical to SEQ ID NO: 11810
  Description of Artificial Sequence: Synthetic all nuts; 5' sequence + inner sequence + 3' sequence

SEQ ID NO: 35635 - DNA, 76 bp, Artificial Sequence; identical to SEQ ID NO: 3448
  Description of Artificial Sequence: Synthetic all nuts; 5' sequence + inner sequence + 3' sequence

SEQ ID NO: 35636 - DNA, 76 bp, Artificial Sequence; identical to SEQ ID NO: 3688
  Description of Artificial Sequence: Synthetic all nuts; 5' sequence + inner sequence + 3' sequence

SEQ ID NO: 35637 - DNA, 76 bp, Artificial Sequence; identical to SEQ ID NO: 7960
  Description of Artificial Sequence: Synthetic all nuts; 5' sequence + inner sequence + 3' sequence

SEQ ID NO: 35638 - DNA, 76 bp, Artificial Sequence; identical to SEQ ID NO: 3095
  Description of Artificial Sequence: Synthetic all nuts; 5' sequence + inner sequence + 3' sequence

SEQ ID NO: 35639 - DNA, 76 bp, Artificial Sequence; identical to SEQ ID NO: 3112
  Description of Artificial Sequence: Synthetic all nuts; 5' sequence + inner sequence + 3' sequence

SEQ ID NO: 35640 - DNA, 76 bp, Artificial Sequence; identical to SEQ ID NO: 3405
  Description of Artificial Sequence: Synthetic all nuts; 5' sequence + inner sequence + 3' sequence

SEQ ID NO: 35641 - DNA, 76 bp, Artificial Sequence; identical to SEQ ID NO: 3268
  Description of Artificial Sequence: Synthetic all nuts; 5' sequence + inner sequence + 3' sequence

SEQ ID NO: 35642 - DNA, 76 bp, Artificial Sequence; identical to SEQ ID NO: 23895
  Description of Artificial Sequence: Synthetic all nuts; 5' sequence + inner sequence + 3' sequence

SEQ ID NO: 35643 - DNA, 76 bp, Artificial Sequence; identical to SEQ ID NO: 11872
  Description of Artificial Sequence: Synthetic all nuts; 5' sequence + inner sequence + 3' sequence

SEQ ID NO: 35644 - DNA, 76 bp, Artificial Sequence; identical to SEQ ID NO: 11949
  Description of Artificial Sequence: Synthetic all nuts; 5' sequence + inner sequence + 3' sequence

SEQ ID NO: 35645 - DNA, 76 bp, Artificial Sequence; identical to SEQ ID NO: 3413
  Description of Artificial Sequence: Synthetic all nuts; 5' sequence + inner sequence + 3' sequence

SEQ ID NO: 35646 - DNA, 76 bp, Artificial Sequence; identical to SEQ ID NO: 7317
  Description of Artificial Sequence: Synthetic all nuts; 5' sequence + inner sequence + 3' sequence

SEQ ID NO: 35647 - DNA, 76 bp, Artificial Sequence; identical to SEQ ID NO: 7870
  Description of Artificial Sequence: Synthetic all nuts; 5' sequence + inner sequence + 3' sequence

SEQ ID NO: 35648 - DNA, 76 bp, Artificial Sequence; identical to SEQ ID NO: 3512
  Description of Artificial Sequence: Synthetic all nuts; 5' sequence + inner sequence + 3' sequence

SEQ ID NO: 35649 - DNA, 76 bp, Artificial Sequence; identical to SEQ ID NO: 3100
  Description of Artificial Sequence: Synthetic all nuts; 5' sequence + inner sequence + 3' sequence

SEQ ID NO: 35650 - DNA, 76 bp, Artificial Sequence; identical to SEQ ID NO: 3392
  Description of Artificial Sequence: Synthetic all nuts; 5' sequence + inner sequence + 3' sequence

SEQ ID NO: 35651 - DNA, 76 bp, Artificial Sequence; identical to SEQ ID NO: 23515
  Description of Artificial Sequence: Synthetic all nuts; 5' sequence + inner sequence + 3' sequence

SEQ ID NO: 35652 - DNA, 76 bp, Artificial Sequence; identical to SEQ ID NO: 3022
  Description of Artificial Sequence: Synthetic all nuts; 5' sequence + inner sequence + 3' sequence

SEQ ID NO: 35653 - DNA, 75 bp, Artificial Sequence; identical to SEQ ID NO: 3251
  Description of Artificial Sequence: Synthetic all nuts; 5' sequence + inner sequence + 3' sequence

SEQ ID NO: 35654 - DNA, 76 bp, Artificial Sequence; identical to SEQ ID NO: 23407
  Description of Artificial Sequence: Synthetic all nuts; 5' sequence + inner sequence + 3' sequence

SEQ ID NO: 35655 - DNA, 76 bp, Artificial Sequence; identical to SEQ ID NO: 15953
  Description of Artificial Sequence: Synthetic all nuts; 5' sequence + inner sequence + 3' sequence

SEQ ID NO: 35656 - DNA, 76 bp, Artificial Sequence; identical to SEQ ID NO: 7977
  Description of Artificial Sequence: Synthetic all nuts; 5' sequence + inner sequence + 3' sequence

SEQ ID NO: 35657 - DNA, 76 bp, Artificial Sequence; identical to SEQ ID NO: 7230
  Description of Artificial Sequence: Synthetic all nuts; 5' sequence + inner sequence + 3' sequence

SEQ ID NO: 35658 - DNA, 76 bp, Artificial Sequence; identical to SEQ ID NO: 3037
  Description of Artificial Sequence: Synthetic all nuts; 5' sequence + inner sequence + 3' sequence

SEQ ID NO: 35659 - DNA, 76 bp, Artificial Sequence
  Description of Artificial Sequence: Synthetic all nuts; 5' sequence + inner sequence + 3' sequence
tagggaagagaaggacatatgatgggatgcacgcacctacacgtgggtatggattgactagtacatgaccacttga

SEQ ID NO: 35660 - DNA, 76 bp, Artificial Sequence
  Description of Artificial Sequence: Synthetic all nuts; 5' sequence + inner sequence + 3' sequence
tagggaagagaaggacatatgatgcacgacgcgcaccctatcatgaggccatgttgactagtacatgaccacttga

SEQ ID NO: 35661 - DNA, 76 bp, Artificial Sequence; identical to SEQ ID NO: 3348
  Description of Artificial Sequence: Synthetic all nuts; 5' sequence + inner sequence + 3' sequence

SEQ ID NO: 35662 - DNA, 76 bp, Artificial Sequence; identical to SEQ ID NO: 8001
  Description of Artificial Sequence: Synthetic all nuts; 5' sequence + inner sequence + 3' sequence

SEQ ID NO: 35663 - DNA, 76 bp, Artificial Sequence; identical to SEQ ID NO: 23596
  Description of Artificial Sequence: Synthetic all nuts; 5' sequence + inner sequence + 3' sequence

SEQ ID NO: 35664 - DNA, 76 bp, Artificial Sequence; identical to SEQ ID NO: 3080
  Description of Artificial Sequence: Synthetic all nuts; 5' sequence + inner sequence + 3' sequence

SEQ ID NO: 35665 - DNA, 76 bp, Artificial Sequence
  Description of Artificial Sequence: Synthetic all nuts; 5' sequence + inner sequence + 3' sequence
tagggaagagaaggacatatgatcgcacacccgtcatagcggtcacgtgcatgttgactagtacatgaccacttga

SEQ ID NO: 35666 - DNA, 76 bp, Artificial Sequence
  Description of Artificial Sequence: Synthetic all nuts; 5' sequence + inner sequence + 3' sequence
tagggaagagaaggacatatgatcgcaccgtcgatacgtcatgcacgcggacattgactagtacatgaccacttga

SEQ ID NO: 35667 - DNA, 76 bp, Artificial Sequence; identical to SEQ ID NO: 3118
  Description of Artificial Sequence: Synthetic all nuts; 5' sequence + inner sequence + 3' sequence

SEQ ID NO: 35668 - DNA, 76 bp, Artificial Sequence; identical to SEQ ID NO: 3466
  Description of Artificial Sequence: Synthetic all nuts; 5' sequence + inner sequence + 3' sequence

SEQ ID NO: 35669 - DNA, 76 bp, Artificial Sequence; identical to SEQ ID NO: 3091
  Description of Artificial Sequence: Synthetic all nuts; 5' sequence + inner sequence + 3' sequence

SEQ ID NO: 35670 - DNA, 76 bp, Artificial Sequence; identical to SEQ ID NO: 3272
  Description of Artificial Sequence: Synthetic all nuts; 5' sequence + inner sequence + 3' sequence

SEQ ID NO: 35671 - DNA, 76 bp, Artificial Sequence; identical to SEQ ID NO: 3115
  Description of Artificial Sequence: Synthetic all nuts; 5' sequence + inner sequence + 3' sequence

SEQ ID NO: 35672 - DNA, 76 bp, Artificial Sequence; identical to SEQ ID NO: 3962
  Description of Artificial Sequence: Synthetic all nuts; 5' sequence + inner sequence + 3' sequence

SEQ ID NO: 35673 - DNA, 76 bp, Artificial Sequence; identical to SEQ ID NO: 31979
  Description of Artificial Sequence: Synthetic all nuts; 5' sequence + inner sequence + 3' sequence

SEQ ID NO: 35674 - DNA, 76 bp, Artificial Sequence; identical to SEQ ID NO: 3724
  Description of Artificial Sequence: Synthetic all nuts; 5' sequence + inner sequence + 3' sequence

SEQ ID NO: 35675 - DNA, 76 bp, Artificial Sequence; identical to SEQ ID NO: 19709
  Description of Artificial Sequence: Synthetic all nuts; 5' sequence + inner sequence + 3' sequence

SEQ ID NO: 35676 - DNA, 76 bp, Artificial Sequence; identical to SEQ ID NO: 19627
  Description of Artificial Sequence: Synthetic all nuts; 5' sequence + inner sequence + 3' sequence

SEQ ID NO: 35677 - DNA, 76 bp, Artificial Sequence; identical to SEQ ID NO: 3446
  Description of Artificial Sequence: Synthetic all nuts; 5' sequence + inner sequence + 3' sequence

SEQ ID NO: 35678 - DNA, 76 bp, Artificial Sequence; identical to SEQ ID NO: 3214
  Description of Artificial Sequence: Synthetic all nuts; 5' sequence + inner sequence + 3' sequence

SEQ ID NO: 35679 - DNA, 76 bp, Artificial Sequence; identical to SEQ ID NO: 3920
  Description of Artificial Sequence: Synthetic all nuts; 5' sequence + inner sequence + 3' sequence

SEQ ID NO: 35680 - DNA, 76 bp, Artificial Sequence; identical to SEQ ID NO: 23829
  Description of Artificial Sequence: Synthetic all nuts; 5' sequence + inner sequence + 3' sequence

SEQ ID NO: 35681 - DNA, 76 bp, Artificial Sequence; identical to SEQ ID NO: 11938
  Description of Artificial Sequence: Synthetic all nuts; 5' sequence + inner sequence + 3' sequence

SEQ ID NO: 35682 - DNA, 76 bp, Artificial Sequence; identical to SEQ ID NO: 31806
  Description of Artificial Sequence: Synthetic all nuts; 5' sequence + inner sequence + 3' sequence

SEQ ID NO: 35683 - DNA, 77 bp, Artificial Sequence; identical to SEQ ID NO: 31686
  Description of Artificial Sequence: Synthetic all nuts; 5' sequence + inner sequence + 3' sequence

SEQ ID NO: 35684 - DNA, 76 bp, Artificial Sequence; identical to SEQ ID NO: 3018
  Description of Artificial Sequence: Synthetic all nuts; 5' sequence + inner sequence + 3' sequence

SEQ ID NO: 35685 - DNA, 76 bp, Artificial Sequence; identical to SEQ ID NO: 7823
  Description of Artificial Sequence: Synthetic all nuts; 5' sequence + inner sequence + 3' sequence

SEQ ID NO: 35686 - DNA, 76 bp, Artificial Sequence; identical to SEQ ID NO: 3196
  Description of Artificial Sequence: Synthetic all nuts; 5' sequence + inner sequence + 3' sequence

SEQ ID NO: 35687 - DNA, 76 bp, Artificial Sequence; identical to SEQ ID NO: 3278
  Description of Artificial Sequence: Synthetic all nuts; 5' sequence + inner sequence + 3' sequence

SEQ ID NO: 35688 - DNA, 76 bp, Artificial Sequence; identical to SEQ ID NO: 19832
  Description of Artificial Sequence: Synthetic all nuts; 5' sequence + inner sequence + 3' sequence

SEQ ID NO: 35689 - DNA, 76 bp, Artificial Sequence
  Description of Artificial Sequence: Synthetic all nuts; 5' sequence + inner sequence + 3' sequence
tagggaagagaaggacatatgatcgacgcgacatgaaggcatgggtaggcacgttgactagtacatgaccacttga

SEQ ID NO: 35690 - DNA, 76 bp, Artificial Sequence; identical to SEQ ID NO: 3032
  Description of Artificial Sequence: Synthetic all nuts; 5' sequence + inner sequence + 3' sequence

SEQ ID NO: 35691 - DNA, 76 bp, Artificial Sequence; identical to SEQ ID NO: 3917
  Description of Artificial Sequence: Synthetic all nuts; 5' sequence + inner sequence + 3' sequence

SEQ ID NO: 35692 - DNA, 76 bp, Artificial Sequence; identical to SEQ ID NO: 3603
  Description of Artificial Sequence: Synthetic all nuts; 5' sequence + inner sequence + 3' sequence

SEQ ID NO: 35693 - DNA, 76 bp, Artificial Sequence; identical to SEQ ID NO: 15997
  Description of Artificial Sequence: Synthetic all nuts; 5' sequence + inner sequence + 3' sequence

SEQ ID NO: 35694 - DNA, 76 bp, Artificial Sequence; identical to SEQ ID NO: 3850
  Description of Artificial Sequence: Synthetic all nuts; 5' sequence + inner sequence + 3' sequence

SEQ ID NO: 35695 - DNA, 76 bp, Artificial Sequence; identical to SEQ ID NO: 15996
  Description of Artificial Sequence: Synthetic all nuts; 5' sequence + inner sequence + 3' sequence

SEQ ID NO: 35696 - DNA, 76 bp, Artificial Sequence; identical to SEQ ID NO: 3232
  Description of Artificial Sequence: Synthetic all nuts; 5' sequence + inner sequence + 3' sequence

SEQ ID NO: 35697 - DNA, 76 bp, Artificial Sequence; identical to SEQ ID NO: 3540
  Description of Artificial Sequence: Synthetic all nuts; 5' sequence + inner sequence + 3' sequence

SEQ ID NO: 35698 - DNA, 76 bp, Artificial Sequence; identical to SEQ ID NO: 3396
  Description of Artificial Sequence: Synthetic all nuts; 5' sequence + inner sequence + 3' sequence

SEQ ID NO: 35699 - DNA, 76 bp, Artificial Sequence; identical to SEQ ID NO: 15986
  Description of Artificial Sequence: Synthetic all nuts; 5' sequence + inner sequence + 3' sequence

SEQ ID NO: 35700 - DNA, 76 bp, Artificial Sequence; identical to SEQ ID NO: 3757
  Description of Artificial Sequence: Synthetic all nuts; 5' sequence + inner sequence + 3' sequence

SEQ ID NO: 35701 - DNA, 76 bp, Artificial Sequence; identical to SEQ ID NO: 3084
  Description of Artificial Sequence: Synthetic all nuts; 5' sequence + inner sequence + 3' sequence

SEQ ID NO: 35702 - DNA, 76 bp, Artificial Sequence; identical to SEQ ID NO: 23533
  Description of Artificial Sequence: Synthetic all nuts; 5' sequence + inner sequence + 3' sequence

SEQ ID NO: 35703 - DNA, 76 bp, Artificial Sequence; identical to SEQ ID NO: 3900
  Description of Artificial Sequence: Synthetic all nuts; 5' sequence + inner sequence + 3' sequence

SEQ ID NO: 35704 - DNA, 76 bp, Artificial Sequence; identical to SEQ ID NO: 3654
  Description of Artificial Sequence: Synthetic all nuts; 5' sequence + inner sequence + 3' sequence

SEQ ID NO: 35705 - DNA, 76 bp, Artificial Sequence; identical to SEQ ID NO: 7377
  Description of Artificial Sequence: Synthetic all nuts; 5' sequence + inner sequence + 3' sequence

SEQ ID NO: 35706 - DNA, 76 bp, Artificial Sequence; identical to SEQ ID NO: 3846
  Description of Artificial Sequence: Synthetic all nuts; 5' sequence + inner sequence + 3' sequence

SEQ ID NO: 35707 - DNA, 76 bp, Artificial Sequence; identical to SEQ ID NO: 3420
  Description of Artificial Sequence: Synthetic all nuts; 5' sequence + inner sequence + 3' sequence

SEQ ID NO: 35708 - DNA, 76 bp, Artificial Sequence; identical to SEQ ID NO: 3527
  Description of Artificial Sequence: Synthetic all nuts; 5' sequence + inner sequence + 3' sequence

SEQ ID NO: 35709 - DNA, 76 bp, Artificial Sequence; identical to SEQ ID NO: 3753
  Description of Artificial Sequence: Synthetic all nuts; 5' sequence + inner sequence + 3' sequence

SEQ ID NO: 35710 - DNA, 76 bp, Artificial Sequence; identical to SEQ ID NO: 3086
  Description of Artificial Sequence: Synthetic all nuts; 5' sequence + inner sequence + 3' sequence

SEQ ID NO: 35711 - DNA, 76 bp, Artificial Sequence; identical to SEQ ID NO: 3481
  Description of Artificial Sequence: Synthetic all nuts; 5' sequence + inner sequence + 3' sequence

SEQ ID NO: 35712 - DNA, 76 bp, Artificial Sequence; identical to SEQ ID NO: 3122
  Description of Artificial Sequence: Synthetic all nuts; 5' sequence + inner sequence + 3' sequence

SEQ ID NO: 35713 - DNA, 76 bp, Artificial Sequence; identical to SEQ ID NO: 11978
  Description of Artificial Sequence: Synthetic all nuts; 5' sequence + inner sequence + 3' sequence

SEQ ID NO: 35714 - DNA, 76 bp, Artificial Sequence; identical to SEQ ID NO: 7985
  Description of Artificial Sequence: Synthetic all nuts; 5' sequence + inner sequence + 3' sequence

SEQ ID NO: 35715 - DNA, 76 bp, Artificial Sequence; identical to SEQ ID NO: 3142
  Description of Artificial Sequence: Synthetic all nuts; 5' sequence + inner sequence + 3' sequence

SEQ ID NO: 35716 - DNA, 76 bp, Artificial Sequence; identical to SEQ ID NO: 27852
  Description of Artificial Sequence: Synthetic all nuts; 5' sequence + inner sequence + 3' sequence

SEQ ID NO: 35717 - DNA, 76 bp, Artificial Sequence; identical to SEQ ID NO: 7405
  Description of Artificial Sequence: Synthetic all nuts; 5' sequence + inner sequence + 3' sequence

SEQ ID NO: 35718 - DNA, 76 bp, Artificial Sequence; identical to SEQ ID NO: 3370
  Description of Artificial Sequence: Synthetic all nuts; 5' sequence + inner sequence + 3' sequence

SEQ ID NO: 35719 - DNA, 76 bp, Artificial Sequence
  Description of Artificial Sequence: Synthetic all nuts; 5' sequence + inner sequence + 3' sequence
tagggaagagaaggacatatgatggacatcgcgtcactaagtgcgtcttgtgcttgactagtacatgaccacttga

SEQ ID NO: 35720 - DNA, 76 bp, Artificial Sequence; identical to SEQ ID NO: 3640
  Description of Artificial Sequence: Synthetic all nuts; 5' sequence + inner sequence + 3' sequence

SEQ ID NO: 35721 - DNA, 76 bp, Artificial Sequence; identical to SEQ ID NO: 3853
  Description of Artificial Sequence: Synthetic all nuts; 5' sequence + inner sequence + 3' sequence

SEQ ID NO: 35722 - DNA, 76 bp, Artificial Sequence; identical to SEQ ID NO: 7254
  Description of Artificial Sequence: Synthetic all nuts; 5' sequence + inner sequence + 3' sequence

SEQ ID NO: 35723 - DNA, 76 bp, Artificial Sequence; identical to SEQ ID NO: 7948
  Description of Artificial Sequence: Synthetic all nuts; 5' sequence + inner sequence + 3' sequence

SEQ ID NO: 35724 - DNA, 76 bp, Artificial Sequence; identical to SEQ ID NO: 7336
  Description of Artificial Sequence: Synthetic all nuts; 5' sequence + inner sequence + 3' sequence

SEQ ID NO: 35725 - DNA, 76 bp, Artificial Sequence; identical to SEQ ID NO: 3197
  Description of Artificial Sequence: Synthetic all nuts; 5' sequence + inner sequence + 3' sequence

SEQ ID NO: 35726 - DNA, 76 bp, Artificial Sequence; identical to SEQ ID NO: 3028
  Description of Artificial Sequence: Synthetic all nuts; 5' sequence + inner sequence + 3' sequence

SEQ ID NO: 35727 - DNA, 76 bp, Artificial Sequence
  Description of Artificial Sequence: Synthetic all nuts; 5' sequence + inner sequence + 3' sequence
tagggaagagaaggacatatgatccgtagcgacaccaagcggtggtgtgcgtgttgactagtacatgaccacttga

SEQ ID NO: 35728 - DNA, 76 bp, Artificial Sequence; identical to SEQ ID NO: 3633
  Description of Artificial Sequence: Synthetic all nuts; 5' sequence + inner sequence + 3' sequence

SEQ ID NO: 35729 - DNA, 76 bp, Artificial Sequence; identical to SEQ ID NO: 7913
  Description of Artificial Sequence: Synthetic all nuts; 5' sequence + inner sequence + 3' sequence

SEQ ID NO: 35730 - DNA, 76 bp, Artificial Sequence; identical to SEQ ID NO: 3172
  Description of Artificial Sequence: Synthetic all nuts; 5' sequence + inner sequence + 3' sequence

SEQ ID NO: 35731 - DNA, 76 bp, Artificial Sequence; identical to SEQ ID NO: 7627
  Description of Artificial Sequence: Synthetic all nuts; 5' sequence + inner sequence + 3' sequence

SEQ ID NO: 35732 - DNA, 76 bp, Artificial Sequence; identical to SEQ ID NO: 7469
  Description of Artificial Sequence: Synthetic all nuts; 5' sequence + inner sequence + 3' sequence

SEQ ID NO: 35733 - DNA, 76 bp, Artificial Sequence; identical to SEQ ID NO: 3336
  Description of Artificial Sequence: Synthetic all nuts; 5' sequence + inner sequence + 3' sequence

SEQ ID NO: 35734 - DNA, 76 bp, Artificial Sequence; identical to SEQ ID NO: 3449
  Description of Artificial Sequence: Synthetic all nuts; 5' sequence + inner sequence + 3' sequence

SEQ ID NO: 35735 - DNA, 76 bp, Artificial Sequence; identical to SEQ ID NO: 3164
  Description of Artificial Sequence: Synthetic all nuts; 5' sequence + inner sequence + 3' sequence

SEQ ID NO: 35736 - DNA, 76 bp, Artificial Sequence; identical to SEQ ID NO: 3776
  Description of Artificial Sequence: Synthetic all nuts; 5' sequence + inner sequence + 3' sequence

SEQ ID NO: 35737 - DNA, 76 bp, Artificial Sequence; identical to SEQ ID NO: 15895
  Description of Artificial Sequence: Synthetic all nuts; 5' sequence + inner sequence + 3' sequence

SEQ ID NO: 35738 - DNA, 76 bp, Artificial Sequence; identical to SEQ ID NO: 7498
  Description of Artificial Sequence: Synthetic all nuts; 5' sequence + inner sequence + 3' sequence

SEQ ID NO: 35739 - DNA, 76 bp, Artificial Sequence; identical to SEQ ID NO: 3762
  Description of Artificial Sequence: Synthetic all nuts; 5' sequence + inner sequence + 3' sequence

SEQ ID NO: 35740 - DNA, 76 bp, Artificial Sequence; identical to SEQ ID NO: 19931
  Description of Artificial Sequence: Synthetic all nuts; 5' sequence + inner sequence + 3' sequence

SEQ ID NO: 35741 - DNA, 76 bp, Artificial Sequence; identical to SEQ ID NO: 23327
  Description of Artificial Sequence: Synthetic all nuts; 5' sequence + inner sequence + 3' sequence

SEQ ID NO: 35742 - DNA, 76 bp, Artificial Sequence; identical to SEQ ID NO: 3149
  Description of Artificial Sequence: Synthetic all nuts; 5' sequence + inner sequence + 3' sequence

SEQ ID NO: 35743 - DNA, 76 bp, Artificial Sequence
  Description of Artificial Sequence: Synthetic all nuts; 5' sequence + inner sequence + 3' sequence
tagggaagagaaggacatatgatgtacgcatcgtaccgtcatgtggttccgtattgactagtacatgaccacttga

SEQ ID NO: 35744 - DNA, 76 bp, Artificial Sequence; identical to SEQ ID NO: 3310
  Description of Artificial Sequence: Synthetic all nuts; 5' sequence + inner sequence + 3' sequence

SEQ ID NO: 35745 - DNA, 76 bp, Artificial Sequence; identical to SEQ ID NO: 11962
  Description of Artificial Sequence: Synthetic all nuts; 5' sequence + inner sequence + 3' sequence

SEQ ID NO: 35746 - DNA, 76 bp, Artificial Sequence; identical to SEQ ID NO: 3341
  Description of Artificial Sequence: Synthetic all nuts; 5' sequence + inner sequence + 3' sequence

SEQ ID NO: 35747 - DNA, 76 bp, Artificial Sequence; identical to SEQ ID NO: 23700
  Description of Artificial Sequence: Synthetic all nuts; 5' sequence + inner sequence + 3' sequence

SEQ ID NO: 35748 - DNA, 76 bp, Artificial Sequence; identical to SEQ ID NO: 3244
  Description of Artificial Sequence: Synthetic all nuts; 5' sequence + inner sequence + 3' sequence

SEQ ID NO: 35749 - DNA, 76 bp, Artificial Sequence; identical to SEQ ID NO: 3457
  Description of Artificial Sequence: Synthetic all nuts; 5' sequence + inner sequence + 3' sequence

SEQ ID NO: 35750 - DNA, 76 bp, Artificial Sequence; identical to SEQ ID NO: 3076
  Description of Artificial Sequence: Synthetic all nuts; 5' sequence + inner sequence + 3' sequence

SEQ ID NO: 35751 - DNA, 76 bp, Artificial Sequence; identical to SEQ ID NO: 3529
  Description of Artificial Sequence: Synthetic all nuts; 5' sequence + inner sequence + 3' sequence

SEQ ID NO: 35752 - DNA, 76 bp, Artificial Sequence; identical to SEQ ID NO: 23119
  Description of Artificial Sequence: Synthetic all nuts; 5' sequence + inner sequence + 3' sequence

SEQ ID NO: 35753 - DNA, 76 bp, Artificial Sequence; identical to SEQ ID NO: 3500
  Description of Artificial Sequence: Synthetic all nuts; 5' sequence + inner sequence + 3' sequence

SEQ ID NO: 35754 - DNA, 76 bp, Artificial Sequence; identical to SEQ ID NO: 3027
  Description of Artificial Sequence: Synthetic all nuts; 5' sequence + inner sequence + 3' sequence

SEQ ID NO: 35755 - DNA, 76 bp, Artificial Sequence; identical to SEQ ID NO: 3921
  Description of Artificial Sequence: Synthetic all nuts; 5' sequence + inner sequence + 3' sequence

SEQ ID NO: 35756 - DNA, 76 bp, Artificial Sequence; identical to SEQ ID NO: 23777
  Description of Artificial Sequence: Synthetic all nuts; 5' sequence + inner sequence + 3' sequence

SEQ ID NO: 35757 - DNA, 76 bp, Artificial Sequence; identical to SEQ ID NO: 3553
  Description of Artificial Sequence: Synthetic all nuts; 5' sequence + inner sequence + 3' sequence

SEQ ID NO: 35758 - DNA, 76 bp, Artificial Sequence; identical to SEQ ID NO: 23165
  Description of Artificial Sequence: Synthetic all nuts; 5' sequence + inner sequence + 3' sequence

SEQ ID NO: 35759 - DNA, 76 bp, Artificial Sequence; identical to SEQ ID NO: 7707
  Description of Artificial Sequence: Synthetic all nuts; 5' sequence + inner sequence + 3' sequence

SEQ ID NO: 35760 - DNA, 76 bp, Artificial Sequence; identical to SEQ ID NO: 3064
  Description of Artificial Sequence: Synthetic all nuts; 5' sequence + inner sequence + 3' sequence

SEQ ID NO: 35761 - DNA, 76 bp, Artificial Sequence; identical to SEQ ID NO: 3720
  Description of Artificial Sequence: Synthetic all nuts; 5' sequence + inner sequence + 3' sequence

SEQ ID NO: 35762 - DNA, 76 bp, Artificial Sequence; identical to SEQ ID NO: 7890
  Description of Artificial Sequence: Synthetic all nuts; 5' sequence + inner sequence + 3' sequence

SEQ ID NO: 35763 - DNA, 76 bp, Artificial Sequence; identical to SEQ ID NO: 3301
  Description of Artificial Sequence: Synthetic all nuts; 5' sequence + inner sequence + 3' sequence

SEQ ID NO: 35764 - DNA, 76 bp, Artificial Sequence; identical to SEQ ID NO: 23947
  Description of Artificial Sequence: Synthetic all nuts; 5' sequence + inner sequence + 3' sequence

SEQ ID NO: 35765 - DNA, 76 bp, Artificial Sequence; identical to SEQ ID NO: 11618
  Description of Artificial Sequence: Synthetic all nuts; 5' sequence + inner sequence + 3' sequence

SEQ ID NO: 35766 - DNA, 76 bp, Artificial Sequence; identical to SEQ ID NO: 3111
  Description of Artificial Sequence: Synthetic all nuts; 5' sequence + inner sequence + 3' sequence

SEQ ID NO: 35767 - DNA, 76 bp, Artificial Sequence; identical to SEQ ID NO: 3738
  Description of Artificial Sequence: Synthetic all nuts; 5' sequence + inner sequence + 3' sequence

SEQ ID NO: 35768 - DNA, 76 bp, Artificial Sequence; identical to SEQ ID NO: 3408
  Description of Artificial Sequence: Synthetic all nuts; 5' sequence + inner sequence + 3' sequence

SEQ ID NO: 35769 - DNA, 76 bp, Artificial Sequence; identical to SEQ ID NO: 3705
  Description of Artificial Sequence: Synthetic all nuts; 5' sequence + inner sequence + 3' sequence

SEQ ID NO: 35770 - DNA, 76 bp, Artificial Sequence; identical to SEQ ID NO: 7621
  Description of Artificial Sequence: Synthetic all nuts; 5' sequence + inner sequence + 3' sequence

SEQ ID NO: 35771 - DNA, 76 bp, Artificial Sequence; identical to SEQ ID NO: 3621
  Description of Artificial Sequence: Synthetic all nuts; 5' sequence + inner sequence + 3' sequence

SEQ ID NO: 35772 - DNA, 76 bp, Artificial Sequence; identical to SEQ ID NO: 3017
  Description of Artificial Sequence: Synthetic all nuts; 5' sequence + inner sequence + 3' sequence

SEQ ID NO: 35773 - DNA, 76 bp, Artificial Sequence; identical to SEQ ID NO: 3289
  Description of Artificial Sequence: Synthetic all nuts; 5' sequence + inner sequence + 3' sequence

SEQ ID NO: 35774 - DNA, 76 bp, Artificial Sequence; identical to SEQ ID NO: 23711
  Description of Artificial Sequence: Synthetic all nuts; 5' sequence + inner sequence + 3' sequence

SEQ ID NO: 35775 - DNA, 76 bp, Artificial Sequence; identical to SEQ ID NO: 11994
  Description of Artificial Sequence: Synthetic all nuts; 5' sequence + inner sequence + 3' sequence

SEQ ID NO: 35776 - DNA, 76 bp, Artificial Sequence; identical to SEQ ID NO: 3805
  Description of Artificial Sequence: Synthetic all nuts; 5' sequence + inner sequence + 3' sequence

SEQ ID NO: 35777 - DNA, 76 bp, Artificial Sequence; identical to SEQ ID NO: 3622
  Description of Artificial Sequence: Synthetic all nuts; 5' sequence + inner sequence + 3' sequence

SEQ ID NO: 35778 - DNA, 76 bp, Artificial Sequence; identical to SEQ ID NO: 19862
  Description of Artificial Sequence: Synthetic all nuts; 5' sequence + inner sequence + 3' sequence

SEQ ID NO: 35779 - DNA, 76 bp, Artificial Sequence; identical to SEQ ID NO: 3531
  Description of Artificial Sequence: Synthetic all nuts; 5' sequence + inner sequence + 3' sequence

SEQ ID NO: 35780 - DNA, 76 bp, Artificial Sequence; identical to SEQ ID NO: 19544
  Description of Artificial Sequence: Synthetic all nuts; 5' sequence + inner sequence + 3' sequence

SEQ ID NO: 35781 - DNA, 76 bp, Artificial Sequence; identical to SEQ ID NO: 3662
  Description of Artificial Sequence: Synthetic all nuts; 5' sequence + inner sequence + 3' sequence

SEQ ID NO: 35782 - DNA, 76 bp, Artificial Sequence; identical to SEQ ID NO: 23783
  Description of Artificial Sequence: Synthetic all nuts; 5' sequence + inner sequence + 3' sequence

SEQ ID NO: 35783 - DNA, 76 bp, Artificial Sequence
  Description of Artificial Sequence: Synthetic all nuts; 5' sequence + inner sequence + 3' sequence
tagggaagagaaggacatatgatgtgcgacacgtaacctagcaagggagcatgttgactagtacatgaccacttga

SEQ ID NO: 35784 - DNA, 76 bp, Artificial Sequence; identical to SEQ ID NO: 3545
  Description of Artificial Sequence: Synthetic all nuts; 5' sequence + inner sequence + 3' sequence

SEQ ID NO: 35785 - DNA, 76 bp, Artificial Sequence; identical to SEQ ID NO: 3884
  Description of Artificial Sequence: Synthetic all nuts; 5' sequence + inner sequence + 3' sequence

SEQ ID NO: 35786 - DNA, 76 bp, Artificial Sequence; identical to SEQ ID NO: 23576
  Description of Artificial Sequence: Synthetic all nuts; 5' sequence + inner sequence + 3' sequence

SEQ ID NO: 35787 - DNA, 76 bp, Artificial Sequence; identical to SEQ ID NO: 3025
  Description of Artificial Sequence: Synthetic all nuts; 5' sequence + inner sequence + 3' sequence

SEQ ID NO: 35788 - DNA, 76 bp, Artificial Sequence; identical to SEQ ID NO: 7517
  Description of Artificial Sequence: Synthetic all nuts; 5' sequence + inner sequence + 3' sequence

SEQ ID NO: 35789 - DNA, 76 bp, Artificial Sequence; identical to SEQ ID NO: 19352
  Description of Artificial Sequence: Synthetic all nuts; 5' sequence + inner sequence + 3' sequence

SEQ ID NO: 35790 - DNA, 76 bp, Artificial Sequence; identical to SEQ ID NO: 3030
  Description of Artificial Sequence: Synthetic all nuts; 5' sequence + inner sequence + 3' sequence

SEQ ID NO: 35791 - DNA, 76 bp, Artificial Sequence
  Description of Artificial Sequence: Synthetic all nuts; 5' sequence + inner sequence + 3' sequence
tagggaagagaaggacatatgatcgacgcacggaagacacgatacgtggtgcgttgactagtacatgaccacttga

SEQ ID NO: 35792 - DNA, 75 bp, Artificial Sequence; identical to SEQ ID NO: 3259
  Description of Artificial Sequence: Synthetic all nuts; 5' sequence + inner sequence + 3' sequence

SEQ ID NO: 35793 - DNA, 75 bp, Artificial Sequence; identical to SEQ ID NO: 3975
  Description of Artificial Sequence: Synthetic all nuts; 5' sequence + inner sequence + 3' sequence

SEQ ID NO: 35794 - DNA, 76 bp, Artificial Sequence; identical to SEQ ID NO: 11909
  Description of Artificial Sequence: Synthetic all nuts; 5' sequence + inner sequence + 3' sequence

SEQ ID NO: 35795 - DNA, 76 bp, Artificial Sequence; identical to SEQ ID NO: 3700
  Description of Artificial Sequence: Synthetic all nuts; 5' sequence + inner sequence + 3' sequence

SEQ ID NO: 35796 - DNA, 76 bp, Artificial Sequence; identical to SEQ ID NO: 3384
  Description of Artificial Sequence: Synthetic all nuts; 5' sequence + inner sequence + 3' sequence

SEQ ID NO: 35797 - DNA, 76 bp, Artificial Sequence; identical to SEQ ID NO: 3534
  Description of Artificial Sequence: Synthetic all nuts; 5' sequence + inner sequence + 3' sequence

SEQ ID NO: 35798 - DNA, 76 bp, Artificial Sequence; identical to SEQ ID NO: 23462
  Description of Artificial Sequence: Synthetic all nuts; 5' sequence + inner sequence + 3' sequence

SEQ ID NO: 35799 - DNA, 76 bp, Artificial Sequence; identical to SEQ ID NO: 3598
  Description of Artificial Sequence: Synthetic all nuts; 5' sequence + inner sequence + 3' sequence

SEQ ID NO: 35800 - DNA, 76 bp, Artificial Sequence; identical to SEQ ID NO: 3979
  Description of Artificial Sequence: Synthetic all nuts; 5' sequence + inner sequence + 3' sequence

SEQ ID NO: 35801 - DNA, 76 bp, Artificial Sequence; identical to SEQ ID NO: 3951
  Description of Artificial Sequence: Synthetic all nuts; 5' sequence + inner sequence + 3' sequence

SEQ ID NO: 35802 - DNA, 76 bp, Artificial Sequence
  Description of Artificial Sequence: Synthetic all nuts; 5' sequence + inner sequence + 3' sequence
tagggaagagaaggacatatgatgtgatgcacgaacactatcatggcggcatgttgactagtacatgaccacttga

SEQ ID NO: 35803 - DNA, 76 bp, Artificial Sequence; identical to SEQ ID NO: 3649
  Description of Artificial Sequence: Synthetic all nuts; 5' sequence + inner sequence + 3' sequence

SEQ ID NO: 35804 - DNA, 76 bp, Artificial Sequence; identical to SEQ ID NO: 3207
  Description of Artificial Sequence: Synthetic all nuts; 5' sequence + inner sequence + 3' sequence

SEQ ID NO: 35805 - DNA, 76 bp, Artificial Sequence; identical to SEQ ID NO: 3007
  Description of Artificial Sequence: Synthetic all nuts; 5' sequence + inner sequence + 3' sequence

SEQ ID NO: 35806 - DNA, 76 bp, Artificial Sequence; identical to SEQ ID NO: 3189
  Description of Artificial Sequence: Synthetic all nuts; 5' sequence + inner sequence + 3' sequence

SEQ ID NO: 35807 - DNA, 76 bp, Artificial Sequence; identical to SEQ ID NO: 3238
  Description of Artificial Sequence: Synthetic all nuts; 5' sequence + inner sequence + 3' sequence

SEQ ID NO: 35808 - DNA, 76 bp, Artificial Sequence; identical to SEQ ID NO: 3288
  Description of Artificial Sequence: Synthetic all nuts; 5' sequence + inner sequence + 3' sequence

SEQ ID NO: 35809 - DNA, 76 bp, Artificial Sequence; identical to SEQ ID NO: 23367
  Description of Artificial Sequence: Synthetic all nuts; 5' sequence + inner sequence + 3' sequence

SEQ ID NO: 35810 - DNA, 76 bp, Artificial Sequence
  Description of Artificial Sequence: Synthetic all nuts; 5' sequence + inner sequence + 3' sequence
tagggaagagaaggacatatgatccgtagcgccatcaagcggtggcgtgcgtgttgactagtacatgaccacttga

SEQ ID NO: 35811 - DNA, 76 bp, Artificial Sequence; identical to SEQ ID NO: 3227
  Description of Artificial Sequence: Synthetic all nuts; 5' sequence + inner sequence + 3' sequence

SEQ ID NO: 35812 - DNA, 76 bp, Artificial Sequence; identical to SEQ ID NO: 3684
  Description of Artificial Sequence: Synthetic all nuts; 5' sequence + inner sequence + 3' sequence

SEQ ID NO: 35813 - DNA, 76 bp, Artificial Sequence; identical to SEQ ID NO: 3253
  Description of Artificial Sequence: Synthetic all nuts; 5' sequence + inner sequence + 3' sequence

SEQ ID NO: 35814 - DNA, 76 bp, Artificial Sequence; identical to SEQ ID NO: 7565
  Description of Artificial Sequence: Synthetic all nuts; 5' sequence + inner sequence + 3' sequence

SEQ ID NO: 35815 - DNA, 76 bp, Artificial Sequence; identical to SEQ ID NO: 3124
  Description of Artificial Sequence: Synthetic all nuts; 5' sequence + inner sequence + 3' sequence

SEQ ID NO: 35816 - DNA, 76 bp, Artificial Sequence; identical to SEQ ID NO: 3249
  Description of Artificial Sequence: Synthetic all nuts; 5' sequence + inner sequence + 3' sequence

SEQ ID NO: 35817 - DNA, 76 bp, Artificial Sequence; identical to SEQ ID NO: 7364
  Description of Artificial Sequence: Synthetic all nuts; 5' sequence + inner sequence + 3' sequence

SEQ ID NO: 35818 - DNA, 76 bp, Artificial Sequence; identical to SEQ ID NO: 3991
  Description of Artificial Sequence: Synthetic all nuts; 5' sequence + inner sequence + 3' sequence

SEQ ID NO: 35819 - DNA, 76 bp, Artificial Sequence; identical to SEQ ID NO: 3200
  Description of Artificial Sequence: Synthetic all nuts; 5' sequence + inner sequence + 3' sequence

SEQ ID NO: 35820 - DNA, 76 bp, Artificial Sequence; identical to SEQ ID NO: 3139
  Description of Artificial Sequence: Synthetic all nuts; 5' sequence + inner sequence + 3' sequence

SEQ ID NO: 35821 - DNA, 76 bp, Artificial Sequence; identical to SEQ ID NO: 3914
  Description of Artificial Sequence: Synthetic all nuts; 5' sequence + inner sequence + 3' sequence

SEQ ID NO: 35822 - DNA, 76 bp, Artificial Sequence; identical to SEQ ID NO: 7489
  Description of Artificial Sequence: Synthetic all nuts; 5' sequence + inner sequence + 3' sequence

SEQ ID NO: 35823 - DNA, 76 bp, Artificial Sequence; identical to SEQ ID NO: 23343
  Description of Artificial Sequence: Synthetic all nuts; 5' sequence + inner sequence + 3' sequence

SEQ ID NO: 35824 - DNA, 76 bp, Artificial Sequence; identical to SEQ ID NO: 3393
  Description of Artificial Sequence: Synthetic all nuts; 5' sequence + inner sequence + 3' sequence

SEQ ID NO: 35825 - DNA, 76 bp, Artificial Sequence; identical to SEQ ID NO: 3089
  Description of Artificial Sequence: Synthetic all nuts; 5' sequence + inner sequence + 3' sequence

SEQ ID NO: 35826 - DNA, 76 bp, Artificial Sequence; identical to SEQ ID NO: 3181
  Description of Artificial Sequence: Synthetic all nuts; 5' sequence + inner sequence + 3' sequence

SEQ ID NO: 35827 - DNA, 76 bp, Artificial Sequence; identical to SEQ ID NO: 3266
  Description of Artificial Sequence: Synthetic all nuts; 5' sequence + inner sequence + 3' sequence

SEQ ID NO: 35828 - DNA, 76 bp, Artificial Sequence; identical to SEQ ID NO: 3634
  Description of Artificial Sequence: Synthetic all nuts; 5' sequence + inner sequence + 3' sequence

SEQ ID NO: 35829 - DNA, 76 bp, Artificial Sequence; identical to SEQ ID NO: 3096
  Description of Artificial Sequence: Synthetic all nuts; 5' sequence + inner sequence + 3' sequence

SEQ ID NO: 35830 - DNA, 76 bp, Artificial Sequence; identical to SEQ ID NO: 7521
  Description of Artificial Sequence: Synthetic all nuts; 5' sequence + inner sequence + 3' sequence

SEQ ID NO: 35831 - DNA, 76 bp, Artificial Sequence; identical to SEQ ID NO: 3023
  Description of Artificial Sequence: Synthetic all nuts; 5' sequence + inner sequence + 3' sequence

SEQ ID NO: 35832 - DNA, 76 bp, Artificial Sequence; identical to SEQ ID NO: 31914
  Description of Artificial Sequence: Synthetic all nuts; 5' sequence + inner sequence + 3' sequence

SEQ ID NO: 35833 - DNA, 76 bp, Artificial Sequence; identical to SEQ ID NO: 3016
  Description of Artificial Sequence: Synthetic all nuts; 5' sequence + inner sequence + 3' sequence

SEQ ID NO: 35834 - DNA, 76 bp, Artificial Sequence; identical to SEQ ID NO: 19733
  Description of Artificial Sequence: Synthetic all nuts; 5' sequence + inner sequence + 3' sequence

SEQ ID NO: 35835 - DNA, 76 bp, Artificial Sequence; identical to SEQ ID NO: 3283
  Description of Artificial Sequence: Synthetic all nuts; 5' sequence + inner sequence + 3' sequence

SEQ ID NO: 35836 - DNA, 76 bp, Artificial Sequence; identical to SEQ ID NO: 3077
  Description of Artificial Sequence: Synthetic all nuts; 5' sequence + inner sequence + 3' sequence

SEQ ID NO: 35837 - DNA, 76 bp, Artificial Sequence; identical to SEQ ID NO: 3560
  Description of Artificial Sequence: Synthetic all nuts; 5' sequence + inner sequence + 3' sequence

SEQ ID NO: 35838 - DNA, 76 bp, Artificial Sequence; identical to SEQ ID NO: 3511
  Description of Artificial Sequence: Synthetic all nuts; 5' sequence + inner sequence + 3' sequence

SEQ ID NO: 35839 - DNA, 76 bp, Artificial Sequence; identical to SEQ ID NO: 3201
  Description of Artificial Sequence: Synthetic all nuts; 5' sequence + inner sequence + 3' sequence

SEQ ID NO: 35840 - DNA, 76 bp, Artificial Sequence
  Description of Artificial Sequence: Synthetic all nuts; 5' sequence + inner sequence + 3' sequence
tagggaagagaaggacatatgatggactgcacgcaccctatcatgtaggcatgttgactagtacatgaccacttga

SEQ ID NO: 35841 - DNA, 76 bp, Artificial Sequence; identical to SEQ ID NO: 3657
  Description of Artificial Sequence: Synthetic all nuts; 5' sequence + inner sequence + 3' sequence

SEQ ID NO: 35842 - DNA, 76 bp, Artificial Sequence; identical to SEQ ID NO: 3243
  Description of Artificial Sequence: Synthetic all nuts; 5' sequence + inner sequence + 3' sequence

SEQ ID NO: 35843 - DNA, 79 bp, Artificial Sequence; identical to SEQ ID NO: 3864
  Description of Artificial Sequence: Synthetic all nuts; 5' sequence + inner sequence + 3' sequence

SEQ ID NO: 35844 - DNA, 76 bp, Artificial Sequence; identical to SEQ ID NO: 11876
  Description of Artificial Sequence: Synthetic all nuts; 5' sequence + inner sequence + 3' sequence

SEQ ID NO: 35845 - DNA, 76 bp, Artificial Sequence; identical to SEQ ID NO: 3778
  Description of Artificial Sequence: Synthetic all nuts; 5' sequence + inner sequence + 3' sequence

SEQ ID NO: 35846 - DNA, 76 bp, Artificial Sequence; identical to SEQ ID NO: 3145
  Description of Artificial Sequence: Synthetic all nuts; 5' sequence + inner sequence + 3' sequence

SEQ ID NO: 35847 - DNA, 76 bp, Artificial Sequence; identical to SEQ ID NO: 3192
  Description of Artificial Sequence: Synthetic all nuts; 5' sequence + inner sequence + 3' sequence

SEQ ID NO: 35848 - DNA, 76 bp, Artificial Sequence
  Description of Artificial Sequence: Synthetic all nuts; 5' sequence + inner sequence + 3' sequence
tagggaagagaaggacatatgatccgcagcgacatcaagcggcggtgtgcgtgttgactagtacatgaccacttga

SEQ ID NO: 35849 - DNA, 76 bp, Artificial Sequence; identical to SEQ ID NO: 7801
  Description of Artificial Sequence: Synthetic all nuts; 5' sequence + inner sequence + 3' sequence

SEQ ID NO: 35850 - DNA, 76 bp, Artificial Sequence; identical to SEQ ID NO: 3923
  Description of Artificial Sequence: Synthetic all nuts; 5' sequence + inner sequence + 3' sequence

SEQ ID NO: 35851 - DNA, 76 bp, Artificial Sequence; identical to SEQ ID NO: 3051
  Description of Artificial Sequence: Synthetic all nuts; 5' sequence + inner sequence + 3' sequence

SEQ ID NO: 35852 - DNA, 76 bp, Artificial Sequence; identical to SEQ ID NO: 11946
  Description of Artificial Sequence: Synthetic all nuts; 5' sequence + inner sequence + 3' sequence

SEQ ID NO: 35853 - DNA, 76 bp, Artificial Sequence; identical to SEQ ID NO: 3539
  Description of Artificial Sequence: Synthetic all nuts; 5' sequence + inner sequence + 3' sequence

SEQ ID NO: 35854 - DNA, 76 bp, Artificial Sequence; identical to SEQ ID NO: 7979
  Description of Artificial Sequence: Synthetic all nuts; 5' sequence + inner sequence + 3' sequence

SEQ ID NO: 35855 - DNA, 76 bp, Artificial Sequence; identical to SEQ ID NO: 7748
  Description of Artificial Sequence: Synthetic all nuts; 5' sequence + inner sequence + 3' sequence

SEQ ID NO: 35856 - DNA, 76 bp, Artificial Sequence; identical to SEQ ID NO: 3928
  Description of Artificial Sequence: Synthetic all nuts; 5' sequence + inner sequence + 3' sequence

SEQ ID NO: 35857 - DNA, 76 bp, Artificial Sequence; identical to SEQ ID NO: 3960
  Description of Artificial Sequence: Synthetic all nuts; 5' sequence + inner sequence + 3' sequence

SEQ ID NO: 35858 - DNA, 76 bp, Artificial Sequence; identical to SEQ ID NO: 3074
  Description of Artificial Sequence: Synthetic all nuts; 5' sequence + inner sequence + 3' sequence

SEQ ID NO: 35859 - DNA, 76 bp, Artificial Sequence; identical to SEQ ID NO: 3387
  Description of Artificial Sequence: Synthetic all nuts; 5' sequence + inner sequence + 3' sequence

SEQ ID NO: 35860 - DNA, 76 bp, Artificial Sequence; identical to SEQ ID NO: 7861
  Description of Artificial Sequence: Synthetic all nuts; 5' sequence + inner sequence + 3' sequence

SEQ ID NO: 35861 - DNA, 76 bp, Artificial Sequence; identical to SEQ ID NO: 3280
  Description of Artificial Sequence: Synthetic all nuts; 5' sequence + inner sequence + 3' sequence

SEQ ID NO: 35862 - DNA, 76 bp, Artificial Sequence; identical to SEQ ID NO: 19866
  Description of Artificial Sequence: Synthetic all nuts; 5' sequence + inner sequence + 3' sequence

SEQ ID NO: 35863 - DNA, 76 bp, Artificial Sequence; identical to SEQ ID NO: 3180
  Description of Artificial Sequence: Synthetic all nuts; 5' sequence + inner sequence + 3' sequence

SEQ ID NO: 35864 - DNA, 76 bp, Artificial Sequence; identical to SEQ ID NO: 7667
  Description of Artificial Sequence: Synthetic all nuts; 5' sequence + inner sequence + 3' sequence

SEQ ID NO: 35865 - DNA, 76 bp, Artificial Sequence; identical to SEQ ID NO: 23565
  Description of Artificial Sequence: Synthetic all nuts; 5' sequence + inner sequence + 3' sequence

SEQ ID NO: 35866 - DNA, 76 bp, Artificial Sequence
  Description of Artificial Sequence: Synthetic all nuts; 5' sequence + inner sequence + 3' sequence
tagggaagagaaggacatatgatgtcattccgcatcctacccgtgggcacgtattgactagtacatgaccacttga

SEQ ID NO: 35867 - DNA, 76 bp, Artificial Sequence; identical to SEQ ID NO: 3467
  Description of Artificial Sequence: Synthetic all nuts; 5' sequence + inner sequence + 3' sequence

SEQ ID NO: 35868 - DNA, 75 bp, Artificial Sequence; identical to SEQ ID NO: 3810
  Description of Artificial Sequence: Synthetic all nuts; 5' sequence + inner sequence + 3' sequence

SEQ ID NO: 35869 - DNA, 76 bp, Artificial Sequence; identical to SEQ ID NO: 3167
  Description of Artificial Sequence: Synthetic all nuts; 5' sequence + inner sequence + 3' sequence

SEQ ID NO: 35870 - DNA, 76 bp, Artificial Sequence; identical to SEQ ID NO: 3589
  Description of Artificial Sequence: Synthetic all nuts; 5' sequence + inner sequence + 3' sequence

SEQ ID NO: 35871 - DNA, 76 bp, Artificial Sequence; identical to SEQ ID NO: 3113
  Description of Artificial Sequence: Synthetic all nuts; 5' sequence + inner sequence + 3' sequence

SEQ ID NO: 35872 - DNA, 76 bp, Artificial Sequence
  Description of Artificial Sequence: Synthetic all nuts; 5' sequence + inner sequence + 3' sequence
tagggaagagaaggacatatgatgtcatgcacgaacactatcatggcgccatgttgactagtacatgaccacttga

SEQ ID NO: 35873 - DNA, 76 bp, Artificial Sequence
  Description of Artificial Sequence: Synthetic all nuts; 5' sequence + inner sequence + 3' sequence
tagggaagagaaggacatatgatccgtagcgacatcaagcggcggggtgcgtgttgactagtacatgaccacttga

SEQ ID NO: 35874 - DNA, 76 bp, Artificial Sequence; identical to SEQ ID NO: 3137
  Description of Artificial Sequence: Synthetic all nuts; 5' sequence + inner sequence + 3' sequence

SEQ ID NO: 35875 - DNA, 76 bp, Artificial Sequence; identical to SEQ ID NO: 3497
  Description of Artificial Sequence: Synthetic all nuts; 5' sequence + inner sequence + 3' sequence

SEQ ID NO: 35876 - DNA, 76 bp, Artificial Sequence; identical to SEQ ID NO: 3203
  Description of Artificial Sequence: Synthetic all nuts; 5' sequence + inner sequence + 3' sequence

SEQ ID NO: 35877 - DNA, 76 bp, Artificial Sequence; identical to SEQ ID NO: 3834
  Description of Artificial Sequence: Synthetic all nuts; 5' sequence + inner sequence + 3' sequence

SEQ ID NO: 35878 - DNA, 76 bp, Artificial Sequence; identical to SEQ ID NO: 3245
  Description of Artificial Sequence: Synthetic all nuts; 5' sequence + inner sequence + 3' sequence

SEQ ID NO: 35879 - DNA, 76 bp, Artificial Sequence; identical to SEQ ID NO: 3009
  Description of Artificial Sequence: Synthetic all nuts; 5' sequence + inner sequence + 3' sequence

SEQ ID NO: 35880 - DNA, 76 bp, Artificial Sequence; identical to SEQ ID NO: 11816
  Description of Artificial Sequence: Synthetic all nuts; 5' sequence + inner sequence + 3' sequence

SEQ ID NO: 35881 - DNA, 76 bp, Artificial Sequence; identical to SEQ ID NO: 3407
  Description of Artificial Sequence: Synthetic all nuts; 5' sequence + inner sequence + 3' sequence

SEQ ID NO: 35882 - DNA, 76 bp, Artificial Sequence; identical to SEQ ID NO: 3248
  Description of Artificial Sequence: Synthetic all nuts; 5' sequence + inner sequence + 3' sequence

SEQ ID NO: 35883 - DNA, 76 bp, Artificial Sequence; identical to SEQ ID NO: 23151
  Description of Artificial Sequence: Synthetic all nuts; 5' sequence + inner sequence + 3' sequence

SEQ ID NO: 35884 - DNA, 76 bp, Artificial Sequence; identical to SEQ ID NO: 3926
  Description of Artificial Sequence: Synthetic all nuts; 5' sequence + inner sequence + 3' sequence

SEQ ID NO: 35885 - DNA, 76 bp, Artificial Sequence; identical to SEQ ID NO: 7943
  Description of Artificial Sequence: Synthetic all nuts; 5' sequence + inner sequence + 3' sequence

SEQ ID NO: 35886 - DNA, 76 bp, Artificial Sequence; identical to SEQ ID NO: 7597
  Description of Artificial Sequence: Synthetic all nuts; 5' sequence + inner sequence + 3' sequence

SEQ ID NO: 35887 - DNA, 76 bp, Artificial Sequence; identical to SEQ ID NO: 7612
  Description of Artificial Sequence: Synthetic all nuts; 5' sequence + inner sequence + 3' sequence

SEQ ID NO: 35888 - DNA, 76 bp, Artificial Sequence; identical to SEQ ID NO: 3138
  Description of Artificial Sequence: Synthetic all nuts; 5' sequence + inner sequence + 3' sequence

SEQ ID NO: 35889 - DNA, 76 bp, Artificial Sequence; identical to SEQ ID NO: 19662
  Description of Artificial Sequence: Synthetic all nuts; 5' sequence + inner sequence + 3' sequence

SEQ ID NO: 35890 - DNA, 76 bp, Artificial Sequence; identical to SEQ ID NO: 7775
  Description of Artificial Sequence: Synthetic all nuts; 5' sequence + inner sequence + 3' sequence

SEQ ID NO: 35891 - DNA, 76 bp, Artificial Sequence; identical to SEQ ID NO: 3305
  Description of Artificial Sequence: Synthetic all nuts; 5' sequence + inner sequence + 3' sequence

SEQ ID NO: 35892 - DNA, 76 bp, Artificial Sequence; identical to SEQ ID NO: 15767
  Description of Artificial Sequence: Synthetic all nuts; 5' sequence + inner sequence + 3' sequence

SEQ ID NO: 35893 - DNA, 76 bp, Artificial Sequence; identical to SEQ ID NO: 27870
  Description of Artificial Sequence: Synthetic all nuts; 5' sequence + inner sequence + 3' sequence

SEQ ID NO: 35894 - DNA, 76 bp, Artificial Sequence; identical to SEQ ID NO: 3541
  Description of Artificial Sequence: Synthetic all nuts; 5' sequence + inner sequence + 3' sequence

SEQ ID NO: 35895 - DNA, 76 bp, Artificial Sequence; identical to SEQ ID NO: 3186
  Description of Artificial Sequence: Synthetic all nuts; 5' sequence + inner sequence + 3' sequence

SEQ ID NO: 35896 - DNA, 76 bp, Artificial Sequence; identical to SEQ ID NO: 3285
  Description of Artificial Sequence: Synthetic all nuts; 5' sequence + inner sequence + 3' sequence

SEQ ID NO: 35897 - DNA, 76 bp, Artificial Sequence; identical to SEQ ID NO: 7638
  Description of Artificial Sequence: Synthetic all nuts; 5' sequence + inner sequence + 3' sequence

SEQ ID NO: 35898 - DNA, 76 bp, Artificial Sequence; identical to SEQ ID NO: 23773
  Description of Artificial Sequence: Synthetic all nuts; 5' sequence + inner sequence + 3' sequence

SEQ ID NO: 35899 - DNA, 76 bp, Artificial Sequence
  Description of Artificial Sequence: Synthetic all nuts; 5' sequence + inner sequence + 3' sequence
tagggaagagaaggacatatgatgcacgtctcgcaccctatcatgaggccatgttgactagtacatgaccacttga

SEQ ID NO: 35900 - DNA, 76 bp, Artificial Sequence; identical to SEQ ID NO: 3871
  Description of Artificial Sequence: Synthetic all nuts; 5' sequence + inner sequence + 3' sequence

SEQ ID NO: 35901 - DNA, 76 bp, Artificial Sequence; identical to SEQ ID NO: 3727
  Description of Artificial Sequence: Synthetic all nuts; 5' sequence + inner sequence + 3' sequence

SEQ ID NO: 35902 - DNA, 76 bp, Artificial Sequence; identical to SEQ ID NO: 3049
  Description of Artificial Sequence: Synthetic all nuts; 5' sequence + inner sequence + 3' sequence

SEQ ID NO: 35903 - DNA, 76 bp, Artificial Sequence; identical to SEQ ID NO: 3101
  Description of Artificial Sequence: Synthetic all nuts; 5' sequence + inner sequence + 3' sequence

SEQ ID NO: 35904 - DNA, 77 bp, Artificial Sequence; identical to SEQ ID NO: 3845
  Description of Artificial Sequence: Synthetic all nuts; 5' sequence + inner sequence + 3' sequence

SEQ ID NO: 35905 - DNA, 76 bp, Artificial Sequence; identical to SEQ ID NO: 11935
  Description of Artificial Sequence: Synthetic all nuts; 5' sequence + inner sequence + 3' sequence

SEQ ID NO: 35906 - DNA, 76 bp, Artificial Sequence; identical to SEQ ID NO: 3980
  Description of Artificial Sequence: Synthetic all nuts; 5' sequence + inner sequence + 3' sequence

SEQ ID NO: 35907 - DNA, 76 bp, Artificial Sequence; identical to SEQ ID NO: 3220
  Description of Artificial Sequence: Synthetic all nuts; 5' sequence + inner sequence + 3' sequence

SEQ ID NO: 35908 - DNA, 76 bp, Artificial Sequence; identical to SEQ ID NO: 7997
  Description of Artificial Sequence: Synthetic all nuts; 5' sequence + inner sequence + 3' sequence

SEQ ID NO: 35909 - DNA, 76 bp, Artificial Sequence; identical to SEQ ID NO: 3823
  Description of Artificial Sequence: Synthetic all nuts; 5' sequence + inner sequence + 3' sequence

SEQ ID NO: 35910 - DNA, 76 bp, Artificial Sequence; identical to SEQ ID NO: 3561
  Description of Artificial Sequence: Synthetic all nuts; 5' sequence + inner sequence + 3' sequence

SEQ ID NO: 35911 - DNA, 76 bp, Artificial Sequence; identical to SEQ ID NO: 19427
  Description of Artificial Sequence: Synthetic all nuts; 5' sequence + inner sequence + 3' sequence

SEQ ID NO: 35912 - DNA, 76 bp, Artificial Sequence; identical to SEQ ID NO: 7882
  Description of Artificial Sequence: Synthetic all nuts; 5' sequence + inner sequence + 3' sequence

SEQ ID NO: 35913 - DNA, 76 bp, Artificial Sequence
  Description of Artificial Sequence: Synthetic all nuts; 5' sequence + inner sequence + 3' sequence
tagggaagagaaggacatatgatcggtagcgacatcaagcggtggtgtgcgtgttgactagtacatgaccacttga

SEQ ID NO: 35914 - DNA, 76 bp, Artificial Sequence; identical to SEQ ID NO: 7735
  Description of Artificial Sequence: Synthetic all nuts; 5' sequence + inner sequence + 3' sequence

SEQ ID NO: 35915 - DNA, 76 bp, Artificial Sequence; identical to SEQ ID NO: 23541
  Description of Artificial Sequence: Synthetic all nuts; 5' sequence + inner sequence + 3' sequence

SEQ ID NO: 35916 - DNA, 76 bp, Artificial Sequence; identical to SEQ ID NO: 3079
  Description of Artificial Sequence: Synthetic all nuts; 5' sequence + inner sequence + 3' sequence

SEQ ID NO: 35917 - DNA, 76 bp, Artificial Sequence; identical to SEQ ID NO: 3290
  Description of Artificial Sequence: Synthetic all nuts; 5' sequence + inner sequence + 3' sequence

SEQ ID NO: 35918 - DNA, 76 bp, Artificial Sequence
  Description of Artificial Sequence: Synthetic all nuts; 5' sequence + inner sequence + 3' sequence
tagggaagagaaggacatatgatgtcattccgcatcctacacgtgagcacgtattgactagtacatgaccacttga

SEQ ID NO: 35919 - DNA, 76 bp, Artificial Sequence; identical to SEQ ID NO: 3369
  Description of Artificial Sequence: Synthetic all nuts; 5' sequence + inner sequence + 3' sequence

SEQ ID NO: 35920 - DNA, 76 bp, Artificial Sequence; identical to SEQ ID NO: 3514
  Description of Artificial Sequence: Synthetic all nuts; 5' sequence + inner sequence + 3' sequence

SEQ ID NO: 35921 - DNA, 76 bp, Artificial Sequence; identical to SEQ ID NO: 3793
  Description of Artificial Sequence: Synthetic all nuts; 5' sequence + inner sequence + 3' sequence

SEQ ID NO: 35922 - DNA, 76 bp, Artificial Sequence; identical to SEQ ID NO: 23426
  Description of Artificial Sequence: Synthetic all nuts; 5' sequence + inner sequence + 3' sequence

SEQ ID NO: 35923 - DNA, 76 bp, Artificial Sequence; identical to SEQ ID NO: 19767
  Description of Artificial Sequence: Synthetic all nuts; 5' sequence + inner sequence + 3' sequence

SEQ ID NO: 35924 - DNA, 76 bp, Artificial Sequence
  Description of Artificial Sequence: Synthetic all nuts; 5' sequence + inner sequence + 3' sequence
tagggaagagaaggacatatgatgccgcatcgatcacgtatcatgtgctcatgttgactagtacatgaccacttga

SEQ ID NO: 35925 - DNA, 76 bp, Artificial Sequence; identical to SEQ ID NO: 7911
  Description of Artificial Sequence: Synthetic all nuts; 5' sequence + inner sequence + 3' sequence

SEQ ID NO: 35926 - DNA, 76 bp, Artificial Sequence; identical to SEQ ID NO: 3835
  Description of Artificial Sequence: Synthetic all nuts; 5' sequence + inner sequence + 3' sequence

SEQ ID NO: 35927 - DNA, 76 bp, Artificial Sequence; identical to SEQ ID NO: 23899
  Description of Artificial Sequence: Synthetic all nuts; 5' sequence + inner sequence + 3' sequence

SEQ ID NO: 35928 - DNA, 76 bp, Artificial Sequence; identical to SEQ ID NO: 3699
  Description of Artificial Sequence: Synthetic all nuts; 5' sequence + inner sequence + 3' sequence

SEQ ID NO: 35929 - DNA, 76 bp, Artificial Sequence; identical to SEQ ID NO: 23915
  Description of Artificial Sequence: Synthetic all nuts; 5' sequence + inner sequence + 3' sequence

SEQ ID NO: 35930 - DNA, 76 bp, Artificial Sequence
  Description of Artificial Sequence: Synthetic all nuts; 5' sequence + inner sequence + 3' sequence
tagggaagagaaggacatatgatgcgcgactcgcaccctatcatgaggccatgttgactagtacatgaccacttga

SEQ ID NO: 35931 - DNA, 76 bp, Artificial Sequence; identical to SEQ ID NO: 7898
  Description of Artificial Sequence: Synthetic all nuts; 5' sequence + inner sequence + 3' sequence

SEQ ID NO: 35932 - DNA, 76 bp, Artificial Sequence; identical to SEQ ID NO: 7451
  Description of Artificial Sequence: Synthetic all nuts; 5' sequence + inner sequence + 3' sequence

SEQ ID NO: 35933 - DNA, 76 bp, Artificial Sequence; identical to SEQ ID NO: 3036
  Description of Artificial Sequence: Synthetic all nuts; 5' sequence + inner sequence + 3' sequence

SEQ ID NO: 35934 - DNA, 76 bp, Artificial Sequence; identical to SEQ ID NO: 11871
  Description of Artificial Sequence: Synthetic all nuts; 5' sequence + inner sequence + 3' sequence

SEQ ID NO: 35935 - DNA, 76 bp, Artificial Sequence; identical to SEQ ID NO: 7445
  Description of Artificial Sequence: Synthetic all nuts; 5' sequence + inner sequence + 3' sequence

SEQ ID NO: 35936 - DNA, 76 bp, Artificial Sequence; identical to SEQ ID NO: 3040
  Description of Artificial Sequence: Synthetic all nuts; 5' sequence + inner sequence + 3' sequence

SEQ ID NO: 35937 - DNA, 75 bp, Artificial Sequence
  Description of Artificial Sequence: Synthetic all nuts; 5' sequence + inner sequence + 3' sequence
tagggaagagaaggacatatgatgtgcgcaacgaccttcacgttgtcgtgtattgactagtacatgaccacttga

SEQ ID NO: 35938 - DNA, 76 bp, Artificial Sequence; identical to SEQ ID NO: 3318
  Description of Artificial Sequence: Synthetic all nuts; 5' sequence + inner sequence + 3' sequence

SEQ ID NO: 35939 - DNA, 76 bp, Artificial Sequence; identical to SEQ ID NO: 3062
  Description of Artificial Sequence: Synthetic all nuts; 5' sequence + inner sequence + 3' sequence

SEQ ID NO: 35940 - DNA, 76 bp, Artificial Sequence; identical to SEQ ID NO: 23594
  Description of Artificial Sequence: Synthetic all nuts; 5' sequence + inner sequence + 3' sequence

SEQ ID NO: 35941 - DNA, 76 bp, Artificial Sequence
  Description of Artificial Sequence: Synthetic all nuts; 5' sequence + inner sequence + 3' sequence
tagggaagagaaggacatatgatgtcattccgcatcctacacgtgcgcacgtattgactagtacatgaccacttga

SEQ ID NO: 35942 - DNA, 76 bp, Artificial Sequence; identical to SEQ ID NO: 7620
  Description of Artificial Sequence: Synthetic all nuts; 5' sequence + inner sequence + 3' sequence

SEQ ID NO: 35943 - DNA, 76 bp, Artificial Sequence; identical to SEQ ID NO: 7650
  Description of Artificial Sequence: Synthetic all nuts; 5' sequence + inner sequence + 3' sequence

SEQ ID NO: 35944 - DNA, 76 bp, Artificial Sequence; identical to SEQ ID NO: 3053
  Description of Artificial Sequence: Synthetic all nuts; 5' sequence + inner sequence + 3' sequence

SEQ ID NO: 35945 - DNA, 76 bp, Artificial Sequence; identical to SEQ ID NO: 3831
  Description of Artificial Sequence: Synthetic all nuts; 5' sequence + inner sequence + 3' sequence

SEQ ID NO: 35946 - DNA, 76 bp, Artificial Sequence; identical to SEQ ID NO: 3498
  Description of Artificial Sequence: Synthetic all nuts; 5' sequence + inner sequence + 3' sequence

SEQ ID NO: 35947 - DNA, 76 bp, Artificial Sequence; identical to SEQ ID NO: 3282
  Description of Artificial Sequence: Synthetic all nuts; 5' sequence + inner sequence + 3' sequence

SEQ ID NO: 35948 - DNA, 76 bp, Artificial Sequence; identical to SEQ ID NO: 19744
  Description of Artificial Sequence: Synthetic all nuts; 5' sequence + inner sequence + 3' sequence

SEQ ID NO: 35949 - DNA, 76 bp, Artificial Sequence; identical to SEQ ID NO: 3134
  Description of Artificial Sequence: Synthetic all nuts; 5' sequence + inner sequence + 3' sequence

SEQ ID NO: 35950 - DNA, 76 bp, Artificial Sequence; identical to SEQ ID NO: 3057
  Description of Artificial Sequence: Synthetic all nuts; 5' sequence + inner sequence + 3' sequence

SEQ ID NO: 35951 - DNA, 75 bp, Artificial Sequence; identical to SEQ ID NO: 3879
  Description of Artificial Sequence: Synthetic all nuts; 5' sequence + inner sequence + 3' sequence

SEQ ID NO: 35952 - DNA, 76 bp, Artificial Sequence; identical to SEQ ID NO: 3397
  Description of Artificial Sequence: Synthetic all nuts; 5' sequence + inner sequence + 3' sequence

SEQ ID NO: 35953 - DNA, 76 bp, Artificial Sequence; identical to SEQ ID NO: 23807
  Description of Artificial Sequence: Synthetic all nuts; 5' sequence + inner sequence + 3' sequence

SEQ ID NO: 35954 - DNA, 76 bp, Artificial Sequence; identical to SEQ ID NO: 3437
  Description of Artificial Sequence: Synthetic all nuts; 5' sequence + inner sequence + 3' sequence

SEQ ID NO: 35955 - DNA, 76 bp, Artificial Sequence
  Description of Artificial Sequence: Synthetic all nuts; 5' sequence + inner sequence + 3' sequence
tagggaagagaaggacatatgatcgacacgacgagtggtgcaacgtgcaggcattgactagtacatgaccacttga

SEQ ID NO: 35956 - DNA, 76 bp, Artificial Sequence; identical to SEQ ID NO: 3130
  Description of Artificial Sequence: Synthetic all nuts; 5' sequence + inner sequence + 3' sequence

SEQ ID NO: 35957 - DNA, 76 bp, Artificial Sequence; identical to SEQ ID NO: 7940
  Description of Artificial Sequence: Synthetic all nuts; 5' sequence + inner sequence + 3' sequence

SEQ ID NO: 35958 - DNA, 76 bp, Artificial Sequence; identical to SEQ ID NO: 3173
  Description of Artificial Sequence: Synthetic all nuts; 5' sequence + inner sequence + 3' sequence

SEQ ID NO: 35959 - DNA, 76 bp, Artificial Sequence; identical to SEQ ID NO: 3120
  Description of Artificial Sequence: Synthetic all nuts; 5' sequence + inner sequence + 3' sequence

SEQ ID NO: 35960 - DNA, 76 bp, Artificial Sequence; identical to SEQ ID NO: 7611
  Description of Artificial Sequence: Synthetic all nuts; 5' sequence + inner sequence + 3' sequence

SEQ ID NO: 35961 - DNA, 76 bp, Artificial Sequence; identical to SEQ ID NO: 23496
  Description of Artificial Sequence: Synthetic all nuts; 5' sequence + inner sequence + 3' sequence

SEQ ID NO: 35962 - DNA, 76 bp, Artificial Sequence; identical to SEQ ID NO: 23801
  Description of Artificial Sequence: Synthetic all nuts; 5' sequence + inner sequence + 3' sequence

SEQ ID NO: 35963 - DNA, 76 bp, Artificial Sequence; identical to SEQ ID NO: 3470
  Description of Artificial Sequence: Synthetic all nuts; 5' sequence + inner sequence + 3' sequence

SEQ ID NO: 35964 - DNA, 76 bp, Artificial Sequence; identical to SEQ ID NO: 3692
  Description of Artificial Sequence: Synthetic all nuts; 5' sequence + inner sequence + 3' sequence

SEQ ID NO: 35965 - DNA, 76 bp, Artificial Sequence; identical to SEQ ID NO: 3169
  Description of Artificial Sequence: Synthetic all nuts; 5' sequence + inner sequence + 3' sequence

SEQ ID NO: 35966 - DNA, 76 bp, Artificial Sequence; identical to SEQ ID NO: 31844
  Description of Artificial Sequence: Synthetic all nuts; 5' sequence + inner sequence + 3' sequence

SEQ ID NO: 35967 - DNA, 76 bp, Artificial Sequence; identical to SEQ ID NO: 3422
  Description of Artificial Sequence: Synthetic all nuts; 5' sequence + inner sequence + 3' sequence

SEQ ID NO: 35968 - DNA, 76 bp, Artificial Sequence; identical to SEQ ID NO: 7401
  Description of Artificial Sequence: Synthetic all nuts; 5' sequence + inner sequence + 3' sequence

SEQ ID NO: 35969 - DNA, 76 bp, Artificial Sequence; identical to SEQ ID NO: 3292
  Description of Artificial Sequence: Synthetic all nuts; 5' sequence + inner sequence + 3' sequence

SEQ ID NO: 35970 - DNA, 76 bp, Artificial Sequence; identical to SEQ ID NO: 3471
  Description of Artificial Sequence: Synthetic all nuts; 5' sequence + inner sequence + 3' sequence

SEQ ID NO: 35971 - DNA, 76 bp, Artificial Sequence; identical to SEQ ID NO: 3782
  Description of Artificial Sequence: Synthetic all nuts; 5' sequence + inner sequence + 3' sequence

SEQ ID NO: 35972 - DNA, 75 bp, Artificial Sequence
  Description of Artificial Sequence: Synthetic all nuts; 5' sequence + inner sequence + 3' sequence
tagggaagagaaggacatatgatggccaagcaaccgtcaaggtggacgtggattgactagtacatgaccacttga

SEQ ID NO: 35973 - DNA, 76 bp, Artificial Sequence; identical to SEQ ID NO: 3187
  Description of Artificial Sequence: Synthetic all nuts; 5' sequence + inner sequence + 3' sequence

SEQ ID NO: 35974 - DNA, 76 bp, Artificial Sequence; identical to SEQ ID NO: 23761
  Description of Artificial Sequence: Synthetic all nuts; 5' sequence + inner sequence + 3' sequence

SEQ ID NO: 35975 - DNA, 76 bp, Artificial Sequence; identical to SEQ ID NO: 3601
  Description of Artificial Sequence: Synthetic all nuts; 5' sequence + inner sequence + 3' sequence

SEQ ID NO: 35976 - DNA, 76 bp, Artificial Sequence; identical to SEQ ID NO: 3309
  Description of Artificial Sequence: Synthetic all nuts; 5' sequence + inner sequence + 3' sequence

SEQ ID NO: 35977 - DNA, 76 bp, Artificial Sequence; identical to SEQ ID NO: 7513
  Description of Artificial Sequence: Synthetic all nuts; 5' sequence + inner sequence + 3' sequence

SEQ ID NO: 35978 - DNA, 76 bp, Artificial Sequence; identical to SEQ ID NO: 23133
  Description of Artificial Sequence: Synthetic all nuts; 5' sequence + inner sequence + 3' sequence

SEQ ID NO: 35979 - DNA, 76 bp, Artificial Sequence; identical to SEQ ID NO: 3741
  Description of Artificial Sequence: Synthetic all nuts; 5' sequence + inner sequence + 3' sequence

SEQ ID NO: 35980 - DNA, 76 bp, Artificial Sequence; identical to SEQ ID NO: 19531
  Description of Artificial Sequence: Synthetic all nuts; 5' sequence + inner sequence + 3' sequence

SEQ ID NO: 35981 - DNA, 76 bp, Artificial Sequence; identical to SEQ ID NO: 3892
  Description of Artificial Sequence: Synthetic all nuts; 5' sequence + inner sequence + 3' sequence

SEQ ID NO: 35982 - DNA, 76 bp, Artificial Sequence; identical to SEQ ID NO: 3264
  Description of Artificial Sequence: Synthetic all nuts; 5' sequence + inner sequence + 3' sequence

SEQ ID NO: 35983 - DNA, 76 bp, Artificial Sequence; identical to SEQ ID NO: 23478
  Description of Artificial Sequence: Synthetic all nuts; 5' sequence + inner sequence + 3' sequence

SEQ ID NO: 35984 - DNA, 76 bp, Artificial Sequence; identical to SEQ ID NO: 3066
  Description of Artificial Sequence: Synthetic all nuts; 5' sequence + inner sequence + 3' sequence

SEQ ID NO: 35985 - DNA, 76 bp, Artificial Sequence; identical to SEQ ID NO: 3398
  Description of Artificial Sequence: Synthetic all nuts; 5' sequence + inner sequence + 3' sequence

SEQ ID NO: 35986 - DNA, 76 bp, Artificial Sequence; identical to SEQ ID NO: 7651
  Description of Artificial Sequence: Synthetic all nuts; 5' sequence + inner sequence + 3' sequence

SEQ ID NO: 35987 - DNA, 76 bp, Artificial Sequence; identical to SEQ ID NO: 23676
  Description of Artificial Sequence: Synthetic all nuts; 5' sequence + inner sequence + 3' sequence

SEQ ID NO: 35988 - DNA, 76 bp, Artificial Sequence; identical to SEQ ID NO: 3015
  Description of Artificial Sequence: Synthetic all nuts; 5' sequence + inner sequence + 3' sequence

SEQ ID NO: 35989 - DNA, 76 bp, Artificial Sequence; identical to SEQ ID NO: 19688
  Description of Artificial Sequence: Synthetic all nuts; 5' sequence + inner sequence + 3' sequence

SEQ ID NO: 35990 - DNA, 76 bp, Artificial Sequence; identical to SEQ ID NO: 23709
  Description of Artificial Sequence: Synthetic all nuts; 5' sequence + inner sequence + 3' sequence

SEQ ID NO: 35991 - DNA, 76 bp, Artificial Sequence; identical to SEQ ID NO: 3459
  Description of Artificial Sequence: Synthetic all nuts; 5' sequence + inner sequence + 3' sequence

SEQ ID NO: 35992 - DNA, 76 bp, Artificial Sequence; identical to SEQ ID NO: 3213
  Description of Artificial Sequence: Synthetic all nuts; 5' sequence + inner sequence + 3' sequence

SEQ ID NO: 35993 - DNA, 76 bp, Artificial Sequence; identical to SEQ ID NO: 7854
  Description of Artificial Sequence: Synthetic all nuts; 5' sequence + inner sequence + 3' sequence

SEQ ID NO: 35994 - DNA, 76 bp, Artificial Sequence
  Description of Artificial Sequence: Synthetic all nuts; 5' sequence + inner sequence + 3' sequence
tagggaagagaaggacatatgatggcatggtcgtaccatcaagtaggcgtggattgactagtacatgaccacttga

SEQ ID NO: 35995 - DNA, 76 bp, Artificial Sequence; identical to SEQ ID NO: 3006
  Description of Artificial Sequence: Synthetic all nuts; 5' sequence + inner sequence + 3' sequence

SEQ ID NO: 35996 - DNA, 76 bp, Artificial Sequence; identical to SEQ ID NO: 11910
  Description of Artificial Sequence: Synthetic all nuts; 5' sequence + inner sequence + 3' sequence

SEQ ID NO: 35997 - DNA, 76 bp, Artificial Sequence; identical to SEQ ID NO: 3205
  Description of Artificial Sequence: Synthetic all nuts; 5' sequence + inner sequence + 3' sequence

SEQ ID NO: 35998 - DNA, 76 bp, Artificial Sequence; identical to SEQ ID NO: 3229
  Description of Artificial Sequence: Synthetic all nuts; 5' sequence + inner sequence + 3' sequence

SEQ ID NO: 35999 - DNA, 76 bp, Artificial Sequence; identical to SEQ ID NO: 15889
  Description of Artificial Sequence: Synthetic all nuts; 5' sequence + inner sequence + 3' sequence

SEQ ID NO: 36000 - DNA, 76 bp, Artificial Sequence; identical to SEQ ID NO: 3668
  Description of Artificial Sequence: Synthetic all nuts; 5' sequence + inner sequence + 3' sequence

SEQ ID NO: 36001 - DNA, 76 bp, Artificial Sequence; identical to SEQ ID NO: 3052
  Description of Artificial Sequence: Synthetic all nuts; 5' sequence + inner sequence + 3' sequence

SEQ ID NO: 36002 - DNA, 76 bp, Artificial Sequence; identical to SEQ ID NO: 3125
  Description of Artificial Sequence: Synthetic all nuts; 5' sequence + inner sequence + 3' sequence

SEQ ID NO: 36003 - DNA, 30 bp, Artificial Sequence; identical to SEQ ID NO: 4
  Description of Artificial Sequence: Synthetic Peanut control sequences, inner sequence

SEQ ID NO: 36004 - DNA, 30 bp, Artificial Sequence; identical to SEQ ID NO: 8
  Description of Artificial Sequence: Synthetic Peanut control sequences, inner sequence

SEQ ID NO: 36005 - DNA, 30 bp, Artificial Sequence; identical to SEQ ID NO: 7
  Description of Artificial Sequence: Synthetic Peanut control sequences, inner sequence

SEQ ID NO: 36006 - DNA, 30 bp, Artificial Sequence; identical to SEQ ID NO: 6
  Description of Artificial Sequence: Synthetic Peanut control sequences, inner sequence

SEQ ID NO: 36007 - DNA, 30 bp, Artificial Sequence; identical to SEQ ID NO: 17
  Description of Artificial Sequence: Synthetic Peanut control sequences, inner sequence

SEQ ID NO: 36008 - DNA, 30 bp, Artificial Sequence; identical to SEQ ID NO: 3
  Description of Artificial Sequence: Synthetic Peanut control sequences, inner sequence

SEQ ID NO: 36009 - DNA, 30 bp, Artificial Sequence; identical to SEQ ID NO: 9
  Description of Artificial Sequence: Synthetic Peanut control sequences, inner sequence

SEQ ID NO: 36010 - DNA, 30 bp, Artificial Sequence; identical to SEQ ID NO: 12
  Description of Artificial Sequence: Synthetic Peanut control sequences, inner sequence

SEQ ID NO: 36011 - DNA, 30 bp, Artificial Sequence; identical to SEQ ID NO: 14
  Description of Artificial Sequence: Synthetic Peanut control sequences, inner sequence

SEQ ID NO: 36012 - DNA, 30 bp, Artificial Sequence; identical to SEQ ID NO: 5
  Description of Artificial Sequence: Synthetic Peanut control sequences, inner sequence

SEQ ID NO: 36013 - DNA, 30 bp, Artificial Sequence; identical to SEQ ID NO: 11
  Description of Artificial Sequence: Synthetic Peanut control sequences, inner sequence

SEQ ID NO: 36014 - DNA, 30 bp, Artificial Sequence; identical to SEQ ID NO: 19
  Description of Artificial Sequence: Synthetic Peanut control sequences, inner sequence

SEQ ID NO: 36015 - DNA, 30 bp, Artificial Sequence; identical to SEQ ID NO: 23
  Description of Artificial Sequence: Synthetic Peanut control sequences, inner sequence

SEQ ID NO: 36016 - DNA, 30 bp, Artificial Sequence; identical to SEQ ID NO: 15
  Description of Artificial Sequence: Synthetic Peanut control sequences, inner sequence

SEQ ID NO: 36017 - DNA, 30 bp, Artificial Sequence; identical to SEQ ID NO: 24
  Description of Artificial Sequence: Synthetic Peanut control sequences, inner sequence

SEQ ID NO: 36018 - DNA, 30 bp, Artificial Sequence; identical to SEQ ID NO: 60
  Description of Artificial Sequence: Synthetic Peanut control sequences, inner sequence

SEQ ID NO: 36019 - DNA, 30 bp, Artificial Sequence; identical to SEQ ID NO: 13
  Description of Artificial Sequence: Synthetic Peanut control sequences, inner sequence

SEQ ID NO: 36020 - DNA, 30 bp, Artificial Sequence; identical to SEQ ID NO: 29
  Description of Artificial Sequence: Synthetic Peanut control sequences, inner sequence

SEQ ID NO: 36021 - DNA, 30 bp, Artificial Sequence; identical to SEQ ID NO: 34
  Description of Artificial Sequence: Synthetic Peanut control sequences, inner sequence

SEQ ID NO: 36022 - DNA, 30 bp, Artificial Sequence; identical to SEQ ID NO: 10
  Description of Artificial Sequence: Synthetic Peanut control sequences, inner sequence

SEQ ID NO: 36023 - DNA, 30 bp, Artificial Sequence; identical to SEQ ID NO: 55
  Description of Artificial Sequence: Synthetic Peanut control sequences, inner sequence

SEQ ID NO: 36024 - DNA, 30 bp, Artificial Sequence; identical to SEQ ID NO: 54
  Description of Artificial Sequence: Synthetic Peanut control sequences, inner sequence

SEQ ID NO: 36025 - DNA, 30 bp, Artificial Sequence; identical to SEQ ID NO: 41
  Description of Artificial Sequence: Synthetic Peanut control sequences, inner sequence

SEQ ID NO: 36026 - DNA, 30 bp, Artificial Sequence; identical to SEQ ID NO: 32
  Description of Artificial Sequence: Synthetic Peanut control sequences, inner sequence

SEQ ID NO: 36027 - DNA, 30 bp, Artificial Sequence; identical to SEQ ID NO: 18
  Description of Artificial Sequence: Synthetic Peanut control sequences, inner sequence

SEQ ID NO: 36028 - DNA, 30 bp, Artificial Sequence; identical to SEQ ID NO: 31
  Description of Artificial Sequence: Synthetic Peanut control sequences, inner sequence

SEQ ID NO: 36029 - DNA, 30 bp, Artificial Sequence; identical to SEQ ID NO: 28
  Description of Artificial Sequence: Synthetic Peanut control sequences, inner sequence

SEQ ID NO: 36030 - DNA, 30 bp, Artificial Sequence; identical to SEQ ID NO: 30
  Description of Artificial Sequence: Synthetic Peanut control sequences, inner sequence

SEQ ID NO: 36031 - DNA, 30 bp, Artificial Sequence; identical to SEQ ID NO: 20
  Description of Artificial Sequence: Synthetic Peanut control sequences, inner sequence

SEQ ID NO: 36032 - DNA, 30 bp, Artificial Sequence; identical to SEQ ID NO: 133
  Description of Artificial Sequence: Synthetic Peanut control sequences, inner sequence

SEQ ID NO: 36033 - DNA, 30 bp, Artificial Sequence; identical to SEQ ID NO: 21
  Description of Artificial Sequence: Synthetic Peanut control sequences, inner sequence

SEQ ID NO: 36034 - DNA, 30 bp, Artificial Sequence; identical to SEQ ID NO: 42
  Description of Artificial Sequence: Synthetic Peanut control sequences, inner sequence

SEQ ID NO: 36035 - DNA, 30 bp, Artificial Sequence; identical to SEQ ID NO: 74
  Description of Artificial Sequence: Synthetic Peanut control sequences, inner sequence

SEQ ID NO: 36036 - DNA, 30 bp, Artificial Sequence; identical to SEQ ID NO: 47
  Description of Artificial Sequence: Synthetic Peanut control sequences, inner sequence

SEQ ID NO: 36037 - DNA, 30 bp, Artificial Sequence; identical to SEQ ID NO: 37
  Description of Artificial Sequence: Synthetic Peanut control sequences, inner sequence

SEQ ID NO: 36038 - DNA, 30 bp, Artificial Sequence; identical to SEQ ID NO: 45
  Description of Artificial Sequence: Synthetic Peanut control sequences, inner sequence

SEQ ID NO: 36039 - DNA, 30 bp, Artificial Sequence; identical to SEQ ID NO: 76
  Description of Artificial Sequence: Synthetic Peanut control sequences, inner sequence

SEQ ID NO: 36040 - DNA, 30 bp, Artificial Sequence; identical to SEQ ID NO: 26
  Description of Artificial Sequence: Synthetic Peanut control sequences, inner sequence

SEQ ID NO: 36041 - DNA, 30 bp, Artificial Sequence; identical to SEQ ID NO: 82
  Description of Artificial Sequence: Synthetic Peanut control sequences, inner sequence

SEQ ID NO: 36042 - DNA, 30 bp, Artificial Sequence; identical to SEQ ID NO: 49
  Description of Artificial Sequence: Synthetic Peanut control sequences, inner sequence

SEQ ID NO: 36043 - DNA, 29 bp, Artificial Sequence
  Description of Artificial Sequence: Synthetic Peanut control sequences, inner sequence
gcacgccgatgccctcatgtggccgtgga

SEQ ID NO: 36044 - DNA, 30 bp, Artificial Sequence; identical to SEQ ID NO: 33
  Description of Artificial Sequence: Synthetic Peanut control sequences, inner sequence

SEQ ID NO: 36045 - DNA, 30 bp, Artificial Sequence; identical to SEQ ID NO: 22
  Description of Artificial Sequence: Synthetic Peanut control sequences, inner sequence

SEQ ID NO: 36046 - DNA, 30 bp, Artificial Sequence; identical to SEQ ID NO: 257
  Description of Artificial Sequence: Synthetic Peanut control sequences, inner sequence

SEQ ID NO: 36047 - DNA, 30 bp, Artificial Sequence; identical to SEQ ID NO: 122
  Description of Artificial Sequence: Synthetic Peanut control sequences, inner sequence

SEQ ID NO: 36048 - DNA, 30 bp, Artificial Sequence; identical to SEQ ID NO: 48
  Description of Artificial Sequence: Synthetic Peanut control sequences, inner sequence

SEQ ID NO: 36049 - DNA, 30 bp, Artificial Sequence; identical to SEQ ID NO: 61
  Description of Artificial Sequence: Synthetic Peanut control sequences, inner sequence

SEQ ID NO: 36050 - DNA, 30 bp, Artificial Sequence; identical to SEQ ID NO: 59
  Description of Artificial Sequence: Synthetic Peanut control sequences, inner sequence

SEQ ID NO: 36051 - DNA, 30 bp, Artificial Sequence; identical to SEQ ID NO: 308
  Description of Artificial Sequence: Synthetic Peanut control sequences, inner sequence

SEQ ID NO: 36052 - DNA, 30 bp, Artificial Sequence; identical to SEQ ID NO: 46
  Description of Artificial Sequence: Synthetic Peanut control sequences, inner sequence

SEQ ID NO: 36053 - DNA, 30 bp, Artificial Sequence; identical to SEQ ID NO: 38
  Description of Artificial Sequence: Synthetic Peanut control sequences, inner sequence

SEQ ID NO: 36054 - DNA, 30 bp, Artificial Sequence; identical to SEQ ID NO: 50
  Description of Artificial Sequence: Synthetic Peanut control sequences, inner sequence

SEQ ID NO: 36055 - DNA, 30 bp, Artificial Sequence; identical to SEQ ID NO: 125
  Description of Artificial Sequence: Synthetic Peanut control sequences, inner sequence

SEQ ID NO: 36056 - DNA, 30 bp, Artificial Sequence; identical to SEQ ID NO: 52
  Description of Artificial Sequence: Synthetic Peanut control sequences, inner sequence

SEQ ID NO: 36057 - DNA, 30 bp, Artificial Sequence; identical to SEQ ID NO: 53
  Description of Artificial Sequence: Synthetic Peanut control sequences, inner sequence

SEQ ID NO: 36058 - DNA, 30 bp, Artificial Sequence; identical to SEQ ID NO: 27
  Description of Artificial Sequence: Synthetic Peanut control sequences, inner sequence

SEQ ID NO: 36059 - DNA, 30 bp, Artificial Sequence; identical to SEQ ID NO: 81
  Description of Artificial Sequence: Synthetic Peanut control sequences, inner sequence

SEQ ID NO: 36060 - DNA, 30 bp, Artificial Sequence; identical to SEQ ID NO: 39
  Description of Artificial Sequence: Synthetic Peanut control sequences, inner sequence

SEQ ID NO: 36061 - DNA, 30 bp, Artificial Sequence; identical to SEQ ID NO: 80
  Description of Artificial Sequence: Synthetic Peanut control sequences, inner sequence

SEQ ID NO: 36062 - DNA, 30 bp, Artificial Sequence; identical to SEQ ID NO: 40
  Description of Artificial Sequence: Synthetic Peanut control sequences, inner sequence

SEQ ID NO: 36063 - DNA, 30 bp, Artificial Sequence; identical to SEQ ID NO: 299
  Description of Artificial Sequence: Synthetic Peanut control sequences, inner sequence

SEQ ID NO: 36064 - DNA, 30 bp, Artificial Sequence; identical to SEQ ID NO: 35
  Description of Artificial Sequence: Synthetic Peanut control sequences, inner sequence

SEQ ID NO: 36065 - DNA, 30 bp, Artificial Sequence; identical to SEQ ID NO: 93
  Description of Artificial Sequence: Synthetic Peanut control sequences, inner sequence

SEQ ID NO: 36066 - DNA, 30 bp, Artificial Sequence; identical to SEQ ID NO: 230
  Description of Artificial Sequence: Synthetic Peanut control sequences, inner sequence

SEQ ID NO: 36067 - DNA, 30 bp, Artificial Sequence; identical to SEQ ID NO: 77
  Description of Artificial Sequence: Synthetic Peanut control sequences, inner sequence

SEQ ID NO: 36068 - DNA, 30 bp, Artificial Sequence; identical to SEQ ID NO: 207
  Description of Artificial Sequence: Synthetic Peanut control sequences, inner sequence

SEQ ID NO: 36069 - DNA, 30 bp, Artificial Sequence; identical to SEQ ID NO: 131
  Description of Artificial Sequence: Synthetic Peanut control sequences, inner sequence

SEQ ID NO: 36070 - DNA, 30 bp, Artificial Sequence; identical to SEQ ID NO: 92
  Description of Artificial Sequence: Synthetic Peanut control sequences, inner sequence

SEQ ID NO: 36071 - DNA, 29 bp, Artificial Sequence
  Description of Artificial Sequence: Synthetic Peanut control sequences, inner sequence
gcacgtcgaaacacgtagccatgcacggt

SEQ ID NO: 36072 - DNA, 30 bp, Artificial Sequence; identical to SEQ ID NO: 8401
  Description of Artificial Sequence: Synthetic Peanut control sequences, inner sequence

SEQ ID NO: 36073 - DNA, 30 bp, Artificial Sequence; identical to SEQ ID NO: 106
  Description of Artificial Sequence: Synthetic Peanut control sequences, inner sequence

SEQ ID NO: 36074 - DNA, 30 bp, Artificial Sequence; identical to SEQ ID NO: 43
  Description of Artificial Sequence: Synthetic Peanut control sequences, inner sequence

SEQ ID NO: 36075 - DNA, 30 bp, Artificial Sequence; identical to SEQ ID NO: 175
  Description of Artificial Sequence: Synthetic Peanut control sequences, inner sequence

SEQ ID NO: 36076 - DNA, 30 bp, Artificial Sequence; identical to SEQ ID NO: 145
  Description of Artificial Sequence: Synthetic Peanut control sequences, inner sequence

SEQ ID NO: 36077 - DNA, 30 bp, Artificial Sequence; identical to SEQ ID NO: 16
  Description of Artificial Sequence: Synthetic Peanut control sequences, inner sequence

SEQ ID NO: 36078 - DNA, 30 bp, Artificial Sequence; identical to SEQ ID NO: 126
  Description of Artificial Sequence: Synthetic Peanut control sequences, inner sequence

SEQ ID NO: 36079 - DNA, 30 bp, Artificial Sequence; identical to SEQ ID NO: 66
  Description of Artificial Sequence: Synthetic Peanut control sequences, inner sequence

SEQ ID NO: 36080 - DNA, 30 bp, Artificial Sequence; identical to SEQ ID NO: 63
  Description of Artificial Sequence: Synthetic Peanut control sequences, inner sequence

SEQ ID NO: 36081 - DNA, 30 bp, Artificial Sequence; identical to SEQ ID NO: 164
  Description of Artificial Sequence: Synthetic Peanut control sequences, inner sequence

SEQ ID NO: 36082 - DNA, 28 bp, Artificial Sequence
  Description of Artificial Sequence: Synthetic Peanut control sequences, inner sequence
ggacgcagctgacctagcatgtgtgtca

SEQ ID NO: 36083 - DNA, 30 bp, Artificial Sequence; identical to SEQ ID NO: 51
  Description of Artificial Sequence: Synthetic Peanut control sequences, inner sequence

SEQ ID NO: 36084 - DNA, 30 bp, Artificial Sequence; identical to SEQ ID NO: 270
  Description of Artificial Sequence: Synthetic Peanut control sequences, inner sequence

SEQ ID NO: 36085 - DNA, 30 bp, Artificial Sequence; identical to SEQ ID NO: 154
  Description of Artificial Sequence: Synthetic Peanut control sequences, inner sequence

SEQ ID NO: 36086 - DNA, 30 bp, Artificial Sequence; identical to SEQ ID NO: 109
  Description of Artificial Sequence: Synthetic Peanut control sequences, inner sequence

SEQ ID NO: 36087 - DNA, 30 bp, Artificial Sequence; identical to SEQ ID NO: 67
  Description of Artificial Sequence: Synthetic Peanut control sequences, inner sequence

SEQ ID NO: 36088 - DNA, 30 bp, Artificial Sequence; identical to SEQ ID NO: 58
  Description of Artificial Sequence: Synthetic Peanut control sequences, inner sequence

SEQ ID NO: 36089 - DNA, 30 bp, Artificial Sequence; identical to SEQ ID NO: 25
  Description of Artificial Sequence: Synthetic Peanut control sequences, inner sequence

SEQ ID NO: 36090 - DNA, 30 bp, Artificial Sequence; identical to SEQ ID NO: 156
  Description of Artificial Sequence: Synthetic Peanut control sequences, inner sequence

SEQ ID NO: 36091 - DNA, 30 bp, Artificial Sequence; identical to SEQ ID NO: 136
  Description of Artificial Sequence: Synthetic Peanut control sequences, inner sequence

SEQ ID NO: 36092 - DNA, 30 bp, Artificial Sequence; identical to SEQ ID NO: 142
  Description of Artificial Sequence: Synthetic Peanut control sequences, inner sequence

SEQ ID NO: 36093 - DNA, 30 bp, Artificial Sequence; identical to SEQ ID NO: 94
  Description of Artificial Sequence: Synthetic Peanut control sequences, inner sequence

SEQ ID NO: 36094 - DNA, 30 bp, Artificial Sequence; identical to SEQ ID NO: 100
  Description of Artificial Sequence: Synthetic Peanut control sequences, inner sequence

SEQ ID NO: 36095 - DNA, 30 bp, Artificial Sequence; identical to SEQ ID NO: 89
  Description of Artificial Sequence: Synthetic Peanut control sequences, inner sequence

SEQ ID NO: 36096 - DNA, 30 bp, Artificial Sequence; identical to SEQ ID NO: 208
  Description of Artificial Sequence: Synthetic Peanut control sequences, inner sequence

SEQ ID NO: 36097 - DNA, 30 bp, Artificial Sequence; identical to SEQ ID NO: 186
  Description of Artificial Sequence: Synthetic Peanut control sequences, inner sequence

SEQ ID NO: 36098 - DNA, 30 bp, Artificial Sequence; identical to SEQ ID NO: 111
  Description of Artificial Sequence: Synthetic Peanut control sequences, inner sequence

SEQ ID NO: 36099 - DNA, 30 bp, Artificial Sequence; identical to SEQ ID NO: 146
  Description of Artificial Sequence: Synthetic Peanut control sequences, inner sequence

SEQ ID NO: 36100 - DNA, 30 bp, Artificial Sequence; identical to SEQ ID NO: 163
  Description of Artificial Sequence: Synthetic Peanut control sequences, inner sequence

SEQ ID NO: 36101 - DNA, 30 bp, Artificial Sequence; identical to SEQ ID NO: 203
  Description of Artificial Sequence: Synthetic Peanut control sequences, inner sequence

SEQ ID NO: 36102 - DNA, 31 bp, Artificial Sequence; identical to SEQ ID NO: 250
  Description of Artificial Sequence: Synthetic Peanut control sequences, inner sequence

SEQ ID NO: 36103 - DNA, 29 bp, Artificial Sequence
  Description of Artificial Sequence: Synthetic Peanut control sequences, inner sequence
ggccgatcgaccctatcaagtgcagcatg

SEQ ID NO: 36104 - DNA, 30 bp, Artificial Sequence; identical to SEQ ID NO: 44
  Description of Artificial Sequence: Synthetic Peanut control sequences, inner sequence

SEQ ID NO: 36105 - DNA, 30 bp, Artificial Sequence; identical to SEQ ID NO: 161
  Description of Artificial Sequence: Synthetic Peanut control sequences, inner sequence

SEQ ID NO: 36106 - DNA, 30 bp, Artificial Sequence; identical to SEQ ID NO: 362
  Description of Artificial Sequence: Synthetic Peanut control sequences, inner sequence

SEQ ID NO: 36107 - DNA, 30 bp, Artificial Sequence; identical to SEQ ID NO: 57
  Description of Artificial Sequence: Synthetic Peanut control sequences, inner sequence

SEQ ID NO: 36108 - DNA, 30 bp, Artificial Sequence; identical to SEQ ID NO: 78
  Description of Artificial Sequence: Synthetic Peanut control sequences, inner sequence

SEQ ID NO: 36109 - DNA, 30 bp, Artificial Sequence; identical to SEQ ID NO: 323
  Description of Artificial Sequence: Synthetic Peanut control sequences, inner sequence

SEQ ID NO: 36110 - DNA, 30 bp, Artificial Sequence; identical to SEQ ID NO: 567
  Description of Artificial Sequence: Synthetic Peanut control sequences, inner sequence

SEQ ID NO: 36111 - DNA, 30 bp, Artificial Sequence; identical to SEQ ID NO: 529
  Description of Artificial Sequence: Synthetic Peanut control sequences, inner sequence

SEQ ID NO: 36112 - DNA, 30 bp, Artificial Sequence; identical to SEQ ID NO: 95
  Description of Artificial Sequence: Synthetic Peanut control sequences, inner sequence

SEQ ID NO: 36113 - DNA, 30 bp, Artificial Sequence; identical to SEQ ID NO: 247
  Description of Artificial Sequence: Synthetic Peanut control sequences, inner sequence

SEQ ID NO: 36114 - DNA, 30 bp, Artificial Sequence; identical to SEQ ID NO: 377
  Description of Artificial Sequence: Synthetic Peanut control sequences, inner sequence

SEQ ID NO: 36115 - DNA, 29 bp, Artificial Sequence
  Description of Artificial Sequence: Synthetic Peanut control sequences, inner sequence
gtcatgccatcccttcgagtggacaggta

SEQ ID NO: 36116 - DNA, 30 bp, Artificial Sequence; identical to SEQ ID NO: 65
  Description of Artificial Sequence: Synthetic Peanut control sequences, inner sequence

SEQ ID NO: 36117 - DNA, 30 bp, Artificial Sequence; identical to SEQ ID NO: 117
  Description of Artificial Sequence: Synthetic Peanut control sequences, inner sequence

SEQ ID NO: 36118 - DNA, 30 bp, Artificial Sequence; identical to SEQ ID NO: 389
  Description of Artificial Sequence: Synthetic Peanut control sequences, inner sequence

SEQ ID NO: 36119 - DNA, 30 bp, Artificial Sequence; identical to SEQ ID NO: 147
  Description of Artificial Sequence: Synthetic Peanut control sequences, inner sequence

SEQ ID NO: 36120 - DNA, 30 bp, Artificial Sequence; identical to SEQ ID NO: 349
  Description of Artificial Sequence: Synthetic Peanut control sequences, inner sequence

SEQ ID NO: 36121 - DNA, 30 bp, Artificial Sequence; identical to SEQ ID NO: 168
  Description of Artificial Sequence: Synthetic Peanut control sequences, inner sequence

SEQ ID NO: 36122 - DNA, 30 bp, Artificial Sequence; identical to SEQ ID NO: 182
  Description of Artificial Sequence: Synthetic Peanut control sequences, inner sequence

SEQ ID NO: 36123 - DNA, 30 bp, Artificial Sequence; identical to SEQ ID NO: 290
  Description of Artificial Sequence: Synthetic Peanut control sequences, inner sequence

SEQ ID NO: 36124 - DNA, 30 bp, Artificial Sequence; identical to SEQ ID NO: 96
  Description of Artificial Sequence: Synthetic Peanut control sequences, inner sequence

SEQ ID NO: 36125 - DNA, 30 bp, Artificial Sequence; identical to SEQ ID NO: 310
  Description of Artificial Sequence: Synthetic Peanut control sequences, inner sequence

SEQ ID NO: 36126 - DNA, 30 bp, Artificial Sequence; identical to SEQ ID NO: 243
  Description of Artificial Sequence: Synthetic Peanut control sequences, inner sequence

SEQ ID NO: 36127 - DNA, 30 bp, Artificial Sequence; identical to SEQ ID NO: 496
  Description of Artificial Sequence: Synthetic Peanut control sequences, inner sequence

SEQ ID NO: 36128 - DNA, 30 bp, Artificial Sequence; identical to SEQ ID NO: 262
  Description of Artificial Sequence: Synthetic Peanut control sequences, inner sequence

SEQ ID NO: 36129 - DNA, 30 bp, Artificial Sequence; identical to SEQ ID NO: 383
  Description of Artificial Sequence: Synthetic Peanut control sequences, inner sequence

SEQ ID NO: 36130 - DNA, 30 bp, Artificial Sequence; identical to SEQ ID NO: 293
  Description of Artificial Sequence: Synthetic Peanut control sequences, inner sequence

SEQ ID NO: 36131 - DNA, 30 bp, Artificial Sequence; identical to SEQ ID NO: 191
  Description of Artificial Sequence: Synthetic Peanut control sequences, inner sequence

SEQ ID NO: 36132 - DNA, 30 bp, Artificial Sequence; identical to SEQ ID NO: 116
  Description of Artificial Sequence: Synthetic Peanut control sequences, inner sequence

SEQ ID NO: 36133 - DNA, 30 bp, Artificial Sequence; identical to SEQ ID NO: 85
  Description of Artificial Sequence: Synthetic Peanut control sequences, inner sequence

SEQ ID NO: 36134 - DNA, 30 bp, Artificial Sequence; identical to SEQ ID NO: 394
  Description of Artificial Sequence: Synthetic Peanut control sequences, inner sequence

SEQ ID NO: 36135 - DNA, 30 bp, Artificial Sequence; identical to SEQ ID NO: 128
  Description of Artificial Sequence: Synthetic Peanut control sequences, inner sequence

SEQ ID NO: 36136 - DNA, 30 bp, Artificial Sequence; identical to SEQ ID NO: 430
  Description of Artificial Sequence: Synthetic Peanut control sequences, inner sequence

SEQ ID NO: 36137 - DNA, 30 bp, Artificial Sequence; identical to SEQ ID NO: 271
  Description of Artificial Sequence: Synthetic Peanut control sequences, inner sequence

SEQ ID NO: 36138 - DNA, 30 bp, Artificial Sequence; identical to SEQ ID NO: 229
  Description of Artificial Sequence: Synthetic Peanut control sequences, inner sequence

SEQ ID NO: 36139 - DNA, 30 bp, Artificial Sequence; identical to SEQ ID NO: 429
  Description of Artificial Sequence: Synthetic Peanut control sequences, inner sequence

SEQ ID NO: 36140 - DNA, 30 bp, Artificial Sequence; identical to SEQ ID NO: 118
  Description of Artificial Sequence: Synthetic Peanut control sequences, inner sequence

SEQ ID NO: 36141 - DNA, 31 bp, Artificial Sequence; identical to SEQ ID NO: 150
  Description of Artificial Sequence: Synthetic Peanut control sequences, inner sequence

SEQ ID NO: 36142 - DNA, 30 bp, Artificial Sequence; identical to SEQ ID NO: 218
  Description of Artificial Sequence: Synthetic Peanut control sequences, inner sequence

SEQ ID NO: 36143 - DNA, 30 bp, Artificial Sequence; identical to SEQ ID NO: 311
  Description of Artificial Sequence: Synthetic Peanut control sequences, inner sequence

SEQ ID NO: 36144 - DNA, 30 bp, Artificial Sequence; identical to SEQ ID NO: 115
  Description of Artificial Sequence: Synthetic Peanut control sequences, inner sequence

SEQ ID NO: 36145 - DNA, 30 bp, Artificial Sequence; identical to SEQ ID NO: 201
  Description of Artificial Sequence: Synthetic Peanut control sequences, inner sequence

SEQ ID NO: 36146 - DNA, 30 bp, Artificial Sequence; identical to SEQ ID NO: 155
  Description of Artificial Sequence: Synthetic Peanut control sequences, inner sequence

SEQ ID NO: 36147 - DNA, 30 bp, Artificial Sequence; identical to SEQ ID NO: 68
  Description of Artificial Sequence: Synthetic Peanut control sequences, inner sequence

SEQ ID NO: 36148 - DNA, 30 bp, Artificial Sequence; identical to SEQ ID NO: 468
  Description of Artificial Sequence: Synthetic Peanut control sequences, inner sequence

SEQ ID NO: 36149 - DNA, 30 bp, Artificial Sequence; identical to SEQ ID NO: 253
  Description of Artificial Sequence: Synthetic Peanut control sequences, inner sequence

SEQ ID NO: 36150 - DNA, 30 bp, Artificial Sequence; identical to SEQ ID NO: 200
  Description of Artificial Sequence: Synthetic Peanut control sequences, inner sequence

SEQ ID NO: 36151 - DNA, 30 bp, Artificial Sequence; identical to SEQ ID NO: 113
  Description of Artificial Sequence: Synthetic Peanut control sequences, inner sequence

SEQ ID NO: 36152 - DNA, 30 bp, Artificial Sequence; identical to SEQ ID NO: 99
  Description of Artificial Sequence: Synthetic Peanut control sequences, inner sequence

SEQ ID NO: 36153 - DNA, 30 bp, Artificial Sequence; identical to SEQ ID NO: 71
  Description of Artificial Sequence: Synthetic Peanut control sequences, inner sequence

SEQ ID NO: 36154 - DNA, 30 bp, Artificial Sequence; identical to SEQ ID NO: 185
  Description of Artificial Sequence: Synthetic Peanut control sequences, inner sequence

SEQ ID NO: 36155 - DNA, 30 bp, Artificial Sequence; identical to SEQ ID NO: 88
  Description of Artificial Sequence: Synthetic Peanut control sequences, inner sequence

SEQ ID NO: 36156 - DNA, 30 bp, Artificial Sequence; identical to SEQ ID NO: 347
  Description of Artificial Sequence: Synthetic Peanut control sequences, inner sequence

SEQ ID NO: 36157 - DNA, 30 bp, Artificial Sequence; identical to SEQ ID NO: 159
  Description of Artificial Sequence: Synthetic Peanut control sequences, inner sequence

SEQ ID NO: 36158 - DNA, 31 bp, Artificial Sequence; identical to SEQ ID NO: 4245
  Description of Artificial Sequence: Synthetic Peanut control sequences, inner sequence

SEQ ID NO: 36159 - DNA, 30 bp, Artificial Sequence; identical to SEQ ID NO: 240
  Description of Artificial Sequence: Synthetic Peanut control sequences, inner sequence

SEQ ID NO: 36160 - DNA, 30 bp, Artificial Sequence; identical to SEQ ID NO: 438
  Description of Artificial Sequence: Synthetic Peanut control sequences, inner sequence

SEQ ID NO: 36161 - DNA, 30 bp, Artificial Sequence; identical to SEQ ID NO: 171
  Description of Artificial Sequence: Synthetic Peanut control sequences, inner sequence

SEQ ID NO: 36162 - DNA, 30 bp, Artificial Sequence; identical to SEQ ID NO: 119
  Description of Artificial Sequence: Synthetic Peanut control sequences, inner sequence

SEQ ID NO: 36163 - DNA, 31 bp, Artificial Sequence; identical to SEQ ID NO: 503
  Description of Artificial Sequence: Synthetic Peanut control sequences, inner sequence

SEQ ID NO: 36164 - DNA, 30 bp, Artificial Sequence; identical to SEQ ID NO: 850
  Description of Artificial Sequence: Synthetic Peanut control sequences, inner sequence

SEQ ID NO: 36165 - DNA, 30 bp, Artificial Sequence; identical to SEQ ID NO: 370
  Description of Artificial Sequence: Synthetic Peanut control sequences, inner sequence

SEQ ID NO: 36166 - DNA, 30 bp, Artificial Sequence; identical to SEQ ID NO: 341
  Description of Artificial Sequence: Synthetic Peanut control sequences, inner sequence

SEQ ID NO: 36167 - DNA, 30 bp, Artificial Sequence; identical to SEQ ID NO: 285
  Description of Artificial Sequence: Synthetic Peanut control sequences, inner sequence

SEQ ID NO: 36168 - DNA, 30 bp, Artificial Sequence; identical to SEQ ID NO: 245
  Description of Artificial Sequence: Synthetic Peanut control sequences, inner sequence

SEQ ID NO: 36169 - DNA, 30 bp, Artificial Sequence; identical to SEQ ID NO: 441
  Description of Artificial Sequence: Synthetic Peanut control sequences, inner sequence

SEQ ID NO: 36170 - DNA, 30 bp, Artificial Sequence; identical to SEQ ID NO: 560
  Description of Artificial Sequence: Synthetic Peanut control sequences, inner sequence

SEQ ID NO: 36171 - DNA, 30 bp, Artificial Sequence; identical to SEQ ID NO: 36
  Description of Artificial Sequence: Synthetic Peanut control sequences, inner sequence

SEQ ID NO: 36172 - DNA, 30 bp, Artificial Sequence; identical to SEQ ID NO: 188
  Description of Artificial Sequence: Synthetic Peanut control sequences, inner sequence

SEQ ID NO: 36173 - DNA, 30 bp, Artificial Sequence; identical to SEQ ID NO: 153
  Description of Artificial Sequence: Synthetic Peanut control sequences, inner sequence

SEQ ID NO: 36174 - DNA, 30 bp, Artificial Sequence; identical to SEQ ID NO: 196
  Description of Artificial Sequence: Synthetic Peanut control sequences, inner sequence

SEQ ID NO: 36175 - DNA, 30 bp, Artificial Sequence; identical to SEQ ID NO: 328
  Description of Artificial Sequence: Synthetic Peanut control sequences, inner sequence

SEQ ID NO: 36176 - DNA, 30 bp, Artificial Sequence; identical to SEQ ID NO: 273
  Description of Artificial Sequence: Synthetic Peanut control sequences, inner sequence

SEQ ID NO: 36177 - DNA, 30 bp, Artificial Sequence; identical to SEQ ID NO: 73
  Description of Artificial Sequence: Synthetic Peanut control sequences, inner sequence

SEQ ID NO: 36178 - DNA, 30 bp, Artificial Sequence; identical to SEQ ID NO: 215
  Description of Artificial Sequence: Synthetic Peanut control sequences, inner sequence

SEQ ID NO: 36179 - DNA, 30 bp, Artificial Sequence
  Description of Artificial Sequence: Synthetic Peanut control sequences, inner sequence
tggccgatcatccctcaagttggcgtgtgc

SEQ ID NO: 36180 - DNA, 30 bp, Artificial Sequence; identical to SEQ ID NO: 472
  Description of Artificial Sequence: Synthetic Peanut control sequences, inner sequence

SEQ ID NO: 36181 - DNA, 30 bp, Artificial Sequence; identical to SEQ ID NO: 237
  Description of Artificial Sequence: Synthetic Peanut control sequences, inner sequence

SEQ ID NO: 36182 - DNA, 30 bp, Artificial Sequence; identical to SEQ ID NO: 948
  Description of Artificial Sequence: Synthetic Peanut control sequences, inner sequence

SEQ ID NO: 36183 - DNA, 30 bp, Artificial Sequence; identical to SEQ ID NO: 123
  Description of Artificial Sequence: Synthetic Peanut control sequences, inner sequence

SEQ ID NO: 36184 - DNA, 30 bp, Artificial Sequence; identical to SEQ ID NO: 4814
  Description of Artificial Sequence: Synthetic Peanut control sequences, inner sequence

SEQ ID NO: 36185 - DNA, 30 bp, Artificial Sequence; identical to SEQ ID NO: 741
  Description of Artificial Sequence: Synthetic Peanut control sequences, inner sequence

SEQ ID NO: 36186 - DNA, 30 bp, Artificial Sequence; identical to SEQ ID NO: 8922
  Description of Artificial Sequence: Synthetic Peanut control sequences, inner sequence

SEQ ID NO: 36187 - DNA, 30 bp, Artificial Sequence; identical to SEQ ID NO: 91
  Description of Artificial Sequence: Synthetic Peanut control sequences, inner sequence

SEQ ID NO: 36188 - DNA, 30 bp, Artificial Sequence; identical to SEQ ID NO: 189
  Description of Artificial Sequence: Synthetic Peanut control sequences, inner sequence

SEQ ID NO: 36189 - DNA, 30 bp, Artificial Sequence; identical to SEQ ID NO: 260
  Description of Artificial Sequence: Synthetic Peanut control sequences, inner sequence

SEQ ID NO: 36190 - DNA, 30 bp, Artificial Sequence; identical to SEQ ID NO: 461
  Description of Artificial Sequence: Synthetic Peanut control sequences, inner sequence

SEQ ID NO: 36191 - DNA, 30 bp, Artificial Sequence; identical to SEQ ID NO: 487
  Description of Artificial Sequence: Synthetic Peanut control sequences, inner sequence

SEQ ID NO: 36192 - DNA, 31 bp, Artificial Sequence; identical to SEQ ID NO: 20870
  Description of Artificial Sequence: Synthetic Peanut control sequences, inner sequence

SEQ ID NO: 36193 - DNA, 30 bp, Artificial Sequence; identical to SEQ ID NO: 360
  Description of Artificial Sequence: Synthetic Peanut control sequences, inner sequence

SEQ ID NO: 36194 - DNA, 30 bp, Artificial Sequence; identical to SEQ ID NO: 233
  Description of Artificial Sequence: Synthetic Peanut control sequences, inner sequence

SEQ ID NO: 36195 - DNA, 30 bp, Artificial Sequence; identical to SEQ ID NO: 387
  Description of Artificial Sequence: Synthetic Peanut control sequences, inner sequence

SEQ ID NO: 36196 - DNA, 30 bp, Artificial Sequence; identical to SEQ ID NO: 312
  Description of Artificial Sequence: Synthetic Peanut control sequences, inner sequence

SEQ ID NO: 36197 - DNA, 30 bp, Artificial Sequence; identical to SEQ ID NO: 288
  Description of Artificial Sequence: Synthetic Peanut control sequences, inner sequence

SEQ ID NO: 36198 - DNA, 30 bp, Artificial Sequence; identical to SEQ ID NO: 485
  Description of Artificial Sequence: Synthetic Peanut control sequences, inner sequence

SEQ ID NO: 36199 - DNA, 30 bp, Artificial Sequence; identical to SEQ ID NO: 395
  Description of Artificial Sequence: Synthetic Peanut control sequences, inner sequence

SEQ ID NO: 36200 - DNA, 30 bp, Artificial Sequence; identical to SEQ ID NO: 392
  Description of Artificial Sequence: Synthetic Peanut control sequences, inner sequence

SEQ ID NO: 36201 - DNA, 30 bp, Artificial Sequence; identical to SEQ ID NO: 528
  Description of Artificial Sequence: Synthetic Peanut control sequences, inner sequence

SEQ ID NO: 36202 - DNA, 30 bp, Artificial Sequence; identical to SEQ ID NO: 97
  Description of Artificial Sequence: Synthetic Peanut control sequences, inner sequence

SEQ ID NO: 36203 - DNA, 30 bp, Artificial Sequence; identical to SEQ ID NO: 400
  Description of Artificial Sequence: Synthetic Peanut control sequences, inner sequence

SEQ ID NO: 36204 - DNA, 30 bp, Artificial Sequence; identical to SEQ ID NO: 284
  Description of Artificial Sequence: Synthetic Peanut control sequences, inner sequence

SEQ ID NO: 36205 - DNA, 30 bp, Artificial Sequence; identical to SEQ ID NO: 286
  Description of Artificial Sequence: Synthetic Peanut control sequences, inner sequence

SEQ ID NO: 36206 - DNA, 30 bp, Artificial Sequence; identical to SEQ ID NO: 211
  Description of Artificial Sequence: Synthetic Peanut control sequences, inner sequence

SEQ ID NO: 36207 - DNA, 30 bp, Artificial Sequence; identical to SEQ ID NO: 329
  Description of Artificial Sequence: Synthetic Peanut control sequences, inner sequence

SEQ ID NO: 36208 - DNA, 31 bp, Artificial Sequence; identical to SEQ ID NO: 221
  Description of Artificial Sequence: Synthetic Peanut control sequences, inner sequence

SEQ ID NO: 36209 - DNA, 30 bp, Artificial Sequence; identical to SEQ ID NO: 344
  Description of Artificial Sequence: Synthetic Peanut control sequences, inner sequence

SEQ ID NO: 36210 - DNA, 30 bp, Artificial Sequence; identical to SEQ ID NO: 448
  Description of Artificial Sequence: Synthetic Peanut control sequences, inner sequence

SEQ ID NO: 36211 - DNA, 30 bp, Artificial Sequence; identical to SEQ ID NO: 354
  Description of Artificial Sequence: Synthetic Peanut control sequences, inner sequence

SEQ ID NO: 36212 - DNA, 30 bp, Artificial Sequence; identical to SEQ ID NO: 582
  Description of Artificial Sequence: Synthetic Peanut control sequences, inner sequence

SEQ ID NO: 36213 - DNA, 30 bp, Artificial Sequence; identical to SEQ ID NO: 305
  Description of Artificial Sequence: Synthetic Peanut control sequences, inner sequence

SEQ ID NO: 36214 - DNA, 30 bp, Artificial Sequence; identical to SEQ ID NO: 266
  Description of Artificial Sequence: Synthetic Peanut control sequences, inner sequence

SEQ ID NO: 36215 - DNA, 30 bp, Artificial Sequence; identical to SEQ ID NO: 783
  Description of Artificial Sequence: Synthetic Peanut control sequences, inner sequence

SEQ ID NO: 36216 - DNA, 30 bp, Artificial Sequence; identical to SEQ ID NO: 139
  Description of Artificial Sequence: Synthetic Peanut control sequences, inner sequence

SEQ ID NO: 36217 - DNA, 30 bp, Artificial Sequence; identical to SEQ ID NO: 373
  Description of Artificial Sequence: Synthetic Peanut control sequences, inner sequence

SEQ ID NO: 36218 - DNA, 30 bp, Artificial Sequence; identical to SEQ ID NO: 340
  Description of Artificial Sequence: Synthetic Peanut control sequences, inner sequence

SEQ ID NO: 36219 - DNA, 30 bp, Artificial Sequence; identical to SEQ ID NO: 437
  Description of Artificial Sequence: Synthetic Peanut control sequences, inner sequence

SEQ ID NO: 36220 - DNA, 30 bp, Artificial Sequence; identical to SEQ ID NO: 166
  Description of Artificial Sequence: Synthetic Peanut control sequences, inner sequence

SEQ ID NO: 36221 - DNA, 30 bp, Artificial Sequence; identical to SEQ ID NO: 4552
  Description of Artificial Sequence: Synthetic Peanut control sequences, inner sequence

SEQ ID NO: 36222 - DNA, 30 bp, Artificial Sequence; identical to SEQ ID NO: 355
  Description of Artificial Sequence: Synthetic Peanut control sequences, inner sequence

SEQ ID NO: 36223 - DNA, 30 bp, Artificial Sequence; identical to SEQ ID NO: 517
  Description of Artificial Sequence: Synthetic Peanut control sequences, inner sequence

SEQ ID NO: 36224 - DNA, 30 bp, Artificial Sequence; identical to SEQ ID NO: 374
  Description of Artificial Sequence: Synthetic Peanut control sequences, inner sequence

SEQ ID NO: 36225 - DNA, 30 bp, Artificial Sequence; identical to SEQ ID NO: 132
  Description of Artificial Sequence: Synthetic Peanut control sequences, inner sequence

SEQ ID NO: 36226 - DNA, 30 bp, Artificial Sequence; identical to SEQ ID NO: 283
  Description of Artificial Sequence: Synthetic Peanut control sequences, inner sequence

SEQ ID NO: 36227 - DNA, 30 bp, Artificial Sequence; identical to SEQ ID NO: 715
  Description of Artificial Sequence: Synthetic Peanut control sequences, inner sequence

SEQ ID NO: 36228 - DNA, 30 bp, Artificial Sequence; identical to SEQ ID NO: 287
  Description of Artificial Sequence: Synthetic Peanut control sequences, inner sequence

SEQ ID NO: 36229 - DNA, 30 bp, Artificial Sequence; identical to SEQ ID NO: 470
  Description of Artificial Sequence: Synthetic Peanut control sequences, inner sequence

SEQ ID NO: 36230 - DNA, 30 bp, Artificial Sequence; identical to SEQ ID NO: 916
  Description of Artificial Sequence: Synthetic Peanut control sequences, inner sequence

SEQ ID NO: 36231 - DNA, 30 bp, Artificial Sequence; identical to SEQ ID NO: 524
  Description of Artificial Sequence: Synthetic Peanut control sequences, inner sequence

SEQ ID NO: 36232 - DNA, 30 bp, Artificial Sequence; identical to SEQ ID NO: 346
  Description of Artificial Sequence: Synthetic Peanut control sequences, inner sequence

SEQ ID NO: 36233 - DNA, 30 bp, Artificial Sequence; identical to SEQ ID NO: 4254
  Description of Artificial Sequence: Synthetic Peanut control sequences, inner sequence

SEQ ID NO: 36234 - DNA, 30 bp, Artificial Sequence; identical to SEQ ID NO: 151
  Description of Artificial Sequence: Synthetic Peanut control sequences, inner sequence

SEQ ID NO: 36235 - DNA, 30 bp, Artificial Sequence; identical to SEQ ID NO: 695
  Description of Artificial Sequence: Synthetic Peanut control sequences, inner sequence

SEQ ID NO: 36236 - DNA, 30 bp, Artificial Sequence; identical to SEQ ID NO: 8682
  Description of Artificial Sequence: Synthetic Peanut control sequences, inner sequence

SEQ ID NO: 36237 - DNA, 30 bp, Artificial Sequence; identical to SEQ ID NO: 179
  Description of Artificial Sequence: Synthetic Peanut control sequences, inner sequence

SEQ ID NO: 36238 - DNA, 31 bp, Artificial Sequence; identical to SEQ ID NO: 258
  Description of Artificial Sequence: Synthetic Peanut control sequences, inner sequence

SEQ ID NO: 36239 - DNA, 30 bp, Artificial Sequence; identical to SEQ ID NO: 401
  Description of Artificial Sequence: Synthetic Peanut control sequences, inner sequence

SEQ ID NO: 36240 - DNA, 30 bp, Artificial Sequence; identical to SEQ ID NO: 4234
  Description of Artificial Sequence: Synthetic Peanut control sequences, inner sequence

SEQ ID NO: 36241 - DNA, 30 bp, Artificial Sequence; identical to SEQ ID NO: 4229
  Description of Artificial Sequence: Synthetic Peanut control sequences, inner sequence

SEQ ID NO: 36242 - DNA, 30 bp, Artificial Sequence; identical to SEQ ID NO: 174
  Description of Artificial Sequence: Synthetic Peanut control sequences, inner sequence

SEQ ID NO: 36243 - DNA, 30 bp, Artificial Sequence; identical to SEQ ID NO: 801
  Description of Artificial Sequence: Synthetic Peanut control sequences, inner sequence

SEQ ID NO: 36244 - DNA, 30 bp, Artificial Sequence; identical to SEQ ID NO: 105
  Description of Artificial Sequence: Synthetic Peanut control sequences, inner sequence

SEQ ID NO: 36245 - DNA, 30 bp, Artificial Sequence; identical to SEQ ID NO: 144
  Description of Artificial Sequence: Synthetic Peanut control sequences, inner sequence

SEQ ID NO: 36246 - DNA, 30 bp, Artificial Sequence; identical to SEQ ID NO: 369
  Description of Artificial Sequence: Synthetic Peanut control sequences, inner sequence

SEQ ID NO: 36247 - DNA, 30 bp, Artificial Sequence; identical to SEQ ID NO: 834
  Description of Artificial Sequence: Synthetic Peanut control sequences, inner sequence

SEQ ID NO: 36248 - DNA, 30 bp, Artificial Sequence; identical to SEQ ID NO: 406
  Description of Artificial Sequence: Synthetic Peanut control sequences, inner sequence

SEQ ID NO: 36249 - DNA, 30 bp, Artificial Sequence; identical to SEQ ID NO: 28268
  Description of Artificial Sequence: Synthetic Peanut control sequences, inner sequence

SEQ ID NO: 36250 - DNA, 30 bp, Artificial Sequence; identical to SEQ ID NO: 985
  Description of Artificial Sequence: Synthetic Peanut control sequences, inner sequence

SEQ ID NO: 36251 - DNA, 30 bp, Artificial Sequence; identical to SEQ ID NO: 184
  Description of Artificial Sequence: Synthetic Peanut control sequences, inner sequence

SEQ ID NO: 36252 - DNA, 30 bp, Artificial Sequence; identical to SEQ ID NO: 112
  Description of Artificial Sequence: Synthetic Peanut control sequences, inner sequence

SEQ ID NO: 36253 - DNA, 29 bp, Artificial Sequence
  Description of Artificial Sequence: Synthetic Peanut control sequences, inner sequence
ggccgaacggaccgacaagtgcgcatgga

SEQ ID NO: 36254 - DNA, 30 bp, Artificial Sequence; identical to SEQ ID NO: 764
  Description of Artificial Sequence: Synthetic Peanut control sequences, inner sequence

SEQ ID NO: 36255 - DNA, 30 bp, Artificial Sequence; identical to SEQ ID NO: 238
  Description of Artificial Sequence: Synthetic Peanut control sequences, inner sequence

SEQ ID NO: 36256 - DNA, 30 bp, Artificial Sequence; identical to SEQ ID NO: 127
  Description of Artificial Sequence: Synthetic Peanut control sequences, inner sequence

SEQ ID NO: 36257 - DNA, 30 bp, Artificial Sequence; identical to SEQ ID NO: 4889
  Description of Artificial Sequence: Synthetic Peanut control sequences, inner sequence

SEQ ID NO: 36258 - DNA, 27 bp, Artificial Sequence
  Description of Artificial Sequence: Synthetic Peanut control sequences, inner sequence
ggccaagctgacctagcatgtgtgtca

SEQ ID NO: 36259 - DNA, 30 bp, Artificial Sequence; identical to SEQ ID NO: 563
  Description of Artificial Sequence: Synthetic Peanut control sequences, inner sequence

SEQ ID NO: 36260 - DNA, 30 bp, Artificial Sequence; identical to SEQ ID NO: 454
  Description of Artificial Sequence: Synthetic Peanut control sequences, inner sequence

SEQ ID NO: 36261 - DNA, 30 bp, Artificial Sequence; identical to SEQ ID NO: 548
  Description of Artificial Sequence: Synthetic Peanut control sequences, inner sequence

SEQ ID NO: 36262 - DNA, 30 bp, Artificial Sequence; identical to SEQ ID NO: 409
  Description of Artificial Sequence: Synthetic Peanut control sequences, inner sequence

SEQ ID NO: 36263 - DNA, 30 bp, Artificial Sequence; identical to SEQ ID NO: 464
  Description of Artificial Sequence: Synthetic Peanut control sequences, inner sequence

SEQ ID NO: 36264 - DNA, 30 bp, Artificial Sequence; identical to SEQ ID NO: 212
  Description of Artificial Sequence: Synthetic Peanut control sequences, inner sequence

SEQ ID NO: 36265 - DNA, 29 bp, Artificial Sequence
  Description of Artificial Sequence: Synthetic Peanut control sequences, inner sequence
gtgcgaccgaccctatcaagtgcagcatg

SEQ ID NO: 36266 - DNA, 30 bp, Artificial Sequence; identical to SEQ ID NO: 318
  Description of Artificial Sequence: Synthetic Peanut control sequences, inner sequence

SEQ ID NO: 36267 - DNA, 30 bp, Artificial Sequence; identical to SEQ ID NO: 187
  Description of Artificial Sequence: Synthetic Peanut control sequences, inner sequence

SEQ ID NO: 36268 - DNA, 30 bp, Artificial Sequence; identical to SEQ ID NO: 135
  Description of Artificial Sequence: Synthetic Peanut control sequences, inner sequence

SEQ ID NO: 36269 - DNA, 30 bp, Artificial Sequence; identical to SEQ ID NO: 968
  Description of Artificial Sequence: Synthetic Peanut control sequences, inner sequence

SEQ ID NO: 36270 - DNA, 30 bp, Artificial Sequence; identical to SEQ ID NO: 8825
  Description of Artificial Sequence: Synthetic Peanut control sequences, inner sequence

SEQ ID NO: 36271 - DNA, 30 bp, Artificial Sequence; identical to SEQ ID NO: 698
  Description of Artificial Sequence: Synthetic Peanut control sequences, inner sequence

SEQ ID NO: 36272 - DNA, 30 bp, Artificial Sequence; identical to SEQ ID NO: 121
  Description of Artificial Sequence: Synthetic Peanut control sequences, inner sequence

SEQ ID NO: 36273 - DNA, 30 bp, Artificial Sequence; identical to SEQ ID NO: 130
  Description of Artificial Sequence: Synthetic Peanut control sequences, inner sequence

SEQ ID NO: 36274 - DNA, 30 bp, Artificial Sequence; identical to SEQ ID NO: 165
  Description of Artificial Sequence: Synthetic Peanut control sequences, inner sequence

SEQ ID NO: 36275 - DNA, 31 bp, Artificial Sequence; identical to SEQ ID NO: 216
  Description of Artificial Sequence: Synthetic Peanut control sequences, inner sequence

SEQ ID NO: 36276 - DNA, 30 bp, Artificial Sequence; identical to SEQ ID NO: 4981
  Description of Artificial Sequence: Synthetic Peanut control sequences, inner sequence

SEQ ID NO: 36277 - DNA, 33 bp, Artificial Sequence; identical to SEQ ID NO: 864
  Description of Artificial Sequence: Synthetic Peanut control sequences, inner sequence

SEQ ID NO: 36278 - DNA, 30 bp, Artificial Sequence; identical to SEQ ID NO: 740
  Description of Artificial Sequence: Synthetic Peanut control sequences, inner sequence

SEQ ID NO: 36279 - DNA, 30 bp, Artificial Sequence; identical to SEQ ID NO: 149
  Description of Artificial Sequence: Synthetic Peanut control sequences, inner sequence

SEQ ID NO: 36280 - DNA, 30 bp, Artificial Sequence; identical to SEQ ID NO: 120
  Description of Artificial Sequence: Synthetic Peanut control sequences, inner sequence

SEQ ID NO: 36281 - DNA, 30 bp, Artificial Sequence; identical to SEQ ID NO: 282
  Description of Artificial Sequence: Synthetic Peanut control sequences, inner sequence

SEQ ID NO: 36282 - DNA, 30 bp, Artificial Sequence; identical to SEQ ID NO: 79
  Description of Artificial Sequence: Synthetic Peanut control sequences, inner sequence

SEQ ID NO: 36283 - DNA, 30 bp, Artificial Sequence; identical to SEQ ID NO: 103
  Description of Artificial Sequence: Synthetic Peanut control sequences, inner sequence

SEQ ID NO: 36284 - DNA, 30 bp, Artificial Sequence; identical to SEQ ID NO: 4205
  Description of Artificial Sequence: Synthetic Peanut control sequences, inner sequence

SEQ ID NO: 36285 - DNA, 30 bp, Artificial Sequence; identical to SEQ ID NO: 950
  Description of Artificial Sequence: Synthetic Peanut control sequences, inner sequence

SEQ ID NO: 36286 - DNA, 25 bp, Artificial Sequence
  Description of Artificial Sequence: Synthetic Peanut control sequences, inner sequence
ggcatgcacgcacctacacgtgggc

SEQ ID NO: 36287 - DNA, 30 bp, Artificial Sequence; identical to SEQ ID NO: 294
  Description of Artificial Sequence: Synthetic Peanut control sequences, inner sequence

SEQ ID NO: 36288 - DNA, 30 bp, Artificial Sequence; identical to SEQ ID NO: 327
  Description of Artificial Sequence: Synthetic Peanut control sequences, inner sequence

SEQ ID NO: 36289 - DNA, 30 bp, Artificial Sequence; identical to SEQ ID NO: 630
  Description of Artificial Sequence: Synthetic Peanut control sequences, inner sequence

SEQ ID NO: 36290 - DNA, 30 bp, Artificial Sequence; identical to SEQ ID NO: 352
  Description of Artificial Sequence: Synthetic Peanut control sequences, inner sequence

SEQ ID NO: 36291 - DNA, 30 bp, Artificial Sequence; identical to SEQ ID NO: 673
  Description of Artificial Sequence: Synthetic Peanut control sequences, inner sequence

SEQ ID NO: 36292 - DNA, 30 bp, Artificial Sequence; identical to SEQ ID NO: 298
  Description of Artificial Sequence: Synthetic Peanut control sequences, inner sequence

SEQ ID NO: 36293 - DNA, 30 bp, Artificial Sequence; identical to SEQ ID NO: 4881
  Description of Artificial Sequence: Synthetic Peanut control sequences, inner sequence

SEQ ID NO: 36294 - DNA, 30 bp, Artificial Sequence; identical to SEQ ID NO: 928
  Description of Artificial Sequence: Synthetic Peanut control sequences, inner sequence

SEQ ID NO: 36295 - DNA, 30 bp, Artificial Sequence; identical to SEQ ID NO: 640
  Description of Artificial Sequence: Synthetic Peanut control sequences, inner sequence

SEQ ID NO: 36296 - DNA, 30 bp, Artificial Sequence; identical to SEQ ID NO: 914
  Description of Artificial Sequence: Synthetic Peanut control sequences, inner sequence

SEQ ID NO: 36297 - DNA, 30 bp, Artificial Sequence; identical to SEQ ID NO: 28926
  Description of Artificial Sequence: Synthetic Peanut control sequences, inner sequence

SEQ ID NO: 36298 - DNA, 30 bp, Artificial Sequence; identical to SEQ ID NO: 28472
  Description of Artificial Sequence: Synthetic Peanut control sequences, inner sequence

SEQ ID NO: 36299 - DNA, 30 bp, Artificial Sequence; identical to SEQ ID NO: 379
  Description of Artificial Sequence: Synthetic Peanut control sequences, inner sequence

SEQ ID NO: 36300 - DNA, 30 bp, Artificial Sequence; identical to SEQ ID NO: 301
  Description of Artificial Sequence: Synthetic Peanut control sequences, inner sequence

SEQ ID NO: 36301 - DNA, 30 bp, Artificial Sequence; identical to SEQ ID NO: 107
  Description of Artificial Sequence: Synthetic Peanut control sequences, inner sequence

SEQ ID NO: 36302 - DNA, 30 bp, Artificial Sequence; identical to SEQ ID NO: 511
  Description of Artificial Sequence: Synthetic Peanut control sequences, inner sequence

SEQ ID NO: 36303 - DNA, 30 bp, Artificial Sequence; identical to SEQ ID NO: 572
  Description of Artificial Sequence: Synthetic Peanut control sequences, inner sequence

SEQ ID NO: 36304 - DNA, 30 bp, Artificial Sequence; identical to SEQ ID NO: 645
  Description of Artificial Sequence: Synthetic Peanut control sequences, inner sequence

SEQ ID NO: 36305 - DNA, 30 bp, Artificial Sequence; identical to SEQ ID NO: 615
  Description of Artificial Sequence: Synthetic Peanut control sequences, inner sequence

SEQ ID NO: 36306 - DNA, 30 bp, Artificial Sequence; identical to SEQ ID NO: 545
  Description of Artificial Sequence: Synthetic Peanut control sequences, inner sequence

SEQ ID NO: 36307 - DNA, 30 bp, Artificial Sequence; identical to SEQ ID NO: 192
  Description of Artificial Sequence: Synthetic Peanut control sequences, inner sequence

SEQ ID NO: 36308 - DNA, 30 bp, Artificial Sequence; identical to SEQ ID NO: 12931
  Description of Artificial Sequence: Synthetic Peanut control sequences, inner sequence

SEQ ID NO: 36309 - DNA, 30 bp, Artificial Sequence; identical to SEQ ID NO: 686
  Description of Artificial Sequence: Synthetic Peanut control sequences, inner sequence

SEQ ID NO: 36310 - DNA, 30 bp, Artificial Sequence; identical to SEQ ID NO: 585
  Description of Artificial Sequence: Synthetic Peanut control sequences, inner sequence

SEQ ID NO: 36311 - DNA, 30 bp, Artificial Sequence; identical to SEQ ID NO: 4598
  Description of Artificial Sequence: Synthetic Peanut control sequences, inner sequence

SEQ ID NO: 36312 - DNA, 29 bp, Artificial Sequence
  Description of Artificial Sequence: Synthetic Peanut control sequences, inner sequence
tggccgatcgaccctatcatgaggccatg

SEQ ID NO: 36313 - DNA, 30 bp, Artificial Sequence; identical to SEQ ID NO: 532
  Description of Artificial Sequence: Synthetic Peanut control sequences, inner sequence

SEQ ID NO: 36314 - DNA, 29 bp, Artificial Sequence
  Description of Artificial Sequence: Synthetic Peanut control sequences, inner sequence
ggcctgcgatggatgtggacgtacgtggc

SEQ ID NO: 36315 - DNA, 30 bp, Artificial Sequence; identical to SEQ ID NO: 12939
  Description of Artificial Sequence: Synthetic Peanut control sequences, inner sequence

SEQ ID NO: 36316 - DNA, 30 bp, Artificial Sequence; identical to SEQ ID NO: 553
  Description of Artificial Sequence: Synthetic Peanut control sequences, inner sequence

SEQ ID NO: 36317 - DNA, 30 bp, Artificial Sequence; identical to SEQ ID NO: 522
  Description of Artificial Sequence: Synthetic Peanut control sequences, inner sequence

SEQ ID NO: 36318 - DNA, 30 bp, Artificial Sequence; identical to SEQ ID NO: 320
  Description of Artificial Sequence: Synthetic Peanut control sequences, inner sequence

SEQ ID NO: 36319 - DNA, 30 bp, Artificial Sequence; identical to SEQ ID NO: 232
  Description of Artificial Sequence: Synthetic Peanut control sequences, inner sequence

SEQ ID NO: 36320 - DNA, 30 bp, Artificial Sequence; identical to SEQ ID NO: 386
  Description of Artificial Sequence: Synthetic Peanut control sequences, inner sequence

SEQ ID NO: 36321 - DNA, 30 bp, Artificial Sequence; identical to SEQ ID NO: 586
  Description of Artificial Sequence: Synthetic Peanut control sequences, inner sequence

SEQ ID NO: 36322 - DNA, 30 bp, Artificial Sequence; identical to SEQ ID NO: 194
  Description of Artificial Sequence: Synthetic Peanut control sequences, inner sequence

SEQ ID NO: 36323 - DNA, 30 bp, Artificial Sequence; identical to SEQ ID NO: 321
  Description of Artificial Sequence: Synthetic Peanut control sequences, inner sequence

SEQ ID NO: 36324 - DNA, 30 bp, Artificial Sequence
  Description of Artificial Sequence: Synthetic Peanut control sequences, inner sequence
gcatcagggcgttcgatggctagctggtca

SEQ ID NO: 36325 - DNA, 30 bp, Artificial Sequence; identical to SEQ ID NO: 816
  Description of Artificial Sequence: Synthetic Peanut control sequences, inner sequence

SEQ ID NO: 36326 - DNA, 30 bp, Artificial Sequence; identical to SEQ ID NO: 226
  Description of Artificial Sequence: Synthetic Peanut control sequences, inner sequence

SEQ ID NO: 36327 - DNA, 30 bp, Artificial Sequence; identical to SEQ ID NO: 390
  Description of Artificial Sequence: Synthetic Peanut control sequences, inner sequence

SEQ ID NO: 36328 - DNA, 30 bp, Artificial Sequence; identical to SEQ ID NO: 83
  Description of Artificial Sequence: Synthetic Peanut control sequences, inner sequence

SEQ ID NO: 36329 - DNA, 25 bp, Artificial Sequence
  Description of Artificial Sequence: Synthetic Peanut control sequences, inner sequence
gtcattccgcatcctacacgtgggc

SEQ ID NO: 36330 - DNA, 30 bp, Artificial Sequence; identical to SEQ ID NO: 951
  Description of Artificial Sequence: Synthetic Peanut control sequences, inner sequence

SEQ ID NO: 36331 - DNA, 30 bp, Artificial Sequence; identical to SEQ ID NO: 457
  Description of Artificial Sequence: Synthetic Peanut control sequences, inner sequence

SEQ ID NO: 36332 - DNA, 30 bp, Artificial Sequence; identical to SEQ ID NO: 793
  Description of Artificial Sequence: Synthetic Peanut control sequences, inner sequence

SEQ ID NO: 36333 - DNA, 30 bp, Artificial Sequence
  Description of Artificial Sequence: Synthetic Peanut control sequences, inner sequence
gtgcttccacttcccagcaagtgcgtcacg

SEQ ID NO: 36334 - DNA, 30 bp, Artificial Sequence; identical to SEQ ID NO: 780
  Description of Artificial Sequence: Synthetic Peanut control sequences, inner sequence

SEQ ID NO: 36335 - DNA, 30 bp, Artificial Sequence; identical to SEQ ID NO: 4301
  Description of Artificial Sequence: Synthetic Peanut control sequences, inner sequence

SEQ ID NO: 36336 - DNA, 30 bp, Artificial Sequence; identical to SEQ ID NO: 316
  Description of Artificial Sequence: Synthetic Peanut control sequences, inner sequence

SEQ ID NO: 36337 - DNA, 30 bp, Artificial Sequence; identical to SEQ ID NO: 348
  Description of Artificial Sequence: Synthetic Peanut control sequences, inner sequence

SEQ ID NO: 36338 - DNA, 30 bp, Artificial Sequence; identical to SEQ ID NO: 204
  Description of Artificial Sequence: Synthetic Peanut control sequences, inner sequence

SEQ ID NO: 36339 - DNA, 30 bp, Artificial Sequence; identical to SEQ ID NO: 272
  Description of Artificial Sequence: Synthetic Peanut control sequences, inner sequence

SEQ ID NO: 36340 - DNA, 30 bp, Artificial Sequence
  Description of Artificial Sequence: Synthetic Peanut control sequences, inner sequence
cgtatgtcgtcacgacccttcgagtggaca

SEQ ID NO: 36341 - DNA, 30 bp, Artificial Sequence; identical to SEQ ID NO: 476
  Description of Artificial Sequence: Synthetic Peanut control sequences, inner sequence

SEQ ID NO: 36342 - DNA, 30 bp, Artificial Sequence; identical to SEQ ID NO: 64
  Description of Artificial Sequence: Synthetic Peanut control sequences, inner sequence

SEQ ID NO: 36343 - DNA, 30 bp, Artificial Sequence; identical to SEQ ID NO: 541
  Description of Artificial Sequence: Synthetic Peanut control sequences, inner sequence

SEQ ID NO: 36344 - DNA, 30 bp, Artificial Sequence; identical to SEQ ID NO: 205
  Description of Artificial Sequence: Synthetic Peanut control sequences, inner sequence

SEQ ID NO: 36345 - DNA, 30 bp, Artificial Sequence; identical to SEQ ID NO: 264
  Description of Artificial Sequence: Synthetic Peanut control sequences, inner sequence

SEQ ID NO: 36346 - DNA, 30 bp, Artificial Sequence; identical to SEQ ID NO: 901
  Description of Artificial Sequence: Synthetic Peanut control sequences, inner sequence

SEQ ID NO: 36347 - DNA, 30 bp, Artificial Sequence
  Description of Artificial Sequence: Synthetic Peanut control sequences, inner sequence
gaccgaaacggaccgaagtgcgtgatgtgc

SEQ ID NO: 36348 - DNA, 30 bp, Artificial Sequence; identical to SEQ ID NO: 8950
  Description of Artificial Sequence: Synthetic Peanut control sequences, inner sequence

SEQ ID NO: 36349 - DNA, 30 bp, Artificial Sequence; identical to SEQ ID NO: 239
  Description of Artificial Sequence: Synthetic Peanut control sequences, inner sequence

SEQ ID NO: 36350 - DNA, 30 bp, Artificial Sequence; identical to SEQ ID NO: 4874
  Description of Artificial Sequence: Synthetic Peanut control sequences, inner sequence

SEQ ID NO: 36351 - DNA, 30 bp, Artificial Sequence; identical to SEQ ID NO: 343
  Description of Artificial Sequence: Synthetic Peanut control sequences, inner sequence

SEQ ID NO: 36352 - DNA, 29 bp, Artificial Sequence
  Description of Artificial Sequence: Synthetic Peanut control sequences, inner sequence
ggacgccgatgccctcatgtggccgtgga

SEQ ID NO: 36353 - DNA, 29 bp, Artificial Sequence
  Description of Artificial Sequence: Synthetic Peanut control sequences, inner sequence
ggccaagcgacctagcaagtgtgctcatg

SEQ ID NO: 36354 - DNA, 30 bp, Artificial Sequence; identical to SEQ ID NO: 692
  Description of Artificial Sequence: Synthetic Peanut control sequences, inner sequence

SEQ ID NO: 36355 - DNA, 30 bp, Artificial Sequence; identical to SEQ ID NO: 800
  Description of Artificial Sequence: Synthetic Peanut control sequences, inner sequence

SEQ ID NO: 36356 - DNA, 30 bp, Artificial Sequence; identical to SEQ ID NO: 596
  Description of Artificial Sequence: Synthetic Peanut control sequences, inner sequence

SEQ ID NO: 36357 - DNA, 30 bp, Artificial Sequence; identical to SEQ ID NO: 611
  Description of Artificial Sequence: Synthetic Peanut control sequences, inner sequence

SEQ ID NO: 36358 - DNA, 30 bp, Artificial Sequence; identical to SEQ ID NO: 4407
  Description of Artificial Sequence: Synthetic Peanut control sequences, inner sequence

SEQ ID NO: 36359 - DNA, 30 bp, Artificial Sequence; identical to SEQ ID NO: 336
  Description of Artificial Sequence: Synthetic Peanut control sequences, inner sequence

SEQ ID NO: 36360 - DNA, 30 bp, Artificial Sequence; identical to SEQ ID NO: 4543
  Description of Artificial Sequence: Synthetic Peanut control sequences, inner sequence

SEQ ID NO: 36361 - DNA, 30 bp, Artificial Sequence; identical to SEQ ID NO: 446
  Description of Artificial Sequence: Synthetic Peanut control sequences, inner sequence

SEQ ID NO: 36362 - DNA, 30 bp, Artificial Sequence; identical to SEQ ID NO: 4864
  Description of Artificial Sequence: Synthetic Peanut control sequences, inner sequence

SEQ ID NO: 36363 - DNA, 30 bp, Artificial Sequence; identical to SEQ ID NO: 303
  Description of Artificial Sequence: Synthetic Peanut control sequences, inner sequence

SEQ ID NO: 36364 - DNA, 30 bp, Artificial Sequence; identical to SEQ ID NO: 4394
  Description of Artificial Sequence: Synthetic Peanut control sequences, inner sequence

SEQ ID NO: 36365 - DNA, 30 bp, Artificial Sequence; identical to SEQ ID NO: 28922
  Description of Artificial Sequence: Synthetic Peanut control sequences, inner sequence

SEQ ID NO: 36366 - DNA, 30 bp, Artificial Sequence; identical to SEQ ID NO: 376
  Description of Artificial Sequence: Synthetic Peanut control sequences, inner sequence

SEQ ID NO: 36367 - DNA, 30 bp, Artificial Sequence; identical to SEQ ID NO: 636
  Description of Artificial Sequence: Synthetic Peanut control sequences, inner sequence

SEQ ID NO: 36368 - DNA, 30 bp, Artificial Sequence; identical to SEQ ID NO: 254
  Description of Artificial Sequence: Synthetic Peanut control sequences, inner sequence

SEQ ID NO: 36369 - DNA, 30 bp, Artificial Sequence; identical to SEQ ID NO: 413
  Description of Artificial Sequence: Synthetic Peanut control sequences, inner sequence

SEQ ID NO: 36370 - DNA, 30 bp, Artificial Sequence; identical to SEQ ID NO: 4650
  Description of Artificial Sequence: Synthetic Peanut control sequences, inner sequence

SEQ ID NO: 36371 - DNA, 30 bp, Artificial Sequence; identical to SEQ ID NO: 4238
  Description of Artificial Sequence: Synthetic Peanut control sequences, inner sequence

SEQ ID NO: 36372 - DNA, 30 bp, Artificial Sequence; identical to SEQ ID NO: 4967
  Description of Artificial Sequence: Synthetic Peanut control sequences, inner sequence

SEQ ID NO: 36373 - DNA, 30 bp, Artificial Sequence; identical to SEQ ID NO: 20519
  Description of Artificial Sequence: Synthetic Peanut control sequences, inner sequence

SEQ ID NO: 36374 - DNA, 30 bp, Artificial Sequence; identical to SEQ ID NO: 728
  Description of Artificial Sequence: Synthetic Peanut control sequences, inner sequence

SEQ ID NO: 36375 - DNA, 30 bp, Artificial Sequence; identical to SEQ ID NO: 4401
  Description of Artificial Sequence: Synthetic Peanut control sequences, inner sequence

SEQ ID NO: 36376 - DNA, 30 bp, Artificial Sequence; identical to SEQ ID NO: 24984
  Description of Artificial Sequence: Synthetic Peanut control sequences, inner sequence

SEQ ID NO: 36377 - DNA, 30 bp, Artificial Sequence; identical to SEQ ID NO: 506
  Description of Artificial Sequence: Synthetic Peanut control sequences, inner sequence

SEQ ID NO: 36378 - DNA, 30 bp, Artificial Sequence; identical to SEQ ID NO: 4592
  Description of Artificial Sequence: Synthetic Peanut control sequences, inner sequence

SEQ ID NO: 36379 - DNA, 30 bp, Artificial Sequence; identical to SEQ ID NO: 4513
  Description of Artificial Sequence: Synthetic Peanut control sequences, inner sequence

SEQ ID NO: 36380 - DNA, 30 bp, Artificial Sequence; identical to SEQ ID NO: 696
  Description of Artificial Sequence: Synthetic Peanut control sequences, inner sequence

SEQ ID NO: 36381 - DNA, 30 bp, Artificial Sequence; identical to SEQ ID NO: 227
  Description of Artificial Sequence: Synthetic Peanut control sequences, inner sequence

SEQ ID NO: 36382 - DNA, 30 bp, Artificial Sequence; identical to SEQ ID NO: 570
  Description of Artificial Sequence: Synthetic Peanut control sequences, inner sequence

SEQ ID NO: 36383 - DNA, 30 bp, Artificial Sequence; identical to SEQ ID NO: 540
  Description of Artificial Sequence: Synthetic Peanut control sequences, inner sequence

SEQ ID NO: 36384 - DNA, 30 bp, Artificial Sequence
  Description of Artificial Sequence: Synthetic Peanut control sequences, inner sequence
ggcctgatcgaacctagagagtggcgtgta

SEQ ID NO: 36385 - DNA, 30 bp, Artificial Sequence; identical to SEQ ID NO: 647
  Description of Artificial Sequence: Synthetic Peanut control sequences, inner sequence

SEQ ID NO: 36386 - DNA, 30 bp, Artificial Sequence; identical to SEQ ID NO: 581
  Description of Artificial Sequence: Synthetic Peanut control sequences, inner sequence

SEQ ID NO: 36387 - DNA, 30 bp, Artificial Sequence; identical to SEQ ID NO: 414
  Description of Artificial Sequence: Synthetic Peanut control sequences, inner sequence

SEQ ID NO: 36388 - DNA, 30 bp, Artificial Sequence; identical to SEQ ID NO: 789
  Description of Artificial Sequence: Synthetic Peanut control sequences, inner sequence

SEQ ID NO: 36389 - DNA, 30 bp, Artificial Sequence; identical to SEQ ID NO: 62
  Description of Artificial Sequence: Synthetic Peanut control sequences, inner sequence

SEQ ID NO: 36390 - DNA, 30 bp, Artificial Sequence; identical to SEQ ID NO: 738
  Description of Artificial Sequence: Synthetic Peanut control sequences, inner sequence

SEQ ID NO: 36391 - DNA, 30 bp, Artificial Sequence; identical to SEQ ID NO: 813
  Description of Artificial Sequence: Synthetic Peanut control sequences, inner sequence

SEQ ID NO: 36392 - DNA, 30 bp, Artificial Sequence; identical to SEQ ID NO: 787
  Description of Artificial Sequence: Synthetic Peanut control sequences, inner sequence

SEQ ID NO: 36393 - DNA, 30 bp, Artificial Sequence; identical to SEQ ID NO: 12971
  Description of Artificial Sequence: Synthetic Peanut control sequences, inner sequence

SEQ ID NO: 36394 - DNA, 30 bp, Artificial Sequence; identical to SEQ ID NO: 620
  Description of Artificial Sequence: Synthetic Peanut control sequences, inner sequence

SEQ ID NO: 36395 - DNA, 30 bp, Artificial Sequence; identical to SEQ ID NO: 836
  Description of Artificial Sequence: Synthetic Peanut control sequences, inner sequence

SEQ ID NO: 36396 - DNA, 30 bp, Artificial Sequence; identical to SEQ ID NO: 811
  Description of Artificial Sequence: Synthetic Peanut control sequences, inner sequence

SEQ ID NO: 36397 - DNA, 30 bp, Artificial Sequence; identical to SEQ ID NO: 28446
  Description of Artificial Sequence: Synthetic Peanut control sequences, inner sequence

SEQ ID NO: 36398 - DNA, 31 bp, Artificial Sequence; identical to SEQ ID NO: 489
  Description of Artificial Sequence: Synthetic Peanut control sequences, inner sequence

SEQ ID NO: 36399 - DNA, 30 bp, Artificial Sequence; identical to SEQ ID NO: 359
  Description of Artificial Sequence: Synthetic Peanut control sequences, inner sequence

SEQ ID NO: 36400 - DNA, 30 bp, Artificial Sequence; identical to SEQ ID NO: 4530
  Description of Artificial Sequence: Synthetic Peanut control sequences, inner sequence

SEQ ID NO: 36401 - DNA, 30 bp, Artificial Sequence; identical to SEQ ID NO: 573
  Description of Artificial Sequence: Synthetic Peanut control sequences, inner sequence

SEQ ID NO: 36402 - DNA, 30 bp, Artificial Sequence; identical to SEQ ID NO: 628
  Description of Artificial Sequence: Synthetic Peanut control sequences, inner sequence

SEQ ID NO: 36403 - DNA, 30 bp, Artificial Sequence; identical to SEQ ID NO: 432
  Description of Artificial Sequence: Synthetic Peanut control sequences, inner sequence

SEQ ID NO: 36404 - DNA, 30 bp, Artificial Sequence; identical to SEQ ID NO: 365
  Description of Artificial Sequence: Synthetic Peanut control sequences, inner sequence

SEQ ID NO: 36405 - DNA, 30 bp, Artificial Sequence; identical to SEQ ID NO: 8971
  Description of Artificial Sequence: Synthetic Peanut control sequences, inner sequence

SEQ ID NO: 36406 - DNA, 30 bp, Artificial Sequence; identical to SEQ ID NO: 867
  Description of Artificial Sequence: Synthetic Peanut control sequences, inner sequence

SEQ ID NO: 36407 - DNA, 30 bp, Artificial Sequence; identical to SEQ ID NO: 515
  Description of Artificial Sequence: Synthetic Peanut control sequences, inner sequence

SEQ ID NO: 36408 - DNA, 30 bp, Artificial Sequence; identical to SEQ ID NO: 4713
  Description of Artificial Sequence: Synthetic Peanut control sequences, inner sequence

SEQ ID NO: 36409 - DNA, 30 bp, Artificial Sequence; identical to SEQ ID NO: 8939
  Description of Artificial Sequence: Synthetic Peanut control sequences, inner sequence

SEQ ID NO: 36410 - DNA, 30 bp, Artificial Sequence; identical to SEQ ID NO: 714
  Description of Artificial Sequence: Synthetic Peanut control sequences, inner sequence

SEQ ID NO: 36411 - DNA, 30 bp, Artificial Sequence; identical to SEQ ID NO: 8546
  Description of Artificial Sequence: Synthetic Peanut control sequences, inner sequence

SEQ ID NO: 36412 - DNA, 30 bp, Artificial Sequence; identical to SEQ ID NO: 684
  Description of Artificial Sequence: Synthetic Peanut control sequences, inner sequence

SEQ ID NO: 36413 - DNA, 30 bp, Artificial Sequence; identical to SEQ ID NO: 552
  Description of Artificial Sequence: Synthetic Peanut control sequences, inner sequence

SEQ ID NO: 36414 - DNA, 30 bp, Artificial Sequence; identical to SEQ ID NO: 462
  Description of Artificial Sequence: Synthetic Peanut control sequences, inner sequence

SEQ ID NO: 36415 - DNA, 30 bp, Artificial Sequence; identical to SEQ ID NO: 884
  Description of Artificial Sequence: Synthetic Peanut control sequences, inner sequence

SEQ ID NO: 36416 - DNA, 30 bp, Artificial Sequence; identical to SEQ ID NO: 891
  Description of Artificial Sequence: Synthetic Peanut control sequences, inner sequence

SEQ ID NO: 36417 - DNA, 30 bp, Artificial Sequence; identical to SEQ ID NO: 12799
  Description of Artificial Sequence: Synthetic Peanut control sequences, inner sequence

SEQ ID NO: 36418 - DNA, 30 bp, Artificial Sequence; identical to SEQ ID NO: 984
  Description of Artificial Sequence: Synthetic Peanut control sequences, inner sequence

SEQ ID NO: 36419 - DNA, 29 bp, Artificial Sequence
  Description of Artificial Sequence: Synthetic Peanut control sequences, inner sequence
ccgcacgtagccctatcaagtgcagcatg

SEQ ID NO: 36420 - DNA, 30 bp, Artificial Sequence; identical to SEQ ID NO: 527
  Description of Artificial Sequence: Synthetic Peanut control sequences, inner sequence

SEQ ID NO: 36421 - DNA, 30 bp, Artificial Sequence; identical to SEQ ID NO: 750
  Description of Artificial Sequence: Synthetic Peanut control sequences, inner sequence

SEQ ID NO: 36422 - DNA, 30 bp, Artificial Sequence; identical to SEQ ID NO: 12958
  Description of Artificial Sequence: Synthetic Peanut control sequences, inner sequence

SEQ ID NO: 36423 - DNA, 30 bp, Artificial Sequence; identical to SEQ ID NO: 4860
  Description of Artificial Sequence: Synthetic Peanut control sequences, inner sequence

SEQ ID NO: 36424 - DNA, 30 bp, Artificial Sequence; identical to SEQ ID NO: 393
  Description of Artificial Sequence: Synthetic Peanut control sequences, inner sequence

SEQ ID NO: 36425 - DNA, 30 bp, Artificial Sequence; identical to SEQ ID NO: 4336
  Description of Artificial Sequence: Synthetic Peanut control sequences, inner sequence

SEQ ID NO: 36426 - DNA, 29 bp, Artificial Sequence
  Description of Artificial Sequence: Synthetic Peanut control sequences, inner sequence
ggcctgcgatggatgtggttgtgctcgtc

SEQ ID NO: 36427 - DNA, 30 bp, Artificial Sequence; identical to SEQ ID NO: 4792
  Description of Artificial Sequence: Synthetic Peanut control sequences, inner sequence

SEQ ID NO: 36428 - DNA, 30 bp, Artificial Sequence; identical to SEQ ID NO: 8868
  Description of Artificial Sequence: Synthetic Peanut control sequences, inner sequence

SEQ ID NO: 36429 - DNA, 29 bp, Artificial Sequence
  Description of Artificial Sequence: Synthetic Peanut control sequences, inner sequence
gtgcaaacggaccgacaagtgcgcatgga

SEQ ID NO: 36430 - DNA, 30 bp, Artificial Sequence; identical to SEQ ID NO: 791
  Description of Artificial Sequence: Synthetic Peanut control sequences, inner sequence

SEQ ID NO: 36431 - DNA, 30 bp, Artificial Sequence; identical to SEQ ID NO: 20783
  Description of Artificial Sequence: Synthetic Peanut control sequences, inner sequence

SEQ ID NO: 36432 - DNA, 30 bp, Artificial Sequence
  Description of Artificial Sequence: Synthetic Peanut control sequences, inner sequence
ggacggatcgaacctacaagttgtcgtgta

SEQ ID NO: 36433 - DNA, 30 bp, Artificial Sequence; identical to SEQ ID NO: 32332
  Description of Artificial Sequence: Synthetic Peanut control sequences, inner sequence

SEQ ID NO: 36434 - DNA, 30 bp, Artificial Sequence; identical to SEQ ID NO: 772
  Description of Artificial Sequence: Synthetic Peanut control sequences, inner sequence

SEQ ID NO: 36435 - DNA, 30 bp, Artificial Sequence; identical to SEQ ID NO: 358
  Description of Artificial Sequence: Synthetic Peanut control sequences, inner sequence

SEQ ID NO: 36436 - DNA, 30 bp, Artificial Sequence; identical to SEQ ID NO: 269
  Description of Artificial Sequence: Synthetic Peanut control sequences, inner sequence

SEQ ID NO: 36437 - DNA, 30 bp, Artificial Sequence; identical to SEQ ID NO: 20581
  Description of Artificial Sequence: Synthetic Peanut control sequences, inner sequence

SEQ ID NO: 36438 - DNA, 30 bp, Artificial Sequence; identical to SEQ ID NO: 500
  Description of Artificial Sequence: Synthetic Peanut control sequences, inner sequence

SEQ ID NO: 36439 - DNA, 30 bp, Artificial Sequence; identical to SEQ ID NO: 478
  Description of Artificial Sequence: Synthetic Peanut control sequences, inner sequence

SEQ ID NO: 36440 - DNA, 30 bp, Artificial Sequence; identical to SEQ ID NO: 4887
  Description of Artificial Sequence: Synthetic Peanut control sequences, inner sequence

SEQ ID NO: 36441 - DNA, 30 bp, Artificial Sequence; identical to SEQ ID NO: 518
  Description of Artificial Sequence: Synthetic Peanut control sequences, inner sequence

SEQ ID NO: 36442 - DNA, 28 bp, Artificial Sequence
  Description of Artificial Sequence: Synthetic Peanut control sequences, inner sequence
gtgcgaccgaccctatcatgaggccatg

SEQ ID NO: 36443 - DNA, 30 bp, Artificial Sequence; identical to SEQ ID NO: 104
  Description of Artificial Sequence: Synthetic Peanut control sequences, inner sequence

SEQ ID NO: 36444 - DNA, 30 bp, Artificial Sequence; identical to SEQ ID NO: 994
  Description of Artificial Sequence: Synthetic Peanut control sequences, inner sequence

SEQ ID NO: 36445 - DNA, 30 bp, Artificial Sequence; identical to SEQ ID NO: 32719
  Description of Artificial Sequence: Synthetic Peanut control sequences, inner sequence

SEQ ID NO: 36446 - DNA, 30 bp, Artificial Sequence; identical to SEQ ID NO: 279
  Description of Artificial Sequence: Synthetic Peanut control sequences, inner sequence

SEQ ID NO: 36447 - DNA, 30 bp, Artificial Sequence; identical to SEQ ID NO: 399
  Description of Artificial Sequence: Synthetic Peanut control sequences, inner sequence

SEQ ID NO: 36448 - DNA, 30 bp, Artificial Sequence; identical to SEQ ID NO: 134
  Description of Artificial Sequence: Synthetic Peanut control sequences, inner sequence

SEQ ID NO: 36449 - DNA, 30 bp, Artificial Sequence; identical to SEQ ID NO: 436
  Description of Artificial Sequence: Synthetic Peanut control sequences, inner sequence

SEQ ID NO: 36450 - DNA, 30 bp, Artificial Sequence; identical to SEQ ID NO: 228
  Description of Artificial Sequence: Synthetic Peanut control sequences, inner sequence

SEQ ID NO: 36451 - DNA, 30 bp, Artificial Sequence; identical to SEQ ID NO: 943
  Description of Artificial Sequence: Synthetic Peanut control sequences, inner sequence

SEQ ID NO: 36452 - DNA, 30 bp, Artificial Sequence; identical to SEQ ID NO: 4317
  Description of Artificial Sequence: Synthetic Peanut control sequences, inner sequence

SEQ ID NO: 36453 - DNA, 29 bp, Artificial Sequence
  Description of Artificial Sequence: Synthetic Peanut control sequences, inner sequence
gtcatgccatcccttcgagtgtgcaggta

SEQ ID NO: 36454 - DNA, 30 bp, Artificial Sequence; identical to SEQ ID NO: 28849
  Description of Artificial Sequence: Synthetic Peanut control sequences, inner sequence

SEQ ID NO: 36455 - DNA, 30 bp, Artificial Sequence; identical to SEQ ID NO: 5001
  Description of Artificial Sequence: Synthetic Peanut control sequences, inner sequence

SEQ ID NO: 36456 - DNA, 30 bp, Artificial Sequence
  Description of Artificial Sequence: Synthetic Peanut control sequences, inner sequence
ccatctcgacccgtcacgtggtgcatggcc

SEQ ID NO: 36457 - DNA, 30 bp, Artificial Sequence; identical to SEQ ID NO: 4997
  Description of Artificial Sequence: Synthetic Peanut control sequences, inner sequence

SEQ ID NO: 36458 - DNA, 30 bp, Artificial Sequence; identical to SEQ ID NO: 831
  Description of Artificial Sequence: Synthetic Peanut control sequences, inner sequence

SEQ ID NO: 36459 - DNA, 30 bp, Artificial Sequence; identical to SEQ ID NO: 108
  Description of Artificial Sequence: Synthetic Peanut control sequences, inner sequence

SEQ ID NO: 36460 - DNA, 30 bp, Artificial Sequence; identical to SEQ ID NO: 198
  Description of Artificial Sequence: Synthetic Peanut control sequences, inner sequence

SEQ ID NO: 36461 - DNA, 30 bp, Artificial Sequence; identical to SEQ ID NO: 513
  Description of Artificial Sequence: Synthetic Peanut control sequences, inner sequence

SEQ ID NO: 36462 - DNA, 30 bp, Artificial Sequence; identical to SEQ ID NO: 12673
  Description of Artificial Sequence: Synthetic Peanut control sequences, inner sequence

SEQ ID NO: 36463 - DNA, 30 bp, Artificial Sequence; identical to SEQ ID NO: 268
  Description of Artificial Sequence: Synthetic Peanut control sequences, inner sequence

SEQ ID NO: 36464 - DNA, 30 bp, Artificial Sequence; identical to SEQ ID NO: 530
  Description of Artificial Sequence: Synthetic Peanut control sequences, inner sequence

SEQ ID NO: 36465 - DNA, 30 bp, Artificial Sequence; identical to SEQ ID NO: 4644
  Description of Artificial Sequence: Synthetic Peanut control sequences, inner sequence

SEQ ID NO: 36466 - DNA, 30 bp, Artificial Sequence; identical to SEQ ID NO: 8712
  Description of Artificial Sequence: Synthetic Peanut control sequences, inner sequence

SEQ ID NO: 36467 - DNA, 30 bp, Artificial Sequence; identical to SEQ ID NO: 475
  Description of Artificial Sequence: Synthetic Peanut control sequences, inner sequence

SEQ ID NO: 36468 - DNA, 30 bp, Artificial Sequence; identical to SEQ ID NO: 129
  Description of Artificial Sequence: Synthetic Peanut control sequences, inner sequence

SEQ ID NO: 36469 - DNA, 30 bp, Artificial Sequence
  Description of Artificial Sequence: Synthetic Peanut control sequences, inner sequence
ggacggatcgaacctacaagttggcgtgga

SEQ ID NO: 36470 - DNA, 30 bp, Artificial Sequence; identical to SEQ ID NO: 915
  Description of Artificial Sequence: Synthetic Peanut control sequences, inner sequence

SEQ ID NO: 36471 - DNA, 30 bp, Artificial Sequence; identical to SEQ ID NO: 807
  Description of Artificial Sequence: Synthetic Peanut control sequences, inner sequence

SEQ ID NO: 36472 - DNA, 30 bp, Artificial Sequence; identical to SEQ ID NO: 4503
  Description of Artificial Sequence: Synthetic Peanut control sequences, inner sequence

SEQ ID NO: 36473 - DNA, 30 bp, Artificial Sequence; identical to SEQ ID NO: 4688
  Description of Artificial Sequence: Synthetic Peanut control sequences, inner sequence

SEQ ID NO: 36474 - DNA, 30 bp, Artificial Sequence; identical to SEQ ID NO: 920
  Description of Artificial Sequence: Synthetic Peanut control sequences, inner sequence

SEQ ID NO: 36475 - DNA, 30 bp, Artificial Sequence; identical to SEQ ID NO: 102
  Description of Artificial Sequence: Synthetic Peanut control sequences, inner sequence

SEQ ID NO: 36476 - DNA, 30 bp, Artificial Sequence; identical to SEQ ID NO: 577
  Description of Artificial Sequence: Synthetic Peanut control sequences, inner sequence

SEQ ID NO: 36477 - DNA, 30 bp, Artificial Sequence; identical to SEQ ID NO: 746
  Description of Artificial Sequence: Synthetic Peanut control sequences, inner sequence

SEQ ID NO: 36478 - DNA, 30 bp, Artificial Sequence; identical to SEQ ID NO: 660
  Description of Artificial Sequence: Synthetic Peanut control sequences, inner sequence

SEQ ID NO: 36479 - DNA, 30 bp, Artificial Sequence; identical to SEQ ID NO: 4775
  Description of Artificial Sequence: Synthetic Peanut control sequences, inner sequence

SEQ ID NO: 36480 - DNA, 30 bp, Artificial Sequence; identical to SEQ ID NO: 777
  Description of Artificial Sequence: Synthetic Peanut control sequences, inner sequence

SEQ ID NO: 36481 - DNA, 30 bp, Artificial Sequence; identical to SEQ ID NO: 877
  Description of Artificial Sequence: Synthetic Peanut control sequences, inner sequence

SEQ ID NO: 36482 - DNA, 30 bp, Artificial Sequence
  Description of Artificial Sequence: Synthetic Peanut control sequences, inner sequence
tgtccgatcgaccctatcaagtgcagcatg

SEQ ID NO: 36483 - DNA, 28 bp, Artificial Sequence
  Description of Artificial Sequence: Synthetic Peanut control sequences, inner sequence
gcacgactcgcaccctatcatgcggtca

SEQ ID NO: 36484 - DNA, 30 bp, Artificial Sequence; identical to SEQ ID NO: 574
  Description of Artificial Sequence: Synthetic Peanut control sequences, inner sequence

SEQ ID NO: 36485 - DNA, 30 bp, Artificial Sequence; identical to SEQ ID NO: 4913
  Description of Artificial Sequence: Synthetic Peanut control sequences, inner sequence

SEQ ID NO: 36486 - DNA, 31 bp, Artificial Sequence; identical to SEQ ID NO: 4619
  Description of Artificial Sequence: Synthetic Peanut control sequences, inner sequence

SEQ ID NO: 36487 - DNA, 30 bp, Artificial Sequence; identical to SEQ ID NO: 4856
  Description of Artificial Sequence: Synthetic Peanut control sequences, inner sequence

SEQ ID NO: 36488 - DNA, 29 bp, Artificial Sequence
  Description of Artificial Sequence: Synthetic Peanut control sequences, inner sequence
ccacatggacgacgatggcttagcgtggt

SEQ ID NO: 36489 - DNA, 30 bp, Artificial Sequence; identical to SEQ ID NO: 28350
  Description of Artificial Sequence: Synthetic Peanut control sequences, inner sequence

SEQ ID NO: 36490 - DNA, 32 bp, Artificial Sequence
  Description of Artificial Sequence: Synthetic Peanut control sequences, inner sequence
gtcacggaacgaagcctatcaagtgcagcatg

SEQ ID NO: 36491 - DNA, 30 bp, Artificial Sequence; identical to SEQ ID NO: 617
  Description of Artificial Sequence: Synthetic Peanut control sequences, inner sequence

SEQ ID NO: 36492 - DNA, 30 bp, Artificial Sequence; identical to SEQ ID NO: 1002
  Description of Artificial Sequence: Synthetic Peanut control sequences, inner sequence

SEQ ID NO: 36493 - DNA, 30 bp, Artificial Sequence; identical to SEQ ID NO: 805
  Description of Artificial Sequence: Synthetic Peanut control sequences, inner sequence

SEQ ID NO: 36494 - DNA, 28 bp, Artificial Sequence
  Description of Artificial Sequence: Synthetic Peanut control sequences, inner sequence
ggacgcaacgtaccgtatcgtggccatg

SEQ ID NO: 36495 - DNA, 30 bp, Artificial Sequence; identical to SEQ ID NO: 4999
  Description of Artificial Sequence: Synthetic Peanut control sequences, inner sequence

SEQ ID NO: 36496 - DNA, 30 bp, Artificial Sequence; identical to SEQ ID NO: 419
  Description of Artificial Sequence: Synthetic Peanut control sequences, inner sequence

SEQ ID NO: 36497 - DNA, 30 bp, Artificial Sequence; identical to SEQ ID NO: 625
  Description of Artificial Sequence: Synthetic Peanut control sequences, inner sequence

SEQ ID NO: 36498 - DNA, 30 bp, Artificial Sequence; identical to SEQ ID NO: 158
  Description of Artificial Sequence: Synthetic Peanut control sequences, inner sequence

SEQ ID NO: 36499 - DNA, 30 bp, Artificial Sequence; identical to SEQ ID NO: 4535
  Description of Artificial Sequence: Synthetic Peanut control sequences, inner sequence

SEQ ID NO: 36500 - DNA, 30 bp, Artificial Sequence
  Description of Artificial Sequence: Synthetic Peanut control sequences, inner sequence
cggccgatcgaccctatcaagtgcagcatg

SEQ ID NO: 36501 - DNA, 30 bp, Artificial Sequence; identical to SEQ ID NO: 183
  Description of Artificial Sequence: Synthetic Peanut control sequences, inner sequence

SEQ ID NO: 36502 - DNA, 30 bp, Artificial Sequence; identical to SEQ ID NO: 24927
  Description of Artificial Sequence: Synthetic Peanut control sequences, inner sequence

SEQ ID NO: 36503 - DNA, 30 bp, Artificial Sequence; identical to SEQ ID NO: 431
  Description of Artificial Sequence: Synthetic Peanut control sequences, inner sequence

SEQ ID NO: 36504 - DNA, 30 bp, Artificial Sequence
  Description of Artificial Sequence: Synthetic Peanut control sequences, inner sequence
ccatctcgcgctcctacgtggccatgcact

SEQ ID NO: 36505 - DNA, 30 bp, Artificial Sequence; identical to SEQ ID NO: 579
  Description of Artificial Sequence: Synthetic Peanut control sequences, inner sequence

SEQ ID NO: 36506 - DNA, 30 bp, Artificial Sequence
  Description of Artificial Sequence: Synthetic Peanut control sequences, inner sequence
tgtgtgcctgaacgacctacacgtggctca

SEQ ID NO: 36507 - DNA, 30 bp, Artificial Sequence; identical to SEQ ID NO: 28317
  Description of Artificial Sequence: Synthetic Peanut control sequences, inner sequence

SEQ ID NO: 36508 - DNA, 30 bp, Artificial Sequence; identical to SEQ ID NO: 455
  Description of Artificial Sequence: Synthetic Peanut control sequences, inner sequence

SEQ ID NO: 36509 - DNA, 30 bp, Artificial Sequence; identical to SEQ ID NO: 685
  Description of Artificial Sequence: Synthetic Peanut control sequences, inner sequence

SEQ ID NO: 36510 - DNA, 30 bp, Artificial Sequence; identical to SEQ ID NO: 4787
  Description of Artificial Sequence: Synthetic Peanut control sequences, inner sequence

SEQ ID NO: 36511 - DNA, 30 bp, Artificial Sequence
  Description of Artificial Sequence: Synthetic Peanut control sequences, inner sequence
cgcgatcacgtccgttcccttcgagtggcc

SEQ ID NO: 36512 - DNA, 30 bp, Artificial Sequence; identical to SEQ ID NO: 701
  Description of Artificial Sequence: Synthetic Peanut control sequences, inner sequence

SEQ ID NO: 36513 - DNA, 30 bp, Artificial Sequence; identical to SEQ ID NO: 670
  Description of Artificial Sequence: Synthetic Peanut control sequences, inner sequence

SEQ ID NO: 36514 - DNA, 30 bp, Artificial Sequence
  Description of Artificial Sequence: Synthetic Peanut control sequences, inner sequence
tggcttgcatgctggacttcctactggttt

SEQ ID NO: 36515 - DNA, 29 bp, Artificial Sequence
  Description of Artificial Sequence: Synthetic Peanut control sequences, inner sequence
ggccaagcaaccgtcaaggtggacgtgga

SEQ ID NO: 36516 - DNA, 30 bp, Artificial Sequence
  Description of Artificial Sequence: Synthetic Peanut control sequences, inner sequence
cgtactgaacgcaccctcacaagtggcgca

SEQ ID NO: 36517 - DNA, 30 bp, Artificial Sequence; identical to SEQ ID NO: 157
  Description of Artificial Sequence: Synthetic Peanut control sequences, inner sequence

SEQ ID NO: 36518 - DNA, 30 bp, Artificial Sequence; identical to SEQ ID NO: 24630
  Description of Artificial Sequence: Synthetic Peanut control sequences, inner sequence

SEQ ID NO: 36519 - DNA, 30 bp, Artificial Sequence; identical to SEQ ID NO: 220
  Description of Artificial Sequence: Synthetic Peanut control sequences, inner sequence

SEQ ID NO: 36520 - DNA, 30 bp, Artificial Sequence; identical to SEQ ID NO: 90
  Description of Artificial Sequence: Synthetic Peanut control sequences, inner sequence

SEQ ID NO: 36521 - DNA, 30 bp, Artificial Sequence; identical to SEQ ID NO: 776
  Description of Artificial Sequence: Synthetic Peanut control sequences, inner sequence

SEQ ID NO: 36522 - DNA, 31 bp, Artificial Sequence; identical to SEQ ID NO: 32291
  Description of Artificial Sequence: Synthetic Peanut control sequences, inner sequence

SEQ ID NO: 36523 - DNA, 30 bp, Artificial Sequence; identical to SEQ ID NO: 4312
  Description of Artificial Sequence: Synthetic Peanut control sequences, inner sequence

SEQ ID NO: 36524 - DNA, 30 bp, Artificial Sequence; identical to SEQ ID NO: 523
  Description of Artificial Sequence: Synthetic Peanut control sequences, inner sequence

SEQ ID NO: 36525 - DNA, 30 bp, Artificial Sequence; identical to SEQ ID NO: 912
  Description of Artificial Sequence: Synthetic Peanut control sequences, inner sequence

SEQ ID NO: 36526 - DNA, 30 bp, Artificial Sequence; identical to SEQ ID NO: 84
  Description of Artificial Sequence: Synthetic Peanut control sequences, inner sequence

SEQ ID NO: 36527 - DNA, 30 bp, Artificial Sequence
  Description of Artificial Sequence: Synthetic Peanut control sequences, inner sequence
gtacgcgtcgaccttcaagtgtgccgtgga

SEQ ID NO: 36528 - DNA, 30 bp, Artificial Sequence; identical to SEQ ID NO: 397
  Description of Artificial Sequence: Synthetic Peanut control sequences, inner sequence

SEQ ID NO: 36529 - DNA, 30 bp, Artificial Sequence; identical to SEQ ID NO: 4807
  Description of Artificial Sequence: Synthetic Peanut control sequences, inner sequence

SEQ ID NO: 36530 - DNA, 30 bp, Artificial Sequence; identical to SEQ ID NO: 900
  Description of Artificial Sequence: Synthetic Peanut control sequences, inner sequence

SEQ ID NO: 36531 - DNA, 30 bp, Artificial Sequence; identical to SEQ ID NO: 4616
  Description of Artificial Sequence: Synthetic Peanut control sequences, inner sequence

SEQ ID NO: 36532 - DNA, 30 bp, Artificial Sequence; identical to SEQ ID NO: 426
  Description of Artificial Sequence: Synthetic Peanut control sequences, inner sequence

SEQ ID NO: 36533 - DNA, 30 bp, Artificial Sequence; identical to SEQ ID NO: 28427
  Description of Artificial Sequence: Synthetic Peanut control sequences, inner sequence

SEQ ID NO: 36534 - DNA, 30 bp, Artificial Sequence; identical to SEQ ID NO: 622
  Description of Artificial Sequence: Synthetic Peanut control sequences, inner sequence

SEQ ID NO: 36535 - DNA, 30 bp, Artificial Sequence; identical to SEQ ID NO: 680
  Description of Artificial Sequence: Synthetic Peanut control sequences, inner sequence

SEQ ID NO: 36536 - DNA, 30 bp, Artificial Sequence; identical to SEQ ID NO: 4939
  Description of Artificial Sequence: Synthetic Peanut control sequences, inner sequence

SEQ ID NO: 36537 - DNA, 30 bp, Artificial Sequence; identical to SEQ ID NO: 634
  Description of Artificial Sequence: Synthetic Peanut control sequences, inner sequence

SEQ ID NO: 36538 - DNA, 30 bp, Artificial Sequence; identical to SEQ ID NO: 8860
  Description of Artificial Sequence: Synthetic Peanut control sequences, inner sequence

SEQ ID NO: 36539 - DNA, 30 bp, Artificial Sequence; identical to SEQ ID NO: 173
  Description of Artificial Sequence: Synthetic Peanut control sequences, inner sequence

SEQ ID NO: 36540 - DNA, 30 bp, Artificial Sequence; identical to SEQ ID NO: 808
  Description of Artificial Sequence: Synthetic Peanut control sequences, inner sequence

SEQ ID NO: 36541 - DNA, 30 bp, Artificial Sequence; identical to SEQ ID NO: 671
  Description of Artificial Sequence: Synthetic Peanut control sequences, inner sequence

SEQ ID NO: 36542 - DNA, 30 bp, Artificial Sequence; identical to SEQ ID NO: 12581
  Description of Artificial Sequence: Synthetic Peanut control sequences, inner sequence

SEQ ID NO: 36543 - DNA, 30 bp, Artificial Sequence; identical to SEQ ID NO: 4603
  Description of Artificial Sequence: Synthetic Peanut control sequences, inner sequence

SEQ ID NO: 36544 - DNA, 30 bp, Artificial Sequence; identical to SEQ ID NO: 4230
  Description of Artificial Sequence: Synthetic Peanut control sequences, inner sequence

SEQ ID NO: 36545 - DNA, 30 bp, Artificial Sequence; identical to SEQ ID NO: 12985
  Description of Artificial Sequence: Synthetic Peanut control sequences, inner sequence

SEQ ID NO: 36546 - DNA, 30 bp, Artificial Sequence
  Description of Artificial Sequence: Synthetic Peanut control sequences, inner sequence
acgtccgcactccttgccatacacgtgggc

SEQ ID NO: 36547 - DNA, 30 bp, Artificial Sequence; identical to SEQ ID NO: 559
  Description of Artificial Sequence: Synthetic Peanut control sequences, inner sequence

SEQ ID NO: 36548 - DNA, 28 bp, Artificial Sequence
  Description of Artificial Sequence: Synthetic Peanut control sequences, inner sequence
ccgcacgtagccctatcatgaggccatg

SEQ ID NO: 36549 - DNA, 30 bp, Artificial Sequence; identical to SEQ ID NO: 521
  Description of Artificial Sequence: Synthetic Peanut control sequences, inner sequence

SEQ ID NO: 36550 - DNA, 30 bp, Artificial Sequence; identical to SEQ ID NO: 921
  Description of Artificial Sequence: Synthetic Peanut control sequences, inner sequence

SEQ ID NO: 36551 - DNA, 30 bp, Artificial Sequence
  Description of Artificial Sequence: Synthetic Peanut control sequences, inner sequence
gtgcgcactcttgccttccagtggttcgtg

SEQ ID NO: 36552 - DNA, 30 bp, Artificial Sequence
  Description of Artificial Sequence: Synthetic Peanut control sequences, inner sequence
catgctctgaccgtggcaggaacgctgtca

SEQ ID NO: 36553 - DNA, 30 bp, Artificial Sequence; identical to SEQ ID NO: 20229
  Description of Artificial Sequence: Synthetic Peanut control sequences, inner sequence

SEQ ID NO: 36554 - DNA, 30 bp, Artificial Sequence; identical to SEQ ID NO: 385
  Description of Artificial Sequence: Synthetic Peanut control sequences, inner sequence

SEQ ID NO: 36555 - DNA, 30 bp, Artificial Sequence; identical to SEQ ID NO: 24843
  Description of Artificial Sequence: Synthetic Peanut control sequences, inner sequence

SEQ ID NO: 36556 - DNA, 30 bp, Artificial Sequence; identical to SEQ ID NO: 28702
  Description of Artificial Sequence: Synthetic Peanut control sequences, inner sequence

SEQ ID NO: 36557 - DNA, 30 bp, Artificial Sequence; identical to SEQ ID NO: 28823
  Description of Artificial Sequence: Synthetic Peanut control sequences, inner sequence

SEQ ID NO: 36558 - DNA, 30 bp, Artificial Sequence; identical to SEQ ID NO: 4492
  Description of Artificial Sequence: Synthetic Peanut control sequences, inner sequence

SEQ ID NO: 36559 - DNA, 30 bp, Artificial Sequence; identical to SEQ ID NO: 28513
  Description of Artificial Sequence: Synthetic Peanut control sequences, inner sequence

SEQ ID NO: 36560 - DNA, 30 bp, Artificial Sequence; identical to SEQ ID NO: 677
  Description of Artificial Sequence: Synthetic Peanut control sequences, inner sequence

SEQ ID NO: 36561 - DNA, 30 bp, Artificial Sequence; identical to SEQ ID NO: 8844
  Description of Artificial Sequence: Synthetic Peanut control sequences, inner sequence

SEQ ID NO: 36562 - DNA, 30 bp, Artificial Sequence; identical to SEQ ID NO: 4381
  Description of Artificial Sequence: Synthetic Peanut control sequences, inner sequence

SEQ ID NO: 36563 - DNA, 30 bp, Artificial Sequence; identical to SEQ ID NO: 28257
  Description of Artificial Sequence: Synthetic Peanut control sequences, inner sequence

SEQ ID NO: 36564 - DNA, 30 bp, Artificial Sequence; identical to SEQ ID NO: 367
  Description of Artificial Sequence: Synthetic Peanut control sequences, inner sequence

SEQ ID NO: 36565 - DNA, 28 bp, Artificial Sequence
  Description of Artificial Sequence: Synthetic Peanut control sequences, inner sequence
ggcatgcacgcacctacacgtgatcatg

SEQ ID NO: 36566 - DNA, 29 bp, Artificial Sequence
  Description of Artificial Sequence: Synthetic Peanut control sequences, inner sequence
gtacgccgatgccctcatgtggccgtgga

SEQ ID NO: 36567 - DNA, 30 bp, Artificial Sequence; identical to SEQ ID NO: 246
  Description of Artificial Sequence: Synthetic Peanut control sequences, inner sequence

SEQ ID NO: 36568 - DNA, 30 bp, Artificial Sequence; identical to SEQ ID NO: 280
  Description of Artificial Sequence: Synthetic Peanut control sequences, inner sequence

SEQ ID NO: 36569 - DNA, 30 bp, Artificial Sequence; identical to SEQ ID NO: 98
  Description of Artificial Sequence: Synthetic Peanut control sequences, inner sequence

SEQ ID NO: 36570 - DNA, 30 bp, Artificial Sequence; identical to SEQ ID NO: 768
  Description of Artificial Sequence: Synthetic Peanut control sequences, inner sequence

SEQ ID NO: 36571 - DNA, 30 bp, Artificial Sequence; identical to SEQ ID NO: 4472
  Description of Artificial Sequence: Synthetic Peanut control sequences, inner sequence

SEQ ID NO: 36572 - DNA, 30 bp, Artificial Sequence; identical to SEQ ID NO: 24527
  Description of Artificial Sequence: Synthetic Peanut control sequences, inner sequence

SEQ ID NO: 36573 - DNA, 25 bp, Artificial Sequence
  Description of Artificial Sequence: Synthetic Peanut control sequences, inner sequence
ggcctgcgatggatgtgtgcgtgta

SEQ ID NO: 36574 - DNA, 30 bp, Artificial Sequence; identical to SEQ ID NO: 467
  Description of Artificial Sequence: Synthetic Peanut control sequences, inner sequence

SEQ ID NO: 36575 - DNA, 30 bp, Artificial Sequence; identical to SEQ ID NO: 296
  Description of Artificial Sequence: Synthetic Peanut control sequences, inner sequence

SEQ ID NO: 36576 - DNA, 30 bp, Artificial Sequence; identical to SEQ ID NO: 4748
  Description of Artificial Sequence: Synthetic Peanut control sequences, inner sequence

SEQ ID NO: 36577 - DNA, 30 bp, Artificial Sequence; identical to SEQ ID NO: 265
  Description of Artificial Sequence: Synthetic Peanut control sequences, inner sequence

SEQ ID NO: 36578 - DNA, 30 bp, Artificial Sequence; identical to SEQ ID NO: 632
  Description of Artificial Sequence: Synthetic Peanut control sequences, inner sequence

SEQ ID NO: 36579 - DNA, 28 bp, Artificial Sequence
  Description of Artificial Sequence: Synthetic Peanut control sequences, inner sequence
tggccgatcgaccctatcaagtgcgaca

SEQ ID NO: 36580 - DNA, 30 bp, Artificial Sequence; identical to SEQ ID NO: 857
  Description of Artificial Sequence: Synthetic Peanut control sequences, inner sequence

SEQ ID NO: 36581 - DNA, 30 bp, Artificial Sequence; identical to SEQ ID NO: 493
  Description of Artificial Sequence: Synthetic Peanut control sequences, inner sequence

SEQ ID NO: 36582 - DNA, 30 bp, Artificial Sequence; identical to SEQ ID NO: 306
  Description of Artificial Sequence: Synthetic Peanut control sequences, inner sequence

SEQ ID NO: 36583 - DNA, 30 bp, Artificial Sequence
  Description of Artificial Sequence: Synthetic Peanut control sequences, inner sequence
ggcctgcgatggatgtggacggtacgcggt

SEQ ID NO: 36584 - DNA, 30 bp, Artificial Sequence; identical to SEQ ID NO: 979
  Description of Artificial Sequence: Synthetic Peanut control sequences, inner sequence

SEQ ID NO: 36585 - DNA, 30 bp, Artificial Sequence; identical to SEQ ID NO: 4591
  Description of Artificial Sequence: Synthetic Peanut control sequences, inner sequence

SEQ ID NO: 36586 - DNA, 30 bp, Artificial Sequence
  Description of Artificial Sequence: Synthetic Peanut control sequences, inner sequence
tggccgctcgaccctatcaagtgcagcatg

SEQ ID NO: 36587 - DNA, 30 bp, Artificial Sequence; identical to SEQ ID NO: 20874
  Description of Artificial Sequence: Synthetic Peanut control sequences, inner sequence

SEQ ID NO: 36588 - DNA, 30 bp, Artificial Sequence; identical to SEQ ID NO: 8910
  Description of Artificial Sequence: Synthetic Peanut control sequences, inner sequence

SEQ ID NO: 36589 - DNA, 30 bp, Artificial Sequence; identical to SEQ ID NO: 484
  Description of Artificial Sequence: Synthetic Peanut control sequences, inner sequence

SEQ ID NO: 36590 - DNA, 30 bp, Artificial Sequence; identical to SEQ ID NO: 32433
  Description of Artificial Sequence: Synthetic Peanut control sequences, inner sequence

SEQ ID NO: 36591 - DNA, 30 bp, Artificial Sequence; identical to SEQ ID NO: 138
  Description of Artificial Sequence: Synthetic Peanut control sequences, inner sequence

SEQ ID NO: 36592 - DNA, 30 bp, Artificial Sequence; identical to SEQ ID NO: 8564
  Description of Artificial Sequence: Synthetic Peanut control sequences, inner sequence

SEQ ID NO: 36593 - DNA, 30 bp, Artificial Sequence; identical to SEQ ID NO: 631
  Description of Artificial Sequence: Synthetic Peanut control sequences, inner sequence

SEQ ID NO: 36594 - DNA, 31 bp, Artificial Sequence; identical to SEQ ID NO: 659
  Description of Artificial Sequence: Synthetic Peanut control sequences, inner sequence

SEQ ID NO: 36595 - DNA, 30 bp, Artificial Sequence; identical to SEQ ID NO: 8782
  Description of Artificial Sequence: Synthetic Peanut control sequences, inner sequence

SEQ ID NO: 36596 - DNA, 30 bp, Artificial Sequence; identical to SEQ ID NO: 4651
  Description of Artificial Sequence: Synthetic Peanut control sequences, inner sequence

SEQ ID NO: 36597 - DNA, 30 bp, Artificial Sequence; identical to SEQ ID NO: 442
  Description of Artificial Sequence: Synthetic Peanut control sequences, inner sequence

SEQ ID NO: 36598 - DNA, 30 bp, Artificial Sequence; identical to SEQ ID NO: 4837
  Description of Artificial Sequence: Synthetic Peanut control sequences, inner sequence

SEQ ID NO: 36599 - DNA, 30 bp, Artificial Sequence; identical to SEQ ID NO: 4280
  Description of Artificial Sequence: Synthetic Peanut control sequences, inner sequence

SEQ ID NO: 36600 - DNA, 30 bp, Artificial Sequence; identical to SEQ ID NO: 141
  Description of Artificial Sequence: Synthetic Peanut control sequences, inner sequence

SEQ ID NO: 36601 - DNA, 30 bp, Artificial Sequence; identical to SEQ ID NO: 8850
  Description of Artificial Sequence: Synthetic Peanut control sequences, inner sequence

SEQ ID NO: 36602 - DNA, 30 bp, Artificial Sequence
  Description of Artificial Sequence: Synthetic Peanut control sequences, inner sequence
tggccgatcgaccctctcaagtgcagcatg

SEQ ID NO: 36603 - DNA, 30 bp, Artificial Sequence; identical to SEQ ID NO: 4580
  Description of Artificial Sequence: Synthetic Peanut control sequences, inner sequence

SEQ ID NO: 36604 - DNA, 30 bp, Artificial Sequence; identical to SEQ ID NO: 4590
  Description of Artificial Sequence: Synthetic Peanut control sequences, inner sequence

SEQ ID NO: 36605 - DNA, 30 bp, Artificial Sequence; identical to SEQ ID NO: 4565
  Description of Artificial Sequence: Synthetic Peanut control sequences, inner sequence

SEQ ID NO: 36606 - DNA, 30 bp, Artificial Sequence; identical to SEQ ID NO: 889
  Description of Artificial Sequence: Synthetic Peanut control sequences, inner sequence

SEQ ID NO: 36607 - DNA, 31 bp, Artificial Sequence
  Description of Artificial Sequence: Synthetic Peanut control sequences, inner sequence
gtgctgcgatggcttagcaaagtgcgacatg

SEQ ID NO: 36608 - DNA, 30 bp, Artificial Sequence; identical to SEQ ID NO: 244
  Description of Artificial Sequence: Synthetic Peanut control sequences, inner sequence

SEQ ID NO: 36609 - DNA, 30 bp, Artificial Sequence; identical to SEQ ID NO: 499
  Description of Artificial Sequence: Synthetic Peanut control sequences, inner sequence

SEQ ID NO: 36610 - DNA, 30 bp, Artificial Sequence; identical to SEQ ID NO: 12872
  Description of Artificial Sequence: Synthetic Peanut control sequences, inner sequence

SEQ ID NO: 36611 - DNA, 30 bp, Artificial Sequence
  Description of Artificial Sequence: Synthetic Peanut control sequences, inner sequence
gtggccgcagctgacctagcatgtgtgtca

SEQ ID NO: 36612 - DNA, 30 bp, Artificial Sequence
  Description of Artificial Sequence: Synthetic Peanut control sequences, inner sequence
gtgcttcacgacctagcacgtggggatgga

SEQ ID NO: 36613 - DNA, 30 bp, Artificial Sequence; identical to SEQ ID NO: 274
  Description of Artificial Sequence: Synthetic Peanut control sequences, inner sequence

SEQ ID NO: 36614 - DNA, 30 bp, Artificial Sequence; identical to SEQ ID NO: 28914
  Description of Artificial Sequence: Synthetic Peanut control sequences, inner sequence

SEQ ID NO: 36615 - DNA, 30 bp, Artificial Sequence; identical to SEQ ID NO: 20744
  Description of Artificial Sequence: Synthetic Peanut control sequences, inner sequence

SEQ ID NO: 36616 - DNA, 30 bp, Artificial Sequence; identical to SEQ ID NO: 637
  Description of Artificial Sequence: Synthetic Peanut control sequences, inner sequence

SEQ ID NO: 36617 - DNA, 30 bp, Artificial Sequence
  Description of Artificial Sequence: Synthetic Peanut control sequences, inner sequence
gtcatgcgcggacattcaagttggcgtgta

SEQ ID NO: 36618 - DNA, 30 bp, Artificial Sequence; identical to SEQ ID NO: 8807
  Description of Artificial Sequence: Synthetic Peanut control sequences, inner sequence

SEQ ID NO: 36619 - DNA, 30 bp, Artificial Sequence; identical to SEQ ID NO: 657
  Description of Artificial Sequence: Synthetic Peanut control sequences, inner sequence

SEQ ID NO: 36620 - DNA, 30 bp, Artificial Sequence; identical to SEQ ID NO: 12791
  Description of Artificial Sequence: Synthetic Peanut control sequences, inner sequence

SEQ ID NO: 36621 - DNA, 30 bp, Artificial Sequence; identical to SEQ ID NO: 20673
  Description of Artificial Sequence: Synthetic Peanut control sequences, inner sequence

SEQ ID NO: 36622 - DNA, 30 bp, Artificial Sequence; identical to SEQ ID NO: 20722
  Description of Artificial Sequence: Synthetic Peanut control sequences, inner sequence

SEQ ID NO: 36623 - DNA, 30 bp, Artificial Sequence; identical to SEQ ID NO: 4393
  Description of Artificial Sequence: Synthetic Peanut control sequences, inner sequence

SEQ ID NO: 36624 - DNA, 30 bp, Artificial Sequence
  Description of Artificial Sequence: Synthetic Peanut control sequences, inner sequence
cgtatggcctggacatccctcaagttggca

SEQ ID NO: 36625 - DNA, 30 bp, Artificial Sequence; identical to SEQ ID NO: 248
  Description of Artificial Sequence: Synthetic Peanut control sequences, inner sequence

SEQ ID NO: 36626 - DNA, 30 bp, Artificial Sequence; identical to SEQ ID NO: 4525
  Description of Artificial Sequence: Synthetic Peanut control sequences, inner sequence

SEQ ID NO: 36627 - DNA, 30 bp, Artificial Sequence; identical to SEQ ID NO: 654
  Description of Artificial Sequence: Synthetic Peanut control sequences, inner sequence

SEQ ID NO: 36628 - DNA, 30 bp, Artificial Sequence; identical to SEQ ID NO: 504
  Description of Artificial Sequence: Synthetic Peanut control sequences, inner sequence

SEQ ID NO: 36629 - DNA, 30 bp, Artificial Sequence; identical to SEQ ID NO: 32416
  Description of Artificial Sequence: Synthetic Peanut control sequences, inner sequence

SEQ ID NO: 36630 - DNA, 25 bp, Artificial Sequence
  Description of Artificial Sequence: Synthetic Peanut control sequences, inner sequence
gtactgcactgccctacacgtgggc

SEQ ID NO: 36631 - DNA, 30 bp, Artificial Sequence; identical to SEQ ID NO: 932
  Description of Artificial Sequence: Synthetic Peanut control sequences, inner sequence

SEQ ID NO: 36632 - DNA, 30 bp, Artificial Sequence; identical to SEQ ID NO: 4870
  Description of Artificial Sequence: Synthetic Peanut control sequences, inner sequence

SEQ ID NO: 36633 - DNA, 30 bp, Artificial Sequence; identical to SEQ ID NO: 830
  Description of Artificial Sequence: Synthetic Peanut control sequences, inner sequence

SEQ ID NO: 36634 - DNA, 30 bp, Artificial Sequence
  Description of Artificial Sequence: Synthetic Peanut control sequences, inner sequence
gtcatgcgctgacattcaagttggcgtgga

SEQ ID NO: 36635 - DNA, 30 bp, Artificial Sequence; identical to SEQ ID NO: 28994
  Description of Artificial Sequence: Synthetic Peanut control sequences, inner sequence

SEQ ID NO: 36636 - DNA, 30 bp, Artificial Sequence; identical to SEQ ID NO: 403
  Description of Artificial Sequence: Synthetic Peanut control sequences, inner sequence

SEQ ID NO: 36637 - DNA, 30 bp, Artificial Sequence; identical to SEQ ID NO: 439
  Description of Artificial Sequence: Synthetic Peanut control sequences, inner sequence

SEQ ID NO: 36638 - DNA, 30 bp, Artificial Sequence; identical to SEQ ID NO: 846
  Description of Artificial Sequence: Synthetic Peanut control sequences, inner sequence

SEQ ID NO: 36639 - DNA, 30 bp, Artificial Sequence
  Description of Artificial Sequence: Synthetic Peanut control sequences, inner sequence
tggccgatcgaccctatcaagggcagcatg

SEQ ID NO: 36640 - DNA, 30 bp, Artificial Sequence; identical to SEQ ID NO: 8871
  Description of Artificial Sequence: Synthetic Peanut control sequences, inner sequence

SEQ ID NO: 36641 - DNA, 30 bp, Artificial Sequence; identical to SEQ ID NO: 8876
  Description of Artificial Sequence: Synthetic Peanut control sequences, inner sequence

SEQ ID NO: 36642 - DNA, 30 bp, Artificial Sequence
  Description of Artificial Sequence: Synthetic Peanut control sequences, inner sequence
ggacggatcgaacctacaagttgtcgcgga

SEQ ID NO: 36643 - DNA, 30 bp, Artificial Sequence
  Description of Artificial Sequence: Synthetic Peanut control sequences, inner sequence
ccgtaccgaccctatcaagtgctgtccatg

SEQ ID NO: 36644 - DNA, 30 bp, Artificial Sequence; identical to SEQ ID NO: 20549
  Description of Artificial Sequence: Synthetic Peanut control sequences, inner sequence

SEQ ID NO: 36645 - DNA, 30 bp, Artificial Sequence; identical to SEQ ID NO: 12892
  Description of Artificial Sequence: Synthetic Peanut control sequences, inner sequence

SEQ ID NO: 36646 - DNA, 32 bp, Artificial Sequence
  Description of Artificial Sequence: Synthetic Peanut control sequences, inner sequence
catgtgtcgactcgccctatcatgaggccatg

SEQ ID NO: 36647 - DNA, 30 bp, Artificial Sequence
  Description of Artificial Sequence: Synthetic Peanut control sequences, inner sequence
ggtccgaacgcacctcatgtgtgtcgtgga

SEQ ID NO: 36648 - DNA, 30 bp, Artificial Sequence; identical to SEQ ID NO: 633
  Description of Artificial Sequence: Synthetic Peanut control sequences, inner sequence

SEQ ID NO: 36649 - DNA, 30 bp, Artificial Sequence; identical to SEQ ID NO: 4494
  Description of Artificial Sequence: Synthetic Peanut control sequences, inner sequence

SEQ ID NO: 36650 - DNA, 30 bp, Artificial Sequence; identical to SEQ ID NO: 20289
  Description of Artificial Sequence: Synthetic Peanut control sequences, inner sequence

SEQ ID NO: 36651 - DNA, 28 bp, Artificial Sequence
  Description of Artificial Sequence: Synthetic Peanut control sequences, inner sequence
ggcctcgatggatgtggtggtgctgtca

SEQ ID NO: 36652 - DNA, 33 bp, Artificial Sequence
  Description of Artificial Sequence: Synthetic Peanut control sequences, inner sequence
ccgcatcggaccgatcaaggcaggctgtacgag

SEQ ID NO: 36653 - DNA, 30 bp, Artificial Sequence
  Description of Artificial Sequence: Synthetic Peanut control sequences, inner sequence
ggccaagctgaccgtcaacgtggttgtgga

SEQ ID NO: 36654 - DNA, 30 bp, Artificial Sequence; identical to SEQ ID NO: 8810
  Description of Artificial Sequence: Synthetic Peanut control sequences, inner sequence

SEQ ID NO: 36655 - DNA, 30 bp, Artificial Sequence; identical to SEQ ID NO: 32565
  Description of Artificial Sequence: Synthetic Peanut control sequences, inner sequence

SEQ ID NO: 36656 - DNA, 30 bp, Artificial Sequence; identical to SEQ ID NO: 32235
  Description of Artificial Sequence: Synthetic Peanut control sequences, inner sequence

SEQ ID NO: 36657 - DNA, 30 bp, Artificial Sequence; identical to SEQ ID NO: 20269
  Description of Artificial Sequence: Synthetic Peanut control sequences, inner sequence

SEQ ID NO: 36658 - DNA, 30 bp, Artificial Sequence; identical to SEQ ID NO: 4351
  Description of Artificial Sequence: Synthetic Peanut control sequences, inner sequence

SEQ ID NO: 36659 - DNA, 30 bp, Artificial Sequence; identical to SEQ ID NO: 930
  Description of Artificial Sequence: Synthetic Peanut control sequences, inner sequence

SEQ ID NO: 36660 - DNA, 30 bp, Artificial Sequence; identical to SEQ ID NO: 841
  Description of Artificial Sequence: Synthetic Peanut control sequences, inner sequence

SEQ ID NO: 36661 - DNA, 30 bp, Artificial Sequence; identical to SEQ ID NO: 415
  Description of Artificial Sequence: Synthetic Peanut control sequences, inner sequence

SEQ ID NO: 36662 - DNA, 30 bp, Artificial Sequence; identical to SEQ ID NO: 8988
  Description of Artificial Sequence: Synthetic Peanut control sequences, inner sequence

SEQ ID NO: 36663 - DNA, 30 bp, Artificial Sequence; identical to SEQ ID NO: 4380
  Description of Artificial Sequence: Synthetic Peanut control sequences, inner sequence

SEQ ID NO: 36664 - DNA, 30 bp, Artificial Sequence; identical to SEQ ID NO: 32404
  Description of Artificial Sequence: Synthetic Peanut control sequences, inner sequence

SEQ ID NO: 36665 - DNA, 30 bp, Artificial Sequence
  Description of Artificial Sequence: Synthetic Peanut control sequences, inner sequence
cacgtcagtccggatcggcttagctgggca

SEQ ID NO: 36666 - DNA, 30 bp, Artificial Sequence; identical to SEQ ID NO: 4445
  Description of Artificial Sequence: Synthetic Peanut control sequences, inner sequence

SEQ ID NO: 36667 - DNA, 30 bp, Artificial Sequence; identical to SEQ ID NO: 881
  Description of Artificial Sequence: Synthetic Peanut control sequences, inner sequence

SEQ ID NO: 36668 - DNA, 30 bp, Artificial Sequence; identical to SEQ ID NO: 190
  Description of Artificial Sequence: Synthetic Peanut control sequences, inner sequence

SEQ ID NO: 36669 - DNA, 30 bp, Artificial Sequence; identical to SEQ ID NO: 8928
  Description of Artificial Sequence: Synthetic Peanut control sequences, inner sequence

SEQ ID NO: 36670 - DNA, 30 bp, Artificial Sequence; identical to SEQ ID NO: 471
  Description of Artificial Sequence: Synthetic Peanut control sequences, inner sequence

SEQ ID NO: 36671 - DNA, 30 bp, Artificial Sequence; identical to SEQ ID NO: 172
  Description of Artificial Sequence: Synthetic Peanut control sequences, inner sequence

SEQ ID NO: 36672 - DNA, 30 bp, Artificial Sequence; identical to SEQ ID NO: 988
  Description of Artificial Sequence: Synthetic Peanut control sequences, inner sequence

SEQ ID NO: 36673 - DNA, 30 bp, Artificial Sequence; identical to SEQ ID NO: 4988
  Description of Artificial Sequence: Synthetic Peanut control sequences, inner sequence

SEQ ID NO: 36674 - DNA, 30 bp, Artificial Sequence; identical to SEQ ID NO: 424
  Description of Artificial Sequence: Synthetic Peanut control sequences, inner sequence

SEQ ID NO: 36675 - DNA, 30 bp, Artificial Sequence; identical to SEQ ID NO: 20286
  Description of Artificial Sequence: Synthetic Peanut control sequences, inner sequence

SEQ ID NO: 36676 - DNA, 30 bp, Artificial Sequence; identical to SEQ ID NO: 4905
  Description of Artificial Sequence: Synthetic Peanut control sequences, inner sequence

SEQ ID NO: 36677 - DNA, 30 bp, Artificial Sequence
  Description of Artificial Sequence: Synthetic Peanut control sequences, inner sequence
gtccgagcggacctagcaagtgaggctgga

SEQ ID NO: 36678 - DNA, 30 bp, Artificial Sequence; identical to SEQ ID NO: 4700
  Description of Artificial Sequence: Synthetic Peanut control sequences, inner sequence

SEQ ID NO: 36679 - DNA, 30 bp, Artificial Sequence; identical to SEQ ID NO: 724
  Description of Artificial Sequence: Synthetic Peanut control sequences, inner sequence

SEQ ID NO: 36680 - DNA, 30 bp, Artificial Sequence
  Description of Artificial Sequence: Synthetic Peanut control sequences, inner sequence
gacgttgctgaccgaaagtgcatgtgcgtg

SEQ ID NO: 36681 - DNA, 30 bp, Artificial Sequence; identical to SEQ ID NO: 12933
  Description of Artificial Sequence: Synthetic Peanut control sequences, inner sequence

SEQ ID NO: 36682 - DNA, 30 bp, Artificial Sequence; identical to SEQ ID NO: 20343
  Description of Artificial Sequence: Synthetic Peanut control sequences, inner sequence

SEQ ID NO: 36683 - DNA, 30 bp, Artificial Sequence; identical to SEQ ID NO: 4575
  Description of Artificial Sequence: Synthetic Peanut control sequences, inner sequence

SEQ ID NO: 36684 - DNA, 30 bp, Artificial Sequence; identical to SEQ ID NO: 4611
  Description of Artificial Sequence: Synthetic Peanut control sequences, inner sequence

SEQ ID NO: 36685 - DNA, 30 bp, Artificial Sequence; identical to SEQ ID NO: 8633
  Description of Artificial Sequence: Synthetic Peanut control sequences, inner sequence

SEQ ID NO: 36686 - DNA, 31 bp, Artificial Sequence
  Description of Artificial Sequence: Synthetic Peanut control sequences, inner sequence
ggcctgcgatggcttagcaaagtgcgacatg

SEQ ID NO: 36687 - DNA, 30 bp, Artificial Sequence
  Description of Artificial Sequence: Synthetic Peanut control sequences, inner sequence
tggccgatctaccctatcaagtgcagcatg

SEQ ID NO: 36688 - DNA, 30 bp, Artificial Sequence
  Description of Artificial Sequence: Synthetic Peanut control sequences, inner sequence
cgtgtggccgtcgacatccctcgagtgtca

SEQ ID NO: 36689 - DNA, 30 bp, Artificial Sequence; identical to SEQ ID NO: 4406
  Description of Artificial Sequence: Synthetic Peanut control sequences, inner sequence

SEQ ID NO: 36690 - DNA, 30 bp, Artificial Sequence; identical to SEQ ID NO: 28295
  Description of Artificial Sequence: Synthetic Peanut control sequences, inner sequence

SEQ ID NO: 36691 - DNA, 30 bp, Artificial Sequence; identical to SEQ ID NO: 214
  Description of Artificial Sequence: Synthetic Peanut control sequences, inner sequence

SEQ ID NO: 36692 - DNA, 30 bp, Artificial Sequence; identical to SEQ ID NO: 8792
  Description of Artificial Sequence: Synthetic Peanut control sequences, inner sequence

SEQ ID NO: 36693 - DNA, 30 bp, Artificial Sequence; identical to SEQ ID NO: 4799
  Description of Artificial Sequence: Synthetic Peanut control sequences, inner sequence

SEQ ID NO: 36694 - DNA, 30 bp, Artificial Sequence; identical to SEQ ID NO: 761
  Description of Artificial Sequence: Synthetic Peanut control sequences, inner sequence

SEQ ID NO: 36695 - DNA, 30 bp, Artificial Sequence; identical to SEQ ID NO: 4890
  Description of Artificial Sequence: Synthetic Peanut control sequences, inner sequence

SEQ ID NO: 36696 - DNA, 30 bp, Artificial Sequence; identical to SEQ ID NO: 20295
  Description of Artificial Sequence: Synthetic Peanut control sequences, inner sequence

SEQ ID NO: 36697 - DNA, 30 bp, Artificial Sequence; identical to SEQ ID NO: 4691
  Description of Artificial Sequence: Synthetic Peanut control sequences, inner sequence

SEQ ID NO: 36698 - DNA, 29 bp, Artificial Sequence
  Description of Artificial Sequence: Synthetic Peanut control sequences, inner sequence
cgtgctacgaggacctggaccggtgcgtc

SEQ ID NO: 36699 - DNA, 32 bp, Artificial Sequence
  Description of Artificial Sequence: Synthetic Peanut control sequences, inner sequence
ggacgcacgcagaccttcaagtgtgccgtgga

SEQ ID NO: 36700 - DNA, 30 bp, Artificial Sequence; identical to SEQ ID NO: 361
  Description of Artificial Sequence: Synthetic Peanut control sequences, inner sequence

SEQ ID NO: 36701 - DNA, 30 bp, Artificial Sequence; identical to SEQ ID NO: 4706
  Description of Artificial Sequence: Synthetic Peanut control sequences, inner sequence

SEQ ID NO: 36702 - DNA, 30 bp, Artificial Sequence
  Description of Artificial Sequence: Synthetic Peanut control sequences, inner sequence
ccgcgtcaacctatcaagcgcatggacgta

SEQ ID NO: 36703 - DNA, 30 bp, Artificial Sequence; identical to SEQ ID NO: 167
  Description of Artificial Sequence: Synthetic Peanut control sequences, inner sequence

SEQ ID NO: 36704 - DNA, 30 bp, Artificial Sequence; identical to SEQ ID NO: 20789
  Description of Artificial Sequence: Synthetic Peanut control sequences, inner sequence

SEQ ID NO: 36705 - DNA, 30 bp, Artificial Sequence; identical to SEQ ID NO: 32166
  Description of Artificial Sequence: Synthetic Peanut control sequences, inner sequence

SEQ ID NO: 36706 - DNA, 30 bp, Artificial Sequence; identical to SEQ ID NO: 498
  Description of Artificial Sequence: Synthetic Peanut control sequences, inner sequence

SEQ ID NO: 36707 - DNA, 30 bp, Artificial Sequence; identical to SEQ ID NO: 919
  Description of Artificial Sequence: Synthetic Peanut control sequences, inner sequence

SEQ ID NO: 36708 - DNA, 26 bp, Artificial Sequence
  Description of Artificial Sequence: Synthetic Peanut control sequences, inner sequence
ggcatgcacgcacctacacgtggaca

SEQ ID NO: 36709 - DNA, 30 bp, Artificial Sequence
  Description of Artificial Sequence: Synthetic Peanut control sequences, inner sequence
gtcatggctcgtccctgatcacgtggctca

SEQ ID NO: 36710 - DNA, 30 bp, Artificial Sequence; identical to SEQ ID NO: 946
  Description of Artificial Sequence: Synthetic Peanut control sequences, inner sequence

SEQ ID NO: 36711 - DNA, 30 bp, Artificial Sequence; identical to SEQ ID NO: 8659
  Description of Artificial Sequence: Synthetic Peanut control sequences, inner sequence

SEQ ID NO: 36712 - DNA, 30 bp, Artificial Sequence; identical to SEQ ID NO: 380
  Description of Artificial Sequence: Synthetic Peanut control sequences, inner sequence

SEQ ID NO: 36713 - DNA, 30 bp, Artificial Sequence; identical to SEQ ID NO: 20617
  Description of Artificial Sequence: Synthetic Peanut control sequences, inner sequence

SEQ ID NO: 36714 - DNA, 30 bp, Artificial Sequence; identical to SEQ ID NO: 4451
  Description of Artificial Sequence: Synthetic Peanut control sequences, inner sequence

SEQ ID NO: 36715 - DNA, 30 bp, Artificial Sequence; identical to SEQ ID NO: 4816
  Description of Artificial Sequence: Synthetic Peanut control sequences, inner sequence

SEQ ID NO: 36716 - DNA, 30 bp, Artificial Sequence; identical to SEQ ID NO: 955
  Description of Artificial Sequence: Synthetic Peanut control sequences, inner sequence

SEQ ID NO: 36717 - DNA, 30 bp, Artificial Sequence; identical to SEQ ID NO: 178
  Description of Artificial Sequence: Synthetic Peanut control sequences, inner sequence

SEQ ID NO: 36718 - DNA, 30 bp, Artificial Sequence
  Description of Artificial Sequence: Synthetic Peanut control sequences, inner sequence
ggccgaacacgaccgcaagtgcgttatgga

SEQ ID NO: 36719 - DNA, 30 bp, Artificial Sequence; identical to SEQ ID NO: 4260
  Description of Artificial Sequence: Synthetic Peanut control sequences, inner sequence

SEQ ID NO: 36720 - DNA, 30 bp, Artificial Sequence; identical to SEQ ID NO: 20468
  Description of Artificial Sequence: Synthetic Peanut control sequences, inner sequence

SEQ ID NO: 36721 - DNA, 30 bp, Artificial Sequence
  Description of Artificial Sequence: Synthetic Peanut control sequences, inner sequence
gacgccactcatgccctatcgatgtggcca

SEQ ID NO: 36722 - DNA, 30 bp, Artificial Sequence
  Description of Artificial Sequence: Synthetic Peanut control sequences, inner sequence
ggccaatcgagccgatcaagtgtcgatgga

SEQ ID NO: 36723 - DNA, 30 bp, Artificial Sequence; identical to SEQ ID NO: 755
  Description of Artificial Sequence: Synthetic Peanut control sequences, inner sequence

SEQ ID NO: 36724 - DNA, 30 bp, Artificial Sequence
  Description of Artificial Sequence: Synthetic Peanut control sequences, inner sequence
tggccgatcgaccctatcaagtgcatcatg

SEQ ID NO: 36725 - DNA, 30 bp, Artificial Sequence; identical to SEQ ID NO: 8618
  Description of Artificial Sequence: Synthetic Peanut control sequences, inner sequence

SEQ ID NO: 36726 - DNA, 30 bp, Artificial Sequence; identical to SEQ ID NO: 4610
  Description of Artificial Sequence: Synthetic Peanut control sequences, inner sequence

SEQ ID NO: 36727 - DNA, 30 bp, Artificial Sequence; identical to SEQ ID NO: 4735
  Description of Artificial Sequence: Synthetic Peanut control sequences, inner sequence

SEQ ID NO: 36728 - DNA, 30 bp, Artificial Sequence; identical to SEQ ID NO: 4898
  Description of Artificial Sequence: Synthetic Peanut control sequences, inner sequence

SEQ ID NO: 36729 - DNA, 30 bp, Artificial Sequence; identical to SEQ ID NO: 4907
  Description of Artificial Sequence: Synthetic Peanut control sequences, inner sequence

SEQ ID NO: 36730 - DNA, 30 bp, Artificial Sequence; identical to SEQ ID NO: 4638
  Description of Artificial Sequence: Synthetic Peanut control sequences, inner sequence

SEQ ID NO: 36731 - DNA, 30 bp, Artificial Sequence; identical to SEQ ID NO: 371
  Description of Artificial Sequence: Synthetic Peanut control sequences, inner sequence

SEQ ID NO: 36732 - DNA, 30 bp, Artificial Sequence; identical to SEQ ID NO: 945
  Description of Artificial Sequence: Synthetic Peanut control sequences, inner sequence

SEQ ID NO: 36733 - DNA, 27 bp, Artificial Sequence
  Description of Artificial Sequence: Synthetic Peanut control sequences, inner sequence
gtgcgaccgaccctatcaagtacgtca

SEQ ID NO: 36734 - DNA, 30 bp, Artificial Sequence; identical to SEQ ID NO: 4597
  Description of Artificial Sequence: Synthetic Peanut control sequences, inner sequence

SEQ ID NO: 36735 - DNA, 30 bp, Artificial Sequence; identical to SEQ ID NO: 12744
  Description of Artificial Sequence: Synthetic Peanut control sequences, inner sequence

SEQ ID NO: 36736 - DNA, 30 bp, Artificial Sequence
  Description of Artificial Sequence: Synthetic Peanut control sequences, inner sequence
ggcctgatcgaacctatcaagtgcagcatg

SEQ ID NO: 36737 - DNA, 30 bp, Artificial Sequence; identical to SEQ ID NO: 4499
  Description of Artificial Sequence: Synthetic Peanut control sequences, inner sequence

SEQ ID NO: 36738 - DNA, 30 bp, Artificial Sequence; identical to SEQ ID NO: 8877
  Description of Artificial Sequence: Synthetic Peanut control sequences, inner sequence

SEQ ID NO: 36739 - DNA, 30 bp, Artificial Sequence; identical to SEQ ID NO: 666
  Description of Artificial Sequence: Synthetic Peanut control sequences, inner sequence

SEQ ID NO: 36740 - DNA, 30 bp, Artificial Sequence; identical to SEQ ID NO: 12618
  Description of Artificial Sequence: Synthetic Peanut control sequences, inner sequence

SEQ ID NO: 36741 - DNA, 30 bp, Artificial Sequence; identical to SEQ ID NO: 911
  Description of Artificial Sequence: Synthetic Peanut control sequences, inner sequence

SEQ ID NO: 36742 - DNA, 27 bp, Artificial Sequence
  Description of Artificial Sequence: Synthetic Peanut control sequences, inner sequence
gcatgcgatgatccttcgagtgcgtca

SEQ ID NO: 36743 - DNA, 29 bp, Artificial Sequence
  Description of Artificial Sequence: Synthetic Peanut control sequences, inner sequence
gtgccgcagctgacctagcatgtgtgtca

SEQ ID NO: 36744 - DNA, 30 bp, Artificial Sequence; identical to SEQ ID NO: 231
  Description of Artificial Sequence: Synthetic Peanut control sequences, inner sequence

SEQ ID NO: 36745 - DNA, 30 bp, Artificial Sequence
  Description of Artificial Sequence: Synthetic Peanut control sequences, inner sequence
gtgcgcgctgttccctctacgtgcggcatg

SEQ ID NO: 36746 - DNA, 30 bp, Artificial Sequence; identical to SEQ ID NO: 24801
  Description of Artificial Sequence: Synthetic Peanut control sequences, inner sequence

SEQ ID NO: 36747 - DNA, 30 bp, Artificial Sequence; identical to SEQ ID NO: 324
  Description of Artificial Sequence: Synthetic Peanut control sequences, inner sequence

SEQ ID NO: 36748 - DNA, 30 bp, Artificial Sequence; identical to SEQ ID NO: 4653
  Description of Artificial Sequence: Synthetic Peanut control sequences, inner sequence

SEQ ID NO: 36749 - DNA, 30 bp, Artificial Sequence; identical to SEQ ID NO: 763
  Description of Artificial Sequence: Synthetic Peanut control sequences, inner sequence

SEQ ID NO: 36750 - DNA, 30 bp, Artificial Sequence; identical to SEQ ID NO: 720
  Description of Artificial Sequence: Synthetic Peanut control sequences, inner sequence

SEQ ID NO: 36751 - DNA, 30 bp, Artificial Sequence; identical to SEQ ID NO: 869
  Description of Artificial Sequence: Synthetic Peanut control sequences, inner sequence

SEQ ID NO: 36752 - DNA, 35 bp, Artificial Sequence
  Description of Artificial Sequence: Synthetic Peanut control sequences, inner sequence
gcattggacgatcgtgccctacacgtgggtatgga

SEQ ID NO: 36753 - DNA, 30 bp, Artificial Sequence; identical to SEQ ID NO: 56
  Description of Artificial Sequence: Synthetic Peanut control sequences, inner sequence

SEQ ID NO: 36754 - DNA, 30 bp, Artificial Sequence; identical to SEQ ID NO: 4504
  Description of Artificial Sequence: Synthetic Peanut control sequences, inner sequence

SEQ ID NO: 36755 - DNA, 30 bp, Artificial Sequence; identical to SEQ ID NO: 32010
  Description of Artificial Sequence: Synthetic Peanut control sequences, inner sequence

SEQ ID NO: 36756 - DNA, 30 bp, Artificial Sequence; identical to SEQ ID NO: 860
  Description of Artificial Sequence: Synthetic Peanut control sequences, inner sequence

SEQ ID NO: 36757 - DNA, 30 bp, Artificial Sequence; identical to SEQ ID NO: 32783
  Description of Artificial Sequence: Synthetic Peanut control sequences, inner sequence

SEQ ID NO: 36758 - DNA, 30 bp, Artificial Sequence; identical to SEQ ID NO: 28452
  Description of Artificial Sequence: Synthetic Peanut control sequences, inner sequence

SEQ ID NO: 36759 - DNA, 30 bp, Artificial Sequence
  Description of Artificial Sequence: Synthetic Peanut control sequences, inner sequence
tggcatgtgtgcggattcgtcccttggtca

SEQ ID NO: 36760 - DNA, 30 bp, Artificial Sequence; identical to SEQ ID NO: 20385
  Description of Artificial Sequence: Synthetic Peanut control sequences, inner sequence

SEQ ID NO: 36761 - DNA, 30 bp, Artificial Sequence; identical to SEQ ID NO: 940
  Description of Artificial Sequence: Synthetic Peanut control sequences, inner sequence

SEQ ID NO: 36762 - DNA, 30 bp, Artificial Sequence
  Description of Artificial Sequence: Synthetic Peanut control sequences, inner sequence
ccgatcgacctcggtgcgtcagggcttgac

SEQ ID NO: 36763 - DNA, 30 bp, Artificial Sequence
  Description of Artificial Sequence: Synthetic Peanut control sequences, inner sequence
tggccgatcgaccctatcaattgcagcatg

SEQ ID NO: 36764 - DNA, 30 bp, Artificial Sequence; identical to SEQ ID NO: 635
  Description of Artificial Sequence: Synthetic Peanut control sequences, inner sequence

SEQ ID NO: 36765 - DNA, 30 bp, Artificial Sequence; identical to SEQ ID NO: 8458
  Description of Artificial Sequence: Synthetic Peanut control sequences, inner sequence

SEQ ID NO: 36766 - DNA, 30 bp, Artificial Sequence; identical to SEQ ID NO: 4420
  Description of Artificial Sequence: Synthetic Peanut control sequences, inner sequence

SEQ ID NO: 36767 - DNA, 27 bp, Artificial Sequence
  Description of Artificial Sequence: Synthetic Peanut control sequences, inner sequence
gtgcgacctgacctagcatgtgtgtca

SEQ ID NO: 36768 - DNA, 30 bp, Artificial Sequence
  Description of Artificial Sequence: Synthetic Peanut control sequences, inner sequence
gtcatgccatcccttcgagtgtgtcacgta

SEQ ID NO: 36769 - DNA, 30 bp, Artificial Sequence
  Description of Artificial Sequence: Synthetic Peanut control sequences, inner sequence
gtctcgcgtgccctatcatgtgtgcgtgga

SEQ ID NO: 36770 - DNA, 30 bp, Artificial Sequence; identical to SEQ ID NO: 114
  Description of Artificial Sequence: Synthetic Peanut control sequences, inner sequence

SEQ ID NO: 36771 - DNA, 30 bp, Artificial Sequence; identical to SEQ ID NO: 12612
  Description of Artificial Sequence: Synthetic Peanut control sequences, inner sequence

SEQ ID NO: 36772 - DNA, 30 bp, Artificial Sequence; identical to SEQ ID NO: 4613
  Description of Artificial Sequence: Synthetic Peanut control sequences, inner sequence

SEQ ID NO: 36773 - DNA, 30 bp, Artificial Sequence; identical to SEQ ID NO: 4785
  Description of Artificial Sequence: Synthetic Peanut control sequences, inner sequence

SEQ ID NO: 36774 - DNA, 30 bp, Artificial Sequence; identical to SEQ ID NO: 20506
  Description of Artificial Sequence: Synthetic Peanut control sequences, inner sequence

SEQ ID NO: 36775 - DNA, 30 bp, Artificial Sequence; identical to SEQ ID NO: 28989
  Description of Artificial Sequence: Synthetic Peanut control sequences, inner sequence

SEQ ID NO: 36776 - DNA, 29 bp, Artificial Sequence
  Description of Artificial Sequence: Synthetic Peanut control sequences, inner sequence
gtcatgccatcccttcgagtgtgacggta

SEQ ID NO: 36777 - DNA, 30 bp, Artificial Sequence
  Description of Artificial Sequence: Synthetic Peanut control sequences, inner sequence
gcgtcatgtgtccagtccctcaagttgtca

SEQ ID NO: 36778 - DNA, 30 bp, Artificial Sequence
  Description of Artificial Sequence: Synthetic Peanut control sequences, inner sequence
ccgtctcaaccgtcgtggtctggatgcgtc

SEQ ID NO: 36779 - DNA, 30 bp, Artificial Sequence; identical to SEQ ID NO: 28441
  Description of Artificial Sequence: Synthetic Peanut control sequences, inner sequence

SEQ ID NO: 36780 - DNA, 30 bp, Artificial Sequence; identical to SEQ ID NO: 291
  Description of Artificial Sequence: Synthetic Peanut control sequences, inner sequence

SEQ ID NO: 36781 - DNA, 30 bp, Artificial Sequence; identical to SEQ ID NO: 24810
  Description of Artificial Sequence: Synthetic Peanut control sequences, inner sequence

SEQ ID NO: 36782 - DNA, 30 bp, Artificial Sequence; identical to SEQ ID NO: 86
  Description of Artificial Sequence: Synthetic Peanut control sequences, inner sequence

SEQ ID NO: 36783 - DNA, 30 bp, Artificial Sequence; identical to SEQ ID NO: 28947
  Description of Artificial Sequence: Synthetic Peanut control sequences, inner sequence

SEQ ID NO: 36784 - DNA, 30 bp, Artificial Sequence
  Description of Artificial Sequence: Synthetic Peanut control sequences, inner sequence
tggccgatcgaccatatcaagtgcagcatg

SEQ ID NO: 36785 - DNA, 30 bp, Artificial Sequence; identical to SEQ ID NO: 8769
  Description of Artificial Sequence: Synthetic Peanut control sequences, inner sequence

SEQ ID NO: 36786 - DNA, 29 bp, Artificial Sequence
  Description of Artificial Sequence: Synthetic Peanut control sequences, inner sequence
ggccgaacgaccctatcaagtgcagcatg

SEQ ID NO: 36787 - DNA, 30 bp, Artificial Sequence; identical to SEQ ID NO: 678
  Description of Artificial Sequence: Synthetic Peanut control sequences, inner sequence

SEQ ID NO: 36788 - DNA, 30 bp, Artificial Sequence; identical to SEQ ID NO: 20496
  Description of Artificial Sequence: Synthetic Peanut control sequences, inner sequence

SEQ ID NO: 36789 - DNA, 29 bp, Artificial Sequence
  Description of Artificial Sequence: Synthetic Peanut control sequences, inner sequence
ggcacaaacggaccgacaagtgcagcatg

SEQ ID NO: 36790 - DNA, 30 bp, Artificial Sequence
  Description of Artificial Sequence: Synthetic Peanut control sequences, inner sequence
gtgcgtatcggcccggtcaagttcggcatg

SEQ ID NO: 36791 - DNA, 28 bp, Artificial Sequence
  Description of Artificial Sequence: Synthetic Peanut control sequences, inner sequence
ccgtaccgaccctatcaagtgcagcatg

SEQ ID NO: 36792 - DNA, 28 bp, Artificial Sequence
  Description of Artificial Sequence: Synthetic Peanut control sequences, inner sequence
ggccgcagctgacctagcatgtgtgtca

SEQ ID NO: 36793 - DNA, 30 bp, Artificial Sequence; identical to SEQ ID NO: 32023
  Description of Artificial Sequence: Synthetic Peanut control sequences, inner sequence

SEQ ID NO: 36794 - DNA, 30 bp, Artificial Sequence
  Description of Artificial Sequence: Synthetic Peanut control sequences, inner sequence
gtcgcgatactgaccttcgagtgcgtgatg

SEQ ID NO: 36795 - DNA, 30 bp, Artificial Sequence; identical to SEQ ID NO: 8579
  Description of Artificial Sequence: Synthetic Peanut control sequences, inner sequence

SEQ ID NO: 36796 - DNA, 30 bp, Artificial Sequence; identical to SEQ ID NO: 8949
  Description of Artificial Sequence: Synthetic Peanut control sequences, inner sequence

SEQ ID NO: 36797 - DNA, 30 bp, Artificial Sequence
  Description of Artificial Sequence: Synthetic Peanut control sequences, inner sequence
gcacgactcgcaccctatcatggggccatg

SEQ ID NO: 36798 - DNA, 30 bp, Artificial Sequence
  Description of Artificial Sequence: Synthetic Peanut control sequences, inner sequence
ggaccgagcttacgtacgagtgggtgtgga

SEQ ID NO: 36799 - DNA, 30 bp, Artificial Sequence
  Description of Artificial Sequence: Synthetic Peanut control sequences, inner sequence
ccgactcgccctacatgtgggtacgtcgtg

SEQ ID NO: 36800 - DNA, 30 bp, Artificial Sequence
  Description of Artificial Sequence: Synthetic Peanut control sequences, inner sequence
gtcacgagcgtaccgtcatggggtgatgga

SEQ ID NO: 36801 - DNA, 30 bp, Artificial Sequence; identical to SEQ ID NO: 863
  Description of Artificial Sequence: Synthetic Peanut control sequences, inner sequence

SEQ ID NO: 36802 - DNA, 30 bp, Artificial Sequence; identical to SEQ ID NO: 256
  Description of Artificial Sequence: Synthetic Peanut control sequences, inner sequence

SEQ ID NO: 36803 - DNA, 30 bp, Artificial Sequence; identical to SEQ ID NO: 601
  Description of Artificial Sequence: Synthetic Peanut control sequences, inner sequence

SEQ ID NO: 36804 - DNA, 30 bp, Artificial Sequence
  Description of Artificial Sequence: Synthetic Peanut control sequences, inner sequence
catgtggccactatgccctatcatgcggtc

SEQ ID NO: 36805 - DNA, 30 bp, Artificial Sequence
  Description of Artificial Sequence: Synthetic Peanut control sequences, inner sequence
gtgctgcactgccctacacgtgggtatgga

SEQ ID NO: 36806 - DNA, 30 bp, Artificial Sequence
  Description of Artificial Sequence: Synthetic Peanut control sequences, inner sequence
ttgccgatcgaccctatcaagtgcagcatg

SEQ ID NO: 36807 - DNA, 30 bp, Artificial Sequence; identical to SEQ ID NO: 12821
  Description of Artificial Sequence: Synthetic Peanut control sequences, inner sequence

SEQ ID NO: 36808 - DNA, 30 bp, Artificial Sequence; identical to SEQ ID NO: 20478
  Description of Artificial Sequence: Synthetic Peanut control sequences, inner sequence

SEQ ID NO: 36809 - DNA, 30 bp, Artificial Sequence; identical to SEQ ID NO: 953
  Description of Artificial Sequence: Synthetic Peanut control sequences, inner sequence

SEQ ID NO: 36810 - DNA, 30 bp, Artificial Sequence; identical to SEQ ID NO: 8964
  Description of Artificial Sequence: Synthetic Peanut control sequences, inner sequence

SEQ ID NO: 36811 - DNA, 30 bp, Artificial Sequence; identical to SEQ ID NO: 937
  Description of Artificial Sequence: Synthetic Peanut control sequences, inner sequence

SEQ ID NO: 36812 - DNA, 30 bp, Artificial Sequence; identical to SEQ ID NO: 4979
  Description of Artificial Sequence: Synthetic Peanut control sequences, inner sequence

SEQ ID NO: 36813 - DNA, 30 bp, Artificial Sequence; identical to SEQ ID NO: 703
  Description of Artificial Sequence: Synthetic Peanut control sequences, inner sequence

SEQ ID NO: 36814 - DNA, 30 bp, Artificial Sequence
  Description of Artificial Sequence: Synthetic Peanut control sequences, inner sequence
tggccgcactgaccgttcaagtgtcgtgga

SEQ ID NO: 36815 - DNA, 30 bp, Artificial Sequence; identical to SEQ ID NO: 20312
  Description of Artificial Sequence: Synthetic Peanut control sequences, inner sequence

SEQ ID NO: 36816 - DNA, 30 bp, Artificial Sequence; identical to SEQ ID NO: 4823
  Description of Artificial Sequence: Synthetic Peanut control sequences, inner sequence

SEQ ID NO: 36817 - DNA, 30 bp, Artificial Sequence; identical to SEQ ID NO: 137
  Description of Artificial Sequence: Synthetic Peanut control sequences, inner sequence

SEQ ID NO: 36818 - DNA, 30 bp, Artificial Sequence; identical to SEQ ID NO: 644
  Description of Artificial Sequence: Synthetic Peanut control sequences, inner sequence

SEQ ID NO: 36819 - DNA, 30 bp, Artificial Sequence
  Description of Artificial Sequence: Synthetic Peanut control sequences, inner sequence
tggacgatcgaccctatcaagtgcagcatg

SEQ ID NO: 36820 - DNA, 30 bp, Artificial Sequence
  Description of Artificial Sequence: Synthetic Peanut control sequences, inner sequence
tggccgatcgatcctatcaagtgcagcatg

SEQ ID NO: 36821 - DNA, 30 bp, Artificial Sequence
  Description of Artificial Sequence: Synthetic Peanut control sequences, inner sequence
ggacgcgatctggcagtgagcatgcactcg

SEQ ID NO: 36822 - DNA, 30 bp, Artificial Sequence; identical to SEQ ID NO: 12936
  Description of Artificial Sequence: Synthetic Peanut control sequences, inner sequence

SEQ ID NO: 36823 - DNA, 30 bp, Artificial Sequence; identical to SEQ ID NO: 195
  Description of Artificial Sequence: Synthetic Peanut control sequences, inner sequence

SEQ ID NO: 36824 - DNA, 30 bp, Artificial Sequence; identical to SEQ ID NO: 4364
  Description of Artificial Sequence: Synthetic Peanut control sequences, inner sequence

SEQ ID NO: 36825 - DNA, 30 bp, Artificial Sequence; identical to SEQ ID NO: 177
  Description of Artificial Sequence: Synthetic Peanut control sequences, inner sequence

SEQ ID NO: 36826 - DNA, 30 bp, Artificial Sequence; identical to SEQ ID NO: 662
  Description of Artificial Sequence: Synthetic Peanut control sequences, inner sequence

SEQ ID NO: 36827 - DNA, 30 bp, Artificial Sequence
  Description of Artificial Sequence: Synthetic Peanut control sequences, inner sequence
gtcattccgcatcctacacgtgggaacgta

SEQ ID NO: 36828 - DNA, 30 bp, Artificial Sequence; identical to SEQ ID NO: 326
  Description of Artificial Sequence: Synthetic Peanut control sequences, inner sequence

SEQ ID NO: 36829 - DNA, 30 bp, Artificial Sequence; identical to SEQ ID NO: 236
  Description of Artificial Sequence: Synthetic Peanut control sequences, inner sequence

SEQ ID NO: 36830 - DNA, 30 bp, Artificial Sequence
  Description of Artificial Sequence: Synthetic Peanut control sequences, inner sequence
ggacatcgctaacctacaatgtgcgtcgtg

SEQ ID NO: 36831 - DNA, 30 bp, Artificial Sequence; identical to SEQ ID NO: 20777
  Description of Artificial Sequence: Synthetic Peanut control sequences, inner sequence

SEQ ID NO: 36832 - DNA, 30 bp, Artificial Sequence; identical to SEQ ID NO: 72
  Description of Artificial Sequence: Synthetic Peanut control sequences, inner sequence

SEQ ID NO: 36833 - DNA, 30 bp, Artificial Sequence; identical to SEQ ID NO: 727
  Description of Artificial Sequence: Synthetic Peanut control sequences, inner sequence

SEQ ID NO: 36834 - DNA, 30 bp, Artificial Sequence; identical to SEQ ID NO: 775
  Description of Artificial Sequence: Synthetic Peanut control sequences, inner sequence

SEQ ID NO: 36835 - DNA, 30 bp, Artificial Sequence; identical to SEQ ID NO: 8889
  Description of Artificial Sequence: Synthetic Peanut control sequences, inner sequence

SEQ ID NO: 36836 - DNA, 31 bp, Artificial Sequence
  Description of Artificial Sequence: Synthetic Peanut control sequences, inner sequence
ccgaacgaaccgcacgtggactgagcgacgt

SEQ ID NO: 36837 - DNA, 30 bp, Artificial Sequence; identical to SEQ ID NO: 4935
  Description of Artificial Sequence: Synthetic Peanut control sequences, inner sequence

SEQ ID NO: 36838 - DNA, 30 bp, Artificial Sequence; identical to SEQ ID NO: 8869
  Description of Artificial Sequence: Synthetic Peanut control sequences, inner sequence

SEQ ID NO: 36839 - DNA, 30 bp, Artificial Sequence
  Description of Artificial Sequence: Synthetic Peanut control sequences, inner sequence
ggcctgatcgaacctagagaggggcgtgga

SEQ ID NO: 36840 - DNA, 30 bp, Artificial Sequence; identical to SEQ ID NO: 4722
  Description of Artificial Sequence: Synthetic Peanut control sequences, inner sequence

SEQ ID NO: 36841 - DNA, 30 bp, Artificial Sequence; identical to SEQ ID NO: 551
  Description of Artificial Sequence: Synthetic Peanut control sequences, inner sequence

SEQ ID NO: 36842 - DNA, 30 bp, Artificial Sequence; identical to SEQ ID NO: 20327
  Description of Artificial Sequence: Synthetic Peanut control sequences, inner sequence

SEQ ID NO: 36843 - DNA, 30 bp, Artificial Sequence; identical to SEQ ID NO: 20227
  Description of Artificial Sequence: Synthetic Peanut control sequences, inner sequence

SEQ ID NO: 36844 - DNA, 30 bp, Artificial Sequence
  Description of Artificial Sequence: Synthetic Peanut control sequences, inner sequence
ggacggatcgaacctacaagttgtcgtggt

SEQ ID NO: 36845 - DNA, 29 bp, Artificial Sequence
  Description of Artificial Sequence: Synthetic Peanut control sequences, inner sequence
ggcatgcgatggatgtggtggtgctgtca

SEQ ID NO: 36846 - DNA, 30 bp, Artificial Sequence; identical to SEQ ID NO: 28577
  Description of Artificial Sequence: Synthetic Peanut control sequences, inner sequence

SEQ ID NO: 36847 - DNA, 30 bp, Artificial Sequence; identical to SEQ ID NO: 32009
  Description of Artificial Sequence: Synthetic Peanut control sequences, inner sequence

SEQ ID NO: 36848 - DNA, 30 bp, Artificial Sequence; identical to SEQ ID NO: 8767
  Description of Artificial Sequence: Synthetic Peanut control sequences, inner sequence

SEQ ID NO: 36849 - DNA, 30 bp, Artificial Sequence; identical to SEQ ID NO: 20331
  Description of Artificial Sequence: Synthetic Peanut control sequences, inner sequence

SEQ ID NO: 36850 - DNA, 30 bp, Artificial Sequence; identical to SEQ ID NO: 8627
  Description of Artificial Sequence: Synthetic Peanut control sequences, inner sequence

SEQ ID NO: 36851 - DNA, 30 bp, Artificial Sequence
  Description of Artificial Sequence: Synthetic Peanut control sequences, inner sequence
gtcacacgctctgcccttatcacgtggaca

SEQ ID NO: 36852 - DNA, 30 bp, Artificial Sequence; identical to SEQ ID NO: 580
  Description of Artificial Sequence: Synthetic Peanut control sequences, inner sequence

SEQ ID NO: 36853 - DNA, 30 bp, Artificial Sequence; identical to SEQ ID NO: 906
  Description of Artificial Sequence: Synthetic Peanut control sequences, inner sequence

SEQ ID NO: 36854 - DNA, 30 bp, Artificial Sequence; identical to SEQ ID NO: 4740
  Description of Artificial Sequence: Synthetic Peanut control sequences, inner sequence

SEQ ID NO: 36855 - DNA, 30 bp, Artificial Sequence; identical to SEQ ID NO: 4579
  Description of Artificial Sequence: Synthetic Peanut control sequences, inner sequence

SEQ ID NO: 36856 - DNA, 30 bp, Artificial Sequence; identical to SEQ ID NO: 8936
  Description of Artificial Sequence: Synthetic Peanut control sequences, inner sequence

SEQ ID NO: 36857 - DNA, 30 bp, Artificial Sequence; identical to SEQ ID NO: 962
  Description of Artificial Sequence: Synthetic Peanut control sequences, inner sequence

SEQ ID NO: 36858 - DNA, 30 bp, Artificial Sequence; identical to SEQ ID NO: 28652
  Description of Artificial Sequence: Synthetic Peanut control sequences, inner sequence

SEQ ID NO: 36859 - DNA, 30 bp, Artificial Sequence; identical to SEQ ID NO: 4449
  Description of Artificial Sequence: Synthetic Peanut control sequences, inner sequence

SEQ ID NO: 36860 - DNA, 30 bp, Artificial Sequence; identical to SEQ ID NO: 8798
  Description of Artificial Sequence: Synthetic Peanut control sequences, inner sequence

SEQ ID NO: 36861 - DNA, 30 bp, Artificial Sequence
  Description of Artificial Sequence: Synthetic Peanut control sequences, inner sequence
ggccgaacgaaccttggtcagctaggcagt

SEQ ID NO: 36862 - DNA, 30 bp, Artificial Sequence; identical to SEQ ID NO: 556
  Description of Artificial Sequence: Synthetic Peanut control sequences, inner sequence

SEQ ID NO: 36863 - DNA, 30 bp, Artificial Sequence; identical to SEQ ID NO: 991
  Description of Artificial Sequence: Synthetic Peanut control sequences, inner sequence

SEQ ID NO: 36864 - DNA, 30 bp, Artificial Sequence; identical to SEQ ID NO: 619
  Description of Artificial Sequence: Synthetic Peanut control sequences, inner sequence

SEQ ID NO: 36865 - DNA, 30 bp, Artificial Sequence; identical to SEQ ID NO: 621
  Description of Artificial Sequence: Synthetic Peanut control sequences, inner sequence

SEQ ID NO: 36866 - DNA, 30 bp, Artificial Sequence; identical to SEQ ID NO: 75
  Description of Artificial Sequence: Synthetic Peanut control sequences, inner sequence

SEQ ID NO: 36867 - DNA, 27 bp, Artificial Sequence
  Description of Artificial Sequence: Synthetic Peanut control sequences, inner sequence
ccgatcgcacgtcaaggcaggcttgga

SEQ ID NO: 36868 - DNA, 30 bp, Artificial Sequence; identical to SEQ ID NO: 4782
  Description of Artificial Sequence: Synthetic Peanut control sequences, inner sequence

SEQ ID NO: 36869 - DNA, 30 bp, Artificial Sequence
  Description of Artificial Sequence: Synthetic Peanut control sequences, inner sequence
gtacacagcgcaccctatcgagcttggtca

SEQ ID NO: 36870 - DNA, 30 bp, Artificial Sequence; identical to SEQ ID NO: 653
  Description of Artificial Sequence: Synthetic Peanut control sequences, inner sequence

SEQ ID NO: 36871 - DNA, 30 bp, Artificial Sequence; identical to SEQ ID NO: 12986
  Description of Artificial Sequence: Synthetic Peanut control sequences, inner sequence

SEQ ID NO: 36872 - DNA, 30 bp, Artificial Sequence; identical to SEQ ID NO: 322
  Description of Artificial Sequence: Synthetic Peanut control sequences, inner sequence

SEQ ID NO: 36873 - DNA, 30 bp, Artificial Sequence
  Description of Artificial Sequence: Synthetic Peanut control sequences, inner sequence
ggcctgatcgaacctagagagtggcgtggt

SEQ ID NO: 36874 - DNA, 30 bp, Artificial Sequence; identical to SEQ ID NO: 12866
  Description of Artificial Sequence: Synthetic Peanut control sequences, inner sequence

SEQ ID NO: 36875 - DNA, 30 bp, Artificial Sequence; identical to SEQ ID NO: 534
  Description of Artificial Sequence: Synthetic Peanut control sequences, inner sequence

SEQ ID NO: 36876 - DNA, 30 bp, Artificial Sequence
  Description of Artificial Sequence: Synthetic Peanut control sequences, inner sequence
ggccagatcgaccctatcaagtgcagcatg

SEQ ID NO: 36877 - DNA, 30 bp, Artificial Sequence
  Description of Artificial Sequence: Synthetic Peanut control sequences, inner sequence
ggcctgatcgaccctatcaagtgcagcatg

SEQ ID NO: 36878 - DNA, 30 bp, Artificial Sequence
  Description of Artificial Sequence: Synthetic Peanut control sequences, inner sequence
ggatgcactcaaccgatccaaggtgcgtca

SEQ ID NO: 36879 - DNA, 30 bp, Artificial Sequence
  Description of Artificial Sequence: Synthetic Peanut control sequences, inner sequence
ggacgcaacttcactcaagtgtggcgtgga

SEQ ID NO: 36880 - DNA, 30 bp, Artificial Sequence; identical to SEQ ID NO: 4642
  Description of Artificial Sequence: Synthetic Peanut control sequences, inner sequence

SEQ ID NO: 36881 - DNA, 30 bp, Artificial Sequence; identical to SEQ ID NO: 8837
  Description of Artificial Sequence: Synthetic Peanut control sequences, inner sequence

SEQ ID NO: 36882 - DNA, 30 bp, Artificial Sequence; identical to SEQ ID NO: 12853
  Description of Artificial Sequence: Synthetic Peanut control sequences, inner sequence

SEQ ID NO: 36883 - DNA, 30 bp, Artificial Sequence; identical to SEQ ID NO: 661
  Description of Artificial Sequence: Synthetic Peanut control sequences, inner sequence

SEQ ID NO: 36884 - DNA, 29 bp, Artificial Sequence
  Description of Artificial Sequence: Synthetic Peanut control sequences, inner sequence
gtgcgcaacgaccttcacgttgtcgtgta

SEQ ID NO: 36885 - DNA, 27 bp, Artificial Sequence
  Description of Artificial Sequence: Synthetic Peanut control sequences, inner sequence
ccatcgcgtcactatcatgaggccatg

SEQ ID NO: 36886 - DNA, 30 bp, Artificial Sequence; identical to SEQ ID NO: 20458
  Description of Artificial Sequence: Synthetic Peanut control sequences, inner sequence

SEQ ID NO: 36887 - DNA, 30 bp, Artificial Sequence; identical to SEQ ID NO: 4938
  Description of Artificial Sequence: Synthetic Peanut control sequences, inner sequence

SEQ ID NO: 36888 - DNA, 30 bp, Artificial Sequence; identical to SEQ ID NO: 4933
  Description of Artificial Sequence: Synthetic Peanut control sequences, inner sequence

SEQ ID NO: 36889 - DNA, 30 bp, Artificial Sequence
  Description of Artificial Sequence: Synthetic Peanut control sequences, inner sequence
ggacggatcgaccctatcaagtgcagcatg

SEQ ID NO: 36890 - DNA, 30 bp, Artificial Sequence; identical to SEQ ID NO: 20462
  Description of Artificial Sequence: Synthetic Peanut control sequences, inner sequence

SEQ ID NO: 36891 - DNA, 30 bp, Artificial Sequence; identical to SEQ ID NO: 8993
  Description of Artificial Sequence: Synthetic Peanut control sequences, inner sequence

SEQ ID NO: 36892 - DNA, 30 bp, Artificial Sequence; identical to SEQ ID NO: 4998
  Description of Artificial Sequence: Synthetic Peanut control sequences, inner sequence

SEQ ID NO: 36893 - DNA, 30 bp, Artificial Sequence; identical to SEQ ID NO: 8927
  Description of Artificial Sequence: Synthetic Peanut control sequences, inner sequence

SEQ ID NO: 36894 - DNA, 30 bp, Artificial Sequence; identical to SEQ ID NO: 4918
  Description of Artificial Sequence: Synthetic Peanut control sequences, inner sequence

SEQ ID NO: 36895 - DNA, 30 bp, Artificial Sequence; identical to SEQ ID NO: 12803
  Description of Artificial Sequence: Synthetic Peanut control sequences, inner sequence

SEQ ID NO: 36896 - DNA, 26 bp, Artificial Sequence
  Description of Artificial Sequence: Synthetic Peanut control sequences, inner sequence
ggacgcatcgccccttcgagtggaca

SEQ ID NO: 36897 - DNA, 30 bp, Artificial Sequence; identical to SEQ ID NO: 12795
  Description of Artificial Sequence: Synthetic Peanut control sequences, inner sequence

SEQ ID NO: 36898 - DNA, 30 bp, Artificial Sequence; identical to SEQ ID NO: 4801
  Description of Artificial Sequence: Synthetic Peanut control sequences, inner sequence

SEQ ID NO: 36899 - DNA, 30 bp, Artificial Sequence; identical to SEQ ID NO: 32584
  Description of Artificial Sequence: Synthetic Peanut control sequences, inner sequence

SEQ ID NO: 36900 - DNA, 31 bp, Artificial Sequence; identical to SEQ ID NO: 28816
  Description of Artificial Sequence: Synthetic Peanut control sequences, inner sequence

SEQ ID NO: 36901 - DNA, 30 bp, Artificial Sequence
  Description of Artificial Sequence: Synthetic Peanut control sequences, inner sequence
ccgcctcgacctggctcatgtggccgtgtg

SEQ ID NO: 36902 - DNA, 30 bp, Artificial Sequence; identical to SEQ ID NO: 224
  Description of Artificial Sequence: Synthetic Peanut control sequences, inner sequence

SEQ ID NO: 36903 - DNA, 30 bp, Artificial Sequence; identical to SEQ ID NO: 4692
  Description of Artificial Sequence: Synthetic Peanut control sequences, inner sequence

SEQ ID NO: 36904 - DNA, 30 bp, Artificial Sequence
  Description of Artificial Sequence: Synthetic Peanut control sequences, inner sequence
gtgcaagcgagcctaccttgacgtgcgtca

SEQ ID NO: 36905 - DNA, 30 bp, Artificial Sequence; identical to SEQ ID NO: 20580
  Description of Artificial Sequence: Synthetic Peanut control sequences, inner sequence

SEQ ID NO: 36906 - DNA, 29 bp, Artificial Sequence
  Description of Artificial Sequence: Synthetic Peanut control sequences, inner sequence
gcactggctgacctacacgtgggcacgta

SEQ ID NO: 36907 - DNA, 30 bp, Artificial Sequence
  Description of Artificial Sequence: Synthetic Peanut control sequences, inner sequence
gtgtccgagctgggtgtggtcctgcttggc

SEQ ID NO: 36908 - DNA, 30 bp, Artificial Sequence
  Description of Artificial Sequence: Synthetic Peanut control sequences, inner sequence
gcacctgaacgccactcaagttgccgtgga

SEQ ID NO: 36909 - DNA, 30 bp, Artificial Sequence
  Description of Artificial Sequence: Synthetic Peanut control sequences, inner sequence
tgtcctgacgtgccctgacatgctgcgtca

SEQ ID NO: 36910 - DNA, 30 bp, Artificial Sequence; identical to SEQ ID NO: 616
  Description of Artificial Sequence: Synthetic Peanut control sequences, inner sequence

SEQ ID NO: 36911 - DNA, 30 bp, Artificial Sequence; identical to SEQ ID NO: 20817
  Description of Artificial Sequence: Synthetic Peanut control sequences, inner sequence

SEQ ID NO: 36912 - DNA, 30 bp, Artificial Sequence; identical to SEQ ID NO: 8935
  Description of Artificial Sequence: Synthetic Peanut control sequences, inner sequence

SEQ ID NO: 36913 - DNA, 30 bp, Artificial Sequence; identical to SEQ ID NO: 206
  Description of Artificial Sequence: Synthetic Peanut control sequences, inner sequence

SEQ ID NO: 36914 - DNA, 31 bp, Artificial Sequence
  Description of Artificial Sequence: Synthetic Peanut control sequences, inner sequence
gtgcgtgcgatctgaccgtgcaagttgggca

SEQ ID NO: 36915 - DNA, 30 bp, Artificial Sequence; identical to SEQ ID NO: 28844
  Description of Artificial Sequence: Synthetic Peanut control sequences, inner sequence

SEQ ID NO: 36916 - DNA, 30 bp, Artificial Sequence; identical to SEQ ID NO: 8907
  Description of Artificial Sequence: Synthetic Peanut control sequences, inner sequence

SEQ ID NO: 36917 - DNA, 30 bp, Artificial Sequence; identical to SEQ ID NO: 152
  Description of Artificial Sequence: Synthetic Peanut control sequences, inner sequence

SEQ ID NO: 36918 - DNA, 30 bp, Artificial Sequence; identical to SEQ ID NO: 4857
  Description of Artificial Sequence: Synthetic Peanut control sequences, inner sequence

SEQ ID NO: 36919 - DNA, 30 bp, Artificial Sequence; identical to SEQ ID NO: 20324
  Description of Artificial Sequence: Synthetic Peanut control sequences, inner sequence

SEQ ID NO: 36920 - DNA, 30 bp, Artificial Sequence
  Description of Artificial Sequence: Synthetic Peanut control sequences, inner sequence
tggccgatcgaacctatcaagtgcagcatg

SEQ ID NO: 36921 - DNA, 30 bp, Artificial Sequence; identical to SEQ ID NO: 4969
  Description of Artificial Sequence: Synthetic Peanut control sequences, inner sequence

SEQ ID NO: 36922 - DNA, 30 bp, Artificial Sequence; identical to SEQ ID NO: 20427
  Description of Artificial Sequence: Synthetic Peanut control sequences, inner sequence

SEQ ID NO: 36923 - DNA, 30 bp, Artificial Sequence
  Description of Artificial Sequence: Synthetic Peanut control sequences, inner sequence
ggacgaacgtaacgtgagagtgtgcatgga

SEQ ID NO: 36924 - DNA, 30 bp, Artificial Sequence
  Description of Artificial Sequence: Synthetic Peanut control sequences, inner sequence
gcaccgtacgcttgacctacacgtggctca

SEQ ID NO: 36925 - DNA, 30 bp, Artificial Sequence; identical to SEQ ID NO: 4419
  Description of Artificial Sequence: Synthetic Peanut control sequences, inner sequence

SEQ ID NO: 36926 - DNA, 30 bp, Artificial Sequence; identical to SEQ ID NO: 874
  Description of Artificial Sequence: Synthetic Peanut control sequences, inner sequence

SEQ ID NO: 36927 - DNA, 30 bp, Artificial Sequence
  Description of Artificial Sequence: Synthetic Peanut control sequences, inner sequence
ccgctcgatgaacgtgaatgggcatgcgtc

SEQ ID NO: 36928 - DNA, 30 bp, Artificial Sequence
  Description of Artificial Sequence: Synthetic Peanut control sequences, inner sequence
gtcgtgactggctagctggacatgcactgt

SEQ ID NO: 36929 - DNA, 30 bp, Artificial Sequence; identical to SEQ ID NO: 8991
  Description of Artificial Sequence: Synthetic Peanut control sequences, inner sequence

SEQ ID NO: 36930 - DNA, 30 bp, Artificial Sequence; identical to SEQ ID NO: 20879
  Description of Artificial Sequence: Synthetic Peanut control sequences, inner sequence

SEQ ID NO: 36931 - DNA, 30 bp, Artificial Sequence; identical to SEQ ID NO: 8752
  Description of Artificial Sequence: Synthetic Peanut control sequences, inner sequence

SEQ ID NO: 36932 - DNA, 30 bp, Artificial Sequence
  Description of Artificial Sequence: Synthetic Peanut control sequences, inner sequence
tggccgatcgaccctgtcaagtgcagcatg

SEQ ID NO: 36933 - DNA, 27 bp, Artificial Sequence
  Description of Artificial Sequence: Synthetic Peanut control sequences, inner sequence
tggccgatcgacactagcaagtgtgca

SEQ ID NO: 36934 - DNA, 30 bp, Artificial Sequence; identical to SEQ ID NO: 4376
  Description of Artificial Sequence: Synthetic Peanut control sequences, inner sequence

SEQ ID NO: 36935 - DNA, 30 bp, Artificial Sequence; identical to SEQ ID NO: 749
  Description of Artificial Sequence: Synthetic Peanut control sequences, inner sequence

SEQ ID NO: 36936 - DNA, 30 bp, Artificial Sequence
  Description of Artificial Sequence: Synthetic Peanut control sequences, inner sequence
gggccgatcgaccctatcaagtgcagcatg

SEQ ID NO: 36937 - DNA, 30 bp, Artificial Sequence; identical to SEQ ID NO: 8872
  Description of Artificial Sequence: Synthetic Peanut control sequences, inner sequence

SEQ ID NO: 36938 - DNA, 30 bp, Artificial Sequence; identical to SEQ ID NO: 827
  Description of Artificial Sequence: Synthetic Peanut control sequences, inner sequence

SEQ ID NO: 36939 - DNA, 30 bp, Artificial Sequence
  Description of Artificial Sequence: Synthetic Peanut control sequences, inner sequence
ccgatctggcgtagctggaacatgtgcgtg

SEQ ID NO: 36940 - DNA, 30 bp, Artificial Sequence; identical to SEQ ID NO: 481
  Description of Artificial Sequence: Synthetic Peanut control sequences, inner sequence

SEQ ID NO: 36941 - DNA, 30 bp, Artificial Sequence
  Description of Artificial Sequence: Synthetic Peanut control sequences, inner sequence
gtccgtgcttgaccgtagagtgtgcgtgta

SEQ ID NO: 36942 - DNA, 30 bp, Artificial Sequence
  Description of Artificial Sequence: Synthetic Peanut control sequences, inner sequence
ccgatgctgcccgtcatgtgtggcgatgtg

SEQ ID NO: 36943 - DNA, 30 bp, Artificial Sequence; identical to SEQ ID NO: 28917
  Description of Artificial Sequence: Synthetic Peanut control sequences, inner sequence

SEQ ID NO: 36944 - DNA, 30 bp, Artificial Sequence; identical to SEQ ID NO: 8801
  Description of Artificial Sequence: Synthetic Peanut control sequences, inner sequence

SEQ ID NO: 36945 - DNA, 26 bp, Artificial Sequence
  Description of Artificial Sequence: Synthetic Peanut control sequences, inner sequence
ggcacaaacggaccgacaagtgcgca

SEQ ID NO: 36946 - DNA, 30 bp, Artificial Sequence
  Description of Artificial Sequence: Synthetic Peanut control sequences, inner sequence
tggctgatcgaccctatcaagtgcagcatg

SEQ ID NO: 36947 - DNA, 30 bp, Artificial Sequence; identical to SEQ ID NO: 396
  Description of Artificial Sequence: Synthetic Peanut control sequences, inner sequence

SEQ ID NO: 36948 - DNA, 30 bp, Artificial Sequence; identical to SEQ ID NO: 28879
  Description of Artificial Sequence: Synthetic Peanut control sequences, inner sequence

SEQ ID NO: 36949 - DNA, 35 bp, Artificial Sequence
  Description of Artificial Sequence: Synthetic Peanut control sequences, inner sequence
gcattggacgatcgtgccctacacgtgggaatgga

SEQ ID NO: 36950 - DNA, 30 bp, Artificial Sequence; identical to SEQ ID NO: 32175
  Description of Artificial Sequence: Synthetic Peanut control sequences, inner sequence

SEQ ID NO: 36951 - DNA, 30 bp, Artificial Sequence; identical to SEQ ID NO: 20424
  Description of Artificial Sequence: Synthetic Peanut control sequences, inner sequence

SEQ ID NO: 36952 - DNA, 30 bp, Artificial Sequence; identical to SEQ ID NO: 4810
  Description of Artificial Sequence: Synthetic Peanut control sequences, inner sequence

SEQ ID NO: 36953 - DNA, 30 bp, Artificial Sequence; identical to SEQ ID NO: 32268
  Description of Artificial Sequence: Synthetic Peanut control sequences, inner sequence

SEQ ID NO: 36954 - DNA, 31 bp, Artificial Sequence
  Description of Artificial Sequence: Synthetic Peanut control sequences, inner sequence
tggccgaacgaccgatcgagtggcgcatgga

SEQ ID NO: 36955 - DNA, 30 bp, Artificial Sequence; identical to SEQ ID NO: 8891
  Description of Artificial Sequence: Synthetic Peanut control sequences, inner sequence

SEQ ID NO: 36956 - DNA, 30 bp, Artificial Sequence; identical to SEQ ID NO: 20623
  Description of Artificial Sequence: Synthetic Peanut control sequences, inner sequence

SEQ ID NO: 36957 - DNA, 30 bp, Artificial Sequence; identical to SEQ ID NO: 16962
  Description of Artificial Sequence: Synthetic Peanut control sequences, inner sequence

SEQ ID NO: 36958 - DNA, 30 bp, Artificial Sequence; identical to SEQ ID NO: 32384
  Description of Artificial Sequence: Synthetic Peanut control sequences, inner sequence

SEQ ID NO: 36959 - DNA, 31 bp, Artificial Sequence; identical to SEQ ID NO: 971
  Description of Artificial Sequence: Synthetic Peanut control sequences, inner sequence

SEQ ID NO: 36960 - DNA, 30 bp, Artificial Sequence; identical to SEQ ID NO: 12914
  Description of Artificial Sequence: Synthetic Peanut control sequences, inner sequence

SEQ ID NO: 36961 - DNA, 30 bp, Artificial Sequence
  Description of Artificial Sequence: Synthetic Peanut control sequences, inner sequence
ggacgacgcgagccctacatgtgtcgtgga

SEQ ID NO: 36962 - DNA, 28 bp, Artificial Sequence
  Description of Artificial Sequence: Synthetic Peanut control sequences, inner sequence
ggacgcagcttgcctactggtggtcacg

SEQ ID NO: 36963 - DNA, 35 bp, Artificial Sequence
  Description of Artificial Sequence: Synthetic Peanut control sequences, inner sequence
aatgcggcatgaacggacctacacgtgggcacgta

SEQ ID NO: 36964 - DNA, 30 bp, Artificial Sequence; identical to SEQ ID NO: 12428
  Description of Artificial Sequence: Synthetic Peanut control sequences, inner sequence

SEQ ID NO: 36965 - DNA, 30 bp, Artificial Sequence; identical to SEQ ID NO: 972
  Description of Artificial Sequence: Synthetic Peanut control sequences, inner sequence

SEQ ID NO: 36966 - DNA, 30 bp, Artificial Sequence
  Description of Artificial Sequence: Synthetic Peanut control sequences, inner sequence
ggccaatcatcccgtcaagtgaggtgtgga

SEQ ID NO: 36967 - DNA, 30 bp, Artificial Sequence
  Description of Artificial Sequence: Synthetic Peanut control sequences, inner sequence
ggcctgatcgaacctagagagtggcgtggc

SEQ ID NO: 36968 - DNA, 30 bp, Artificial Sequence
  Description of Artificial Sequence: Synthetic Peanut control sequences, inner sequence
tgcatgtgccgtctcgctcccggtgtggca

SEQ ID NO: 36969 - DNA, 30 bp, Artificial Sequence; identical to SEQ ID NO: 375
  Description of Artificial Sequence: Synthetic Peanut control sequences, inner sequence

SEQ ID NO: 36970 - DNA, 30 bp, Artificial Sequence; identical to SEQ ID NO: 12945
  Description of Artificial Sequence: Synthetic Peanut control sequences, inner sequence

SEQ ID NO: 36971 - DNA, 30 bp, Artificial Sequence; identical to SEQ ID NO: 32006
  Description of Artificial Sequence: Synthetic Peanut control sequences, inner sequence

SEQ ID NO: 36972 - DNA, 30 bp, Artificial Sequence; identical to SEQ ID NO: 20415
  Description of Artificial Sequence: Synthetic Peanut control sequences, inner sequence

SEQ ID NO: 36973 - DNA, 30 bp, Artificial Sequence; identical to SEQ ID NO: 4405
  Description of Artificial Sequence: Synthetic Peanut control sequences, inner sequence

SEQ ID NO: 36974 - DNA, 30 bp, Artificial Sequence
  Description of Artificial Sequence: Synthetic Peanut control sequences, inner sequence
gcttcgatggatgctgggcaggcacgcagt

SEQ ID NO: 36975 - DNA, 30 bp, Artificial Sequence; identical to SEQ ID NO: 4631
  Description of Artificial Sequence: Synthetic Peanut control sequences, inner sequence

SEQ ID NO: 36976 - DNA, 30 bp, Artificial Sequence; identical to SEQ ID NO: 773
  Description of Artificial Sequence: Synthetic Peanut control sequences, inner sequence

SEQ ID NO: 36977 - DNA, 30 bp, Artificial Sequence; identical to SEQ ID NO: 486
  Description of Artificial Sequence: Synthetic Peanut control sequences, inner sequence

SEQ ID NO: 36978 - DNA, 30 bp, Artificial Sequence; identical to SEQ ID NO: 20803
  Description of Artificial Sequence: Synthetic Peanut control sequences, inner sequence

SEQ ID NO: 36979 - DNA, 29 bp, Artificial Sequence
  Description of Artificial Sequence: Synthetic Peanut control sequences, inner sequence
gaccgaacgtaccggtggcatgcacgcca

SEQ ID NO: 36980 - DNA, 30 bp, Artificial Sequence; identical to SEQ ID NO: 8953
  Description of Artificial Sequence: Synthetic Peanut control sequences, inner sequence

SEQ ID NO: 36981 - DNA, 30 bp, Artificial Sequence; identical to SEQ ID NO: 20882
  Description of Artificial Sequence: Synthetic Peanut control sequences, inner sequence

SEQ ID NO: 36982 - DNA, 30 bp, Artificial Sequence
  Description of Artificial Sequence: Synthetic Peanut control sequences, inner sequence
tggccgatcgaccctatcaagttcagcatg

SEQ ID NO: 36983 - DNA, 30 bp, Artificial Sequence; identical to SEQ ID NO: 28957
  Description of Artificial Sequence: Synthetic Peanut control sequences, inner sequence

SEQ ID NO: 36984 - DNA, 30 bp, Artificial Sequence; identical to SEQ ID NO: 543
  Description of Artificial Sequence: Synthetic Peanut control sequences, inner sequence

SEQ ID NO: 36985 - DNA, 30 bp, Artificial Sequence; identical to SEQ ID NO: 8946
  Description of Artificial Sequence: Synthetic Peanut control sequences, inner sequence

SEQ ID NO: 36986 - DNA, 30 bp, Artificial Sequence
  Description of Artificial Sequence: Synthetic Peanut control sequences, inner sequence
gtcacgaaacggcaccttcatgtggacgtg

SEQ ID NO: 36987 - DNA, 30 bp, Artificial Sequence; identical to SEQ ID NO: 28485
  Description of Artificial Sequence: Synthetic Peanut control sequences, inner sequence

SEQ ID NO: 36988 - DNA, 30 bp, Artificial Sequence; identical to SEQ ID NO: 267
  Description of Artificial Sequence: Synthetic Peanut control sequences, inner sequence

SEQ ID NO: 36989 - DNA, 30 bp, Artificial Sequence; identical to SEQ ID NO: 892
  Description of Artificial Sequence: Synthetic Peanut control sequences, inner sequence

SEQ ID NO: 36990 - DNA, 30 bp, Artificial Sequence; identical to SEQ ID NO: 4761
  Description of Artificial Sequence: Synthetic Peanut control sequences, inner sequence

SEQ ID NO: 36991 - DNA, 30 bp, Artificial Sequence; identical to SEQ ID NO: 24872
  Description of Artificial Sequence: Synthetic Peanut control sequences, inner sequence

SEQ ID NO: 36992 - DNA, 30 bp, Artificial Sequence
  Description of Artificial Sequence: Synthetic Peanut control sequences, inner sequence
ggcatgcacgcaccctatcatgaggccatg

SEQ ID NO: 36993 - DNA, 30 bp, Artificial Sequence
  Description of Artificial Sequence: Synthetic Peanut control sequences, inner sequence
tggtcgatcgaccctatcaagtgcagcatg

SEQ ID NO: 36994 - DNA, 30 bp, Artificial Sequence; identical to SEQ ID NO: 8670
  Description of Artificial Sequence: Synthetic Peanut control sequences, inner sequence

SEQ ID NO: 36995 - DNA, 30 bp, Artificial Sequence; identical to SEQ ID NO: 20801
  Description of Artificial Sequence: Synthetic Peanut control sequences, inner sequence

SEQ ID NO: 36996 - DNA, 30 bp, Artificial Sequence
  Description of Artificial Sequence: Synthetic Peanut control sequences, inner sequence
ctcgacgagtaggcatgtcttctgtgtgca

SEQ ID NO: 36997 - DNA, 30 bp, Artificial Sequence; identical to SEQ ID NO: 608
  Description of Artificial Sequence: Synthetic Peanut control sequences, inner sequence

SEQ ID NO: 36998 - DNA, 30 bp, Artificial Sequence; identical to SEQ ID NO: 20530
  Description of Artificial Sequence: Synthetic Peanut control sequences, inner sequence

SEQ ID NO: 36999 - DNA, 30 bp, Artificial Sequence; identical to SEQ ID NO: 4721
  Description of Artificial Sequence: Synthetic Peanut control sequences, inner sequence

SEQ ID NO: 37000 - DNA, 30 bp, Artificial Sequence
  Description of Artificial Sequence: Synthetic Peanut control sequences, inner sequence
gacctggctcgaccttcaatgcgtcgtgga

SEQ ID NO: 37001 - DNA, 30 bp, Artificial Sequence
  Description of Artificial Sequence: Synthetic Peanut control sequences, inner sequence
ccgtcacgtacctatcacgtgtcatgctgc

SEQ ID NO: 37002 - DNA, 30 bp, Artificial Sequence; identical to SEQ ID NO: 20984
  Description of Artificial Sequence: Synthetic Peanut control sequences, inner sequence

SEQ ID NO: 37003 - DNA, 53 bp, Artificial Sequence; identical to SEQ ID NO: 1004
  Description of Artificial Sequence: Synthetic Peanut control sequences, 5' sequence and inner sequence

SEQ ID NO: 37004 - DNA, 53 bp, Artificial Sequence; identical to SEQ ID NO: 1008
  Description of Artificial Sequence: Synthetic Peanut control sequences, 5' sequence and inner sequence

SEQ ID NO: 37005 - DNA, 53 bp, Artificial Sequence; identical to SEQ ID NO: 1007
  Description of Artificial Sequence: Synthetic Peanut control sequences, 5' sequence and inner sequence

SEQ ID NO: 37006 - DNA, 53 bp, Artificial Sequence; identical to SEQ ID NO: 1006
  Description of Artificial Sequence: Synthetic Peanut control sequences, 5' sequence and inner sequence

SEQ ID NO: 37007 - DNA, 53 bp, Artificial Sequence; identical to SEQ ID NO: 1017
  Description of Artificial Sequence: Synthetic Peanut control sequences, 5' sequence and inner sequence

SEQ ID NO: 37008 - DNA, 53 bp, Artificial Sequence; identical to SEQ ID NO: 1003
  Description of Artificial Sequence: Synthetic Peanut control sequences, 5' sequence and inner sequence

SEQ ID NO: 37009 - DNA, 53 bp, Artificial Sequence; identical to SEQ ID NO: 1009
  Description of Artificial Sequence: Synthetic Peanut control sequences, 5' sequence and inner sequence

SEQ ID NO: 37010 - DNA, 53 bp, Artificial Sequence; identical to SEQ ID NO: 1012
  Description of Artificial Sequence: Synthetic Peanut control sequences, 5' sequence and inner sequence

SEQ ID NO: 37011 - DNA, 53 bp, Artificial Sequence; identical to SEQ ID NO: 1014
  Description of Artificial Sequence: Synthetic Peanut control sequences, 5' sequence and inner sequence

SEQ ID NO: 37012 - DNA, 53 bp, Artificial Sequence; identical to SEQ ID NO: 1005
  Description of Artificial Sequence: Synthetic Peanut control sequences, 5' sequence and inner sequence

SEQ ID NO: 37013 - DNA, 53 bp, Artificial Sequence; identical to SEQ ID NO: 1011
  Description of Artificial Sequence: Synthetic Peanut control sequences, 5' sequence and inner sequence

SEQ ID NO: 37014 - DNA, 53 bp, Artificial Sequence; identical to SEQ ID NO: 1019
  Description of Artificial Sequence: Synthetic Peanut control sequences, 5' sequence and inner sequence

SEQ ID NO: 37015 - DNA, 53 bp, Artificial Sequence; identical to SEQ ID NO: 1023
  Description of Artificial Sequence: Synthetic Peanut control sequences, 5' sequence and inner sequence

SEQ ID NO: 37016 - DNA, 53 bp, Artificial Sequence; identical to SEQ ID NO: 1015
  Description of Artificial Sequence: Synthetic Peanut control sequences, 5' sequence and inner sequence

SEQ ID NO: 37017 - DNA, 53 bp, Artificial Sequence; identical to SEQ ID NO: 1024
  Description of Artificial Sequence: Synthetic Peanut control sequences, 5' sequence and inner sequence

SEQ ID NO: 37018 - DNA, 53 bp, Artificial Sequence; identical to SEQ ID NO: 1060
  Description of Artificial Sequence: Synthetic Peanut control sequences, 5' sequence and inner sequence

SEQ ID NO: 37019 - DNA, 53 bp, Artificial Sequence; identical to SEQ ID NO: 1013
  Description of Artificial Sequence: Synthetic Peanut control sequences, 5' sequence and inner sequence

SEQ ID NO: 37020 - DNA, 53 bp, Artificial Sequence; identical to SEQ ID NO: 1029
  Description of Artificial Sequence: Synthetic Peanut control sequences, 5' sequence and inner sequence

SEQ ID NO: 37021 - DNA, 53 bp, Artificial Sequence; identical to SEQ ID NO: 1034
  Description of Artificial Sequence: Synthetic Peanut control sequences, 5' sequence and inner sequence

SEQ ID NO: 37022 - DNA, 53 bp, Artificial Sequence; identical to SEQ ID NO: 1010
  Description of Artificial Sequence: Synthetic Peanut control sequences, 5' sequence and inner sequence

SEQ ID NO: 37023 - DNA, 53 bp, Artificial Sequence; identical to SEQ ID NO: 1055
  Description of Artificial Sequence: Synthetic Peanut control sequences, 5' sequence and inner sequence

SEQ ID NO: 37024 - DNA, 53 bp, Artificial Sequence; identical to SEQ ID NO: 1054
  Description of Artificial Sequence: Synthetic Peanut control sequences, 5' sequence and inner sequence

SEQ ID NO: 37025 - DNA, 53 bp, Artificial Sequence; identical to SEQ ID NO: 1041
  Description of Artificial Sequence: Synthetic Peanut control sequences, 5' sequence and inner sequence

SEQ ID NO: 37026 - DNA, 53 bp, Artificial Sequence; identical to SEQ ID NO: 1032
  Description of Artificial Sequence: Synthetic Peanut control sequences, 5' sequence and inner sequence

SEQ ID NO: 37027 - DNA, 53 bp, Artificial Sequence; identical to SEQ ID NO: 1018
  Description of Artificial Sequence: Synthetic Peanut control sequences, 5' sequence and inner sequence

SEQ ID NO: 37028 - DNA, 53 bp, Artificial Sequence; identical to SEQ ID NO: 1031
  Description of Artificial Sequence: Synthetic Peanut control sequences, 5' sequence and inner sequence

SEQ ID NO: 37029 - DNA, 53 bp, Artificial Sequence; identical to SEQ ID NO: 1028
  Description of Artificial Sequence: Synthetic Peanut control sequences, 5' sequence and inner sequence

SEQ ID NO: 37030 - DNA, 53 bp, Artificial Sequence; identical to SEQ ID NO: 1030
  Description of Artificial Sequence: Synthetic Peanut control sequences, 5' sequence and inner sequence

SEQ ID NO: 37031 - DNA, 53 bp, Artificial Sequence; identical to SEQ ID NO: 1020
  Description of Artificial Sequence: Synthetic Peanut control sequences, 5' sequence and inner sequence

SEQ ID NO: 37032 - DNA, 53 bp, Artificial Sequence; identical to SEQ ID NO: 1133
  Description of Artificial Sequence: Synthetic Peanut control sequences, 5' sequence and inner sequence

SEQ ID NO: 37033 - DNA, 53 bp, Artificial Sequence; identical to SEQ ID NO: 1021
  Description of Artificial Sequence: Synthetic Peanut control sequences, 5' sequence and inner sequence

SEQ ID NO: 37034 - DNA, 53 bp, Artificial Sequence; identical to SEQ ID NO: 1042
  Description of Artificial Sequence: Synthetic Peanut control sequences, 5' sequence and inner sequence

SEQ ID NO: 37035 - DNA, 53 bp, Artificial Sequence; identical to SEQ ID NO: 1074
  Description of Artificial Sequence: Synthetic Peanut control sequences, 5' sequence and inner sequence

SEQ ID NO: 37036 - DNA, 53 bp, Artificial Sequence; identical to SEQ ID NO: 1047
  Description of Artificial Sequence: Synthetic Peanut control sequences, 5' sequence and inner sequence

SEQ ID NO: 37037 - DNA, 53 bp, Artificial Sequence; identical to SEQ ID NO: 1037
  Description of Artificial Sequence: Synthetic Peanut control sequences, 5' sequence and inner sequence

SEQ ID NO: 37038 - DNA, 53 bp, Artificial Sequence; identical to SEQ ID NO: 1045
  Description of Artificial Sequence: Synthetic Peanut control sequences, 5' sequence and inner sequence

SEQ ID NO: 37039 - DNA, 53 bp, Artificial Sequence; identical to SEQ ID NO: 1076
  Description of Artificial Sequence: Synthetic Peanut control sequences, 5' sequence and inner sequence

SEQ ID NO: 37040 - DNA, 53 bp, Artificial Sequence; identical to SEQ ID NO: 1026
  Description of Artificial Sequence: Synthetic Peanut control sequences, 5' sequence and inner sequence

SEQ ID NO: 37041 - DNA, 53 bp, Artificial Sequence; identical to SEQ ID NO: 1082
  Description of Artificial Sequence: Synthetic Peanut control sequences, 5' sequence and inner sequence

SEQ ID NO: 37042 - DNA, 53 bp, Artificial Sequence; identical to SEQ ID NO: 1049
  Description of Artificial Sequence: Synthetic Peanut control sequences, 5' sequence and inner sequence

SEQ ID NO: 37043 - DNA, 52 bp, Artificial Sequence; identical to SEQ ID NO: 1070
  Description of Artificial Sequence: Synthetic Peanut control sequences, 5' sequence and inner sequence

SEQ ID NO: 37044 - DNA, 53 bp, Artificial Sequence; identical to SEQ ID NO: 1033
  Description of Artificial Sequence: Synthetic Peanut control sequences, 5' sequence and inner sequence

SEQ ID NO: 37045 - DNA, 53 bp, Artificial Sequence; identical to SEQ ID NO: 1022
  Description of Artificial Sequence: Synthetic Peanut control sequences, 5' sequence and inner sequence

SEQ ID NO: 37046 - DNA, 53 bp, Artificial Sequence; identical to SEQ ID NO: 1257
  Description of Artificial Sequence: Synthetic Peanut control sequences, 5' sequence and inner sequence

SEQ ID NO: 37047 - DNA, 53 bp, Artificial Sequence; identical to SEQ ID NO: 1122
  Description of Artificial Sequence: Synthetic Peanut control sequences, 5' sequence and inner sequence

SEQ ID NO: 37048 - DNA, 53 bp, Artificial Sequence; identical to SEQ ID NO: 1048
  Description of Artificial Sequence: Synthetic Peanut control sequences, 5' sequence and inner sequence

SEQ ID NO: 37049 - DNA, 53 bp, Artificial Sequence; identical to SEQ ID NO: 1061
  Description of Artificial Sequence: Synthetic Peanut control sequences, 5' sequence and inner sequence

SEQ ID NO: 37050 - DNA, 53 bp, Artificial Sequence; identical to SEQ ID NO: 1059
  Description of Artificial Sequence: Synthetic Peanut control sequences, 5' sequence and inner sequence

SEQ ID NO: 37051 - DNA, 53 bp, Artificial Sequence; identical to SEQ ID NO: 1308
  Description of Artificial Sequence: Synthetic Peanut control sequences, 5' sequence and inner sequence

SEQ ID NO: 37052 - DNA, 53 bp, Artificial Sequence; identical to SEQ ID NO: 1046
  Description of Artificial Sequence: Synthetic Peanut control sequences, 5' sequence and inner sequence

SEQ ID NO: 37053 - DNA, 53 bp, Artificial Sequence; identical to SEQ ID NO: 1038
  Description of Artificial Sequence: Synthetic Peanut control sequences, 5' sequence and inner sequence

SEQ ID NO: 37054 - DNA, 53 bp, Artificial Sequence; identical to SEQ ID NO: 1050
  Description of Artificial Sequence: Synthetic Peanut control sequences, 5' sequence and inner sequence

SEQ ID NO: 37055 - DNA, 53 bp, Artificial Sequence; identical to SEQ ID NO: 1125
  Description of Artificial Sequence: Synthetic Peanut control sequences, 5' sequence and inner sequence

SEQ ID NO: 37056 - DNA, 53 bp, Artificial Sequence; identical to SEQ ID NO: 1052
  Description of Artificial Sequence: Synthetic Peanut control sequences, 5' sequence and inner sequence

SEQ ID NO: 37057 - DNA, 53 bp, Artificial Sequence; identical to SEQ ID NO: 1053
  Description of Artificial Sequence: Synthetic Peanut control sequences, 5' sequence and inner sequence

SEQ ID NO: 37058 - DNA, 53 bp, Artificial Sequence; identical to SEQ ID NO: 1027
  Description of Artificial Sequence: Synthetic Peanut control sequences, 5' sequence and inner sequence

SEQ ID NO: 37059 - DNA, 53 bp, Artificial Sequence; identical to SEQ ID NO: 1081
  Description of Artificial Sequence: Synthetic Peanut control sequences, 5' sequence and inner sequence

SEQ ID NO: 37060 - DNA, 53 bp, Artificial Sequence; identical to SEQ ID NO: 1039
  Description of Artificial Sequence: Synthetic Peanut control sequences, 5' sequence and inner sequence

SEQ ID NO: 37061 - DNA, 53 bp, Artificial Sequence; identical to SEQ ID NO: 1080
  Description of Artificial Sequence: Synthetic Peanut control sequences, 5' sequence and inner sequence

SEQ ID NO: 37062 - DNA, 53 bp, Artificial Sequence; identical to SEQ ID NO: 1040
  Description of Artificial Sequence: Synthetic Peanut control sequences, 5' sequence and inner sequence

SEQ ID NO: 37063 - DNA, 53 bp, Artificial Sequence; identical to SEQ ID NO: 1299
  Description of Artificial Sequence: Synthetic Peanut control sequences, 5' sequence and inner sequence

SEQ ID NO: 37064 - DNA, 53 bp, Artificial Sequence; identical to SEQ ID NO: 1035
  Description of Artificial Sequence: Synthetic Peanut control sequences, 5' sequence and inner sequence

SEQ ID NO: 37065 - DNA, 53 bp, Artificial Sequence; identical to SEQ ID NO: 1093
  Description of Artificial Sequence: Synthetic Peanut control sequences, 5' sequence and inner sequence

SEQ ID NO: 37066 - DNA, 53 bp, Artificial Sequence; identical to SEQ ID NO: 1230
  Description of Artificial Sequence: Synthetic Peanut control sequences, 5' sequence and inner sequence

SEQ ID NO: 37067 - DNA, 53 bp, Artificial Sequence; identical to SEQ ID NO: 1077
  Description of Artificial Sequence: Synthetic Peanut control sequences, 5' sequence and inner sequence

SEQ ID NO: 37068 - DNA, 53 bp, Artificial Sequence; identical to SEQ ID NO: 1207
  Description of Artificial Sequence: Synthetic Peanut control sequences, 5' sequence and inner sequence

SEQ ID NO: 37069 - DNA, 53 bp, Artificial Sequence; identical to SEQ ID NO: 1131
  Description of Artificial Sequence: Synthetic Peanut control sequences, 5' sequence and inner sequence

SEQ ID NO: 37070 - DNA, 53 bp, Artificial Sequence; identical to SEQ ID NO: 1092
  Description of Artificial Sequence: Synthetic Peanut control sequences, 5' sequence and inner sequence

SEQ ID NO: 37071 - DNA, 52 bp, Artificial Sequence; identical to SEQ ID NO: 1193
  Description of Artificial Sequence: Synthetic Peanut control sequences, 5' sequence and inner sequence

SEQ ID NO: 37072 - DNA, 53 bp, Artificial Sequence; identical to SEQ ID NO: 9401
  Description of Artificial Sequence: Synthetic Peanut control sequences, 5' sequence and inner sequence

SEQ ID NO: 37073 - DNA, 53 bp, Artificial Sequence; identical to SEQ ID NO: 1106
  Description of Artificial Sequence: Synthetic Peanut control sequences, 5' sequence and inner sequence

SEQ ID NO: 37074 - DNA, 53 bp, Artificial Sequence; identical to SEQ ID NO: 1043
  Description of Artificial Sequence: Synthetic Peanut control sequences, 5' sequence and inner sequence

SEQ ID NO: 37075 - DNA, 53 bp, Artificial Sequence; identical to SEQ ID NO: 1175
  Description of Artificial Sequence: Synthetic Peanut control sequences, 5' sequence and inner sequence

SEQ ID NO: 37076 - DNA, 53 bp, Artificial Sequence; identical to SEQ ID NO: 1145
  Description of Artificial Sequence: Synthetic Peanut control sequences, 5' sequence and inner sequence

SEQ ID NO: 37077 - DNA, 53 bp, Artificial Sequence; identical to SEQ ID NO: 1016
  Description of Artificial Sequence: Synthetic Peanut control sequences, 5' sequence and inner sequence

SEQ ID NO: 37078 - DNA, 53 bp, Artificial Sequence; identical to SEQ ID NO: 1126
  Description of Artificial Sequence: Synthetic Peanut control sequences, 5' sequence and inner sequence

SEQ ID NO: 37079 - DNA, 53 bp, Artificial Sequence; identical to SEQ ID NO: 1066
  Description of Artificial Sequence: Synthetic Peanut control sequences, 5' sequence and inner sequence

SEQ ID NO: 37080 - DNA, 53 bp, Artificial Sequence; identical to SEQ ID NO: 1063
  Description of Artificial Sequence: Synthetic Peanut control sequences, 5' sequence and inner sequence

SEQ ID NO: 37081 - DNA, 53 bp, Artificial Sequence; identical to SEQ ID NO: 1164
  Description of Artificial Sequence: Synthetic Peanut control sequences, 5' sequence and inner sequence

SEQ ID NO: 37082 - DNA, 51 bp, Artificial Sequence; identical to SEQ ID NO: 1148
  Description of Artificial Sequence: Synthetic Peanut control sequences, 5' sequence and inner sequence

SEQ ID NO: 37083 - DNA, 53 bp, Artificial Sequence; identical to SEQ ID NO: 1051
  Description of Artificial Sequence: Synthetic Peanut control sequences, 5' sequence and inner sequence

SEQ ID NO: 37084 - DNA, 53 bp, Artificial Sequence; identical to SEQ ID NO: 1270
  Description of Artificial Sequence: Synthetic Peanut control sequences, 5' sequence and inner sequence

SEQ ID NO: 37085 - DNA, 53 bp, Artificial Sequence; identical to SEQ ID NO: 1154
  Description of Artificial Sequence: Synthetic Peanut control sequences, 5' sequence and inner sequence

SEQ ID NO: 37086 - DNA, 53 bp, Artificial Sequence; identical to SEQ ID NO: 1109
  Description of Artificial Sequence: Synthetic Peanut control sequences, 5' sequence and inner sequence

SEQ ID NO: 37087 - DNA, 53 bp, Artificial Sequence; identical to SEQ ID NO: 1067
  Description of Artificial Sequence: Synthetic Peanut control sequences, 5' sequence and inner sequence

SEQ ID NO: 37088 - DNA, 53 bp, Artificial Sequence; identical to SEQ ID NO: 1058
  Description of Artificial Sequence: Synthetic Peanut control sequences, 5' sequence and inner sequence

SEQ ID NO: 37089 - DNA, 53 bp, Artificial Sequence; identical to SEQ ID NO: 1025
  Description of Artificial Sequence: Synthetic Peanut control sequences, 5' sequence and inner sequence

SEQ ID NO: 37090 - DNA, 53 bp, Artificial Sequence; identical to SEQ ID NO: 1156
  Description of Artificial Sequence: Synthetic Peanut control sequences, 5' sequence and inner sequence

SEQ ID NO: 37091 - DNA, 53 bp, Artificial Sequence; identical to SEQ ID NO: 1136
  Description of Artificial Sequence: Synthetic Peanut control sequences, 5' sequence and inner sequence

SEQ ID NO: 37092 - DNA, 53 bp, Artificial Sequence; identical to SEQ ID NO: 1142
  Description of Artificial Sequence: Synthetic Peanut control sequences, 5' sequence and inner sequence

SEQ ID NO: 37093 - DNA, 53 bp, Artificial Sequence; identical to SEQ ID NO: 1094
  Description of Artificial Sequence: Synthetic Peanut control sequences, 5' sequence and inner sequence

SEQ ID NO: 37094 - DNA, 53 bp, Artificial Sequence; identical to SEQ ID NO: 1100
  Description of Artificial Sequence: Synthetic Peanut control sequences, 5' sequence and inner sequence

SEQ ID NO: 37095 - DNA, 53 bp, Artificial Sequence; identical to SEQ ID NO: 1089
  Description of Artificial Sequence: Synthetic Peanut control sequences, 5' sequence and inner sequence

SEQ ID NO: 37096 - DNA, 53 bp, Artificial Sequence; identical to SEQ ID NO: 1208
  Description of Artificial Sequence: Synthetic Peanut control sequences, 5' sequence and inner sequence

SEQ ID NO: 37097 - DNA, 53 bp, Artificial Sequence; identical to SEQ ID NO: 1186
  Description of Artificial Sequence: Synthetic Peanut control sequences, 5' sequence and inner sequence

SEQ ID NO: 37098 - DNA, 53 bp, Artificial Sequence; identical to SEQ ID NO: 1111
  Description of Artificial Sequence: Synthetic Peanut control sequences, 5' sequence and inner sequence

SEQ ID NO: 37099 - DNA, 53 bp, Artificial Sequence; identical to SEQ ID NO: 1146
  Description of Artificial Sequence: Synthetic Peanut control sequences, 5' sequence and inner sequence

SEQ ID NO: 37100 - DNA, 53 bp, Artificial Sequence; identical to SEQ ID NO: 1163
  Description of Artificial Sequence: Synthetic Peanut control sequences, 5' sequence and inner sequence

SEQ ID NO: 37101 - DNA, 53 bp, Artificial Sequence; identical to SEQ ID NO: 1203
  Description of Artificial Sequence: Synthetic Peanut control sequences, 5' sequence and inner sequence

SEQ ID NO: 37102 - DNA, 54 bp, Artificial Sequence; identical to SEQ ID NO: 1250
  Description of Artificial Sequence: Synthetic Peanut control sequences, 5' sequence and inner sequence

SEQ ID NO: 37103 - DNA, 52 bp, Artificial Sequence; identical to SEQ ID NO: 1334
  Description of Artificial Sequence: Synthetic Peanut control sequences, 5' sequence and inner sequence

SEQ ID NO: 37104 - DNA, 53 bp, Artificial Sequence; identical to SEQ ID NO: 1044
  Description of Artificial Sequence: Synthetic Peanut control sequences, 5' sequence and inner sequence

SEQ ID NO: 37105 - DNA, 53 bp, Artificial Sequence; identical to SEQ ID NO: 1161
  Description of Artificial Sequence: Synthetic Peanut control sequences, 5' sequence and inner sequence

SEQ ID NO: 37106 - DNA, 53 bp, Artificial Sequence; identical to SEQ ID NO: 1362
  Description of Artificial Sequence: Synthetic Peanut control sequences, 5' sequence and inner sequence

SEQ ID NO: 37107 - DNA, 53 bp, Artificial Sequence; identical to SEQ ID NO: 1057
  Description of Artificial Sequence: Synthetic Peanut control sequences, 5' sequence and inner sequence

SEQ ID NO: 37108 - DNA, 53 bp, Artificial Sequence; identical to SEQ ID NO: 1078
  Description of Artificial Sequence: Synthetic Peanut control sequences, 5' sequence and inner sequence

SEQ ID NO: 37109 - DNA, 53 bp, Artificial Sequence; identical to SEQ ID NO: 1323
  Description of Artificial Sequence: Synthetic Peanut control sequences, 5' sequence and inner sequence

SEQ ID NO: 37110 - DNA, 53 bp, Artificial Sequence; identical to SEQ ID NO: 1567
  Description of Artificial Sequence: Synthetic Peanut control sequences, 5' sequence and inner sequence

SEQ ID NO: 37111 - DNA, 53 bp, Artificial Sequence; identical to SEQ ID NO: 1529
  Description of Artificial Sequence: Synthetic Peanut control sequences, 5' sequence and inner sequence

SEQ ID NO: 37112 - DNA, 53 bp, Artificial Sequence; identical to SEQ ID NO: 1095
  Description of Artificial Sequence: Synthetic Peanut control sequences, 5' sequence and inner sequence

SEQ ID NO: 37113 - DNA, 53 bp, Artificial Sequence; identical to SEQ ID NO: 1247
  Description of Artificial Sequence: Synthetic Peanut control sequences, 5' sequence and inner sequence

SEQ ID NO: 37114 - DNA, 53 bp, Artificial Sequence; identical to SEQ ID NO: 1377
  Description of Artificial Sequence: Synthetic Peanut control sequences, 5' sequence and inner sequence

SEQ ID NO: 37115 - DNA, 52 bp, Artificial Sequence; identical to SEQ ID NO: 1251
  Description of Artificial Sequence: Synthetic Peanut control sequences, 5' sequence and inner sequence

SEQ ID NO: 37116 - DNA, 53 bp, Artificial Sequence; identical to SEQ ID NO: 1065
  Description of Artificial Sequence: Synthetic Peanut control sequences, 5' sequence and inner sequence

SEQ ID NO: 37117 - DNA, 53 bp, Artificial Sequence; identical to SEQ ID NO: 1117
  Description of Artificial Sequence: Synthetic Peanut control sequences, 5' sequence and inner sequence

SEQ ID NO: 37118 - DNA, 53 bp, Artificial Sequence; identical to SEQ ID NO: 1389
  Description of Artificial Sequence: Synthetic Peanut control sequences, 5' sequence and inner sequence

SEQ ID NO: 37119 - DNA, 53 bp, Artificial Sequence; identical to SEQ ID NO: 1147
  Description of Artificial Sequence: Synthetic Peanut control sequences, 5' sequence and inner sequence

SEQ ID NO: 37120 - DNA, 53 bp, Artificial Sequence; identical to SEQ ID NO: 1349
  Description of Artificial Sequence: Synthetic Peanut control sequences, 5' sequence and inner sequence

SEQ ID NO: 37121 - DNA, 53 bp, Artificial Sequence; identical to SEQ ID NO: 1168
  Description of Artificial Sequence: Synthetic Peanut control sequences, 5' sequence and inner sequence

SEQ ID NO: 37122 - DNA, 53 bp, Artificial Sequence; identical to SEQ ID NO: 1182
  Description of Artificial Sequence: Synthetic Peanut control sequences, 5' sequence and inner sequence

SEQ ID NO: 37123 - DNA, 53 bp, Artificial Sequence; identical to SEQ ID NO: 1290
  Description of Artificial Sequence: Synthetic Peanut control sequences, 5' sequence and inner sequence

SEQ ID NO: 37124 - DNA, 53 bp, Artificial Sequence; identical to SEQ ID NO: 1096
  Description of Artificial Sequence: Synthetic Peanut control sequences, 5' sequence and inner sequence

SEQ ID NO: 37125 - DNA, 53 bp, Artificial Sequence; identical to SEQ ID NO: 1310
  Description of Artificial Sequence: Synthetic Peanut control sequences, 5' sequence and inner sequence

SEQ ID NO: 37126 - DNA, 53 bp, Artificial Sequence; identical to SEQ ID NO: 1243
  Description of Artificial Sequence: Synthetic Peanut control sequences, 5' sequence and inner sequence

SEQ ID NO: 37127 - DNA, 53 bp, Artificial Sequence; identical to SEQ ID NO: 1496
  Description of Artificial Sequence: Synthetic Peanut control sequences, 5' sequence and inner sequence

SEQ ID NO: 37128 - DNA, 53 bp, Artificial Sequence; identical to SEQ ID NO: 1262
  Description of Artificial Sequence: Synthetic Peanut control sequences, 5' sequence and inner sequence

SEQ ID NO: 37129 - DNA, 53 bp, Artificial Sequence; identical to SEQ ID NO: 1383
  Description of Artificial Sequence: Synthetic Peanut control sequences, 5' sequence and inner sequence

SEQ ID NO: 37130 - DNA, 53 bp, Artificial Sequence; identical to SEQ ID NO: 1293
  Description of Artificial Sequence: Synthetic Peanut control sequences, 5' sequence and inner sequence

SEQ ID NO: 37131 - DNA, 53 bp, Artificial Sequence; identical to SEQ ID NO: 1191
  Description of Artificial Sequence: Synthetic Peanut control sequences, 5' sequence and inner sequence

SEQ ID NO: 37132 - DNA, 53 bp, Artificial Sequence; identical to SEQ ID NO: 1116
  Description of Artificial Sequence: Synthetic Peanut control sequences, 5' sequence and inner sequence

SEQ ID NO: 37133 - DNA, 53 bp, Artificial Sequence; identical to SEQ ID NO: 1085
  Description of Artificial Sequence: Synthetic Peanut control sequences, 5' sequence and inner sequence

SEQ ID NO: 37134 - DNA, 53 bp, Artificial Sequence; identical to SEQ ID NO: 1394
  Description of Artificial Sequence: Synthetic Peanut control sequences, 5' sequence and inner sequence

SEQ ID NO: 37135 - DNA, 53 bp, Artificial Sequence; identical to SEQ ID NO: 1128
  Description of Artificial Sequence: Synthetic Peanut control sequences, 5' sequence and inner sequence

SEQ ID NO: 37136 - DNA, 53 bp, Artificial Sequence; identical to SEQ ID NO: 1430
  Description of Artificial Sequence: Synthetic Peanut control sequences, 5' sequence and inner sequence

SEQ ID NO: 37137 - DNA, 53 bp, Artificial Sequence; identical to SEQ ID NO: 1271
  Description of Artificial Sequence: Synthetic Peanut control sequences, 5' sequence and inner sequence

SEQ ID NO: 37138 - DNA, 53 bp, Artificial Sequence; identical to SEQ ID NO: 1229
  Description of Artificial Sequence: Synthetic Peanut control sequences, 5' sequence and inner sequence

SEQ ID NO: 37139 - DNA, 53 bp, Artificial Sequence; identical to SEQ ID NO: 1429
  Description of Artificial Sequence: Synthetic Peanut control sequences, 5' sequence and inner sequence

SEQ ID NO: 37140 - DNA, 53 bp, Artificial Sequence; identical to SEQ ID NO: 1118
  Description of Artificial Sequence: Synthetic Peanut control sequences, 5' sequence and inner sequence

SEQ ID NO: 37141 - DNA, 54 bp, Artificial Sequence; identical to SEQ ID NO: 1150
  Description of Artificial Sequence: Synthetic Peanut control sequences, 5' sequence and inner sequence

SEQ ID NO: 37142 - DNA, 53 bp, Artificial Sequence; identical to SEQ ID NO: 1218
  Description of Artificial Sequence: Synthetic Peanut control sequences, 5' sequence and inner sequence

SEQ ID NO: 37143 - DNA, 53 bp, Artificial Sequence; identical to SEQ ID NO: 1311
  Description of Artificial Sequence: Synthetic Peanut control sequences, 5' sequence and inner sequence

SEQ ID NO: 37144 - DNA, 53 bp, Artificial Sequence; identical to SEQ ID NO: 1115
  Description of Artificial Sequence: Synthetic Peanut control sequences, 5' sequence and inner sequence

SEQ ID NO: 37145 - DNA, 53 bp, Artificial Sequence; identical to SEQ ID NO: 1201
  Description of Artificial Sequence: Synthetic Peanut control sequences, 5' sequence and inner sequence

SEQ ID NO: 37146 - DNA, 53 bp, Artificial Sequence; identical to SEQ ID NO: 1155
  Description of Artificial Sequence: Synthetic Peanut control sequences, 5' sequence and inner sequence

SEQ ID NO: 37147 - DNA, 53 bp, Artificial Sequence; identical to SEQ ID NO: 1068
  Description of Artificial Sequence: Synthetic Peanut control sequences, 5' sequence and inner sequence

SEQ ID NO: 37148 - DNA, 53 bp, Artificial Sequence; identical to SEQ ID NO: 1468
  Description of Artificial Sequence: Synthetic Peanut control sequences, 5' sequence and inner sequence

SEQ ID NO: 37149 - DNA, 53 bp, Artificial Sequence; identical to SEQ ID NO: 1253
  Description of Artificial Sequence: Synthetic Peanut control sequences, 5' sequence and inner sequence

SEQ ID NO: 37150 - DNA, 53 bp, Artificial Sequence; identical to SEQ ID NO: 1200
  Description of Artificial Sequence: Synthetic Peanut control sequences, 5' sequence and inner sequence

SEQ ID NO: 37151 - DNA, 53 bp, Artificial Sequence; identical to SEQ ID NO: 1113
  Description of Artificial Sequence: Synthetic Peanut control sequences, 5' sequence and inner sequence

SEQ ID NO: 37152 - DNA, 53 bp, Artificial Sequence; identical to SEQ ID NO: 1099
  Description of Artificial Sequence: Synthetic Peanut control sequences, 5' sequence and inner sequence

SEQ ID NO: 37153 - DNA, 53 bp, Artificial Sequence; identical to SEQ ID NO: 1071
  Description of Artificial Sequence: Synthetic Peanut control sequences, 5' sequence and inner sequence

SEQ ID NO: 37154 - DNA, 53 bp, Artificial Sequence; identical to SEQ ID NO: 1185
  Description of Artificial Sequence: Synthetic Peanut control sequences, 5' sequence and inner sequence

SEQ ID NO: 37155 - DNA, 53 bp, Artificial Sequence; identical to SEQ ID NO: 1088
  Description of Artificial Sequence: Synthetic Peanut control sequences, 5' sequence and inner sequence

SEQ ID NO: 37156 - DNA, 53 bp, Artificial Sequence; identical to SEQ ID NO: 1347
  Description of Artificial Sequence: Synthetic Peanut control sequences, 5' sequence and inner sequence

SEQ ID NO: 37157 - DNA, 53 bp, Artificial Sequence; identical to SEQ ID NO: 1159
  Description of Artificial Sequence: Synthetic Peanut control sequences, 5' sequence and inner sequence

SEQ ID NO: 37158 - DNA, 54 bp, Artificial Sequence; identical to SEQ ID NO: 5245
  Description of Artificial Sequence: Synthetic Peanut control sequences, 5' sequence and inner sequence

SEQ ID NO: 37159 - DNA, 53 bp, Artificial Sequence; identical to SEQ ID NO: 1240
  Description of Artificial Sequence: Synthetic Peanut control sequences, 5' sequence and inner sequence

SEQ ID NO: 37160 - DNA, 53 bp, Artificial Sequence; identical to SEQ ID NO: 1438
  Description of Artificial Sequence: Synthetic Peanut control sequences, 5' sequence and inner sequence

SEQ ID NO: 37161 - DNA, 53 bp, Artificial Sequence; identical to SEQ ID NO: 1171
  Description of Artificial Sequence: Synthetic Peanut control sequences, 5' sequence and inner sequence

SEQ ID NO: 37162 - DNA, 53 bp, Artificial Sequence; identical to SEQ ID NO: 1119
  Description of Artificial Sequence: Synthetic Peanut control sequences, 5' sequence and inner sequence

SEQ ID NO: 37163 - DNA, 54 bp, Artificial Sequence; identical to SEQ ID NO: 1503
  Description of Artificial Sequence: Synthetic Peanut control sequences, 5' sequence and inner sequence

SEQ ID NO: 37164 - DNA, 53 bp, Artificial Sequence; identical to SEQ ID NO: 1850
  Description of Artificial Sequence: Synthetic Peanut control sequences, 5' sequence and inner sequence

SEQ ID NO: 37165 - DNA, 53 bp, Artificial Sequence; identical to SEQ ID NO: 1370
  Description of Artificial Sequence: Synthetic Peanut control sequences, 5' sequence and inner sequence

SEQ ID NO: 37166 - DNA, 53 bp, Artificial Sequence; identical to SEQ ID NO: 1341
  Description of Artificial Sequence: Synthetic Peanut control sequences, 5' sequence and inner sequence

SEQ ID NO: 37167 - DNA, 53 bp, Artificial Sequence; identical to SEQ ID NO: 1285
  Description of Artificial Sequence: Synthetic Peanut control sequences, 5' sequence and inner sequence

SEQ ID NO: 37168 - DNA, 53 bp, Artificial Sequence; identical to SEQ ID NO: 1245
  Description of Artificial Sequence: Synthetic Peanut control sequences, 5' sequence and inner sequence

SEQ ID NO: 37169 - DNA, 53 bp, Artificial Sequence; identical to SEQ ID NO: 1441
  Description of Artificial Sequence: Synthetic Peanut control sequences, 5' sequence and inner sequence

SEQ ID NO: 37170 - DNA, 53 bp, Artificial Sequence; identical to SEQ ID NO: 1560
  Description of Artificial Sequence: Synthetic Peanut control sequences, 5' sequence and inner sequence

SEQ ID NO: 37171 - DNA, 53 bp, Artificial Sequence; identical to SEQ ID NO: 1036
  Description of Artificial Sequence: Synthetic Peanut control sequences, 5' sequence and inner sequence

SEQ ID NO: 37172 - DNA, 53 bp, Artificial Sequence; identical to SEQ ID NO: 1188
  Description of Artificial Sequence: Synthetic Peanut control sequences, 5' sequence and inner sequence

SEQ ID NO: 37173 - DNA, 53 bp, Artificial Sequence; identical to SEQ ID NO: 1153
  Description of Artificial Sequence: Synthetic Peanut control sequences, 5' sequence and inner sequence

SEQ ID NO: 37174 - DNA, 53 bp, Artificial Sequence; identical to SEQ ID NO: 1196
  Description of Artificial Sequence: Synthetic Peanut control sequences, 5' sequence and inner sequence

SEQ ID NO: 37175 - DNA, 53 bp, Artificial Sequence; identical to SEQ ID NO: 1328
  Description of Artificial Sequence: Synthetic Peanut control sequences, 5' sequence and inner sequence

SEQ ID NO: 37176 - DNA, 53 bp, Artificial Sequence; identical to SEQ ID NO: 1273
  Description of Artificial Sequence: Synthetic Peanut control sequences, 5' sequence and inner sequence

SEQ ID NO: 37177 - DNA, 53 bp, Artificial Sequence; identical to SEQ ID NO: 1073
  Description of Artificial Sequence: Synthetic Peanut control sequences, 5' sequence and inner sequence

SEQ ID NO: 37178 - DNA, 53 bp, Artificial Sequence; identical to SEQ ID NO: 1215
  Description of Artificial Sequence: Synthetic Peanut control sequences, 5' sequence and inner sequence

SEQ ID NO: 37179 - DNA, 53 bp, Artificial Sequence
  Description of Artificial Sequence: Synthetic Peanut control sequences, 5' sequence and inner sequence
tagggaagagaaggacatatgattggccgatcatccctcaagttggcgtgtgc

SEQ ID NO: 37180 - DNA, 53 bp, Artificial Sequence; identical to SEQ ID NO: 1472
  Description of Artificial Sequence: Synthetic Peanut control sequences, 5' sequence and inner sequence

SEQ ID NO: 37181 - DNA, 53 bp, Artificial Sequence; identical to SEQ ID NO: 1237
  Description of Artificial Sequence: Synthetic Peanut control sequences, 5' sequence and inner sequence

SEQ ID NO: 37182 - DNA, 53 bp, Artificial Sequence; identical to SEQ ID NO: 1948
  Description of Artificial Sequence: Synthetic Peanut control sequences, 5' sequence and inner sequence

SEQ ID NO: 37183 - DNA, 53 bp, Artificial Sequence; identical to SEQ ID NO: 1123
  Description of Artificial Sequence: Synthetic Peanut control sequences, 5' sequence and inner sequence

SEQ ID NO: 37184 - DNA, 53 bp, Artificial Sequence; identical to SEQ ID NO: 5814
  Description of Artificial Sequence: Synthetic Peanut control sequences, 5' sequence and inner sequence

SEQ ID NO: 37185 - DNA, 53 bp, Artificial Sequence; identical to SEQ ID NO: 1741
  Description of Artificial Sequence: Synthetic Peanut control sequences, 5' sequence and inner sequence

SEQ ID NO: 37186 - DNA, 53 bp, Artificial Sequence; identical to SEQ ID NO: 9922
  Description of Artificial Sequence: Synthetic Peanut control sequences, 5' sequence and inner sequence

SEQ ID NO: 37187 - DNA, 53 bp, Artificial Sequence; identical to SEQ ID NO: 1091
  Description of Artificial Sequence: Synthetic Peanut control sequences, 5' sequence and inner sequence

SEQ ID NO: 37188 - DNA, 53 bp, Artificial Sequence; identical to SEQ ID NO: 1189
  Description of Artificial Sequence: Synthetic Peanut control sequences, 5' sequence and inner sequence

SEQ ID NO: 37189 - DNA, 53 bp, Artificial Sequence; identical to SEQ ID NO: 1260
  Description of Artificial Sequence: Synthetic Peanut control sequences, 5' sequence and inner sequence

SEQ ID NO: 37190 - DNA, 53 bp, Artificial Sequence; identical to SEQ ID NO: 1461
  Description of Artificial Sequence: Synthetic Peanut control sequences, 5' sequence and inner sequence

SEQ ID NO: 37191 - DNA, 53 bp, Artificial Sequence; identical to SEQ ID NO: 1487
  Description of Artificial Sequence: Synthetic Peanut control sequences, 5' sequence and inner sequence

SEQ ID NO: 37192 - DNA, 54 bp, Artificial Sequence; identical to SEQ ID NO: 21870
  Description of Artificial Sequence: Synthetic Peanut control sequences, 5' sequence and inner sequence

SEQ ID NO: 37193 - DNA, 53 bp, Artificial Sequence; identical to SEQ ID NO: 1360
  Description of Artificial Sequence: Synthetic Peanut control sequences, 5' sequence and inner sequence

SEQ ID NO: 37194 - DNA, 53 bp, Artificial Sequence; identical to SEQ ID NO: 1233
  Description of Artificial Sequence: Synthetic Peanut control sequences, 5' sequence and inner sequence

SEQ ID NO: 37195 - DNA, 53 bp, Artificial Sequence; identical to SEQ ID NO: 1387
  Description of Artificial Sequence: Synthetic Peanut control sequences, 5' sequence and inner sequence

SEQ ID NO: 37196 - DNA, 53 bp, Artificial Sequence; identical to SEQ ID NO: 1312
  Description of Artificial Sequence: Synthetic Peanut control sequences, 5' sequence and inner sequence

SEQ ID NO: 37197 - DNA, 53 bp, Artificial Sequence; identical to SEQ ID NO: 1288
  Description of Artificial Sequence: Synthetic Peanut control sequences, 5' sequence and inner sequence

SEQ ID NO: 37198 - DNA, 53 bp, Artificial Sequence; identical to SEQ ID NO: 1485
  Description of Artificial Sequence: Synthetic Peanut control sequences, 5' sequence and inner sequence

SEQ ID NO: 37199 - DNA, 53 bp, Artificial Sequence; identical to SEQ ID NO: 1395
  Description of Artificial Sequence: Synthetic Peanut control sequences, 5' sequence and inner sequence

SEQ ID NO: 37200 - DNA, 53 bp, Artificial Sequence; identical to SEQ ID NO: 1392
  Description of Artificial Sequence: Synthetic Peanut control sequences, 5' sequence and inner sequence

SEQ ID NO: 37201 - DNA, 53 bp, Artificial Sequence; identical to SEQ ID NO: 1528
  Description of Artificial Sequence: Synthetic Peanut control sequences, 5' sequence and inner sequence

SEQ ID NO: 37202 - DNA, 53 bp, Artificial Sequence; identical to SEQ ID NO: 1097
  Description of Artificial Sequence: Synthetic Peanut control sequences, 5' sequence and inner sequence

SEQ ID NO: 37203 - DNA, 53 bp, Artificial Sequence; identical to SEQ ID NO: 1400
  Description of Artificial Sequence: Synthetic Peanut control sequences, 5' sequence and inner sequence

SEQ ID NO: 37204 - DNA, 53 bp, Artificial Sequence; identical to SEQ ID NO: 1284
  Description of Artificial Sequence: Synthetic Peanut control sequences, 5' sequence and inner sequence

SEQ ID NO: 37205 - DNA, 53 bp, Artificial Sequence; identical to SEQ ID NO: 1286
  Description of Artificial Sequence: Synthetic Peanut control sequences, 5' sequence and inner sequence

SEQ ID NO: 37206 - DNA, 53 bp, Artificial Sequence; identical to SEQ ID NO: 1211
  Description of Artificial Sequence: Synthetic Peanut control sequences, 5' sequence and inner sequence

SEQ ID NO: 37207 - DNA, 53 bp, Artificial Sequence; identical to SEQ ID NO: 1329
  Description of Artificial Sequence: Synthetic Peanut control sequences, 5' sequence and inner sequence

SEQ ID NO: 37208 - DNA, 54 bp, Artificial Sequence; identical to SEQ ID NO: 1221
  Description of Artificial Sequence: Synthetic Peanut control sequences, 5' sequence and inner sequence

SEQ ID NO: 37209 - DNA, 53 bp, Artificial Sequence; identical to SEQ ID NO: 1344
  Description of Artificial Sequence: Synthetic Peanut control sequences, 5' sequence and inner sequence

SEQ ID NO: 37210 - DNA, 53 bp, Artificial Sequence; identical to SEQ ID NO: 1448
  Description of Artificial Sequence: Synthetic Peanut control sequences, 5' sequence and inner sequence

SEQ ID NO: 37211 - DNA, 53 bp, Artificial Sequence; identical to SEQ ID NO: 1354
  Description of Artificial Sequence: Synthetic Peanut control sequences, 5' sequence and inner sequence

SEQ ID NO: 37212 - DNA, 53 bp, Artificial Sequence; identical to SEQ ID NO: 1582
  Description of Artificial Sequence: Synthetic Peanut control sequences, 5' sequence and inner sequence

SEQ ID NO: 37213 - DNA, 53 bp, Artificial Sequence; identical to SEQ ID NO: 1305
  Description of Artificial Sequence: Synthetic Peanut control sequences, 5' sequence and inner sequence

SEQ ID NO: 37214 - DNA, 53 bp, Artificial Sequence; identical to SEQ ID NO: 1266
  Description of Artificial Sequence: Synthetic Peanut control sequences, 5' sequence and inner sequence

SEQ ID NO: 37215 - DNA, 53 bp, Artificial Sequence; identical to SEQ ID NO: 1783
  Description of Artificial Sequence: Synthetic Peanut control sequences, 5' sequence and inner sequence

SEQ ID NO: 37216 - DNA, 53 bp, Artificial Sequence; identical to SEQ ID NO: 1139
  Description of Artificial Sequence: Synthetic Peanut control sequences, 5' sequence and inner sequence

SEQ ID NO: 37217 - DNA, 53 bp, Artificial Sequence; identical to SEQ ID NO: 1373
  Description of Artificial Sequence: Synthetic Peanut control sequences, 5' sequence and inner sequence

SEQ ID NO: 37218 - DNA, 53 bp, Artificial Sequence; identical to SEQ ID NO: 1340
  Description of Artificial Sequence: Synthetic Peanut control sequences, 5' sequence and inner sequence

SEQ ID NO: 37219 - DNA, 53 bp, Artificial Sequence; identical to SEQ ID NO: 1437
  Description of Artificial Sequence: Synthetic Peanut control sequences, 5' sequence and inner sequence

SEQ ID NO: 37220 - DNA, 53 bp, Artificial Sequence; identical to SEQ ID NO: 1166
  Description of Artificial Sequence: Synthetic Peanut control sequences, 5' sequence and inner sequence

SEQ ID NO: 37221 - DNA, 53 bp, Artificial Sequence; identical to SEQ ID NO: 5552
  Description of Artificial Sequence: Synthetic Peanut control sequences, 5' sequence and inner sequence

SEQ ID NO: 37222 - DNA, 53 bp, Artificial Sequence; identical to SEQ ID NO: 1355
  Description of Artificial Sequence: Synthetic Peanut control sequences, 5' sequence and inner sequence

SEQ ID NO: 37223 - DNA, 53 bp, Artificial Sequence; identical to SEQ ID NO: 1517
  Description of Artificial Sequence: Synthetic Peanut control sequences, 5' sequence and inner sequence

SEQ ID NO: 37224 - DNA, 53 bp, Artificial Sequence; identical to SEQ ID NO: 1374
  Description of Artificial Sequence: Synthetic Peanut control sequences, 5' sequence and inner sequence

SEQ ID NO: 37225 - DNA, 53 bp, Artificial Sequence; identical to SEQ ID NO: 1132
  Description of Artificial Sequence: Synthetic Peanut control sequences, 5' sequence and inner sequence

SEQ ID NO: 37226 - DNA, 53 bp, Artificial Sequence; identical to SEQ ID NO: 1283
  Description of Artificial Sequence: Synthetic Peanut control sequences, 5' sequence and inner sequence

SEQ ID NO: 37227 - DNA, 53 bp, Artificial Sequence; identical to SEQ ID NO: 1715
  Description of Artificial Sequence: Synthetic Peanut control sequences, 5' sequence and inner sequence

SEQ ID NO: 37228 - DNA, 53 bp, Artificial Sequence; identical to SEQ ID NO: 1287
  Description of Artificial Sequence: Synthetic Peanut control sequences, 5' sequence and inner sequence

SEQ ID NO: 37229 - DNA, 53 bp, Artificial Sequence; identical to SEQ ID NO: 1470
  Description of Artificial Sequence: Synthetic Peanut control sequences, 5' sequence and inner sequence

SEQ ID NO: 37230 - DNA, 53 bp, Artificial Sequence; identical to SEQ ID NO: 1916
  Description of Artificial Sequence: Synthetic Peanut control sequences, 5' sequence and inner sequence

SEQ ID NO: 37231 - DNA, 53 bp, Artificial Sequence; identical to SEQ ID NO: 1524
  Description of Artificial Sequence: Synthetic Peanut control sequences, 5' sequence and inner sequence

SEQ ID NO: 37232 - DNA, 53 bp, Artificial Sequence; identical to SEQ ID NO: 1346
  Description of Artificial Sequence: Synthetic Peanut control sequences, 5' sequence and inner sequence

SEQ ID NO: 37233 - DNA, 53 bp, Artificial Sequence; identical to SEQ ID NO: 5254
  Description of Artificial Sequence: Synthetic Peanut control sequences, 5' sequence and inner sequence

SEQ ID NO: 37234 - DNA, 53 bp, Artificial Sequence; identical to SEQ ID NO: 1151
  Description of Artificial Sequence: Synthetic Peanut control sequences, 5' sequence and inner sequence

SEQ ID NO: 37235 - DNA, 53 bp, Artificial Sequence; identical to SEQ ID NO: 1695
  Description of Artificial Sequence: Synthetic Peanut control sequences, 5' sequence and inner sequence

SEQ ID NO: 37236 - DNA, 53 bp, Artificial Sequence; identical to SEQ ID NO: 9682
  Description of Artificial Sequence: Synthetic Peanut control sequences, 5' sequence and inner sequence

SEQ ID NO: 37237 - DNA, 53 bp, Artificial Sequence; identical to SEQ ID NO: 1179
  Description of Artificial Sequence: Synthetic Peanut control sequences, 5' sequence and inner sequence

SEQ ID NO: 37238 - DNA, 54 bp, Artificial Sequence; identical to SEQ ID NO: 1258
  Description of Artificial Sequence: Synthetic Peanut control sequences, 5' sequence and inner sequence

SEQ ID NO: 37239 - DNA, 53 bp, Artificial Sequence; identical to SEQ ID NO: 1401
  Description of Artificial Sequence: Synthetic Peanut control sequences, 5' sequence and inner sequence

SEQ ID NO: 37240 - DNA, 53 bp, Artificial Sequence; identical to SEQ ID NO: 5234
  Description of Artificial Sequence: Synthetic Peanut control sequences, 5' sequence and inner sequence

SEQ ID NO: 37241 - DNA, 53 bp, Artificial Sequence; identical to SEQ ID NO: 5229
  Description of Artificial Sequence: Synthetic Peanut control sequences, 5' sequence and inner sequence

SEQ ID NO: 37242 - DNA, 53 bp, Artificial Sequence; identical to SEQ ID NO: 1174
  Description of Artificial Sequence: Synthetic Peanut control sequences, 5' sequence and inner sequence

SEQ ID NO: 37243 - DNA, 53 bp, Artificial Sequence; identical to SEQ ID NO: 1801
  Description of Artificial Sequence: Synthetic Peanut control sequences, 5' sequence and inner sequence

SEQ ID NO: 37244 - DNA, 53 bp, Artificial Sequence; identical to SEQ ID NO: 1105
  Description of Artificial Sequence: Synthetic Peanut control sequences, 5' sequence and inner sequence

SEQ ID NO: 37245 - DNA, 53 bp, Artificial Sequence; identical to SEQ ID NO: 1144
  Description of Artificial Sequence: Synthetic Peanut control sequences, 5' sequence and inner sequence

SEQ ID NO: 37246 - DNA, 53 bp, Artificial Sequence; identical to SEQ ID NO: 1369
  Description of Artificial Sequence: Synthetic Peanut control sequences, 5' sequence and inner sequence

SEQ ID NO: 37247 - DNA, 53 bp, Artificial Sequence; identical to SEQ ID NO: 1834
  Description of Artificial Sequence: Synthetic Peanut control sequences, 5' sequence and inner sequence

SEQ ID NO: 37248 - DNA, 53 bp, Artificial Sequence; identical to SEQ ID NO: 1406
  Description of Artificial Sequence: Synthetic Peanut control sequences, 5' sequence and inner sequence

SEQ ID NO: 37249 - DNA, 53 bp, Artificial Sequence; identical to SEQ ID NO: 29268
  Description of Artificial Sequence: Synthetic Peanut control sequences, 5' sequence and inner sequence

SEQ ID NO: 37250 - DNA, 53 bp, Artificial Sequence; identical to SEQ ID NO: 1985
  Description of Artificial Sequence: Synthetic Peanut control sequences, 5' sequence and inner sequence

SEQ ID NO: 37251 - DNA, 53 bp, Artificial Sequence; identical to SEQ ID NO: 1184
  Description of Artificial Sequence: Synthetic Peanut control sequences, 5' sequence and inner sequence

SEQ ID NO: 37252 - DNA, 53 bp, Artificial Sequence; identical to SEQ ID NO: 1112
  Description of Artificial Sequence: Synthetic Peanut control sequences, 5' sequence and inner sequence

SEQ ID NO: 37253 - DNA, 52 bp, Artificial Sequence; identical to SEQ ID NO: 5559
  Description of Artificial Sequence: Synthetic Peanut control sequences, 5' sequence and inner sequence

SEQ ID NO: 37254 - DNA, 53 bp, Artificial Sequence; identical to SEQ ID NO: 1764
  Description of Artificial Sequence: Synthetic Peanut control sequences, 5' sequence and inner sequence

SEQ ID NO: 37255 - DNA, 53 bp, Artificial Sequence; identical to SEQ ID NO: 1238
  Description of Artificial Sequence: Synthetic Peanut control sequences, 5' sequence and inner sequence

SEQ ID NO: 37256 - DNA, 53 bp, Artificial Sequence; identical to SEQ ID NO: 1127
  Description of Artificial Sequence: Synthetic Peanut control sequences, 5' sequence and inner sequence

SEQ ID NO: 37257 - DNA, 53 bp, Artificial Sequence; identical to SEQ ID NO: 5889
  Description of Artificial Sequence: Synthetic Peanut control sequences, 5' sequence and inner sequence

SEQ ID NO: 37258 - DNA, 50 bp, Artificial Sequence; identical to SEQ ID NO: 1885
  Description of Artificial Sequence: Synthetic Peanut control sequences, 5' sequence and inner sequence

SEQ ID NO: 37259 - DNA, 53 bp, Artificial Sequence; identical to SEQ ID NO: 1563
  Description of Artificial Sequence: Synthetic Peanut control sequences, 5' sequence and inner sequence

SEQ ID NO: 37260 - DNA, 53 bp, Artificial Sequence; identical to SEQ ID NO: 1454
  Description of Artificial Sequence: Synthetic Peanut control sequences, 5' sequence and inner sequence

SEQ ID NO: 37261 - DNA, 53 bp, Artificial Sequence; identical to SEQ ID NO: 1548
  Description of Artificial Sequence: Synthetic Peanut control sequences, 5' sequence and inner sequence

SEQ ID NO: 37262 - DNA, 53 bp, Artificial Sequence; identical to SEQ ID NO: 1409
  Description of Artificial Sequence: Synthetic Peanut control sequences, 5' sequence and inner sequence

SEQ ID NO: 37263 - DNA, 53 bp, Artificial Sequence; identical to SEQ ID NO: 1464
  Description of Artificial Sequence: Synthetic Peanut control sequences, 5' sequence and inner sequence

SEQ ID NO: 37264 - DNA, 53 bp, Artificial Sequence; identical to SEQ ID NO: 1212
  Description of Artificial Sequence: Synthetic Peanut control sequences, 5' sequence and inner sequence

SEQ ID NO: 37265 - DNA, 52 bp, Artificial Sequence; identical to SEQ ID NO: 1648
  Description of Artificial Sequence: Synthetic Peanut control sequences, 5' sequence and inner sequence

SEQ ID NO: 37266 - DNA, 53 bp, Artificial Sequence; identical to SEQ ID NO: 1318
  Description of Artificial Sequence: Synthetic Peanut control sequences, 5' sequence and inner sequence

SEQ ID NO: 37267 - DNA, 53 bp, Artificial Sequence; identical to SEQ ID NO: 1187
  Description of Artificial Sequence: Synthetic Peanut control sequences, 5' sequence and inner sequence

SEQ ID NO: 37268 - DNA, 53 bp, Artificial Sequence; identical to SEQ ID NO: 1135
  Description of Artificial Sequence: Synthetic Peanut control sequences, 5' sequence and inner sequence

SEQ ID NO: 37269 - DNA, 53 bp, Artificial Sequence; identical to SEQ ID NO: 1968
  Description of Artificial Sequence: Synthetic Peanut control sequences, 5' sequence and inner sequence

SEQ ID NO: 37270 - DNA, 53 bp, Artificial Sequence; identical to SEQ ID NO: 9825
  Description of Artificial Sequence: Synthetic Peanut control sequences, 5' sequence and inner sequence

SEQ ID NO: 37271 - DNA, 53 bp, Artificial Sequence; identical to SEQ ID NO: 1698
  Description of Artificial Sequence: Synthetic Peanut control sequences, 5' sequence and inner sequence

SEQ ID NO: 37272 - DNA, 53 bp, Artificial Sequence; identical to SEQ ID NO: 1121
  Description of Artificial Sequence: Synthetic Peanut control sequences, 5' sequence and inner sequence

SEQ ID NO: 37273 - DNA, 53 bp, Artificial Sequence; identical to SEQ ID NO: 1130
  Description of Artificial Sequence: Synthetic Peanut control sequences, 5' sequence and inner sequence

SEQ ID NO: 37274 - DNA, 53 bp, Artificial Sequence; identical to SEQ ID NO: 1165
  Description of Artificial Sequence: Synthetic Peanut control sequences, 5' sequence and inner sequence

SEQ ID NO: 37275 - DNA, 54 bp, Artificial Sequence; identical to SEQ ID NO: 1216
  Description of Artificial Sequence: Synthetic Peanut control sequences, 5' sequence and inner sequence

SEQ ID NO: 37276 - DNA, 53 bp, Artificial Sequence; identical to SEQ ID NO: 5981
  Description of Artificial Sequence: Synthetic Peanut control sequences, 5' sequence and inner sequence

SEQ ID NO: 37277 - DNA, 56 bp, Artificial Sequence; identical to SEQ ID NO: 1864
  Description of Artificial Sequence: Synthetic Peanut control sequences, 5' sequence and inner sequence

SEQ ID NO: 37278 - DNA, 53 bp, Artificial Sequence; identical to SEQ ID NO: 1740
  Description of Artificial Sequence: Synthetic Peanut control sequences, 5' sequence and inner sequence

SEQ ID NO: 37279 - DNA, 53 bp, Artificial Sequence; identical to SEQ ID NO: 1149
  Description of Artificial Sequence: Synthetic Peanut control sequences, 5' sequence and inner sequence

SEQ ID NO: 37280 - DNA, 53 bp, Artificial Sequence; identical to SEQ ID NO: 1120
  Description of Artificial Sequence: Synthetic Peanut control sequences, 5' sequence and inner sequence

SEQ ID NO: 37281 - DNA, 53 bp, Artificial Sequence; identical to SEQ ID NO: 1282
  Description of Artificial Sequence: Synthetic Peanut control sequences, 5' sequence and inner sequence

SEQ ID NO: 37282 - DNA, 53 bp, Artificial Sequence; identical to SEQ ID NO: 1079
  Description of Artificial Sequence: Synthetic Peanut control sequences, 5' sequence and inner sequence

SEQ ID NO: 37283 - DNA, 53 bp, Artificial Sequence; identical to SEQ ID NO: 1103
  Description of Artificial Sequence: Synthetic Peanut control sequences, 5' sequence and inner sequence

SEQ ID NO: 37284 - DNA, 53 bp, Artificial Sequence; identical to SEQ ID NO: 5205
  Description of Artificial Sequence: Synthetic Peanut control sequences, 5' sequence and inner sequence

SEQ ID NO: 37285 - DNA, 53 bp, Artificial Sequence; identical to SEQ ID NO: 1950
  Description of Artificial Sequence: Synthetic Peanut control sequences, 5' sequence and inner sequence

SEQ ID NO: 37286 - DNA, 48 bp, Artificial Sequence; identical to SEQ ID NO: 21136
  Description of Artificial Sequence: Synthetic Peanut control sequences, 5' sequence and inner sequence

SEQ ID NO: 37287 - DNA, 53 bp, Artificial Sequence; identical to SEQ ID NO: 1294
  Description of Artificial Sequence: Synthetic Peanut control sequences, 5' sequence and inner sequence

SEQ ID NO: 37288 - DNA, 53 bp, Artificial Sequence; identical to SEQ ID NO: 1327
  Description of Artificial Sequence: Synthetic Peanut control sequences, 5' sequence and inner sequence

SEQ ID NO: 37289 - DNA, 53 bp, Artificial Sequence; identical to SEQ ID NO: 1630
  Description of Artificial Sequence: Synthetic Peanut control sequences, 5' sequence and inner sequence

SEQ ID NO: 37290 - DNA, 53 bp, Artificial Sequence; identical to SEQ ID NO: 1352
  Description of Artificial Sequence: Synthetic Peanut control sequences, 5' sequence and inner sequence

SEQ ID NO: 37291 - DNA, 53 bp, Artificial Sequence; identical to SEQ ID NO: 1673
  Description of Artificial Sequence: Synthetic Peanut control sequences, 5' sequence and inner sequence

SEQ ID NO: 37292 - DNA, 53 bp, Artificial Sequence; identical to SEQ ID NO: 1298
  Description of Artificial Sequence: Synthetic Peanut control sequences, 5' sequence and inner sequence

SEQ ID NO: 37293 - DNA, 53 bp, Artificial Sequence; identical to SEQ ID NO: 5881
  Description of Artificial Sequence: Synthetic Peanut control sequences, 5' sequence and inner sequence

SEQ ID NO: 37294 - DNA, 53 bp, Artificial Sequence; identical to SEQ ID NO: 1928
  Description of Artificial Sequence: Synthetic Peanut control sequences, 5' sequence and inner sequence

SEQ ID NO: 37295 - DNA, 53 bp, Artificial Sequence; identical to SEQ ID NO: 1640
  Description of Artificial Sequence: Synthetic Peanut control sequences, 5' sequence and inner sequence

SEQ ID NO: 37296 - DNA, 53 bp, Artificial Sequence; identical to SEQ ID NO: 1914
  Description of Artificial Sequence: Synthetic Peanut control sequences, 5' sequence and inner sequence

SEQ ID NO: 37297 - DNA, 53 bp, Artificial Sequence; identical to SEQ ID NO: 29926
  Description of Artificial Sequence: Synthetic Peanut control sequences, 5' sequence and inner sequence

SEQ ID NO: 37298 - DNA, 53 bp, Artificial Sequence; identical to SEQ ID NO: 29472
  Description of Artificial Sequence: Synthetic Peanut control sequences, 5' sequence and inner sequence

SEQ ID NO: 37299 - DNA, 53 bp, Artificial Sequence; identical to SEQ ID NO: 1379
  Description of Artificial Sequence: Synthetic Peanut control sequences, 5' sequence and inner sequence

SEQ ID NO: 37300 - DNA, 53 bp, Artificial Sequence; identical to SEQ ID NO: 1301
  Description of Artificial Sequence: Synthetic Peanut control sequences, 5' sequence and inner sequence

SEQ ID NO: 37301 - DNA, 53 bp, Artificial Sequence; identical to SEQ ID NO: 1107
  Description of Artificial Sequence: Synthetic Peanut control sequences, 5' sequence and inner sequence

SEQ ID NO: 37302 - DNA, 53 bp, Artificial Sequence; identical to SEQ ID NO: 1511
  Description of Artificial Sequence: Synthetic Peanut control sequences, 5' sequence and inner sequence

SEQ ID NO: 37303 - DNA, 53 bp, Artificial Sequence; identical to SEQ ID NO: 1572
  Description of Artificial Sequence: Synthetic Peanut control sequences, 5' sequence and inner sequence

SEQ ID NO: 37304 - DNA, 53 bp, Artificial Sequence; identical to SEQ ID NO: 1645
  Description of Artificial Sequence: Synthetic Peanut control sequences, 5' sequence and inner sequence

SEQ ID NO: 37305 - DNA, 53 bp, Artificial Sequence; identical to SEQ ID NO: 1615
  Description of Artificial Sequence: Synthetic Peanut control sequences, 5' sequence and inner sequence

SEQ ID NO: 37306 - DNA, 53 bp, Artificial Sequence; identical to SEQ ID NO: 1545
  Description of Artificial Sequence: Synthetic Peanut control sequences, 5' sequence and inner sequence

SEQ ID NO: 37307 - DNA, 53 bp, Artificial Sequence; identical to SEQ ID NO: 1192
  Description of Artificial Sequence: Synthetic Peanut control sequences, 5' sequence and inner sequence

SEQ ID NO: 37308 - DNA, 53 bp, Artificial Sequence; identical to SEQ ID NO: 13931
  Description of Artificial Sequence: Synthetic Peanut control sequences, 5' sequence and inner sequence

SEQ ID NO: 37309 - DNA, 53 bp, Artificial Sequence; identical to SEQ ID NO: 1686
  Description of Artificial Sequence: Synthetic Peanut control sequences, 5' sequence and inner sequence

SEQ ID NO: 37310 - DNA, 53 bp, Artificial Sequence; identical to SEQ ID NO: 1585
  Description of Artificial Sequence: Synthetic Peanut control sequences, 5' sequence and inner sequence

SEQ ID NO: 37311 - DNA, 53 bp, Artificial Sequence; identical to SEQ ID NO: 5598
  Description of Artificial Sequence: Synthetic Peanut control sequences, 5' sequence and inner sequence

SEQ ID NO: 37312 - DNA, 52 bp, Artificial Sequence
  Description of Artificial Sequence: Synthetic Peanut control sequences, 5' sequence and inner sequence
tagggaagagaaggacatatgattggccgatcgaccctatcatgaggccatg

SEQ ID NO: 37313 - DNA, 53 bp, Artificial Sequence; identical to SEQ ID NO: 1532
  Description of Artificial Sequence: Synthetic Peanut control sequences, 5' sequence and inner sequence

SEQ ID NO: 37314 - DNA, 52 bp, Artificial Sequence; identical to SEQ ID NO: 1453
  Description of Artificial Sequence: Synthetic Peanut control sequences, 5' sequence and inner sequence

SEQ ID NO: 37315 - DNA, 53 bp, Artificial Sequence; identical to SEQ ID NO: 13939
  Description of Artificial Sequence: Synthetic Peanut control sequences, 5' sequence and inner sequence

SEQ ID NO: 37316 - DNA, 53 bp, Artificial Sequence; identical to SEQ ID NO: 1553
  Description of Artificial Sequence: Synthetic Peanut control sequences, 5' sequence and inner sequence

SEQ ID NO: 37317 - DNA, 53 bp, Artificial Sequence; identical to SEQ ID NO: 1522
  Description of Artificial Sequence: Synthetic Peanut control sequences, 5' sequence and inner sequence

SEQ ID NO: 37318 - DNA, 53 bp, Artificial Sequence; identical to SEQ ID NO: 1320
  Description of Artificial Sequence: Synthetic Peanut control sequences, 5' sequence and inner sequence

SEQ ID NO: 37319 - DNA, 53 bp, Artificial Sequence; identical to SEQ ID NO: 1232
  Description of Artificial Sequence: Synthetic Peanut control sequences, 5' sequence and inner sequence

SEQ ID NO: 37320 - DNA, 53 bp, Artificial Sequence; identical to SEQ ID NO: 1386
  Description of Artificial Sequence: Synthetic Peanut control sequences, 5' sequence and inner sequence

SEQ ID NO: 37321 - DNA, 53 bp, Artificial Sequence; identical to SEQ ID NO: 1586
  Description of Artificial Sequence: Synthetic Peanut control sequences, 5' sequence and inner sequence

SEQ ID NO: 37322 - DNA, 53 bp, Artificial Sequence; identical to SEQ ID NO: 1194
  Description of Artificial Sequence: Synthetic Peanut control sequences, 5' sequence and inner sequence

SEQ ID NO: 37323 - DNA, 53 bp, Artificial Sequence; identical to SEQ ID NO: 1321
  Description of Artificial Sequence: Synthetic Peanut control sequences, 5' sequence and inner sequence

SEQ ID NO: 37324 - DNA, 53 bp, Artificial Sequence
  Description of Artificial Sequence: Synthetic Peanut control sequences, 5' sequence and inner sequence
tagggaagagaaggacatatgatgcatcagggcgttcgatggctagctggtca

SEQ ID NO: 37325 - DNA, 53 bp, Artificial Sequence; identical to SEQ ID NO: 1816
  Description of Artificial Sequence: Synthetic Peanut control sequences, 5' sequence and inner sequence

SEQ ID NO: 37326 - DNA, 53 bp, Artificial Sequence; identical to SEQ ID NO: 1226
  Description of Artificial Sequence: Synthetic Peanut control sequences, 5' sequence and inner sequence

SEQ ID NO: 37327 - DNA, 53 bp, Artificial Sequence; identical to SEQ ID NO: 1390
  Description of Artificial Sequence: Synthetic Peanut control sequences, 5' sequence and inner sequence

SEQ ID NO: 37328 - DNA, 53 bp, Artificial Sequence; identical to SEQ ID NO: 1083
  Description of Artificial Sequence: Synthetic Peanut control sequences, 5' sequence and inner sequence

SEQ ID NO: 37329 - DNA, 48 bp, Artificial Sequence; identical to SEQ ID NO: 21741
  Description of Artificial Sequence: Synthetic Peanut control sequences, 5' sequence and inner sequence

SEQ ID NO: 37330 - DNA, 53 bp, Artificial Sequence; identical to SEQ ID NO: 1951
  Description of Artificial Sequence: Synthetic Peanut control sequences, 5' sequence and inner sequence

SEQ ID NO: 37331 - DNA, 53 bp, Artificial Sequence; identical to SEQ ID NO: 1457
  Description of Artificial Sequence: Synthetic Peanut control sequences, 5' sequence and inner sequence

SEQ ID NO: 37332 - DNA, 53 bp, Artificial Sequence; identical to SEQ ID NO: 1793
  Description of Artificial Sequence: Synthetic Peanut control sequences, 5' sequence and inner sequence

SEQ ID NO: 37333 - DNA, 53 bp, Artificial Sequence
  Description of Artificial Sequence: Synthetic Peanut control sequences, 5' sequence and inner sequence
tagggaagagaaggacatatgatgtgcttccacttcccagcaagtgcgtcacg

SEQ ID NO: 37334 - DNA, 53 bp, Artificial Sequence; identical to SEQ ID NO: 1780
  Description of Artificial Sequence: Synthetic Peanut control sequences, 5' sequence and inner sequence

SEQ ID NO: 37335 - DNA, 53 bp, Artificial Sequence; identical to SEQ ID NO: 5301
  Description of Artificial Sequence: Synthetic Peanut control sequences, 5' sequence and inner sequence

SEQ ID NO: 37336 - DNA, 53 bp, Artificial Sequence; identical to SEQ ID NO: 1316
  Description of Artificial Sequence: Synthetic Peanut control sequences, 5' sequence and inner sequence

SEQ ID NO: 37337 - DNA, 53 bp, Artificial Sequence; identical to SEQ ID NO: 1348
  Description of Artificial Sequence: Synthetic Peanut control sequences, 5' sequence and inner sequence

SEQ ID NO: 37338 - DNA, 53 bp, Artificial Sequence; identical to SEQ ID NO: 1204
  Description of Artificial Sequence: Synthetic Peanut control sequences, 5' sequence and inner sequence

SEQ ID NO: 37339 - DNA, 53 bp, Artificial Sequence; identical to SEQ ID NO: 1272
  Description of Artificial Sequence: Synthetic Peanut control sequences, 5' sequence and inner sequence

SEQ ID NO: 37340 - DNA, 53 bp, Artificial Sequence
  Description of Artificial Sequence: Synthetic Peanut control sequences, 5' sequence and inner sequence
tagggaagagaaggacatatgatcgtatgtcgtcacgacccttcgagtggaca

SEQ ID NO: 37341 - DNA, 53 bp, Artificial Sequence; identical to SEQ ID NO: 1476
  Description of Artificial Sequence: Synthetic Peanut control sequences, 5' sequence and inner sequence

SEQ ID NO: 37342 - DNA, 53 bp, Artificial Sequence; identical to SEQ ID NO: 1064
  Description of Artificial Sequence: Synthetic Peanut control sequences, 5' sequence and inner sequence

SEQ ID NO: 37343 - DNA, 53 bp, Artificial Sequence; identical to SEQ ID NO: 1541
  Description of Artificial Sequence: Synthetic Peanut control sequences, 5' sequence and inner sequence

SEQ ID NO: 37344 - DNA, 53 bp, Artificial Sequence; identical to SEQ ID NO: 1205
  Description of Artificial Sequence: Synthetic Peanut control sequences, 5' sequence and inner sequence

SEQ ID NO: 37345 - DNA, 53 bp, Artificial Sequence; identical to SEQ ID NO: 1264
  Description of Artificial Sequence: Synthetic Peanut control sequences, 5' sequence and inner sequence

SEQ ID NO: 37346 - DNA, 53 bp, Artificial Sequence; identical to SEQ ID NO: 1901
  Description of Artificial Sequence: Synthetic Peanut control sequences, 5' sequence and inner sequence

SEQ ID NO: 37347 - DNA, 53 bp, Artificial Sequence
  Description of Artificial Sequence: Synthetic Peanut control sequences, 5' sequence and inner sequence
tagggaagagaaggacatatgatgaccgaaacggaccgaagtgcgtgatgtgc

SEQ ID NO: 37348 - DNA, 53 bp, Artificial Sequence; identical to SEQ ID NO: 9950
  Description of Artificial Sequence: Synthetic Peanut control sequences, 5' sequence and inner sequence

SEQ ID NO: 37349 - DNA, 53 bp, Artificial Sequence; identical to SEQ ID NO: 1239
  Description of Artificial Sequence: Synthetic Peanut control sequences, 5' sequence and inner sequence

SEQ ID NO: 37350 - DNA, 53 bp, Artificial Sequence; identical to SEQ ID NO: 5874
  Description of Artificial Sequence: Synthetic Peanut control sequences, 5' sequence and inner sequence

SEQ ID NO: 37351 - DNA, 53 bp, Artificial Sequence; identical to SEQ ID NO: 1343
  Description of Artificial Sequence: Synthetic Peanut control sequences, 5' sequence and inner sequence

SEQ ID NO: 37352 - DNA, 52 bp, Artificial Sequence; identical to SEQ ID NO: 5763
  Description of Artificial Sequence: Synthetic Peanut control sequences, 5' sequence and inner sequence

SEQ ID NO: 37353 - DNA, 52 bp, Artificial Sequence
  Description of Artificial Sequence: Synthetic Peanut control sequences, 5' sequence and inner sequence
tagggaagagaaggacatatgatggccaagcgacctagcaagtgtgctcatg

SEQ ID NO: 37354 - DNA, 53 bp, Artificial Sequence; identical to SEQ ID NO: 1692
  Description of Artificial Sequence: Synthetic Peanut control sequences, 5' sequence and inner sequence

SEQ ID NO: 37355 - DNA, 53 bp, Artificial Sequence; identical to SEQ ID NO: 1800
  Description of Artificial Sequence: Synthetic Peanut control sequences, 5' sequence and inner sequence

SEQ ID NO: 37356 - DNA, 53 bp, Artificial Sequence; identical to SEQ ID NO: 1596
  Description of Artificial Sequence: Synthetic Peanut control sequences, 5' sequence and inner sequence

SEQ ID NO: 37357 - DNA, 53 bp, Artificial Sequence; identical to SEQ ID NO: 1611
  Description of Artificial Sequence: Synthetic Peanut control sequences, 5' sequence and inner sequence

SEQ ID NO: 37358 - DNA, 53 bp, Artificial Sequence; identical to SEQ ID NO: 5407
  Description of Artificial Sequence: Synthetic Peanut control sequences, 5' sequence and inner sequence

SEQ ID NO: 37359 - DNA, 53 bp, Artificial Sequence; identical to SEQ ID NO: 1336
  Description of Artificial Sequence: Synthetic Peanut control sequences, 5' sequence and inner sequence

SEQ ID NO: 37360 - DNA, 53 bp, Artificial Sequence; identical to SEQ ID NO: 5543
  Description of Artificial Sequence: Synthetic Peanut control sequences, 5' sequence and inner sequence

SEQ ID NO: 37361 - DNA, 53 bp, Artificial Sequence; identical to SEQ ID NO: 1446
  Description of Artificial Sequence: Synthetic Peanut control sequences, 5' sequence and inner sequence

SEQ ID NO: 37362 - DNA, 53 bp, Artificial Sequence; identical to SEQ ID NO: 5864
  Description of Artificial Sequence: Synthetic Peanut control sequences, 5' sequence and inner sequence

SEQ ID NO: 37363 - DNA, 53 bp, Artificial Sequence; identical to SEQ ID NO: 1303
  Description of Artificial Sequence: Synthetic Peanut control sequences, 5' sequence and inner sequence

SEQ ID NO: 37364 - DNA, 53 bp, Artificial Sequence; identical to SEQ ID NO: 5394
  Description of Artificial Sequence: Synthetic Peanut control sequences, 5' sequence and inner sequence

SEQ ID NO: 37365 - DNA, 53 bp, Artificial Sequence; identical to SEQ ID NO: 29922
  Description of Artificial Sequence: Synthetic Peanut control sequences, 5' sequence and inner sequence

SEQ ID NO: 37366 - DNA, 53 bp, Artificial Sequence; identical to SEQ ID NO: 1376
  Description of Artificial Sequence: Synthetic Peanut control sequences, 5' sequence and inner sequence

SEQ ID NO: 37367 - DNA, 53 bp, Artificial Sequence; identical to SEQ ID NO: 1636
  Description of Artificial Sequence: Synthetic Peanut control sequences, 5' sequence and inner sequence

SEQ ID NO: 37368 - DNA, 53 bp, Artificial Sequence; identical to SEQ ID NO: 1254
  Description of Artificial Sequence: Synthetic Peanut control sequences, 5' sequence and inner sequence

SEQ ID NO: 37369 - DNA, 53 bp, Artificial Sequence; identical to SEQ ID NO: 1413
  Description of Artificial Sequence: Synthetic Peanut control sequences, 5' sequence and inner sequence

SEQ ID NO: 37370 - DNA, 53 bp, Artificial Sequence; identical to SEQ ID NO: 5650
  Description of Artificial Sequence: Synthetic Peanut control sequences, 5' sequence and inner sequence

SEQ ID NO: 37371 - DNA, 53 bp, Artificial Sequence; identical to SEQ ID NO: 5238
  Description of Artificial Sequence: Synthetic Peanut control sequences, 5' sequence and inner sequence

SEQ ID NO: 37372 - DNA, 53 bp, Artificial Sequence; identical to SEQ ID NO: 5967
  Description of Artificial Sequence: Synthetic Peanut control sequences, 5' sequence and inner sequence

SEQ ID NO: 37373 - DNA, 53 bp, Artificial Sequence; identical to SEQ ID NO: 21519
  Description of Artificial Sequence: Synthetic Peanut control sequences, 5' sequence and inner sequence

SEQ ID NO: 37374 - DNA, 53 bp, Artificial Sequence; identical to SEQ ID NO: 1728
  Description of Artificial Sequence: Synthetic Peanut control sequences, 5' sequence and inner sequence

SEQ ID NO: 37375 - DNA, 53 bp, Artificial Sequence; identical to SEQ ID NO: 5401
  Description of Artificial Sequence: Synthetic Peanut control sequences, 5' sequence and inner sequence

SEQ ID NO: 37376 - DNA, 53 bp, Artificial Sequence; identical to SEQ ID NO: 25984
  Description of Artificial Sequence: Synthetic Peanut control sequences, 5' sequence and inner sequence

SEQ ID NO: 37377 - DNA, 53 bp, Artificial Sequence; identical to SEQ ID NO: 1506
  Description of Artificial Sequence: Synthetic Peanut control sequences, 5' sequence and inner sequence

SEQ ID NO: 37378 - DNA, 53 bp, Artificial Sequence; identical to SEQ ID NO: 5592
  Description of Artificial Sequence: Synthetic Peanut control sequences, 5' sequence and inner sequence

SEQ ID NO: 37379 - DNA, 53 bp, Artificial Sequence; identical to SEQ ID NO: 5513
  Description of Artificial Sequence: Synthetic Peanut control sequences, 5' sequence and inner sequence

SEQ ID NO: 37380 - DNA, 53 bp, Artificial Sequence; identical to SEQ ID NO: 1696
  Description of Artificial Sequence: Synthetic Peanut control sequences, 5' sequence and inner sequence

SEQ ID NO: 37381 - DNA, 53 bp, Artificial Sequence; identical to SEQ ID NO: 1227
  Description of Artificial Sequence: Synthetic Peanut control sequences, 5' sequence and inner sequence

SEQ ID NO: 37382 - DNA, 53 bp, Artificial Sequence; identical to SEQ ID NO: 1570
  Description of Artificial Sequence: Synthetic Peanut control sequences, 5' sequence and inner sequence

SEQ ID NO: 37383 - DNA, 53 bp, Artificial Sequence; identical to SEQ ID NO: 1540
  Description of Artificial Sequence: Synthetic Peanut control sequences, 5' sequence and inner sequence

SEQ ID NO: 37384 - DNA, 53 bp, Artificial Sequence
  Description of Artificial Sequence: Synthetic Peanut control sequences, 5' sequence and inner sequence
tagggaagagaaggacatatgatggcctgatcgaacctagagagtggcgtgta

SEQ ID NO: 37385 - DNA, 53 bp, Artificial Sequence; identical to SEQ ID NO: 1647
  Description of Artificial Sequence: Synthetic Peanut control sequences, 5' sequence and inner sequence

SEQ ID NO: 37386 - DNA, 53 bp, Artificial Sequence; identical to SEQ ID NO: 1581
  Description of Artificial Sequence: Synthetic Peanut control sequences, 5' sequence and inner sequence

SEQ ID NO: 37387 - DNA, 53 bp, Artificial Sequence; identical to SEQ ID NO: 1414
  Description of Artificial Sequence: Synthetic Peanut control sequences, 5' sequence and inner sequence

SEQ ID NO: 37388 - DNA, 53 bp, Artificial Sequence; identical to SEQ ID NO: 1789
  Description of Artificial Sequence: Synthetic Peanut control sequences, 5' sequence and inner sequence

SEQ ID NO: 37389 - DNA, 53 bp, Artificial Sequence; identical to SEQ ID NO: 1062
  Description of Artificial Sequence: Synthetic Peanut control sequences, 5' sequence and inner sequence

SEQ ID NO: 37390 - DNA, 53 bp, Artificial Sequence; identical to SEQ ID NO: 1738
  Description of Artificial Sequence: Synthetic Peanut control sequences, 5' sequence and inner sequence

SEQ ID NO: 37391 - DNA, 53 bp, Artificial Sequence; identical to SEQ ID NO: 1813
  Description of Artificial Sequence: Synthetic Peanut control sequences, 5' sequence and inner sequence

SEQ ID NO: 37392 - DNA, 53 bp, Artificial Sequence; identical to SEQ ID NO: 1787
  Description of Artificial Sequence: Synthetic Peanut control sequences, 5' sequence and inner sequence

SEQ ID NO: 37393 - DNA, 53 bp, Artificial Sequence; identical to SEQ ID NO: 13971
  Description of Artificial Sequence: Synthetic Peanut control sequences, 5' sequence and inner sequence

SEQ ID NO: 37394 - DNA, 53 bp, Artificial Sequence; identical to SEQ ID NO: 1620
  Description of Artificial Sequence: Synthetic Peanut control sequences, 5' sequence and inner sequence

SEQ ID NO: 37395 - DNA, 53 bp, Artificial Sequence; identical to SEQ ID NO: 1836
  Description of Artificial Sequence: Synthetic Peanut control sequences, 5' sequence and inner sequence

SEQ ID NO: 37396 - DNA, 53 bp, Artificial Sequence; identical to SEQ ID NO: 1811
  Description of Artificial Sequence: Synthetic Peanut control sequences, 5' sequence and inner sequence

SEQ ID NO: 37397 - DNA, 53 bp, Artificial Sequence; identical to SEQ ID NO: 29446
  Description of Artificial Sequence: Synthetic Peanut control sequences, 5' sequence and inner sequence

SEQ ID NO: 37398 - DNA, 54 bp, Artificial Sequence; identical to SEQ ID NO: 1489
  Description of Artificial Sequence: Synthetic Peanut control sequences, 5' sequence and inner sequence

SEQ ID NO: 37399 - DNA, 53 bp, Artificial Sequence; identical to SEQ ID NO: 1359
  Description of Artificial Sequence: Synthetic Peanut control sequences, 5' sequence and inner sequence

SEQ ID NO: 37400 - DNA, 53 bp, Artificial Sequence; identical to SEQ ID NO: 5530
  Description of Artificial Sequence: Synthetic Peanut control sequences, 5' sequence and inner sequence

SEQ ID NO: 37401 - DNA, 53 bp, Artificial Sequence; identical to SEQ ID NO: 1573
  Description of Artificial Sequence: Synthetic Peanut control sequences, 5' sequence and inner sequence

SEQ ID NO: 37402 - DNA, 53 bp, Artificial Sequence; identical to SEQ ID NO: 1628
  Description of Artificial Sequence: Synthetic Peanut control sequences, 5' sequence and inner sequence

SEQ ID NO: 37403 - DNA, 53 bp, Artificial Sequence; identical to SEQ ID NO: 1432
  Description of Artificial Sequence: Synthetic Peanut control sequences, 5' sequence and inner sequence

SEQ ID NO: 37404 - DNA, 53 bp, Artificial Sequence; identical to SEQ ID NO: 1365
  Description of Artificial Sequence: Synthetic Peanut control sequences, 5' sequence and inner sequence

SEQ ID NO: 37405 - DNA, 53 bp, Artificial Sequence; identical to SEQ ID NO: 9971
  Description of Artificial Sequence: Synthetic Peanut control sequences, 5' sequence and inner sequence

SEQ ID NO: 37406 - DNA, 53 bp, Artificial Sequence; identical to SEQ ID NO: 1867
  Description of Artificial Sequence: Synthetic Peanut control sequences, 5' sequence and inner sequence

SEQ ID NO: 37407 - DNA, 53 bp, Artificial Sequence; identical to SEQ ID NO: 1515
  Description of Artificial Sequence: Synthetic Peanut control sequences, 5' sequence and inner sequence

SEQ ID NO: 37408 - DNA, 53 bp, Artificial Sequence; identical to SEQ ID NO: 5713
  Description of Artificial Sequence: Synthetic Peanut control sequences, 5' sequence and inner sequence

SEQ ID NO: 37409 - DNA, 53 bp, Artificial Sequence; identical to SEQ ID NO: 9939
  Description of Artificial Sequence: Synthetic Peanut control sequences, 5' sequence and inner sequence

SEQ ID NO: 37410 - DNA, 53 bp, Artificial Sequence; identical to SEQ ID NO: 1714
  Description of Artificial Sequence: Synthetic Peanut control sequences, 5' sequence and inner sequence

SEQ ID NO: 37411 - DNA, 53 bp, Artificial Sequence; identical to SEQ ID NO: 9546
  Description of Artificial Sequence: Synthetic Peanut control sequences, 5' sequence and inner sequence

SEQ ID NO: 37412 - DNA, 53 bp, Artificial Sequence; identical to SEQ ID NO: 1684
  Description of Artificial Sequence: Synthetic Peanut control sequences, 5' sequence and inner sequence

SEQ ID NO: 37413 - DNA, 53 bp, Artificial Sequence; identical to SEQ ID NO: 1552
  Description of Artificial Sequence: Synthetic Peanut control sequences, 5' sequence and inner sequence

SEQ ID NO: 37414 - DNA, 53 bp, Artificial Sequence; identical to SEQ ID NO: 1462
  Description of Artificial Sequence: Synthetic Peanut control sequences, 5' sequence and inner sequence

SEQ ID NO: 37415 - DNA, 53 bp, Artificial Sequence; identical to SEQ ID NO: 1884
  Description of Artificial Sequence: Synthetic Peanut control sequences, 5' sequence and inner sequence

SEQ ID NO: 37416 - DNA, 53 bp, Artificial Sequence; identical to SEQ ID NO: 1891
  Description of Artificial Sequence: Synthetic Peanut control sequences, 5' sequence and inner sequence

SEQ ID NO: 37417 - DNA, 53 bp, Artificial Sequence; identical to SEQ ID NO: 13799
  Description of Artificial Sequence: Synthetic Peanut control sequences, 5' sequence and inner sequence

SEQ ID NO: 37418 - DNA, 53 bp, Artificial Sequence; identical to SEQ ID NO: 1984
  Description of Artificial Sequence: Synthetic Peanut control sequences, 5' sequence and inner sequence

SEQ ID NO: 37419 - DNA, 52 bp, Artificial Sequence
  Description of Artificial Sequence: Synthetic Peanut control sequences, 5' sequence and inner sequence
tagggaagagaaggacatatgatccgcacgtagccctatcaagtgcagcatg

SEQ ID NO: 37420 - DNA, 53 bp, Artificial Sequence; identical to SEQ ID NO: 1527
  Description of Artificial Sequence: Synthetic Peanut control sequences, 5' sequence and inner sequence

SEQ ID NO: 37421 - DNA, 53 bp, Artificial Sequence; identical to SEQ ID NO: 1750
  Description of Artificial Sequence: Synthetic Peanut control sequences, 5' sequence and inner sequence

SEQ ID NO: 37422 - DNA, 53 bp, Artificial Sequence; identical to SEQ ID NO: 13958
  Description of Artificial Sequence: Synthetic Peanut control sequences, 5' sequence and inner sequence

SEQ ID NO: 37423 - DNA, 53 bp, Artificial Sequence; identical to SEQ ID NO: 5860
  Description of Artificial Sequence: Synthetic Peanut control sequences, 5' sequence and inner sequence

SEQ ID NO: 37424 - DNA, 53 bp, Artificial Sequence; identical to SEQ ID NO: 1393
  Description of Artificial Sequence: Synthetic Peanut control sequences, 5' sequence and inner sequence

SEQ ID NO: 37425 - DNA, 53 bp, Artificial Sequence; identical to SEQ ID NO: 5336
  Description of Artificial Sequence: Synthetic Peanut control sequences, 5' sequence and inner sequence

SEQ ID NO: 37426 - DNA, 52 bp, Artificial Sequence; identical to SEQ ID NO: 1642
  Description of Artificial Sequence: Synthetic Peanut control sequences, 5' sequence and inner sequence

SEQ ID NO: 37427 - DNA, 53 bp, Artificial Sequence; identical to SEQ ID NO: 5792
  Description of Artificial Sequence: Synthetic Peanut control sequences, 5' sequence and inner sequence

SEQ ID NO: 37428 - DNA, 53 bp, Artificial Sequence; identical to SEQ ID NO: 9868
  Description of Artificial Sequence: Synthetic Peanut control sequences, 5' sequence and inner sequence

SEQ ID NO: 37429 - DNA, 52 bp, Artificial Sequence; identical to SEQ ID NO: 5869
  Description of Artificial Sequence: Synthetic Peanut control sequences, 5' sequence and inner sequence

SEQ ID NO: 37430 - DNA, 53 bp, Artificial Sequence; identical to SEQ ID NO: 1791
  Description of Artificial Sequence: Synthetic Peanut control sequences, 5' sequence and inner sequence

SEQ ID NO: 37431 - DNA, 53 bp, Artificial Sequence; identical to SEQ ID NO: 21783
  Description of Artificial Sequence: Synthetic Peanut control sequences, 5' sequence and inner sequence

SEQ ID NO: 37432 - DNA, 53 bp, Artificial Sequence
  Description of Artificial Sequence: Synthetic Peanut control sequences, 5' sequence and inner sequence
tagggaagagaaggacatatgatggacggatcgaacctacaagttgtcgtgta

SEQ ID NO: 37433 - DNA, 53 bp, Artificial Sequence; identical to SEQ ID NO: 33332
  Description of Artificial Sequence: Synthetic Peanut control sequences, 5' sequence and inner sequence

SEQ ID NO: 37434 - DNA, 53 bp, Artificial Sequence; identical to SEQ ID NO: 1772
  Description of Artificial Sequence: Synthetic Peanut control sequences, 5' sequence and inner sequence

SEQ ID NO: 37435 - DNA, 53 bp, Artificial Sequence; identical to SEQ ID NO: 1358
  Description of Artificial Sequence: Synthetic Peanut control sequences, 5' sequence and inner sequence

SEQ ID NO: 37436 - DNA, 53 bp, Artificial Sequence; identical to SEQ ID NO: 1269
  Description of Artificial Sequence: Synthetic Peanut control sequences, 5' sequence and inner sequence

SEQ ID NO: 37437 - DNA, 53 bp, Artificial Sequence; identical to SEQ ID NO: 21581
  Description of Artificial Sequence: Synthetic Peanut control sequences, 5' sequence and inner sequence

SEQ ID NO: 37438 - DNA, 53 bp, Artificial Sequence; identical to SEQ ID NO: 1500
  Description of Artificial Sequence: Synthetic Peanut control sequences, 5' sequence and inner sequence

SEQ ID NO: 37439 - DNA, 53 bp, Artificial Sequence; identical to SEQ ID NO: 1478
  Description of Artificial Sequence: Synthetic Peanut control sequences, 5' sequence and inner sequence

SEQ ID NO: 37440 - DNA, 53 bp, Artificial Sequence; identical to SEQ ID NO: 5887
  Description of Artificial Sequence: Synthetic Peanut control sequences, 5' sequence and inner sequence

SEQ ID NO: 37441 - DNA, 53 bp, Artificial Sequence; identical to SEQ ID NO: 1518
  Description of Artificial Sequence: Synthetic Peanut control sequences, 5' sequence and inner sequence

SEQ ID NO: 37442 - DNA, 51 bp, Artificial Sequence; identical to SEQ ID NO: 13885
  Description of Artificial Sequence: Synthetic Peanut control sequences, 5' sequence and inner sequence

SEQ ID NO: 37443 - DNA, 53 bp, Artificial Sequence; identical to SEQ ID NO: 1104
  Description of Artificial Sequence: Synthetic Peanut control sequences, 5' sequence and inner sequence

SEQ ID NO: 37444 - DNA, 53 bp, Artificial Sequence; identical to SEQ ID NO: 1994
  Description of Artificial Sequence: Synthetic Peanut control sequences, 5' sequence and inner sequence

SEQ ID NO: 37445 - DNA, 53 bp, Artificial Sequence; identical to SEQ ID NO: 33719
  Description of Artificial Sequence: Synthetic Peanut control sequences, 5' sequence and inner sequence

SEQ ID NO: 37446 - DNA, 53 bp, Artificial Sequence; identical to SEQ ID NO: 1279
  Description of Artificial Sequence: Synthetic Peanut control sequences, 5' sequence and inner sequence

SEQ ID NO: 37447 - DNA, 53 bp, Artificial Sequence; identical to SEQ ID NO: 1399
  Description of Artificial Sequence: Synthetic Peanut control sequences, 5' sequence and inner sequence

SEQ ID NO: 37448 - DNA, 53 bp, Artificial Sequence; identical to SEQ ID NO: 1134
  Description of Artificial Sequence: Synthetic Peanut control sequences, 5' sequence and inner sequence

SEQ ID NO: 37449 - DNA, 53 bp, Artificial Sequence; identical to SEQ ID NO: 1436
  Description of Artificial Sequence: Synthetic Peanut control sequences, 5' sequence and inner sequence

SEQ ID NO: 37450 - DNA, 53 bp, Artificial Sequence; identical to SEQ ID NO: 1228
  Description of Artificial Sequence: Synthetic Peanut control sequences, 5' sequence and inner sequence

SEQ ID NO: 37451 - DNA, 53 bp, Artificial Sequence; identical to SEQ ID NO: 1943
  Description of Artificial Sequence: Synthetic Peanut control sequences, 5' sequence and inner sequence

SEQ ID NO: 37452 - DNA, 53 bp, Artificial Sequence; identical to SEQ ID NO: 5317
  Description of Artificial Sequence: Synthetic Peanut control sequences, 5' sequence and inner sequence

SEQ ID NO: 37453 - DNA, 52 bp, Artificial Sequence; identical to SEQ ID NO: 1873
  Description of Artificial Sequence: Synthetic Peanut control sequences, 5' sequence and inner sequence

SEQ ID NO: 37454 - DNA, 53 bp, Artificial Sequence; identical to SEQ ID NO: 29849
  Description of Artificial Sequence: Synthetic Peanut control sequences, 5' sequence and inner sequence

SEQ ID NO: 37455 - DNA, 53 bp, Artificial Sequence; identical to SEQ ID NO: 6001
  Description of Artificial Sequence: Synthetic Peanut control sequences, 5' sequence and inner sequence

SEQ ID NO: 37456 - DNA, 53 bp, Artificial Sequence
  Description of Artificial Sequence: Synthetic Peanut control sequences, 5' sequence and inner sequence
tagggaagagaaggacatatgatccatctcgacccgtcacgtggtgcatggcc

SEQ ID NO: 37457 - DNA, 53 bp, Artificial Sequence; identical to SEQ ID NO: 5997
  Description of Artificial Sequence: Synthetic Peanut control sequences, 5' sequence and inner sequence

SEQ ID NO: 37458 - DNA, 53 bp, Artificial Sequence; identical to SEQ ID NO: 1831
  Description of Artificial Sequence: Synthetic Peanut control sequences, 5' sequence and inner sequence

SEQ ID NO: 37459 - DNA, 53 bp, Artificial Sequence; identical to SEQ ID NO: 1108
  Description of Artificial Sequence: Synthetic Peanut control sequences, 5' sequence and inner sequence

SEQ ID NO: 37460 - DNA, 53 bp, Artificial Sequence; identical to SEQ ID NO: 1198
  Description of Artificial Sequence: Synthetic Peanut control sequences, 5' sequence and inner sequence

SEQ ID NO: 37461 - DNA, 53 bp, Artificial Sequence; identical to SEQ ID NO: 1513
  Description of Artificial Sequence: Synthetic Peanut control sequences, 5' sequence and inner sequence

SEQ ID NO: 37462 - DNA, 53 bp, Artificial Sequence; identical to SEQ ID NO: 13673
  Description of Artificial Sequence: Synthetic Peanut control sequences, 5' sequence and inner sequence

SEQ ID NO: 37463 - DNA, 53 bp, Artificial Sequence; identical to SEQ ID NO: 1268
  Description of Artificial Sequence: Synthetic Peanut control sequences, 5' sequence and inner sequence

SEQ ID NO: 37464 - DNA, 53 bp, Artificial Sequence; identical to SEQ ID NO: 1530
  Description of Artificial Sequence: Synthetic Peanut control sequences, 5' sequence and inner sequence

SEQ ID NO: 37465 - DNA, 53 bp, Artificial Sequence; identical to SEQ ID NO: 5644
  Description of Artificial Sequence: Synthetic Peanut control sequences, 5' sequence and inner sequence

SEQ ID NO: 37466 - DNA, 53 bp, Artificial Sequence; identical to SEQ ID NO: 9712
  Description of Artificial Sequence: Synthetic Peanut control sequences, 5' sequence and inner sequence

SEQ ID NO: 37467 - DNA, 53 bp, Artificial Sequence; identical to SEQ ID NO: 1475
  Description of Artificial Sequence: Synthetic Peanut control sequences, 5' sequence and inner sequence

SEQ ID NO: 37468 - DNA, 53 bp, Artificial Sequence; identical to SEQ ID NO: 1129
  Description of Artificial Sequence: Synthetic Peanut control sequences, 5' sequence and inner sequence

SEQ ID NO: 37469 - DNA, 53 bp, Artificial Sequence
  Description of Artificial Sequence: Synthetic Peanut control sequences, 5' sequence and inner sequence
tagggaagagaaggacatatgatggacggatcgaacctacaagttggcgtgga

SEQ ID NO: 37470 - DNA, 53 bp, Artificial Sequence; identical to SEQ ID NO: 1915
  Description of Artificial Sequence: Synthetic Peanut control sequences, 5' sequence and inner sequence

SEQ ID NO: 37471 - DNA, 53 bp, Artificial Sequence; identical to SEQ ID NO: 1807
  Description of Artificial Sequence: Synthetic Peanut control sequences, 5' sequence and inner sequence

SEQ ID NO: 37472 - DNA, 53 bp, Artificial Sequence; identical to SEQ ID NO: 5503
  Description of Artificial Sequence: Synthetic Peanut control sequences, 5' sequence and inner sequence

SEQ ID NO: 37473 - DNA, 53 bp, Artificial Sequence; identical to SEQ ID NO: 5688
  Description of Artificial Sequence: Synthetic Peanut control sequences, 5' sequence and inner sequence

SEQ ID NO: 37474 - DNA, 53 bp, Artificial Sequence; identical to SEQ ID NO: 1920
  Description of Artificial Sequence: Synthetic Peanut control sequences, 5' sequence and inner sequence

SEQ ID NO: 37475 - DNA, 53 bp, Artificial Sequence; identical to SEQ ID NO: 1102
  Description of Artificial Sequence: Synthetic Peanut control sequences, 5' sequence and inner sequence

SEQ ID NO: 37476 - DNA, 53 bp, Artificial Sequence; identical to SEQ ID NO: 1577
  Description of Artificial Sequence: Synthetic Peanut control sequences, 5' sequence and inner sequence

SEQ ID NO: 37477 - DNA, 53 bp, Artificial Sequence; identical to SEQ ID NO: 1746
  Description of Artificial Sequence: Synthetic Peanut control sequences, 5' sequence and inner sequence

SEQ ID NO: 37478 - DNA, 53 bp, Artificial Sequence; identical to SEQ ID NO: 1660
  Description of Artificial Sequence: Synthetic Peanut control sequences, 5' sequence and inner sequence

SEQ ID NO: 37479 - DNA, 53 bp, Artificial Sequence; identical to SEQ ID NO: 5775
  Description of Artificial Sequence: Synthetic Peanut control sequences, 5' sequence and inner sequence

SEQ ID NO: 37480 - DNA, 53 bp, Artificial Sequence; identical to SEQ ID NO: 1777
  Description of Artificial Sequence: Synthetic Peanut control sequences, 5' sequence and inner sequence

SEQ ID NO: 37481 - DNA, 53 bp, Artificial Sequence; identical to SEQ ID NO: 1877
  Description of Artificial Sequence: Synthetic Peanut control sequences, 5' sequence and inner sequence

SEQ ID NO: 37482 - DNA, 53 bp, Artificial Sequence
  Description of Artificial Sequence: Synthetic Peanut control sequences, 5' sequence and inner sequence
tagggaagagaaggacatatgattgtccgatcgaccctatcaagtgcagcatg

SEQ ID NO: 37483 - DNA, 51 bp, Artificial Sequence; identical to SEQ ID NO: 21321
  Description of Artificial Sequence: Synthetic Peanut control sequences, 5' sequence and inner sequence

SEQ ID NO: 37484 - DNA, 53 bp, Artificial Sequence; identical to SEQ ID NO: 1574
  Description of Artificial Sequence: Synthetic Peanut control sequences, 5' sequence and inner sequence

SEQ ID NO: 37485 - DNA, 53 bp, Artificial Sequence; identical to SEQ ID NO: 5913
  Description of Artificial Sequence: Synthetic Peanut control sequences, 5' sequence and inner sequence

SEQ ID NO: 37486 - DNA, 54 bp, Artificial Sequence; identical to SEQ ID NO: 5619
  Description of Artificial Sequence: Synthetic Peanut control sequences, 5' sequence and inner sequence

SEQ ID NO: 37487 - DNA, 53 bp, Artificial Sequence; identical to SEQ ID NO: 5856
  Description of Artificial Sequence: Synthetic Peanut control sequences, 5' sequence and inner sequence

SEQ ID NO: 37488 - DNA, 52 bp, Artificial Sequence; identical to SEQ ID NO: 9977
  Description of Artificial Sequence: Synthetic Peanut control sequences, 5' sequence and inner sequence

SEQ ID NO: 37489 - DNA, 53 bp, Artificial Sequence; identical to SEQ ID NO: 29350
  Description of Artificial Sequence: Synthetic Peanut control sequences, 5' sequence and inner sequence

SEQ ID NO: 37490 - DNA, 55 bp, Artificial Sequence
  Description of Artificial Sequence: Synthetic Peanut control sequences, 5' sequence and inner sequence
tagggaagagaaggacatatgatgtcacggaacgaagcctatcaagtgcagcatg

SEQ ID NO: 37491 - DNA, 53 bp, Artificial Sequence; identical to SEQ ID NO: 1617
  Description of Artificial Sequence: Synthetic Peanut control sequences, 5' sequence and inner sequence

SEQ ID NO: 37492 - DNA, 53 bp, Artificial Sequence; identical to SEQ ID NO: 2002
  Description of Artificial Sequence: Synthetic Peanut control sequences, 5' sequence and inner sequence

SEQ ID NO: 37493 - DNA, 53 bp, Artificial Sequence; identical to SEQ ID NO: 1805
  Description of Artificial Sequence: Synthetic Peanut control sequences, 5' sequence and inner sequence

SEQ ID NO: 37494 - DNA, 51 bp, Artificial Sequence; identical to SEQ ID NO: 1241
  Description of Artificial Sequence: Synthetic Peanut control sequences, 5' sequence and inner sequence

SEQ ID NO: 37495 - DNA, 53 bp, Artificial Sequence; identical to SEQ ID NO: 5999
  Description of Artificial Sequence: Synthetic Peanut control sequences, 5' sequence and inner sequence

SEQ ID NO: 37496 - DNA, 53 bp, Artificial Sequence; identical to SEQ ID NO: 1419
  Description of Artificial Sequence: Synthetic Peanut control sequences, 5' sequence and inner sequence

SEQ ID NO: 37497 - DNA, 53 bp, Artificial Sequence; identical to SEQ ID NO: 1625
  Description of Artificial Sequence: Synthetic Peanut control sequences, 5' sequence and inner sequence

SEQ ID NO: 37498 - DNA, 53 bp, Artificial Sequence; identical to SEQ ID NO: 1158
  Description of Artificial Sequence: Synthetic Peanut control sequences, 5' sequence and inner sequence

SEQ ID NO: 37499 - DNA, 53 bp, Artificial Sequence; identical to SEQ ID NO: 5535
  Description of Artificial Sequence: Synthetic Peanut control sequences, 5' sequence and inner sequence

SEQ ID NO: 37500 - DNA, 53 bp, Artificial Sequence
  Description of Artificial Sequence: Synthetic Peanut control sequences, 5' sequence and inner sequence
tagggaagagaaggacatatgatcggccgatcgaccctatcaagtgcagcatg

SEQ ID NO: 37501 - DNA, 53 bp, Artificial Sequence; identical to SEQ ID NO: 1183
  Description of Artificial Sequence: Synthetic Peanut control sequences, 5' sequence and inner sequence

SEQ ID NO: 37502 - DNA, 53 bp, Artificial Sequence; identical to SEQ ID NO: 25927
  Description of Artificial Sequence: Synthetic Peanut control sequences, 5' sequence and inner sequence

SEQ ID NO: 37503 - DNA, 53 bp, Artificial Sequence; identical to SEQ ID NO: 1431
  Description of Artificial Sequence: Synthetic Peanut control sequences, 5' sequence and inner sequence

SEQ ID NO: 37504 - DNA, 53 bp, Artificial Sequence
  Description of Artificial Sequence: Synthetic Peanut control sequences, 5' sequence and inner sequence
tagggaagagaaggacatatgatccatctcgcgctcctacgtggccatgcact

SEQ ID NO: 37505 - DNA, 53 bp, Artificial Sequence; identical to SEQ ID NO: 1579
  Description of Artificial Sequence: Synthetic Peanut control sequences, 5' sequence and inner sequence

SEQ ID NO: 37506 - DNA, 53 bp, Artificial Sequence
  Description of Artificial Sequence: Synthetic Peanut control sequences, 5' sequence and inner sequence
tagggaagagaaggacatatgattgtgtgcctgaacgacctacacgtggctca

SEQ ID NO: 37507 - DNA, 53 bp, Artificial Sequence; identical to SEQ ID NO: 29317
  Description of Artificial Sequence: Synthetic Peanut control sequences, 5' sequence and inner sequence

SEQ ID NO: 37508 - DNA, 53 bp, Artificial Sequence; identical to SEQ ID NO: 1455
  Description of Artificial Sequence: Synthetic Peanut control sequences, 5' sequence and inner sequence

SEQ ID NO: 37509 - DNA, 53 bp, Artificial Sequence; identical to SEQ ID NO: 1685
  Description of Artificial Sequence: Synthetic Peanut control sequences, 5' sequence and inner sequence

SEQ ID NO: 37510 - DNA, 53 bp, Artificial Sequence; identical to SEQ ID NO: 5787
  Description of Artificial Sequence: Synthetic Peanut control sequences, 5' sequence and inner sequence

SEQ ID NO: 37511 - DNA, 53 bp, Artificial Sequence
  Description of Artificial Sequence: Synthetic Peanut control sequences, 5' sequence and inner sequence
tagggaagagaaggacatatgatcgcgatcacgtccgttcccttcgagtggcc

SEQ ID NO: 37512 - DNA, 53 bp, Artificial Sequence; identical to SEQ ID NO: 1701
  Description of Artificial Sequence: Synthetic Peanut control sequences, 5' sequence and inner sequence

SEQ ID NO: 37513 - DNA, 53 bp, Artificial Sequence; identical to SEQ ID NO: 1670
  Description of Artificial Sequence: Synthetic Peanut control sequences, 5' sequence and inner sequence

SEQ ID NO: 37514 - DNA, 53 bp, Artificial Sequence
  Description of Artificial Sequence: Synthetic Peanut control sequences, 5' sequence and inner sequence
tagggaagagaaggacatatgattggcttgcatgctggacttcctactggttt

SEQ ID NO: 37515 - DNA, 52 bp, Artificial Sequence; identical to SEQ ID NO: 33972
  Description of Artificial Sequence: Synthetic Peanut control sequences, 5' sequence and inner sequence

SEQ ID NO: 37516 - DNA, 53 bp, Artificial Sequence
  Description of Artificial Sequence: Synthetic Peanut control sequences, 5' sequence and inner sequence
tagggaagagaaggacatatgatcgtactgaacgcaccctcacaagtggcgca

SEQ ID NO: 37517 - DNA, 53 bp, Artificial Sequence; identical to SEQ ID NO: 1157
  Description of Artificial Sequence: Synthetic Peanut control sequences, 5' sequence and inner sequence

SEQ ID NO: 37518 - DNA, 53 bp, Artificial Sequence; identical to SEQ ID NO: 25630
  Description of Artificial Sequence: Synthetic Peanut control sequences, 5' sequence and inner sequence

SEQ ID NO: 37519 - DNA, 53 bp, Artificial Sequence; identical to SEQ ID NO: 1220
  Description of Artificial Sequence: Synthetic Peanut control sequences, 5' sequence and inner sequence

SEQ ID NO: 37520 - DNA, 53 bp, Artificial Sequence; identical to SEQ ID NO: 1090
  Description of Artificial Sequence: Synthetic Peanut control sequences, 5' sequence and inner sequence

SEQ ID NO: 37521 - DNA, 53 bp, Artificial Sequence; identical to SEQ ID NO: 1776
  Description of Artificial Sequence: Synthetic Peanut control sequences, 5' sequence and inner sequence

SEQ ID NO: 37522 - DNA, 54 bp, Artificial Sequence; identical to SEQ ID NO: 33291
  Description of Artificial Sequence: Synthetic Peanut control sequences, 5' sequence and inner sequence

SEQ ID NO: 37523 - DNA, 53 bp, Artificial Sequence; identical to SEQ ID NO: 5312
  Description of Artificial Sequence: Synthetic Peanut control sequences, 5' sequence and inner sequence

SEQ ID NO: 37524 - DNA, 53 bp, Artificial Sequence; identical to SEQ ID NO: 1523
  Description of Artificial Sequence: Synthetic Peanut control sequences, 5' sequence and inner sequence

SEQ ID NO: 37525 - DNA, 53 bp, Artificial Sequence; identical to SEQ ID NO: 1912
  Description of Artificial Sequence: Synthetic Peanut control sequences, 5' sequence and inner sequence

SEQ ID NO: 37526 - DNA, 53 bp, Artificial Sequence; identical to SEQ ID NO: 1084
  Description of Artificial Sequence: Synthetic Peanut control sequences, 5' sequence and inner sequence

SEQ ID NO: 37527 - DNA, 53 bp, Artificial Sequence
  Description of Artificial Sequence: Synthetic Peanut control sequences, 5' sequence and inner sequence
tagggaagagaaggacatatgatgtacgcgtcgaccttcaagtgtgccgtgga

SEQ ID NO: 37528 - DNA, 53 bp, Artificial Sequence; identical to SEQ ID NO: 1397
  Description of Artificial Sequence: Synthetic Peanut control sequences, 5' sequence and inner sequence

SEQ ID NO: 37529 - DNA, 53 bp, Artificial Sequence; identical to SEQ ID NO: 5807
  Description of Artificial Sequence: Synthetic Peanut control sequences, 5' sequence and inner sequence

SEQ ID NO: 37530 - DNA, 53 bp, Artificial Sequence; identical to SEQ ID NO: 1900
  Description of Artificial Sequence: Synthetic Peanut control sequences, 5' sequence and inner sequence

SEQ ID NO: 37531 - DNA, 53 bp, Artificial Sequence; identical to SEQ ID NO: 5616
  Description of Artificial Sequence: Synthetic Peanut control sequences, 5' sequence and inner sequence

SEQ ID NO: 37532 - DNA, 53 bp, Artificial Sequence; identical to SEQ ID NO: 1426
  Description of Artificial Sequence: Synthetic Peanut control sequences, 5' sequence and inner sequence

SEQ ID NO: 37533 - DNA, 53 bp, Artificial Sequence; identical to SEQ ID NO: 29427
  Description of Artificial Sequence: Synthetic Peanut control sequences, 5' sequence and inner sequence

SEQ ID NO: 37534 - DNA, 53 bp, Artificial Sequence; identical to SEQ ID NO: 1622
  Description of Artificial Sequence: Synthetic Peanut control sequences, 5' sequence and inner sequence

SEQ ID NO: 37535 - DNA, 53 bp, Artificial Sequence; identical to SEQ ID NO: 1680
  Description of Artificial Sequence: Synthetic Peanut control sequences, 5' sequence and inner sequence

SEQ ID NO: 37536 - DNA, 53 bp, Artificial Sequence; identical to SEQ ID NO: 5939
  Description of Artificial Sequence: Synthetic Peanut control sequences, 5' sequence and inner sequence

SEQ ID NO: 37537 - DNA, 53 bp, Artificial Sequence; identical to SEQ ID NO: 1634
  Description of Artificial Sequence: Synthetic Peanut control sequences, 5' sequence and inner sequence

SEQ ID NO: 37538 - DNA, 53 bp, Artificial Sequence; identical to SEQ ID NO: 9860
  Description of Artificial Sequence: Synthetic Peanut control sequences, 5' sequence and inner sequence

SEQ ID NO: 37539 - DNA, 53 bp, Artificial Sequence; identical to SEQ ID NO: 1173
  Description of Artificial Sequence: Synthetic Peanut control sequences, 5' sequence and inner sequence

SEQ ID NO: 37540 - DNA, 53 bp, Artificial Sequence; identical to SEQ ID NO: 1808
  Description of Artificial Sequence: Synthetic Peanut control sequences, 5' sequence and inner sequence

SEQ ID NO: 37541 - DNA, 53 bp, Artificial Sequence; identical to SEQ ID NO: 1671
  Description of Artificial Sequence: Synthetic Peanut control sequences, 5' sequence and inner sequence

SEQ ID NO: 37542 - DNA, 53 bp, Artificial Sequence; identical to SEQ ID NO: 13581
  Description of Artificial Sequence: Synthetic Peanut control sequences, 5' sequence and inner sequence

SEQ ID NO: 37543 - DNA, 53 bp, Artificial Sequence; identical to SEQ ID NO: 5603
  Description of Artificial Sequence: Synthetic Peanut control sequences, 5' sequence and inner sequence

SEQ ID NO: 37544 - DNA, 53 bp, Artificial Sequence; identical to SEQ ID NO: 5230
  Description of Artificial Sequence: Synthetic Peanut control sequences, 5' sequence and inner sequence

SEQ ID NO: 37545 - DNA, 53 bp, Artificial Sequence; identical to SEQ ID NO: 13985
  Description of Artificial Sequence: Synthetic Peanut control sequences, 5' sequence and inner sequence

SEQ ID NO: 37546 - DNA, 53 bp, Artificial Sequence
  Description of Artificial Sequence: Synthetic Peanut control sequences, 5' sequence and inner sequence
tagggaagagaaggacatatgatacgtccgcactccttgccatacacgtgggc

SEQ ID NO: 37547 - DNA, 53 bp, Artificial Sequence; identical to SEQ ID NO: 1559
  Description of Artificial Sequence: Synthetic Peanut control sequences, 5' sequence and inner sequence

SEQ ID NO: 37548 - DNA, 51 bp, Artificial Sequence
  Description of Artificial Sequence: Synthetic Peanut control sequences, 5' sequence and inner sequence
tagggaagagaaggacatatgatccgcacgtagccctatcatgaggccatg

SEQ ID NO: 37549 - DNA, 53 bp, Artificial Sequence; identical to SEQ ID NO: 1521
  Description of Artificial Sequence: Synthetic Peanut control sequences, 5' sequence and inner sequence

SEQ ID NO: 37550 - DNA, 53 bp, Artificial Sequence; identical to SEQ ID NO: 1921
  Description of Artificial Sequence: Synthetic Peanut control sequences, 5' sequence and inner sequence

SEQ ID NO: 37551 - DNA, 53 bp, Artificial Sequence
  Description of Artificial Sequence: Synthetic Peanut control sequences, 5' sequence and inner sequence
tagggaagagaaggacatatgatgtgcgcactcttgccttccagtggttcgtg

SEQ ID NO: 37552 - DNA, 53 bp, Artificial Sequence
  Description of Artificial Sequence: Synthetic Peanut control sequences, 5' sequence and inner sequence
tagggaagagaaggacatatgatcatgctctgaccgtggcaggaacgctgtca

SEQ ID NO: 37553 - DNA, 53 bp, Artificial Sequence; identical to SEQ ID NO: 21229
  Description of Artificial Sequence: Synthetic Peanut control sequences, 5' sequence and inner sequence

SEQ ID NO: 37554 - DNA, 53 bp, Artificial Sequence; identical to SEQ ID NO: 1385
  Description of Artificial Sequence: Synthetic Peanut control sequences, 5' sequence and inner sequence

SEQ ID NO: 37555 - DNA, 53 bp, Artificial Sequence; identical to SEQ ID NO: 25843
  Description of Artificial Sequence: Synthetic Peanut control sequences, 5' sequence and inner sequence

SEQ ID NO: 37556 - DNA, 53 bp, Artificial Sequence; identical to SEQ ID NO: 29702
  Description of Artificial Sequence: Synthetic Peanut control sequences, 5' sequence and inner sequence

SEQ ID NO: 37557 - DNA, 53 bp, Artificial Sequence; identical to SEQ ID NO: 29823
  Description of Artificial Sequence: Synthetic Peanut control sequences, 5' sequence and inner sequence

SEQ ID NO: 37558 - DNA, 53 bp, Artificial Sequence; identical to SEQ ID NO: 5492
  Description of Artificial Sequence: Synthetic Peanut control sequences, 5' sequence and inner sequence

SEQ ID NO: 37559 - DNA, 53 bp, Artificial Sequence; identical to SEQ ID NO: 29513
  Description of Artificial Sequence: Synthetic Peanut control sequences, 5' sequence and inner sequence

SEQ ID NO: 37560 - DNA, 53 bp, Artificial Sequence; identical to SEQ ID NO: 1677
  Description of Artificial Sequence: Synthetic Peanut control sequences, 5' sequence and inner sequence

SEQ ID NO: 37561 - DNA, 53 bp, Artificial Sequence; identical to SEQ ID NO: 9844
  Description of Artificial Sequence: Synthetic Peanut control sequences, 5' sequence and inner sequence

SEQ ID NO: 37562 - DNA, 53 bp, Artificial Sequence; identical to SEQ ID NO: 5381
  Description of Artificial Sequence: Synthetic Peanut control sequences, 5' sequence and inner sequence

SEQ ID NO: 37563 - DNA, 53 bp, Artificial Sequence; identical to SEQ ID NO: 29257
  Description of Artificial Sequence: Synthetic Peanut control sequences, 5' sequence and inner sequence

SEQ ID NO: 37564 - DNA, 53 bp, Artificial Sequence; identical to SEQ ID NO: 1367
  Description of Artificial Sequence: Synthetic Peanut control sequences, 5' sequence and inner sequence

SEQ ID NO: 37565 - DNA, 51 bp, Artificial Sequence; identical to SEQ ID NO: 5786
  Description of Artificial Sequence: Synthetic Peanut control sequences, 5' sequence and inner sequence

SEQ ID NO: 37566 - DNA, 52 bp, Artificial Sequence; identical to SEQ ID NO: 5968
  Description of Artificial Sequence: Synthetic Peanut control sequences, 5' sequence and inner sequence

SEQ ID NO: 37567 - DNA, 53 bp, Artificial Sequence; identical to SEQ ID NO: 1246
  Description of Artificial Sequence: Synthetic Peanut control sequences, 5' sequence and inner sequence

SEQ ID NO: 37568 - DNA, 53 bp, Artificial Sequence; identical to SEQ ID NO: 1280
  Description of Artificial Sequence: Synthetic Peanut control sequences, 5' sequence and inner sequence

SEQ ID NO: 37569 - DNA, 53 bp, Artificial Sequence; identical to SEQ ID NO: 1098
  Description of Artificial Sequence: Synthetic Peanut control sequences, 5' sequence and inner sequence

SEQ ID NO: 37570 - DNA, 53 bp, Artificial Sequence; identical to SEQ ID NO: 1768
  Description of Artificial Sequence: Synthetic Peanut control sequences, 5' sequence and inner sequence

SEQ ID NO: 37571 - DNA, 53 bp, Artificial Sequence; identical to SEQ ID NO: 5472
  Description of Artificial Sequence: Synthetic Peanut control sequences, 5' sequence and inner sequence

SEQ ID NO: 37572 - DNA, 53 bp, Artificial Sequence; identical to SEQ ID NO: 25527
  Description of Artificial Sequence: Synthetic Peanut control sequences, 5' sequence and inner sequence

SEQ ID NO: 37573 - DNA, 48 bp, Artificial Sequence; identical to SEQ ID NO: 1427
  Description of Artificial Sequence: Synthetic Peanut control sequences, 5' sequence and inner sequence

SEQ ID NO: 37574 - DNA, 53 bp, Artificial Sequence; identical to SEQ ID NO: 1467
  Description of Artificial Sequence: Synthetic Peanut control sequences, 5' sequence and inner sequence

SEQ ID NO: 37575 - DNA, 53 bp, Artificial Sequence; identical to SEQ ID NO: 1296
  Description of Artificial Sequence: Synthetic Peanut control sequences, 5' sequence and inner sequence

SEQ ID NO: 37576 - DNA, 53 bp, Artificial Sequence; identical to SEQ ID NO: 5748
  Description of Artificial Sequence: Synthetic Peanut control sequences, 5' sequence and inner sequence

SEQ ID NO: 37577 - DNA, 53 bp, Artificial Sequence; identical to SEQ ID NO: 1265
  Description of Artificial Sequence: Synthetic Peanut control sequences, 5' sequence and inner sequence

SEQ ID NO: 37578 - DNA, 53 bp, Artificial Sequence; identical to SEQ ID NO: 1632
  Description of Artificial Sequence: Synthetic Peanut control sequences, 5' sequence and inner sequence

SEQ ID NO: 37579 - DNA, 51 bp, Artificial Sequence
  Description of Artificial Sequence: Synthetic Peanut control sequences, 5' sequence and inner sequence
tagggaagagaaggacatatgattggccgatcgaccctatcaagtgcgaca

SEQ ID NO: 37580 - DNA, 53 bp, Artificial Sequence; identical to SEQ ID NO: 1857
  Description of Artificial Sequence: Synthetic Peanut control sequences, 5' sequence and inner sequence

SEQ ID NO: 37581 - DNA, 53 bp, Artificial Sequence; identical to SEQ ID NO: 1493
  Description of Artificial Sequence: Synthetic Peanut control sequences, 5' sequence and inner sequence

SEQ ID NO: 37582 - DNA, 53 bp, Artificial Sequence; identical to SEQ ID NO: 1306
  Description of Artificial Sequence: Synthetic Peanut control sequences, 5' sequence and inner sequence

SEQ ID NO: 37583 - DNA, 53 bp, Artificial Sequence
  Description of Artificial Sequence: Synthetic Peanut control sequences, 5' sequence and inner sequence
tagggaagagaaggacatatgatggcctgcgatggatgtggacggtacgcggt

SEQ ID NO: 37584 - DNA, 53 bp, Artificial Sequence; identical to SEQ ID NO: 1979
  Description of Artificial Sequence: Synthetic Peanut control sequences, 5' sequence and inner sequence

SEQ ID NO: 37585 - DNA, 53 bp, Artificial Sequence; identical to SEQ ID NO: 5591
  Description of Artificial Sequence: Synthetic Peanut control sequences, 5' sequence and inner sequence

SEQ ID NO: 37586 - DNA, 53 bp, Artificial Sequence
  Description of Artificial Sequence: Synthetic Peanut control sequences, 5' sequence and inner sequence
tagggaagagaaggacatatgattggccgctcgaccctatcaagtgcagcatg

SEQ ID NO: 37587 - DNA, 53 bp, Artificial Sequence; identical to SEQ ID NO: 21874
  Description of Artificial Sequence: Synthetic Peanut control sequences, 5' sequence and inner sequence

SEQ ID NO: 37588 - DNA, 53 bp, Artificial Sequence; identical to SEQ ID NO: 9910
  Description of Artificial Sequence: Synthetic Peanut control sequences, 5' sequence and inner sequence

SEQ ID NO: 37589 - DNA, 53 bp, Artificial Sequence; identical to SEQ ID NO: 1484
  Description of Artificial Sequence: Synthetic Peanut control sequences, 5' sequence and inner sequence

SEQ ID NO: 37590 - DNA, 53 bp, Artificial Sequence; identical to SEQ ID NO: 33433
  Description of Artificial Sequence: Synthetic Peanut control sequences, 5' sequence and inner sequence

SEQ ID NO: 37591 - DNA, 53 bp, Artificial Sequence; identical to SEQ ID NO: 1138
  Description of Artificial Sequence: Synthetic Peanut control sequences, 5' sequence and inner sequence

SEQ ID NO: 37592 - DNA, 53 bp, Artificial Sequence; identical to SEQ ID NO: 9564
  Description of Artificial Sequence: Synthetic Peanut control sequences, 5' sequence and inner sequence

SEQ ID NO: 37593 - DNA, 53 bp, Artificial Sequence; identical to SEQ ID NO: 1631
  Description of Artificial Sequence: Synthetic Peanut control sequences, 5' sequence and inner sequence

SEQ ID NO: 37594 - DNA, 54 bp, Artificial Sequence; identical to SEQ ID NO: 1659
  Description of Artificial Sequence: Synthetic Peanut control sequences, 5' sequence and inner sequence

SEQ ID NO: 37595 - DNA, 53 bp, Artificial Sequence; identical to SEQ ID NO: 9782
  Description of Artificial Sequence: Synthetic Peanut control sequences, 5' sequence and inner sequence

SEQ ID NO: 37596 - DNA, 53 bp, Artificial Sequence; identical to SEQ ID NO: 5651
  Description of Artificial Sequence: Synthetic Peanut control sequences, 5' sequence and inner sequence

SEQ ID NO: 37597 - DNA, 53 bp, Artificial Sequence; identical to SEQ ID NO: 1442
  Description of Artificial Sequence: Synthetic Peanut control sequences, 5' sequence and inner sequence

SEQ ID NO: 37598 - DNA, 53 bp, Artificial Sequence; identical to SEQ ID NO: 5837
  Description of Artificial Sequence: Synthetic Peanut control sequences, 5' sequence and inner sequence

SEQ ID NO: 37599 - DNA, 53 bp, Artificial Sequence; identical to SEQ ID NO: 5280
  Description of Artificial Sequence: Synthetic Peanut control sequences, 5' sequence and inner sequence

SEQ ID NO: 37600 - DNA, 53 bp, Artificial Sequence; identical to SEQ ID NO: 1141
  Description of Artificial Sequence: Synthetic Peanut control sequences, 5' sequence and inner sequence

SEQ ID NO: 37601 - DNA, 53 bp, Artificial Sequence; identical to SEQ ID NO: 9850
  Description of Artificial Sequence: Synthetic Peanut control sequences, 5' sequence and inner sequence

SEQ ID NO: 37602 - DNA, 53 bp, Artificial Sequence
  Description of Artificial Sequence: Synthetic Peanut control sequences, 5' sequence and inner sequence
tagggaagagaaggacatatgattggccgatcgaccctctcaagtgcagcatg

SEQ ID NO: 37603 - DNA, 53 bp, Artificial Sequence; identical to SEQ ID NO: 5580
  Description of Artificial Sequence: Synthetic Peanut control sequences, 5' sequence and inner sequence

SEQ ID NO: 37604 - DNA, 53 bp, Artificial Sequence; identical to SEQ ID NO: 5590
  Description of Artificial Sequence: Synthetic Peanut control sequences, 5' sequence and inner sequence

SEQ ID NO: 37605 - DNA, 53 bp, Artificial Sequence; identical to SEQ ID NO: 5565
  Description of Artificial Sequence: Synthetic Peanut control sequences, 5' sequence and inner sequence

SEQ ID NO: 37606 - DNA, 53 bp, Artificial Sequence; identical to SEQ ID NO: 1889
  Description of Artificial Sequence: Synthetic Peanut control sequences, 5' sequence and inner sequence

SEQ ID NO: 37607 - DNA, 54 bp, Artificial Sequence
  Description of Artificial Sequence: Synthetic Peanut control sequences, 5' sequence and inner sequence
tagggaagagaaggacatatgatgtgctgcgatggcttagcaaagtgcgacatg

SEQ ID NO: 37608 - DNA, 53 bp, Artificial Sequence; identical to SEQ ID NO: 1244
  Description of Artificial Sequence: Synthetic Peanut control sequences, 5' sequence and inner sequence

SEQ ID NO: 37609 - DNA, 53 bp, Artificial Sequence; identical to SEQ ID NO: 1499
  Description of Artificial Sequence: Synthetic Peanut control sequences, 5' sequence and inner sequence

SEQ ID NO: 37610 - DNA, 53 bp, Artificial Sequence; identical to SEQ ID NO: 13872
  Description of Artificial Sequence: Synthetic Peanut control sequences, 5' sequence and inner sequence

SEQ ID NO: 37611 - DNA, 53 bp, Artificial Sequence
  Description of Artificial Sequence: Synthetic Peanut control sequences, 5' sequence and inner sequence
tagggaagagaaggacatatgatgtggccgcagctgacctagcatgtgtgtca

SEQ ID NO: 37612 - DNA, 53 bp, Artificial Sequence
  Description of Artificial Sequence: Synthetic Peanut control sequences, 5' sequence and inner sequence
tagggaagagaaggacatatgatgtgcttcacgacctagcacgtggggatgga

SEQ ID NO: 37613 - DNA, 53 bp, Artificial Sequence; identical to SEQ ID NO: 1274
  Description of Artificial Sequence: Synthetic Peanut control sequences, 5' sequence and inner sequence

SEQ ID NO: 37614 - DNA, 53 bp, Artificial Sequence; identical to SEQ ID NO: 29914
  Description of Artificial Sequence: Synthetic Peanut control sequences, 5' sequence and inner sequence

SEQ ID NO: 37615 - DNA, 53 bp, Artificial Sequence; identical to SEQ ID NO: 21744
  Description of Artificial Sequence: Synthetic Peanut control sequences, 5' sequence and inner sequence

SEQ ID NO: 37616 - DNA, 53 bp, Artificial Sequence; identical to SEQ ID NO: 1637
  Description of Artificial Sequence: Synthetic Peanut control sequences, 5' sequence and inner sequence

SEQ ID NO: 37617 - DNA, 53 bp, Artificial Sequence
  Description of Artificial Sequence: Synthetic Peanut control sequences, 5' sequence and inner sequence
tagggaagagaaggacatatgatgtcatgcgcggacattcaagttggcgtgta

SEQ ID NO: 37618 - DNA, 53 bp, Artificial Sequence; identical to SEQ ID NO: 9807
  Description of Artificial Sequence: Synthetic Peanut control sequences, 5' sequence and inner sequence

SEQ ID NO: 37619 - DNA, 53 bp, Artificial Sequence; identical to SEQ ID NO: 1657
  Description of Artificial Sequence: Synthetic Peanut control sequences, 5' sequence and inner sequence

SEQ ID NO: 37620 - DNA, 53 bp, Artificial Sequence; identical to SEQ ID NO: 13791
  Description of Artificial Sequence: Synthetic Peanut control sequences, 5' sequence and inner sequence

SEQ ID NO: 37621 - DNA, 53 bp, Artificial Sequence; identical to SEQ ID NO: 21673
  Description of Artificial Sequence: Synthetic Peanut control sequences, 5' sequence and inner sequence

SEQ ID NO: 37622 - DNA, 53 bp, Artificial Sequence; identical to SEQ ID NO: 21722
  Description of Artificial Sequence: Synthetic Peanut control sequences, 5' sequence and inner sequence

SEQ ID NO: 37623 - DNA, 53 bp, Artificial Sequence; identical to SEQ ID NO: 5393
  Description of Artificial Sequence: Synthetic Peanut control sequences, 5' sequence and inner sequence

SEQ ID NO: 37624 - DNA, 53 bp, Artificial Sequence
  Description of Artificial Sequence: Synthetic Peanut control sequences, 5' sequence and inner sequence
tagggaagagaaggacatatgatcgtatggcctggacatccctcaagttggca

SEQ ID NO: 37625 - DNA, 53 bp, Artificial Sequence; identical to SEQ ID NO: 1248
  Description of Artificial Sequence: Synthetic Peanut control sequences, 5' sequence and inner sequence

SEQ ID NO: 37626 - DNA, 53 bp, Artificial Sequence; identical to SEQ ID NO: 5525
  Description of Artificial Sequence: Synthetic Peanut control sequences, 5' sequence and inner sequence

SEQ ID NO: 37627 - DNA, 53 bp, Artificial Sequence; identical to SEQ ID NO: 1654
  Description of Artificial Sequence: Synthetic Peanut control sequences, 5' sequence and inner sequence

SEQ ID NO: 37628 - DNA, 53 bp, Artificial Sequence; identical to SEQ ID NO: 1504
  Description of Artificial Sequence: Synthetic Peanut control sequences, 5' sequence and inner sequence

SEQ ID NO: 37629 - DNA, 53 bp, Artificial Sequence; identical to SEQ ID NO: 33416
  Description of Artificial Sequence: Synthetic Peanut control sequences, 5' sequence and inner sequence

SEQ ID NO: 37630 - DNA, 48 bp, Artificial Sequence
  Description of Artificial Sequence: Synthetic Peanut control sequences, 5' sequence and inner sequence
tagggaagagaaggacatatgatgtactgcactgccctacacgtgggc

SEQ ID NO: 37631 - DNA, 53 bp, Artificial Sequence; identical to SEQ ID NO: 1932
  Description of Artificial Sequence: Synthetic Peanut control sequences, 5' sequence and inner sequence

SEQ ID NO: 37632 - DNA, 53 bp, Artificial Sequence; identical to SEQ ID NO: 5870
  Description of Artificial Sequence: Synthetic Peanut control sequences, 5' sequence and inner sequence

SEQ ID NO: 37633 - DNA, 53 bp, Artificial Sequence; identical to SEQ ID NO: 1830
  Description of Artificial Sequence: Synthetic Peanut control sequences, 5' sequence and inner sequence

SEQ ID NO: 37634 - DNA, 53 bp, Artificial Sequence
  Description of Artificial Sequence: Synthetic Peanut control sequences, 5' sequence and inner sequence
tagggaagagaaggacatatgatgtcatgcgctgacattcaagttggcgtgga

SEQ ID NO: 37635 - DNA, 53 bp, Artificial Sequence; identical to SEQ ID NO: 29994
  Description of Artificial Sequence: Synthetic Peanut control sequences, 5' sequence and inner sequence

SEQ ID NO: 37636 - DNA, 53 bp, Artificial Sequence; identical to SEQ ID NO: 1403
  Description of Artificial Sequence: Synthetic Peanut control sequences, 5' sequence and inner sequence

SEQ ID NO: 37637 - DNA, 53 bp, Artificial Sequence; identical to SEQ ID NO: 1439
  Description of Artificial Sequence: Synthetic Peanut control sequences, 5' sequence and inner sequence

SEQ ID NO: 37638 - DNA, 53 bp, Artificial Sequence; identical to SEQ ID NO: 1846
  Description of Artificial Sequence: Synthetic Peanut control sequences, 5' sequence and inner sequence

SEQ ID NO: 37639 - DNA, 53 bp, Artificial Sequence
  Description of Artificial Sequence: Synthetic Peanut control sequences, 5' sequence and inner sequence
tagggaagagaaggacatatgattggccgatcgaccctatcaagggcagcatg

SEQ ID NO: 37640 - DNA, 53 bp, Artificial Sequence; identical to SEQ ID NO: 9871
  Description of Artificial Sequence: Synthetic Peanut control sequences, 5' sequence and inner sequence

SEQ ID NO: 37641 - DNA, 53 bp, Artificial Sequence; identical to SEQ ID NO: 9876
  Description of Artificial Sequence: Synthetic Peanut control sequences, 5' sequence and inner sequence

SEQ ID NO: 37642 - DNA, 53 bp, Artificial Sequence
  Description of Artificial Sequence: Synthetic Peanut control sequences, 5' sequence and inner sequence
tagggaagagaaggacatatgatggacggatcgaacctacaagttgtcgcgga

SEQ ID NO: 37643 - DNA, 53 bp, Artificial Sequence
  Description of Artificial Sequence: Synthetic Peanut control sequences, 5' sequence and inner sequence
tagggaagagaaggacatatgatccgtaccgaccctatcaagtgctgtccatg

SEQ ID NO: 37644 - DNA, 53 bp, Artificial Sequence; identical to SEQ ID NO: 21549
  Description of Artificial Sequence: Synthetic Peanut control sequences, 5' sequence and inner sequence

SEQ ID NO: 37645 - DNA, 53 bp, Artificial Sequence; identical to SEQ ID NO: 13892
  Description of Artificial Sequence: Synthetic Peanut control sequences, 5' sequence and inner sequence

SEQ ID NO: 37646 - DNA, 55 bp, Artificial Sequence
  Description of Artificial Sequence: Synthetic Peanut control sequences, 5' sequence and inner sequence
tagggaagagaaggacatatgatcatgtgtcgactcgccctatcatgaggccatg

SEQ ID NO: 37647 - DNA, 53 bp, Artificial Sequence
  Description of Artificial Sequence: Synthetic Peanut control sequences, 5' sequence and inner sequence
tagggaagagaaggacatatgatggtccgaacgcacctcatgtgtgtcgtgga

SEQ ID NO: 37648 - DNA, 53 bp, Artificial Sequence; identical to SEQ ID NO: 1633
  Description of Artificial Sequence: Synthetic Peanut control sequences, 5' sequence and inner sequence

SEQ ID NO: 37649 - DNA, 53 bp, Artificial Sequence; identical to SEQ ID NO: 5494
  Description of Artificial Sequence: Synthetic Peanut control sequences, 5' sequence and inner sequence

SEQ ID NO: 37650 - DNA, 53 bp, Artificial Sequence; identical to SEQ ID NO: 21289
  Description of Artificial Sequence: Synthetic Peanut control sequences, 5' sequence and inner sequence

SEQ ID NO: 37651 - DNA, 51 bp, Artificial Sequence
  Description of Artificial Sequence: Synthetic Peanut control sequences, 5' sequence and inner sequence
tagggaagagaaggacatatgatggcctcgatggatgtggtggtgctgtca

SEQ ID NO: 37652 - DNA, 56 bp, Artificial Sequence
  Description of Artificial Sequence: Synthetic Peanut control sequences, 5' sequence and inner sequence
tagggaagagaaggacatatgatccgcatcggaccgatcaaggcaggctgtacgag

SEQ ID NO: 37653 - DNA, 53 bp, Artificial Sequence
  Description of Artificial Sequence: Synthetic Peanut control sequences, 5' sequence and inner sequence
tagggaagagaaggacatatgatggccaagctgaccgtcaacgtggttgtgga

SEQ ID NO: 37654 - DNA, 53 bp, Artificial Sequence; identical to SEQ ID NO: 9810
  Description of Artificial Sequence: Synthetic Peanut control sequences, 5' sequence and inner sequence

SEQ ID NO: 37655 - DNA, 53 bp, Artificial Sequence; identical to SEQ ID NO: 33565
  Description of Artificial Sequence: Synthetic Peanut control sequences, 5' sequence and inner sequence

SEQ ID NO: 37656 - DNA, 53 bp, Artificial Sequence; identical to SEQ ID NO: 33235
  Description of Artificial Sequence: Synthetic Peanut control sequences, 5' sequence and inner sequence

SEQ ID NO: 37657 - DNA, 53 bp, Artificial Sequence; identical to SEQ ID NO: 21269
  Description of Artificial Sequence: Synthetic Peanut control sequences, 5' sequence and inner sequence

SEQ ID NO: 37658 - DNA, 53 bp, Artificial Sequence; identical to SEQ ID NO: 5351
  Description of Artificial Sequence: Synthetic Peanut control sequences, 5' sequence and inner sequence

SEQ ID NO: 37659 - DNA, 53 bp, Artificial Sequence; identical to SEQ ID NO: 1930
  Description of Artificial Sequence: Synthetic Peanut control sequences, 5' sequence and inner sequence

SEQ ID NO: 37660 - DNA, 53 bp, Artificial Sequence; identical to SEQ ID NO: 1841
  Description of Artificial Sequence: Synthetic Peanut control sequences, 5' sequence and inner sequence

SEQ ID NO: 37661 - DNA, 53 bp, Artificial Sequence; identical to SEQ ID NO: 1415
  Description of Artificial Sequence: Synthetic Peanut control sequences, 5' sequence and inner sequence

SEQ ID NO: 37662 - DNA, 53 bp, Artificial Sequence; identical to SEQ ID NO: 9988
  Description of Artificial Sequence: Synthetic Peanut control sequences, 5' sequence and inner sequence

SEQ ID NO: 37663 - DNA, 53 bp, Artificial Sequence; identical to SEQ ID NO: 5380
  Description of Artificial Sequence: Synthetic Peanut control sequences, 5' sequence and inner sequence

SEQ ID NO: 37664 - DNA, 53 bp, Artificial Sequence; identical to SEQ ID NO: 33404
  Description of Artificial Sequence: Synthetic Peanut control sequences, 5' sequence and inner sequence

SEQ ID NO: 37665 - DNA, 53 bp, Artificial Sequence
  Description of Artificial Sequence: Synthetic Peanut control sequences, 5' sequence and inner sequence
tagggaagagaaggacatatgatcacgtcagtccggatcggcttagctgggca

SEQ ID NO: 37666 - DNA, 53 bp, Artificial Sequence; identical to SEQ ID NO: 5445
  Description of Artificial Sequence: Synthetic Peanut control sequences, 5' sequence and inner sequence

SEQ ID NO: 37667 - DNA, 53 bp, Artificial Sequence; identical to SEQ ID NO: 1881
  Description of Artificial Sequence: Synthetic Peanut control sequences, 5' sequence and inner sequence

SEQ ID NO: 37668 - DNA, 53 bp, Artificial Sequence; identical to SEQ ID NO: 1190
  Description of Artificial Sequence: Synthetic Peanut control sequences, 5' sequence and inner sequence

SEQ ID NO: 37669 - DNA, 53 bp, Artificial Sequence; identical to SEQ ID NO: 9928
  Description of Artificial Sequence: Synthetic Peanut control sequences, 5' sequence and inner sequence

SEQ ID NO: 37670 - DNA, 53 bp, Artificial Sequence; identical to SEQ ID NO: 1471
  Description of Artificial Sequence: Synthetic Peanut control sequences, 5' sequence and inner sequence

SEQ ID NO: 37671 - DNA, 53 bp, Artificial Sequence; identical to SEQ ID NO: 1172
  Description of Artificial Sequence: Synthetic Peanut control sequences, 5' sequence and inner sequence

SEQ ID NO: 37672 - DNA, 53 bp, Artificial Sequence; identical to SEQ ID NO: 1988
  Description of Artificial Sequence: Synthetic Peanut control sequences, 5' sequence and inner sequence

SEQ ID NO: 37673 - DNA, 53 bp, Artificial Sequence; identical to SEQ ID NO: 5988
  Description of Artificial Sequence: Synthetic Peanut control sequences, 5' sequence and inner sequence

SEQ ID NO: 37674 - DNA, 53 bp, Artificial Sequence; identical to SEQ ID NO: 1424
  Description of Artificial Sequence: Synthetic Peanut control sequences, 5' sequence and inner sequence

SEQ ID NO: 37675 - DNA, 53 bp, Artificial Sequence; identical to SEQ ID NO: 21286
  Description of Artificial Sequence: Synthetic Peanut control sequences, 5' sequence and inner sequence

SEQ ID NO: 37676 - DNA, 53 bp, Artificial Sequence; identical to SEQ ID NO: 5905
  Description of Artificial Sequence: Synthetic Peanut control sequences, 5' sequence and inner sequence

SEQ ID NO: 37677 - DNA, 53 bp, Artificial Sequence
  Description of Artificial Sequence: Synthetic Peanut control sequences, 5' sequence and inner sequence
tagggaagagaaggacatatgatgtccgagcggacctagcaagtgaggctgga

SEQ ID NO: 37678 - DNA, 53 bp, Artificial Sequence; identical to SEQ ID NO: 5700
  Description of Artificial Sequence: Synthetic Peanut control sequences, 5' sequence and inner sequence

SEQ ID NO: 37679 - DNA, 53 bp, Artificial Sequence; identical to SEQ ID NO: 1724
  Description of Artificial Sequence: Synthetic Peanut control sequences, 5' sequence and inner sequence

SEQ ID NO: 37680 - DNA, 53 bp, Artificial Sequence
  Description of Artificial Sequence: Synthetic Peanut control sequences, 5' sequence and inner sequence
tagggaagagaaggacatatgatgacgttgctgaccgaaagtgcatgtgcgtg

SEQ ID NO: 37681 - DNA, 53 bp, Artificial Sequence; identical to SEQ ID NO: 13933
  Description of Artificial Sequence: Synthetic Peanut control sequences, 5' sequence and inner sequence

SEQ ID NO: 37682 - DNA, 53 bp, Artificial Sequence; identical to SEQ ID NO: 21343
  Description of Artificial Sequence: Synthetic Peanut control sequences, 5' sequence and inner sequence

SEQ ID NO: 37683 - DNA, 53 bp, Artificial Sequence; identical to SEQ ID NO: 5575
  Description of Artificial Sequence: Synthetic Peanut control sequences, 5' sequence and inner sequence

SEQ ID NO: 37684 - DNA, 53 bp, Artificial Sequence; identical to SEQ ID NO: 5611
  Description of Artificial Sequence: Synthetic Peanut control sequences, 5' sequence and inner sequence

SEQ ID NO: 37685 - DNA, 53 bp, Artificial Sequence; identical to SEQ ID NO: 9633
  Description of Artificial Sequence: Synthetic Peanut control sequences, 5' sequence and inner sequence

SEQ ID NO: 37686 - DNA, 54 bp, Artificial Sequence
  Description of Artificial Sequence: Synthetic Peanut control sequences, 5' sequence and inner sequence
tagggaagagaaggacatatgatggcctgcgatggcttagcaaagtgcgacatg

SEQ ID NO: 37687 - DNA, 53 bp, Artificial Sequence
  Description of Artificial Sequence: Synthetic Peanut control sequences, 5' sequence and inner sequence
tagggaagagaaggacatatgattggccgatctaccctatcaagtgcagcatg

SEQ ID NO: 37688 - DNA, 53 bp, Artificial Sequence
  Description of Artificial Sequence: Synthetic Peanut control sequences, 5' sequence and inner sequence
tagggaagagaaggacatatgatcgtgtggccgtcgacatccctcgagtgtca

SEQ ID NO: 37689 - DNA, 53 bp, Artificial Sequence; identical to SEQ ID NO: 5406
  Description of Artificial Sequence: Synthetic Peanut control sequences, 5' sequence and inner sequence

SEQ ID NO: 37690 - DNA, 53 bp, Artificial Sequence; identical to SEQ ID NO: 29295
  Description of Artificial Sequence: Synthetic Peanut control sequences, 5' sequence and inner sequence

SEQ ID NO: 37691 - DNA, 53 bp, Artificial Sequence; identical to SEQ ID NO: 1214
  Description of Artificial Sequence: Synthetic Peanut control sequences, 5' sequence and inner sequence

SEQ ID NO: 37692 - DNA, 53 bp, Artificial Sequence; identical to SEQ ID NO: 9792
  Description of Artificial Sequence: Synthetic Peanut control sequences, 5' sequence and inner sequence

SEQ ID NO: 37693 - DNA, 53 bp, Artificial Sequence; identical to SEQ ID NO: 5799
  Description of Artificial Sequence: Synthetic Peanut control sequences, 5' sequence and inner sequence

SEQ ID NO: 37694 - DNA, 53 bp, Artificial Sequence; identical to SEQ ID NO: 1761
  Description of Artificial Sequence: Synthetic Peanut control sequences, 5' sequence and inner sequence

SEQ ID NO: 37695 - DNA, 53 bp, Artificial Sequence; identical to SEQ ID NO: 5890
  Description of Artificial Sequence: Synthetic Peanut control sequences, 5' sequence and inner sequence

SEQ ID NO: 37696 - DNA, 53 bp, Artificial Sequence; identical to SEQ ID NO: 21295
  Description of Artificial Sequence: Synthetic Peanut control sequences, 5' sequence and inner sequence

SEQ ID NO: 37697 - DNA, 53 bp, Artificial Sequence; identical to SEQ ID NO: 5691
  Description of Artificial Sequence: Synthetic Peanut control sequences, 5' sequence and inner sequence

SEQ ID NO: 37698 - DNA, 52 bp, Artificial Sequence; identical to SEQ ID NO: 13918
  Description of Artificial Sequence: Synthetic Peanut control sequences, 5' sequence and inner sequence

SEQ ID NO: 37699 - DNA, 55 bp, Artificial Sequence
  Description of Artificial Sequence: Synthetic Peanut control sequences, 5' sequence and inner sequence
tagggaagagaaggacatatgatggacgcacgcagaccttcaagtgtgccgtgga

SEQ ID NO: 37700 - DNA, 53 bp, Artificial Sequence; identical to SEQ ID NO: 1361
  Description of Artificial Sequence: Synthetic Peanut control sequences, 5' sequence and inner sequence

SEQ ID NO: 37701 - DNA, 53 bp, Artificial Sequence; identical to SEQ ID NO: 5706
  Description of Artificial Sequence: Synthetic Peanut control sequences, 5' sequence and inner sequence

SEQ ID NO: 37702 - DNA, 53 bp, Artificial Sequence
  Description of Artificial Sequence: Synthetic Peanut control sequences, 5' sequence and inner sequence
tagggaagagaaggacatatgatccgcgtcaacctatcaagcgcatggacgta

SEQ ID NO: 37703 - DNA, 53 bp, Artificial Sequence; identical to SEQ ID NO: 1167
  Description of Artificial Sequence: Synthetic Peanut control sequences, 5' sequence and inner sequence

SEQ ID NO: 37704 - DNA, 53 bp, Artificial Sequence; identical to SEQ ID NO: 21789
  Description of Artificial Sequence: Synthetic Peanut control sequences, 5' sequence and inner sequence

SEQ ID NO: 37705 - DNA, 53 bp, Artificial Sequence; identical to SEQ ID NO: 33166
  Description of Artificial Sequence: Synthetic Peanut control sequences, 5' sequence and inner sequence

SEQ ID NO: 37706 - DNA, 53 bp, Artificial Sequence; identical to SEQ ID NO: 1498
  Description of Artificial Sequence: Synthetic Peanut control sequences, 5' sequence and inner sequence

SEQ ID NO: 37707 - DNA, 53 bp, Artificial Sequence; identical to SEQ ID NO: 1919
  Description of Artificial Sequence: Synthetic Peanut control sequences, 5' sequence and inner sequence

SEQ ID NO: 37708 - DNA, 49 bp, Artificial Sequence; identical to SEQ ID NO: 1893
  Description of Artificial Sequence: Synthetic Peanut control sequences, 5' sequence and inner sequence

SEQ ID NO: 37709 - DNA, 53 bp, Artificial Sequence
  Description of Artificial Sequence: Synthetic Peanut control sequences, 5' sequence and inner sequence
tagggaagagaaggacatatgatgtcatggctcgtccctgatcacgtggctca

SEQ ID NO: 37710 - DNA, 53 bp, Artificial Sequence; identical to SEQ ID NO: 1946
  Description of Artificial Sequence: Synthetic Peanut control sequences, 5' sequence and inner sequence

SEQ ID NO: 37711 - DNA, 53 bp, Artificial Sequence; identical to SEQ ID NO: 9659
  Description of Artificial Sequence: Synthetic Peanut control sequences, 5' sequence and inner sequence

SEQ ID NO: 37712 - DNA, 53 bp, Artificial Sequence; identical to SEQ ID NO: 1380
  Description of Artificial Sequence: Synthetic Peanut control sequences, 5' sequence and inner sequence

SEQ ID NO: 37713 - DNA, 53 bp, Artificial Sequence; identical to SEQ ID NO: 21617
  Description of Artificial Sequence: Synthetic Peanut control sequences, 5' sequence and inner sequence

SEQ ID NO: 37714 - DNA, 53 bp, Artificial Sequence; identical to SEQ ID NO: 5451
  Description of Artificial Sequence: Synthetic Peanut control sequences, 5' sequence and inner sequence

SEQ ID NO: 37715 - DNA, 53 bp, Artificial Sequence; identical to SEQ ID NO: 5816
  Description of Artificial Sequence: Synthetic Peanut control sequences, 5' sequence and inner sequence

SEQ ID NO: 37716 - DNA, 53 bp, Artificial Sequence; identical to SEQ ID NO: 1955
  Description of Artificial Sequence: Synthetic Peanut control sequences, 5' sequence and inner sequence

SEQ ID NO: 37717 - DNA, 53 bp, Artificial Sequence; identical to SEQ ID NO: 1178
  Description of Artificial Sequence: Synthetic Peanut control sequences, 5' sequence and inner sequence

SEQ ID NO: 37718 - DNA, 53 bp, Artificial Sequence
  Description of Artificial Sequence: Synthetic Peanut control sequences, 5' sequence and inner sequence
tagggaagagaaggacatatgatggccgaacacgaccgcaagtgcgttatgga

SEQ ID NO: 37719 - DNA, 53 bp, Artificial Sequence; identical to SEQ ID NO: 5260
  Description of Artificial Sequence: Synthetic Peanut control sequences, 5' sequence and inner sequence

SEQ ID NO: 37720 - DNA, 53 bp, Artificial Sequence; identical to SEQ ID NO: 21468
  Description of Artificial Sequence: Synthetic Peanut control sequences, 5' sequence and inner sequence

SEQ ID NO: 37721 - DNA, 53 bp, Artificial Sequence
  Description of Artificial Sequence: Synthetic Peanut control sequences, 5' sequence and inner sequence
tagggaagagaaggacatatgatgacgccactcatgccctatcgatgtggcca

SEQ ID NO: 37722 - DNA, 53 bp, Artificial Sequence
  Description of Artificial Sequence: Synthetic Peanut control sequences, 5' sequence and inner sequence
tagggaagagaaggacatatgatggccaatcgagccgatcaagtgtcgatgga

SEQ ID NO: 37723 - DNA, 53 bp, Artificial Sequence; identical to SEQ ID NO: 1755
  Description of Artificial Sequence: Synthetic Peanut control sequences, 5' sequence and inner sequence

SEQ ID NO: 37724 - DNA, 53 bp, Artificial Sequence
  Description of Artificial Sequence: Synthetic Peanut control sequences, 5' sequence and inner sequence
tagggaagagaaggacatatgattggccgatcgaccctatcaagtgcatcatg

SEQ ID NO: 37725 - DNA, 53 bp, Artificial Sequence; identical to SEQ ID NO: 9618
  Description of Artificial Sequence: Synthetic Peanut control sequences, 5' sequence and inner sequence

SEQ ID NO: 37726 - DNA, 53 bp, Artificial Sequence; identical to SEQ ID NO: 5610
  Description of Artificial Sequence: Synthetic Peanut control sequences, 5' sequence and inner sequence

SEQ ID NO: 37727 - DNA, 53 bp, Artificial Sequence; identical to SEQ ID NO: 5735
  Description of Artificial Sequence: Synthetic Peanut control sequences, 5' sequence and inner sequence

SEQ ID NO: 37728 - DNA, 53 bp, Artificial Sequence; identical to SEQ ID NO: 5898
  Description of Artificial Sequence: Synthetic Peanut control sequences, 5' sequence and inner sequence

SEQ ID NO: 37729 - DNA, 53 bp, Artificial Sequence; identical to SEQ ID NO: 5907
  Description of Artificial Sequence: Synthetic Peanut control sequences, 5' sequence and inner sequence

SEQ ID NO: 37730 - DNA, 53 bp, Artificial Sequence; identical to SEQ ID NO: 5638
  Description of Artificial Sequence: Synthetic Peanut control sequences, 5' sequence and inner sequence

SEQ ID NO: 37731 - DNA, 53 bp, Artificial Sequence; identical to SEQ ID NO: 1371
  Description of Artificial Sequence: Synthetic Peanut control sequences, 5' sequence and inner sequence

SEQ ID NO: 37732 - DNA, 53 bp, Artificial Sequence; identical to SEQ ID NO: 1945
  Description of Artificial Sequence: Synthetic Peanut control sequences, 5' sequence and inner sequence

SEQ ID NO: 37733 - DNA, 50 bp, Artificial Sequence; identical to SEQ ID NO: 25993
  Description of Artificial Sequence: Synthetic Peanut control sequences, 5' sequence and inner sequence

SEQ ID NO: 37734 - DNA, 53 bp, Artificial Sequence; identical to SEQ ID NO: 5597
  Description of Artificial Sequence: Synthetic Peanut control sequences, 5' sequence and inner sequence

SEQ ID NO: 37735 - DNA, 53 bp, Artificial Sequence; identical to SEQ ID NO: 13744
  Description of Artificial Sequence: Synthetic Peanut control sequences, 5' sequence and inner sequence

SEQ ID NO: 37736 - DNA, 53 bp, Artificial Sequence
  Description of Artificial Sequence: Synthetic Peanut control sequences, 5' sequence and inner sequence
tagggaagagaaggacatatgatggcctgatcgaacctatcaagtgcagcatg

SEQ ID NO: 37737 - DNA, 53 bp, Artificial Sequence; identical to SEQ ID NO: 5499
  Description of Artificial Sequence: Synthetic Peanut control sequences, 5' sequence and inner sequence

SEQ ID NO: 37738 - DNA, 53 bp, Artificial Sequence; identical to SEQ ID NO: 9877
  Description of Artificial Sequence: Synthetic Peanut control sequences, 5' sequence and inner sequence

SEQ ID NO: 37739 - DNA, 53 bp, Artificial Sequence; identical to SEQ ID NO: 1666
  Description of Artificial Sequence: Synthetic Peanut control sequences, 5' sequence and inner sequence

SEQ ID NO: 37740 - DNA, 53 bp, Artificial Sequence; identical to SEQ ID NO: 13618
  Description of Artificial Sequence: Synthetic Peanut control sequences, 5' sequence and inner sequence

SEQ ID NO: 37741 - DNA, 53 bp, Artificial Sequence; identical to SEQ ID NO: 1911
  Description of Artificial Sequence: Synthetic Peanut control sequences, 5' sequence and inner sequence

SEQ ID NO: 37742 - DNA, 50 bp, Artificial Sequence; identical to SEQ ID NO: 25902
  Description of Artificial Sequence: Synthetic Peanut control sequences, 5' sequence and inner sequence

SEQ ID NO: 37743 - DNA, 52 bp, Artificial Sequence
  Description of Artificial Sequence: Synthetic Peanut control sequences, 5' sequence and inner sequence
tagggaagagaaggacatatgatgtgccgcagctgacctagcatgtgtgtca

SEQ ID NO: 37744 - DNA, 53 bp, Artificial Sequence; identical to SEQ ID NO: 1231
  Description of Artificial Sequence: Synthetic Peanut control sequences, 5' sequence and inner sequence

SEQ ID NO: 37745 - DNA, 53 bp, Artificial Sequence
  Description of Artificial Sequence: Synthetic Peanut control sequences, 5' sequence and inner sequence
tagggaagagaaggacatatgatgtgcgcgctgttccctctacgtgcggcatg

SEQ ID NO: 37746 - DNA, 53 bp, Artificial Sequence; identical to SEQ ID NO: 25801
  Description of Artificial Sequence: Synthetic Peanut control sequences, 5' sequence and inner sequence

SEQ ID NO: 37747 - DNA, 53 bp, Artificial Sequence; identical to SEQ ID NO: 1324
  Description of Artificial Sequence: Synthetic Peanut control sequences, 5' sequence and inner sequence

SEQ ID NO: 37748 - DNA, 53 bp, Artificial Sequence; identical to SEQ ID NO: 5653
  Description of Artificial Sequence: Synthetic Peanut control sequences, 5' sequence and inner sequence

SEQ ID NO: 37749 - DNA, 53 bp, Artificial Sequence; identical to SEQ ID NO: 1763
  Description of Artificial Sequence: Synthetic Peanut control sequences, 5' sequence and inner sequence

SEQ ID NO: 37750 - DNA, 53 bp, Artificial Sequence; identical to SEQ ID NO: 1720
  Description of Artificial Sequence: Synthetic Peanut control sequences, 5' sequence and inner sequence

SEQ ID NO: 37751 - DNA, 53 bp, Artificial Sequence; identical to SEQ ID NO: 1869
  Description of Artificial Sequence: Synthetic Peanut control sequences, 5' sequence and inner sequence

SEQ ID NO: 37752 - DNA, 58 bp, Artificial Sequence
  Description of Artificial Sequence: Synthetic Peanut control sequences, 5' sequence and inner sequence
tagggaagagaaggacatatgatgcattggacgatcgtgccctacacgtgggtatgga

SEQ ID NO: 37753 - DNA, 53 bp, Artificial Sequence; identical to SEQ ID NO: 1056
  Description of Artificial Sequence: Synthetic Peanut control sequences, 5' sequence and inner sequence

SEQ ID NO: 37754 - DNA, 53 bp, Artificial Sequence; identical to SEQ ID NO: 5504
  Description of Artificial Sequence: Synthetic Peanut control sequences, 5' sequence and inner sequence

SEQ ID NO: 37755 - DNA, 53 bp, Artificial Sequence; identical to SEQ ID NO: 33010
  Description of Artificial Sequence: Synthetic Peanut control sequences, 5' sequence and inner sequence

SEQ ID NO: 37756 - DNA, 53 bp, Artificial Sequence; identical to SEQ ID NO: 1860
  Description of Artificial Sequence: Synthetic Peanut control sequences, 5' sequence and inner sequence

SEQ ID NO: 37757 - DNA, 53 bp, Artificial Sequence; identical to SEQ ID NO: 33783
  Description of Artificial Sequence: Synthetic Peanut control sequences, 5' sequence and inner sequence

SEQ ID NO: 37758 - DNA, 53 bp, Artificial Sequence; identical to SEQ ID NO: 29452
  Description of Artificial Sequence: Synthetic Peanut control sequences, 5' sequence and inner sequence

SEQ ID NO: 37759 - DNA, 53 bp, Artificial Sequence
  Description of Artificial Sequence: Synthetic Peanut control sequences, 5' sequence and inner sequence
tagggaagagaaggacatatgattggcatgtgtgcggattcgtcccttggtca

SEQ ID NO: 37760 - DNA, 53 bp, Artificial Sequence; identical to SEQ ID NO: 21385
  Description of Artificial Sequence: Synthetic Peanut control sequences, 5' sequence and inner sequence

SEQ ID NO: 37761 - DNA, 53 bp, Artificial Sequence; identical to SEQ ID NO: 1940
  Description of Artificial Sequence: Synthetic Peanut control sequences, 5' sequence and inner sequence

SEQ ID NO: 37762 - DNA, 53 bp, Artificial Sequence
  Description of Artificial Sequence: Synthetic Peanut control sequences, 5' sequence and inner sequence
tagggaagagaaggacatatgatccgatcgacctcggtgcgtcagggcttgac

SEQ ID NO: 37763 - DNA, 53 bp, Artificial Sequence
  Description of Artificial Sequence: Synthetic Peanut control sequences, 5' sequence and inner sequence
tagggaagagaaggacatatgattggccgatcgaccctatcaattgcagcatg

SEQ ID NO: 37764 - DNA, 53 bp, Artificial Sequence; identical to SEQ ID NO: 1635
  Description of Artificial Sequence: Synthetic Peanut control sequences, 5' sequence and inner sequence

SEQ ID NO: 37765 - DNA, 53 bp, Artificial Sequence; identical to SEQ ID NO: 9458
  Description of Artificial Sequence: Synthetic Peanut control sequences, 5' sequence and inner sequence

SEQ ID NO: 37766 - DNA, 53 bp, Artificial Sequence; identical to SEQ ID NO: 5420
  Description of Artificial Sequence: Synthetic Peanut control sequences, 5' sequence and inner sequence

SEQ ID NO: 37767 - DNA, 50 bp, Artificial Sequence
  Description of Artificial Sequence: Synthetic Peanut control sequences, 5' sequence and inner sequence
tagggaagagaaggacatatgatgtgcgacctgacctagcatgtgtgtca

SEQ ID NO: 37768 - DNA, 53 bp, Artificial Sequence
  Description of Artificial Sequence: Synthetic Peanut control sequences, 5' sequence and inner sequence
tagggaagagaaggacatatgatgtcatgccatcccttcgagtgtgtcacgta

SEQ ID NO: 37769 - DNA, 53 bp, Artificial Sequence
  Description of Artificial Sequence: Synthetic Peanut control sequences, 5' sequence and inner sequence
tagggaagagaaggacatatgatgtctcgcgtgccctatcatgtgtgcgtgga

SEQ ID NO: 37770 - DNA, 53 bp, Artificial Sequence; identical to SEQ ID NO: 1114
  Description of Artificial Sequence: Synthetic Peanut control sequences, 5' sequence and inner sequence

SEQ ID NO: 37771 - DNA, 53 bp, Artificial Sequence; identical to SEQ ID NO: 13612
  Description of Artificial Sequence: Synthetic Peanut control sequences, 5' sequence and inner sequence

SEQ ID NO: 37772 - DNA, 53 bp, Artificial Sequence; identical to SEQ ID NO: 5613
  Description of Artificial Sequence: Synthetic Peanut control sequences, 5' sequence and inner sequence

SEQ ID NO: 37773 - DNA, 53 bp, Artificial Sequence; identical to SEQ ID NO: 5785
  Description of Artificial Sequence: Synthetic Peanut control sequences, 5' sequence and inner sequence

SEQ ID NO: 37774 - DNA, 53 bp, Artificial Sequence; identical to SEQ ID NO: 21506
  Description of Artificial Sequence: Synthetic Peanut control sequences, 5' sequence and inner sequence

SEQ ID NO: 37775 - DNA, 53 bp, Artificial Sequence; identical to SEQ ID NO: 29989
  Description of Artificial Sequence: Synthetic Peanut control sequences, 5' sequence and inner sequence

SEQ ID NO: 37776 - DNA, 52 bp, Artificial Sequence; identical to SEQ ID NO: 1975
  Description of Artificial Sequence: Synthetic Peanut control sequences, 5' sequence and inner sequence

SEQ ID NO: 37777 - DNA, 53 bp, Artificial Sequence
  Description of Artificial Sequence: Synthetic Peanut control sequences, 5' sequence and inner sequence
tagggaagagaaggacatatgatgcgtcatgtgtccagtccctcaagttgtca

SEQ ID NO: 37778 - DNA, 53 bp, Artificial Sequence
  Description of Artificial Sequence: Synthetic Peanut control sequences, 5' sequence and inner sequence
tagggaagagaaggacatatgatccgtctcaaccgtcgtggtctggatgcgtc

SEQ ID NO: 37779 - DNA, 53 bp, Artificial Sequence; identical to SEQ ID NO: 29441
  Description of Artificial Sequence: Synthetic Peanut control sequences, 5' sequence and inner sequence

SEQ ID NO: 37780 - DNA, 53 bp, Artificial Sequence; identical to SEQ ID NO: 1291
  Description of Artificial Sequence: Synthetic Peanut control sequences, 5' sequence and inner sequence

SEQ ID NO: 37781 - DNA, 53 bp, Artificial Sequence; identical to SEQ ID NO: 25810
  Description of Artificial Sequence: Synthetic Peanut control sequences, 5' sequence and inner sequence

SEQ ID NO: 37782 - DNA, 53 bp, Artificial Sequence; identical to SEQ ID NO: 1086
  Description of Artificial Sequence: Synthetic Peanut control sequences, 5' sequence and inner sequence

SEQ ID NO: 37783 - DNA, 53 bp, Artificial Sequence; identical to SEQ ID NO: 29947
  Description of Artificial Sequence: Synthetic Peanut control sequences, 5' sequence and inner sequence

SEQ ID NO: 37784 - DNA, 53 bp, Artificial Sequence
  Description of Artificial Sequence: Synthetic Peanut control sequences, 5' sequence and inner sequence
tagggaagagaaggacatatgattggccgatcgaccatatcaagtgcagcatg

SEQ ID NO: 37785 - DNA, 53 bp, Artificial Sequence; identical to SEQ ID NO: 9769
  Description of Artificial Sequence: Synthetic Peanut control sequences, 5' sequence and inner sequence

SEQ ID NO: 37786 - DNA, 52 bp, Artificial Sequence
  Description of Artificial Sequence: Synthetic Peanut control sequences, 5' sequence and inner sequence
tagggaagagaaggacatatgatggccgaacgaccctatcaagtgcagcatg

SEQ ID NO: 37787 - DNA, 53 bp, Artificial Sequence; identical to SEQ ID NO: 1678
  Description of Artificial Sequence: Synthetic Peanut control sequences, 5' sequence and inner sequence

SEQ ID NO: 37788 - DNA, 53 bp, Artificial Sequence; identical to SEQ ID NO: 21496
  Description of Artificial Sequence: Synthetic Peanut control sequences, 5' sequence and inner sequence

SEQ ID NO: 37789 - DNA, 52 bp, Artificial Sequence
  Description of Artificial Sequence: Synthetic Peanut control sequences, 5' sequence and inner sequence
tagggaagagaaggacatatgatggcacaaacggaccgacaagtgcagcatg

SEQ ID NO: 37790 - DNA, 53 bp, Artificial Sequence
  Description of Artificial Sequence: Synthetic Peanut control sequences, 5' sequence and inner sequence
tagggaagagaaggacatatgatgtgcgtatcggcccggtcaagttcggcatg

SEQ ID NO: 37791 - DNA, 51 bp, Artificial Sequence
  Description of Artificial Sequence: Synthetic Peanut control sequences, 5' sequence and inner sequence
tagggaagagaaggacatatgatccgtaccgaccctatcaagtgcagcatg

SEQ ID NO: 37792 - DNA, 51 bp, Artificial Sequence
  Description of Artificial Sequence: Synthetic Peanut control sequences, 5' sequence and inner sequence
tagggaagagaaggacatatgatggccgcagctgacctagcatgtgtgtca

SEQ ID NO: 37793 - DNA, 53 bp, Artificial Sequence; identical to SEQ ID NO: 33023
  Description of Artificial Sequence: Synthetic Peanut control sequences, 5' sequence and inner sequence

SEQ ID NO: 37794 - DNA, 53 bp, Artificial Sequence
  Description of Artificial Sequence: Synthetic Peanut control sequences, 5' sequence and inner sequence
tagggaagagaaggacatatgatgtcgcgatactgaccttcgagtgcgtgatg

SEQ ID NO: 37795 - DNA, 53 bp, Artificial Sequence; identical to SEQ ID NO: 9579
  Description of Artificial Sequence: Synthetic Peanut control sequences, 5' sequence and inner sequence

SEQ ID NO: 37796 - DNA, 53 bp, Artificial Sequence; identical to SEQ ID NO: 9949
  Description of Artificial Sequence: Synthetic Peanut control sequences, 5' sequence and inner sequence

SEQ ID NO: 37797 - DNA, 53 bp, Artificial Sequence
  Description of Artificial Sequence: Synthetic Peanut control sequences, 5' sequence and inner sequence
tagggaagagaaggacatatgatgcacgactcgcaccctatcatggggccatg

SEQ ID NO: 37798 - DNA, 53 bp, Artificial Sequence
  Description of Artificial Sequence: Synthetic Peanut control sequences, 5' sequence and inner sequence
tagggaagagaaggacatatgatggaccgagcttacgtacgagtgggtgtgga

SEQ ID NO: 37799 - DNA, 53 bp, Artificial Sequence
  Description of Artificial Sequence: Synthetic Peanut control sequences, 5' sequence and inner sequence
tagggaagagaaggacatatgatccgactcgccctacatgtgggtacgtcgtg

SEQ ID NO: 37800 - DNA, 53 bp, Artificial Sequence
  Description of Artificial Sequence: Synthetic Peanut control sequences, 5' sequence and inner sequence
tagggaagagaaggacatatgatgtcacgagcgtaccgtcatggggtgatgga

SEQ ID NO: 37801 - DNA, 53 bp, Artificial Sequence; identical to SEQ ID NO: 1863
  Description of Artificial Sequence: Synthetic Peanut control sequences, 5' sequence and inner sequence

SEQ ID NO: 37802 - DNA, 53 bp, Artificial Sequence; identical to SEQ ID NO: 1256
  Description of Artificial Sequence: Synthetic Peanut control sequences, 5' sequence and inner sequence

SEQ ID NO: 37803 - DNA, 53 bp, Artificial Sequence; identical to SEQ ID NO: 1601
  Description of Artificial Sequence: Synthetic Peanut control sequences, 5' sequence and inner sequence

SEQ ID NO: 37804 - DNA, 53 bp, Artificial Sequence
  Description of Artificial Sequence: Synthetic Peanut control sequences, 5' sequence and inner sequence
tagggaagagaaggacatatgatcatgtggccactatgccctatcatgcggtc

SEQ ID NO: 37805 - DNA, 53 bp, Artificial Sequence
  Description of Artificial Sequence: Synthetic Peanut control sequences, 5' sequence and inner sequence
tagggaagagaaggacatatgatgtgctgcactgccctacacgtgggtatgga

SEQ ID NO: 37806 - DNA, 53 bp, Artificial Sequence
  Description of Artificial Sequence: Synthetic Peanut control sequences, 5' sequence and inner sequence
tagggaagagaaggacatatgatttgccgatcgaccctatcaagtgcagcatg

SEQ ID NO: 37807 - DNA, 53 bp, Artificial Sequence; identical to SEQ ID NO: 13821
  Description of Artificial Sequence: Synthetic Peanut control sequences, 5' sequence and inner sequence

SEQ ID NO: 37808 - DNA, 53 bp, Artificial Sequence; identical to SEQ ID NO: 21478
  Description of Artificial Sequence: Synthetic Peanut control sequences, 5' sequence and inner sequence

SEQ ID NO: 37809 - DNA, 53 bp, Artificial Sequence; identical to SEQ ID NO: 1953
  Description of Artificial Sequence: Synthetic Peanut control sequences, 5' sequence and inner sequence

SEQ ID NO: 37810 - DNA, 53 bp, Artificial Sequence; identical to SEQ ID NO: 9964
  Description of Artificial Sequence: Synthetic Peanut control sequences, 5' sequence and inner sequence

SEQ ID NO: 37811 - DNA, 53 bp, Artificial Sequence; identical to SEQ ID NO: 1937
  Description of Artificial Sequence: Synthetic Peanut control sequences, 5' sequence and inner sequence

SEQ ID NO: 37812 - DNA, 53 bp, Artificial Sequence; identical to SEQ ID NO: 5979
  Description of Artificial Sequence: Synthetic Peanut control sequences, 5' sequence and inner sequence

SEQ ID NO: 37813 - DNA, 53 bp, Artificial Sequence; identical to SEQ ID NO: 1703
  Description of Artificial Sequence: Synthetic Peanut control sequences, 5' sequence and inner sequence

SEQ ID NO: 37814 - DNA, 53 bp, Artificial Sequence
  Description of Artificial Sequence: Synthetic Peanut control sequences, 5' sequence and inner sequence
tagggaagagaaggacatatgattggccgcactgaccgttcaagtgtcgtgga

SEQ ID NO: 37815 - DNA, 53 bp, Artificial Sequence; identical to SEQ ID NO: 21312
  Description of Artificial Sequence: Synthetic Peanut control sequences, 5' sequence and inner sequence

SEQ ID NO: 37816 - DNA, 53 bp, Artificial Sequence; identical to SEQ ID NO: 5823
  Description of Artificial Sequence: Synthetic Peanut control sequences, 5' sequence and inner sequence

SEQ ID NO: 37817 - DNA, 53 bp, Artificial Sequence; identical to SEQ ID NO: 1137
  Description of Artificial Sequence: Synthetic Peanut control sequences, 5' sequence and inner sequence

SEQ ID NO: 37818 - DNA, 53 bp, Artificial Sequence; identical to SEQ ID NO: 1644
  Description of Artificial Sequence: Synthetic Peanut control sequences, 5' sequence and inner sequence

SEQ ID NO: 37819 - DNA, 53 bp, Artificial Sequence
  Description of Artificial Sequence: Synthetic Peanut control sequences, 5' sequence and inner sequence
tagggaagagaaggacatatgattggacgatcgaccctatcaagtgcagcatg

SEQ ID NO: 37820 - DNA, 53 bp, Artificial Sequence
  Description of Artificial Sequence: Synthetic Peanut control sequences, 5' sequence and inner sequence
tagggaagagaaggacatatgattggccgatcgatcctatcaagtgcagcatg

SEQ ID NO: 37821 - DNA, 53 bp, Artificial Sequence
  Description of Artificial Sequence: Synthetic Peanut control sequences, 5' sequence and inner sequence
tagggaagagaaggacatatgatggacgcgatctggcagtgagcatgcactcg

SEQ ID NO: 37822 - DNA, 53 bp, Artificial Sequence; identical to SEQ ID NO: 13936
  Description of Artificial Sequence: Synthetic Peanut control sequences, 5' sequence and inner sequence

SEQ ID NO: 37823 - DNA, 53 bp, Artificial Sequence; identical to SEQ ID NO: 1195
  Description of Artificial Sequence: Synthetic Peanut control sequences, 5' sequence and inner sequence

SEQ ID NO: 37824 - DNA, 53 bp, Artificial Sequence; identical to SEQ ID NO: 5364
  Description of Artificial Sequence: Synthetic Peanut control sequences, 5' sequence and inner sequence

SEQ ID NO: 37825 - DNA, 53 bp, Artificial Sequence; identical to SEQ ID NO: 1177
  Description of Artificial Sequence: Synthetic Peanut control sequences, 5' sequence and inner sequence

SEQ ID NO: 37826 - DNA, 53 bp, Artificial Sequence; identical to SEQ ID NO: 1662
  Description of Artificial Sequence: Synthetic Peanut control sequences, 5' sequence and inner sequence

SEQ ID NO: 37827 - DNA, 53 bp, Artificial Sequence
  Description of Artificial Sequence: Synthetic Peanut control sequences, 5' sequence and inner sequence
tagggaagagaaggacatatgatgtcattccgcatcctacacgtgggaacgta

SEQ ID NO: 37828 - DNA, 53 bp, Artificial Sequence; identical to SEQ ID NO: 1326
  Description of Artificial Sequence: Synthetic Peanut control sequences, 5' sequence and inner sequence

SEQ ID NO: 37829 - DNA, 53 bp, Artificial Sequence; identical to SEQ ID NO: 1236
  Description of Artificial Sequence: Synthetic Peanut control sequences, 5' sequence and inner sequence

SEQ ID NO: 37830 - DNA, 53 bp, Artificial Sequence
  Description of Artificial Sequence: Synthetic Peanut control sequences, 5' sequence and inner sequence
tagggaagagaaggacatatgatggacatcgctaacctacaatgtgcgtcgtg

SEQ ID NO: 37831 - DNA, 53 bp, Artificial Sequence; identical to SEQ ID NO: 21777
  Description of Artificial Sequence: Synthetic Peanut control sequences, 5' sequence and inner sequence

SEQ ID NO: 37832 - DNA, 53 bp, Artificial Sequence; identical to SEQ ID NO: 1072
  Description of Artificial Sequence: Synthetic Peanut control sequences, 5' sequence and inner sequence

SEQ ID NO: 37833 - DNA, 53 bp, Artificial Sequence; identical to SEQ ID NO: 1727
  Description of Artificial Sequence: Synthetic Peanut control sequences, 5' sequence and inner sequence

SEQ ID NO: 37834 - DNA, 53 bp, Artificial Sequence; identical to SEQ ID NO: 1775
  Description of Artificial Sequence: Synthetic Peanut control sequences, 5' sequence and inner sequence

SEQ ID NO: 37835 - DNA, 53 bp, Artificial Sequence; identical to SEQ ID NO: 9889
  Description of Artificial Sequence: Synthetic Peanut control sequences, 5' sequence and inner sequence

SEQ ID NO: 37836 - DNA, 54 bp, Artificial Sequence
  Description of Artificial Sequence: Synthetic Peanut control sequences, 5' sequence and inner sequence
tagggaagagaaggacatatgatccgaacgaaccgcacgtggactgagcgacgt

SEQ ID NO: 37837 - DNA, 53 bp, Artificial Sequence; identical to SEQ ID NO: 5935
  Description of Artificial Sequence: Synthetic Peanut control sequences, 5' sequence and inner sequence

SEQ ID NO: 37838 - DNA, 53 bp, Artificial Sequence; identical to SEQ ID NO: 9869
  Description of Artificial Sequence: Synthetic Peanut control sequences, 5' sequence and inner sequence

SEQ ID NO: 37839 - DNA, 53 bp, Artificial Sequence
  Description of Artificial Sequence: Synthetic Peanut control sequences, 5' sequence and inner sequence
tagggaagagaaggacatatgatggcctgatcgaacctagagaggggcgtgga

SEQ ID NO: 37840 - DNA, 53 bp, Artificial Sequence; identical to SEQ ID NO: 5722
  Description of Artificial Sequence: Synthetic Peanut control sequences, 5' sequence and inner sequence

SEQ ID NO: 37841 - DNA, 53 bp, Artificial Sequence; identical to SEQ ID NO: 1551
  Description of Artificial Sequence: Synthetic Peanut control sequences, 5' sequence and inner sequence

SEQ ID NO: 37842 - DNA, 53 bp, Artificial Sequence; identical to SEQ ID NO: 21327
  Description of Artificial Sequence: Synthetic Peanut control sequences, 5' sequence and inner sequence

SEQ ID NO: 37843 - DNA, 53 bp, Artificial Sequence; identical to SEQ ID NO: 21227
  Description of Artificial Sequence: Synthetic Peanut control sequences, 5' sequence and inner sequence

SEQ ID NO: 37844 - DNA, 53 bp, Artificial Sequence
  Description of Artificial Sequence: Synthetic Peanut control sequences, 5' sequence and inner sequence
tagggaagagaaggacatatgatggacggatcgaacctacaagttgtcgtggt

SEQ ID NO: 37845 - DNA, 52 bp, Artificial Sequence; identical to SEQ ID NO: 1879
  Description of Artificial Sequence: Synthetic Peanut control sequences, 5' sequence and inner sequence

SEQ ID NO: 37846 - DNA, 53 bp, Artificial Sequence; identical to SEQ ID NO: 29577
  Description of Artificial Sequence: Synthetic Peanut control sequences, 5' sequence and inner sequence

SEQ ID NO: 37847 - DNA, 53 bp, Artificial Sequence; identical to SEQ ID NO: 33009
  Description of Artificial Sequence: Synthetic Peanut control sequences, 5' sequence and inner sequence

SEQ ID NO: 37848 - DNA, 53 bp, Artificial Sequence; identical to SEQ ID NO: 9767
  Description of Artificial Sequence: Synthetic Peanut control sequences, 5' sequence and inner sequence

SEQ ID NO: 37849 - DNA, 53 bp, Artificial Sequence; identical to SEQ ID NO: 21331
  Description of Artificial Sequence: Synthetic Peanut control sequences, 5' sequence and inner sequence

SEQ ID NO: 37850 - DNA, 53 bp, Artificial Sequence; identical to SEQ ID NO: 9627
  Description of Artificial Sequence: Synthetic Peanut control sequences, 5' sequence and inner sequence

SEQ ID NO: 37851 - DNA, 53 bp, Artificial Sequence
  Description of Artificial Sequence: Synthetic Peanut control sequences, 5' sequence and inner sequence
tagggaagagaaggacatatgatgtcacacgctctgcccttatcacgtggaca

SEQ ID NO: 37852 - DNA, 53 bp, Artificial Sequence; identical to SEQ ID NO: 1580
  Description of Artificial Sequence: Synthetic Peanut control sequences, 5' sequence and inner sequence

SEQ ID NO: 37853 - DNA, 53 bp, Artificial Sequence; identical to SEQ ID NO: 1906
  Description of Artificial Sequence: Synthetic Peanut control sequences, 5' sequence and inner sequence

SEQ ID NO: 37854 - DNA, 53 bp, Artificial Sequence; identical to SEQ ID NO: 5740
  Description of Artificial Sequence: Synthetic Peanut control sequences, 5' sequence and inner sequence

SEQ ID NO: 37855 - DNA, 53 bp, Artificial Sequence; identical to SEQ ID NO: 5579
  Description of Artificial Sequence: Synthetic Peanut control sequences, 5' sequence and inner sequence

SEQ ID NO: 37856 - DNA, 53 bp, Artificial Sequence; identical to SEQ ID NO: 9936
  Description of Artificial Sequence: Synthetic Peanut control sequences, 5' sequence and inner sequence

SEQ ID NO: 37857 - DNA, 53 bp, Artificial Sequence; identical to SEQ ID NO: 1962
  Description of Artificial Sequence: Synthetic Peanut control sequences, 5' sequence and inner sequence

SEQ ID NO: 37858 - DNA, 53 bp, Artificial Sequence; identical to SEQ ID NO: 29652
  Description of Artificial Sequence: Synthetic Peanut control sequences, 5' sequence and inner sequence

SEQ ID NO: 37859 - DNA, 53 bp, Artificial Sequence; identical to SEQ ID NO: 5449
  Description of Artificial Sequence: Synthetic Peanut control sequences, 5' sequence and inner sequence

SEQ ID NO: 37860 - DNA, 53 bp, Artificial Sequence; identical to SEQ ID NO: 9798
  Description of Artificial Sequence: Synthetic Peanut control sequences, 5' sequence and inner sequence

SEQ ID NO: 37861 - DNA, 53 bp, Artificial Sequence
  Description of Artificial Sequence: Synthetic Peanut control sequences, 5' sequence and inner sequence
tagggaagagaaggacatatgatggccgaacgaaccttggtcagctaggcagt

SEQ ID NO: 37862 - DNA, 53 bp, Artificial Sequence; identical to SEQ ID NO: 1556
  Description of Artificial Sequence: Synthetic Peanut control sequences, 5' sequence and inner sequence

SEQ ID NO: 37863 - DNA, 53 bp, Artificial Sequence; identical to SEQ ID NO: 1991
  Description of Artificial Sequence: Synthetic Peanut control sequences, 5' sequence and inner sequence

SEQ ID NO: 37864 - DNA, 53 bp, Artificial Sequence; identical to SEQ ID NO: 1619
  Description of Artificial Sequence: Synthetic Peanut control sequences, 5' sequence and inner sequence

SEQ ID NO: 37865 - DNA, 53 bp, Artificial Sequence; identical to SEQ ID NO: 1621
  Description of Artificial Sequence: Synthetic Peanut control sequences, 5' sequence and inner sequence

SEQ ID NO: 37866 - DNA, 53 bp, Artificial Sequence; identical to SEQ ID NO: 1075
  Description of Artificial Sequence: Synthetic Peanut control sequences, 5' sequence and inner sequence

SEQ ID NO: 37867 - DNA, 50 bp, Artificial Sequence; identical to SEQ ID NO: 33422
  Description of Artificial Sequence: Synthetic Peanut control sequences, 5' sequence and inner sequence

SEQ ID NO: 37868 - DNA, 53 bp, Artificial Sequence; identical to SEQ ID NO: 5782
  Description of Artificial Sequence: Synthetic Peanut control sequences, 5' sequence and inner sequence

SEQ ID NO: 37869 - DNA, 53 bp, Artificial Sequence
  Description of Artificial Sequence: Synthetic Peanut control sequences, 5' sequence and inner sequence
tagggaagagaaggacatatgatgtacacagcgcaccctatcgagcttggtca

SEQ ID NO: 37870 - DNA, 53 bp, Artificial Sequence; identical to SEQ ID NO: 1653
  Description of Artificial Sequence: Synthetic Peanut control sequences, 5' sequence and inner sequence

SEQ ID NO: 37871 - DNA, 53 bp, Artificial Sequence; identical to SEQ ID NO: 13986
  Description of Artificial Sequence: Synthetic Peanut control sequences, 5' sequence and inner sequence

SEQ ID NO: 37872 - DNA, 53 bp, Artificial Sequence; identical to SEQ ID NO: 1322
  Description of Artificial Sequence: Synthetic Peanut control sequences, 5' sequence and inner sequence

SEQ ID NO: 37873 - DNA, 53 bp, Artificial Sequence
  Description of Artificial Sequence: Synthetic Peanut control sequences, 5' sequence and inner sequence
tagggaagagaaggacatatgatggcctgatcgaacctagagagtggcgtggt

SEQ ID NO: 37874 - DNA, 53 bp, Artificial Sequence; identical to SEQ ID NO: 13866
  Description of Artificial Sequence: Synthetic Peanut control sequences, 5' sequence and inner sequence

SEQ ID NO: 37875 - DNA, 53 bp, Artificial Sequence; identical to SEQ ID NO: 1534
  Description of Artificial Sequence: Synthetic Peanut control sequences, 5' sequence and inner sequence

SEQ ID NO: 37876 - DNA, 53 bp, Artificial Sequence
  Description of Artificial Sequence: Synthetic Peanut control sequences, 5' sequence and inner sequence
tagggaagagaaggacatatgatggccagatcgaccctatcaagtgcagcatg

SEQ ID NO: 37877 - DNA, 53 bp, Artificial Sequence
  Description of Artificial Sequence: Synthetic Peanut control sequences, 5' sequence and inner sequence
tagggaagagaaggacatatgatggcctgatcgaccctatcaagtgcagcatg

SEQ ID NO: 37878 - DNA, 53 bp, Artificial Sequence
  Description of Artificial Sequence: Synthetic Peanut control sequences, 5' sequence and inner sequence
tagggaagagaaggacatatgatggatgcactcaaccgatccaaggtgcgtca

SEQ ID NO: 37879 - DNA, 53 bp, Artificial Sequence
  Description of Artificial Sequence: Synthetic Peanut control sequences, 5' sequence and inner sequence
tagggaagagaaggacatatgatggacgcaacttcactcaagtgtggcgtgga

SEQ ID NO: 37880 - DNA, 53 bp, Artificial Sequence; identical to SEQ ID NO: 5642
  Description of Artificial Sequence: Synthetic Peanut control sequences, 5' sequence and inner sequence

SEQ ID NO: 37881 - DNA, 53 bp, Artificial Sequence; identical to SEQ ID NO: 9837
  Description of Artificial Sequence: Synthetic Peanut control sequences, 5' sequence and inner sequence

SEQ ID NO: 37882 - DNA, 53 bp, Artificial Sequence; identical to SEQ ID NO: 13853
  Description of Artificial Sequence: Synthetic Peanut control sequences, 5' sequence and inner sequence

SEQ ID NO: 37883 - DNA, 53 bp, Artificial Sequence; identical to SEQ ID NO: 1661
  Description of Artificial Sequence: Synthetic Peanut control sequences, 5' sequence and inner sequence

SEQ ID NO: 37884 - DNA, 52 bp, Artificial Sequence; identical to SEQ ID NO: 33937
  Description of Artificial Sequence: Synthetic Peanut control sequences, 5' sequence and inner sequence

SEQ ID NO: 37885 - DNA, 50 bp, Artificial Sequence
  Description of Artificial Sequence: Synthetic Peanut control sequences, 5' sequence and inner sequence
tagggaagagaaggacatatgatccatcgcgtcactatcatgaggccatg

SEQ ID NO: 37886 - DNA, 53 bp, Artificial Sequence; identical to SEQ ID NO: 21458
  Description of Artificial Sequence: Synthetic Peanut control sequences, 5' sequence and inner sequence

SEQ ID NO: 37887 - DNA, 53 bp, Artificial Sequence; identical to SEQ ID NO: 5938
  Description of Artificial Sequence: Synthetic Peanut control sequences, 5' sequence and inner sequence

SEQ ID NO: 37888 - DNA, 53 bp, Artificial Sequence; identical to SEQ ID NO: 5933
  Description of Artificial Sequence: Synthetic Peanut control sequences, 5' sequence and inner sequence

SEQ ID NO: 37889 - DNA, 53 bp, Artificial Sequence
  Description of Artificial Sequence: Synthetic Peanut control sequences, 5' sequence and inner sequence
tagggaagagaaggacatatgatggacggatcgaccctatcaagtgcagcatg

SEQ ID NO: 37890 - DNA, 53 bp, Artificial Sequence; identical to SEQ ID NO: 21462
  Description of Artificial Sequence: Synthetic Peanut control sequences, 5' sequence and inner sequence

SEQ ID NO: 37891 - DNA, 53 bp, Artificial Sequence; identical to SEQ ID NO: 9993
  Description of Artificial Sequence: Synthetic Peanut control sequences, 5' sequence and inner sequence

SEQ ID NO: 37892 - DNA, 53 bp, Artificial Sequence; identical to SEQ ID NO: 5998
  Description of Artificial Sequence: Synthetic Peanut control sequences, 5' sequence and inner sequence

SEQ ID NO: 37893 - DNA, 53 bp, Artificial Sequence; identical to SEQ ID NO: 9927
  Description of Artificial Sequence: Synthetic Peanut control sequences, 5' sequence and inner sequence

SEQ ID NO: 37894 - DNA, 53 bp, Artificial Sequence; identical to SEQ ID NO: 5918
  Description of Artificial Sequence: Synthetic Peanut control sequences, 5' sequence and inner sequence

SEQ ID NO: 37895 - DNA, 53 bp, Artificial Sequence; identical to SEQ ID NO: 13803
  Description of Artificial Sequence: Synthetic Peanut control sequences, 5' sequence and inner sequence

SEQ ID NO: 37896 - DNA, 49 bp, Artificial Sequence
  Description of Artificial Sequence: Synthetic Peanut control sequences, 5' sequence and inner sequence
tagggaagagaaggacatatgatggacgcatcgccccttcgagtggaca

SEQ ID NO: 37897 - DNA, 53 bp, Artificial Sequence; identical to SEQ ID NO: 13795
  Description of Artificial Sequence: Synthetic Peanut control sequences, 5' sequence and inner sequence

SEQ ID NO: 37898 - DNA, 53 bp, Artificial Sequence; identical to SEQ ID NO: 5801
  Description of Artificial Sequence: Synthetic Peanut control sequences, 5' sequence and inner sequence

SEQ ID NO: 37899 - DNA, 53 bp, Artificial Sequence; identical to SEQ ID NO: 33584
  Description of Artificial Sequence: Synthetic Peanut control sequences, 5' sequence and inner sequence

SEQ ID NO: 37900 - DNA, 54 bp, Artificial Sequence; identical to SEQ ID NO: 29816
  Description of Artificial Sequence: Synthetic Peanut control sequences, 5' sequence and inner sequence

SEQ ID NO: 37901 - DNA, 53 bp, Artificial Sequence
  Description of Artificial Sequence: Synthetic Peanut control sequences, 5' sequence and inner sequence
tagggaagagaaggacatatgatccgcctcgacctggctcatgtggccgtgtg

SEQ ID NO: 37902 - DNA, 53 bp, Artificial Sequence; identical to SEQ ID NO: 1224
  Description of Artificial Sequence: Synthetic Peanut control sequences, 5' sequence and inner sequence

SEQ ID NO: 37903 - DNA, 53 bp, Artificial Sequence; identical to SEQ ID NO: 5692
  Description of Artificial Sequence: Synthetic Peanut control sequences, 5' sequence and inner sequence

SEQ ID NO: 37904 - DNA, 53 bp, Artificial Sequence
  Description of Artificial Sequence: Synthetic Peanut control sequences, 5' sequence and inner sequence
tagggaagagaaggacatatgatgtgcaagcgagcctaccttgacgtgcgtca

SEQ ID NO: 37905 - DNA, 53 bp, Artificial Sequence; identical to SEQ ID NO: 21580
  Description of Artificial Sequence: Synthetic Peanut control sequences, 5' sequence and inner sequence

SEQ ID NO: 37906 - DNA, 52 bp, Artificial Sequence
  Description of Artificial Sequence: Synthetic Peanut control sequences, 5' sequence and inner sequence
tagggaagagaaggacatatgatgcactggctgacctacacgtgggcacgta

SEQ ID NO: 37907 - DNA, 53 bp, Artificial Sequence
  Description of Artificial Sequence: Synthetic Peanut control sequences, 5' sequence and inner sequence
tagggaagagaaggacatatgatgtgtccgagctgggtgtggtcctgcttggc

SEQ ID NO: 37908 - DNA, 53 bp, Artificial Sequence
  Description of Artificial Sequence: Synthetic Peanut control sequences, 5' sequence and inner sequence
tagggaagagaaggacatatgatgcacctgaacgccactcaagttgccgtgga

SEQ ID NO: 37909 - DNA, 53 bp, Artificial Sequence
  Description of Artificial Sequence: Synthetic Peanut control sequences, 5' sequence and inner sequence
tagggaagagaaggacatatgattgtcctgacgtgccctgacatgctgcgtca

SEQ ID NO: 37910 - DNA, 53 bp, Artificial Sequence; identical to SEQ ID NO: 1616
  Description of Artificial Sequence: Synthetic Peanut control sequences, 5' sequence and inner sequence

SEQ ID NO: 37911 - DNA, 53 bp, Artificial Sequence; identical to SEQ ID NO: 21817
  Description of Artificial Sequence: Synthetic Peanut control sequences, 5' sequence and inner sequence

SEQ ID NO: 37912 - DNA, 53 bp, Artificial Sequence; identical to SEQ ID NO: 9935
  Description of Artificial Sequence: Synthetic Peanut control sequences, 5' sequence and inner sequence

SEQ ID NO: 37913 - DNA, 53 bp, Artificial Sequence; identical to SEQ ID NO: 1206
  Description of Artificial Sequence: Synthetic Peanut control sequences, 5' sequence and inner sequence

SEQ ID NO: 37914 - DNA, 54 bp, Artificial Sequence
  Description of Artificial Sequence: Synthetic Peanut control sequences, 5' sequence and inner sequence
tagggaagagaaggacatatgatgtgcgtgcgatctgaccgtgcaagttgggca

SEQ ID NO: 37915 - DNA, 53 bp, Artificial Sequence; identical to SEQ ID NO: 29844
  Description of Artificial Sequence: Synthetic Peanut control sequences, 5' sequence and inner sequence

SEQ ID NO: 37916 - DNA, 53 bp, Artificial Sequence; identical to SEQ ID NO: 9907
  Description of Artificial Sequence: Synthetic Peanut control sequences, 5' sequence and inner sequence

SEQ ID NO: 37917 - DNA, 53 bp, Artificial Sequence; identical to SEQ ID NO: 1152
  Description of Artificial Sequence: Synthetic Peanut control sequences, 5' sequence and inner sequence

SEQ ID NO: 37918 - DNA, 53 bp, Artificial Sequence; identical to SEQ ID NO: 5857
  Description of Artificial Sequence: Synthetic Peanut control sequences, 5' sequence and inner sequence

SEQ ID NO: 37919 - DNA, 53 bp, Artificial Sequence; identical to SEQ ID NO: 21324
  Description of Artificial Sequence: Synthetic Peanut control sequences, 5' sequence and inner sequence

SEQ ID NO: 37920 - DNA, 53 bp, Artificial Sequence
  Description of Artificial Sequence: Synthetic Peanut control sequences, 5' sequence and inner sequence
tagggaagagaaggacatatgattggccgatcgaacctatcaagtgcagcatg

SEQ ID NO: 37921 - DNA, 53 bp, Artificial Sequence; identical to SEQ ID NO: 5969
  Description of Artificial Sequence: Synthetic Peanut control sequences, 5' sequence and inner sequence

SEQ ID NO: 37922 - DNA, 53 bp, Artificial Sequence; identical to SEQ ID NO: 21427
  Description of Artificial Sequence: Synthetic Peanut control sequences, 5' sequence and inner sequence

SEQ ID NO: 37923 - DNA, 53 bp, Artificial Sequence
  Description of Artificial Sequence: Synthetic Peanut control sequences, 5' sequence and inner sequence
tagggaagagaaggacatatgatggacgaacgtaacgtgagagtgtgcatgga

SEQ ID NO: 37924 - DNA, 53 bp, Artificial Sequence
  Description of Artificial Sequence: Synthetic Peanut control sequences, 5' sequence and inner sequence
tagggaagagaaggacatatgatgcaccgtacgcttgacctacacgtggctca

SEQ ID NO: 37925 - DNA, 53 bp, Artificial Sequence; identical to SEQ ID NO: 5419
  Description of Artificial Sequence: Synthetic Peanut control sequences, 5' sequence and inner sequence

SEQ ID NO: 37926 - DNA, 53 bp, Artificial Sequence; identical to SEQ ID NO: 1874
  Description of Artificial Sequence: Synthetic Peanut control sequences, 5' sequence and inner sequence

SEQ ID NO: 37927 - DNA, 53 bp, Artificial Sequence
  Description of Artificial Sequence: Synthetic Peanut control sequences, 5' sequence and inner sequence
tagggaagagaaggacatatgatccgctcgatgaacgtgaatgggcatgcgtc

SEQ ID NO: 37928 - DNA, 53 bp, Artificial Sequence
  Description of Artificial Sequence: Synthetic Peanut control sequences, 5' sequence and inner sequence
tagggaagagaaggacatatgatgtcgtgactggctagctggacatgcactgt

SEQ ID NO: 37929 - DNA, 53 bp, Artificial Sequence; identical to SEQ ID NO: 9991
  Description of Artificial Sequence: Synthetic Peanut control sequences, 5' sequence and inner sequence

SEQ ID NO: 37930 - DNA, 53 bp, Artificial Sequence; identical to SEQ ID NO: 21879
  Description of Artificial Sequence: Synthetic Peanut control sequences, 5' sequence and inner sequence

SEQ ID NO: 37931 - DNA, 53 bp, Artificial Sequence; identical to SEQ ID NO: 9752
  Description of Artificial Sequence: Synthetic Peanut control sequences, 5' sequence and inner sequence

SEQ ID NO: 37932 - DNA, 53 bp, Artificial Sequence
  Description of Artificial Sequence: Synthetic Peanut control sequences, 5' sequence and inner sequence
tagggaagagaaggacatatgattggccgatcgaccctgtcaagtgcagcatg

SEQ ID NO: 37933 - DNA, 50 bp, Artificial Sequence
  Description of Artificial Sequence: Synthetic Peanut control sequences, 5' sequence and inner sequence
tagggaagagaaggacatatgattggccgatcgacactagcaagtgtgca

SEQ ID NO: 37934 - DNA, 53 bp, Artificial Sequence; identical to SEQ ID NO: 5376
  Description of Artificial Sequence: Synthetic Peanut control sequences, 5' sequence and inner sequence

SEQ ID NO: 37935 - DNA, 53 bp, Artificial Sequence; identical to SEQ ID NO: 1749
  Description of Artificial Sequence: Synthetic Peanut control sequences, 5' sequence and inner sequence

SEQ ID NO: 37936 - DNA, 53 bp, Artificial Sequence
  Description of Artificial Sequence: Synthetic Peanut control sequences, 5' sequence and inner sequence
tagggaagagaaggacatatgatgggccgatcgaccctatcaagtgcagcatg

SEQ ID NO: 37937 - DNA, 53 bp, Artificial Sequence; identical to SEQ ID NO: 9872
  Description of Artificial Sequence: Synthetic Peanut control sequences, 5' sequence and inner sequence

SEQ ID NO: 37938 - DNA, 53 bp, Artificial Sequence; identical to SEQ ID NO: 1827
  Description of Artificial Sequence: Synthetic Peanut control sequences, 5' sequence and inner sequence

SEQ ID NO: 37939 - DNA, 53 bp, Artificial Sequence
  Description of Artificial Sequence: Synthetic Peanut control sequences, 5' sequence and inner sequence
tagggaagagaaggacatatgatccgatctggcgtagctggaacatgtgcgtg

SEQ ID NO: 37940 - DNA, 53 bp, Artificial Sequence; identical to SEQ ID NO: 1481
  Description of Artificial Sequence: Synthetic Peanut control sequences, 5' sequence and inner sequence

SEQ ID NO: 37941 - DNA, 53 bp, Artificial Sequence
  Description of Artificial Sequence: Synthetic Peanut control sequences, 5' sequence and inner sequence
tagggaagagaaggacatatgatgtccgtgcttgaccgtagagtgtgcgtgta

SEQ ID NO: 37942 - DNA, 53 bp, Artificial Sequence
  Description of Artificial Sequence: Synthetic Peanut control sequences, 5' sequence and inner sequence
tagggaagagaaggacatatgatccgatgctgcccgtcatgtgtggcgatgtg

SEQ ID NO: 37943 - DNA, 53 bp, Artificial Sequence; identical to SEQ ID NO: 29917
  Description of Artificial Sequence: Synthetic Peanut control sequences, 5' sequence and inner sequence

SEQ ID NO: 37944 - DNA, 53 bp, Artificial Sequence; identical to SEQ ID NO: 9801
  Description of Artificial Sequence: Synthetic Peanut control sequences, 5' sequence and inner sequence

SEQ ID NO: 37945 - DNA, 49 bp, Artificial Sequence; identical to SEQ ID NO: 1822
  Description of Artificial Sequence: Synthetic Peanut control sequences, 5' sequence and inner sequence

SEQ ID NO: 37946 - DNA, 53 bp, Artificial Sequence
  Description of Artificial Sequence: Synthetic Peanut control sequences, 5' sequence and inner sequence
tagggaagagaaggacatatgattggctgatcgaccctatcaagtgcagcatg

SEQ ID NO: 37947 - DNA, 53 bp, Artificial Sequence; identical to SEQ ID NO: 1396
  Description of Artificial Sequence: Synthetic Peanut control sequences, 5' sequence and inner sequence

SEQ ID NO: 37948 - DNA, 53 bp, Artificial Sequence; identical to SEQ ID NO: 29879
  Description of Artificial Sequence: Synthetic Peanut control sequences, 5' sequence and inner sequence

SEQ ID NO: 37949 - DNA, 58 bp, Artificial Sequence
  Description of Artificial Sequence: Synthetic Peanut control sequences, 5' sequence and inner sequence
tagggaagagaaggacatatgatgcattggacgatcgtgccctacacgtgggaatgga

SEQ ID NO: 37950 - DNA, 53 bp, Artificial Sequence; identical to SEQ ID NO: 33175
  Description of Artificial Sequence: Synthetic Peanut control sequences, 5' sequence and inner sequence

SEQ ID NO: 37951 - DNA, 53 bp, Artificial Sequence; identical to SEQ ID NO: 21424
  Description of Artificial Sequence: Synthetic Peanut control sequences, 5' sequence and inner sequence

SEQ ID NO: 37952 - DNA, 53 bp, Artificial Sequence; identical to SEQ ID NO: 5810
  Description of Artificial Sequence: Synthetic Peanut control sequences, 5' sequence and inner sequence

SEQ ID NO: 37953 - DNA, 53 bp, Artificial Sequence; identical to SEQ ID NO: 33268
  Description of Artificial Sequence: Synthetic Peanut control sequences, 5' sequence and inner sequence

SEQ ID NO: 37954 - DNA, 54 bp, Artificial Sequence
  Description of Artificial Sequence: Synthetic Peanut control sequences, 5' sequence and inner sequence
tagggaagagaaggacatatgattggccgaacgaccgatcgagtggcgcatgga

SEQ ID NO: 37955 - DNA, 53 bp, Artificial Sequence; identical to SEQ ID NO: 9891
  Description of Artificial Sequence: Synthetic Peanut control sequences, 5' sequence and inner sequence

SEQ ID NO: 37956 - DNA, 53 bp, Artificial Sequence; identical to SEQ ID NO: 21623
  Description of Artificial Sequence: Synthetic Peanut control sequences, 5' sequence and inner sequence

SEQ ID NO: 37957 - DNA, 53 bp, Artificial Sequence; identical to SEQ ID NO: 17962
  Description of Artificial Sequence: Synthetic Peanut control sequences, 5' sequence and inner sequence

SEQ ID NO: 37958 - DNA, 53 bp, Artificial Sequence; identical to SEQ ID NO: 33384
  Description of Artificial Sequence: Synthetic Peanut control sequences, 5' sequence and inner sequence

SEQ ID NO: 37959 - DNA, 54 bp, Artificial Sequence; identical to SEQ ID NO: 1971
  Description of Artificial Sequence: Synthetic Peanut control sequences, 5' sequence and inner sequence

SEQ ID NO: 37960 - DNA, 53 bp, Artificial Sequence; identical to SEQ ID NO: 13914
  Description of Artificial Sequence: Synthetic Peanut control sequences, 5' sequence and inner sequence

SEQ ID NO: 37961 - DNA, 53 bp, Artificial Sequence
  Description of Artificial Sequence: Synthetic Peanut control sequences, 5' sequence and inner sequence
tagggaagagaaggacatatgatggacgacgcgagccctacatgtgtcgtgga

SEQ ID NO: 37962 - DNA, 51 bp, Artificial Sequence; identical to SEQ ID NO: 21328
  Description of Artificial Sequence: Synthetic Peanut control sequences, 5' sequence and inner sequence

SEQ ID NO: 37963 - DNA, 58 bp, Artificial Sequence
  Description of Artificial Sequence: Synthetic Peanut control sequences, 5' sequence and inner sequence
tagggaagagaaggacatatgataatgcggcatgaacggacctacacgtgggcacgta

SEQ ID NO: 37964 - DNA, 53 bp, Artificial Sequence; identical to SEQ ID NO: 13428
  Description of Artificial Sequence: Synthetic Peanut control sequences, 5' sequence and inner sequence

SEQ ID NO: 37965 - DNA, 53 bp, Artificial Sequence; identical to SEQ ID NO: 1972
  Description of Artificial Sequence: Synthetic Peanut control sequences, 5' sequence and inner sequence

SEQ ID NO: 37966 - DNA, 53 bp, Artificial Sequence
  Description of Artificial Sequence: Synthetic Peanut control sequences, 5' sequence and inner sequence
tagggaagagaaggacatatgatggccaatcatcccgtcaagtgaggtgtgga

SEQ ID NO: 37967 - DNA, 53 bp, Artificial Sequence
  Description of Artificial Sequence: Synthetic Peanut control sequences, 5' sequence and inner sequence
tagggaagagaaggacatatgatggcctgatcgaacctagagagtggcgtggc

SEQ ID NO: 37968 - DNA, 53 bp, Artificial Sequence
  Description of Artificial Sequence: Synthetic Peanut control sequences, 5' sequence and inner sequence
tagggaagagaaggacatatgattgcatgtgccgtctcgctcccggtgtggca

SEQ ID NO: 37969 - DNA, 53 bp, Artificial Sequence; identical to SEQ ID NO: 1375
  Description of Artificial Sequence: Synthetic Peanut control sequences, 5' sequence and inner sequence

SEQ ID NO: 37970 - DNA, 53 bp, Artificial Sequence; identical to SEQ ID NO: 13945
  Description of Artificial Sequence: Synthetic Peanut control sequences, 5' sequence and inner sequence

SEQ ID NO: 37971 - DNA, 53 bp, Artificial Sequence; identical to SEQ ID NO: 33006
  Description of Artificial Sequence: Synthetic Peanut control sequences, 5' sequence and inner sequence

SEQ ID NO: 37972 - DNA, 53 bp, Artificial Sequence; identical to SEQ ID NO: 21415
  Description of Artificial Sequence: Synthetic Peanut control sequences, 5' sequence and inner sequence

SEQ ID NO: 37973 - DNA, 53 bp, Artificial Sequence; identical to SEQ ID NO: 5405
  Description of Artificial Sequence: Synthetic Peanut control sequences, 5' sequence and inner sequence

SEQ ID NO: 37974 - DNA, 53 bp, Artificial Sequence
  Description of Artificial Sequence: Synthetic Peanut control sequences, 5' sequence and inner sequence
tagggaagagaaggacatatgatgcttcgatggatgctgggcaggcacgcagt

SEQ ID NO: 37975 - DNA, 53 bp, Artificial Sequence; identical to SEQ ID NO: 5631
  Description of Artificial Sequence: Synthetic Peanut control sequences, 5' sequence and inner sequence

SEQ ID NO: 37976 - DNA, 53 bp, Artificial Sequence; identical to SEQ ID NO: 1773
  Description of Artificial Sequence: Synthetic Peanut control sequences, 5' sequence and inner sequence

SEQ ID NO: 37977 - DNA, 53 bp, Artificial Sequence; identical to SEQ ID NO: 1486
  Description of Artificial Sequence: Synthetic Peanut control sequences, 5' sequence and inner sequence

SEQ ID NO: 37978 - DNA, 53 bp, Artificial Sequence; identical to SEQ ID NO: 21803
  Description of Artificial Sequence: Synthetic Peanut control sequences, 5' sequence and inner sequence

SEQ ID NO: 37979 - DNA, 52 bp, Artificial Sequence
  Description of Artificial Sequence: Synthetic Peanut control sequences, 5' sequence and inner sequence
tagggaagagaaggacatatgatgaccgaacgtaccggtggcatgcacgcca

SEQ ID NO: 37980 - DNA, 53 bp, Artificial Sequence; identical to SEQ ID NO: 9953
  Description of Artificial Sequence: Synthetic Peanut control sequences, 5' sequence and inner sequence

SEQ ID NO: 37981 - DNA, 53 bp, Artificial Sequence; identical to SEQ ID NO: 21882
  Description of Artificial Sequence: Synthetic Peanut control sequences, 5' sequence and inner sequence

SEQ ID NO: 37982 - DNA, 53 bp, Artificial Sequence
  Description of Artificial Sequence: Synthetic Peanut control sequences, 5' sequence and inner sequence
tagggaagagaaggacatatgattggccgatcgaccctatcaagttcagcatg

SEQ ID NO: 37983 - DNA, 53 bp, Artificial Sequence; identical to SEQ ID NO: 29957
  Description of Artificial Sequence: Synthetic Peanut control sequences, 5' sequence and inner sequence

SEQ ID NO: 37984 - DNA, 53 bp, Artificial Sequence; identical to SEQ ID NO: 1543
  Description of Artificial Sequence: Synthetic Peanut control sequences, 5' sequence and inner sequence

SEQ ID NO: 37985 - DNA, 53 bp, Artificial Sequence; identical to SEQ ID NO: 9946
  Description of Artificial Sequence: Synthetic Peanut control sequences, 5' sequence and inner sequence

SEQ ID NO: 37986 - DNA, 53 bp, Artificial Sequence
  Description of Artificial Sequence: Synthetic Peanut control sequences, 5' sequence and inner sequence
tagggaagagaaggacatatgatgtcacgaaacggcaccttcatgtggacgtg

SEQ ID NO: 37987 - DNA, 53 bp, Artificial Sequence; identical to SEQ ID NO: 29485
  Description of Artificial Sequence: Synthetic Peanut control sequences, 5' sequence and inner sequence

SEQ ID NO: 37988 - DNA, 53 bp, Artificial Sequence; identical to SEQ ID NO: 1267
  Description of Artificial Sequence: Synthetic Peanut control sequences, 5' sequence and inner sequence

SEQ ID NO: 37989 - DNA, 53 bp, Artificial Sequence; identical to SEQ ID NO: 1892
  Description of Artificial Sequence: Synthetic Peanut control sequences, 5' sequence and inner sequence

SEQ ID NO: 37990 - DNA, 53 bp, Artificial Sequence; identical to SEQ ID NO: 5761
  Description of Artificial Sequence: Synthetic Peanut control sequences, 5' sequence and inner sequence

SEQ ID NO: 37991 - DNA, 53 bp, Artificial Sequence; identical to SEQ ID NO: 25872
  Description of Artificial Sequence: Synthetic Peanut control sequences, 5' sequence and inner sequence

SEQ ID NO: 37992 - DNA, 53 bp, Artificial Sequence
  Description of Artificial Sequence: Synthetic Peanut control sequences, 5' sequence and inner sequence
tagggaagagaaggacatatgatggcatgcacgcaccctatcatgaggccatg

SEQ ID NO: 37993 - DNA, 53 bp, Artificial Sequence
  Description of Artificial Sequence: Synthetic Peanut control sequences, 5' sequence and inner sequence
tagggaagagaaggacatatgattggtcgatcgaccctatcaagtgcagcatg

SEQ ID NO: 37994 - DNA, 53 bp, Artificial Sequence; identical to SEQ ID NO: 9670
  Description of Artificial Sequence: Synthetic Peanut control sequences, 5' sequence and inner sequence

SEQ ID NO: 37995 - DNA, 53 bp, Artificial Sequence; identical to SEQ ID NO: 21801
  Description of Artificial Sequence: Synthetic Peanut control sequences, 5' sequence and inner sequence

SEQ ID NO: 37996 - DNA, 53 bp, Artificial Sequence
  Description of Artificial Sequence: Synthetic Peanut control sequences, 5' sequence and inner sequence
tagggaagagaaggacatatgatctcgacgagtaggcatgtcttctgtgtgca

SEQ ID NO: 37997 - DNA, 53 bp, Artificial Sequence; identical to SEQ ID NO: 1608
  Description of Artificial Sequence: Synthetic Peanut control sequences, 5' sequence and inner sequence

SEQ ID NO: 37998 - DNA, 53 bp, Artificial Sequence; identical to SEQ ID NO: 21530
  Description of Artificial Sequence: Synthetic Peanut control sequences, 5' sequence and inner sequence

SEQ ID NO: 37999 - DNA, 53 bp, Artificial Sequence; identical to SEQ ID NO: 5721
  Description of Artificial Sequence: Synthetic Peanut control sequences, 5' sequence and inner sequence

SEQ ID NO: 38000 - DNA, 53 bp, Artificial Sequence
  Description of Artificial Sequence: Synthetic Peanut control sequences, 5' sequence and inner sequence
tagggaagagaaggacatatgatgacctggctcgaccttcaatgcgtcgtgga

SEQ ID NO: 38001 - DNA, 53 bp, Artificial Sequence
  Description of Artificial Sequence: Synthetic Peanut control sequences, 5' sequence and inner sequence
tagggaagagaaggacatatgatccgtcacgtacctatcacgtgtcatgctgc

SEQ ID NO: 38002 - DNA, 53 bp, Artificial Sequence; identical to SEQ ID NO: 21984
  Description of Artificial Sequence: Synthetic Peanut control sequences, 5' sequence and inner sequence

SEQ ID NO: 38003 - DNA, 53 bp, Artificial Sequence; identical to SEQ ID NO: 2004
  Description of Artificial Sequence: Synthetic Peanut control sequences; inner sequence and 3' sequence

SEQ ID NO: 38004 - DNA, 53 bp, Artificial Sequence; identical to SEQ ID NO: 2008
  Description of Artificial Sequence: Synthetic Peanut control sequences; inner sequence and 3' sequence

SEQ ID NO: 38005 - DNA, 53 bp, Artificial Sequence; identical to SEQ ID NO: 2007
  Description of Artificial Sequence: Synthetic Peanut control sequences; inner sequence and 3' sequence

SEQ ID NO: 38006 - DNA, 53 bp, Artificial Sequence; identical to SEQ ID NO: 2006
  Description of Artificial Sequence: Synthetic Peanut control sequences; inner sequence and 3' sequence

SEQ ID NO: 38007 - DNA, 53 bp, Artificial Sequence; identical to SEQ ID NO: 2017
  Description of Artificial Sequence: Synthetic Peanut control sequences; inner sequence and 3' sequence

SEQ ID NO: 38008 - DNA, 53 bp, Artificial Sequence; identical to SEQ ID NO: 2003
  Description of Artificial Sequence: Synthetic Peanut control sequences; inner sequence and 3' sequence

SEQ ID NO: 38009 - DNA, 53 bp, Artificial Sequence; identical to SEQ ID NO: 2009
  Description of Artificial Sequence: Synthetic Peanut control sequences; inner sequence and 3' sequence

SEQ ID NO: 38010 - DNA, 53 bp, Artificial Sequence; identical to SEQ ID NO: 2012
  Description of Artificial Sequence: Synthetic Peanut control sequences; inner sequence and 3' sequence

SEQ ID NO: 38011 - DNA, 53 bp, Artificial Sequence; identical to SEQ ID NO: 2014
  Description of Artificial Sequence: Synthetic Peanut control sequences; inner sequence and 3' sequence

SEQ ID NO: 38012 - DNA, 53 bp, Artificial Sequence; identical to SEQ ID NO: 2005
  Description of Artificial Sequence: Synthetic Peanut control sequences; inner sequence and 3' sequence

SEQ ID NO: 38013 - DNA, 53 bp, Artificial Sequence; identical to SEQ ID NO: 2011
  Description of Artificial Sequence: Synthetic Peanut control sequences; inner sequence and 3' sequence

SEQ ID NO: 38014 - DNA, 53 bp, Artificial Sequence; identical to SEQ ID NO: 2019
  Description of Artificial Sequence: Synthetic Peanut control sequences; inner sequence and 3' sequence

SEQ ID NO: 38015 - DNA, 53 bp, Artificial Sequence; identical to SEQ ID NO: 2023
  Description of Artificial Sequence: Synthetic Peanut control sequences; inner sequence and 3' sequence

SEQ ID NO: 38016 - DNA, 53 bp, Artificial Sequence; identical to SEQ ID NO: 2015
  Description of Artificial Sequence: Synthetic Peanut control sequences; inner sequence and 3' sequence

SEQ ID NO: 38017 - DNA, 53 bp, Artificial Sequence; identical to SEQ ID NO: 2024
  Description of Artificial Sequence: Synthetic Peanut control sequences; inner sequence and 3' sequence

SEQ ID NO: 38018 - DNA, 53 bp, Artificial Sequence; identical to SEQ ID NO: 2060
  Description of Artificial Sequence: Synthetic Peanut control sequences; inner sequence and 3' sequence

SEQ ID NO: 38019 - DNA, 53 bp, Artificial Sequence; identical to SEQ ID NO: 2013
  Description of Artificial Sequence: Synthetic Peanut control sequences; inner sequence and 3' sequence

SEQ ID NO: 38020 - DNA, 53 bp, Artificial Sequence; identical to SEQ ID NO: 2029
  Description of Artificial Sequence: Synthetic Peanut control sequences; inner sequence and 3' sequence

SEQ ID NO: 38021 - DNA, 53 bp, Artificial Sequence; identical to SEQ ID NO: 2034
  Description of Artificial Sequence: Synthetic Peanut control sequences; inner sequence and 3' sequence

SEQ ID NO: 38022 - DNA, 53 bp, Artificial Sequence; identical to SEQ ID NO: 2010
  Description of Artificial Sequence: Synthetic Peanut control sequences; inner sequence and 3' sequence

SEQ ID NO: 38023 - DNA, 53 bp, Artificial Sequence; identical to SEQ ID NO: 2055
  Description of Artificial Sequence: Synthetic Peanut control sequences; inner sequence and 3' sequence

SEQ ID NO: 38024 - DNA, 53 bp, Artificial Sequence; identical to SEQ ID NO: 2054
  Description of Artificial Sequence: Synthetic Peanut control sequences; inner sequence and 3' sequence

SEQ ID NO: 38025 - DNA, 53 bp, Artificial Sequence; identical to SEQ ID NO: 2041
  Description of Artificial Sequence: Synthetic Peanut control sequences; inner sequence and 3' sequence

SEQ ID NO: 38026 - DNA, 53 bp, Artificial Sequence; identical to SEQ ID NO: 2032
  Description of Artificial Sequence: Synthetic Peanut control sequences; inner sequence and 3' sequence

SEQ ID NO: 38027 - DNA, 53 bp, Artificial Sequence; identical to SEQ ID NO: 2018
  Description of Artificial Sequence: Synthetic Peanut control sequences; inner sequence and 3' sequence

SEQ ID NO: 38028 - DNA, 53 bp, Artificial Sequence; identical to SEQ ID NO: 2031
  Description of Artificial Sequence: Synthetic Peanut control sequences; inner sequence and 3' sequence

SEQ ID NO: 38029 - DNA, 53 bp, Artificial Sequence; identical to SEQ ID NO: 2028
  Description of Artificial Sequence: Synthetic Peanut control sequences; inner sequence and 3' sequence

SEQ ID NO: 38030 - DNA, 53 bp, Artificial Sequence; identical to SEQ ID NO: 2030
  Description of Artificial Sequence: Synthetic Peanut control sequences; inner sequence and 3' sequence

SEQ ID NO: 38031 - DNA, 53 bp, Artificial Sequence; identical to SEQ ID NO: 2020
  Description of Artificial Sequence: Synthetic Peanut control sequences; inner sequence and 3' sequence

SEQ ID NO: 38032 - DNA, 53 bp, Artificial Sequence; identical to SEQ ID NO: 2133
  Description of Artificial Sequence: Synthetic Peanut control sequences; inner sequence and 3' sequence

SEQ ID NO: 38033 - DNA, 53 bp, Artificial Sequence; identical to SEQ ID NO: 2021
  Description of Artificial Sequence: Synthetic Peanut control sequences; inner sequence and 3' sequence

SEQ ID NO: 38034 - DNA, 53 bp, Artificial Sequence; identical to SEQ ID NO: 2042
  Description of Artificial Sequence: Synthetic Peanut control sequences; inner sequence and 3' sequence

SEQ ID NO: 38035 - DNA, 53 bp, Artificial Sequence; identical to SEQ ID NO: 2074
  Description of Artificial Sequence: Synthetic Peanut control sequences; inner sequence and 3' sequence

SEQ ID NO: 38036 - DNA, 53 bp, Artificial Sequence; identical to SEQ ID NO: 2047
  Description of Artificial Sequence: Synthetic Peanut control sequences; inner sequence and 3' sequence

SEQ ID NO: 38037 - DNA, 53 bp, Artificial Sequence; identical to SEQ ID NO: 2037
  Description of Artificial Sequence: Synthetic Peanut control sequences; inner sequence and 3' sequence

SEQ ID NO: 38038 - DNA, 53 bp, Artificial Sequence; identical to SEQ ID NO: 2045
  Description of Artificial Sequence: Synthetic Peanut control sequences; inner sequence and 3' sequence

SEQ ID NO: 38039 - DNA, 53 bp, Artificial Sequence; identical to SEQ ID NO: 2076
  Description of Artificial Sequence: Synthetic Peanut control sequences; inner sequence and 3' sequence

SEQ ID NO: 38040 - DNA, 53 bp, Artificial Sequence; identical to SEQ ID NO: 2026
  Description of Artificial Sequence: Synthetic Peanut control sequences; inner sequence and 3' sequence

SEQ ID NO: 38041 - DNA, 53 bp, Artificial Sequence; identical to SEQ ID NO: 2082
  Description of Artificial Sequence: Synthetic Peanut control sequences; inner sequence and 3' sequence

SEQ ID NO: 38042 - DNA, 53 bp, Artificial Sequence; identical to SEQ ID NO: 2049
  Description of Artificial Sequence: Synthetic Peanut control sequences; inner sequence and 3' sequence

SEQ ID NO: 38043 - DNA, 52 bp, Artificial Sequence; identical to SEQ ID NO: 2070
  Description of Artificial Sequence: Synthetic Peanut control sequences; inner sequence and 3' sequence

SEQ ID NO: 38044 - DNA, 53 bp, Artificial Sequence; identical to SEQ ID NO: 2033
  Description of Artificial Sequence: Synthetic Peanut control sequences; inner sequence and 3' sequence

SEQ ID NO: 38045 - DNA, 53 bp, Artificial Sequence; identical to SEQ ID NO: 2022
  Description of Artificial Sequence: Synthetic Peanut control sequences; inner sequence and 3' sequence

SEQ ID NO: 38046 - DNA, 53 bp, Artificial Sequence; identical to SEQ ID NO: 2257
  Description of Artificial Sequence: Synthetic Peanut control sequences; inner sequence and 3' sequence

SEQ ID NO: 38047 - DNA, 53 bp, Artificial Sequence; identical to SEQ ID NO: 2122
  Description of Artificial Sequence: Synthetic Peanut control sequences; inner sequence and 3' sequence

SEQ ID NO: 38048 - DNA, 53 bp, Artificial Sequence; identical to SEQ ID NO: 2048
  Description of Artificial Sequence: Synthetic Peanut control sequences; inner sequence and 3' sequence

SEQ ID NO: 38049 - DNA, 53 bp, Artificial Sequence; identical to SEQ ID NO: 2061
  Description of Artificial Sequence: Synthetic Peanut control sequences; inner sequence and 3' sequence

SEQ ID NO: 38050 - DNA, 53 bp, Artificial Sequence; identical to SEQ ID NO: 2059
  Description of Artificial Sequence: Synthetic Peanut control sequences; inner sequence and 3' sequence

SEQ ID NO: 38051 - DNA, 53 bp, Artificial Sequence; identical to SEQ ID NO: 2308
  Description of Artificial Sequence: Synthetic Peanut control sequences; inner sequence and 3' sequence

SEQ ID NO: 38052 - DNA, 53 bp, Artificial Sequence; identical to SEQ ID NO: 2046
  Description of Artificial Sequence: Synthetic Peanut control sequences; inner sequence and 3' sequence

SEQ ID NO: 38053 - DNA, 53 bp, Artificial Sequence; identical to SEQ ID NO: 2038
  Description of Artificial Sequence: Synthetic Peanut control sequences; inner sequence and 3' sequence

SEQ ID NO: 38054 - DNA, 53 bp, Artificial Sequence; identical to SEQ ID NO: 2050
  Description of Artificial Sequence: Synthetic Peanut control sequences; inner sequence and 3' sequence

SEQ ID NO: 38055 - DNA, 53 bp, Artificial Sequence; identical to SEQ ID NO: 2125
  Description of Artificial Sequence: Synthetic Peanut control sequences; inner sequence and 3' sequence

SEQ ID NO: 38056 - DNA, 53 bp, Artificial Sequence; identical to SEQ ID NO: 2052
  Description of Artificial Sequence: Synthetic Peanut control sequences; inner sequence and 3' sequence

SEQ ID NO: 38057 - DNA, 53 bp, Artificial Sequence; identical to SEQ ID NO: 2053
  Description of Artificial Sequence: Synthetic Peanut control sequences; inner sequence and 3' sequence

SEQ ID NO: 38058 - DNA, 53 bp, Artificial Sequence; identical to SEQ ID NO: 2027
  Description of Artificial Sequence: Synthetic Peanut control sequences; inner sequence and 3' sequence

SEQ ID NO: 38059 - DNA, 53 bp, Artificial Sequence; identical to SEQ ID NO: 2081
  Description of Artificial Sequence: Synthetic Peanut control sequences; inner sequence and 3' sequence

SEQ ID NO: 38060 - DNA, 53 bp, Artificial Sequence; identical to SEQ ID NO: 2039
  Description of Artificial Sequence: Synthetic Peanut control sequences; inner sequence and 3' sequence

SEQ ID NO: 38061 - DNA, 53 bp, Artificial Sequence; identical to SEQ ID NO: 2080
  Description of Artificial Sequence: Synthetic Peanut control sequences; inner sequence and 3' sequence

SEQ ID NO: 38062 - DNA, 53 bp, Artificial Sequence; identical to SEQ ID NO: 2040
  Description of Artificial Sequence: Synthetic Peanut control sequences; inner sequence and 3' sequence

SEQ ID NO: 38063 - DNA, 53 bp, Artificial Sequence; identical to SEQ ID NO: 2299
  Description of Artificial Sequence: Synthetic Peanut control sequences; inner sequence and 3' sequence

SEQ ID NO: 38064 - DNA, 53 bp, Artificial Sequence; identical to SEQ ID NO: 2035
  Description of Artificial Sequence: Synthetic Peanut control sequences; inner sequence and 3' sequence

SEQ ID NO: 38065 - DNA, 53 bp, Artificial Sequence; identical to SEQ ID NO: 2093
  Description of Artificial Sequence: Synthetic Peanut control sequences; inner sequence and 3' sequence

SEQ ID NO: 38066 - DNA, 53 bp, Artificial Sequence; identical to SEQ ID NO: 2230
  Description of Artificial Sequence: Synthetic Peanut control sequences; inner sequence and 3' sequence

SEQ ID NO: 38067 - DNA, 53 bp, Artificial Sequence; identical to SEQ ID NO: 2077
  Description of Artificial Sequence: Synthetic Peanut control sequences; inner sequence and 3' sequence

SEQ ID NO: 38068 - DNA, 53 bp, Artificial Sequence; identical to SEQ ID NO: 2207
  Description of Artificial Sequence: Synthetic Peanut control sequences; inner sequence and 3' sequence

SEQ ID NO: 38069 - DNA, 53 bp, Artificial Sequence; identical to SEQ ID NO: 2131
  Description of Artificial Sequence: Synthetic Peanut control sequences; inner sequence and 3' sequence

SEQ ID NO: 38070 - DNA, 53 bp, Artificial Sequence; identical to SEQ ID NO: 2092
  Description of Artificial Sequence: Synthetic Peanut control sequences; inner sequence and 3' sequence

SEQ ID NO: 38071 - DNA, 52 bp, Artificial Sequence; identical to SEQ ID NO: 2193
  Description of Artificial Sequence: Synthetic Peanut control sequences; inner sequence and 3' sequence

SEQ ID NO: 38072 - DNA, 53 bp, Artificial Sequence; identical to SEQ ID NO: 10401
  Description of Artificial Sequence: Synthetic Peanut control sequences; inner sequence and 3' sequence

SEQ ID NO: 38073 - DNA, 53 bp, Artificial Sequence; identical to SEQ ID NO: 2106
  Description of Artificial Sequence: Synthetic Peanut control sequences; inner sequence and 3' sequence

SEQ ID NO: 38074 - DNA, 53 bp, Artificial Sequence; identical to SEQ ID NO: 2043
  Description of Artificial Sequence: Synthetic Peanut control sequences; inner sequence and 3' sequence

SEQ ID NO: 38075 - DNA, 53 bp, Artificial Sequence; identical to SEQ ID NO: 2175
  Description of Artificial Sequence: Synthetic Peanut control sequences; inner sequence and 3' sequence

SEQ ID NO: 38076 - DNA, 53 bp, Artificial Sequence; identical to SEQ ID NO: 2145
  Description of Artificial Sequence: Synthetic Peanut control sequences; inner sequence and 3' sequence

SEQ ID NO: 38077 - DNA, 53 bp, Artificial Sequence; identical to SEQ ID NO: 2016
  Description of Artificial Sequence: Synthetic Peanut control sequences; inner sequence and 3' sequence

SEQ ID NO: 38078 - DNA, 53 bp, Artificial Sequence; identical to SEQ ID NO: 2126
  Description of Artificial Sequence: Synthetic Peanut control sequences; inner sequence and 3' sequence

SEQ ID NO: 38079 - DNA, 53 bp, Artificial Sequence; identical to SEQ ID NO: 2066
  Description of Artificial Sequence: Synthetic Peanut control sequences; inner sequence and 3' sequence

SEQ ID NO: 38080 - DNA, 53 bp, Artificial Sequence; identical to SEQ ID NO: 2063
  Description of Artificial Sequence: Synthetic Peanut control sequences; inner sequence and 3' sequence

SEQ ID NO: 38081 - DNA, 53 bp, Artificial Sequence; identical to SEQ ID NO: 2164
  Description of Artificial Sequence: Synthetic Peanut control sequences; inner sequence and 3' sequence

SEQ ID NO: 38082 - DNA, 51 bp, Artificial Sequence; identical to SEQ ID NO: 2148
  Description of Artificial Sequence: Synthetic Peanut control sequences; inner sequence and 3' sequence

SEQ ID NO: 38083 - DNA, 53 bp, Artificial Sequence; identical to SEQ ID NO: 2051
  Description of Artificial Sequence: Synthetic Peanut control sequences; inner sequence and 3' sequence

SEQ ID NO: 38084 - DNA, 53 bp, Artificial Sequence; identical to SEQ ID NO: 2270
  Description of Artificial Sequence: Synthetic Peanut control sequences; inner sequence and 3' sequence

SEQ ID NO: 38085 - DNA, 53 bp, Artificial Sequence; identical to SEQ ID NO: 2154
  Description of Artificial Sequence: Synthetic Peanut control sequences; inner sequence and 3' sequence

SEQ ID NO: 38086 - DNA, 53 bp, Artificial Sequence; identical to SEQ ID NO: 2109
  Description of Artificial Sequence: Synthetic Peanut control sequences; inner sequence and 3' sequence

SEQ ID NO: 38087 - DNA, 53 bp, Artificial Sequence; identical to SEQ ID NO: 2067
  Description of Artificial Sequence: Synthetic Peanut control sequences; inner sequence and 3' sequence

SEQ ID NO: 38088 - DNA, 53 bp, Artificial Sequence; identical to SEQ ID NO: 2058
  Description of Artificial Sequence: Synthetic Peanut control sequences; inner sequence and 3' sequence

SEQ ID NO: 38089 - DNA, 53 bp, Artificial Sequence; identical to SEQ ID NO: 2025
  Description of Artificial Sequence: Synthetic Peanut control sequences; inner sequence and 3' sequence

SEQ ID NO: 38090 - DNA, 53 bp, Artificial Sequence; identical to SEQ ID NO: 2156
  Description of Artificial Sequence: Synthetic Peanut control sequences; inner sequence and 3' sequence

SEQ ID NO: 38091 - DNA, 53 bp, Artificial Sequence; identical to SEQ ID NO: 2136
  Description of Artificial Sequence: Synthetic Peanut control sequences; inner sequence and 3' sequence

SEQ ID NO: 38092 - DNA, 53 bp, Artificial Sequence; identical to SEQ ID NO: 2142
  Description of Artificial Sequence: Synthetic Peanut control sequences; inner sequence and 3' sequence

SEQ ID NO: 38093 - DNA, 53 bp, Artificial Sequence; identical to SEQ ID NO: 2094
  Description of Artificial Sequence: Synthetic Peanut control sequences; inner sequence and 3' sequence

SEQ ID NO: 38094 - DNA, 53 bp, Artificial Sequence; identical to SEQ ID NO: 2100
  Description of Artificial Sequence: Synthetic Peanut control sequences; inner sequence and 3' sequence

SEQ ID NO: 38095 - DNA, 53 bp, Artificial Sequence; identical to SEQ ID NO: 2089
  Description of Artificial Sequence: Synthetic Peanut control sequences; inner sequence and 3' sequence

SEQ ID NO: 38096 - DNA, 53 bp, Artificial Sequence; identical to SEQ ID NO: 2208
  Description of Artificial Sequence: Synthetic Peanut control sequences; inner sequence and 3' sequence

SEQ ID NO: 38097 - DNA, 53 bp, Artificial Sequence; identical to SEQ ID NO: 2186
  Description of Artificial Sequence: Synthetic Peanut control sequences; inner sequence and 3' sequence

SEQ ID NO: 38098 - DNA, 53 bp, Artificial Sequence; identical to SEQ ID NO: 2111
  Description of Artificial Sequence: Synthetic Peanut control sequences; inner sequence and 3' sequence

SEQ ID NO: 38099 - DNA, 53 bp, Artificial Sequence; identical to SEQ ID NO: 2146
  Description of Artificial Sequence: Synthetic Peanut control sequences; inner sequence and 3' sequence

SEQ ID NO: 38100 - DNA, 53 bp, Artificial Sequence; identical to SEQ ID NO: 2163
  Description of Artificial Sequence: Synthetic Peanut control sequences; inner sequence and 3' sequence

SEQ ID NO: 38101 - DNA, 53 bp, Artificial Sequence; identical to SEQ ID NO: 2203
  Description of Artificial Sequence: Synthetic Peanut control sequences; inner sequence and 3' sequence

SEQ ID NO: 38102 - DNA, 54 bp, Artificial Sequence; identical to SEQ ID NO: 2250
  Description of Artificial Sequence: Synthetic Peanut control sequences; inner sequence and 3' sequence

SEQ ID NO: 38103 - DNA, 52 bp, Artificial Sequence; identical to SEQ ID NO: 2334
  Description of Artificial Sequence: Synthetic Peanut control sequences; inner sequence and 3' sequence

SEQ ID NO: 38104 - DNA, 53 bp, Artificial Sequence; identical to SEQ ID NO: 2044
  Description of Artificial Sequence: Synthetic Peanut control sequences; inner sequence and 3' sequence

SEQ ID NO: 38105 - DNA, 53 bp, Artificial Sequence; identical to SEQ ID NO: 2161
  Description of Artificial Sequence: Synthetic Peanut control sequences; inner sequence and 3' sequence

SEQ ID NO: 38106 - DNA, 53 bp, Artificial Sequence; identical to SEQ ID NO: 2362
  Description of Artificial Sequence: Synthetic Peanut control sequences; inner sequence and 3' sequence

SEQ ID NO: 38107 - DNA, 53 bp, Artificial Sequence; identical to SEQ ID NO: 2057
  Description of Artificial Sequence: Synthetic Peanut control sequences; inner sequence and 3' sequence

SEQ ID NO: 38108 - DNA, 53 bp, Artificial Sequence; identical to SEQ ID NO: 2078
  Description of Artificial Sequence: Synthetic Peanut control sequences; inner sequence and 3' sequence

SEQ ID NO: 38109 - DNA, 53 bp, Artificial Sequence; identical to SEQ ID NO: 2323
  Description of Artificial Sequence: Synthetic Peanut control sequences; inner sequence and 3' sequence

SEQ ID NO: 38110 - DNA, 53 bp, Artificial Sequence; identical to SEQ ID NO: 2567
  Description of Artificial Sequence: Synthetic Peanut control sequences; inner sequence and 3' sequence

SEQ ID NO: 38111 - DNA, 53 bp, Artificial Sequence; identical to SEQ ID NO: 2529
  Description of Artificial Sequence: Synthetic Peanut control sequences; inner sequence and 3' sequence

SEQ ID NO: 38112 - DNA, 53 bp, Artificial Sequence; identical to SEQ ID NO: 2095
  Description of Artificial Sequence: Synthetic Peanut control sequences; inner sequence and 3' sequence

SEQ ID NO: 38113 - DNA, 53 bp, Artificial Sequence; identical to SEQ ID NO: 2247
  Description of Artificial Sequence: Synthetic Peanut control sequences; inner sequence and 3' sequence

SEQ ID NO: 38114 - DNA, 53 bp, Artificial Sequence; identical to SEQ ID NO: 2377
  Description of Artificial Sequence: Synthetic Peanut control sequences; inner sequence and 3' sequence

SEQ ID NO: 38115 - DNA, 52 bp, Artificial Sequence; identical to SEQ ID NO: 2251
  Description of Artificial Sequence: Synthetic Peanut control sequences; inner sequence and 3' sequence

SEQ ID NO: 38116 - DNA, 53 bp, Artificial Sequence; identical to SEQ ID NO: 2065
  Description of Artificial Sequence: Synthetic Peanut control sequences; inner sequence and 3' sequence

SEQ ID NO: 38117 - DNA, 53 bp, Artificial Sequence; identical to SEQ ID NO: 2117
  Description of Artificial Sequence: Synthetic Peanut control sequences; inner sequence and 3' sequence

SEQ ID NO: 38118 - DNA, 53 bp, Artificial Sequence; identical to SEQ ID NO: 2389
  Description of Artificial Sequence: Synthetic Peanut control sequences; inner sequence and 3' sequence

SEQ ID NO: 38119 - DNA, 53 bp, Artificial Sequence; identical to SEQ ID NO: 2147
  Description of Artificial Sequence: Synthetic Peanut control sequences; inner sequence and 3' sequence

SEQ ID NO: 38120 - DNA, 53 bp, Artificial Sequence; identical to SEQ ID NO: 2349
  Description of Artificial Sequence: Synthetic Peanut control sequences; inner sequence and 3' sequence

SEQ ID NO: 38121 - DNA, 53 bp, Artificial Sequence; identical to SEQ ID NO: 2168
  Description of Artificial Sequence: Synthetic Peanut control sequences; inner sequence and 3' sequence

SEQ ID NO: 38122 - DNA, 53 bp, Artificial Sequence; identical to SEQ ID NO: 2182
  Description of Artificial Sequence: Synthetic Peanut control sequences; inner sequence and 3' sequence

SEQ ID NO: 38123 - DNA, 53 bp, Artificial Sequence; identical to SEQ ID NO: 2290
  Description of Artificial Sequence: Synthetic Peanut control sequences; inner sequence and 3' sequence

SEQ ID NO: 38124 - DNA, 53 bp, Artificial Sequence; identical to SEQ ID NO: 2096
  Description of Artificial Sequence: Synthetic Peanut control sequences; inner sequence and 3' sequence

SEQ ID NO: 38125 - DNA, 53 bp, Artificial Sequence; identical to SEQ ID NO: 2310
  Description of Artificial Sequence: Synthetic Peanut control sequences; inner sequence and 3' sequence

SEQ ID NO: 38126 - DNA, 53 bp, Artificial Sequence; identical to SEQ ID NO: 2243
  Description of Artificial Sequence: Synthetic Peanut control sequences; inner sequence and 3' sequence

SEQ ID NO: 38127 - DNA, 53 bp, Artificial Sequence; identical to SEQ ID NO: 2496
  Description of Artificial Sequence: Synthetic Peanut control sequences; inner sequence and 3' sequence

SEQ ID NO: 38128 - DNA, 53 bp, Artificial Sequence; identical to SEQ ID NO: 2262
  Description of Artificial Sequence: Synthetic Peanut control sequences; inner sequence and 3' sequence

SEQ ID NO: 38129 - DNA, 53 bp, Artificial Sequence; identical to SEQ ID NO: 2383
  Description of Artificial Sequence: Synthetic Peanut control sequences; inner sequence and 3' sequence

SEQ ID NO: 38130 - DNA, 53 bp, Artificial Sequence; identical to SEQ ID NO: 2293
  Description of Artificial Sequence: Synthetic Peanut control sequences; inner sequence and 3' sequence

SEQ ID NO: 38131 - DNA, 53 bp, Artificial Sequence; identical to SEQ ID NO: 2191
  Description of Artificial Sequence: Synthetic Peanut control sequences; inner sequence and 3' sequence

SEQ ID NO: 38132 - DNA, 53 bp, Artificial Sequence; identical to SEQ ID NO: 2116
  Description of Artificial Sequence: Synthetic Peanut control sequences; inner sequence and 3' sequence

SEQ ID NO: 38133 - DNA, 53 bp, Artificial Sequence; identical to SEQ ID NO: 2085
  Description of Artificial Sequence: Synthetic Peanut control sequences; inner sequence and 3' sequence

SEQ ID NO: 38134 - DNA, 53 bp, Artificial Sequence; identical to SEQ ID NO: 2394
  Description of Artificial Sequence: Synthetic Peanut control sequences; inner sequence and 3' sequence

SEQ ID NO: 38135 - DNA, 53 bp, Artificial Sequence; identical to SEQ ID NO: 2128
  Description of Artificial Sequence: Synthetic Peanut control sequences; inner sequence and 3' sequence

SEQ ID NO: 38136 - DNA, 53 bp, Artificial Sequence; identical to SEQ ID NO: 2430
  Description of Artificial Sequence: Synthetic Peanut control sequences; inner sequence and 3' sequence

SEQ ID NO: 38137 - DNA, 53 bp, Artificial Sequence; identical to SEQ ID NO: 2271
  Description of Artificial Sequence: Synthetic Peanut control sequences; inner sequence and 3' sequence

SEQ ID NO: 38138 - DNA, 53 bp, Artificial Sequence; identical to SEQ ID NO: 2229
  Description of Artificial Sequence: Synthetic Peanut control sequences; inner sequence and 3' sequence

SEQ ID NO: 38139 - DNA, 53 bp, Artificial Sequence; identical to SEQ ID NO: 2429
  Description of Artificial Sequence: Synthetic Peanut control sequences; inner sequence and 3' sequence

SEQ ID NO: 38140 - DNA, 53 bp, Artificial Sequence; identical to SEQ ID NO: 2118
  Description of Artificial Sequence: Synthetic Peanut control sequences; inner sequence and 3' sequence

SEQ ID NO: 38141 - DNA, 54 bp, Artificial Sequence; identical to SEQ ID NO: 2150
  Description of Artificial Sequence: Synthetic Peanut control sequences; inner sequence and 3' sequence

SEQ ID NO: 38142 - DNA, 53 bp, Artificial Sequence; identical to SEQ ID NO: 2218
  Description of Artificial Sequence: Synthetic Peanut control sequences; inner sequence and 3' sequence

SEQ ID NO: 38143 - DNA, 53 bp, Artificial Sequence; identical to SEQ ID NO: 2311
  Description of Artificial Sequence: Synthetic Peanut control sequences; inner sequence and 3' sequence

SEQ ID NO: 38144 - DNA, 53 bp, Artificial Sequence; identical to SEQ ID NO: 2115
  Description of Artificial Sequence: Synthetic Peanut control sequences; inner sequence and 3' sequence

SEQ ID NO: 38145 - DNA, 53 bp, Artificial Sequence; identical to SEQ ID NO: 2201
  Description of Artificial Sequence: Synthetic Peanut control sequences; inner sequence and 3' sequence

SEQ ID NO: 38146 - DNA, 53 bp, Artificial Sequence; identical to SEQ ID NO: 2155
  Description of Artificial Sequence: Synthetic Peanut control sequences; inner sequence and 3' sequence

SEQ ID NO: 38147 - DNA, 53 bp, Artificial Sequence; identical to SEQ ID NO: 2068
  Description of Artificial Sequence: Synthetic Peanut control sequences; inner sequence and 3' sequence

SEQ ID NO: 38148 - DNA, 53 bp, Artificial Sequence; identical to SEQ ID NO: 2468
  Description of Artificial Sequence: Synthetic Peanut control sequences; inner sequence and 3' sequence

SEQ ID NO: 38149 - DNA, 53 bp, Artificial Sequence; identical to SEQ ID NO: 2253
  Description of Artificial Sequence: Synthetic Peanut control sequences; inner sequence and 3' sequence

SEQ ID NO: 38150 - DNA, 53 bp, Artificial Sequence; identical to SEQ ID NO: 2200
  Description of Artificial Sequence: Synthetic Peanut control sequences; inner sequence and 3' sequence

SEQ ID NO: 38151 - DNA, 53 bp, Artificial Sequence; identical to SEQ ID NO: 2113
  Description of Artificial Sequence: Synthetic Peanut control sequences; inner sequence and 3' sequence

SEQ ID NO: 38152 - DNA, 53 bp, Artificial Sequence; identical to SEQ ID NO: 2099
  Description of Artificial Sequence: Synthetic Peanut control sequences; inner sequence and 3' sequence

SEQ ID NO: 38153 - DNA, 53 bp, Artificial Sequence; identical to SEQ ID NO: 2071
  Description of Artificial Sequence: Synthetic Peanut control sequences; inner sequence and 3' sequence

SEQ ID NO: 38154 - DNA, 53 bp, Artificial Sequence; identical to SEQ ID NO: 2185
  Description of Artificial Sequence: Synthetic Peanut control sequences; inner sequence and 3' sequence

SEQ ID NO: 38155 - DNA, 53 bp, Artificial Sequence; identical to SEQ ID NO: 2088
  Description of Artificial Sequence: Synthetic Peanut control sequences; inner sequence and 3' sequence

SEQ ID NO: 38156 - DNA, 53 bp, Artificial Sequence; identical to SEQ ID NO: 2347
  Description of Artificial Sequence: Synthetic Peanut control sequences; inner sequence and 3' sequence

SEQ ID NO: 38157 - DNA, 53 bp, Artificial Sequence; identical to SEQ ID NO: 2159
  Description of Artificial Sequence: Synthetic Peanut control sequences; inner sequence and 3' sequence

SEQ ID NO: 38158 - DNA, 54 bp, Artificial Sequence; identical to SEQ ID NO: 6245
  Description of Artificial Sequence: Synthetic Peanut control sequences; inner sequence and 3' sequence

SEQ ID NO: 38159 - DNA, 53 bp, Artificial Sequence; identical to SEQ ID NO: 2240
  Description of Artificial Sequence: Synthetic Peanut control sequences; inner sequence and 3' sequence

SEQ ID NO: 38160 - DNA, 53 bp, Artificial Sequence; identical to SEQ ID NO: 2438
  Description of Artificial Sequence: Synthetic Peanut control sequences; inner sequence and 3' sequence

SEQ ID NO: 38161 - DNA, 53 bp, Artificial Sequence; identical to SEQ ID NO: 2171
  Description of Artificial Sequence: Synthetic Peanut control sequences; inner sequence and 3' sequence

SEQ ID NO: 38162 - DNA, 53 bp, Artificial Sequence; identical to SEQ ID NO: 2119
  Description of Artificial Sequence: Synthetic Peanut control sequences; inner sequence and 3' sequence

SEQ ID NO: 38163 - DNA, 54 bp, Artificial Sequence; identical to SEQ ID NO: 2503
  Description of Artificial Sequence: Synthetic Peanut control sequences; inner sequence and 3' sequence

SEQ ID NO: 38164 - DNA, 53 bp, Artificial Sequence; identical to SEQ ID NO: 2850
  Description of Artificial Sequence: Synthetic Peanut control sequences; inner sequence and 3' sequence

SEQ ID NO: 38165 - DNA, 53 bp, Artificial Sequence; identical to SEQ ID NO: 2370
  Description of Artificial Sequence: Synthetic Peanut control sequences; inner sequence and 3' sequence

SEQ ID NO: 38166 - DNA, 53 bp, Artificial Sequence; identical to SEQ ID NO: 2341
  Description of Artificial Sequence: Synthetic Peanut control sequences; inner sequence and 3' sequence

SEQ ID NO: 38167 - DNA, 53 bp, Artificial Sequence; identical to SEQ ID NO: 2285
  Description of Artificial Sequence: Synthetic Peanut control sequences; inner sequence and 3' sequence

SEQ ID NO: 38168 - DNA, 53 bp, Artificial Sequence; identical to SEQ ID NO: 2245
  Description of Artificial Sequence: Synthetic Peanut control sequences; inner sequence and 3' sequence

SEQ ID NO: 38169 - DNA, 53 bp, Artificial Sequence; identical to SEQ ID NO: 2441
  Description of Artificial Sequence: Synthetic Peanut control sequences; inner sequence and 3' sequence

SEQ ID NO: 38170 - DNA, 53 bp, Artificial Sequence; identical to SEQ ID NO: 2560
  Description of Artificial Sequence: Synthetic Peanut control sequences; inner sequence and 3' sequence

SEQ ID NO: 38171 - DNA, 53 bp, Artificial Sequence; identical to SEQ ID NO: 2036
  Description of Artificial Sequence: Synthetic Peanut control sequences; inner sequence and 3' sequence

SEQ ID NO: 38172 - DNA, 53 bp, Artificial Sequence; identical to SEQ ID NO: 2188
  Description of Artificial Sequence: Synthetic Peanut control sequences; inner sequence and 3' sequence

SEQ ID NO: 38173 - DNA, 53 bp, Artificial Sequence; identical to SEQ ID NO: 2153
  Description of Artificial Sequence: Synthetic Peanut control sequences; inner sequence and 3' sequence

SEQ ID NO: 38174 - DNA, 53 bp, Artificial Sequence; identical to SEQ ID NO: 2196
  Description of Artificial Sequence: Synthetic Peanut control sequences; inner sequence and 3' sequence

SEQ ID NO: 38175 - DNA, 53 bp, Artificial Sequence; identical to SEQ ID NO: 2328
  Description of Artificial Sequence: Synthetic Peanut control sequences; inner sequence and 3' sequence

SEQ ID NO: 38176 - DNA, 53 bp, Artificial Sequence; identical to SEQ ID NO: 2273
  Description of Artificial Sequence: Synthetic Peanut control sequences; inner sequence and 3' sequence

SEQ ID NO: 38177 - DNA, 53 bp, Artificial Sequence; identical to SEQ ID NO: 2073
  Description of Artificial Sequence: Synthetic Peanut control sequences; inner sequence and 3' sequence

SEQ ID NO: 38178 - DNA, 53 bp, Artificial Sequence; identical to SEQ ID NO: 2215
  Description of Artificial Sequence: Synthetic Peanut control sequences; inner sequence and 3' sequence

SEQ ID NO: 38179 - DNA, 53 bp, Artificial Sequence
  Description of Artificial Sequence: Synthetic Peanut control sequences; inner sequence and 3' sequence
tggccgatcatccctcaagttggcgtgtgcttgactagtacatgaccacttga

SEQ ID NO: 38180 - DNA, 53 bp, Artificial Sequence; identical to SEQ ID NO: 2472
  Description of Artificial Sequence: Synthetic Peanut control sequences; inner sequence and 3' sequence

SEQ ID NO: 38181 - DNA, 53 bp, Artificial Sequence; identical to SEQ ID NO: 2237
  Description of Artificial Sequence: Synthetic Peanut control sequences; inner sequence and 3' sequence

SEQ ID NO: 38182 - DNA, 53 bp, Artificial Sequence; identical to SEQ ID NO: 2948
  Description of Artificial Sequence: Synthetic Peanut control sequences; inner sequence and 3' sequence

SEQ ID NO: 38183 - DNA, 53 bp, Artificial Sequence; identical to SEQ ID NO: 2123
  Description of Artificial Sequence: Synthetic Peanut control sequences; inner sequence and 3' sequence

SEQ ID NO: 38184 - DNA, 53 bp, Artificial Sequence; identical to SEQ ID NO: 6814
  Description of Artificial Sequence: Synthetic Peanut control sequences; inner sequence and 3' sequence

SEQ ID NO: 38185 - DNA, 53 bp, Artificial Sequence; identical to SEQ ID NO: 2741
  Description of Artificial Sequence: Synthetic Peanut control sequences; inner sequence and 3' sequence

SEQ ID NO: 38186 - DNA, 53 bp, Artificial Sequence; identical to SEQ ID NO: 10922
  Description of Artificial Sequence: Synthetic Peanut control sequences; inner sequence and 3' sequence

SEQ ID NO: 38187 - DNA, 53 bp, Artificial Sequence; identical to SEQ ID NO: 2091
  Description of Artificial Sequence: Synthetic Peanut control sequences; inner sequence and 3' sequence

SEQ ID NO: 38188 - DNA, 53 bp, Artificial Sequence; identical to SEQ ID NO: 2189
  Description of Artificial Sequence: Synthetic Peanut control sequences; inner sequence and 3' sequence

SEQ ID NO: 38189 - DNA, 53 bp, Artificial Sequence; identical to SEQ ID NO: 2260
  Description of Artificial Sequence: Synthetic Peanut control sequences; inner sequence and 3' sequence

SEQ ID NO: 38190 - DNA, 53 bp, Artificial Sequence; identical to SEQ ID NO: 2461
  Description of Artificial Sequence: Synthetic Peanut control sequences; inner sequence and 3' sequence

SEQ ID NO: 38191 - DNA, 53 bp, Artificial Sequence; identical to SEQ ID NO: 2487
  Description of Artificial Sequence: Synthetic Peanut control sequences; inner sequence and 3' sequence

SEQ ID NO: 38192 - DNA, 54 bp, Artificial Sequence; identical to SEQ ID NO: 22870
  Description of Artificial Sequence: Synthetic Peanut control sequences; inner sequence and 3' sequence

SEQ ID NO: 38193 - DNA, 53 bp, Artificial Sequence; identical to SEQ ID NO: 2360
  Description of Artificial Sequence: Synthetic Peanut control sequences; inner sequence and 3' sequence

SEQ ID NO: 38194 - DNA, 53 bp, Artificial Sequence; identical to SEQ ID NO: 2233
  Description of Artificial Sequence: Synthetic Peanut control sequences; inner sequence and 3' sequence

SEQ ID NO: 38195 - DNA, 53 bp, Artificial Sequence; identical to SEQ ID NO: 2387
  Description of Artificial Sequence: Synthetic Peanut control sequences; inner sequence and 3' sequence

SEQ ID NO: 38196 - DNA, 53 bp, Artificial Sequence; identical to SEQ ID NO: 2312
  Description of Artificial Sequence: Synthetic Peanut control sequences; inner sequence and 3' sequence

SEQ ID NO: 38197 - DNA, 53 bp, Artificial Sequence; identical to SEQ ID NO: 2288
  Description of Artificial Sequence: Synthetic Peanut control sequences; inner sequence and 3' sequence

SEQ ID NO: 38198 - DNA, 53 bp, Artificial Sequence; identical to SEQ ID NO: 2485
  Description of Artificial Sequence: Synthetic Peanut control sequences; inner sequence and 3' sequence

SEQ ID NO: 38199 - DNA, 53 bp, Artificial Sequence; identical to SEQ ID NO: 2395
  Description of Artificial Sequence: Synthetic Peanut control sequences; inner sequence and 3' sequence

SEQ ID NO: 38200 - DNA, 53 bp, Artificial Sequence; identical to SEQ ID NO: 2392
  Description of Artificial Sequence: Synthetic Peanut control sequences; inner sequence and 3' sequence

SEQ ID NO: 38201 - DNA, 53 bp, Artificial Sequence; identical to SEQ ID NO: 2528
  Description of Artificial Sequence: Synthetic Peanut control sequences; inner sequence and 3' sequence

SEQ ID NO: 38202 - DNA, 53 bp, Artificial Sequence; identical to SEQ ID NO: 2097
  Description of Artificial Sequence: Synthetic Peanut control sequences; inner sequence and 3' sequence

SEQ ID NO: 38203 - DNA, 53 bp, Artificial Sequence; identical to SEQ ID NO: 2400
  Description of Artificial Sequence: Synthetic Peanut control sequences; inner sequence and 3' sequence

SEQ ID NO: 38204 - DNA, 53 bp, Artificial Sequence; identical to SEQ ID NO: 2284
  Description of Artificial Sequence: Synthetic Peanut control sequences; inner sequence and 3' sequence

SEQ ID NO: 38205 - DNA, 53 bp, Artificial Sequence; identical to SEQ ID NO: 2286
  Description of Artificial Sequence: Synthetic Peanut control sequences; inner sequence and 3' sequence

SEQ ID NO: 38206 - DNA, 53 bp, Artificial Sequence; identical to SEQ ID NO: 2211
  Description of Artificial Sequence: Synthetic Peanut control sequences; inner sequence and 3' sequence

SEQ ID NO: 38207 - DNA, 53 bp, Artificial Sequence; identical to SEQ ID NO: 2329
  Description of Artificial Sequence: Synthetic Peanut control sequences; inner sequence and 3' sequence

SEQ ID NO: 38208 - DNA, 54 bp, Artificial Sequence; identical to SEQ ID NO: 2221
  Description of Artificial Sequence: Synthetic Peanut control sequences; inner sequence and 3' sequence

SEQ ID NO: 38209 - DNA, 53 bp, Artificial Sequence; identical to SEQ ID NO: 2344
  Description of Artificial Sequence: Synthetic Peanut control sequences; inner sequence and 3' sequence

SEQ ID NO: 38210 - DNA, 53 bp, Artificial Sequence; identical to SEQ ID NO: 2448
  Description of Artificial Sequence: Synthetic Peanut control sequences; inner sequence and 3' sequence

SEQ ID NO: 38211 - DNA, 53 bp, Artificial Sequence; identical to SEQ ID NO: 2354
  Description of Artificial Sequence: Synthetic Peanut control sequences; inner sequence and 3' sequence

SEQ ID NO: 38212 - DNA, 53 bp, Artificial Sequence; identical to SEQ ID NO: 2582
  Description of Artificial Sequence: Synthetic Peanut control sequences; inner sequence and 3' sequence

SEQ ID NO: 38213 - DNA, 53 bp, Artificial Sequence; identical to SEQ ID NO: 2305
  Description of Artificial Sequence: Synthetic Peanut control sequences; inner sequence and 3' sequence

SEQ ID NO: 38214 - DNA, 53 bp, Artificial Sequence; identical to SEQ ID NO: 2266
  Description of Artificial Sequence: Synthetic Peanut control sequences; inner sequence and 3' sequence

SEQ ID NO: 38215 - DNA, 53 bp, Artificial Sequence; identical to SEQ ID NO: 2783
  Description of Artificial Sequence: Synthetic Peanut control sequences; inner sequence and 3' sequence

SEQ ID NO: 38216 - DNA, 53 bp, Artificial Sequence; identical to SEQ ID NO: 2139
  Description of Artificial Sequence: Synthetic Peanut control sequences; inner sequence and 3' sequence

SEQ ID NO: 38217 - DNA, 53 bp, Artificial Sequence; identical to SEQ ID NO: 2373
  Description of Artificial Sequence: Synthetic Peanut control sequences; inner sequence and 3' sequence

SEQ ID NO: 38218 - DNA, 53 bp, Artificial Sequence; identical to SEQ ID NO: 2340
  Description of Artificial Sequence: Synthetic Peanut control sequences; inner sequence and 3' sequence

SEQ ID NO: 38219 - DNA, 53 bp, Artificial Sequence; identical to SEQ ID NO: 2437
  Description of Artificial Sequence: Synthetic Peanut control sequences; inner sequence and 3' sequence

SEQ ID NO: 38220 - DNA, 53 bp, Artificial Sequence; identical to SEQ ID NO: 2166
  Description of Artificial Sequence: Synthetic Peanut control sequences; inner sequence and 3' sequence

SEQ ID NO: 38221 - DNA, 53 bp, Artificial Sequence; identical to SEQ ID NO: 6552
  Description of Artificial Sequence: Synthetic Peanut control sequences; inner sequence and 3' sequence

SEQ ID NO: 38222 - DNA, 53 bp, Artificial Sequence; identical to SEQ ID NO: 2355
  Description of Artificial Sequence: Synthetic Peanut control sequences; inner sequence and 3' sequence

SEQ ID NO: 38223 - DNA, 53 bp, Artificial Sequence; identical to SEQ ID NO: 2517
  Description of Artificial Sequence: Synthetic Peanut control sequences; inner sequence and 3' sequence

SEQ ID NO: 38224 - DNA, 53 bp, Artificial Sequence; identical to SEQ ID NO: 2374
  Description of Artificial Sequence: Synthetic Peanut control sequences; inner sequence and 3' sequence

SEQ ID NO: 38225 - DNA, 53 bp, Artificial Sequence; identical to SEQ ID NO: 2132
  Description of Artificial Sequence: Synthetic Peanut control sequences; inner sequence and 3' sequence

SEQ ID NO: 38226 - DNA, 53 bp, Artificial Sequence; identical to SEQ ID NO: 2283
  Description of Artificial Sequence: Synthetic Peanut control sequences; inner sequence and 3' sequence

SEQ ID NO: 38227 - DNA, 53 bp, Artificial Sequence; identical to SEQ ID NO: 2715
  Description of Artificial Sequence: Synthetic Peanut control sequences; inner sequence and 3' sequence

SEQ ID NO: 38228 - DNA, 53 bp, Artificial Sequence; identical to SEQ ID NO: 2287
  Description of Artificial Sequence: Synthetic Peanut control sequences; inner sequence and 3' sequence

SEQ ID NO: 38229 - DNA, 53 bp, Artificial Sequence; identical to SEQ ID NO: 2470
  Description of Artificial Sequence: Synthetic Peanut control sequences; inner sequence and 3' sequence

SEQ ID NO: 38230 - DNA, 53 bp, Artificial Sequence; identical to SEQ ID NO: 2916
  Description of Artificial Sequence: Synthetic Peanut control sequences; inner sequence and 3' sequence

SEQ ID NO: 38231 - DNA, 53 bp, Artificial Sequence; identical to SEQ ID NO: 2524
  Description of Artificial Sequence: Synthetic Peanut control sequences; inner sequence and 3' sequence

SEQ ID NO: 38232 - DNA, 53 bp, Artificial Sequence; identical to SEQ ID NO: 2346
  Description of Artificial Sequence: Synthetic Peanut control sequences; inner sequence and 3' sequence

SEQ ID NO: 38233 - DNA, 53 bp, Artificial Sequence; identical to SEQ ID NO: 6254
  Description of Artificial Sequence: Synthetic Peanut control sequences; inner sequence and 3' sequence

SEQ ID NO: 38234 - DNA, 53 bp, Artificial Sequence; identical to SEQ ID NO: 2151
  Description of Artificial Sequence: Synthetic Peanut control sequences; inner sequence and 3' sequence

SEQ ID NO: 38235 - DNA, 53 bp, Artificial Sequence; identical to SEQ ID NO: 2695
  Description of Artificial Sequence: Synthetic Peanut control sequences; inner sequence and 3' sequence

SEQ ID NO: 38236 - DNA, 53 bp, Artificial Sequence; identical to SEQ ID NO: 10682
  Description of Artificial Sequence: Synthetic Peanut control sequences; inner sequence and 3' sequence

SEQ ID NO: 38237 - DNA, 53 bp, Artificial Sequence; identical to SEQ ID NO: 2179
  Description of Artificial Sequence: Synthetic Peanut control sequences; inner sequence and 3' sequence

SEQ ID NO: 38238 - DNA, 54 bp, Artificial Sequence; identical to SEQ ID NO: 2258
  Description of Artificial Sequence: Synthetic Peanut control sequences; inner sequence and 3' sequence

SEQ ID NO: 38239 - DNA, 53 bp, Artificial Sequence; identical to SEQ ID NO: 2401
  Description of Artificial Sequence: Synthetic Peanut control sequences; inner sequence and 3' sequence

SEQ ID NO: 38240 - DNA, 53 bp, Artificial Sequence; identical to SEQ ID NO: 6234
  Description of Artificial Sequence: Synthetic Peanut control sequences; inner sequence and 3' sequence

SEQ ID NO: 38241 - DNA, 53 bp, Artificial Sequence; identical to SEQ ID NO: 6229
  Description of Artificial Sequence: Synthetic Peanut control sequences; inner sequence and 3' sequence

SEQ ID NO: 38242 - DNA, 53 bp, Artificial Sequence; identical to SEQ ID NO: 2174
  Description of Artificial Sequence: Synthetic Peanut control sequences; inner sequence and 3' sequence

SEQ ID NO: 38243 - DNA, 53 bp, Artificial Sequence; identical to SEQ ID NO: 2801
  Description of Artificial Sequence: Synthetic Peanut control sequences; inner sequence and 3' sequence

SEQ ID NO: 38244 - DNA, 53 bp, Artificial Sequence; identical to SEQ ID NO: 2105
  Description of Artificial Sequence: Synthetic Peanut control sequences; inner sequence and 3' sequence

SEQ ID NO: 38245 - DNA, 53 bp, Artificial Sequence; identical to SEQ ID NO: 2144
  Description of Artificial Sequence: Synthetic Peanut control sequences; inner sequence and 3' sequence

SEQ ID NO: 38246 - DNA, 53 bp, Artificial Sequence; identical to SEQ ID NO: 2369
  Description of Artificial Sequence: Synthetic Peanut control sequences; inner sequence and 3' sequence

SEQ ID NO: 38247 - DNA, 53 bp, Artificial Sequence; identical to SEQ ID NO: 2834
  Description of Artificial Sequence: Synthetic Peanut control sequences; inner sequence and 3' sequence

SEQ ID NO: 38248 - DNA, 53 bp, Artificial Sequence; identical to SEQ ID NO: 2406
  Description of Artificial Sequence: Synthetic Peanut control sequences; inner sequence and 3' sequence

SEQ ID NO: 38249 - DNA, 53 bp, Artificial Sequence; identical to SEQ ID NO: 30268
  Description of Artificial Sequence: Synthetic Peanut control sequences; inner sequence and 3' sequence

SEQ ID NO: 38250 - DNA, 53 bp, Artificial Sequence; identical to SEQ ID NO: 2985
  Description of Artificial Sequence: Synthetic Peanut control sequences; inner sequence and 3' sequence

SEQ ID NO: 38251 - DNA, 53 bp, Artificial Sequence; identical to SEQ ID NO: 2184
  Description of Artificial Sequence: Synthetic Peanut control sequences; inner sequence and 3' sequence

SEQ ID NO: 38252 - DNA, 53 bp, Artificial Sequence; identical to SEQ ID NO: 2112
  Description of Artificial Sequence: Synthetic Peanut control sequences; inner sequence and 3' sequence

SEQ ID NO: 38253 - DNA, 52 bp, Artificial Sequence; identical to SEQ ID NO: 6559
  Description of Artificial Sequence: Synthetic Peanut control sequences; inner sequence and 3' sequence

SEQ ID NO: 38254 - DNA, 53 bp, Artificial Sequence; identical to SEQ ID NO: 2764
  Description of Artificial Sequence: Synthetic Peanut control sequences; inner sequence and 3' sequence

SEQ ID NO: 38255 - DNA, 53 bp, Artificial Sequence; identical to SEQ ID NO: 2238
  Description of Artificial Sequence: Synthetic Peanut control sequences; inner sequence and 3' sequence

SEQ ID NO: 38256 - DNA, 53 bp, Artificial Sequence; identical to SEQ ID NO: 2127
  Description of Artificial Sequence: Synthetic Peanut control sequences; inner sequence and 3' sequence

SEQ ID NO: 38257 - DNA, 53 bp, Artificial Sequence; identical to SEQ ID NO: 6889
  Description of Artificial Sequence: Synthetic Peanut control sequences; inner sequence and 3' sequence

SEQ ID NO: 38258 - DNA, 50 bp, Artificial Sequence; identical to SEQ ID NO: 2885
  Description of Artificial Sequence: Synthetic Peanut control sequences; inner sequence and 3' sequence

SEQ ID NO: 38259 - DNA, 53 bp, Artificial Sequence; identical to SEQ ID NO: 2563
  Description of Artificial Sequence: Synthetic Peanut control sequences; inner sequence and 3' sequence

SEQ ID NO: 38260 - DNA, 53 bp, Artificial Sequence; identical to SEQ ID NO: 2454
  Description of Artificial Sequence: Synthetic Peanut control sequences; inner sequence and 3' sequence

SEQ ID NO: 38261 - DNA, 53 bp, Artificial Sequence; identical to SEQ ID NO: 2548
  Description of Artificial Sequence: Synthetic Peanut control sequences; inner sequence and 3' sequence

SEQ ID NO: 38262 - DNA, 53 bp, Artificial Sequence; identical to SEQ ID NO: 2409
  Description of Artificial Sequence: Synthetic Peanut control sequences; inner sequence and 3' sequence

SEQ ID NO: 38263 - DNA, 53 bp, Artificial Sequence; identical to SEQ ID NO: 2464
  Description of Artificial Sequence: Synthetic Peanut control sequences; inner sequence and 3' sequence

SEQ ID NO: 38264 - DNA, 53 bp, Artificial Sequence; identical to SEQ ID NO: 2212
  Description of Artificial Sequence: Synthetic Peanut control sequences; inner sequence and 3' sequence

SEQ ID NO: 38265 - DNA, 52 bp, Artificial Sequence; identical to SEQ ID NO: 2648
  Description of Artificial Sequence: Synthetic Peanut control sequences; inner sequence and 3' sequence

SEQ ID NO: 38266 - DNA, 53 bp, Artificial Sequence; identical to SEQ ID NO: 2318
  Description of Artificial Sequence: Synthetic Peanut control sequences; inner sequence and 3' sequence

SEQ ID NO: 38267 - DNA, 53 bp, Artificial Sequence; identical to SEQ ID NO: 2187
  Description of Artificial Sequence: Synthetic Peanut control sequences; inner sequence and 3' sequence

SEQ ID NO: 38268 - DNA, 53 bp, Artificial Sequence; identical to SEQ ID NO: 2135
  Description of Artificial Sequence: Synthetic Peanut control sequences; inner sequence and 3' sequence

SEQ ID NO: 38269 - DNA, 53 bp, Artificial Sequence; identical to SEQ ID NO: 2968
  Description of Artificial Sequence: Synthetic Peanut control sequences; inner sequence and 3' sequence

SEQ ID NO: 38270 - DNA, 53 bp, Artificial Sequence; identical to SEQ ID NO: 10825
  Description of Artificial Sequence: Synthetic Peanut control sequences; inner sequence and 3' sequence

SEQ ID NO: 38271 - DNA, 53 bp, Artificial Sequence; identical to SEQ ID NO: 2698
  Description of Artificial Sequence: Synthetic Peanut control sequences; inner sequence and 3' sequence

SEQ ID NO: 38272 - DNA, 53 bp, Artificial Sequence; identical to SEQ ID NO: 2121
  Description of Artificial Sequence: Synthetic Peanut control sequences; inner sequence and 3' sequence

SEQ ID NO: 38273 - DNA, 53 bp, Artificial Sequence; identical to SEQ ID NO: 2130
  Description of Artificial Sequence: Synthetic Peanut control sequences; inner sequence and 3' sequence

SEQ ID NO: 38274 - DNA, 53 bp, Artificial Sequence; identical to SEQ ID NO: 2165
  Description of Artificial Sequence: Synthetic Peanut control sequences; inner sequence and 3' sequence

SEQ ID NO: 38275 - DNA, 54 bp, Artificial Sequence; identical to SEQ ID NO: 2216
  Description of Artificial Sequence: Synthetic Peanut control sequences; inner sequence and 3' sequence

SEQ ID NO: 38276 - DNA, 53 bp, Artificial Sequence; identical to SEQ ID NO: 6981
  Description of Artificial Sequence: Synthetic Peanut control sequences; inner sequence and 3' sequence

SEQ ID NO: 38277 - DNA, 56 bp, Artificial Sequence; identical to SEQ ID NO: 2864
  Description of Artificial Sequence: Synthetic Peanut control sequences; inner sequence and 3' sequence

SEQ ID NO: 38278 - DNA, 53 bp, Artificial Sequence; identical to SEQ ID NO: 2740
  Description of Artificial Sequence: Synthetic Peanut control sequences; inner sequence and 3' sequence

SEQ ID NO: 38279 - DNA, 53 bp, Artificial Sequence; identical to SEQ ID NO: 2149
  Description of Artificial Sequence: Synthetic Peanut control sequences; inner sequence and 3' sequence

SEQ ID NO: 38280 - DNA, 53 bp, Artificial Sequence; identical to SEQ ID NO: 2120
  Description of Artificial Sequence: Synthetic Peanut control sequences; inner sequence and 3' sequence

SEQ ID NO: 38281 - DNA, 53 bp, Artificial Sequence; identical to SEQ ID NO: 2282
  Description of Artificial Sequence: Synthetic Peanut control sequences; inner sequence and 3' sequence

SEQ ID NO: 38282 - DNA, 53 bp, Artificial Sequence; identical to SEQ ID NO: 2079
  Description of Artificial Sequence: Synthetic Peanut control sequences; inner sequence and 3' sequence

SEQ ID NO: 38283 - DNA, 53 bp, Artificial Sequence; identical to SEQ ID NO: 2103
  Description of Artificial Sequence: Synthetic Peanut control sequences; inner sequence and 3' sequence

SEQ ID NO: 38284 - DNA, 53 bp, Artificial Sequence; identical to SEQ ID NO: 6205
  Description of Artificial Sequence: Synthetic Peanut control sequences; inner sequence and 3' sequence

SEQ ID NO: 38285 - DNA, 53 bp, Artificial Sequence; identical to SEQ ID NO: 2950
  Description of Artificial Sequence: Synthetic Peanut control sequences; inner sequence and 3' sequence

SEQ ID NO: 38286 - DNA, 48 bp, Artificial Sequence; identical to SEQ ID NO: 22136
  Description of Artificial Sequence: Synthetic Peanut control sequences; inner sequence and 3' sequence

SEQ ID NO: 38287 - DNA, 53 bp, Artificial Sequence; identical to SEQ ID NO: 2294
  Description of Artificial Sequence: Synthetic Peanut control sequences; inner sequence and 3' sequence

SEQ ID NO: 38288 - DNA, 53 bp, Artificial Sequence; identical to SEQ ID NO: 2327
  Description of Artificial Sequence: Synthetic Peanut control sequences; inner sequence and 3' sequence

SEQ ID NO: 38289 - DNA, 53 bp, Artificial Sequence; identical to SEQ ID NO: 2630
  Description of Artificial Sequence: Synthetic Peanut control sequences; inner sequence and 3' sequence

SEQ ID NO: 38290 - DNA, 53 bp, Artificial Sequence; identical to SEQ ID NO: 2352
  Description of Artificial Sequence: Synthetic Peanut control sequences; inner sequence and 3' sequence

SEQ ID NO: 38291 - DNA, 53 bp, Artificial Sequence; identical to SEQ ID NO: 2673
  Description of Artificial Sequence: Synthetic Peanut control sequences; inner sequence and 3' sequence

SEQ ID NO: 38292 - DNA, 53 bp, Artificial Sequence; identical to SEQ ID NO: 2298
  Description of Artificial Sequence: Synthetic Peanut control sequences; inner sequence and 3' sequence

SEQ ID NO: 38293 - DNA, 53 bp, Artificial Sequence; identical to SEQ ID NO: 6881
  Description of Artificial Sequence: Synthetic Peanut control sequences; inner sequence and 3' sequence

SEQ ID NO: 38294 - DNA, 53 bp, Artificial Sequence; identical to SEQ ID NO: 2928
  Description of Artificial Sequence: Synthetic Peanut control sequences; inner sequence and 3' sequence

SEQ ID NO: 38295 - DNA, 53 bp, Artificial Sequence; identical to SEQ ID NO: 2640
  Description of Artificial Sequence: Synthetic Peanut control sequences; inner sequence and 3' sequence

SEQ ID NO: 38296 - DNA, 53 bp, Artificial Sequence; identical to SEQ ID NO: 2914
  Description of Artificial Sequence: Synthetic Peanut control sequences; inner sequence and 3' sequence

SEQ ID NO: 38297 - DNA, 53 bp, Artificial Sequence; identical to SEQ ID NO: 30926
  Description of Artificial Sequence: Synthetic Peanut control sequences; inner sequence and 3' sequence

SEQ ID NO: 38298 - DNA, 53 bp, Artificial Sequence; identical to SEQ ID NO: 30472
  Description of Artificial Sequence: Synthetic Peanut control sequences; inner sequence and 3' sequence

SEQ ID NO: 38299 - DNA, 53 bp, Artificial Sequence; identical to SEQ ID NO: 2379
  Description of Artificial Sequence: Synthetic Peanut control sequences; inner sequence and 3' sequence

SEQ ID NO: 38300 - DNA, 53 bp, Artificial Sequence; identical to SEQ ID NO: 2301
  Description of Artificial Sequence: Synthetic Peanut control sequences; inner sequence and 3' sequence

SEQ ID NO: 38301 - DNA, 53 bp, Artificial Sequence; identical to SEQ ID NO: 2107
  Description of Artificial Sequence: Synthetic Peanut control sequences; inner sequence and 3' sequence

SEQ ID NO: 38302 - DNA, 53 bp, Artificial Sequence; identical to SEQ ID NO: 2511
  Description of Artificial Sequence: Synthetic Peanut control sequences; inner sequence and 3' sequence

SEQ ID NO: 38303 - DNA, 53 bp, Artificial Sequence; identical to SEQ ID NO: 2572
  Description of Artificial Sequence: Synthetic Peanut control sequences; inner sequence and 3' sequence

SEQ ID NO: 38304 - DNA, 53 bp, Artificial Sequence; identical to SEQ ID NO: 2645
  Description of Artificial Sequence: Synthetic Peanut control sequences; inner sequence and 3' sequence

SEQ ID NO: 38305 - DNA, 53 bp, Artificial Sequence; identical to SEQ ID NO: 2615
  Description of Artificial Sequence: Synthetic Peanut control sequences; inner sequence and 3' sequence

SEQ ID NO: 38306 - DNA, 53 bp, Artificial Sequence; identical to SEQ ID NO: 2545
  Description of Artificial Sequence: Synthetic Peanut control sequences; inner sequence and 3' sequence

SEQ ID NO: 38307 - DNA, 53 bp, Artificial Sequence; identical to SEQ ID NO: 2192
  Description of Artificial Sequence: Synthetic Peanut control sequences; inner sequence and 3' sequence

SEQ ID NO: 38308 - DNA, 53 bp, Artificial Sequence; identical to SEQ ID NO: 14931
  Description of Artificial Sequence: Synthetic Peanut control sequences; inner sequence and 3' sequence

SEQ ID NO: 38309 - DNA, 53 bp, Artificial Sequence; identical to SEQ ID NO: 2686
  Description of Artificial Sequence: Synthetic Peanut control sequences; inner sequence and 3' sequence

SEQ ID NO: 38310 - DNA, 53 bp, Artificial Sequence; identical to SEQ ID NO: 2585
  Description of Artificial Sequence: Synthetic Peanut control sequences; inner sequence and 3' sequence

SEQ ID NO: 38311 - DNA, 53 bp, Artificial Sequence; identical to SEQ ID NO: 6598
  Description of Artificial Sequence: Synthetic Peanut control sequences; inner sequence and 3' sequence

SEQ ID NO: 38312 - DNA, 52 bp, Artificial Sequence
  Description of Artificial Sequence: Synthetic Peanut control sequences; inner sequence and 3' sequence
tggccgatcgaccctatcatgaggccatgttgactagtacatgaccacttga

SEQ ID NO: 38313 - DNA, 53 bp, Artificial Sequence; identical to SEQ ID NO: 2532
  Description of Artificial Sequence: Synthetic Peanut control sequences; inner sequence and 3' sequence

SEQ ID NO: 38314 - DNA, 52 bp, Artificial Sequence; identical to SEQ ID NO: 2453
  Description of Artificial Sequence: Synthetic Peanut control sequences; inner sequence and 3' sequence

SEQ ID NO: 38315 - DNA, 53 bp, Artificial Sequence; identical to SEQ ID NO: 14939
  Description of Artificial Sequence: Synthetic Peanut control sequences; inner sequence and 3' sequence

SEQ ID NO: 38316 - DNA, 53 bp, Artificial Sequence; identical to SEQ ID NO: 2553
  Description of Artificial Sequence: Synthetic Peanut control sequences; inner sequence and 3' sequence

SEQ ID NO: 38317 - DNA, 53 bp, Artificial Sequence; identical to SEQ ID NO: 2522
  Description of Artificial Sequence: Synthetic Peanut control sequences; inner sequence and 3' sequence

SEQ ID NO: 38318 - DNA, 53 bp, Artificial Sequence; identical to SEQ ID NO: 2320
  Description of Artificial Sequence: Synthetic Peanut control sequences; inner sequence and 3' sequence

SEQ ID NO: 38319 - DNA, 53 bp, Artificial Sequence; identical to SEQ ID NO: 2232
  Description of Artificial Sequence: Synthetic Peanut control sequences; inner sequence and 3' sequence

SEQ ID NO: 38320 - DNA, 53 bp, Artificial Sequence; identical to SEQ ID NO: 2386
  Description of Artificial Sequence: Synthetic Peanut control sequences; inner sequence and 3' sequence

SEQ ID NO: 38321 - DNA, 53 bp, Artificial Sequence; identical to SEQ ID NO: 2586
  Description of Artificial Sequence: Synthetic Peanut control sequences; inner sequence and 3' sequence

SEQ ID NO: 38322 - DNA, 53 bp, Artificial Sequence; identical to SEQ ID NO: 2194
  Description of Artificial Sequence: Synthetic Peanut control sequences; inner sequence and 3' sequence

SEQ ID NO: 38323 - DNA, 53 bp, Artificial Sequence; identical to SEQ ID NO: 2321
  Description of Artificial Sequence: Synthetic Peanut control sequences; inner sequence and 3' sequence

SEQ ID NO: 38324 - DNA, 53 bp, Artificial Sequence
  Description of Artificial Sequence: Synthetic Peanut control sequences; inner sequence and 3' sequence
gcatcagggcgttcgatggctagctggtcattgactagtacatgaccacttga

SEQ ID NO: 38325 - DNA, 53 bp, Artificial Sequence; identical to SEQ ID NO: 2816
  Description of Artificial Sequence: Synthetic Peanut control sequences; inner sequence and 3' sequence

SEQ ID NO: 38326 - DNA, 53 bp, Artificial Sequence; identical to SEQ ID NO: 2226
  Description of Artificial Sequence: Synthetic Peanut control sequences; inner sequence and 3' sequence

SEQ ID NO: 38327 - DNA, 53 bp, Artificial Sequence; identical to SEQ ID NO: 2390
  Description of Artificial Sequence: Synthetic Peanut control sequences; inner sequence and 3' sequence

SEQ ID NO: 38328 - DNA, 53 bp, Artificial Sequence; identical to SEQ ID NO: 2083
  Description of Artificial Sequence: Synthetic Peanut control sequences; inner sequence and 3' sequence

SEQ ID NO: 38329 - DNA, 48 bp, Artificial Sequence; identical to SEQ ID NO: 22741
  Description of Artificial Sequence: Synthetic Peanut control sequences; inner sequence and 3' sequence

SEQ ID NO: 38330 - DNA, 53 bp, Artificial Sequence; identical to SEQ ID NO: 2951
  Description of Artificial Sequence: Synthetic Peanut control sequences; inner sequence and 3' sequence

SEQ ID NO: 38331 - DNA, 53 bp, Artificial Sequence; identical to SEQ ID NO: 2457
  Description of Artificial Sequence: Synthetic Peanut control sequences; inner sequence and 3' sequence

SEQ ID NO: 38332 - DNA, 53 bp, Artificial Sequence; identical to SEQ ID NO: 2793
  Description of Artificial Sequence: Synthetic Peanut control sequences; inner sequence and 3' sequence

SEQ ID NO: 38333 - DNA, 53 bp, Artificial Sequence
  Description of Artificial Sequence: Synthetic Peanut control sequences; inner sequence and 3' sequence
gtgcttccacttcccagcaagtgcgtcacgttgactagtacatgaccacttga

SEQ ID NO: 38334 - DNA, 53 bp, Artificial Sequence; identical to SEQ ID NO: 2780
  Description of Artificial Sequence: Synthetic Peanut control sequences; inner sequence and 3' sequence

SEQ ID NO: 38335 - DNA, 53 bp, Artificial Sequence; identical to SEQ ID NO: 6301
  Description of Artificial Sequence: Synthetic Peanut control sequences; inner sequence and 3' sequence

SEQ ID NO: 38336 - DNA, 53 bp, Artificial Sequence; identical to SEQ ID NO: 2316
  Description of Artificial Sequence: Synthetic Peanut control sequences; inner sequence and 3' sequence

SEQ ID NO: 38337 - DNA, 53 bp, Artificial Sequence; identical to SEQ ID NO: 2348
  Description of Artificial Sequence: Synthetic Peanut control sequences; inner sequence and 3' sequence

SEQ ID NO: 38338 - DNA, 53 bp, Artificial Sequence; identical to SEQ ID NO: 2204
  Description of Artificial Sequence: Synthetic Peanut control sequences; inner sequence and 3' sequence

SEQ ID NO: 38339 - DNA, 53 bp, Artificial Sequence; identical to SEQ ID NO: 2272
  Description of Artificial Sequence: Synthetic Peanut control sequences; inner sequence and 3' sequence

SEQ ID NO: 38340 - DNA, 53 bp, Artificial Sequence
  Description of Artificial Sequence: Synthetic Peanut control sequences; inner sequence and 3' sequence
cgtatgtcgtcacgacccttcgagtggacattgactagtacatgaccacttga

SEQ ID NO: 38341 - DNA, 53 bp, Artificial Sequence; identical to SEQ ID NO: 2476
  Description of Artificial Sequence: Synthetic Peanut control sequences; inner sequence and 3' sequence

SEQ ID NO: 38342 - DNA, 53 bp, Artificial Sequence; identical to SEQ ID NO: 2064
  Description of Artificial Sequence: Synthetic Peanut control sequences; inner sequence and 3' sequence

SEQ ID NO: 38343 - DNA, 53 bp, Artificial Sequence; identical to SEQ ID NO: 2541
  Description of Artificial Sequence: Synthetic Peanut control sequences; inner sequence and 3' sequence

SEQ ID NO: 38344 - DNA, 53 bp, Artificial Sequence; identical to SEQ ID NO: 2205
  Description of Artificial Sequence: Synthetic Peanut control sequences; inner sequence and 3' sequence

SEQ ID NO: 38345 - DNA, 53 bp, Artificial Sequence; identical to SEQ ID NO: 2264
  Description of Artificial Sequence: Synthetic Peanut control sequences; inner sequence and 3' sequence

SEQ ID NO: 38346 - DNA, 53 bp, Artificial Sequence; identical to SEQ ID NO: 2901
  Description of Artificial Sequence: Synthetic Peanut control sequences; inner sequence and 3' sequence

SEQ ID NO: 38347 - DNA, 53 bp, Artificial Sequence
  Description of Artificial Sequence: Synthetic Peanut control sequences; inner sequence and 3' sequence
gaccgaaacggaccgaagtgcgtgatgtgcttgactagtacatgaccacttga

SEQ ID NO: 38348 - DNA, 53 bp, Artificial Sequence; identical to SEQ ID NO: 10950
  Description of Artificial Sequence: Synthetic Peanut control sequences; inner sequence and 3' sequence

SEQ ID NO: 38349 - DNA, 53 bp, Artificial Sequence; identical to SEQ ID NO: 2239
  Description of Artificial Sequence: Synthetic Peanut control sequences; inner sequence and 3' sequence

SEQ ID NO: 38350 - DNA, 53 bp, Artificial Sequence; identical to SEQ ID NO: 6874
  Description of Artificial Sequence: Synthetic Peanut control sequences; inner sequence and 3' sequence

SEQ ID NO: 38351 - DNA, 53 bp, Artificial Sequence; identical to SEQ ID NO: 2343
  Description of Artificial Sequence: Synthetic Peanut control sequences; inner sequence and 3' sequence

SEQ ID NO: 38352 - DNA, 52 bp, Artificial Sequence; identical to SEQ ID NO: 6763
  Description of Artificial Sequence: Synthetic Peanut control sequences; inner sequence and 3' sequence

SEQ ID NO: 38353 - DNA, 52 bp, Artificial Sequence
  Description of Artificial Sequence: Synthetic Peanut control sequences; inner sequence and 3' sequence
ggccaagcgacctagcaagtgtgctcatgttgactagtacatgaccacttga

SEQ ID NO: 38354 - DNA, 53 bp, Artificial Sequence; identical to SEQ ID NO: 2692
  Description of Artificial Sequence: Synthetic Peanut control sequences; inner sequence and 3' sequence

SEQ ID NO: 38355 - DNA, 53 bp, Artificial Sequence; identical to SEQ ID NO: 2800
  Description of Artificial Sequence: Synthetic Peanut control sequences; inner sequence and 3' sequence

SEQ ID NO: 38356 - DNA, 53 bp, Artificial Sequence; identical to SEQ ID NO: 2596
  Description of Artificial Sequence: Synthetic Peanut control sequences; inner sequence and 3' sequence

SEQ ID NO: 38357 - DNA, 53 bp, Artificial Sequence; identical to SEQ ID NO: 2611
  Description of Artificial Sequence: Synthetic Peanut control sequences; inner sequence and 3' sequence

SEQ ID NO: 38358 - DNA, 53 bp, Artificial Sequence; identical to SEQ ID NO: 6407
  Description of Artificial Sequence: Synthetic Peanut control sequences; inner sequence and 3' sequence

SEQ ID NO: 38359 - DNA, 53 bp, Artificial Sequence; identical to SEQ ID NO: 2336
  Description of Artificial Sequence: Synthetic Peanut control sequences; inner sequence and 3' sequence

SEQ ID NO: 38360 - DNA, 53 bp, Artificial Sequence; identical to SEQ ID NO: 6543
  Description of Artificial Sequence: Synthetic Peanut control sequences; inner sequence and 3' sequence

SEQ ID NO: 38361 - DNA, 53 bp, Artificial Sequence; identical to SEQ ID NO: 2446
  Description of Artificial Sequence: Synthetic Peanut control sequences; inner sequence and 3' sequence

SEQ ID NO: 38362 - DNA, 53 bp, Artificial Sequence; identical to SEQ ID NO: 6864
  Description of Artificial Sequence: Synthetic Peanut control sequences; inner sequence and 3' sequence

SEQ ID NO: 38363 - DNA, 53 bp, Artificial Sequence; identical to SEQ ID NO: 2303
  Description of Artificial Sequence: Synthetic Peanut control sequences; inner sequence and 3' sequence

SEQ ID NO: 38364 - DNA, 53 bp, Artificial Sequence; identical to SEQ ID NO: 6394
  Description of Artificial Sequence: Synthetic Peanut control sequences; inner sequence and 3' sequence

SEQ ID NO: 38365 - DNA, 53 bp, Artificial Sequence; identical to SEQ ID NO: 30922
  Description of Artificial Sequence: Synthetic Peanut control sequences; inner sequence and 3' sequence

SEQ ID NO: 38366 - DNA, 53 bp, Artificial Sequence; identical to SEQ ID NO: 2376
  Description of Artificial Sequence: Synthetic Peanut control sequences; inner sequence and 3' sequence

SEQ ID NO: 38367 - DNA, 53 bp, Artificial Sequence; identical to SEQ ID NO: 2636
  Description of Artificial Sequence: Synthetic Peanut control sequences; inner sequence and 3' sequence

SEQ ID NO: 38368 - DNA, 53 bp, Artificial Sequence; identical to SEQ ID NO: 2254
  Description of Artificial Sequence: Synthetic Peanut control sequences; inner sequence and 3' sequence

SEQ ID NO: 38369 - DNA, 53 bp, Artificial Sequence; identical to SEQ ID NO: 2413
  Description of Artificial Sequence: Synthetic Peanut control sequences; inner sequence and 3' sequence

SEQ ID NO: 38370 - DNA, 53 bp, Artificial Sequence; identical to SEQ ID NO: 6650
  Description of Artificial Sequence: Synthetic Peanut control sequences; inner sequence and 3' sequence

SEQ ID NO: 38371 - DNA, 53 bp, Artificial Sequence; identical to SEQ ID NO: 6238
  Description of Artificial Sequence: Synthetic Peanut control sequences; inner sequence and 3' sequence

SEQ ID NO: 38372 - DNA, 53 bp, Artificial Sequence; identical to SEQ ID NO: 6967
  Description of Artificial Sequence: Synthetic Peanut control sequences; inner sequence and 3' sequence

SEQ ID NO: 38373 - DNA, 53 bp, Artificial Sequence; identical to SEQ ID NO: 22519
  Description of Artificial Sequence: Synthetic Peanut control sequences; inner sequence and 3' sequence

SEQ ID NO: 38374 - DNA, 53 bp, Artificial Sequence; identical to SEQ ID NO: 2728
  Description of Artificial Sequence: Synthetic Peanut control sequences; inner sequence and 3' sequence

SEQ ID NO: 38375 - DNA, 53 bp, Artificial Sequence; identical to SEQ ID NO: 6401
  Description of Artificial Sequence: Synthetic Peanut control sequences; inner sequence and 3' sequence

SEQ ID NO: 38376 - DNA, 53 bp, Artificial Sequence; identical to SEQ ID NO: 26984
  Description of Artificial Sequence: Synthetic Peanut control sequences; inner sequence and 3' sequence

SEQ ID NO: 38377 - DNA, 53 bp, Artificial Sequence; identical to SEQ ID NO: 2506
  Description of Artificial Sequence: Synthetic Peanut control sequences; inner sequence and 3' sequence

SEQ ID NO: 38378 - DNA, 53 bp, Artificial Sequence; identical to SEQ ID NO: 6592
  Description of Artificial Sequence: Synthetic Peanut control sequences; inner sequence and 3' sequence

SEQ ID NO: 38379 - DNA, 53 bp, Artificial Sequence; identical to SEQ ID NO: 6513
  Description of Artificial Sequence: Synthetic Peanut control sequences; inner sequence and 3' sequence

SEQ ID NO: 38380 - DNA, 53 bp, Artificial Sequence; identical to SEQ ID NO: 2696
  Description of Artificial Sequence: Synthetic Peanut control sequences; inner sequence and 3' sequence

SEQ ID NO: 38381 - DNA, 53 bp, Artificial Sequence; identical to SEQ ID NO: 2227
  Description of Artificial Sequence: Synthetic Peanut control sequences; inner sequence and 3' sequence

SEQ ID NO: 38382 - DNA, 53 bp, Artificial Sequence; identical to SEQ ID NO: 2570
  Description of Artificial Sequence: Synthetic Peanut control sequences; inner sequence and 3' sequence

SEQ ID NO: 38383 - DNA, 53 bp, Artificial Sequence; identical to SEQ ID NO: 2540
  Description of Artificial Sequence: Synthetic Peanut control sequences; inner sequence and 3' sequence

SEQ ID NO: 38384 - DNA, 53 bp, Artificial Sequence
  Description of Artificial Sequence: Synthetic Peanut control sequences; inner sequence and 3' sequence
ggcctgatcgaacctagagagtggcgtgtattgactagtacatgaccacttga

SEQ ID NO: 38385 - DNA, 53 bp, Artificial Sequence; identical to SEQ ID NO: 2647
  Description of Artificial Sequence: Synthetic Peanut control sequences; inner sequence and 3' sequence

SEQ ID NO: 38386 - DNA, 53 bp, Artificial Sequence; identical to SEQ ID NO: 2581
  Description of Artificial Sequence: Synthetic Peanut control sequences; inner sequence and 3' sequence

SEQ ID NO: 38387 - DNA, 53 bp, Artificial Sequence; identical to SEQ ID NO: 2414
  Description of Artificial Sequence: Synthetic Peanut control sequences; inner sequence and 3' sequence

SEQ ID NO: 38388 - DNA, 53 bp, Artificial Sequence; identical to SEQ ID NO: 2789
  Description of Artificial Sequence: Synthetic Peanut control sequences; inner sequence and 3' sequence

SEQ ID NO: 38389 - DNA, 53 bp, Artificial Sequence; identical to SEQ ID NO: 2062
  Description of Artificial Sequence: Synthetic Peanut control sequences; inner sequence and 3' sequence

SEQ ID NO: 38390 - DNA, 53 bp, Artificial Sequence; identical to SEQ ID NO: 2738
  Description of Artificial Sequence: Synthetic Peanut control sequences; inner sequence and 3' sequence

SEQ ID NO: 38391 - DNA, 53 bp, Artificial Sequence; identical to SEQ ID NO: 2813
  Description of Artificial Sequence: Synthetic Peanut control sequences; inner sequence and 3' sequence

SEQ ID NO: 38392 - DNA, 53 bp, Artificial Sequence; identical to SEQ ID NO: 2787
  Description of Artificial Sequence: Synthetic Peanut control sequences; inner sequence and 3' sequence

SEQ ID NO: 38393 - DNA, 53 bp, Artificial Sequence; identical to SEQ ID NO: 14971
  Description of Artificial Sequence: Synthetic Peanut control sequences; inner sequence and 3' sequence

SEQ ID NO: 38394 - DNA, 53 bp, Artificial Sequence; identical to SEQ ID NO: 2620
  Description of Artificial Sequence: Synthetic Peanut control sequences; inner sequence and 3' sequence

SEQ ID NO: 38395 - DNA, 53 bp, Artificial Sequence; identical to SEQ ID NO: 2836
  Description of Artificial Sequence: Synthetic Peanut control sequences; inner sequence and 3' sequence

SEQ ID NO: 38396 - DNA, 53 bp, Artificial Sequence; identical to SEQ ID NO: 2811
  Description of Artificial Sequence: Synthetic Peanut control sequences; inner sequence and 3' sequence

SEQ ID NO: 38397 - DNA, 53 bp, Artificial Sequence; identical to SEQ ID NO: 30446
  Description of Artificial Sequence: Synthetic Peanut control sequences; inner sequence and 3' sequence

SEQ ID NO: 38398 - DNA, 54 bp, Artificial Sequence; identical to SEQ ID NO: 2489
  Description of Artificial Sequence: Synthetic Peanut control sequences; inner sequence and 3' sequence

SEQ ID NO: 38399 - DNA, 53 bp, Artificial Sequence; identical to SEQ ID NO: 2359
  Description of Artificial Sequence: Synthetic Peanut control sequences; inner sequence and 3' sequence

SEQ ID NO: 38400 - DNA, 53 bp, Artificial Sequence; identical to SEQ ID NO: 6530
  Description of Artificial Sequence: Synthetic Peanut control sequences; inner sequence and 3' sequence

SEQ ID NO: 38401 - DNA, 53 bp, Artificial Sequence; identical to SEQ ID NO: 2573
  Description of Artificial Sequence: Synthetic Peanut control sequences; inner sequence and 3' sequence

SEQ ID NO: 38402 - DNA, 53 bp, Artificial Sequence; identical to SEQ ID NO: 2628
  Description of Artificial Sequence: Synthetic Peanut control sequences; inner sequence and 3' sequence

SEQ ID NO: 38403 - DNA, 53 bp, Artificial Sequence; identical to SEQ ID NO: 2432
  Description of Artificial Sequence: Synthetic Peanut control sequences; inner sequence and 3' sequence

SEQ ID NO: 38404 - DNA, 53 bp, Artificial Sequence; identical to SEQ ID NO: 2365
  Description of Artificial Sequence: Synthetic Peanut control sequences; inner sequence and 3' sequence

SEQ ID NO: 38405 - DNA, 53 bp, Artificial Sequence; identical to SEQ ID NO: 10971
  Description of Artificial Sequence: Synthetic Peanut control sequences; inner sequence and 3' sequence

SEQ ID NO: 38406 - DNA, 53 bp, Artificial Sequence; identical to SEQ ID NO: 2867
  Description of Artificial Sequence: Synthetic Peanut control sequences; inner sequence and 3' sequence

SEQ ID NO: 38407 - DNA, 53 bp, Artificial Sequence; identical to SEQ ID NO: 2515
  Description of Artificial Sequence: Synthetic Peanut control sequences; inner sequence and 3' sequence

SEQ ID NO: 38408 - DNA, 53 bp, Artificial Sequence; identical to SEQ ID NO: 6713
  Description of Artificial Sequence: Synthetic Peanut control sequences; inner sequence and 3' sequence

SEQ ID NO: 38409 - DNA, 53 bp, Artificial Sequence; identical to SEQ ID NO: 10939
  Description of Artificial Sequence: Synthetic Peanut control sequences; inner sequence and 3' sequence

SEQ ID NO: 38410 - DNA, 53 bp, Artificial Sequence; identical to SEQ ID NO: 2714
  Description of Artificial Sequence: Synthetic Peanut control sequences; inner sequence and 3' sequence

SEQ ID NO: 38411 - DNA, 53 bp, Artificial Sequence; identical to SEQ ID NO: 10546
  Description of Artificial Sequence: Synthetic Peanut control sequences; inner sequence and 3' sequence

SEQ ID NO: 38412 - DNA, 53 bp, Artificial Sequence; identical to SEQ ID NO: 2684
  Description of Artificial Sequence: Synthetic Peanut control sequences; inner sequence and 3' sequence

SEQ ID NO: 38413 - DNA, 53 bp, Artificial Sequence; identical to SEQ ID NO: 2552
  Description of Artificial Sequence: Synthetic Peanut control sequences; inner sequence and 3' sequence

SEQ ID NO: 38414 - DNA, 53 bp, Artificial Sequence; identical to SEQ ID NO: 2462
  Description of Artificial Sequence: Synthetic Peanut control sequences; inner sequence and 3' sequence

SEQ ID NO: 38415 - DNA, 53 bp, Artificial Sequence; identical to SEQ ID NO: 2884
  Description of Artificial Sequence: Synthetic Peanut control sequences; inner sequence and 3' sequence

SEQ ID NO: 38416 - DNA, 53 bp, Artificial Sequence; identical to SEQ ID NO: 2891
  Description of Artificial Sequence: Synthetic Peanut control sequences; inner sequence and 3' sequence

SEQ ID NO: 38417 - DNA, 53 bp, Artificial Sequence; identical to SEQ ID NO: 14799
  Description of Artificial Sequence: Synthetic Peanut control sequences; inner sequence and 3' sequence

SEQ ID NO: 38418 - DNA, 53 bp, Artificial Sequence; identical to SEQ ID NO: 2984
  Description of Artificial Sequence: Synthetic Peanut control sequences; inner sequence and 3' sequence

SEQ ID NO: 38419 - DNA, 52 bp, Artificial Sequence
  Description of Artificial Sequence: Synthetic Peanut control sequences; inner sequence and 3' sequence
ccgcacgtagccctatcaagtgcagcatgttgactagtacatgaccacttga

SEQ ID NO: 38420 - DNA, 53 bp, Artificial Sequence; identical to SEQ ID NO: 2527
  Description of Artificial Sequence: Synthetic Peanut control sequences; inner sequence and 3' sequence

SEQ ID NO: 38421 - DNA, 53 bp, Artificial Sequence; identical to SEQ ID NO: 2750
  Description of Artificial Sequence: Synthetic Peanut control sequences; inner sequence and 3' sequence

SEQ ID NO: 38422 - DNA, 53 bp, Artificial Sequence; identical to SEQ ID NO: 14958
  Description of Artificial Sequence: Synthetic Peanut control sequences; inner sequence and 3' sequence

SEQ ID NO: 38423 - DNA, 53 bp, Artificial Sequence; identical to SEQ ID NO: 6860
  Description of Artificial Sequence: Synthetic Peanut control sequences; inner sequence and 3' sequence

SEQ ID NO: 38424 - DNA, 53 bp, Artificial Sequence; identical to SEQ ID NO: 2393
  Description of Artificial Sequence: Synthetic Peanut control sequences; inner sequence and 3' sequence

SEQ ID NO: 38425 - DNA, 53 bp, Artificial Sequence; identical to SEQ ID NO: 6336
  Description of Artificial Sequence: Synthetic Peanut control sequences; inner sequence and 3' sequence

SEQ ID NO: 38426 - DNA, 52 bp, Artificial Sequence; identical to SEQ ID NO: 2642
  Description of Artificial Sequence: Synthetic Peanut control sequences; inner sequence and 3' sequence

SEQ ID NO: 38427 - DNA, 53 bp, Artificial Sequence; identical to SEQ ID NO: 6792
  Description of Artificial Sequence: Synthetic Peanut control sequences; inner sequence and 3' sequence

SEQ ID NO: 38428 - DNA, 53 bp, Artificial Sequence; identical to SEQ ID NO: 10868
  Description of Artificial Sequence: Synthetic Peanut control sequences; inner sequence and 3' sequence

SEQ ID NO: 38429 - DNA, 52 bp, Artificial Sequence; identical to SEQ ID NO: 6869
  Description of Artificial Sequence: Synthetic Peanut control sequences; inner sequence and 3' sequence

SEQ ID NO: 38430 - DNA, 53 bp, Artificial Sequence; identical to SEQ ID NO: 2791
  Description of Artificial Sequence: Synthetic Peanut control sequences; inner sequence and 3' sequence

SEQ ID NO: 38431 - DNA, 53 bp, Artificial Sequence; identical to SEQ ID NO: 22783
  Description of Artificial Sequence: Synthetic Peanut control sequences; inner sequence and 3' sequence

SEQ ID NO: 38432 - DNA, 53 bp, Artificial Sequence
  Description of Artificial Sequence: Synthetic Peanut control sequences; inner sequence and 3' sequence
ggacggatcgaacctacaagttgtcgtgtattgactagtacatgaccacttga

SEQ ID NO: 38433 - DNA, 53 bp, Artificial Sequence; identical to SEQ ID NO: 34332
  Description of Artificial Sequence: Synthetic Peanut control sequences; inner sequence and 3' sequence

SEQ ID NO: 38434 - DNA, 53 bp, Artificial Sequence; identical to SEQ ID NO: 2772
  Description of Artificial Sequence: Synthetic Peanut control sequences; inner sequence and 3' sequence

SEQ ID NO: 38435 - DNA, 53 bp, Artificial Sequence; identical to SEQ ID NO: 2358
  Description of Artificial Sequence: Synthetic Peanut control sequences; inner sequence and 3' sequence

SEQ ID NO: 38436 - DNA, 53 bp, Artificial Sequence; identical to SEQ ID NO: 2269
  Description of Artificial Sequence: Synthetic Peanut control sequences; inner sequence and 3' sequence

SEQ ID NO: 38437 - DNA, 53 bp, Artificial Sequence; identical to SEQ ID NO: 22581
  Description of Artificial Sequence: Synthetic Peanut control sequences; inner sequence and 3' sequence

SEQ ID NO: 38438 - DNA, 53 bp, Artificial Sequence; identical to SEQ ID NO: 2500
  Description of Artificial Sequence: Synthetic Peanut control sequences; inner sequence and 3' sequence

SEQ ID NO: 38439 - DNA, 53 bp, Artificial Sequence; identical to SEQ ID NO: 2478
  Description of Artificial Sequence: Synthetic Peanut control sequences; inner sequence and 3' sequence

SEQ ID NO: 38440 - DNA, 53 bp, Artificial Sequence; identical to SEQ ID NO: 6887
  Description of Artificial Sequence: Synthetic Peanut control sequences; inner sequence and 3' sequence

SEQ ID NO: 38441 - DNA, 53 bp, Artificial Sequence; identical to SEQ ID NO: 2518
  Description of Artificial Sequence: Synthetic Peanut control sequences; inner sequence and 3' sequence

SEQ ID NO: 38442 - DNA, 51 bp, Artificial Sequence; identical to SEQ ID NO: 14885
  Description of Artificial Sequence: Synthetic Peanut control sequences; inner sequence and 3' sequence

SEQ ID NO: 38443 - DNA, 53 bp, Artificial Sequence; identical to SEQ ID NO: 2104
  Description of Artificial Sequence: Synthetic Peanut control sequences; inner sequence and 3' sequence

SEQ ID NO: 38444 - DNA, 53 bp, Artificial Sequence; identical to SEQ ID NO: 2994
  Description of Artificial Sequence: Synthetic Peanut control sequences; inner sequence and 3' sequence

SEQ ID NO: 38445 - DNA, 53 bp, Artificial Sequence; identical to SEQ ID NO: 34719
  Description of Artificial Sequence: Synthetic Peanut control sequences; inner sequence and 3' sequence

SEQ ID NO: 38446 - DNA, 53 bp, Artificial Sequence; identical to SEQ ID NO: 2279
  Description of Artificial Sequence: Synthetic Peanut control sequences; inner sequence and 3' sequence

SEQ ID NO: 38447 - DNA, 53 bp, Artificial Sequence; identical to SEQ ID NO: 2399
  Description of Artificial Sequence: Synthetic Peanut control sequences; inner sequence and 3' sequence

SEQ ID NO: 38448 - DNA, 53 bp, Artificial Sequence; identical to SEQ ID NO: 2134
  Description of Artificial Sequence: Synthetic Peanut control sequences; inner sequence and 3' sequence

SEQ ID NO: 38449 - DNA, 53 bp, Artificial Sequence; identical to SEQ ID NO: 2436
  Description of Artificial Sequence: Synthetic Peanut control sequences; inner sequence and 3' sequence

SEQ ID NO: 38450 - DNA, 53 bp, Artificial Sequence; identical to SEQ ID NO: 2228
  Description of Artificial Sequence: Synthetic Peanut control sequences; inner sequence and 3' sequence

SEQ ID NO: 38451 - DNA, 53 bp, Artificial Sequence; identical to SEQ ID NO: 2943
  Description of Artificial Sequence: Synthetic Peanut control sequences; inner sequence and 3' sequence

SEQ ID NO: 38452 - DNA, 53 bp, Artificial Sequence; identical to SEQ ID NO: 6317
  Description of Artificial Sequence: Synthetic Peanut control sequences; inner sequence and 3' sequence

SEQ ID NO: 38453 - DNA, 52 bp, Artificial Sequence; identical to SEQ ID NO: 2873
  Description of Artificial Sequence: Synthetic Peanut control sequences; inner sequence and 3' sequence

SEQ ID NO: 38454 - DNA, 53 bp, Artificial Sequence; identical to SEQ ID NO: 30849
  Description of Artificial Sequence: Synthetic Peanut control sequences; inner sequence and 3' sequence

SEQ ID NO: 38455 - DNA, 53 bp, Artificial Sequence; identical to SEQ ID NO: 7001
  Description of Artificial Sequence: Synthetic Peanut control sequences; inner sequence and 3' sequence

SEQ ID NO: 38456 - DNA, 53 bp, Artificial Sequence
  Description of Artificial Sequence: Synthetic Peanut control sequences; inner sequence and 3' sequence
ccatctcgacccgtcacgtggtgcatggccttgactagtacatgaccacttga

SEQ ID NO: 38457 - DNA, 53 bp, Artificial Sequence; identical to SEQ ID NO: 6997
  Description of Artificial Sequence: Synthetic Peanut control sequences; inner sequence and 3' sequence

SEQ ID NO: 38458 - DNA, 53 bp, Artificial Sequence; identical to SEQ ID NO: 2831
  Description of Artificial Sequence: Synthetic Peanut control sequences; inner sequence and 3' sequence

SEQ ID NO: 38459 - DNA, 53 bp, Artificial Sequence; identical to SEQ ID NO: 2108
  Description of Artificial Sequence: Synthetic Peanut control sequences; inner sequence and 3' sequence

SEQ ID NO: 38460 - DNA, 53 bp, Artificial Sequence; identical to SEQ ID NO: 2198
  Description of Artificial Sequence: Synthetic Peanut control sequences; inner sequence and 3' sequence

SEQ ID NO: 38461 - DNA, 53 bp, Artificial Sequence; identical to SEQ ID NO: 2513
  Description of Artificial Sequence: Synthetic Peanut control sequences; inner sequence and 3' sequence

SEQ ID NO: 38462 - DNA, 53 bp, Artificial Sequence; identical to SEQ ID NO: 14673
  Description of Artificial Sequence: Synthetic Peanut control sequences; inner sequence and 3' sequence

SEQ ID NO: 38463 - DNA, 53 bp, Artificial Sequence; identical to SEQ ID NO: 2268
  Description of Artificial Sequence: Synthetic Peanut control sequences; inner sequence and 3' sequence

SEQ ID NO: 38464 - DNA, 53 bp, Artificial Sequence; identical to SEQ ID NO: 2530
  Description of Artificial Sequence: Synthetic Peanut control sequences; inner sequence and 3' sequence

SEQ ID NO: 38465 - DNA, 53 bp, Artificial Sequence; identical to SEQ ID NO: 6644
  Description of Artificial Sequence: Synthetic Peanut control sequences; inner sequence and 3' sequence

SEQ ID NO: 38466 - DNA, 53 bp, Artificial Sequence; identical to SEQ ID NO: 10712
  Description of Artificial Sequence: Synthetic Peanut control sequences; inner sequence and 3' sequence

SEQ ID NO: 38467 - DNA, 53 bp, Artificial Sequence; identical to SEQ ID NO: 2475
  Description of Artificial Sequence: Synthetic Peanut control sequences; inner sequence and 3' sequence

SEQ ID NO: 38468 - DNA, 53 bp, Artificial Sequence; identical to SEQ ID NO: 2129
  Description of Artificial Sequence: Synthetic Peanut control sequences; inner sequence and 3' sequence

SEQ ID NO: 38469 - DNA, 53 bp, Artificial Sequence
  Description of Artificial Sequence: Synthetic Peanut control sequences; inner sequence and 3' sequence
ggacggatcgaacctacaagttggcgtggattgactagtacatgaccacttga

SEQ ID NO: 38470 - DNA, 53 bp, Artificial Sequence; identical to SEQ ID NO: 2915
  Description of Artificial Sequence: Synthetic Peanut control sequences; inner sequence and 3' sequence

SEQ ID NO: 38471 - DNA, 53 bp, Artificial Sequence; identical to SEQ ID NO: 2807
  Description of Artificial Sequence: Synthetic Peanut control sequences; inner sequence and 3' sequence

SEQ ID NO: 38472 - DNA, 53 bp, Artificial Sequence; identical to SEQ ID NO: 6503
  Description of Artificial Sequence: Synthetic Peanut control sequences; inner sequence and 3' sequence

SEQ ID NO: 38473 - DNA, 53 bp, Artificial Sequence; identical to SEQ ID NO: 6688
  Description of Artificial Sequence: Synthetic Peanut control sequences; inner sequence and 3' sequence

SEQ ID NO: 38474 - DNA, 53 bp, Artificial Sequence; identical to SEQ ID NO: 2920
  Description of Artificial Sequence: Synthetic Peanut control sequences; inner sequence and 3' sequence

SEQ ID NO: 38475 - DNA, 53 bp, Artificial Sequence; identical to SEQ ID NO: 2102
  Description of Artificial Sequence: Synthetic Peanut control sequences; inner sequence and 3' sequence

SEQ ID NO: 38476 - DNA, 53 bp, Artificial Sequence; identical to SEQ ID NO: 2577
  Description of Artificial Sequence: Synthetic Peanut control sequences; inner sequence and 3' sequence

SEQ ID NO: 38477 - DNA, 53 bp, Artificial Sequence; identical to SEQ ID NO: 2746
  Description of Artificial Sequence: Synthetic Peanut control sequences; inner sequence and 3' sequence

SEQ ID NO: 38478 - DNA, 53 bp, Artificial Sequence; identical to SEQ ID NO: 2660
  Description of Artificial Sequence: Synthetic Peanut control sequences; inner sequence and 3' sequence

SEQ ID NO: 38479 - DNA, 53 bp, Artificial Sequence; identical to SEQ ID NO: 6775
  Description of Artificial Sequence: Synthetic Peanut control sequences; inner sequence and 3' sequence

SEQ ID NO: 38480 - DNA, 53 bp, Artificial Sequence; identical to SEQ ID NO: 2777
  Description of Artificial Sequence: Synthetic Peanut control sequences; inner sequence and 3' sequence

SEQ ID NO: 38481 - DNA, 53 bp, Artificial Sequence; identical to SEQ ID NO: 2877
  Description of Artificial Sequence: Synthetic Peanut control sequences; inner sequence and 3' sequence

SEQ ID NO: 38482 - DNA, 53 bp, Artificial Sequence
  Description of Artificial Sequence: Synthetic Peanut control sequences; inner sequence and 3' sequence
tgtccgatcgaccctatcaagtgcagcatgttgactagtacatgaccacttga

SEQ ID NO: 38483 - DNA, 51 bp, Artificial Sequence; identical to SEQ ID NO: 22321
  Description of Artificial Sequence: Synthetic Peanut control sequences; inner sequence and 3' sequence

SEQ ID NO: 38484 - DNA, 53 bp, Artificial Sequence; identical to SEQ ID NO: 2574
  Description of Artificial Sequence: Synthetic Peanut control sequences; inner sequence and 3' sequence

SEQ ID NO: 38485 - DNA, 53 bp, Artificial Sequence; identical to SEQ ID NO: 6913
  Description of Artificial Sequence: Synthetic Peanut control sequences; inner sequence and 3' sequence

SEQ ID NO: 38486 - DNA, 54 bp, Artificial Sequence; identical to SEQ ID NO: 6619
  Description of Artificial Sequence: Synthetic Peanut control sequences; inner sequence and 3' sequence

SEQ ID NO: 38487 - DNA, 53 bp, Artificial Sequence; identical to SEQ ID NO: 6856
  Description of Artificial Sequence: Synthetic Peanut control sequences; inner sequence and 3' sequence

SEQ ID NO: 38488 - DNA, 52 bp, Artificial Sequence; identical to SEQ ID NO: 10977
  Description of Artificial Sequence: Synthetic Peanut control sequences; inner sequence and 3' sequence

SEQ ID NO: 38489 - DNA, 53 bp, Artificial Sequence; identical to SEQ ID NO: 30350
  Description of Artificial Sequence: Synthetic Peanut control sequences; inner sequence and 3' sequence

SEQ ID NO: 38490 - DNA, 55 bp, Artificial Sequence
  Description of Artificial Sequence: Synthetic Peanut control sequences; inner sequence and 3' sequence
gtcacggaacgaagcctatcaagtgcagcatgttgactagtacatgaccacttga

SEQ ID NO: 38491 - DNA, 53 bp, Artificial Sequence; identical to SEQ ID NO: 2617
  Description of Artificial Sequence: Synthetic Peanut control sequences; inner sequence and 3' sequence

SEQ ID NO: 38492 - DNA, 53 bp, Artificial Sequence; identical to SEQ ID NO: 3002
  Description of Artificial Sequence: Synthetic Peanut control sequences; inner sequence and 3' sequence

SEQ ID NO: 38493 - DNA, 53 bp, Artificial Sequence; identical to SEQ ID NO: 2805
  Description of Artificial Sequence: Synthetic Peanut control sequences; inner sequence and 3' sequence

SEQ ID NO: 38494 - DNA, 51 bp, Artificial Sequence; identical to SEQ ID NO: 2241
  Description of Artificial Sequence: Synthetic Peanut control sequences; inner sequence and 3' sequence

SEQ ID NO: 38495 - DNA, 53 bp, Artificial Sequence; identical to SEQ ID NO: 6999
  Description of Artificial Sequence: Synthetic Peanut control sequences; inner sequence and 3' sequence

SEQ ID NO: 38496 - DNA, 53 bp, Artificial Sequence; identical to SEQ ID NO: 2419
  Description of Artificial Sequence: Synthetic Peanut control sequences; inner sequence and 3' sequence

SEQ ID NO: 38497 - DNA, 53 bp, Artificial Sequence; identical to SEQ ID NO: 2625
  Description of Artificial Sequence: Synthetic Peanut control sequences; inner sequence and 3' sequence

SEQ ID NO: 38498 - DNA, 53 bp, Artificial Sequence; identical to SEQ ID NO: 2158
  Description of Artificial Sequence: Synthetic Peanut control sequences; inner sequence and 3' sequence

SEQ ID NO: 38499 - DNA, 53 bp, Artificial Sequence; identical to SEQ ID NO: 6535
  Description of Artificial Sequence: Synthetic Peanut control sequences; inner sequence and 3' sequence

SEQ ID NO: 38500 - DNA, 53 bp, Artificial Sequence
  Description of Artificial Sequence: Synthetic Peanut control sequences; inner sequence and 3' sequence
cggccgatcgaccctatcaagtgcagcatgttgactagtacatgaccacttga

SEQ ID NO: 38501 - DNA, 53 bp, Artificial Sequence; identical to SEQ ID NO: 2183
  Description of Artificial Sequence: Synthetic Peanut control sequences; inner sequence and 3' sequence

SEQ ID NO: 38502 - DNA, 53 bp, Artificial Sequence; identical to SEQ ID NO: 26927
  Description of Artificial Sequence: Synthetic Peanut control sequences; inner sequence and 3' sequence

SEQ ID NO: 38503 - DNA, 53 bp, Artificial Sequence; identical to SEQ ID NO: 2431
  Description of Artificial Sequence: Synthetic Peanut control sequences; inner sequence and 3' sequence

SEQ ID NO: 38504 - DNA, 53 bp, Artificial Sequence
  Description of Artificial Sequence: Synthetic Peanut control sequences; inner sequence and 3' sequence
ccatctcgcgctcctacgtggccatgcactttgactagtacatgaccacttga

SEQ ID NO: 38505 - DNA, 53 bp, Artificial Sequence; identical to SEQ ID NO: 2579
  Description of Artificial Sequence: Synthetic Peanut control sequences; inner sequence and 3' sequence

SEQ ID NO: 38506 - DNA, 53 bp, Artificial Sequence
  Description of Artificial Sequence: Synthetic Peanut control sequences; inner sequence and 3' sequence
tgtgtgcctgaacgacctacacgtggctcattgactagtacatgaccacttga

SEQ ID NO: 38507 - DNA, 53 bp, Artificial Sequence; identical to SEQ ID NO: 30317
  Description of Artificial Sequence: Synthetic Peanut control sequences; inner sequence and 3' sequence

SEQ ID NO: 38508 - DNA, 53 bp, Artificial Sequence; identical to SEQ ID NO: 2455
  Description of Artificial Sequence: Synthetic Peanut control sequences; inner sequence and 3' sequence

SEQ ID NO: 38509 - DNA, 53 bp, Artificial Sequence; identical to SEQ ID NO: 2685
  Description of Artificial Sequence: Synthetic Peanut control sequences; inner sequence and 3' sequence

SEQ ID NO: 38510 - DNA, 53 bp, Artificial Sequence; identical to SEQ ID NO: 6787
  Description of Artificial Sequence: Synthetic Peanut control sequences; inner sequence and 3' sequence

SEQ ID NO: 38511 - DNA, 53 bp, Artificial Sequence
  Description of Artificial Sequence: Synthetic Peanut control sequences; inner sequence and 3' sequence
cgcgatcacgtccgttcccttcgagtggccttgactagtacatgaccacttga

SEQ ID NO: 38512 - DNA, 53 bp, Artificial Sequence; identical to SEQ ID NO: 2701
  Description of Artificial Sequence: Synthetic Peanut control sequences; inner sequence and 3' sequence

SEQ ID NO: 38513 - DNA, 53 bp, Artificial Sequence; identical to SEQ ID NO: 2670
  Description of Artificial Sequence: Synthetic Peanut control sequences; inner sequence and 3' sequence

SEQ ID NO: 38514 - DNA, 53 bp, Artificial Sequence
  Description of Artificial Sequence: Synthetic Peanut control sequences; inner sequence and 3' sequence
tggcttgcatgctggacttcctactggtttttgactagtacatgaccacttga

SEQ ID NO: 38515 - DNA, 52 bp, Artificial Sequence; identical to SEQ ID NO: 34972
  Description of Artificial Sequence: Synthetic Peanut control sequences; inner sequence and 3' sequence

SEQ ID NO: 38516 - DNA, 53 bp, Artificial Sequence
  Description of Artificial Sequence: Synthetic Peanut control sequences; inner sequence and 3' sequence
cgtactgaacgcaccctcacaagtggcgcattgactagtacatgaccacttga

SEQ ID NO: 38517 - DNA, 53 bp, Artificial Sequence; identical to SEQ ID NO: 2157
  Description of Artificial Sequence: Synthetic Peanut control sequences; inner sequence and 3' sequence

SEQ ID NO: 38518 - DNA, 53 bp, Artificial Sequence; identical to SEQ ID NO: 26630
  Description of Artificial Sequence: Synthetic Peanut control sequences; inner sequence and 3' sequence

SEQ ID NO: 38519 - DNA, 53 bp, Artificial Sequence; identical to SEQ ID NO: 2220
  Description of Artificial Sequence: Synthetic Peanut control sequences; inner sequence and 3' sequence

SEQ ID NO: 38520 - DNA, 53 bp, Artificial Sequence; identical to SEQ ID NO: 2090
  Description of Artificial Sequence: Synthetic Peanut control sequences; inner sequence and 3' sequence

SEQ ID NO: 38521 - DNA, 53 bp, Artificial Sequence; identical to SEQ ID NO: 2776
  Description of Artificial Sequence: Synthetic Peanut control sequences; inner sequence and 3' sequence

SEQ ID NO: 38522 - DNA, 54 bp, Artificial Sequence; identical to SEQ ID NO: 34291
  Description of Artificial Sequence: Synthetic Peanut control sequences; inner sequence and 3' sequence

SEQ ID NO: 38523 - DNA, 53 bp, Artificial Sequence; identical to SEQ ID NO: 6312
  Description of Artificial Sequence: Synthetic Peanut control sequences; inner sequence and 3' sequence

SEQ ID NO: 38524 - DNA, 53 bp, Artificial Sequence; identical to SEQ ID NO: 2523
  Description of Artificial Sequence: Synthetic Peanut control sequences; inner sequence and 3' sequence

SEQ ID NO: 38525 - DNA, 53 bp, Artificial Sequence; identical to SEQ ID NO: 2912
  Description of Artificial Sequence: Synthetic Peanut control sequences; inner sequence and 3' sequence

SEQ ID NO: 38526 - DNA, 53 bp, Artificial Sequence; identical to SEQ ID NO: 2084
  Description of Artificial Sequence: Synthetic Peanut control sequences; inner sequence and 3' sequence

SEQ ID NO: 38527 - DNA, 53 bp, Artificial Sequence
  Description of Artificial Sequence: Synthetic Peanut control sequences; inner sequence and 3' sequence
gtacgcgtcgaccttcaagtgtgccgtggattgactagtacatgaccacttga

SEQ ID NO: 38528 - DNA, 53 bp, Artificial Sequence; identical to SEQ ID NO: 2397
  Description of Artificial Sequence: Synthetic Peanut control sequences; inner sequence and 3' sequence

SEQ ID NO: 38529 - DNA, 53 bp, Artificial Sequence; identical to SEQ ID NO: 6807
  Description of Artificial Sequence: Synthetic Peanut control sequences; inner sequence and 3' sequence

SEQ ID NO: 38530 - DNA, 53 bp, Artificial Sequence; identical to SEQ ID NO: 2900
  Description of Artificial Sequence: Synthetic Peanut control sequences; inner sequence and 3' sequence

SEQ ID NO: 38531 - DNA, 53 bp, Artificial Sequence; identical to SEQ ID NO: 6616
  Description of Artificial Sequence: Synthetic Peanut control sequences; inner sequence and 3' sequence

SEQ ID NO: 38532 - DNA, 53 bp, Artificial Sequence; identical to SEQ ID NO: 2426
  Description of Artificial Sequence: Synthetic Peanut control sequences; inner sequence and 3' sequence

SEQ ID NO: 38533 - DNA, 53 bp, Artificial Sequence; identical to SEQ ID NO: 30427
  Description of Artificial Sequence: Synthetic Peanut control sequences; inner sequence and 3' sequence

SEQ ID NO: 38534 - DNA, 53 bp, Artificial Sequence; identical to SEQ ID NO: 2622
  Description of Artificial Sequence: Synthetic Peanut control sequences; inner sequence and 3' sequence

SEQ ID NO: 38535 - DNA, 53 bp, Artificial Sequence; identical to SEQ ID NO: 2680
  Description of Artificial Sequence: Synthetic Peanut control sequences; inner sequence and 3' sequence

SEQ ID NO: 38536 - DNA, 53 bp, Artificial Sequence; identical to SEQ ID NO: 6939
  Description of Artificial Sequence: Synthetic Peanut control sequences; inner sequence and 3' sequence

SEQ ID NO: 38537 - DNA, 53 bp, Artificial Sequence; identical to SEQ ID NO: 2634
  Description of Artificial Sequence: Synthetic Peanut control sequences; inner sequence and 3' sequence

SEQ ID NO: 38538 - DNA, 53 bp, Artificial Sequence; identical to SEQ ID NO: 10860
  Description of Artificial Sequence: Synthetic Peanut control sequences; inner sequence and 3' sequence

SEQ ID NO: 38539 - DNA, 53 bp, Artificial Sequence; identical to SEQ ID NO: 2173
  Description of Artificial Sequence: Synthetic Peanut control sequences; inner sequence and 3' sequence

SEQ ID NO: 38540 - DNA, 53 bp, Artificial Sequence; identical to SEQ ID NO: 2808
  Description of Artificial Sequence: Synthetic Peanut control sequences; inner sequence and 3' sequence

SEQ ID NO: 38541 - DNA, 53 bp, Artificial Sequence; identical to SEQ ID NO: 2671
  Description of Artificial Sequence: Synthetic Peanut control sequences; inner sequence and 3' sequence

SEQ ID NO: 38542 - DNA, 53 bp, Artificial Sequence; identical to SEQ ID NO: 14581
  Description of Artificial Sequence: Synthetic Peanut control sequences; inner sequence and 3' sequence

SEQ ID NO: 38543 - DNA, 53 bp, Artificial Sequence; identical to SEQ ID NO: 6603
  Description of Artificial Sequence: Synthetic Peanut control sequences; inner sequence and 3' sequence

SEQ ID NO: 38544 - DNA, 53 bp, Artificial Sequence; identical to SEQ ID NO: 6230
  Description of Artificial Sequence: Synthetic Peanut control sequences; inner sequence and 3' sequence

SEQ ID NO: 38545 - DNA, 53 bp, Artificial Sequence; identical to SEQ ID NO: 14985
  Description of Artificial Sequence: Synthetic Peanut control sequences; inner sequence and 3' sequence

SEQ ID NO: 38546 - DNA, 53 bp, Artificial Sequence
  Description of Artificial Sequence: Synthetic Peanut control sequences; inner sequence and 3' sequence
acgtccgcactccttgccatacacgtgggcttgactagtacatgaccacttga

SEQ ID NO: 38547 - DNA, 53 bp, Artificial Sequence; identical to SEQ ID NO: 2559
  Description of Artificial Sequence: Synthetic Peanut control sequences; inner sequence and 3' sequence

SEQ ID NO: 38548 - DNA, 51 bp, Artificial Sequence
  Description of Artificial Sequence: Synthetic Peanut control sequences; inner sequence and 3' sequence
ccgcacgtagccctatcatgaggccatgttgactagtacatgaccacttga

SEQ ID NO: 38549 - DNA, 53 bp, Artificial Sequence; identical to SEQ ID NO: 2521
  Description of Artificial Sequence: Synthetic Peanut control sequences; inner sequence and 3' sequence

SEQ ID NO: 38550 - DNA, 53 bp, Artificial Sequence; identical to SEQ ID NO: 2921
  Description of Artificial Sequence: Synthetic Peanut control sequences; inner sequence and 3' sequence

SEQ ID NO: 38551 - DNA, 53 bp, Artificial Sequence
  Description of Artificial Sequence: Synthetic Peanut control sequences; inner sequence and 3' sequence
gtgcgcactcttgccttccagtggttcgtgttgactagtacatgaccacttga

SEQ ID NO: 38552 - DNA, 53 bp, Artificial Sequence
  Description of Artificial Sequence: Synthetic Peanut control sequences; inner sequence and 3' sequence
catgctctgaccgtggcaggaacgctgtcattgactagtacatgaccacttga

SEQ ID NO: 38553 - DNA, 53 bp, Artificial Sequence; identical to SEQ ID NO: 22229
  Description of Artificial Sequence: Synthetic Peanut control sequences; inner sequence and 3' sequence

SEQ ID NO: 38554 - DNA, 53 bp, Artificial Sequence; identical to SEQ ID NO: 2385
  Description of Artificial Sequence: Synthetic Peanut control sequences; inner sequence and 3' sequence

SEQ ID NO: 38555 - DNA, 53 bp, Artificial Sequence; identical to SEQ ID NO: 26843
  Description of Artificial Sequence: Synthetic Peanut control sequences; inner sequence and 3' sequence

SEQ ID NO: 38556 - DNA, 53 bp, Artificial Sequence; identical to SEQ ID NO: 30702
  Description of Artificial Sequence: Synthetic Peanut control sequences; inner sequence and 3' sequence

SEQ ID NO: 38557 - DNA, 53 bp, Artificial Sequence; identical to SEQ ID NO: 30823
  Description of Artificial Sequence: Synthetic Peanut control sequences; inner sequence and 3' sequence

SEQ ID NO: 38558 - DNA, 53 bp, Artificial Sequence; identical to SEQ ID NO: 6492
  Description of Artificial Sequence: Synthetic Peanut control sequences; inner sequence and 3' sequence

SEQ ID NO: 38559 - DNA, 53 bp, Artificial Sequence; identical to SEQ ID NO: 30513
  Description of Artificial Sequence: Synthetic Peanut control sequences; inner sequence and 3' sequence

SEQ ID NO: 38560 - DNA, 53 bp, Artificial Sequence; identical to SEQ ID NO: 2677
  Description of Artificial Sequence: Synthetic Peanut control sequences; inner sequence and 3' sequence

SEQ ID NO: 38561 - DNA, 53 bp, Artificial Sequence; identical to SEQ ID NO: 10844
  Description of Artificial Sequence: Synthetic Peanut control sequences; inner sequence and 3' sequence

SEQ ID NO: 38562 - DNA, 53 bp, Artificial Sequence; identical to SEQ ID NO: 6381
  Description of Artificial Sequence: Synthetic Peanut control sequences; inner sequence and 3' sequence

SEQ ID NO: 38563 - DNA, 53 bp, Artificial Sequence; identical to SEQ ID NO: 30257
  Description of Artificial Sequence: Synthetic Peanut control sequences; inner sequence and 3' sequence

SEQ ID NO: 38564 - DNA, 53 bp, Artificial Sequence; identical to SEQ ID NO: 2367
  Description of Artificial Sequence: Synthetic Peanut control sequences; inner sequence and 3' sequence

SEQ ID NO: 38565 - DNA, 51 bp, Artificial Sequence; identical to SEQ ID NO: 6786
  Description of Artificial Sequence: Synthetic Peanut control sequences; inner sequence and 3' sequence

SEQ ID NO: 38566 - DNA, 52 bp, Artificial Sequence; identical to SEQ ID NO: 6968
  Description of Artificial Sequence: Synthetic Peanut control sequences; inner sequence and 3' sequence

SEQ ID NO: 38567 - DNA, 53 bp, Artificial Sequence; identical to SEQ ID NO: 2246
  Description of Artificial Sequence: Synthetic Peanut control sequences; inner sequence and 3' sequence

SEQ ID NO: 38568 - DNA, 53 bp, Artificial Sequence; identical to SEQ ID NO: 2280
  Description of Artificial Sequence: Synthetic Peanut control sequences; inner sequence and 3' sequence

SEQ ID NO: 38569 - DNA, 53 bp, Artificial Sequence; identical to SEQ ID NO: 2098
  Description of Artificial Sequence: Synthetic Peanut control sequences; inner sequence and 3' sequence

SEQ ID NO: 38570 - DNA, 53 bp, Artificial Sequence; identical to SEQ ID NO: 2768
  Description of Artificial Sequence: Synthetic Peanut control sequences; inner sequence and 3' sequence

SEQ ID NO: 38571 - DNA, 53 bp, Artificial Sequence; identical to SEQ ID NO: 6472
  Description of Artificial Sequence: Synthetic Peanut control sequences; inner sequence and 3' sequence

SEQ ID NO: 38572 - DNA, 53 bp, Artificial Sequence; identical to SEQ ID NO: 26527
  Description of Artificial Sequence: Synthetic Peanut control sequences; inner sequence and 3' sequence

SEQ ID NO: 38573 - DNA, 48 bp, Artificial Sequence; identical to SEQ ID NO: 2427
  Description of Artificial Sequence: Synthetic Peanut control sequences; inner sequence and 3' sequence

SEQ ID NO: 38574 - DNA, 53 bp, Artificial Sequence; identical to SEQ ID NO: 2467
  Description of Artificial Sequence: Synthetic Peanut control sequences; inner sequence and 3' sequence

SEQ ID NO: 38575 - DNA, 53 bp, Artificial Sequence; identical to SEQ ID NO: 2296
  Description of Artificial Sequence: Synthetic Peanut control sequences; inner sequence and 3' sequence

SEQ ID NO: 38576 - DNA, 53 bp, Artificial Sequence; identical to SEQ ID NO: 6748
  Description of Artificial Sequence: Synthetic Peanut control sequences; inner sequence and 3' sequence

SEQ ID NO: 38577 - DNA, 53 bp, Artificial Sequence; identical to SEQ ID NO: 2265
  Description of Artificial Sequence: Synthetic Peanut control sequences; inner sequence and 3' sequence

SEQ ID NO: 38578 - DNA, 53 bp, Artificial Sequence; identical to SEQ ID NO: 2632
  Description of Artificial Sequence: Synthetic Peanut control sequences; inner sequence and 3' sequence

SEQ ID NO: 38579 - DNA, 51 bp, Artificial Sequence
  Description of Artificial Sequence: Synthetic Peanut control sequences; inner sequence and 3' sequence
tggccgatcgaccctatcaagtgcgacattgactagtacatgaccacttga

SEQ ID NO: 38580 - DNA, 53 bp, Artificial Sequence; identical to SEQ ID NO: 2857
  Description of Artificial Sequence: Synthetic Peanut control sequences; inner sequence and 3' sequence

SEQ ID NO: 38581 - DNA, 53 bp, Artificial Sequence; identical to SEQ ID NO: 2493
  Description of Artificial Sequence: Synthetic Peanut control sequences; inner sequence and 3' sequence

SEQ ID NO: 38582 - DNA, 53 bp, Artificial Sequence; identical to SEQ ID NO: 2306
  Description of Artificial Sequence: Synthetic Peanut control sequences; inner sequence and 3' sequence

SEQ ID NO: 38583 - DNA, 53 bp, Artificial Sequence
  Description of Artificial Sequence: Synthetic Peanut control sequences; inner sequence and 3' sequence
ggcctgcgatggatgtggacggtacgcggtttgactagtacatgaccacttga

SEQ ID NO: 38584 - DNA, 53 bp, Artificial Sequence; identical to SEQ ID NO: 2979
  Description of Artificial Sequence: Synthetic Peanut control sequences; inner sequence and 3' sequence

SEQ ID NO: 38585 - DNA, 53 bp, Artificial Sequence; identical to SEQ ID NO: 6591
  Description of Artificial Sequence: Synthetic Peanut control sequences; inner sequence and 3' sequence

SEQ ID NO: 38586 - DNA, 53 bp, Artificial Sequence
  Description of Artificial Sequence: Synthetic Peanut control sequences; inner sequence and 3' sequence
tggccgctcgaccctatcaagtgcagcatgttgactagtacatgaccacttga

SEQ ID NO: 38587 - DNA, 53 bp, Artificial Sequence; identical to SEQ ID NO: 22874
  Description of Artificial Sequence: Synthetic Peanut control sequences; inner sequence and 3' sequence

SEQ ID NO: 38588 - DNA, 53 bp, Artificial Sequence; identical to SEQ ID NO: 10910
  Description of Artificial Sequence: Synthetic Peanut control sequences; inner sequence and 3' sequence

SEQ ID NO: 38589 - DNA, 53 bp, Artificial Sequence; identical to SEQ ID NO: 2484
  Description of Artificial Sequence: Synthetic Peanut control sequences; inner sequence and 3' sequence

SEQ ID NO: 38590 - DNA, 53 bp, Artificial Sequence; identical to SEQ ID NO: 34433
  Description of Artificial Sequence: Synthetic Peanut control sequences; inner sequence and 3' sequence

SEQ ID NO: 38591 - DNA, 53 bp, Artificial Sequence; identical to SEQ ID NO: 2138
  Description of Artificial Sequence: Synthetic Peanut control sequences; inner sequence and 3' sequence

SEQ ID NO: 38592 - DNA, 53 bp, Artificial Sequence; identical to SEQ ID NO: 10564
  Description of Artificial Sequence: Synthetic Peanut control sequences; inner sequence and 3' sequence

SEQ ID NO: 38593 - DNA, 53 bp, Artificial Sequence; identical to SEQ ID NO: 2631
  Description of Artificial Sequence: Synthetic Peanut control sequences; inner sequence and 3' sequence

SEQ ID NO: 38594 - DNA, 54 bp, Artificial Sequence; identical to SEQ ID NO: 2659
  Description of Artificial Sequence: Synthetic Peanut control sequences; inner sequence and 3' sequence

SEQ ID NO: 38595 - DNA, 53 bp, Artificial Sequence; identical to SEQ ID NO: 10782
  Description of Artificial Sequence: Synthetic Peanut control sequences; inner sequence and 3' sequence

SEQ ID NO: 38596 - DNA, 53 bp, Artificial Sequence; identical to SEQ ID NO: 6651
  Description of Artificial Sequence: Synthetic Peanut control sequences; inner sequence and 3' sequence

SEQ ID NO: 38597 - DNA, 53 bp, Artificial Sequence; identical to SEQ ID NO: 2442
  Description of Artificial Sequence: Synthetic Peanut control sequences; inner sequence and 3' sequence

SEQ ID NO: 38598 - DNA, 53 bp, Artificial Sequence; identical to SEQ ID NO: 6837
  Description of Artificial Sequence: Synthetic Peanut control sequences; inner sequence and 3' sequence

SEQ ID NO: 38599 - DNA, 53 bp, Artificial Sequence; identical to SEQ ID NO: 6280
  Description of Artificial Sequence: Synthetic Peanut control sequences; inner sequence and 3' sequence

SEQ ID NO: 38600 - DNA, 53 bp, Artificial Sequence; identical to SEQ ID NO: 2141
  Description of Artificial Sequence: Synthetic Peanut control sequences; inner sequence and 3' sequence

SEQ ID NO: 38601 - DNA, 53 bp, Artificial Sequence; identical to SEQ ID NO: 10850
  Description of Artificial Sequence: Synthetic Peanut control sequences; inner sequence and 3' sequence

SEQ ID NO: 38602 - DNA, 53 bp, Artificial Sequence
  Description of Artificial Sequence: Synthetic Peanut control sequences; inner sequence and 3' sequence
tggccgatcgaccctctcaagtgcagcatgttgactagtacatgaccacttga

SEQ ID NO: 38603 - DNA, 53 bp, Artificial Sequence; identical to SEQ ID NO: 6580
  Description of Artificial Sequence: Synthetic Peanut control sequences; inner sequence and 3' sequence

SEQ ID NO: 38604 - DNA, 53 bp, Artificial Sequence; identical to SEQ ID NO: 6590
  Description of Artificial Sequence: Synthetic Peanut control sequences; inner sequence and 3' sequence

SEQ ID NO: 38605 - DNA, 53 bp, Artificial Sequence; identical to SEQ ID NO: 6565
  Description of Artificial Sequence: Synthetic Peanut control sequences; inner sequence and 3' sequence

SEQ ID NO: 38606 - DNA, 53 bp, Artificial Sequence; identical to SEQ ID NO: 2889
  Description of Artificial Sequence: Synthetic Peanut control sequences; inner sequence and 3' sequence

SEQ ID NO: 38607 - DNA, 54 bp, Artificial Sequence
  Description of Artificial Sequence: Synthetic Peanut control sequences; inner sequence and 3' sequence
gtgctgcgatggcttagcaaagtgcgacatgttgactagtacatgaccacttga

SEQ ID NO: 38608 - DNA, 53 bp, Artificial Sequence; identical to SEQ ID NO: 2244
  Description of Artificial Sequence: Synthetic Peanut control sequences; inner sequence and 3' sequence

SEQ ID NO: 38609 - DNA, 53 bp, Artificial Sequence; identical to SEQ ID NO: 2499
  Description of Artificial Sequence: Synthetic Peanut control sequences; inner sequence and 3' sequence

SEQ ID NO: 38610 - DNA, 53 bp, Artificial Sequence; identical to SEQ ID NO: 14872
  Description of Artificial Sequence: Synthetic Peanut control sequences; inner sequence and 3' sequence

SEQ ID NO: 38611 - DNA, 53 bp, Artificial Sequence
  Description of Artificial Sequence: Synthetic Peanut control sequences; inner sequence and 3' sequence
gtggccgcagctgacctagcatgtgtgtcattgactagtacatgaccacttga

SEQ ID NO: 38612 - DNA, 53 bp, Artificial Sequence
  Description of Artificial Sequence: Synthetic Peanut control sequences; inner sequence and 3' sequence
gtgcttcacgacctagcacgtggggatggattgactagtacatgaccacttga

SEQ ID NO: 38613 - DNA, 53 bp, Artificial Sequence; identical to SEQ ID NO: 2274
  Description of Artificial Sequence: Synthetic Peanut control sequences; inner sequence and 3' sequence

SEQ ID NO: 38614 - DNA, 53 bp, Artificial Sequence; identical to SEQ ID NO: 30914
  Description of Artificial Sequence: Synthetic Peanut control sequences; inner sequence and 3' sequence

SEQ ID NO: 38615 - DNA, 53 bp, Artificial Sequence; identical to SEQ ID NO: 22744
  Description of Artificial Sequence: Synthetic Peanut control sequences; inner sequence and 3' sequence

SEQ ID NO: 38616 - DNA, 53 bp, Artificial Sequence; identical to SEQ ID NO: 2637
  Description of Artificial Sequence: Synthetic Peanut control sequences; inner sequence and 3' sequence

SEQ ID NO: 38617 - DNA, 53 bp, Artificial Sequence
  Description of Artificial Sequence: Synthetic Peanut control sequences; inner sequence and 3' sequence
gtcatgcgcggacattcaagttggcgtgtattgactagtacatgaccacttga

SEQ ID NO: 38618 - DNA, 53 bp, Artificial Sequence; identical to SEQ ID NO: 10807
  Description of Artificial Sequence: Synthetic Peanut control sequences; inner sequence and 3' sequence

SEQ ID NO: 38619 - DNA, 53 bp, Artificial Sequence; identical to SEQ ID NO: 2657
  Description of Artificial Sequence: Synthetic Peanut control sequences; inner sequence and 3' sequence

SEQ ID NO: 38620 - DNA, 53 bp, Artificial Sequence; identical to SEQ ID NO: 14791
  Description of Artificial Sequence: Synthetic Peanut control sequences; inner sequence and 3' sequence

SEQ ID NO: 38621 - DNA, 53 bp, Artificial Sequence; identical to SEQ ID NO: 22673
  Description of Artificial Sequence: Synthetic Peanut control sequences; inner sequence and 3' sequence

SEQ ID NO: 38622 - DNA, 53 bp, Artificial Sequence; identical to SEQ ID NO: 22722
  Description of Artificial Sequence: Synthetic Peanut control sequences; inner sequence and 3' sequence

SEQ ID NO: 38623 - DNA, 53 bp, Artificial Sequence; identical to SEQ ID NO: 6393
  Description of Artificial Sequence: Synthetic Peanut control sequences; inner sequence and 3' sequence

SEQ ID NO: 38624 - DNA, 53 bp, Artificial Sequence
  Description of Artificial Sequence: Synthetic Peanut control sequences; inner sequence and 3' sequence
cgtatggcctggacatccctcaagttggcattgactagtacatgaccacttga

SEQ ID NO: 38625 - DNA, 53 bp, Artificial Sequence; identical to SEQ ID NO: 2248
  Description of Artificial Sequence: Synthetic Peanut control sequences; inner sequence and 3' sequence

SEQ ID NO: 38626 - DNA, 53 bp, Artificial Sequence; identical to SEQ ID NO: 6525
  Description of Artificial Sequence: Synthetic Peanut control sequences; inner sequence and 3' sequence

SEQ ID NO: 38627 - DNA, 53 bp, Artificial Sequence; identical to SEQ ID NO: 2654
  Description of Artificial Sequence: Synthetic Peanut control sequences; inner sequence and 3' sequence

SEQ ID NO: 38628 - DNA, 53 bp, Artificial Sequence; identical to SEQ ID NO: 2504
  Description of Artificial Sequence: Synthetic Peanut control sequences; inner sequence and 3' sequence

SEQ ID NO: 38629 - DNA, 53 bp, Artificial Sequence; identical to SEQ ID NO: 34416
  Description of Artificial Sequence: Synthetic Peanut control sequences; inner sequence and 3' sequence

SEQ ID NO: 38630 - DNA, 48 bp, Artificial Sequence
  Description of Artificial Sequence: Synthetic Peanut control sequences; inner sequence and 3' sequence
gtactgcactgccctacacgtgggcttgactagtacatgaccacttga

SEQ ID NO: 38631 - DNA, 53 bp, Artificial Sequence; identical to SEQ ID NO: 2932
  Description of Artificial Sequence: Synthetic Peanut control sequences; inner sequence and 3' sequence

SEQ ID NO: 38632 - DNA, 53 bp, Artificial Sequence; identical to SEQ ID NO: 6870
  Description of Artificial Sequence: Synthetic Peanut control sequences; inner sequence and 3' sequence

SEQ ID NO: 38633 - DNA, 53 bp, Artificial Sequence; identical to SEQ ID NO: 2830
  Description of Artificial Sequence: Synthetic Peanut control sequences; inner sequence and 3' sequence

SEQ ID NO: 38634 - DNA, 53 bp, Artificial Sequence
  Description of Artificial Sequence: Synthetic Peanut control sequences; inner sequence and 3' sequence
gtcatgcgctgacattcaagttggcgtggattgactagtacatgaccacttga

SEQ ID NO: 38635 - DNA, 53 bp, Artificial Sequence; identical to SEQ ID NO: 30994
  Description of Artificial Sequence: Synthetic Peanut control sequences; inner sequence and 3' sequence

SEQ ID NO: 38636 - DNA, 53 bp, Artificial Sequence; identical to SEQ ID NO: 2403
  Description of Artificial Sequence: Synthetic Peanut control sequences; inner sequence and 3' sequence

SEQ ID NO: 38637 - DNA, 53 bp, Artificial Sequence; identical to SEQ ID NO: 2439
  Description of Artificial Sequence: Synthetic Peanut control sequences; inner sequence and 3' sequence

SEQ ID NO: 38638 - DNA, 53 bp, Artificial Sequence; identical to SEQ ID NO: 2846
  Description of Artificial Sequence: Synthetic Peanut control sequences; inner sequence and 3' sequence

SEQ ID NO: 38639 - DNA, 53 bp, Artificial Sequence
  Description of Artificial Sequence: Synthetic Peanut control sequences; inner sequence and 3' sequence
tggccgatcgaccctatcaagggcagcatgttgactagtacatgaccacttga

SEQ ID NO: 38640 - DNA, 53 bp, Artificial Sequence; identical to SEQ ID NO: 10871
  Description of Artificial Sequence: Synthetic Peanut control sequences; inner sequence and 3' sequence

SEQ ID NO: 38641 - DNA, 53 bp, Artificial Sequence; identical to SEQ ID NO: 10876
  Description of Artificial Sequence: Synthetic Peanut control sequences; inner sequence and 3' sequence

SEQ ID NO: 38642 - DNA, 53 bp, Artificial Sequence
  Description of Artificial Sequence: Synthetic Peanut control sequences; inner sequence and 3' sequence
ggacggatcgaacctacaagttgtcgcggattgactagtacatgaccacttga

SEQ ID NO: 38643 - DNA, 53 bp, Artificial Sequence
  Description of Artificial Sequence: Synthetic Peanut control sequences; inner sequence and 3' sequence
ccgtaccgaccctatcaagtgctgtccatgttgactagtacatgaccacttga

SEQ ID NO: 38644 - DNA, 53 bp, Artificial Sequence; identical to SEQ ID NO: 22549
  Description of Artificial Sequence: Synthetic Peanut control sequences; inner sequence and 3' sequence

SEQ ID NO: 38645 - DNA, 53 bp, Artificial Sequence; identical to SEQ ID NO: 14892
  Description of Artificial Sequence: Synthetic Peanut control sequences; inner sequence and 3' sequence

SEQ ID NO: 38646 - DNA, 55 bp, Artificial Sequence
  Description of Artificial Sequence: Synthetic Peanut control sequences; inner sequence and 3' sequence
catgtgtcgactcgccctatcatgaggccatgttgactagtacatgaccacttga

SEQ ID NO: 38647 - DNA, 53 bp, Artificial Sequence
  Description of Artificial Sequence: Synthetic Peanut control sequences; inner sequence and 3' sequence
ggtccgaacgcacctcatgtgtgtcgtggattgactagtacatgaccacttga

SEQ ID NO: 38648 - DNA, 53 bp, Artificial Sequence; identical to SEQ ID NO: 2633
  Description of Artificial Sequence: Synthetic Peanut control sequences; inner sequence and 3' sequence

SEQ ID NO: 38649 - DNA, 53 bp, Artificial Sequence; identical to SEQ ID NO: 6494
  Description of Artificial Sequence: Synthetic Peanut control sequences; inner sequence and 3' sequence

SEQ ID NO: 38650 - DNA, 53 bp, Artificial Sequence; identical to SEQ ID NO: 22289
  Description of Artificial Sequence: Synthetic Peanut control sequences; inner sequence and 3' sequence

SEQ ID NO: 38651 - DNA, 51 bp, Artificial Sequence
  Description of Artificial Sequence: Synthetic Peanut control sequences; inner sequence and 3' sequence
ggcctcgatggatgtggtggtgctgtcattgactagtacatgaccacttga

SEQ ID NO: 38652 - DNA, 56 bp, Artificial Sequence
  Description of Artificial Sequence: Synthetic Peanut control sequences; inner sequence and 3' sequence
ccgcatcggaccgatcaaggcaggctgtacgagttgactagtacatgaccacttga

SEQ ID NO: 38653 - DNA, 53 bp, Artificial Sequence
  Description of Artificial Sequence: Synthetic Peanut control sequences; inner sequence and 3' sequence
ggccaagctgaccgtcaacgtggttgtggattgactagtacatgaccacttga

SEQ ID NO: 38654 - DNA, 53 bp, Artificial Sequence; identical to SEQ ID NO: 10810
  Description of Artificial Sequence: Synthetic Peanut control sequences; inner sequence and 3' sequence

SEQ ID NO: 38655 - DNA, 53 bp, Artificial Sequence; identical to SEQ ID NO: 34565
  Description of Artificial Sequence: Synthetic Peanut control sequences; inner sequence and 3' sequence

SEQ ID NO: 38656 - DNA, 53 bp, Artificial Sequence; identical to SEQ ID NO: 34235
  Description of Artificial Sequence: Synthetic Peanut control sequences; inner sequence and 3' sequence

SEQ ID NO: 38657 - DNA, 53 bp, Artificial Sequence; identical to SEQ ID NO: 22269
  Description of Artificial Sequence: Synthetic Peanut control sequences; inner sequence and 3' sequence

SEQ ID NO: 38658 - DNA, 53 bp, Artificial Sequence; identical to SEQ ID NO: 6351
  Description of Artificial Sequence: Synthetic Peanut control sequences; inner sequence and 3' sequence

SEQ ID NO: 38659 - DNA, 53 bp, Artificial Sequence; identical to SEQ ID NO: 2930
  Description of Artificial Sequence: Synthetic Peanut control sequences; inner sequence and 3' sequence

SEQ ID NO: 38660 - DNA, 53 bp, Artificial Sequence; identical to SEQ ID NO: 2841
  Description of Artificial Sequence: Synthetic Peanut control sequences; inner sequence and 3' sequence

SEQ ID NO: 38661 - DNA, 53 bp, Artificial Sequence; identical to SEQ ID NO: 2415
  Description of Artificial Sequence: Synthetic Peanut control sequences; inner sequence and 3' sequence

SEQ ID NO: 38662 - DNA, 53 bp, Artificial Sequence; identical to SEQ ID NO: 10988
  Description of Artificial Sequence: Synthetic Peanut control sequences; inner sequence and 3' sequence

SEQ ID NO: 38663 - DNA, 53 bp, Artificial Sequence; identical to SEQ ID NO: 6380
  Description of Artificial Sequence: Synthetic Peanut control sequences; inner sequence and 3' sequence

SEQ ID NO: 38664 - DNA, 53 bp, Artificial Sequence; identical to SEQ ID NO: 34404
  Description of Artificial Sequence: Synthetic Peanut control sequences; inner sequence and 3' sequence

SEQ ID NO: 38665 - DNA, 53 bp, Artificial Sequence
  Description of Artificial Sequence: Synthetic Peanut control sequences; inner sequence and 3' sequence
cacgtcagtccggatcggcttagctgggcattgactagtacatgaccacttga

SEQ ID NO: 38666 - DNA, 53 bp, Artificial Sequence; identical to SEQ ID NO: 6445
  Description of Artificial Sequence: Synthetic Peanut control sequences; inner sequence and 3' sequence

SEQ ID NO: 38667 - DNA, 53 bp, Artificial Sequence; identical to SEQ ID NO: 2881
  Description of Artificial Sequence: Synthetic Peanut control sequences; inner sequence and 3' sequence

SEQ ID NO: 38668 - DNA, 53 bp, Artificial Sequence; identical to SEQ ID NO: 2190
  Description of Artificial Sequence: Synthetic Peanut control sequences; inner sequence and 3' sequence

SEQ ID NO: 38669 - DNA, 53 bp, Artificial Sequence; identical to SEQ ID NO: 10928
  Description of Artificial Sequence: Synthetic Peanut control sequences; inner sequence and 3' sequence

SEQ ID NO: 38670 - DNA, 53 bp, Artificial Sequence; identical to SEQ ID NO: 2471
  Description of Artificial Sequence: Synthetic Peanut control sequences; inner sequence and 3' sequence

SEQ ID NO: 38671 - DNA, 53 bp, Artificial Sequence; identical to SEQ ID NO: 2172
  Description of Artificial Sequence: Synthetic Peanut control sequences; inner sequence and 3' sequence

SEQ ID NO: 38672 - DNA, 53 bp, Artificial Sequence; identical to SEQ ID NO: 2988
  Description of Artificial Sequence: Synthetic Peanut control sequences; inner sequence and 3' sequence

SEQ ID NO: 38673 - DNA, 53 bp, Artificial Sequence; identical to SEQ ID NO: 6988
  Description of Artificial Sequence: Synthetic Peanut control sequences; inner sequence and 3' sequence

SEQ ID NO: 38674 - DNA, 53 bp, Artificial Sequence; identical to SEQ ID NO: 2424
  Description of Artificial Sequence: Synthetic Peanut control sequences; inner sequence and 3' sequence

SEQ ID NO: 38675 - DNA, 53 bp, Artificial Sequence; identical to SEQ ID NO: 22286
  Description of Artificial Sequence: Synthetic Peanut control sequences; inner sequence and 3' sequence

SEQ ID NO: 38676 - DNA, 53 bp, Artificial Sequence; identical to SEQ ID NO: 6905
  Description of Artificial Sequence: Synthetic Peanut control sequences; inner sequence and 3' sequence

SEQ ID NO: 38677 - DNA, 53 bp, Artificial Sequence
  Description of Artificial Sequence: Synthetic Peanut control sequences; inner sequence and 3' sequence
gtccgagcggacctagcaagtgaggctggattgactagtacatgaccacttga

SEQ ID NO: 38678 - DNA, 53 bp, Artificial Sequence; identical to SEQ ID NO: 6700
  Description of Artificial Sequence: Synthetic Peanut control sequences; inner sequence and 3' sequence

SEQ ID NO: 38679 - DNA, 53 bp, Artificial Sequence; identical to SEQ ID NO: 2724
  Description of Artificial Sequence: Synthetic Peanut control sequences; inner sequence and 3' sequence

SEQ ID NO: 38680 - DNA, 53 bp, Artificial Sequence
  Description of Artificial Sequence: Synthetic Peanut control sequences; inner sequence and 3' sequence
gacgttgctgaccgaaagtgcatgtgcgtgttgactagtacatgaccacttga

SEQ ID NO: 38681 - DNA, 53 bp, Artificial Sequence; identical to SEQ ID NO: 14933
  Description of Artificial Sequence: Synthetic Peanut control sequences; inner sequence and 3' sequence

SEQ ID NO: 38682 - DNA, 53 bp, Artificial Sequence; identical to SEQ ID NO: 22343
  Description of Artificial Sequence: Synthetic Peanut control sequences; inner sequence and 3' sequence

SEQ ID NO: 38683 - DNA, 53 bp, Artificial Sequence; identical to SEQ ID NO: 6575
  Description of Artificial Sequence: Synthetic Peanut control sequences; inner sequence and 3' sequence

SEQ ID NO: 38684 - DNA, 53 bp, Artificial Sequence; identical to SEQ ID NO: 6611
  Description of Artificial Sequence: Synthetic Peanut control sequences; inner sequence and 3' sequence

SEQ ID NO: 38685 - DNA, 53 bp, Artificial Sequence; identical to SEQ ID NO: 10633
  Description of Artificial Sequence: Synthetic Peanut control sequences; inner sequence and 3' sequence

SEQ ID NO: 38686 - DNA, 54 bp, Artificial Sequence
  Description of Artificial Sequence: Synthetic Peanut control sequences; inner sequence and 3' sequence
ggcctgcgatggcttagcaaagtgcgacatgttgactagtacatgaccacttga

SEQ ID NO: 38687 - DNA, 53 bp, Artificial Sequence
  Description of Artificial Sequence: Synthetic Peanut control sequences; inner sequence and 3' sequence
tggccgatctaccctatcaagtgcagcatgttgactagtacatgaccacttga

SEQ ID NO: 38688 - DNA, 53 bp, Artificial Sequence
  Description of Artificial Sequence: Synthetic Peanut control sequences; inner sequence and 3' sequence
cgtgtggccgtcgacatccctcgagtgtcattgactagtacatgaccacttga

SEQ ID NO: 38689 - DNA, 53 bp, Artificial Sequence; identical to SEQ ID NO: 6406
  Description of Artificial Sequence: Synthetic Peanut control sequences; inner sequence and 3' sequence

SEQ ID NO: 38690 - DNA, 53 bp, Artificial Sequence; identical to SEQ ID NO: 30295
  Description of Artificial Sequence: Synthetic Peanut control sequences; inner sequence and 3' sequence

SEQ ID NO: 38691 - DNA, 53 bp, Artificial Sequence; identical to SEQ ID NO: 2214
  Description of Artificial Sequence: Synthetic Peanut control sequences; inner sequence and 3' sequence

SEQ ID NO: 38692 - DNA, 53 bp, Artificial Sequence; identical to SEQ ID NO: 10792
  Description of Artificial Sequence: Synthetic Peanut control sequences; inner sequence and 3' sequence

SEQ ID NO: 38693 - DNA, 53 bp, Artificial Sequence; identical to SEQ ID NO: 6799
  Description of Artificial Sequence: Synthetic Peanut control sequences; inner sequence and 3' sequence

SEQ ID NO: 38694 - DNA, 53 bp, Artificial Sequence; identical to SEQ ID NO: 2761
  Description of Artificial Sequence: Synthetic Peanut control sequences; inner sequence and 3' sequence

SEQ ID NO: 38695 - DNA, 53 bp, Artificial Sequence; identical to SEQ ID NO: 6890
  Description of Artificial Sequence: Synthetic Peanut control sequences; inner sequence and 3' sequence

SEQ ID NO: 38696 - DNA, 53 bp, Artificial Sequence; identical to SEQ ID NO: 22295
  Description of Artificial Sequence: Synthetic Peanut control sequences; inner sequence and 3' sequence

SEQ ID NO: 38697 - DNA, 53 bp, Artificial Sequence; identical to SEQ ID NO: 6691
  Description of Artificial Sequence: Synthetic Peanut control sequences; inner sequence and 3' sequence

SEQ ID NO: 38698 - DNA, 52 bp, Artificial Sequence; identical to SEQ ID NO: 14918
  Description of Artificial Sequence: Synthetic Peanut control sequences; inner sequence and 3' sequence

SEQ ID NO: 38699 - DNA, 55 bp, Artificial Sequence
  Description of Artificial Sequence: Synthetic Peanut control sequences; inner sequence and 3' sequence
ggacgcacgcagaccttcaagtgtgccgtggattgactagtacatgaccacttga

SEQ ID NO: 38700 - DNA, 53 bp, Artificial Sequence; identical to SEQ ID NO: 2361
  Description of Artificial Sequence: Synthetic Peanut control sequences; inner sequence and 3' sequence

SEQ ID NO: 38701 - DNA, 53 bp, Artificial Sequence; identical to SEQ ID NO: 6706
  Description of Artificial Sequence: Synthetic Peanut control sequences; inner sequence and 3' sequence

SEQ ID NO: 38702 - DNA, 53 bp, Artificial Sequence
  Description of Artificial Sequence: Synthetic Peanut control sequences; inner sequence and 3' sequence
ccgcgtcaacctatcaagcgcatggacgtattgactagtacatgaccacttga

SEQ ID NO: 38703 - DNA, 53 bp, Artificial Sequence; identical to SEQ ID NO: 2167
  Description of Artificial Sequence: Synthetic Peanut control sequences; inner sequence and 3' sequence

SEQ ID NO: 38704 - DNA, 53 bp, Artificial Sequence; identical to SEQ ID NO: 22789
  Description of Artificial Sequence: Synthetic Peanut control sequences; inner sequence and 3' sequence

SEQ ID NO: 38705 - DNA, 53 bp, Artificial Sequence; identical to SEQ ID NO: 34166
  Description of Artificial Sequence: Synthetic Peanut control sequences; inner sequence and 3' sequence

SEQ ID NO: 38706 - DNA, 53 bp, Artificial Sequence; identical to SEQ ID NO: 2498
  Description of Artificial Sequence: Synthetic Peanut control sequences; inner sequence and 3' sequence

SEQ ID NO: 38707 - DNA, 53 bp, Artificial Sequence; identical to SEQ ID NO: 2919
  Description of Artificial Sequence: Synthetic Peanut control sequences; inner sequence and 3' sequence

SEQ ID NO: 38708 - DNA, 49 bp, Artificial Sequence; identical to SEQ ID NO: 2893
  Description of Artificial Sequence: Synthetic Peanut control sequences; inner sequence and 3' sequence

SEQ ID NO: 38709 - DNA, 53 bp, Artificial Sequence
  Description of Artificial Sequence: Synthetic Peanut control sequences; inner sequence and 3' sequence
gtcatggctcgtccctgatcacgtggctcattgactagtacatgaccacttga

SEQ ID NO: 38710 - DNA, 53 bp, Artificial Sequence; identical to SEQ ID NO: 2946
  Description of Artificial Sequence: Synthetic Peanut control sequences; inner sequence and 3' sequence

SEQ ID NO: 38711 - DNA, 53 bp, Artificial Sequence; identical to SEQ ID NO: 10659
  Description of Artificial Sequence: Synthetic Peanut control sequences; inner sequence and 3' sequence

SEQ ID NO: 38712 - DNA, 53 bp, Artificial Sequence; identical to SEQ ID NO: 2380
  Description of Artificial Sequence: Synthetic Peanut control sequences; inner sequence and 3' sequence

SEQ ID NO: 38713 - DNA, 53 bp, Artificial Sequence; identical to SEQ ID NO: 22617
  Description of Artificial Sequence: Synthetic Peanut control sequences; inner sequence and 3' sequence

SEQ ID NO: 38714 - DNA, 53 bp, Artificial Sequence; identical to SEQ ID NO: 6451
  Description of Artificial Sequence: Synthetic Peanut control sequences; inner sequence and 3' sequence

SEQ ID NO: 38715 - DNA, 53 bp, Artificial Sequence; identical to SEQ ID NO: 6816
  Description of Artificial Sequence: Synthetic Peanut control sequences; inner sequence and 3' sequence

SEQ ID NO: 38716 - DNA, 53 bp, Artificial Sequence; identical to SEQ ID NO: 2955
  Description of Artificial Sequence: Synthetic Peanut control sequences; inner sequence and 3' sequence

SEQ ID NO: 38717 - DNA, 53 bp, Artificial Sequence; identical to SEQ ID NO: 2178
  Description of Artificial Sequence: Synthetic Peanut control sequences; inner sequence and 3' sequence

SEQ ID NO: 38718 - DNA, 53 bp, Artificial Sequence
  Description of Artificial Sequence: Synthetic Peanut control sequences; inner sequence and 3' sequence
ggccgaacacgaccgcaagtgcgttatggattgactagtacatgaccacttga

SEQ ID NO: 38719 - DNA, 53 bp, Artificial Sequence; identical to SEQ ID NO: 6260
  Description of Artificial Sequence: Synthetic Peanut control sequences; inner sequence and 3' sequence

SEQ ID NO: 38720 - DNA, 53 bp, Artificial Sequence; identical to SEQ ID NO: 22468
  Description of Artificial Sequence: Synthetic Peanut control sequences; inner sequence and 3' sequence

SEQ ID NO: 38721 - DNA, 53 bp, Artificial Sequence
  Description of Artificial Sequence: Synthetic Peanut control sequences; inner sequence and 3' sequence
gacgccactcatgccctatcgatgtggccattgactagtacatgaccacttga

SEQ ID NO: 38722 - DNA, 53 bp, Artificial Sequence
  Description of Artificial Sequence: Synthetic Peanut control sequences; inner sequence and 3' sequence
ggccaatcgagccgatcaagtgtcgatggattgactagtacatgaccacttga

SEQ ID NO: 38723 - DNA, 53 bp, Artificial Sequence; identical to SEQ ID NO: 2755
  Description of Artificial Sequence: Synthetic Peanut control sequences; inner sequence and 3' sequence

SEQ ID NO: 38724 - DNA, 53 bp, Artificial Sequence
  Description of Artificial Sequence: Synthetic Peanut control sequences; inner sequence and 3' sequence
tggccgatcgaccctatcaagtgcatcatgttgactagtacatgaccacttga

SEQ ID NO: 38725 - DNA, 53 bp, Artificial Sequence; identical to SEQ ID NO: 10618
  Description of Artificial Sequence: Synthetic Peanut control sequences; inner sequence and 3' sequence

SEQ ID NO: 38726 - DNA, 53 bp, Artificial Sequence; identical to SEQ ID NO: 6610
  Description of Artificial Sequence: Synthetic Peanut control sequences; inner sequence and 3' sequence

SEQ ID NO: 38727 - DNA, 53 bp, Artificial Sequence; identical to SEQ ID NO: 6735
  Description of Artificial Sequence: Synthetic Peanut control sequences; inner sequence and 3' sequence

SEQ ID NO: 38728 - DNA, 53 bp, Artificial Sequence; identical to SEQ ID NO: 6898
  Description of Artificial Sequence: Synthetic Peanut control sequences; inner sequence and 3' sequence

SEQ ID NO: 38729 - DNA, 53 bp, Artificial Sequence; identical to SEQ ID NO: 6907
  Description of Artificial Sequence: Synthetic Peanut control sequences; inner sequence and 3' sequence

SEQ ID NO: 38730 - DNA, 53 bp, Artificial Sequence; identical to SEQ ID NO: 6638
  Description of Artificial Sequence: Synthetic Peanut control sequences; inner sequence and 3' sequence

SEQ ID NO: 38731 - DNA, 53 bp, Artificial Sequence; identical to SEQ ID NO: 2371
  Description of Artificial Sequence: Synthetic Peanut control sequences; inner sequence and 3' sequence

SEQ ID NO: 38732 - DNA, 53 bp, Artificial Sequence; identical to SEQ ID NO: 2945
  Description of Artificial Sequence: Synthetic Peanut control sequences; inner sequence and 3' sequence

SEQ ID NO: 38733 - DNA, 50 bp, Artificial Sequence; identical to SEQ ID NO: 26993
  Description of Artificial Sequence: Synthetic Peanut control sequences; inner sequence and 3' sequence

SEQ ID NO: 38734 - DNA, 53 bp, Artificial Sequence; identical to SEQ ID NO: 6597
  Description of Artificial Sequence: Synthetic Peanut control sequences; inner sequence and 3' sequence

SEQ ID NO: 38735 - DNA, 53 bp, Artificial Sequence; identical to SEQ ID NO: 14744
  Description of Artificial Sequence: Synthetic Peanut control sequences; inner sequence and 3' sequence

SEQ ID NO: 38736 - DNA, 53 bp, Artificial Sequence
  Description of Artificial Sequence: Synthetic Peanut control sequences; inner sequence and 3' sequence
ggcctgatcgaacctatcaagtgcagcatgttgactagtacatgaccacttga

SEQ ID NO: 38737 - DNA, 53 bp, Artificial Sequence; identical to SEQ ID NO: 6499
  Description of Artificial Sequence: Synthetic Peanut control sequences; inner sequence and 3' sequence

SEQ ID NO: 38738 - DNA, 53 bp, Artificial Sequence; identical to SEQ ID NO: 10877
  Description of Artificial Sequence: Synthetic Peanut control sequences; inner sequence and 3' sequence

SEQ ID NO: 38739 - DNA, 53 bp, Artificial Sequence; identical to SEQ ID NO: 2666
  Description of Artificial Sequence: Synthetic Peanut control sequences; inner sequence and 3' sequence

SEQ ID NO: 38740 - DNA, 53 bp, Artificial Sequence; identical to SEQ ID NO: 14618
  Description of Artificial Sequence: Synthetic Peanut control sequences; inner sequence and 3' sequence

SEQ ID NO: 38741 - DNA, 53 bp, Artificial Sequence; identical to SEQ ID NO: 2911
  Description of Artificial Sequence: Synthetic Peanut control sequences; inner sequence and 3' sequence

SEQ ID NO: 38742 - DNA, 50 bp, Artificial Sequence; identical to SEQ ID NO: 26902
  Description of Artificial Sequence: Synthetic Peanut control sequences; inner sequence and 3' sequence

SEQ ID NO: 38743 - DNA, 52 bp, Artificial Sequence
  Description of Artificial Sequence: Synthetic Peanut control sequences; inner sequence and 3' sequence
gtgccgcagctgacctagcatgtgtgtcattgactagtacatgaccacttga

SEQ ID NO: 38744 - DNA, 53 bp, Artificial Sequence; identical to SEQ ID NO: 2231
  Description of Artificial Sequence: Synthetic Peanut control sequences; inner sequence and 3' sequence

SEQ ID NO: 38745 - DNA, 53 bp, Artificial Sequence
  Description of Artificial Sequence: Synthetic Peanut control sequences; inner sequence and 3' sequence
gtgcgcgctgttccctctacgtgcggcatgttgactagtacatgaccacttga

SEQ ID NO: 38746 - DNA, 53 bp, Artificial Sequence; identical to SEQ ID NO: 26801
  Description of Artificial Sequence: Synthetic Peanut control sequences; inner sequence and 3' sequence

SEQ ID NO: 38747 - DNA, 53 bp, Artificial Sequence; identical to SEQ ID NO: 2324
  Description of Artificial Sequence: Synthetic Peanut control sequences; inner sequence and 3' sequence

SEQ ID NO: 38748 - DNA, 53 bp, Artificial Sequence; identical to SEQ ID NO: 6653
  Description of Artificial Sequence: Synthetic Peanut control sequences; inner sequence and 3' sequence

SEQ ID NO: 38749 - DNA, 53 bp, Artificial Sequence; identical to SEQ ID NO: 2763
  Description of Artificial Sequence: Synthetic Peanut control sequences; inner sequence and 3' sequence

SEQ ID NO: 38750 - DNA, 53 bp, Artificial Sequence; identical to SEQ ID NO: 2720
  Description of Artificial Sequence: Synthetic Peanut control sequences; inner sequence and 3' sequence

SEQ ID NO: 38751 - DNA, 53 bp, Artificial Sequence; identical to SEQ ID NO: 2869
  Description of Artificial Sequence: Synthetic Peanut control sequences; inner sequence and 3' sequence

SEQ ID NO: 38752 - DNA, 58 bp, Artificial Sequence
  Description of Artificial Sequence: Synthetic Peanut control sequences; inner sequence and 3' sequence
gcattggacgatcgtgccctacacgtgggtatggattgactagtacatgaccacttga

SEQ ID NO: 38753 - DNA, 53 bp, Artificial Sequence; identical to SEQ ID NO: 2056
  Description of Artificial Sequence: Synthetic Peanut control sequences; inner sequence and 3' sequence

SEQ ID NO: 38754 - DNA, 53 bp, Artificial Sequence; identical to SEQ ID NO: 6504
  Description of Artificial Sequence: Synthetic Peanut control sequences; inner sequence and 3' sequence

SEQ ID NO: 38755 - DNA, 53 bp, Artificial Sequence; identical to SEQ ID NO: 34010
  Description of Artificial Sequence: Synthetic Peanut control sequences; inner sequence and 3' sequence

SEQ ID NO: 38756 - DNA, 53 bp, Artificial Sequence; identical to SEQ ID NO: 2860
  Description of Artificial Sequence: Synthetic Peanut control sequences; inner sequence and 3' sequence

SEQ ID NO: 38757 - DNA, 53 bp, Artificial Sequence; identical to SEQ ID NO: 34783
  Description of Artificial Sequence: Synthetic Peanut control sequences; inner sequence and 3' sequence

SEQ ID NO: 38758 - DNA, 53 bp, Artificial Sequence; identical to SEQ ID NO: 30452
  Description of Artificial Sequence: Synthetic Peanut control sequences; inner sequence and 3' sequence

SEQ ID NO: 38759 - DNA, 53 bp, Artificial Sequence
  Description of Artificial Sequence: Synthetic Peanut control sequences; inner sequence and 3' sequence
tggcatgtgtgcggattcgtcccttggtcattgactagtacatgaccacttga

SEQ ID NO: 38760 - DNA, 53 bp, Artificial Sequence; identical to SEQ ID NO: 22385
  Description of Artificial Sequence: Synthetic Peanut control sequences; inner sequence and 3' sequence

SEQ ID NO: 38761 - DNA, 53 bp, Artificial Sequence; identical to SEQ ID NO: 2940
  Description of Artificial Sequence: Synthetic Peanut control sequences; inner sequence and 3' sequence

SEQ ID NO: 38762 - DNA, 53 bp, Artificial Sequence
  Description of Artificial Sequence: Synthetic Peanut control sequences; inner sequence and 3' sequence
ccgatcgacctcggtgcgtcagggcttgacttgactagtacatgaccacttga

SEQ ID NO: 38763 - DNA, 53 bp, Artificial Sequence
  Description of Artificial Sequence: Synthetic Peanut control sequences; inner sequence and 3' sequence
tggccgatcgaccctatcaattgcagcatgttgactagtacatgaccacttga

SEQ ID NO: 38764 - DNA, 53 bp, Artificial Sequence; identical to SEQ ID NO: 2635
  Description of Artificial Sequence: Synthetic Peanut control sequences; inner sequence and 3' sequence

SEQ ID NO: 38765 - DNA, 53 bp, Artificial Sequence; identical to SEQ ID NO: 10458
  Description of Artificial Sequence: Synthetic Peanut control sequences; inner sequence and 3' sequence

SEQ ID NO: 38766 - DNA, 53 bp, Artificial Sequence; identical to SEQ ID NO: 6420
  Description of Artificial Sequence: Synthetic Peanut control sequences; inner sequence and 3' sequence

SEQ ID NO: 38767 - DNA, 50 bp, Artificial Sequence
  Description of Artificial Sequence: Synthetic Peanut control sequences; inner sequence and 3' sequence
gtgcgacctgacctagcatgtgtgtcattgactagtacatgaccacttga

SEQ ID NO: 38768 - DNA, 53 bp, Artificial Sequence
  Description of Artificial Sequence: Synthetic Peanut control sequences; inner sequence and 3' sequence
gtcatgccatcccttcgagtgtgtcacgtattgactagtacatgaccacttga

SEQ ID NO: 38769 - DNA, 53 bp, Artificial Sequence
  Description of Artificial Sequence: Synthetic Peanut control sequences; inner sequence and 3' sequence
gtctcgcgtgccctatcatgtgtgcgtggattgactagtacatgaccacttga

SEQ ID NO: 38770 - DNA, 53 bp, Artificial Sequence; identical to SEQ ID NO: 2114
  Description of Artificial Sequence: Synthetic Peanut control sequences; inner sequence and 3' sequence

SEQ ID NO: 38771 - DNA, 53 bp, Artificial Sequence; identical to SEQ ID NO: 14612
  Description of Artificial Sequence: Synthetic Peanut control sequences; inner sequence and 3' sequence

SEQ ID NO: 38772 - DNA, 53 bp, Artificial Sequence; identical to SEQ ID NO: 6613
  Description of Artificial Sequence: Synthetic Peanut control sequences; inner sequence and 3' sequence

SEQ ID NO: 38773 - DNA, 53 bp, Artificial Sequence; identical to SEQ ID NO: 6785
  Description of Artificial Sequence: Synthetic Peanut control sequences; inner sequence and 3' sequence

SEQ ID NO: 38774 - DNA, 53 bp, Artificial Sequence; identical to SEQ ID NO: 22506
  Description of Artificial Sequence: Synthetic Peanut control sequences; inner sequence and 3' sequence

SEQ ID NO: 38775 - DNA, 53 bp, Artificial Sequence; identical to SEQ ID NO: 30989
  Description of Artificial Sequence: Synthetic Peanut control sequences; inner sequence and 3' sequence

SEQ ID NO: 38776 - DNA, 52 bp, Artificial Sequence; identical to SEQ ID NO: 2975
  Description of Artificial Sequence: Synthetic Peanut control sequences; inner sequence and 3' sequence

SEQ ID NO: 38777 - DNA, 53 bp, Artificial Sequence
  Description of Artificial Sequence: Synthetic Peanut control sequences; inner sequence and 3' sequence
gcgtcatgtgtccagtccctcaagttgtcattgactagtacatgaccacttga

SEQ ID NO: 38778 - DNA, 53 bp, Artificial Sequence
  Description of Artificial Sequence: Synthetic Peanut control sequences; inner sequence and 3' sequence
ccgtctcaaccgtcgtggtctggatgcgtcttgactagtacatgaccacttga

SEQ ID NO: 38779 - DNA, 53 bp, Artificial Sequence; identical to SEQ ID NO: 30441
  Description of Artificial Sequence: Synthetic Peanut control sequences; inner sequence and 3' sequence

SEQ ID NO: 38780 - DNA, 53 bp, Artificial Sequence; identical to SEQ ID NO: 2291
  Description of Artificial Sequence: Synthetic Peanut control sequences; inner sequence and 3' sequence

SEQ ID NO: 38781 - DNA, 53 bp, Artificial Sequence; identical to SEQ ID NO: 26810
  Description of Artificial Sequence: Synthetic Peanut control sequences; inner sequence and 3' sequence

SEQ ID NO: 38782 - DNA, 53 bp, Artificial Sequence; identical to SEQ ID NO: 2086
  Description of Artificial Sequence: Synthetic Peanut control sequences; inner sequence and 3' sequence

SEQ ID NO: 38783 - DNA, 53 bp, Artificial Sequence; identical to SEQ ID NO: 30947
  Description of Artificial Sequence: Synthetic Peanut control sequences; inner sequence and 3' sequence

SEQ ID NO: 38784 - DNA, 53 bp, Artificial Sequence
  Description of Artificial Sequence: Synthetic Peanut control sequences; inner sequence and 3' sequence
tggccgatcgaccatatcaagtgcagcatgttgactagtacatgaccacttga

SEQ ID NO: 38785 - DNA, 53 bp, Artificial Sequence; identical to SEQ ID NO: 10769
  Description of Artificial Sequence: Synthetic Peanut control sequences; inner sequence and 3' sequence

SEQ ID NO: 38786 - DNA, 52 bp, Artificial Sequence
  Description of Artificial Sequence: Synthetic Peanut control sequences; inner sequence and 3' sequence
ggccgaacgaccctatcaagtgcagcatgttgactagtacatgaccacttga

SEQ ID NO: 38787 - DNA, 53 bp, Artificial Sequence; identical to SEQ ID NO: 2678
  Description of Artificial Sequence: Synthetic Peanut control sequences; inner sequence and 3' sequence

SEQ ID NO: 38788 - DNA, 53 bp, Artificial Sequence; identical to SEQ ID NO: 22496
  Description of Artificial Sequence: Synthetic Peanut control sequences; inner sequence and 3' sequence

SEQ ID NO: 38789 - DNA, 52 bp, Artificial Sequence
  Description of Artificial Sequence: Synthetic Peanut control sequences; inner sequence and 3' sequence
ggcacaaacggaccgacaagtgcagcatgttgactagtacatgaccacttga

SEQ ID NO: 38790 - DNA, 53 bp, Artificial Sequence
  Description of Artificial Sequence: Synthetic Peanut control sequences; inner sequence and 3' sequence
gtgcgtatcggcccggtcaagttcggcatgttgactagtacatgaccacttga

SEQ ID NO: 38791 - DNA, 51 bp, Artificial Sequence
  Description of Artificial Sequence: Synthetic Peanut control sequences; inner sequence and 3' sequence
ccgtaccgaccctatcaagtgcagcatgttgactagtacatgaccacttga

SEQ ID NO: 38792 - DNA, 51 bp, Artificial Sequence
  Description of Artificial Sequence: Synthetic Peanut control sequences; inner sequence and 3' sequence
ggccgcagctgacctagcatgtgtgtcattgactagtacatgaccacttga

SEQ ID NO: 38793 - DNA, 53 bp, Artificial Sequence; identical to SEQ ID NO: 34023
  Description of Artificial Sequence: Synthetic Peanut control sequences; inner sequence and 3' sequence

SEQ ID NO: 38794 - DNA, 53 bp, Artificial Sequence
  Description of Artificial Sequence: Synthetic Peanut control sequences; inner sequence and 3' sequence
gtcgcgatactgaccttcgagtgcgtgatgttgactagtacatgaccacttga

SEQ ID NO: 38795 - DNA, 53 bp, Artificial Sequence; identical to SEQ ID NO: 10579
  Description of Artificial Sequence: Synthetic Peanut control sequences; inner sequence and 3' sequence

SEQ ID NO: 38796 - DNA, 53 bp, Artificial Sequence; identical to SEQ ID NO: 10949
  Description of Artificial Sequence: Synthetic Peanut control sequences; inner sequence and 3' sequence

SEQ ID NO: 38797 - DNA, 53 bp, Artificial Sequence
  Description of Artificial Sequence: Synthetic Peanut control sequences; inner sequence and 3' sequence
gcacgactcgcaccctatcatggggccatgttgactagtacatgaccacttga

SEQ ID NO: 38798 - DNA, 53 bp, Artificial Sequence
  Description of Artificial Sequence: Synthetic Peanut control sequences; inner sequence and 3' sequence
ggaccgagcttacgtacgagtgggtgtggattgactagtacatgaccacttga

SEQ ID NO: 38799 - DNA, 53 bp, Artificial Sequence
  Description of Artificial Sequence: Synthetic Peanut control sequences; inner sequence and 3' sequence
ccgactcgccctacatgtgggtacgtcgtgttgactagtacatgaccacttga

SEQ ID NO: 38800 - DNA, 53 bp, Artificial Sequence
  Description of Artificial Sequence: Synthetic Peanut control sequences; inner sequence and 3' sequence
gtcacgagcgtaccgtcatggggtgatggattgactagtacatgaccacttga

SEQ ID NO: 38801 - DNA, 53 bp, Artificial Sequence; identical to SEQ ID NO: 2863
  Description of Artificial Sequence: Synthetic Peanut control sequences; inner sequence and 3' sequence

SEQ ID NO: 38802 - DNA, 53 bp, Artificial Sequence; identical to SEQ ID NO: 2256
  Description of Artificial Sequence: Synthetic Peanut control sequences; inner sequence and 3' sequence

SEQ ID NO: 38803 - DNA, 53 bp, Artificial Sequence; identical to SEQ ID NO: 2601
  Description of Artificial Sequence: Synthetic Peanut control sequences; inner sequence and 3' sequence

SEQ ID NO: 38804 - DNA, 53 bp, Artificial Sequence
  Description of Artificial Sequence: Synthetic Peanut control sequences; inner sequence and 3' sequence
catgtggccactatgccctatcatgcggtcttgactagtacatgaccacttga

SEQ ID NO: 38805 - DNA, 53 bp, Artificial Sequence
  Description of Artificial Sequence: Synthetic Peanut control sequences; inner sequence and 3' sequence
gtgctgcactgccctacacgtgggtatggattgactagtacatgaccacttga

SEQ ID NO: 38806 - DNA, 53 bp, Artificial Sequence
  Description of Artificial Sequence: Synthetic Peanut control sequences; inner sequence and 3' sequence
ttgccgatcgaccctatcaagtgcagcatgttgactagtacatgaccacttga

SEQ ID NO: 38807 - DNA, 53 bp, Artificial Sequence; identical to SEQ ID NO: 14821
  Description of Artificial Sequence: Synthetic Peanut control sequences; inner sequence and 3' sequence

SEQ ID NO: 38808 - DNA, 53 bp, Artificial Sequence; identical to SEQ ID NO: 22478
  Description of Artificial Sequence: Synthetic Peanut control sequences; inner sequence and 3' sequence

SEQ ID NO: 38809 - DNA, 53 bp, Artificial Sequence; identical to SEQ ID NO: 2953
  Description of Artificial Sequence: Synthetic Peanut control sequences; inner sequence and 3' sequence

SEQ ID NO: 38810 - DNA, 53 bp, Artificial Sequence; identical to SEQ ID NO: 10964
  Description of Artificial Sequence: Synthetic Peanut control sequences; inner sequence and 3' sequence

SEQ ID NO: 38811 - DNA, 53 bp, Artificial Sequence; identical to SEQ ID NO: 2937
  Description of Artificial Sequence: Synthetic Peanut control sequences; inner sequence and 3' sequence

SEQ ID NO: 38812 - DNA, 53 bp, Artificial Sequence; identical to SEQ ID NO: 6979
  Description of Artificial Sequence: Synthetic Peanut control sequences; inner sequence and 3' sequence

SEQ ID NO: 38813 - DNA, 53 bp, Artificial Sequence; identical to SEQ ID NO: 2703
  Description of Artificial Sequence: Synthetic Peanut control sequences; inner sequence and 3' sequence

SEQ ID NO: 38814 - DNA, 53 bp, Artificial Sequence
  Description of Artificial Sequence: Synthetic Peanut control sequences; inner sequence and 3' sequence
tggccgcactgaccgttcaagtgtcgtggattgactagtacatgaccacttga

SEQ ID NO: 38815 - DNA, 53 bp, Artificial Sequence; identical to SEQ ID NO: 22312
  Description of Artificial Sequence: Synthetic Peanut control sequences; inner sequence and 3' sequence

SEQ ID NO: 38816 - DNA, 53 bp, Artificial Sequence; identical to SEQ ID NO: 6823
  Description of Artificial Sequence: Synthetic Peanut control sequences; inner sequence and 3' sequence

SEQ ID NO: 38817 - DNA, 53 bp, Artificial Sequence; identical to SEQ ID NO: 2137
  Description of Artificial Sequence: Synthetic Peanut control sequences; inner sequence and 3' sequence

SEQ ID NO: 38818 - DNA, 53 bp, Artificial Sequence; identical to SEQ ID NO: 2644
  Description of Artificial Sequence: Synthetic Peanut control sequences; inner sequence and 3' sequence

SEQ ID NO: 38819 - DNA, 53 bp, Artificial Sequence
  Description of Artificial Sequence: Synthetic Peanut control sequences; inner sequence and 3' sequence
tggacgatcgaccctatcaagtgcagcatgttgactagtacatgaccacttga

SEQ ID NO: 38820 - DNA, 53 bp, Artificial Sequence
  Description of Artificial Sequence: Synthetic Peanut control sequences; inner sequence and 3' sequence
tggccgatcgatcctatcaagtgcagcatgttgactagtacatgaccacttga

SEQ ID NO: 38821 - DNA, 53 bp, Artificial Sequence
  Description of Artificial Sequence: Synthetic Peanut control sequences; inner sequence and 3' sequence
ggacgcgatctggcagtgagcatgcactcgttgactagtacatgaccacttga

SEQ ID NO: 38822 - DNA, 53 bp, Artificial Sequence; identical to SEQ ID NO: 14936
  Description of Artificial Sequence: Synthetic Peanut control sequences; inner sequence and 3' sequence

SEQ ID NO: 38823 - DNA, 53 bp, Artificial Sequence; identical to SEQ ID NO: 2195
  Description of Artificial Sequence: Synthetic Peanut control sequences; inner sequence and 3' sequence

SEQ ID NO: 38824 - DNA, 53 bp, Artificial Sequence; identical to SEQ ID NO: 6364
  Description of Artificial Sequence: Synthetic Peanut control sequences; inner sequence and 3' sequence

SEQ ID NO: 38825 - DNA, 53 bp, Artificial Sequence; identical to SEQ ID NO: 2177
  Description of Artificial Sequence: Synthetic Peanut control sequences; inner sequence and 3' sequence

SEQ ID NO: 38826 - DNA, 53 bp, Artificial Sequence; identical to SEQ ID NO: 2662
  Description of Artificial Sequence: Synthetic Peanut control sequences; inner sequence and 3' sequence

SEQ ID NO: 38827 - DNA, 53 bp, Artificial Sequence
  Description of Artificial Sequence: Synthetic Peanut control sequences; inner sequence and 3' sequence
gtcattccgcatcctacacgtgggaacgtattgactagtacatgaccacttga

SEQ ID NO: 38828 - DNA, 53 bp, Artificial Sequence; identical to SEQ ID NO: 2326
  Description of Artificial Sequence: Synthetic Peanut control sequences; inner sequence and 3' sequence

SEQ ID NO: 38829 - DNA, 53 bp, Artificial Sequence; identical to SEQ ID NO: 2236
  Description of Artificial Sequence: Synthetic Peanut control sequences; inner sequence and 3' sequence

SEQ ID NO: 38830 - DNA, 53 bp, Artificial Sequence
  Description of Artificial Sequence: Synthetic Peanut control sequences; inner sequence and 3' sequence
ggacatcgctaacctacaatgtgcgtcgtgttgactagtacatgaccacttga

SEQ ID NO: 38831 - DNA, 53 bp, Artificial Sequence; identical to SEQ ID NO: 22777
  Description of Artificial Sequence: Synthetic Peanut control sequences; inner sequence and 3' sequence

SEQ ID NO: 38832 - DNA, 53 bp, Artificial Sequence; identical to SEQ ID NO: 2072
  Description of Artificial Sequence: Synthetic Peanut control sequences; inner sequence and 3' sequence

SEQ ID NO: 38833 - DNA, 53 bp, Artificial Sequence; identical to SEQ ID NO: 2727
  Description of Artificial Sequence: Synthetic Peanut control sequences; inner sequence and 3' sequence

SEQ ID NO: 38834 - DNA, 53 bp, Artificial Sequence; identical to SEQ ID NO: 2775
  Description of Artificial Sequence: Synthetic Peanut control sequences; inner sequence and 3' sequence

SEQ ID NO: 38835 - DNA, 53 bp, Artificial Sequence; identical to SEQ ID NO: 10889
  Description of Artificial Sequence: Synthetic Peanut control sequences; inner sequence and 3' sequence

SEQ ID NO: 38836 - DNA, 54 bp, Artificial Sequence
  Description of Artificial Sequence: Synthetic Peanut control sequences; inner sequence and 3' sequence
ccgaacgaaccgcacgtggactgagcgacgtttgactagtacatgaccacttga

SEQ ID NO: 38837 - DNA, 53 bp, Artificial Sequence; identical to SEQ ID NO: 6935
  Description of Artificial Sequence: Synthetic Peanut control sequences; inner sequence and 3' sequence

SEQ ID NO: 38838 - DNA, 53 bp, Artificial Sequence; identical to SEQ ID NO: 10869
  Description of Artificial Sequence: Synthetic Peanut control sequences; inner sequence and 3' sequence

SEQ ID NO: 38839 - DNA, 53 bp, Artificial Sequence
  Description of Artificial Sequence: Synthetic Peanut control sequences; inner sequence and 3' sequence
ggcctgatcgaacctagagaggggcgtggattgactagtacatgaccacttga

SEQ ID NO: 38840 - DNA, 53 bp, Artificial Sequence; identical to SEQ ID NO: 6722
  Description of Artificial Sequence: Synthetic Peanut control sequences; inner sequence and 3' sequence

SEQ ID NO: 38841 - DNA, 53 bp, Artificial Sequence; identical to SEQ ID NO: 2551
  Description of Artificial Sequence: Synthetic Peanut control sequences; inner sequence and 3' sequence

SEQ ID NO: 38842 - DNA, 53 bp, Artificial Sequence; identical to SEQ ID NO: 22327
  Description of Artificial Sequence: Synthetic Peanut control sequences; inner sequence and 3' sequence

SEQ ID NO: 38843 - DNA, 53 bp, Artificial Sequence; identical to SEQ ID NO: 22227
  Description of Artificial Sequence: Synthetic Peanut control sequences; inner sequence and 3' sequence

SEQ ID NO: 38844 - DNA, 53 bp, Artificial Sequence
  Description of Artificial Sequence: Synthetic Peanut control sequences; inner sequence and 3' sequence
ggacggatcgaacctacaagttgtcgtggtttgactagtacatgaccacttga

SEQ ID NO: 38845 - DNA, 52 bp, Artificial Sequence; identical to SEQ ID NO: 2879
  Description of Artificial Sequence: Synthetic Peanut control sequences; inner sequence and 3' sequence

SEQ ID NO: 38846 - DNA, 53 bp, Artificial Sequence; identical to SEQ ID NO: 30577
  Description of Artificial Sequence: Synthetic Peanut control sequences; inner sequence and 3' sequence

SEQ ID NO: 38847 - DNA, 53 bp, Artificial Sequence; identical to SEQ ID NO: 34009
  Description of Artificial Sequence: Synthetic Peanut control sequences; inner sequence and 3' sequence

SEQ ID NO: 38848 - DNA, 53 bp, Artificial Sequence; identical to SEQ ID NO: 10767
  Description of Artificial Sequence: Synthetic Peanut control sequences; inner sequence and 3' sequence

SEQ ID NO: 38849 - DNA, 53 bp, Artificial Sequence; identical to SEQ ID NO: 22331
  Description of Artificial Sequence: Synthetic Peanut control sequences; inner sequence and 3' sequence

SEQ ID NO: 38850 - DNA, 53 bp, Artificial Sequence; identical to SEQ ID NO: 10627
  Description of Artificial Sequence: Synthetic Peanut control sequences; inner sequence and 3' sequence

SEQ ID NO: 38851 - DNA, 53 bp, Artificial Sequence
  Description of Artificial Sequence: Synthetic Peanut control sequences; inner sequence and 3' sequence
gtcacacgctctgcccttatcacgtggacattgactagtacatgaccacttga

SEQ ID NO: 38852 - DNA, 53 bp, Artificial Sequence; identical to SEQ ID NO: 2580
  Description of Artificial Sequence: Synthetic Peanut control sequences; inner sequence and 3' sequence

SEQ ID NO: 38853 - DNA, 53 bp, Artificial Sequence; identical to SEQ ID NO: 2906
  Description of Artificial Sequence: Synthetic Peanut control sequences; inner sequence and 3' sequence

SEQ ID NO: 38854 - DNA, 53 bp, Artificial Sequence; identical to SEQ ID NO: 6740
  Description of Artificial Sequence: Synthetic Peanut control sequences; inner sequence and 3' sequence

SEQ ID NO: 38855 - DNA, 53 bp, Artificial Sequence; identical to SEQ ID NO: 6579
  Description of Artificial Sequence: Synthetic Peanut control sequences; inner sequence and 3' sequence

SEQ ID NO: 38856 - DNA, 53 bp, Artificial Sequence; identical to SEQ ID NO: 10936
  Description of Artificial Sequence: Synthetic Peanut control sequences; inner sequence and 3' sequence

SEQ ID NO: 38857 - DNA, 53 bp, Artificial Sequence; identical to SEQ ID NO: 2962
  Description of Artificial Sequence: Synthetic Peanut control sequences; inner sequence and 3' sequence

SEQ ID NO: 38858 - DNA, 53 bp, Artificial Sequence; identical to SEQ ID NO: 30652
  Description of Artificial Sequence: Synthetic Peanut control sequences; inner sequence and 3' sequence

SEQ ID NO: 38859 - DNA, 53 bp, Artificial Sequence; identical to SEQ ID NO: 6449
  Description of Artificial Sequence: Synthetic Peanut control sequences; inner sequence and 3' sequence

SEQ ID NO: 38860 - DNA, 53 bp, Artificial Sequence; identical to SEQ ID NO: 10798
  Description of Artificial Sequence: Synthetic Peanut control sequences; inner sequence and 3' sequence

SEQ ID NO: 38861 - DNA, 53 bp, Artificial Sequence
  Description of Artificial Sequence: Synthetic Peanut control sequences; inner sequence and 3' sequence
ggccgaacgaaccttggtcagctaggcagtttgactagtacatgaccacttga

SEQ ID NO: 38862 - DNA, 53 bp, Artificial Sequence; identical to SEQ ID NO: 2556
  Description of Artificial Sequence: Synthetic Peanut control sequences; inner sequence and 3' sequence

SEQ ID NO: 38863 - DNA, 53 bp, Artificial Sequence; identical to SEQ ID NO: 2991
  Description of Artificial Sequence: Synthetic Peanut control sequences; inner sequence and 3' sequence

SEQ ID NO: 38864 - DNA, 53 bp, Artificial Sequence; identical to SEQ ID NO: 2619
  Description of Artificial Sequence: Synthetic Peanut control sequences; inner sequence and 3' sequence

SEQ ID NO: 38865 - DNA, 53 bp, Artificial Sequence; identical to SEQ ID NO: 2621
  Description of Artificial Sequence: Synthetic Peanut control sequences; inner sequence and 3' sequence

SEQ ID NO: 38866 - DNA, 53 bp, Artificial Sequence; identical to SEQ ID NO: 2075
  Description of Artificial Sequence: Synthetic Peanut control sequences; inner sequence and 3' sequence

SEQ ID NO: 38867 - DNA, 50 bp, Artificial Sequence; identical to SEQ ID NO: 34422
  Description of Artificial Sequence: Synthetic Peanut control sequences; inner sequence and 3' sequence

SEQ ID NO: 38868 - DNA, 53 bp, Artificial Sequence; identical to SEQ ID NO: 6782
  Description of Artificial Sequence: Synthetic Peanut control sequences; inner sequence and 3' sequence

SEQ ID NO: 38869 - DNA, 53 bp, Artificial Sequence
  Description of Artificial Sequence: Synthetic Peanut control sequences; inner sequence and 3' sequence
gtacacagcgcaccctatcgagcttggtcattgactagtacatgaccacttga

SEQ ID NO: 38870 - DNA, 53 bp, Artificial Sequence; identical to SEQ ID NO: 2653
  Description of Artificial Sequence: Synthetic Peanut control sequences; inner sequence and 3' sequence

SEQ ID NO: 38871 - DNA, 53 bp, Artificial Sequence; identical to SEQ ID NO: 14986
  Description of Artificial Sequence: Synthetic Peanut control sequences; inner sequence and 3' sequence

SEQ ID NO: 38872 - DNA, 53 bp, Artificial Sequence; identical to SEQ ID NO: 2322
  Description of Artificial Sequence: Synthetic Peanut control sequences; inner sequence and 3' sequence

SEQ ID NO: 38873 - DNA, 53 bp, Artificial Sequence
  Description of Artificial Sequence: Synthetic Peanut control sequences; inner sequence and 3' sequence
ggcctgatcgaacctagagagtggcgtggtttgactagtacatgaccacttga

SEQ ID NO: 38874 - DNA, 53 bp, Artificial Sequence; identical to SEQ ID NO: 14866
  Description of Artificial Sequence: Synthetic Peanut control sequences; inner sequence and 3' sequence

SEQ ID NO: 38875 - DNA, 53 bp, Artificial Sequence; identical to SEQ ID NO: 2534
  Description of Artificial Sequence: Synthetic Peanut control sequences; inner sequence and 3' sequence

SEQ ID NO: 38876 - DNA, 53 bp, Artificial Sequence
  Description of Artificial Sequence: Synthetic Peanut control sequences; inner sequence and 3' sequence
ggccagatcgaccctatcaagtgcagcatgttgactagtacatgaccacttga

SEQ ID NO: 38877 - DNA, 53 bp, Artificial Sequence
  Description of Artificial Sequence: Synthetic Peanut control sequences; inner sequence and 3' sequence
ggcctgatcgaccctatcaagtgcagcatgttgactagtacatgaccacttga

SEQ ID NO: 38878 - DNA, 53 bp, Artificial Sequence
  Description of Artificial Sequence: Synthetic Peanut control sequences; inner sequence and 3' sequence
ggatgcactcaaccgatccaaggtgcgtcattgactagtacatgaccacttga

SEQ ID NO: 38879 - DNA, 53 bp, Artificial Sequence
  Description of Artificial Sequence: Synthetic Peanut control sequences; inner sequence and 3' sequence
ggacgcaacttcactcaagtgtggcgtggattgactagtacatgaccacttga

SEQ ID NO: 38880 - DNA, 53 bp, Artificial Sequence; identical to SEQ ID NO: 6642
  Description of Artificial Sequence: Synthetic Peanut control sequences; inner sequence and 3' sequence

SEQ ID NO: 38881 - DNA, 53 bp, Artificial Sequence; identical to SEQ ID NO: 10837
  Description of Artificial Sequence: Synthetic Peanut control sequences; inner sequence and 3' sequence

SEQ ID NO: 38882 - DNA, 53 bp, Artificial Sequence; identical to SEQ ID NO: 14853
  Description of Artificial Sequence: Synthetic Peanut control sequences; inner sequence and 3' sequence

SEQ ID NO: 38883 - DNA, 53 bp, Artificial Sequence; identical to SEQ ID NO: 2661
  Description of Artificial Sequence: Synthetic Peanut control sequences; inner sequence and 3' sequence

SEQ ID NO: 38884 - DNA, 52 bp, Artificial Sequence; identical to SEQ ID NO: 34937
  Description of Artificial Sequence: Synthetic Peanut control sequences; inner sequence and 3' sequence

SEQ ID NO: 38885 - DNA, 50 bp, Artificial Sequence
  Description of Artificial Sequence: Synthetic Peanut control sequences; inner sequence and 3' sequence
ccatcgcgtcactatcatgaggccatgttgactagtacatgaccacttga

SEQ ID NO: 38886 - DNA, 53 bp, Artificial Sequence; identical to SEQ ID NO: 22458
  Description of Artificial Sequence: Synthetic Peanut control sequences; inner sequence and 3' sequence

SEQ ID NO: 38887 - DNA, 53 bp, Artificial Sequence; identical to SEQ ID NO: 6938
  Description of Artificial Sequence: Synthetic Peanut control sequences; inner sequence and 3' sequence

SEQ ID NO: 38888 - DNA, 53 bp, Artificial Sequence; identical to SEQ ID NO: 6933
  Description of Artificial Sequence: Synthetic Peanut control sequences; inner sequence and 3' sequence

SEQ ID NO: 38889 - DNA, 53 bp, Artificial Sequence
  Description of Artificial Sequence: Synthetic Peanut control sequences; inner sequence and 3' sequence
ggacggatcgaccctatcaagtgcagcatgttgactagtacatgaccacttga

SEQ ID NO: 38890 - DNA, 53 bp, Artificial Sequence; identical to SEQ ID NO: 22462
  Description of Artificial Sequence: Synthetic Peanut control sequences; inner sequence and 3' sequence

SEQ ID NO: 38891 - DNA, 53 bp, Artificial Sequence; identical to SEQ ID NO: 10993
  Description of Artificial Sequence: Synthetic Peanut control sequences; inner sequence and 3' sequence

SEQ ID NO: 38892 - DNA, 53 bp, Artificial Sequence; identical to SEQ ID NO: 6998
  Description of Artificial Sequence: Synthetic Peanut control sequences; inner sequence and 3' sequence

SEQ ID NO: 38893 - DNA, 53 bp, Artificial Sequence; identical to SEQ ID NO: 10927
  Description of Artificial Sequence: Synthetic Peanut control sequences; inner sequence and 3' sequence

SEQ ID NO: 38894 - DNA, 53 bp, Artificial Sequence; identical to SEQ ID NO: 6918
  Description of Artificial Sequence: Synthetic Peanut control sequences; inner sequence and 3' sequence

SEQ ID NO: 38895 - DNA, 53 bp, Artificial Sequence; identical to SEQ ID NO: 14803
  Description of Artificial Sequence: Synthetic Peanut control sequences; inner sequence and 3' sequence

SEQ ID NO: 38896 - DNA, 49 bp, Artificial Sequence
  Description of Artificial Sequence: Synthetic Peanut control sequences; inner sequence and 3' sequence
ggacgcatcgccccttcgagtggacattgactagtacatgaccacttga

SEQ ID NO: 38897 - DNA, 53 bp, Artificial Sequence; identical to SEQ ID NO: 14795
  Description of Artificial Sequence: Synthetic Peanut control sequences; inner sequence and 3' sequence

SEQ ID NO: 38898 - DNA, 53 bp, Artificial Sequence; identical to SEQ ID NO: 6801
  Description of Artificial Sequence: Synthetic Peanut control sequences; inner sequence and 3' sequence

SEQ ID NO: 38899 - DNA, 53 bp, Artificial Sequence; identical to SEQ ID NO: 34584
  Description of Artificial Sequence: Synthetic Peanut control sequences; inner sequence and 3' sequence

SEQ ID NO: 38900 - DNA, 54 bp, Artificial Sequence; identical to SEQ ID NO: 30816
  Description of Artificial Sequence: Synthetic Peanut control sequences; inner sequence and 3' sequence

SEQ ID NO: 38901 - DNA, 53 bp, Artificial Sequence
  Description of Artificial Sequence: Synthetic Peanut control sequences; inner sequence and 3' sequence
ccgcctcgacctggctcatgtggccgtgtgttgactagtacatgaccacttga

SEQ ID NO: 38902 - DNA, 53 bp, Artificial Sequence; identical to SEQ ID NO: 2224
  Description of Artificial Sequence: Synthetic Peanut control sequences; inner sequence and 3' sequence

SEQ ID NO: 38903 - DNA, 53 bp, Artificial Sequence; identical to SEQ ID NO: 6692
  Description of Artificial Sequence: Synthetic Peanut control sequences; inner sequence and 3' sequence

SEQ ID NO: 38904 - DNA, 53 bp, Artificial Sequence
  Description of Artificial Sequence: Synthetic Peanut control sequences; inner sequence and 3' sequence
gtgcaagcgagcctaccttgacgtgcgtcattgactagtacatgaccacttga

SEQ ID NO: 38905 - DNA, 53 bp, Artificial Sequence; identical to SEQ ID NO: 22580
  Description of Artificial Sequence: Synthetic Peanut control sequences; inner sequence and 3' sequence

SEQ ID NO: 38906 - DNA, 52 bp, Artificial Sequence
  Description of Artificial Sequence: Synthetic Peanut control sequences; inner sequence and 3' sequence
gcactggctgacctacacgtgggcacgtattgactagtacatgaccacttga

SEQ ID NO: 38907 - DNA, 53 bp, Artificial Sequence
  Description of Artificial Sequence: Synthetic Peanut control sequences; inner sequence and 3' sequence
gtgtccgagctgggtgtggtcctgcttggcttgactagtacatgaccacttga

SEQ ID NO: 38908 - DNA, 53 bp, Artificial Sequence
  Description of Artificial Sequence: Synthetic Peanut control sequences; inner sequence and 3' sequence
gcacctgaacgccactcaagttgccgtggattgactagtacatgaccacttga

SEQ ID NO: 38909 - DNA, 53 bp, Artificial Sequence
  Description of Artificial Sequence: Synthetic Peanut control sequences; inner sequence and 3' sequence
tgtcctgacgtgccctgacatgctgcgtcattgactagtacatgaccacttga

SEQ ID NO: 38910 - DNA, 53 bp, Artificial Sequence; identical to SEQ ID NO: 2616
  Description of Artificial Sequence: Synthetic Peanut control sequences; inner sequence and 3' sequence

SEQ ID NO: 38911 - DNA, 53 bp, Artificial Sequence; identical to SEQ ID NO: 22817
  Description of Artificial Sequence: Synthetic Peanut control sequences; inner sequence and 3' sequence

SEQ ID NO: 38912 - DNA, 53 bp, Artificial Sequence; identical to SEQ ID NO: 10935
  Description of Artificial Sequence: Synthetic Peanut control sequences; inner sequence and 3' sequence

SEQ ID NO: 38913 - DNA, 53 bp, Artificial Sequence; identical to SEQ ID NO: 2206
  Description of Artificial Sequence: Synthetic Peanut control sequences; inner sequence and 3' sequence

SEQ ID NO: 38914 - DNA, 54 bp, Artificial Sequence
  Description of Artificial Sequence: Synthetic Peanut control sequences; inner sequence and 3' sequence
gtgcgtgcgatctgaccgtgcaagttgggcattgactagtacatgaccacttga

SEQ ID NO: 38915 - DNA, 53 bp, Artificial Sequence; identical to SEQ ID NO: 30844
  Description of Artificial Sequence: Synthetic Peanut control sequences; inner sequence and 3' sequence

SEQ ID NO: 38916 - DNA, 53 bp, Artificial Sequence; identical to SEQ ID NO: 10907
  Description of Artificial Sequence: Synthetic Peanut control sequences; inner sequence and 3' sequence

SEQ ID NO: 38917 - DNA, 53 bp, Artificial Sequence; identical to SEQ ID NO: 2152
  Description of Artificial Sequence: Synthetic Peanut control sequences; inner sequence and 3' sequence

SEQ ID NO: 38918 - DNA, 53 bp, Artificial Sequence; identical to SEQ ID NO: 6857
  Description of Artificial Sequence: Synthetic Peanut control sequences; inner sequence and 3' sequence

SEQ ID NO: 38919 - DNA, 53 bp, Artificial Sequence; identical to SEQ ID NO: 22324
  Description of Artificial Sequence: Synthetic Peanut control sequences; inner sequence and 3' sequence

SEQ ID NO: 38920 - DNA, 53 bp, Artificial Sequence
  Description of Artificial Sequence: Synthetic Peanut control sequences; inner sequence and 3' sequence
tggccgatcgaacctatcaagtgcagcatgttgactagtacatgaccacttga

SEQ ID NO: 38921 - DNA, 53 bp, Artificial Sequence; identical to SEQ ID NO: 6969
  Description of Artificial Sequence: Synthetic Peanut control sequences; inner sequence and 3' sequence

SEQ ID NO: 38922 - DNA, 53 bp, Artificial Sequence; identical to SEQ ID NO: 22427
  Description of Artificial Sequence: Synthetic Peanut control sequences; inner sequence and 3' sequence

SEQ ID NO: 38923 - DNA, 53 bp, Artificial Sequence
  Description of Artificial Sequence: Synthetic Peanut control sequences; inner sequence and 3' sequence
ggacgaacgtaacgtgagagtgtgcatggattgactagtacatgaccacttga

SEQ ID NO: 38924 - DNA, 53 bp, Artificial Sequence
  Description of Artificial Sequence: Synthetic Peanut control sequences; inner sequence and 3' sequence
gcaccgtacgcttgacctacacgtggctcattgactagtacatgaccacttga

SEQ ID NO: 38925 - DNA, 53 bp, Artificial Sequence; identical to SEQ ID NO: 6419
  Description of Artificial Sequence: Synthetic Peanut control sequences; inner sequence and 3' sequence

SEQ ID NO: 38926 - DNA, 53 bp, Artificial Sequence; identical to SEQ ID NO: 2874
  Description of Artificial Sequence: Synthetic Peanut control sequences; inner sequence and 3' sequence

SEQ ID NO: 38927 - DNA, 53 bp, Artificial Sequence
  Description of Artificial Sequence: Synthetic Peanut control sequences; inner sequence and 3' sequence
ccgctcgatgaacgtgaatgggcatgcgtcttgactagtacatgaccacttga

SEQ ID NO: 38928 - DNA, 53 bp, Artificial Sequence
  Description of Artificial Sequence: Synthetic Peanut control sequences; inner sequence and 3' sequence
gtcgtgactggctagctggacatgcactgtttgactagtacatgaccacttga

SEQ ID NO: 38929 - DNA, 53 bp, Artificial Sequence; identical to SEQ ID NO: 10991
  Description of Artificial Sequence: Synthetic Peanut control sequences; inner sequence and 3' sequence

SEQ ID NO: 38930 - DNA, 53 bp, Artificial Sequence; identical to SEQ ID NO: 22879
  Description of Artificial Sequence: Synthetic Peanut control sequences; inner sequence and 3' sequence

SEQ ID NO: 38931 - DNA, 53 bp, Artificial Sequence; identical to SEQ ID NO: 10752
  Description of Artificial Sequence: Synthetic Peanut control sequences; inner sequence and 3' sequence

SEQ ID NO: 38932 - DNA, 53 bp, Artificial Sequence
  Description of Artificial Sequence: Synthetic Peanut control sequences; inner sequence and 3' sequence
tggccgatcgaccctgtcaagtgcagcatgttgactagtacatgaccacttga

SEQ ID NO: 38933 - DNA, 50 bp, Artificial Sequence
  Description of Artificial Sequence: Synthetic Peanut control sequences; inner sequence and 3' sequence
tggccgatcgacactagcaagtgtgcattgactagtacatgaccacttga

SEQ ID NO: 38934 - DNA, 53 bp, Artificial Sequence; identical to SEQ ID NO: 6376
  Description of Artificial Sequence: Synthetic Peanut control sequences; inner sequence and 3' sequence

SEQ ID NO: 38935 - DNA, 53 bp, Artificial Sequence; identical to SEQ ID NO: 2749
  Description of Artificial Sequence: Synthetic Peanut control sequences; inner sequence and 3' sequence

SEQ ID NO: 38936 - DNA, 53 bp, Artificial Sequence
  Description of Artificial Sequence: Synthetic Peanut control sequences; inner sequence and 3' sequence
gggccgatcgaccctatcaagtgcagcatgttgactagtacatgaccacttga

SEQ ID NO: 38937 - DNA, 53 bp, Artificial Sequence; identical to SEQ ID NO: 10872
  Description of Artificial Sequence: Synthetic Peanut control sequences; inner sequence and 3' sequence

SEQ ID NO: 38938 - DNA, 53 bp, Artificial Sequence; identical to SEQ ID NO: 2827
  Description of Artificial Sequence: Synthetic Peanut control sequences; inner sequence and 3' sequence

SEQ ID NO: 38939 - DNA, 53 bp, Artificial Sequence
  Description of Artificial Sequence: Synthetic Peanut control sequences; inner sequence and 3' sequence
ccgatctggcgtagctggaacatgtgcgtgttgactagtacatgaccacttga

SEQ ID NO: 38940 - DNA, 53 bp, Artificial Sequence; identical to SEQ ID NO: 2481
  Description of Artificial Sequence: Synthetic Peanut control sequences; inner sequence and 3' sequence

SEQ ID NO: 38941 - DNA, 53 bp, Artificial Sequence
  Description of Artificial Sequence: Synthetic Peanut control sequences; inner sequence and 3' sequence
gtccgtgcttgaccgtagagtgtgcgtgtattgactagtacatgaccacttga

SEQ ID NO: 38942 - DNA, 53 bp, Artificial Sequence
  Description of Artificial Sequence: Synthetic Peanut control sequences; inner sequence and 3' sequence
ccgatgctgcccgtcatgtgtggcgatgtgttgactagtacatgaccacttga

SEQ ID NO: 38943 - DNA, 53 bp, Artificial Sequence; identical to SEQ ID NO: 30917
  Description of Artificial Sequence: Synthetic Peanut control sequences; inner sequence and 3' sequence

SEQ ID NO: 38944 - DNA, 53 bp, Artificial Sequence; identical to SEQ ID NO: 10801
  Description of Artificial Sequence: Synthetic Peanut control sequences; inner sequence and 3' sequence

SEQ ID NO: 38945 - DNA, 49 bp, Artificial Sequence; identical to SEQ ID NO: 2822
  Description of Artificial Sequence: Synthetic Peanut control sequences; inner sequence and 3' sequence

SEQ ID NO: 38946 - DNA, 53 bp, Artificial Sequence
  Description of Artificial Sequence: Synthetic Peanut control sequences; inner sequence and 3' sequence
tggctgatcgaccctatcaagtgcagcatgttgactagtacatgaccacttga

SEQ ID NO: 38947 - DNA, 53 bp, Artificial Sequence; identical to SEQ ID NO: 2396
  Description of Artificial Sequence: Synthetic Peanut control sequences; inner sequence and 3' sequence

SEQ ID NO: 38948 - DNA, 53 bp, Artificial Sequence; identical to SEQ ID NO: 30879
  Description of Artificial Sequence: Synthetic Peanut control sequences; inner sequence and 3' sequence

SEQ ID NO: 38949 - DNA, 58 bp, Artificial Sequence
  Description of Artificial Sequence: Synthetic Peanut control sequences; inner sequence and 3' sequence
gcattggacgatcgtgccctacacgtgggaatggattgactagtacatgaccacttga

SEQ ID NO: 38950 - DNA, 53 bp, Artificial Sequence; identical to SEQ ID NO: 34175
  Description of Artificial Sequence: Synthetic Peanut control sequences; inner sequence and 3' sequence

SEQ ID NO: 38951 - DNA, 53 bp, Artificial Sequence; identical to SEQ ID NO: 22424
  Description of Artificial Sequence: Synthetic Peanut control sequences; inner sequence and 3' sequence

SEQ ID NO: 38952 - DNA, 53 bp, Artificial Sequence; identical to SEQ ID NO: 6810
  Description of Artificial Sequence: Synthetic Peanut control sequences; inner sequence and 3' sequence

SEQ ID NO: 38953 - DNA, 53 bp, Artificial Sequence; identical to SEQ ID NO: 34268
  Description of Artificial Sequence: Synthetic Peanut control sequences; inner sequence and 3' sequence

SEQ ID NO: 38954 - DNA, 54 bp, Artificial Sequence
  Description of Artificial Sequence: Synthetic Peanut control sequences; inner sequence and 3' sequence
tggccgaacgaccgatcgagtggcgcatggattgactagtacatgaccacttga

SEQ ID NO: 38955 - DNA, 53 bp, Artificial Sequence; identical to SEQ ID NO: 10891
  Description of Artificial Sequence: Synthetic Peanut control sequences; inner sequence and 3' sequence

SEQ ID NO: 38956 - DNA, 53 bp, Artificial Sequence; identical to SEQ ID NO: 22623
  Description of Artificial Sequence: Synthetic Peanut control sequences; inner sequence and 3' sequence

SEQ ID NO: 38957 - DNA, 53 bp, Artificial Sequence; identical to SEQ ID NO: 18962
  Description of Artificial Sequence: Synthetic Peanut control sequences; inner sequence and 3' sequence

SEQ ID NO: 38958 - DNA, 53 bp, Artificial Sequence; identical to SEQ ID NO: 34384
  Description of Artificial Sequence: Synthetic Peanut control sequences; inner sequence and 3' sequence

SEQ ID NO: 38959 - DNA, 54 bp, Artificial Sequence; identical to SEQ ID NO: 2971
  Description of Artificial Sequence: Synthetic Peanut control sequences; inner sequence and 3' sequence

SEQ ID NO: 38960 - DNA, 53 bp, Artificial Sequence; identical to SEQ ID NO: 14914
  Description of Artificial Sequence: Synthetic Peanut control sequences; inner sequence and 3' sequence

SEQ ID NO: 38961 - DNA, 53 bp, Artificial Sequence
  Description of Artificial Sequence: Synthetic Peanut control sequences; inner sequence and 3' sequence
ggacgacgcgagccctacatgtgtcgtggattgactagtacatgaccacttga

SEQ ID NO: 38962 - DNA, 51 bp, Artificial Sequence; identical to SEQ ID NO: 22328
  Description of Artificial Sequence: Synthetic Peanut control sequences; inner sequence and 3' sequence

SEQ ID NO: 38963 - DNA, 58 bp, Artificial Sequence
  Description of Artificial Sequence: Synthetic Peanut control sequences; inner sequence and 3' sequence
aatgcggcatgaacggacctacacgtgggcacgtattgactagtacatgaccacttga

SEQ ID NO: 38964 - DNA, 53 bp, Artificial Sequence; identical to SEQ ID NO: 14428
  Description of Artificial Sequence: Synthetic Peanut control sequences; inner sequence and 3' sequence

SEQ ID NO: 38965 - DNA, 53 bp, Artificial Sequence; identical to SEQ ID NO: 2972
  Description of Artificial Sequence: Synthetic Peanut control sequences; inner sequence and 3' sequence

SEQ ID NO: 38966 - DNA, 53 bp, Artificial Sequence
  Description of Artificial Sequence: Synthetic Peanut control sequences; inner sequence and 3' sequence
ggccaatcatcccgtcaagtgaggtgtggattgactagtacatgaccacttga

SEQ ID NO: 38967 - DNA, 53 bp, Artificial Sequence
  Description of Artificial Sequence: Synthetic Peanut control sequences; inner sequence and 3' sequence
ggcctgatcgaacctagagagtggcgtggcttgactagtacatgaccacttga

SEQ ID NO: 38968 - DNA, 53 bp, Artificial Sequence
  Description of Artificial Sequence: Synthetic Peanut control sequences; inner sequence and 3' sequence
tgcatgtgccgtctcgctcccggtgtggcattgactagtacatgaccacttga

SEQ ID NO: 38969 - DNA, 53 bp, Artificial Sequence; identical to SEQ ID NO: 2375
  Description of Artificial Sequence: Synthetic Peanut control sequences; inner sequence and 3' sequence

SEQ ID NO: 38970 - DNA, 53 bp, Artificial Sequence; identical to SEQ ID NO: 14945
  Description of Artificial Sequence: Synthetic Peanut control sequences; inner sequence and 3' sequence

SEQ ID NO: 38971 - DNA, 53 bp, Artificial Sequence; identical to SEQ ID NO: 34006
  Description of Artificial Sequence: Synthetic Peanut control sequences; inner sequence and 3' sequence

SEQ ID NO: 38972 - DNA, 53 bp, Artificial Sequence; identical to SEQ ID NO: 22415
  Description of Artificial Sequence: Synthetic Peanut control sequences; inner sequence and 3' sequence

SEQ ID NO: 38973 - DNA, 53 bp, Artificial Sequence; identical to SEQ ID NO: 6405
  Description of Artificial Sequence: Synthetic Peanut control sequences; inner sequence and 3' sequence

SEQ ID NO: 38974 - DNA, 53 bp, Artificial Sequence
  Description of Artificial Sequence: Synthetic Peanut control sequences; inner sequence and 3' sequence
gcttcgatggatgctgggcaggcacgcagtttgactagtacatgaccacttga

SEQ ID NO: 38975 - DNA, 53 bp, Artificial Sequence; identical to SEQ ID NO: 6631
  Description of Artificial Sequence: Synthetic Peanut control sequences; inner sequence and 3' sequence

SEQ ID NO: 38976 - DNA, 53 bp, Artificial Sequence; identical to SEQ ID NO: 2773
  Description of Artificial Sequence: Synthetic Peanut control sequences; inner sequence and 3' sequence

SEQ ID NO: 38977 - DNA, 53 bp, Artificial Sequence; identical to SEQ ID NO: 2486
  Description of Artificial Sequence: Synthetic Peanut control sequences; inner sequence and 3' sequence

SEQ ID NO: 38978 - DNA, 53 bp, Artificial Sequence; identical to SEQ ID NO: 22803
  Description of Artificial Sequence: Synthetic Peanut control sequences; inner sequence and 3' sequence

SEQ ID NO: 38979 - DNA, 52 bp, Artificial Sequence
  Description of Artificial Sequence: Synthetic Peanut control sequences; inner sequence and 3' sequence
gaccgaacgtaccggtggcatgcacgccattgactagtacatgaccacttga

SEQ ID NO: 38980 - DNA, 53 bp, Artificial Sequence; identical to SEQ ID NO: 10953
  Description of Artificial Sequence: Synthetic Peanut control sequences; inner sequence and 3' sequence

SEQ ID NO: 38981 - DNA, 53 bp, Artificial Sequence; identical to SEQ ID NO: 22882
  Description of Artificial Sequence: Synthetic Peanut control sequences; inner sequence and 3' sequence

SEQ ID NO: 38982 - DNA, 53 bp, Artificial Sequence
  Description of Artificial Sequence: Synthetic Peanut control sequences; inner sequence and 3' sequence
tggccgatcgaccctatcaagttcagcatgttgactagtacatgaccacttga

SEQ ID NO: 38983 - DNA, 53 bp, Artificial Sequence; identical to SEQ ID NO: 30957
  Description of Artificial Sequence: Synthetic Peanut control sequences; inner sequence and 3' sequence

SEQ ID NO: 38984 - DNA, 53 bp, Artificial Sequence; identical to SEQ ID NO: 2543
  Description of Artificial Sequence: Synthetic Peanut control sequences; inner sequence and 3' sequence

SEQ ID NO: 38985 - DNA, 53 bp, Artificial Sequence; identical to SEQ ID NO: 10946
  Description of Artificial Sequence: Synthetic Peanut control sequences; inner sequence and 3' sequence

SEQ ID NO: 38986 - DNA, 53 bp, Artificial Sequence
  Description of Artificial Sequence: Synthetic Peanut control sequences; inner sequence and 3' sequence
gtcacgaaacggcaccttcatgtggacgtgttgactagtacatgaccacttga

SEQ ID NO: 38987 - DNA, 53 bp, Artificial Sequence; identical to SEQ ID NO: 30485
  Description of Artificial Sequence: Synthetic Peanut control sequences; inner sequence and 3' sequence

SEQ ID NO: 38988 - DNA, 53 bp, Artificial Sequence; identical to SEQ ID NO: 2267
  Description of Artificial Sequence: Synthetic Peanut control sequences; inner sequence and 3' sequence

SEQ ID NO: 38989 - DNA, 53 bp, Artificial Sequence; identical to SEQ ID NO: 2892
  Description of Artificial Sequence: Synthetic Peanut control sequences; inner sequence and 3' sequence

SEQ ID NO: 38990 - DNA, 53 bp, Artificial Sequence; identical to SEQ ID NO: 6761
  Description of Artificial Sequence: Synthetic Peanut control sequences; inner sequence and 3' sequence

SEQ ID NO: 38991 - DNA, 53 bp, Artificial Sequence; identical to SEQ ID NO: 26872
  Description of Artificial Sequence: Synthetic Peanut control sequences; inner sequence and 3' sequence

SEQ ID NO: 38992 - DNA, 53 bp, Artificial Sequence
  Description of Artificial Sequence: Synthetic Peanut control sequences; inner sequence and 3' sequence
ggcatgcacgcaccctatcatgaggccatgttgactagtacatgaccacttga

SEQ ID NO: 38993 - DNA, 53 bp, Artificial Sequence
  Description of Artificial Sequence: Synthetic Peanut control sequences; inner sequence and 3' sequence
tggtcgatcgaccctatcaagtgcagcatgttgactagtacatgaccacttga

SEQ ID NO: 38994 - DNA, 53 bp, Artificial Sequence; identical to SEQ ID NO: 10670
  Description of Artificial Sequence: Synthetic Peanut control sequences; inner sequence and 3' sequence

SEQ ID NO: 38995 - DNA, 53 bp, Artificial Sequence; identical to SEQ ID NO: 22801
  Description of Artificial Sequence: Synthetic Peanut control sequences; inner sequence and 3' sequence

SEQ ID NO: 38996 - DNA, 53 bp, Artificial Sequence
  Description of Artificial Sequence: Synthetic Peanut control sequences; inner sequence and 3' sequence
ctcgacgagtaggcatgtcttctgtgtgcattgactagtacatgaccacttga

SEQ ID NO: 38997 - DNA, 53 bp, Artificial Sequence; identical to SEQ ID NO: 2608
  Description of Artificial Sequence: Synthetic Peanut control sequences; inner sequence and 3' sequence

SEQ ID NO: 38998 - DNA, 53 bp, Artificial Sequence; identical to SEQ ID NO: 22530
  Description of Artificial Sequence: Synthetic Peanut control sequences; inner sequence and 3' sequence

SEQ ID NO: 38999 - DNA, 53 bp, Artificial Sequence; identical to SEQ ID NO: 6721
  Description of Artificial Sequence: Synthetic Peanut control sequences; inner sequence and 3' sequence

SEQ ID NO: 39000 - DNA, 53 bp, Artificial Sequence
  Description of Artificial Sequence: Synthetic Peanut control sequences; inner sequence and 3' sequence
gacctggctcgaccttcaatgcgtcgtggattgactagtacatgaccacttga

SEQ ID NO: 39001 - DNA, 53 bp, Artificial Sequence
  Description of Artificial Sequence: Synthetic Peanut control sequences; inner sequence and 3' sequence
ccgtcacgtacctatcacgtgtcatgctgcttgactagtacatgaccacttga

SEQ ID NO: 39002 - DNA, 53 bp, Artificial Sequence; identical to SEQ ID NO: 22984
  Description of Artificial Sequence: Synthetic Peanut control sequences; inner sequence and 3' sequence

SEQ ID NO: 39003 - DNA, 76 bp, Artificial Sequence; identical to SEQ ID NO: 3004
  Description of Artificial Sequence: Synthetic Peanut control sequences; 5' sequence + inner sequence + 3' sequence

SEQ ID NO: 39004 - DNA, 76 bp, Artificial Sequence; identical to SEQ ID NO: 3008
  Description of Artificial Sequence: Synthetic Peanut control sequences; 5' sequence + inner sequence + 3' sequence

SEQ ID NO: 39005 - DNA, 76 bp, Artificial Sequence; identical to SEQ ID NO: 3007
  Description of Artificial Sequence: Synthetic Peanut control sequences; 5' sequence + inner sequence + 3' sequence

SEQ ID NO: 39006 - DNA, 76 bp, Artificial Sequence; identical to SEQ ID NO: 3006
  Description of Artificial Sequence: Synthetic Peanut control sequences; 5' sequence + inner sequence + 3' sequence

SEQ ID NO: 39007 - DNA, 76 bp, Artificial Sequence; identical to SEQ ID NO: 3017
  Description of Artificial Sequence: Synthetic Peanut control sequences; 5' sequence + inner sequence + 3' sequence

SEQ ID NO: 39008 - DNA, 76 bp, Artificial Sequence; identical to SEQ ID NO: 3003
  Description of Artificial Sequence: Synthetic Peanut control sequences; 5' sequence + inner sequence + 3' sequence

SEQ ID NO: 39009 - DNA, 76 bp, Artificial Sequence; identical to SEQ ID NO: 3009
  Description of Artificial Sequence: Synthetic Peanut control sequences; 5' sequence + inner sequence + 3' sequence

SEQ ID NO: 39010 - DNA, 76 bp, Artificial Sequence; identical to SEQ ID NO: 3012
  Description of Artificial Sequence: Synthetic Peanut control sequences; 5' sequence + inner sequence + 3' sequence

SEQ ID NO: 39011 - DNA, 76 bp, Artificial Sequence; identical to SEQ ID NO: 3014
  Description of Artificial Sequence: Synthetic Peanut control sequences; 5' sequence + inner sequence + 3' sequence

SEQ ID NO: 39012 - DNA, 76 bp, Artificial Sequence; identical to SEQ ID NO: 3005
  Description of Artificial Sequence: Synthetic Peanut control sequences; 5' sequence + inner sequence + 3' sequence

SEQ ID NO: 39013 - DNA, 76 bp, Artificial Sequence; identical to SEQ ID NO: 3011
  Description of Artificial Sequence: Synthetic Peanut control sequences; 5' sequence + inner sequence + 3' sequence

SEQ ID NO: 39014 - DNA, 76 bp, Artificial Sequence; identical to SEQ ID NO: 3019
  Description of Artificial Sequence: Synthetic Peanut control sequences; 5' sequence + inner sequence + 3' sequence

SEQ ID NO: 39015 - DNA, 76 bp, Artificial Sequence; identical to SEQ ID NO: 3023
  Description of Artificial Sequence: Synthetic Peanut control sequences; 5' sequence + inner sequence + 3' sequence

SEQ ID NO: 39016 - DNA, 76 bp, Artificial Sequence; identical to SEQ ID NO: 3015
  Description of Artificial Sequence: Synthetic Peanut control sequences; 5' sequence + inner sequence + 3' sequence

SEQ ID NO: 39017 - DNA, 76 bp, Artificial Sequence; identical to SEQ ID NO: 3024
  Description of Artificial Sequence: Synthetic Peanut control sequences; 5' sequence + inner sequence + 3' sequence

SEQ ID NO: 39018 - DNA, 76 bp, Artificial Sequence; identical to SEQ ID NO: 3060
  Description of Artificial Sequence: Synthetic Peanut control sequences; 5' sequence + inner sequence + 3' sequence

SEQ ID NO: 39019 - DNA, 76 bp, Artificial Sequence; identical to SEQ ID NO: 3013
  Description of Artificial Sequence: Synthetic Peanut control sequences; 5' sequence + inner sequence + 3' sequence

SEQ ID NO: 39020 - DNA, 76 bp, Artificial Sequence; identical to SEQ ID NO: 3029
  Description of Artificial Sequence: Synthetic Peanut control sequences; 5' sequence + inner sequence + 3' sequence

SEQ ID NO: 39021 - DNA, 76 bp, Artificial Sequence; identical to SEQ ID NO: 3034
  Description of Artificial Sequence: Synthetic Peanut control sequences; 5' sequence + inner sequence + 3' sequence

SEQ ID NO: 39022 - DNA, 76 bp, Artificial Sequence; identical to SEQ ID NO: 3010
  Description of Artificial Sequence: Synthetic Peanut control sequences; 5' sequence + inner sequence + 3' sequence

SEQ ID NO: 39023 - DNA, 76 bp, Artificial Sequence; identical to SEQ ID NO: 3055
  Description of Artificial Sequence: Synthetic Peanut control sequences; 5' sequence + inner sequence + 3' sequence

SEQ ID NO: 39024 - DNA, 76 bp, Artificial Sequence; identical to SEQ ID NO: 3054
  Description of Artificial Sequence: Synthetic Peanut control sequences; 5' sequence + inner sequence + 3' sequence

SEQ ID NO: 39025 - DNA, 76 bp, Artificial Sequence; identical to SEQ ID NO: 3041
  Description of Artificial Sequence: Synthetic Peanut control sequences; 5' sequence + inner sequence + 3' sequence

SEQ ID NO: 39026 - DNA, 76 bp, Artificial Sequence; identical to SEQ ID NO: 3032
  Description of Artificial Sequence: Synthetic Peanut control sequences; 5' sequence + inner sequence + 3' sequence

SEQ ID NO: 39027 - DNA, 76 bp, Artificial Sequence; identical to SEQ ID NO: 3018
  Description of Artificial Sequence: Synthetic Peanut control sequences; 5' sequence + inner sequence + 3' sequence

SEQ ID NO: 39028 - DNA, 76 bp, Artificial Sequence; identical to SEQ ID NO: 3031
  Description of Artificial Sequence: Synthetic Peanut control sequences; 5' sequence + inner sequence + 3' sequence

SEQ ID NO: 39029 - DNA, 76 bp, Artificial Sequence; identical to SEQ ID NO: 3028
  Description of Artificial Sequence: Synthetic Peanut control sequences; 5' sequence + inner sequence + 3' sequence

SEQ ID NO: 39030 - DNA, 76 bp, Artificial Sequence; identical to SEQ ID NO: 3030
  Description of Artificial Sequence: Synthetic Peanut control sequences; 5' sequence + inner sequence + 3' sequence

SEQ ID NO: 39031 - DNA, 76 bp, Artificial Sequence; identical to SEQ ID NO: 3020
  Description of Artificial Sequence: Synthetic Peanut control sequences; 5' sequence + inner sequence + 3' sequence

SEQ ID NO: 39032 - DNA, 76 bp, Artificial Sequence; identical to SEQ ID NO: 3133
  Description of Artificial Sequence: Synthetic Peanut control sequences; 5' sequence + inner sequence + 3' sequence

SEQ ID NO: 39033 - DNA, 76 bp, Artificial Sequence; identical to SEQ ID NO: 3021
  Description of Artificial Sequence: Synthetic Peanut control sequences; 5' sequence + inner sequence + 3' sequence

SEQ ID NO: 39034 - DNA, 76 bp, Artificial Sequence; identical to SEQ ID NO: 3042
  Description of Artificial Sequence: Synthetic Peanut control sequences; 5' sequence + inner sequence + 3' sequence

SEQ ID NO: 39035 - DNA, 76 bp, Artificial Sequence; identical to SEQ ID NO: 3074
  Description of Artificial Sequence: Synthetic Peanut control sequences; 5' sequence + inner sequence + 3' sequence

SEQ ID NO: 39036 - DNA, 76 bp, Artificial Sequence; identical to SEQ ID NO: 3047
  Description of Artificial Sequence: Synthetic Peanut control sequences; 5' sequence + inner sequence + 3' sequence

SEQ ID NO: 39037 - DNA, 76 bp, Artificial Sequence; identical to SEQ ID NO: 3037
  Description of Artificial Sequence: Synthetic Peanut control sequences; 5' sequence + inner sequence + 3' sequence

SEQ ID NO: 39038 - DNA, 76 bp, Artificial Sequence; identical to SEQ ID NO: 3045
  Description of Artificial Sequence: Synthetic Peanut control sequences; 5' sequence + inner sequence + 3' sequence

SEQ ID NO: 39039 - DNA, 76 bp, Artificial Sequence; identical to SEQ ID NO: 3076
  Description of Artificial Sequence: Synthetic Peanut control sequences; 5' sequence + inner sequence + 3' sequence

SEQ ID NO: 39040 - DNA, 76 bp, Artificial Sequence; identical to SEQ ID NO: 3026
  Description of Artificial Sequence: Synthetic Peanut control sequences; 5' sequence + inner sequence + 3' sequence

SEQ ID NO: 39041 - DNA, 76 bp, Artificial Sequence; identical to SEQ ID NO: 3082
  Description of Artificial Sequence: Synthetic Peanut control sequences; 5' sequence + inner sequence + 3' sequence

SEQ ID NO: 39042 - DNA, 76 bp, Artificial Sequence; identical to SEQ ID NO: 3049
  Description of Artificial Sequence: Synthetic Peanut control sequences; 5' sequence + inner sequence + 3' sequence

SEQ ID NO: 39043 - DNA, 75 bp, Artificial Sequence; identical to SEQ ID NO: 3070
  Description of Artificial Sequence: Synthetic Peanut control sequences; 5' sequence + inner sequence + 3' sequence

SEQ ID NO: 39044 - DNA, 76 bp, Artificial Sequence; identical to SEQ ID NO: 3033
  Description of Artificial Sequence: Synthetic Peanut control sequences; 5' sequence + inner sequence + 3' sequence

SEQ ID NO: 39045 - DNA, 76 bp, Artificial Sequence; identical to SEQ ID NO: 3022
  Description of Artificial Sequence: Synthetic Peanut control sequences; 5' sequence + inner sequence + 3' sequence

SEQ ID NO: 39046 - DNA, 76 bp, Artificial Sequence; identical to SEQ ID NO: 3257
  Description of Artificial Sequence: Synthetic Peanut control sequences; 5' sequence + inner sequence + 3' sequence

SEQ ID NO: 39047 - DNA, 76 bp, Artificial Sequence; identical to SEQ ID NO: 3122
  Description of Artificial Sequence: Synthetic Peanut control sequences; 5' sequence + inner sequence + 3' sequence

SEQ ID NO: 39048 - DNA, 76 bp, Artificial Sequence; identical to SEQ ID NO: 3048
  Description of Artificial Sequence: Synthetic Peanut control sequences; 5' sequence + inner sequence + 3' sequence

SEQ ID NO: 39049 - DNA, 76 bp, Artificial Sequence; identical to SEQ ID NO: 3061
  Description of Artificial Sequence: Synthetic Peanut control sequences; 5' sequence + inner sequence + 3' sequence

SEQ ID NO: 39050 - DNA, 76 bp, Artificial Sequence; identical to SEQ ID NO: 3059
  Description of Artificial Sequence: Synthetic Peanut control sequences; 5' sequence + inner sequence + 3' sequence

SEQ ID NO: 39051 - DNA, 76 bp, Artificial Sequence; identical to SEQ ID NO: 3308
  Description of Artificial Sequence: Synthetic Peanut control sequences; 5' sequence + inner sequence + 3' sequence

SEQ ID NO: 39052 - DNA, 76 bp, Artificial Sequence; identical to SEQ ID NO: 3046
  Description of Artificial Sequence: Synthetic Peanut control sequences; 5' sequence + inner sequence + 3' sequence

SEQ ID NO: 39053 - DNA, 76 bp, Artificial Sequence; identical to SEQ ID NO: 3038
  Description of Artificial Sequence: Synthetic Peanut control sequences; 5' sequence + inner sequence + 3' sequence

SEQ ID NO: 39054 - DNA, 76 bp, Artificial Sequence; identical to SEQ ID NO: 3050
  Description of Artificial Sequence: Synthetic Peanut control sequences; 5' sequence + inner sequence + 3' sequence

SEQ ID NO: 39055 - DNA, 76 bp, Artificial Sequence; identical to SEQ ID NO: 3125
  Description of Artificial Sequence: Synthetic Peanut control sequences; 5' sequence + inner sequence + 3' sequence

SEQ ID NO: 39056 - DNA, 76 bp, Artificial Sequence; identical to SEQ ID NO: 3052
  Description of Artificial Sequence: Synthetic Peanut control sequences; 5' sequence + inner sequence + 3' sequence

SEQ ID NO: 39057 - DNA, 76 bp, Artificial Sequence; identical to SEQ ID NO: 3053
  Description of Artificial Sequence: Synthetic Peanut control sequences; 5' sequence + inner sequence + 3' sequence

SEQ ID NO: 39058 - DNA, 76 bp, Artificial Sequence; identical to SEQ ID NO: 3027
  Description of Artificial Sequence: Synthetic Peanut control sequences; 5' sequence + inner sequence + 3' sequence

SEQ ID NO: 39059 - DNA, 76 bp, Artificial Sequence; identical to SEQ ID NO: 3081
  Description of Artificial Sequence: Synthetic Peanut control sequences; 5' sequence + inner sequence + 3' sequence

SEQ ID NO: 39060 - DNA, 76 bp, Artificial Sequence; identical to SEQ ID NO: 3039
  Description of Artificial Sequence: Synthetic Peanut control sequences; 5' sequence + inner sequence + 3' sequence

SEQ ID NO: 39061 - DNA, 76 bp, Artificial Sequence; identical to SEQ ID NO: 3080
  Description of Artificial Sequence: Synthetic Peanut control sequences; 5' sequence + inner sequence + 3' sequence

SEQ ID NO: 39062 - DNA, 76 bp, Artificial Sequence; identical to SEQ ID NO: 3040
  Description of Artificial Sequence: Synthetic Peanut control sequences; 5' sequence + inner sequence + 3' sequence

SEQ ID NO: 39063 - DNA, 76 bp, Artificial Sequence; identical to SEQ ID NO: 3299
  Description of Artificial Sequence: Synthetic Peanut control sequences; 5' sequence + inner sequence + 3' sequence

SEQ ID NO: 39064 - DNA, 76 bp, Artificial Sequence; identical to SEQ ID NO: 3035
  Description of Artificial Sequence: Synthetic Peanut control sequences; 5' sequence + inner sequence + 3' sequence

SEQ ID NO: 39065 - DNA, 76 bp, Artificial Sequence; identical to SEQ ID NO: 3093
  Description of Artificial Sequence: Synthetic Peanut control sequences; 5' sequence + inner sequence + 3' sequence

SEQ ID NO: 39066 - DNA, 76 bp, Artificial Sequence; identical to SEQ ID NO: 3230
  Description of Artificial Sequence: Synthetic Peanut control sequences; 5' sequence + inner sequence + 3' sequence

SEQ ID NO: 39067 - DNA, 76 bp, Artificial Sequence; identical to SEQ ID NO: 3077
  Description of Artificial Sequence: Synthetic Peanut control sequences; 5' sequence + inner sequence + 3' sequence

SEQ ID NO: 39068 - DNA, 76 bp, Artificial Sequence; identical to SEQ ID NO: 3207
  Description of Artificial Sequence: Synthetic Peanut control sequences; 5' sequence + inner sequence + 3' sequence

SEQ ID NO: 39069 - DNA, 76 bp, Artificial Sequence; identical to SEQ ID NO: 3131
  Description of Artificial Sequence: Synthetic Peanut control sequences; 5' sequence + inner sequence + 3' sequence

SEQ ID NO: 39070 - DNA, 76 bp, Artificial Sequence; identical to SEQ ID NO: 3092
  Description of Artificial Sequence: Synthetic Peanut control sequences; 5' sequence + inner sequence + 3' sequence

SEQ ID NO: 39071 - DNA, 75 bp, Artificial Sequence; identical to SEQ ID NO: 3193
  Description of Artificial Sequence: Synthetic Peanut control sequences; 5' sequence + inner sequence + 3' sequence

SEQ ID NO: 39072 - DNA, 76 bp, Artificial Sequence; identical to SEQ ID NO: 11401
  Description of Artificial Sequence: Synthetic Peanut control sequences; 5' sequence + inner sequence + 3' sequence

SEQ ID NO: 39073 - DNA, 76 bp, Artificial Sequence; identical to SEQ ID NO: 3106
  Description of Artificial Sequence: Synthetic Peanut control sequences; 5' sequence + inner sequence + 3' sequence

SEQ ID NO: 39074 - DNA, 76 bp, Artificial Sequence; identical to SEQ ID NO: 3043
  Description of Artificial Sequence: Synthetic Peanut control sequences; 5' sequence + inner sequence + 3' sequence

SEQ ID NO: 39075 - DNA, 76 bp, Artificial Sequence; identical to SEQ ID NO: 3175
  Description of Artificial Sequence: Synthetic Peanut control sequences; 5' sequence + inner sequence + 3' sequence

SEQ ID NO: 39076 - DNA, 76 bp, Artificial Sequence; identical to SEQ ID NO: 3145
  Description of Artificial Sequence: Synthetic Peanut control sequences; 5' sequence + inner sequence + 3' sequence

SEQ ID NO: 39077 - DNA, 76 bp, Artificial Sequence; identical to SEQ ID NO: 3016
  Description of Artificial Sequence: Synthetic Peanut control sequences; 5' sequence + inner sequence + 3' sequence

SEQ ID NO: 39078 - DNA, 76 bp, Artificial Sequence; identical to SEQ ID NO: 3126
  Description of Artificial Sequence: Synthetic Peanut control sequences; 5' sequence + inner sequence + 3' sequence

SEQ ID NO: 39079 - DNA, 76 bp, Artificial Sequence; identical to SEQ ID NO: 3066
  Description of Artificial Sequence: Synthetic Peanut control sequences; 5' sequence + inner sequence + 3' sequence

SEQ ID NO: 39080 - DNA, 76 bp, Artificial Sequence; identical to SEQ ID NO: 3063
  Description of Artificial Sequence: Synthetic Peanut control sequences; 5' sequence + inner sequence + 3' sequence

SEQ ID NO: 39081 - DNA, 76 bp, Artificial Sequence; identical to SEQ ID NO: 3164
  Description of Artificial Sequence: Synthetic Peanut control sequences; 5' sequence + inner sequence + 3' sequence

SEQ ID NO: 39082 - DNA, 74 bp, Artificial Sequence; identical to SEQ ID NO: 3148
  Description of Artificial Sequence: Synthetic Peanut control sequences; 5' sequence + inner sequence + 3' sequence

SEQ ID NO: 39083 - DNA, 76 bp, Artificial Sequence; identical to SEQ ID NO: 3051
  Description of Artificial Sequence: Synthetic Peanut control sequences; 5' sequence + inner sequence + 3' sequence

SEQ ID NO: 39084 - DNA, 76 bp, Artificial Sequence; identical to SEQ ID NO: 3270
  Description of Artificial Sequence: Synthetic Peanut control sequences; 5' sequence + inner sequence + 3' sequence

SEQ ID NO: 39085 - DNA, 76 bp, Artificial Sequence; identical to SEQ ID NO: 3154
  Description of Artificial Sequence: Synthetic Peanut control sequences; 5' sequence + inner sequence + 3' sequence

SEQ ID NO: 39086 - DNA, 76 bp, Artificial Sequence; identical to SEQ ID NO: 3109
  Description of Artificial Sequence: Synthetic Peanut control sequences; 5' sequence + inner sequence + 3' sequence

SEQ ID NO: 39087 - DNA, 76 bp, Artificial Sequence; identical to SEQ ID NO: 3067
  Description of Artificial Sequence: Synthetic Peanut control sequences; 5' sequence + inner sequence + 3' sequence

SEQ ID NO: 39088 - DNA, 76 bp, Artificial Sequence; identical to SEQ ID NO: 3058
  Description of Artificial Sequence: Synthetic Peanut control sequences; 5' sequence + inner sequence + 3' sequence

SEQ ID NO: 39089 - DNA, 76 bp, Artificial Sequence; identical to SEQ ID NO: 3025
  Description of Artificial Sequence: Synthetic Peanut control sequences; 5' sequence + inner sequence + 3' sequence

SEQ ID NO: 39090 - DNA, 76 bp, Artificial Sequence; identical to SEQ ID NO: 3156
  Description of Artificial Sequence: Synthetic Peanut control sequences; 5' sequence + inner sequence + 3' sequence

SEQ ID NO: 39091 - DNA, 76 bp, Artificial Sequence; identical to SEQ ID NO: 3136
  Description of Artificial Sequence: Synthetic Peanut control sequences; 5' sequence + inner sequence + 3' sequence

SEQ ID NO: 39092 - DNA, 76 bp, Artificial Sequence; identical to SEQ ID NO: 3142
  Description of Artificial Sequence: Synthetic Peanut control sequences; 5' sequence + inner sequence + 3' sequence

SEQ ID NO: 39093 - DNA, 76 bp, Artificial Sequence; identical to SEQ ID NO: 3094
  Description of Artificial Sequence: Synthetic Peanut control sequences; 5' sequence + inner sequence + 3' sequence

SEQ ID NO: 39094 - DNA, 76 bp, Artificial Sequence; identical to SEQ ID NO: 3100
  Description of Artificial Sequence: Synthetic Peanut control sequences; 5' sequence + inner sequence + 3' sequence

SEQ ID NO: 39095 - DNA, 76 bp, Artificial Sequence; identical to SEQ ID NO: 3089
  Description of Artificial Sequence: Synthetic Peanut control sequences; 5' sequence + inner sequence + 3' sequence

SEQ ID NO: 39096 - DNA, 76 bp, Artificial Sequence; identical to SEQ ID NO: 3208
  Description of Artificial Sequence: Synthetic Peanut control sequences; 5' sequence + inner sequence + 3' sequence

SEQ ID NO: 39097 - DNA, 76 bp, Artificial Sequence; identical to SEQ ID NO: 3186
  Description of Artificial Sequence: Synthetic Peanut control sequences; 5' sequence + inner sequence + 3' sequence

SEQ ID NO: 39098 - DNA, 76 bp, Artificial Sequence; identical to SEQ ID NO: 3111
  Description of Artificial Sequence: Synthetic Peanut control sequences; 5' sequence + inner sequence + 3' sequence

SEQ ID NO: 39099 - DNA, 76 bp, Artificial Sequence; identical to SEQ ID NO: 3146
  Description of Artificial Sequence: Synthetic Peanut control sequences; 5' sequence + inner sequence + 3' sequence

SEQ ID NO: 39100 - DNA, 76 bp, Artificial Sequence; identical to SEQ ID NO: 3163
  Description of Artificial Sequence: Synthetic Peanut control sequences; 5' sequence + inner sequence + 3' sequence

SEQ ID NO: 39101 - DNA, 76 bp, Artificial Sequence; identical to SEQ ID NO: 3203
  Description of Artificial Sequence: Synthetic Peanut control sequences; 5' sequence + inner sequence + 3' sequence

SEQ ID NO: 39102 - DNA, 77 bp, Artificial Sequence; identical to SEQ ID NO: 3250
  Description of Artificial Sequence: Synthetic Peanut control sequences; 5' sequence + inner sequence + 3' sequence

SEQ ID NO: 39103 - DNA, 75 bp, Artificial Sequence; identical to SEQ ID NO: 3334
  Description of Artificial Sequence: Synthetic Peanut control sequences; 5' sequence + inner sequence + 3' sequence

SEQ ID NO: 39104 - DNA, 76 bp, Artificial Sequence; identical to SEQ ID NO: 3044
  Description of Artificial Sequence: Synthetic Peanut control sequences; 5' sequence + inner sequence + 3' sequence

SEQ ID NO: 39105 - DNA, 76 bp, Artificial Sequence; identical to SEQ ID NO: 3161
  Description of Artificial Sequence: Synthetic Peanut control sequences; 5' sequence + inner sequence + 3' sequence

SEQ ID NO: 39106 - DNA, 76 bp, Artificial Sequence; identical to SEQ ID NO: 3362
  Description of Artificial Sequence: Synthetic Peanut control sequences; 5' sequence + inner sequence + 3' sequence

SEQ ID NO: 39107 - DNA, 76 bp, Artificial Sequence; identical to SEQ ID NO: 3057
  Description of Artificial Sequence: Synthetic Peanut control sequences; 5' sequence + inner sequence + 3' sequence

SEQ ID NO: 39108 - DNA, 76 bp, Artificial Sequence; identical to SEQ ID NO: 3078
  Description of Artificial Sequence: Synthetic Peanut control sequences; 5' sequence + inner sequence + 3' sequence

SEQ ID NO: 39109 - DNA, 76 bp, Artificial Sequence; identical to SEQ ID NO: 3323
  Description of Artificial Sequence: Synthetic Peanut control sequences; 5' sequence + inner sequence + 3' sequence

SEQ ID NO: 39110 - DNA, 76 bp, Artificial Sequence; identical to SEQ ID NO: 3567
  Description of Artificial Sequence: Synthetic Peanut control sequences; 5' sequence + inner sequence + 3' sequence

SEQ ID NO: 39111 - DNA, 76 bp, Artificial Sequence; identical to SEQ ID NO: 3529
  Description of Artificial Sequence: Synthetic Peanut control sequences; 5' sequence + inner sequence + 3' sequence

SEQ ID NO: 39112 - DNA, 76 bp, Artificial Sequence; identical to SEQ ID NO: 3095
  Description of Artificial Sequence: Synthetic Peanut control sequences; 5' sequence + inner sequence + 3' sequence
